United States Patent Application Publication US 2014/0004565 A1 - sequence listing, part 108

SEQ ID NO: 2695866 - RNA, 19 nt, Artificial Sequence
  Description of Artificial Sequence: Synthetic oligonucleotide
aaauugaacaggucaccaa

SEQ ID NO: 2695867 - RNA, 19 nt, Artificial Sequence
  Description of Artificial Sequence: Synthetic oligonucleotide
uggugauaauaacuccccg

SEQ ID NO: 2695868 - RNA, 19 nt, Artificial Sequence
  Description of Artificial Sequence: Synthetic oligonucleotide
auggugauaauaacucccc

SEQ ID NO: 2695869 - RNA, 19 nt, Artificial Sequence
  Description of Artificial Sequence: Synthetic oligonucleotide
ugcagcaauuuuaaacaca

SEQ ID NO: 2695870 - RNA, 19 nt, Artificial Sequence
  Description of Artificial Sequence: Synthetic oligonucleotide
aucgcugacucucauguug

SEQ ID NO: 2695871 - RNA, 19 nt, Artificial Sequence
  Description of Artificial Sequence: Synthetic oligonucleotide
agaggauugagcugggcca

SEQ ID NO: 2695872 - RNA, 19 nt, Artificial Sequence
  Description of Artificial Sequence: Synthetic oligonucleotide
aauucauccugaaaauaga

SEQ ID NO: 2695873 - RNA, 19 nt, Artificial Sequence
  Description of Artificial Sequence: Synthetic oligonucleotide
aaugcccaaaguaggcuac

SEQ ID NO: 2695874 - RNA, 19 nt, Artificial Sequence
  Description of Artificial Sequence: Synthetic oligonucleotide
augccuguaccccagaaga

SEQ ID NO: 2695875 - RNA, 19 nt, Artificial Sequence
  Description of Artificial Sequence: Synthetic oligonucleotide
uagaaguaagaaauucauc

SEQ ID NO: 2695876 - RNA, 19 nt, Artificial Sequence
  Description of Artificial Sequence: Synthetic oligonucleotide
aaagagauagcagcaaauu

SEQ ID NO: 2695877 - RNA, 19 nt, Artificial Sequence
  Description of Artificial Sequence: Synthetic oligonucleotide
auaacuccccgguuaggac

SEQ ID NO: 2695878 - RNA, 19 nt, Artificial Sequence
  Description of Artificial Sequence: Synthetic oligonucleotide
ucgaaauaaugcccaaagu

SEQ ID NO: 2695879 - RNA, 19 nt, Artificial Sequence
  Description of Artificial Sequence: Synthetic oligonucleotide
ugucuugcagcaauuuuaa

SEQ ID NO: 2695880 - RNA, 19 nt, Artificial Sequence
  Description of Artificial Sequence: Synthetic oligonucleotide
aguaacagauuucucgaaa

SEQ ID NO: 2695881 - RNA, 19 nt, Artificial Sequence
  Description of Artificial Sequence: Synthetic oligonucleotide
ugaucucagggccugggca

SEQ ID NO: 2695882 - RNA, 19 nt, Artificial Sequence
  Description of Artificial Sequence: Synthetic oligonucleotide
aaauagagcuugauguaca

SEQ ID NO: 2695883 - RNA, 19 nt, Artificial Sequence
  Description of Artificial Sequence: Synthetic oligonucleotide
uaacuccccgguuaggacc

SEQ ID NO: 2695884 - RNA, 19 nt, Artificial Sequence
  Description of Artificial Sequence: Synthetic oligonucleotide
acuccugacugcuccaccg

SEQ ID NO: 2695885 - RNA, 19 nt, Artificial Sequence
  Description of Artificial Sequence: Synthetic oligonucleotide
ugauguacaucugcuuggg

SEQ ID NO: 2695886 - RNA, 19 nt, Artificial Sequence
  Description of Artificial Sequence: Synthetic oligonucleotide
aaaagagauagcagcaaau

SEQ ID NO: 2695887 - RNA, 19 nt, Artificial Sequence
  Description of Artificial Sequence: Synthetic oligonucleotide
ccagaaaacgcucaucacg

SEQ ID NO: 2695888 - RNA, 19 nt, Artificial Sequence
  Description of Artificial Sequence: Synthetic oligonucleotide
auugagcugggccagaauu

SEQ ID NO: 2695889 - RNA, 19 nt, Artificial Sequence
  Description of Artificial Sequence: Synthetic oligonucleotide
aucacgaucagaggcacag

SEQ ID NO: 2695890 - RNA, 19 nt, Artificial Sequence
  Description of Artificial Sequence: Synthetic oligonucleotide
agugguacuucagauacca

SEQ ID NO: 2695891 - RNA, 19 nt, Artificial Sequence
  Description of Artificial Sequence: Synthetic oligonucleotide
auucauccugaaaauagag

SEQ ID NO: 2695892 - RNA, 19 nt, Artificial Sequence
  Description of Artificial Sequence: Synthetic oligonucleotide
acgagaaggcccacgaagc

SEQ ID NO: 2695893 - RNA, 19 nt, Artificial Sequence
  Description of Artificial Sequence: Synthetic oligonucleotide
gaaaacgcucaucacgauc

SEQ ID NO: 2695894 - RNA, 19 nt, Artificial Sequence
  Description of Artificial Sequence: Synthetic oligonucleotide
cacgagaaggcccacgaag

SEQ ID NO: 2695895 - RNA, 19 nt, Artificial Sequence
  Description of Artificial Sequence: Synthetic oligonucleotide
aaaguaggcuaccgaagaa

SEQ ID NO: 2695896 - RNA, 19 nt, Artificial Sequence
  Description of Artificial Sequence: Synthetic oligonucleotide
agaaggcccacgaagcccc

SEQ ID NO: 2695897 - RNA, 19 nt, Artificial Sequence
  Description of Artificial Sequence: Synthetic oligonucleotide
caggucaccaacaugguga

SEQ ID NO: 2695898 - RNA, 19 nt, Artificial Sequence
  Description of Artificial Sequence: Synthetic oligonucleotide
uggggauaaaccagggcac

SEQ ID NO: 2695899 - RNA, 19 nt, Artificial Sequence
  Description of Artificial Sequence: Synthetic oligonucleotide
uagaaggcauucuuucucu

SEQ ID NO: 2695900 - RNA, 19 nt, Artificial Sequence
  Description of Artificial Sequence: Synthetic oligonucleotide
cagaaaacgcucaucacga

SEQ ID NO: 2695901 - RNA, 19 nt, Artificial Sequence
  Description of Artificial Sequence: Synthetic oligonucleotide
gacccuuggggauaaacca

SEQ ID NO: 2695902 - RNA, 19 nt, Artificial Sequence
  Description of Artificial Sequence: Synthetic oligonucleotide
gaaguaagaaauucauccu

SEQ ID NO: 2695903 - RNA, 19 nt, Artificial Sequence
  Description of Artificial Sequence: Synthetic oligonucleotide
uccaccgagucuuauuugu

SEQ ID NO: 2695904 - RNA, 19 nt, Artificial Sequence
  Description of Artificial Sequence: Synthetic oligonucleotide
uuauuccaaagauguagaa

SEQ ID NO: 2695905 - RNA, 19 nt, Artificial Sequence
  Description of Artificial Sequence: Synthetic oligonucleotide
auguacaucugcuugggua

SEQ ID NO: 2695906 - RNA, 19 nt, Artificial Sequence
  Description of Artificial Sequence: Synthetic oligonucleotide
auaccagaugguuucauuu

SEQ ID NO: 2695907 - RNA, 19 nt, Artificial Sequence
  Description of Artificial Sequence: Synthetic oligonucleotide
uuugucuugcagcaauuuu

SEQ ID NO: 2695908 - RNA, 19 nt, Artificial Sequence
  Description of Artificial Sequence: Synthetic oligonucleotide
cagcaaauugaacagguca

SEQ ID NO: 2695909 - RNA, 19 nt, Artificial Sequence
  Description of Artificial Sequence: Synthetic oligonucleotide
cagaauugcaaucagccaa

SEQ ID NO: 2695910 - RNA, 19 nt, Artificial Sequence
  Description of Artificial Sequence: Synthetic oligonucleotide
aagccacggguuccaagac

SEQ ID NO: 2695911 - RNA, 19 nt, Artificial Sequence
  Description of Artificial Sequence: Synthetic oligonucleotide
uaacagauuucucgaaaua

SEQ ID NO: 2695912 - RNA, 19 nt, Artificial Sequence
  Description of Artificial Sequence: Synthetic oligonucleotide
aaccagggcacgagaaggc

SEQ ID NO: 2695913 - RNA, 19 nt, Artificial Sequence
  Description of Artificial Sequence: Synthetic oligonucleotide
aguaggcuaccgaagaaag

SEQ ID NO: 2695914 - RNA, 19 nt, Artificial Sequence
  Description of Artificial Sequence: Synthetic oligonucleotide
ucauguugugagcuggcaa

SEQ ID NO: 2695915 - RNA, 19 nt, Artificial Sequence
  Description of Artificial Sequence: Synthetic oligonucleotide
uuugcaucuagaaggcauu

SEQ ID NO: 2695916 - RNA, 19 nt, Artificial Sequence
  Description of Artificial Sequence: Synthetic oligonucleotide
ucugcuuggguagagcuuc

SEQ ID NO: 2695917 - RNA, 19 nt, Artificial Sequence
  Description of Artificial Sequence: Synthetic oligonucleotide
caauuuuaaacacaucgcu

SEQ ID NO: 2695918 - RNA, 19 nt, Artificial Sequence
  Description of Artificial Sequence: Synthetic oligonucleotide
gauaaaccagggcacgaga

SEQ ID NO: 2695919 - RNA, 19 nt, Artificial Sequence
  Description of Artificial Sequence: Synthetic oligonucleotide
caaagagaggauugagcug

SEQ ID NO: 2695920 - RNA, 19 nt, Artificial Sequence
  Description of Artificial Sequence: Synthetic oligonucleotide
gcucaucacgaucagaggc

SEQ ID NO: 2695921 - RNA, 19 nt, Artificial Sequence
  Description of Artificial Sequence: Synthetic oligonucleotide
agacaacaguaacagauuu

SEQ ID NO: 2695922 - RNA, 19 nt, Artificial Sequence
  Description of Artificial Sequence: Synthetic oligonucleotide
gucaccaacauggugauaa

SEQ ID NO: 2695923 - RNA, 19 nt, Artificial Sequence
  Description of Artificial Sequence: Synthetic oligonucleotide
uugcagcaauuuuaaacac

SEQ ID NO: 2695924 - RNA, 19 nt, Artificial Sequence
  Description of Artificial Sequence: Synthetic oligonucleotide
accaacauggugauaauaa

SEQ ID NO: 2695925 - RNA, 19 nt, Artificial Sequence
  Description of Artificial Sequence: Synthetic oligonucleotide
caaagauguagaaguaaga

SEQ ID NO: 2695926 - RNA, 19 nt, Artificial Sequence
  Description of Artificial Sequence: Synthetic oligonucleotide
uaaugcccaaaguaggcua

SEQ ID NO: 2695927 - RNA, 19 nt, Artificial Sequence
  Description of Artificial Sequence: Synthetic oligonucleotide
ugggccagaauugcaauca

SEQ ID NO: 2695928 - RNA, 19 nt, Artificial Sequence
  Description of Artificial Sequence: Synthetic oligonucleotide
uccaaagauguagaaguaa

SEQ ID NO: 2695929 - RNA, 19 nt, Artificial Sequence
  Description of Artificial Sequence: Synthetic oligonucleotide
cauucuuucucugaucuca

SEQ ID NO: 2695930 - RNA, 19 nt, Artificial Sequence
  Description of Artificial Sequence: Synthetic oligonucleotide
gcaauuuuaaacacaucgc

SEQ ID NO: 2695931 - RNA, 19 nt, Artificial Sequence
  Description of Artificial Sequence: Synthetic oligonucleotide
guggagcaugucuucaucc

SEQ ID NO: 2695932 - RNA, 19 nt, Artificial Sequence
  Description of Artificial Sequence: Synthetic oligonucleotide
caagagccauauucaaagc

SEQ ID NO: 2695933 - RNA, 19 nt, Artificial Sequence
  Description of Artificial Sequence: Synthetic oligonucleotide
guugugagcuggcaagagc

SEQ ID NO: 2695934 - RNA, 19 nt, Artificial Sequence
  Description of Artificial Sequence: Synthetic oligonucleotide
cacgaucagaggcacagug

SEQ ID NO: 2695935 - RNA, 19 nt, Artificial Sequence
  Description of Artificial Sequence: Synthetic oligonucleotide
caaaguaggcuaccgaaga

SEQ ID NO: 2695936 - RNA, 19 nt, Artificial Sequence
  Description of Artificial Sequence: Synthetic oligonucleotide
cagccaaaagagauagcag

SEQ ID NO: 2695937 - RNA, 19 nt, Artificial Sequence
  Description of Artificial Sequence: Synthetic oligonucleotide
aaguaggcuaccgaagaaa

SEQ ID NO: 2695938 - RNA, 19 nt, Artificial Sequence
  Description of Artificial Sequence: Synthetic oligonucleotide
gccauauucaaagccacgg

SEQ ID NO: 2695939 - RNA, 19 nt, Artificial Sequence
  Description of Artificial Sequence: Synthetic oligonucleotide
gaucucagggccugggcac

SEQ ID NO: 2695940 - RNA, 19 nt, Artificial Sequence
  Description of Artificial Sequence: Synthetic oligonucleotide
aaacgcucaucacgaucag

SEQ ID NO: 2695941 - RNA, 19 nt, Artificial Sequence
  Description of Artificial Sequence: Synthetic oligonucleotide
ucucauguugugagcuggc

SEQ ID NO: 2695942 - RNA, 19 nt, Artificial Sequence
  Description of Artificial Sequence: Synthetic oligonucleotide
uggagcaugucuucauccu

SEQ ID NO: 2695943 - RNA, 19 nt, Artificial Sequence
  Description of Artificial Sequence: Synthetic oligonucleotide
ccagugguacuucagauac

SEQ ID NO: 2695944 - RNA, 19 nt, Artificial Sequence
  Description of Artificial Sequence: Synthetic oligonucleotide
cuuggggauaaaccagggc

SEQ ID NO: 2695945 - RNA, 19 nt, Artificial Sequence
  Description of Artificial Sequence: Synthetic oligonucleotide
agugaggccgugguacgcc

SEQ ID NO: 2695946 - RNA, 19 nt, Artificial Sequence
  Description of Artificial Sequence: Synthetic oligonucleotide
uaccgaagaaaguggucug

SEQ ID NO: 2695947 - RNA, 19 nt, Artificial Sequence
  Description of Artificial Sequence: Synthetic oligonucleotide
cucucauguugugagcugg

SEQ ID NO: 2695948 - RNA, 19 nt, Artificial Sequence
  Description of Artificial Sequence: Synthetic oligonucleotide
uguggagcaugucuucauc

SEQ ID NO: 2695949 - RNA, 19 nt, Artificial Sequence
  Description of Artificial Sequence: Synthetic oligonucleotide
ugagcugggccagaauugc

SEQ ID NO: 2695950 - RNA, 19 nt, Artificial Sequence
  Description of Artificial Sequence: Synthetic oligonucleotide
aaaguggucugggugugga

SEQ ID NO: 2695951 - RNA, 19 nt, Artificial Sequence
  Description of Artificial Sequence: Synthetic oligonucleotide
cacagugaggccgugguac

SEQ ID NO: 2695952 - RNA, 19 nt, Artificial Sequence
  Description of Artificial Sequence: Synthetic oligonucleotide
auaaugcccaaaguaggcu

SEQ ID NO: 2695953 - RNA, 19 nt, Artificial Sequence
  Description of Artificial Sequence: Synthetic oligonucleotide
uuccaaagauguagaagua

SEQ ID NO: 2695954 - RNA, 19 nt, Artificial Sequence
  Description of Artificial Sequence: Synthetic oligonucleotide
acaggucaccaacauggug

SEQ ID NO: 2695955 - RNA, 19 nt, Artificial Sequence
  Description of Artificial Sequence: Synthetic oligonucleotide
caugccuguaccccagaag

SEQ ID NO: 2695956 - RNA, 19 nt, Artificial Sequence
  Description of Artificial Sequence: Synthetic oligonucleotide
uccugacugcuccaccgag

SEQ ID NO: 2695957 - RNA, 19 nt, Artificial Sequence
  Description of Artificial Sequence: Synthetic oligonucleotide
cucaucacgaucagaggca

SEQ ID NO: 2695958 - RNA, 19 nt, Artificial Sequence
  Description of Artificial Sequence: Synthetic oligonucleotide
gugauaauaacuccccggu

SEQ ID NO: 2695959 - RNA, 19 nt, Artificial Sequence
  Description of Artificial Sequence: Synthetic oligonucleotide
uaauaacuccccgguuagg

SEQ ID NO: 2695960 - RNA, 19 nt, Artificial Sequence
  Description of Artificial Sequence: Synthetic oligonucleotide
uucucugaucucagggccu

SEQ ID NO: 2695961 - RNA, 19 nt, Artificial Sequence
  Description of Artificial Sequence: Synthetic oligonucleotide
acaucugcuuggguagagc

SEQ ID NO: 2695962 - RNA, 19 nt, Artificial Sequence
  Description of Artificial Sequence: Synthetic oligonucleotide
uacgccaugccuguacccc

SEQ ID NO: 2695963 - RNA, 19 nt, Artificial Sequence
  Description of Artificial Sequence: Synthetic oligonucleotide
aagacaacaguaacagauu

SEQ ID NO: 2695964 - RNA, 19 nt, Artificial Sequence
  Description of Artificial Sequence: Synthetic oligonucleotide
aggcauucuuucucugauc

SEQ ID NO: 2695965 - RNA, 19 nt, Artificial Sequence
  Description of Artificial Sequence: Synthetic oligonucleotide
ucgcugacucucauguugu

SEQ ID NO: 2695966 - RNA, 19 nt, Artificial Sequence
  Description of Artificial Sequence: Synthetic oligonucleotide
auagagcuugauguacauc

SEQ ID NO: 2695967 - RNA, 19 nt, Artificial Sequence
  Description of Artificial Sequence: Synthetic oligonucleotide
cugugguccaaagagagga

SEQ ID NO: 2695968 - RNA, 19 nt, Artificial Sequence
  Description of Artificial Sequence: Synthetic oligonucleotide
ugugagcuggcaagagcca

SEQ ID NO: 2695969 - RNA, 19 nt, Artificial Sequence
  Description of Artificial Sequence: Synthetic oligonucleotide
gagauagcagcaaauugaa

SEQ ID NO: 2695970 - RNA, 19 nt, Artificial Sequence
  Description of Artificial Sequence: Synthetic oligonucleotide
uguugugagcuggcaagag

SEQ ID NO: 2695971 - RNA, 19 nt, Artificial Sequence
  Description of Artificial Sequence: Synthetic oligonucleotide
uccucaaggccagugguac

SEQ ID NO: 2695972 - RNA, 19 nt, Artificial Sequence
  Description of Artificial Sequence: Synthetic oligonucleotide
uauuugucuugcagcaauu

SEQ ID NO: 2695973 - RNA, 19 nt, Artificial Sequence
  Description of Artificial Sequence: Synthetic oligonucleotide
acgaagccccagaaaacgc

SEQ ID NO: 2695974 - RNA, 19 nt, Artificial Sequence
  Description of Artificial Sequence: Synthetic oligonucleotide
acagauuucucgaaauaau

SEQ ID NO: 2695975 - RNA, 19 nt, Artificial Sequence
  Description of Artificial Sequence: Synthetic oligonucleotide
accgaagaaaguggucugg

SEQ ID NO: 2695976 - RNA, 19 nt, Artificial Sequence
  Description of Artificial Sequence: Synthetic oligonucleotide
agaaggcauucuuucucug

SEQ ID NO: 2695977 - RNA, 19 nt, Artificial Sequence
  Description of Artificial Sequence: Synthetic oligonucleotide
ugacucucauguugugagc

SEQ ID NO: 2695978 - RNA, 19 nt, Artificial Sequence
  Description of Artificial Sequence: Synthetic oligonucleotide
caaaagagauagcagcaaa

SEQ ID NO: 2695979 - RNA, 19 nt, Artificial Sequence
  Description of Artificial Sequence: Synthetic oligonucleotide
uaccagaugguuucauuuu

SEQ ID NO: 2695980 - RNA, 19 nt, Artificial Sequence
  Description of Artificial Sequence: Synthetic oligonucleotide
ugcccaaaguaggcuaccg

SEQ ID NO: 2695981 - RNA, 19 nt, Artificial Sequence
  Description of Artificial Sequence: Synthetic oligonucleotide
ugguacgccaugccuguac

SEQ ID NO: 2695982 - RNA, 19 nt, Artificial Sequence
  Description of Artificial Sequence: Synthetic oligonucleotide
guaagaaauucauccugaa

SEQ ID NO: 2695983 - RNA, 19 nt, Artificial Sequence
  Description of Artificial Sequence: Synthetic oligonucleotide
guacuucagauaccagaug

SEQ ID NO: 2695984 - RNA, 19 nt, Artificial Sequence
  Description of Artificial Sequence: Synthetic oligonucleotide
ccgguuaggacccuugggg

SEQ ID NO: 2695985 - RNA, 19 nt, Artificial Sequence
  Description of Artificial Sequence: Synthetic oligonucleotide
aggacccuuggggauaaac

SEQ ID NO: 2695986 - RNA, 19 nt, Artificial Sequence
  Description of Artificial Sequence: Synthetic oligonucleotide
auauucaaagccacggguu

SEQ ID NO: 2695987 - RNA, 19 nt, Artificial Sequence
  Description of Artificial Sequence: Synthetic oligonucleotide
gagccauauucaaagccac

SEQ ID NO: 2695988 - RNA, 19 nt, Artificial Sequence
  Description of Artificial Sequence: Synthetic oligonucleotide
acggguuccaagacaacag

SEQ ID NO: 2695989 - RNA, 19 nt, Artificial Sequence
  Description of Artificial Sequence: Synthetic oligonucleotide
ggugguuuugcaucuagaa

SEQ ID NO: 2695990 - RNA, 19 nt, Artificial Sequence
  Description of Artificial Sequence: Synthetic oligonucleotide
uggcaagagccauauucaa

SEQ ID NO: 2695991 - RNA, 19 nt, Artificial Sequence
  Description of Artificial Sequence: Synthetic oligonucleotide
gguuuugcaucuagaaggc

SEQ ID NO: 2695992 - RNA, 19 nt, Artificial Sequence
  Description of Artificial Sequence: Synthetic oligonucleotide
guagaaguaagaaauucau

SEQ ID NO: 2695993 - RNA, 19 nt, Artificial Sequence
  Description of Artificial Sequence: Synthetic oligonucleotide
guaacagauuucucgaaau

SEQ ID NO: 2695994 - RNA, 19 nt, Artificial Sequence
  Description of Artificial Sequence: Synthetic oligonucleotide
uaaacacaucgcugacucu

SEQ ID NO: 2695995 - RNA, 19 nt, Artificial Sequence
  Description of Artificial Sequence: Synthetic oligonucleotide
ucaucacgaucagaggcac

SEQ ID NO: 2695996 - RNA, 19 nt, Artificial Sequence
  Description of Artificial Sequence: Synthetic oligonucleotide
agagaggauugagcugggc

SEQ ID NO: 2695997 - RNA, 19 nt, Artificial Sequence
  Description of Artificial Sequence: Synthetic oligonucleotide
agaauugcaaucagccaaa

SEQ ID NO: 2695998 - RNA, 19 nt, Artificial Sequence
  Description of Artificial Sequence: Synthetic oligonucleotide
ucucgaaauaaugcccaaa

SEQ ID NO: 2695999 - RNA, 19 nt, Artificial Sequence
  Description of Artificial Sequence: Synthetic oligonucleotide
ccaaaguaggcuaccgaag

SEQ ID NO: 2696000 - RNA, 19 nt, Artificial Sequence
  Description of Artificial Sequence: Synthetic oligonucleotide
aggcuaccgaagaaagugg

SEQ ID NO: 2696001 - RNA, 19 nt, Artificial Sequence
  Description of Artificial Sequence: Synthetic oligonucleotide
ugcaucuagaaggcauucu

SEQ ID NO: 2696002 - RNA, 19 nt, Artificial Sequence
  Description of Artificial Sequence: Synthetic oligonucleotide
caaagccacggguuccaag

SEQ ID NO: 2696003 - RNA, 19 nt, Artificial Sequence
  Description of Artificial Sequence: Synthetic oligonucleotide
ucucugaucucagggccug

SEQ ID NO: 2696004 - RNA, 19 nt, Artificial Sequence
  Description of Artificial Sequence: Synthetic oligonucleotide
uacaucugcuuggguagag

SEQ ID NO: 2696005 - RNA, 19 nt, Artificial Sequence
  Description of Artificial Sequence: Synthetic oligonucleotide
gaaaguggucugggugugg

SEQ ID NO: 2696006 - RNA, 19 nt, Artificial Sequence
  Description of Artificial Sequence: Synthetic oligonucleotide
auucuuucucugaucucag

SEQ ID NO: 2696007 - RNA, 19 nt, Artificial Sequence
  Description of Artificial Sequence: Synthetic oligonucleotide
uucucgaaauaaugcccaa

SEQ ID NO: 2696008 - RNA, 19 nt, Artificial Sequence
  Description of Artificial Sequence: Synthetic oligonucleotide
aacacaucgcugacucuca

SEQ ID NO: 2696009 - RNA, 19 nt, Artificial Sequence
  Description of Artificial Sequence: Synthetic oligonucleotide
aaggccagugguacuucag

SEQ ID NO: 2696010 - RNA, 19 nt, Artificial Sequence
  Description of Artificial Sequence: Synthetic oligonucleotide
acugugguccaaagagagg

SEQ ID NO: 2696011 - RNA, 19 nt, Artificial Sequence
  Description of Artificial Sequence: Synthetic oligonucleotide
augcccaaaguaggcuacc

SEQ ID NO: 2696012 - RNA, 19 nt, Artificial Sequence
  Description of Artificial Sequence: Synthetic oligonucleotide
ccaacauggugauaauaac

SEQ ID NO: 2696013 - RNA, 19 nt, Artificial Sequence
  Description of Artificial Sequence: Synthetic oligonucleotide
agccauauucaaagccacg

SEQ ID NO: 2696014 - RNA, 19 nt, Artificial Sequence
  Description of Artificial Sequence: Synthetic oligonucleotide
caacaguaacagauuucuc

SEQ ID NO: 2696015 - RNA, 19 nt, Artificial Sequence
  Description of Artificial Sequence: Synthetic oligonucleotide
aagagaggauugagcuggg

SEQ ID NO: 2696016 - RNA, 19 nt, Artificial Sequence
  Description of Artificial Sequence: Synthetic oligonucleotide
aggccagugguacuucaga

SEQ ID NO: 2696017 - RNA, 19 nt, Artificial Sequence
  Description of Artificial Sequence: Synthetic oligonucleotide
agaaaguggucugggugug

SEQ ID NO: 2696018 - RNA, 19 nt, Artificial Sequence
  Description of Artificial Sequence: Synthetic oligonucleotide
ugggcggggacuccugacu

SEQ ID NO: 2696019 - RNA, 19 nt, Artificial Sequence
  Description of Artificial Sequence: Synthetic oligonucleotide
ugagcuggcaagagccaua

SEQ ID NO: 2696020 - RNA, 19 nt, Artificial Sequence
  Description of Artificial Sequence: Synthetic oligonucleotide
gacuccugacugcuccacc

SEQ ID NO: 2696021 - RNA, 19 nt, Artificial Sequence
  Description of Artificial Sequence: Synthetic oligonucleotide
aucagccaaaagagauagc

SEQ ID NO: 2696022 - RNA, 19 nt, Artificial Sequence
  Description of Artificial Sequence: Synthetic oligonucleotide
gcaaauugaacaggucacc

SEQ ID NO: 2696023 - RNA, 19 nt, Artificial Sequence
  Description of Artificial Sequence: Synthetic oligonucleotide
gagucuuauuugucuugca

SEQ ID NO: 2696024 - RNA, 19 nt, Artificial Sequence
  Description of Artificial Sequence: Synthetic oligonucleotide
cugaucucagggccugggc

SEQ ID NO: 2696025 - RNA, 19 nt, Artificial Sequence
  Description of Artificial Sequence: Synthetic oligonucleotide
cgaaauaaugcccaaagua

SEQ ID NO: 2696026 - RNA, 19 nt, Artificial Sequence
  Description of Artificial Sequence: Synthetic oligonucleotide
gaagccccagaaaacgcuc

SEQ ID NO: 2696027 - RNA, 19 nt, Artificial Sequence
  Description of Artificial Sequence: Synthetic oligonucleotide
aacaggucaccaacauggu

SEQ ID NO: 2696028 - RNA, 19 nt, Artificial Sequence
  Description of Artificial Sequence: Synthetic oligonucleotide
ccaaagagaggauugagcu

SEQ ID NO: 2696029 - RNA, 19 nt, Artificial Sequence
  Description of Artificial Sequence: Synthetic oligonucleotide
ggacccuuggggauaaacc

SEQ ID NO: 2696030 - RNA, 19 nt, Artificial Sequence
  Description of Artificial Sequence: Synthetic oligonucleotide
cacaucgcugacucucaug

SEQ ID NO: 2696031 - RNA, 19 nt, Artificial Sequence
  Description of Artificial Sequence: Synthetic oligonucleotide
ggauaaaccagggcacgag

SEQ ID NO: 2696032 - RNA, 19 nt, Artificial Sequence
  Description of Artificial Sequence: Synthetic oligonucleotide
cuaccgaagaaaguggucu

SEQ ID NO: 2696033 - RNA, 19 nt, Artificial Sequence
  Description of Artificial Sequence: Synthetic oligonucleotide
aacgcucaucacgaucaga

SEQ ID NO: 2696034 - RNA, 19 nt, Artificial Sequence
  Description of Artificial Sequence: Synthetic oligonucleotide
acccuuggggauaaaccag

SEQ ID NO: 2696035 - RNA, 19 nt, Artificial Sequence
  Description of Artificial Sequence: Synthetic oligonucleotide
agaaaacgcucaucacgau

SEQ ID NO: 2696036 - RNA, 19 nt, Artificial Sequence
  Description of Artificial Sequence: Synthetic oligonucleotide
acuguggagcaugucuuca

SEQ ID NO: 2696037 - RNA, 19 nt, Artificial Sequence
  Description of Artificial Sequence: Synthetic oligonucleotide
auuugucuugcagcaauuu

SEQ ID NO: 2696038 - RNA, 19 nt, Artificial Sequence
  Description of Artificial Sequence: Synthetic oligonucleotide
cugggccagaauugcaauc

SEQ ID NO: 2696039 - RNA, 19 nt, Artificial Sequence
  Description of Artificial Sequence: Synthetic oligonucleotide
caaucagccaaaagagaua

SEQ ID NO: 2696040 - RNA, 19 nt, Artificial Sequence
  Description of Artificial Sequence: Synthetic oligonucleotide
cgaucagaggcacagugag

SEQ ID NO: 2696041 - RNA, 19 nt, Artificial Sequence
  Description of Artificial Sequence: Synthetic oligonucleotide
gacucucauguugugagcu

SEQ ID NO: 2696042 - RNA, 19 nt, Artificial Sequence
  Description of Artificial Sequence: Synthetic oligonucleotide
gguacgccaugccuguacc

SEQ ID NO: 2696043 - RNA, 19 nt, Artificial Sequence
  Description of Artificial Sequence: Synthetic oligonucleotide
ggggacuccugacugcucc

SEQ ID NO: 2696044 - RNA, 19 nt, Artificial Sequence
  Description of Artificial Sequence: Synthetic oligonucleotide
agagcuugauguacaucug

SEQ ID NO: 2696045 - RNA, 19 nt, Artificial Sequence
  Description of Artificial Sequence: Synthetic oligonucleotide
uccccgguuaggacccuug

SEQ ID NO: 2696046 - RNA, 19 nt, Artificial Sequence
  Description of Artificial Sequence: Synthetic oligonucleotide
aggccgugguacgccaugc

SEQ ID NO: 2696047 - RNA, 19 nt, Artificial Sequence
  Description of Artificial Sequence: Synthetic oligonucleotide
agccacggguuccaagaca

SEQ ID NO: 2696048 - RNA, 19 nt, Artificial Sequence
  Description of Artificial Sequence: Synthetic oligonucleotide
ggggauaaaccagggcacg

SEQ ID NO: 2696049 - RNA, 19 nt, Artificial Sequence
  Description of Artificial Sequence: Synthetic oligonucleotide
guacgccaugccuguaccc

SEQ ID NO: 2696050 - RNA, 19 nt, Artificial Sequence
  Description of Artificial Sequence: Synthetic oligonucleotide
cuccaccgagucuuauuug

SEQ ID NO: 2696051 - RNA, 19 nt, Artificial Sequence
  Description of Artificial Sequence: Synthetic oligonucleotide
gguuccaagacaacaguaa

SEQ ID NO: 2696052 - RNA, 19 nt, Artificial Sequence
  Description of Artificial Sequence: Synthetic oligonucleotide
aagccccagaaaacgcuca

SEQ ID NO: 2696053 - RNA, 19 nt, Artificial Sequence
  Description of Artificial Sequence: Synthetic oligonucleotide
gauaccagaugguuucauu

SEQ ID NO: 2696054 - RNA, 19 nt, Artificial Sequence
  Description of Artificial Sequence: Synthetic oligonucleotide
gaggccgugguacgccaug

SEQ ID NO: 2696055 - RNA, 19 nt, Artificial Sequence
  Description of Artificial Sequence: Synthetic oligonucleotide
auguugugagcuggcaaga

SEQ ID NO: 2696056 - RNA, 19 nt, Artificial Sequence
  Description of Artificial Sequence: Synthetic oligonucleotide
cacggguuccaagacaaca

SEQ ID NO: 2696057 - RNA, 19 nt, Artificial Sequence
  Description of Artificial Sequence: Synthetic oligonucleotide
gccaaaagagauagcagca

SEQ ID NO: 2696058 - RNA, 19 nt, Artificial Sequence
  Description of Artificial Sequence: Synthetic oligonucleotide
acgaucagaggcacaguga

SEQ ID NO: 2696059 - RNA, 19 nt, Artificial Sequence
  Description of Artificial Sequence: Synthetic oligonucleotide
agcaugucuucauccucaa

SEQ ID NO: 2696060 - RNA, 19 nt, Artificial Sequence
  Description of Artificial Sequence: Synthetic oligonucleotide
uuaggacccuuggggauaa

SEQ ID NO: 2696061 - RNA, 19 nt, Artificial Sequence
  Description of Artificial Sequence: Synthetic oligonucleotide
ccuuggggauaaaccaggg

SEQ ID NO: 2696062 - RNA, 19 nt, Artificial Sequence
  Description of Artificial Sequence: Synthetic oligonucleotide
caucugcuuggguagagcu

SEQ ID NO: 2696063 - RNA, 19 nt, Artificial Sequence
  Description of Artificial Sequence: Synthetic oligonucleotide
cugggcacuguggagcaug

SEQ ID NO: 2696064 - RNA, 19 nt, Artificial Sequence
  Description of Artificial Sequence: Synthetic oligonucleotide
ggcacuguggagcaugucu

SEQ ID NO: 2696065 - RNA, 19 nt, Artificial Sequence
  Description of Artificial Sequence: Synthetic oligonucleotide
ggagcaugucuucauccuc

SEQ ID NO: 2696066 - RNA, 19 nt, Artificial Sequence
  Description of Artificial Sequence: Synthetic oligonucleotide
uggguguggaggugguuuu

SEQ ID NO: 2696067 - RNA, 19 nt, Artificial Sequence
  Description of Artificial Sequence: Synthetic oligonucleotide
ugcuccaccgagucuuauu

SEQ ID NO: 2696068 - RNA, 19 nt, Artificial Sequence
  Description of Artificial Sequence: Synthetic oligonucleotide
cagggcacgagaaggccca

SEQ ID NO: 2696069 - RNA, 19 nt, Artificial Sequence
  Description of Artificial Sequence: Synthetic oligonucleotide
caguaacagauuucucgaa

SEQ ID NO: 2696070 - RNA, 19 nt, Artificial Sequence
  Description of Artificial Sequence: Synthetic oligonucleotide
uugggcggggacuccugac

SEQ ID NO: 2696071 - RNA, 19 nt, Artificial Sequence
  Description of Artificial Sequence: Synthetic oligonucleotide
gcaaucagccaaaagagau

SEQ ID NO: 2696072 - RNA, 19 nt, Artificial Sequence
  Description of Artificial Sequence: Synthetic oligonucleotide
cuuggguagagcuucucuu

SEQ ID NO: 2696073 - RNA, 19 nt, Artificial Sequence
  Description of Artificial Sequence: Synthetic oligonucleotide
cccacgaagccccagaaaa

SEQ ID NO: 2696074 - RNA, 19 nt, Artificial Sequence
  Description of Artificial Sequence: Synthetic oligonucleotide
agauaccagaugguuucau

SEQ ID NO: 2696075 - RNA, 19 nt, Artificial Sequence
  Description of Artificial Sequence: Synthetic oligonucleotide
guguggaggugguuuugca

SEQ ID NO: 2696076 - RNA, 19 nt, Artificial Sequence
  Description of Artificial Sequence: Synthetic oligonucleotide
ggcacgagaaggcccacga

SEQ ID NO: 2696077 - RNA, 19 nt, Artificial Sequence
  Description of Artificial Sequence: Synthetic oligonucleotide
gauguacaucugcuugggu

SEQ ID NO: 2696078 - RNA, 19 nt, Artificial Sequence
  Description of Artificial Sequence: Synthetic oligonucleotide
ucaaggccagugguacuuc

SEQ ID NO: 2696079 - RNA, 19 nt, Artificial Sequence
  Description of Artificial Sequence: Synthetic oligonucleotide
gaauugcaaucagccaaaa

SEQ ID NO: 2696080 - RNA, 19 nt, Artificial Sequence
  Description of Artificial Sequence: Synthetic oligonucleotide
gguguggaggugguuuugc

SEQ ID NO: 2696081 - RNA, 19 nt, Artificial Sequence
  Description of Artificial Sequence: Synthetic oligonucleotide
gcagcaauuuuaaacacau

SEQ ID NO: 2696082 - RNA, 19 nt, Artificial Sequence
  Description of Artificial Sequence: Synthetic oligonucleotide
ccgaagaaaguggucuggg

SEQ ID NO: 2696083 - RNA, 19 nt, Artificial Sequence
  Description of Artificial Sequence: Synthetic oligonucleotide
cccaaaguaggcuaccgaa

SEQ ID NO: 2696084 - RNA, 19 nt, Artificial Sequence
  Description of Artificial Sequence: Synthetic oligonucleotide
aggcccacgaagccccaga

SEQ ID NO: 2696085 - RNA, 19 nt, Artificial Sequence
  Description of Artificial Sequence: Synthetic oligonucleotide
agccccagaaaacgcucau

SEQ ID NO: 2696086 - RNA, 19 nt, Artificial Sequence
  Description of Artificial Sequence: Synthetic oligonucleotide
aaggcccacgaagccccag

SEQ ID NO: 2696087 - RNA, 19 nt, Artificial Sequence
  Description of Artificial Sequence: Synthetic oligonucleotide
agaggcacagugaggccgu

SEQ ID NO: 2696088 - RNA, 19 nt, Artificial Sequence
  Description of Artificial Sequence: Synthetic oligonucleotide
caccgagucuuauuugucu

SEQ ID NO: 2696089 - RNA, 19 nt, Artificial Sequence
  Description of Artificial Sequence: Synthetic oligonucleotide
ccagaauugcaaucagcca

SEQ ID NO: 2696090 - RNA, 19 nt, Artificial Sequence
  Description of Artificial Sequence: Synthetic oligonucleotide
ggccagaauugcaaucagc

SEQ ID NO: 2696091 - RNA, 19 nt, Artificial Sequence
  Description of Artificial Sequence: Synthetic oligonucleotide
gggccagaauugcaaucag

SEQ ID NO: 2696092 - RNA, 19 nt, Artificial Sequence
  Description of Artificial Sequence: Synthetic oligonucleotide
acacaucgcugacucucau

SEQ ID NO: 2696093 - RNA, 19 nt, Artificial Sequence
  Description of Artificial Sequence: Synthetic oligonucleotide
caaggccagugguacuuca

SEQ ID NO: 2696094 - RNA, 19 nt, Artificial Sequence
  Description of Artificial Sequence: Synthetic oligonucleotide
ccgagucuuauuugucuug

SEQ ID NO: 2696095 - RNA, 19 nt, Artificial Sequence
  Description of Artificial Sequence: Synthetic oligonucleotide
guuaggacccuuggggaua

SEQ ID NO: 2696096 - RNA, 19 nt, Artificial Sequence
  Description of Artificial Sequence: Synthetic oligonucleotide
ucacgaucagaggcacagu

SEQ ID NO: 2696097 - RNA, 19 nt, Artificial Sequence
  Description of Artificial Sequence: Synthetic oligonucleotide
aggcacagugaggccgugg

SEQ ID NO: 2696098 - RNA, 19 nt, Artificial Sequence
  Description of Artificial Sequence: Synthetic oligonucleotide
ccgugguacgccaugccug

SEQ ID NO: 2696099 - RNA, 19 nt, Artificial Sequence
  Description of Artificial Sequence: Synthetic oligonucleotide
cauccucaaggccaguggu

SEQ ID NO: 2696100 - RNA, 19 nt, Artificial Sequence
  Description of Artificial Sequence: Synthetic oligonucleotide
cgagucuuauuugucuugc

SEQ ID NO: 2696101 - RNA, 19 nt, Artificial Sequence
  Description of Artificial Sequence: Synthetic oligonucleotide
ccacgaagccccagaaaac

SEQ ID NO: 2696102 - RNA, 19 nt, Artificial Sequence
  Description of Artificial Sequence: Synthetic oligonucleotide
ccuguaccccagaagacga

SEQ ID NO: 2696103 - RNA, 19 nt, Artificial Sequence
  Description of Artificial Sequence: Synthetic oligonucleotide
gguccaaagagaggauuga

SEQ ID NO: 2696104 - RNA, 19 nt, Artificial Sequence
  Description of Artificial Sequence: Synthetic oligonucleotide
cucauguugugagcuggca

SEQ ID NO: 2696105 - RNA, 19 nt, Artificial Sequence
  Description of Artificial Sequence: Synthetic oligonucleotide
ugaggccgugguacgccau

SEQ ID NO: 2696106 - RNA, 19 nt, Artificial Sequence
  Description of Artificial Sequence: Synthetic oligonucleotide
cccgguuaggacccuuggg

SEQ ID NO: 2696107 - RNA, 19 nt, Artificial Sequence
  Description of Artificial Sequence: Synthetic oligonucleotide
gucuugcagcaauuuuaaa

SEQ ID NO: 2696108 - RNA, 19 nt, Artificial Sequence
  Description of Artificial Sequence: Synthetic oligonucleotide
cucugaucucagggccugg

SEQ ID NO: 2696109 - RNA, 19 nt, Artificial Sequence
  Description of Artificial Sequence: Synthetic oligonucleotide
ucucuugggcggggacucc

SEQ ID NO: 2696110 - RNA, 19 nt, Artificial Sequence
  Description of Artificial Sequence: Synthetic oligonucleotide
ggcaagagccauauucaaa

SEQ ID NO: 2696111 - RNA, 19 nt, Artificial Sequence
  Description of Artificial Sequence: Synthetic oligonucleotide
gcauucuuucucugaucuc

SEQ ID NO: 2696112 - RNA, 19 nt, Artificial Sequence
  Description of Artificial Sequence: Synthetic oligonucleotide
gcaucuagaaggcauucuu

SEQ ID NO: 2696113 - RNA, 19 nt, Artificial Sequence
  Description of Artificial Sequence: Synthetic oligonucleotide
guacaucugcuuggguaga

SEQ ID NO: 2696114 - RNA, 19 nt, Artificial Sequence
  Description of Artificial Sequence: Synthetic oligonucleotide
gggcggggacuccugacug

SEQ ID NO: 2696115 - RNA, 19 nt, Artificial Sequence
  Description of Artificial Sequence: Synthetic oligonucleotide
gugaggccgugguacgcca

SEQ ID NO: 2696116 - RNA, 19 nt, Artificial Sequence
  Description of Artificial Sequence: Synthetic oligonucleotide
caucacgaucagaggcaca

SEQ ID NO: 2696117 - RNA, 19 nt, Artificial Sequence
  Description of Artificial Sequence: Synthetic oligonucleotide
ugcuuggguagagcuucuc

SEQ ID NO: 2696118 - RNA, 19 nt, Artificial Sequence
  Description of Artificial Sequence: Synthetic oligonucleotide
cuccugacugcuccaccga

SEQ ID NO: 2696119 - RNA, 19 nt, Artificial Sequence
  Description of Artificial Sequence: Synthetic oligonucleotide
cuugggcggggacuccuga

SEQ ID NO: 2696120 - RNA, 19 nt, Artificial Sequence
  Description of Artificial Sequence: Synthetic oligonucleotide
gcuaccgaagaaagugguc

SEQ ID NO: 2696121 - RNA, 19 nt, Artificial Sequence
  Description of Artificial Sequence: Synthetic oligonucleotide
cgcucaucacgaucagagg

SEQ ID NO: 2696122 - RNA, 19 nt, Artificial Sequence
  Description of Artificial Sequence: Synthetic oligonucleotide
gcagcaaauugaacagguc

SEQ ID NO: 2696123 - RNA, 19 nt, Artificial Sequence
  Description of Artificial Sequence: Synthetic oligonucleotide
guaggcuaccgaagaaagu

SEQ ID NO: 2696124 - RNA, 19 nt, Artificial Sequence
  Description of Artificial Sequence: Synthetic oligonucleotide
gccagugguacuucagaua

SEQ ID NO: 2696125 - RNA, 19 nt, Artificial Sequence
  Description of Artificial Sequence: Synthetic oligonucleotide
auccucaaggccaguggua

SEQ ID NO: 2696126 - RNA, 19 nt, Artificial Sequence
  Description of Artificial Sequence: Synthetic oligonucleotide
gggauaaaccagggcacga

SEQ ID NO: 2696127 - RNA, 19 nt, Artificial Sequence
  Description of Artificial Sequence: Synthetic oligonucleotide
gcccaaaguaggcuaccga

SEQ ID NO: 2696128 - RNA, 19 nt, Artificial Sequence
  Description of Artificial Sequence: Synthetic oligonucleotide
cagauaccagaugguuuca

SEQ ID NO: 2696129 - RNA, 19 nt, Artificial Sequence
  Description of Artificial Sequence: Synthetic oligonucleotide
ggcggggacuccugacugc

SEQ ID NO: 2696130 - RNA, 19 nt, Artificial Sequence
  Description of Artificial Sequence: Synthetic oligonucleotide
caccaacauggugauaaua

SEQ ID NO: 2696131 - RNA, 19 nt, Artificial Sequence
  Description of Artificial Sequence: Synthetic oligonucleotide
gcuuggguagagcuucucu

SEQ ID NO: 2696132 - RNA, 19 nt, Artificial Sequence
  Description of Artificial Sequence: Synthetic oligonucleotide
agggcacgagaaggcccac

SEQ ID NO: 2696133 - RNA, 19 nt, Artificial Sequence
  Description of Artificial Sequence: Synthetic oligonucleotide
gguuaggacccuuggggau

SEQ ID NO: 2696134 - RNA, 19 nt, Artificial Sequence
  Description of Artificial Sequence: Synthetic oligonucleotide
ccaagacaacaguaacaga

SEQ ID NO: 2696135 - RNA, 19 nt, Artificial Sequence
  Description of Artificial Sequence: Synthetic oligonucleotide
aggauugagcugggccaga

SEQ ID NO: 2696136 - RNA, 19 nt, Artificial Sequence
  Description of Artificial Sequence: Synthetic oligonucleotide
cuguaccccagaagacgaa

SEQ ID NO: 2696137 - RNA, 19 nt, Artificial Sequence
  Description of Artificial Sequence: Synthetic oligonucleotide
gagcuggcaagagccauau

SEQ ID NO: 2696138 - RNA, 19 nt, Artificial Sequence
  Description of Artificial Sequence: Synthetic oligonucleotide
ucuggguguggaggugguu

SEQ ID NO: 2696139 - RNA, 19 nt, Artificial Sequence
  Description of Artificial Sequence: Synthetic oligonucleotide
cuucucuugggcggggacu

SEQ ID NO: 2696140 - RNA, 19 nt, Artificial Sequence
  Description of Artificial Sequence: Synthetic oligonucleotide
ccccgguuaggacccuugg

SEQ ID NO: 2696141 - RNA, 19 nt, Artificial Sequence
  Description of Artificial Sequence: Synthetic oligonucleotide
gggcacgagaaggcccacg

SEQ ID NO: 2696142 - RNA, 19 nt, Artificial Sequence
  Description of Artificial Sequence: Synthetic oligonucleotide
gcuugauguacaucugcuu

SEQ ID NO: 2696143 - RNA, 19 nt, Artificial Sequence
  Description of Artificial Sequence: Synthetic oligonucleotide
cuguggagcaugucuucau

SEQ ID NO: 2696144 - RNA, 19 nt, Artificial Sequence
  Description of Artificial Sequence: Synthetic oligonucleotide
ggccagugguacuucagau

SEQ ID NO: 2696145 - RNA, 19 nt, Artificial Sequence
  Description of Artificial Sequence: Synthetic oligonucleotide
ggacuccugacugcuccac

SEQ ID NO: 2696146 - RNA, 19 nt, Artificial Sequence
  Description of Artificial Sequence: Synthetic oligonucleotide
gggacuccugacugcucca

SEQ ID NO: 2696147 - RNA, 19 nt, Artificial Sequence
  Description of Artificial Sequence: Synthetic oligonucleotide
gaggcacagugaggccgug

SEQ ID NO: 2696148 - RNA, 19 nt, Artificial Sequence
  Description of Artificial Sequence: Synthetic oligonucleotide
ggcuaccgaagaaaguggu

SEQ ID NO: 2696149 - RNA, 19 nt, Artificial Sequence
  Description of Artificial Sequence: Synthetic oligonucleotide
gaaggcccacgaagcccca

SEQ ID NO: 2696150 - RNA, 19 nt, Artificial Sequence
  Description of Artificial Sequence: Synthetic oligonucleotide
agcuggcaagagccauauu

SEQ ID NO: 2696151 - RNA, 19 nt, Artificial Sequence
  Description of Artificial Sequence: Synthetic oligonucleotide
gccgugguacgccaugccu

SEQ ID NO: 2696152 - RNA, 19 nt, Artificial Sequence
  Description of Artificial Sequence: Synthetic oligonucleotide
ggcccacgaagccccagaa

SEQ ID NO: 2696153 - RNA, 19 nt, Artificial Sequence
  Description of Artificial Sequence: Synthetic oligonucleotide
gcugggccagaauugcaau

SEQ ID NO: 2696154 - RNA, 19 nt, Artificial Sequence
  Description of Artificial Sequence: Synthetic oligonucleotide
acugcuccaccgagucuua

SEQ ID NO: 2696155 - RNA, 19 nt, Artificial Sequence
  Description of Artificial Sequence: Synthetic oligonucleotide
ccacggguuccaagacaac

SEQ ID NO: 2696156 - RNA, 19 nt, Artificial Sequence
  Description of Artificial Sequence: Synthetic oligonucleotide
gcacgagaaggcccacgaa

SEQ ID NO: 2696157 - RNA, 19 nt, Artificial Sequence
  Description of Artificial Sequence: Synthetic oligonucleotide
cgaagccccagaaaacgcu

SEQ ID NO: 2696158 - RNA, 19 nt, Artificial Sequence
  Description of Artificial Sequence: Synthetic oligonucleotide
gcccacgaagccccagaaa

SEQ ID NO: 2696159 - RNA, 19 nt, Artificial Sequence
  Description of Artificial Sequence: Synthetic oligonucleotide
caucgcugacucucauguu

SEQ ID NO: 2696160 - RNA, 19 nt, Artificial Sequence
  Description of Artificial Sequence: Synthetic oligonucleotide
ccugacugcuccaccgagu

SEQ ID NO: 2696161 - RNA, 19 nt, Artificial Sequence
  Description of Artificial Sequence: Synthetic oligonucleotide
uaggacccuuggggauaaa

SEQ ID NO: 2696162 - RNA, 19 nt, Artificial Sequence
  Description of Artificial Sequence: Synthetic oligonucleotide
gcggggacuccugacugcu

SEQ ID NO: 2696163 - RNA, 19 nt, Artificial Sequence
  Description of Artificial Sequence: Synthetic oligonucleotide
cggguuccaagacaacagu

SEQ ID NO: 2696164 - RNA, 19 nt, Artificial Sequence
  Description of Artificial Sequence: Synthetic oligonucleotide
gugguacgccaugccugua

SEQ ID NO: 2696165 - RNA, 19 nt, Artificial Sequence
  Description of Artificial Sequence: Synthetic oligonucleotide
gggcacuguggagcauguc

SEQ ID NO: 2696166 - RNA, 19 nt, Artificial Sequence
  Description of Artificial Sequence: Synthetic oligonucleotide
ggucaccaacauggugaua

SEQ ID NO: 2696167 - RNA, 19 nt, Artificial Sequence
  Description of Artificial Sequence: Synthetic oligonucleotide
cugcuccaccgagucuuau

SEQ ID NO: 2696168 - RNA, 19 nt, Artificial Sequence
  Description of Artificial Sequence: Synthetic oligonucleotide
cuccccgguuaggacccuu

SEQ ID NO: 2696169 - RNA, 19 nt, Artificial Sequence
  Description of Artificial Sequence: Synthetic oligonucleotide
aaugaugguaaugacaacc

SEQ ID NO: 2696170 - RNA, 19 nt, Artificial Sequence
  Description of Artificial Sequence: Synthetic oligonucleotide
uuuauugaauccacgaugg

SEQ ID NO: 2696171 - RNA, 19 nt, Artificial Sequence
  Description of Artificial Sequence: Synthetic oligonucleotide
ucuacuaaauguaaagacg

SEQ ID NO: 2696172 - RNA, 19 nt, Artificial Sequence
  Description of Artificial Sequence: Synthetic oligonucleotide
aguguuaaccucuauauag

SEQ ID NO: 2696173 - RNA, 19 nt, Artificial Sequence
  Description of Artificial Sequence: Synthetic oligonucleotide
uuaaccucuauauagggag

SEQ ID NO: 2696174 - RNA, 19 nt, Artificial Sequence
  Description of Artificial Sequence: Synthetic oligonucleotide
aaauguaaagacgaccagc

SEQ ID NO: 2696175 - RNA, 19 nt, Artificial Sequence
  Description of Artificial Sequence: Synthetic oligonucleotide
aaagacgaccagcagaaac

SEQ ID NO: 2696176 - RNA, 19 nt, Artificial Sequence
  Description of Artificial Sequence: Synthetic oligonucleotide
aagaagagcguauugaaca

SEQ ID NO: 2696177 - RNA, 19 nt, Artificial Sequence
  Description of Artificial Sequence: Synthetic oligonucleotide
aggaccaaaagccagaauc

SEQ ID NO: 2696178 - RNA, 19 nt, Artificial Sequence
  Description of Artificial Sequence: Synthetic oligonucleotide
caugucaggaccaaaagcc

SEQ ID NO: 2696179 - RNA, 19 nt, Artificial Sequence
  Description of Artificial Sequence: Synthetic oligonucleotide
gaugcugaggaccagggcg

SEQ ID NO: 2696180 - RNA, 19 nt, Artificial Sequence
  Description of Artificial Sequence: Synthetic oligonucleotide
gagacgacagcaaugaugg

SEQ ID NO: 2696181 - RNA, 19 nt, Artificial Sequence
  Description of Artificial Sequence: Synthetic oligonucleotide
gauucuuucauaguuuggg

SEQ ID NO: 2696182 - RNA, 19 nt, Artificial Sequence
  Description of Artificial Sequence: Synthetic oligonucleotide
acuaaauguaaagacgacc

SEQ ID NO: 2696183 - RNA, 19 nt, Artificial Sequence
  Description of Artificial Sequence: Synthetic oligonucleotide
uguaaagacgaccagcaga

SEQ ID NO: 2696184 - RNA, 19 nt, Artificial Sequence
  Description of Artificial Sequence: Synthetic oligonucleotide
ugagaagugugguucaugg

SEQ ID NO: 2696185 - RNA, 19 nt, Artificial Sequence
  Description of Artificial Sequence: Synthetic oligonucleotide
uauauagggaggaguaagg

SEQ ID NO: 2696186 - RNA, 19 nt, Artificial Sequence
  Description of Artificial Sequence: Synthetic oligonucleotide
gguaaugacaaccaugagg

SEQ ID NO: 2696187 - RNA, 19 nt, Artificial Sequence
  Description of Artificial Sequence: Synthetic oligonucleotide
aagacgaccagcagaaacc

SEQ ID NO: 2696188 - RNA, 19 nt, Artificial Sequence
  Description of Artificial Sequence: Synthetic oligonucleotide
ucauauucuuccuugauuc

SEQ ID NO: 2696189 - RNA, 19 nt, Artificial Sequence
  Description of Artificial Sequence: Synthetic oligonucleotide
acaugucaggaccaaaagc

SEQ ID NO: 2696190 - RNA, 19 nt, Artificial Sequence
  Description of Artificial Sequence: Synthetic oligonucleotide
gaaaccauaauggagacga

SEQ ID NO: 2696191 - RNA, 19 nt, Artificial Sequence
  Description of Artificial Sequence: Synthetic oligonucleotide
aaaaccagcagugaggggu

SEQ ID NO: 2696192 - RNA, 19 nt, Artificial Sequence
  Description of Artificial Sequence: Synthetic oligonucleotide
auagggaggaguaaggagc

SEQ ID NO: 2696193 - RNA, 19 nt, Artificial Sequence
  Description of Artificial Sequence: Synthetic oligonucleotide
augacaaccaugaggaugc

SEQ ID NO: 2696194 - RNA, 19 nt, Artificial Sequence
  Description of Artificial Sequence: Synthetic oligonucleotide
aaugacaaccaugaggaug

SEQ ID NO: 2696195 - RNA, 19 nt, Artificial Sequence
  Description of Artificial Sequence: Synthetic oligonucleotide
uguuaaccucuauauaggg

SEQ ID NO: 2696196 - RNA, 19 nt, Artificial Sequence
  Description of Artificial Sequence: Synthetic oligonucleotide
cuuuauugaauccacgaug

SEQ ID NO: 2696197 - RNA, 19 nt, Artificial Sequence
  Description of Artificial Sequence: Synthetic oligonucleotide
cuagacuucacagaguagg

SEQ ID NO: 2696198 - RNA, 19 nt, Artificial Sequence
  Description of Artificial Sequence: Synthetic oligonucleotide
guugguaggagucaagaag

SEQ ID NO: 2696199 - RNA, 19 nt, Artificial Sequence
  Description of Artificial Sequence: Synthetic oligonucleotide
aaagccagaauccucuacu

SEQ ID NO: 2696200 - RNA, 19 nt, Artificial Sequence
  Description of Artificial Sequence: Synthetic oligonucleotide
agaugggugaguguuaacc

SEQ ID NO: 2696201 - RNA, 19 nt, Artificial Sequence
  Description of Artificial Sequence: Synthetic oligonucleotide
aaaagccagaauccucuac

SEQ ID NO: 2696202 - RNA, 19 nt, Artificial Sequence
  Description of Artificial Sequence: Synthetic oligonucleotide
guaaugacaaccaugagga

SEQ ID NO: 2696203 - RNA, 19 nt, Artificial Sequence
  Description of Artificial Sequence: Synthetic oligonucleotide
agaagugugguucauggug

SEQ ID NO: 2696204 - RNA, 19 nt, Artificial Sequence
  Description of Artificial Sequence: Synthetic oligonucleotide
cuaaauguaaagacgacca

SEQ ID NO: 2696205 - RNA, 19 nt, Artificial Sequence
  Description of Artificial Sequence: Synthetic oligonucleotide
aauguaaagacgaccagca

SEQ ID NO: 2696206 - RNA, 19 nt, Artificial Sequence
  Description of Artificial Sequence: Synthetic oligonucleotide
uccucuacuaaauguaaag

SEQ ID NO: 2696207 - RNA, 19 nt, Artificial Sequence
  Description of Artificial Sequence: Synthetic oligonucleotide
cucuacuaaauguaaagac

SEQ ID NO: 2696208 - RNA, 19 nt, Artificial Sequence
  Description of Artificial Sequence: Synthetic oligonucleotide
accagcagaaaccauaaug

SEQ ID NO: 2696209 - RNA, 19 nt, Artificial Sequence
  Description of Artificial Sequence: Synthetic oligonucleotide
ugaguguuaaccucuauau

SEQ ID NO: 2696210 - RNA, 19 nt, Artificial Sequence
  Description of Artificial Sequence: Synthetic oligonucleotide
uacuuuauugaauccacga

SEQ ID NO: 2696211 - RNA, 19 nt, Artificial Sequence
  Description of Artificial Sequence: Synthetic oligonucleotide
uaaggagcaaagcagcugu

SEQ ID NO: 2696212 - RNA, 19 nt, Artificial Sequence
  Description of Artificial Sequence: Synthetic oligonucleotide
uuccuugauucuuucauag

SEQ ID NO: 2696213 - RNA, 19 nt, Artificial Sequence
  Description of Artificial Sequence: Synthetic oligonucleotide
agucacaucgcccaccauc

SEQ ID NO: 2696214 - RNA, 19 nt, Artificial Sequence
  Description of Artificial Sequence: Synthetic oligonucleotide
uaaauguaaagacgaccag

SEQ ID NO: 2696215 - RNA, 19 nt, Artificial Sequence
  Description of Artificial Sequence: Synthetic oligonucleotide
auucuuucauaguuugggg

SEQ ID NO: 2696216 - RNA, 19 nt, Artificial Sequence
  Description of Artificial Sequence: Synthetic oligonucleotide
agggcgcugauguugaggc

SEQ ID NO: 2696217 - RNA, 19 nt, Artificial Sequence
  Description of Artificial Sequence: Synthetic oligonucleotide
auccacgauggacagaugg

SEQ ID NO: 2696218 - RNA, 19 nt, Artificial Sequence
  Description of Artificial Sequence: Synthetic oligonucleotide
agaauccucuacuaaaugu

SEQ ID NO: 2696219 - RNA, 19 nt, Artificial Sequence
  Description of Artificial Sequence: Synthetic oligonucleotide
cuacuaaauguaaagacga

SEQ ID NO: 2696220 - RNA, 19 nt, Artificial Sequence
  Description of Artificial Sequence: Synthetic oligonucleotide
ucaagaaggcuugagaagu

SEQ ID NO: 2696221 - RNA, 19 nt, Artificial Sequence
  Description of Artificial Sequence: Synthetic oligonucleotide
aagagcguauugaacaggg

SEQ ID NO: 2696222 - RNA, 19 nt, Artificial Sequence
  Description of Artificial Sequence: Synthetic oligonucleotide
aggaguaaggagcaaagca

SEQ ID NO: 2696223 - RNA, 19 nt, Artificial Sequence
  Description of Artificial Sequence: Synthetic oligonucleotide
aaacccaagcagcagaaau

SEQ ID NO: 2696224 - RNA, 19 nt, Artificial Sequence
  Description of Artificial Sequence: Synthetic oligonucleotide
uucugacagagguugagcc

SEQ ID NO: 2696225 - RNA, 19 nt, Artificial Sequence
  Description of Artificial Sequence: Synthetic oligonucleotide
gaugguaaugacaaccaug

SEQ ID NO: 2696226 - RNA, 19 nt, Artificial Sequence
  Description of Artificial Sequence: Synthetic oligonucleotide
ugauucuuucauaguuugg

SEQ ID NO: 2696227 - RNA, 19 nt, Artificial Sequence
  Description of Artificial Sequence: Synthetic oligonucleotide
ccagcagaaaccauaaugg

SEQ ID NO: 2696228 - RNA, 19 nt, Artificial Sequence
  Description of Artificial Sequence: Synthetic oligonucleotide
cauggugcagcgcaaaacc

SEQ ID NO: 2696229 - RNA, 19 nt, Artificial Sequence
  Description of Artificial Sequence: Synthetic oligonucleotide
agcguauugaacagggacc

SEQ ID NO: 2696230 - RNA, 19 nt, Artificial Sequence
  Description of Artificial Sequence: Synthetic oligonucleotide
agggguaaggaugaagagc

SEQ ID NO: 2696231 - RNA, 19 nt, Artificial Sequence
  Description of Artificial Sequence: Synthetic oligonucleotide
agucaagaaggcuugagaa

SEQ ID NO: 2696232 - RNA, 19 nt, Artificial Sequence
  Description of Artificial Sequence: Synthetic oligonucleotide
uauugaacagggaccagac

SEQ ID NO: 2696233 - RNA, 19 nt, Artificial Sequence
  Description of Artificial Sequence: Synthetic oligonucleotide
agccaccucauauucuucc

SEQ ID NO: 2696234 - RNA, 19 nt, Artificial Sequence
  Description of Artificial Sequence: Synthetic oligonucleotide
uauugaauccacgauggac

SEQ ID NO: 2696235 - RNA, 19 nt, Artificial Sequence
  Description of Artificial Sequence: Synthetic oligonucleotide
accaugaggaugcugagga

SEQ ID NO: 2696236 - RNA, 19 nt, Artificial Sequence
  Description of Artificial Sequence: Synthetic oligonucleotide
uccacgauggacagauggg

SEQ ID NO: 2696237 - RNA, 19 nt, Artificial Sequence
  Description of Artificial Sequence: Synthetic oligonucleotide
uucaagaagagcguauuga

SEQ ID NO: 2696238 - RNA, 19 nt, Artificial Sequence
  Description of Artificial Sequence: Synthetic oligonucleotide
ucaagaagagcguauugaa

SEQ ID NO: 2696239 - RNA, 19 nt, Artificial Sequence
  Description of Artificial Sequence: Synthetic oligonucleotide
auugaauccacgauggaca

SEQ ID NO: 2696240 - RNA, 19 nt, Artificial Sequence
  Description of Artificial Sequence: Synthetic oligonucleotide
gagcguauugaacagggac

SEQ ID NO: 2696241 - RNA, 19 nt, Artificial Sequence
  Description of Artificial Sequence: Synthetic oligonucleotide
aaggaugaagagcucugug

SEQ ID NO: 2696242 - RNA, 19 nt, Artificial Sequence
  Description of Artificial Sequence: Synthetic oligonucleotide
uaaccucuauauagggagg

SEQ ID NO: 2696243 - RNA, 19 nt, Artificial Sequence
  Description of Artificial Sequence: Synthetic oligonucleotide
ugugguucauggugcagcg

SEQ ID NO: 2696244 - RNA, 19 nt, Artificial Sequence
  Description of Artificial Sequence: Synthetic oligonucleotide
aagcagcagaaauucaaga

SEQ ID NO: 2696245 - RNA, 19 nt, Artificial Sequence
  Description of Artificial Sequence: Synthetic oligonucleotide
ugguucauggugcagcgca

SEQ ID NO: 2696246 - RNA, 19 nt, Artificial Sequence
  Description of Artificial Sequence: Synthetic oligonucleotide
gaaggcuugagaagugugg

SEQ ID NO: 2696247 - RNA, 19 nt, Artificial Sequence
  Description of Artificial Sequence: Synthetic oligonucleotide
cuauauagggaggaguaag

SEQ ID NO: 2696248 - RNA, 19 nt, Artificial Sequence
  Description of Artificial Sequence: Synthetic oligonucleotide
augguaaugacaaccauga

SEQ ID NO: 2696249 - RNA, 19 nt, Artificial Sequence
  Description of Artificial Sequence: Synthetic oligonucleotide
ucagaaguuuccuuuuccu

SEQ ID NO: 2696250 - RNA, 19 nt, Artificial Sequence
  Description of Artificial Sequence: Synthetic oligonucleotide
accauaauggagacgacag

SEQ ID NO: 2696251 - RNA, 19 nt, Artificial Sequence
  Description of Artificial Sequence: Synthetic oligonucleotide
gucccuagacuucacagag

SEQ ID NO: 2696252 - RNA, 19 nt, Artificial Sequence
  Description of Artificial Sequence: Synthetic oligonucleotide
uagacuucacagaguaggc

SEQ ID NO: 2696253 - RNA, 19 nt, Artificial Sequence
  Description of Artificial Sequence: Synthetic oligonucleotide
uugaauccacgauggacag

SEQ ID NO: 2696254 - RNA, 19 nt, Artificial Sequence
  Description of Artificial Sequence: Synthetic oligonucleotide
uaggagucaagaaggcuug

SEQ ID NO: 2696255 - RNA, 19 nt, Artificial Sequence
  Description of Artificial Sequence: Synthetic oligonucleotide
acuuuauugaauccacgau

SEQ ID NO: 2696256 - RNA, 19 nt, Artificial Sequence
  Description of Artificial Sequence: Synthetic oligonucleotide
uuucucagaaguuuccuuu

SEQ ID NO: 2696257 - RNA, 19 nt, Artificial Sequence
  Description of Artificial Sequence: Synthetic oligonucleotide
aauggagacgacagcaaug

SEQ ID NO: 2696258 - RNA, 19 nt, Artificial Sequence
  Description of Artificial Sequence: Synthetic oligonucleotide
caagcagcagaaauucaag

SEQ ID NO: 2696259 - RNA, 19 nt, Artificial Sequence
  Description of Artificial Sequence: Synthetic oligonucleotide
acaaccaugaggaugcuga

SEQ ID NO: 2696260 - RNA, 19 nt, Artificial Sequence
  Description of Artificial Sequence: Synthetic oligonucleotide
gaagugugguucauggugc

SEQ ID NO: 2696261 - RNA, 19 nt, Artificial Sequence
  Description of Artificial Sequence: Synthetic oligonucleotide
agcagaaaccauaauggag

SEQ ID NO: 2696262 - RNA, 19 nt, Artificial Sequence
  Description of Artificial Sequence: Synthetic oligonucleotide
uacuaaauguaaagacgac

SEQ ID NO: 2696263 - RNA, 19 nt, Artificial Sequence
  Description of Artificial Sequence: Synthetic oligonucleotide
uggugcagcgcaaaaccag

SEQ ID NO: 2696264 - RNA, 19 nt, Artificial Sequence
  Description of Artificial Sequence: Synthetic oligonucleotide
agcagcagaaauucaagaa

SEQ ID NO: 2696265 - RNA, 19 nt, Artificial Sequence
  Description of Artificial Sequence: Synthetic oligonucleotide
gaguaaggagcaaagcagc

SEQ ID NO: 2696266 - RNA, 19 nt, Artificial Sequence
  Description of Artificial Sequence: Synthetic oligonucleotide
guguuaaccucuauauagg

SEQ ID NO: 2696267 - RNA, 19 nt, Artificial Sequence
  Description of Artificial Sequence: Synthetic oligonucleotide
augaagagcucuguggguc

SEQ ID NO: 2696268 - RNA, 19 nt, Artificial Sequence
  Description of Artificial Sequence: Synthetic oligonucleotide
auucaagaagagcguauug

SEQ ID NO: 2696269 - RNA, 19 nt, Artificial Sequence
  Description of Artificial Sequence: Synthetic oligonucleotide
aaccauaauggagacgaca

SEQ ID NO: 2696270 - RNA, 19 nt, Artificial Sequence
  Description of Artificial Sequence: Synthetic oligonucleotide
augggugaguguuaaccuc

SEQ ID NO: 2696271 - RNA, 19 nt, Artificial Sequence
  Description of Artificial Sequence: Synthetic oligonucleotide
acagcgaccucucugggca

SEQ ID NO: 2696272 - RNA, 19 nt, Artificial Sequence
  Description of Artificial Sequence: Synthetic oligonucleotide
caagaagagcguauugaac

SEQ ID NO: 2696273 - RNA, 19 nt, Artificial Sequence
  Description of Artificial Sequence: Synthetic oligonucleotide
agagguugagccaugggag

SEQ ID NO: 2696274 - RNA, 19 nt, Artificial Sequence
  Description of Artificial Sequence: Synthetic oligonucleotide
cauaauggagacgacagca

SEQ ID NO: 2696275 - RNA, 19 nt, Artificial Sequence
  Description of Artificial Sequence: Synthetic oligonucleotide
cucagaaguuuccuuuucc

SEQ ID NO: 2696276 - RNA, 19 nt, Artificial Sequence
  Description of Artificial Sequence: Synthetic oligonucleotide
ugggugaguguuaaccucu

SEQ ID NO: 2696277 - RNA, 19 nt, Artificial Sequence
  Description of Artificial Sequence: Synthetic oligonucleotide
ggaguaaggagcaaagcag

SEQ ID NO: 2696278 - RNA, 19 nt, Artificial Sequence
  Description of Artificial Sequence: Synthetic oligonucleotide
uaauggagacgacagcaau

SEQ ID NO: 2696279 - RNA, 19 nt, Artificial Sequence
  Description of Artificial Sequence: Synthetic oligonucleotide
uauucuuccuugauucuuu

SEQ ID NO: 2696280 - RNA, 19 nt, Artificial Sequence
  Description of Artificial Sequence: Synthetic oligonucleotide
acccaagcagcagaaauuc

SEQ ID NO: 2696281 - RNA, 19 nt, Artificial Sequence
  Description of Artificial Sequence: Synthetic oligonucleotide
aaagcagcuguggauggug

SEQ ID NO: 2696282 - RNA, 19 nt, Artificial Sequence
  Description of Artificial Sequence: Synthetic oligonucleotide
ucugacagagguugagcca

SEQ ID NO: 2696283 - RNA, 19 nt, Artificial Sequence
  Description of Artificial Sequence: Synthetic oligonucleotide
aaccaugaggaugcugagg

SEQ ID NO: 2696284 - RNA, 19 nt, Artificial Sequence
  Description of Artificial Sequence: Synthetic oligonucleotide
ugcagcgcaaaaccagcag

SEQ ID NO: 2696285 - RNA, 19 nt, Artificial Sequence
  Description of Artificial Sequence: Synthetic oligonucleotide
cagcagaaauucaagaaga

SEQ ID NO: 2696286 - RNA, 19 nt, Artificial Sequence
  Description of Artificial Sequence: Synthetic oligonucleotide
uguggaugguggcagcaca

SEQ ID NO: 2696287 - RNA, 19 nt, Artificial Sequence
  Description of Artificial Sequence: Synthetic oligonucleotide
uagggaggaguaaggagca

SEQ ID NO: 2696288 - RNA, 19 nt, Artificial Sequence
  Description of Artificial Sequence: Synthetic oligonucleotide
gaagagcguauugaacagg

SEQ ID NO: 2696289 - RNA, 19 nt, Artificial Sequence
  Description of Artificial Sequence: Synthetic oligonucleotide
agcaaagcagcuguggaug

SEQ ID NO: 2696290 - RNA, 19 nt, Artificial Sequence
  Description of Artificial Sequence: Synthetic oligonucleotide
cugucccuagacuucacag

SEQ ID NO: 2696291 - RNA, 19 nt, Artificial Sequence
  Description of Artificial Sequence: Synthetic oligonucleotide
aaauucaagaagagcguau

SEQ ID NO: 2696292 - RNA, 19 nt, Artificial Sequence
  Description of Artificial Sequence: Synthetic oligonucleotide
ugucccuagacuucacaga

SEQ ID NO: 2696293 - RNA, 19 nt, Artificial Sequence
  Description of Artificial Sequence: Synthetic oligonucleotide
gugguucugacagagguug

SEQ ID NO: 2696294 - RNA, 19 nt, Artificial Sequence
  Description of Artificial Sequence: Synthetic oligonucleotide
aaggcuugagaaguguggu

SEQ ID NO: 2696295 - RNA, 19 nt, Artificial Sequence
  Description of Artificial Sequence: Synthetic oligonucleotide
uuauugaauccacgaugga

SEQ ID NO: 2696296 - RNA, 19 nt, Artificial Sequence
  Description of Artificial Sequence: Synthetic oligonucleotide
guaaagacgaccagcagaa

SEQ ID NO: 2696297 - RNA, 19 nt, Artificial Sequence
  Description of Artificial Sequence: Synthetic oligonucleotide
ucgguuucucagaaguuuc

SEQ ID NO: 2696298 - RNA, 19 nt, Artificial Sequence
  Description of Artificial Sequence: Synthetic oligonucleotide
guuucgguuucucagaagu

SEQ ID NO: 2696299 - RNA, 19 nt, Artificial Sequence
  Description of Artificial Sequence: Synthetic oligonucleotide
agguugagccaugggagcc

SEQ ID NO: 2696300 - RNA, 19 nt, Artificial Sequence
  Description of Artificial Sequence: Synthetic oligonucleotide
cacaugucaggaccaaaag

SEQ ID NO: 2696301 - RNA, 19 nt, Artificial Sequence
  Description of Artificial Sequence: Synthetic oligonucleotide
agcagcuguggaugguggc

SEQ ID NO: 2696302 - RNA, 19 nt, Artificial Sequence
  Description of Artificial Sequence: Synthetic oligonucleotide
ugguaggagucaagaaggc

SEQ ID NO: 2696303 - RNA, 19 nt, Artificial Sequence
  Description of Artificial Sequence: Synthetic oligonucleotide
gcaaaaccagcagugaggg

SEQ ID NO: 2696304 - RNA, 19 nt, Artificial Sequence
  Description of Artificial Sequence: Synthetic oligonucleotide
acgauggacagauggguga

SEQ ID NO: 2696305 - RNA, 19 nt, Artificial Sequence
  Description of Artificial Sequence: Synthetic oligonucleotide
gagguugagccaugggagc

SEQ ID NO: 2696306 - RNA, 19 nt, Artificial Sequence
  Description of Artificial Sequence: Synthetic oligonucleotide
aaccucuauauagggagga

SEQ ID NO: 2696307 - RNA, 19 nt, Artificial Sequence
  Description of Artificial Sequence: Synthetic oligonucleotide
aauccucuacuaaauguaa

SEQ ID NO: 2696308 - RNA, 19 nt, Artificial Sequence
  Description of Artificial Sequence: Synthetic oligonucleotide
auggagacgacagcaauga

SEQ ID NO: 2696309 - RNA, 19 nt, Artificial Sequence
  Description of Artificial Sequence: Synthetic oligonucleotide
ucagccaccucauauucuu

SEQ ID NO: 2696310 - RNA, 19 nt, Artificial Sequence
  Description of Artificial Sequence: Synthetic oligonucleotide
auguaaagacgaccagcag

SEQ ID NO: 2696311 - RNA, 19 nt, Artificial Sequence
  Description of Artificial Sequence: Synthetic oligonucleotide
ugguaaugacaaccaugag

SEQ ID NO: 2696312 - RNA, 19 nt, Artificial Sequence
  Description of Artificial Sequence: Synthetic oligonucleotide
cagaaaccauaauggagac

SEQ ID NO: 2696313 - RNA, 19 nt, Artificial Sequence
  Description of Artificial Sequence: Synthetic oligonucleotide
aagaaggcuugagaagugu

SEQ ID NO: 2696314 - RNA, 19 nt, Artificial Sequence
  Description of Artificial Sequence: Synthetic oligonucleotide
gaauccucuacuaaaugua

SEQ ID NO: 2696315 - RNA, 19 nt, Artificial Sequence
  Description of Artificial Sequence: Synthetic oligonucleotide
ugaugguaaugacaaccau

SEQ ID NO: 2696316 - RNA, 19 nt, Artificial Sequence
  Description of Artificial Sequence: Synthetic oligonucleotide
gcagaaaccauaauggaga

SEQ ID NO: 2696317 - RNA, 19 nt, Artificial Sequence
  Description of Artificial Sequence: Synthetic oligonucleotide
ucucagaaguuuccuuuuc

SEQ ID NO: 2696318 - RNA, 19 nt, Artificial Sequence
  Description of Artificial Sequence: Synthetic oligonucleotide
gacagcaaugaugguaaug

SEQ ID NO: 2696319 - RNA, 19 nt, Artificial Sequence
  Description of Artificial Sequence: Synthetic oligonucleotide
agaaaccauaauggagacg

SEQ ID NO: 2696320 - RNA, 19 nt, Artificial Sequence
  Description of Artificial Sequence: Synthetic oligonucleotide
ggcacagcgaccucucugg

SEQ ID NO: 2696321 - RNA, 19 nt, Artificial Sequence
  Description of Artificial Sequence: Synthetic oligonucleotide
agcagaaauucaagaagag

SEQ ID NO: 2696322 - RNA, 19 nt, Artificial Sequence
  Description of Artificial Sequence: Synthetic oligonucleotide
uguggguccgcccuuucuc

SEQ ID NO: 2696323 - RNA, 19 nt, Artificial Sequence
  Description of Artificial Sequence: Synthetic oligonucleotide
auauagggaggaguaagga

SEQ ID NO: 2696324 - RNA, 19 nt, Artificial Sequence
  Description of Artificial Sequence: Synthetic oligonucleotide
gcaaugaaacccaagcagc

SEQ ID NO: 2696325 - RNA, 19 nt, Artificial Sequence
  Description of Artificial Sequence: Synthetic oligonucleotide
ggcagcacaugucaggacc

SEQ ID NO: 2696326 - RNA, 19 nt, Artificial Sequence
  Description of Artificial Sequence: Synthetic oligonucleotide
acagagguugagccauggg

SEQ ID NO: 2696327 - RNA, 19 nt, Artificial Sequence
  Description of Artificial Sequence: Synthetic oligonucleotide
augcugaggaccagggcgc

SEQ ID NO: 2696328 - RNA, 19 nt, Artificial Sequence
  Description of Artificial Sequence: Synthetic oligonucleotide
accaaaagccagaauccuc

SEQ ID NO: 2696329 - RNA, 19 nt, Artificial Sequence
  Description of Artificial Sequence: Synthetic oligonucleotide
aagugugguucauggugca

SEQ ID NO: 2696330 - RNA, 19 nt, Artificial Sequence
  Description of Artificial Sequence: Synthetic oligonucleotide
aggagcaaagcagcugugg

SEQ ID NO: 2696331 - RNA, 19 nt, Artificial Sequence
  Description of Artificial Sequence: Synthetic oligonucleotide
cucuauauagggaggagua

SEQ ID NO: 2696332 - RNA, 19 nt, Artificial Sequence
  Description of Artificial Sequence: Synthetic oligonucleotide
ucuauauagggaggaguaa

SEQ ID NO: 2696333 - RNA, 19 nt, Artificial Sequence
  Description of Artificial Sequence: Synthetic oligonucleotide
augaugguaaugacaacca

SEQ ID NO: 2696334 - RNA, 19 nt, Artificial Sequence
  Description of Artificial Sequence: Synthetic oligonucleotide
aaaccauaauggagacgac

SEQ ID NO: 2696335 - RNA, 19 nt, Artificial Sequence
  Description of Artificial Sequence: Synthetic oligonucleotide
cagcgcaaaaccagcagug

SEQ ID NO: 2696336 - RNA, 19 nt, Artificial Sequence
  Description of Artificial Sequence: Synthetic oligonucleotide
cagagguugagccauggga

SEQ ID NO: 2696337 - RNA, 19 nt, Artificial Sequence
  Description of Artificial Sequence: Synthetic oligonucleotide
cuuucuccagcaguuucgg

SEQ ID NO: 2696338 - RNA, 19 nt, Artificial Sequence
  Description of Artificial Sequence: Synthetic oligonucleotide
guaaggaugaagagcucug

SEQ ID NO: 2696339 - RNA, 19 nt, Artificial Sequence
  Description of Artificial Sequence: Synthetic oligonucleotide
agcagugagggguaaggau

SEQ ID NO: 2696340 - RNA, 19 nt, Artificial Sequence
  Description of Artificial Sequence: Synthetic oligonucleotide
uucgguuucucagaaguuu

SEQ ID NO: 2696341 - RNA, 19 nt, Artificial Sequence
  Description of Artificial Sequence: Synthetic oligonucleotide
cagaauccucuacuaaaug

SEQ ID NO: 2696342 - RNA, 19 nt, Artificial Sequence
  Description of Artificial Sequence: Synthetic oligonucleotide
aagccagaauccucuacua

SEQ ID NO: 2696343 - RNA, 19 nt, Artificial Sequence
  Description of Artificial Sequence: Synthetic oligonucleotide
gaaauucaagaagagcgua

SEQ ID NO: 2696344 - RNA, 19 nt, Artificial Sequence
  Description of Artificial Sequence: Synthetic oligonucleotide
aguuucgguuucucagaag

SEQ ID NO: 2696345 - RNA, 19 nt, Artificial Sequence
  Description of Artificial Sequence: Synthetic oligonucleotide
gguggcagcacaugucagg

SEQ ID NO: 2696346 - RNA, 19 nt, Artificial Sequence
  Description of Artificial Sequence: Synthetic oligonucleotide
gaugggugaguguuaaccu

SEQ ID NO: 2696347 - RNA, 19 nt, Artificial Sequence
  Description of Artificial Sequence: Synthetic oligonucleotide
uccuugauucuuucauagu

SEQ ID NO: 2696348 - RNA, 19 nt, Artificial Sequence
  Description of Artificial Sequence: Synthetic oligonucleotide
ggaccaaaagccagaaucc

SEQ ID NO: 2696349 - RNA, 19 nt, Artificial Sequence
  Description of Artificial Sequence: Synthetic oligonucleotide
ggagacgacagcaaugaug

SEQ ID NO: 2696350 - RNA, 19 nt, Artificial Sequence
  Description of Artificial Sequence: Synthetic oligonucleotide
guaaggagcaaagcagcug

SEQ ID NO: 2696351 - RNA, 19 nt, Artificial Sequence
  Description of Artificial Sequence: Synthetic oligonucleotide
uaaggaugaagagcucugu

SEQ ID NO: 2696352 - RNA, 19 nt, Artificial Sequence
  Description of Artificial Sequence: Synthetic oligonucleotide
cacgauggacagaugggug

SEQ ID NO: 2696353 - RNA, 19 nt, Artificial Sequence
  Description of Artificial Sequence: Synthetic oligonucleotide
ucauggugcagcgcaaaac

SEQ ID NO: 2696354 - RNA, 19 nt, Artificial Sequence
  Description of Artificial Sequence: Synthetic oligonucleotide
uggucaggcacagcgaccu

SEQ ID NO: 2696355 - RNA, 19 nt, Artificial Sequence
  Description of Artificial Sequence: Synthetic oligonucleotide
caagaaggcuugagaagug

SEQ ID NO: 2696356 - RNA, 19 nt, Artificial Sequence
  Description of Artificial Sequence: Synthetic oligonucleotide
gacagagguugagccaugg

SEQ ID NO: 2696357 - RNA, 19 nt, Artificial Sequence
  Description of Artificial Sequence: Synthetic oligonucleotide
auggacagaugggugagug

SEQ ID NO: 2696358 - RNA, 19 nt, Artificial Sequence
  Description of Artificial Sequence: Synthetic oligonucleotide
guauugaacagggaccaga

SEQ ID NO: 2696359 - RNA, 19 nt, Artificial Sequence
  Description of Artificial Sequence: Synthetic oligonucleotide
uugagaagugugguucaug

SEQ ID NO: 2696360 - RNA, 19 nt, Artificial Sequence
  Description of Artificial Sequence: Synthetic oligonucleotide
gaauccacgauggacagau

SEQ ID NO: 2696361 - RNA, 19 nt, Artificial Sequence
  Description of Artificial Sequence: Synthetic oligonucleotide
uucauggugcagcgcaaaa

SEQ ID NO: 2696362 - RNA, 19 nt, Artificial Sequence
  Description of Artificial Sequence: Synthetic oligonucleotide
guuaaccucuauauaggga

SEQ ID NO: 2696363 - RNA, 19 nt, Artificial Sequence
  Description of Artificial Sequence: Synthetic oligonucleotide
uucucagaaguuuccuuuu

SEQ ID NO: 2696364 - RNA, 19 nt, Artificial Sequence
  Description of Artificial Sequence: Synthetic oligonucleotide
gacgacagcaaugauggua

SEQ ID NO: 2696365 - RNA, 19 nt, Artificial Sequence
  Description of Artificial Sequence: Synthetic oligonucleotide
acgacagcaaugaugguaa

SEQ ID NO: 2696366 - RNA, 19 nt, Artificial Sequence
  Description of Artificial Sequence: Synthetic oligonucleotide
gaccucucugggcauguug

SEQ ID NO: 2696367 - RNA, 19 nt, Artificial Sequence
  Description of Artificial Sequence: Synthetic oligonucleotide
gugaguguuaaccucuaua

SEQ ID NO: 2696368 - RNA, 19 nt, Artificial Sequence
  Description of Artificial Sequence: Synthetic oligonucleotide
gugugguucauggugcagc

SEQ ID NO: 2696369 - RNA, 19 nt, Artificial Sequence
  Description of Artificial Sequence: Synthetic oligonucleotide
aagagcucuguggguccgc

SEQ ID NO: 2696370 - RNA, 19 nt, Artificial Sequence
  Description of Artificial Sequence: Synthetic oligonucleotide
uuucgguuucucagaaguu

SEQ ID NO: 2696371 - RNA, 19 nt, Artificial Sequence
  Description of Artificial Sequence: Synthetic oligonucleotide
accucauauucuuccuuga

SEQ ID NO: 2696372 - RNA, 19 nt, Artificial Sequence
  Description of Artificial Sequence: Synthetic oligonucleotide
aacccaagcagcagaaauu

SEQ ID NO: 2696373 - RNA, 19 nt, Artificial Sequence
  Description of Artificial Sequence: Synthetic oligonucleotide
aguaaggagcaaagcagcu

SEQ ID NO: 2696374 - RNA, 19 nt, Artificial Sequence
  Description of Artificial Sequence: Synthetic oligonucleotide
guucugacagagguugagc

SEQ ID NO: 2696375 - RNA, 19 nt, Artificial Sequence
  Description of Artificial Sequence: Synthetic oligonucleotide
ugguggcagcacaugucag

SEQ ID NO: 2696376 - RNA, 19 nt, Artificial Sequence
  Description of Artificial Sequence: Synthetic oligonucleotide
agagcucuguggguccgcc

SEQ ID NO: 2696377 - RNA, 19 nt, Artificial Sequence
  Description of Artificial Sequence: Synthetic oligonucleotide
cacggugguucugacagag

SEQ ID NO: 2696378 - RNA, 19 nt, Artificial Sequence
  Description of Artificial Sequence: Synthetic oligonucleotide
caaugaugguaaugacaac

SEQ ID NO: 2696379 - RNA, 19 nt, Artificial Sequence
  Description of Artificial Sequence: Synthetic oligonucleotide
agaaggcuugagaagugug

SEQ ID NO: 2696380 - RNA, 19 nt, Artificial Sequence
  Description of Artificial Sequence: Synthetic oligonucleotide
gaugguggcagcacauguc

SEQ ID NO: 2696381 - RNA, 19 nt, Artificial Sequence
  Description of Artificial Sequence: Synthetic oligonucleotide
caaccaugaggaugcugag

SEQ ID NO: 2696382 - RNA, 19 nt, Artificial Sequence
  Description of Artificial Sequence: Synthetic oligonucleotide
ggaggaguaaggagcaaag

SEQ ID NO: 2696383 - RNA, 19 nt, Artificial Sequence
  Description of Artificial Sequence: Synthetic oligonucleotide
gcaaagcagcuguggaugg

SEQ ID NO: 2696384 - RNA, 19 nt, Artificial Sequence
  Description of Artificial Sequence: Synthetic oligonucleotide
gcagugagggguaaggaug

SEQ ID NO: 2696385 - RNA, 19 nt, Artificial Sequence
  Description of Artificial Sequence: Synthetic oligonucleotide
gaccagggcgcugauguug

SEQ ID NO: 2696386 - RNA, 19 nt, Artificial Sequence
  Description of Artificial Sequence: Synthetic oligonucleotide
cgcaaaaccagcagugagg

SEQ ID NO: 2696387 - RNA, 19 nt, Artificial Sequence
  Description of Artificial Sequence: Synthetic oligonucleotide
cagcagaaaccauaaugga

SEQ ID NO: 2696388 - RNA, 19 nt, Artificial Sequence
  Description of Artificial Sequence: Synthetic oligonucleotide
ucaggaccaaaagccagaa

SEQ ID NO: 2696389 - RNA, 19 nt, Artificial Sequence
  Description of Artificial Sequence: Synthetic oligonucleotide
augaggaugcugaggacca

SEQ ID NO: 2696390 - RNA, 19 nt, Artificial Sequence
  Description of Artificial Sequence: Synthetic oligonucleotide
uggacagaugggugagugu

SEQ ID NO: 2696391 - RNA, 19 nt, Artificial Sequence
  Description of Artificial Sequence: Synthetic oligonucleotide
cacagcgaccucucugggc

SEQ ID NO: 2696392 - RNA, 19 nt, Artificial Sequence
  Description of Artificial Sequence: Synthetic oligonucleotide
agacgaccagcagaaacca

SEQ ID NO: 2696393 - RNA, 19 nt, Artificial Sequence
  Description of Artificial Sequence: Synthetic oligonucleotide
agcucagccaccucauauu

SEQ ID NO: 2696394 - RNA, 19 nt, Artificial Sequence
  Description of Artificial Sequence: Synthetic oligonucleotide
auaauggagacgacagcaa

SEQ ID NO: 2696395 - RNA, 19 nt, Artificial Sequence
  Description of Artificial Sequence: Synthetic oligonucleotide
ucccuagacuucacagagu

SEQ ID NO: 2696396 - RNA, 19 nt, Artificial Sequence
  Description of Artificial Sequence: Synthetic oligonucleotide
agccagaauccucuacuaa

SEQ ID NO: 2696397 - RNA, 19 nt, Artificial Sequence
  Description of Artificial Sequence: Synthetic oligonucleotide
accucuauauagggaggag

SEQ ID NO: 2696398 - RNA, 19 nt, Artificial Sequence
  Description of Artificial Sequence: Synthetic oligonucleotide
gaugaagagcucugugggu

SEQ ID NO: 2696399 - RNA, 19 nt, Artificial Sequence
  Description of Artificial Sequence: Synthetic oligonucleotide
uccagucacaucgcccacc

SEQ ID NO: 2696400 - RNA, 19 nt, Artificial Sequence
  Description of Artificial Sequence: Synthetic oligonucleotide
ugacagagguugagccaug

SEQ ID NO: 2696401 - RNA, 19 nt, Artificial Sequence
  Description of Artificial Sequence: Synthetic oligonucleotide
ugguucugacagagguuga

SEQ ID NO: 2696402 - RNA, 19 nt, Artificial Sequence
  Description of Artificial Sequence: Synthetic oligonucleotide
cagugagggguaaggauga

SEQ ID NO: 2696403 - RNA, 19 nt, Artificial Sequence
  Description of Artificial Sequence: Synthetic oligonucleotide
cuugauucuuucauaguuu

SEQ ID NO: 2696404 - RNA, 19 nt, Artificial Sequence
  Description of Artificial Sequence: Synthetic oligonucleotide
uaaugacaaccaugaggau

SEQ ID NO: 2696405 - RNA, 19 nt, Artificial Sequence
  Description of Artificial Sequence: Synthetic oligonucleotide
acagaugggugaguguuaa

SEQ ID NO: 2696406 - RNA, 19 nt, Artificial Sequence
  Description of Artificial Sequence: Synthetic oligonucleotide
ggagcaaagcagcugugga

SEQ ID NO: 2696407 - RNA, 19 nt, Artificial Sequence
  Description of Artificial Sequence: Synthetic oligonucleotide
gacaaccaugaggaugcug

SEQ ID NO: 2696408 - RNA, 19 nt, Artificial Sequence
  Description of Artificial Sequence: Synthetic oligonucleotide
guggguccgcccuuucucc

SEQ ID NO: 2696409 - RNA, 19 nt, Artificial Sequence
  Description of Artificial Sequence: Synthetic oligonucleotide
gcgcaaaaccagcagugag

SEQ ID NO: 2696410 - RNA, 19 nt, Artificial Sequence
  Description of Artificial Sequence: Synthetic oligonucleotide
uggaugguggcagcacaug

SEQ ID NO: 2696411 - RNA, 19 nt, Artificial Sequence
  Description of Artificial Sequence: Synthetic oligonucleotide
ggcuugagaagugugguuc

SEQ ID NO: 2696412 - RNA, 19 nt, Artificial Sequence
  Description of Artificial Sequence: Synthetic oligonucleotide
gccagaauccucuacuaaa

SEQ ID NO: 2696413 - RNA, 19 nt, Artificial Sequence
  Description of Artificial Sequence: Synthetic oligonucleotide
gggguaaggaugaagagcu

SEQ ID NO: 2696414 - RNA, 19 nt, Artificial Sequence
  Description of Artificial Sequence: Synthetic oligonucleotide
guaggagucaagaaggcuu

SEQ ID NO: 2696415 - RNA, 19 nt, Artificial Sequence
  Description of Artificial Sequence: Synthetic oligonucleotide
aaggagcaaagcagcugug

SEQ ID NO: 2696416 - RNA, 19 nt, Artificial Sequence
  Description of Artificial Sequence: Synthetic oligonucleotide
uuucuccagcaguuucggu

SEQ ID NO: 2696417 - RNA, 19 nt, Artificial Sequence
  Description of Artificial Sequence: Synthetic oligonucleotide
cuuccuugauucuuucaua

SEQ ID NO: 2696418 - RNA, 19 nt, Artificial Sequence
  Description of Artificial Sequence: Synthetic oligonucleotide
gcuccagucacaucgccca

SEQ ID NO: 2696419 - RNA, 19 nt, Artificial Sequence
  Description of Artificial Sequence: Synthetic oligonucleotide
gguucugacagagguugag

SEQ ID NO: 2696420 - RNA, 19 nt, Artificial Sequence
  Description of Artificial Sequence: Synthetic oligonucleotide
uccgcccuuucuccagcag

SEQ ID NO: 2696421 - RNA, 19 nt, Artificial Sequence
  Description of Artificial Sequence: Synthetic oligonucleotide
acgaccagcagaaaccaua

SEQ ID NO: 2696422 - RNA, 19 nt, Artificial Sequence
  Description of Artificial Sequence: Synthetic oligonucleotide
agugugguucauggugcag

SEQ ID NO: 2696423 - RNA, 19 nt, Artificial Sequence
  Description of Artificial Sequence: Synthetic oligonucleotide
ggagucaagaaggcuugag

SEQ ID NO: 2696424 - RNA, 19 nt, Artificial Sequence
  Description of Artificial Sequence: Synthetic oligonucleotide
agcgcaaaaccagcaguga

SEQ ID NO: 2696425 - RNA, 19 nt, Artificial Sequence
  Description of Artificial Sequence: Synthetic oligonucleotide
ggugcagcgcaaaaccagc

SEQ ID NO: 2696426 - RNA, 19 nt, Artificial Sequence
  Description of Artificial Sequence: Synthetic oligonucleotide
cagggcgcugauguugagg

SEQ ID NO: 2696427 - RNA, 19 nt, Artificial Sequence
  Description of Artificial Sequence: Synthetic oligonucleotide
ccauaauggagacgacagc

SEQ ID NO: 2696428 - RNA, 19 nt, Artificial Sequence
  Description of Artificial Sequence: Synthetic oligonucleotide
cagcuguggaugguggcag

SEQ ID NO: 2696429 - RNA, 19 nt, Artificial Sequence
  Description of Artificial Sequence: Synthetic oligonucleotide
gcaguuucgguuucucaga

SEQ ID NO: 2696430 - RNA, 19 nt, Artificial Sequence
  Description of Artificial Sequence: Synthetic oligonucleotide
guggcagcacaugucagga

SEQ ID NO: 2696431 - RNA, 19 nt, Artificial Sequence
  Description of Artificial Sequence: Synthetic oligonucleotide
aaaccagcagugaggggua

SEQ ID NO: 2696432 - RNA, 19 nt, Artificial Sequence
  Description of Artificial Sequence: Synthetic oligonucleotide
ccaagcagcagaaauucaa

SEQ ID NO: 2696433 - RNA, 19 nt, Artificial Sequence
  Description of Artificial Sequence: Synthetic oligonucleotide
gagcaaagcagcuguggau

SEQ ID NO: 2696434 - RNA, 19 nt, Artificial Sequence
  Description of Artificial Sequence: Synthetic oligonucleotide
cucauauucuuccuugauu

SEQ ID NO: 2696435 - RNA, 19 nt, Artificial Sequence
  Description of Artificial Sequence: Synthetic oligonucleotide
cauauucuuccuugauucu

SEQ ID NO: 2696436 - RNA, 19 nt, Artificial Sequence
  Description of Artificial Sequence: Synthetic oligonucleotide
auggugcagcgcaaaacca

SEQ ID NO: 2696437 - RNA, 19 nt, Artificial Sequence
  Description of Artificial Sequence: Synthetic oligonucleotide
gaccaaaagccagaauccu

SEQ ID NO: 2696438 - RNA, 19 nt, Artificial Sequence
  Description of Artificial Sequence: Synthetic oligonucleotide
ggcgcugauguugaggcac

SEQ ID NO: 2696439 - RNA, 19 nt, Artificial Sequence
  Description of Artificial Sequence: Synthetic oligonucleotide
gagaagugugguucauggu

SEQ ID NO: 2696440 - RNA, 19 nt, Artificial Sequence
  Description of Artificial Sequence: Synthetic oligonucleotide
guugagccaugggagcccc

SEQ ID NO: 2696441 - RNA, 19 nt, Artificial Sequence
  Description of Artificial Sequence: Synthetic oligonucleotide
auccucuacuaaauguaaa

SEQ ID NO: 2696442 - RNA, 19 nt, Artificial Sequence
  Description of Artificial Sequence: Synthetic oligonucleotide
uggagacgacagcaaugau

SEQ ID NO: 2696443 - RNA, 19 nt, Artificial Sequence
  Description of Artificial Sequence: Synthetic oligonucleotide
uggguccgcccuuucucca

SEQ ID NO: 2696444 - RNA, 19 nt, Artificial Sequence
  Description of Artificial Sequence: Synthetic oligonucleotide
ccagcagugagggguaagg

SEQ ID NO: 2696445 - RNA, 19 nt, Artificial Sequence
  Description of Artificial Sequence: Synthetic oligonucleotide
ucacggugguucugacaga

SEQ ID NO: 2696446 - RNA, 19 nt, Artificial Sequence
  Description of Artificial Sequence: Synthetic oligonucleotide
aggcuugagaagugugguu

SEQ ID NO: 2696447 - RNA, 19 nt, Artificial Sequence
  Description of Artificial Sequence: Synthetic oligonucleotide
gguaaggaugaagagcucu

SEQ ID NO: 2696448 - RNA, 19 nt, Artificial Sequence
  Description of Artificial Sequence: Synthetic oligonucleotide
gcguauugaacagggacca

SEQ ID NO: 2696449 - RNA, 19 nt, Artificial Sequence
  Description of Artificial Sequence: Synthetic oligonucleotide
uggcagcacaugucaggac

SEQ ID NO: 2696450 - RNA, 19 nt, Artificial Sequence
  Description of Artificial Sequence: Synthetic oligonucleotide
gcucagccaccucauauuc

SEQ ID NO: 2696451 - RNA, 19 nt, Artificial Sequence
  Description of Artificial Sequence: Synthetic oligonucleotide
gcuugagaagugugguuca

SEQ ID NO: 2696452 - RNA, 19 nt, Artificial Sequence
  Description of Artificial Sequence: Synthetic oligonucleotide
ggaugcugaggaccagggc

SEQ ID NO: 2696453 - RNA, 19 nt, Artificial Sequence
  Description of Artificial Sequence: Synthetic oligonucleotide
caguuucgguuucucagaa

SEQ ID NO: 2696454 - RNA, 19 nt, Artificial Sequence
  Description of Artificial Sequence: Synthetic oligonucleotide
cagaugggugaguguuaac

SEQ ID NO: 2696455 - RNA, 19 nt, Artificial Sequence
  Description of Artificial Sequence: Synthetic oligonucleotide
aauccacgauggacagaug

SEQ ID NO: 2696456 - RNA, 19 nt, Artificial Sequence
  Description of Artificial Sequence: Synthetic oligonucleotide
ccuagacuucacagaguag

SEQ ID NO: 2696457 - RNA, 19 nt, Artificial Sequence
  Description of Artificial Sequence: Synthetic oligonucleotide
gaaacccaagcagcagaaa

SEQ ID NO: 2696458 - RNA, 19 nt, Artificial Sequence
  Description of Artificial Sequence: Synthetic oligonucleotide
agagcguauugaacaggga

SEQ ID NO: 2696459 - RNA, 19 nt, Artificial Sequence
  Description of Artificial Sequence: Synthetic oligonucleotide
ucuguggguccgcccuuuc

SEQ ID NO: 2696460 - RNA, 19 nt, Artificial Sequence
  Description of Artificial Sequence: Synthetic oligonucleotide
ccucuacuaaauguaaaga

SEQ ID NO: 2696461 - RNA, 19 nt, Artificial Sequence
  Description of Artificial Sequence: Synthetic oligonucleotide
cuguggaugguggcagcac

SEQ ID NO: 2696462 - RNA, 19 nt, Artificial Sequence
  Description of Artificial Sequence: Synthetic oligonucleotide
accagcagugagggguaag

SEQ ID NO: 2696463 - RNA, 19 nt, Artificial Sequence
  Description of Artificial Sequence: Synthetic oligonucleotide
agacgacagcaaugauggu

SEQ ID NO: 2696464 - RNA, 19 nt, Artificial Sequence
  Description of Artificial Sequence: Synthetic oligonucleotide
gguugagccaugggagccc

SEQ ID NO: 2696465 - RNA, 19 nt, Artificial Sequence
  Description of Artificial Sequence: Synthetic oligonucleotide
cagccaccucauauucuuc

SEQ ID NO: 2696466 - RNA, 19 nt, Artificial Sequence
  Description of Artificial Sequence: Synthetic oligonucleotide
acggugguucugacagagg

SEQ ID NO: 2696467 - RNA, 19 nt, Artificial Sequence
  Description of Artificial Sequence: Synthetic oligonucleotide
gcacaugucaggaccaaaa

SEQ ID NO: 2696468 - RNA, 19 nt, Artificial Sequence
  Description of Artificial Sequence: Synthetic oligonucleotide
agcacaugucaggaccaaa

SEQ ID NO: 2696469 - RNA, 19 nt, Artificial Sequence
  Description of Artificial Sequence: Synthetic oligonucleotide
cccuagacuucacagagua

SEQ ID NO: 2696470 - RNA, 19 nt, Artificial Sequence
  Description of Artificial Sequence: Synthetic oligonucleotide
cgguuucucagaaguuucc

SEQ ID NO: 2696471 - RNA, 19 nt, Artificial Sequence
  Description of Artificial Sequence: Synthetic oligonucleotide
ggcuccagucacaucgccc

SEQ ID NO: 2696472 - RNA, 19 nt, Artificial Sequence
  Description of Artificial Sequence: Synthetic oligonucleotide
cugacagagguugagccau

SEQ ID NO: 2696473 - RNA, 19 nt, Artificial Sequence
  Description of Artificial Sequence: Synthetic oligonucleotide
ccuugauucuuucauaguu

SEQ ID NO: 2696474 - RNA, 19 nt, Artificial Sequence
  Description of Artificial Sequence: Synthetic oligonucleotide
aggagucaagaaggcuuga

SEQ ID NO: 2696475 - RNA, 19 nt, Artificial Sequence
  Description of Artificial Sequence: Synthetic oligonucleotide
ggaugguggcagcacaugu

SEQ ID NO: 2696476 - RNA, 19 nt, Artificial Sequence
  Description of Artificial Sequence: Synthetic oligonucleotide
gcacagcgaccucucuggg

SEQ ID NO: 2696477 - RNA, 19 nt, Artificial Sequence
  Description of Artificial Sequence: Synthetic oligonucleotide
gugguucauggugcagcgc

SEQ ID NO: 2696478 - RNA, 19 nt, Artificial Sequence
  Description of Artificial Sequence: Synthetic oligonucleotide
ugaggaccagggcgcugau

SEQ ID NO: 2696479 - RNA, 19 nt, Artificial Sequence
  Description of Artificial Sequence: Synthetic oligonucleotide
gcagcgcaaaaccagcagu

SEQ ID NO: 2696480 - RNA, 19 nt, Artificial Sequence
  Description of Artificial Sequence: Synthetic oligonucleotide
ugcugaggaccagggcgcu

SEQ ID NO: 2696481 - RNA, 19 nt, Artificial Sequence
  Description of Artificial Sequence: Synthetic oligonucleotide
gugcagcgcaaaaccagca

SEQ ID NO: 2696482 - RNA, 19 nt, Artificial Sequence
  Description of Artificial Sequence: Synthetic oligonucleotide
agcgaccucucugggcaug

SEQ ID NO: 2696483 - RNA, 19 nt, Artificial Sequence
  Description of Artificial Sequence: Synthetic oligonucleotide
gggaggaguaaggagcaaa

SEQ ID NO: 2696484 - RNA, 19 nt, Artificial Sequence
  Description of Artificial Sequence: Synthetic oligonucleotide
ugacaaccaugaggaugcu

SEQ ID NO: 2696485 - RNA, 19 nt, Artificial Sequence
  Description of Artificial Sequence: Synthetic oligonucleotide
ggguccgcccuuucuccag

SEQ ID NO: 2696486 - RNA, 19 nt, Artificial Sequence
  Description of Artificial Sequence: Synthetic oligonucleotide
aaccagcagugagggguaa

SEQ ID NO: 2696487 - RNA, 19 nt, Artificial Sequence
  Description of Artificial Sequence: Synthetic oligonucleotide
gguccgcccuuucuccagc

SEQ ID NO: 2696488 - RNA, 19 nt, Artificial Sequence
  Description of Artificial Sequence: Synthetic oligonucleotide
cucagccaccucauauucu

SEQ ID NO: 2696489 - RNA, 19 nt, Artificial Sequence
  Description of Artificial Sequence: Synthetic oligonucleotide
gguuucucagaaguuuccu

SEQ ID NO: 2696490 - RNA, 19 nt, Artificial Sequence
  Description of Artificial Sequence: Synthetic oligonucleotide
cagcagugagggguaagga

SEQ ID NO: 2696491 - RNA, 19 nt, Artificial Sequence
  Description of Artificial Sequence: Synthetic oligonucleotide
gcagcuguggaugguggca

SEQ ID NO: 2696492 - RNA, 19 nt, Artificial Sequence
  Description of Artificial Sequence: Synthetic oligonucleotide
gguaggagucaagaaggcu

SEQ ID NO: 2696493 - RNA, 19 nt, Artificial Sequence
  Description of Artificial Sequence: Synthetic oligonucleotide
cagcucagccaccucauau

SEQ ID NO: 2696494 - RNA, 19 nt, Artificial Sequence
  Description of Artificial Sequence: Synthetic oligonucleotide
ccaugaggaugcugaggac

SEQ ID NO: 2696495 - RNA, 19 nt, Artificial Sequence
  Description of Artificial Sequence: Synthetic oligonucleotide
ggacagaugggugaguguu

SEQ ID NO: 2696496 - RNA, 19 nt, Artificial Sequence
  Description of Artificial Sequence: Synthetic oligonucleotide
gcagcacaugucaggacca

SEQ ID NO: 2696497 - RNA, 19 nt, Artificial Sequence
  Description of Artificial Sequence: Synthetic oligonucleotide
gggcuccagucacaucgcc

SEQ ID NO: 2696498 - RNA, 19 nt, Artificial Sequence
  Description of Artificial Sequence: Synthetic oligonucleotide
ccagaauccucuacuaaau

SEQ ID NO: 2696499 - RNA, 19 nt, Artificial Sequence
  Description of Artificial Sequence: Synthetic oligonucleotide
gauggacagaugggugagu

SEQ ID NO: 2696500 - RNA, 19 nt, Artificial Sequence
  Description of Artificial Sequence: Synthetic oligonucleotide
agugagggguaaggaugaa

SEQ ID NO: 2696501 - RNA, 19 nt, Artificial Sequence
  Description of Artificial Sequence: Synthetic oligonucleotide
ccagucacaucgcccacca

SEQ ID NO: 2696502 - RNA, 19 nt, Artificial Sequence
  Description of Artificial Sequence: Synthetic oligonucleotide
cccguugguaggagucaag

SEQ ID NO: 2696503 - RNA, 19 nt, Artificial Sequence
  Description of Artificial Sequence: Synthetic oligonucleotide
guccgcccuuucuccagca

SEQ ID NO: 2696504 - RNA, 19 nt, Artificial Sequence
  Description of Artificial Sequence: Synthetic oligonucleotide
gaccagcagaaaccauaau

SEQ ID NO: 2696505 - RNA, 19 nt, Artificial Sequence
  Description of Artificial Sequence: Synthetic oligonucleotide
gcuguggaugguggcagca

SEQ ID NO: 2696506 - RNA, 19 nt, Artificial Sequence
  Description of Artificial Sequence: Synthetic oligonucleotide
ccguugguaggagucaaga

SEQ ID NO: 2696507 - RNA, 19 nt, Artificial Sequence
  Description of Artificial Sequence: Synthetic oligonucleotide
agggaggaguaaggagcaa

SEQ ID NO: 2696508 - RNA, 19 nt, Artificial Sequence
  Description of Artificial Sequence: Synthetic oligonucleotide
cgaccagcagaaaccauaa

SEQ ID NO: 2696509 - RNA, 19 nt, Artificial Sequence
  Description of Artificial Sequence: Synthetic oligonucleotide
cuugagaagugugguucau

SEQ ID NO: 2696510 - RNA, 19 nt, Artificial Sequence
  Description of Artificial Sequence: Synthetic oligonucleotide
cguugguaggagucaagaa

SEQ ID NO: 2696511 - RNA, 19 nt, Artificial Sequence
  Description of Artificial Sequence: Synthetic oligonucleotide
ccucuauauagggaggagu

SEQ ID NO: 2696512 - RNA, 19 nt, Artificial Sequence
  Description of Artificial Sequence: Synthetic oligonucleotide
ccagcaguuucgguuucuc

SEQ ID NO: 2696513 - RNA, 19 nt, Artificial Sequence
  Description of Artificial Sequence: Synthetic oligonucleotide
gguucauggugcagcgcaa

SEQ ID NO: 2696514 - RNA, 19 nt, Artificial Sequence
  Description of Artificial Sequence: Synthetic oligonucleotide
guggaugguggcagcacau

SEQ ID NO: 2696515 - RNA, 19 nt, Artificial Sequence
  Description of Artificial Sequence: Synthetic oligonucleotide
ccccagcucagccaccuca

SEQ ID NO: 2696516 - RNA, 19 nt, Artificial Sequence
  Description of Artificial Sequence: Synthetic oligonucleotide
caaagcagcuguggauggu

SEQ ID NO: 2696517 - RNA, 19 nt, Artificial Sequence
  Description of Artificial Sequence: Synthetic oligonucleotide
cguauugaacagggaccag

SEQ ID NO: 2696518 - RNA, 19 nt, Artificial Sequence
  Description of Artificial Sequence: Synthetic oligonucleotide
ggguaaggaugaagagcuc

SEQ ID NO: 2696519 - RNA, 19 nt, Artificial Sequence
  Description of Artificial Sequence: Synthetic oligonucleotide
cuguggguccgcccuuucu

SEQ ID NO: 2696520 - RNA, 19 nt, Artificial Sequence
  Description of Artificial Sequence: Synthetic oligonucleotide
ggugaguguuaaccucuau

SEQ ID NO: 2696521 - RNA, 19 nt, Artificial Sequence
  Description of Artificial Sequence: Synthetic oligonucleotide
cggugguucugacagaggu

SEQ ID NO: 2696522 - RNA, 19 nt, Artificial Sequence
  Description of Artificial Sequence: Synthetic oligonucleotide
cagcacaugucaggaccaa

SEQ ID NO: 2696523 - RNA, 19 nt, Artificial Sequence
  Description of Artificial Sequence: Synthetic oligonucleotide
gacgaccagcagaaaccau

SEQ ID NO: 2696524 - RNA, 19 nt, Artificial Sequence
  Description of Artificial Sequence: Synthetic oligonucleotide
gggcgcugauguugaggca

SEQ ID NO: 2696525 - RNA, 19 nt, Artificial Sequence
  Description of Artificial Sequence: Synthetic oligonucleotide
ccacgauggacagaugggu

SEQ ID NO: 2696526 - RNA, 19 nt, Artificial Sequence
  Description of Artificial Sequence: Synthetic oligonucleotide
ccucauauucuuccuugau

SEQ ID NO: 2696527 - RNA, 19 nt, Artificial Sequence
  Description of Artificial Sequence: Synthetic oligonucleotide
caggaccaaaagccagaau

SEQ ID NO: 2696528 - RNA, 19 nt, Artificial Sequence
  Description of Artificial Sequence: Synthetic oligonucleotide
ggugguucugacagagguu

SEQ ID NO: 2696529 - RNA, 19 nt, Artificial Sequence
  Description of Artificial Sequence: Synthetic oligonucleotide
ccagggcgcugauguugag

SEQ ID NO: 2696530 - RNA, 19 nt, Artificial Sequence
  Description of Artificial Sequence: Synthetic oligonucleotide
gggugaguguuaaccucua

SEQ ID NO: 2696531 - RNA, 19 nt, Artificial Sequence
  Description of Artificial Sequence: Synthetic oligonucleotide
ccgcccuuucuccagcagu

SEQ ID NO: 2696532 - RNA, 19 nt, Artificial Sequence
  Description of Artificial Sequence: Synthetic oligonucleotide
ccaccucauauucuuccuu

SEQ ID NO: 2696533 - RNA, 19 nt, Artificial Sequence
  Description of Artificial Sequence: Synthetic oligonucleotide
cccagcucagccaccucau

SEQ ID NO: 2696534 - RNA, 19 nt, Artificial Sequence
  Description of Artificial Sequence: Synthetic oligonucleotide
gcgcugauguugaggcacu

SEQ ID NO: 2696535 - RNA, 19 nt, Artificial Sequence
  Description of Artificial Sequence: Synthetic oligonucleotide
ccagcucagccaccucaua

SEQ ID NO: 2696536 - RNA, 19 nt, Artificial Sequence
  Description of Artificial Sequence: Synthetic oligonucleotide
cucuguggguccgcccuuu

SEQ ID NO: 2696537 - RNA, 19 nt, Artificial Sequence
  Description of Artificial Sequence: Synthetic oligonucleotide
ccucucugggcauguugau

SEQ ID NO: 2696538 - RNA, 19 nt, Artificial Sequence
  Description of Artificial Sequence: Synthetic oligonucleotide
cagcgaccucucugggcau

SEQ ID NO: 2696539 - RNA, 19 nt, Artificial Sequence
  Description of Artificial Sequence: Synthetic oligonucleotide
gcgaccucucugggcaugu

SEQ ID NO: 2696540 - RNA, 19 nt, Artificial Sequence
  Description of Artificial Sequence: Synthetic oligonucleotide
ggaccagggcgcugauguu

SEQ ID NO: 2696541 - RNA, 19 nt, Artificial Sequence
  Description of Artificial Sequence: Synthetic oligonucleotide
cagucacaucgcccaccau

SEQ ID NO: 2696542 - RNA, 19 nt, Artificial Sequence
  Description of Artificial Sequence: Synthetic oligonucleotide
cgcccuuucuccagcaguu

SEQ ID NO: 2696543 - RNA, 19 nt, Artificial Sequence
  Description of Artificial Sequence: Synthetic oligonucleotide
gcucuguggguccgcccuu

SEQ ID NO: 2696544 - RNA, 19 nt, Artificial Sequence
  Description of Artificial Sequence: Synthetic oligonucleotide
cgacagcaaugaugguaau

SEQ ID NO: 2696545 - RNA, 19 nt, Artificial Sequence
  Description of Artificial Sequence: Synthetic oligonucleotide
cgcugauguugaggcacuu

SEQ ID NO: 2696546 - RNA, 19 nt, Artificial Sequence
  Description of Artificial Sequence: Synthetic oligonucleotide
cgaccucucugggcauguu

SEQ ID NO: 2696547 - RNA, 19 nt, Artificial Sequence
  Description of Artificial Sequence: Synthetic oligonucleotide
aauaauuucuaucuuugac

SEQ ID NO: 2696548 - RNA, 19 nt, Artificial Sequence
  Description of Artificial Sequence: Synthetic oligonucleotide
uguucuagaaguaacuugg

SEQ ID NO: 2696549 - RNA, 19 nt, Artificial Sequence
  Description of Artificial Sequence: Synthetic oligonucleotide
ucuagaaguaacuugggcg

SEQ ID NO: 2696550 - RNA, 19 nt, Artificial Sequence
  Description of Artificial Sequence: Synthetic oligonucleotide
uauuaaauauuuccaaugc

SEQ ID NO: 2696551 - RNA, 19 nt, Artificial Sequence
  Description of Artificial Sequence: Synthetic oligonucleotide
ucaaauccaacacauaacc

SEQ ID NO: 2696552 - RNA, 19 nt, Artificial Sequence
  Description of Artificial Sequence: Synthetic oligonucleotide
uguguaaagaauauacugc

SEQ ID NO: 2696553 - RNA, 19 nt, Artificial Sequence
  Description of Artificial Sequence: Synthetic oligonucleotide
uuauggauuguauagagca

SEQ ID NO: 2696554 - RNA, 19 nt, Artificial Sequence
  Description of Artificial Sequence: Synthetic oligonucleotide
ucugcaauaauuucuaucu

SEQ ID NO: 2696555 - RNA, 19 nt, Artificial Sequence
  Description of Artificial Sequence: Synthetic oligonucleotide
aacaucgaagccccaaugc

SEQ ID NO: 2696556 - RNA, 19 nt, Artificial Sequence
  Description of Artificial Sequence: Synthetic oligonucleotide
uacuguaucaaauaacuug

SEQ ID NO: 2696557 - RNA, 19 nt, Artificial Sequence
  Description of Artificial Sequence: Synthetic oligonucleotide
aauuagguccacuucaaug

SEQ ID NO: 2696558 - RNA, 19 nt, Artificial Sequence
  Description of Artificial Sequence: Synthetic oligonucleotide
aaauauuuccaaugcaucu

SEQ ID NO: 2696559 - RNA, 19 nt, Artificial Sequence
  Description of Artificial Sequence: Synthetic oligonucleotide
aguuguauaaugcuggcag

SEQ ID NO: 2696560 - RNA, 19 nt, Artificial Sequence
  Description of Artificial Sequence: Synthetic oligonucleotide
aaaguuguauaaugcuggc

SEQ ID NO: 2696561 - RNA, 19 nt, Artificial Sequence
  Description of Artificial Sequence: Synthetic oligonucleotide
aacuugggcguuucgaacc

SEQ ID NO: 2696562 - RNA, 19 nt, Artificial Sequence
  Description of Artificial Sequence: Synthetic oligonucleotide
uuguguaaagaauauacug

SEQ ID NO: 2696563 - RNA, 19 nt, Artificial Sequence
  Description of Artificial Sequence: Synthetic oligonucleotide
uuucuauuaaauauuucca

SEQ ID NO: 2696564 - RNA, 19 nt, Artificial Sequence
  Description of Artificial Sequence: Synthetic oligonucleotide
aagaauauacugcuguucu

SEQ ID NO: 2696565 - RNA, 19 nt, Artificial Sequence
  Description of Artificial Sequence: Synthetic oligonucleotide
agaaaagccauaucuguac

SEQ ID NO: 2696566 - RNA, 19 nt, Artificial Sequence
  Description of Artificial Sequence: Synthetic oligonucleotide
uguaggacgaacuuucuag

SEQ ID NO: 2696567 - RNA, 19 nt, Artificial Sequence
  Description of Artificial Sequence: Synthetic oligonucleotide
aacuuggacauucuguuag

SEQ ID NO: 2696568 - RNA, 19 nt, Artificial Sequence
  Description of Artificial Sequence: Synthetic oligonucleotide
ucuauaucaaauccaacac

SEQ ID NO: 2696569 - RNA, 19 nt, Artificial Sequence
  Description of Artificial Sequence: Synthetic oligonucleotide
acauccuaaaucugcaacc

SEQ ID NO: 2696570 - RNA, 19 nt, Artificial Sequence
  Description of Artificial Sequence: Synthetic oligonucleotide
aucuauaucaaauccaaca

SEQ ID NO: 2696571 - RNA, 19 nt, Artificial Sequence
  Description of Artificial Sequence: Synthetic oligonucleotide
auaauuucuaucuuugacu

SEQ ID NO: 2696572 - RNA, 19 nt, Artificial Sequence
  Description of Artificial Sequence: Synthetic oligonucleotide
uauuauggauuguauagag

SEQ ID NO: 2696573 - RNA, 19 nt, Artificial Sequence
  Description of Artificial Sequence: Synthetic oligonucleotide
uauugaaaguuguauaaug

SEQ ID NO: 2696574 - RNA, 19 nt, Artificial Sequence
  Description of Artificial Sequence: Synthetic oligonucleotide
aaagaaaagcguaauuagg

SEQ ID NO: 2696575 - RNA, 19 nt, Artificial Sequence
  Description of Artificial Sequence: Synthetic oligonucleotide
gaaaagcguaauuaggucc

SEQ ID NO: 2696576 - RNA, 19 nt, Artificial Sequence
  Description of Artificial Sequence: Synthetic oligonucleotide
aauuacuguaucaaauaac

SEQ ID NO: 2696577 - RNA, 19 nt, Artificial Sequence
  Description of Artificial Sequence: Synthetic oligonucleotide
ugaaaguuguauaaugcug

SEQ ID NO: 2696578 - RNA, 19 nt, Artificial Sequence
  Description of Artificial Sequence: Synthetic oligonucleotide
uggacauucuguuagauaa

SEQ ID NO: 2696579 - RNA, 19 nt, Artificial Sequence
  Description of Artificial Sequence: Synthetic oligonucleotide
acaaccacauccuaaaucu

SEQ ID NO: 2696580 - RNA, 19 nt, Artificial Sequence
  Description of Artificial Sequence: Synthetic oligonucleotide
aaugucaucauacguauua

SEQ ID NO: 2696581 - RNA, 19 nt, Artificial Sequence
  Description of Artificial Sequence: Synthetic oligonucleotide
aguuccuuaagucuuaacu

SEQ ID NO: 2696582 - RNA, 19 nt, Artificial Sequence
  Description of Artificial Sequence: Synthetic oligonucleotide
aaagggaggauucauaauu

SEQ ID NO: 2696583 - RNA, 19 nt, Artificial Sequence
  Description of Artificial Sequence: Synthetic oligonucleotide
uguuaacucaaacucuucc

SEQ ID NO: 2696584 - RNA, 19 nt, Artificial Sequence
  Description of Artificial Sequence: Synthetic oligonucleotide
aaagaauauacugcuguuc

SEQ ID NO: 2696585 - RNA, 19 nt, Artificial Sequence
  Description of Artificial Sequence: Synthetic oligonucleotide
uuagauaauguguacacau

SEQ ID NO: 2696586 - RNA, 19 nt, Artificial Sequence
  Description of Artificial Sequence: Synthetic oligonucleotide
aucacacugaaucauauca

SEQ ID NO: 2696587 - RNA, 19 nt, Artificial Sequence
  Description of Artificial Sequence: Synthetic oligonucleotide
auuagguccacuucaaugu

SEQ ID NO: 2696588 - RNA, 19 nt, Artificial Sequence
  Description of Artificial Sequence: Synthetic oligonucleotide
acuguaucaaauaacuugg

SEQ ID NO: 2696589 - RNA, 19 nt, Artificial Sequence
  Description of Artificial Sequence: Synthetic oligonucleotide
uuaagucuuaacuucuuca

SEQ ID NO: 2696590 - RNA, 19 nt, Artificial Sequence
  Description of Artificial Sequence: Synthetic oligonucleotide
ugcuaaguacuccacaacc

SEQ ID NO: 2696591 - RNA, 19 nt, Artificial Sequence
  Description of Artificial Sequence: Synthetic oligonucleotide
uaauguguacacaucacac

SEQ ID NO: 2696592 - RNA, 19 nt, Artificial Sequence
  Description of Artificial Sequence: Synthetic oligonucleotide
aaugcuaaguacuccacaa

SEQ ID NO: 2696593 - RNA, 19 nt, Artificial Sequence
  Description of Artificial Sequence: Synthetic oligonucleotide
uucagaaaagccauaucug

SEQ ID NO: 2696594 - RNA, 19 nt, Artificial Sequence
  Description of Artificial Sequence: Synthetic oligonucleotide
uauagagcaugcaugcugc

SEQ ID NO: 2696595 - RNA, 19 nt, Artificial Sequence
  Description of Artificial Sequence: Synthetic oligonucleotide
aacucuuccacauuucuau

SEQ ID NO: 2696596 - RNA, 19 nt, Artificial Sequence
  Description of Artificial Sequence: Synthetic oligonucleotide
uucaucuauaucaaaucca

SEQ ID NO: 2696597 - RNA, 19 nt, Artificial Sequence
  Description of Artificial Sequence: Synthetic oligonucleotide
uguuagauaauguguacac

SEQ ID NO: 2696598 - RNA, 19 nt, Artificial Sequence
  Description of Artificial Sequence: Synthetic oligonucleotide
uuuguguaaagaauauacu

SEQ ID NO: 2696599 - RNA, 19 nt, Artificial Sequence
  Description of Artificial Sequence: Synthetic oligonucleotide
agaaaagcguaauuagguc

SEQ ID NO: 2696600 - RNA, 19 nt, Artificial Sequence
  Description of Artificial Sequence: Synthetic oligonucleotide
aauaacuuggacauucugu

SEQ ID NO: 2696601 - RNA, 19 nt, Artificial Sequence
  Description of Artificial Sequence: Synthetic oligonucleotide
cuucaucuauaucaaaucc

SEQ ID NO: 2696602 - RNA, 19 nt, Artificial Sequence
  Description of Artificial Sequence: Synthetic oligonucleotide
gaauauguucucuaguuga

SEQ ID NO: 2696603 - RNA, 19 nt, Artificial Sequence
  Description of Artificial Sequence: Synthetic oligonucleotide
agauaauguguacacauca

SEQ ID NO: 2696604 - RNA, 19 nt, Artificial Sequence
  Description of Artificial Sequence: Synthetic oligonucleotide
aauguguacacaucacacu

SEQ ID NO: 2696605 - RNA, 19 nt, Artificial Sequence
  Description of Artificial Sequence: Synthetic oligonucleotide
aaccacauccuaaaucugc

SEQ ID NO: 2696606 - RNA, 19 nt, Artificial Sequence
  Description of Artificial Sequence: Synthetic oligonucleotide
uuguauagagcaugcaugc

SEQ ID NO: 2696607 - RNA, 19 nt, Artificial Sequence
  Description of Artificial Sequence: Synthetic oligonucleotide
aagaaaagcguaauuaggu

SEQ ID NO: 2696608 - RNA, 19 nt, Artificial Sequence
  Description of Artificial Sequence: Synthetic oligonucleotide
gucaucauacguauuaugg

SEQ ID NO: 2696609 - RNA, 19 nt, Artificial Sequence
  Description of Artificial Sequence: Synthetic oligonucleotide
ucaacauuuguuaacucaa

SEQ ID NO: 2696610 - RNA, 19 nt, Artificial Sequence
  Description of Artificial Sequence: Synthetic oligonucleotide
auuacuguaucaaauaacu

SEQ ID NO: 2696611 - RNA, 19 nt, Artificial Sequence
  Description of Artificial Sequence: Synthetic oligonucleotide
uauacugcuguucuugcca

SEQ ID NO: 2696612 - RNA, 19 nt, Artificial Sequence
  Description of Artificial Sequence: Synthetic oligonucleotide
uguaucaaauaacuuggac

SEQ ID NO: 2696613 - RNA, 19 nt, Artificial Sequence
  Description of Artificial Sequence: Synthetic oligonucleotide
acauuuguuaacucaaacu

SEQ ID NO: 2696614 - RNA, 19 nt, Artificial Sequence
  Description of Artificial Sequence: Synthetic oligonucleotide
uuaacucaaacucuuccac

SEQ ID NO: 2696615 - RNA, 19 nt, Artificial Sequence
  Description of Artificial Sequence: Synthetic oligonucleotide
ugaauauguucucuaguug

SEQ ID NO: 2696616 - RNA, 19 nt, Artificial Sequence
  Description of Artificial Sequence: Synthetic oligonucleotide
cauucuguuagauaaugug

SEQ ID NO: 2696617 - RNA, 19 nt, Artificial Sequence
  Description of Artificial Sequence: Synthetic oligonucleotide
ugaaucauaucaacauuug

SEQ ID NO: 2696618 - RNA, 19 nt, Artificial Sequence
  Description of Artificial Sequence: Synthetic oligonucleotide
aauguccuacuguauuuuc

SEQ ID NO: 2696619 - RNA, 19 nt, Artificial Sequence
  Description of Artificial Sequence: Synthetic oligonucleotide
ucagaaaagccauaucugu

SEQ ID NO: 2696620 - RNA, 19 nt, Artificial Sequence
  Description of Artificial Sequence: Synthetic oligonucleotide
aaauaacuuggacauucug

SEQ ID NO: 2696621 - RNA, 19 nt, Artificial Sequence
  Description of Artificial Sequence: Synthetic oligonucleotide
uauguucucuaguugagga

SEQ ID NO: 2696622 - RNA, 19 nt, Artificial Sequence
  Description of Artificial Sequence: Synthetic oligonucleotide
uuuugguuccaaagggagg

SEQ ID NO: 2696623 - RNA, 19 nt, Artificial Sequence
  Description of Artificial Sequence: Synthetic oligonucleotide
ugggauacuguucuagaag

SEQ ID NO: 2696624 - RNA, 19 nt, Artificial Sequence
  Description of Artificial Sequence: Synthetic oligonucleotide
ucuugaauauguucucuag

SEQ ID NO: 2696625 - RNA, 19 nt, Artificial Sequence
  Description of Artificial Sequence: Synthetic oligonucleotide
ucauacguauuauggauug

SEQ ID NO: 2696626 - RNA, 19 nt, Artificial Sequence
  Description of Artificial Sequence: Synthetic oligonucleotide
ucuuguaggacgaacuuuc

SEQ ID NO: 2696627 - RNA, 19 nt, Artificial Sequence
  Description of Artificial Sequence: Synthetic oligonucleotide
aaucauaucaacauuuguu

SEQ ID NO: 2696628 - RNA, 19 nt, Artificial Sequence
  Description of Artificial Sequence: Synthetic oligonucleotide
auauuuccaaugcaucuuc

SEQ ID NO: 2696629 - RNA, 19 nt, Artificial Sequence
  Description of Artificial Sequence: Synthetic oligonucleotide
ucugcaaccacuuuauuuu

SEQ ID NO: 2696630 - RNA, 19 nt, Artificial Sequence
  Description of Artificial Sequence: Synthetic oligonucleotide
aaugcuggcaggucauauc

SEQ ID NO: 2696631 - RNA, 19 nt, Artificial Sequence
  Description of Artificial Sequence: Synthetic oligonucleotide
aucaacauuuguuaacuca

SEQ ID NO: 2696632 - RNA, 19 nt, Artificial Sequence
  Description of Artificial Sequence: Synthetic oligonucleotide
ucuaguugaggauuugugu

SEQ ID NO: 2696633 - RNA, 19 nt, Artificial Sequence
  Description of Artificial Sequence: Synthetic oligonucleotide
uuaaugucaucauacguau

SEQ ID NO: 2696634 - RNA, 19 nt, Artificial Sequence
  Description of Artificial Sequence: Synthetic oligonucleotide
uuuguuaacucaaacucuu

SEQ ID NO: 2696635 - RNA, 19 nt, Artificial Sequence
  Description of Artificial Sequence: Synthetic oligonucleotide
ugaggauuuguguaaagaa

SEQ ID NO: 2696636 - RNA, 19 nt, Artificial Sequence
  Description of Artificial Sequence: Synthetic oligonucleotide
cauaucaacauuuguuaac

SEQ ID NO: 2696637 - RNA, 19 nt, Artificial Sequence
  Description of Artificial Sequence: Synthetic oligonucleotide
uaauuucuaucuuugacuu

SEQ ID NO: 2696638 - RNA, 19 nt, Artificial Sequence
  Description of Artificial Sequence: Synthetic oligonucleotide
auaauguguacacaucaca

SEQ ID NO: 2696639 - RNA, 19 nt, Artificial Sequence
  Description of Artificial Sequence: Synthetic oligonucleotide
caugcaugcugcaaugugg

SEQ ID NO: 2696640 - RNA, 19 nt, Artificial Sequence
  Description of Artificial Sequence: Synthetic oligonucleotide
auucauaauuacuguauca

SEQ ID NO: 2696641 - RNA, 19 nt, Artificial Sequence
  Description of Artificial Sequence: Synthetic oligonucleotide
aucauaucaacauuuguua

SEQ ID NO: 2696642 - RNA, 19 nt, Artificial Sequence
  Description of Artificial Sequence: Synthetic oligonucleotide
uugacuuuccauucugcag

SEQ ID NO: 2696643 - RNA, 19 nt, Artificial Sequence
  Description of Artificial Sequence: Synthetic oligonucleotide
gaauauacugcuguucuug

SEQ ID NO: 2696644 - RNA, 19 nt, Artificial Sequence
  Description of Artificial Sequence: Synthetic oligonucleotide
ucaucauacguauuaugga

SEQ ID NO: 2696645 - RNA, 19 nt, Artificial Sequence
  Description of Artificial Sequence: Synthetic oligonucleotide
auaauuacuguaucaaaua

SEQ ID NO: 2696646 - RNA, 19 nt, Artificial Sequence
  Description of Artificial Sequence: Synthetic oligonucleotide
uucuagaaguaacuugggc

SEQ ID NO: 2696647 - RNA, 19 nt, Artificial Sequence
  Description of Artificial Sequence: Synthetic oligonucleotide
uccuaaaucugcaaccacu

SEQ ID NO: 2696648 - RNA, 19 nt, Artificial Sequence
  Description of Artificial Sequence: Synthetic oligonucleotide
uugaauauguucucuaguu

SEQ ID NO: 2696649 - RNA, 19 nt, Artificial Sequence
  Description of Artificial Sequence: Synthetic oligonucleotide
uucuguuagauaaugugua

SEQ ID NO: 2696650 - RNA, 19 nt, Artificial Sequence
  Description of Artificial Sequence: Synthetic oligonucleotide
aacccugcuccuaacaucg

SEQ ID NO: 2696651 - RNA, 19 nt, Artificial Sequence
  Description of Artificial Sequence: Synthetic oligonucleotide
auauacugcuguucuugcc

SEQ ID NO: 2696652 - RNA, 19 nt, Artificial Sequence
  Description of Artificial Sequence: Synthetic oligonucleotide
aaaagccauaucuguaccu

SEQ ID NO: 2696653 - RNA, 19 nt, Artificial Sequence
  Description of Artificial Sequence: Synthetic oligonucleotide
uuugguuccaaagggagga

SEQ ID NO: 2696654 - RNA, 19 nt, Artificial Sequence
  Description of Artificial Sequence: Synthetic oligonucleotide
augcuggcaggucauaucg

SEQ ID NO: 2696655 - RNA, 19 nt, Artificial Sequence
  Description of Artificial Sequence: Synthetic oligonucleotide
aggacgaacuuucuaguuc

SEQ ID NO: 2696656 - RNA, 19 nt, Artificial Sequence
  Description of Artificial Sequence: Synthetic oligonucleotide
uucauaauuacuguaucaa

SEQ ID NO: 2696657 - RNA, 19 nt, Artificial Sequence
  Description of Artificial Sequence: Synthetic oligonucleotide
auuguauagagcaugcaug

SEQ ID NO: 2696658 - RNA, 19 nt, Artificial Sequence
  Description of Artificial Sequence: Synthetic oligonucleotide
auaacuuggacauucuguu

SEQ ID NO: 2696659 - RNA, 19 nt, Artificial Sequence
  Description of Artificial Sequence: Synthetic oligonucleotide
guucuugccauucccaaag

SEQ ID NO: 2696660 - RNA, 19 nt, Artificial Sequence
  Description of Artificial Sequence: Synthetic oligonucleotide
ucuuugacuuuccauucug

SEQ ID NO: 2696661 - RNA, 19 nt, Artificial Sequence
  Description of Artificial Sequence: Synthetic oligonucleotide
auuauggauuguauagagc

SEQ ID NO: 2696662 - RNA, 19 nt, Artificial Sequence
  Description of Artificial Sequence: Synthetic oligonucleotide
gauucauaauuacuguauc

SEQ ID NO: 2696663 - RNA, 19 nt, Artificial Sequence
  Description of Artificial Sequence: Synthetic oligonucleotide
aaagcagucuucagaaaag

SEQ ID NO: 2696664 - RNA, 19 nt, Artificial Sequence
  Description of Artificial Sequence: Synthetic oligonucleotide
guauagagcaugcaugcug

SEQ ID NO: 2696665 - RNA, 19 nt, Artificial Sequence
  Description of Artificial Sequence: Synthetic oligonucleotide
uggauuguauagagcaugc

SEQ ID NO: 2696666 - RNA, 19 nt, Artificial Sequence
  Description of Artificial Sequence: Synthetic oligonucleotide
auaucaacauuuguuaacu

SEQ ID NO: 2696667 - RNA, 19 nt, Artificial Sequence
  Description of Artificial Sequence: Synthetic oligonucleotide
aaaagcguaauuaggucca

SEQ ID NO: 2696668 - RNA, 19 nt, Artificial Sequence
  Description of Artificial Sequence: Synthetic oligonucleotide
aucaaauccaacacauaac

SEQ ID NO: 2696669 - RNA, 19 nt, Artificial Sequence
  Description of Artificial Sequence: Synthetic oligonucleotide
uuccuuaagucuuaacuuc

SEQ ID NO: 2696670 - RNA, 19 nt, Artificial Sequence
  Description of Artificial Sequence: Synthetic oligonucleotide
ucauaauuacuguaucaaa

SEQ ID NO: 2696671 - RNA, 19 nt, Artificial Sequence
  Description of Artificial Sequence: Synthetic oligonucleotide
caaauccaacacauaaccc

SEQ ID NO: 2696672 - RNA, 19 nt, Artificial Sequence
  Description of Artificial Sequence: Synthetic oligonucleotide
ugcaauaauuucuaucuuu

SEQ ID NO: 2696673 - RNA, 19 nt, Artificial Sequence
  Description of Artificial Sequence: Synthetic oligonucleotide
uaagucuuaacuucuucau

SEQ ID NO: 2696674 - RNA, 19 nt, Artificial Sequence
  Description of Artificial Sequence: Synthetic oligonucleotide
guuguauaaugcuggcagg

SEQ ID NO: 2696675 - RNA, 19 nt, Artificial Sequence
  Description of Artificial Sequence: Synthetic oligonucleotide
ucuaucuuugacuuuccau

SEQ ID NO: 2696676 - RNA, 19 nt, Artificial Sequence
  Description of Artificial Sequence: Synthetic oligonucleotide
uacuguucuagaaguaacu

SEQ ID NO: 2696677 - RNA, 19 nt, Artificial Sequence
  Description of Artificial Sequence: Synthetic oligonucleotide
uucgaacccauccacuucu

SEQ ID NO: 2696678 - RNA, 19 nt, Artificial Sequence
  Description of Artificial Sequence: Synthetic oligonucleotide
ucauaucaacauuuguuaa

SEQ ID NO: 2696679 - RNA, 19 nt, Artificial Sequence
  Description of Artificial Sequence: Synthetic oligonucleotide
uucaauguccuacuguauu

SEQ ID NO: 2696680 - RNA, 19 nt, Artificial Sequence
  Description of Artificial Sequence: Synthetic oligonucleotide
caugcugcaauguggggcc

SEQ ID NO: 2696681 - RNA, 19 nt, Artificial Sequence
  Description of Artificial Sequence: Synthetic oligonucleotide
cuaaguacuccacaaccac

SEQ ID NO: 2696682 - RNA, 19 nt, Artificial Sequence
  Description of Artificial Sequence: Synthetic oligonucleotide
agggaggauucauaauuac

SEQ ID NO: 2696683 - RNA, 19 nt, Artificial Sequence
  Description of Artificial Sequence: Synthetic oligonucleotide
uccacauuucuauuaaaua

SEQ ID NO: 2696684 - RNA, 19 nt, Artificial Sequence
  Description of Artificial Sequence: Synthetic oligonucleotide
cauaucuguaccuuuauua

SEQ ID NO: 2696685 - RNA, 19 nt, Artificial Sequence
  Description of Artificial Sequence: Synthetic oligonucleotide
ucuguuagauaauguguac

SEQ ID NO: 2696686 - RNA, 19 nt, Artificial Sequence
  Description of Artificial Sequence: Synthetic oligonucleotide
uccuuaagucuuaacuucu

SEQ ID NO: 2696687 - RNA, 19 nt, Artificial Sequence
  Description of Artificial Sequence: Synthetic oligonucleotide
ugucaucauacguauuaug

SEQ ID NO: 2696688 - RNA, 19 nt, Artificial Sequence
  Description of Artificial Sequence: Synthetic oligonucleotide
aagccccaaugcuaaguac

SEQ ID NO: 2696689 - RNA, 19 nt, Artificial Sequence
  Description of Artificial Sequence: Synthetic oligonucleotide
cguauuauggauuguauag

SEQ ID NO: 2696690 - RNA, 19 nt, Artificial Sequence
  Description of Artificial Sequence: Synthetic oligonucleotide
ggaggauucauaauuacug

SEQ ID NO: 2696691 - RNA, 19 nt, Artificial Sequence
  Description of Artificial Sequence: Synthetic oligonucleotide
uucuaguuccuuaagucuu

SEQ ID NO: 2696692 - RNA, 19 nt, Artificial Sequence
  Description of Artificial Sequence: Synthetic oligonucleotide
guuaacucaaacucuucca

SEQ ID NO: 2696693 - RNA, 19 nt, Artificial Sequence
  Description of Artificial Sequence: Synthetic oligonucleotide
uaucuuugacuuuccauuc

SEQ ID NO: 2696694 - RNA, 19 nt, Artificial Sequence
  Description of Artificial Sequence: Synthetic oligonucleotide
gacauucuguuagauaaug

SEQ ID NO: 2696695 - RNA, 19 nt, Artificial Sequence
  Description of Artificial Sequence: Synthetic oligonucleotide
acuugggcguuucgaaccc

SEQ ID NO: 2696696 - RNA, 19 nt, Artificial Sequence
  Description of Artificial Sequence: Synthetic oligonucleotide
uaacaucgaagccccaaug

SEQ ID NO: 2696697 - RNA, 19 nt, Artificial Sequence
  Description of Artificial Sequence: Synthetic oligonucleotide
auucuguuagauaaugugu

SEQ ID NO: 2696698 - RNA, 19 nt, Artificial Sequence
  Description of Artificial Sequence: Synthetic oligonucleotide
cuucagaaaagccauaucu

SEQ ID NO: 2696699 - RNA, 19 nt, Artificial Sequence
  Description of Artificial Sequence: Synthetic oligonucleotide
augcuaaguacuccacaac

SEQ ID NO: 2696700 - RNA, 19 nt, Artificial Sequence
  Description of Artificial Sequence: Synthetic oligonucleotide
uccacaaccacauccuaaa

SEQ ID NO: 2696701 - RNA, 19 nt, Artificial Sequence
  Description of Artificial Sequence: Synthetic oligonucleotide
uagauaauguguacacauc

SEQ ID NO: 2696702 - RNA, 19 nt, Artificial Sequence
  Description of Artificial Sequence: Synthetic oligonucleotide
uugaggauuuguguaaaga

SEQ ID NO: 2696703 - RNA, 19 nt, Artificial Sequence
  Description of Artificial Sequence: Synthetic oligonucleotide
gaagcucugcaauaauuuc

SEQ ID NO: 2696704 - RNA, 19 nt, Artificial Sequence
  Description of Artificial Sequence: Synthetic oligonucleotide
gauaauguguacacaucac

SEQ ID NO: 2696705 - RNA, 19 nt, Artificial Sequence
  Description of Artificial Sequence: Synthetic oligonucleotide
cuccuaacaucgaagcccc

SEQ ID NO: 2696706 - RNA, 19 nt, Artificial Sequence
  Description of Artificial Sequence: Synthetic oligonucleotide
agcagucuucagaaaagcc

SEQ ID NO: 2696707 - RNA, 19 nt, Artificial Sequence
  Description of Artificial Sequence: Synthetic oligonucleotide
cuuugacuuuccauucugc

SEQ ID NO: 2696708 - RNA, 19 nt, Artificial Sequence
  Description of Artificial Sequence: Synthetic oligonucleotide
auggauuguauagagcaug

SEQ ID NO: 2696709 - RNA, 19 nt, Artificial Sequence
  Description of Artificial Sequence: Synthetic oligonucleotide
cacauccuaaaucugcaac

SEQ ID NO: 2696710 - RNA, 19 nt, Artificial Sequence
  Description of Artificial Sequence: Synthetic oligonucleotide
uauuuccaaugcaucuuca

SEQ ID NO: 2696711 - RNA, 19 nt, Artificial Sequence
  Description of Artificial Sequence: Synthetic oligonucleotide
uacguauuauggauuguau

SEQ ID NO: 2696712 - RNA, 19 nt, Artificial Sequence
  Description of Artificial Sequence: Synthetic oligonucleotide
acaucgaagccccaaugcu

SEQ ID NO: 2696713 - RNA, 19 nt, Artificial Sequence
  Description of Artificial Sequence: Synthetic oligonucleotide
gauuguauagagcaugcau

SEQ ID NO: 2696714 - RNA, 19 nt, Artificial Sequence
  Description of Artificial Sequence: Synthetic oligonucleotide
uuguauaaugcuggcaggu

SEQ ID NO: 2696715 - RNA, 19 nt, Artificial Sequence
  Description of Artificial Sequence: Synthetic oligonucleotide
aucugcaaccacuuuauuu

SEQ ID NO: 2696716 - RNA, 19 nt, Artificial Sequence
  Description of Artificial Sequence: Synthetic oligonucleotide
aaguaacuugggcguuucg

SEQ ID NO: 2696717 - RNA, 19 nt, Artificial Sequence
  Description of Artificial Sequence: Synthetic oligonucleotide
cuuaagucuuaacuucuuc

SEQ ID NO: 2696718 - RNA, 19 nt, Artificial Sequence
  Description of Artificial Sequence: Synthetic oligonucleotide
uuucuaucuuugacuuucc

SEQ ID NO: 2696719 - RNA, 19 nt, Artificial Sequence
  Description of Artificial Sequence: Synthetic oligonucleotide
uauggauuguauagagcau

SEQ ID NO: 2696720 - RNA, 19 nt, Artificial Sequence
  Description of Artificial Sequence: Synthetic oligonucleotide
ugcuccuaacaucgaagcc

SEQ ID NO: 2696721 - RNA, 19 nt, Artificial Sequence
  Description of Artificial Sequence: Synthetic oligonucleotide
ggacgaacuuucuaguucc

SEQ ID NO: 2696722 - RNA, 19 nt, Artificial Sequence
  Description of Artificial Sequence: Synthetic oligonucleotide
gauacuguucuagaaguaa

SEQ ID NO: 2696723 - RNA, 19 nt, Artificial Sequence
  Description of Artificial Sequence: Synthetic oligonucleotide
cauaauuacuguaucaaau

SEQ ID NO: 2696724 - RNA, 19 nt, Artificial Sequence
  Description of Artificial Sequence: Synthetic oligonucleotide
ucaauguccuacuguauuu

SEQ ID NO: 2696725 - RNA, 19 nt, Artificial Sequence
  Description of Artificial Sequence: Synthetic oligonucleotide
cacaaccacauccuaaauc

SEQ ID NO: 2696726 - RNA, 19 nt, Artificial Sequence
  Description of Artificial Sequence: Synthetic oligonucleotide
acugaaucauaucaacauu

SEQ ID NO: 2696727 - RNA, 19 nt, Artificial Sequence
  Description of Artificial Sequence: Synthetic oligonucleotide
caauguggggccugguggg

SEQ ID NO: 2696728 - RNA, 19 nt, Artificial Sequence
  Description of Artificial Sequence: Synthetic oligonucleotide
ugcaauguggggccuggug

SEQ ID NO: 2696729 - RNA, 19 nt, Artificial Sequence
  Description of Artificial Sequence: Synthetic oligonucleotide
uuacuguaucaaauaacuu

SEQ ID NO: 2696730 - RNA, 19 nt, Artificial Sequence
  Description of Artificial Sequence: Synthetic oligonucleotide
ucuucagaaaagccauauc

SEQ ID NO: 2696731 - RNA, 19 nt, Artificial Sequence
  Description of Artificial Sequence: Synthetic oligonucleotide
aaagcguaauuagguccac

SEQ ID NO: 2696732 - RNA, 19 nt, Artificial Sequence
  Description of Artificial Sequence: Synthetic oligonucleotide
uucuugaauauguucucua

SEQ ID NO: 2696733 - RNA, 19 nt, Artificial Sequence
  Description of Artificial Sequence: Synthetic oligonucleotide
ucaaacucuuccacauuuc

SEQ ID NO: 2696734 - RNA, 19 nt, Artificial Sequence
  Description of Artificial Sequence: Synthetic oligonucleotide
aauuucuaucuuugacuuu

SEQ ID NO: 2696735 - RNA, 19 nt, Artificial Sequence
  Description of Artificial Sequence: Synthetic oligonucleotide
aaagccauaucuguaccuu

SEQ ID NO: 2696736 - RNA, 19 nt, Artificial Sequence
  Description of Artificial Sequence: Synthetic oligonucleotide
uucuaucuuugacuuucca

SEQ ID NO: 2696737 - RNA, 19 nt, Artificial Sequence
  Description of Artificial Sequence: Synthetic oligonucleotide
gaacuuucuaguuccuuaa

SEQ ID NO: 2696738 - RNA, 19 nt, Artificial Sequence
  Description of Artificial Sequence: Synthetic oligonucleotide
uaacuugggcguuucgaac

SEQ ID NO: 2696739 - RNA, 19 nt, Artificial Sequence
  Description of Artificial Sequence: Synthetic oligonucleotide
aggauucauaauuacugua

SEQ ID NO: 2696740 - RNA, 19 nt, Artificial Sequence
  Description of Artificial Sequence: Synthetic oligonucleotide
cuaguugaggauuugugua

SEQ ID NO: 2696741 - RNA, 19 nt, Artificial Sequence
  Description of Artificial Sequence: Synthetic oligonucleotide
auaacccugcuccuaacau

SEQ ID NO: 2696742 - RNA, 19 nt, Artificial Sequence
  Description of Artificial Sequence: Synthetic oligonucleotide
uguucucuaguugaggauu

SEQ ID NO: 2696743 - RNA, 19 nt, Artificial Sequence
  Description of Artificial Sequence: Synthetic oligonucleotide
aaguuguauaaugcuggca

SEQ ID NO: 2696744 - RNA, 19 nt, Artificial Sequence
  Description of Artificial Sequence: Synthetic oligonucleotide
gucauaucgaagcucugca

SEQ ID NO: 2696745 - RNA, 19 nt, Artificial Sequence
  Description of Artificial Sequence: Synthetic oligonucleotide
uguccuacuguauuuucuu

SEQ ID NO: 2696746 - RNA, 19 nt, Artificial Sequence
  Description of Artificial Sequence: Synthetic oligonucleotide
uuagguccacuucaauguc

SEQ ID NO: 2696747 - RNA, 19 nt, Artificial Sequence
  Description of Artificial Sequence: Synthetic oligonucleotide
aggauuuguguaaagaaua

SEQ ID NO: 2696748 - RNA, 19 nt, Artificial Sequence
  Description of Artificial Sequence: Synthetic oligonucleotide
aguaacuugggcguuucga

SEQ ID NO: 2696749 - RNA, 19 nt, Artificial Sequence
  Description of Artificial Sequence: Synthetic oligonucleotide
ucuaguuccuuaagucuua

SEQ ID NO: 2696750 - RNA, 19 nt, Artificial Sequence
  Description of Artificial Sequence: Synthetic oligonucleotide
uaucuguaccuuuauuauu

SEQ ID NO: 2696751 - RNA, 19 nt, Artificial Sequence
  Description of Artificial Sequence: Synthetic oligonucleotide
cuagaaguaacuugggcgu

SEQ ID NO: 2696752 - RNA, 19 nt, Artificial Sequence
  Description of Artificial Sequence: Synthetic oligonucleotide
auuuccaaugcaucuucau

SEQ ID NO: 2696753 - RNA, 19 nt, Artificial Sequence
  Description of Artificial Sequence: Synthetic oligonucleotide
guugaggauuuguguaaag

SEQ ID NO: 2696754 - RNA, 19 nt, Artificial Sequence
  Description of Artificial Sequence: Synthetic oligonucleotide
uuucgaacccauccacuuc

SEQ ID NO: 2696755 - RNA, 19 nt, Artificial Sequence
  Description of Artificial Sequence: Synthetic oligonucleotide
uccuacuguauuuucuuuu

SEQ ID NO: 2696756 - RNA, 19 nt, Artificial Sequence
  Description of Artificial Sequence: Synthetic oligonucleotide
acguauuauggauuguaua

SEQ ID NO: 2696757 - RNA, 19 nt, Artificial Sequence
  Description of Artificial Sequence: Synthetic oligonucleotide
augcaugcugcaauguggg

SEQ ID NO: 2696758 - RNA, 19 nt, Artificial Sequence
  Description of Artificial Sequence: Synthetic oligonucleotide
aucuguaccuuuauuauuu

SEQ ID NO: 2696759 - RNA, 19 nt, Artificial Sequence
  Description of Artificial Sequence: Synthetic oligonucleotide
guauuauggauuguauaga

SEQ ID NO: 2696760 - RNA, 19 nt, Artificial Sequence
  Description of Artificial Sequence: Synthetic oligonucleotide
uaucaacauuuguuaacuc

SEQ ID NO: 2696761 - RNA, 19 nt, Artificial Sequence
  Description of Artificial Sequence: Synthetic oligonucleotide
ucauaucgaagcucugcaa

SEQ ID NO: 2696762 - RNA, 19 nt, Artificial Sequence
  Description of Artificial Sequence: Synthetic oligonucleotide
acauaacccugcuccuaac

SEQ ID NO: 2696763 - RNA, 19 nt, Artificial Sequence
  Description of Artificial Sequence: Synthetic oligonucleotide
auaucgaagcucugcaaua

SEQ ID NO: 2696764 - RNA, 19 nt, Artificial Sequence
  Description of Artificial Sequence: Synthetic oligonucleotide
uccaaagggaggauucaua

SEQ ID NO: 2696765 - RNA, 19 nt, Artificial Sequence
  Description of Artificial Sequence: Synthetic oligonucleotide
aguacuccacaaccacauc

SEQ ID NO: 2696766 - RNA, 19 nt, Artificial Sequence
  Description of Artificial Sequence: Synthetic oligonucleotide
guucuagaaguaacuuggg

SEQ ID NO: 2696767 - RNA, 19 nt, Artificial Sequence
  Description of Artificial Sequence: Synthetic oligonucleotide
uggugggauacuguucuag

SEQ ID NO: 2696768 - RNA, 19 nt, Artificial Sequence
  Description of Artificial Sequence: Synthetic oligonucleotide
cuaucuuugacuuuccauu

SEQ ID NO: 2696769 - RNA, 19 nt, Artificial Sequence
  Description of Artificial Sequence: Synthetic oligonucleotide
caauaauuucuaucuuuga

SEQ ID NO: 2696770 - RNA, 19 nt, Artificial Sequence
  Description of Artificial Sequence: Synthetic oligonucleotide
guaacuugggcguuucgaa

SEQ ID NO: 2696771 - RNA, 19 nt, Artificial Sequence
  Description of Artificial Sequence: Synthetic oligonucleotide
uguucuugccauucccaaa

SEQ ID NO: 2696772 - RNA, 19 nt, Artificial Sequence
  Description of Artificial Sequence: Synthetic oligonucleotide
uuggacauucuguuagaua

SEQ ID NO: 2696773 - RNA, 19 nt, Artificial Sequence
  Description of Artificial Sequence: Synthetic oligonucleotide
uaucgaagcucugcaauaa

SEQ ID NO: 2696774 - RNA, 19 nt, Artificial Sequence
  Description of Artificial Sequence: Synthetic oligonucleotide
uaacccugcuccuaacauc

SEQ ID NO: 2696775 - RNA, 19 nt, Artificial Sequence
  Description of Artificial Sequence: Synthetic oligonucleotide
uguauaaugcuggcagguc

SEQ ID NO: 2696776 - RNA, 19 nt, Artificial Sequence
  Description of Artificial Sequence: Synthetic oligonucleotide
gaggauucauaauuacugu

SEQ ID NO: 2696777 - RNA, 19 nt, Artificial Sequence
  Description of Artificial Sequence: Synthetic oligonucleotide
uuguaggacgaacuuucua

SEQ ID NO: 2696778 - RNA, 19 nt, Artificial Sequence
  Description of Artificial Sequence: Synthetic oligonucleotide
ucucuaguugaggauuugu

SEQ ID NO: 2696779 - RNA, 19 nt, Artificial Sequence
  Description of Artificial Sequence: Synthetic oligonucleotide
auacguauuauggauugua

SEQ ID NO: 2696780 - RNA, 19 nt, Artificial Sequence
  Description of Artificial Sequence: Synthetic oligonucleotide
guuagauaauguguacaca

SEQ ID NO: 2696781 - RNA, 19 nt, Artificial Sequence
  Description of Artificial Sequence: Synthetic oligonucleotide
uguauagagcaugcaugcu

SEQ ID NO: 2696782 - RNA, 19 nt, Artificial Sequence
  Description of Artificial Sequence: Synthetic oligonucleotide
aagccauaucuguaccuuu

SEQ ID NO: 2696783 - RNA, 19 nt, Artificial Sequence
  Description of Artificial Sequence: Synthetic oligonucleotide
guuccuuaagucuuaacuu

SEQ ID NO: 2696784 - RNA, 19 nt, Artificial Sequence
  Description of Artificial Sequence: Synthetic oligonucleotide
aagggaggauucauaauua

SEQ ID NO: 2696785 - RNA, 19 nt, Artificial Sequence
  Description of Artificial Sequence: Synthetic oligonucleotide
acuuggacauucuguuaga

SEQ ID NO: 2696786 - RNA, 19 nt, Artificial Sequence
  Description of Artificial Sequence: Synthetic oligonucleotide
cugaaucauaucaacauuu

SEQ ID NO: 2696787 - RNA, 19 nt, Artificial Sequence
  Description of Artificial Sequence: Synthetic oligonucleotide
uaacuuggacauucuguua

SEQ ID NO: 2696788 - RNA, 19 nt, Artificial Sequence
  Description of Artificial Sequence: Synthetic oligonucleotide
agaauauacugcuguucuu

SEQ ID NO: 2696789 - RNA, 19 nt, Artificial Sequence
  Description of Artificial Sequence: Synthetic oligonucleotide
acccauccacuucuuguag

SEQ ID NO: 2696790 - RNA, 19 nt, Artificial Sequence
  Description of Artificial Sequence: Synthetic oligonucleotide
caucauacguauuauggau

SEQ ID NO: 2696791 - RNA, 19 nt, Artificial Sequence
  Description of Artificial Sequence: Synthetic oligonucleotide
caucacacugaaucauauc

SEQ ID NO: 2696792 - RNA, 19 nt, Artificial Sequence
  Description of Artificial Sequence: Synthetic oligonucleotide
cuguuagauaauguguaca

SEQ ID NO: 2696793 - RNA, 19 nt, Artificial Sequence
  Description of Artificial Sequence: Synthetic oligonucleotide
gaagccccaaugcuaagua

SEQ ID NO: 2696794 - RNA, 19 nt, Artificial Sequence
  Description of Artificial Sequence: Synthetic oligonucleotide
auguucucuaguugaggau

SEQ ID NO: 2696795 - RNA, 19 nt, Artificial Sequence
  Description of Artificial Sequence: Synthetic oligonucleotide
uaggacgaacuuucuaguu

SEQ ID NO: 2696796 - RNA, 19 nt, Artificial Sequence
  Description of Artificial Sequence: Synthetic oligonucleotide
uguacacaucacacugaau

SEQ ID NO: 2696797 - RNA, 19 nt, Artificial Sequence
  Description of Artificial Sequence: Synthetic oligonucleotide
uucuuguaggacgaacuuu

SEQ ID NO: 2696798 - RNA, 19 nt, Artificial Sequence
  Description of Artificial Sequence: Synthetic oligonucleotide
acauucuguuagauaaugu

SEQ ID NO: 2696799 - RNA, 19 nt, Artificial Sequence
  Description of Artificial Sequence: Synthetic oligonucleotide
ggucauaucgaagcucugc

SEQ ID NO: 2696800 - RNA, 19 nt, Artificial Sequence
  Description of Artificial Sequence: Synthetic oligonucleotide
caaugcuaaguacuccaca

SEQ ID NO: 2696801 - RNA, 19 nt, Artificial Sequence
  Description of Artificial Sequence: Synthetic oligonucleotide
agccccaaugcuaaguacu

SEQ ID NO: 2696802 - RNA, 19 nt, Artificial Sequence
  Description of Artificial Sequence: Synthetic oligonucleotide
gggcguuucgaacccaucc

SEQ ID NO: 2696803 - RNA, 19 nt, Artificial Sequence
  Description of Artificial Sequence: Synthetic oligonucleotide
cuugaauauguucucuagu

SEQ ID NO: 2696804 - RNA, 19 nt, Artificial Sequence
  Description of Artificial Sequence: Synthetic oligonucleotide
cauccuaaaucugcaacca

SEQ ID NO: 2696805 - RNA, 19 nt, Artificial Sequence
  Description of Artificial Sequence: Synthetic oligonucleotide
auacugcuguucuugccau

SEQ ID NO: 2696806 - RNA, 19 nt, Artificial Sequence
  Description of Artificial Sequence: Synthetic oligonucleotide
gcagucuucagaaaagcca

SEQ ID NO: 2696807 - RNA, 19 nt, Artificial Sequence
  Description of Artificial Sequence: Synthetic oligonucleotide
aaucugcaaccacuuuauu

SEQ ID NO: 2696808 - RNA, 19 nt, Artificial Sequence
  Description of Artificial Sequence: Synthetic oligonucleotide
gaggauuuguguaaagaau

SEQ ID NO: 2696809 - RNA, 19 nt, Artificial Sequence
  Description of Artificial Sequence: Synthetic oligonucleotide
cauaacccugcuccuaaca

SEQ ID NO: 2696810 - RNA, 19 nt, Artificial Sequence
  Description of Artificial Sequence: Synthetic oligonucleotide
acacaucacacugaaucau

SEQ ID NO: 2696811 - RNA, 19 nt, Artificial Sequence
  Description of Artificial Sequence: Synthetic oligonucleotide
accacauccuaaaucugca

SEQ ID NO: 2696812 - RNA, 19 nt, Artificial Sequence
  Description of Artificial Sequence: Synthetic oligonucleotide
uaaugucaucauacguauu

SEQ ID NO: 2696813 - RNA, 19 nt, Artificial Sequence
  Description of Artificial Sequence: Synthetic oligonucleotide
cuguaucaaauaacuugga

SEQ ID NO: 2696814 - RNA, 19 nt, Artificial Sequence
  Description of Artificial Sequence: Synthetic oligonucleotide
uaguuccuuaagucuuaac

SEQ ID NO: 2696815 - RNA, 19 nt, Artificial Sequence
  Description of Artificial Sequence: Synthetic oligonucleotide
aucauacguauuauggauu

SEQ ID NO: 2696816 - RNA, 19 nt, Artificial Sequence
  Description of Artificial Sequence: Synthetic oligonucleotide
caggucauaucgaagcucu

SEQ ID NO: 2696817 - RNA, 19 nt, Artificial Sequence
  Description of Artificial Sequence: Synthetic oligonucleotide
gaaguaacuugggcguuuc

SEQ ID NO: 2696818 - RNA, 19 nt, Artificial Sequence
  Description of Artificial Sequence: Synthetic oligonucleotide
ccugcuccuaacaucgaag

SEQ ID NO: 2696819 - RNA, 19 nt, Artificial Sequence
  Description of Artificial Sequence: Synthetic oligonucleotide
ugcuggcaggucauaucga

SEQ ID NO: 2696820 - RNA, 19 nt, Artificial Sequence
  Description of Artificial Sequence: Synthetic oligonucleotide
gggauacuguucuagaagu

SEQ ID NO: 2696821 - RNA, 19 nt, Artificial Sequence
  Description of Artificial Sequence: Synthetic oligonucleotide
guaauuagguccacuucaa

SEQ ID NO: 2696822 - RNA, 19 nt, Artificial Sequence
  Description of Artificial Sequence: Synthetic oligonucleotide
cguaauuagguccacuuca

SEQ ID NO: 2696823 - RNA, 19 nt, Artificial Sequence
  Description of Artificial Sequence: Synthetic oligonucleotide
gugggauacuguucuagaa

SEQ ID NO: 2696824 - RNA, 19 nt, Artificial Sequence
  Description of Artificial Sequence: Synthetic oligonucleotide
auagagcaugcaugcugca

SEQ ID NO: 2696825 - RNA, 19 nt, Artificial Sequence
  Description of Artificial Sequence: Synthetic oligonucleotide
aguugaggauuuguguaaa

SEQ ID NO: 2696826 - RNA, 19 nt, Artificial Sequence
  Description of Artificial Sequence: Synthetic oligonucleotide
ccauucugcagcuuucuuc

SEQ ID NO: 2696827 - RNA, 19 nt, Artificial Sequence
  Description of Artificial Sequence: Synthetic oligonucleotide
uucucuaguugaggauuug

SEQ ID NO: 2696828 - RNA, 19 nt, Artificial Sequence
  Description of Artificial Sequence: Synthetic oligonucleotide
aucgaagccccaaugcuaa

SEQ ID NO: 2696829 - RNA, 19 nt, Artificial Sequence
  Description of Artificial Sequence: Synthetic oligonucleotide
acaucacacugaaucauau

SEQ ID NO: 2696830 - RNA, 19 nt, Artificial Sequence
  Description of Artificial Sequence: Synthetic oligonucleotide
cauaucgaagcucugcaau

SEQ ID NO: 2696831 - RNA, 19 nt, Artificial Sequence
  Description of Artificial Sequence: Synthetic oligonucleotide
aucgaagcucugcaauaau

SEQ ID NO: 2696832 - RNA, 19 nt, Artificial Sequence
  Description of Artificial Sequence: Synthetic oligonucleotide
uagagcaugcaugcugcaa

SEQ ID NO: 2696833 - RNA, 19 nt, Artificial Sequence
  Description of Artificial Sequence: Synthetic oligonucleotide
caacauuuguuaacucaaa

SEQ ID NO: 2696834 - RNA, 19 nt, Artificial Sequence
  Description of Artificial Sequence: Synthetic oligonucleotide
gcaugcaugcugcaaugug

SEQ ID NO: 2696835 - RNA, 19 nt, Artificial Sequence
  Description of Artificial Sequence: Synthetic oligonucleotide
uugggcguuucgaacccau

SEQ ID NO: 2696836 - RNA, 19 nt, Artificial Sequence
  Description of Artificial Sequence: Synthetic oligonucleotide
augucaucauacguauuau

SEQ ID NO: 2696837 - RNA, 19 nt, Artificial Sequence
  Description of Artificial Sequence: Synthetic oligonucleotide
guaggacgaacuuucuagu

SEQ ID NO: 2696838 - RNA, 19 nt, Artificial Sequence
  Description of Artificial Sequence: Synthetic oligonucleotide
gguuccaaagggaggauuc

SEQ ID NO: 2696839 - RNA, 19 nt, Artificial Sequence
  Description of Artificial Sequence: Synthetic oligonucleotide
caucgaagccccaaugcua

SEQ ID NO: 2696840 - RNA, 19 nt, Artificial Sequence
  Description of Artificial Sequence: Synthetic oligonucleotide
aauguggggccugguggga

SEQ ID NO: 2696841 - RNA, 19 nt, Artificial Sequence
  Description of Artificial Sequence: Synthetic oligonucleotide
ggugggauacuguucuaga

SEQ ID NO: 2696842 - RNA, 19 nt, Artificial Sequence
  Description of Artificial Sequence: Synthetic oligonucleotide
ucgaagccccaaugcuaag

SEQ ID NO: 2696843 - RNA, 19 nt, Artificial Sequence
  Description of Artificial Sequence: Synthetic oligonucleotide
ccacauuucuauuaaauau

SEQ ID NO: 2696844 - RNA, 19 nt, Artificial Sequence
  Description of Artificial Sequence: Synthetic oligonucleotide
cacauaacccugcuccuaa

SEQ ID NO: 2696845 - RNA, 19 nt, Artificial Sequence
  Description of Artificial Sequence: Synthetic oligonucleotide
gcuaaguacuccacaacca

SEQ ID NO: 2696846 - RNA, 19 nt, Artificial Sequence
  Description of Artificial Sequence: Synthetic oligonucleotide
cuccacaaccacauccuaa

SEQ ID NO: 2696847 - RNA, 19 nt, Artificial Sequence
  Description of Artificial Sequence: Synthetic oligonucleotide
cacaucacacugaaucaua

SEQ ID NO: 2696848 - RNA, 19 nt, Artificial Sequence
  Description of Artificial Sequence: Synthetic oligonucleotide
ccaaagggaggauucauaa

SEQ ID NO: 2696849 - RNA, 19 nt, Artificial Sequence
  Description of Artificial Sequence: Synthetic oligonucleotide
guuucgaacccauccacuu

SEQ ID NO: 2696850 - RNA, 19 nt, Artificial Sequence
  Description of Artificial Sequence: Synthetic oligonucleotide
caaauaacuuggacauucu

SEQ ID NO: 2696851 - RNA, 19 nt, Artificial Sequence
  Description of Artificial Sequence: Synthetic oligonucleotide
auaucaaauccaacacaua

SEQ ID NO: 2696852 - RNA, 19 nt, Artificial Sequence
  Description of Artificial Sequence: Synthetic oligonucleotide
gacuuuccauucugcagcu

SEQ ID NO: 2696853 - RNA, 19 nt, Artificial Sequence
  Description of Artificial Sequence: Synthetic oligonucleotide
ggauucauaauuacuguau

SEQ ID NO: 2696854 - RNA, 19 nt, Artificial Sequence
  Description of Artificial Sequence: Synthetic oligonucleotide
agaaguaacuugggcguuu

SEQ ID NO: 2696855 - RNA, 19 nt, Artificial Sequence
  Description of Artificial Sequence: Synthetic oligonucleotide
agcaugcaugcugcaaugu

SEQ ID NO: 2696856 - RNA, 19 nt, Artificial Sequence
  Description of Artificial Sequence: Synthetic oligonucleotide
cccaaugcuaaguacucca

SEQ ID NO: 2696857 - RNA, 19 nt, Artificial Sequence
  Description of Artificial Sequence: Synthetic oligonucleotide
ccaaugcuaaguacuccac

SEQ ID NO: 2696858 - RNA, 19 nt, Artificial Sequence
  Description of Artificial Sequence: Synthetic oligonucleotide
ggcguuucgaacccaucca

SEQ ID NO: 2696859 - RNA, 19 nt, Artificial Sequence
  Description of Artificial Sequence: Synthetic oligonucleotide
uagaaguaacuugggcguu

SEQ ID NO: 2696860 - RNA, 19 nt, Artificial Sequence
  Description of Artificial Sequence: Synthetic oligonucleotide
gcguaauuagguccacuuc

SEQ ID NO: 2696861 - RNA, 19 nt, Artificial Sequence
  Description of Artificial Sequence: Synthetic oligonucleotide
ugguuccaaagggaggauu

SEQ ID NO: 2696862 - RNA, 19 nt, Artificial Sequence
  Description of Artificial Sequence: Synthetic oligonucleotide
ugggcguuucgaacccauc

SEQ ID NO: 2696863 - RNA, 19 nt, Artificial Sequence
  Description of Artificial Sequence: Synthetic oligonucleotide
cacuucaauguccuacugu

SEQ ID NO: 2696864 - RNA, 19 nt, Artificial Sequence
  Description of Artificial Sequence: Synthetic oligonucleotide
uccuaacaucgaagcccca

SEQ ID NO: 2696865 - RNA, 19 nt, Artificial Sequence
  Description of Artificial Sequence: Synthetic oligonucleotide
gcguuucgaacccauccac

SEQ ID NO: 2696866 - RNA, 19 nt, Artificial Sequence
  Description of Artificial Sequence: Synthetic oligonucleotide
agccauaucuguaccuuua

SEQ ID NO: 2696867 - RNA, 19 nt, Artificial Sequence
  Description of Artificial Sequence: Synthetic oligonucleotide
ugcugcaauguggggccug

SEQ ID NO: 2696868 - RNA, 19 nt, Artificial Sequence
  Description of Artificial Sequence: Synthetic oligonucleotide
cuaacaucgaagccccaau

SEQ ID NO: 2696869 - RNA, 19 nt, Artificial Sequence
  Description of Artificial Sequence: Synthetic oligonucleotide
acacauaacccugcuccua

SEQ ID NO: 2696870 - RNA, 19 nt, Artificial Sequence
  Description of Artificial Sequence: Synthetic oligonucleotide
gcuggcaggucauaucgaa

SEQ ID NO: 2696871 - RNA, 19 nt, Artificial Sequence
  Description of Artificial Sequence: Synthetic oligonucleotide
acgaacuuucuaguuccuu

SEQ ID NO: 2696872 - RNA, 19 nt, Artificial Sequence
  Description of Artificial Sequence: Synthetic oligonucleotide
gcugcaauguggggccugg

SEQ ID NO: 2696873 - RNA, 19 nt, Artificial Sequence
  Description of Artificial Sequence: Synthetic oligonucleotide
cuuguaggacgaacuuucu

SEQ ID NO: 2696874 - RNA, 19 nt, Artificial Sequence
  Description of Artificial Sequence: Synthetic oligonucleotide
ucgaacccauccacuucuu

SEQ ID NO: 2696875 - RNA, 19 nt, Artificial Sequence
  Description of Artificial Sequence: Synthetic oligonucleotide
uugguuccaaagggaggau

SEQ ID NO: 2696876 - RNA, 19 nt, Artificial Sequence
  Description of Artificial Sequence: Synthetic oligonucleotide
cuucuuguaggacgaacuu

SEQ ID NO: 2696877 - RNA, 19 nt, Artificial Sequence
  Description of Artificial Sequence: Synthetic oligonucleotide
caaagggaggauucauaau

SEQ ID NO: 2696878 - RNA, 19 nt, Artificial Sequence
  Description of Artificial Sequence: Synthetic oligonucleotide
ggauuguauagagcaugca

SEQ ID NO: 2696879 - RNA, 19 nt, Artificial Sequence
  Description of Artificial Sequence: Synthetic oligonucleotide
gcuguucuugccauuccca

SEQ ID NO: 2696880 - RNA, 19 nt, Artificial Sequence
  Description of Artificial Sequence: Synthetic oligonucleotide
cuucaauguccuacuguau

SEQ ID NO: 2696881 - RNA, 19 nt, Artificial Sequence
  Description of Artificial Sequence: Synthetic oligonucleotide
ggauuuguguaaagaauau

SEQ ID NO: 2696882 - RNA, 19 nt, Artificial Sequence
  Description of Artificial Sequence: Synthetic oligonucleotide
gcaggucauaucgaagcuc

SEQ ID NO: 2696883 - RNA, 19 nt, Artificial Sequence
  Description of Artificial Sequence: Synthetic oligonucleotide
auaaugcuggcaggucaua

SEQ ID NO: 2696884 - RNA, 19 nt, Artificial Sequence
  Description of Artificial Sequence: Synthetic oligonucleotide
cagcuuucuucuugaauau

SEQ ID NO: 2696885 - RNA, 19 nt, Artificial Sequence
  Description of Artificial Sequence: Synthetic oligonucleotide
gggaggauucauaauuacu

SEQ ID NO: 2696886 - RNA, 19 nt, Artificial Sequence
  Description of Artificial Sequence: Synthetic oligonucleotide
cuaguuccuuaagucuuaa

SEQ ID NO: 2696887 - RNA, 19 nt, Artificial Sequence
  Description of Artificial Sequence: Synthetic oligonucleotide
aggucauaucgaagcucug

SEQ ID NO: 2696888 - RNA, 19 nt, Artificial Sequence
  Description of Artificial Sequence: Synthetic oligonucleotide
cgaacuuucuaguuccuua

SEQ ID NO: 2696889 - RNA, 19 nt, Artificial Sequence
  Description of Artificial Sequence: Synthetic oligonucleotide
ccuaaaucugcaaccacuu

SEQ ID NO: 2696890 - RNA, 19 nt, Artificial Sequence
  Description of Artificial Sequence: Synthetic oligonucleotide
cuuggacauucuguuagau

SEQ ID NO: 2696891 - RNA, 19 nt, Artificial Sequence
  Description of Artificial Sequence: Synthetic oligonucleotide
ggauacuguucuagaagua

SEQ ID NO: 2696892 - RNA, 19 nt, Artificial Sequence
  Description of Artificial Sequence: Synthetic oligonucleotide
ccccaaugcuaaguacucc

SEQ ID NO: 2696893 - RNA, 19 nt, Artificial Sequence
  Description of Artificial Sequence: Synthetic oligonucleotide
cugcaauaauuucuaucuu

SEQ ID NO: 2696894 - RNA, 19 nt, Artificial Sequence
  Description of Artificial Sequence: Synthetic oligonucleotide
cauacguauuauggauugu

SEQ ID NO: 2696895 - RNA, 19 nt, Artificial Sequence
  Description of Artificial Sequence: Synthetic oligonucleotide
ggggccuggugggauacug

SEQ ID NO: 2696896 - RNA, 19 nt, Artificial Sequence
  Description of Artificial Sequence: Synthetic oligonucleotide
gccccaaugcuaaguacuc

SEQ ID NO: 2696897 - RNA, 19 nt, Artificial Sequence
  Description of Artificial Sequence: Synthetic oligonucleotide
gacgaacuuucuaguuccu

SEQ ID NO: 2696898 - RNA, 19 nt, Artificial Sequence
  Description of Artificial Sequence: Synthetic oligonucleotide
caauguccuacuguauuuu

SEQ ID NO: 2696899 - RNA, 19 nt, Artificial Sequence
  Description of Artificial Sequence: Synthetic oligonucleotide
ccuaacaucgaagccccaa

SEQ ID NO: 2696900 - RNA, 19 nt, Artificial Sequence
  Description of Artificial Sequence: Synthetic oligonucleotide
cuugggcguuucgaaccca

SEQ ID NO: 2696901 - RNA, 19 nt, Artificial Sequence
  Description of Artificial Sequence: Synthetic oligonucleotide
augcugcaauguggggccu

SEQ ID NO: 2696902 - RNA, 19 nt, Artificial Sequence
  Description of Artificial Sequence: Synthetic oligonucleotide
ccacauccuaaaucugcaa

SEQ ID NO: 2696903 - RNA, 19 nt, Artificial Sequence
  Description of Artificial Sequence: Synthetic oligonucleotide
uggggccuggugggauacu

SEQ ID NO: 2696904 - RNA, 19 nt, Artificial Sequence
  Description of Artificial Sequence: Synthetic oligonucleotide
gccauucccaaagcagucu

SEQ ID NO: 2696905 - RNA, 19 nt, Artificial Sequence
  Description of Artificial Sequence: Synthetic oligonucleotide
ggacauucuguuagauaau

SEQ ID NO: 2696906 - RNA, 19 nt, Artificial Sequence
  Description of Artificial Sequence: Synthetic oligonucleotide
ggccuggugggauacuguu

SEQ ID NO: 2696907 - RNA, 19 nt, Artificial Sequence
  Description of Artificial Sequence: Synthetic oligonucleotide
acccugcuccuaacaucga

SEQ ID NO: 2696908 - RNA, 19 nt, Artificial Sequence
  Description of Artificial Sequence: Synthetic oligonucleotide
ccuuaagucuuaacuucuu

SEQ ID NO: 2696909 - RNA, 19 nt, Artificial Sequence
  Description of Artificial Sequence: Synthetic oligonucleotide
cguuucgaacccauccacu

SEQ ID NO: 2696910 - RNA, 19 nt, Artificial Sequence
  Description of Artificial Sequence: Synthetic oligonucleotide
ccauucccaaagcagucuu

SEQ ID NO: 2696911 - RNA, 19 nt, Artificial Sequence
  Description of Artificial Sequence: Synthetic oligonucleotide
ccacaaccacauccuaaau

SEQ ID NO: 2696912 - RNA, 19 nt, Artificial Sequence
  Description of Artificial Sequence: Synthetic oligonucleotide
cgaagccccaaugcuaagu

SEQ ID NO: 2696913 - RNA, 19 nt, Artificial Sequence
  Description of Artificial Sequence: Synthetic oligonucleotide
gggccuggugggauacugu

SEQ ID NO: 2696914 - RNA, 19 nt, Artificial Sequence
  Description of Artificial Sequence: Synthetic oligonucleotide
cugcaauguggggccuggu

SEQ ID NO: 2696915 - RNA, 19 nt, Artificial Sequence
  Description of Artificial Sequence: Synthetic oligonucleotide
ccacuucuuguaggacgaa

SEQ ID NO: 2696916 - RNA, 19 nt, Artificial Sequence
  Description of Artificial Sequence: Synthetic oligonucleotide
  modified_base (16)..(16): a, c, u, g, unknown or other
auggcuuacagauuunacc

SEQ ID NO: 2696917 - RNA, 19 nt, Artificial Sequence
  Description of Artificial Sequence: Synthetic oligonucleotide
  modified_base (9)..(9): a, c, u, g, unknown or other
acagauuunacccacugac

SEQ ID NO: 2696918 - RNA, 19 nt, Artificial Sequence
  Description of Artificial Sequence: Synthetic oligonucleotide
auagaggccacuuacaagg

SEQ ID NO: 2696919 - RNA, 19 nt, Artificial Sequence
  Description of Artificial Sequence: Synthetic oligonucleotide
agaaucugcugauagaggc

SEQ ID NO: 2696920 - RNA, 19 nt, Artificial Sequence
  Description of Artificial Sequence: Synthetic oligonucleotide
auagugagaacagagaggc

SEQ ID NO: 2696921 - RNA, 19 nt, Artificial Sequence
  Description of Artificial Sequence: Synthetic oligonucleotide
ucauucaaaggguugaugg

SEQ ID NO: 2696922 - RNA, 19 nt, Artificial Sequence
  Description of Artificial Sequence: Synthetic oligonucleotide
cauaaacaaaguaaggcag

SEQ ID NO: 2696923 - RNA, 19 nt, Artificial Sequence
  Description of Artificial Sequence: Synthetic oligonucleotide
gauguggcugaguagaagg

SEQ ID NO: 2696924 - RNA, 19 nt, Artificial Sequence
  Description of Artificial Sequence: Synthetic oligonucleotide
  modified_base (7)..(7): a, c, u, g, unknown or other
agauuunacccacugacca

SEQ ID NO: 2696925 - RNA, 19 nt, Artificial Sequence
  Description of Artificial Sequence: Synthetic oligonucleotide
uuagauacggaauagucau

SEQ ID NO: 2696926 - RNA, 19 nt, Artificial Sequence
  Description of Artificial Sequence: Synthetic oligonucleotide
aaaggguugauggaggcgg

SEQ ID NO: 2696927 - RNA, 19 nt, Artificial Sequence
  Description of Artificial Sequence: Synthetic oligonucleotide
agauacggaauagucaucc

SEQ ID NO: 2696928 - RNA, 19 nt, Artificial Sequence
  Description of Artificial Sequence: Synthetic oligonucleotide
agggaucggacauagggcc

SEQ ID NO: 2696929 - RNA, 19 nt, Artificial Sequence
  Description of Artificial Sequence: Synthetic oligonucleotide
  modified_base (15)..(15): a, c, u, g, unknown or other
uggcuuacagauuunaccc

SEQ ID NO: 2696930 - RNA, 19 nt, Artificial Sequence
  Description of Artificial Sequence: Synthetic oligonucleotide
cacauaaacaaaguaaggc

SEQ ID NO: 2696931 - RNA, 19 nt, Artificial Sequence
  Description of Artificial Sequence: Synthetic oligonucleotide
uuugacuugggcauuagau

SEQ ID NO: 2696932 - RNA, 19 nt, Artificial Sequence
  Description of Artificial Sequence: Synthetic oligonucleotide
agugcugcaaucuuggagu

SEQ ID NO: 2696933 - RNA, 19 nt, Artificial Sequence
  Description of Artificial Sequence: Synthetic oligonucleotide
ggaauagucauccagcacc

SEQ ID NO: 2696934 - RNA, 19 nt, Artificial Sequence
  Description of Artificial Sequence: Synthetic oligonucleotide
uucaaaggguugauggagg

SEQ ID NO: 2696935 - RNA, 19 nt, Artificial Sequence
  Description of Artificial Sequence: Synthetic oligonucleotide
aagugcugcaaucuuggag

SEQ ID NO: 2696936 - RNA, 19 nt, Artificial Sequence
  Description of Artificial Sequence: Synthetic oligonucleotide
ugacuugggcauuagauac

SEQ ID NO: 2696937 - RNA, 19 nt, Artificial Sequence
  Description of Artificial Sequence: Synthetic oligonucleotide
ugccuuccagccuagagcg

SEQ ID NO: 2696938 - RNA, 19 nt, Artificial Sequence
  Description of Artificial Sequence: Synthetic oligonucleotide
caaaguaaggcagaagugc

SEQ ID NO: 2696939 - RNA, 19 nt, Artificial Sequence
  Description of Artificial Sequence: Synthetic oligonucleotide
uuccguaucaggcuccgcg

SEQ ID NO: 2696940 - RNA, 19 nt, Artificial Sequence
  Description of Artificial Sequence: Synthetic oligonucleotide
uacggaauagucauccagc

SEQ ID NO: 2696941 - RNA, 19 nt, Artificial Sequence
  Description of Artificial Sequence: Synthetic oligonucleotide
uguggguuccguaucaggc

SEQ ID NO: 2696942 - RNA, 19 nt, Artificial Sequence
  Description of Artificial Sequence: Synthetic oligonucleotide
uacaagguccccaugaguc

SEQ ID NO: 2696943 - RNA, 19 nt, Artificial Sequence
  Description of Artificial Sequence: Synthetic oligonucleotide
ucaucugucagugaagaca

SEQ ID NO: 2696944 - RNA, 19 nt, Artificial Sequence
  Description of Artificial Sequence: Synthetic oligonucleotide
accacauaaacaaaguaag

SEQ ID NO: 2696945 - RNA, 19 nt, Artificial Sequence
  Description of Artificial Sequence: Synthetic oligonucleotide
  modified_base (2)..(2): a, c, u, g, unknown or other
unacccacugaccacauaa

SEQ ID NO: 2696946 - RNA, 19 nt, Artificial Sequence
  Description of Artificial Sequence: Synthetic oligonucleotide
cauuagauacggaauaguc

SEQ ID NO: 2696947 - RNA, 19 nt, Artificial Sequence
  Description of Artificial Sequence: Synthetic oligonucleotide
agagaggccgaacaggguc

SEQ ID NO: 2696948 - RNA, 19 nt, Artificial Sequence
  Description of Artificial Sequence: Synthetic oligonucleotide
uggagggcgaccuucauca

SEQ ID NO: 2696949 - RNA, 19 nt, Artificial Sequence
  Description of Artificial Sequence: Synthetic oligonucleotide
aaggucaucugucagugaa

SEQ ID NO: 2696950 - RNA, 19 nt, Artificial Sequence
  Description of Artificial Sequence: Synthetic oligonucleotide
  modified_base (10)..(10): a, c, u, g, unknown or other
uacagauuunacccacuga

SEQ ID NO: 2696951 - RNA, 19 nt, Artificial Sequence
  Description of Artificial Sequence: Synthetic oligonucleotide
acaggacucguucuacugc

SEQ ID NO: 2696952 - RNA, 19 nt, Artificial Sequence
  Description of Artificial Sequence: Synthetic oligonucleotide
  modified_base (11)..(11): a, c, u, g, unknown or other
uuacagauuunacccacug

SEQ ID NO: 2696953 - RNA, 19 nt, Artificial Sequence
  Description of Artificial Sequence: Synthetic oligonucleotide
ugcagguuuguccaguaug

SEQ ID NO: 2696954 - RNA, 19 nt, Artificial Sequence
  Description of Artificial Sequence: Synthetic oligonucleotide
auacggaauagucauccag

SEQ ID NO: 2696955 - RNA, 19 nt, Artificial Sequence
  Description of Artificial Sequence: Synthetic oligonucleotide
gauagaggccacuuacaag

SEQ ID NO: 2696956 - RNA, 19 nt, Artificial Sequence
  Description of Artificial Sequence: Synthetic oligonucleotide
aguaugugggcagaugugg

SEQ ID NO: 2696957 - RNA, 19 nt, Artificial Sequence
  Description of Artificial Sequence: Synthetic oligonucleotide
uccccaugaguccagaaga

SEQ ID NO: 2696958 - RNA, 19 nt, Artificial Sequence
  Description of Artificial Sequence: Synthetic oligonucleotide
acaagguccccaugagucc

SEQ ID NO: 2696959 - RNA, 19 nt, Artificial Sequence
  Description of Artificial Sequence: Synthetic oligonucleotide
caucugucagugaagacac

SEQ ID NO: 2696960 - RNA, 19 nt, Artificial Sequence
  Description of Artificial Sequence: Synthetic oligonucleotide
ugucagugaagacacugca

SEQ ID NO: 2696961 - RNA, 19 nt, Artificial Sequence
  Description of Artificial Sequence: Synthetic oligonucleotide
gaagauguggcugaguaga

SEQ ID NO: 2696962 - RNA, 19 nt, Artificial Sequence
  Description of Artificial Sequence: Synthetic oligonucleotide
uugggcauuagauacggaa

SEQ ID NO: 2696963 - RNA, 19 nt, Artificial Sequence
  Description of Artificial Sequence: Synthetic oligonucleotide
ugauagaggccacuuacaa

SEQ ID NO: 2696964 - RNA, 19 nt, Artificial Sequence
  Description of Artificial Sequence: Synthetic oligonucleotide
accgccugcagguuugucc

SEQ ID NO: 2696965 - RNA, 19 nt, Artificial Sequence
  Description of Artificial Sequence: Synthetic oligonucleotide
cacaguagagcacacugcc

SEQ ID NO: 2696966 - RNA, 19 nt, Artificial Sequence
  Description of Artificial Sequence: Synthetic oligonucleotide
gaauagucauccagcaccg

SEQ ID NO: 2696967 - RNA, 19 nt, Artificial Sequence
  Description of Artificial Sequence: Synthetic oligonucleotide
aguagagcacacugccacc

SEQ ID NO: 2696968 - RNA, 19 nt, Artificial Sequence
  Description of Artificial Sequence: Synthetic oligonucleotide
ccaguggucauucaaaggg

SEQ ID NO: 2696969 - RNA, 19 nt, Artificial Sequence
  Description of Artificial Sequence: Synthetic oligonucleotide
uaguauuugagaaggucau

SEQ ID NO: 2696970 - RNA, 19 nt, Artificial Sequence
  Description of Artificial Sequence: Synthetic oligonucleotide
agugaagacacugcacugg

SEQ ID NO: 2696971 - RNA, 19 nt, Artificial Sequence
  Description of Artificial Sequence: Synthetic oligonucleotide
gauggaggcggccaguggc

SEQ ID NO: 2696972 - RNA, 19 nt, Artificial Sequence
  Description of Artificial Sequence: Synthetic oligonucleotide
auuagauacggaauaguca

SEQ ID NO: 2696973 - RNA, 19 nt, Artificial Sequence
  Description of Artificial Sequence: Synthetic oligonucleotide
acugaccacauaaacaaag

SEQ ID NO: 2696974 - RNA, 19 nt, Artificial Sequence
  Description of Artificial Sequence: Synthetic oligonucleotide
uccaguggucauucaaagg

SEQ ID NO: 2696975 - RNA, 19 nt, Artificial Sequence
  Description of Artificial Sequence: Synthetic oligonucleotide
uauuugagaaggucaucug

SEQ ID NO: 2696976 - RNA, 19 nt, Artificial Sequence
  Description of Artificial Sequence: Synthetic oligonucleotide
aaucugcugauagaggcca

SEQ ID NO: 2696977 - RNA, 19 nt, Artificial Sequence
  Description of Artificial Sequence: Synthetic oligonucleotide
ugaguccagaagauguggc

SEQ ID NO: 2696978 - RNA, 19 nt, Artificial Sequence
  Description of Artificial Sequence: Synthetic oligonucleotide
aucugcuuugacuugggca

SEQ ID NO: 2696979 - RNA, 19 nt, Artificial Sequence
  Description of Artificial Sequence: Synthetic oligonucleotide
aagaguccaguggucauuc

SEQ ID NO: 2696980 - RNA, 19 nt, Artificial Sequence
  Description of Artificial Sequence: Synthetic oligonucleotide
  modified_base (8)..(8): a, c, u, g, unknown or other
cagauuunacccacugacc

SEQ ID NO: 2696981 - RNA, 19 nt, Artificial Sequence
  Description of Artificial Sequence: Synthetic oligonucleotide
guaguauuugagaagguca

SEQ ID NO: 2696982 - RNA, 19 nt, Artificial Sequence
  Description of Artificial Sequence: Synthetic oligonucleotide
gguuuguccaguauguggg

SEQ ID NO: 2696983 - RNA, 19 nt, Artificial Sequence
  Description of Artificial Sequence: Synthetic oligonucleotide
  modified_base (6)..(6): a, c, u, g, unknown or other
gauuunacccacugaccac

SEQ ID NO: 2696984 - RNA, 19 nt, Artificial Sequence
  Description of Artificial Sequence: Synthetic oligonucleotide
gaccacauaaacaaaguaa

SEQ ID NO: 2696985 - RNA, 19 nt, Artificial Sequence
  Description of Artificial Sequence: Synthetic oligonucleotide
uugagaaggucaucuguca

SEQ ID NO: 2696986 - RNA, 19 nt, Artificial Sequence
  Description of Artificial Sequence: Synthetic oligonucleotide
gaggccacuuacaaggucc

SEQ ID NO: 2696987 - RNA, 19 nt, Artificial Sequence
  Description of Artificial Sequence: Synthetic oligonucleotide
gaacagagaggccgaacag

SEQ ID NO: 2696988 - RNA, 19 nt, Artificial Sequence
  Description of Artificial Sequence: Synthetic oligonucleotide
ugaccacauaaacaaagua

SEQ ID NO: 2696989 - RNA, 19 nt, Artificial Sequence
  Description of Artificial Sequence: Synthetic oligonucleotide
ugcagggagagcagaaucu

SEQ ID NO: 2696990 - RNA, 19 nt, Artificial Sequence
  Description of Artificial Sequence: Synthetic oligonucleotide
uugacuugggcauuagaua

SEQ ID NO: 2696991 - RNA, 19 nt, Artificial Sequence
  Description of Artificial Sequence: Synthetic oligonucleotide
acucguucuacugccuucc

SEQ ID NO: 2696992 - RNA, 19 nt, Artificial Sequence
  Description of Artificial Sequence: Synthetic oligonucleotide
uaaacaaaguaaggcagaa

SEQ ID NO: 2696993 - RNA, 19 nt, Artificial Sequence
  Description of Artificial Sequence: Synthetic oligonucleotide
acuugggcauuagauacgg

SEQ ID NO: 2696994 - RNA, 19 nt, Artificial Sequence
  Description of Artificial Sequence: Synthetic oligonucleotide
  modified_base (5)..(5): a, c, u, g, unknown or other
auuunacccacugaccaca

SEQ ID NO: 2696995 - RNA, 19 nt, Artificial Sequence
  Description of Artificial Sequence: Synthetic oligonucleotide
cuuacaagguccccaugag

SEQ ID NO: 2696996 - RNA, 19 nt, Artificial Sequence
  Description of Artificial Sequence: Synthetic oligonucleotide
caguagagcacacugccac

SEQ ID NO: 2696997 - RNA, 19 nt, Artificial Sequence
  Description of Artificial Sequence: Synthetic oligonucleotide
ugggcauuagauacggaau

SEQ ID NO: 2696998 - RNA, 19 nt, Artificial Sequence
  Description of Artificial Sequence: Synthetic oligonucleotide
uacaggacucguucuacug

SEQ ID NO: 2696999 - RNA, 19 nt, Artificial Sequence
  Description of Artificial Sequence: Synthetic oligonucleotide
uuguccaguaugugggcag

SEQ ID NO: 2697000 - RNA, 19 nt, Artificial Sequence
  Description of Artificial Sequence: Synthetic oligonucleotide
cagaaucugcugauagagg

SEQ ID NO: 2697001 - RNA, 19 nt, Artificial Sequence
  Description of Artificial Sequence: Synthetic oligonucleotide
augaguccagaagaugugg

SEQ ID NO: 2697002 - RNA, 19 nt, Artificial Sequence
  Description of Artificial Sequence: Synthetic oligonucleotide
ccagggaucggacauaggg

SEQ ID NO: 2697003 - RNA, 19 nt, Artificial Sequence
  Description of Artificial Sequence: Synthetic oligonucleotide
cugucagugaagacacugc

SEQ ID NO: 2697004 - RNA, 19 nt, Artificial Sequence
  Description of Artificial Sequence: Synthetic oligonucleotide
auaaacaaaguaaggcaga

SEQ ID NO: 2697005 - RNA, 19 nt, Artificial Sequence
  Description of Artificial Sequence: Synthetic oligonucleotide
uaccacagccccauaguga

SEQ ID NO: 2697006 - RNA, 19 nt, Artificial Sequence
  Description of Artificial Sequence: Synthetic oligonucleotide
aaggcagaagugcugcaau

SEQ ID NO: 2697007 - RNA, 19 nt, Artificial Sequence
  Description of Artificial Sequence: Synthetic oligonucleotide
cugccuuccagccuagagc

SEQ ID NO: 2697008 - RNA, 19 nt, Artificial Sequence
  Description of Artificial Sequence: Synthetic oligonucleotide
cagggaucggacauagggc

SEQ ID NO: 2697009 - RNA, 19 nt, Artificial Sequence
  Description of Artificial Sequence: Synthetic oligonucleotide
aagcacagguguggguucc

SEQ ID NO: 2697010 - RNA, 19 nt, Artificial Sequence
  Description of Artificial Sequence: Synthetic oligonucleotide
caggacucguucuacugcc

SEQ ID NO: 2697011 - RNA, 19 nt, Artificial Sequence
  Description of Artificial Sequence: Synthetic oligonucleotide
acggaauagucauccagca

SEQ ID NO: 2697012 - RNA, 19 nt, Artificial Sequence
  Description of Artificial Sequence: Synthetic oligonucleotide
uggucauucaaaggguuga

SEQ ID NO: 2697013 - RNA, 19 nt, Artificial Sequence
  Description of Artificial Sequence: Synthetic oligonucleotide
cacacugccaccagggauc

SEQ ID NO: 2697014 - RNA, 19 nt, Artificial Sequence
  Description of Artificial Sequence: Synthetic oligonucleotide
ugcccaucugcuuugacuu

SEQ ID NO: 2697015 - RNA, 19 nt, Artificial Sequence
  Description of Artificial Sequence: Synthetic oligonucleotide
agagcgugcagcccuacca

SEQ ID NO: 2697016 - RNA, 19 nt, Artificial Sequence
  Description of Artificial Sequence: Synthetic oligonucleotide
guccaguggucauucaaag

SEQ ID NO: 2697017 - RNA, 19 nt, Artificial Sequence
  Description of Artificial Sequence: Synthetic oligonucleotide
ucguucuacugccuuccag

SEQ ID NO: 2697018 - RNA, 19 nt, Artificial Sequence
  Description of Artificial Sequence: Synthetic oligonucleotide
aguauuugagaaggucauc

SEQ ID NO: 2697019 - RNA, 19 nt, Artificial Sequence
  Description of Artificial Sequence: Synthetic oligonucleotide
caucagcuguggaucaucc

SEQ ID NO: 2697020 - RNA, 19 nt, Artificial Sequence
  Description of Artificial Sequence: Synthetic oligonucleotide
gaaucugcugauagaggcc

SEQ ID NO: 2697021 - RNA, 19 nt, Artificial Sequence
  Description of Artificial Sequence: Synthetic oligonucleotide
uguggcugaguagaagggc

SEQ ID NO: 2697022 - RNA, 19 nt, Artificial Sequence
  Description of Artificial Sequence: Synthetic oligonucleotide
guucuacugccuuccagcc

SEQ ID NO: 2697023 - RNA, 19 nt, Artificial Sequence
  Description of Artificial Sequence: Synthetic oligonucleotide
gagcacacugccaccaggg

SEQ ID NO: 2697024 - RNA, 19 nt, Artificial Sequence
  Description of Artificial Sequence: Synthetic oligonucleotide
gcugauagaggccacuuac

SEQ ID NO: 2697025 - RNA, 19 nt, Artificial Sequence
  Description of Artificial Sequence: Synthetic oligonucleotide
agaggccacuuacaagguc

SEQ ID NO: 2697026 - RNA, 19 nt, Artificial Sequence
  Description of Artificial Sequence: Synthetic oligonucleotide
cuccaagacacaguagagc

SEQ ID NO: 2697027 - RNA, 19 nt, Artificial Sequence
  Description of Artificial Sequence: Synthetic oligonucleotide
aggcagaagugcugcaauc

SEQ ID NO: 2697028 - RNA, 19 nt, Artificial Sequence
  Description of Artificial Sequence: Synthetic oligonucleotide
uggcugaguagaagggcag

SEQ ID NO: 2697029 - RNA, 19 nt, Artificial Sequence
  Description of Artificial Sequence: Synthetic oligonucleotide
gaagggcagccccaucccg

SEQ ID NO: 2697030 - RNA, 19 nt, Artificial Sequence
  Description of Artificial Sequence: Synthetic oligonucleotide
ugauggaggcggccagugg

SEQ ID NO: 2697031 - RNA, 19 nt, Artificial Sequence
  Description of Artificial Sequence: Synthetic oligonucleotide
guccccaugaguccagaag

SEQ ID NO: 2697032 - RNA, 19 nt, Artificial Sequence
  Description of Artificial Sequence: Synthetic oligonucleotide
gacuugggcauuagauacg

SEQ ID NO: 2697033 - RNA, 19 nt, Artificial Sequence
  Description of Artificial Sequence: Synthetic oligonucleotide
agcagaaucugcugauaga

SEQ ID NO: 2697034 - RNA, 19 nt, Artificial Sequence
  Description of Artificial Sequence: Synthetic oligonucleotide
uccguaucaggcuccgcgc

SEQ ID NO: 2697035 - RNA, 19 nt, Artificial Sequence
  Description of Artificial Sequence: Synthetic oligonucleotide
ucggacauagggccccaag

SEQ ID NO: 2697036 - RNA, 19 nt, Artificial Sequence
  Description of Artificial Sequence: Synthetic oligonucleotide
acuugcugguaguauuuga

SEQ ID NO: 2697037 - RNA, 19 nt, Artificial Sequence
  Description of Artificial Sequence: Synthetic oligonucleotide
aagacacaguagagcacac

SEQ ID NO: 2697038 - RNA, 19 nt, Artificial Sequence
  Description of Artificial Sequence: Synthetic oligonucleotide
uagggccccaagcacaggu

SEQ ID NO: 2697039 - RNA, 19 nt, Artificial Sequence
  Description of Artificial Sequence: Synthetic oligonucleotide
agauguggguacaggacuc

SEQ ID NO: 2697040 - RNA, 19 nt, Artificial Sequence
  Description of Artificial Sequence: Synthetic oligonucleotide
guauuugagaaggucaucu

SEQ ID NO: 2697041 - RNA, 19 nt, Artificial Sequence
  Description of Artificial Sequence: Synthetic oligonucleotide
cauucaaaggguugaugga

SEQ ID NO: 2697042 - RNA, 19 nt, Artificial Sequence
  Description of Artificial Sequence: Synthetic oligonucleotide
caagacacaguagagcaca

SEQ ID NO: 2697043 - RNA, 19 nt, Artificial Sequence
  Description of Artificial Sequence: Synthetic oligonucleotide
ucuuggaguuugucugcag

SEQ ID NO: 2697044 - RNA, 19 nt, Artificial Sequence
  Description of Artificial Sequence: Synthetic oligonucleotide
guggguacaggacucguuc

SEQ ID NO: 2697045 - RNA, 19 nt, Artificial Sequence
  Description of Artificial Sequence: Synthetic oligonucleotide
  modified_base (4)..(4): a, c, u, g, unknown or other
uuunacccacugaccacau

SEQ ID NO: 2697046 - RNA, 19 nt, Artificial Sequence
  Description of Artificial Sequence: Synthetic oligonucleotide
ucacuugcugguaguauuu

SEQ ID NO: 2697047 - RNA, 19 nt, Artificial Sequence
  Description of Artificial Sequence: Synthetic oligonucleotide
agcccgugucacuugcugg

SEQ ID NO: 2697048 - RNA, 19 nt, Artificial Sequence
  Description of Artificial Sequence: Synthetic oligonucleotide
uggguuccguaucaggcuc

SEQ ID NO: 2697049 - RNA, 19 nt, Artificial Sequence
  Description of Artificial Sequence: Synthetic oligonucleotide
ggcuccaagacacaguaga

SEQ ID NO: 2697050 - RNA, 19 nt, Artificial Sequence
  Description of Artificial Sequence: Synthetic oligonucleotide
cagccuagagcgugcagcc

SEQ ID NO: 2697051 - RNA, 19 nt, Artificial Sequence
  Description of Artificial Sequence: Synthetic oligonucleotide
  modified_base (18)..(18): a, c, u, g, unknown or other
ucauggcuuacagauuuna

SEQ ID NO: 2697052 - RNA, 19 nt, Artificial Sequence
  Description of Artificial Sequence: Synthetic oligonucleotide
gagggcgaccuucaucagc

SEQ ID NO: 2697053 - RNA, 19 nt, Artificial Sequence
  Description of Artificial Sequence: Synthetic oligonucleotide
guguggguuccguaucagg

SEQ ID NO: 2697054 - RNA, 19 nt, Artificial Sequence
  Description of Artificial Sequence: Synthetic oligonucleotide
guuuguccaguaugugggc

SEQ ID NO: 2697055 - RNA, 19 nt, Artificial Sequence
  Description of Artificial Sequence: Synthetic oligonucleotide
gauacggaauagucaucca

SEQ ID NO: 2697056 - RNA, 19 nt, Artificial Sequence
  Description of Artificial Sequence: Synthetic oligonucleotide
cagugaagacacugcacug

SEQ ID NO: 2697057 - RNA, 19 nt, Artificial Sequence
  Description of Artificial Sequence: Synthetic oligonucleotide
uagauacggaauagucauc

SEQ ID NO: 2697058 - RNA, 19 nt, Artificial Sequence
  Description of Artificial Sequence: Synthetic oligonucleotide
caguaugugggcagaugug

SEQ ID NO: 2697059 - RNA, 19 nt, Artificial Sequence
  Description of Artificial Sequence: Synthetic oligonucleotide
uucuacugccuuccagccu

SEQ ID NO: 2697060 - RNA, 19 nt, Artificial Sequence
  Description of Artificial Sequence: Synthetic oligonucleotide
gguaguauuugagaagguc

SEQ ID NO: 2697061 - RNA, 19 nt, Artificial Sequence
  Description of Artificial Sequence: Synthetic oligonucleotide
ugcaguagucggugcagcu

SEQ ID NO: 2697062 - RNA, 19 nt, Artificial Sequence
  Description of Artificial Sequence: Synthetic oligonucleotide
auguggcugaguagaaggg

SEQ ID NO: 2697063 - RNA, 19 nt, Artificial Sequence
  Description of Artificial Sequence: Synthetic oligonucleotide
ugguaguauuugagaaggu

SEQ ID NO: 2697064 - RNA, 19 nt, Artificial Sequence
  Description of Artificial Sequence: Synthetic oligonucleotide
cagaagauguggcugagua

SEQ ID NO: 2697065 - RNA, 19 nt, Artificial Sequence
  Description of Artificial Sequence: Synthetic oligonucleotide
gcugcaaucuuggaguuug

SEQ ID NO: 2697066 - RNA, 19 nt, Artificial Sequence
  Description of Artificial Sequence: Synthetic oligonucleotide
uggguacaggacucguucu

SEQ ID NO: 2697067 - RNA, 19 nt, Artificial Sequence
  Description of Artificial Sequence: Synthetic oligonucleotide
gucugucaggaccuucugc

SEQ ID NO: 2697068 - RNA, 19 nt, Artificial Sequence
  Description of Artificial Sequence: Synthetic oligonucleotide
agauguggcugaguagaag

SEQ ID NO: 2697069 - RNA, 19 nt, Artificial Sequence
  Description of Artificial Sequence: Synthetic oligonucleotide
cugcagggagagcagaauc

SEQ ID NO: 2697070 - RNA, 19 nt, Artificial Sequence
  Description of Artificial Sequence: Synthetic oligonucleotide
uagaggccacuuacaaggu

SEQ ID NO: 2697071 - RNA, 19 nt, Artificial Sequence
  Description of Artificial Sequence: Synthetic oligonucleotide
gucauucaaaggguugaug

SEQ ID NO: 2697072 - RNA, 19 nt, Artificial Sequence
  Description of Artificial Sequence: Synthetic oligonucleotide
uugauggaggcggccagug

SEQ ID NO: 2697073 - RNA, 19 nt, Artificial Sequence
  Description of Artificial Sequence: Synthetic oligonucleotide
gacucguucuacugccuuc

SEQ ID NO: 2697074 - RNA, 19 nt, Artificial Sequence
  Description of Artificial Sequence: Synthetic oligonucleotide
cguucuacugccuuccagc

SEQ ID NO: 2697075 - RNA, 19 nt, Artificial Sequence
  Description of Artificial Sequence: Synthetic oligonucleotide
aguacagcccgugucacuu

SEQ ID NO: 2697076 - RNA, 19 nt, Artificial Sequence
  Description of Artificial Sequence: Synthetic oligonucleotide
agggcgaccuucaucagcu

SEQ ID NO: 2697077 - RNA, 19 nt, Artificial Sequence
  Description of Artificial Sequence: Synthetic oligonucleotide
  modified_base (14)..(14): a, c, u, g, unknown or other
ggcuuacagauuunaccca

SEQ ID NO: 2697078 - RNA, 19 nt, Artificial Sequence
  Description of Artificial Sequence: Synthetic oligonucleotide
cugauagaggccacuuaca

SEQ ID NO: 2697079 - RNA, 19 nt, Artificial Sequence
  Description of Artificial Sequence: Synthetic oligonucleotide
cuuccagccuagagcgugc

SEQ ID NO: 2697080 - RNA, 19 nt, Artificial Sequence
  Description of Artificial Sequence: Synthetic oligonucleotide
ccacugaccacauaaacaa

SEQ ID NO: 2697081 - RNA, 19 nt, Artificial Sequence
  Description of Artificial Sequence: Synthetic oligonucleotide
ugcugauagaggccacuua

SEQ ID NO: 2697082 - RNA, 19 nt, Artificial Sequence
  Description of Artificial Sequence: Synthetic oligonucleotide
gagcgugcagcccuaccac

SEQ ID NO: 2697083 - RNA, 19 nt, Artificial Sequence
  Description of Artificial Sequence: Synthetic oligonucleotide
auccagcaccgccugcagg

SEQ ID NO: 2697084 - RNA, 19 nt, Artificial Sequence
  Description of Artificial Sequence: Synthetic oligonucleotide
uagagcgugcagcccuacc

SEQ ID NO: 2697085 - RNA, 19 nt, Artificial Sequence
  Description of Artificial Sequence: Synthetic oligonucleotide
agguguggguuccguauca

SEQ ID NO: 2697086 - RNA, 19 nt, Artificial Sequence
  Description of Artificial Sequence: Synthetic oligonucleotide
uggaguuugucugcagguc

SEQ ID NO: 2697087 - RNA, 19 nt, Artificial Sequence
  Description of Artificial Sequence: Synthetic oligonucleotide
aggccacuuacaagguccc

SEQ ID NO: 2697088 - RNA, 19 nt, Artificial Sequence
  Description of Artificial Sequence: Synthetic oligonucleotide
uggcuccaagacacaguag

SEQ ID NO: 2697089 - RNA, 19 nt, Artificial Sequence
  Description of Artificial Sequence: Synthetic oligonucleotide
guggcuccaagacacagua

SEQ ID NO: 2697090 - RNA, 19 nt, Artificial Sequence
  Description of Artificial Sequence: Synthetic oligonucleotide
uguggguacaggacucguu

SEQ ID NO: 2697091 - RNA, 19 nt, Artificial Sequence
  Description of Artificial Sequence: Synthetic oligonucleotide
uccuggagggcgaccuuca

SEQ ID NO: 2697092 - RNA, 19 nt, Artificial Sequence
  Description of Artificial Sequence: Synthetic oligonucleotide
cugcagguccuggagggcg

SEQ ID NO: 2697093 - RNA, 19 nt, Artificial Sequence
  Description of Artificial Sequence: Synthetic oligonucleotide
ucaucagcuguggaucauc

SEQ ID NO: 2697094 - RNA, 19 nt, Artificial Sequence
  Description of Artificial Sequence: Synthetic oligonucleotide
ugucacuugcugguaguau

SEQ ID NO: 2697095 - RNA, 19 nt, Artificial Sequence
  Description of Artificial Sequence: Synthetic oligonucleotide
  modified_base (13)..(13): a, c, u, g, unknown or other
gcuuacagauuunacccac

SEQ ID NO: 2697096 - RNA, 19 nt, Artificial Sequence
  Description of Artificial Sequence: Synthetic oligonucleotide
uguccaguaugugggcaga

SEQ ID NO: 2697097 - RNA, 19 nt, Artificial Sequence
  Description of Artificial Sequence: Synthetic oligonucleotide
aguccaguggucauucaaa

SEQ ID NO: 2697098 - RNA, 19 nt, Artificial Sequence
  Description of Artificial Sequence: Synthetic oligonucleotide
gucaucugucagugaagac

SEQ ID NO: 2697099 - RNA, 19 nt, Artificial Sequence
  Description of Artificial Sequence: Synthetic oligonucleotide
gaagugcugcaaucuugga

SEQ ID NO: 2697100 - RNA, 19 nt, Artificial Sequence
  Description of Artificial Sequence: Synthetic oligonucleotide
agccccauagugagaacag

SEQ ID NO: 2697101 - RNA, 19 nt, Artificial Sequence
  Description of Artificial Sequence: Synthetic oligonucleotide
gaguccagaagauguggcu

SEQ ID NO: 2697102 - RNA, 19 nt, Artificial Sequence
  Description of Artificial Sequence: Synthetic oligonucleotide
ugcagguccuggagggcga

SEQ ID NO: 2697103 - RNA, 19 nt, Artificial Sequence
  Description of Artificial Sequence: Synthetic oligonucleotide
gccaguggcuccaagacac

SEQ ID NO: 2697104 - RNA, 19 nt, Artificial Sequence
  Description of Artificial Sequence: Synthetic oligonucleotide
caggaccuucugcagggag

SEQ ID NO: 2697105 - RNA, 19 nt, Artificial Sequence
  Description of Artificial Sequence: Synthetic oligonucleotide
aggccgaacagggucuguc

SEQ ID NO: 2697106 - RNA, 19 nt, Artificial Sequence
  Description of Artificial Sequence: Synthetic oligonucleotide
gagaacagagaggccgaac

SEQ ID NO: 2697107 - RNA, 19 nt, Artificial Sequence
  Description of Artificial Sequence: Synthetic oligonucleotide
gguugauggaggcggccag

SEQ ID NO: 2697108 - RNA, 19 nt, Artificial Sequence
  Description of Artificial Sequence: Synthetic oligonucleotide
aagggcagccccaucccga

SEQ ID NO: 2697109 - RNA, 19 nt, Artificial Sequence
  Description of Artificial Sequence: Synthetic oligonucleotide
  modified_base (3)..(3): a, c, u, g, unknown or other
uunacccacugaccacaua

SEQ ID NO: 2697110 - RNA, 19 nt, Artificial Sequence
  Description of Artificial Sequence: Synthetic oligonucleotide
cugaccacauaaacaaagu

SEQ ID NO: 2697111 - RNA, 19 nt, Artificial Sequence
  Description of Artificial Sequence: Synthetic oligonucleotide
cuuugacuugggcauuaga

SEQ ID NO: 2697112 - RNA, 19 nt, Artificial Sequence
  Description of Artificial Sequence: Synthetic oligonucleotide
aggucaucugucagugaag

SEQ ID NO: 2697113 - RNA, 19 nt, Artificial Sequence
  Description of Artificial Sequence: Synthetic oligonucleotide
gaaggucaucugucaguga

SEQ ID NO: 2697114 - RNA, 19 nt, Artificial Sequence
  Description of Artificial Sequence: Synthetic oligonucleotide
cagauguggguacaggacu

SEQ ID NO: 2697115 - RNA, 19 nt, Artificial Sequence
  Description of Artificial Sequence: Synthetic oligonucleotide
agcacacugccaccaggga

SEQ ID NO: 2697116 - RNA, 19 nt, Artificial Sequence
  Description of Artificial Sequence: Synthetic oligonucleotide
agcgugcagcccuaccaca

SEQ ID NO: 2697117 - RNA, 19 nt, Artificial Sequence
  Description of Artificial Sequence: Synthetic oligonucleotide
caccagggaucggacauag

SEQ ID NO: 2697118 - RNA, 19 nt, Artificial Sequence
  Description of Artificial Sequence: Synthetic oligonucleotide
agccuagagcgugcagccc

SEQ ID NO: 2697119 - RNA, 19 nt, Artificial Sequence
  Description of Artificial Sequence: Synthetic oligonucleotide
ggucaucugucagugaaga

SEQ ID NO: 2697120 - RNA, 19 nt, Artificial Sequence
  Description of Artificial Sequence: Synthetic oligonucleotide
aguagaagggcagccccau

SEQ ID NO: 2697121 - RNA, 19 nt, Artificial Sequence
  Description of Artificial Sequence: Synthetic oligonucleotide
cccacugaccacauaaaca

SEQ ID NO: 2697122 - RNA, 19 nt, Artificial Sequence
  Description of Artificial Sequence: Synthetic oligonucleotide
aguggucauucaaaggguu

SEQ ID NO: 2697123 - RNA, 19 nt, Artificial Sequence
  Description of Artificial Sequence: Synthetic oligonucleotide
uaucaggcuccgcgccacc

SEQ ID NO: 2697124 - RNA, 19 nt, Artificial Sequence
  Description of Artificial Sequence: Synthetic oligonucleotide
cuggagggcgaccuucauc

SEQ ID NO: 2697125 - RNA, 19 nt, Artificial Sequence
  Description of Artificial Sequence: Synthetic oligonucleotide
guaaggcagaagugcugca

SEQ ID NO: 2697126 - RNA, 19 nt, Artificial Sequence
  Description of Artificial Sequence: Synthetic oligonucleotide
acaguagagcacacugcca

SEQ ID NO: 2697127 - RNA, 19 nt, Artificial Sequence
  Description of Artificial Sequence: Synthetic oligonucleotide
caggcuccgcgccaccugc

SEQ ID NO: 2697128 - RNA, 19 nt, Artificial Sequence
  Description of Artificial Sequence: Synthetic oligonucleotide
agacacaguagagcacacu

SEQ ID NO: 2697129 - RNA, 19 nt, Artificial Sequence
  Description of Artificial Sequence: Synthetic oligonucleotide
  modified_base (12)..(12): a, c, u, g, unknown or other
cuuacagauuunacccacu

SEQ ID NO: 2697130 - RNA, 19 nt, Artificial Sequence
  Description of Artificial Sequence: Synthetic oligonucleotide
ccagccuagagcgugcagc

SEQ ID NO: 2697131 - RNA, 19 nt, Artificial Sequence
  Description of Artificial Sequence: Synthetic oligonucleotide
aguggcuccaagacacagu

SEQ ID NO: 2697132 - RNA, 19 nt, Artificial Sequence
  Description of Artificial Sequence: Synthetic oligonucleotide
gaguagaagggcagcccca

SEQ ID NO: 2697133 - RNA, 19 nt, Artificial Sequence
  Description of Artificial Sequence: Synthetic oligonucleotide
cagcccgugucacuugcug

SEQ ID NO: 2697134 - RNA, 19 nt, Artificial Sequence
  Description of Artificial Sequence: Synthetic oligonucleotide
gcagauguggguacaggac

SEQ ID NO: 2697135 - RNA, 19 nt, Artificial Sequence
  Description of Artificial Sequence: Synthetic oligonucleotide
gcagcccuaccacagcccc

SEQ ID NO: 2697136 - RNA, 19 nt, Artificial Sequence
  Description of Artificial Sequence: Synthetic oligonucleotide
gccgaacagggucugucag

SEQ ID NO: 2697137 - RNA, 19 nt, Artificial Sequence
  Description of Artificial Sequence: Synthetic oligonucleotide
cagguguggguuccguauc

SEQ ID NO: 2697138 - RNA, 19 nt, Artificial Sequence
  Description of Artificial Sequence: Synthetic oligonucleotide
gguacaggacucguucuac

SEQ ID NO: 2697139 - RNA, 19 nt, Artificial Sequence
  Description of Artificial Sequence: Synthetic oligonucleotide
aagguccccaugaguccag

SEQ ID NO: 2697140 - RNA, 19 nt, Artificial Sequence
  Description of Artificial Sequence: Synthetic oligonucleotide
ccgaacagggucugucagg

SEQ ID NO: 2697141 - RNA, 19 nt, Artificial Sequence
  Description of Artificial Sequence: Synthetic oligonucleotide
cagguuuguccaguaugug

SEQ ID NO: 2697142 - RNA, 19 nt, Artificial Sequence
  Description of Artificial Sequence: Synthetic oligonucleotide
cacagccccauagugagaa

SEQ ID NO: 2697143 - RNA, 19 nt, Artificial Sequence
  Description of Artificial Sequence: Synthetic oligonucleotide
cacuuacaagguccccaug

SEQ ID NO: 2697144 - RNA, 19 nt, Artificial Sequence
  Description of Artificial Sequence: Synthetic oligonucleotide
agaguccaguggucauuca

SEQ ID NO: 2697145 - RNA, 19 nt, Artificial Sequence
  Description of Artificial Sequence: Synthetic oligonucleotide
ccaagacacaguagagcac

SEQ ID NO: 2697146 - RNA, 19 nt, Artificial Sequence
  Description of Artificial Sequence: Synthetic oligonucleotide
gucacuugcugguaguauu

SEQ ID NO: 2697147 - RNA, 19 nt, Artificial Sequence
  Description of Artificial Sequence: Synthetic oligonucleotide
ggaucggacauagggcccc

SEQ ID NO: 2697148 - RNA, 19 nt, Artificial Sequence
  Description of Artificial Sequence: Synthetic oligonucleotide
uucaucagcuguggaucau

SEQ ID NO: 2697149 - RNA, 19 nt, Artificial Sequence
  Description of Artificial Sequence: Synthetic oligonucleotide
guacagcccgugucacuug

SEQ ID NO: 2697150 - RNA, 19 nt, Artificial Sequence
  Description of Artificial Sequence: Synthetic oligonucleotide
cagccccauagugagaaca

SEQ ID NO: 2697151 - RNA, 19 nt, Artificial Sequence
  Description of Artificial Sequence: Synthetic oligonucleotide
caagguccccaugagucca

SEQ ID NO: 2697152 - RNA, 19 nt, Artificial Sequence
  Description of Artificial Sequence: Synthetic oligonucleotide
guggguuccguaucaggcu

SEQ ID NO: 2697153 - RNA, 19 nt, Artificial Sequence
  Description of Artificial Sequence: Synthetic oligonucleotide
guaucaggcuccgcgccac

SEQ ID NO: 2697154 - RNA, 19 nt, Artificial Sequence
  Description of Artificial Sequence: Synthetic oligonucleotide
gguuccguaucaggcuccg

SEQ ID NO: 2697155 - RNA, 19 nt, Artificial Sequence
  Description of Artificial Sequence: Synthetic oligonucleotide
caccugcaguagucggugc

SEQ ID NO: 2697156 - RNA, 19 nt, Artificial Sequence
  Description of Artificial Sequence: Synthetic oligonucleotide
agcacagguguggguuccg

SEQ ID NO: 2697157 - RNA, 19 nt, Artificial Sequence
  Description of Artificial Sequence: Synthetic oligonucleotide
ggcagccccaucccgaaga

SEQ ID NO: 2697158 - RNA, 19 nt, Artificial Sequence
  Description of Artificial Sequence: Synthetic oligonucleotide
caguagucggugcagcugu

SEQ ID NO: 2697159 - RNA, 19 nt, Artificial Sequence
  Description of Artificial Sequence: Synthetic oligonucleotide
agcaccgccugcagguuug

SEQ ID NO: 2697160 - RNA, 19 nt, Artificial Sequence
  Description of Artificial Sequence: Synthetic oligonucleotide
caguggucauucaaagggu

SEQ ID NO: 2697161 - RNA, 19 nt, Artificial Sequence
  Description of Artificial Sequence: Synthetic oligonucleotide
guacaggacucguucuacu

SEQ ID NO: 2697162 - RNA, 19 nt, Artificial Sequence
  Description of Artificial Sequence: Synthetic oligonucleotide
auguggguacaggacucgu

SEQ ID NO: 2697163 - RNA, 19 nt, Artificial Sequence
  Description of Artificial Sequence: Synthetic oligonucleotide
gccccaagcacaggugugg

SEQ ID NO: 2697164 - RNA, 19 nt, Artificial Sequence
  Description of Artificial Sequence: Synthetic oligonucleotide
uuccagccuagagcgugca

SEQ ID NO: 2697165 - RNA, 19 nt, Artificial Sequence
  Description of Artificial Sequence: Synthetic oligonucleotide
gccacuuacaaggucccca

SEQ ID NO: 2697166 - RNA, 19 nt, Artificial Sequence
  Description of Artificial Sequence: Synthetic oligonucleotide
guagaagggcagccccauc

SEQ ID NO: 2697167 - RNA, 19 nt, Artificial Sequence
  Description of Artificial Sequence: Synthetic oligonucleotide
ccuucugcagggagagcag

SEQ ID NO: 2697168 - RNA, 19 nt, Artificial Sequence
  Description of Artificial Sequence: Synthetic oligonucleotide
gcaguagucggugcagcug

SEQ ID NO: 2697169 - RNA, 19 nt, Artificial Sequence
  Description of Artificial Sequence: Synthetic oligonucleotide
ccuuccagccuagagcgug

SEQ ID NO: 2697170 - RNA, 19 nt, Artificial Sequence
  Description of Artificial Sequence: Synthetic oligonucleotide
agggcagccccaucccgaa

SEQ ID NO: 2697171 - RNA, 19 nt, Artificial Sequence
  Description of Artificial Sequence: Synthetic oligonucleotide
auagggccccaagcacagg

SEQ ID NO: 2697172 - RNA, 19 nt, Artificial Sequence
  Description of Artificial Sequence: Synthetic oligonucleotide
auggaggcggccaguggcu

SEQ ID NO: 2697173 - RNA, 19 nt, Artificial Sequence
  Description of Artificial Sequence: Synthetic oligonucleotide
guagucggugcagcuguuc

SEQ ID NO: 2697174 - RNA, 19 nt, Artificial Sequence
  Description of Artificial Sequence: Synthetic oligonucleotide
cuugggcauuagauacgga

SEQ ID NO: 2697175 - RNA, 19 nt, Artificial Sequence
  Description of Artificial Sequence: Synthetic oligonucleotide
gagaggccgaacagggucu

SEQ ID NO: 2697176 - RNA, 19 nt, Artificial Sequence
  Description of Artificial Sequence: Synthetic oligonucleotide
uccgcgccaccugcaguag

SEQ ID NO: 2697177 - RNA, 19 nt, Artificial Sequence
  Description of Artificial Sequence: Synthetic oligonucleotide
uugugcccaucugcuuuga

SEQ ID NO: 2697178 - RNA, 19 nt, Artificial Sequence
  Description of Artificial Sequence: Synthetic oligonucleotide
ccguaucaggcuccgcgcc

SEQ ID NO: 2697179 - RNA, 19 nt, Artificial Sequence
  Description of Artificial Sequence: Synthetic oligonucleotide
cuccgcgccaccugcagua

SEQ ID NO: 2697180 - RNA, 19 nt, Artificial Sequence
  Description of Artificial Sequence: Synthetic oligonucleotide
ugcugcaaucuuggaguuu

SEQ ID NO: 2697181 - RNA, 19 nt, Artificial Sequence
  Description of Artificial Sequence: Synthetic oligonucleotide
gcagguuuguccaguaugu

SEQ ID NO: 2697182 - RNA, 19 nt, Artificial Sequence
  Description of Artificial Sequence: Synthetic oligonucleotide
gaagaguccaguggucauu

SEQ ID NO: 2697183 - RNA, 19 nt, Artificial Sequence
  Description of Artificial Sequence: Synthetic oligonucleotide
gggaucggacauagggccc

SEQ ID NO: 2697184 - RNA, 19 nt, Artificial Sequence
  Description of Artificial Sequence: Synthetic oligonucleotide
ggccgaacagggucuguca

SEQ ID NO: 2697185 - RNA, 19 nt, Artificial Sequence
  Description of Artificial Sequence: Synthetic oligonucleotide
accagggaucggacauagg

SEQ ID NO: 2697186 - RNA, 19 nt, Artificial Sequence
  Description of Artificial Sequence: Synthetic oligonucleotide
ggcagaagugcugcaaucu

SEQ ID NO: 2697187 - RNA, 19 nt, Artificial Sequence
  Description of Artificial Sequence: Synthetic oligonucleotide
ggaggcggccaguggcucc

SEQ ID NO: 2697188 - RNA, 19 nt, Artificial Sequence
  Description of Artificial Sequence: Synthetic oligonucleotide
ccgugucacuugcugguag

SEQ ID NO: 2697189 - RNA, 19 nt, Artificial Sequence
  Description of Artificial Sequence: Synthetic oligonucleotide
cuagagcgugcagcccuac

SEQ ID NO: 2697190 - RNA, 19 nt, Artificial Sequence
  Description of Artificial Sequence: Synthetic oligonucleotide
aggacucguucuacugccu

SEQ ID NO: 2697191 - RNA, 19 nt, Artificial Sequence
  Description of Artificial Sequence: Synthetic oligonucleotide
gcauuagauacggaauagu

SEQ ID NO: 2697192 - RNA, 19 nt, Artificial Sequence
  Description of Artificial Sequence: Synthetic oligonucleotide
ggguacaggacucguucua

SEQ ID NO: 2697193 - RNA, 19 nt, Artificial Sequence
  Description of Artificial Sequence: Synthetic oligonucleotide
ggagggcgaccuucaucag

SEQ ID NO: 2697194 - RNA, 19 nt, Artificial Sequence
  Description of Artificial Sequence: Synthetic oligonucleotide
cggaauagucauccagcac

SEQ ID NO: 2697195 - RNA, 19 nt, Artificial Sequence
  Description of Artificial Sequence: Synthetic oligonucleotide
uggaggcggccaguggcuc

SEQ ID NO: 2697196 - RNA, 19 nt, Artificial Sequence
  Description of Artificial Sequence: Synthetic oligonucleotide
ccaccugcaguagucggug

SEQ ID NO: 2697197 - RNA, 19 nt, Artificial Sequence
  Description of Artificial Sequence: Synthetic oligonucleotide
gaucggacauagggcccca

SEQ ID NO: 2697198 - RNA, 19 nt, Artificial Sequence
  Description of Artificial Sequence: Synthetic oligonucleotide
cucguucuacugccuucca

SEQ ID NO: 2697199 - RNA, 19 nt, Artificial Sequence
  Description of Artificial Sequence: Synthetic oligonucleotide
gcggccaguggcuccaaga

SEQ ID NO: 2697200 - RNA, 19 nt, Artificial Sequence
  Description of Artificial Sequence: Synthetic oligonucleotide
ggguugauggaggcggcca

SEQ ID NO: 2697201 - RNA, 19 nt, Artificial Sequence
  Description of Artificial Sequence: Synthetic oligonucleotide
cacagguguggguuccgua

SEQ ID NO: 2697202 - RNA, 19 nt, Artificial Sequence
  Description of Artificial Sequence: Synthetic oligonucleotide
guuccguaucaggcuccgc

SEQ ID NO: 2697203 - RNA, 19 nt, Artificial Sequence
  Description of Artificial Sequence: Synthetic oligonucleotide
gcccaucugcuuugacuug

SEQ ID NO: 2697204 - RNA, 19 nt, Artificial Sequence
  Description of Artificial Sequence: Synthetic oligonucleotide
ccgccugcagguuugucca

SEQ ID NO: 2697205 - RNA, 19 nt, Artificial Sequence
  Description of Artificial Sequence: Synthetic oligonucleotide
ggcuccgcgccaccugcag

SEQ ID NO: 2697206 - RNA, 19 nt, Artificial Sequence
  Description of Artificial Sequence: Synthetic oligonucleotide
gugucacuugcugguagua

SEQ ID NO: 2697207 - RNA, 19 nt, Artificial Sequence
  Description of Artificial Sequence: Synthetic oligonucleotide
ggcgaccuucaucagcugu

SEQ ID NO: 2697208 - RNA, 19 nt, Artificial Sequence
  Description of Artificial Sequence: Synthetic oligonucleotide
ccccaguacagcccguguc

SEQ ID NO: 2697209 - RNA, 19 nt, Artificial Sequence
  Description of Artificial Sequence: Synthetic oligonucleotide
cuguuccaggucauggcuu

SEQ ID NO: 2697210 - RNA, 19 nt, Artificial Sequence
  Description of Artificial Sequence: Synthetic oligonucleotide
cccgaagaguccagugguc

SEQ ID NO: 2697211 - RNA, 19 nt, Artificial Sequence
  Description of Artificial Sequence: Synthetic oligonucleotide
ccgaagaguccagugguca

SEQ ID NO: 2697212 - RNA, 19 nt, Artificial Sequence
  Description of Artificial Sequence: Synthetic oligonucleotide
gccaccagggaucggacau

SEQ ID NO: 2697213 - RNA, 19 nt, Artificial Sequence
  Description of Artificial Sequence: Synthetic oligonucleotide
  modified_base (19)..(19): a, c, u, g, unknown or other
gucauggcuuacagauuun

SEQ ID NO: 2697214 - RNA, 19 nt, Artificial Sequence
  Description of Artificial Sequence: Synthetic oligonucleotide
gcgccaccugcaguagucg

SEQ ID NO: 2697215 - RNA, 19 nt, Artificial Sequence
  Description of Artificial Sequence: Synthetic oligonucleotide
ggccccaagcacaggugug

SEQ ID NO: 2697216 - RNA, 19 nt, Artificial Sequence
  Description of Artificial Sequence: Synthetic oligonucleotide
ccccaagcacagguguggg

SEQ ID NO: 2697217 - RNA, 19 nt, Artificial Sequence
  Description of Artificial Sequence: Synthetic oligonucleotide
cgccaccugcaguagucgg

SEQ ID NO: 2697218 - RNA, 19 nt, Artificial Sequence
  Description of Artificial Sequence: Synthetic oligonucleotide
acagcccgugucacuugcu

SEQ ID NO: 2697219 - RNA, 19 nt, Artificial Sequence
  Description of Artificial Sequence: Synthetic oligonucleotide
gcacacugccaccagggau

SEQ ID NO: 2697220 - RNA, 19 nt, Artificial Sequence
  Description of Artificial Sequence: Synthetic oligonucleotide
cagcccuaccacagcccca

SEQ ID NO: 2697221 - RNA, 19 nt, Artificial Sequence
  Description of Artificial Sequence: Synthetic oligonucleotide
cccaucccgaagaguccag

SEQ ID NO: 2697222 - RNA, 19 nt, Artificial Sequence
  Description of Artificial Sequence: Synthetic oligonucleotide
agguccccaugaguccaga

SEQ ID NO: 2697223 - RNA, 19 nt, Artificial Sequence
  Description of Artificial Sequence: Synthetic oligonucleotide
gcagaagugcugcaaucuu

SEQ ID NO: 2697224 - RNA, 19 nt, Artificial Sequence
  Description of Artificial Sequence: Synthetic oligonucleotide
cagagaggccgaacagggu

SEQ ID NO: 2697225 - RNA, 19 nt, Artificial Sequence
  Description of Artificial Sequence: Synthetic oligonucleotide
gggucugucaggaccuucu

SEQ ID NO: 2697226 - RNA, 19 nt, Artificial Sequence
  Description of Artificial Sequence: Synthetic oligonucleotide
ggccacuuacaaggucccc

SEQ ID NO: 2697227 - RNA, 19 nt, Artificial Sequence
  Description of Artificial Sequence: Synthetic oligonucleotide
aguagucggugcagcuguu

SEQ ID NO: 2697228 - RNA, 19 nt, Artificial Sequence
  Description of Artificial Sequence: Synthetic oligonucleotide
ccuaccacagccccauagu

SEQ ID NO: 2697229 - RNA, 19 nt, Artificial Sequence
  Description of Artificial Sequence: Synthetic oligonucleotide
caguacagcccgugucacu

SEQ ID NO: 2697230 - RNA, 19 nt, Artificial Sequence
  Description of Artificial Sequence: Synthetic oligonucleotide
gugcugcaaucuuggaguu

SEQ ID NO: 2697231 - RNA, 19 nt, Artificial Sequence
  Description of Artificial Sequence: Synthetic oligonucleotide
gguccccaugaguccagaa

SEQ ID NO: 2697232 - RNA, 19 nt, Artificial Sequence
  Description of Artificial Sequence: Synthetic oligonucleotide
cgcgccaccugcaguaguc

SEQ ID NO: 2697233 - RNA, 19 nt, Artificial Sequence
  Description of Artificial Sequence: Synthetic oligonucleotide
gccccauagugagaacaga

SEQ ID NO: 2697234 - RNA, 19 nt, Artificial Sequence
  Description of Artificial Sequence: Synthetic oligonucleotide
cugcaaucuuggaguuugu

SEQ ID NO: 2697235 - RNA, 19 nt, Artificial Sequence
  Description of Artificial Sequence: Synthetic oligonucleotide
aucggacauagggccccaa

SEQ ID NO: 2697236 - RNA, 19 nt, Artificial Sequence
  Description of Artificial Sequence: Synthetic oligonucleotide
ggucauucaaaggguugau

SEQ ID NO: 2697237 - RNA, 19 nt, Artificial Sequence
  Description of Artificial Sequence: Synthetic oligonucleotide
ggacucguucuacugccuu

SEQ ID NO: 2697238 - RNA, 19 nt, Artificial Sequence
  Description of Artificial Sequence: Synthetic oligonucleotide
cacugccaccagggaucgg

SEQ ID NO: 2697239 - RNA, 19 nt, Artificial Sequence
  Description of Artificial Sequence: Synthetic oligonucleotide
cugcagguuuguccaguau

SEQ ID NO: 2697240 - RNA, 19 nt, Artificial Sequence
  Description of Artificial Sequence: Synthetic oligonucleotide
ccacuuacaagguccccau

SEQ ID NO: 2697241 - RNA, 19 nt, Artificial Sequence
  Description of Artificial Sequence: Synthetic oligonucleotide
cguaucaggcuccgcgcca

SEQ ID NO: 2697242 - RNA, 19 nt, Artificial Sequence
  Description of Artificial Sequence: Synthetic oligonucleotide
ccaagcacagguguggguu

SEQ ID NO: 2697243 - RNA, 19 nt, Artificial Sequence
  Description of Artificial Sequence: Synthetic oligonucleotide
ccugcagguuuguccagua

SEQ ID NO: 2697244 - RNA, 19 nt, Artificial Sequence
  Description of Artificial Sequence: Synthetic oligonucleotide
cugcugauagaggccacuu

SEQ ID NO: 2697245 - RNA, 19 nt, Artificial Sequence
  Description of Artificial Sequence: Synthetic oligonucleotide
ccaguggcuccaagacaca

SEQ ID NO: 2697246 - RNA, 19 nt, Artificial Sequence
  Description of Artificial Sequence: Synthetic oligonucleotide
caccgccugcagguuuguc

SEQ ID NO: 2697247 - RNA, 19 nt, Artificial Sequence
  Description of Artificial Sequence: Synthetic oligonucleotide
aggcuccgcgccaccugca

SEQ ID NO: 2697248 - RNA, 19 nt, Artificial Sequence
  Description of Artificial Sequence: Synthetic oligonucleotide
guccaguaugugggcagau

SEQ ID NO: 2697249 - RNA, 19 nt, Artificial Sequence
  Description of Artificial Sequence: Synthetic oligonucleotide
ccuagagcgugcagcccua

SEQ ID NO: 2697250 - RNA, 19 nt, Artificial Sequence
  Description of Artificial Sequence: Synthetic oligonucleotide
gccugcagguuuguccagu

SEQ ID NO: 2697251 - RNA, 19 nt, Artificial Sequence
  Description of Artificial Sequence: Synthetic oligonucleotide
cagcaccgccugcagguuu

SEQ ID NO: 2697252 - RNA, 19 nt, Artificial Sequence
  Description of Artificial Sequence: Synthetic oligonucleotide
gcuccgcgccaccugcagu

SEQ ID NO: 2697253 - RNA, 19 nt, Artificial Sequence
  Description of Artificial Sequence: Synthetic oligonucleotide
cccaagcacaggugugggu

SEQ ID NO: 2697254 - RNA, 19 nt, Artificial Sequence
  Description of Artificial Sequence: Synthetic oligonucleotide
gcacagguguggguuccgu

SEQ ID NO: 2697255 - RNA, 19 nt, Artificial Sequence
  Description of Artificial Sequence: Synthetic oligonucleotide
ccagaagauguggcugagu

SEQ ID NO: 2697256 - RNA, 19 nt, Artificial Sequence
  Description of Artificial Sequence: Synthetic oligonucleotide
ccaccagggaucggacaua

SEQ ID NO: 2697257 - RNA, 19 nt, Artificial Sequence
  Description of Artificial Sequence: Synthetic oligonucleotide
aggcggccaguggcuccaa

SEQ ID NO: 2697258 - RNA, 19 nt, Artificial Sequence
  Description of Artificial Sequence: Synthetic oligonucleotide
cccgugucacuugcuggua

SEQ ID NO: 2697259 - RNA, 19 nt, Artificial Sequence
  Description of Artificial Sequence: Synthetic oligonucleotide
gccuuccagccuagagcgu

SEQ ID NO: 2697260 - RNA, 19 nt, Artificial Sequence
  Description of Artificial Sequence: Synthetic oligonucleotide
cagggucugucaggaccuu

SEQ ID NO: 2697261 - RNA, 19 nt, Artificial Sequence
  Description of Artificial Sequence: Synthetic oligonucleotide
ccuggagggcgaccuucau

SEQ ID NO: 2697262 - RNA, 19 nt, Artificial Sequence
  Description of Artificial Sequence: Synthetic oligonucleotide
gcccuaccacagccccaua

SEQ ID NO: 2697263 - RNA, 19 nt, Artificial Sequence
  Description of Artificial Sequence: Synthetic oligonucleotide
ccgcgccaccugcaguagu

SEQ ID NO: 2697264 - RNA, 19 nt, Artificial Sequence
  Description of Artificial Sequence: Synthetic oligonucleotide
ccagcaccgccugcagguu

SEQ ID NO: 2697265 - RNA, 19 nt, Artificial Sequence
  Description of Artificial Sequence: Synthetic oligonucleotide
aaaacaauagauaugauac

SEQ ID NO: 2697266 - RNA, 19 nt, Artificial Sequence
  Description of Artificial Sequence: Synthetic oligonucleotide
aaagaauggaguuacacac

SEQ ID NO: 2697267 - RNA, 19 nt, Artificial Sequence
  Description of Artificial Sequence: Synthetic oligonucleotide
ugcucuacaauauugacgg

SEQ ID NO: 2697268 - RNA, 19 nt, Artificial Sequence
  Description of Artificial Sequence: Synthetic oligonucleotide
auaugauacuauuagcugc

SEQ ID NO: 2697269 - RNA, 19 nt, Artificial Sequence
  Description of Artificial Sequence: Synthetic oligonucleotide
uuauauuggaucaaggaca

SEQ ID NO: 2697270 - RNA, 19 nt, Artificial Sequence
  Description of Artificial Sequence: Synthetic oligonucleotide
auagauaugauacuauuag

SEQ ID NO: 2697271 - RNA, 19 nt, Artificial Sequence
  Description of Artificial Sequence: Synthetic oligonucleotide
uuuauauuggaucaaggac

SEQ ID NO: 2697272 - RNA, 19 nt, Artificial Sequence
  Description of Artificial Sequence: Synthetic oligonucleotide
uuuuccaaaauguagagau

SEQ ID NO: 2697273 - RNA, 19 nt, Artificial Sequence
  Description of Artificial Sequence: Synthetic oligonucleotide
uugaguaaggcauacagca

SEQ ID NO: 2697274 - RNA, 19 nt, Artificial Sequence
  Description of Artificial Sequence: Synthetic oligonucleotide
uguugaguaaggcauacag

SEQ ID NO: 2697275 - RNA, 19 nt, Artificial Sequence
  Description of Artificial Sequence: Synthetic oligonucleotide
agcaguuuuauauuggauc

SEQ ID NO: 2697276 - RNA, 19 nt, Artificial Sequence
  Description of Artificial Sequence: Synthetic oligonucleotide
uuugaaauggcccaaacuu

SEQ ID NO: 2697277 - RNA, 19 nt, Artificial Sequence
  Description of Artificial Sequence: Synthetic oligonucleotide
uaaauuuccggucaaggug

SEQ ID NO: 2697278 - RNA, 19 nt, Artificial Sequence
  Description of Artificial Sequence: Synthetic oligonucleotide
aaauuuccggucaaggugc

SEQ ID NO: 2697279 - RNA, 19 nt, Artificial Sequence
  Description of Artificial Sequence: Synthetic oligonucleotide
ucuaugauaagaaagugua

SEQ ID NO: 2697280 - RNA, 19 nt, Artificial Sequence
  Description of Artificial Sequence: Synthetic oligonucleotide
ucgaguaccaaaacaauag

SEQ ID NO: 2697281 - RNA, 19 nt, Artificial Sequence
  Description of Artificial Sequence: Synthetic oligonucleotide
acaauauugacggacuucc

SEQ ID NO: 2697282 - RNA, 19 nt, Artificial Sequence
  Description of Artificial Sequence: Synthetic oligonucleotide
caaacuuuugaaauggccc

SEQ ID NO: 2697283 - RNA, 19 nt, Artificial Sequence
  Description of Artificial Sequence: Synthetic oligonucleotide
gauauauucuguucguuag

SEQ ID NO: 2697284 - RNA, 19 nt, Artificial Sequence
  Description of Artificial Sequence: Synthetic oligonucleotide
aauggaguuacacacuuga

SEQ ID NO: 2697285 - RNA, 19 nt, Artificial Sequence
  Description of Artificial Sequence: Synthetic oligonucleotide
aaaucgagcaccuuaaauu

SEQ ID NO: 2697286 - RNA, 19 nt, Artificial Sequence
  Description of Artificial Sequence: Synthetic oligonucleotide
uuugaaaugacugaagaaa

SEQ ID NO: 2697287 - RNA, 19 nt, Artificial Sequence
  Description of Artificial Sequence: Synthetic oligonucleotide
guagagaucugcuugaggc

SEQ ID NO: 2697288 - RNA, 19 nt, Artificial Sequence
  Description of Artificial Sequence: Synthetic oligonucleotide
uaugauacuauuagcugcc

SEQ ID NO: 2697289 - RNA, 19 nt, Artificial Sequence
  Description of Artificial Sequence: Synthetic oligonucleotide
uuucgauucaugcucagca

SEQ ID NO: 2697290 - RNA, 19 nt, Artificial Sequence
  Description of Artificial Sequence: Synthetic oligonucleotide
ucuuugaaaugacugaaga

SEQ ID NO: 2697291 - RNA, 19 nt, Artificial Sequence
  Description of Artificial Sequence: Synthetic oligonucleotide
aaaguguaacaguauagga

SEQ ID NO: 2697292 - RNA, 19 nt, Artificial Sequence
  Description of Artificial Sequence: Synthetic oligonucleotide
aaacuuuugaaauggccca

SEQ ID NO: 2697293 - RNA, 19 nt, Artificial Sequence
  Description of Artificial Sequence: Synthetic oligonucleotide
uaugauaagaaaguguaac

SEQ ID NO: 2697294 - RNA, 19 nt, Artificial Sequence
  Description of Artificial Sequence: Synthetic oligonucleotide
ugauaagaaaguguaacag

SEQ ID NO: 2697295 - RNA, 19 nt, Artificial Sequence
  Description of Artificial Sequence: Synthetic oligonucleotide
uugaacagcaguuuuauau

SEQ ID NO: 2697296 - RNA, 19 nt, Artificial Sequence
  Description of Artificial Sequence: Synthetic oligonucleotide
aagaaaaucucuugcagau

SEQ ID NO: 2697297 - RNA, 19 nt, Artificial Sequence
  Description of Artificial Sequence: Synthetic oligonucleotide
guuuccaacacucagccug

SEQ ID NO: 2697298 - RNA, 19 nt, Artificial Sequence
  Description of Artificial Sequence: Synthetic oligonucleotide
ucagccugcugccaaaucg

SEQ ID NO: 2697299 - RNA, 19 nt, Artificial Sequence
  Description of Artificial Sequence: Synthetic oligonucleotide
aaugacugaagaaaaucuc

SEQ ID NO: 2697300 - RNA, 19 nt, Artificial Sequence
  Description of Artificial Sequence: Synthetic oligonucleotide
aauggcccaaacuucuuuc

SEQ ID NO: 2697301 - RNA, 19 nt, Artificial Sequence
  Description of Artificial Sequence: Synthetic oligonucleotide
auauugacggacuuccuuc

SEQ ID NO: 2697302 - RNA, 19 nt, Artificial Sequence
  Description of Artificial Sequence: Synthetic oligonucleotide
uuaguuuccaacacucagc

SEQ ID NO: 2697303 - RNA, 19 nt, Artificial Sequence
  Description of Artificial Sequence: Synthetic oligonucleotide
uguugugaauggaaggucc

SEQ ID NO: 2697304 - RNA, 19 nt, Artificial Sequence
  Description of Artificial Sequence: Synthetic oligonucleotide
accaaaacaauagauauga

SEQ ID NO: 2697305 - RNA, 19 nt, Artificial Sequence
  Description of Artificial Sequence: Synthetic oligonucleotide
uucuaugauaagaaagugu

SEQ ID NO: 2697306 - RNA, 19 nt, Artificial Sequence
  Description of Artificial Sequence: Synthetic oligonucleotide
aaaugacugaagaaaaucu

SEQ ID NO: 2697307 - RNA, 19 nt, Artificial Sequence
  Description of Artificial Sequence: Synthetic oligonucleotide
ucuacaccugguuugauga

SEQ ID NO: 2697308 - RNA, 19 nt, Artificial Sequence
  Description of Artificial Sequence: Synthetic oligonucleotide
uacagcauggcuucuauga

SEQ ID NO: 2697309 - RNA, 19 nt, Artificial Sequence
  Description of Artificial Sequence: Synthetic oligonucleotide
uaguuuccaacacucagcc

SEQ ID NO: 2697310 - RNA, 19 nt, Artificial Sequence
  Description of Artificial Sequence: Synthetic oligonucleotide
uuaaauuuccggucaaggu

SEQ ID NO: 2697311 - RNA, 19 nt, Artificial Sequence
  Description of Artificial Sequence: Synthetic oligonucleotide
uauauuggaucaaggacac

SEQ ID NO: 2697312 - RNA, 19 nt, Artificial Sequence
  Description of Artificial Sequence: Synthetic oligonucleotide
aaacaauagauaugauacu

SEQ ID NO: 2697313 - RNA, 19 nt, Artificial Sequence
  Description of Artificial Sequence: Synthetic oligonucleotide
ucugugcucuacaauauug

SEQ ID NO: 2697314 - RNA, 19 nt, Artificial Sequence
  Description of Artificial Sequence: Synthetic oligonucleotide
ugugucgccgaucaucagg

SEQ ID NO: 2697315 - RNA, 19 nt, Artificial Sequence
  Description of Artificial Sequence: Synthetic oligonucleotide
guuaguuuccaacacucag

SEQ ID NO: 2697316 - RNA, 19 nt, Artificial Sequence
  Description of Artificial Sequence: Synthetic oligonucleotide
ucuacaauauugacggacu

SEQ ID NO: 2697317 - RNA, 19 nt, Artificial Sequence
  Description of Artificial Sequence: Synthetic oligonucleotide
agagauguguugugaaugg

SEQ ID NO: 2697318 - RNA, 19 nt, Artificial Sequence
  Description of Artificial Sequence: Synthetic oligonucleotide
uguucguuaguuuccaaca

SEQ ID NO: 2697319 - RNA, 19 nt, Artificial Sequence
  Description of Artificial Sequence: Synthetic oligonucleotide
uggaguuacacacuugaac

SEQ ID NO: 2697320 - RNA, 19 nt, Artificial Sequence
  Description of Artificial Sequence: Synthetic oligonucleotide
uauuggaucaaggacacgu

SEQ ID NO: 2697321 - RNA, 19 nt, Artificial Sequence
  Description of Artificial Sequence: Synthetic oligonucleotide
ucugucaaaacucuccaaa

SEQ ID NO: 2697322 - RNA, 19 nt, Artificial Sequence
  Description of Artificial Sequence: Synthetic oligonucleotide
uuuugaaauggcccaaacu

SEQ ID NO: 2697323 - RNA, 19 nt, Artificial Sequence
  Description of Artificial Sequence: Synthetic oligonucleotide
aaucgagcaccuuaaauuu

SEQ ID NO: 2697324 - RNA, 19 nt, Artificial Sequence
  Description of Artificial Sequence: Synthetic oligonucleotide
ugaaauggcccaaacuucu

SEQ ID NO: 2697325 - RNA, 19 nt, Artificial Sequence
  Description of Artificial Sequence: Synthetic oligonucleotide
uuuuccuuccacucucugg

SEQ ID NO: 2697326 - RNA, 19 nt, Artificial Sequence
  Description of Artificial Sequence: Synthetic oligonucleotide
agauaugauacuauuagcu

SEQ ID NO: 2697327 - RNA, 19 nt, Artificial Sequence
  Description of Artificial Sequence: Synthetic oligonucleotide
cuuaaauuuccggucaagg

SEQ ID NO: 2697328 - RNA, 19 nt, Artificial Sequence
  Description of Artificial Sequence: Synthetic oligonucleotide
aagaaaguguaacaguaua

SEQ ID NO: 2697329 - RNA, 19 nt, Artificial Sequence
  Description of Artificial Sequence: Synthetic oligonucleotide
uagauaugauacuauuagc

SEQ ID NO: 2697330 - RNA, 19 nt, Artificial Sequence
  Description of Artificial Sequence: Synthetic oligonucleotide
cuauuagcugccuuaauuc

SEQ ID NO: 2697331 - RNA, 19 nt, Artificial Sequence
  Description of Artificial Sequence: Synthetic oligonucleotide
aacaauagauaugauacua

SEQ ID NO: 2697332 - RNA, 19 nt, Artificial Sequence
  Description of Artificial Sequence: Synthetic oligonucleotide
aauucucucucucucuaca

SEQ ID NO: 2697333 - RNA, 19 nt, Artificial Sequence
  Description of Artificial Sequence: Synthetic oligonucleotide
gaguaaggcauacagcaug

SEQ ID NO: 2697334 - RNA, 19 nt, Artificial Sequence
  Description of Artificial Sequence: Synthetic oligonucleotide
aauauugacggacuuccuu

SEQ ID NO: 2697335 - RNA, 19 nt, Artificial Sequence
  Description of Artificial Sequence: Synthetic oligonucleotide
ucugcuugaggcaucuuug

SEQ ID NO: 2697336 - RNA, 19 nt, Artificial Sequence
  Description of Artificial Sequence: Synthetic oligonucleotide
augauaagaaaguguaaca

SEQ ID NO: 2697337 - RNA, 19 nt, Artificial Sequence
  Description of Artificial Sequence: Synthetic oligonucleotide
uguagagaucugcuugagg

SEQ ID NO: 2697338 - RNA, 19 nt, Artificial Sequence
  Description of Artificial Sequence: Synthetic oligonucleotide
ucgagcaccuuaaauuucc

SEQ ID NO: 2697339 - RNA, 19 nt, Artificial Sequence
  Description of Artificial Sequence: Synthetic oligonucleotide
agcaccuuaaauuuccggu

SEQ ID NO: 2697340 - RNA, 19 nt, Artificial Sequence
  Description of Artificial Sequence: Synthetic oligonucleotide
auguguugugaauggaagg

SEQ ID NO: 2697341 - RNA, 19 nt, Artificial Sequence
  Description of Artificial Sequence: Synthetic oligonucleotide
ucgauucaugcucagcacc

SEQ ID NO: 2697342 - RNA, 19 nt, Artificial Sequence
  Description of Artificial Sequence: Synthetic oligonucleotide
uuagcugccuuaauucucu

SEQ ID NO: 2697343 - RNA, 19 nt, Artificial Sequence
  Description of Artificial Sequence: Synthetic oligonucleotide
guaacaguauaggaaacag

SEQ ID NO: 2697344 - RNA, 19 nt, Artificial Sequence
  Description of Artificial Sequence: Synthetic oligonucleotide
ugcagauagacagaugaug

SEQ ID NO: 2697345 - RNA, 19 nt, Artificial Sequence
  Description of Artificial Sequence: Synthetic oligonucleotide
ucuggacaaagaauggagu

SEQ ID NO: 2697346 - RNA, 19 nt, Artificial Sequence
  Description of Artificial Sequence: Synthetic oligonucleotide
gauacuauuagcugccuua

SEQ ID NO: 2697347 - RNA, 19 nt, Artificial Sequence
  Description of Artificial Sequence: Synthetic oligonucleotide
uauuagcugccuuaauucu

SEQ ID NO: 2697348 - RNA, 19 nt, Artificial Sequence
  Description of Artificial Sequence: Synthetic oligonucleotide
guuuuauauuggaucaagg

SEQ ID NO: 2697349 - RNA, 19 nt, Artificial Sequence
  Description of Artificial Sequence: Synthetic oligonucleotide
aauagauaugauacuauua

SEQ ID NO: 2697350 - RNA, 19 nt, Artificial Sequence
  Description of Artificial Sequence: Synthetic oligonucleotide
acuauuagcugccuuaauu

SEQ ID NO: 2697351 - RNA, 19 nt, Artificial Sequence
  Description of Artificial Sequence: Synthetic oligonucleotide
gacugaagaaaaucucuug

SEQ ID NO: 2697352 - RNA, 19 nt, Artificial Sequence
  Description of Artificial Sequence: Synthetic oligonucleotide
ucucucuacaccugguuug

SEQ ID NO: 2697353 - RNA, 19 nt, Artificial Sequence
  Description of Artificial Sequence: Synthetic oligonucleotide
uguaacaguauaggaaaca

SEQ ID NO: 2697354 - RNA, 19 nt, Artificial Sequence
  Description of Artificial Sequence: Synthetic oligonucleotide
uguguugugaauggaaggu

SEQ ID NO: 2697355 - RNA, 19 nt, Artificial Sequence
  Description of Artificial Sequence: Synthetic oligonucleotide
cuccaaacuuuugaaaugg

SEQ ID NO: 2697356 - RNA, 19 nt, Artificial Sequence
  Description of Artificial Sequence: Synthetic oligonucleotide
uugaaauggcccaaacuuc

SEQ ID NO: 2697357 - RNA, 19 nt, Artificial Sequence
  Description of Artificial Sequence: Synthetic oligonucleotide
uaacaguauaggaaacaga

SEQ ID NO: 2697358 - RNA, 19 nt, Artificial Sequence
  Description of Artificial Sequence: Synthetic oligonucleotide
ggaguuacacacuugaaca

SEQ ID NO: 2697359 - RNA, 19 nt, Artificial Sequence
  Description of Artificial Sequence: Synthetic oligonucleotide
gaaacagagauguguugug

SEQ ID NO: 2697360 - RNA, 19 nt, Artificial Sequence
  Description of Artificial Sequence: Synthetic oligonucleotide
ugcuucgaguaccaaaaca

SEQ ID NO: 2697361 - RNA, 19 nt, Artificial Sequence
  Description of Artificial Sequence: Synthetic oligonucleotide
ucguuaguuuccaacacuc

SEQ ID NO: 2697362 - RNA, 19 nt, Artificial Sequence
  Description of Artificial Sequence: Synthetic oligonucleotide
acucucuggacaaagaaug

SEQ ID NO: 2697363 - RNA, 19 nt, Artificial Sequence
  Description of Artificial Sequence: Synthetic oligonucleotide
ucucucucucuacaccugg

SEQ ID NO: 2697364 - RNA, 19 nt, Artificial Sequence
  Description of Artificial Sequence: Synthetic oligonucleotide
ugaaaugacugaagaaaau

SEQ ID NO: 2697365 - RNA, 19 nt, Artificial Sequence
  Description of Artificial Sequence: Synthetic oligonucleotide
gauaagaaaguguaacagu

SEQ ID NO: 2697366 - RNA, 19 nt, Artificial Sequence
  Description of Artificial Sequence: Synthetic oligonucleotide
auucucucucucucuacac

SEQ ID NO: 2697367 - RNA, 19 nt, Artificial Sequence
  Description of Artificial Sequence: Synthetic oligonucleotide
uucgaguaccaaaacaaua

SEQ ID NO: 2697368 - RNA, 19 nt, Artificial Sequence
  Description of Artificial Sequence: Synthetic oligonucleotide
uggaucaaggacacgucug

SEQ ID NO: 2697369 - RNA, 19 nt, Artificial Sequence
  Description of Artificial Sequence: Synthetic oligonucleotide
uaagaaaguguaacaguau

SEQ ID NO: 2697370 - RNA, 19 nt, Artificial Sequence
  Description of Artificial Sequence: Synthetic oligonucleotide
ucaaaacucuccaaacuuu

SEQ ID NO: 2697371 - RNA, 19 nt, Artificial Sequence
  Description of Artificial Sequence: Synthetic oligonucleotide
auaagaaaguguaacagua

SEQ ID NO: 2697372 - RNA, 19 nt, Artificial Sequence
  Description of Artificial Sequence: Synthetic oligonucleotide
acgucugucaaaacucucc

SEQ ID NO: 2697373 - RNA, 19 nt, Artificial Sequence
  Description of Artificial Sequence: Synthetic oligonucleotide
auagacagaugauggauau

SEQ ID NO: 2697374 - RNA, 19 nt, Artificial Sequence
  Description of Artificial Sequence: Synthetic oligonucleotide
uuaauucucucucucucua

SEQ ID NO: 2697375 - RNA, 19 nt, Artificial Sequence
  Description of Artificial Sequence: Synthetic oligonucleotide
ugugcucuacaauauugac

SEQ ID NO: 2697376 - RNA, 19 nt, Artificial Sequence
  Description of Artificial Sequence: Synthetic oligonucleotide
ucaaggacacgucugucaa

SEQ ID NO: 2697377 - RNA, 19 nt, Artificial Sequence
  Description of Artificial Sequence: Synthetic oligonucleotide
agacagaugauggauauau

SEQ ID NO: 2697378 - RNA, 19 nt, Artificial Sequence
  Description of Artificial Sequence: Synthetic oligonucleotide
uauugacggacuuccuucc

SEQ ID NO: 2697379 - RNA, 19 nt, Artificial Sequence
  Description of Artificial Sequence: Synthetic oligonucleotide
gcagauagacagaugaugg

SEQ ID NO: 2697380 - RNA, 19 nt, Artificial Sequence
  Description of Artificial Sequence: Synthetic oligonucleotide
uuggaucaaggacacgucu

SEQ ID NO: 2697381 - RNA, 19 nt, Artificial Sequence
  Description of Artificial Sequence: Synthetic oligonucleotide
uucucucucucucuacacc

SEQ ID NO: 2697382 - RNA, 19 nt, Artificial Sequence
  Description of Artificial Sequence: Synthetic oligonucleotide
ucucucucucucuacaccu

SEQ ID NO: 2697383 - RNA, 19 nt, Artificial Sequence
  Description of Artificial Sequence: Synthetic oligonucleotide
ugaacagcaguuuuauauu

SEQ ID NO: 2697384 - RNA, 19 nt, Artificial Sequence
  Description of Artificial Sequence: Synthetic oligonucleotide
ugguuugaugaacuucccc

SEQ ID NO: 2697385 - RNA, 19 nt, Artificial Sequence
  Description of Artificial Sequence: Synthetic oligonucleotide
ugacggacuuccuuccacg

SEQ ID NO: 2697386 - RNA, 19 nt, Artificial Sequence
  Description of Artificial Sequence: Synthetic oligonucleotide
uuuccaacacucagccugc

SEQ ID NO: 2697387 - RNA, 19 nt, Artificial Sequence
  Description of Artificial Sequence: Synthetic oligonucleotide
cugucaaaacucuccaaac

SEQ ID NO: 2697388 - RNA, 19 nt, Artificial Sequence
  Description of Artificial Sequence: Synthetic oligonucleotide
cucuacaauauugacggac

SEQ ID NO: 2697389 - RNA, 19 nt, Artificial Sequence
  Description of Artificial Sequence: Synthetic oligonucleotide
uaggaaacagagauguguu

SEQ ID NO: 2697390 - RNA, 19 nt, Artificial Sequence
  Description of Artificial Sequence: Synthetic oligonucleotide
gugcucuacaauauugacg

SEQ ID NO: 2697391 - RNA, 19 nt, Artificial Sequence
  Description of Artificial Sequence: Synthetic oligonucleotide
guaccaaaacaauagauau

SEQ ID NO: 2697392 - RNA, 19 nt, Artificial Sequence
  Description of Artificial Sequence: Synthetic oligonucleotide
cuuucugugcucuacaaua

SEQ ID NO: 2697393 - RNA, 19 nt, Artificial Sequence
  Description of Artificial Sequence: Synthetic oligonucleotide
gaucaucagguugaagugc

SEQ ID NO: 2697394 - RNA, 19 nt, Artificial Sequence
  Description of Artificial Sequence: Synthetic oligonucleotide
gaagugcuugcccaccugc

SEQ ID NO: 2697395 - RNA, 19 nt, Artificial Sequence
  Description of Artificial Sequence: Synthetic oligonucleotide
gagcaccuuaaauuuccgg

SEQ ID NO: 2697396 - RNA, 19 nt, Artificial Sequence
  Description of Artificial Sequence: Synthetic oligonucleotide
aucaaggacacgucuguca

SEQ ID NO: 2697397 - RNA, 19 nt, Artificial Sequence
  Description of Artificial Sequence: Synthetic oligonucleotide
ugacugaagaaaaucucuu

SEQ ID NO: 2697398 - RNA, 19 nt, Artificial Sequence
  Description of Artificial Sequence: Synthetic oligonucleotide
gguuugaugaacuucccca

SEQ ID NO: 2697399 - RNA, 19 nt, Artificial Sequence
  Description of Artificial Sequence: Synthetic oligonucleotide
uccaaacuuuugaaauggc

SEQ ID NO: 2697400 - RNA, 19 nt, Artificial Sequence
  Description of Artificial Sequence: Synthetic oligonucleotide
aguaccaaaacaauagaua

SEQ ID NO: 2697401 - RNA, 19 nt, Artificial Sequence
  Description of Artificial Sequence: Synthetic oligonucleotide
ucgccgaucaucagguuga

SEQ ID NO: 2697402 - RNA, 19 nt, Artificial Sequence
  Description of Artificial Sequence: Synthetic oligonucleotide
agaauggaguuacacacuu

SEQ ID NO: 2697403 - RNA, 19 nt, Artificial Sequence
  Description of Artificial Sequence: Synthetic oligonucleotide
ucaaggugcuucgaguacc

SEQ ID NO: 2697404 - RNA, 19 nt, Artificial Sequence
  Description of Artificial Sequence: Synthetic oligonucleotide
auggauauauucuguucgu

SEQ ID NO: 2697405 - RNA, 19 nt, Artificial Sequence
  Description of Artificial Sequence: Synthetic oligonucleotide
aaacagagauguguuguga

SEQ ID NO: 2697406 - RNA, 19 nt, Artificial Sequence
  Description of Artificial Sequence: Synthetic oligonucleotide
cuguucguuaguuuccaac

SEQ ID NO: 2697407 - RNA, 19 nt, Artificial Sequence
  Description of Artificial Sequence: Synthetic oligonucleotide
aaggcauacagcauggcuu

SEQ ID NO: 2697408 - RNA, 19 nt, Artificial Sequence
  Description of Artificial Sequence: Synthetic oligonucleotide
uuucugugcucuacaauau

SEQ ID NO: 2697409 - RNA, 19 nt, Artificial Sequence
  Description of Artificial Sequence: Synthetic oligonucleotide
uuuccaaaauguagagauc

SEQ ID NO: 2697410 - RNA, 19 nt, Artificial Sequence
  Description of Artificial Sequence: Synthetic oligonucleotide
gaauggaagguccugauuu

SEQ ID NO: 2697411 - RNA, 19 nt, Artificial Sequence
  Description of Artificial Sequence: Synthetic oligonucleotide
cugaagaaaaucucuugca

SEQ ID NO: 2697412 - RNA, 19 nt, Artificial Sequence
  Description of Artificial Sequence: Synthetic oligonucleotide
aauggaagguccugauuuu

SEQ ID NO: 2697413 - RNA, 19 nt, Artificial Sequence
  Description of Artificial Sequence: Synthetic oligonucleotide
gacacgucugucaaaacuc

SEQ ID NO: 2697414 - RNA, 19 nt, Artificial Sequence
  Description of Artificial Sequence: Synthetic oligonucleotide
augacugaagaaaaucucu

SEQ ID NO: 2697415 - RNA, 19 nt, Artificial Sequence
  Description of Artificial Sequence: Synthetic oligonucleotide
aaggacacgucugucaaaa

SEQ ID NO: 2697416 - RNA, 19 nt, Artificial Sequence
  Description of Artificial Sequence: Synthetic oligonucleotide
aaacuucuuucugugcucu

SEQ ID NO: 2697417 - RNA, 19 nt, Artificial Sequence
  Description of Artificial Sequence: Synthetic oligonucleotide
cuucuaugauaagaaagug

SEQ ID NO: 2697418 - RNA, 19 nt, Artificial Sequence
  Description of Artificial Sequence: Synthetic oligonucleotide
uuuuguugaguaaggcaua

SEQ ID NO: 2697419 - RNA, 19 nt, Artificial Sequence
  Description of Artificial Sequence: Synthetic oligonucleotide
gcaguuuuauauuggauca

SEQ ID NO: 2697420 - RNA, 19 nt, Artificial Sequence
  Description of Artificial Sequence: Synthetic oligonucleotide
ggcuucuaugauaagaaag

SEQ ID NO: 2697421 - RNA, 19 nt, Artificial Sequence
  Description of Artificial Sequence: Synthetic oligonucleotide
uauauucuguucguuaguu

SEQ ID NO: 2697422 - RNA, 19 nt, Artificial Sequence
  Description of Artificial Sequence: Synthetic oligonucleotide
uuuguugaguaaggcauac

SEQ ID NO: 2697423 - RNA, 19 nt, Artificial Sequence
  Description of Artificial Sequence: Synthetic oligonucleotide
ugccaaaucgagcaccuua

SEQ ID NO: 2697424 - RNA, 19 nt, Artificial Sequence
  Description of Artificial Sequence: Synthetic oligonucleotide
aaauggcccaaacuucuuu

SEQ ID NO: 2697425 - RNA, 19 nt, Artificial Sequence
  Description of Artificial Sequence: Synthetic oligonucleotide
agcagucugaaaagcuucc

SEQ ID NO: 2697426 - RNA, 19 nt, Artificial Sequence
  Description of Artificial Sequence: Synthetic oligonucleotide
caguauaggaaacagagau

SEQ ID NO: 2697427 - RNA, 19 nt, Artificial Sequence
  Description of Artificial Sequence: Synthetic oligonucleotide
guugaguaaggcauacagc

SEQ ID NO: 2697428 - RNA, 19 nt, Artificial Sequence
  Description of Artificial Sequence: Synthetic oligonucleotide
ccugcauuucgauucaugc

SEQ ID NO: 2697429 - RNA, 19 nt, Artificial Sequence
  Description of Artificial Sequence: Synthetic oligonucleotide
gacggacuuccuuccacgg

SEQ ID NO: 2697430 - RNA, 19 nt, Artificial Sequence
  Description of Artificial Sequence: Synthetic oligonucleotide
cuuugaaaugacugaagaa

SEQ ID NO: 2697431 - RNA, 19 nt, Artificial Sequence
  Description of Artificial Sequence: Synthetic oligonucleotide
aggaaacagagauguguug

SEQ ID NO: 2697432 - RNA, 19 nt, Artificial Sequence
  Description of Artificial Sequence: Synthetic oligonucleotide
uucgauucaugcucagcac

SEQ ID NO: 2697433 - RNA, 19 nt, Artificial Sequence
  Description of Artificial Sequence: Synthetic oligonucleotide
ucucuggacaaagaaugga

SEQ ID NO: 2697434 - RNA, 19 nt, Artificial Sequence
  Description of Artificial Sequence: Synthetic oligonucleotide
ucuuucugugcucuacaau

SEQ ID NO: 2697435 - RNA, 19 nt, Artificial Sequence
  Description of Artificial Sequence: Synthetic oligonucleotide
cagagauguguugugaaug

SEQ ID NO: 2697436 - RNA, 19 nt, Artificial Sequence
  Description of Artificial Sequence: Synthetic oligonucleotide
ucaugcucagcacccgaug

SEQ ID NO: 2697437 - RNA, 19 nt, Artificial Sequence
  Description of Artificial Sequence: Synthetic oligonucleotide
uacaauauugacggacuuc

SEQ ID NO: 2697438 - RNA, 19 nt, Artificial Sequence
  Description of Artificial Sequence: Synthetic oligonucleotide
cagucugaaaagcuuccag

SEQ ID NO: 2697439 - RNA, 19 nt, Artificial Sequence
  Description of Artificial Sequence: Synthetic oligonucleotide
aagaauggaguuacacacu

SEQ ID NO: 2697440 - RNA, 19 nt, Artificial Sequence
  Description of Artificial Sequence: Synthetic oligonucleotide
aaucucuugcagauagaca

SEQ ID NO: 2697441 - RNA, 19 nt, Artificial Sequence
  Description of Artificial Sequence: Synthetic oligonucleotide
ucagguugaagugcuugcc

SEQ ID NO: 2697442 - RNA, 19 nt, Artificial Sequence
  Description of Artificial Sequence: Synthetic oligonucleotide
acggagcagucugaaaagc

SEQ ID NO: 2697443 - RNA, 19 nt, Artificial Sequence
  Description of Artificial Sequence: Synthetic oligonucleotide
cuugugucgccgaucauca

SEQ ID NO: 2697444 - RNA, 19 nt, Artificial Sequence
  Description of Artificial Sequence: Synthetic oligonucleotide
guucguuaguuuccaacac

SEQ ID NO: 2697445 - RNA, 19 nt, Artificial Sequence
  Description of Artificial Sequence: Synthetic oligonucleotide
uaauucucucucucucuac

SEQ ID NO: 2697446 - RNA, 19 nt, Artificial Sequence
  Description of Artificial Sequence: Synthetic oligonucleotide
ucuugcagauagacagaug

SEQ ID NO: 2697447 - RNA, 19 nt, Artificial Sequence
  Description of Artificial Sequence: Synthetic oligonucleotide
gauucaugcucagcacccg

SEQ ID NO: 2697448 - RNA, 19 nt, Artificial Sequence
  Description of Artificial Sequence: Synthetic oligonucleotide
uugacggacuuccuuccac

SEQ ID NO: 2697449 - RNA, 19 nt, Artificial Sequence
  Description of Artificial Sequence: Synthetic oligonucleotide
ugccuuaauucucucucuc

SEQ ID NO: 2697450 - RNA, 19 nt, Artificial Sequence
  Description of Artificial Sequence: Synthetic oligonucleotide
cagguugaagugcuugccc

SEQ ID NO: 2697451 - RNA, 19 nt, Artificial Sequence
  Description of Artificial Sequence: Synthetic oligonucleotide
cucuacaccugguuugaug

SEQ ID NO: 2697452 - RNA, 19 nt, Artificial Sequence
  Description of Artificial Sequence: Synthetic oligonucleotide
cacggagcagucugaaaag

SEQ ID NO: 2697453 - RNA, 19 nt, Artificial Sequence
  Description of Artificial Sequence: Synthetic oligonucleotide
accugguuugaugaacuuc

SEQ ID NO: 2697454 - RNA, 19 nt, Artificial Sequence
  Description of Artificial Sequence: Synthetic oligonucleotide
auuggaucaaggacacguc

SEQ ID NO: 2697455 - RNA, 19 nt, Artificial Sequence
  Description of Artificial Sequence: Synthetic oligonucleotide
uuccggucaaggugcuucg

SEQ ID NO: 2697456 - RNA, 19 nt, Artificial Sequence
  Description of Artificial Sequence: Synthetic oligonucleotide
acucuccaaacuuuugaaa

SEQ ID NO: 2697457 - RNA, 19 nt, Artificial Sequence
  Description of Artificial Sequence: Synthetic oligonucleotide
caaaauguagagaucugcu

SEQ ID NO: 2697458 - RNA, 19 nt, Artificial Sequence
  Description of Artificial Sequence: Synthetic oligonucleotide
gucgccgaucaucagguug

SEQ ID NO: 2697459 - RNA, 19 nt, Artificial Sequence
  Description of Artificial Sequence: Synthetic oligonucleotide
uggcccaaacuucuuucug

SEQ ID NO: 2697460 - RNA, 19 nt, Artificial Sequence
  Description of Artificial Sequence: Synthetic oligonucleotide
uccacucucuggacaaaga

SEQ ID NO: 2697461 - RNA, 19 nt, Artificial Sequence
  Description of Artificial Sequence: Synthetic oligonucleotide
ccaacacucagccugcugc

SEQ ID NO: 2697462 - RNA, 19 nt, Artificial Sequence
  Description of Artificial Sequence: Synthetic oligonucleotide
accuaguccuugugucgcc

SEQ ID NO: 2697463 - RNA, 19 nt, Artificial Sequence
  Description of Artificial Sequence: Synthetic oligonucleotide
acaauagauaugauacuau

SEQ ID NO: 2697464 - RNA, 19 nt, Artificial Sequence
  Description of Artificial Sequence: Synthetic oligonucleotide
ugaauggaagguccugauu

SEQ ID NO: 2697465 - RNA, 19 nt, Artificial Sequence
  Description of Artificial Sequence: Synthetic oligonucleotide
caacacucagccugcugcc

SEQ ID NO: 2697466 - RNA, 19 nt, Artificial Sequence
  Description of Artificial Sequence: Synthetic oligonucleotide
auggcuucuaugauaagaa

SEQ ID NO: 2697467 - RNA, 19 nt, Artificial Sequence
  Description of Artificial Sequence: Synthetic oligonucleotide
cuugcccaccugcauuucg

SEQ ID NO: 2697468 - RNA, 19 nt, Artificial Sequence
  Description of Artificial Sequence: Synthetic oligonucleotide
gauagacagaugauggaua

SEQ ID NO: 2697469 - RNA, 19 nt, Artificial Sequence
  Description of Artificial Sequence: Synthetic oligonucleotide
uacaccugguuugaugaac

SEQ ID NO: 2697470 - RNA, 19 nt, Artificial Sequence
  Description of Artificial Sequence: Synthetic oligonucleotide
ggacaaagaauggaguuac

SEQ ID NO: 2697471 - RNA, 19 nt, Artificial Sequence
  Description of Artificial Sequence: Synthetic oligonucleotide
uugcagauagacagaugau

SEQ ID NO: 2697472 - RNA, 19 nt, Artificial Sequence
  Description of Artificial Sequence: Synthetic oligonucleotide
ugcugccaaaucgagcacc

SEQ ID NO: 2697473 - RNA, 19 nt, Artificial Sequence
  Description of Artificial Sequence: Synthetic oligonucleotide
cuugaggcaucuuugaaau

SEQ ID NO: 2697474 - RNA, 19 nt, Artificial Sequence
  Description of Artificial Sequence: Synthetic oligonucleotide
aacuuuugaaauggcccaa

SEQ ID NO: 2697475 - RNA, 19 nt, Artificial Sequence
  Description of Artificial Sequence: Synthetic oligonucleotide
ccaaaauguagagaucugc

SEQ ID NO: 2697476 - RNA, 19 nt, Artificial Sequence
  Description of Artificial Sequence: Synthetic oligonucleotide
uuccacucucuggacaaag

SEQ ID NO: 2697477 - RNA, 19 nt, Artificial Sequence
  Description of Artificial Sequence: Synthetic oligonucleotide
agcauggcuucuaugauaa

SEQ ID NO: 2697478 - RNA, 19 nt, Artificial Sequence
  Description of Artificial Sequence: Synthetic oligonucleotide
uucuguucguuaguuucca

SEQ ID NO: 2697479 - RNA, 19 nt, Artificial Sequence
  Description of Artificial Sequence: Synthetic oligonucleotide
cugguuugaugaacuuccc

SEQ ID NO: 2697480 - RNA, 19 nt, Artificial Sequence
  Description of Artificial Sequence: Synthetic oligonucleotide
auauucuguucguuaguuu

SEQ ID NO: 2697481 - RNA, 19 nt, Artificial Sequence
  Description of Artificial Sequence: Synthetic oligonucleotide
aaaaucucuugcagauaga

SEQ ID NO: 2697482 - RNA, 19 nt, Artificial Sequence
  Description of Artificial Sequence: Synthetic oligonucleotide
uugugaauggaagguccug

SEQ ID NO: 2697483 - RNA, 19 nt, Artificial Sequence
  Description of Artificial Sequence: Synthetic oligonucleotide
cuaugauaagaaaguguaa

SEQ ID NO: 2697484 - RNA, 19 nt, Artificial Sequence
  Description of Artificial Sequence: Synthetic oligonucleotide
uccaacacucagccugcug

SEQ ID NO: 2697485 - RNA, 19 nt, Artificial Sequence
  Description of Artificial Sequence: Synthetic oligonucleotide
uucaugcucagcacccgau

SEQ ID NO: 2697486 - RNA, 19 nt, Artificial Sequence
  Description of Artificial Sequence: Synthetic oligonucleotide
ucccaccuaguccuugugu

SEQ ID NO: 2697487 - RNA, 19 nt, Artificial Sequence
  Description of Artificial Sequence: Synthetic oligonucleotide
auggcccaaacuucuuucu

SEQ ID NO: 2697488 - RNA, 19 nt, Artificial Sequence
  Description of Artificial Sequence: Synthetic oligonucleotide
auacagcauggcuucuaug

SEQ ID NO: 2697489 - RNA, 19 nt, Artificial Sequence
  Description of Artificial Sequence: Synthetic oligonucleotide
aggacacgucugucaaaac

SEQ ID NO: 2697490 - RNA, 19 nt, Artificial Sequence
  Description of Artificial Sequence: Synthetic oligonucleotide
gcugccuuaauucucucuc

SEQ ID NO: 2697491 - RNA, 19 nt, Artificial Sequence
  Description of Artificial Sequence: Synthetic oligonucleotide
uggcuucuaugauaagaaa

SEQ ID NO: 2697492 - RNA, 19 nt, Artificial Sequence
  Description of Artificial Sequence: Synthetic oligonucleotide
uugaggcaucuuugaaaug

SEQ ID NO: 2697493 - RNA, 19 nt, Artificial Sequence
  Description of Artificial Sequence: Synthetic oligonucleotide
ggauauauucuguucguua

SEQ ID NO: 2697494 - RNA, 19 nt, Artificial Sequence
  Description of Artificial Sequence: Synthetic oligonucleotide
agauguguugugaauggaa

SEQ ID NO: 2697495 - RNA, 19 nt, Artificial Sequence
  Description of Artificial Sequence: Synthetic oligonucleotide
caccuuaaauuuccgguca

SEQ ID NO: 2697496 - RNA, 19 nt, Artificial Sequence
  Description of Artificial Sequence: Synthetic oligonucleotide
uucugugcucuacaauauu

SEQ ID NO: 2697497 - RNA, 19 nt, Artificial Sequence
  Description of Artificial Sequence: Synthetic oligonucleotide
aggugcuucgaguaccaaa

SEQ ID NO: 2697498 - RNA, 19 nt, Artificial Sequence
  Description of Artificial Sequence: Synthetic oligonucleotide
gaauggaguuacacacuug

SEQ ID NO: 2697499 - RNA, 19 nt, Artificial Sequence
  Description of Artificial Sequence: Synthetic oligonucleotide
ucucucucuacaccugguu

SEQ ID NO: 2697500 - RNA, 19 nt, Artificial Sequence
  Description of Artificial Sequence: Synthetic oligonucleotide
gaacuuccccagcagccac

SEQ ID NO: 2697501 - RNA, 19 nt, Artificial Sequence
  Description of Artificial Sequence: Synthetic oligonucleotide
aucgagcaccuuaaauuuc

SEQ ID NO: 2697502 - RNA, 19 nt, Artificial Sequence
  Description of Artificial Sequence: Synthetic oligonucleotide
ccugcugccaaaucgagca

SEQ ID NO: 2697503 - RNA, 19 nt, Artificial Sequence
  Description of Artificial Sequence: Synthetic oligonucleotide
auacuauuagcugccuuaa

SEQ ID NO: 2697504 - RNA, 19 nt, Artificial Sequence
  Description of Artificial Sequence: Synthetic oligonucleotide
cagauagacagaugaugga

SEQ ID NO: 2697505 - RNA, 19 nt, Artificial Sequence
  Description of Artificial Sequence: Synthetic oligonucleotide
uacuauuagcugccuuaau

SEQ ID NO: 2697506 - RNA, 19 nt, Artificial Sequence
  Description of Artificial Sequence: Synthetic oligonucleotide
auugacggacuuccuucca

SEQ ID NO: 2697507 - RNA, 19 nt, Artificial Sequence
  Description of Artificial Sequence: Synthetic oligonucleotide
cuuaauucucucucucucu

SEQ ID NO: 2697508 - RNA, 19 nt, Artificial Sequence
  Description of Artificial Sequence: Synthetic oligonucleotide
guccuugugucgccgauca

SEQ ID NO: 2697509 - RNA, 19 nt, Artificial Sequence
  Description of Artificial Sequence: Synthetic oligonucleotide
agcugccuuaauucucucu

SEQ ID NO: 2697510 - RNA, 19 nt, Artificial Sequence
  Description of Artificial Sequence: Synthetic oligonucleotide
cucagcacccgaugcuggc

SEQ ID NO: 2697511 - RNA, 19 nt, Artificial Sequence
  Description of Artificial Sequence: Synthetic oligonucleotide
ccuuaauucucucucucuc

SEQ ID NO: 2697512 - RNA, 19 nt, Artificial Sequence
  Description of Artificial Sequence: Synthetic oligonucleotide
gcuucgaguaccaaaacaa

SEQ ID NO: 2697513 - RNA, 19 nt, Artificial Sequence
  Description of Artificial Sequence: Synthetic oligonucleotide
caccuaguccuugugucgc

SEQ ID NO: 2697514 - RNA, 19 nt, Artificial Sequence
  Description of Artificial Sequence: Synthetic oligonucleotide
ucucccaccuaguccuugu

SEQ ID NO: 2697515 - RNA, 19 nt, Artificial Sequence
  Description of Artificial Sequence: Synthetic oligonucleotide
aguuuccaacacucagccu

SEQ ID NO: 2697516 - RNA, 19 nt, Artificial Sequence
  Description of Artificial Sequence: Synthetic oligonucleotide
gcaccuuaaauuuccgguc

SEQ ID NO: 2697517 - RNA, 19 nt, Artificial Sequence
  Description of Artificial Sequence: Synthetic oligonucleotide
accuuaaauuuccggucaa

SEQ ID NO: 2697518 - RNA, 19 nt, Artificial Sequence
  Description of Artificial Sequence: Synthetic oligonucleotide
acacacuugaacagcaguu

SEQ ID NO: 2697519 - RNA, 19 nt, Artificial Sequence
  Description of Artificial Sequence: Synthetic oligonucleotide
caauagauaugauacuauu

SEQ ID NO: 2697520 - RNA, 19 nt, Artificial Sequence
  Description of Artificial Sequence: Synthetic oligonucleotide
ugcuugcccaccugcauuu

SEQ ID NO: 2697521 - RNA, 19 nt, Artificial Sequence
  Description of Artificial Sequence: Synthetic oligonucleotide
auauuggaucaaggacacg

SEQ ID NO: 2697522 - RNA, 19 nt, Artificial Sequence
  Description of Artificial Sequence: Synthetic oligonucleotide
acaccugguuugaugaacu

SEQ ID NO: 2697523 - RNA, 19 nt, Artificial Sequence
  Description of Artificial Sequence: Synthetic oligonucleotide
uggauauauucuguucguu

SEQ ID NO: 2697524 - RNA, 19 nt, Artificial Sequence
  Description of Artificial Sequence: Synthetic oligonucleotide
uuguugaguaaggcauaca

SEQ ID NO: 2697525 - RNA, 19 nt, Artificial Sequence
  Description of Artificial Sequence: Synthetic oligonucleotide
aacacucagccugcugcca

SEQ ID NO: 2697526 - RNA, 19 nt, Artificial Sequence
  Description of Artificial Sequence: Synthetic oligonucleotide
gcuucuaugauaagaaagu

SEQ ID NO: 2697527 - RNA, 19 nt, Artificial Sequence
  Description of Artificial Sequence: Synthetic oligonucleotide
cucucucucucuacaccug

SEQ ID NO: 2697528 - RNA, 19 nt, Artificial Sequence
  Description of Artificial Sequence: Synthetic oligonucleotide
ggugcuucgaguaccaaaa

SEQ ID NO: 2697529 - RNA, 19 nt, Artificial Sequence
  Description of Artificial Sequence: Synthetic oligonucleotide
aguccuugugucgccgauc

SEQ ID NO: 2697530 - RNA, 19 nt, Artificial Sequence
  Description of Artificial Sequence: Synthetic oligonucleotide
agaucugcuugaggcaucu

SEQ ID NO: 2697531 - RNA, 19 nt, Artificial Sequence
  Description of Artificial Sequence: Synthetic oligonucleotide
ucagcacccgaugcuggcc

SEQ ID NO: 2697532 - RNA, 19 nt, Artificial Sequence
  Description of Artificial Sequence: Synthetic oligonucleotide
gcuugaggcaucuuugaaa

SEQ ID NO: 2697533 - RNA, 19 nt, Artificial Sequence
  Description of Artificial Sequence: Synthetic oligonucleotide
ucuguucguuaguuuccaa

SEQ ID NO: 2697534 - RNA, 19 nt, Artificial Sequence
  Description of Artificial Sequence: Synthetic oligonucleotide
aacuucuuucugugcucua

SEQ ID NO: 2697535 - RNA, 19 nt, Artificial Sequence
  Description of Artificial Sequence: Synthetic oligonucleotide
cgauucaugcucagcaccc

SEQ ID NO: 2697536 - RNA, 19 nt, Artificial Sequence
  Description of Artificial Sequence: Synthetic oligonucleotide
cacgucugucaaaacucuc

SEQ ID NO: 2697537 - RNA, 19 nt, Artificial Sequence
  Description of Artificial Sequence: Synthetic oligonucleotide
aauuuccggucaaggugcu

SEQ ID NO: 2697538 - RNA, 19 nt, Artificial Sequence
  Description of Artificial Sequence: Synthetic oligonucleotide
acggacuuccuuccacgga

SEQ ID NO: 2697539 - RNA, 19 nt, Artificial Sequence
  Description of Artificial Sequence: Synthetic oligonucleotide
gaucaaggacacgucuguc

SEQ ID NO: 2697540 - RNA, 19 nt, Artificial Sequence
  Description of Artificial Sequence: Synthetic oligonucleotide
ccgaucaucagguugaagu

SEQ ID NO: 2697541 - RNA, 19 nt, Artificial Sequence
  Description of Artificial Sequence: Synthetic oligonucleotide
gagauguguugugaaugga

SEQ ID NO: 2697542 - RNA, 19 nt, Artificial Sequence
  Description of Artificial Sequence: Synthetic oligonucleotide
guguugugaauggaagguc

SEQ ID NO: 2697543 - RNA, 19 nt, Artificial Sequence
  Description of Artificial Sequence: Synthetic oligonucleotide
ccuuccacggagcagucug

SEQ ID NO: 2697544 - RNA, 19 nt, Artificial Sequence
  Description of Artificial Sequence: Synthetic oligonucleotide
gcccaaacuucuuucugug

SEQ ID NO: 2697545 - RNA, 19 nt, Artificial Sequence
  Description of Artificial Sequence: Synthetic oligonucleotide
gguugaagugcuugcccac

SEQ ID NO: 2697546 - RNA, 19 nt, Artificial Sequence
  Description of Artificial Sequence: Synthetic oligonucleotide
ggaaacagagauguguugu

SEQ ID NO: 2697547 - RNA, 19 nt, Artificial Sequence
  Description of Artificial Sequence: Synthetic oligonucleotide
ccaccuaguccuugugucg

SEQ ID NO: 2697548 - RNA, 19 nt, Artificial Sequence
  Description of Artificial Sequence: Synthetic oligonucleotide
caaaucgagcaccuuaaau

SEQ ID NO: 2697549 - RNA, 19 nt, Artificial Sequence
  Description of Artificial Sequence: Synthetic oligonucleotide
uggccauccucggcaaaag

SEQ ID NO: 2697550 - RNA, 19 nt, Artificial Sequence
  Description of Artificial Sequence: Synthetic oligonucleotide
cacuugaacagcaguuuua

SEQ ID NO: 2697551 - RNA, 19 nt, Artificial Sequence
  Description of Artificial Sequence: Synthetic oligonucleotide
uugugucgccgaucaucag

SEQ ID NO: 2697552 - RNA, 19 nt, Artificial Sequence
  Description of Artificial Sequence: Synthetic oligonucleotide
uaguccuugugucgccgau

SEQ ID NO: 2697553 - RNA, 19 nt, Artificial Sequence
  Description of Artificial Sequence: Synthetic oligonucleotide
ccgaugcuggccauccucg

SEQ ID NO: 2697554 - RNA, 19 nt, Artificial Sequence
  Description of Artificial Sequence: Synthetic oligonucleotide
cgaucaucagguugaagug

SEQ ID NO: 2697555 - RNA, 19 nt, Artificial Sequence
  Description of Artificial Sequence: Synthetic oligonucleotide
caaggugcuucgaguacca

SEQ ID NO: 2697556 - RNA, 19 nt, Artificial Sequence
  Description of Artificial Sequence: Synthetic oligonucleotide
cugcauuucgauucaugcu

SEQ ID NO: 2697557 - RNA, 19 nt, Artificial Sequence
  Description of Artificial Sequence: Synthetic oligonucleotide
accugcauuucgauucaug

SEQ ID NO: 2697558 - RNA, 19 nt, Artificial Sequence
  Description of Artificial Sequence: Synthetic oligonucleotide
cagccugcugccaaaucga

SEQ ID NO: 2697559 - RNA, 19 nt, Artificial Sequence
  Description of Artificial Sequence: Synthetic oligonucleotide
ggucaaggugcuucgagua

SEQ ID NO: 2697560 - RNA, 19 nt, Artificial Sequence
  Description of Artificial Sequence: Synthetic oligonucleotide
cacccgaugcuggccaucc

SEQ ID NO: 2697561 - RNA, 19 nt, Artificial Sequence
  Description of Artificial Sequence: Synthetic oligonucleotide
gucugucaaaacucuccaa

SEQ ID NO: 2697562 - RNA, 19 nt, Artificial Sequence
  Description of Artificial Sequence: Synthetic oligonucleotide
gugcuucgaguaccaaaac

SEQ ID NO: 2697563 - RNA, 19 nt, Artificial Sequence
  Description of Artificial Sequence: Synthetic oligonucleotide
uagcucucucccaccuagu

SEQ ID NO: 2697564 - RNA, 19 nt, Artificial Sequence
  Description of Artificial Sequence: Synthetic oligonucleotide
cccaccuaguccuuguguc

SEQ ID NO: 2697565 - RNA, 19 nt, Artificial Sequence
  Description of Artificial Sequence: Synthetic oligonucleotide
cccaaacuucuuucugugc

SEQ ID NO: 2697566 - RNA, 19 nt, Artificial Sequence
  Description of Artificial Sequence: Synthetic oligonucleotide
cuucgaguaccaaaacaau

SEQ ID NO: 2697567 - RNA, 19 nt, Artificial Sequence
  Description of Artificial Sequence: Synthetic oligonucleotide
uagacagaugauggauaua

SEQ ID NO: 2697568 - RNA, 19 nt, Artificial Sequence
  Description of Artificial Sequence: Synthetic oligonucleotide
cagcauggcuucuaugaua

SEQ ID NO: 2697569 - RNA, 19 nt, Artificial Sequence
  Description of Artificial Sequence: Synthetic oligonucleotide
cuugaacagcaguuuuaua

SEQ ID NO: 2697570 - RNA, 19 nt, Artificial Sequence
  Description of Artificial Sequence: Synthetic oligonucleotide
ggaucaaggacacgucugu

SEQ ID NO: 2697571 - RNA, 19 nt, Artificial Sequence
  Description of Artificial Sequence: Synthetic oligonucleotide
uuccacggagcagucugaa

SEQ ID NO: 2697572 - RNA, 19 nt, Artificial Sequence
  Description of Artificial Sequence: Synthetic oligonucleotide
ccuugugucgccgaucauc

SEQ ID NO: 2697573 - RNA, 19 nt, Artificial Sequence
  Description of Artificial Sequence: Synthetic oligonucleotide
ccacggagcagucugaaaa

SEQ ID NO: 2697574 - RNA, 19 nt, Artificial Sequence
  Description of Artificial Sequence: Synthetic oligonucleotide
cacucucuggacaaagaau

SEQ ID NO: 2697575 - RNA, 19 nt, Artificial Sequence
  Description of Artificial Sequence: Synthetic oligonucleotide
uuccuuccacggagcaguc

SEQ ID NO: 2697576 - RNA, 19 nt, Artificial Sequence
  Description of Artificial Sequence: Synthetic oligonucleotide
auggaguuacacacuugaa

SEQ ID NO: 2697577 - RNA, 19 nt, Artificial Sequence
  Description of Artificial Sequence: Synthetic oligonucleotide
cucucuacaccugguuuga

SEQ ID NO: 2697578 - RNA, 19 nt, Artificial Sequence
  Description of Artificial Sequence: Synthetic oligonucleotide
cuaguccuugugucgccga

SEQ ID NO: 2697579 - RNA, 19 nt, Artificial Sequence
  Description of Artificial Sequence: Synthetic oligonucleotide
gagaucugcuugaggcauc

SEQ ID NO: 2697580 - RNA, 19 nt, Artificial Sequence
  Description of Artificial Sequence: Synthetic oligonucleotide
ugcuggccauccucggcaa

SEQ ID NO: 2697581 - RNA, 19 nt, Artificial Sequence
  Description of Artificial Sequence: Synthetic oligonucleotide
cuuccacggagcagucuga

SEQ ID NO: 2697582 - RNA, 19 nt, Artificial Sequence
  Description of Artificial Sequence: Synthetic oligonucleotide
agccugcugccaaaucgag

SEQ ID NO: 2697583 - RNA, 19 nt, Artificial Sequence
  Description of Artificial Sequence: Synthetic oligonucleotide
cucagccugcugccaaauc

SEQ ID NO: 2697584 - RNA, 19 nt, Artificial Sequence
  Description of Artificial Sequence: Synthetic oligonucleotide
caguuuuauauuggaucaa

SEQ ID NO: 2697585 - RNA, 19 nt, Artificial Sequence
  Description of Artificial Sequence: Synthetic oligonucleotide
cucccaccuaguccuugug

SEQ ID NO: 2697586 - RNA, 19 nt, Artificial Sequence
  Description of Artificial Sequence: Synthetic oligonucleotide
uagcugccuuaauucucuc

SEQ ID NO: 2697587 - RNA, 19 nt, Artificial Sequence
  Description of Artificial Sequence: Synthetic oligonucleotide
cuacaccugguuugaugaa

SEQ ID NO: 2697588 - RNA, 19 nt, Artificial Sequence
  Description of Artificial Sequence: Synthetic oligonucleotide
gcagccacuucuccuguga

SEQ ID NO: 2697589 - RNA, 19 nt, Artificial Sequence
  Description of Artificial Sequence: Synthetic oligonucleotide
ggcccaaacuucuuucugu

SEQ ID NO: 2697590 - RNA, 19 nt, Artificial Sequence
  Description of Artificial Sequence: Synthetic oligonucleotide
gugucgccgaucaucaggu

SEQ ID NO: 2697591 - RNA, 19 nt, Artificial Sequence
  Description of Artificial Sequence: Synthetic oligonucleotide
caauauugacggacuuccu

SEQ ID NO: 2697592 - RNA, 19 nt, Artificial Sequence
  Description of Artificial Sequence: Synthetic oligonucleotide
aaggugcuucgaguaccaa

SEQ ID NO: 2697593 - RNA, 19 nt, Artificial Sequence
  Description of Artificial Sequence: Synthetic oligonucleotide
ccggucaaggugcuucgag

SEQ ID NO: 2697594 - RNA, 19 nt, Artificial Sequence
  Description of Artificial Sequence: Synthetic oligonucleotide
uccuuccacggagcagucu

SEQ ID NO: 2697595 - RNA, 19 nt, Artificial Sequence
  Description of Artificial Sequence: Synthetic oligonucleotide
cgagcaccuuaaauuuccg

SEQ ID NO: 2697596 - RNA, 19 nt, Artificial Sequence
  Description of Artificial Sequence: Synthetic oligonucleotide
gccaaaucgagcaccuuaa

SEQ ID NO: 2697597 - RNA, 19 nt, Artificial Sequence
  Description of Artificial Sequence: Synthetic oligonucleotide
cugccuuaauucucucucu

SEQ ID NO: 2697598 - RNA, 19 nt, Artificial Sequence
  Description of Artificial Sequence: Synthetic oligonucleotide
ccuaguccuugugucgccg

SEQ ID NO: 2697599 - RNA, 19 nt, Artificial Sequence
  Description of Artificial Sequence: Synthetic oligonucleotide
uccggucaaggugcuucga

SEQ ID NO: 2697600 - RNA, 19 nt, Artificial Sequence
  Description of Artificial Sequence: Synthetic oligonucleotide
caaggacacgucugucaaa

SEQ ID NO: 2697601 - RNA, 19 nt, Artificial Sequence
  Description of Artificial Sequence: Synthetic oligonucleotide
cuacaauauugacggacuu

SEQ ID NO: 2697602 - RNA, 19 nt, Artificial Sequence
  Description of Artificial Sequence: Synthetic oligonucleotide
cagcaguuuuauauuggau

SEQ ID NO: 2697603 - RNA, 19 nt, Artificial Sequence
  Description of Artificial Sequence: Synthetic oligonucleotide
ucucuacaccugguuugau

SEQ ID NO: 2697604 - RNA, 19 nt, Artificial Sequence
  Description of Artificial Sequence: Synthetic oligonucleotide
cucucucuacaccugguuu

SEQ ID NO: 2697605 - RNA, 19 nt, Artificial Sequence
  Description of Artificial Sequence: Synthetic oligonucleotide
ccuuccacucucuggacaa

SEQ ID NO: 2697606 - RNA, 19 nt, Artificial Sequence
  Description of Artificial Sequence: Synthetic oligonucleotide
uccuugugucgccgaucau

SEQ ID NO: 2697607 - RNA, 19 nt, Artificial Sequence
  Description of Artificial Sequence: Synthetic oligonucleotide
cucuugcagauagacagau

SEQ ID NO: 2697608 - RNA, 19 nt, Artificial Sequence
  Description of Artificial Sequence: Synthetic oligonucleotide
gccuuaauucucucucucu

SEQ ID NO: 2697609 - RNA, 19 nt, Artificial Sequence
  Description of Artificial Sequence: Synthetic oligonucleotide
acucagccugcugccaaau

SEQ ID NO: 2697610 - RNA, 19 nt, Artificial Sequence
  Description of Artificial Sequence: Synthetic oligonucleotide
cccgaugcuggccauccuc

SEQ ID NO: 2697611 - RNA, 19 nt, Artificial Sequence
  Description of Artificial Sequence: Synthetic oligonucleotide
gcauggcuucuaugauaag

SEQ ID NO: 2697612 - RNA, 19 nt, Artificial Sequence
  Description of Artificial Sequence: Synthetic oligonucleotide
agcacccgaugcuggccau

SEQ ID NO: 2697613 - RNA, 19 nt, Artificial Sequence
  Description of Artificial Sequence: Synthetic oligonucleotide
cauccucggcaaaaguuuu

SEQ ID NO: 2697614 - RNA, 19 nt, Artificial Sequence
  Description of Artificial Sequence: Synthetic oligonucleotide
ugucgccgaucaucagguu

SEQ ID NO: 2697615 - RNA, 19 nt, Artificial Sequence
  Description of Artificial Sequence: Synthetic oligonucleotide
gaaauggcccaaacuucuu

SEQ ID NO: 2697616 - RNA, 19 nt, Artificial Sequence
  Description of Artificial Sequence: Synthetic oligonucleotide
gacagaugauggauauauu

SEQ ID NO: 2697617 - RNA, 19 nt, Artificial Sequence
  Description of Artificial Sequence: Synthetic oligonucleotide
cgucugucaaaacucucca

SEQ ID NO: 2697618 - RNA, 19 nt, Artificial Sequence
  Description of Artificial Sequence: Synthetic oligonucleotide
cguuaguuuccaacacuca

SEQ ID NO: 2697619 - RNA, 19 nt, Artificial Sequence
  Description of Artificial Sequence: Synthetic oligonucleotide
gccugcugccaaaucgagc

SEQ ID NO: 2697620 - RNA, 19 nt, Artificial Sequence
  Description of Artificial Sequence: Synthetic oligonucleotide
acccgaugcuggccauccu

SEQ ID NO: 2697621 - RNA, 19 nt, Artificial Sequence
  Description of Artificial Sequence: Synthetic oligonucleotide
gugcuugcccaccugcauu

SEQ ID NO: 2697622 - RNA, 19 nt, Artificial Sequence
  Description of Artificial Sequence: Synthetic oligonucleotide
ccauccucggcaaaaguuu

SEQ ID NO: 2697623 - RNA, 19 nt, Artificial Sequence
  Description of Artificial Sequence: Synthetic oligonucleotide
auuuccggucaaggugcuu

SEQ ID NO: 2697624 - RNA, 19 nt, Artificial Sequence
  Description of Artificial Sequence: Synthetic oligonucleotide
gccgaucaucagguugaag

SEQ ID NO: 2697625 - RNA, 19 nt, Artificial Sequence
  Description of Artificial Sequence: Synthetic oligonucleotide
gcugccaaaucgagcaccu

SEQ ID NO: 2697626 - RNA, 19 nt, Artificial Sequence
  Description of Artificial Sequence: Synthetic oligonucleotide
ccaaaucgagcaccuuaaa

SEQ ID NO: 2697627 - RNA, 19 nt, Artificial Sequence
  Description of Artificial Sequence: Synthetic oligonucleotide
cuuccacucucuggacaaa

SEQ ID NO: 2697628 - RNA, 19 nt, Artificial Sequence
  Description of Artificial Sequence: Synthetic oligonucleotide
ccaccugcauuucgauuca

SEQ ID NO: 2697629 - RNA, 19 nt, Artificial Sequence
  Description of Artificial Sequence: Synthetic oligonucleotide
gcauacagcauggcuucua

SEQ ID NO: 2697630 - RNA, 19 nt, Artificial Sequence
  Description of Artificial Sequence: Synthetic oligonucleotide
ccaaaacaauagauaugau

SEQ ID NO: 2697631 - RNA, 19 nt, Artificial Sequence
  Description of Artificial Sequence: Synthetic oligonucleotide
ggccauccucggcaaaagu

SEQ ID NO: 2697632 - RNA, 19 nt, Artificial Sequence
  Description of Artificial Sequence: Synthetic oligonucleotide
caccugguuugaugaacuu

SEQ ID NO: 2697633 - RNA, 19 nt, Artificial Sequence
  Description of Artificial Sequence: Synthetic oligonucleotide
cggagcagucugaaaagcu

SEQ ID NO: 2697634 - RNA, 19 nt, Artificial Sequence
  Description of Artificial Sequence: Synthetic oligonucleotide
cggucaaggugcuucgagu

SEQ ID NO: 2697635 - RNA, 19 nt, Artificial Sequence
  Description of Artificial Sequence: Synthetic oligonucleotide
ggcauacagcauggcuucu

SEQ ID NO: 2697636 - RNA, 19 nt, Artificial Sequence
  Description of Artificial Sequence: Synthetic oligonucleotide
gcacccgaugcuggccauc

SEQ ID NO: 2697637 - RNA, 19 nt, Artificial Sequence
  Description of Artificial Sequence: Synthetic oligonucleotide
gcccaccugcauuucgauu

SEQ ID NO: 2697638 - RNA, 19 nt, Artificial Sequence
  Description of Artificial Sequence: Synthetic oligonucleotide
caccugcauuucgauucau

SEQ ID NO: 2697639 - RNA, 19 nt, Artificial Sequence
  Description of Artificial Sequence: Synthetic oligonucleotide
cugccaaaucgagcaccuu

SEQ ID NO: 2697640 - RNA, 19 nt, Artificial Sequence
  Description of Artificial Sequence: Synthetic oligonucleotide
cgccgaucaucagguugaa

SEQ ID NO: 2697641 - RNA, 19 nt, Artificial Sequence
  Description of Artificial Sequence: Synthetic oligonucleotide
aaagguguuccucauggac

SEQ ID NO: 2697642 - RNA, 19 nt, Artificial Sequence
  Description of Artificial Sequence: Synthetic oligonucleotide
uuugauauuuuccuugacc

SEQ ID NO: 2697643 - RNA, 19 nt, Artificial Sequence
  Description of Artificial Sequence: Synthetic oligonucleotide
uggauggccaaguagaacg

SEQ ID NO: 2697644 - RNA, 19 nt, Artificial Sequence
  Description of Artificial Sequence: Synthetic oligonucleotide
uuuaaagggcaacaggucc

SEQ ID NO: 2697645 - RNA, 19 nt, Artificial Sequence
  Description of Artificial Sequence: Synthetic oligonucleotide
uagaaaugaugacacaggg

SEQ ID NO: 2697646 - RNA, 19 nt, Artificial Sequence
  Description of Artificial Sequence: Synthetic oligonucleotide
uacaccacggggaugaugg

SEQ ID NO: 2697647 - RNA, 19 nt, Artificial Sequence
  Description of Artificial Sequence: Synthetic oligonucleotide
ugauuagaaaugaugacac

SEQ ID NO: 2697648 - RNA, 19 nt, Artificial Sequence
  Description of Artificial Sequence: Synthetic oligonucleotide
uugauauuuuccuugacca

SEQ ID NO: 2697649 - RNA, 19 nt, Artificial Sequence
  Description of Artificial Sequence: Synthetic oligonucleotide
agaaagguguuccucaugg

SEQ ID NO: 2697650 - RNA, 19 nt, Artificial Sequence
  Description of Artificial Sequence: Synthetic oligonucleotide
uggugauuagaaaugauga

SEQ ID NO: 2697651 - RNA, 19 nt, Artificial Sequence
  Description of Artificial Sequence: Synthetic oligonucleotide
acagggaccauccaccucc

SEQ ID NO: 2697652 - RNA, 19 nt, Artificial Sequence
  Description of Artificial Sequence: Synthetic oligonucleotide
ucuguaaggccucugguag

SEQ ID NO: 2697653 - RNA, 19 nt, Artificial Sequence
  Description of Artificial Sequence: Synthetic oligonucleotide
cuuggaaauuuguagaaag

SEQ ID NO: 2697654 - RNA, 19 nt, Artificial Sequence
  Description of Artificial Sequence: Synthetic oligonucleotide
aaaagacgaguacaccacg

SEQ ID NO: 2697655 - RNA, 19 nt, Artificial Sequence
  Description of Artificial Sequence: Synthetic oligonucleotide
uuuaauuguagaguucucc

SEQ ID NO: 2697656 - RNA, 19 nt, Artificial Sequence
  Description of Artificial Sequence: Synthetic oligonucleotide
uacaugaugaggcccacag

SEQ ID NO: 2697657 - RNA, 19 nt, Artificial Sequence
  Description of Artificial Sequence: Synthetic oligonucleotide
ucuuuaauuguagaguucu

SEQ ID NO: 2697658 - RNA, 19 nt, Artificial Sequence
  Description of Artificial Sequence: Synthetic oligonucleotide
aagagcuuccucuugacau

SEQ ID NO: 2697659 - RNA, 19 nt, Artificial Sequence
  Description of Artificial Sequence: Synthetic oligonucleotide
uuaauuguagaguucuccu

SEQ ID NO: 2697660 - RNA, 19 nt, Artificial Sequence
  Description of Artificial Sequence: Synthetic oligonucleotide
uguagaguucuccuggggc

SEQ ID NO: 2697661 - RNA, 19 nt, Artificial Sequence
  Description of Artificial Sequence: Synthetic oligonucleotide
auugucguugcguguaccc

SEQ ID NO: 2697662 - RNA, 19 nt, Artificial Sequence
  Description of Artificial Sequence: Synthetic oligonucleotide
ucugguagggacagcaucc

SEQ ID NO: 2697663 - RNA, 19 nt, Artificial Sequence
  Description of Artificial Sequence: Synthetic oligonucleotide
aauuuguagaaagguguuc

SEQ ID NO: 2697664 - RNA, 19 nt, Artificial Sequence
  Description of Artificial Sequence: Synthetic oligonucleotide
uagauccacacuuugauau

SEQ ID NO: 2697665 - RNA, 19 nt, Artificial Sequence
  Description of Artificial Sequence: Synthetic oligonucleotide
guagcaaguguccacaagc

SEQ ID NO: 2697666 - RNA, 19 nt, Artificial Sequence
  Description of Artificial Sequence: Synthetic oligonucleotide
aagacgaguacaccacggg

SEQ ID NO: 2697667 - RNA, 19 nt, Artificial Sequence
  Description of Artificial Sequence: Synthetic oligonucleotide
ugaacaacagcucacgcuu

SEQ ID NO: 2697668 - RNA, 19 nt, Artificial Sequence
  Description of Artificial Sequence: Synthetic oligonucleotide
uguuccugagguaaagagc

SEQ ID NO: 2697669 - RNA, 19 nt, Artificial Sequence
  Description of Artificial Sequence: Synthetic oligonucleotide
uuagggaguaucuccauga

SEQ ID NO: 2697670 - RNA, 19 nt, Artificial Sequence
  Description of Artificial Sequence: Synthetic oligonucleotide
gaugauggguaccugggcc

SEQ ID NO: 2697671 - RNA, 19 nt, Artificial Sequence
  Description of Artificial Sequence: Synthetic oligonucleotide
uuguuccugagguaaagag

SEQ ID NO: 2697672 - RNA, 19 nt, Artificial Sequence
  Description of Artificial Sequence: Synthetic oligonucleotide
uacacguacuugaagggcc

SEQ ID NO: 2697673 - RNA, 19 nt, Artificial Sequence
  Description of Artificial Sequence: Synthetic oligonucleotide
ugacauuguagaaggaaga

SEQ ID NO: 2697674 - RNA, 19 nt, Artificial Sequence
  Description of Artificial Sequence: Synthetic oligonucleotide
guugaugaaguagacaccc

SEQ ID NO: 2697675 - RNA, 19 nt, Artificial Sequence
  Description of Artificial Sequence: Synthetic oligonucleotide
ucugaccucaaagcgaagg

SEQ ID NO: 2697676 - RNA, 19 nt, Artificial Sequence
  Description of Artificial Sequence: Synthetic oligonucleotide
uacucuggugauuagaaau

SEQ ID NO: 2697677 - RNA, 19 nt, Artificial Sequence
  Description of Artificial Sequence: Synthetic oligonucleotide
cauacacguacuugaaggg

SEQ ID NO: 2697678 - RNA, 19 nt, Artificial Sequence
  Description of Artificial Sequence: Synthetic oligonucleotide
uccaugagacccaucaugu

SEQ ID NO: 2697679 - RNA, 19 nt, Artificial Sequence
  Description of Artificial Sequence: Synthetic oligonucleotide
cuggugauuagaaaugaug

SEQ ID NO: 2697680 - RNA, 19 nt, Artificial Sequence
  Description of Artificial Sequence: Synthetic oligonucleotide
acuggacuggcacaacccc

SEQ ID NO: 2697681 - RNA, 19 nt, Artificial Sequence
  Description of Artificial Sequence: Synthetic oligonucleotide
uuuuaaagggcaacagguc

SEQ ID NO: 2697682 - RNA, 19 nt, Artificial Sequence
  Description of Artificial Sequence: Synthetic oligonucleotide
ucggccaucagggucaugg

SEQ ID NO: 2697683 - RNA, 19 nt, Artificial Sequence
  Description of Artificial Sequence: Synthetic oligonucleotide
ucuggguagauccacacuu

SEQ ID NO: 2697684 - RNA, 19 nt, Artificial Sequence
  Description of Artificial Sequence: Synthetic oligonucleotide
aucuccaugagacccauca

SEQ ID NO: 2697685 - RNA, 19 nt, Artificial Sequence
  Description of Artificial Sequence: Synthetic oligonucleotide
uaauuguagaguucuccug

SEQ ID NO: 2697686 - RNA, 19 nt, Artificial Sequence
  Description of Artificial Sequence: Synthetic oligonucleotide
agugacaucagcuucugua

SEQ ID NO: 2697687 - RNA, 19 nt, Artificial Sequence
  Description of Artificial Sequence: Synthetic oligonucleotide
aaagacgaguacaccacgg

SEQ ID NO: 2697688 - RNA, 19 nt, Artificial Sequence
  Description of Artificial Sequence: Synthetic oligonucleotide
aguucuggcgcgcuggcgg

SEQ ID NO: 2697689 - RNA, 19 nt, Artificial Sequence
  Description of Artificial Sequence: Synthetic oligonucleotide
auacacguacuugaagggc

SEQ ID NO: 2697690 - RNA, 19 nt, Artificial Sequence
  Description of Artificial Sequence: Synthetic oligonucleotide
aacagcucacgcuuggcga

SEQ ID NO: 2697691 - RNA, 19 nt, Artificial Sequence
  Description of Artificial Sequence: Synthetic oligonucleotide
aacagguccccauugucgu

SEQ ID NO: 2697692 - RNA, 19 nt, Artificial Sequence
  Description of Artificial Sequence: Synthetic oligonucleotide
auuguagaguucuccuggg

SEQ ID NO: 2697693 - RNA, 19 nt, Artificial Sequence
  Description of Artificial Sequence: Synthetic oligonucleotide
guacccucuggguagaucc

SEQ ID NO: 2697694 - RNA, 19 nt, Artificial Sequence
  Description of Artificial Sequence: Synthetic oligonucleotide
ccauacacguacuugaagg

SEQ ID NO: 2697695 - RNA, 19 nt, Artificial Sequence
  Description of Artificial Sequence: Synthetic oligonucleotide
acugguagcaaguguccac

SEQ ID NO: 2697696 - RNA, 19 nt, Artificial Sequence
  Description of Artificial Sequence: Synthetic oligonucleotide
caacagguccccauugucg

SEQ ID NO: 2697697 - RNA, 19 nt, Artificial Sequence
  Description of Artificial Sequence: Synthetic oligonucleotide
caaagcgaaggccauacac

SEQ ID NO: 2697698 - RNA, 19 nt, Artificial Sequence
  Description of Artificial Sequence: Synthetic oligonucleotide
caugucuaggauacucugg

SEQ ID NO: 2697699 - RNA, 19 nt, Artificial Sequence
  Description of Artificial Sequence: Synthetic oligonucleotide
agacgaguacaccacgggg

SEQ ID NO: 2697700 - RNA, 19 nt, Artificial Sequence
  Description of Artificial Sequence: Synthetic oligonucleotide
gaugacacagggaccaucc

SEQ ID NO: 2697701 - RNA, 19 nt, Artificial Sequence
  Description of Artificial Sequence: Synthetic oligonucleotide
ucaugucuaggauacucug

SEQ ID NO: 2697702 - RNA, 19 nt, Artificial Sequence
  Description of Artificial Sequence: Synthetic oligonucleotide
agggacagcauccagcacu

SEQ ID NO: 2697703 - RNA, 19 nt, Artificial Sequence
  Description of Artificial Sequence: Synthetic oligonucleotide
agacccaucaugucuagga

SEQ ID NO: 2697704 - RNA, 19 nt, Artificial Sequence
  Description of Artificial Sequence: Synthetic oligonucleotide
guugcguguacccucuggg

SEQ ID NO: 2697705 - RNA, 19 nt, Artificial Sequence
  Description of Artificial Sequence: Synthetic oligonucleotide
cuuguacccugauuguucc

SEQ ID NO: 2697706 - RNA, 19 nt, Artificial Sequence
  Description of Artificial Sequence: Synthetic oligonucleotide
aaagagcuuccucuugaca

SEQ ID NO: 2697707 - RNA, 19 nt, Artificial Sequence
  Description of Artificial Sequence: Synthetic oligonucleotide
gugauuagaaaugaugaca

SEQ ID NO: 2697708 - RNA, 19 nt, Artificial Sequence
  Description of Artificial Sequence: Synthetic oligonucleotide
uguaaggccucugguaggg

SEQ ID NO: 2697709 - RNA, 19 nt, Artificial Sequence
  Description of Artificial Sequence: Synthetic oligonucleotide
uguccacaagcuuagugac

SEQ ID NO: 2697710 - RNA, 19 nt, Artificial Sequence
  Description of Artificial Sequence: Synthetic oligonucleotide
uuguagaguucuccugggg

SEQ ID NO: 2697711 - RNA, 19 nt, Artificial Sequence
  Description of Artificial Sequence: Synthetic oligonucleotide
aagcuuagugacaucagcu

SEQ ID NO: 2697712 - RNA, 19 nt, Artificial Sequence
  Description of Artificial Sequence: Synthetic oligonucleotide
aguguccacaagcuuagug

SEQ ID NO: 2697713 - RNA, 19 nt, Artificial Sequence
  Description of Artificial Sequence: Synthetic oligonucleotide
ugagguaaagagcuuccuc

SEQ ID NO: 2697714 - RNA, 19 nt, Artificial Sequence
  Description of Artificial Sequence: Synthetic oligonucleotide
uuucuucuggccucugacc

SEQ ID NO: 2697715 - RNA, 19 nt, Artificial Sequence
  Description of Artificial Sequence: Synthetic oligonucleotide
uacuggacuggcacaaccc

SEQ ID NO: 2697716 - RNA, 19 nt, Artificial Sequence
  Description of Artificial Sequence: Synthetic oligonucleotide
caaguguccacaagcuuag

SEQ ID NO: 2697717 - RNA, 19 nt, Artificial Sequence
  Description of Artificial Sequence: Synthetic oligonucleotide
gacacagggaccauccacc

SEQ ID NO: 2697718 - RNA, 19 nt, Artificial Sequence
  Description of Artificial Sequence: Synthetic oligonucleotide
uuccucauggacugguagc

SEQ ID NO: 2697719 - RNA, 19 nt, Artificial Sequence
  Description of Artificial Sequence: Synthetic oligonucleotide
gucauggcaguucuggcgc

SEQ ID NO: 2697720 - RNA, 19 nt, Artificial Sequence
  Description of Artificial Sequence: Synthetic oligonucleotide
gagguaaagagcuuccucu

SEQ ID NO: 2697721 - RNA, 19 nt, Artificial Sequence
  Description of Artificial Sequence: Synthetic oligonucleotide
aagguguuccucauggacu

SEQ ID NO: 2697722 - RNA, 19 nt, Artificial Sequence
  Description of Artificial Sequence: Synthetic oligonucleotide
guguccacaagcuuaguga

SEQ ID NO: 2697723 - RNA, 19 nt, Artificial Sequence
  Description of Artificial Sequence: Synthetic oligonucleotide
ucauggacugguagcaagu

SEQ ID NO: 2697724 - RNA, 19 nt, Artificial Sequence
  Description of Artificial Sequence: Synthetic oligonucleotide
ucuaggauacucuggugau

SEQ ID NO: 2697725 - RNA, 19 nt, Artificial Sequence
  Description of Artificial Sequence: Synthetic oligonucleotide
acuuguacccugauuguuc

SEQ ID NO: 2697726 - RNA, 19 nt, Artificial Sequence
  Description of Artificial Sequence: Synthetic oligonucleotide
gggaguaucuccaugagac

SEQ ID NO: 2697727 - RNA, 19 nt, Artificial Sequence
  Description of Artificial Sequence: Synthetic oligonucleotide
uagcaaguguccacaagcu

SEQ ID NO: 2697728 - RNA, 19 nt, Artificial Sequence
  Description of Artificial Sequence: Synthetic oligonucleotide
uggccaaguagaacgcucc

SEQ ID NO: 2697729 - RNA, 19 nt, Artificial Sequence
  Description of Artificial Sequence: Synthetic oligonucleotide
cuccaugagacccaucaug

SEQ ID NO: 2697730 - RNA, 19 nt, Artificial Sequence
  Description of Artificial Sequence: Synthetic oligonucleotide
aggccauacacguacuuga

SEQ ID NO: 2697731 - RNA, 19 nt, Artificial Sequence
  Description of Artificial Sequence: Synthetic oligonucleotide
uguacccugauuguuccug

SEQ ID NO: 2697732 - RNA, 19 nt, Artificial Sequence
  Description of Artificial Sequence: Synthetic oligonucleotide
aaauuuguagaaagguguu

SEQ ID NO: 2697733 - RNA, 19 nt, Artificial Sequence
  Description of Artificial Sequence: Synthetic oligonucleotide
uugaugaaguagacacccc

SEQ ID NO: 2697734 - RNA, 19 nt, Artificial Sequence
  Description of Artificial Sequence: Synthetic oligonucleotide
cucauggacugguagcaag

SEQ ID NO: 2697735 - RNA, 19 nt, Artificial Sequence
  Description of Artificial Sequence: Synthetic oligonucleotide
acuggcacaaccccaggcu

SEQ ID NO: 2697736 - RNA, 19 nt, Artificial Sequence
  Description of Artificial Sequence: Synthetic oligonucleotide
gauacucuggugauuagaa

SEQ ID NO: 2697737 - RNA, 19 nt, Artificial Sequence
  Description of Artificial Sequence: Synthetic oligonucleotide
gcacacagcgcuuagggag

SEQ ID NO: 2697738 - RNA, 19 nt, Artificial Sequence
  Description of Artificial Sequence: Synthetic oligonucleotide
uagggaguaucuccaugag

SEQ ID NO: 2697739 - RNA, 19 nt, Artificial Sequence
  Description of Artificial Sequence: Synthetic oligonucleotide
uccacaagcuuagugacau

SEQ ID NO: 2697740 - RNA, 19 nt, Artificial Sequence
  Description of Artificial Sequence: Synthetic oligonucleotide
caacagcucacgcuuggcg

SEQ ID NO: 2697741 - RNA, 19 nt, Artificial Sequence
  Description of Artificial Sequence: Synthetic oligonucleotide
accccaggcucuuuaauug

SEQ ID NO: 2697742 - RNA, 19 nt, Artificial Sequence
  Description of Artificial Sequence: Synthetic oligonucleotide
ugaccucaaagcgaaggcc

SEQ ID NO: 2697743 - RNA, 19 nt, Artificial Sequence
  Description of Artificial Sequence: Synthetic oligonucleotide
ggucauggcaguucuggcg

SEQ ID NO: 2697744 - RNA, 19 nt, Artificial Sequence
  Description of Artificial Sequence: Synthetic oligonucleotide
uagaaagguguuccucaug

SEQ ID NO: 2697745 - RNA, 19 nt, Artificial Sequence
  Description of Artificial Sequence: Synthetic oligonucleotide
ugauauuuuccuugaccau

SEQ ID NO: 2697746 - RNA, 19 nt, Artificial Sequence
  Description of Artificial Sequence: Synthetic oligonucleotide
uucuguaaggccucuggua

SEQ ID NO: 2697747 - RNA, 19 nt, Artificial Sequence
  Description of Artificial Sequence: Synthetic oligonucleotide
ggugauuagaaaugaugac

SEQ ID NO: 2697748 - RNA, 19 nt, Artificial Sequence
  Description of Artificial Sequence: Synthetic oligonucleotide
uaaagagcuuccucuugac

SEQ ID NO: 2697749 - RNA, 19 nt, Artificial Sequence
  Description of Artificial Sequence: Synthetic oligonucleotide
cuacuggacuggcacaacc

SEQ ID NO: 2697750 - RNA, 19 nt, Artificial Sequence
  Description of Artificial Sequence: Synthetic oligonucleotide
uuggcgaucugcacacagc

SEQ ID NO: 2697751 - RNA, 19 nt, Artificial Sequence
  Description of Artificial Sequence: Synthetic oligonucleotide
acccugauuguuccugagg

SEQ ID NO: 2697752 - RNA, 19 nt, Artificial Sequence
  Description of Artificial Sequence: Synthetic oligonucleotide
uccuugaccaugaggucac

SEQ ID NO: 2697753 - RNA, 19 nt, Artificial Sequence
  Description of Artificial Sequence: Synthetic oligonucleotide
uccccauugucguugcgug

SEQ ID NO: 2697754 - RNA, 19 nt, Artificial Sequence
  Description of Artificial Sequence: Synthetic oligonucleotide
acccaggucggccaucagg

SEQ ID NO: 2697755 - RNA, 19 nt, Artificial Sequence
  Description of Artificial Sequence: Synthetic oligonucleotide
uaggauacucuggugauua

SEQ ID NO: 2697756 - RNA, 19 nt, Artificial Sequence
  Description of Artificial Sequence: Synthetic oligonucleotide
ucacgcuuggcgaucugca

SEQ ID NO: 2697757 - RNA, 19 nt, Artificial Sequence
  Description of Artificial Sequence: Synthetic oligonucleotide
ucuggugauuagaaaugau

SEQ ID NO: 2697758 - RNA, 19 nt, Artificial Sequence
  Description of Artificial Sequence: Synthetic oligonucleotide
uauuuuccuugaccaugag

SEQ ID NO: 2697759 - RNA, 19 nt, Artificial Sequence
  Description of Artificial Sequence: Synthetic oligonucleotide
ccgagguacaugaugaggc

SEQ ID NO: 2697760 - RNA, 19 nt, Artificial Sequence
  Description of Artificial Sequence: Synthetic oligonucleotide
cuuagggaguaucuccaug

SEQ ID NO: 2697761 - RNA, 19 nt, Artificial Sequence
  Description of Artificial Sequence: Synthetic oligonucleotide
uaaggccucugguagggac

SEQ ID NO: 2697762 - RNA, 19 nt, Artificial Sequence
  Description of Artificial Sequence: Synthetic oligonucleotide
auauuuuccuugaccauga

SEQ ID NO: 2697763 - RNA, 19 nt, Artificial Sequence
  Description of Artificial Sequence: Synthetic oligonucleotide
ucuuggaaauuuguagaaa

SEQ ID NO: 2697764 - RNA, 19 nt, Artificial Sequence
  Description of Artificial Sequence: Synthetic oligonucleotide
uccucauggacugguagca

SEQ ID NO: 2697765 - RNA, 19 nt, Artificial Sequence
  Description of Artificial Sequence: Synthetic oligonucleotide
cuuggcgaucugcacacag

SEQ ID NO: 2697766 - RNA, 19 nt, Artificial Sequence
  Description of Artificial Sequence: Synthetic oligonucleotide
cgguugaugaaguagacac

SEQ ID NO: 2697767 - RNA, 19 nt, Artificial Sequence
  Description of Artificial Sequence: Synthetic oligonucleotide
cucaaagcgaaggccauac

SEQ ID NO: 2697768 - RNA, 19 nt, Artificial Sequence
  Description of Artificial Sequence: Synthetic oligonucleotide
cuuuaauuguagaguucuc

SEQ ID NO: 2697769 - RNA, 19 nt, Artificial Sequence
  Description of Artificial Sequence: Synthetic oligonucleotide
caucaugucuaggauacuc

SEQ ID NO: 2697770 - RNA, 19 nt, Artificial Sequence
  Description of Artificial Sequence: Synthetic oligonucleotide
cucuuuaauuguagaguuc

SEQ ID NO: 2697771 - RNA, 19 nt, Artificial Sequence
  Description of Artificial Sequence: Synthetic oligonucleotide
augauggguaccugggccu

SEQ ID NO: 2697772 - RNA, 19 nt, Artificial Sequence
  Description of Artificial Sequence: Synthetic oligonucleotide
gaguacaccacggggauga

SEQ ID NO: 2697773 - RNA, 19 nt, Artificial Sequence
  Description of Artificial Sequence: Synthetic oligonucleotide
uccucuugacauuguagaa

SEQ ID NO: 2697774 - RNA, 19 nt, Artificial Sequence
  Description of Artificial Sequence: Synthetic oligonucleotide
acucuggugauuagaaaug

SEQ ID NO: 2697775 - RNA, 19 nt, Artificial Sequence
  Description of Artificial Sequence: Synthetic oligonucleotide
gagguacaugaugaggccc

SEQ ID NO: 2697776 - RNA, 19 nt, Artificial Sequence
  Description of Artificial Sequence: Synthetic oligonucleotide
ugucuaggauacucuggug

SEQ ID NO: 2697777 - RNA, 19 nt, Artificial Sequence
  Description of Artificial Sequence: Synthetic oligonucleotide
gcuucuguaaggccucugg

SEQ ID NO: 2697778 - RNA, 19 nt, Artificial Sequence
  Description of Artificial Sequence: Synthetic oligonucleotide
guuccugagguaaagagcu

SEQ ID NO: 2697779 - RNA, 19 nt, Artificial Sequence
  Description of Artificial Sequence: Synthetic oligonucleotide
uaaagggcaacaggucccc

SEQ ID NO: 2697780 - RNA, 19 nt, Artificial Sequence
  Description of Artificial Sequence: Synthetic oligonucleotide
ugcguguacccucugggua

SEQ ID NO: 2697781 - RNA, 19 nt, Artificial Sequence
  Description of Artificial Sequence: Synthetic oligonucleotide
gacgaguacaccacgggga

SEQ ID NO: 2697782 - RNA, 19 nt, Artificial Sequence
  Description of Artificial Sequence: Synthetic oligonucleotide
gacuggcacaaccccaggc

SEQ ID NO: 2697783 - RNA, 19 nt, Artificial Sequence
  Description of Artificial Sequence: Synthetic oligonucleotide
cuuugauauuuuccuugac

SEQ ID NO: 2697784 - RNA, 19 nt, Artificial Sequence
  Description of Artificial Sequence: Synthetic oligonucleotide
agcuuagugacaucagcuu

SEQ ID NO: 2697785 - RNA, 19 nt, Artificial Sequence
  Description of Artificial Sequence: Synthetic oligonucleotide
ucugcacacagcgcuuagg

SEQ ID NO: 2697786 - RNA, 19 nt, Artificial Sequence
  Description of Artificial Sequence: Synthetic oligonucleotide
agaaaugaugacacaggga

SEQ ID NO: 2697787 - RNA, 19 nt, Artificial Sequence
  Description of Artificial Sequence: Synthetic oligonucleotide
cuguaaggccucugguagg

SEQ ID NO: 2697788 - RNA, 19 nt, Artificial Sequence
  Description of Artificial Sequence: Synthetic oligonucleotide
ugauuguuccugagguaaa

SEQ ID NO: 2697789 - RNA, 19 nt, Artificial Sequence
  Description of Artificial Sequence: Synthetic oligonucleotide
cccaucaugucuaggauac

SEQ ID NO: 2697790 - RNA, 19 nt, Artificial Sequence
  Description of Artificial Sequence: Synthetic oligonucleotide
uuagugacaucagcuucug

SEQ ID NO: 2697791 - RNA, 19 nt, Artificial Sequence
  Description of Artificial Sequence: Synthetic oligonucleotide
gacauuguagaaggaagaa

SEQ ID NO: 2697792 - RNA, 19 nt, Artificial Sequence
  Description of Artificial Sequence: Synthetic oligonucleotide
uuguagaaagguguuccuc

SEQ ID NO: 2697793 - RNA, 19 nt, Artificial Sequence
  Description of Artificial Sequence: Synthetic oligonucleotide
gaccucaaagcgaaggcca

SEQ ID NO: 2697794 - RNA, 19 nt, Artificial Sequence
  Description of Artificial Sequence: Synthetic oligonucleotide
ugucguugcguguacccuc

SEQ ID NO: 2697795 - RNA, 19 nt, Artificial Sequence
  Description of Artificial Sequence: Synthetic oligonucleotide
aagggcaacagguccccau

SEQ ID NO: 2697796 - RNA, 19 nt, Artificial Sequence
  Description of Artificial Sequence: Synthetic oligonucleotide
ucauggcaguucuggcgcg

SEQ ID NO: 2697797 - RNA, 19 nt, Artificial Sequence
  Description of Artificial Sequence: Synthetic oligonucleotide
cuugacauuguagaaggaa

SEQ ID NO: 2697798 - RNA, 19 nt, Artificial Sequence
  Description of Artificial Sequence: Synthetic oligonucleotide
ggccucugaccucaaagcg

SEQ ID NO: 2697799 - RNA, 19 nt, Artificial Sequence
  Description of Artificial Sequence: Synthetic oligonucleotide
acauuguagaaggaagaaa

SEQ ID NO: 2697800 - RNA, 19 nt, Artificial Sequence
  Description of Artificial Sequence: Synthetic oligonucleotide
agggaguaucuccaugaga

SEQ ID NO: 2697801 - RNA, 19 nt, Artificial Sequence
  Description of Artificial Sequence: Synthetic oligonucleotide
uccugagguaaagagcuuc

SEQ ID NO: 2697802 - RNA, 19 nt, Artificial Sequence
  Description of Artificial Sequence: Synthetic oligonucleotide
auggacugguagcaagugu

SEQ ID NO: 2697803 - RNA, 19 nt, Artificial Sequence
  Description of Artificial Sequence: Synthetic oligonucleotide
ugcacacagcgcuuaggga

SEQ ID NO: 2697804 - RNA, 19 nt, Artificial Sequence
  Description of Artificial Sequence: Synthetic oligonucleotide
agcgcuuagggaguaucuc

SEQ ID NO: 2697805 - RNA, 19 nt, Artificial Sequence
  Description of Artificial Sequence: Synthetic oligonucleotide
ugguagggacagcauccag

SEQ ID NO: 2697806 - RNA, 19 nt, Artificial Sequence
  Description of Artificial Sequence: Synthetic oligonucleotide
ucaaagcgaaggccauaca

SEQ ID NO: 2697807 - RNA, 19 nt, Artificial Sequence
  Description of Artificial Sequence: Synthetic oligonucleotide
uccagcacuuguacccuga

SEQ ID NO: 2697808 - RNA, 19 nt, Artificial Sequence
  Description of Artificial Sequence: Synthetic oligonucleotide
ugagacccaucaugucuag

SEQ ID NO: 2697809 - RNA, 19 nt, Artificial Sequence
  Description of Artificial Sequence: Synthetic oligonucleotide
cuuagugacaucagcuucu

SEQ ID NO: 2697810 - RNA, 19 nt, Artificial Sequence
  Description of Artificial Sequence: Synthetic oligonucleotide
auggccaaguagaacgcuc

SEQ ID NO: 2697811 - RNA, 19 nt, Artificial Sequence
  Description of Artificial Sequence: Synthetic oligonucleotide
aucaugucuaggauacucu

SEQ ID NO: 2697812 - RNA, 19 nt, Artificial Sequence
  Description of Artificial Sequence: Synthetic oligonucleotide
cucugguagggacagcauc

SEQ ID NO: 2697813 - RNA, 19 nt, Artificial Sequence
  Description of Artificial Sequence: Synthetic oligonucleotide
acagcgcuuagggaguauc

SEQ ID NO: 2697814 - RNA, 19 nt, Artificial Sequence
  Description of Artificial Sequence: Synthetic oligonucleotide
caugagacccaucaugucu

SEQ ID NO: 2697815 - RNA, 19 nt, Artificial Sequence
  Description of Artificial Sequence: Synthetic oligonucleotide
acacuuugauauuuuccuu

SEQ ID NO: 2697816 - RNA, 19 nt, Artificial Sequence
  Description of Artificial Sequence: Synthetic oligonucleotide
cugauuguuccugagguaa

SEQ ID NO: 2697817 - RNA, 19 nt, Artificial Sequence
  Description of Artificial Sequence: Synthetic oligonucleotide
auuguuccugagguaaaga

SEQ ID NO: 2697818 - RNA, 19 nt, Artificial Sequence
  Description of Artificial Sequence: Synthetic oligonucleotide
cccaggucggccaucaggg

SEQ ID NO: 2697819 - RNA, 19 nt, Artificial Sequence
  Description of Artificial Sequence: Synthetic oligonucleotide
uggcacaaccccaggcucu

SEQ ID NO: 2697820 - RNA, 19 nt, Artificial Sequence
  Description of Artificial Sequence: Synthetic oligonucleotide
acgcuuggcgaucugcaca

SEQ ID NO: 2697821 - RNA, 19 nt, Artificial Sequence
  Description of Artificial Sequence: Synthetic oligonucleotide
gaaagguguuccucaugga

SEQ ID NO: 2697822 - RNA, 19 nt, Artificial Sequence
  Description of Artificial Sequence: Synthetic oligonucleotide
auacucuggugauuagaaa

SEQ ID NO: 2697823 - RNA, 19 nt, Artificial Sequence
  Description of Artificial Sequence: Synthetic oligonucleotide
gcgaaggccauacacguac

SEQ ID NO: 2697824 - RNA, 19 nt, Artificial Sequence
  Description of Artificial Sequence: Synthetic oligonucleotide
agguaaagagcuuccucuu

SEQ ID NO: 2697825 - RNA, 19 nt, Artificial Sequence
  Description of Artificial Sequence: Synthetic oligonucleotide
acgaguacaccacggggau

SEQ ID NO: 2697826 - RNA, 19 nt, Artificial Sequence
  Description of Artificial Sequence: Synthetic oligonucleotide
gguagggacagcauccagc

SEQ ID NO: 2697827 - RNA, 19 nt, Artificial Sequence
  Description of Artificial Sequence: Synthetic oligonucleotide
acacguacuugaagggccg

SEQ ID NO: 2697828 - RNA, 19 nt, Artificial Sequence
  Description of Artificial Sequence: Synthetic oligonucleotide
uugcguguacccucugggu

SEQ ID NO: 2697829 - RNA, 19 nt, Artificial Sequence
  Description of Artificial Sequence: Synthetic oligonucleotide
gguagcaaguguccacaag

SEQ ID NO: 2697830 - RNA, 19 nt, Artificial Sequence
  Description of Artificial Sequence: Synthetic oligonucleotide
uggggcaucuuggaaauuu

SEQ ID NO: 2697831 - RNA, 19 nt, Artificial Sequence
  Description of Artificial Sequence: Synthetic oligonucleotide
ucuccaugagacccaucau

SEQ ID NO: 2697832 - RNA, 19 nt, Artificial Sequence
  Description of Artificial Sequence: Synthetic oligonucleotide
acacagggaccauccaccu

SEQ ID NO: 2697833 - RNA, 19 nt, Artificial Sequence
  Description of Artificial Sequence: Synthetic oligonucleotide
agguacaugaugaggccca

SEQ ID NO: 2697834 - RNA, 19 nt, Artificial Sequence
  Description of Artificial Sequence: Synthetic oligonucleotide
acccaucaugucuaggaua

SEQ ID NO: 2697835 - RNA, 19 nt, Artificial Sequence
  Description of Artificial Sequence: Synthetic oligonucleotide
cagcauccagcacuuguac

SEQ ID NO: 2697836 - RNA, 19 nt, Artificial Sequence
  Description of Artificial Sequence: Synthetic oligonucleotide
ccugagguaaagagcuucc

SEQ ID NO: 2697837 - RNA, 19 nt, Artificial Sequence
  Description of Artificial Sequence: Synthetic oligonucleotide
acagcucacgcuuggcgau

SEQ ID NO: 2697838 - RNA, 19 nt, Artificial Sequence
  Description of Artificial Sequence: Synthetic oligonucleotide
ggaguaucuccaugagacc

SEQ ID NO: 2697839 - RNA, 19 nt, Artificial Sequence
  Description of Artificial Sequence: Synthetic oligonucleotide
agcaaguguccacaagcuu

SEQ ID NO: 2697840 - RNA, 19 nt, Artificial Sequence
  Description of Artificial Sequence: Synthetic oligonucleotide
agauccacacuuugauauu

SEQ ID NO: 2697841 - RNA, 19 nt, Artificial Sequence
  Description of Artificial Sequence: Synthetic oligonucleotide
aucugcacacagcgcuuag

SEQ ID NO: 2697842 - RNA, 19 nt, Artificial Sequence
  Description of Artificial Sequence: Synthetic oligonucleotide
cauggacugguagcaagug

SEQ ID NO: 2697843 - RNA, 19 nt, Artificial Sequence
  Description of Artificial Sequence: Synthetic oligonucleotide
uugucguugcguguacccu

SEQ ID NO: 2697844 - RNA, 19 nt, Artificial Sequence
  Description of Artificial Sequence: Synthetic oligonucleotide
augaggucacccaggucgg

SEQ ID NO: 2697845 - RNA, 19 nt, Artificial Sequence
  Description of Artificial Sequence: Synthetic oligonucleotide
guagauccacacuuugaua

SEQ ID NO: 2697846 - RNA, 19 nt, Artificial Sequence
  Description of Artificial Sequence: Synthetic oligonucleotide
aggccccgugaacaacagc

SEQ ID NO: 2697847 - RNA, 19 nt, Artificial Sequence
  Description of Artificial Sequence: Synthetic oligonucleotide
gcgcuuagggaguaucucc

SEQ ID NO: 2697848 - RNA, 19 nt, Artificial Sequence
  Description of Artificial Sequence: Synthetic oligonucleotide
gagacccaucaugucuagg

SEQ ID NO: 2697849 - RNA, 19 nt, Artificial Sequence
  Description of Artificial Sequence: Synthetic oligonucleotide
gccauacacguacuugaag

SEQ ID NO: 2697850 - RNA, 19 nt, Artificial Sequence
  Description of Artificial Sequence: Synthetic oligonucleotide
gcguguacccucuggguag

SEQ ID NO: 2697851 - RNA, 19 nt, Artificial Sequence
  Description of Artificial Sequence: Synthetic oligonucleotide
uacccucuggguagaucca

SEQ ID NO: 2697852 - RNA, 19 nt, Artificial Sequence
  Description of Artificial Sequence: Synthetic oligonucleotide
ugauggguaccugggccug

SEQ ID NO: 2697853 - RNA, 19 nt, Artificial Sequence
  Description of Artificial Sequence: Synthetic oligonucleotide
cuggcacaaccccaggcuc

SEQ ID NO: 2697854 - RNA, 19 nt, Artificial Sequence
  Description of Artificial Sequence: Synthetic oligonucleotide
ggaugauggguaccugggc

SEQ ID NO: 2697855 - RNA, 19 nt, Artificial Sequence
  Description of Artificial Sequence: Synthetic oligonucleotide
cauugucguugcguguacc

SEQ ID NO: 2697856 - RNA, 19 nt, Artificial Sequence
  Description of Artificial Sequence: Synthetic oligonucleotide
cucuggugauuagaaauga

SEQ ID NO: 2697857 - RNA, 19 nt, Artificial Sequence
  Description of Artificial Sequence: Synthetic oligonucleotide
aggucacccaggucggcca

SEQ ID NO: 2697858 - RNA, 19 nt, Artificial Sequence
  Description of Artificial Sequence: Synthetic oligonucleotide
cuggauggccaaguagaac

SEQ ID NO: 2697859 - RNA, 19 nt, Artificial Sequence
  Description of Artificial Sequence: Synthetic oligonucleotide
ugguagcaaguguccacaa

SEQ ID NO: 2697860 - RNA, 19 nt, Artificial Sequence
  Description of Artificial Sequence: Synthetic oligonucleotide
augacacagggaccaucca

SEQ ID NO: 2697861 - RNA, 19 nt, Artificial Sequence
  Description of Artificial Sequence: Synthetic oligonucleotide
acggggaugauggguaccu

SEQ ID NO: 2697862 - RNA, 19 nt, Artificial Sequence
  Description of Artificial Sequence: Synthetic oligonucleotide
augagacccaucaugucua

SEQ ID NO: 2697863 - RNA, 19 nt, Artificial Sequence
  Description of Artificial Sequence: Synthetic oligonucleotide
uagugacaucagcuucugu

SEQ ID NO: 2697864 - RNA, 19 nt, Artificial Sequence
  Description of Artificial Sequence: Synthetic oligonucleotide
ccaggcucuuuaauuguag

SEQ ID NO: 2697865 - RNA, 19 nt, Artificial Sequence
  Description of Artificial Sequence: Synthetic oligonucleotide
uuguacccugauuguuccu

SEQ ID NO: 2697866 - RNA, 19 nt, Artificial Sequence
  Description of Artificial Sequence: Synthetic oligonucleotide
guacccugauuguuccuga

SEQ ID NO: 2697867 - RNA, 19 nt, Artificial Sequence
  Description of Artificial Sequence: Synthetic oligonucleotide
auccagcacuuguacccug

SEQ ID NO: 2697868 - RNA, 19 nt, Artificial Sequence
  Description of Artificial Sequence: Synthetic oligonucleotide
gcaaguguccacaagcuua

SEQ ID NO: 2697869 - RNA, 19 nt, Artificial Sequence
  Description of Artificial Sequence: Synthetic oligonucleotide
ggccuggauggccaaguag

SEQ ID NO: 2697870 - RNA, 19 nt, Artificial Sequence
  Description of Artificial Sequence: Synthetic oligonucleotide
cagguccccauugucguug

SEQ ID NO: 2697871 - RNA, 19 nt, Artificial Sequence
  Description of Artificial Sequence: Synthetic oligonucleotide
acaggccccgugaacaaca

SEQ ID NO: 2697872 - RNA, 19 nt, Artificial Sequence
  Description of Artificial Sequence: Synthetic oligonucleotide
uguacccucuggguagauc

SEQ ID NO: 2697873 - RNA, 19 nt, Artificial Sequence
  Description of Artificial Sequence: Synthetic oligonucleotide
agggcaacagguccccauu

SEQ ID NO: 2697874 - RNA, 19 nt, Artificial Sequence
  Description of Artificial Sequence: Synthetic oligonucleotide
ggguaccugggccuggaug

SEQ ID NO: 2697875 - RNA, 19 nt, Artificial Sequence
  Description of Artificial Sequence: Synthetic oligonucleotide
ugggccuggauggccaagu

SEQ ID NO: 2697876 - RNA, 19 nt, Artificial Sequence
  Description of Artificial Sequence: Synthetic oligonucleotide
gccuggauggccaaguaga

SEQ ID NO: 2697877 - RNA, 19 nt, Artificial Sequence
  Description of Artificial Sequence: Synthetic oligonucleotide
uggcaguucuggcgcgcug

SEQ ID NO: 2697878 - RNA, 19 nt, Artificial Sequence
  Description of Artificial Sequence: Synthetic oligonucleotide
cuucuggccucugaccuca

SEQ ID NO: 2697879 - RNA, 19 nt, Artificial Sequence
  Description of Artificial Sequence: Synthetic oligonucleotide
guagaaagguguuccucau

SEQ ID NO: 2697880 - RNA, 19 nt, Artificial Sequence
  Description of Artificial Sequence: Synthetic oligonucleotide
ucuggccucugaccucaaa

SEQ ID NO: 2697881 - RNA, 19 nt, Artificial Sequence
  Description of Artificial Sequence: Synthetic oligonucleotide
gcaacagguccccauuguc

SEQ ID NO: 2697882 - RNA, 19 nt, Artificial Sequence
  Description of Artificial Sequence: Synthetic oligonucleotide
ucuggcgcgcuggcgguug

SEQ ID NO: 2697883 - RNA, 19 nt, Artificial Sequence
  Description of Artificial Sequence: Synthetic oligonucleotide
gcgaucugcacacagcgcu

SEQ ID NO: 2697884 - RNA, 19 nt, Artificial Sequence
  Description of Artificial Sequence: Synthetic oligonucleotide
cgagguacaugaugaggcc

SEQ ID NO: 2697885 - RNA, 19 nt, Artificial Sequence
  Description of Artificial Sequence: Synthetic oligonucleotide
cccgagguacaugaugagg

SEQ ID NO: 2697886 - RNA, 19 nt, Artificial Sequence
  Description of Artificial Sequence: Synthetic oligonucleotide
accacggggaugaugggua

SEQ ID NO: 2697887 - RNA, 19 nt, Artificial Sequence
  Description of Artificial Sequence: Synthetic oligonucleotide
ccgugaacaacagcucacg

SEQ ID NO: 2697888 - RNA, 19 nt, Artificial Sequence
  Description of Artificial Sequence: Synthetic oligonucleotide
gacccaucaugucuaggau

SEQ ID NO: 2697889 - RNA, 19 nt, Artificial Sequence
  Description of Artificial Sequence: Synthetic oligonucleotide
uaucuccaugagacccauc

SEQ ID NO: 2697890 - RNA, 19 nt, Artificial Sequence
  Description of Artificial Sequence: Synthetic oligonucleotide
guacaccacggggaugaug

SEQ ID NO: 2697891 - RNA, 19 nt, Artificial Sequence
  Description of Artificial Sequence: Synthetic oligonucleotide
cccgugaacaacagcucac

SEQ ID NO: 2697892 - RNA, 19 nt, Artificial Sequence
  Description of Artificial Sequence: Synthetic oligonucleotide
cucugaccucaaagcgaag

SEQ ID NO: 2697893 - RNA, 19 nt, Artificial Sequence
  Description of Artificial Sequence: Synthetic oligonucleotide
cuucuguaaggccucuggu

SEQ ID NO: 2697894 - RNA, 19 nt, Artificial Sequence
  Description of Artificial Sequence: Synthetic oligonucleotide
gggcaacagguccccauug

SEQ ID NO: 2697895 - RNA, 19 nt, Artificial Sequence
  Description of Artificial Sequence: Synthetic oligonucleotide
cacggggaugauggguacc

SEQ ID NO: 2697896 - RNA, 19 nt, Artificial Sequence
  Description of Artificial Sequence: Synthetic oligonucleotide
gauggccaaguagaacgcu

SEQ ID NO: 2697897 - RNA, 19 nt, Artificial Sequence
  Description of Artificial Sequence: Synthetic oligonucleotide
cgugaacaacagcucacgc

SEQ ID NO: 2697898 - RNA, 19 nt, Artificial Sequence
  Description of Artificial Sequence: Synthetic oligonucleotide
ucguugcguguacccucug

SEQ ID NO: 2697899 - RNA, 19 nt, Artificial Sequence
  Description of Artificial Sequence: Synthetic oligonucleotide
cacagggaccauccaccuc

SEQ ID NO: 2697900 - RNA, 19 nt, Artificial Sequence
  Description of Artificial Sequence: Synthetic oligonucleotide
ggacuggcacaaccccagg

SEQ ID NO: 2697901 - RNA, 19 nt, Artificial Sequence
  Description of Artificial Sequence: Synthetic oligonucleotide
ccucugaccucaaagcgaa

SEQ ID NO: 2697902 - RNA, 19 nt, Artificial Sequence
  Description of Artificial Sequence: Synthetic oligonucleotide
gaggcccacaggccccgug

SEQ ID NO: 2697903 - RNA, 19 nt, Artificial Sequence
  Description of Artificial Sequence: Synthetic oligonucleotide
guccacaagcuuagugaca

SEQ ID NO: 2697904 - RNA, 19 nt, Artificial Sequence
  Description of Artificial Sequence: Synthetic oligonucleotide
agcuucuguaaggccucug

SEQ ID NO: 2697905 - RNA, 19 nt, Artificial Sequence
  Description of Artificial Sequence: Synthetic oligonucleotide
gaaggccauacacguacuu

SEQ ID NO: 2697906 - RNA, 19 nt, Artificial Sequence
  Description of Artificial Sequence: Synthetic oligonucleotide
ggguagauccacacuuuga

SEQ ID NO: 2697907 - RNA, 19 nt, Artificial Sequence
  Description of Artificial Sequence: Synthetic oligonucleotide
agcucacgcuuggcgaucu

SEQ ID NO: 2697908 - RNA, 19 nt, Artificial Sequence
  Description of Artificial Sequence: Synthetic oligonucleotide
cacacagcgcuuagggagu

SEQ ID NO: 2697909 - RNA, 19 nt, Artificial Sequence
  Description of Artificial Sequence: Synthetic oligonucleotide
auggcaguucuggcgcgcu

SEQ ID NO: 2697910 - RNA, 19 nt, Artificial Sequence
  Description of Artificial Sequence: Synthetic oligonucleotide
cugguagggacagcaucca

SEQ ID NO: 2697911 - RNA, 19 nt, Artificial Sequence
  Description of Artificial Sequence: Synthetic oligonucleotide
gggaccauccaccuccagu

SEQ ID NO: 2697912 - RNA, 19 nt, Artificial Sequence
  Description of Artificial Sequence: Synthetic oligonucleotide
gccucugguagggacagca

SEQ ID NO: 2697913 - RNA, 19 nt, Artificial Sequence
  Description of Artificial Sequence: Synthetic oligonucleotide
cacaaccccaggcucuuua

SEQ ID NO: 2697914 - RNA, 19 nt, Artificial Sequence
  Description of Artificial Sequence: Synthetic oligonucleotide
guacaugaugaggcccaca

SEQ ID NO: 2697915 - RNA, 19 nt, Artificial Sequence
  Description of Artificial Sequence: Synthetic oligonucleotide
ggcgguugaugaaguagac

SEQ ID NO: 2697916 - RNA, 19 nt, Artificial Sequence
  Description of Artificial Sequence: Synthetic oligonucleotide
gccucugaccucaaagcga

SEQ ID NO: 2697917 - RNA, 19 nt, Artificial Sequence
  Description of Artificial Sequence: Synthetic oligonucleotide
ccaugagacccaucauguc

SEQ ID NO: 2697918 - RNA, 19 nt, Artificial Sequence
  Description of Artificial Sequence: Synthetic oligonucleotide
cgcuuggcgaucugcacac

SEQ ID NO: 2697919 - RNA, 19 nt, Artificial Sequence
  Description of Artificial Sequence: Synthetic oligonucleotide
cguugcguguacccucugg

SEQ ID NO: 2697920 - RNA, 19 nt, Artificial Sequence
  Description of Artificial Sequence: Synthetic oligonucleotide
cccugauuguuccugaggu

SEQ ID NO: 2697921 - RNA, 19 nt, Artificial Sequence
  Description of Artificial Sequence: Synthetic oligonucleotide
cacaggccccgugaacaac

SEQ ID NO: 2697922 - RNA, 19 nt, Artificial Sequence
  Description of Artificial Sequence: Synthetic oligonucleotide
gcaguucuggcgcgcuggc

SEQ ID NO: 2697923 - RNA, 19 nt, Artificial Sequence
  Description of Artificial Sequence: Synthetic oligonucleotide
uggguaccugggccuggau

SEQ ID NO: 2697924 - RNA, 19 nt, Artificial Sequence
  Description of Artificial Sequence: Synthetic oligonucleotide
augaugacacagggaccau

SEQ ID NO: 2697925 - RNA, 19 nt, Artificial Sequence
  Description of Artificial Sequence: Synthetic oligonucleotide
caaguagaacgcuccuuuu

SEQ ID NO: 2697926 - RNA, 19 nt, Artificial Sequence
  Description of Artificial Sequence: Synthetic oligonucleotide
gcgguugaugaaguagaca

SEQ ID NO: 2697927 - RNA, 19 nt, Artificial Sequence
  Description of Artificial Sequence: Synthetic oligonucleotide
gcgcuggcgguugaugaag

SEQ ID NO: 2697928 - RNA, 19 nt, Artificial Sequence
  Description of Artificial Sequence: Synthetic oligonucleotide
cagcgcuuagggaguaucu

SEQ ID NO: 2697929 - RNA, 19 nt, Artificial Sequence
  Description of Artificial Sequence: Synthetic oligonucleotide
cucuggguagauccacacu

SEQ ID NO: 2697930 - RNA, 19 nt, Artificial Sequence
  Description of Artificial Sequence: Synthetic oligonucleotide
ccauugucguugcguguac

SEQ ID NO: 2697931 - RNA, 19 nt, Artificial Sequence
  Description of Artificial Sequence: Synthetic oligonucleotide
ccaaguagaacgcuccuuu

SEQ ID NO: 2697932 - RNA, 19 nt, Artificial Sequence
  Description of Artificial Sequence: Synthetic oligonucleotide
gaguucuccuggggcaucu

SEQ ID NO: 2697933 - RNA, 19 nt, Artificial Sequence
  Description of Artificial Sequence: Synthetic oligonucleotide
cgcuuagggaguaucucca

SEQ ID NO: 2697934 - RNA, 19 nt, Artificial Sequence
  Description of Artificial Sequence: Synthetic oligonucleotide
cccacaggccccgugaaca

SEQ ID NO: 2697935 - RNA, 19 nt, Artificial Sequence
  Description of Artificial Sequence: Synthetic oligonucleotide
cugagguaaagagcuuccu

SEQ ID NO: 2697936 - RNA, 19 nt, Artificial Sequence
  Description of Artificial Sequence: Synthetic oligonucleotide
ggcaacagguccccauugu

SEQ ID NO: 2697937 - RNA, 19 nt, Artificial Sequence
  Description of Artificial Sequence: Synthetic oligonucleotide
gcacuuguacccugauugu

SEQ ID NO: 2697938 - RNA, 19 nt, Artificial Sequence
  Description of Artificial Sequence: Synthetic oligonucleotide
cuggguagauccacacuuu

SEQ ID NO: 2697939 - RNA, 19 nt, Artificial Sequence
  Description of Artificial Sequence: Synthetic oligonucleotide
gcgcgcuggcgguugauga

SEQ ID NO: 2697940 - RNA, 19 nt, Artificial Sequence
  Description of Artificial Sequence: Synthetic oligonucleotide
ccccgagguacaugaugag

SEQ ID NO: 2697941 - RNA, 19 nt, Artificial Sequence
  Description of Artificial Sequence: Synthetic oligonucleotide
gucguugcguguacccucu

SEQ ID NO: 2697942 - RNA, 19 nt, Artificial Sequence
  Description of Artificial Sequence: Synthetic oligonucleotide
agcgaaggccauacacgua

SEQ ID NO: 2697943 - RNA, 19 nt, Artificial Sequence
  Description of Artificial Sequence: Synthetic oligonucleotide
cagggaccauccaccucca

SEQ ID NO: 2697944 - RNA, 19 nt, Artificial Sequence
  Description of Artificial Sequence: Synthetic oligonucleotide
cauccagcacuuguacccu

SEQ ID NO: 2697945 - RNA, 19 nt, Artificial Sequence
  Description of Artificial Sequence: Synthetic oligonucleotide
guucuggcgcgcuggcggu

SEQ ID NO: 2697946 - RNA, 19 nt, Artificial Sequence
  Description of Artificial Sequence: Synthetic oligonucleotide
cagcucacgcuuggcgauc

SEQ ID NO: 2697947 - RNA, 19 nt, Artificial Sequence
  Description of Artificial Sequence: Synthetic oligonucleotide
guaucuccaugagacccau

SEQ ID NO: 2697948 - RNA, 19 nt, Artificial Sequence
  Description of Artificial Sequence: Synthetic oligonucleotide
ccacggggaugauggguac

SEQ ID NO: 2697949 - RNA, 19 nt, Artificial Sequence
  Description of Artificial Sequence: Synthetic oligonucleotide
aguacaccacggggaugau

SEQ ID NO: 2697950 - RNA, 19 nt, Artificial Sequence
  Description of Artificial Sequence: Synthetic oligonucleotide
ggccauacacguacuugaa

SEQ ID NO: 2697951 - RNA, 19 nt, Artificial Sequence
  Description of Artificial Sequence: Synthetic oligonucleotide
acacagcgcuuagggagua

SEQ ID NO: 2697952 - RNA, 19 nt, Artificial Sequence
  Description of Artificial Sequence: Synthetic oligonucleotide
cacuuguacccugauuguu

SEQ ID NO: 2697953 - RNA, 19 nt, Artificial Sequence
  Description of Artificial Sequence: Synthetic oligonucleotide
ggcgcgcuggcgguugaug

SEQ ID NO: 2697954 - RNA, 19 nt, Artificial Sequence
  Description of Artificial Sequence: Synthetic oligonucleotide
cuaggauacucuggugauu

SEQ ID NO: 2697955 - RNA, 19 nt, Artificial Sequence
  Description of Artificial Sequence: Synthetic oligonucleotide
caccacggggaugaugggu

SEQ ID NO: 2697956 - RNA, 19 nt, Artificial Sequence
  Description of Artificial Sequence: Synthetic oligonucleotide
cccauugucguugcgugua

SEQ ID NO: 2697957 - RNA, 19 nt, Artificial Sequence
  Description of Artificial Sequence: Synthetic oligonucleotide
gcuuagggaguaucuccau

SEQ ID NO: 2697958 - RNA, 19 nt, Artificial Sequence
  Description of Artificial Sequence: Synthetic oligonucleotide
gucacccaggucggccauc

SEQ ID NO: 2697959 - RNA, 19 nt, Artificial Sequence
  Description of Artificial Sequence: Synthetic oligonucleotide
cccucuggguagauccaca

SEQ ID NO: 2697960 - RNA, 19 nt, Artificial Sequence
  Description of Artificial Sequence: Synthetic oligonucleotide
gcccacaggccccgugaac

SEQ ID NO: 2697961 - RNA, 19 nt, Artificial Sequence
  Description of Artificial Sequence: Synthetic oligonucleotide
gccccgugaacaacagcuc

SEQ ID NO: 2697962 - RNA, 19 nt, Artificial Sequence
  Description of Artificial Sequence: Synthetic oligonucleotide
ccuggggcaucuuggaaau

SEQ ID NO: 2697963 - RNA, 19 nt, Artificial Sequence
  Description of Artificial Sequence: Synthetic oligonucleotide
uucuggcgcgcuggcgguu

SEQ ID NO: 2697964 - RNA, 19 nt, Artificial Sequence
  Description of Artificial Sequence: Synthetic oligonucleotide
cagcacuuguacccugauu

SEQ ID NO: 2697965 - RNA, 19 nt, Artificial Sequence
  Description of Artificial Sequence: Synthetic oligonucleotide
gcucacgcuuggcgaucug

SEQ ID NO: 2697966 - RNA, 19 nt, Artificial Sequence
  Description of Artificial Sequence: Synthetic oligonucleotide
ggcccacaggccccgugaa

SEQ ID NO: 2697967 - RNA, 19 nt, Artificial Sequence
  Description of Artificial Sequence: Synthetic oligonucleotide
ccacaggccccgugaacaa

SEQ ID NO: 2697968 - RNA, 19 nt, Artificial Sequence
  Description of Artificial Sequence: Synthetic oligonucleotide
uggcgcgcuggcgguugau

SEQ ID NO: 2697969 - RNA, 19 nt, Artificial Sequence
  Description of Artificial Sequence: Synthetic oligonucleotide
ccucauggacugguagcaa

SEQ ID NO: 2697970 - RNA, 19 nt, Artificial Sequence
  Description of Artificial Sequence: Synthetic oligonucleotide
caucagggucauggcaguu

SEQ ID NO: 2697971 - RNA, 19 nt, Artificial Sequence
  Description of Artificial Sequence: Synthetic oligonucleotide
ccucaaagcgaaggccaua

SEQ ID NO: 2697972 - RNA, 19 nt, Artificial Sequence
  Description of Artificial Sequence: Synthetic oligonucleotide
ggucacccaggucggccau

SEQ ID NO: 2697973 - RNA, 19 nt, Artificial Sequence
  Description of Artificial Sequence: Synthetic oligonucleotide
cagcuucuguaaggccucu

SEQ ID NO: 2697974 - RNA, 19 nt, Artificial Sequence
  Description of Artificial Sequence: Synthetic oligonucleotide
ggcacaaccccaggcucuu

SEQ ID NO: 2697975 - RNA, 19 nt, Artificial Sequence
  Description of Artificial Sequence: Synthetic oligonucleotide
cgcgcuggcgguugaugaa

SEQ ID NO: 2697976 - RNA, 19 nt, Artificial Sequence
  Description of Artificial Sequence: Synthetic oligonucleotide
ccccauugucguugcgugu

SEQ ID NO: 2697977 - RNA, 19 nt, Artificial Sequence
  Description of Artificial Sequence: Synthetic oligonucleotide
cgaaggccauacacguacu

SEQ ID NO: 2697978 - RNA, 19 nt, Artificial Sequence
  Description of Artificial Sequence: Synthetic oligonucleotide
ccucugguagggacagcau

SEQ ID NO: 2697979 - RNA, 19 nt, Artificial Sequence
  Description of Artificial Sequence: Synthetic oligonucleotide
cggggaugauggguaccug

SEQ ID NO: 2697980 - RNA, 19 nt, Artificial Sequence
  Description of Artificial Sequence: Synthetic oligonucleotide
cguguacccucuggguaga

SEQ ID NO: 2697981 - RNA, 19 nt, Artificial Sequence
  Description of Artificial Sequence: Synthetic oligonucleotide
guguacccucuggguagau

SEQ ID NO: 2697982 - RNA, 19 nt, Artificial Sequence
  Description of Artificial Sequence: Synthetic oligonucleotide
cacagcgcuuagggaguau

SEQ ID NO: 2697983 - RNA, 19 nt, Artificial Sequence
  Description of Artificial Sequence: Synthetic oligonucleotide
ccaucaugucuaggauacu

SEQ ID NO: 2697984 - RNA, 19 nt, Artificial Sequence
  Description of Artificial Sequence: Synthetic oligonucleotide
cgcuggcgguugaugaagu

SEQ ID NO: 2697985 - RNA, 19 nt, Artificial Sequence
  Description of Artificial Sequence: Synthetic oligonucleotide
cuggggcaucuuggaaauu

SEQ ID NO: 2697986 - RNA, 19 nt, Artificial Sequence
  Description of Artificial Sequence: Synthetic oligonucleotide
ggucggccaucagggucau

SEQ ID NO: 2697987 - RNA, 19 nt, Artificial Sequence
  Description of Artificial Sequence: Synthetic oligonucleotide
gcacaaccccaggcucuuu

SEQ ID NO: 2697988 - RNA, 19 nt, Artificial Sequence
  Description of Artificial Sequence: Synthetic oligonucleotide
aaaccaaaggauuuuaaac

SEQ ID NO: 2697989 - RNA, 19 nt, Artificial Sequence
  Description of Artificial Sequence: Synthetic oligonucleotide
ugaacuaugauaaacagaa

SEQ ID NO: 2697990 - RNA, 19 nt, Artificial Sequence
  Description of Artificial Sequence: Synthetic oligonucleotide
aaggauuuuaaacauaccu

SEQ ID NO: 2697991 - RNA, 19 nt, Artificial Sequence
  Description of Artificial Sequence: Synthetic oligonucleotide
uuaaacauaccucacauuc

SEQ ID NO: 2697992 - RNA, 19 nt, Artificial Sequence
  Description of Artificial Sequence: Synthetic oligonucleotide
gagaacuggaaucauaugg

SEQ ID NO: 2697993 - RNA, 19 nt, Artificial Sequence
  Description of Artificial Sequence: Synthetic oligonucleotide
aaucauaugguguguuucc

SEQ ID NO: 2697994 - RNA, 19 nt, Artificial Sequence
  Description of Artificial Sequence: Synthetic oligonucleotide
auucguaacauuuucuuac

SEQ ID NO: 2697995 - RNA, 19 nt, Artificial Sequence
  Description of Artificial Sequence: Synthetic oligonucleotide
agucauagaaguuuucacc

SEQ ID NO: 2697996 - RNA, 19 nt, Artificial Sequence
  Description of Artificial Sequence: Synthetic oligonucleotide
aaacauaccucacauucac

SEQ ID NO: 2697997 - RNA, 19 nt, Artificial Sequence
  Description of Artificial Sequence: Synthetic oligonucleotide
aaagugaacuaugauaaac

SEQ ID NO: 2697998 - RNA, 19 nt, Artificial Sequence
  Description of Artificial Sequence: Synthetic oligonucleotide
aacauuuucuuacagugug

SEQ ID NO: 2697999 - RNA, 19 nt, Artificial Sequence
  Description of Artificial Sequence: Synthetic oligonucleotide
aagaacucagaacuuuacc

SEQ ID NO: 2698000 - RNA, 19 nt, Artificial Sequence
  Description of Artificial Sequence: Synthetic oligonucleotide
ucucucaugccuuugaagg

SEQ ID NO: 2698001 - RNA, 19 nt, Artificial Sequence
  Description of Artificial Sequence: Synthetic oligonucleotide
aguggaagaacucagagcu

SEQ ID NO: 2698002 - RNA, 19 nt, Artificial Sequence
  Description of Artificial Sequence: Synthetic oligonucleotide
aaccaaaggauuuuaaaca

SEQ ID NO: 2698003 - RNA, 19 nt, Artificial Sequence
  Description of Artificial Sequence: Synthetic oligonucleotide
acuggaagaacucagaacu

SEQ ID NO: 2698004 - RNA, 19 nt, Artificial Sequence
  Description of Artificial Sequence: Synthetic oligonucleotide
acuaugauaaacagaagcc

SEQ ID NO: 2698005 - RNA, 19 nt, Artificial Sequence
  Description of Artificial Sequence: Synthetic oligonucleotide
aaguggaagaacucagagc

SEQ ID NO: 2698006 - RNA, 19 nt, Artificial Sequence
  Description of Artificial Sequence: Synthetic oligonucleotide
uccauuaacagugugagca

SEQ ID NO: 2698007 - RNA, 19 nt, Artificial Sequence
  Description of Artificial Sequence: Synthetic oligonucleotide
uguaaagugaacuaugaua

SEQ ID NO: 2698008 - RNA, 19 nt, Artificial Sequence
  Description of Artificial Sequence: Synthetic oligonucleotide
aagaacucagagcuuuccc

SEQ ID NO: 2698009 - RNA, 19 nt, Artificial Sequence
  Description of Artificial Sequence: Synthetic oligonucleotide
aacuggaagaacucagaac

SEQ ID NO: 2698010 - RNA, 19 nt, Artificial Sequence
  Description of Artificial Sequence: Synthetic oligonucleotide
auaccucacauucacaagg

SEQ ID NO: 2698011 - RNA, 19 nt, Artificial Sequence
  Description of Artificial Sequence: Synthetic oligonucleotide
ucuggagaaaaccaggcug

SEQ ID NO: 2698012 - RNA, 19 nt, Artificial Sequence
  Description of Artificial Sequence: Synthetic oligonucleotide
uuugaagugaaguggaaga

SEQ ID NO: 2698013 - RNA, 19 nt, Artificial Sequence
  Description of Artificial Sequence: Synthetic oligonucleotide
uuuguuguuuucgagacag

SEQ ID NO: 2698014 - RNA, 19 nt, Artificial Sequence
  Description of Artificial Sequence: Synthetic oligonucleotide
uuuuaaacauaccucacau

SEQ ID NO: 2698015 - RNA, 19 nt, Artificial Sequence
  Description of Artificial Sequence: Synthetic oligonucleotide
caaaggauuuuaaacauac

SEQ ID NO: 2698016 - RNA, 19 nt, Artificial Sequence
  Description of Artificial Sequence: Synthetic oligonucleotide
uucacaagguccauuaaca

SEQ ID NO: 2698017 - RNA, 19 nt, Artificial Sequence
  Description of Artificial Sequence: Synthetic oligonucleotide
uuuggugauauauuccaag

SEQ ID NO: 2698018 - RNA, 19 nt, Artificial Sequence
  Description of Artificial Sequence: Synthetic oligonucleotide
auucacaagguccauuaac

SEQ ID NO: 2698019 - RNA, 19 nt, Artificial Sequence
  Description of Artificial Sequence: Synthetic oligonucleotide
uuugaagggaacuggaaga

SEQ ID NO: 2698020 - RNA, 19 nt, Artificial Sequence
  Description of Artificial Sequence: Synthetic oligonucleotide
uuuccauuauuccucaugu

SEQ ID NO: 2698021 - RNA, 19 nt, Artificial Sequence
  Description of Artificial Sequence: Synthetic oligonucleotide
ucucucaugucuuugaagu

SEQ ID NO: 2698022 - RNA, 19 nt, Artificial Sequence
  Description of Artificial Sequence: Synthetic oligonucleotide
uguucuuuuguuguuuucg

SEQ ID NO: 2698023 - RNA, 19 nt, Artificial Sequence
  Description of Artificial Sequence: Synthetic oligonucleotide
aaguuuucaccacugugag

SEQ ID NO: 2698024 - RNA, 19 nt, Artificial Sequence
  Description of Artificial Sequence: Synthetic oligonucleotide
auggcauguauucagagug

SEQ ID NO: 2698025 - RNA, 19 nt, Artificial Sequence
  Description of Artificial Sequence: Synthetic oligonucleotide
agagugagacgugagaugc

SEQ ID NO: 2698026 - RNA, 19 nt, Artificial Sequence
  Description of Artificial Sequence: Synthetic oligonucleotide
ucuuucaugccuaaaggcu

SEQ ID NO: 2698027 - RNA, 19 nt, Artificial Sequence
  Description of Artificial Sequence: Synthetic oligonucleotide
agaacucagaacuuuacca

SEQ ID NO: 2698028 - RNA, 19 nt, Artificial Sequence
  Description of Artificial Sequence: Synthetic oligonucleotide
ugucuuugaagugaagugg

SEQ ID NO: 2698029 - RNA, 19 nt, Artificial Sequence
  Description of Artificial Sequence: Synthetic oligonucleotide
ucauauggcauguauucag

SEQ ID NO: 2698030 - RNA, 19 nt, Artificial Sequence
  Description of Artificial Sequence: Synthetic oligonucleotide
cucgaacucacauucauag

SEQ ID NO: 2698031 - RNA, 19 nt, Artificial Sequence
  Description of Artificial Sequence: Synthetic oligonucleotide
cauguauucagagugagac

SEQ ID NO: 2698032 - RNA, 19 nt, Artificial Sequence
  Description of Artificial Sequence: Synthetic oligonucleotide
agugaacuaugauaaacag

SEQ ID NO: 2698033 - RNA, 19 nt, Artificial Sequence
  Description of Artificial Sequence: Synthetic oligonucleotide
uauccuugaauacuuguga

SEQ ID NO: 2698034 - RNA, 19 nt, Artificial Sequence
  Description of Artificial Sequence: Synthetic oligonucleotide
uguauucagagugagacgu

SEQ ID NO: 2698035 - RNA, 19 nt, Artificial Sequence
  Description of Artificial Sequence: Synthetic oligonucleotide
uccauuauuccucauguuc

SEQ ID NO: 2698036 - RNA, 19 nt, Artificial Sequence
  Description of Artificial Sequence: Synthetic oligonucleotide
uguuguuuucgagacaggg

SEQ ID NO: 2698037 - RNA, 19 nt, Artificial Sequence
  Description of Artificial Sequence: Synthetic oligonucleotide
gaaguggaagaacucagag

SEQ ID NO: 2698038 - RNA, 19 nt, Artificial Sequence
  Description of Artificial Sequence: Synthetic oligonucleotide
uuuucuuacagugugaguu

SEQ ID NO: 2698039 - RNA, 19 nt, Artificial Sequence
  Description of Artificial Sequence: Synthetic oligonucleotide
uguguuuccauuauuccuc

SEQ ID NO: 2698040 - RNA, 19 nt, Artificial Sequence
  Description of Artificial Sequence: Synthetic oligonucleotide
uguguaaagugaacuauga

SEQ ID NO: 2698041 - RNA, 19 nt, Artificial Sequence
  Description of Artificial Sequence: Synthetic oligonucleotide
ucuuuuguuguuuucgaga

SEQ ID NO: 2698042 - RNA, 19 nt, Artificial Sequence
  Description of Artificial Sequence: Synthetic oligonucleotide
auaaacagaagccuuucca

SEQ ID NO: 2698043 - RNA, 19 nt, Artificial Sequence
  Description of Artificial Sequence: Synthetic oligonucleotide
acuggaaucauauggugug

SEQ ID NO: 2698044 - RNA, 19 nt, Artificial Sequence
  Description of Artificial Sequence: Synthetic oligonucleotide
aguuuggugauauauucca

SEQ ID NO: 2698045 - RNA, 19 nt, Artificial Sequence
  Description of Artificial Sequence: Synthetic oligonucleotide
guucuuucaugccuaaagg

SEQ ID NO: 2698046 - RNA, 19 nt, Artificial Sequence
  Description of Artificial Sequence: Synthetic oligonucleotide
cuuuuguuguuuucgagac

SEQ ID NO: 2698047 - RNA, 19 nt, Artificial Sequence
  Description of Artificial Sequence: Synthetic oligonucleotide
uucuuucaugccuaaaggc

SEQ ID NO: 2698048 - RNA, 19 nt, Artificial Sequence
  Description of Artificial Sequence: Synthetic oligonucleotide
ugaguuuggugauauauuc

SEQ ID NO: 2698049 - RNA, 19 nt, Artificial Sequence
  Description of Artificial Sequence: Synthetic oligonucleotide
uuccuuguagucauagaag

SEQ ID NO: 2698050 - RNA, 19 nt, Artificial Sequence
  Description of Artificial Sequence: Synthetic oligonucleotide
uaaacagaagccuuuccac

SEQ ID NO: 2698051 - RNA, 19 nt, Artificial Sequence
  Description of Artificial Sequence: Synthetic oligonucleotide
aaaggauuuuaaacauacc

SEQ ID NO: 2698052 - RNA, 19 nt, Artificial Sequence
  Description of Artificial Sequence: Synthetic oligonucleotide
uugaauacuugugagagaa

SEQ ID NO: 2698053 - RNA, 19 nt, Artificial Sequence
  Description of Artificial Sequence: Synthetic oligonucleotide
aaacagaagccuuuccaca

SEQ ID NO: 2698054 - RNA, 19 nt, Artificial Sequence
  Description of Artificial Sequence: Synthetic oligonucleotide
ugugaguuccuccaugugu

SEQ ID NO: 2698055 - RNA, 19 nt, Artificial Sequence
  Description of Artificial Sequence: Synthetic oligonucleotide
guaaagugaacuaugauaa

SEQ ID NO: 2698056 - RNA, 19 nt, Artificial Sequence
  Description of Artificial Sequence: Synthetic oligonucleotide
auacuugugagagaacugg

SEQ ID NO: 2698057 - RNA, 19 nt, Artificial Sequence
  Description of Artificial Sequence: Synthetic oligonucleotide
aggauuuuaaacauaccuc

SEQ ID NO: 2698058 - RNA, 19 nt, Artificial Sequence
  Description of Artificial Sequence: Synthetic oligonucleotide
agaacuuuaccacacuggu

SEQ ID NO: 2698059 - RNA, 19 nt, Artificial Sequence
  Description of Artificial Sequence: Synthetic oligonucleotide
ucagaacuuuaccacacug

SEQ ID NO: 2698060 - RNA, 19 nt, Artificial Sequence
  Description of Artificial Sequence: Synthetic oligonucleotide
uaugauaaacagaagccuu

SEQ ID NO: 2698061 - RNA, 19 nt, Artificial Sequence
  Description of Artificial Sequence: Synthetic oligonucleotide
ugauauauuccaaguguac

SEQ ID NO: 2698062 - RNA, 19 nt, Artificial Sequence
  Description of Artificial Sequence: Synthetic oligonucleotide
acaagguccauuaacagug

SEQ ID NO: 2698063 - RNA, 19 nt, Artificial Sequence
  Description of Artificial Sequence: Synthetic oligonucleotide
cuggagaaaaccaggcugg

SEQ ID NO: 2698064 - RNA, 19 nt, Artificial Sequence
  Description of Artificial Sequence: Synthetic oligonucleotide
guucauauggcauguauuc

SEQ ID NO: 2698065 - RNA, 19 nt, Artificial Sequence
  Description of Artificial Sequence: Synthetic oligonucleotide
uuguuuucgagacaggguu

SEQ ID NO: 2698066 - RNA, 19 nt, Artificial Sequence
  Description of Artificial Sequence: Synthetic oligonucleotide
aacucagaacuuuaccaca

SEQ ID NO: 2698067 - RNA, 19 nt, Artificial Sequence
  Description of Artificial Sequence: Synthetic oligonucleotide
agaaguuuucaccacugug

SEQ ID NO: 2698068 - RNA, 19 nt, Artificial Sequence
  Description of Artificial Sequence: Synthetic oligonucleotide
uaaacauaccucacauuca

SEQ ID NO: 2698069 - RNA, 19 nt, Artificial Sequence
  Description of Artificial Sequence: Synthetic oligonucleotide
acugguuacauucguaaca

SEQ ID NO: 2698070 - RNA, 19 nt, Artificial Sequence
  Description of Artificial Sequence: Synthetic oligonucleotide
augucuuugaagugaagug

SEQ ID NO: 2698071 - RNA, 19 nt, Artificial Sequence
  Description of Artificial Sequence: Synthetic oligonucleotide
gaacucagaacuuuaccac

SEQ ID NO: 2698072 - RNA, 19 nt, Artificial Sequence
  Description of Artificial Sequence: Synthetic oligonucleotide
cagaacuuuaccacacugg

SEQ ID NO: 2698073 - RNA, 19 nt, Artificial Sequence
  Description of Artificial Sequence: Synthetic oligonucleotide
uuauuccucauguucauau

SEQ ID NO: 2698074 - RNA, 19 nt, Artificial Sequence
  Description of Artificial Sequence: Synthetic oligonucleotide
aagugaacuaugauaaaca

SEQ ID NO: 2698075 - RNA, 19 nt, Artificial Sequence
  Description of Artificial Sequence: Synthetic oligonucleotide
uggugauauauuccaagug

SEQ ID NO: 2698076 - RNA, 19 nt, Artificial Sequence
  Description of Artificial Sequence: Synthetic oligonucleotide
uuccaaguguacuugaaaa

SEQ ID NO: 2698077 - RNA, 19 nt, Artificial Sequence
  Description of Artificial Sequence: Synthetic oligonucleotide
auuaacagugugagcagcc

SEQ ID NO: 2698078 - RNA, 19 nt, Artificial Sequence
  Description of Artificial Sequence: Synthetic oligonucleotide
uuacauucguaacauuuuc

SEQ ID NO: 2698079 - RNA, 19 nt, Artificial Sequence
  Description of Artificial Sequence: Synthetic oligonucleotide
uauauuccaaguguacuug

SEQ ID NO: 2698080 - RNA, 19 nt, Artificial Sequence
  Description of Artificial Sequence: Synthetic oligonucleotide
ggauuuuaaacauaccuca

SEQ ID NO: 2698081 - RNA, 19 nt, Artificial Sequence
  Description of Artificial Sequence: Synthetic oligonucleotide
gaaguuuucaccacuguga

SEQ ID NO: 2698082 - RNA, 19 nt, Artificial Sequence
  Description of Artificial Sequence: Synthetic oligonucleotide
aauucucucaugccuuuga

SEQ ID NO: 2698083 - RNA, 19 nt, Artificial Sequence
  Description of Artificial Sequence: Synthetic oligonucleotide
gucauagaaguuuucacca

SEQ ID NO: 2698084 - RNA, 19 nt, Artificial Sequence
  Description of Artificial Sequence: Synthetic oligonucleotide
gauaaacagaagccuuucc

SEQ ID NO: 2698085 - RNA, 19 nt, Artificial Sequence
  Description of Artificial Sequence: Synthetic oligonucleotide
cuuuccacauuccuuguag

SEQ ID NO: 2698086 - RNA, 19 nt, Artificial Sequence
  Description of Artificial Sequence: Synthetic oligonucleotide
aacucacauucauagggcu

SEQ ID NO: 2698087 - RNA, 19 nt, Artificial Sequence
  Description of Artificial Sequence: Synthetic oligonucleotide
aacagaagccuuuccacau

SEQ ID NO: 2698088 - RNA, 19 nt, Artificial Sequence
  Description of Artificial Sequence: Synthetic oligonucleotide
agugugagcagccauguau

SEQ ID NO: 2698089 - RNA, 19 nt, Artificial Sequence
  Description of Artificial Sequence: Synthetic oligonucleotide
uuggugauauauuccaagu

SEQ ID NO: 2698090 - RNA, 19 nt, Artificial Sequence
  Description of Artificial Sequence: Synthetic oligonucleotide
ugugaguuuggugauauau

SEQ ID NO: 2698091 - RNA, 19 nt, Artificial Sequence
  Description of Artificial Sequence: Synthetic oligonucleotide
ucacaagguccauuaacag

SEQ ID NO: 2698092 - RNA, 19 nt, Artificial Sequence
  Description of Artificial Sequence: Synthetic oligonucleotide
acauaccucacauucacaa

SEQ ID NO: 2698093 - RNA, 19 nt, Artificial Sequence
  Description of Artificial Sequence: Synthetic oligonucleotide
uaacauuuucuuacagugu

SEQ ID NO: 2698094 - RNA, 19 nt, Artificial Sequence
  Description of Artificial Sequence: Synthetic oligonucleotide
uacagugugaguuccucca

SEQ ID NO: 2698095 - RNA, 19 nt, Artificial Sequence
  Description of Artificial Sequence: Synthetic oligonucleotide
uacauucguaacauuuucu

SEQ ID NO: 2698096 - RNA, 19 nt, Artificial Sequence
  Description of Artificial Sequence: Synthetic oligonucleotide
uucuuuuguuguuuucgag

SEQ ID NO: 2698097 - RNA, 19 nt, Artificial Sequence
  Description of Artificial Sequence: Synthetic oligonucleotide
ucagagcuuucccacacug

SEQ ID NO: 2698098 - RNA, 19 nt, Artificial Sequence
  Description of Artificial Sequence: Synthetic oligonucleotide
agccuuuccacauuccuug

SEQ ID NO: 2698099 - RNA, 19 nt, Artificial Sequence
  Description of Artificial Sequence: Synthetic oligonucleotide
ugguguguuuccauuauuc

SEQ ID NO: 2698100 - RNA, 19 nt, Artificial Sequence
  Description of Artificial Sequence: Synthetic oligonucleotide
auccuugaauacuugugag

SEQ ID NO: 2698101 - RNA, 19 nt, Artificial Sequence
  Description of Artificial Sequence: Synthetic oligonucleotide
cucauguucauauggcaug

SEQ ID NO: 2698102 - RNA, 19 nt, Artificial Sequence
  Description of Artificial Sequence: Synthetic oligonucleotide
uuccucauguucauauggc

SEQ ID NO: 2698103 - RNA, 19 nt, Artificial Sequence
  Description of Artificial Sequence: Synthetic oligonucleotide
auauggcauguauucagag

SEQ ID NO: 2698104 - RNA, 19 nt, Artificial Sequence
  Description of Artificial Sequence: Synthetic oligonucleotide
guuuccauuauuccucaug

SEQ ID NO: 2698105 - RNA, 19 nt, Artificial Sequence
  Description of Artificial Sequence: Synthetic oligonucleotide
aauacuugugagagaacug

SEQ ID NO: 2698106 - RNA, 19 nt, Artificial Sequence
  Description of Artificial Sequence: Synthetic oligonucleotide
agagcuuucccacacuggu

SEQ ID NO: 2698107 - RNA, 19 nt, Artificial Sequence
  Description of Artificial Sequence: Synthetic oligonucleotide
agaacucagagcuuuccca

SEQ ID NO: 2698108 - RNA, 19 nt, Artificial Sequence
  Description of Artificial Sequence: Synthetic oligonucleotide
ucucaugucuuugaaguga

SEQ ID NO: 2698109 - RNA, 19 nt, Artificial Sequence
  Description of Artificial Sequence: Synthetic oligonucleotide
ugaaguggaagaacucaga

SEQ ID NO: 2698110 - RNA, 19 nt, Artificial Sequence
  Description of Artificial Sequence: Synthetic oligonucleotide
ucguaacauuuucuuacag

SEQ ID NO: 2698111 - RNA, 19 nt, Artificial Sequence
  Description of Artificial Sequence: Synthetic oligonucleotide
uucaccacugugaguuugg

SEQ ID NO: 2698112 - RNA, 19 nt, Artificial Sequence
  Description of Artificial Sequence: Synthetic oligonucleotide
uauggcauguauucagagu

SEQ ID NO: 2698113 - RNA, 19 nt, Artificial Sequence
  Description of Artificial Sequence: Synthetic oligonucleotide
uucagagugagacgugaga

SEQ ID NO: 2698114 - RNA, 19 nt, Artificial Sequence
  Description of Artificial Sequence: Synthetic oligonucleotide
uguucauauggcauguauu

SEQ ID NO: 2698115 - RNA, 19 nt, Artificial Sequence
  Description of Artificial Sequence: Synthetic oligonucleotide
uucucucaugccuuugaag

SEQ ID NO: 2698116 - RNA, 19 nt, Artificial Sequence
  Description of Artificial Sequence: Synthetic oligonucleotide
cauuuucuuacagugugag

SEQ ID NO: 2698117 - RNA, 19 nt, Artificial Sequence
  Description of Artificial Sequence: Synthetic oligonucleotide
uucucucaugucuuugaag

SEQ ID NO: 2698118 - RNA, 19 nt, Artificial Sequence
  Description of Artificial Sequence: Synthetic oligonucleotide
ucgaacucacauucauagg

SEQ ID NO: 2698119 - RNA, 19 nt, Artificial Sequence
  Description of Artificial Sequence: Synthetic oligonucleotide
uucguaacauuuucuuaca

SEQ ID NO: 2698120 - RNA, 19 nt, Artificial Sequence
  Description of Artificial Sequence: Synthetic oligonucleotide
cuuugaagugaaguggaag

SEQ ID NO: 2698121 - RNA, 19 nt, Artificial Sequence
  Description of Artificial Sequence: Synthetic oligonucleotide
acucgcucuggagaaaacc

SEQ ID NO: 2698122 - RNA, 19 nt, Artificial Sequence
  Description of Artificial Sequence: Synthetic oligonucleotide
gaacucagagcuuucccac

SEQ ID NO: 2698123 - RNA, 19 nt, Artificial Sequence
  Description of Artificial Sequence: Synthetic oligonucleotide
uccuugaauacuugugaga

SEQ ID NO: 2698124 - RNA, 19 nt, Artificial Sequence
  Description of Artificial Sequence: Synthetic oligonucleotide
uguguguaaagugaacuau

SEQ ID NO: 2698125 - RNA, 19 nt, Artificial Sequence
  Description of Artificial Sequence: Synthetic oligonucleotide
uccauguguguaaagugaa

SEQ ID NO: 2698126 - RNA, 19 nt, Artificial Sequence
  Description of Artificial Sequence: Synthetic oligonucleotide
gauuuuaaacauaccucac

SEQ ID NO: 2698127 - RNA, 19 nt, Artificial Sequence
  Description of Artificial Sequence: Synthetic oligonucleotide
agugaaguggaagaacuca

SEQ ID NO: 2698128 - RNA, 19 nt, Artificial Sequence
  Description of Artificial Sequence: Synthetic oligonucleotide
agccauguauccuugaaua

SEQ ID NO: 2698129 - RNA, 19 nt, Artificial Sequence
  Description of Artificial Sequence: Synthetic oligonucleotide
acauucguaacauuuucuu

SEQ ID NO: 2698130 - RNA, 19 nt, Artificial Sequence
  Description of Artificial Sequence: Synthetic oligonucleotide
aacuggaaucauauggugu

SEQ ID NO: 2698131 - RNA, 19 nt, Artificial Sequence
  Description of Artificial Sequence: Synthetic oligonucleotide
cucucaugccuuugaaggg

SEQ ID NO: 2698132 - RNA, 19 nt, Artificial Sequence
  Description of Artificial Sequence: Synthetic oligonucleotide
uuucuuacagugugaguuc

SEQ ID NO: 2698133 - RNA, 19 nt, Artificial Sequence
  Description of Artificial Sequence: Synthetic oligonucleotide
uauucagagugagacguga

SEQ ID NO: 2698134 - RNA, 19 nt, Artificial Sequence
  Description of Artificial Sequence: Synthetic oligonucleotide
agaaaaccaggcuggccuc

SEQ ID NO: 2698135 - RNA, 19 nt, Artificial Sequence
  Description of Artificial Sequence: Synthetic oligonucleotide
gaaucauaugguguguuuc

SEQ ID NO: 2698136 - RNA, 19 nt, Artificial Sequence
  Description of Artificial Sequence: Synthetic oligonucleotide
ucauagaaguuuucaccac

SEQ ID NO: 2698137 - RNA, 19 nt, Artificial Sequence
  Description of Artificial Sequence: Synthetic oligonucleotide
aagggaacuggaagaacuc

SEQ ID NO: 2698138 - RNA, 19 nt, Artificial Sequence
  Description of Artificial Sequence: Synthetic oligonucleotide
uccucauguucauauggca

SEQ ID NO: 2698139 - RNA, 19 nt, Artificial Sequence
  Description of Artificial Sequence: Synthetic oligonucleotide
uuacagugugaguuccucc

SEQ ID NO: 2698140 - RNA, 19 nt, Artificial Sequence
  Description of Artificial Sequence: Synthetic oligonucleotide
uuuuguuguuuucgagaca

SEQ ID NO: 2698141 - RNA, 19 nt, Artificial Sequence
  Description of Artificial Sequence: Synthetic oligonucleotide
ugaagugaaguggaagaac

SEQ ID NO: 2698142 - RNA, 19 nt, Artificial Sequence
  Description of Artificial Sequence: Synthetic oligonucleotide
gaacucacauucauagggc

SEQ ID NO: 2698143 - RNA, 19 nt, Artificial Sequence
  Description of Artificial Sequence: Synthetic oligonucleotide
acucagaacuuuaccacac

SEQ ID NO: 2698144 - RNA, 19 nt, Artificial Sequence
  Description of Artificial Sequence: Synthetic oligonucleotide
acauucacaagguccauua

SEQ ID NO: 2698145 - RNA, 19 nt, Artificial Sequence
  Description of Artificial Sequence: Synthetic oligonucleotide
cgaacucacauucauaggg

SEQ ID NO: 2698146 - RNA, 19 nt, Artificial Sequence
  Description of Artificial Sequence: Synthetic oligonucleotide
agaacuggaaucauauggu

SEQ ID NO: 2698147 - RNA, 19 nt, Artificial Sequence
  Description of Artificial Sequence: Synthetic oligonucleotide
aagugaaguggaagaacuc

SEQ ID NO: 2698148 - RNA, 19 nt, Artificial Sequence
  Description of Artificial Sequence: Synthetic oligonucleotide
uggccucgaacucacauuc

SEQ ID NO: 2698149 - RNA, 19 nt, Artificial Sequence
  Description of Artificial Sequence: Synthetic oligonucleotide
gauucucucaugucuuuga

SEQ ID NO: 2698150 - RNA, 19 nt, Artificial Sequence
  Description of Artificial Sequence: Synthetic oligonucleotide
uauuccucauguucauaug

SEQ ID NO: 2698151 - RNA, 19 nt, Artificial Sequence
  Description of Artificial Sequence: Synthetic oligonucleotide
ucagagugagacgugagau

SEQ ID NO: 2698152 - RNA, 19 nt, Artificial Sequence
  Description of Artificial Sequence: Synthetic oligonucleotide
acacugguuacauucguaa

SEQ ID NO: 2698153 - RNA, 19 nt, Artificial Sequence
  Description of Artificial Sequence: Synthetic oligonucleotide
gaguuuggugauauauucc

SEQ ID NO: 2698154 - RNA, 19 nt, Artificial Sequence
  Description of Artificial Sequence: Synthetic oligonucleotide
ugccuuugaagggaacugg

SEQ ID NO: 2698155 - RNA, 19 nt, Artificial Sequence
  Description of Artificial Sequence: Synthetic oligonucleotide
uuuaaacauaccucacauu

SEQ ID NO: 2698156 - RNA, 19 nt, Artificial Sequence
  Description of Artificial Sequence: Synthetic oligonucleotide
cauaccucacauucacaag

SEQ ID NO: 2698157 - RNA, 19 nt, Artificial Sequence
  Description of Artificial Sequence: Synthetic oligonucleotide
aagguccauuaacagugug

SEQ ID NO: 2698158 - RNA, 19 nt, Artificial Sequence
  Description of Artificial Sequence: Synthetic oligonucleotide
uauuccaaguguacuugaa

SEQ ID NO: 2698159 - RNA, 19 nt, Artificial Sequence
  Description of Artificial Sequence: Synthetic oligonucleotide
uacuugugagagaacugga

SEQ ID NO: 2698160 - RNA, 19 nt, Artificial Sequence
  Description of Artificial Sequence: Synthetic oligonucleotide
aacagugugagcagccaug

SEQ ID NO: 2698161 - RNA, 19 nt, Artificial Sequence
  Description of Artificial Sequence: Synthetic oligonucleotide
uaugguguguuuccauuau

SEQ ID NO: 2698162 - RNA, 19 nt, Artificial Sequence
  Description of Artificial Sequence: Synthetic oligonucleotide
ccucacauucacaaggucc

SEQ ID NO: 2698163 - RNA, 19 nt, Artificial Sequence
  Description of Artificial Sequence: Synthetic oligonucleotide
ugugagcagccauguaucc

SEQ ID NO: 2698164 - RNA, 19 nt, Artificial Sequence
  Description of Artificial Sequence: Synthetic oligonucleotide
gguccauuaacagugugag

SEQ ID NO: 2698165 - RNA, 19 nt, Artificial Sequence
  Description of Artificial Sequence: Synthetic oligonucleotide
uucauauggcauguauuca

SEQ ID NO: 2698166 - RNA, 19 nt, Artificial Sequence
  Description of Artificial Sequence: Synthetic oligonucleotide
gauauauuccaaguguacu

SEQ ID NO: 2698167 - RNA, 19 nt, Artificial Sequence
  Description of Artificial Sequence: Synthetic oligonucleotide
uagaaguuuucaccacugu

SEQ ID NO: 2698168 - RNA, 19 nt, Artificial Sequence
  Description of Artificial Sequence: Synthetic oligonucleotide
auauuccaaguguacuuga

SEQ ID NO: 2698169 - RNA, 19 nt, Artificial Sequence
  Description of Artificial Sequence: Synthetic oligonucleotide
gaagaacucagaacuuuac

SEQ ID NO: 2698170 - RNA, 19 nt, Artificial Sequence
  Description of Artificial Sequence: Synthetic oligonucleotide
aacucagagcuuucccaca

SEQ ID NO: 2698171 - RNA, 19 nt, Artificial Sequence
  Description of Artificial Sequence: Synthetic oligonucleotide
auguucauauggcauguau

SEQ ID NO: 2698172 - RNA, 19 nt, Artificial Sequence
  Description of Artificial Sequence: Synthetic oligonucleotide
ugagcagccauguauccuu

SEQ ID NO: 2698173 - RNA, 19 nt, Artificial Sequence
  Description of Artificial Sequence: Synthetic oligonucleotide
auagaaguuuucaccacug

SEQ ID NO: 2698174 - RNA, 19 nt, Artificial Sequence
  Description of Artificial Sequence: Synthetic oligonucleotide
ucucaugccuuugaaggga

SEQ ID NO: 2698175 - RNA, 19 nt, Artificial Sequence
  Description of Artificial Sequence: Synthetic oligonucleotide
uaccucacauucacaaggu

SEQ ID NO: 2698176 - RNA, 19 nt, Artificial Sequence
  Description of Artificial Sequence: Synthetic oligonucleotide
agagaacuggaaucauaug

SEQ ID NO: 2698177 - RNA, 19 nt, Artificial Sequence
  Description of Artificial Sequence: Synthetic oligonucleotide
uccuccauguguguaaagu

SEQ ID NO: 2698178 - RNA, 19 nt, Artificial Sequence
  Description of Artificial Sequence: Synthetic oligonucleotide
gaagugaaguggaagaacu

SEQ ID NO: 2698179 - RNA, 19 nt, Artificial Sequence
  Description of Artificial Sequence: Synthetic oligonucleotide
uaaagugaacuaugauaaa

SEQ ID NO: 2698180 - RNA, 19 nt, Artificial Sequence
  Description of Artificial Sequence: Synthetic oligonucleotide
ggugauauauuccaagugu

SEQ ID NO: 2698181 - RNA, 19 nt, Artificial Sequence
  Description of Artificial Sequence: Synthetic oligonucleotide
gugaaguggaagaacucag

SEQ ID NO: 2698182 - RNA, 19 nt, Artificial Sequence
  Description of Artificial Sequence: Synthetic oligonucleotide
uuccacauuccuuguaguc

SEQ ID NO: 2698183 - RNA, 19 nt, Artificial Sequence
  Description of Artificial Sequence: Synthetic oligonucleotide
ucauguucauauggcaugu

SEQ ID NO: 2698184 - RNA, 19 nt, Artificial Sequence
  Description of Artificial Sequence: Synthetic oligonucleotide
uuuccacauuccuuguagu

SEQ ID NO: 2698185 - RNA, 19 nt, Artificial Sequence
  Description of Artificial Sequence: Synthetic oligonucleotide
ucuuugaagugaaguggaa

SEQ ID NO: 2698186 - RNA, 19 nt, Artificial Sequence
  Description of Artificial Sequence: Synthetic oligonucleotide
gugaguuccuccaugugug

SEQ ID NO: 2698187 - RNA, 19 nt, Artificial Sequence
  Description of Artificial Sequence: Synthetic oligonucleotide
cauuaacagugugagcagc

SEQ ID NO: 2698188 - RNA, 19 nt, Artificial Sequence
  Description of Artificial Sequence: Synthetic oligonucleotide
uuaacagugugagcagcca

SEQ ID NO: 2698189 - RNA, 19 nt, Artificial Sequence
  Description of Artificial Sequence: Synthetic oligonucleotide
auguguguaaagugaacua

SEQ ID NO: 2698190 - RNA, 19 nt, Artificial Sequence
  Description of Artificial Sequence: Synthetic oligonucleotide
uugaagugaaguggaagaa

SEQ ID NO: 2698191 - RNA, 19 nt, Artificial Sequence
  Description of Artificial Sequence: Synthetic oligonucleotide
guguguaaagugaacuaug

SEQ ID NO: 2698192 - RNA, 19 nt, Artificial Sequence
  Description of Artificial Sequence: Synthetic oligonucleotide
guucuuuuguuguuuucga

SEQ ID NO: 2698193 - RNA, 19 nt, Artificial Sequence
  Description of Artificial Sequence: Synthetic oligonucleotide
ugaauacuugugagagaac

SEQ ID NO: 2698194 - RNA, 19 nt, Artificial Sequence
  Description of Artificial Sequence: Synthetic oligonucleotide
uggaagaacucagagcuuu

SEQ ID NO: 2698195 - RNA, 19 nt, Artificial Sequence
  Description of Artificial Sequence: Synthetic oligonucleotide
cuccauguguguaaaguga

SEQ ID NO: 2698196 - RNA, 19 nt, Artificial Sequence
  Description of Artificial Sequence: Synthetic oligonucleotide
uggcauguauucagaguga

SEQ ID NO: 2698197 - RNA, 19 nt, Artificial Sequence
  Description of Artificial Sequence: Synthetic oligonucleotide
ucaugucuuugaagugaag

SEQ ID NO: 2698198 - RNA, 19 nt, Artificial Sequence
  Description of Artificial Sequence: Synthetic oligonucleotide
auaugguguguuuccauua

SEQ ID NO: 2698199 - RNA, 19 nt, Artificial Sequence
  Description of Artificial Sequence: Synthetic oligonucleotide
uuucaccacugugaguuug

SEQ ID NO: 2698200 - RNA, 19 nt, Artificial Sequence
  Description of Artificial Sequence: Synthetic oligonucleotide
uuucaugccuaaaggcuuu

SEQ ID NO: 2698201 - RNA, 19 nt, Artificial Sequence
  Description of Artificial Sequence: Synthetic oligonucleotide
ugguuacauuuauaggguc

SEQ ID NO: 2698202 - RNA, 19 nt, Artificial Sequence
  Description of Artificial Sequence: Synthetic oligonucleotide
gaaaaccaggcuggccucg

SEQ ID NO: 2698203 - RNA, 19 nt, Artificial Sequence
  Description of Artificial Sequence: Synthetic oligonucleotide
uugaagggaacuggaagaa

SEQ ID NO: 2698204 - RNA, 19 nt, Artificial Sequence
  Description of Artificial Sequence: Synthetic oligonucleotide
gaagggaacuggaagaacu

SEQ ID NO: 2698205 - RNA, 19 nt, Artificial Sequence
  Description of Artificial Sequence: Synthetic oligonucleotide
ucauaugguguguuuccau

SEQ ID NO: 2698206 - RNA, 19 nt, Artificial Sequence
  Description of Artificial Sequence: Synthetic oligonucleotide
aguuccuccauguguguaa

SEQ ID NO: 2698207 - RNA, 19 nt, Artificial Sequence
  Description of Artificial Sequence: Synthetic oligonucleotide
uaacagugugagcagccau

SEQ ID NO: 2698208 - RNA, 19 nt, Artificial Sequence
  Description of Artificial Sequence: Synthetic oligonucleotide
accucacauucacaagguc

SEQ ID NO: 2698209 - RNA, 19 nt, Artificial Sequence
  Description of Artificial Sequence: Synthetic oligonucleotide
cagagugagacgugagaug

SEQ ID NO: 2698210 - RNA, 19 nt, Artificial Sequence
  Description of Artificial Sequence: Synthetic oligonucleotide
agugagacgugagaugccu

SEQ ID NO: 2698211 - RNA, 19 nt, Artificial Sequence
  Description of Artificial Sequence: Synthetic oligonucleotide
ucuuacagugugaguuccu

SEQ ID NO: 2698212 - RNA, 19 nt, Artificial Sequence
  Description of Artificial Sequence: Synthetic oligonucleotide
ugagacgugagaugccuuu

SEQ ID NO: 2698213 - RNA, 19 nt, Artificial Sequence
  Description of Artificial Sequence: Synthetic oligonucleotide
cucucaugucuuugaagug

SEQ ID NO: 2698214 - RNA, 19 nt, Artificial Sequence
  Description of Artificial Sequence: Synthetic oligonucleotide
cauauggcauguauucaga

SEQ ID NO: 2698215 - RNA, 19 nt, Artificial Sequence
  Description of Artificial Sequence: Synthetic oligonucleotide
cacugguuacauucguaac

SEQ ID NO: 2698216 - RNA, 19 nt, Artificial Sequence
  Description of Artificial Sequence: Synthetic oligonucleotide
agaagccuuuccacauucc

SEQ ID NO: 2698217 - RNA, 19 nt, Artificial Sequence
  Description of Artificial Sequence: Synthetic oligonucleotide
gugaacuaugauaaacaga

SEQ ID NO: 2698218 - RNA, 19 nt, Artificial Sequence
  Description of Artificial Sequence: Synthetic oligonucleotide
auucucucaugucuuugaa

SEQ ID NO: 2698219 - RNA, 19 nt, Artificial Sequence
  Description of Artificial Sequence: Synthetic oligonucleotide
cuuacagugugaguuccuc

SEQ ID NO: 2698220 - RNA, 19 nt, Artificial Sequence
  Description of Artificial Sequence: Synthetic oligonucleotide
gucuuugaagugaagugga

SEQ ID NO: 2698221 - RNA, 19 nt, Artificial Sequence
  Description of Artificial Sequence: Synthetic oligonucleotide
cuaugauaaacagaagccu

SEQ ID NO: 2698222 - RNA, 19 nt, Artificial Sequence
  Description of Artificial Sequence: Synthetic oligonucleotide
guguguuuccauuauuccu

SEQ ID NO: 2698223 - RNA, 19 nt, Artificial Sequence
  Description of Artificial Sequence: Synthetic oligonucleotide
agacgugagaugccuuuga

SEQ ID NO: 2698224 - RNA, 19 nt, Artificial Sequence
  Description of Artificial Sequence: Synthetic oligonucleotide
cagaagccuuuccacauuc

SEQ ID NO: 2698225 - RNA, 19 nt, Artificial Sequence
  Description of Artificial Sequence: Synthetic oligonucleotide
aguuuucaccacugugagu

SEQ ID NO: 2698226 - RNA, 19 nt, Artificial Sequence
  Description of Artificial Sequence: Synthetic oligonucleotide
ugaagggaacuggaagaac

SEQ ID NO: 2698227 - RNA, 19 nt, Artificial Sequence
  Description of Artificial Sequence: Synthetic oligonucleotide
auucucucaugccuuugaa

SEQ ID NO: 2698228 - RNA, 19 nt, Artificial Sequence
  Description of Artificial Sequence: Synthetic oligonucleotide
ccauuauuccucauguuca

SEQ ID NO: 2698229 - RNA, 19 nt, Artificial Sequence
  Description of Artificial Sequence: Synthetic oligonucleotide
aacauaccucacauucaca

SEQ ID NO: 2698230 - RNA, 19 nt, Artificial Sequence
  Description of Artificial Sequence: Synthetic oligonucleotide
cauucguaacauuuucuua

SEQ ID NO: 2698231 - RNA, 19 nt, Artificial Sequence
  Description of Artificial Sequence: Synthetic oligonucleotide
agguccauuaacaguguga

SEQ ID NO: 2698232 - RNA, 19 nt, Artificial Sequence
  Description of Artificial Sequence: Synthetic oligonucleotide
augauaaacagaagccuuu

SEQ ID NO: 2698233 - RNA, 19 nt, Artificial Sequence
  Description of Artificial Sequence: Synthetic oligonucleotide
ugaguucuuucaugccuaa

SEQ ID NO: 2698234 - RNA, 19 nt, Artificial Sequence
  Description of Artificial Sequence: Synthetic oligonucleotide
gugauauauuccaagugua

SEQ ID NO: 2698235 - RNA, 19 nt, Artificial Sequence
  Description of Artificial Sequence: Synthetic oligonucleotide
gaauucucucaugccuuug

SEQ ID NO: 2698236 - RNA, 19 nt, Artificial Sequence
  Description of Artificial Sequence: Synthetic oligonucleotide
caugucuuugaagugaagu

SEQ ID NO: 2698237 - RNA, 19 nt, Artificial Sequence
  Description of Artificial Sequence: Synthetic oligonucleotide
cauguguguaaagugaacu

SEQ ID NO: 2698238 - RNA, 19 nt, Artificial Sequence
  Description of Artificial Sequence: Synthetic oligonucleotide
acagugugagcagccaugu

SEQ ID NO: 2698239 - RNA, 19 nt, Artificial Sequence
  Description of Artificial Sequence: Synthetic oligonucleotide
ucaugccuaaaggcuuucc

SEQ ID NO: 2698240 - RNA, 19 nt, Artificial Sequence
  Description of Artificial Sequence: Synthetic oligonucleotide
ugaguuccuccaugugugu

SEQ ID NO: 2698241 - RNA, 19 nt, Artificial Sequence
  Description of Artificial Sequence: Synthetic oligonucleotide
cauagaaguuuucaccacu

SEQ ID NO: 2698242 - RNA, 19 nt, Artificial Sequence
  Description of Artificial Sequence: Synthetic oligonucleotide
uggagaaaaccaggcuggc

SEQ ID NO: 2698243 - RNA, 19 nt, Artificial Sequence
  Description of Artificial Sequence: Synthetic oligonucleotide
acauuuucuuacaguguga

SEQ ID NO: 2698244 - RNA, 19 nt, Artificial Sequence
  Description of Artificial Sequence: Synthetic oligonucleotide
ggcauguauucagagugag

SEQ ID NO: 2698245 - RNA, 19 nt, Artificial Sequence
  Description of Artificial Sequence: Synthetic oligonucleotide
agggaacuggaagaacuca

SEQ ID NO: 2698246 - RNA, 19 nt, Artificial Sequence
  Description of Artificial Sequence: Synthetic oligonucleotide
gagacgugagaugccuuug

SEQ ID NO: 2698247 - RNA, 19 nt, Artificial Sequence
  Description of Artificial Sequence: Synthetic oligonucleotide
guguuuccauuauuccuca

SEQ ID NO: 2698248 - RNA, 19 nt, Artificial Sequence
  Description of Artificial Sequence: Synthetic oligonucleotide
aagccuuuccacauuccuu

SEQ ID NO: 2698249 - RNA, 19 nt, Artificial Sequence
  Description of Artificial Sequence: Synthetic oligonucleotide
ucaugccuuugaagggaac

SEQ ID NO: 2698250 - RNA, 19 nt, Artificial Sequence
  Description of Artificial Sequence: Synthetic oligonucleotide
ccuccauguguguaaagug

SEQ ID NO: 2698251 - RNA, 19 nt, Artificial Sequence
  Description of Artificial Sequence: Synthetic oligonucleotide
uuccauuauuccucauguu

SEQ ID NO: 2698252 - RNA, 19 nt, Artificial Sequence
  Description of Artificial Sequence: Synthetic oligonucleotide
uuccuccauguguguaaag

SEQ ID NO: 2698253 - RNA, 19 nt, Artificial Sequence
  Description of Artificial Sequence: Synthetic oligonucleotide
cauguauccuugaauacuu

SEQ ID NO: 2698254 - RNA, 19 nt, Artificial Sequence
  Description of Artificial Sequence: Synthetic oligonucleotide
gugugagcagccauguauc

SEQ ID NO: 2698255 - RNA, 19 nt, Artificial Sequence
  Description of Artificial Sequence: Synthetic oligonucleotide
uggaaucauaugguguguu

SEQ ID NO: 2698256 - RNA, 19 nt, Artificial Sequence
  Description of Artificial Sequence: Synthetic oligonucleotide
cacaagguccauuaacagu

SEQ ID NO: 2698257 - RNA, 19 nt, Artificial Sequence
  Description of Artificial Sequence: Synthetic oligonucleotide
ccauuaacagugugagcag

SEQ ID NO: 2698258 - RNA, 19 nt, Artificial Sequence
  Description of Artificial Sequence: Synthetic oligonucleotide
caccacugugaguuuggug

SEQ ID NO: 2698259 - RNA, 19 nt, Artificial Sequence
  Description of Artificial Sequence: Synthetic oligonucleotide
cuuucaugccuaaaggcuu

SEQ ID NO: 2698260 - RNA, 19 nt, Artificial Sequence
  Description of Artificial Sequence: Synthetic oligonucleotide
cauuccuuguagucauaga

SEQ ID NO: 2698261 - RNA, 19 nt, Artificial Sequence
  Description of Artificial Sequence: Synthetic oligonucleotide
gccauguauccuugaauac

SEQ ID NO: 2698262 - RNA, 19 nt, Artificial Sequence
  Description of Artificial Sequence: Synthetic oligonucleotide
guauucagagugagacgug

SEQ ID NO: 2698263 - RNA, 19 nt, Artificial Sequence
  Description of Artificial Sequence: Synthetic oligonucleotide
gugugaguuccuccaugug

SEQ ID NO: 2698264 - RNA, 19 nt, Artificial Sequence
  Description of Artificial Sequence: Synthetic oligonucleotide
acagaagccuuuccacauu

SEQ ID NO: 2698265 - RNA, 19 nt, Artificial Sequence
  Description of Artificial Sequence: Synthetic oligonucleotide
gagugagacgugagaugcc

SEQ ID NO: 2698266 - RNA, 19 nt, Artificial Sequence
  Description of Artificial Sequence: Synthetic oligonucleotide
augguguguuuccauuauu

SEQ ID NO: 2698267 - RNA, 19 nt, Artificial Sequence
  Description of Artificial Sequence: Synthetic oligonucleotide
guuguuuucgagacagggu

SEQ ID NO: 2698268 - RNA, 19 nt, Artificial Sequence
  Description of Artificial Sequence: Synthetic oligonucleotide
guuacauucguaacauuuu

SEQ ID NO: 2698269 - RNA, 19 nt, Artificial Sequence
  Description of Artificial Sequence: Synthetic oligonucleotide
uuuucaccacugugaguuu

SEQ ID NO: 2698270 - RNA, 19 nt, Artificial Sequence
  Description of Artificial Sequence: Synthetic oligonucleotide
uguuuccauuauuccucau

SEQ ID NO: 2698271 - RNA, 19 nt, Artificial Sequence
  Description of Artificial Sequence: Synthetic oligonucleotide
auuauuccucauguucaua

SEQ ID NO: 2698272 - RNA, 19 nt, Artificial Sequence
  Description of Artificial Sequence: Synthetic oligonucleotide
ggagaaaaccaggcuggcc

SEQ ID NO: 2698273 - RNA, 19 nt, Artificial Sequence
  Description of Artificial Sequence: Synthetic oligonucleotide
guuuggugauauauuccaa

SEQ ID NO: 2698274 - RNA, 19 nt, Artificial Sequence
  Description of Artificial Sequence: Synthetic oligonucleotide
cgcucuggagaaaaccagg

SEQ ID NO: 2698275 - RNA, 19 nt, Artificial Sequence
  Description of Artificial Sequence: Synthetic oligonucleotide
agcagccauguauccuuga

SEQ ID NO: 2698276 - RNA, 19 nt, Artificial Sequence
  Description of Artificial Sequence: Synthetic oligonucleotide
ugguuacauucguaacauu

SEQ ID NO: 2698277 - RNA, 19 nt, Artificial Sequence
  Description of Artificial Sequence: Synthetic oligonucleotide
cauaugguguguuuccauu

SEQ ID NO: 2698278 - RNA, 19 nt, Artificial Sequence
  Description of Artificial Sequence: Synthetic oligonucleotide
ccauguguguaaagugaac

SEQ ID NO: 2698279 - RNA, 19 nt, Artificial Sequence
  Description of Artificial Sequence: Synthetic oligonucleotide
cauuauuccucauguucau

SEQ ID NO: 2698280 - RNA, 19 nt, Artificial Sequence
  Description of Artificial Sequence: Synthetic oligonucleotide
uucaugccuaaaggcuuuc

SEQ ID NO: 2698281 - RNA, 19 nt, Artificial Sequence
  Description of Artificial Sequence: Synthetic oligonucleotide
cacucgcucuggagaaaac

SEQ ID NO: 2698282 - RNA, 19 nt, Artificial Sequence
  Description of Artificial Sequence: Synthetic oligonucleotide
cauucacaagguccauuaa

SEQ ID NO: 2698283 - RNA, 19 nt, Artificial Sequence
  Description of Artificial Sequence: Synthetic oligonucleotide
cucaugccuuugaagggaa

SEQ ID NO: 2698284 - RNA, 19 nt, Artificial Sequence
  Description of Artificial Sequence: Synthetic oligonucleotide
cugguuacauucguaacau

SEQ ID NO: 2698285 - RNA, 19 nt, Artificial Sequence
  Description of Artificial Sequence: Synthetic oligonucleotide
ucacauucacaagguccau

SEQ ID NO: 2698286 - RNA, 19 nt, Artificial Sequence
  Description of Artificial Sequence: Synthetic oligonucleotide
ggaagaacucagaacuuua

SEQ ID NO: 2698287 - RNA, 19 nt, Artificial Sequence
  Description of Artificial Sequence: Synthetic oligonucleotide
cucacauucauagggcuuu

SEQ ID NO: 2698288 - RNA, 19 nt, Artificial Sequence
  Description of Artificial Sequence: Synthetic oligonucleotide
ucacauucauagggcuuuu

SEQ ID NO: 2698289 - RNA, 19 nt, Artificial Sequence
  Description of Artificial Sequence: Synthetic oligonucleotide
gugaguuuggugauauauu

SEQ ID NO: 2698290 - RNA, 19 nt, Artificial Sequence
  Description of Artificial Sequence: Synthetic oligonucleotide
gaguuccuccaugugugua

SEQ ID NO: 2698291 - RNA, 19 nt, Artificial Sequence
  Description of Artificial Sequence: Synthetic oligonucleotide
gaacuuuaccacacugguu

SEQ ID NO: 2698292 - RNA, 19 nt, Artificial Sequence
  Description of Artificial Sequence: Synthetic oligonucleotide
ccaaaggauuuuaaacaua

SEQ ID NO: 2698293 - RNA, 19 nt, Artificial Sequence
  Description of Artificial Sequence: Synthetic oligonucleotide
guuccuccauguguguaaa

SEQ ID NO: 2698294 - RNA, 19 nt, Artificial Sequence
  Description of Artificial Sequence: Synthetic oligonucleotide
cucagaacuuuaccacacu

SEQ ID NO: 2698295 - RNA, 19 nt, Artificial Sequence
  Description of Artificial Sequence: Synthetic oligonucleotide
cguaacauuuucuuacagu

SEQ ID NO: 2698296 - RNA, 19 nt, Artificial Sequence
  Description of Artificial Sequence: Synthetic oligonucleotide
ggaagaacucagagcuuuc

SEQ ID NO: 2698297 - RNA, 19 nt, Artificial Sequence
  Description of Artificial Sequence: Synthetic oligonucleotide
ggaaucauaugguguguuu

SEQ ID NO: 2698298 - RNA, 19 nt, Artificial Sequence
  Description of Artificial Sequence: Synthetic oligonucleotide
caagguccauuaacagugu

SEQ ID NO: 2698299 - RNA, 19 nt, Artificial Sequence
  Description of Artificial Sequence: Synthetic oligonucleotide
gccuuugaagggaacugga

SEQ ID NO: 2698300 - RNA, 19 nt, Artificial Sequence
  Description of Artificial Sequence: Synthetic oligonucleotide
cuggaagaacucagaacuu

SEQ ID NO: 2698301 - RNA, 19 nt, Artificial Sequence
  Description of Artificial Sequence: Synthetic oligonucleotide
gcauguauucagagugaga

SEQ ID NO: 2698302 - RNA, 19 nt, Artificial Sequence
  Description of Artificial Sequence: Synthetic oligonucleotide
gugagcagccauguauccu

SEQ ID NO: 2698303 - RNA, 19 nt, Artificial Sequence
  Description of Artificial Sequence: Synthetic oligonucleotide
ccauguauccuugaauacu

SEQ ID NO: 2698304 - RNA, 19 nt, Artificial Sequence
  Description of Artificial Sequence: Synthetic oligonucleotide
ccucauguucauauggcau

SEQ ID NO: 2698305 - RNA, 19 nt, Artificial Sequence
  Description of Artificial Sequence: Synthetic oligonucleotide
cucagagcuuucccacacu

SEQ ID NO: 2698306 - RNA, 19 nt, Artificial Sequence
  Description of Artificial Sequence: Synthetic oligonucleotide
gccucgaacucacauucau

SEQ ID NO: 2698307 - RNA, 19 nt, Artificial Sequence
  Description of Artificial Sequence: Synthetic oligonucleotide
cugugaguuuggugauaua

SEQ ID NO: 2698308 - RNA, 19 nt, Artificial Sequence
  Description of Artificial Sequence: Synthetic oligonucleotide
ccucgaacucacauucaua

SEQ ID NO: 2698309 - RNA, 19 nt, Artificial Sequence
  Description of Artificial Sequence: Synthetic oligonucleotide
gucuuucuccugugugaau

SEQ ID NO: 2698310 - RNA, 19 nt, Artificial Sequence
  Description of Artificial Sequence: Synthetic oligonucleotide
gagcuuucccacacugguu

SEQ ID NO: 2698311 - RNA, 19 nt, Artificial Sequence
  Description of Artificial Sequence: Synthetic oligonucleotide
gcacucgcucuggagaaaa

SEQ ID NO: 2698312 - RNA, 19 nt, Artificial Sequence
  Description of Artificial Sequence: Synthetic oligonucleotide
cacauucacaagguccauu

SEQ ID NO: 2698313 - RNA, 19 nt, Artificial Sequence
  Description of Artificial Sequence: Synthetic oligonucleotide
cacugugaguuuggugaua

SEQ ID NO: 2698314 - RNA, 19 nt, Artificial Sequence
  Description of Artificial Sequence: Synthetic oligonucleotide
cagugugagcagccaugua

SEQ ID NO: 2698315 - RNA, 19 nt, Artificial Sequence
  Description of Artificial Sequence: Synthetic oligonucleotide
ccuuuccacauuccuugua

SEQ ID NO: 2698316 - RNA, 19 nt, Artificial Sequence
  Description of Artificial Sequence: Synthetic oligonucleotide
ggccucgaacucacauuca

SEQ ID NO: 2698317 - RNA, 19 nt, Artificial Sequence
  Description of Artificial Sequence: Synthetic oligonucleotide
guggaagaacucagagcuu

SEQ ID NO: 2698318 - RNA, 19 nt, Artificial Sequence
  Description of Artificial Sequence: Synthetic oligonucleotide
ccacacugguuacauucgu

SEQ ID NO: 2698319 - RNA, 19 nt, Artificial Sequence
  Description of Artificial Sequence: Synthetic oligonucleotide
gugagacgugagaugccuu

SEQ ID NO: 2698320 - RNA, 19 nt, Artificial Sequence
  Description of Artificial Sequence: Synthetic oligonucleotide
ccacugugaguuuggugau

SEQ ID NO: 2698321 - RNA, 19 nt, Artificial Sequence
  Description of Artificial Sequence: Synthetic oligonucleotide
gaaaaugccaauauaaugc

SEQ ID NO: 2698322 - RNA, 19 nt, Artificial Sequence
  Description of Artificial Sequence: Synthetic oligonucleotide
ucaaauaucacacuucgac

SEQ ID NO: 2698323 - RNA, 19 nt, Artificial Sequence
  Description of Artificial Sequence: Synthetic oligonucleotide
auuaccauugcacgaaucc

SEQ ID NO: 2698324 - RNA, 19 nt, Artificial Sequence
  Description of Artificial Sequence: Synthetic oligonucleotide
acaauauugccacuggggc

SEQ ID NO: 2698325 - RNA, 19 nt, Artificial Sequence
  Description of Artificial Sequence: Synthetic oligonucleotide
aguuaucugaggcugaugg

SEQ ID NO: 2698326 - RNA, 19 nt, Artificial Sequence
  Description of Artificial Sequence: Synthetic oligonucleotide
aagguuuagggguaggagg

SEQ ID NO: 2698327 - RNA, 19 nt, Artificial Sequence
  Description of Artificial Sequence: Synthetic oligonucleotide
aauauaaugcucuguccag

SEQ ID NO: 2698328 - RNA, 19 nt, Artificial Sequence
  Description of Artificial Sequence: Synthetic oligonucleotide
ucgacaaucaaagugaggc

SEQ ID NO: 2698329 - RNA, 19 nt, Artificial Sequence
  Description of Artificial Sequence: Synthetic oligonucleotide
aaauaucacacuucgacaa

SEQ ID NO: 2698330 - RNA, 19 nt, Artificial Sequence
  Description of Artificial Sequence: Synthetic oligonucleotide
agaaaaugccaauauaaug

SEQ ID NO: 2698331 - RNA, 19 nt, Artificial Sequence
  Description of Artificial Sequence: Synthetic oligonucleotide
auuggcuucgucaucaucc

SEQ ID NO: 2698332 - RNA, 19 nt, Artificial Sequence
  Description of Artificial Sequence: Synthetic oligonucleotide
cacacuucgacaaucaaag

SEQ ID NO: 2698333 - RNA, 19 nt, Artificial Sequence
  Description of Artificial Sequence: Synthetic oligonucleotide
aaaaugccaauauaaugcu

SEQ ID NO: 2698334 - RNA, 19 nt, Artificial Sequence
  Description of Artificial Sequence: Synthetic oligonucleotide
aaaggagucagccucuucu

SEQ ID NO: 2698335 - RNA, 19 nt, Artificial Sequence
  Description of Artificial Sequence: Synthetic oligonucleotide
aagaucuuguucuugcucu

SEQ ID NO: 2698336 - RNA, 19 nt, Artificial Sequence
  Description of Artificial Sequence: Synthetic oligonucleotide
aauauugccacuggggcag

SEQ ID NO: 2698337 - RNA, 19 nt, Artificial Sequence
  Description of Artificial Sequence: Synthetic oligonucleotide
ugaaggacaauauugccac

SEQ ID NO: 2698338 - RNA, 19 nt, Artificial Sequence
  Description of Artificial Sequence: Synthetic oligonucleotide
aaugcucuguccaggaacc

SEQ ID NO: 2698339 - RNA, 19 nt, Artificial Sequence
  Description of Artificial Sequence: Synthetic oligonucleotide
aaugccaauauaaugcucu

SEQ ID NO: 2698340 - RNA, 19 nt, Artificial Sequence
  Description of Artificial Sequence: Synthetic oligonucleotide
uguacauacugaaccauug

SEQ ID NO: 2698341 - RNA, 19 nt, Artificial Sequence
  Description of Artificial Sequence: Synthetic oligonucleotide
aggaagugcauacagaaga

SEQ ID NO: 2698342 - RNA, 19 nt, Artificial Sequence
  Description of Artificial Sequence: Synthetic oligonucleotide
uuguagacgaggcaaaccu

SEQ ID NO: 2698343 - RNA, 19 nt, Artificial Sequence
  Description of Artificial Sequence: Synthetic oligonucleotide
uuugggauuaagaucuugu

SEQ ID NO: 2698344 - RNA, 19 nt, Artificial Sequence
  Description of Artificial Sequence: Synthetic oligonucleotide
gacaauauugccacugggg

SEQ ID NO: 2698345 - RNA, 19 nt, Artificial Sequence
  Description of Artificial Sequence: Synthetic oligonucleotide
gguuuguacauacugaacc

SEQ ID NO: 2698346 - RNA, 19 nt, Artificial Sequence
  Description of Artificial Sequence: Synthetic oligonucleotide
uucccauuaccauugcacg

SEQ ID NO: 2698347 - RNA, 19 nt, Artificial Sequence
  Description of Artificial Sequence: Synthetic oligonucleotide
uaauaggcaguaaagguau

SEQ ID NO: 2698348 - RNA, 19 nt, Artificial Sequence
  Description of Artificial Sequence: Synthetic oligonucleotide
gaugggaugcuuauuuucg

SEQ ID NO: 2698349 - RNA, 19 nt, Artificial Sequence
  Description of Artificial Sequence: Synthetic oligonucleotide
cuggugaaggacaauauug

SEQ ID NO: 2698350 - RNA, 19 nt, Artificial Sequence
  Description of Artificial Sequence: Synthetic oligonucleotide
uggugaaggacaauauugc

SEQ ID NO: 2698351 - RNA, 19 nt, Artificial Sequence
  Description of Artificial Sequence: Synthetic oligonucleotide
uacauacugaaccauugcu

SEQ ID NO: 2698352 - RNA, 19 nt, Artificial Sequence
  Description of Artificial Sequence: Synthetic oligonucleotide
ucacaaaggagucagccuc

SEQ ID NO: 2698353 - RNA, 19 nt, Artificial Sequence
  Description of Artificial Sequence: Synthetic oligonucleotide
uaggugauggguuuguaca

SEQ ID NO: 2698354 - RNA, 19 nt, Artificial Sequence
  Description of Artificial Sequence: Synthetic oligonucleotide
gguaggaggagcuacaggc

SEQ ID NO: 2698355 - RNA, 19 nt, Artificial Sequence
  Description of Artificial Sequence: Synthetic oligonucleotide
guaucugugagaaaaugcc

SEQ ID NO: 2698356 - RNA, 19 nt, Artificial Sequence
  Description of Artificial Sequence: Synthetic oligonucleotide
uaccauugcacgaauccag

SEQ ID NO: 2698357 - RNA, 19 nt, Artificial Sequence
  Description of Artificial Sequence: Synthetic oligonucleotide
cuucccauuaccauugcac

SEQ ID NO: 2698358 - RNA, 19 nt, Artificial Sequence
  Description of Artificial Sequence: Synthetic oligonucleotide
caaagugaggcuucucugg

SEQ ID NO: 2698359 - RNA, 19 nt, Artificial Sequence
  Description of Artificial Sequence: Synthetic oligonucleotide
uuucccauguuuguagacg

SEQ ID NO: 2698360 - RNA, 19 nt, Artificial Sequence
  Description of Artificial Sequence: Synthetic oligonucleotide
uaaugcucuguccaggaac

SEQ ID NO: 2698361 - RNA, 19 nt, Artificial Sequence
  Description of Artificial Sequence: Synthetic oligonucleotide
agugcauacagaagaagac

SEQ ID NO: 2698362 - RNA, 19 nt, Artificial Sequence
  Description of Artificial Sequence: Synthetic oligonucleotide
cacuucgacaaucaaagug

SEQ ID NO: 2698363 - RNA, 19 nt, Artificial Sequence
  Description of Artificial Sequence: Synthetic oligonucleotide
ugggauuaagaucuuguuc

SEQ ID NO: 2698364 - RNA, 19 nt, Artificial Sequence
  Description of Artificial Sequence: Synthetic oligonucleotide
ucuugaacacuuugcuggg

SEQ ID NO: 2698365 - RNA, 19 nt, Artificial Sequence
  Description of Artificial Sequence: Synthetic oligonucleotide
ugggcuaaugccauagcug

SEQ ID NO: 2698366 - RNA, 19 nt, Artificial Sequence
  Description of Artificial Sequence: Synthetic oligonucleotide
auugcacgaauccagcuca

SEQ ID NO: 2698367 - RNA, 19 nt, Artificial Sequence
  Description of Artificial Sequence: Synthetic oligonucleotide
aagugcauacagaagaaga

SEQ ID NO: 2698368 - RNA, 19 nt, Artificial Sequence
  Description of Artificial Sequence: Synthetic oligonucleotide
ucugguuggucuucauugg

SEQ ID NO: 2698369 - RNA, 19 nt, Artificial Sequence
  Description of Artificial Sequence: Synthetic oligonucleotide
gaauccagcucaaauauca

SEQ ID NO: 2698370 - RNA, 19 nt, Artificial Sequence
  Description of Artificial Sequence: Synthetic oligonucleotide
ucaaagugaggcuucucug

SEQ ID NO: 2698371 - RNA, 19 nt, Artificial Sequence
  Description of Artificial Sequence: Synthetic oligonucleotide
uuaucugaggcugauggga

SEQ ID NO: 2698372 - RNA, 19 nt, Artificial Sequence
  Description of Artificial Sequence: Synthetic oligonucleotide
ugcaguaggaagugcauac

SEQ ID NO: 2698373 - RNA, 19 nt, Artificial Sequence
  Description of Artificial Sequence: Synthetic oligonucleotide
gaugcuuauuuucggguug

SEQ ID NO: 2698374 - RNA, 19 nt, Artificial Sequence
  Description of Artificial Sequence: Synthetic oligonucleotide
gcucaaauaucacacuucg

SEQ ID NO: 2698375 - RNA, 19 nt, Artificial Sequence
  Description of Artificial Sequence: Synthetic oligonucleotide
ugcucuugaacacuuugcu

SEQ ID NO: 2698376 - RNA, 19 nt, Artificial Sequence
  Description of Artificial Sequence: Synthetic oligonucleotide
uauaaugcucuguccagga

SEQ ID NO: 2698377 - RNA, 19 nt, Artificial Sequence
  Description of Artificial Sequence: Synthetic oligonucleotide
caauauaaugcucugucca

SEQ ID NO: 2698378 - RNA, 19 nt, Artificial Sequence
  Description of Artificial Sequence: Synthetic oligonucleotide
uccagguuucccauguuug

SEQ ID NO: 2698379 - RNA, 19 nt, Artificial Sequence
  Description of Artificial Sequence: Synthetic oligonucleotide
acuucgacaaucaaaguga

SEQ ID NO: 2698380 - RNA, 19 nt, Artificial Sequence
  Description of Artificial Sequence: Synthetic oligonucleotide
ugggaugcuuauuuucggg

SEQ ID NO: 2698381 - RNA, 19 nt, Artificial Sequence
  Description of Artificial Sequence: Synthetic oligonucleotide
uaauccagguuucccaugu

SEQ ID NO: 2698382 - RNA, 19 nt, Artificial Sequence
  Description of Artificial Sequence: Synthetic oligonucleotide
gcuagaggaagguuuaggg

SEQ ID NO: 2698383 - RNA, 19 nt, Artificial Sequence
  Description of Artificial Sequence: Synthetic oligonucleotide
uguucuugcucuugaacac

SEQ ID NO: 2698384 - RNA, 19 nt, Artificial Sequence
  Description of Artificial Sequence: Synthetic oligonucleotide
uuuagggguaggaggagcu

SEQ ID NO: 2698385 - RNA, 19 nt, Artificial Sequence
  Description of Artificial Sequence: Synthetic oligonucleotide
uaucacacuucgacaauca

SEQ ID NO: 2698386 - RNA, 19 nt, Artificial Sequence
  Description of Artificial Sequence: Synthetic oligonucleotide
agaccuguguuguagguga

SEQ ID NO: 2698387 - RNA, 19 nt, Artificial Sequence
  Description of Artificial Sequence: Synthetic oligonucleotide
uucgacaaucaaagugagg

SEQ ID NO: 2698388 - RNA, 19 nt, Artificial Sequence
  Description of Artificial Sequence: Synthetic oligonucleotide
auacugaaccauugcuugg

SEQ ID NO: 2698389 - RNA, 19 nt, Artificial Sequence
  Description of Artificial Sequence: Synthetic oligonucleotide
aggacaauauugccacugg

SEQ ID NO: 2698390 - RNA, 19 nt, Artificial Sequence
  Description of Artificial Sequence: Synthetic oligonucleotide
acgaauccagcucaaauau

SEQ ID NO: 2698391 - RNA, 19 nt, Artificial Sequence
  Description of Artificial Sequence: Synthetic oligonucleotide
uuauuuucggguuggguuu

SEQ ID NO: 2698392 - RNA, 19 nt, Artificial Sequence
  Description of Artificial Sequence: Synthetic oligonucleotide
aguaaagguaucugugaga

SEQ ID NO: 2698393 - RNA, 19 nt, Artificial Sequence
  Description of Artificial Sequence: Synthetic oligonucleotide
auauaaugcucuguccagg

SEQ ID NO: 2698394 - RNA, 19 nt, Artificial Sequence
  Description of Artificial Sequence: Synthetic oligonucleotide
ucugugagcagaccugugu

SEQ ID NO: 2698395 - RNA, 19 nt, Artificial Sequence
  Description of Artificial Sequence: Synthetic oligonucleotide
uaggaggagcuacaggccc

SEQ ID NO: 2698396 - RNA, 19 nt, Artificial Sequence
  Description of Artificial Sequence: Synthetic oligonucleotide
guaggaagugcauacagaa

SEQ ID NO: 2698397 - RNA, 19 nt, Artificial Sequence
  Description of Artificial Sequence: Synthetic oligonucleotide
uuggucuucauuggcuucg

SEQ ID NO: 2698398 - RNA, 19 nt, Artificial Sequence
  Description of Artificial Sequence: Synthetic oligonucleotide
agcuuguucacaaaggagu

SEQ ID NO: 2698399 - RNA, 19 nt, Artificial Sequence
  Description of Artificial Sequence: Synthetic oligonucleotide
gggcuaaugccauagcugg

SEQ ID NO: 2698400 - RNA, 19 nt, Artificial Sequence
  Description of Artificial Sequence: Synthetic oligonucleotide
uggguuuguacauacugaa

SEQ ID NO: 2698401 - RNA, 19 nt, Artificial Sequence
  Description of Artificial Sequence: Synthetic oligonucleotide
uuuccagagcuagaggaag

SEQ ID NO: 2698402 - RNA, 19 nt, Artificial Sequence
  Description of Artificial Sequence: Synthetic oligonucleotide
caguaaagguaucugugag

SEQ ID NO: 2698403 - RNA, 19 nt, Artificial Sequence
  Description of Artificial Sequence: Synthetic oligonucleotide
gaagguuuagggguaggag

SEQ ID NO: 2698404 - RNA, 19 nt, Artificial Sequence
  Description of Artificial Sequence: Synthetic oligonucleotide
guuuguacauacugaacca

SEQ ID NO: 2698405 - RNA, 19 nt, Artificial Sequence
  Description of Artificial Sequence: Synthetic oligonucleotide
guuaucugaggcugauggg

SEQ ID NO: 2698406 - RNA, 19 nt, Artificial Sequence
  Description of Artificial Sequence: Synthetic oligonucleotide
auaucacacuucgacaauc

SEQ ID NO: 2698407 - RNA, 19 nt, Artificial Sequence
  Description of Artificial Sequence: Synthetic oligonucleotide
uucacaaaggagucagccu

SEQ ID NO: 2698408 - RNA, 19 nt, Artificial Sequence
  Description of Artificial Sequence: Synthetic oligonucleotide
caaauaucacacuucgaca

SEQ ID NO: 2698409 - RNA, 19 nt, Artificial Sequence
  Description of Artificial Sequence: Synthetic oligonucleotide
ucggguuggguuuccagag

SEQ ID NO: 2698410 - RNA, 19 nt, Artificial Sequence
  Description of Artificial Sequence: Synthetic oligonucleotide
agacgaggcaaaccuuccc

SEQ ID NO: 2698411 - RNA, 19 nt, Artificial Sequence
  Description of Artificial Sequence: Synthetic oligonucleotide
uuuguagacgaggcaaacc

SEQ ID NO: 2698412 - RNA, 19 nt, Artificial Sequence
  Description of Artificial Sequence: Synthetic oligonucleotide
ugaugggaugcuuauuuuc

SEQ ID NO: 2698413 - RNA, 19 nt, Artificial Sequence
  Description of Artificial Sequence: Synthetic oligonucleotide
aauccagcucaaauaucac

SEQ ID NO: 2698414 - RNA, 19 nt, Artificial Sequence
  Description of Artificial Sequence: Synthetic oligonucleotide
augggaugcuuauuuucgg

SEQ ID NO: 2698415 - RNA, 19 nt, Artificial Sequence
  Description of Artificial Sequence: Synthetic oligonucleotide
uggguuuccagagcuagag

SEQ ID NO: 2698416 - RNA, 19 nt, Artificial Sequence
  Description of Artificial Sequence: Synthetic oligonucleotide
uucccauguuuguagacga

SEQ ID NO: 2698417 - RNA, 19 nt, Artificial Sequence
  Description of Artificial Sequence: Synthetic oligonucleotide
agcuaauccagguuuccca

SEQ ID NO: 2698418 - RNA, 19 nt, Artificial Sequence
  Description of Artificial Sequence: Synthetic oligonucleotide
augagcaggcgguaauagg

SEQ ID NO: 2698419 - RNA, 19 nt, Artificial Sequence
  Description of Artificial Sequence: Synthetic oligonucleotide
guaaagguaucugugagaa

SEQ ID NO: 2698420 - RNA, 19 nt, Artificial Sequence
  Description of Artificial Sequence: Synthetic oligonucleotide
guacauacugaaccauugc

SEQ ID NO: 2698421 - RNA, 19 nt, Artificial Sequence
  Description of Artificial Sequence: Synthetic oligonucleotide
ugcacaggcacuuucuuuu

SEQ ID NO: 2698422 - RNA, 19 nt, Artificial Sequence
  Description of Artificial Sequence: Synthetic oligonucleotide
uuuugggccacuggcaggc

SEQ ID NO: 2698423 - RNA, 19 nt, Artificial Sequence
  Description of Artificial Sequence: Synthetic oligonucleotide
gaagugcauacagaagaag

SEQ ID NO: 2698424 - RNA, 19 nt, Artificial Sequence
  Description of Artificial Sequence: Synthetic oligonucleotide
cauugcuuggccugugggc

SEQ ID NO: 2698425 - RNA, 19 nt, Artificial Sequence
  Description of Artificial Sequence: Synthetic oligonucleotide
caguaggaagugcauacag

SEQ ID NO: 2698426 - RNA, 19 nt, Artificial Sequence
  Description of Artificial Sequence: Synthetic oligonucleotide
gagcuacaggcccaggucc

SEQ ID NO: 2698427 - RNA, 19 nt, Artificial Sequence
  Description of Artificial Sequence: Synthetic oligonucleotide
cuucgacaaucaaagugag

SEQ ID NO: 2698428 - RNA, 19 nt, Artificial Sequence
  Description of Artificial Sequence: Synthetic oligonucleotide
uuggccugugggcuaaugc

SEQ ID NO: 2698429 - RNA, 19 nt, Artificial Sequence
  Description of Artificial Sequence: Synthetic oligonucleotide
gggauuaagaucuuguucu

SEQ ID NO: 2698430 - RNA, 19 nt, Artificial Sequence
  Description of Artificial Sequence: Synthetic oligonucleotide
uucggguuggguuuccaga

SEQ ID NO: 2698431 - RNA, 19 nt, Artificial Sequence
  Description of Artificial Sequence: Synthetic oligonucleotide
gugggugaugagcaggcgg

SEQ ID NO: 2698432 - RNA, 19 nt, Artificial Sequence
  Description of Artificial Sequence: Synthetic oligonucleotide
uacugaaccauugcuuggc

SEQ ID NO: 2698433 - RNA, 19 nt, Artificial Sequence
  Description of Artificial Sequence: Synthetic oligonucleotide
uuaccauugcacgaaucca

SEQ ID NO: 2698434 - RNA, 19 nt, Artificial Sequence
  Description of Artificial Sequence: Synthetic oligonucleotide
acaaucaaagugaggcuuc

SEQ ID NO: 2698435 - RNA, 19 nt, Artificial Sequence
  Description of Artificial Sequence: Synthetic oligonucleotide
gguuuccagagcuagagga

SEQ ID NO: 2698436 - RNA, 19 nt, Artificial Sequence
  Description of Artificial Sequence: Synthetic oligonucleotide
ugguuggucuucauuggcu

SEQ ID NO: 2698437 - RNA, 19 nt, Artificial Sequence
  Description of Artificial Sequence: Synthetic oligonucleotide
agcucaaauaucacacuuc

SEQ ID NO: 2698438 - RNA, 19 nt, Artificial Sequence
  Description of Artificial Sequence: Synthetic oligonucleotide
uagacgaggcaaaccuucc

SEQ ID NO: 2698439 - RNA, 19 nt, Artificial Sequence
  Description of Artificial Sequence: Synthetic oligonucleotide
uccuuuugggccacuggca

SEQ ID NO: 2698440 - RNA, 19 nt, Artificial Sequence
  Description of Artificial Sequence: Synthetic oligonucleotide
gguaucugugagaaaaugc

SEQ ID NO: 2698441 - RNA, 19 nt, Artificial Sequence
  Description of Artificial Sequence: Synthetic oligonucleotide
accauugcacgaauccagc

SEQ ID NO: 2698442 - RNA, 19 nt, Artificial Sequence
  Description of Artificial Sequence: Synthetic oligonucleotide
ucccauuaccauugcacga

SEQ ID NO: 2698443 - RNA, 19 nt, Artificial Sequence
  Description of Artificial Sequence: Synthetic oligonucleotide
aaaaguuaucugaggcuga

SEQ ID NO: 2698444 - RNA, 19 nt, Artificial Sequence
  Description of Artificial Sequence: Synthetic oligonucleotide
ucugugagaaaaugccaau

SEQ ID NO: 2698445 - RNA, 19 nt, Artificial Sequence
  Description of Artificial Sequence: Synthetic oligonucleotide
ggugaaggacaauauugcc

SEQ ID NO: 2698446 - RNA, 19 nt, Artificial Sequence
  Description of Artificial Sequence: Synthetic oligonucleotide
aggcaguaaagguaucugu

SEQ ID NO: 2698447 - RNA, 19 nt, Artificial Sequence
  Description of Artificial Sequence: Synthetic oligonucleotide
guaggugauggguuuguac

SEQ ID NO: 2698448 - RNA, 19 nt, Artificial Sequence
  Description of Artificial Sequence: Synthetic oligonucleotide
auugcuuggccugugggcu

SEQ ID NO: 2698449 - RNA, 19 nt, Artificial Sequence
  Description of Artificial Sequence: Synthetic oligonucleotide
uuucggguuggguuuccag

SEQ ID NO: 2698450 - RNA, 19 nt, Artificial Sequence
  Description of Artificial Sequence: Synthetic oligonucleotide
cauugcacgaauccagcuc

SEQ ID NO: 2698451 - RNA, 19 nt, Artificial Sequence
  Description of Artificial Sequence: Synthetic oligonucleotide
uaggcaguaaagguaucug

SEQ ID NO: 2698452 - RNA, 19 nt, Artificial Sequence
  Description of Artificial Sequence: Synthetic oligonucleotide
agcuagaggaagguuuagg

SEQ ID NO: 2698453 - RNA, 19 nt, Artificial Sequence
  Description of Artificial Sequence: Synthetic oligonucleotide
guaauaggcaguaaaggua

SEQ ID NO: 2698454 - RNA, 19 nt, Artificial Sequence
  Description of Artificial Sequence: Synthetic oligonucleotide
aaaguuaucugaggcugau

SEQ ID NO: 2698455 - RNA, 19 nt, Artificial Sequence
  Description of Artificial Sequence: Synthetic oligonucleotide
augccauagcuggugaagg

SEQ ID NO: 2698456 - RNA, 19 nt, Artificial Sequence
  Description of Artificial Sequence: Synthetic oligonucleotide
gguaauaggcaguaaaggu

SEQ ID NO: 2698457 - RNA, 19 nt, Artificial Sequence
  Description of Artificial Sequence: Synthetic oligonucleotide
gacgaggcaaaccuuccca

SEQ ID NO: 2698458 - RNA, 19 nt, Artificial Sequence
  Description of Artificial Sequence: Synthetic oligonucleotide
gccaauauaaugcucuguc

SEQ ID NO: 2698459 - RNA, 19 nt, Artificial Sequence
  Description of Artificial Sequence: Synthetic oligonucleotide
gugauggguuuguacauac

SEQ ID NO: 2698460 - RNA, 19 nt, Artificial Sequence
  Description of Artificial Sequence: Synthetic oligonucleotide
auaggcaguaaagguaucu

SEQ ID NO: 2698461 - RNA, 19 nt, Artificial Sequence
  Description of Artificial Sequence: Synthetic oligonucleotide
uugggauuaagaucuuguu

SEQ ID NO: 2698462 - RNA, 19 nt, Artificial Sequence
  Description of Artificial Sequence: Synthetic oligonucleotide
uguuguaggugauggguuu

SEQ ID NO: 2698463 - RNA, 19 nt, Artificial Sequence
  Description of Artificial Sequence: Synthetic oligonucleotide
cuuuugggccacuggcagg

SEQ ID NO: 2698464 - RNA, 19 nt, Artificial Sequence
  Description of Artificial Sequence: Synthetic oligonucleotide
ggacaauauugccacuggg

SEQ ID NO: 2698465 - RNA, 19 nt, Artificial Sequence
  Description of Artificial Sequence: Synthetic oligonucleotide
augcuuauuuucggguugg

SEQ ID NO: 2698466 - RNA, 19 nt, Artificial Sequence
  Description of Artificial Sequence: Synthetic oligonucleotide
caggaaccagaucucagug

SEQ ID NO: 2698467 - RNA, 19 nt, Artificial Sequence
  Description of Artificial Sequence: Synthetic oligonucleotide
ugagcuaauccagguuucc

SEQ ID NO: 2698468 - RNA, 19 nt, Artificial Sequence
  Description of Artificial Sequence: Synthetic oligonucleotide
cuuauuuucggguuggguu

SEQ ID NO: 2698469 - RNA, 19 nt, Artificial Sequence
  Description of Artificial Sequence: Synthetic oligonucleotide
ucaugagcuaauccagguu

SEQ ID NO: 2698470 - RNA, 19 nt, Artificial Sequence
  Description of Artificial Sequence: Synthetic oligonucleotide
aguuggugcaguaggaagu

SEQ ID NO: 2698471 - RNA, 19 nt, Artificial Sequence
  Description of Artificial Sequence: Synthetic oligonucleotide
ccaauauaaugcucugucc

SEQ ID NO: 2698472 - RNA, 19 nt, Artificial Sequence
  Description of Artificial Sequence: Synthetic oligonucleotide
ucauccucuagguccgcca

SEQ ID NO: 2698473 - RNA, 19 nt, Artificial Sequence
  Description of Artificial Sequence: Synthetic oligonucleotide
cuagguccgccagaguugg

SEQ ID NO: 2698474 - RNA, 19 nt, Artificial Sequence
  Description of Artificial Sequence: Synthetic oligonucleotide
auugccacuggggcaggcc

SEQ ID NO: 2698475 - RNA, 19 nt, Artificial Sequence
  Description of Artificial Sequence: Synthetic oligonucleotide
aggaaccagaucucagugu

SEQ ID NO: 2698476 - RNA, 19 nt, Artificial Sequence
  Description of Artificial Sequence: Synthetic oligonucleotide
agcaggcgguaauaggcag

SEQ ID NO: 2698477 - RNA, 19 nt, Artificial Sequence
  Description of Artificial Sequence: Synthetic oligonucleotide
augccaauauaaugcucug

SEQ ID NO: 2698478 - RNA, 19 nt, Artificial Sequence
  Description of Artificial Sequence: Synthetic oligonucleotide
ccagaguuggugcaguagg

SEQ ID NO: 2698479 - RNA, 19 nt, Artificial Sequence
  Description of Artificial Sequence: Synthetic oligonucleotide
ccauguuuguagacgaggc

SEQ ID NO: 2698480 - RNA, 19 nt, Artificial Sequence
  Description of Artificial Sequence: Synthetic oligonucleotide
caauauugccacuggggca

SEQ ID NO: 2698481 - RNA, 19 nt, Artificial Sequence
  Description of Artificial Sequence: Synthetic oligonucleotide
cugguuggucuucauuggc

SEQ ID NO: 2698482 - RNA, 19 nt, Artificial Sequence
  Description of Artificial Sequence: Synthetic oligonucleotide
gagcagaccuguguuguag

SEQ ID NO: 2698483 - RNA, 19 nt, Artificial Sequence
  Description of Artificial Sequence: Synthetic oligonucleotide
uuggcuucgucaucauccu

SEQ ID NO: 2698484 - RNA, 19 nt, Artificial Sequence
  Description of Artificial Sequence: Synthetic oligonucleotide
aggagcuacaggcccaggu

SEQ ID NO: 2698485 - RNA, 19 nt, Artificial Sequence
  Description of Artificial Sequence: Synthetic oligonucleotide
ucccauguuuguagacgag

SEQ ID NO: 2698486 - RNA, 19 nt, Artificial Sequence
  Description of Artificial Sequence: Synthetic oligonucleotide
aucugugagaaaaugccaa

SEQ ID NO: 2698487 - RNA, 19 nt, Artificial Sequence
  Description of Artificial Sequence: Synthetic oligonucleotide
uguagacgaggcaaaccuu

SEQ ID NO: 2698488 - RNA, 19 nt, Artificial Sequence
  Description of Artificial Sequence: Synthetic oligonucleotide
guagacgaggcaaaccuuc

SEQ ID NO: 2698489 - RNA, 19 nt, Artificial Sequence
  Description of Artificial Sequence: Synthetic oligonucleotide
agguuuagggguaggagga

SEQ ID NO: 2698490 - RNA, 19 nt, Artificial Sequence
  Description of Artificial Sequence: Synthetic oligonucleotide
ugaacacuuugcugggguc

SEQ ID NO: 2698491 - RNA, 19 nt, Artificial Sequence
  Description of Artificial Sequence: Synthetic oligonucleotide
ugauggguuuguacauacu

SEQ ID NO: 2698492 - RNA, 19 nt, Artificial Sequence
  Description of Artificial Sequence: Synthetic oligonucleotide
aguaggaagugcauacaga

SEQ ID NO: 2698493 - RNA, 19 nt, Artificial Sequence
  Description of Artificial Sequence: Synthetic oligonucleotide
cuaauccagguuucccaug

SEQ ID NO: 2698494 - RNA, 19 nt, Artificial Sequence
  Description of Artificial Sequence: Synthetic oligonucleotide
uguccaggaaccagaucuc

SEQ ID NO: 2698495 - RNA, 19 nt, Artificial Sequence
  Description of Artificial Sequence: Synthetic oligonucleotide
augagcuaauccagguuuc

SEQ ID NO: 2698496 - RNA, 19 nt, Artificial Sequence
  Description of Artificial Sequence: Synthetic oligonucleotide
ugccauagcuggugaagga

SEQ ID NO: 2698497 - RNA, 19 nt, Artificial Sequence
  Description of Artificial Sequence: Synthetic oligonucleotide
cauuaccauugcacgaauc

SEQ ID NO: 2698498 - RNA, 19 nt, Artificial Sequence
  Description of Artificial Sequence: Synthetic oligonucleotide
ggcaguaaagguaucugug

SEQ ID NO: 2698499 - RNA, 19 nt, Artificial Sequence
  Description of Artificial Sequence: Synthetic oligonucleotide
guuucccauguuuguagac

SEQ ID NO: 2698500 - RNA, 19 nt, Artificial Sequence
  Description of Artificial Sequence: Synthetic oligonucleotide
cacgaauccagcucaaaua

SEQ ID NO: 2698501 - RNA, 19 nt, Artificial Sequence
  Description of Artificial Sequence: Synthetic oligonucleotide
guuggugcaguaggaagug

SEQ ID NO: 2698502 - RNA, 19 nt, Artificial Sequence
  Description of Artificial Sequence: Synthetic oligonucleotide
guuuagggguaggaggagc

SEQ ID NO: 2698503 - RNA, 19 nt, Artificial Sequence
  Description of Artificial Sequence: Synthetic oligonucleotide
gagcuaauccagguuuccc

SEQ ID NO: 2698504 - RNA, 19 nt, Artificial Sequence
  Description of Artificial Sequence: Synthetic oligonucleotide
acauacugaaccauugcuu

SEQ ID NO: 2698505 - RNA, 19 nt, Artificial Sequence
  Description of Artificial Sequence: Synthetic oligonucleotide
cuugaacacuuugcugggg

SEQ ID NO: 2698506 - RNA, 19 nt, Artificial Sequence
  Description of Artificial Sequence: Synthetic oligonucleotide
aggugauggguuuguacau

SEQ ID NO: 2698507 - RNA, 19 nt, Artificial Sequence
  Description of Artificial Sequence: Synthetic oligonucleotide
uucugugagcagaccugug

SEQ ID NO: 2698508 - RNA, 19 nt, Artificial Sequence
  Description of Artificial Sequence: Synthetic oligonucleotide
uaaugccauagcuggugaa

SEQ ID NO: 2698509 - RNA, 19 nt, Artificial Sequence
  Description of Artificial Sequence: Synthetic oligonucleotide
gcauacagaagaagacugg

SEQ ID NO: 2698510 - RNA, 19 nt, Artificial Sequence
  Description of Artificial Sequence: Synthetic oligonucleotide
gcaguaaagguaucuguga

SEQ ID NO: 2698511 - RNA, 19 nt, Artificial Sequence
  Description of Artificial Sequence: Synthetic oligonucleotide
cauccucuagguccgccag

SEQ ID NO: 2698512 - RNA, 19 nt, Artificial Sequence
  Description of Artificial Sequence: Synthetic oligonucleotide
ugccaauauaaugcucugu

SEQ ID NO: 2698513 - RNA, 19 nt, Artificial Sequence
  Description of Artificial Sequence: Synthetic oligonucleotide
guaggaggagcuacaggcc

SEQ ID NO: 2698514 - RNA, 19 nt, Artificial Sequence
  Description of Artificial Sequence: Synthetic oligonucleotide
auuuucggguuggguuucc

SEQ ID NO: 2698515 - RNA, 19 nt, Artificial Sequence
  Description of Artificial Sequence: Synthetic oligonucleotide
cugugggcuaaugccauag

SEQ ID NO: 2698516 - RNA, 19 nt, Artificial Sequence
  Description of Artificial Sequence: Synthetic oligonucleotide
ugcuuauuuucggguuggg

SEQ ID NO: 2698517 - RNA, 19 nt, Artificial Sequence
  Description of Artificial Sequence: Synthetic oligonucleotide
aggcuucucugguuggucu

SEQ ID NO: 2698518 - RNA, 19 nt, Artificial Sequence
  Description of Artificial Sequence: Synthetic oligonucleotide
ggagucagccucuucugug

SEQ ID NO: 2698519 - RNA, 19 nt, Artificial Sequence
  Description of Artificial Sequence: Synthetic oligonucleotide
aggcugcacaggcacuuuc

SEQ ID NO: 2698520 - RNA, 19 nt, Artificial Sequence
  Description of Artificial Sequence: Synthetic oligonucleotide
auaaugcucuguccaggaa

SEQ ID NO: 2698521 - RNA, 19 nt, Artificial Sequence
  Description of Artificial Sequence: Synthetic oligonucleotide
guuuguagacgaggcaaac

SEQ ID NO: 2698522 - RNA, 19 nt, Artificial Sequence
  Description of Artificial Sequence: Synthetic oligonucleotide
auccagguuucccauguuu

SEQ ID NO: 2698523 - RNA, 19 nt, Artificial Sequence
  Description of Artificial Sequence: Synthetic oligonucleotide
gcucuugaacacuuugcug

SEQ ID NO: 2698524 - RNA, 19 nt, Artificial Sequence
  Description of Artificial Sequence: Synthetic oligonucleotide
gcuaaugccauagcuggug

SEQ ID NO: 2698525 - RNA, 19 nt, Artificial Sequence
  Description of Artificial Sequence: Synthetic oligonucleotide
aagugaggcuucucugguu

SEQ ID NO: 2698526 - RNA, 19 nt, Artificial Sequence
  Description of Artificial Sequence: Synthetic oligonucleotide
gcgguaauaggcaguaaag

SEQ ID NO: 2698527 - RNA, 19 nt, Artificial Sequence
  Description of Artificial Sequence: Synthetic oligonucleotide
aucacacuucgacaaucaa

SEQ ID NO: 2698528 - RNA, 19 nt, Artificial Sequence
  Description of Artificial Sequence: Synthetic oligonucleotide
acacuucgacaaucaaagu

SEQ ID NO: 2698529 - RNA, 19 nt, Artificial Sequence
  Description of Artificial Sequence: Synthetic oligonucleotide
cucaaauaucacacuucga

SEQ ID NO: 2698530 - RNA, 19 nt, Artificial Sequence
  Description of Artificial Sequence: Synthetic oligonucleotide
cuaaugccauagcugguga

SEQ ID NO: 2698531 - RNA, 19 nt, Artificial Sequence
  Description of Artificial Sequence: Synthetic oligonucleotide
gacaaucaaagugaggcuu

SEQ ID NO: 2698532 - RNA, 19 nt, Artificial Sequence
  Description of Artificial Sequence: Synthetic oligonucleotide
gguccuuuugggccacugg

SEQ ID NO: 2698533 - RNA, 19 nt, Artificial Sequence
  Description of Artificial Sequence: Synthetic oligonucleotide
auacagaagaagacuggau

SEQ ID NO: 2698534 - RNA, 19 nt, Artificial Sequence
  Description of Artificial Sequence: Synthetic oligonucleotide
caugagcuaauccagguuu

SEQ ID NO: 2698535 - RNA, 19 nt, Artificial Sequence
  Description of Artificial Sequence: Synthetic oligonucleotide
uauuuucggguuggguuuc

SEQ ID NO: 2698536 - RNA, 19 nt, Artificial Sequence
  Description of Artificial Sequence: Synthetic oligonucleotide
uuguaggugauggguuugu

SEQ ID NO: 2698537 - RNA, 19 nt, Artificial Sequence
  Description of Artificial Sequence: Synthetic oligonucleotide
acgaggcaaaccuucccau

SEQ ID NO: 2698538 - RNA, 19 nt, Artificial Sequence
  Description of Artificial Sequence: Synthetic oligonucleotide
gaggaagguuuagggguag

SEQ ID NO: 2698539 - RNA, 19 nt, Artificial Sequence
  Description of Artificial Sequence: Synthetic oligonucleotide
cauagcuggugaaggacaa

SEQ ID NO: 2698540 - RNA, 19 nt, Artificial Sequence
  Description of Artificial Sequence: Synthetic oligonucleotide
gucaugagcuaauccaggu

SEQ ID NO: 2698541 - RNA, 19 nt, Artificial Sequence
  Description of Artificial Sequence: Synthetic oligonucleotide
ggcgguaauaggcaguaaa

SEQ ID NO: 2698542 - RNA, 19 nt, Artificial Sequence
  Description of Artificial Sequence: Synthetic oligonucleotide
agaguuggugcaguaggaa

SEQ ID NO: 2698543 - RNA, 19 nt, Artificial Sequence
  Description of Artificial Sequence: Synthetic oligonucleotide
ggcaaaccuucccauuacc

SEQ ID NO: 2698544 - RNA, 19 nt, Artificial Sequence
  Description of Artificial Sequence: Synthetic oligonucleotide
aauccagguuucccauguu

SEQ ID NO: 2698545 - RNA, 19 nt, Artificial Sequence
  Description of Artificial Sequence: Synthetic oligonucleotide
ccuuuugggccacuggcag

SEQ ID NO: 2698546 - RNA, 19 nt, Artificial Sequence
  Description of Artificial Sequence: Synthetic oligonucleotide
agguccgccagaguuggug

SEQ ID NO: 2698547 - RNA, 19 nt, Artificial Sequence
  Description of Artificial Sequence: Synthetic oligonucleotide
cagaguuggugcaguagga

SEQ ID NO: 2698548 - RNA, 19 nt, Artificial Sequence
  Description of Artificial Sequence: Synthetic oligonucleotide
ggguuuccagagcuagagg

SEQ ID NO: 2698549 - RNA, 19 nt, Artificial Sequence
  Description of Artificial Sequence: Synthetic oligonucleotide
ugaugagcaggcgguaaua

SEQ ID NO: 2698550 - RNA, 19 nt, Artificial Sequence
  Description of Artificial Sequence: Synthetic oligonucleotide
uccgccagaguuggugcag

SEQ ID NO: 2698551 - RNA, 19 nt, Artificial Sequence
  Description of Artificial Sequence: Synthetic oligonucleotide
cuuguucacaaaggaguca

SEQ ID NO: 2698552 - RNA, 19 nt, Artificial Sequence
  Description of Artificial Sequence: Synthetic oligonucleotide
agccucuucugugagcaga

SEQ ID NO: 2698553 - RNA, 19 nt, Artificial Sequence
  Description of Artificial Sequence: Synthetic oligonucleotide
agagcuagaggaagguuua

SEQ ID NO: 2698554 - RNA, 19 nt, Artificial Sequence
  Description of Artificial Sequence: Synthetic oligonucleotide
cccauguuuguagacgagg

SEQ ID NO: 2698555 - RNA, 19 nt, Artificial Sequence
  Description of Artificial Sequence: Synthetic oligonucleotide
cagaccuguguuguaggug

SEQ ID NO: 2698556 - RNA, 19 nt, Artificial Sequence
  Description of Artificial Sequence: Synthetic oligonucleotide
aggaagguuuagggguagg

SEQ ID NO: 2698557 - RNA, 19 nt, Artificial Sequence
  Description of Artificial Sequence: Synthetic oligonucleotide
ggguaggaggagcuacagg

SEQ ID NO: 2698558 - RNA, 19 nt, Artificial Sequence
  Description of Artificial Sequence: Synthetic oligonucleotide
ggagcuacaggcccagguc

SEQ ID NO: 2698559 - RNA, 19 nt, Artificial Sequence
  Description of Artificial Sequence: Synthetic oligonucleotide
ucuugcucuugaacacuuu

SEQ ID NO: 2698560 - RNA, 19 nt, Artificial Sequence
  Description of Artificial Sequence: Synthetic oligonucleotide
gugggcuaaugccauagcu

SEQ ID NO: 2698561 - RNA, 19 nt, Artificial Sequence
  Description of Artificial Sequence: Synthetic oligonucleotide
gagcuagaggaagguuuag

SEQ ID NO: 2698562 - RNA, 19 nt, Artificial Sequence
  Description of Artificial Sequence: Synthetic oligonucleotide
cauuggcuucgucaucauc

SEQ ID NO: 2698563 - RNA, 19 nt, Artificial Sequence
  Description of Artificial Sequence: Synthetic oligonucleotide
accagaucucagugucaug

SEQ ID NO: 2698564 - RNA, 19 nt, Artificial Sequence
  Description of Artificial Sequence: Synthetic oligonucleotide
gugcauacagaagaagacu

SEQ ID NO: 2698565 - RNA, 19 nt, Artificial Sequence
  Description of Artificial Sequence: Synthetic oligonucleotide
guuuccagagcuagaggaa

SEQ ID NO: 2698566 - RNA, 19 nt, Artificial Sequence
  Description of Artificial Sequence: Synthetic oligonucleotide
cagagcuagaggaagguuu

SEQ ID NO: 2698567 - RNA, 19 nt, Artificial Sequence
  Description of Artificial Sequence: Synthetic oligonucleotide
gguccgccagaguuggugc

SEQ ID NO: 2698568 - RNA, 19 nt, Artificial Sequence
  Description of Artificial Sequence: Synthetic oligonucleotide
uuuucggguuggguuucca

SEQ ID NO: 2698569 - RNA, 19 nt, Artificial Sequence
  Description of Artificial Sequence: Synthetic oligonucleotide
ugagcagaccuguguugua

SEQ ID NO: 2698570 - RNA, 19 nt, Artificial Sequence
  Description of Artificial Sequence: Synthetic oligonucleotide
gguuucccauguuuguaga

SEQ ID NO: 2698571 - RNA, 19 nt, Artificial Sequence
  Description of Artificial Sequence: Synthetic oligonucleotide
gaaccagaucucaguguca

SEQ ID NO: 2698572 - RNA, 19 nt, Artificial Sequence
  Description of Artificial Sequence: Synthetic oligonucleotide
gcuuguucacaaaggaguc

SEQ ID NO: 2698573 - RNA, 19 nt, Artificial Sequence
  Description of Artificial Sequence: Synthetic oligonucleotide
uugcacgaauccagcucaa

SEQ ID NO: 2698574 - RNA, 19 nt, Artificial Sequence
  Description of Artificial Sequence: Synthetic oligonucleotide
ucauuggcuucgucaucau

SEQ ID NO: 2698575 - RNA, 19 nt, Artificial Sequence
  Description of Artificial Sequence: Synthetic oligonucleotide
accuguguuguaggugaug

SEQ ID NO: 2698576 - RNA, 19 nt, Artificial Sequence
  Description of Artificial Sequence: Synthetic oligonucleotide
gaggcugaugggaugcuua

SEQ ID NO: 2698577 - RNA, 19 nt, Artificial Sequence
  Description of Artificial Sequence: Synthetic oligonucleotide
gcaaaccuucccauuacca

SEQ ID NO: 2698578 - RNA, 19 nt, Artificial Sequence
  Description of Artificial Sequence: Synthetic oligonucleotide
cugugagaaaaugccaaua

SEQ ID NO: 2698579 - RNA, 19 nt, Artificial Sequence
  Description of Artificial Sequence: Synthetic oligonucleotide
uuagggguaggaggagcua

SEQ ID NO: 2698580 - RNA, 19 nt, Artificial Sequence
  Description of Artificial Sequence: Synthetic oligonucleotide
uauugccacuggggcaggc

SEQ ID NO: 2698581 - RNA, 19 nt, Artificial Sequence
  Description of Artificial Sequence: Synthetic oligonucleotide
gcugaugggaugcuuauuu

SEQ ID NO: 2698582 - RNA, 19 nt, Artificial Sequence
  Description of Artificial Sequence: Synthetic oligonucleotide
ugcacgaauccagcucaaa

SEQ ID NO: 2698583 - RNA, 19 nt, Artificial Sequence
  Description of Artificial Sequence: Synthetic oligonucleotide
ggaagguuuagggguagga

SEQ ID NO: 2698584 - RNA, 19 nt, Artificial Sequence
  Description of Artificial Sequence: Synthetic oligonucleotide
auauugccacuggggcagg

SEQ ID NO: 2698585 - RNA, 19 nt, Artificial Sequence
  Description of Artificial Sequence: Synthetic oligonucleotide
ggaagugcauacagaagaa

SEQ ID NO: 2698586 - RNA, 19 nt, Artificial Sequence
  Description of Artificial Sequence: Synthetic oligonucleotide
ggguuuguacauacugaac

SEQ ID NO: 2698587 - RNA, 19 nt, Artificial Sequence
  Description of Artificial Sequence: Synthetic oligonucleotide
gguuuagggguaggaggag

SEQ ID NO: 2698588 - RNA, 19 nt, Artificial Sequence
  Description of Artificial Sequence: Synthetic oligonucleotide
gaaggacaauauugccacu

SEQ ID NO: 2698589 - RNA, 19 nt, Artificial Sequence
  Description of Artificial Sequence: Synthetic oligonucleotide
uucucugguuggucuucau

SEQ ID NO: 2698590 - RNA, 19 nt, Artificial Sequence
  Description of Artificial Sequence: Synthetic oligonucleotide
gggaugcuuauuuucgggu

SEQ ID NO: 2698591 - RNA, 19 nt, Artificial Sequence
  Description of Artificial Sequence: Synthetic oligonucleotide
gccauagcuggugaaggac

SEQ ID NO: 2698592 - RNA, 19 nt, Artificial Sequence
  Description of Artificial Sequence: Synthetic oligonucleotide
ggcccagguccuuuugggc

SEQ ID NO: 2698593 - RNA, 19 nt, Artificial Sequence
  Description of Artificial Sequence: Synthetic oligonucleotide
agcuacaggcccagguccu

SEQ ID NO: 2698594 - RNA, 19 nt, Artificial Sequence
  Description of Artificial Sequence: Synthetic oligonucleotide
gugagcagaccuguguugu

SEQ ID NO: 2698595 - RNA, 19 nt, Artificial Sequence
  Description of Artificial Sequence: Synthetic oligonucleotide
aggaggagcuacaggccca

SEQ ID NO: 2698596 - RNA, 19 nt, Artificial Sequence
  Description of Artificial Sequence: Synthetic oligonucleotide
cacaaaggagucagccucu

SEQ ID NO: 2698597 - RNA, 19 nt, Artificial Sequence
  Description of Artificial Sequence: Synthetic oligonucleotide
uugcuuggccugugggcua

SEQ ID NO: 2698598 - RNA, 19 nt, Artificial Sequence
  Description of Artificial Sequence: Synthetic oligonucleotide
cucagugucaugagcuaau

SEQ ID NO: 2698599 - RNA, 19 nt, Artificial Sequence
  Description of Artificial Sequence: Synthetic oligonucleotide
gccagaguuggugcaguag

SEQ ID NO: 2698600 - RNA, 19 nt, Artificial Sequence
  Description of Artificial Sequence: Synthetic oligonucleotide
ugaggcugaugggaugcuu

SEQ ID NO: 2698601 - RNA, 19 nt, Artificial Sequence
  Description of Artificial Sequence: Synthetic oligonucleotide
gggguaggaggagcuacag

SEQ ID NO: 2698602 - RNA, 19 nt, Artificial Sequence
  Description of Artificial Sequence: Synthetic oligonucleotide
cuuggccugugggcuaaug

SEQ ID NO: 2698603 - RNA, 19 nt, Artificial Sequence
  Description of Artificial Sequence: Synthetic oligonucleotide
ugcuuggccugugggcuaa

SEQ ID NO: 2698604 - RNA, 19 nt, Artificial Sequence
  Description of Artificial Sequence: Synthetic oligonucleotide
ggguuggguuuccagagcu

SEQ ID NO: 2698605 - RNA, 19 nt, Artificial Sequence
  Description of Artificial Sequence: Synthetic oligonucleotide
ggaggagcuacaggcccag

SEQ ID NO: 2698606 - RNA, 19 nt, Artificial Sequence
  Description of Artificial Sequence: Synthetic oligonucleotide
gugaugagcaggcgguaau

SEQ ID NO: 2698607 - RNA, 19 nt, Artificial Sequence
  Description of Artificial Sequence: Synthetic oligonucleotide
guccgccagaguuggugca

SEQ ID NO: 2698608 - RNA, 19 nt, Artificial Sequence
  Description of Artificial Sequence: Synthetic oligonucleotide
cuucugugagcagaccugu

SEQ ID NO: 2698609 - RNA, 19 nt, Artificial Sequence
  Description of Artificial Sequence: Synthetic oligonucleotide
gcuaauccagguuucccau

SEQ ID NO: 2698610 - RNA, 19 nt, Artificial Sequence
  Description of Artificial Sequence: Synthetic oligonucleotide
cagccucuucugugagcag

SEQ ID NO: 2698611 - RNA, 19 nt, Artificial Sequence
  Description of Artificial Sequence: Synthetic oligonucleotide
gugcaguaggaagugcaua

SEQ ID NO: 2698612 - RNA, 19 nt, Artificial Sequence
  Description of Artificial Sequence: Synthetic oligonucleotide
cagguuucccauguuugua

SEQ ID NO: 2698613 - RNA, 19 nt, Artificial Sequence
  Description of Artificial Sequence: Synthetic oligonucleotide
gcacgaauccagcucaaau

SEQ ID NO: 2698614 - RNA, 19 nt, Artificial Sequence
  Description of Artificial Sequence: Synthetic oligonucleotide
caggcgguaauaggcagua

SEQ ID NO: 2698615 - RNA, 19 nt, Artificial Sequence
  Description of Artificial Sequence: Synthetic oligonucleotide
gguuggucuucauuggcuu

SEQ ID NO: 2698616 - RNA, 19 nt, Artificial Sequence
  Description of Artificial Sequence: Synthetic oligonucleotide
gcaguaggaagugcauaca

SEQ ID NO: 2698617 - RNA, 19 nt, Artificial Sequence
  Description of Artificial Sequence: Synthetic oligonucleotide
cgaauccagcucaaauauc

SEQ ID NO: 2698618 - RNA, 19 nt, Artificial Sequence
  Description of Artificial Sequence: Synthetic oligonucleotide
cugugagcagaccuguguu

SEQ ID NO: 2698619 - RNA, 19 nt, Artificial Sequence
  Description of Artificial Sequence: Synthetic oligonucleotide
caucauccucuagguccgc

SEQ ID NO: 2698620 - RNA, 19 nt, Artificial Sequence
  Description of Artificial Sequence: Synthetic oligonucleotide
caaucaaagugaggcuucu

SEQ ID NO: 2698621 - RNA, 19 nt, Artificial Sequence
  Description of Artificial Sequence: Synthetic oligonucleotide
uuugggccacuggcaggcu

SEQ ID NO: 2698622 - RNA, 19 nt, Artificial Sequence
  Description of Artificial Sequence: Synthetic oligonucleotide
augcucuguccaggaacca

SEQ ID NO: 2698623 - RNA, 19 nt, Artificial Sequence
  Description of Artificial Sequence: Synthetic oligonucleotide
ggugaugagcaggcgguaa

SEQ ID NO: 2698624 - RNA, 19 nt, Artificial Sequence
  Description of Artificial Sequence: Synthetic oligonucleotide
cugaugggaugcuuauuuu

SEQ ID NO: 2698625 - RNA, 19 nt, Artificial Sequence
  Description of Artificial Sequence: Synthetic oligonucleotide
uagguccgccagaguuggu

SEQ ID NO: 2698626 - RNA, 19 nt, Artificial Sequence
  Description of Artificial Sequence: Synthetic oligonucleotide
gcuggugaaggacaauauu

SEQ ID NO: 2698627 - RNA, 19 nt, Artificial Sequence
  Description of Artificial Sequence: Synthetic oligonucleotide
cccauuaccauugcacgaa

SEQ ID NO: 2698628 - RNA, 19 nt, Artificial Sequence
  Description of Artificial Sequence: Synthetic oligonucleotide
ccaggaaccagaucucagu

SEQ ID NO: 2698629 - RNA, 19 nt, Artificial Sequence
  Description of Artificial Sequence: Synthetic oligonucleotide
cucuguccaggaaccagau

SEQ ID NO: 2698630 - RNA, 19 nt, Artificial Sequence
  Description of Artificial Sequence: Synthetic oligonucleotide
gcuuauuuucggguugggu

SEQ ID NO: 2698631 - RNA, 19 nt, Artificial Sequence
  Description of Artificial Sequence: Synthetic oligonucleotide
ggucuucauuggcuucguc

SEQ ID NO: 2698632 - RNA, 19 nt, Artificial Sequence
  Description of Artificial Sequence: Synthetic oligonucleotide
cugcacaggcacuuucuuu

SEQ ID NO: 2698633 - RNA, 19 nt, Artificial Sequence
  Description of Artificial Sequence: Synthetic oligonucleotide
gcagaccuguguuguaggu

SEQ ID NO: 2698634 - RNA, 19 nt, Artificial Sequence
  Description of Artificial Sequence: Synthetic oligonucleotide
ccagguuucccauguuugu

SEQ ID NO: 2698635 - RNA, 19 nt, Artificial Sequence
  Description of Artificial Sequence: Synthetic oligonucleotide
cgucaucauccucuagguc

SEQ ID NO: 2698636 - RNA, 19 nt, Artificial Sequence
  Description of Artificial Sequence: Synthetic oligonucleotide
ccagcucaaauaucacacu

SEQ ID NO: 2698637 - RNA, 19 nt, Artificial Sequence
  Description of Artificial Sequence: Synthetic oligonucleotide
gccacuggggcaggcccag

SEQ ID NO: 2698638 - RNA, 19 nt, Artificial Sequence
  Description of Artificial Sequence: Synthetic oligonucleotide
cggguuggguuuccagagc

SEQ ID NO: 2698639 - RNA, 19 nt, Artificial Sequence
  Description of Artificial Sequence: Synthetic oligonucleotide
ggugcaguaggaagugcau

SEQ ID NO: 2698640 - RNA, 19 nt, Artificial Sequence
  Description of Artificial Sequence: Synthetic oligonucleotide
cacuggggcaggcccaggu

SEQ ID NO: 2698641 - RNA, 19 nt, Artificial Sequence
  Description of Artificial Sequence: Synthetic oligonucleotide
aggcgguaauaggcaguaa

SEQ ID NO: 2698642 - RNA, 19 nt, Artificial Sequence
  Description of Artificial Sequence: Synthetic oligonucleotide
ccauugcacgaauccagcu

SEQ ID NO: 2698643 - RNA, 19 nt, Artificial Sequence
  Description of Artificial Sequence: Synthetic oligonucleotide
ggcugcacaggcacuuucu

SEQ ID NO: 2698644 - RNA, 19 nt, Artificial Sequence
  Description of Artificial Sequence: Synthetic oligonucleotide
gguuggguuuccagagcua

SEQ ID NO: 2698645 - RNA, 19 nt, Artificial Sequence
  Description of Artificial Sequence: Synthetic oligonucleotide
gaccuguguuguaggugau

SEQ ID NO: 2698646 - RNA, 19 nt, Artificial Sequence
  Description of Artificial Sequence: Synthetic oligonucleotide
caggcccaggugggugaug

SEQ ID NO: 2698647 - RNA, 19 nt, Artificial Sequence
  Description of Artificial Sequence: Synthetic oligonucleotide
ggcuucucugguuggucuu

SEQ ID NO: 2698648 - RNA, 19 nt, Artificial Sequence
  Description of Artificial Sequence: Synthetic oligonucleotide
ggcuaaugccauagcuggu

SEQ ID NO: 2698649 - RNA, 19 nt, Artificial Sequence
  Description of Artificial Sequence: Synthetic oligonucleotide
gcaggcgguaauaggcagu

SEQ ID NO: 2698650 - RNA, 19 nt, Artificial Sequence
  Description of Artificial Sequence: Synthetic oligonucleotide
cugaggcugaugggaugcu

SEQ ID NO: 2698651 - RNA, 19 nt, Artificial Sequence
  Description of Artificial Sequence: Synthetic oligonucleotide
ccauuaccauugcacgaau

SEQ ID NO: 2698652 - RNA, 19 nt, Artificial Sequence
  Description of Artificial Sequence: Synthetic oligonucleotide
ccugugggcuaaugccaua

SEQ ID NO: 2698653 - RNA, 19 nt, Artificial Sequence
  Description of Artificial Sequence: Synthetic oligonucleotide
ccacuggggcaggcccagg

SEQ ID NO: 2698654 - RNA, 19 nt, Artificial Sequence
  Description of Artificial Sequence: Synthetic oligonucleotide
ggcugaugggaugcuuauu

SEQ ID NO: 2698655 - RNA, 19 nt, Artificial Sequence
  Description of Artificial Sequence: Synthetic oligonucleotide
cgaggcaaaccuucccauu

SEQ ID NO: 2698656 - RNA, 19 nt, Artificial Sequence
  Description of Artificial Sequence: Synthetic oligonucleotide
ccagagcuagaggaagguu

SEQ ID NO: 2698657 - RNA, 19 nt, Artificial Sequence
  Description of Artificial Sequence: Synthetic oligonucleotide
gcuacaggcccagguccuu

SEQ ID NO: 2698658 - RNA, 19 nt, Artificial Sequence
  Description of Artificial Sequence: Synthetic oligonucleotide
ccgccagaguuggugcagu

SEQ ID NO: 2698659 - RNA, 19 nt, Artificial Sequence
  Description of Artificial Sequence: Synthetic oligonucleotide
gcuuggccugugggcuaau

SEQ ID NO: 2698660 - RNA, 19 nt, Artificial Sequence
  Description of Artificial Sequence: Synthetic oligonucleotide
aauaaagugggucucugag

SEQ ID NO: 2698661 - RNA, 19 nt, Artificial Sequence
  Description of Artificial Sequence: Synthetic oligonucleotide
uguacagaacugaauaaag

SEQ ID NO: 2698662 - RNA, 19 nt, Artificial Sequence
  Description of Artificial Sequence: Synthetic oligonucleotide
uuugccuugauguggaaag

SEQ ID NO: 2698663 - RNA, 19 nt, Artificial Sequence
  Description of Artificial Sequence: Synthetic oligonucleotide
aaaaccagaguuguguuag

SEQ ID NO: 2698664 - RNA, 19 nt, Artificial Sequence
  Description of Artificial Sequence: Synthetic oligonucleotide
aguuguguuaguccugugc

SEQ ID NO: 2698665 - RNA, 19 nt, Artificial Sequence
  Description of Artificial Sequence: Synthetic oligonucleotide
gaugucagcagcuccaucc

SEQ ID NO: 2698666 - RNA, 19 nt, Artificial Sequence
  Description of Artificial Sequence: Synthetic oligonucleotide
cagaacugaauaaaguggg

SEQ ID NO: 2698667 - RNA, 19 nt, Artificial Sequence
  Description of Artificial Sequence: Synthetic oligonucleotide
cuuuauucuccacagaaug

SEQ ID NO: 2698668 - RNA, 19 nt, Artificial Sequence
  Description of Artificial Sequence: Synthetic oligonucleotide
uccacagaaugauacaugc

SEQ ID NO: 2698669 - RNA, 19 nt, Artificial Sequence
  Description of Artificial Sequence: Synthetic oligonucleotide
gaagguggguguuaaaacc

SEQ ID NO: 2698670 - RNA, 19 nt, Artificial Sequence
  Description of Artificial Sequence: Synthetic oligonucleotide
auauguacagaacugaaua

SEQ ID NO: 2698671 - RNA, 19 nt, Artificial Sequence
  Description of Artificial Sequence: Synthetic oligonucleotide
caaaugaagccccagggcc

SEQ ID NO: 2698672 - RNA, 19 nt, Artificial Sequence
  Description of Artificial Sequence: Synthetic oligonucleotide
uugauugaggggcugguag

SEQ ID NO: 2698673 - RNA, 19 nt, Artificial Sequence
  Description of Artificial Sequence: Synthetic oligonucleotide
agggucuugauugaggggc

SEQ ID NO: 2698674 - RNA, 19 nt, Artificial Sequence
  Description of Artificial Sequence: Synthetic oligonucleotide
aauguccccauauguacag

SEQ ID NO: 2698675 - RNA, 19 nt, Artificial Sequence
  Description of Artificial Sequence: Synthetic oligonucleotide
accagaguuguguuagucc

SEQ ID NO: 2698676 - RNA, 19 nt, Artificial Sequence
  Description of Artificial Sequence: Synthetic oligonucleotide
uuuauucuccacagaauga

SEQ ID NO: 2698677 - RNA, 19 nt, Artificial Sequence
  Description of Artificial Sequence: Synthetic oligonucleotide
acagaacugaauaaagugg

SEQ ID NO: 2698678 - RNA, 19 nt, Artificial Sequence
  Description of Artificial Sequence: Synthetic oligonucleotide
ugcuuuauucuccacagaa

SEQ ID NO: 2698679 - RNA, 19 nt, Artificial Sequence
  Description of Artificial Sequence: Synthetic oligonucleotide
uguggaaagggacauggga

SEQ ID NO: 2698680 - RNA, 19 nt, Artificial Sequence
  Description of Artificial Sequence: Synthetic oligonucleotide
aagugggucucugagaguc

SEQ ID NO: 2698681 - RNA, 19 nt, Artificial Sequence
  Description of Artificial Sequence: Synthetic oligonucleotide
ugcucaaugcugcagcucc

SEQ ID NO: 2698682 - RNA, 19 nt, Artificial Sequence
  Description of Artificial Sequence: Synthetic oligonucleotide
cuuacuccagccaucgucc

SEQ ID NO: 2698683 - RNA, 19 nt, Artificial Sequence
  Description of Artificial Sequence: Synthetic oligonucleotide
guuacuuccaggcagggga

SEQ ID NO: 2698684 - RNA, 19 nt, Artificial Sequence
  Description of Artificial Sequence: Synthetic oligonucleotide
aggaguagccugcugggcc

SEQ ID NO: 2698685 - RNA, 19 nt, Artificial Sequence
  Description of Artificial Sequence: Synthetic oligonucleotide
uuucuguacuacaucuucc

SEQ ID NO: 2698686 - RNA, 19 nt, Artificial Sequence
  Description of Artificial Sequence: Synthetic oligonucleotide
caauguagggaggagacgg

SEQ ID NO: 2698687 - RNA, 19 nt, Artificial Sequence
  Description of Artificial Sequence: Synthetic oligonucleotide
uccucacucucuaaugggg

SEQ ID NO: 2698688 - RNA, 19 nt, Artificial Sequence
  Description of Artificial Sequence: Synthetic oligonucleotide
uucuguacuacaucuuccc

SEQ ID NO: 2698689 - RNA, 19 nt, Artificial Sequence
  Description of Artificial Sequence: Synthetic oligonucleotide
uguacuacaucuucccacu

SEQ ID NO: 2698690 - RNA, 19 nt, Artificial Sequence
  Description of Artificial Sequence: Synthetic oligonucleotide
uggaaagggacaugggaag

SEQ ID NO: 2698691 - RNA, 19 nt, Artificial Sequence
  Description of Artificial Sequence: Synthetic oligonucleotide
uguucuggguccaugggga

SEQ ID NO: 2698692 - RNA, 19 nt, Artificial Sequence
  Description of Artificial Sequence: Synthetic oligonucleotide
uauguacagaacugaauaa

SEQ ID NO: 2698693 - RNA, 19 nt, Artificial Sequence
  Description of Artificial Sequence: Synthetic oligonucleotide
ucugauuugccuugaugug

SEQ ID NO: 2698694 - RNA, 19 nt, Artificial Sequence
  Description of Artificial Sequence: Synthetic oligonucleotide
ugauugaggggcugguagg

SEQ ID NO: 2698695 - RNA, 19 nt, Artificial Sequence
  Description of Artificial Sequence: Synthetic oligonucleotide
agccccagggccuggaucc

SEQ ID NO: 2698696 - RNA, 19 nt, Artificial Sequence
  Description of Artificial Sequence: Synthetic oligonucleotide
gguaggaguagccugcugg

SEQ ID NO: 2698697 - RNA, 19 nt, Artificial Sequence
  Description of Artificial Sequence: Synthetic oligonucleotide
ugauuugccuugaugugga

SEQ ID NO: 2698698 - RNA, 19 nt, Artificial Sequence
  Description of Artificial Sequence: Synthetic oligonucleotide
auaucucccgagcccaggc

SEQ ID NO: 2698699 - RNA, 19 nt, Artificial Sequence
  Description of Artificial Sequence: Synthetic oligonucleotide
auccgauaucucccgagcc

SEQ ID NO: 2698700 - RNA, 19 nt, Artificial Sequence
  Description of Artificial Sequence: Synthetic oligonucleotide
aaugcugcagcucccuccu

SEQ ID NO: 2698701 - RNA, 19 nt, Artificial Sequence
  Description of Artificial Sequence: Synthetic oligonucleotide
uacauagggugcuuuauuc

SEQ ID NO: 2698702 - RNA, 19 nt, Artificial Sequence
  Description of Artificial Sequence: Synthetic oligonucleotide
cauccucacucucuaaugg

SEQ ID NO: 2698703 - RNA, 19 nt, Artificial Sequence
  Description of Artificial Sequence: Synthetic oligonucleotide
cuuucuguacuacaucuuc

SEQ ID NO: 2698704 - RNA, 19 nt, Artificial Sequence
  Description of Artificial Sequence: Synthetic oligonucleotide
uccgauaucucccgagccc

SEQ ID NO: 2698705 - RNA, 19 nt, Artificial Sequence
  Description of Artificial Sequence: Synthetic oligonucleotide
uguuaaaaccagaguugug

SEQ ID NO: 2698706 - RNA, 19 nt, Artificial Sequence
  Description of Artificial Sequence: Synthetic oligonucleotide
cugauuugccuugaugugg

SEQ ID NO: 2698707 - RNA, 19 nt, Artificial Sequence
  Description of Artificial Sequence: Synthetic oligonucleotide
uggcuguguacauagggug

SEQ ID NO: 2698708 - RNA, 19 nt, Artificial Sequence
  Description of Artificial Sequence: Synthetic oligonucleotide
cuguacuacaucuucccac

SEQ ID NO: 2698709 - RNA, 19 nt, Artificial Sequence
  Description of Artificial Sequence: Synthetic oligonucleotide
auagggugcuuuauucucc

SEQ ID NO: 2698710 - RNA, 19 nt, Artificial Sequence
  Description of Artificial Sequence: Synthetic oligonucleotide
ugcagcucccuccucaucu

SEQ ID NO: 2698711 - RNA, 19 nt, Artificial Sequence
  Description of Artificial Sequence: Synthetic oligonucleotide
auccucacucucuaauggg

SEQ ID NO: 2698712 - RNA, 19 nt, Artificial Sequence
  Description of Artificial Sequence: Synthetic oligonucleotide
ggcaaaugaagccccaggg

SEQ ID NO: 2698713 - RNA, 19 nt, Artificial Sequence
  Description of Artificial Sequence: Synthetic oligonucleotide
aaccagaguuguguuaguc

SEQ ID NO: 2698714 - RNA, 19 nt, Artificial Sequence
  Description of Artificial Sequence: Synthetic oligonucleotide
uacuacaucuucccacuga

SEQ ID NO: 2698715 - RNA, 19 nt, Artificial Sequence
  Description of Artificial Sequence: Synthetic oligonucleotide
auaaagugggucucugaga

SEQ ID NO: 2698716 - RNA, 19 nt, Artificial Sequence
  Description of Artificial Sequence: Synthetic oligonucleotide
ucuccgugugguuacuucc

SEQ ID NO: 2698717 - RNA, 19 nt, Artificial Sequence
  Description of Artificial Sequence: Synthetic oligonucleotide
guaggaguagccugcuggg

SEQ ID NO: 2698718 - RNA, 19 nt, Artificial Sequence
  Description of Artificial Sequence: Synthetic oligonucleotide
ucuguacuacaucuuccca

SEQ ID NO: 2698719 - RNA, 19 nt, Artificial Sequence
  Description of Artificial Sequence: Synthetic oligonucleotide
cauagggugcuuuauucuc

SEQ ID NO: 2698720 - RNA, 19 nt, Artificial Sequence
  Description of Artificial Sequence: Synthetic oligonucleotide
gaacugaauaaaguggguc

SEQ ID NO: 2698721 - RNA, 19 nt, Artificial Sequence
  Description of Artificial Sequence: Synthetic oligonucleotide
gucugauuugccuugaugu

SEQ ID NO: 2698722 - RNA, 19 nt, Artificial Sequence
  Description of Artificial Sequence: Synthetic oligonucleotide
uuaaaaccagaguuguguu

SEQ ID NO: 2698723 - RNA, 19 nt, Artificial Sequence
  Description of Artificial Sequence: Synthetic oligonucleotide
cuugauguggaaagggaca

SEQ ID NO: 2698724 - RNA, 19 nt, Artificial Sequence
  Description of Artificial Sequence: Synthetic oligonucleotide
guuaguccugugcuggucc

SEQ ID NO: 2698725 - RNA, 19 nt, Artificial Sequence
  Description of Artificial Sequence: Synthetic oligonucleotide
uggguguuaaaaccagagu

SEQ ID NO: 2698726 - RNA, 19 nt, Artificial Sequence
  Description of Artificial Sequence: Synthetic oligonucleotide
agucugauuugccuugaug

SEQ ID NO: 2698727 - RNA, 19 nt, Artificial Sequence
  Description of Artificial Sequence: Synthetic oligonucleotide
acauagggugcuuuauucu

SEQ ID NO: 2698728 - RNA, 19 nt, Artificial Sequence
  Description of Artificial Sequence: Synthetic oligonucleotide
guuaaaaccagaguugugu

SEQ ID NO: 2698729 - RNA, 19 nt, Artificial Sequence
  Description of Artificial Sequence: Synthetic oligonucleotide
aauguagggaggagacggg

SEQ ID NO: 2698730 - RNA, 19 nt, Artificial Sequence
  Description of Artificial Sequence: Synthetic oligonucleotide
acguguucuggguccaugg

SEQ ID NO: 2698731 - RNA, 19 nt, Artificial Sequence
  Description of Artificial Sequence: Synthetic oligonucleotide
caccucuuccuguucaggg

SEQ ID NO: 2698732 - RNA, 19 nt, Artificial Sequence
  Description of Artificial Sequence: Synthetic oligonucleotide
ugaauaaagugggucucug

SEQ ID NO: 2698733 - RNA, 19 nt, Artificial Sequence
  Description of Artificial Sequence: Synthetic oligonucleotide
aaagggacaugggaaggug

SEQ ID NO: 2698734 - RNA, 19 nt, Artificial Sequence
  Description of Artificial Sequence: Synthetic oligonucleotide
gguguuaaaaccagaguug

SEQ ID NO: 2698735 - RNA, 19 nt, Artificial Sequence
  Description of Artificial Sequence: Synthetic oligonucleotide
aagguggguguuaaaacca

SEQ ID NO: 2698736 - RNA, 19 nt, Artificial Sequence
  Description of Artificial Sequence: Synthetic oligonucleotide
ugggccugcuccuauuucc

SEQ ID NO: 2698737 - RNA, 19 nt, Artificial Sequence
  Description of Artificial Sequence: Synthetic oligonucleotide
cacagaaugauacaugcua

SEQ ID NO: 2698738 - RNA, 19 nt, Artificial Sequence
  Description of Artificial Sequence: Synthetic oligonucleotide
ugggcucgggccaaugucc

SEQ ID NO: 2698739 - RNA, 19 nt, Artificial Sequence
  Description of Artificial Sequence: Synthetic oligonucleotide
caaugcugcagcucccucc

SEQ ID NO: 2698740 - RNA, 19 nt, Artificial Sequence
  Description of Artificial Sequence: Synthetic oligonucleotide
guggguguuaaaaccagag

SEQ ID NO: 2698741 - RNA, 19 nt, Artificial Sequence
  Description of Artificial Sequence: Synthetic oligonucleotide
aggcagggaccccuggugc

SEQ ID NO: 2698742 - RNA, 19 nt, Artificial Sequence
  Description of Artificial Sequence: Synthetic oligonucleotide
aaaugaagccccagggccu

SEQ ID NO: 2698743 - RNA, 19 nt, Artificial Sequence
  Description of Artificial Sequence: Synthetic oligonucleotide
ucucugagagucugauuug

SEQ ID NO: 2698744 - RNA, 19 nt, Artificial Sequence
  Description of Artificial Sequence: Synthetic oligonucleotide
uccauggggauagagcugu

SEQ ID NO: 2698745 - RNA, 19 nt, Artificial Sequence
  Description of Artificial Sequence: Synthetic oligonucleotide
gagcauccgauaucucccg

SEQ ID NO: 2698746 - RNA, 19 nt, Artificial Sequence
  Description of Artificial Sequence: Synthetic oligonucleotide
gaauaaagugggucucuga

SEQ ID NO: 2698747 - RNA, 19 nt, Artificial Sequence
  Description of Artificial Sequence: Synthetic oligonucleotide
ugcuccuauuuccuccugc

SEQ ID NO: 2698748 - RNA, 19 nt, Artificial Sequence
  Description of Artificial Sequence: Synthetic oligonucleotide
uuggagggcuuucuguacu

SEQ ID NO: 2698749 - RNA, 19 nt, Artificial Sequence
  Description of Artificial Sequence: Synthetic oligonucleotide
cuggauccggucuuggaug

SEQ ID NO: 2698750 - RNA, 19 nt, Artificial Sequence
  Description of Artificial Sequence: Synthetic oligonucleotide
uaagguggguuugggcucg

SEQ ID NO: 2698751 - RNA, 19 nt, Artificial Sequence
  Description of Artificial Sequence: Synthetic oligonucleotide
cauccgauaucucccgagc

SEQ ID NO: 2698752 - RNA, 19 nt, Artificial Sequence
  Description of Artificial Sequence: Synthetic oligonucleotide
agccaucguccuuuucacc

SEQ ID NO: 2698753 - RNA, 19 nt, Artificial Sequence
  Description of Artificial Sequence: Synthetic oligonucleotide
ugcuaagguggguuugggc

SEQ ID NO: 2698754 - RNA, 19 nt, Artificial Sequence
  Description of Artificial Sequence: Synthetic oligonucleotide
cuccacagaaugauacaug

SEQ ID NO: 2698755 - RNA, 19 nt, Artificial Sequence
  Description of Artificial Sequence: Synthetic oligonucleotide
aaugaagccccagggccug

SEQ ID NO: 2698756 - RNA, 19 nt, Artificial Sequence
  Description of Artificial Sequence: Synthetic oligonucleotide
cuaagguggguuugggcuc

SEQ ID NO: 2698757 - RNA, 19 nt, Artificial Sequence
  Description of Artificial Sequence: Synthetic oligonucleotide
accggugccagcuccaccu

SEQ ID NO: 2698758 - RNA, 19 nt, Artificial Sequence
  Description of Artificial Sequence: Synthetic oligonucleotide
ucccggcuugcaauguagg

SEQ ID NO: 2698759 - RNA, 19 nt, Artificial Sequence
  Description of Artificial Sequence: Synthetic oligonucleotide
uugcaauguagggaggaga

SEQ ID NO: 2698760 - RNA, 19 nt, Artificial Sequence
  Description of Artificial Sequence: Synthetic oligonucleotide
caugcuaagguggguuugg

SEQ ID NO: 2698761 - RNA, 19 nt, Artificial Sequence
  Description of Artificial Sequence: Synthetic oligonucleotide
aucucccgagcccaggcag

SEQ ID NO: 2698762 - RNA, 19 nt, Artificial Sequence
  Description of Artificial Sequence: Synthetic oligonucleotide
cuuuucaccagcuccacgu

SEQ ID NO: 2698763 - RNA, 19 nt, Artificial Sequence
  Description of Artificial Sequence: Synthetic oligonucleotide
uuaguccugugcugguccc

SEQ ID NO: 2698764 - RNA, 19 nt, Artificial Sequence
  Description of Artificial Sequence: Synthetic oligonucleotide
gucucugagagucugauuu

SEQ ID NO: 2698765 - RNA, 19 nt, Artificial Sequence
  Description of Artificial Sequence: Synthetic oligonucleotide
gauaucucccgagcccagg

SEQ ID NO: 2698766 - RNA, 19 nt, Artificial Sequence
  Description of Artificial Sequence: Synthetic oligonucleotide
uuugggcucgggccaaugu

SEQ ID NO: 2698767 - RNA, 19 nt, Artificial Sequence
  Description of Artificial Sequence: Synthetic oligonucleotide
aaagugggucucugagagu

SEQ ID NO: 2698768 - RNA, 19 nt, Artificial Sequence
  Description of Artificial Sequence: Synthetic oligonucleotide
uguacauagggugcuuuau

SEQ ID NO: 2698769 - RNA, 19 nt, Artificial Sequence
  Description of Artificial Sequence: Synthetic oligonucleotide
uagggugcuuuauucucca

SEQ ID NO: 2698770 - RNA, 19 nt, Artificial Sequence
  Description of Artificial Sequence: Synthetic oligonucleotide
uccauccucuccgucaccc

SEQ ID NO: 2698771 - RNA, 19 nt, Artificial Sequence
  Description of Artificial Sequence: Synthetic oligonucleotide
ggaagguggguguuaaaac

SEQ ID NO: 2698772 - RNA, 19 nt, Artificial Sequence
  Description of Artificial Sequence: Synthetic oligonucleotide
cuccacguguucugggucc

SEQ ID NO: 2698773 - RNA, 19 nt, Artificial Sequence
  Description of Artificial Sequence: Synthetic oligonucleotide
aaaccagaguuguguuagu

SEQ ID NO: 2698774 - RNA, 19 nt, Artificial Sequence
  Description of Artificial Sequence: Synthetic oligonucleotide
agaguuguguuaguccugu

SEQ ID NO: 2698775 - RNA, 19 nt, Artificial Sequence
  Description of Artificial Sequence: Synthetic oligonucleotide
ccaauguccccauauguac

SEQ ID NO: 2698776 - RNA, 19 nt, Artificial Sequence
  Description of Artificial Sequence: Synthetic oligonucleotide
gcaaaugaagccccagggc

SEQ ID NO: 2698777 - RNA, 19 nt, Artificial Sequence
  Description of Artificial Sequence: Synthetic oligonucleotide
gggucuggcaaaugaagcc

SEQ ID NO: 2698778 - RNA, 19 nt, Artificial Sequence
  Description of Artificial Sequence: Synthetic oligonucleotide
acagaaugauacaugcuaa

SEQ ID NO: 2698779 - RNA, 19 nt, Artificial Sequence
  Description of Artificial Sequence: Synthetic oligonucleotide
auguagggaggagacgggg

SEQ ID NO: 2698780 - RNA, 19 nt, Artificial Sequence
  Description of Artificial Sequence: Synthetic oligonucleotide
uccgucacccaccggugcc

SEQ ID NO: 2698781 - RNA, 19 nt, Artificial Sequence
  Description of Artificial Sequence: Synthetic oligonucleotide
cuacaucuucccacugagc

SEQ ID NO: 2698782 - RNA, 19 nt, Artificial Sequence
  Description of Artificial Sequence: Synthetic oligonucleotide
gugguuacuuccaggcagg

SEQ ID NO: 2698783 - RNA, 19 nt, Artificial Sequence
  Description of Artificial Sequence: Synthetic oligonucleotide
ugccugccgggcuuggagg

SEQ ID NO: 2698784 - RNA, 19 nt, Artificial Sequence
  Description of Artificial Sequence: Synthetic oligonucleotide
uugggcucgggccaauguc

SEQ ID NO: 2698785 - RNA, 19 nt, Artificial Sequence
  Description of Artificial Sequence: Synthetic oligonucleotide
uggauccggucuuggaugu

SEQ ID NO: 2698786 - RNA, 19 nt, Artificial Sequence
  Description of Artificial Sequence: Synthetic oligonucleotide
uucccacugagcauccgau

SEQ ID NO: 2698787 - RNA, 19 nt, Artificial Sequence
  Description of Artificial Sequence: Synthetic oligonucleotide
cuugcaauguagggaggag

SEQ ID NO: 2698788 - RNA, 19 nt, Artificial Sequence
  Description of Artificial Sequence: Synthetic oligonucleotide
acccaccggugccagcucc

SEQ ID NO: 2698789 - RNA, 19 nt, Artificial Sequence
  Description of Artificial Sequence: Synthetic oligonucleotide
ucuccgucacccaccggug

SEQ ID NO: 2698790 - RNA, 19 nt, Artificial Sequence
  Description of Artificial Sequence: Synthetic oligonucleotide
cauggggauagagcugugg

SEQ ID NO: 2698791 - RNA, 19 nt, Artificial Sequence
  Description of Artificial Sequence: Synthetic oligonucleotide
uaucucccgagcccaggca

SEQ ID NO: 2698792 - RNA, 19 nt, Artificial Sequence
  Description of Artificial Sequence: Synthetic oligonucleotide
gugcaggcaggcuuacucc

SEQ ID NO: 2698793 - RNA, 19 nt, Artificial Sequence
  Description of Artificial Sequence: Synthetic oligonucleotide
gacggggcagcucuccgug

SEQ ID NO: 2698794 - RNA, 19 nt, Artificial Sequence
  Description of Artificial Sequence: Synthetic oligonucleotide
gagacggggcagcucuccg

SEQ ID NO: 2698795 - RNA, 19 nt, Artificial Sequence
  Description of Artificial Sequence: Synthetic oligonucleotide
cagggucuugauugagggg

SEQ ID NO: 2698796 - RNA, 19 nt, Artificial Sequence
  Description of Artificial Sequence: Synthetic oligonucleotide
cgugugguuacuuccaggc

SEQ ID NO: 2698797 - RNA, 19 nt, Artificial Sequence
  Description of Artificial Sequence: Synthetic oligonucleotide
acaucuucccacugagcau

SEQ ID NO: 2698798 - RNA, 19 nt, Artificial Sequence
  Description of Artificial Sequence: Synthetic oligonucleotide
ggaaagggacaugggaagg

SEQ ID NO: 2698799 - RNA, 19 nt, Artificial Sequence
  Description of Artificial Sequence: Synthetic oligonucleotide
gcuuacuccagccaucguc

SEQ ID NO: 2698800 - RNA, 19 nt, Artificial Sequence
  Description of Artificial Sequence: Synthetic oligonucleotide
uuacuuccaggcaggggau

SEQ ID NO: 2698801 - RNA, 19 nt, Artificial Sequence
  Description of Artificial Sequence: Synthetic oligonucleotide
augccugccgggcuuggag

SEQ ID NO: 2698802 - RNA, 19 nt, Artificial Sequence
  Description of Artificial Sequence: Synthetic oligonucleotide
caauguccccauauguaca

SEQ ID NO: 2698803 - RNA, 19 nt, Artificial Sequence
  Description of Artificial Sequence: Synthetic oligonucleotide
guggaaagggacaugggaa

SEQ ID NO: 2698804 - RNA, 19 nt, Artificial Sequence
  Description of Artificial Sequence: Synthetic oligonucleotide
agaacugaauaaagugggu

SEQ ID NO: 2698805 - RNA, 19 nt, Artificial Sequence
  Description of Artificial Sequence: Synthetic oligonucleotide
auacaugcuaagguggguu

SEQ ID NO: 2698806 - RNA, 19 nt, Artificial Sequence
  Description of Artificial Sequence: Synthetic oligonucleotide
gagggcuuucuguacuaca

SEQ ID NO: 2698807 - RNA, 19 nt, Artificial Sequence
  Description of Artificial Sequence: Synthetic oligonucleotide
ggucuggcaaaugaagccc

SEQ ID NO: 2698808 - RNA, 19 nt, Artificial Sequence
  Description of Artificial Sequence: Synthetic oligonucleotide
ggguguuaaaaccagaguu

SEQ ID NO: 2698809 - RNA, 19 nt, Artificial Sequence
  Description of Artificial Sequence: Synthetic oligonucleotide
gauugaggggcugguagga

SEQ ID NO: 2698810 - RNA, 19 nt, Artificial Sequence
  Description of Artificial Sequence: Synthetic oligonucleotide
ggugcaggcaggcuuacuc

SEQ ID NO: 2698811 - RNA, 19 nt, Artificial Sequence
  Description of Artificial Sequence: Synthetic oligonucleotide
gguccauggggauagagcu

SEQ ID NO: 2698812 - RNA, 19 nt, Artificial Sequence
  Description of Artificial Sequence: Synthetic oligonucleotide
gaggagacggggcagcucu

SEQ ID NO: 2698813 - RNA, 19 nt, Artificial Sequence
  Description of Artificial Sequence: Synthetic oligonucleotide
gagcuguggcugcucaaug

SEQ ID NO: 2698814 - RNA, 19 nt, Artificial Sequence
  Description of Artificial Sequence: Synthetic oligonucleotide
gcuaagguggguuugggcu

SEQ ID NO: 2698815 - RNA, 19 nt, Artificial Sequence
  Description of Artificial Sequence: Synthetic oligonucleotide
agggaggagacggggcagc

SEQ ID NO: 2698816 - RNA, 19 nt, Artificial Sequence
  Description of Artificial Sequence: Synthetic oligonucleotide
ugguuacuuccaggcaggg

SEQ ID NO: 2698817 - RNA, 19 nt, Artificial Sequence
  Description of Artificial Sequence: Synthetic oligonucleotide
agcuccacguguucugggu

SEQ ID NO: 2698818 - RNA, 19 nt, Artificial Sequence
  Description of Artificial Sequence: Synthetic oligonucleotide
agggugcuuuauucuccac

SEQ ID NO: 2698819 - RNA, 19 nt, Artificial Sequence
  Description of Artificial Sequence: Synthetic oligonucleotide
gccaucguccuuuucacca

SEQ ID NO: 2698820 - RNA, 19 nt, Artificial Sequence
  Description of Artificial Sequence: Synthetic oligonucleotide
cauccucuccgucacccac

SEQ ID NO: 2698821 - RNA, 19 nt, Artificial Sequence
  Description of Artificial Sequence: Synthetic oligonucleotide
ucaaugcugcagcucccuc

SEQ ID NO: 2698822 - RNA, 19 nt, Artificial Sequence
  Description of Artificial Sequence: Synthetic oligonucleotide
ucuuggaugucagcagcuc

SEQ ID NO: 2698823 - RNA, 19 nt, Artificial Sequence
  Description of Artificial Sequence: Synthetic oligonucleotide
acaugcuaagguggguuug

SEQ ID NO: 2698824 - RNA, 19 nt, Artificial Sequence
  Description of Artificial Sequence: Synthetic oligonucleotide
uccaggcaggggaugccug

SEQ ID NO: 2698825 - RNA, 19 nt, Artificial Sequence
  Description of Artificial Sequence: Synthetic oligonucleotide
gucuggcaaaugaagcccc

SEQ ID NO: 2698826 - RNA, 19 nt, Artificial Sequence
  Description of Artificial Sequence: Synthetic oligonucleotide
gauccggucuuggauguca

SEQ ID NO: 2698827 - RNA, 19 nt, Artificial Sequence
  Description of Artificial Sequence: Synthetic oligonucleotide
cauauguacagaacugaau

SEQ ID NO: 2698828 - RNA, 19 nt, Artificial Sequence
  Description of Artificial Sequence: Synthetic oligonucleotide
guacagaacugaauaaagu

SEQ ID NO: 2698829 - RNA, 19 nt, Artificial Sequence
  Description of Artificial Sequence: Synthetic oligonucleotide
auugaggggcugguaggag

SEQ ID NO: 2698830 - RNA, 19 nt, Artificial Sequence
  Description of Artificial Sequence: Synthetic oligonucleotide
cuguggcugcucaaugcug

SEQ ID NO: 2698831 - RNA, 19 nt, Artificial Sequence
  Description of Artificial Sequence: Synthetic oligonucleotide
cucuccgugugguuacuuc

SEQ ID NO: 2698832 - RNA, 19 nt, Artificial Sequence
  Description of Artificial Sequence: Synthetic oligonucleotide
uaggaguagccugcugggc

SEQ ID NO: 2698833 - RNA, 19 nt, Artificial Sequence
  Description of Artificial Sequence: Synthetic oligonucleotide
guacuacaucuucccacug

SEQ ID NO: 2698834 - RNA, 19 nt, Artificial Sequence
  Description of Artificial Sequence: Synthetic oligonucleotide
uguguacauagggugcuuu

SEQ ID NO: 2698835 - RNA, 19 nt, Artificial Sequence
  Description of Artificial Sequence: Synthetic oligonucleotide
ggcugguaggaguagccug

SEQ ID NO: 2698836 - RNA, 19 nt, Artificial Sequence
  Description of Artificial Sequence: Synthetic oligonucleotide
ucguccuuuucaccagcuc

SEQ ID NO: 2698837 - RNA, 19 nt, Artificial Sequence
  Description of Artificial Sequence: Synthetic oligonucleotide
uuacuccagccaucguccu

SEQ ID NO: 2698838 - RNA, 19 nt, Artificial Sequence
  Description of Artificial Sequence: Synthetic oligonucleotide
caggcaggcuuacuccagc

SEQ ID NO: 2698839 - RNA, 19 nt, Artificial Sequence
  Description of Artificial Sequence: Synthetic oligonucleotide
augcuaagguggguuuggg

SEQ ID NO: 2698840 - RNA, 19 nt, Artificial Sequence
  Description of Artificial Sequence: Synthetic oligonucleotide
ugguaggaguagccugcug

SEQ ID NO: 2698841 - RNA, 19 nt, Artificial Sequence
  Description of Artificial Sequence: Synthetic oligonucleotide
aggcaggggaugccugccg

SEQ ID NO: 2698842 - RNA, 19 nt, Artificial Sequence
  Description of Artificial Sequence: Synthetic oligonucleotide
agggcuuucuguacuacau

SEQ ID NO: 2698843 - RNA, 19 nt, Artificial Sequence
  Description of Artificial Sequence: Synthetic oligonucleotide
gcauccgauaucucccgag

SEQ ID NO: 2698844 - RNA, 19 nt, Artificial Sequence
  Description of Artificial Sequence: Synthetic oligonucleotide
guccuuuucaccagcucca

SEQ ID NO: 2698845 - RNA, 19 nt, Artificial Sequence
  Description of Artificial Sequence: Synthetic oligonucleotide
ggggucuggcaaaugaagc

SEQ ID NO: 2698846 - RNA, 19 nt, Artificial Sequence
  Description of Artificial Sequence: Synthetic oligonucleotide
gggugcuuuauucuccaca

SEQ ID NO: 2698847 - RNA, 19 nt, Artificial Sequence
  Description of Artificial Sequence: Synthetic oligonucleotide
uccggucuuggaugucagc

SEQ ID NO: 2698848 - RNA, 19 nt, Artificial Sequence
  Description of Artificial Sequence: Synthetic oligonucleotide
accccuggugcaggcaggc

SEQ ID NO: 2698849 - RNA, 19 nt, Artificial Sequence
  Description of Artificial Sequence: Synthetic oligonucleotide
cuucccacugagcauccga

SEQ ID NO: 2698850 - RNA, 19 nt, Artificial Sequence
  Description of Artificial Sequence: Synthetic oligonucleotide
agagcuguggcugcucaau

SEQ ID NO: 2698851 - RNA, 19 nt, Artificial Sequence
  Description of Artificial Sequence: Synthetic oligonucleotide
gaguuguguuaguccugug

SEQ ID NO: 2698852 - RNA, 19 nt, Artificial Sequence
  Description of Artificial Sequence: Synthetic oligonucleotide
cuggcaaaugaagccccag

SEQ ID NO: 2698853 - RNA, 19 nt, Artificial Sequence
  Description of Artificial Sequence: Synthetic oligonucleotide
ucuucccacugagcauccg

SEQ ID NO: 2698854 - RNA, 19 nt, Artificial Sequence
  Description of Artificial Sequence: Synthetic oligonucleotide
gaaagggacaugggaaggu

SEQ ID NO: 2698855 - RNA, 19 nt, Artificial Sequence
  Description of Artificial Sequence: Synthetic oligonucleotide
cggcuugcaauguagggag

SEQ ID NO: 2698856 - RNA, 19 nt, Artificial Sequence
  Description of Artificial Sequence: Synthetic oligonucleotide
gccugcuccuauuuccucc

SEQ ID NO: 2698857 - RNA, 19 nt, Artificial Sequence
  Description of Artificial Sequence: Synthetic oligonucleotide
gguuacuuccaggcagggg

SEQ ID NO: 2698858 - RNA, 19 nt, Artificial Sequence
  Description of Artificial Sequence: Synthetic oligonucleotide
uggcugcucaaugcugcag

SEQ ID NO: 2698859 - RNA, 19 nt, Artificial Sequence
  Description of Artificial Sequence: Synthetic oligonucleotide
ggcuguguacauagggugc

SEQ ID NO: 2698860 - RNA, 19 nt, Artificial Sequence
  Description of Artificial Sequence: Synthetic oligonucleotide
gugugguuacuuccaggca

SEQ ID NO: 2698861 - RNA, 19 nt, Artificial Sequence
  Description of Artificial Sequence: Synthetic oligonucleotide
cagcuccacguguucuggg

SEQ ID NO: 2698862 - RNA, 19 nt, Artificial Sequence
  Description of Artificial Sequence: Synthetic oligonucleotide
uggagggcuuucuguacua

SEQ ID NO: 2698863 - RNA, 19 nt, Artificial Sequence
  Description of Artificial Sequence: Synthetic oligonucleotide
gcaauguagggaggagacg

SEQ ID NO: 2698864 - RNA, 19 nt, Artificial Sequence
  Description of Artificial Sequence: Synthetic oligonucleotide
agcauccgauaucucccga

SEQ ID NO: 2698865 - RNA, 19 nt, Artificial Sequence
  Description of Artificial Sequence: Synthetic oligonucleotide
ugugcuggucccggcuugc

SEQ ID NO: 2698866 - RNA, 19 nt, Artificial Sequence
  Description of Artificial Sequence: Synthetic oligonucleotide
cagcucuccgugugguuac

SEQ ID NO: 2698867 - RNA, 19 nt, Artificial Sequence
  Description of Artificial Sequence: Synthetic oligonucleotide
ggcaggggaugccugccgg

SEQ ID NO: 2698868 - RNA, 19 nt, Artificial Sequence
  Description of Artificial Sequence: Synthetic oligonucleotide
cucuccgucacccaccggu

SEQ ID NO: 2698869 - RNA, 19 nt, Artificial Sequence
  Description of Artificial Sequence: Synthetic oligonucleotide
agacggggcagcucuccgu

SEQ ID NO: 2698870 - RNA, 19 nt, Artificial Sequence
  Description of Artificial Sequence: Synthetic oligonucleotide
gggauagagcuguggcugc

SEQ ID NO: 2698871 - RNA, 19 nt, Artificial Sequence
  Description of Artificial Sequence: Synthetic oligonucleotide
gucccggcuugcaauguag

SEQ ID NO: 2698872 - RNA, 19 nt, Artificial Sequence
  Description of Artificial Sequence: Synthetic oligonucleotide
ggaccccuggugcaggcag

SEQ ID NO: 2698873 - RNA, 19 nt, Artificial Sequence
  Description of Artificial Sequence: Synthetic oligonucleotide
cuccgugugguuacuucca

SEQ ID NO: 2698874 - RNA, 19 nt, Artificial Sequence
  Description of Artificial Sequence: Synthetic oligonucleotide
ugcuggucccggcuugcaa

SEQ ID NO: 2698875 - RNA, 19 nt, Artificial Sequence
  Description of Artificial Sequence: Synthetic oligonucleotide
uagagcuguggcugcucaa

SEQ ID NO: 2698876 - RNA, 19 nt, Artificial Sequence
  Description of Artificial Sequence: Synthetic oligonucleotide
guguacauagggugcuuua

SEQ ID NO: 2698877 - RNA, 19 nt, Artificial Sequence
  Description of Artificial Sequence: Synthetic oligonucleotide
cuccgucacccaccggugc

SEQ ID NO: 2698878 - RNA, 19 nt, Artificial Sequence
  Description of Artificial Sequence: Synthetic oligonucleotide
guccccauauguacagaac

SEQ ID NO: 2698879 - RNA, 19 nt, Artificial Sequence
  Description of Artificial Sequence: Synthetic oligonucleotide
ucccacugagcauccgaua

SEQ ID NO: 2698880 - RNA, 19 nt, Artificial Sequence
  Description of Artificial Sequence: Synthetic oligonucleotide
cccggcuugcaauguaggg

SEQ ID NO: 2698881 - RNA, 19 nt, Artificial Sequence
  Description of Artificial Sequence: Synthetic oligonucleotide
gauacaugcuaaggugggu

SEQ ID NO: 2698882 - RNA, 19 nt, Artificial Sequence
  Description of Artificial Sequence: Synthetic oligonucleotide
gggaagguggguguuaaaa

SEQ ID NO: 2698883 - RNA, 19 nt, Artificial Sequence
  Description of Artificial Sequence: Synthetic oligonucleotide
uccacguguucugggucca

SEQ ID NO: 2698884 - RNA, 19 nt, Artificial Sequence
  Description of Artificial Sequence: Synthetic oligonucleotide
uacuccagccaucguccuu

SEQ ID NO: 2698885 - RNA, 19 nt, Artificial Sequence
  Description of Artificial Sequence: Synthetic oligonucleotide
cuuccaggcaggggaugcc

SEQ ID NO: 2698886 - RNA, 19 nt, Artificial Sequence
  Description of Artificial Sequence: Synthetic oligonucleotide
gugcuuuauucuccacaga

SEQ ID NO: 2698887 - RNA, 19 nt, Artificial Sequence
  Description of Artificial Sequence: Synthetic oligonucleotide
caggggaugccugccgggc

SEQ ID NO: 2698888 - RNA, 19 nt, Artificial Sequence
  Description of Artificial Sequence: Synthetic oligonucleotide
uggaugucagcagcuccau

SEQ ID NO: 2698889 - RNA, 19 nt, Artificial Sequence
  Description of Artificial Sequence: Synthetic oligonucleotide
cugugcuggucccggcuug

SEQ ID NO: 2698890 - RNA, 19 nt, Artificial Sequence
  Description of Artificial Sequence: Synthetic oligonucleotide
guccauggggauagagcug

SEQ ID NO: 2698891 - RNA, 19 nt, Artificial Sequence
  Description of Artificial Sequence: Synthetic oligonucleotide
cucccgagcccaggcaggg

SEQ ID NO: 2698892 - RNA, 19 nt, Artificial Sequence
  Description of Artificial Sequence: Synthetic oligonucleotide
guacauagggugcuuuauu

SEQ ID NO: 2698893 - RNA, 19 nt, Artificial Sequence
  Description of Artificial Sequence: Synthetic oligonucleotide
aucguccuuuucaccagcu

SEQ ID NO: 2698894 - RNA, 19 nt, Artificial Sequence
  Description of Artificial Sequence: Synthetic oligonucleotide
uucuggguccauggggaua

SEQ ID NO: 2698895 - RNA, 19 nt, Artificial Sequence
  Description of Artificial Sequence: Synthetic oligonucleotide
ccagaguuguguuaguccu

SEQ ID NO: 2698896 - RNA, 19 nt, Artificial Sequence
  Description of Artificial Sequence: Synthetic oligonucleotide
gcuugcaauguagggagga

SEQ ID NO: 2698897 - RNA, 19 nt, Artificial Sequence
  Description of Artificial Sequence: Synthetic oligonucleotide
ccgugugguuacuuccagg

SEQ ID NO: 2698898 - RNA, 19 nt, Artificial Sequence
  Description of Artificial Sequence: Synthetic oligonucleotide
aagguggguuugggcucgg

SEQ ID NO: 2698899 - RNA, 19 nt, Artificial Sequence
  Description of Artificial Sequence: Synthetic oligonucleotide
cugggccugcuccuauuuc

SEQ ID NO: 2698900 - RNA, 19 nt, Artificial Sequence
  Description of Artificial Sequence: Synthetic oligonucleotide
cuauuuccuccugcucuuc

SEQ ID NO: 2698901 - RNA, 19 nt, Artificial Sequence
  Description of Artificial Sequence: Synthetic oligonucleotide
ugaagccccagggccugga

SEQ ID NO: 2698902 - RNA, 19 nt, Artificial Sequence
  Description of Artificial Sequence: Synthetic oligonucleotide
auccggucuuggaugucag

SEQ ID NO: 2698903 - RNA, 19 nt, Artificial Sequence
  Description of Artificial Sequence: Synthetic oligonucleotide
gcaggggaugccugccggg

SEQ ID NO: 2698904 - RNA, 19 nt, Artificial Sequence
  Description of Artificial Sequence: Synthetic oligonucleotide
gucagcagcuccauccucu

SEQ ID NO: 2698905 - RNA, 19 nt, Artificial Sequence
  Description of Artificial Sequence: Synthetic oligonucleotide
ggccaauguccccauaugu

SEQ ID NO: 2698906 - RNA, 19 nt, Artificial Sequence
  Description of Artificial Sequence: Synthetic oligonucleotide
uccagccaucguccuuuuc

SEQ ID NO: 2698907 - RNA, 19 nt, Artificial Sequence
  Description of Artificial Sequence: Synthetic oligonucleotide
guggcugcucaaugcugca

SEQ ID NO: 2698908 - RNA, 19 nt, Artificial Sequence
  Description of Artificial Sequence: Synthetic oligonucleotide
guuugggcucgggccaaug

SEQ ID NO: 2698909 - RNA, 19 nt, Artificial Sequence
  Description of Artificial Sequence: Synthetic oligonucleotide
caccggugccagcuccacc

SEQ ID NO: 2698910 - RNA, 19 nt, Artificial Sequence
  Description of Artificial Sequence: Synthetic oligonucleotide
ggcaggcuuacuccagcca

SEQ ID NO: 2698911 - RNA, 19 nt, Artificial Sequence
  Description of Artificial Sequence: Synthetic oligonucleotide
gguggguguuaaaaccaga

SEQ ID NO: 2698912 - RNA, 19 nt, Artificial Sequence
  Description of Artificial Sequence: Synthetic oligonucleotide
augaagccccagggccugg

SEQ ID NO: 2698913 - RNA, 19 nt, Artificial Sequence
  Description of Artificial Sequence: Synthetic oligonucleotide
cggucuuggaugucagcag

SEQ ID NO: 2698914 - RNA, 19 nt, Artificial Sequence
  Description of Artificial Sequence: Synthetic oligonucleotide
ggagacggggcagcucucc

SEQ ID NO: 2698915 - RNA, 19 nt, Artificial Sequence
  Description of Artificial Sequence: Synthetic oligonucleotide
uggucccggcuugcaaugu

SEQ ID NO: 2698916 - RNA, 19 nt, Artificial Sequence
  Description of Artificial Sequence: Synthetic oligonucleotide
cagcucccuccucaucuuc

SEQ ID NO: 2698917 - RNA, 19 nt, Artificial Sequence
  Description of Artificial Sequence: Synthetic oligonucleotide
acaugggaagguggguguu

SEQ ID NO: 2698918 - RNA, 19 nt, Artificial Sequence
  Description of Artificial Sequence: Synthetic oligonucleotide
gcuccacguguucuggguc

SEQ ID NO: 2698919 - RNA, 19 nt, Artificial Sequence
  Description of Artificial Sequence: Synthetic oligonucleotide
ccagcuccacguguucugg

SEQ ID NO: 2698920 - RNA, 19 nt, Artificial Sequence
  Description of Artificial Sequence: Synthetic oligonucleotide
ugcugggccugcuccuauu

SEQ ID NO: 2698921 - RNA, 19 nt, Artificial Sequence
  Description of Artificial Sequence: Synthetic oligonucleotide
gucuuggaugucagcagcu

SEQ ID NO: 2698922 - RNA, 19 nt, Artificial Sequence
  Description of Artificial Sequence: Synthetic oligonucleotide
ggcuuggagggcuuucugu

SEQ ID NO: 2698923 - RNA, 19 nt, Artificial Sequence
  Description of Artificial Sequence: Synthetic oligonucleotide
ccacugagcauccgauauc

SEQ ID NO: 2698924 - RNA, 19 nt, Artificial Sequence
  Description of Artificial Sequence: Synthetic oligonucleotide
ggcagggaccccuggugca

SEQ ID NO: 2698925 - RNA, 19 nt, Artificial Sequence
  Description of Artificial Sequence: Synthetic oligonucleotide
ggaguagccugcugggccu

SEQ ID NO: 2698926 - RNA, 19 nt, Artificial Sequence
  Description of Artificial Sequence: Synthetic oligonucleotide
cccgagcccaggcagggac

SEQ ID NO: 2698927 - RNA, 19 nt, Artificial Sequence
  Description of Artificial Sequence: Synthetic oligonucleotide
ggaugucagcagcuccauc

SEQ ID NO: 2698928 - RNA, 19 nt, Artificial Sequence
  Description of Artificial Sequence: Synthetic oligonucleotide
gcaggcaggcuuacuccag

SEQ ID NO: 2698929 - RNA, 19 nt, Artificial Sequence
  Description of Artificial Sequence: Synthetic oligonucleotide
aggagacggggcagcucuc

SEQ ID NO: 2698930 - RNA, 19 nt, Artificial Sequence
  Description of Artificial Sequence: Synthetic oligonucleotide
gucacccaccggugccagc

SEQ ID NO: 2698931 - RNA, 19 nt, Artificial Sequence
  Description of Artificial Sequence: Synthetic oligonucleotide
guguuaguccugugcuggu

SEQ ID NO: 2698932 - RNA, 19 nt, Artificial Sequence
  Description of Artificial Sequence: Synthetic oligonucleotide
ggagggcuuucuguacuac

SEQ ID NO: 2698933 - RNA, 19 nt, Artificial Sequence
  Description of Artificial Sequence: Synthetic oligonucleotide
uggugcaggcaggcuuacu

SEQ ID NO: 2698934 - RNA, 19 nt, Artificial Sequence
  Description of Artificial Sequence: Synthetic oligonucleotide
gaugccugccgggcuugga

SEQ ID NO: 2698935 - RNA, 19 nt, Artificial Sequence
  Description of Artificial Sequence: Synthetic oligonucleotide
ccggcuugcaauguaggga

SEQ ID NO: 2698936 - RNA, 19 nt, Artificial Sequence
  Description of Artificial Sequence: Synthetic oligonucleotide
cugcagcucccuccucauc

SEQ ID NO: 2698937 - RNA, 19 nt, Artificial Sequence
  Description of Artificial Sequence: Synthetic oligonucleotide
gcucaaugcugcagcuccc

SEQ ID NO: 2698938 - RNA, 19 nt, Artificial Sequence
  Description of Artificial Sequence: Synthetic oligonucleotide
gcuuuauucuccacagaau

SEQ ID NO: 2698939 - RNA, 19 nt, Artificial Sequence
  Description of Artificial Sequence: Synthetic oligonucleotide
gagucugauuugccuugau

SEQ ID NO: 2698940 - RNA, 19 nt, Artificial Sequence
  Description of Artificial Sequence: Synthetic oligonucleotide
caugggaagguggguguua

SEQ ID NO: 2698941 - RNA, 19 nt, Artificial Sequence
  Description of Artificial Sequence: Synthetic oligonucleotide
gcuguguacauagggugcu

SEQ ID NO: 2698942 - RNA, 19 nt, Artificial Sequence
  Description of Artificial Sequence: Synthetic oligonucleotide
cucaaugcugcagcucccu

SEQ ID NO: 2698943 - RNA, 19 nt, Artificial Sequence
  Description of Artificial Sequence: Synthetic oligonucleotide
cuggugcaggcaggcuuac

SEQ ID NO: 2698944 - RNA, 19 nt, Artificial Sequence
  Description of Artificial Sequence: Synthetic oligonucleotide
ccgauaucucccgagccca

SEQ ID NO: 2698945 - RNA, 19 nt, Artificial Sequence
  Description of Artificial Sequence: Synthetic oligonucleotide
ggcucgggccaaugucccc

SEQ ID NO: 2698946 - RNA, 19 nt, Artificial Sequence
  Description of Artificial Sequence: Synthetic oligonucleotide
ucgggccaauguccccaua

SEQ ID NO: 2698947 - RNA, 19 nt, Artificial Sequence
  Description of Artificial Sequence: Synthetic oligonucleotide
agcucuccgugugguuacu

SEQ ID NO: 2698948 - RNA, 19 nt, Artificial Sequence
  Description of Artificial Sequence: Synthetic oligonucleotide
ccgagcccaggcagggacc

SEQ ID NO: 2698949 - RNA, 19 nt, Artificial Sequence
  Description of Artificial Sequence: Synthetic oligonucleotide
ucccgagcccaggcaggga

SEQ ID NO: 2698950 - RNA, 19 nt, Artificial Sequence
  Description of Artificial Sequence: Synthetic oligonucleotide
gcuggucccggcuugcaau

SEQ ID NO: 2698951 - RNA, 19 nt, Artificial Sequence
  Description of Artificial Sequence: Synthetic oligonucleotide
cgauaucucccgagcccag

SEQ ID NO: 2698952 - RNA, 19 nt, Artificial Sequence
  Description of Artificial Sequence: Synthetic oligonucleotide
gagcccaggcagggacccc

SEQ ID NO: 2698953 - RNA, 19 nt, Artificial Sequence
  Description of Artificial Sequence: Synthetic oligonucleotide
gccuggauccggucuugga

SEQ ID NO: 2698954 - RNA, 19 nt, Artificial Sequence
  Description of Artificial Sequence: Synthetic oligonucleotide
cccacugagcauccgauau

SEQ ID NO: 2698955 - RNA, 19 nt, Artificial Sequence
  Description of Artificial Sequence: Synthetic oligonucleotide
ggaugccugccgggcuugg

SEQ ID NO: 2698956 - RNA, 19 nt, Artificial Sequence
  Description of Artificial Sequence: Synthetic oligonucleotide
ccuggauccggucuuggau

SEQ ID NO: 2698957 - RNA, 19 nt, Artificial Sequence
  Description of Artificial Sequence: Synthetic oligonucleotide
cacccaccggugccagcuc

SEQ ID NO: 2698958 - RNA, 19 nt, Artificial Sequence
  Description of Artificial Sequence: Synthetic oligonucleotide
ugccgggcuuggagggcuu

SEQ ID NO: 2698959 - RNA, 19 nt, Artificial Sequence
  Description of Artificial Sequence: Synthetic oligonucleotide
ggucccggcuugcaaugua

SEQ ID NO: 2698960 - RNA, 19 nt, Artificial Sequence
  Description of Artificial Sequence: Synthetic oligonucleotide
ggaggagacggggcagcuc

SEQ ID NO: 2698961 - RNA, 19 nt, Artificial Sequence
  Description of Artificial Sequence: Synthetic oligonucleotide
gggaugccugccgggcuug

SEQ ID NO: 2698962 - RNA, 19 nt, Artificial Sequence
  Description of Artificial Sequence: Synthetic oligonucleotide
cgagcccaggcagggaccc

SEQ ID NO: 2698963 - RNA, 19 nt, Artificial Sequence
  Description of Artificial Sequence: Synthetic oligonucleotide
cugguaggaguagccugcu

SEQ ID NO: 2698964 - RNA, 19 nt, Artificial Sequence
  Description of Artificial Sequence: Synthetic oligonucleotide
ggauagagcuguggcugcu

SEQ ID NO: 2698965 - RNA, 19 nt, Artificial Sequence
  Description of Artificial Sequence: Synthetic oligonucleotide
gggucucugagagucugau

SEQ ID NO: 2698966 - RNA, 19 nt, Artificial Sequence
  Description of Artificial Sequence: Synthetic oligonucleotide
gugcuggucccggcuugca

SEQ ID NO: 2698967 - RNA, 19 nt, Artificial Sequence
  Description of Artificial Sequence: Synthetic oligonucleotide
ggucucugagagucugauu

SEQ ID NO: 2698968 - RNA, 19 nt, Artificial Sequence
  Description of Artificial Sequence: Synthetic oligonucleotide
gggucuugauugaggggcu

SEQ ID NO: 2698969 - RNA, 19 nt, Artificial Sequence
  Description of Artificial Sequence: Synthetic oligonucleotide
ccugccgggcuuggagggc

SEQ ID NO: 2698970 - RNA, 19 nt, Artificial Sequence
  Description of Artificial Sequence: Synthetic oligonucleotide
ggauccggucuuggauguc

SEQ ID NO: 2698971 - RNA, 19 nt, Artificial Sequence
  Description of Artificial Sequence: Synthetic oligonucleotide
gggccugcuccuauuuccu

SEQ ID NO: 2698972 - RNA, 19 nt, Artificial Sequence
  Description of Artificial Sequence: Synthetic oligonucleotide
cugccgggcuuggagggcu

SEQ ID NO: 2698973 - RNA, 19 nt, Artificial Sequence
  Description of Artificial Sequence: Synthetic oligonucleotide
ggggaugccugccgggcuu

SEQ ID NO: 2698974 - RNA, 19 nt, Artificial Sequence
  Description of Artificial Sequence: Synthetic oligonucleotide
cccaccggugccagcucca

SEQ ID NO: 2698975 - RNA, 19 nt, Artificial Sequence
  Description of Artificial Sequence: Synthetic oligonucleotide
cuguguacauagggugcuu

SEQ ID NO: 2698976 - RNA, 19 nt, Artificial Sequence
  Description of Artificial Sequence: Synthetic oligonucleotide
ggcuuacuccagccaucgu

SEQ ID NO: 2698977 - RNA, 19 nt, Artificial Sequence
  Description of Artificial Sequence: Synthetic oligonucleotide
gggaccccuggugcaggca

SEQ ID NO: 2698978 - RNA, 19 nt, Artificial Sequence
  Description of Artificial Sequence: Synthetic oligonucleotide
ggugccagcuccaccucuu

SEQ ID NO: 2698979 - RNA, 19 nt, Artificial Sequence
  Description of Artificial Sequence: Synthetic oligonucleotide
ccggugccagcuccaccuc

SEQ ID NO: 2698980 - RNA, 19 nt, Artificial Sequence
  Description of Artificial Sequence: Synthetic oligonucleotide
cuggguccauggggauaga

SEQ ID NO: 2698981 - RNA, 19 nt, Artificial Sequence
  Description of Artificial Sequence: Synthetic oligonucleotide
cgucacccaccggugccag

SEQ ID NO: 2698982 - RNA, 19 nt, Artificial Sequence
  Description of Artificial Sequence: Synthetic oligonucleotide
cgggccaauguccccauau

SEQ ID NO: 2698983 - RNA, 19 nt, Artificial Sequence
  Description of Artificial Sequence: Synthetic oligonucleotide
ccgucacccaccggugcca

SEQ ID NO: 2698984 - RNA, 19 nt, Artificial Sequence
  Description of Artificial Sequence: Synthetic oligonucleotide
ggcagcucuccgugugguu

SEQ ID NO: 2698985 - RNA, 19 nt, Artificial Sequence
  Description of Artificial Sequence: Synthetic oligonucleotide
gguuugggcucgggccaau

SEQ ID NO: 2698986 - RNA, 19 nt, Artificial Sequence
  Description of Artificial Sequence: Synthetic oligonucleotide
gcucuccgugugguuacuu

SEQ ID NO: 2698987 - RNA, 19 nt, Artificial Sequence
  Description of Artificial Sequence: Synthetic oligonucleotide
cggugccagcuccaccucu

SEQ ID NO: 2698988 - RNA, 19 nt, Artificial Sequence
  Description of Artificial Sequence: Synthetic oligonucleotide
aaauguaacacacaggacg

SEQ ID NO: 2698989 - RNA, 19 nt, Artificial Sequence
  Description of Artificial Sequence: Synthetic oligonucleotide
aaguacaccauccagucag

SEQ ID NO: 2698990 - RNA, 19 nt, Artificial Sequence
  Description of Artificial Sequence: Synthetic oligonucleotide
uccaccuucuuucugaugg

SEQ ID NO: 2698991 - RNA, 19 nt, Artificial Sequence
  Description of Artificial Sequence: Synthetic oligonucleotide
acagaaauguaacacacag

SEQ ID NO: 2698992 - RNA, 19 nt, Artificial Sequence
  Description of Artificial Sequence: Synthetic oligonucleotide
uuuguaaccugccucacag

SEQ ID NO: 2698993 - RNA, 19 nt, Artificial Sequence
  Description of Artificial Sequence: Synthetic oligonucleotide
aauguuggucucuuucagc

SEQ ID NO: 2698994 - RNA, 19 nt, Artificial Sequence
  Description of Artificial Sequence: Synthetic oligonucleotide
aaggacaaaggacagauaa

SEQ ID NO: 2698995 - RNA, 19 nt, Artificial Sequence
  Description of Artificial Sequence: Synthetic oligonucleotide
gaggguuuaauccagggcc

SEQ ID NO: 2698996 - RNA, 19 nt, Artificial Sequence
  Description of Artificial Sequence: Synthetic oligonucleotide
ucagcaaggaauaaaggac

SEQ ID NO: 2698997 - RNA, 19 nt, Artificial Sequence
  Description of Artificial Sequence: Synthetic oligonucleotide
auuggcguuggcuaagugc

SEQ ID NO: 2698998 - RNA, 19 nt, Artificial Sequence
  Description of Artificial Sequence: Synthetic oligonucleotide
cuuucagcaaggaauaaag

SEQ ID NO: 2698999 - RNA, 19 nt, Artificial Sequence
  Description of Artificial Sequence: Synthetic oligonucleotide
aggaauaaaggacaaagga

SEQ ID NO: 2699000 - RNA, 19 nt, Artificial Sequence
  Description of Artificial Sequence: Synthetic oligonucleotide
gaauaaaggacaaaggaca

SEQ ID NO: 2699001 - RNA, 19 nt, Artificial Sequence
  Description of Artificial Sequence: Synthetic oligonucleotide
uuuucaugcaacagcaucu

SEQ ID NO: 2699002 - RNA, 19 nt, Artificial Sequence
  Description of Artificial Sequence: Synthetic oligonucleotide
aggcauauuaggcaaugcc

SEQ ID NO: 2699003 - RNA, 19 nt, Artificial Sequence
  Description of Artificial Sequence: Synthetic oligonucleotide
aagugcaugacacuuuugu

SEQ ID NO: 2699004 - RNA, 19 nt, Artificial Sequence
  Description of Artificial Sequence: Synthetic oligonucleotide
uuuuguauguguccccggg

SEQ ID NO: 2699005 - RNA, 19 nt, Artificial Sequence
  Description of Artificial Sequence: Synthetic oligonucleotide
aaauguuggucucuuucag

SEQ ID NO: 2699006 - RNA, 19 nt, Artificial Sequence
  Description of Artificial Sequence: Synthetic oligonucleotide
acugaguuggcuaaacugc

SEQ ID NO: 2699007 - RNA, 19 nt, Artificial Sequence
  Description of Artificial Sequence: Synthetic oligonucleotide
ucaugcaacagcaucuuug

SEQ ID NO: 2699008 - RNA, 19 nt, Artificial Sequence
  Description of Artificial Sequence: Synthetic oligonucleotide
uuaaacuucucagacacac

SEQ ID NO: 2699009 - RNA, 19 nt, Artificial Sequence
  Description of Artificial Sequence: Synthetic oligonucleotide
uuucagcaaggaauaaagg

SEQ ID NO: 2699010 - RNA, 19 nt, Artificial Sequence
  Description of Artificial Sequence: Synthetic oligonucleotide
uucggagacuccaagaaga

SEQ ID NO: 2699011 - RNA, 19 nt, Artificial Sequence
  Description of Artificial Sequence: Synthetic oligonucleotide
gguacugaggguuuaaucc

SEQ ID NO: 2699012 - RNA, 19 nt, Artificial Sequence
  Description of Artificial Sequence: Synthetic oligonucleotide
aaggaauaaaggacaaagg

SEQ ID NO: 2699013 - RNA, 19 nt, Artificial Sequence
  Description of Artificial Sequence: Synthetic oligonucleotide
aucucagcaauucuucaac

SEQ ID NO: 2699014 - RNA, 19 nt, Artificial Sequence
  Description of Artificial Sequence: Synthetic oligonucleotide
aauucuucaacuucuucuu

SEQ ID NO: 2699015 - RNA, 19 nt, Artificial Sequence
  Description of Artificial Sequence: Synthetic oligonucleotide
aauaaaggacaaaggacag

SEQ ID NO: 2699016 - RNA, 19 nt, Artificial Sequence
  Description of Artificial Sequence: Synthetic oligonucleotide
guugacaauguucuugucc

SEQ ID NO: 2699017 - RNA, 19 nt, Artificial Sequence
  Description of Artificial Sequence: Synthetic oligonucleotide
uuggcguuggcuaagugca

SEQ ID NO: 2699018 - RNA, 19 nt, Artificial Sequence
  Description of Artificial Sequence: Synthetic oligonucleotide
aauuguccgcacgagcacc

SEQ ID NO: 2699019 - RNA, 19 nt, Artificial Sequence
  Description of Artificial Sequence: Synthetic oligonucleotide
gacugaguuggcuaaacug

SEQ ID NO: 2699020 - RNA, 19 nt, Artificial Sequence
  Description of Artificial Sequence: Synthetic oligonucleotide
aaugcccuaccacagagau

SEQ ID NO: 2699021 - RNA, 19 nt, Artificial Sequence
  Description of Artificial Sequence: Synthetic oligonucleotide
cuuucuuggagguacugag

SEQ ID NO: 2699022 - RNA, 19 nt, Artificial Sequence
  Description of Artificial Sequence: Synthetic oligonucleotide
ugcccuaccacagagaugu

SEQ ID NO: 2699023 - RNA, 19 nt, Artificial Sequence
  Description of Artificial Sequence: Synthetic oligonucleotide
acagagauguguccugagc

SEQ ID NO: 2699024 - RNA, 19 nt, Artificial Sequence
  Description of Artificial Sequence: Synthetic oligonucleotide
acagauggccaauuguccg

SEQ ID NO: 2699025 - RNA, 19 nt, Artificial Sequence
  Description of Artificial Sequence: Synthetic oligonucleotide
ugaggacacaaucugcuug

SEQ ID NO: 2699026 - RNA, 19 nt, Artificial Sequence
  Description of Artificial Sequence: Synthetic oligonucleotide
gacagauaaagccuguuga

SEQ ID NO: 2699027 - RNA, 19 nt, Artificial Sequence
  Description of Artificial Sequence: Synthetic oligonucleotide
uuaauccagggccucaggc

SEQ ID NO: 2699028 - RNA, 19 nt, Artificial Sequence
  Description of Artificial Sequence: Synthetic oligonucleotide
ugauggcuugcccugaugc

SEQ ID NO: 2699029 - RNA, 19 nt, Artificial Sequence
  Description of Artificial Sequence: Synthetic oligonucleotide
ucagcaauucuucaacuuc

SEQ ID NO: 2699030 - RNA, 19 nt, Artificial Sequence
  Description of Artificial Sequence: Synthetic oligonucleotide
aagagcagccacauuuugc

SEQ ID NO: 2699031 - RNA, 19 nt, Artificial Sequence
  Description of Artificial Sequence: Synthetic oligonucleotide
uuuguauguguccccgggg

SEQ ID NO: 2699032 - RNA, 19 nt, Artificial Sequence
  Description of Artificial Sequence: Synthetic oligonucleotide
aauguaacacacaggacga

SEQ ID NO: 2699033 - RNA, 19 nt, Artificial Sequence
  Description of Artificial Sequence: Synthetic oligonucleotide
uaaccugccucacagaaau

SEQ ID NO: 2699034 - RNA, 19 nt, Artificial Sequence
  Description of Artificial Sequence: Synthetic oligonucleotide
uguaaccugccucacagaa

SEQ ID NO: 2699035 - RNA, 19 nt, Artificial Sequence
  Description of Artificial Sequence: Synthetic oligonucleotide
acuuuuguaaccugccuca

SEQ ID NO: 2699036 - RNA, 19 nt, Artificial Sequence
  Description of Artificial Sequence: Synthetic oligonucleotide
agagauguguccugagcac

SEQ ID NO: 2699037 - RNA, 19 nt, Artificial Sequence
  Description of Artificial Sequence: Synthetic oligonucleotide
ugaaguacaccauccaguc

SEQ ID NO: 2699038 - RNA, 19 nt, Artificial Sequence
  Description of Artificial Sequence: Synthetic oligonucleotide
caugcaacagcaucuuugc

SEQ ID NO: 2699039 - RNA, 19 nt, Artificial Sequence
  Description of Artificial Sequence: Synthetic oligonucleotide
agauaaagccuguugacaa

SEQ ID NO: 2699040 - RNA, 19 nt, Artificial Sequence
  Description of Artificial Sequence: Synthetic oligonucleotide
ugacacuuuuguaaccugc

SEQ ID NO: 2699041 - RNA, 19 nt, Artificial Sequence
  Description of Artificial Sequence: Synthetic oligonucleotide
aaaggacagauaaagccug

SEQ ID NO: 2699042 - RNA, 19 nt, Artificial Sequence
  Description of Artificial Sequence: Synthetic oligonucleotide
cacaggacgagaaggaggc

SEQ ID NO: 2699043 - RNA, 19 nt, Artificial Sequence
  Description of Artificial Sequence: Synthetic oligonucleotide
uuucggagacuccaagaag

SEQ ID NO: 2699044 - RNA, 19 nt, Artificial Sequence
  Description of Artificial Sequence: Synthetic oligonucleotide
aacuucucagacacacucc

SEQ ID NO: 2699045 - RNA, 19 nt, Artificial Sequence
  Description of Artificial Sequence: Synthetic oligonucleotide
ugcaugacacuuuuguaac

SEQ ID NO: 2699046 - RNA, 19 nt, Artificial Sequence
  Description of Artificial Sequence: Synthetic oligonucleotide
aaucucagcaauucuucaa

SEQ ID NO: 2699047 - RNA, 19 nt, Artificial Sequence
  Description of Artificial Sequence: Synthetic oligonucleotide
uuguauguguccccggggc

SEQ ID NO: 2699048 - RNA, 19 nt, Artificial Sequence
  Description of Artificial Sequence: Synthetic oligonucleotide
auguuggucucuuucagca

SEQ ID NO: 2699049 - RNA, 19 nt, Artificial Sequence
  Description of Artificial Sequence: Synthetic oligonucleotide
uuuaauccagggccucagg

SEQ ID NO: 2699050 - RNA, 19 nt, Artificial Sequence
  Description of Artificial Sequence: Synthetic oligonucleotide
uauuaggcaaugcccuacc

SEQ ID NO: 2699051 - RNA, 19 nt, Artificial Sequence
  Description of Artificial Sequence: Synthetic oligonucleotide
uuaggcaaugcccuaccac

SEQ ID NO: 2699052 - RNA, 19 nt, Artificial Sequence
  Description of Artificial Sequence: Synthetic oligonucleotide
uccagucaggcucagucug

SEQ ID NO: 2699053 - RNA, 19 nt, Artificial Sequence
  Description of Artificial Sequence: Synthetic oligonucleotide
cucuucaguguuaggaccc

SEQ ID NO: 2699054 - RNA, 19 nt, Artificial Sequence
  Description of Artificial Sequence: Synthetic oligonucleotide
ggacaaaggacagauaaag

SEQ ID NO: 2699055 - RNA, 19 nt, Artificial Sequence
  Description of Artificial Sequence: Synthetic oligonucleotide
auauuaggcaaugcccuac

SEQ ID NO: 2699056 - RNA, 19 nt, Artificial Sequence
  Description of Artificial Sequence: Synthetic oligonucleotide
uuggucucuuucagcaagg

SEQ ID NO: 2699057 - RNA, 19 nt, Artificial Sequence
  Description of Artificial Sequence: Synthetic oligonucleotide
ucuggauuggcguuggcua

SEQ ID NO: 2699058 - RNA, 19 nt, Artificial Sequence
  Description of Artificial Sequence: Synthetic oligonucleotide
uuucugauggcuugcccug

SEQ ID NO: 2699059 - RNA, 19 nt, Artificial Sequence
  Description of Artificial Sequence: Synthetic oligonucleotide
ucagucugagcaacaaggu

SEQ ID NO: 2699060 - RNA, 19 nt, Artificial Sequence
  Description of Artificial Sequence: Synthetic oligonucleotide
uacugaggguuuaauccag

SEQ ID NO: 2699061 - RNA, 19 nt, Artificial Sequence
  Description of Artificial Sequence: Synthetic oligonucleotide
agguuuuguaugugucccc

SEQ ID NO: 2699062 - RNA, 19 nt, Artificial Sequence
  Description of Artificial Sequence: Synthetic oligonucleotide
acuucucagacacacucca

SEQ ID NO: 2699063 - RNA, 19 nt, Artificial Sequence
  Description of Artificial Sequence: Synthetic oligonucleotide
ggaauaaaggacaaaggac

SEQ ID NO: 2699064 - RNA, 19 nt, Artificial Sequence
  Description of Artificial Sequence: Synthetic oligonucleotide
cugaguuggcuaaacugcc

SEQ ID NO: 2699065 - RNA, 19 nt, Artificial Sequence
  Description of Artificial Sequence: Synthetic oligonucleotide
uuuuguaaccugccucaca

SEQ ID NO: 2699066 - RNA, 19 nt, Artificial Sequence
  Description of Artificial Sequence: Synthetic oligonucleotide
uggacagauggccaauugu

SEQ ID NO: 2699067 - RNA, 19 nt, Artificial Sequence
  Description of Artificial Sequence: Synthetic oligonucleotide
gacaaaggacagauaaagc

SEQ ID NO: 2699068 - RNA, 19 nt, Artificial Sequence
  Description of Artificial Sequence: Synthetic oligonucleotide
uguaacacacaggacgaga

SEQ ID NO: 2699069 - RNA, 19 nt, Artificial Sequence
  Description of Artificial Sequence: Synthetic oligonucleotide
agcagccacauuuugcucu

SEQ ID NO: 2699070 - RNA, 19 nt, Artificial Sequence
  Description of Artificial Sequence: Synthetic oligonucleotide
ugccucuucaguguuagga

SEQ ID NO: 2699071 - RNA, 19 nt, Artificial Sequence
  Description of Artificial Sequence: Synthetic oligonucleotide
cugaggguuuaauccaggg

SEQ ID NO: 2699072 - RNA, 19 nt, Artificial Sequence
  Description of Artificial Sequence: Synthetic oligonucleotide
auaaagccuguugacaaug

SEQ ID NO: 2699073 - RNA, 19 nt, Artificial Sequence
  Description of Artificial Sequence: Synthetic oligonucleotide
gacacuuuuguaaccugcc

SEQ ID NO: 2699074 - RNA, 19 nt, Artificial Sequence
  Description of Artificial Sequence: Synthetic oligonucleotide
ucggagacuccaagaagag

SEQ ID NO: 2699075 - RNA, 19 nt, Artificial Sequence
  Description of Artificial Sequence: Synthetic oligonucleotide
ucuuucugauggcuugccc

SEQ ID NO: 2699076 - RNA, 19 nt, Artificial Sequence
  Description of Artificial Sequence: Synthetic oligonucleotide
gacagauggccaauugucc

SEQ ID NO: 2699077 - RNA, 19 nt, Artificial Sequence
  Description of Artificial Sequence: Synthetic oligonucleotide
gacuccaagaagagcagcc

SEQ ID NO: 2699078 - RNA, 19 nt, Artificial Sequence
  Description of Artificial Sequence: Synthetic oligonucleotide
gaagcuuucggagacucca

SEQ ID NO: 2699079 - RNA, 19 nt, Artificial Sequence
  Description of Artificial Sequence: Synthetic oligonucleotide
caauucuucaacuucuucu

SEQ ID NO: 2699080 - RNA, 19 nt, Artificial Sequence
  Description of Artificial Sequence: Synthetic oligonucleotide
ccacauuuugcucugcugg

SEQ ID NO: 2699081 - RNA, 19 nt, Artificial Sequence
  Description of Artificial Sequence: Synthetic oligonucleotide
cagguuuuguauguguccc

SEQ ID NO: 2699082 - RNA, 19 nt, Artificial Sequence
  Description of Artificial Sequence: Synthetic oligonucleotide
ugcccugaugccuucuucc

SEQ ID NO: 2699083 - RNA, 19 nt, Artificial Sequence
  Description of Artificial Sequence: Synthetic oligonucleotide
aaacugccugaaguacacc

SEQ ID NO: 2699084 - RNA, 19 nt, Artificial Sequence
  Description of Artificial Sequence: Synthetic oligonucleotide
gaagagcagccacauuuug

SEQ ID NO: 2699085 - RNA, 19 nt, Artificial Sequence
  Description of Artificial Sequence: Synthetic oligonucleotide
ucucagcaauucuucaacu

SEQ ID NO: 2699086 - RNA, 19 nt, Artificial Sequence
  Description of Artificial Sequence: Synthetic oligonucleotide
uaaagccuguugacaaugu

SEQ ID NO: 2699087 - RNA, 19 nt, Artificial Sequence
  Description of Artificial Sequence: Synthetic oligonucleotide
cucagacacacuccaaaug

SEQ ID NO: 2699088 - RNA, 19 nt, Artificial Sequence
  Description of Artificial Sequence: Synthetic oligonucleotide
ggcauauuaggcaaugccc

SEQ ID NO: 2699089 - RNA, 19 nt, Artificial Sequence
  Description of Artificial Sequence: Synthetic oligonucleotide
acacuccaaauguuggucu

SEQ ID NO: 2699090 - RNA, 19 nt, Artificial Sequence
  Description of Artificial Sequence: Synthetic oligonucleotide
uguauguguccccggggca

SEQ ID NO: 2699091 - RNA, 19 nt, Artificial Sequence
  Description of Artificial Sequence: Synthetic oligonucleotide
ucuuucuuggagguacuga

SEQ ID NO: 2699092 - RNA, 19 nt, Artificial Sequence
  Description of Artificial Sequence: Synthetic oligonucleotide
auggccaauuguccgcacg

SEQ ID NO: 2699093 - RNA, 19 nt, Artificial Sequence
  Description of Artificial Sequence: Synthetic oligonucleotide
augaagcuuucggagacuc

SEQ ID NO: 2699094 - RNA, 19 nt, Artificial Sequence
  Description of Artificial Sequence: Synthetic oligonucleotide
guuuuguauguguccccgg

SEQ ID NO: 2699095 - RNA, 19 nt, Artificial Sequence
  Description of Artificial Sequence: Synthetic oligonucleotide
cagcaaggaauaaaggaca

SEQ ID NO: 2699096 - RNA, 19 nt, Artificial Sequence
  Description of Artificial Sequence: Synthetic oligonucleotide
ucuucuugcaaagccucug

SEQ ID NO: 2699097 - RNA, 19 nt, Artificial Sequence
  Description of Artificial Sequence: Synthetic oligonucleotide
uggccaauuguccgcacga

SEQ ID NO: 2699098 - RNA, 19 nt, Artificial Sequence
  Description of Artificial Sequence: Synthetic oligonucleotide
acauuuugcucugcuggac

SEQ ID NO: 2699099 - RNA, 19 nt, Artificial Sequence
  Description of Artificial Sequence: Synthetic oligonucleotide
cuggcgccuggacagaugg

SEQ ID NO: 2699100 - RNA, 19 nt, Artificial Sequence
  Description of Artificial Sequence: Synthetic oligonucleotide
cagagauguguccugagca

SEQ ID NO: 2699101 - RNA, 19 nt, Artificial Sequence
  Description of Artificial Sequence: Synthetic oligonucleotide
cagauggccaauuguccgc

SEQ ID NO: 2699102 - RNA, 19 nt, Artificial Sequence
  Description of Artificial Sequence: Synthetic oligonucleotide
agcagguuuuguauguguc

SEQ ID NO: 2699103 - RNA, 19 nt, Artificial Sequence
  Description of Artificial Sequence: Synthetic oligonucleotide
aaagccuguugacaauguu

SEQ ID NO: 2699104 - RNA, 19 nt, Artificial Sequence
  Description of Artificial Sequence: Synthetic oligonucleotide
uggccuggcgccuggacag

SEQ ID NO: 2699105 - RNA, 19 nt, Artificial Sequence
  Description of Artificial Sequence: Synthetic oligonucleotide
ugaagcuuucggagacucc

SEQ ID NO: 2699106 - RNA, 19 nt, Artificial Sequence
  Description of Artificial Sequence: Synthetic oligonucleotide
gaggcaaucucagcaauuc

SEQ ID NO: 2699107 - RNA, 19 nt, Artificial Sequence
  Description of Artificial Sequence: Synthetic oligonucleotide
agccuguugacaauguucu

SEQ ID NO: 2699108 - RNA, 19 nt, Artificial Sequence
  Description of Artificial Sequence: Synthetic oligonucleotide
acacuuuuguaaccugccu

SEQ ID NO: 2699109 - RNA, 19 nt, Artificial Sequence
  Description of Artificial Sequence: Synthetic oligonucleotide
guuggcuaagugcaugaca

SEQ ID NO: 2699110 - RNA, 19 nt, Artificial Sequence
  Description of Artificial Sequence: Synthetic oligonucleotide
augacacuuuuguaaccug

SEQ ID NO: 2699111 - RNA, 19 nt, Artificial Sequence
  Description of Artificial Sequence: Synthetic oligonucleotide
agacacacuccaaauguug

SEQ ID NO: 2699112 - RNA, 19 nt, Artificial Sequence
  Description of Artificial Sequence: Synthetic oligonucleotide
gguuuuguauguguccccg

SEQ ID NO: 2699113 - RNA, 19 nt, Artificial Sequence
  Description of Artificial Sequence: Synthetic oligonucleotide
agcuuucggagacuccaag

SEQ ID NO: 2699114 - RNA, 19 nt, Artificial Sequence
  Description of Artificial Sequence: Synthetic oligonucleotide
aggacgagaaggaggcagc

SEQ ID NO: 2699115 - RNA, 19 nt, Artificial Sequence
  Description of Artificial Sequence: Synthetic oligonucleotide
gggcauauuaaacuucuca

SEQ ID NO: 2699116 - RNA, 19 nt, Artificial Sequence
  Description of Artificial Sequence: Synthetic oligonucleotide
acacacuccaaauguuggu

SEQ ID NO: 2699117 - RNA, 19 nt, Artificial Sequence
  Description of Artificial Sequence: Synthetic oligonucleotide
agucaggcucagucugagc

SEQ ID NO: 2699118 - RNA, 19 nt, Artificial Sequence
  Description of Artificial Sequence: Synthetic oligonucleotide
ggacagauaaagccuguug

SEQ ID NO: 2699119 - RNA, 19 nt, Artificial Sequence
  Description of Artificial Sequence: Synthetic oligonucleotide
cuuucggagacuccaagaa

SEQ ID NO: 2699120 - RNA, 19 nt, Artificial Sequence
  Description of Artificial Sequence: Synthetic oligonucleotide
caugccucuucaguguuag

SEQ ID NO: 2699121 - RNA, 19 nt, Artificial Sequence
  Description of Artificial Sequence: Synthetic oligonucleotide
aguuggcuaaacugccuga

SEQ ID NO: 2699122 - RNA, 19 nt, Artificial Sequence
  Description of Artificial Sequence: Synthetic oligonucleotide
uguccugagcacagcuuca

SEQ ID NO: 2699123 - RNA, 19 nt, Artificial Sequence
  Description of Artificial Sequence: Synthetic oligonucleotide
aaugaagcuuucggagacu

SEQ ID NO: 2699124 - RNA, 19 nt, Artificial Sequence
  Description of Artificial Sequence: Synthetic oligonucleotide
guuuaauccagggccucag

SEQ ID NO: 2699125 - RNA, 19 nt, Artificial Sequence
  Description of Artificial Sequence: Synthetic oligonucleotide
auuaggcaaugcccuacca

SEQ ID NO: 2699126 - RNA, 19 nt, Artificial Sequence
  Description of Artificial Sequence: Synthetic oligonucleotide
auaaaggacaaaggacaga

SEQ ID NO: 2699127 - RNA, 19 nt, Artificial Sequence
  Description of Artificial Sequence: Synthetic oligonucleotide
uaccacagagauguguccu

SEQ ID NO: 2699128 - RNA, 19 nt, Artificial Sequence
  Description of Artificial Sequence: Synthetic oligonucleotide
gcaacagcaucuuugcuga

SEQ ID NO: 2699129 - RNA, 19 nt, Artificial Sequence
  Description of Artificial Sequence: Synthetic oligonucleotide
accugccucacagaaaugu

SEQ ID NO: 2699130 - RNA, 19 nt, Artificial Sequence
  Description of Artificial Sequence: Synthetic oligonucleotide
ucuuguccaccuucuuucu

SEQ ID NO: 2699131 - RNA, 19 nt, Artificial Sequence
  Description of Artificial Sequence: Synthetic oligonucleotide
auguguccugagcacagcu

SEQ ID NO: 2699132 - RNA, 19 nt, Artificial Sequence
  Description of Artificial Sequence: Synthetic oligonucleotide
caggacgagaaggaggcag

SEQ ID NO: 2699133 - RNA, 19 nt, Artificial Sequence
  Description of Artificial Sequence: Synthetic oligonucleotide
guguccugagcacagcuuc

SEQ ID NO: 2699134 - RNA, 19 nt, Artificial Sequence
  Description of Artificial Sequence: Synthetic oligonucleotide
gcagguuuuguaugugucc

SEQ ID NO: 2699135 - RNA, 19 nt, Artificial Sequence
  Description of Artificial Sequence: Synthetic oligonucleotide
gagacuccaagaagagcag

SEQ ID NO: 2699136 - RNA, 19 nt, Artificial Sequence
  Description of Artificial Sequence: Synthetic oligonucleotide
gcaaugcccuaccacagag

SEQ ID NO: 2699137 - RNA, 19 nt, Artificial Sequence
  Description of Artificial Sequence: Synthetic oligonucleotide
gaaguacaccauccaguca

SEQ ID NO: 2699138 - RNA, 19 nt, Artificial Sequence
  Description of Artificial Sequence: Synthetic oligonucleotide
aggaggcagcuccagugag

SEQ ID NO: 2699139 - RNA, 19 nt, Artificial Sequence
  Description of Artificial Sequence: Synthetic oligonucleotide
uccccggggcauauuaaac

SEQ ID NO: 2699140 - RNA, 19 nt, Artificial Sequence
  Description of Artificial Sequence: Synthetic oligonucleotide
cugaaguacaccauccagu

SEQ ID NO: 2699141 - RNA, 19 nt, Artificial Sequence
  Description of Artificial Sequence: Synthetic oligonucleotide
uucuuucugauggcuugcc

SEQ ID NO: 2699142 - RNA, 19 nt, Artificial Sequence
  Description of Artificial Sequence: Synthetic oligonucleotide
ugcuggacugaguuggcua

SEQ ID NO: 2699143 - RNA, 19 nt, Artificial Sequence
  Description of Artificial Sequence: Synthetic oligonucleotide
ugagcagguuuuguaugug

SEQ ID NO: 2699144 - RNA, 19 nt, Artificial Sequence
  Description of Artificial Sequence: Synthetic oligonucleotide
uccgcacgagcaccucugg

SEQ ID NO: 2699145 - RNA, 19 nt, Artificial Sequence
  Description of Artificial Sequence: Synthetic oligonucleotide
ucuucaguguuaggacccc

SEQ ID NO: 2699146 - RNA, 19 nt, Artificial Sequence
  Description of Artificial Sequence: Synthetic oligonucleotide
caauuguccgcacgagcac

SEQ ID NO: 2699147 - RNA, 19 nt, Artificial Sequence
  Description of Artificial Sequence: Synthetic oligonucleotide
cuucuuucugauggcuugc

SEQ ID NO: 2699148 - RNA, 19 nt, Artificial Sequence
  Description of Artificial Sequence: Synthetic oligonucleotide
cuuucugauggcuugcccu

SEQ ID NO: 2699149 - RNA, 19 nt, Artificial Sequence
  Description of Artificial Sequence: Synthetic oligonucleotide
uccugagcacagcuucaug

SEQ ID NO: 2699150 - RNA, 19 nt, Artificial Sequence
  Description of Artificial Sequence: Synthetic oligonucleotide
ugacaauguucuuguccac

SEQ ID NO: 2699151 - RNA, 19 nt, Artificial Sequence
  Description of Artificial Sequence: Synthetic oligonucleotide
ccugaaguacaccauccag

SEQ ID NO: 2699152 - RNA, 19 nt, Artificial Sequence
  Description of Artificial Sequence: Synthetic oligonucleotide
cacacuccaaauguugguc

SEQ ID NO: 2699153 - RNA, 19 nt, Artificial Sequence
  Description of Artificial Sequence: Synthetic oligonucleotide
uguguccugagcacagcuu

SEQ ID NO: 2699154 - RNA, 19 nt, Artificial Sequence
  Description of Artificial Sequence: Synthetic oligonucleotide
uguuggucucuuucagcaa

SEQ ID NO: 2699155 - RNA, 19 nt, Artificial Sequence
  Description of Artificial Sequence: Synthetic oligonucleotide
acugaggguuuaauccagg

SEQ ID NO: 2699156 - RNA, 19 nt, Artificial Sequence
  Description of Artificial Sequence: Synthetic oligonucleotide
ccuaccacagagauguguc

SEQ ID NO: 2699157 - RNA, 19 nt, Artificial Sequence
  Description of Artificial Sequence: Synthetic oligonucleotide
uuucaugcaacagcaucuu

SEQ ID NO: 2699158 - RNA, 19 nt, Artificial Sequence
  Description of Artificial Sequence: Synthetic oligonucleotide
gauuggcguuggcuaagug

SEQ ID NO: 2699159 - RNA, 19 nt, Artificial Sequence
  Description of Artificial Sequence: Synthetic oligonucleotide
aggcaaucucagcaauucu

SEQ ID NO: 2699160 - RNA, 19 nt, Artificial Sequence
  Description of Artificial Sequence: Synthetic oligonucleotide
uggauuggcguuggcuaag

SEQ ID NO: 2699161 - RNA, 19 nt, Artificial Sequence
  Description of Artificial Sequence: Synthetic oligonucleotide
uuguaaccugccucacaga

SEQ ID NO: 2699162 - RNA, 19 nt, Artificial Sequence
  Description of Artificial Sequence: Synthetic oligonucleotide
cuggacagauggccaauug

SEQ ID NO: 2699163 - RNA, 19 nt, Artificial Sequence
  Description of Artificial Sequence: Synthetic oligonucleotide
cacuccaaauguuggucuc

SEQ ID NO: 2699164 - RNA, 19 nt, Artificial Sequence
  Description of Artificial Sequence: Synthetic oligonucleotide
cacauuuugcucugcugga

SEQ ID NO: 2699165 - RNA, 19 nt, Artificial Sequence
  Description of Artificial Sequence: Synthetic oligonucleotide
ccucacagaaauguaacac

SEQ ID NO: 2699166 - RNA, 19 nt, Artificial Sequence
  Description of Artificial Sequence: Synthetic oligonucleotide
uguccgcacgagcaccucu

SEQ ID NO: 2699167 - RNA, 19 nt, Artificial Sequence
  Description of Artificial Sequence: Synthetic oligonucleotide
aggacacaaucugcuuggc

SEQ ID NO: 2699168 - RNA, 19 nt, Artificial Sequence
  Description of Artificial Sequence: Synthetic oligonucleotide
cacgagcaccucuggauug

SEQ ID NO: 2699169 - RNA, 19 nt, Artificial Sequence
  Description of Artificial Sequence: Synthetic oligonucleotide
ccuguugacaauguucuug

SEQ ID NO: 2699170 - RNA, 19 nt, Artificial Sequence
  Description of Artificial Sequence: Synthetic oligonucleotide
agggccucaggcauauuag

SEQ ID NO: 2699171 - RNA, 19 nt, Artificial Sequence
  Description of Artificial Sequence: Synthetic oligonucleotide
ccaauuguccgcacgagca

SEQ ID NO: 2699172 - RNA, 19 nt, Artificial Sequence
  Description of Artificial Sequence: Synthetic oligonucleotide
cacacaggacgagaaggag

SEQ ID NO: 2699173 - RNA, 19 nt, Artificial Sequence
  Description of Artificial Sequence: Synthetic oligonucleotide
ggacagauggccaauuguc

SEQ ID NO: 2699174 - RNA, 19 nt, Artificial Sequence
  Description of Artificial Sequence: Synthetic oligonucleotide
aaggacagauaaagccugu

SEQ ID NO: 2699175 - RNA, 19 nt, Artificial Sequence
  Description of Artificial Sequence: Synthetic oligonucleotide
aguacaccauccagucagg

SEQ ID NO: 2699176 - RNA, 19 nt, Artificial Sequence
  Description of Artificial Sequence: Synthetic oligonucleotide
cuguugacaauguucuugu

SEQ ID NO: 2699177 - RNA, 19 nt, Artificial Sequence
  Description of Artificial Sequence: Synthetic oligonucleotide
acacacaggacgagaagga

SEQ ID NO: 2699178 - RNA, 19 nt, Artificial Sequence
  Description of Artificial Sequence: Synthetic oligonucleotide
gauaaagccuguugacaau

SEQ ID NO: 2699179 - RNA, 19 nt, Artificial Sequence
  Description of Artificial Sequence: Synthetic oligonucleotide
uucaugcaacagcaucuuu

SEQ ID NO: 2699180 - RNA, 19 nt, Artificial Sequence
  Description of Artificial Sequence: Synthetic oligonucleotide
gauguguccugagcacagc

SEQ ID NO: 2699181 - RNA, 19 nt, Artificial Sequence
  Description of Artificial Sequence: Synthetic oligonucleotide
gcuaaacugccugaaguac

SEQ ID NO: 2699182 - RNA, 19 nt, Artificial Sequence
  Description of Artificial Sequence: Synthetic oligonucleotide
gggccucaggcauauuagg

SEQ ID NO: 2699183 - RNA, 19 nt, Artificial Sequence
  Description of Artificial Sequence: Synthetic oligonucleotide
uuggagguacugaggguuu

SEQ ID NO: 2699184 - RNA, 19 nt, Artificial Sequence
  Description of Artificial Sequence: Synthetic oligonucleotide
cugccucacagaaauguaa

SEQ ID NO: 2699185 - RNA, 19 nt, Artificial Sequence
  Description of Artificial Sequence: Synthetic oligonucleotide
ucugauggcuugcccugau

SEQ ID NO: 2699186 - RNA, 19 nt, Artificial Sequence
  Description of Artificial Sequence: Synthetic oligonucleotide
auguaacacacaggacgag

SEQ ID NO: 2699187 - RNA, 19 nt, Artificial Sequence
  Description of Artificial Sequence: Synthetic oligonucleotide
caggcauauuaggcaaugc

SEQ ID NO: 2699188 - RNA, 19 nt, Artificial Sequence
  Description of Artificial Sequence: Synthetic oligonucleotide
uccagugagcagguuuugu

SEQ ID NO: 2699189 - RNA, 19 nt, Artificial Sequence
  Description of Artificial Sequence: Synthetic oligonucleotide
cacaaucugcuuggccugg

SEQ ID NO: 2699190 - RNA, 19 nt, Artificial Sequence
  Description of Artificial Sequence: Synthetic oligonucleotide
agcaaggaauaaaggacaa

SEQ ID NO: 2699191 - RNA, 19 nt, Artificial Sequence
  Description of Artificial Sequence: Synthetic oligonucleotide
acuccaaauguuggucucu

SEQ ID NO: 2699192 - RNA, 19 nt, Artificial Sequence
  Description of Artificial Sequence: Synthetic oligonucleotide
aggguuuaauccagggccu

SEQ ID NO: 2699193 - RNA, 19 nt, Artificial Sequence
  Description of Artificial Sequence: Synthetic oligonucleotide
uugcccugaugccuucuuc

SEQ ID NO: 2699194 - RNA, 19 nt, Artificial Sequence
  Description of Artificial Sequence: Synthetic oligonucleotide
cauauuaggcaaugcccua

SEQ ID NO: 2699195 - RNA, 19 nt, Artificial Sequence
  Description of Artificial Sequence: Synthetic oligonucleotide
gcaugacacuuuuguaacc

SEQ ID NO: 2699196 - RNA, 19 nt, Artificial Sequence
  Description of Artificial Sequence: Synthetic oligonucleotide
aggcaaugcccuaccacag

SEQ ID NO: 2699197 - RNA, 19 nt, Artificial Sequence
  Description of Artificial Sequence: Synthetic oligonucleotide
ugcuuggccuggcgccugg

SEQ ID NO: 2699198 - RNA, 19 nt, Artificial Sequence
  Description of Artificial Sequence: Synthetic oligonucleotide
gcaaucucagcaauucuuc

SEQ ID NO: 2699199 - RNA, 19 nt, Artificial Sequence
  Description of Artificial Sequence: Synthetic oligonucleotide
caaagccucugccuuuuca

SEQ ID NO: 2699200 - RNA, 19 nt, Artificial Sequence
  Description of Artificial Sequence: Synthetic oligonucleotide
agauggccaauuguccgca

SEQ ID NO: 2699201 - RNA, 19 nt, Artificial Sequence
  Description of Artificial Sequence: Synthetic oligonucleotide
gccaauuguccgcacgagc

SEQ ID NO: 2699202 - RNA, 19 nt, Artificial Sequence
  Description of Artificial Sequence: Synthetic oligonucleotide
uguccccggggcauauuaa

SEQ ID NO: 2699203 - RNA, 19 nt, Artificial Sequence
  Description of Artificial Sequence: Synthetic oligonucleotide
uggucucuuucagcaagga

SEQ ID NO: 2699204 - RNA, 19 nt, Artificial Sequence
  Description of Artificial Sequence: Synthetic oligonucleotide
aaaggacaaaggacagaua

SEQ ID NO: 2699205 - RNA, 19 nt, Artificial Sequence
  Description of Artificial Sequence: Synthetic oligonucleotide
aggacaaaggacagauaaa

SEQ ID NO: 2699206 - RNA, 19 nt, Artificial Sequence
  Description of Artificial Sequence: Synthetic oligonucleotide
gcucagucugagcaacaag

SEQ ID NO: 2699207 - RNA, 19 nt, Artificial Sequence
  Description of Artificial Sequence: Synthetic oligonucleotide
ucugcuuggccuggcgccu

SEQ ID NO: 2699208 - RNA, 19 nt, Artificial Sequence
  Description of Artificial Sequence: Synthetic oligonucleotide
cuucaugccucuucagugu

SEQ ID NO: 2699209 - RNA, 19 nt, Artificial Sequence
  Description of Artificial Sequence: Synthetic oligonucleotide
gcaauucuucaacuucuuc

SEQ ID NO: 2699210 - RNA, 19 nt, Artificial Sequence
  Description of Artificial Sequence: Synthetic oligonucleotide
guacaccauccagucaggc

SEQ ID NO: 2699211 - RNA, 19 nt, Artificial Sequence
  Description of Artificial Sequence: Synthetic oligonucleotide
cuugcaaagccucugccuu

SEQ ID NO: 2699212 - RNA, 19 nt, Artificial Sequence
  Description of Artificial Sequence: Synthetic oligonucleotide
caggcucagucugagcaac

SEQ ID NO: 2699213 - RNA, 19 nt, Artificial Sequence
  Description of Artificial Sequence: Synthetic oligonucleotide
uugcaaagccucugccuuu

SEQ ID NO: 2699214 - RNA, 19 nt, Artificial Sequence
  Description of Artificial Sequence: Synthetic oligonucleotide
ggcuaaacugccugaagua

SEQ ID NO: 2699215 - RNA, 19 nt, Artificial Sequence
  Description of Artificial Sequence: Synthetic oligonucleotide
uccaaauguuggucucuuu

SEQ ID NO: 2699216 - RNA, 19 nt, Artificial Sequence
  Description of Artificial Sequence: Synthetic oligonucleotide
gauggccaauuguccgcac

SEQ ID NO: 2699217 - RNA, 19 nt, Artificial Sequence
  Description of Artificial Sequence: Synthetic oligonucleotide
ggcgccuggacagauggcc

SEQ ID NO: 2699218 - RNA, 19 nt, Artificial Sequence
  Description of Artificial Sequence: Synthetic oligonucleotide
guuggcuaaacugccugaa

SEQ ID NO: 2699219 - RNA, 19 nt, Artificial Sequence
  Description of Artificial Sequence: Synthetic oligonucleotide
gcuuucggagacuccaaga

SEQ ID NO: 2699220 - RNA, 19 nt, Artificial Sequence
  Description of Artificial Sequence: Synthetic oligonucleotide
auuguccgcacgagcaccu

SEQ ID NO: 2699221 - RNA, 19 nt, Artificial Sequence
  Description of Artificial Sequence: Synthetic oligonucleotide
ggucuggaggcaaucucag

SEQ ID NO: 2699222 - RNA, 19 nt, Artificial Sequence
  Description of Artificial Sequence: Synthetic oligonucleotide
gcauauuaggcaaugcccu

SEQ ID NO: 2699223 - RNA, 19 nt, Artificial Sequence
  Description of Artificial Sequence: Synthetic oligonucleotide
uggcuugcccugaugccuu

SEQ ID NO: 2699224 - RNA, 19 nt, Artificial Sequence
  Description of Artificial Sequence: Synthetic oligonucleotide
cagucaggcucagucugag

SEQ ID NO: 2699225 - RNA, 19 nt, Artificial Sequence
  Description of Artificial Sequence: Synthetic oligonucleotide
ugcaaagccucugccuuuu

SEQ ID NO: 2699226 - RNA, 19 nt, Artificial Sequence
  Description of Artificial Sequence: Synthetic oligonucleotide
cuggauuggcguuggcuaa

SEQ ID NO: 2699227 - RNA, 19 nt, Artificial Sequence
  Description of Artificial Sequence: Synthetic oligonucleotide
cugauggcuugcccugaug

SEQ ID NO: 2699228 - RNA, 19 nt, Artificial Sequence
  Description of Artificial Sequence: Synthetic oligonucleotide
caaugcccuaccacagaga

SEQ ID NO: 2699229 - RNA, 19 nt, Artificial Sequence
  Description of Artificial Sequence: Synthetic oligonucleotide
acugccugaaguacaccau

SEQ ID NO: 2699230 - RNA, 19 nt, Artificial Sequence
  Description of Artificial Sequence: Synthetic oligonucleotide
gcagccacauuuugcucug

SEQ ID NO: 2699231 - RNA, 19 nt, Artificial Sequence
  Description of Artificial Sequence: Synthetic oligonucleotide
gacgagaaggaggcagcuc

SEQ ID NO: 2699232 - RNA, 19 nt, Artificial Sequence
  Description of Artificial Sequence: Synthetic oligonucleotide
aagcuuucggagacuccaa

SEQ ID NO: 2699233 - RNA, 19 nt, Artificial Sequence
  Description of Artificial Sequence: Synthetic oligonucleotide
caacagcaucuuugcugag

SEQ ID NO: 2699234 - RNA, 19 nt, Artificial Sequence
  Description of Artificial Sequence: Synthetic oligonucleotide
cuuggccuggcgccuggac

SEQ ID NO: 2699235 - RNA, 19 nt, Artificial Sequence
  Description of Artificial Sequence: Synthetic oligonucleotide
uugcucugcuggacugagu

SEQ ID NO: 2699236 - RNA, 19 nt, Artificial Sequence
  Description of Artificial Sequence: Synthetic oligonucleotide
cagggccucaggcauauua

SEQ ID NO: 2699237 - RNA, 19 nt, Artificial Sequence
  Description of Artificial Sequence: Synthetic oligonucleotide
ugaugccuucuuccccaau

SEQ ID NO: 2699238 - RNA, 19 nt, Artificial Sequence
  Description of Artificial Sequence: Synthetic oligonucleotide
cuuggagguacugaggguu

SEQ ID NO: 2699239 - RNA, 19 nt, Artificial Sequence
  Description of Artificial Sequence: Synthetic oligonucleotide
cagugagcagguuuuguau

SEQ ID NO: 2699240 - RNA, 19 nt, Artificial Sequence
  Description of Artificial Sequence: Synthetic oligonucleotide
cucagcaauucuucaacuu

SEQ ID NO: 2699241 - RNA, 19 nt, Artificial Sequence
  Description of Artificial Sequence: Synthetic oligonucleotide
aggacagauaaagccuguu

SEQ ID NO: 2699242 - RNA, 19 nt, Artificial Sequence
  Description of Artificial Sequence: Synthetic oligonucleotide
aaccugccucacagaaaug

SEQ ID NO: 2699243 - RNA, 19 nt, Artificial Sequence
  Description of Artificial Sequence: Synthetic oligonucleotide
guaaccugccucacagaaa

SEQ ID NO: 2699244 - RNA, 19 nt, Artificial Sequence
  Description of Artificial Sequence: Synthetic oligonucleotide
uggcgccuggacagauggc

SEQ ID NO: 2699245 - RNA, 19 nt, Artificial Sequence
  Description of Artificial Sequence: Synthetic oligonucleotide
gcuggacugaguuggcuaa

SEQ ID NO: 2699246 - RNA, 19 nt, Artificial Sequence
  Description of Artificial Sequence: Synthetic oligonucleotide
guccccggggcauauuaaa

SEQ ID NO: 2699247 - RNA, 19 nt, Artificial Sequence
  Description of Artificial Sequence: Synthetic oligonucleotide
guccgcacgagcaccucug

SEQ ID NO: 2699248 - RNA, 19 nt, Artificial Sequence
  Description of Artificial Sequence: Synthetic oligonucleotide
gcccugaugccuucuuccc

SEQ ID NO: 2699249 - RNA, 19 nt, Artificial Sequence
  Description of Artificial Sequence: Synthetic oligonucleotide
caccucuggauuggcguug

SEQ ID NO: 2699250 - RNA, 19 nt, Artificial Sequence
  Description of Artificial Sequence: Synthetic oligonucleotide
ggucucuuucagcaaggaa

SEQ ID NO: 2699251 - RNA, 19 nt, Artificial Sequence
  Description of Artificial Sequence: Synthetic oligonucleotide
uauguguccccggggcaua

SEQ ID NO: 2699252 - RNA, 19 nt, Artificial Sequence
  Description of Artificial Sequence: Synthetic oligonucleotide
uggcguuggcuaagugcau

SEQ ID NO: 2699253 - RNA, 19 nt, Artificial Sequence
  Description of Artificial Sequence: Synthetic oligonucleotide
uggagguacugaggguuua

SEQ ID NO: 2699254 - RNA, 19 nt, Artificial Sequence
  Description of Artificial Sequence: Synthetic oligonucleotide
ggcguuggcuaagugcaug

SEQ ID NO: 2699255 - RNA, 19 nt, Artificial Sequence
  Description of Artificial Sequence: Synthetic oligonucleotide
gguuuaauccagggccuca

SEQ ID NO: 2699256 - RNA, 19 nt, Artificial Sequence
  Description of Artificial Sequence: Synthetic oligonucleotide
guguccccggggcauauua

SEQ ID NO: 2699257 - RNA, 19 nt, Artificial Sequence
  Description of Artificial Sequence: Synthetic oligonucleotide
gccugaaguacaccaucca

SEQ ID NO: 2699258 - RNA, 19 nt, Artificial Sequence
  Description of Artificial Sequence: Synthetic oligonucleotide
ggcaaugcccuaccacaga

SEQ ID NO: 2699259 - RNA, 19 nt, Artificial Sequence
  Description of Artificial Sequence: Synthetic oligonucleotide
gcucugcuggacugaguug

SEQ ID NO: 2699260 - RNA, 19 nt, Artificial Sequence
  Description of Artificial Sequence: Synthetic oligonucleotide
cccugaugccuucuucccc

SEQ ID NO: 2699261 - RNA, 19 nt, Artificial Sequence
  Description of Artificial Sequence: Synthetic oligonucleotide
gcguuggcuaagugcauga

SEQ ID NO: 2699262 - RNA, 19 nt, Artificial Sequence
  Description of Artificial Sequence: Synthetic oligonucleotide
ccccaaugaagcuuucgga

SEQ ID NO: 2699263 - RNA, 19 nt, Artificial Sequence
  Description of Artificial Sequence: Synthetic oligonucleotide
cuccagugagcagguuuug

SEQ ID NO: 2699264 - RNA, 19 nt, Artificial Sequence
  Description of Artificial Sequence: Synthetic oligonucleotide
ggccaauuguccgcacgag

SEQ ID NO: 2699265 - RNA, 19 nt, Artificial Sequence
  Description of Artificial Sequence: Synthetic oligonucleotide
augcccuaccacagagaug

SEQ ID NO: 2699266 - RNA, 19 nt, Artificial Sequence
  Description of Artificial Sequence: Synthetic oligonucleotide
ccggggcauauuaaacuuc

SEQ ID NO: 2699267 - RNA, 19 nt, Artificial Sequence
  Description of Artificial Sequence: Synthetic oligonucleotide
ggcaaucucagcaauucuu

SEQ ID NO: 2699268 - RNA, 19 nt, Artificial Sequence
  Description of Artificial Sequence: Synthetic oligonucleotide
ccagugagcagguuuugua

SEQ ID NO: 2699269 - RNA, 19 nt, Artificial Sequence
  Description of Artificial Sequence: Synthetic oligonucleotide
acaggacgagaaggaggca

SEQ ID NO: 2699270 - RNA, 19 nt, Artificial Sequence
  Description of Artificial Sequence: Synthetic oligonucleotide
cagacacacuccaaauguu

SEQ ID NO: 2699271 - RNA, 19 nt, Artificial Sequence
  Description of Artificial Sequence: Synthetic oligonucleotide
cucuuucagcaaggaauaa

SEQ ID NO: 2699272 - RNA, 19 nt, Artificial Sequence
  Description of Artificial Sequence: Synthetic oligonucleotide
gcaaggaauaaaggacaaa

SEQ ID NO: 2699273 - RNA, 19 nt, Artificial Sequence
  Description of Artificial Sequence: Synthetic oligonucleotide
ggcuaagugcaugacacuu

SEQ ID NO: 2699274 - RNA, 19 nt, Artificial Sequence
  Description of Artificial Sequence: Synthetic oligonucleotide
guauguguccccggggcau

SEQ ID NO: 2699275 - RNA, 19 nt, Artificial Sequence
  Description of Artificial Sequence: Synthetic oligonucleotide
ggguuuaauccagggccuc

SEQ ID NO: 2699276 - RNA, 19 nt, Artificial Sequence
  Description of Artificial Sequence: Synthetic oligonucleotide
aggcucagucugagcaaca

SEQ ID NO: 2699277 - RNA, 19 nt, Artificial Sequence
  Description of Artificial Sequence: Synthetic oligonucleotide
cucaggcauauuaggcaau

SEQ ID NO: 2699278 - RNA, 19 nt, Artificial Sequence
  Description of Artificial Sequence: Synthetic oligonucleotide
uuguccgcacgagcaccuc

SEQ ID NO: 2699279 - RNA, 19 nt, Artificial Sequence
  Description of Artificial Sequence: Synthetic oligonucleotide
ggggcauauuaaacuucuc

SEQ ID NO: 2699280 - RNA, 19 nt, Artificial Sequence
  Description of Artificial Sequence: Synthetic oligonucleotide
ggagguacugaggguuuaa

SEQ ID NO: 2699281 - RNA, 19 nt, Artificial Sequence
  Description of Artificial Sequence: Synthetic oligonucleotide
ccugccucacagaaaugua

SEQ ID NO: 2699282 - RNA, 19 nt, Artificial Sequence
  Description of Artificial Sequence: Synthetic oligonucleotide
cugcuuggccuggcgccug

SEQ ID NO: 2699283 - RNA, 19 nt, Artificial Sequence
  Description of Artificial Sequence: Synthetic oligonucleotide
auguguccccggggcauau

SEQ ID NO: 2699284 - RNA, 19 nt, Artificial Sequence
  Description of Artificial Sequence: Synthetic oligonucleotide
uguguccccggggcauauu

SEQ ID NO: 2699285 - RNA, 19 nt, Artificial Sequence
  Description of Artificial Sequence: Synthetic oligonucleotide
ccuggcgccuggacagaug

SEQ ID NO: 2699286 - RNA, 19 nt, Artificial Sequence
  Description of Artificial Sequence: Synthetic oligonucleotide
cagggaggucuggaggcaa

SEQ ID NO: 2699287 - RNA, 19 nt, Artificial Sequence
  Description of Artificial Sequence: Synthetic oligonucleotide
cggggcauauuaaacuucu

SEQ ID NO: 2699288 - RNA, 19 nt, Artificial Sequence
  Description of Artificial Sequence: Synthetic oligonucleotide
ccccggggcauauuaaacu

SEQ ID NO: 2699289 - RNA, 19 nt, Artificial Sequence
  Description of Artificial Sequence: Synthetic oligonucleotide
gcuaagugcaugacacuuu

SEQ ID NO: 2699290 - RNA, 19 nt, Artificial Sequence
  Description of Artificial Sequence: Synthetic oligonucleotide
gcacgagcaccucuggauu

SEQ ID NO: 2699291 - RNA, 19 nt, Artificial Sequence
  Description of Artificial Sequence: Synthetic oligonucleotide
cuccaaauguuggucucuu

SEQ ID NO: 2699292 - RNA, 19 nt, Artificial Sequence
  Description of Artificial Sequence: Synthetic oligonucleotide
cuugcccugaugccuucuu

SEQ ID NO: 2699293 - RNA, 19 nt, Artificial Sequence
  Description of Artificial Sequence: Synthetic oligonucleotide
guccugagcacagcuucau

SEQ ID NO: 2699294 - RNA, 19 nt, Artificial Sequence
  Description of Artificial Sequence: Synthetic oligonucleotide
cguuggcuaagugcaugac

SEQ ID NO: 2699295 - RNA, 19 nt, Artificial Sequence
  Description of Artificial Sequence: Synthetic oligonucleotide
ggacgagaaggaggcagcu

SEQ ID NO: 2699296 - RNA, 19 nt, Artificial Sequence
  Description of Artificial Sequence: Synthetic oligonucleotide
gcgccuggacagauggcca

SEQ ID NO: 2699297 - RNA, 19 nt, Artificial Sequence
  Description of Artificial Sequence: Synthetic oligonucleotide
ggcuugcccugaugccuuc

SEQ ID NO: 2699298 - RNA, 19 nt, Artificial Sequence
  Description of Artificial Sequence: Synthetic oligonucleotide
ggauuggcguuggcuaagu

SEQ ID NO: 2699299 - RNA, 19 nt, Artificial Sequence
  Description of Artificial Sequence: Synthetic oligonucleotide
ggaggcaaucucagcaauu

SEQ ID NO: 2699300 - RNA, 19 nt, Artificial Sequence
  Description of Artificial Sequence: Synthetic oligonucleotide
cugcuggacugaguuggcu

SEQ ID NO: 2699301 - RNA, 19 nt, Artificial Sequence
  Description of Artificial Sequence: Synthetic oligonucleotide
cccggggcauauuaaacuu

SEQ ID NO: 2699302 - RNA, 19 nt, Artificial Sequence
  Description of Artificial Sequence: Synthetic oligonucleotide
gcaccucuggauuggcguu

SEQ ID NO: 2699303 - RNA, 19 nt, Artificial Sequence
  Description of Artificial Sequence: Synthetic oligonucleotide
ccuuuucaugcaacagcau

SEQ ID NO: 2699304 - RNA, 19 nt, Artificial Sequence
  Description of Artificial Sequence: Synthetic oligonucleotide
ccucugccuuuucaugcaa

SEQ ID NO: 2699305 - RNA, 19 nt, Artificial Sequence
  Description of Artificial Sequence: Synthetic oligonucleotide
cgcacgagcaccucuggau

SEQ ID NO: 2699306 - RNA, 19 nt, Artificial Sequence
  Description of Artificial Sequence: Synthetic oligonucleotide
ccgcacgagcaccucugga

SEQ ID NO: 2699307 - RNA, 19 nt, Artificial Sequence
  Description of Artificial Sequence: Synthetic oligonucleotide
gccuguugacaauguucuu

SEQ ID NO: 2699308 - RNA, 19 nt, Artificial Sequence
  Description of Artificial Sequence: Synthetic oligonucleotide
gcuugcccugaugccuucu

SEQ ID NO: 2699309 - RNA, 19 nt, Artificial Sequence
  Description of Artificial Sequence: Synthetic oligonucleotide
gcuuggccuggcgccugga

SEQ ID NO: 2699310 - RNA, 19 nt, Artificial Sequence
  Description of Artificial Sequence: Synthetic oligonucleotide
ggccuggcgccuggacaga

SEQ ID NO: 2699311 - RNA, 19 nt, Artificial Sequence
  Description of Artificial Sequence: Synthetic oligonucleotide
ccuggacagauggccaauu

SEQ ID NO: 2699312 - RNA, 19 nt, Artificial Sequence
  Description of Artificial Sequence: Synthetic oligonucleotide
gccuggcgccuggacagau

SEQ ID NO: 2699313 - RNA, 19 nt, Artificial Sequence
  Description of Artificial Sequence: Synthetic oligonucleotide
ccauccagucaggcucagu

SEQ ID NO: 2699314 - RNA, 19 nt, Artificial Sequence
  Description of Artificial Sequence: Synthetic oligonucleotide
ccagggccucaggcauauu

SEQ ID NO: 2699315 - RNA, 19 nt, Artificial Sequence
  Description of Artificial Sequence: Synthetic oligonucleotide
aacauagggguccagaucc

SEQ ID NO: 2699316 - RNA, 19 nt, Artificial Sequence
  Description of Artificial Sequence: Synthetic oligonucleotide
aacacugugguuuaaccgc

SEQ ID NO: 2699317 - RNA, 19 nt, Artificial Sequence
  Description of Artificial Sequence: Synthetic oligonucleotide
uguaaaauauuguugacca

SEQ ID NO: 2699318 - RNA, 19 nt, Artificial Sequence
  Description of Artificial Sequence: Synthetic oligonucleotide
aauauuguugaccaagaca

SEQ ID NO: 2699319 - RNA, 19 nt, Artificial Sequence
  Description of Artificial Sequence: Synthetic oligonucleotide
uaaguaaguacacaguuca

SEQ ID NO: 2699320 - RNA, 19 nt, Artificial Sequence
  Description of Artificial Sequence: Synthetic oligonucleotide
aguucaaacaaaccaaagg

SEQ ID NO: 2699321 - RNA, 19 nt, Artificial Sequence
  Description of Artificial Sequence: Synthetic oligonucleotide
ugcuaugugaguaaguaag

SEQ ID NO: 2699322 - RNA, 19 nt, Artificial Sequence
  Description of Artificial Sequence: Synthetic oligonucleotide
ucaaacaaaccaaaggucu

SEQ ID NO: 2699323 - RNA, 19 nt, Artificial Sequence
  Description of Artificial Sequence: Synthetic oligonucleotide
uguaauggagauucuauag

SEQ ID NO: 2699324 - RNA, 19 nt, Artificial Sequence
  Description of Artificial Sequence: Synthetic oligonucleotide
uucuguaaaauauuguuga

SEQ ID NO: 2699325 - RNA, 19 nt, Artificial Sequence
  Description of Artificial Sequence: Synthetic oligonucleotide
aaauauuguugaccaagac

SEQ ID NO: 2699326 - RNA, 19 nt, Artificial Sequence
  Description of Artificial Sequence: Synthetic oligonucleotide
uaugaauguuucuugaggc

SEQ ID NO: 2699327 - RNA, 19 nt, Artificial Sequence
  Description of Artificial Sequence: Synthetic oligonucleotide
uacuuguacacucagguca

SEQ ID NO: 2699328 - RNA, 19 nt, Artificial Sequence
  Description of Artificial Sequence: Synthetic oligonucleotide
gauucuauaggcaauaguc

SEQ ID NO: 2699329 - RNA, 19 nt, Artificial Sequence
  Description of Artificial Sequence: Synthetic oligonucleotide
aaguucuguagcuagguug

SEQ ID NO: 2699330 - RNA, 19 nt, Artificial Sequence
  Description of Artificial Sequence: Synthetic oligonucleotide
uaauggagauucuauaggc

SEQ ID NO: 2699331 - RNA, 19 nt, Artificial Sequence
  Description of Artificial Sequence: Synthetic oligonucleotide
ugcuuggagaaccaggagg

SEQ ID NO: 2699332 - RNA, 19 nt, Artificial Sequence
  Description of Artificial Sequence: Synthetic oligonucleotide
uacagaaacuguuuccugg

SEQ ID NO: 2699333 - RNA, 19 nt, Artificial Sequence
  Description of Artificial Sequence: Synthetic oligonucleotide
aaguacacaguucaaacaa

SEQ ID NO: 2699334 - RNA, 19 nt, Artificial Sequence
  Description of Artificial Sequence: Synthetic oligonucleotide
aggguaaacuccugaaucc

SEQ ID NO: 2699335 - RNA, 19 nt, Artificial Sequence
  Description of Artificial Sequence: Synthetic oligonucleotide
guaugaauguuucuugagg

SEQ ID NO: 2699336 - RNA, 19 nt, Artificial Sequence
  Description of Artificial Sequence: Synthetic oligonucleotide
uguugaccaagacaacucg

SEQ ID NO: 2699337 - RNA, 19 nt, Artificial Sequence
  Description of Artificial Sequence: Synthetic oligonucleotide
guaauggagauucuauagg

SEQ ID NO: 2699338 - RNA, 19 nt, Artificial Sequence
  Description of Artificial Sequence: Synthetic oligonucleotide
agcuucuuaacauaggggu

SEQ ID NO: 2699339 - RNA, 19 nt, Artificial Sequence
  Description of Artificial Sequence: Synthetic oligonucleotide
auucuauaggcaauagucc

SEQ ID NO: 2699340 - RNA, 19 nt, Artificial Sequence
  Description of Artificial Sequence: Synthetic oligonucleotide
ugguuuaaccgccuuagcc

SEQ ID NO: 2699341 - RNA, 19 nt, Artificial Sequence
  Description of Artificial Sequence: Synthetic oligonucleotide
augucuaccaaagcaaggc

SEQ ID NO: 2699342 - RNA, 19 nt, Artificial Sequence
  Description of Artificial Sequence: Synthetic oligonucleotide
accaagacaacucgucgcc

SEQ ID NO: 2699343 - RNA, 19 nt, Artificial Sequence
  Description of Artificial Sequence: Synthetic oligonucleotide
uucaaacaaaccaaagguc

SEQ ID NO: 2699344 - RNA, 19 nt, Artificial Sequence
  Description of Artificial Sequence: Synthetic oligonucleotide
ugaccaagacaacucgucg

SEQ ID NO: 2699345 - RNA, 19 nt, Artificial Sequence
  Description of Artificial Sequence: Synthetic oligonucleotide
uuauuguuugcuuggagaa

SEQ ID NO: 2699346 - RNA, 19 nt, Artificial Sequence
  Description of Artificial Sequence: Synthetic oligonucleotide
uucuauaggcaauaguccu

SEQ ID NO: 2699347 - RNA, 19 nt, Artificial Sequence
  Description of Artificial Sequence: Synthetic oligonucleotide
ucuaccaaagcaaggcagc

SEQ ID NO: 2699348 - RNA, 19 nt, Artificial Sequence
  Description of Artificial Sequence: Synthetic oligonucleotide
gguuuaaccgccuuagccg

SEQ ID NO: 2699349 - RNA, 19 nt, Artificial Sequence
  Description of Artificial Sequence: Synthetic oligonucleotide
gaaacuguuuccuggaauc

SEQ ID NO: 2699350 - RNA, 19 nt, Artificial Sequence
  Description of Artificial Sequence: Synthetic oligonucleotide
uaggcaauaguccugcagu

SEQ ID NO: 2699351 - RNA, 19 nt, Artificial Sequence
  Description of Artificial Sequence: Synthetic oligonucleotide
caagcuguaauggagauuc

SEQ ID NO: 2699352 - RNA, 19 nt, Artificial Sequence
  Description of Artificial Sequence: Synthetic oligonucleotide
aguaugaauguuucuugag

SEQ ID NO: 2699353 - RNA, 19 nt, Artificial Sequence
  Description of Artificial Sequence: Synthetic oligonucleotide
ugggcauucuguaaaauau

SEQ ID NO: 2699354 - RNA, 19 nt, Artificial Sequence
  Description of Artificial Sequence: Synthetic oligonucleotide
uacacucaggucaugggcc

SEQ ID NO: 2699355 - RNA, 19 nt, Artificial Sequence
  Description of Artificial Sequence: Synthetic oligonucleotide
uggagaacaguacuuguac

SEQ ID NO: 2699356 - RNA, 19 nt, Artificial Sequence
  Description of Artificial Sequence: Synthetic oligonucleotide
aaagcaaggcagcuggaga

SEQ ID NO: 2699357 - RNA, 19 nt, Artificial Sequence
  Description of Artificial Sequence: Synthetic oligonucleotide
gagaacaguacuuguacac

SEQ ID NO: 2699358 - RNA, 19 nt, Artificial Sequence
  Description of Artificial Sequence: Synthetic oligonucleotide
uacacaguucaaacaaacc

SEQ ID NO: 2699359 - RNA, 19 nt, Artificial Sequence
  Description of Artificial Sequence: Synthetic oligonucleotide
ucgcaugucuaccaaagca

SEQ ID NO: 2699360 - RNA, 19 nt, Artificial Sequence
  Description of Artificial Sequence: Synthetic oligonucleotide
uguuucuugaggcugcuau

SEQ ID NO: 2699361 - RNA, 19 nt, Artificial Sequence
  Description of Artificial Sequence: Synthetic oligonucleotide
aaccaggaggguaaacucc

SEQ ID NO: 2699362 - RNA, 19 nt, Artificial Sequence
  Description of Artificial Sequence: Synthetic oligonucleotide
ugucaauuuguucccggag

SEQ ID NO: 2699363 - RNA, 19 nt, Artificial Sequence
  Description of Artificial Sequence: Synthetic oligonucleotide
agguugucaauuuguuccc

SEQ ID NO: 2699364 - RNA, 19 nt, Artificial Sequence
  Description of Artificial Sequence: Synthetic oligonucleotide
caacacugugguuuaaccg

SEQ ID NO: 2699365 - RNA, 19 nt, Artificial Sequence
  Description of Artificial Sequence: Synthetic oligonucleotide
guucaaacaaaccaaaggu

SEQ ID NO: 2699366 - RNA, 19 nt, Artificial Sequence
  Description of Artificial Sequence: Synthetic oligonucleotide
uguacacucaggucauggg

SEQ ID NO: 2699367 - RNA, 19 nt, Artificial Sequence
  Description of Artificial Sequence: Synthetic oligonucleotide
cuguaaaauauuguugacc

SEQ ID NO: 2699368 - RNA, 19 nt, Artificial Sequence
  Description of Artificial Sequence: Synthetic oligonucleotide
ugugguuuaaccgccuuag

SEQ ID NO: 2699369 - RNA, 19 nt, Artificial Sequence
  Description of Artificial Sequence: Synthetic oligonucleotide
gaggguaaacuccugaauc

SEQ ID NO: 2699370 - RNA, 19 nt, Artificial Sequence
  Description of Artificial Sequence: Synthetic oligonucleotide
ugaauguuucuugaggcug

SEQ ID NO: 2699371 - RNA, 19 nt, Artificial Sequence
  Description of Artificial Sequence: Synthetic oligonucleotide
aagacaacucgucgccugg

SEQ ID NO: 2699372 - RNA, 19 nt, Artificial Sequence
  Description of Artificial Sequence: Synthetic oligonucleotide
ugugaguaaguaaguacac

SEQ ID NO: 2699373 - RNA, 19 nt, Artificial Sequence
  Description of Artificial Sequence: Synthetic oligonucleotide
cuucuuaacauaggggucc

SEQ ID NO: 2699374 - RNA, 19 nt, Artificial Sequence
  Description of Artificial Sequence: Synthetic oligonucleotide
uagggguccagauccaggg

SEQ ID NO: 2699375 - RNA, 19 nt, Artificial Sequence
  Description of Artificial Sequence: Synthetic oligonucleotide
cuuauuguuugcuuggaga

SEQ ID NO: 2699376 - RNA, 19 nt, Artificial Sequence
  Description of Artificial Sequence: Synthetic oligonucleotide
cuugaggcugcuaugugag

SEQ ID NO: 2699377 - RNA, 19 nt, Artificial Sequence
  Description of Artificial Sequence: Synthetic oligonucleotide
uccggcaaaguucuguagc

SEQ ID NO: 2699378 - RNA, 19 nt, Artificial Sequence
  Description of Artificial Sequence: Synthetic oligonucleotide
uguacagcgggucguagga

SEQ ID NO: 2699379 - RNA, 19 nt, Artificial Sequence
  Description of Artificial Sequence: Synthetic oligonucleotide
cauugauccggcaaaguuc

SEQ ID NO: 2699380 - RNA, 19 nt, Artificial Sequence
  Description of Artificial Sequence: Synthetic oligonucleotide
aaucuucgcaugucuacca

SEQ ID NO: 2699381 - RNA, 19 nt, Artificial Sequence
  Description of Artificial Sequence: Synthetic oligonucleotide
auaggcaauaguccugcag

SEQ ID NO: 2699382 - RNA, 19 nt, Artificial Sequence
  Description of Artificial Sequence: Synthetic oligonucleotide
uaaacuccugaauccagca

SEQ ID NO: 2699383 - RNA, 19 nt, Artificial Sequence
  Description of Artificial Sequence: Synthetic oligonucleotide
caaaggucuacagaaacug

SEQ ID NO: 2699384 - RNA, 19 nt, Artificial Sequence
  Description of Artificial Sequence: Synthetic oligonucleotide
gucaauuuguucccggagc

SEQ ID NO: 2699385 - RNA, 19 nt, Artificial Sequence
  Description of Artificial Sequence: Synthetic oligonucleotide
uuaacauagggguccagau

SEQ ID NO: 2699386 - RNA, 19 nt, Artificial Sequence
  Description of Artificial Sequence: Synthetic oligonucleotide
uuuccuuggcaacacugug

SEQ ID NO: 2699387 - RNA, 19 nt, Artificial Sequence
  Description of Artificial Sequence: Synthetic oligonucleotide
cuucgcaugucuaccaaag

SEQ ID NO: 2699388 - RNA, 19 nt, Artificial Sequence
  Description of Artificial Sequence: Synthetic oligonucleotide
ucauugauccggcaaaguu

SEQ ID NO: 2699389 - RNA, 19 nt, Artificial Sequence
  Description of Artificial Sequence: Synthetic oligonucleotide
acaaaccaaaggucuacag

SEQ ID NO: 2699390 - RNA, 19 nt, Artificial Sequence
  Description of Artificial Sequence: Synthetic oligonucleotide
caugucuaccaaagcaagg

SEQ ID NO: 2699391 - RNA, 19 nt, Artificial Sequence
  Description of Artificial Sequence: Synthetic oligonucleotide
ucuugaggcugcuauguga

SEQ ID NO: 2699392 - RNA, 19 nt, Artificial Sequence
  Description of Artificial Sequence: Synthetic oligonucleotide
ucguaggaacuccaggagc

SEQ ID NO: 2699393 - RNA, 19 nt, Artificial Sequence
  Description of Artificial Sequence: Synthetic oligonucleotide
uuuccuggaaucuucgcau

SEQ ID NO: 2699394 - RNA, 19 nt, Artificial Sequence
  Description of Artificial Sequence: Synthetic oligonucleotide
uuguacacucaggucaugg

SEQ ID NO: 2699395 - RNA, 19 nt, Artificial Sequence
  Description of Artificial Sequence: Synthetic oligonucleotide
guugucaauuuguucccgg

SEQ ID NO: 2699396 - RNA, 19 nt, Artificial Sequence
  Description of Artificial Sequence: Synthetic oligonucleotide
gaccaagacaacucgucgc

SEQ ID NO: 2699397 - RNA, 19 nt, Artificial Sequence
  Description of Artificial Sequence: Synthetic oligonucleotide
gaacaguacuuguacacuc

SEQ ID NO: 2699398 - RNA, 19 nt, Artificial Sequence
  Description of Artificial Sequence: Synthetic oligonucleotide
aagcaaggcagcuggagaa

SEQ ID NO: 2699399 - RNA, 19 nt, Artificial Sequence
  Description of Artificial Sequence: Synthetic oligonucleotide
uugaccaagacaacucguc

SEQ ID NO: 2699400 - RNA, 19 nt, Artificial Sequence
  Description of Artificial Sequence: Synthetic oligonucleotide
uccuuggcaacacuguggu

SEQ ID NO: 2699401 - RNA, 19 nt, Artificial Sequence
  Description of Artificial Sequence: Synthetic oligonucleotide
ugucuaccaaagcaaggca

SEQ ID NO: 2699402 - RNA, 19 nt, Artificial Sequence
  Description of Artificial Sequence: Synthetic oligonucleotide
aucacgaacugcccugacg

SEQ ID NO: 2699403 - RNA, 19 nt, Artificial Sequence
  Description of Artificial Sequence: Synthetic oligonucleotide
ucuguagcuagguugucaa

SEQ ID NO: 2699404 - RNA, 19 nt, Artificial Sequence
  Description of Artificial Sequence: Synthetic oligonucleotide
uccagcauugcucuccuuc

SEQ ID NO: 2699405 - RNA, 19 nt, Artificial Sequence
  Description of Artificial Sequence: Synthetic oligonucleotide
aauggagauucuauaggca

SEQ ID NO: 2699406 - RNA, 19 nt, Artificial Sequence
  Description of Artificial Sequence: Synthetic oligonucleotide
cauuaagcagcuucuuaac

SEQ ID NO: 2699407 - RNA, 19 nt, Artificial Sequence
  Description of Artificial Sequence: Synthetic oligonucleotide
cagcuuauuguuugcuugg

SEQ ID NO: 2699408 - RNA, 19 nt, Artificial Sequence
  Description of Artificial Sequence: Synthetic oligonucleotide
agauucuauaggcaauagu

SEQ ID NO: 2699409 - RNA, 19 nt, Artificial Sequence
  Description of Artificial Sequence: Synthetic oligonucleotide
ggaagcacaagcuguaaug

SEQ ID NO: 2699410 - RNA, 19 nt, Artificial Sequence
  Description of Artificial Sequence: Synthetic oligonucleotide
guuugcuuggagaaccagg

SEQ ID NO: 2699411 - RNA, 19 nt, Artificial Sequence
  Description of Artificial Sequence: Synthetic oligonucleotide
uccugaauccagcauugcu

SEQ ID NO: 2699412 - RNA, 19 nt, Artificial Sequence
  Description of Artificial Sequence: Synthetic oligonucleotide
gaaucuucgcaugucuacc

SEQ ID NO: 2699413 - RNA, 19 nt, Artificial Sequence
  Description of Artificial Sequence: Synthetic oligonucleotide
augaauguuucuugaggcu

SEQ ID NO: 2699414 - RNA, 19 nt, Artificial Sequence
  Description of Artificial Sequence: Synthetic oligonucleotide
uuucuugaggcugcuaugu

SEQ ID NO: 2699415 - RNA, 19 nt, Artificial Sequence
  Description of Artificial Sequence: Synthetic oligonucleotide
auugauccggcaaaguucu

SEQ ID NO: 2699416 - RNA, 19 nt, Artificial Sequence
  Description of Artificial Sequence: Synthetic oligonucleotide
caccuucugauccucauug

SEQ ID NO: 2699417 - RNA, 19 nt, Artificial Sequence
  Description of Artificial Sequence: Synthetic oligonucleotide
aguccugcaguaugaaugu

SEQ ID NO: 2699418 - RNA, 19 nt, Artificial Sequence
  Description of Artificial Sequence: Synthetic oligonucleotide
uccucauugauccggcaaa

SEQ ID NO: 2699419 - RNA, 19 nt, Artificial Sequence
  Description of Artificial Sequence: Synthetic oligonucleotide
caguucaaacaaaccaaag

SEQ ID NO: 2699420 - RNA, 19 nt, Artificial Sequence
  Description of Artificial Sequence: Synthetic oligonucleotide
ucggcaaagaggucgcggc

SEQ ID NO: 2699421 - RNA, 19 nt, Artificial Sequence
  Description of Artificial Sequence: Synthetic oligonucleotide
uucucugaccgcgugcacg

SEQ ID NO: 2699422 - RNA, 19 nt, Artificial Sequence
  Description of Artificial Sequence: Synthetic oligonucleotide
uaacauagggguccagauc

SEQ ID NO: 2699423 - RNA, 19 nt, Artificial Sequence
  Description of Artificial Sequence: Synthetic oligonucleotide
agcacaagcuguaauggag

SEQ ID NO: 2699424 - RNA, 19 nt, Artificial Sequence
  Description of Artificial Sequence: Synthetic oligonucleotide
ugauccucauugauccggc

SEQ ID NO: 2699425 - RNA, 19 nt, Artificial Sequence
  Description of Artificial Sequence: Synthetic oligonucleotide
cuggcuuucucugaccgcg

SEQ ID NO: 2699426 - RNA, 19 nt, Artificial Sequence
  Description of Artificial Sequence: Synthetic oligonucleotide
aguaaguacacaguucaaa

SEQ ID NO: 2699427 - RNA, 19 nt, Artificial Sequence
  Description of Artificial Sequence: Synthetic oligonucleotide
gucgagcugcuguacagcg

SEQ ID NO: 2699428 - RNA, 19 nt, Artificial Sequence
  Description of Artificial Sequence: Synthetic oligonucleotide
agaaacuguuuccuggaau

SEQ ID NO: 2699429 - RNA, 19 nt, Artificial Sequence
  Description of Artificial Sequence: Synthetic oligonucleotide
uaagcagcuucuuaacaua

SEQ ID NO: 2699430 - RNA, 19 nt, Artificial Sequence
  Description of Artificial Sequence: Synthetic oligonucleotide
cuagguugucaauuuguuc

SEQ ID NO: 2699431 - RNA, 19 nt, Artificial Sequence
  Description of Artificial Sequence: Synthetic oligonucleotide
acuguuuccuggaaucuuc

SEQ ID NO: 2699432 - RNA, 19 nt, Artificial Sequence
  Description of Artificial Sequence: Synthetic oligonucleotide
uugucaauuuguucccgga

SEQ ID NO: 2699433 - RNA, 19 nt, Artificial Sequence
  Description of Artificial Sequence: Synthetic oligonucleotide
aauccagcauugcucuccu

SEQ ID NO: 2699434 - RNA, 19 nt, Artificial Sequence
  Description of Artificial Sequence: Synthetic oligonucleotide
uucgcaugucuaccaaagc

SEQ ID NO: 2699435 - RNA, 19 nt, Artificial Sequence
  Description of Artificial Sequence: Synthetic oligonucleotide
guuuccuggaaucuucgca

SEQ ID NO: 2699436 - RNA, 19 nt, Artificial Sequence
  Description of Artificial Sequence: Synthetic oligonucleotide
ugcacgugagagucgagcu

SEQ ID NO: 2699437 - RNA, 19 nt, Artificial Sequence
  Description of Artificial Sequence: Synthetic oligonucleotide
uguagcuagguugucaauu

SEQ ID NO: 2699438 - RNA, 19 nt, Artificial Sequence
  Description of Artificial Sequence: Synthetic oligonucleotide
aaaguucuguagcuagguu

SEQ ID NO: 2699439 - RNA, 19 nt, Artificial Sequence
  Description of Artificial Sequence: Synthetic oligonucleotide
aagaggucgcggccugugg

SEQ ID NO: 2699440 - RNA, 19 nt, Artificial Sequence
  Description of Artificial Sequence: Synthetic oligonucleotide
agcauugcucuccuucgag

SEQ ID NO: 2699441 - RNA, 19 nt, Artificial Sequence
  Description of Artificial Sequence: Synthetic oligonucleotide
ucugauccucauugauccg

SEQ ID NO: 2699442 - RNA, 19 nt, Artificial Sequence
  Description of Artificial Sequence: Synthetic oligonucleotide
agaggucgcggccuguggg

SEQ ID NO: 2699443 - RNA, 19 nt, Artificial Sequence
  Description of Artificial Sequence: Synthetic oligonucleotide
uauuguugaccaagacaac

SEQ ID NO: 2699444 - RNA, 19 nt, Artificial Sequence
  Description of Artificial Sequence: Synthetic oligonucleotide
gucuaccaaagcaaggcag

SEQ ID NO: 2699445 - RNA, 19 nt, Artificial Sequence
  Description of Artificial Sequence: Synthetic oligonucleotide
agcggaaccggccgcggcc

SEQ ID NO: 2699446 - RNA, 19 nt, Artificial Sequence
  Description of Artificial Sequence: Synthetic oligonucleotide
cuguuuccuggaaucuucg

SEQ ID NO: 2699447 - RNA, 19 nt, Artificial Sequence
  Description of Artificial Sequence: Synthetic oligonucleotide
cuucgagcuguuuccuugg

SEQ ID NO: 2699448 - RNA, 19 nt, Artificial Sequence
  Description of Artificial Sequence: Synthetic oligonucleotide
gagucgagcugcuguacag

SEQ ID NO: 2699449 - RNA, 19 nt, Artificial Sequence
  Description of Artificial Sequence: Synthetic oligonucleotide
aguucuguagcuagguugu

SEQ ID NO: 2699450 - RNA, 19 nt, Artificial Sequence
  Description of Artificial Sequence: Synthetic oligonucleotide
aaacuccugaauccagcau

SEQ ID NO: 2699451 - RNA, 19 nt, Artificial Sequence
  Description of Artificial Sequence: Synthetic oligonucleotide
aacaguacuuguacacuca

SEQ ID NO: 2699452 - RNA, 19 nt, Artificial Sequence
  Description of Artificial Sequence: Synthetic oligonucleotide
gucguaggaacuccaggag

SEQ ID NO: 2699453 - RNA, 19 nt, Artificial Sequence
  Description of Artificial Sequence: Synthetic oligonucleotide
guaaacuccugaauccagc

SEQ ID NO: 2699454 - RNA, 19 nt, Artificial Sequence
  Description of Artificial Sequence: Synthetic oligonucleotide
guacacaguucaaacaaac

SEQ ID NO: 2699455 - RNA, 19 nt, Artificial Sequence
  Description of Artificial Sequence: Synthetic oligonucleotide
uggagauucuauaggcaau

SEQ ID NO: 2699456 - RNA, 19 nt, Artificial Sequence
  Description of Artificial Sequence: Synthetic oligonucleotide
aaaggucuacagaaacugu

SEQ ID NO: 2699457 - RNA, 19 nt, Artificial Sequence
  Description of Artificial Sequence: Synthetic oligonucleotide
agaacaguacuuguacacu

SEQ ID NO: 2699458 - RNA, 19 nt, Artificial Sequence
  Description of Artificial Sequence: Synthetic oligonucleotide
uguuuccuggaaucuucgc

SEQ ID NO: 2699459 - RNA, 19 nt, Artificial Sequence
  Description of Artificial Sequence: Synthetic oligonucleotide
guuucuugaggcugcuaug

SEQ ID NO: 2699460 - RNA, 19 nt, Artificial Sequence
  Description of Artificial Sequence: Synthetic oligonucleotide
cuacagaaacuguuuccug

SEQ ID NO: 2699461 - RNA, 19 nt, Artificial Sequence
  Description of Artificial Sequence: Synthetic oligonucleotide
agucgagcugcuguacagc

SEQ ID NO: 2699462 - RNA, 19 nt, Artificial Sequence
  Description of Artificial Sequence: Synthetic oligonucleotide
uacagcgggucguaggaac

SEQ ID NO: 2699463 - RNA, 19 nt, Artificial Sequence
  Description of Artificial Sequence: Synthetic oligonucleotide
uucuugaggcugcuaugug

SEQ ID NO: 2699464 - RNA, 19 nt, Artificial Sequence
  Description of Artificial Sequence: Synthetic oligonucleotide
uccugcaguaugaauguuu

SEQ ID NO: 2699465 - RNA, 19 nt, Artificial Sequence
  Description of Artificial Sequence: Synthetic oligonucleotide
cacgugagagucgagcugc

SEQ ID NO: 2699466 - RNA, 19 nt, Artificial Sequence
  Description of Artificial Sequence: Synthetic oligonucleotide
gagauucuauaggcaauag

SEQ ID NO: 2699467 - RNA, 19 nt, Artificial Sequence
  Description of Artificial Sequence: Synthetic oligonucleotide
ucgagcugcuguacagcgg

SEQ ID NO: 2699468 - RNA, 19 nt, Artificial Sequence
  Description of Artificial Sequence: Synthetic oligonucleotide
uagcuagguugucaauuug

SEQ ID NO: 2699469 - RNA, 19 nt, Artificial Sequence
  Description of Artificial Sequence: Synthetic oligonucleotide
caagacaacucgucgccug

SEQ ID NO: 2699470 - RNA, 19 nt, Artificial Sequence
  Description of Artificial Sequence: Synthetic oligonucleotide
cuguacagcgggucguagg

SEQ ID NO: 2699471 - RNA, 19 nt, Artificial Sequence
  Description of Artificial Sequence: Synthetic oligonucleotide
gcaguaugaauguuucuug

SEQ ID NO: 2699472 - RNA, 19 nt, Artificial Sequence
  Description of Artificial Sequence: Synthetic oligonucleotide
ugacacggcagcggaaccg

SEQ ID NO: 2699473 - RNA, 19 nt, Artificial Sequence
  Description of Artificial Sequence: Synthetic oligonucleotide
uauuguuugcuuggagaac

SEQ ID NO: 2699474 - RNA, 19 nt, Artificial Sequence
  Description of Artificial Sequence: Synthetic oligonucleotide
gucgccuggcauuaagcag

SEQ ID NO: 2699475 - RNA, 19 nt, Artificial Sequence
  Description of Artificial Sequence: Synthetic oligonucleotide
ggcauucuguaaaauauug

SEQ ID NO: 2699476 - RNA, 19 nt, Artificial Sequence
  Description of Artificial Sequence: Synthetic oligonucleotide
uguucccggagcucuaccu

SEQ ID NO: 2699477 - RNA, 19 nt, Artificial Sequence
  Description of Artificial Sequence: Synthetic oligonucleotide
gcaauaguccugcaguaug

SEQ ID NO: 2699478 - RNA, 19 nt, Artificial Sequence
  Description of Artificial Sequence: Synthetic oligonucleotide
uucuguagcuagguuguca

SEQ ID NO: 2699479 - RNA, 19 nt, Artificial Sequence
  Description of Artificial Sequence: Synthetic oligonucleotide
uggaagcacaagcuguaau

SEQ ID NO: 2699480 - RNA, 19 nt, Artificial Sequence
  Description of Artificial Sequence: Synthetic oligonucleotide
cucuccuucgagcuguuuc

SEQ ID NO: 2699481 - RNA, 19 nt, Artificial Sequence
  Description of Artificial Sequence: Synthetic oligonucleotide
ucucugaccgcgugcacgu

SEQ ID NO: 2699482 - RNA, 19 nt, Artificial Sequence
  Description of Artificial Sequence: Synthetic oligonucleotide
ucugaccgcgugcacguga

SEQ ID NO: 2699483 - RNA, 19 nt, Artificial Sequence
  Description of Artificial Sequence: Synthetic oligonucleotide
aauaguccugcaguaugaa

SEQ ID NO: 2699484 - RNA, 19 nt, Artificial Sequence
  Description of Artificial Sequence: Synthetic oligonucleotide
uuguuugcuuggagaacca

SEQ ID NO: 2699485 - RNA, 19 nt, Artificial Sequence
  Description of Artificial Sequence: Synthetic oligonucleotide
ucgucgccuggcauuaagc

SEQ ID NO: 2699486 - RNA, 19 nt, Artificial Sequence
  Description of Artificial Sequence: Synthetic oligonucleotide
uguuugcuuggagaaccag

SEQ ID NO: 2699487 - RNA, 19 nt, Artificial Sequence
  Description of Artificial Sequence: Synthetic oligonucleotide
ggaaucuucgcaugucuac

SEQ ID NO: 2699488 - RNA, 19 nt, Artificial Sequence
  Description of Artificial Sequence: Synthetic oligonucleotide
ucgagcuguuuccuuggca

SEQ ID NO: 2699489 - RNA, 19 nt, Artificial Sequence
  Description of Artificial Sequence: Synthetic oligonucleotide
ugugggccccgccacuggg

SEQ ID NO: 2699490 - RNA, 19 nt, Artificial Sequence
  Description of Artificial Sequence: Synthetic oligonucleotide
uggaaucuucgcaugucua

SEQ ID NO: 2699491 - RNA, 19 nt, Artificial Sequence
  Description of Artificial Sequence: Synthetic oligonucleotide
cucuaccuggcuuucucug

SEQ ID NO: 2699492 - RNA, 19 nt, Artificial Sequence
  Description of Artificial Sequence: Synthetic oligonucleotide
caguaugaauguuucuuga

SEQ ID NO: 2699493 - RNA, 19 nt, Artificial Sequence
  Description of Artificial Sequence: Synthetic oligonucleotide
aggucaugggcccagcuua

SEQ ID NO: 2699494 - RNA, 19 nt, Artificial Sequence
  Description of Artificial Sequence: Synthetic oligonucleotide
aaagaggucgcggccugug

SEQ ID NO: 2699495 - RNA, 19 nt, Artificial Sequence
  Description of Artificial Sequence: Synthetic oligonucleotide
auugcucuccuucgagcug

SEQ ID NO: 2699496 - RNA, 19 nt, Artificial Sequence
  Description of Artificial Sequence: Synthetic oligonucleotide
gcaacacugugguuuaacc

SEQ ID NO: 2699497 - RNA, 19 nt, Artificial Sequence
  Description of Artificial Sequence: Synthetic oligonucleotide
gacacggcagcggaaccgg

SEQ ID NO: 2699498 - RNA, 19 nt, Artificial Sequence
  Description of Artificial Sequence: Synthetic oligonucleotide
caauaguccugcaguauga

SEQ ID NO: 2699499 - RNA, 19 nt, Artificial Sequence
  Description of Artificial Sequence: Synthetic oligonucleotide
ggucguaggaacuccagga

SEQ ID NO: 2699500 - RNA, 19 nt, Artificial Sequence
  Description of Artificial Sequence: Synthetic oligonucleotide
agcuggagaacaguacuug

SEQ ID NO: 2699501 - RNA, 19 nt, Artificial Sequence
  Description of Artificial Sequence: Synthetic oligonucleotide
gucccugccccugacacgg

SEQ ID NO: 2699502 - RNA, 19 nt, Artificial Sequence
  Description of Artificial Sequence: Synthetic oligonucleotide
ucuucgcaugucuaccaaa

SEQ ID NO: 2699503 - RNA, 19 nt, Artificial Sequence
  Description of Artificial Sequence: Synthetic oligonucleotide
gcauuaagcagcuucuuaa

SEQ ID NO: 2699504 - RNA, 19 nt, Artificial Sequence
  Description of Artificial Sequence: Synthetic oligonucleotide
gaccgcgugcacgugagag

SEQ ID NO: 2699505 - RNA, 19 nt, Artificial Sequence
  Description of Artificial Sequence: Synthetic oligonucleotide
ugagagucgagcugcugua

SEQ ID NO: 2699506 - RNA, 19 nt, Artificial Sequence
  Description of Artificial Sequence: Synthetic oligonucleotide
cuuaacauagggguccaga

SEQ ID NO: 2699507 - RNA, 19 nt, Artificial Sequence
  Description of Artificial Sequence: Synthetic oligonucleotide
agagucgagcugcuguaca

SEQ ID NO: 2699508 - RNA, 19 nt, Artificial Sequence
  Description of Artificial Sequence: Synthetic oligonucleotide
acaguucaaacaaaccaaa

SEQ ID NO: 2699509 - RNA, 19 nt, Artificial Sequence
  Description of Artificial Sequence: Synthetic oligonucleotide
auccucauugauccggcaa

SEQ ID NO: 2699510 - RNA, 19 nt, Artificial Sequence
  Description of Artificial Sequence: Synthetic oligonucleotide
ccagcuuauuguuugcuug

SEQ ID NO: 2699511 - RNA, 19 nt, Artificial Sequence
  Description of Artificial Sequence: Synthetic oligonucleotide
auaguccugcaguaugaau

SEQ ID NO: 2699512 - RNA, 19 nt, Artificial Sequence
  Description of Artificial Sequence: Synthetic oligonucleotide
agcuagguugucaauuugu

SEQ ID NO: 2699513 - RNA, 19 nt, Artificial Sequence
  Description of Artificial Sequence: Synthetic oligonucleotide
guaaaauauuguugaccaa

SEQ ID NO: 2699514 - RNA, 19 nt, Artificial Sequence
  Description of Artificial Sequence: Synthetic oligonucleotide
cuaccuggcuuucucugac

SEQ ID NO: 2699515 - RNA, 19 nt, Artificial Sequence
  Description of Artificial Sequence: Synthetic oligonucleotide
agcaaggcagcuggagaac

SEQ ID NO: 2699516 - RNA, 19 nt, Artificial Sequence
  Description of Artificial Sequence: Synthetic oligonucleotide
uucgagcuguuuccuuggc

SEQ ID NO: 2699517 - RNA, 19 nt, Artificial Sequence
  Description of Artificial Sequence: Synthetic oligonucleotide
auccggcaaaguucuguag

SEQ ID NO: 2699518 - RNA, 19 nt, Artificial Sequence
  Description of Artificial Sequence: Synthetic oligonucleotide
agacaacucgucgccuggc

SEQ ID NO: 2699519 - RNA, 19 nt, Artificial Sequence
  Description of Artificial Sequence: Synthetic oligonucleotide
auagggguccagauccagg

SEQ ID NO: 2699520 - RNA, 19 nt, Artificial Sequence
  Description of Artificial Sequence: Synthetic oligonucleotide
agcgggucguaggaacucc

SEQ ID NO: 2699521 - RNA, 19 nt, Artificial Sequence
  Description of Artificial Sequence: Synthetic oligonucleotide
gcugcuguacagcgggucg

SEQ ID NO: 2699522 - RNA, 19 nt, Artificial Sequence
  Description of Artificial Sequence: Synthetic oligonucleotide
gagccccucggcaaagagg

SEQ ID NO: 2699523 - RNA, 19 nt, Artificial Sequence
  Description of Artificial Sequence: Synthetic oligonucleotide
uuggagaaccaggagggua

SEQ ID NO: 2699524 - RNA, 19 nt, Artificial Sequence
  Description of Artificial Sequence: Synthetic oligonucleotide
uucuuaacauaggggucca

SEQ ID NO: 2699525 - RNA, 19 nt, Artificial Sequence
  Description of Artificial Sequence: Synthetic oligonucleotide
uuguucccggagcucuacc

SEQ ID NO: 2699526 - RNA, 19 nt, Artificial Sequence
  Description of Artificial Sequence: Synthetic oligonucleotide
ccagcauugcucuccuucg

SEQ ID NO: 2699527 - RNA, 19 nt, Artificial Sequence
  Description of Artificial Sequence: Synthetic oligonucleotide
cuguaauggagauucuaua

SEQ ID NO: 2699528 - RNA, 19 nt, Artificial Sequence
  Description of Artificial Sequence: Synthetic oligonucleotide
uuggcaacacugugguuua

SEQ ID NO: 2699529 - RNA, 19 nt, Artificial Sequence
  Description of Artificial Sequence: Synthetic oligonucleotide
uauaggcaauaguccugca

SEQ ID NO: 2699530 - RNA, 19 nt, Artificial Sequence
  Description of Artificial Sequence: Synthetic oligonucleotide
ggucuacagaaacuguuuc

SEQ ID NO: 2699531 - RNA, 19 nt, Artificial Sequence
  Description of Artificial Sequence: Synthetic oligonucleotide
cucggcaaagaggucgcgg

SEQ ID NO: 2699532 - RNA, 19 nt, Artificial Sequence
  Description of Artificial Sequence: Synthetic oligonucleotide
guuuaaccgccuuagccgu

SEQ ID NO: 2699533 - RNA, 19 nt, Artificial Sequence
  Description of Artificial Sequence: Synthetic oligonucleotide
gugaguaaguaaguacaca

SEQ ID NO: 2699534 - RNA, 19 nt, Artificial Sequence
  Description of Artificial Sequence: Synthetic oligonucleotide
gauccggcaaaguucugua

SEQ ID NO: 2699535 - RNA, 19 nt, Artificial Sequence
  Description of Artificial Sequence: Synthetic oligonucleotide
gaggucgcggccugugggc

SEQ ID NO: 2699536 - RNA, 19 nt, Artificial Sequence
  Description of Artificial Sequence: Synthetic oligonucleotide
guucccggagcucuaccug

SEQ ID NO: 2699537 - RNA, 19 nt, Artificial Sequence
  Description of Artificial Sequence: Synthetic oligonucleotide
ucaggucaugggcccagcu

SEQ ID NO: 2699538 - RNA, 19 nt, Artificial Sequence
  Description of Artificial Sequence: Synthetic oligonucleotide
gggucguaggaacuccagg

SEQ ID NO: 2699539 - RNA, 19 nt, Artificial Sequence
  Description of Artificial Sequence: Synthetic oligonucleotide
cugaccgcgugcacgugag

SEQ ID NO: 2699540 - RNA, 19 nt, Artificial Sequence
  Description of Artificial Sequence: Synthetic oligonucleotide
aaguaaguacacaguucaa

SEQ ID NO: 2699541 - RNA, 19 nt, Artificial Sequence
  Description of Artificial Sequence: Synthetic oligonucleotide
cuuucucugaccgcgugca

SEQ ID NO: 2699542 - RNA, 19 nt, Artificial Sequence
  Description of Artificial Sequence: Synthetic oligonucleotide
agcugcuguacagcggguc

SEQ ID NO: 2699543 - RNA, 19 nt, Artificial Sequence
  Description of Artificial Sequence: Synthetic oligonucleotide
gugguuuaaccgccuuagc

SEQ ID NO: 2699544 - RNA, 19 nt, Artificial Sequence
  Description of Artificial Sequence: Synthetic oligonucleotide
uuaaccgccuuagccguuc

SEQ ID NO: 2699545 - RNA, 19 nt, Artificial Sequence
  Description of Artificial Sequence: Synthetic oligonucleotide
cugggcauucuguaaaaua

SEQ ID NO: 2699546 - RNA, 19 nt, Artificial Sequence
  Description of Artificial Sequence: Synthetic oligonucleotide
accaggaggguaaacuccu

SEQ ID NO: 2699547 - RNA, 19 nt, Artificial Sequence
  Description of Artificial Sequence: Synthetic oligonucleotide
accuucugauccucauuga

SEQ ID NO: 2699548 - RNA, 19 nt, Artificial Sequence
  Description of Artificial Sequence: Synthetic oligonucleotide
gugcacgugagagucgagc

SEQ ID NO: 2699549 - RNA, 19 nt, Artificial Sequence
  Description of Artificial Sequence: Synthetic oligonucleotide
aguacacaguucaaacaaa

SEQ ID NO: 2699550 - RNA, 19 nt, Artificial Sequence
  Description of Artificial Sequence: Synthetic oligonucleotide
gaguaaguaaguacacagu

SEQ ID NO: 2699551 - RNA, 19 nt, Artificial Sequence
  Description of Artificial Sequence: Synthetic oligonucleotide
gaggcugcuaugugaguaa

SEQ ID NO: 2699552 - RNA, 19 nt, Artificial Sequence
  Description of Artificial Sequence: Synthetic oligonucleotide
acaacucgucgccuggcau

SEQ ID NO: 2699553 - RNA, 19 nt, Artificial Sequence
  Description of Artificial Sequence: Synthetic oligonucleotide
gacaacucgucgccuggca

SEQ ID NO: 2699554 - RNA, 19 nt, Artificial Sequence
  Description of Artificial Sequence: Synthetic oligonucleotide
uuuguucccggagcucuac

SEQ ID NO: 2699555 - RNA, 19 nt, Artificial Sequence
  Description of Artificial Sequence: Synthetic oligonucleotide
ucuuaacauagggguccag

SEQ ID NO: 2699556 - RNA, 19 nt, Artificial Sequence
  Description of Artificial Sequence: Synthetic oligonucleotide
uccugggcauucuguaaaa

SEQ ID NO: 2699557 - RNA, 19 nt, Artificial Sequence
  Description of Artificial Sequence: Synthetic oligonucleotide
aggcaauaguccugcagua

SEQ ID NO: 2699558 - RNA, 19 nt, Artificial Sequence
  Description of Artificial Sequence: Synthetic oligonucleotide
gugagagucgagcugcugu

SEQ ID NO: 2699559 - RNA, 19 nt, Artificial Sequence
  Description of Artificial Sequence: Synthetic oligonucleotide
cuggagaacaguacuugua

SEQ ID NO: 2699560 - RNA, 19 nt, Artificial Sequence
  Description of Artificial Sequence: Synthetic oligonucleotide
cuuggcaacacugugguuu

SEQ ID NO: 2699561 - RNA, 19 nt, Artificial Sequence
  Description of Artificial Sequence: Synthetic oligonucleotide
aucuucgcaugucuaccaa

SEQ ID NO: 2699562 - RNA, 19 nt, Artificial Sequence
  Description of Artificial Sequence: Synthetic oligonucleotide
cauagggguccagauccag

SEQ ID NO: 2699563 - RNA, 19 nt, Artificial Sequence
  Description of Artificial Sequence: Synthetic oligonucleotide
gcggccaucacgaacugcc

SEQ ID NO: 2699564 - RNA, 19 nt, Artificial Sequence
  Description of Artificial Sequence: Synthetic oligonucleotide
cucgucgccuggcauuaag

SEQ ID NO: 2699565 - RNA, 19 nt, Artificial Sequence
  Description of Artificial Sequence: Synthetic oligonucleotide
gguugucaauuuguucccg

SEQ ID NO: 2699566 - RNA, 19 nt, Artificial Sequence
  Description of Artificial Sequence: Synthetic oligonucleotide
cacgaacugcccugacgcc

SEQ ID NO: 2699567 - RNA, 19 nt, Artificial Sequence
  Description of Artificial Sequence: Synthetic oligonucleotide
cuaugugaguaaguaagua

SEQ ID NO: 2699568 - RNA, 19 nt, Artificial Sequence
  Description of Artificial Sequence: Synthetic oligonucleotide
gcauugcucuccuucgagc

SEQ ID NO: 2699569 - RNA, 19 nt, Artificial Sequence
  Description of Artificial Sequence: Synthetic oligonucleotide
uuucucugaccgcgugcac

SEQ ID NO: 2699570 - RNA, 19 nt, Artificial Sequence
  Description of Artificial Sequence: Synthetic oligonucleotide
cauugcucuccuucgagcu

SEQ ID NO: 2699571 - RNA, 19 nt, Artificial Sequence
  Description of Artificial Sequence: Synthetic oligonucleotide
agcuuauuguuugcuugga

SEQ ID NO: 2699572 - RNA, 19 nt, Artificial Sequence
  Description of Artificial Sequence: Synthetic oligonucleotide
gccaucacgaacugcccug

SEQ ID NO: 2699573 - RNA, 19 nt, Artificial Sequence
  Description of Artificial Sequence: Synthetic oligonucleotide
ccuucgagcuguuuccuug

SEQ ID NO: 2699574 - RNA, 19 nt, Artificial Sequence
  Description of Artificial Sequence: Synthetic oligonucleotide
cugacacggcagcggaacc

SEQ ID NO: 2699575 - RNA, 19 nt, Artificial Sequence
  Description of Artificial Sequence: Synthetic oligonucleotide
aacucgucgccuggcauua

SEQ ID NO: 2699576 - RNA, 19 nt, Artificial Sequence
  Description of Artificial Sequence: Synthetic oligonucleotide
aggucgcggccugugggcc

SEQ ID NO: 2699577 - RNA, 19 nt, Artificial Sequence
  Description of Artificial Sequence: Synthetic oligonucleotide
cuggcauuaagcagcuucu

SEQ ID NO: 2699578 - RNA, 19 nt, Artificial Sequence
  Description of Artificial Sequence: Synthetic oligonucleotide
uaaccgccuuagccguucc

SEQ ID NO: 2699579 - RNA, 19 nt, Artificial Sequence
  Description of Artificial Sequence: Synthetic oligonucleotide
agcuguaauggagauucua

SEQ ID NO: 2699580 - RNA, 19 nt, Artificial Sequence
  Description of Artificial Sequence: Synthetic oligonucleotide
uugaggcugcuaugugagu

SEQ ID NO: 2699581 - RNA, 19 nt, Artificial Sequence
  Description of Artificial Sequence: Synthetic oligonucleotide
uuggaagcacaagcuguaa

SEQ ID NO: 2699582 - RNA, 19 nt, Artificial Sequence
  Description of Artificial Sequence: Synthetic oligonucleotide
gauccucauugauccggca

SEQ ID NO: 2699583 - RNA, 19 nt, Artificial Sequence
  Description of Artificial Sequence: Synthetic oligonucleotide
acugugguuuaaccgccuu

SEQ ID NO: 2699584 - RNA, 19 nt, Artificial Sequence
  Description of Artificial Sequence: Synthetic oligonucleotide
uuuaaccgccuuagccguu

SEQ ID NO: 2699585 - RNA, 19 nt, Artificial Sequence
  Description of Artificial Sequence: Synthetic oligonucleotide
aaccgccuuagccguuccu

SEQ ID NO: 2699586 - RNA, 19 nt, Artificial Sequence
  Description of Artificial Sequence: Synthetic oligonucleotide
guagcuagguugucaauuu

SEQ ID NO: 2699587 - RNA, 19 nt, Artificial Sequence
  Description of Artificial Sequence: Synthetic oligonucleotide
accgcgugcacgugagagu

SEQ ID NO: 2699588 - RNA, 19 nt, Artificial Sequence
  Description of Artificial Sequence: Synthetic oligonucleotide
augggcccagcuuauuguu

SEQ ID NO: 2699589 - RNA, 19 nt, Artificial Sequence
  Description of Artificial Sequence: Synthetic oligonucleotide
gagagucgagcugcuguac

SEQ ID NO: 2699590 - RNA, 19 nt, Artificial Sequence
  Description of Artificial Sequence: Synthetic oligonucleotide
aggcugcuaugugaguaag

SEQ ID NO: 2699591 - RNA, 19 nt, Artificial Sequence
  Description of Artificial Sequence: Synthetic oligonucleotide
caauuuguucccggagcuc

SEQ ID NO: 2699592 - RNA, 19 nt, Artificial Sequence
  Description of Artificial Sequence: Synthetic oligonucleotide
gcugcuaugugaguaagua

SEQ ID NO: 2699593 - RNA, 19 nt, Artificial Sequence
  Description of Artificial Sequence: Synthetic oligonucleotide
ugggccccgccacuggggu

SEQ ID NO: 2699594 - RNA, 19 nt, Artificial Sequence
  Description of Artificial Sequence: Synthetic oligonucleotide
ugggcccagcuuauuguuu

SEQ ID NO: 2699595 - RNA, 19 nt, Artificial Sequence
  Description of Artificial Sequence: Synthetic oligonucleotide
ggcauuaagcagcuucuua

SEQ ID NO: 2699596 - RNA, 19 nt, Artificial Sequence
  Description of Artificial Sequence: Synthetic oligonucleotide
caaaguucuguagcuaggu

SEQ ID NO: 2699597 - RNA, 19 nt, Artificial Sequence
  Description of Artificial Sequence: Synthetic oligonucleotide
gcuucuuaacauagggguc

SEQ ID NO: 2699598 - RNA, 19 nt, Artificial Sequence
  Description of Artificial Sequence: Synthetic oligonucleotide
cuggaaucuucgcaugucu

SEQ ID NO: 2699599 - RNA, 19 nt, Artificial Sequence
  Description of Artificial Sequence: Synthetic oligonucleotide
ccccucggcaaagaggucg

SEQ ID NO: 2699600 - RNA, 19 nt, Artificial Sequence
  Description of Artificial Sequence: Synthetic oligonucleotide
ggagauucuauaggcaaua

SEQ ID NO: 2699601 - RNA, 19 nt, Artificial Sequence
  Description of Artificial Sequence: Synthetic oligonucleotide
acaagcuguaauggagauu

SEQ ID NO: 2699602 - RNA, 19 nt, Artificial Sequence
  Description of Artificial Sequence: Synthetic oligonucleotide
gggucccugccccugacac

SEQ ID NO: 2699603 - RNA, 19 nt, Artificial Sequence
  Description of Artificial Sequence: Synthetic oligonucleotide
cuccugaauccagcauugc

SEQ ID NO: 2699604 - RNA, 19 nt, Artificial Sequence
  Description of Artificial Sequence: Synthetic oligonucleotide
uccuucgagcuguuuccuu

SEQ ID NO: 2699605 - RNA, 19 nt, Artificial Sequence
  Description of Artificial Sequence: Synthetic oligonucleotide
ggagccccucggcaaagag

SEQ ID NO: 2699606 - RNA, 19 nt, Artificial Sequence
  Description of Artificial Sequence: Synthetic oligonucleotide
gaaccggccgcggccauca

SEQ ID NO: 2699607 - RNA, 19 nt, Artificial Sequence
  Description of Artificial Sequence: Synthetic oligonucleotide
aagcuguaauggagauucu

SEQ ID NO: 2699608 - RNA, 19 nt, Artificial Sequence
  Description of Artificial Sequence: Synthetic oligonucleotide
gccuuagccguuccugggc

SEQ ID NO: 2699609 - RNA, 19 nt, Artificial Sequence
  Description of Artificial Sequence: Synthetic oligonucleotide
gcacgugagagucgagcug

SEQ ID NO: 2699610 - RNA, 19 nt, Artificial Sequence
  Description of Artificial Sequence: Synthetic oligonucleotide
caugggcccagcuuauugu

SEQ ID NO: 2699611 - RNA, 19 nt, Artificial Sequence
  Description of Artificial Sequence: Synthetic oligonucleotide
acagcgggucguaggaacu

SEQ ID NO: 2699612 - RNA, 19 nt, Artificial Sequence
  Description of Artificial Sequence: Synthetic oligonucleotide
uuagccguuccugggcauu

SEQ ID NO: 2699613 - RNA, 19 nt, Artificial Sequence
  Description of Artificial Sequence: Synthetic oligonucleotide
gcaaagaggucgcggccug

SEQ ID NO: 2699614 - RNA, 19 nt, Artificial Sequence
  Description of Artificial Sequence: Synthetic oligonucleotide
guugaccaagacaacucgu

SEQ ID NO: 2699615 - RNA, 19 nt, Artificial Sequence
  Description of Artificial Sequence: Synthetic oligonucleotide
caucacgaacugcccugac

SEQ ID NO: 2699616 - RNA, 19 nt, Artificial Sequence
  Description of Artificial Sequence: Synthetic oligonucleotide
gcacaagcuguaauggaga

SEQ ID NO: 2699617 - RNA, 19 nt, Artificial Sequence
  Description of Artificial Sequence: Synthetic oligonucleotide
cuuguacacucaggucaug

SEQ ID NO: 2699618 - RNA, 19 nt, Artificial Sequence
  Description of Artificial Sequence: Synthetic oligonucleotide
ggcaacacugugguuuaac

SEQ ID NO: 2699619 - RNA, 19 nt, Artificial Sequence
  Description of Artificial Sequence: Synthetic oligonucleotide
uggcauuaagcagcuucuu

SEQ ID NO: 2699620 - RNA, 19 nt, Artificial Sequence
  Description of Artificial Sequence: Synthetic oligonucleotide
ccgccuuagccguuccugg

SEQ ID NO: 2699621 - RNA, 19 nt, Artificial Sequence
  Description of Artificial Sequence: Synthetic oligonucleotide
ggcagcuggagaacaguac

SEQ ID NO: 2699622 - RNA, 19 nt, Artificial Sequence
  Description of Artificial Sequence: Synthetic oligonucleotide
ccugacacggcagcggaac

SEQ ID NO: 2699623 - RNA, 19 nt, Artificial Sequence
  Description of Artificial Sequence: Synthetic oligonucleotide
aaccggccgcggccaucac

SEQ ID NO: 2699624 - RNA, 19 nt, Artificial Sequence
  Description of Artificial Sequence: Synthetic oligonucleotide
ugaccgcgugcacgugaga

SEQ ID NO: 2699625 - RNA, 19 nt, Artificial Sequence
  Description of Artificial Sequence: Synthetic oligonucleotide
uagccguuccugggcauuc

SEQ ID NO: 2699626 - RNA, 19 nt, Artificial Sequence
  Description of Artificial Sequence: Synthetic oligonucleotide
ugcuguacagcgggucgua

SEQ ID NO: 2699627 - RNA, 19 nt, Artificial Sequence
  Description of Artificial Sequence: Synthetic oligonucleotide
cugugguuuaaccgccuua

SEQ ID NO: 2699628 - RNA, 19 nt, Artificial Sequence
  Description of Artificial Sequence: Synthetic oligonucleotide
ccucauugauccggcaaag

SEQ ID NO: 2699629 - RNA, 19 nt, Artificial Sequence
  Description of Artificial Sequence: Synthetic oligonucleotide
gcuguaauggagauucuau

SEQ ID NO: 2699630 - RNA, 19 nt, Artificial Sequence
  Description of Artificial Sequence: Synthetic oligonucleotide
uggggucccugccccugac

SEQ ID NO: 2699631 - RNA, 19 nt, Artificial Sequence
  Description of Artificial Sequence: Synthetic oligonucleotide
ccuggcuuucucugaccgc

SEQ ID NO: 2699632 - RNA, 19 nt, Artificial Sequence
  Description of Artificial Sequence: Synthetic oligonucleotide
ggcccagcuuauuguuugc

SEQ ID NO: 2699633 - RNA, 19 nt, Artificial Sequence
  Description of Artificial Sequence: Synthetic oligonucleotide
gcauucuguaaaauauugu

SEQ ID NO: 2699634 - RNA, 19 nt, Artificial Sequence
  Description of Artificial Sequence: Synthetic oligonucleotide
cgcaugucuaccaaagcaa

SEQ ID NO: 2699635 - RNA, 19 nt, Artificial Sequence
  Description of Artificial Sequence: Synthetic oligonucleotide
gcuggagaacaguacuugu

SEQ ID NO: 2699636 - RNA, 19 nt, Artificial Sequence
  Description of Artificial Sequence: Synthetic oligonucleotide
ccaaaggucuacagaaacu

SEQ ID NO: 2699637 - RNA, 19 nt, Artificial Sequence
  Description of Artificial Sequence: Synthetic oligonucleotide
cagcggaaccggccgcggc

SEQ ID NO: 2699638 - RNA, 19 nt, Artificial Sequence
  Description of Artificial Sequence: Synthetic oligonucleotide
cccucggcaaagaggucgc

SEQ ID NO: 2699639 - RNA, 19 nt, Artificial Sequence
  Description of Artificial Sequence: Synthetic oligonucleotide
cucaggucaugggcccagc

SEQ ID NO: 2699640 - RNA, 19 nt, Artificial Sequence
  Description of Artificial Sequence: Synthetic oligonucleotide
ggcagcggaaccggccgcg

SEQ ID NO: 2699641 - RNA, 19 nt, Artificial Sequence
  Description of Artificial Sequence: Synthetic oligonucleotide
gcaaggcagcuggagaaca

SEQ ID NO: 2699642 - RNA, 19 nt, Artificial Sequence
  Description of Artificial Sequence: Synthetic oligonucleotide
gcuaugugaguaaguaagu

SEQ ID NO: 2699643 - RNA, 19 nt, Artificial Sequence
  Description of Artificial Sequence: Synthetic oligonucleotide
guucuguagcuagguuguc

SEQ ID NO: 2699644 - RNA, 19 nt, Artificial Sequence
  Description of Artificial Sequence: Synthetic oligonucleotide
ggccccgccacuggggucc

SEQ ID NO: 2699645 - RNA, 19 nt, Artificial Sequence
  Description of Artificial Sequence: Synthetic oligonucleotide
cagcgggucguaggaacuc

SEQ ID NO: 2699646 - RNA, 19 nt, Artificial Sequence
  Description of Artificial Sequence: Synthetic oligonucleotide
gcuguacagcgggucguag

SEQ ID NO: 2699647 - RNA, 19 nt, Artificial Sequence
  Description of Artificial Sequence: Synthetic oligonucleotide
caggagccccucggcaaag

SEQ ID NO: 2699648 - RNA, 19 nt, Artificial Sequence
  Description of Artificial Sequence: Synthetic oligonucleotide
gccguuccugggcauucug

SEQ ID NO: 2699649 - RNA, 19 nt, Artificial Sequence
  Description of Artificial Sequence: Synthetic oligonucleotide
cgccuuagccguuccuggg

SEQ ID NO: 2699650 - RNA, 19 nt, Artificial Sequence
  Description of Artificial Sequence: Synthetic oligonucleotide
ccuuagccguuccugggca

SEQ ID NO: 2699651 - RNA, 19 nt, Artificial Sequence
  Description of Artificial Sequence: Synthetic oligonucleotide
cucauugauccggcaaagu

SEQ ID NO: 2699652 - RNA, 19 nt, Artificial Sequence
  Description of Artificial Sequence: Synthetic oligonucleotide
gucgcggccugugggcccc

SEQ ID NO: 2699653 - RNA, 19 nt, Artificial Sequence
  Description of Artificial Sequence: Synthetic oligonucleotide
ccaggaggguaaacuccug

SEQ ID NO: 2699654 - RNA, 19 nt, Artificial Sequence
  Description of Artificial Sequence: Synthetic oligonucleotide
caacucgucgccuggcauu

SEQ ID NO: 2699655 - RNA, 19 nt, Artificial Sequence
  Description of Artificial Sequence: Synthetic oligonucleotide
ugcucuccuucgagcuguu

SEQ ID NO: 2699656 - RNA, 19 nt, Artificial Sequence
  Description of Artificial Sequence: Synthetic oligonucleotide
cgucgccuggcauuaagca

SEQ ID NO: 2699657 - RNA, 19 nt, Artificial Sequence
  Description of Artificial Sequence: Synthetic oligonucleotide
auguuucuugaggcugcua

SEQ ID NO: 2699658 - RNA, 19 nt, Artificial Sequence
  Description of Artificial Sequence: Synthetic oligonucleotide
ggccgcggccaucacgaac

SEQ ID NO: 2699659 - RNA, 19 nt, Artificial Sequence
  Description of Artificial Sequence: Synthetic oligonucleotide
ccgcgugcacgugagaguc

SEQ ID NO: 2699660 - RNA, 19 nt, Artificial Sequence
  Description of Artificial Sequence: Synthetic oligonucleotide
cagcuggagaacaguacuu

SEQ ID NO: 2699661 - RNA, 19 nt, Artificial Sequence
  Description of Artificial Sequence: Synthetic oligonucleotide
agccguuccugggcauucu

SEQ ID NO: 2699662 - RNA, 19 nt, Artificial Sequence
  Description of Artificial Sequence: Synthetic oligonucleotide
uggcaacacugugguuuaa

SEQ ID NO: 2699663 - RNA, 19 nt, Artificial Sequence
  Description of Artificial Sequence: Synthetic oligonucleotide
guacagcgggucguaggaa

SEQ ID NO: 2699664 - RNA, 19 nt, Artificial Sequence
  Description of Artificial Sequence: Synthetic oligonucleotide
ggucgcggccugugggccc

SEQ ID NO: 2699665 - RNA, 19 nt, Artificial Sequence
  Description of Artificial Sequence: Synthetic oligonucleotide
acgugagagucgagcugcu

SEQ ID NO: 2699666 - RNA, 19 nt, Artificial Sequence
  Description of Artificial Sequence: Synthetic oligonucleotide
ggagcucuaccuggcuuuc

SEQ ID NO: 2699667 - RNA, 19 nt, Artificial Sequence
  Description of Artificial Sequence: Synthetic oligonucleotide
gcuagguugucaauuuguu

SEQ ID NO: 2699668 - RNA, 19 nt, Artificial Sequence
  Description of Artificial Sequence: Synthetic oligonucleotide
cacugugguuuaaccgccu

SEQ ID NO: 2699669 - RNA, 19 nt, Artificial Sequence
  Description of Artificial Sequence: Synthetic oligonucleotide
gccgcggccaucacgaacu

SEQ ID NO: 2699670 - RNA, 19 nt, Artificial Sequence
  Description of Artificial Sequence: Synthetic oligonucleotide
cgggucguaggaacuccag

SEQ ID NO: 2699671 - RNA, 19 nt, Artificial Sequence
  Description of Artificial Sequence: Synthetic oligonucleotide
auccagcauugcucuccuu

SEQ ID NO: 2699672 - RNA, 19 nt, Artificial Sequence
  Description of Artificial Sequence: Synthetic oligonucleotide
caggucaugggcccagcuu

SEQ ID NO: 2699673 - RNA, 19 nt, Artificial Sequence
  Description of Artificial Sequence: Synthetic oligonucleotide
ggcaauaguccugcaguau

SEQ ID NO: 2699674 - RNA, 19 nt, Artificial Sequence
  Description of Artificial Sequence: Synthetic oligonucleotide
cuuagccguuccugggcau

SEQ ID NO: 2699675 - RNA, 19 nt, Artificial Sequence
  Description of Artificial Sequence: Synthetic oligonucleotide
cuguagcuagguugucaau

SEQ ID NO: 2699676 - RNA, 19 nt, Artificial Sequence
  Description of Artificial Sequence: Synthetic oligonucleotide
cucugaccgcgugcacgug

SEQ ID NO: 2699677 - RNA, 19 nt, Artificial Sequence
  Description of Artificial Sequence: Synthetic oligonucleotide
gcagcggaaccggccgcgg

SEQ ID NO: 2699678 - RNA, 19 nt, Artificial Sequence
  Description of Artificial Sequence: Synthetic oligonucleotide
ggagaaccaggaggguaaa

SEQ ID NO: 2699679 - RNA, 19 nt, Artificial Sequence
  Description of Artificial Sequence: Synthetic oligonucleotide
cggccaucacgaacugccc

SEQ ID NO: 2699680 - RNA, 19 nt, Artificial Sequence
  Description of Artificial Sequence: Synthetic oligonucleotide
cugcuguacagcgggucgu

SEQ ID NO: 2699681 - RNA, 19 nt, Artificial Sequence
  Description of Artificial Sequence: Synthetic oligonucleotide
cgcgugcacgugagagucg

SEQ ID NO: 2699682 - RNA, 19 nt, Artificial Sequence
  Description of Artificial Sequence: Synthetic oligonucleotide
ccucggcaaagaggucgcg

SEQ ID NO: 2699683 - RNA, 19 nt, Artificial Sequence
  Description of Artificial Sequence: Synthetic oligonucleotide
gcgggucguaggaacucca

SEQ ID NO: 2699684 - RNA, 19 nt, Artificial Sequence
  Description of Artificial Sequence: Synthetic oligonucleotide
ggcugcuaugugaguaagu

SEQ ID NO: 2699685 - RNA, 19 nt, Artificial Sequence
  Description of Artificial Sequence: Synthetic oligonucleotide
acucgucgccuggcauuaa

SEQ ID NO: 2699686 - RNA, 19 nt, Artificial Sequence
  Description of Artificial Sequence: Synthetic oligonucleotide
gagcugcuguacagcgggu

SEQ ID NO: 2699687 - RNA, 19 nt, Artificial Sequence
  Description of Artificial Sequence: Synthetic oligonucleotide
ucgcggccugugggccccg

SEQ ID NO: 2699688 - RNA, 19 nt, Artificial Sequence
  Description of Artificial Sequence: Synthetic oligonucleotide
ccaggagccccucggcaaa

SEQ ID NO: 2699689 - RNA, 19 nt, Artificial Sequence
  Description of Artificial Sequence: Synthetic oligonucleotide
cgugcacgugagagucgag

SEQ ID NO: 2699690 - RNA, 19 nt, Artificial Sequence
  Description of Artificial Sequence: Synthetic oligonucleotide
caaagaggucgcggccugu

SEQ ID NO: 2699691 - RNA, 19 nt, Artificial Sequence
  Description of Artificial Sequence: Synthetic oligonucleotide
cccagcuuauuguuugcuu

SEQ ID NO: 2699692 - RNA, 19 nt, Artificial Sequence
  Description of Artificial Sequence: Synthetic oligonucleotide
gcggaaccggccgcggcca

SEQ ID NO: 2699693 - RNA, 19 nt, Artificial Sequence
  Description of Artificial Sequence: Synthetic oligonucleotide
ggaaccggccgcggccauc

SEQ ID NO: 2699694 - RNA, 19 nt, Artificial Sequence
  Description of Artificial Sequence: Synthetic oligonucleotide
gcccagcuuauuguuugcu

SEQ ID NO: 2699695 - RNA, 19 nt, Artificial Sequence
  Description of Artificial Sequence: Synthetic oligonucleotide
cccgccacuggggucccug

SEQ ID NO: 2699696 - RNA, 19 nt, Artificial Sequence
  Description of Artificial Sequence: Synthetic oligonucleotide
cacuggggucccugccccu

SEQ ID NO: 2699697 - RNA, 19 nt, Artificial Sequence
  Description of Artificial Sequence: Synthetic oligonucleotide
ccaagacaacucgucgccu

SEQ ID NO: 2699698 - RNA, 19 nt, Artificial Sequence
  Description of Artificial Sequence: Synthetic oligonucleotide
gggccccgccacugggguc

SEQ ID NO: 2699699 - RNA, 19 nt, Artificial Sequence
  Description of Artificial Sequence: Synthetic oligonucleotide
cccugacacggcagcggaa

SEQ ID NO: 2699700 - RNA, 19 nt, Artificial Sequence
  Description of Artificial Sequence: Synthetic oligonucleotide
cggccugugggccccgcca

SEQ ID NO: 2699701 - RNA, 19 nt, Artificial Sequence
  Description of Artificial Sequence: Synthetic oligonucleotide
ccggagcucuaccuggcuu

SEQ ID NO: 2699702 - RNA, 19 nt, Artificial Sequence
  Description of Artificial Sequence: Synthetic oligonucleotide
gccccucggcaaagagguc

SEQ ID NO: 2699703 - RNA, 19 nt, Artificial Sequence
  Description of Artificial Sequence: Synthetic oligonucleotide
cccggagcucuaccuggcu

SEQ ID NO: 2699704 - RNA, 19 nt, Artificial Sequence
  Description of Artificial Sequence: Synthetic oligonucleotide
ccuuggcaacacugugguu

SEQ ID NO: 2699705 - RNA, 19 nt, Artificial Sequence
  Description of Artificial Sequence: Synthetic oligonucleotide
cggccgcggccaucacgaa

SEQ ID NO: 2699706 - RNA, 19 nt, Artificial Sequence
  Description of Artificial Sequence: Synthetic oligonucleotide
cggaaccggccgcggccau

SEQ ID NO: 2699707 - RNA, 19 nt, Artificial Sequence
  Description of Artificial Sequence: Synthetic oligonucleotide
ccccgccacuggggucccu

SEQ ID NO: 2699708 - RNA, 19 nt, Artificial Sequence
  Description of Artificial Sequence: Synthetic oligonucleotide
aauacagccuaucaaaagg

SEQ ID NO: 2699709 - RNA, 19 nt, Artificial Sequence
  Description of Artificial Sequence: Synthetic oligonucleotide
aaucagaucagggauuucc

SEQ ID NO: 2699710 - RNA, 19 nt, Artificial Sequence
  Description of Artificial Sequence: Synthetic oligonucleotide
uguuguucuccacauaccg

SEQ ID NO: 2699711 - RNA, 19 nt, Artificial Sequence
  Description of Artificial Sequence: Synthetic oligonucleotide
aagggacugauauuccucc

SEQ ID NO: 2699712 - RNA, 19 nt, Artificial Sequence
  Description of Artificial Sequence: Synthetic oligonucleotide
uauuggaacuaccagucgg

SEQ ID NO: 2699713 - RNA, 19 nt, Artificial Sequence
  Description of Artificial Sequence: Synthetic oligonucleotide
aaagguuugaaaugaucag

SEQ ID NO: 2699714 - RNA, 19 nt, Artificial Sequence
  Description of Artificial Sequence: Synthetic oligonucleotide
aaacucauauuugaggagg

SEQ ID NO: 2699715 - RNA, 19 nt, Artificial Sequence
  Description of Artificial Sequence: Synthetic oligonucleotide
cauaagaugagcuagucca

SEQ ID NO: 2699716 - RNA, 19 nt, Artificial Sequence
  Description of Artificial Sequence: Synthetic oligonucleotide
ugagcuaguccaaacuugg

SEQ ID NO: 2699717 - RNA, 19 nt, Artificial Sequence
  Description of Artificial Sequence: Synthetic oligonucleotide
gauauuccuccuuuagucg

SEQ ID NO: 2699718 - RNA, 19 nt, Artificial Sequence
  Description of Artificial Sequence: Synthetic oligonucleotide
auauuccuccuuuagucgc

SEQ ID NO: 2699719 - RNA, 19 nt, Artificial Sequence
  Description of Artificial Sequence: Synthetic oligonucleotide
aucaaaaggcccucugucc

SEQ ID NO: 2699720 - RNA, 19 nt, Artificial Sequence
  Description of Artificial Sequence: Synthetic oligonucleotide
gauaggaauuucaaacucg

SEQ ID NO: 2699721 - RNA, 19 nt, Artificial Sequence
  Description of Artificial Sequence: Synthetic oligonucleotide
agcuaguccaaacuugggc

SEQ ID NO: 2699722 - RNA, 19 nt, Artificial Sequence
  Description of Artificial Sequence: Synthetic oligonucleotide
ucugaaucagaucagggau

SEQ ID NO: 2699723 - RNA, 19 nt, Artificial Sequence
  Description of Artificial Sequence: Synthetic oligonucleotide
aagaugagcuaguccaaac

SEQ ID NO: 2699724 - RNA, 19 nt, Artificial Sequence
  Description of Artificial Sequence: Synthetic oligonucleotide
  modified_base (13)..(13): a, c, u, g, unknown or other
uccacauaccggnuaaggg

SEQ ID NO: 2699725 - RNA, 19 nt, Artificial Sequence
  Description of Artificial Sequence: Synthetic oligonucleotide
auugucugaauucuuguug

SEQ ID NO: 2699726 - RNA, 19 nt, Artificial Sequence
  Description of Artificial Sequence: Synthetic oligonucleotide
cuuauuggaacuaccaguc

SEQ ID NO: 2699727 - RNA, 19 nt, Artificial Sequence
  Description of Artificial Sequence: Synthetic oligonucleotide
ucugaauucuuguuguucu

SEQ ID NO: 2699728 - RNA, 19 nt, Artificial Sequence
  Description of Artificial Sequence: Synthetic oligonucleotide
uauuuugccaccccuguac

SEQ ID NO: 2699729 - RNA, 19 nt, Artificial Sequence
  Description of Artificial Sequence: Synthetic oligonucleotide
uugcuugcaacuuacucag

SEQ ID NO: 2699730 - RNA, 19 nt, Artificial Sequence
  Description of Artificial Sequence: Synthetic oligonucleotide
cuuguuguucuccacauac

SEQ ID NO: 2699731 - RNA, 19 nt, Artificial Sequence
  Description of Artificial Sequence: Synthetic oligonucleotide
caaagguuugaaaugauca

SEQ ID NO: 2699732 - RNA, 19 nt, Artificial Sequence
  Description of Artificial Sequence: Synthetic oligonucleotide
gaauacagccuaucaaaag

SEQ ID NO: 2699733 - RNA, 19 nt, Artificial Sequence
  Description of Artificial Sequence: Synthetic oligonucleotide
aguugcuugcaacuuacuc

SEQ ID NO: 2699734 - RNA, 19 nt, Artificial Sequence
  Description of Artificial Sequence: Synthetic oligonucleotide
ggaacuaccagucggaacc

SEQ ID NO: 2699735 - RNA, 19 nt, Artificial Sequence
  Description of Artificial Sequence: Synthetic oligonucleotide
uguaccagcauuuuccaaa

SEQ ID NO: 2699736 - RNA, 19 nt, Artificial Sequence
  Description of Artificial Sequence: Synthetic oligonucleotide
auauuugaggaggucaugg

SEQ ID NO: 2699737 - RNA, 19 nt, Artificial Sequence
  Description of Artificial Sequence: Synthetic oligonucleotide
ucaaacucgaugucaaacu

SEQ ID NO: 2699738 - RNA, 19 nt, Artificial Sequence
  Description of Artificial Sequence: Synthetic oligonucleotide
aaaauagcggaaguggagu

SEQ ID NO: 2699739 - RNA, 19 nt, Artificial Sequence
  Description of Artificial Sequence: Synthetic oligonucleotide
uaugugauaggaauuucaa

SEQ ID NO: 2699740 - RNA, 19 nt, Artificial Sequence
  Description of Artificial Sequence: Synthetic oligonucleotide
ugauaggaauuucaaacuc

SEQ ID NO: 2699741 - RNA, 19 nt, Artificial Sequence
  Description of Artificial Sequence: Synthetic oligonucleotide
aucagucagacauauuuug

SEQ ID NO: 2699742 - RNA, 19 nt, Artificial Sequence
  Description of Artificial Sequence: Synthetic oligonucleotide
uuagucuucagcaccggga

SEQ ID NO: 2699743 - RNA, 19 nt, Artificial Sequence
  Description of Artificial Sequence: Synthetic oligonucleotide
acugauauuccuccuuuag

SEQ ID NO: 2699744 - RNA, 19 nt, Artificial Sequence
  Description of Artificial Sequence: Synthetic oligonucleotide
uucugaaucagaucaggga

SEQ ID NO: 2699745 - RNA, 19 nt, Artificial Sequence
  Description of Artificial Sequence: Synthetic oligonucleotide
  modified_base (19)..(19): a, c, u, g, unknown or other
uuguucuccacauaccggn

SEQ ID NO: 2699746 - RNA, 19 nt, Artificial Sequence
  Description of Artificial Sequence: Synthetic oligonucleotide
ucagucagacauauuuugc

SEQ ID NO: 2699747 - RNA, 19 nt, Artificial Sequence
  Description of Artificial Sequence: Synthetic oligonucleotide
uuauuggaacuaccagucg

SEQ ID NO: 2699748 - RNA, 19 nt, Artificial Sequence
  Description of Artificial Sequence: Synthetic oligonucleotide
acuuacucagggcuucgcc

SEQ ID NO: 2699749 - RNA, 19 nt, Artificial Sequence
  Description of Artificial Sequence: Synthetic oligonucleotide
auacagccuaucaaaaggc

SEQ ID NO: 2699750 - RNA, 19 nt, Artificial Sequence
  Description of Artificial Sequence: Synthetic oligonucleotide
guugcuugcaacuuacuca

SEQ ID NO: 2699751 - RNA, 19 nt, Artificial Sequence
  Description of Artificial Sequence: Synthetic oligonucleotide
aaaccaccggguucccucc

SEQ ID NO: 2699752 - RNA, 19 nt, Artificial Sequence
  Description of Artificial Sequence: Synthetic oligonucleotide
aguaggauaugugauagga

SEQ ID NO: 2699753 - RNA, 19 nt, Artificial Sequence
  Description of Artificial Sequence: Synthetic oligonucleotide
aagguuugaaaugaucagu

SEQ ID NO: 2699754 - RNA, 19 nt, Artificial Sequence
  Description of Artificial Sequence: Synthetic oligonucleotide
guaguaggauaugugauag

SEQ ID NO: 2699755 - RNA, 19 nt, Artificial Sequence
  Description of Artificial Sequence: Synthetic oligonucleotide
auagcggaaguggaguugc

SEQ ID NO: 2699756 - RNA, 19 nt, Artificial Sequence
  Description of Artificial Sequence: Synthetic oligonucleotide
uucagcaccgggaucucgg

SEQ ID NO: 2699757 - RNA, 19 nt, Artificial Sequence
  Description of Artificial Sequence: Synthetic oligonucleotide
aucagggauuuccacugcc

SEQ ID NO: 2699758 - RNA, 19 nt, Artificial Sequence
  Description of Artificial Sequence: Synthetic oligonucleotide
agacauauuuugccacccc

SEQ ID NO: 2699759 - RNA, 19 nt, Artificial Sequence
  Description of Artificial Sequence: Synthetic oligonucleotide
ucagacauauuuugccacc

SEQ ID NO: 2699760 - RNA, 19 nt, Artificial Sequence
  Description of Artificial Sequence: Synthetic oligonucleotide
ucguccgccaucuuggacc

SEQ ID NO: 2699761 - RNA, 19 nt, Artificial Sequence
  Description of Artificial Sequence: Synthetic oligonucleotide
aaaaggcccucuguccugc

SEQ ID NO: 2699762 - RNA, 19 nt, Artificial Sequence
  Description of Artificial Sequence: Synthetic oligonucleotide
aggacccagcccuagggcc

SEQ ID NO: 2699763 - RNA, 19 nt, Artificial Sequence
  Description of Artificial Sequence: Synthetic oligonucleotide
acagccuaucaaaaggccc

SEQ ID NO: 2699764 - RNA, 19 nt, Artificial Sequence
  Description of Artificial Sequence: Synthetic oligonucleotide
agggauuuccacugccagc

SEQ ID NO: 2699765 - RNA, 19 nt, Artificial Sequence
  Description of Artificial Sequence: Synthetic oligonucleotide
uugggcacauuccuggccc

SEQ ID NO: 2699766 - RNA, 19 nt, Artificial Sequence
  Description of Artificial Sequence: Synthetic oligonucleotide
ugaauucuuguuguucucc

SEQ ID NO: 2699767 - RNA, 19 nt, Artificial Sequence
  Description of Artificial Sequence: Synthetic oligonucleotide
cuuuccguccagcucaggg

SEQ ID NO: 2699768 - RNA, 19 nt, Artificial Sequence
  Description of Artificial Sequence: Synthetic oligonucleotide
uacagccuaucaaaaggcc

SEQ ID NO: 2699769 - RNA, 19 nt, Artificial Sequence
  Description of Artificial Sequence: Synthetic oligonucleotide
agucagacauauuuugcca

SEQ ID NO: 2699770 - RNA, 19 nt, Artificial Sequence
  Description of Artificial Sequence: Synthetic oligonucleotide
  modified_base (11)..(11): a, c, u, g, unknown or other
cacauaccggnuaagggac

SEQ ID NO: 2699771 - RNA, 19 nt, Artificial Sequence
  Description of Artificial Sequence: Synthetic oligonucleotide
cuugcaacuuacucagggc

SEQ ID NO: 2699772 - RNA, 19 nt, Artificial Sequence
  Description of Artificial Sequence: Synthetic oligonucleotide
caaacucauauuugaggag

SEQ ID NO: 2699773 - RNA, 19 nt, Artificial Sequence
  Description of Artificial Sequence: Synthetic oligonucleotide
ucauugucugaauucuugu

SEQ ID NO: 2699774 - RNA, 19 nt, Artificial Sequence
  Description of Artificial Sequence: Synthetic oligonucleotide
ucauggauguaccagcauu

SEQ ID NO: 2699775 - RNA, 19 nt, Artificial Sequence
  Description of Artificial Sequence: Synthetic oligonucleotide
ucggaaccaaucauugucu

SEQ ID NO: 2699776 - RNA, 19 nt, Artificial Sequence
  Description of Artificial Sequence: Synthetic oligonucleotide
uggagcaguaguaggauau

SEQ ID NO: 2699777 - RNA, 19 nt, Artificial Sequence
  Description of Artificial Sequence: Synthetic oligonucleotide
ggaauuucaaacucgaugu

SEQ ID NO: 2699778 - RNA, 19 nt, Artificial Sequence
  Description of Artificial Sequence: Synthetic oligonucleotide
acaggaauacagccuauca

SEQ ID NO: 2699779 - RNA, 19 nt, Artificial Sequence
  Description of Artificial Sequence: Synthetic oligonucleotide
agaugagcuaguccaaacu

SEQ ID NO: 2699780 - RNA, 19 nt, Artificial Sequence
  Description of Artificial Sequence: Synthetic oligonucleotide
uccaaacuugggcacauuc

SEQ ID NO: 2699781 - RNA, 19 nt, Artificial Sequence
  Description of Artificial Sequence: Synthetic oligonucleotide
uaagggacugauauuccuc

SEQ ID NO: 2699782 - RNA, 19 nt, Artificial Sequence
  Description of Artificial Sequence: Synthetic oligonucleotide
gucggaaccaaucauuguc

SEQ ID NO: 2699783 - RNA, 19 nt, Artificial Sequence
  Description of Artificial Sequence: Synthetic oligonucleotide
acaauucccgaucccgggg

SEQ ID NO: 2699784 - RNA, 19 nt, Artificial Sequence
  Description of Artificial Sequence: Synthetic oligonucleotide
acaaagguuugaaaugauc

SEQ ID NO: 2699785 - RNA, 19 nt, Artificial Sequence
  Description of Artificial Sequence: Synthetic oligonucleotide
aguaguaggauaugugaua

SEQ ID NO: 2699786 - RNA, 19 nt, Artificial Sequence
  Description of Artificial Sequence: Synthetic oligonucleotide
uauuugaggaggucaugga

SEQ ID NO: 2699787 - RNA, 19 nt, Artificial Sequence
  Description of Artificial Sequence: Synthetic oligonucleotide
uuuccaaaccaccggguuc

SEQ ID NO: 2699788 - RNA, 19 nt, Artificial Sequence
  Description of Artificial Sequence: Synthetic oligonucleotide
ucuuugugcuggaucacac

SEQ ID NO: 2699789 - RNA, 19 nt, Artificial Sequence
  Description of Artificial Sequence: Synthetic oligonucleotide
ggauguaccagcauuuucc

SEQ ID NO: 2699790 - RNA, 19 nt, Artificial Sequence
  Description of Artificial Sequence: Synthetic oligonucleotide
aauagcggaaguggaguug

SEQ ID NO: 2699791 - RNA, 19 nt, Artificial Sequence
  Description of Artificial Sequence: Synthetic oligonucleotide
cagcauuuuccaaaccacc

SEQ ID NO: 2699792 - RNA, 19 nt, Artificial Sequence
  Description of Artificial Sequence: Synthetic oligonucleotide
gcuugcaacuuacucaggg

SEQ ID NO: 2699793 - RNA, 19 nt, Artificial Sequence
  Description of Artificial Sequence: Synthetic oligonucleotide
ucggacacgacccgccggg

SEQ ID NO: 2699794 - RNA, 19 nt, Artificial Sequence
  Description of Artificial Sequence: Synthetic oligonucleotide
caucuuugcugucuuuccg

SEQ ID NO: 2699795 - RNA, 19 nt, Artificial Sequence
  Description of Artificial Sequence: Synthetic oligonucleotide
gacacgacccgccgggugg

SEQ ID NO: 2699796 - RNA, 19 nt, Artificial Sequence
  Description of Artificial Sequence: Synthetic oligonucleotide
  modified_base (14)..(14): a, c, u, g, unknown or other
cuccacauaccggnuaagg

SEQ ID NO: 2699797 - RNA, 19 nt, Artificial Sequence
  Description of Artificial Sequence: Synthetic oligonucleotide
  modified_base (2)..(2): a, c, u, g, unknown or other
gnuaagggacugauauucc

SEQ ID NO: 2699798 - RNA, 19 nt, Artificial Sequence
  Description of Artificial Sequence: Synthetic oligonucleotide
auuugaggaggucauggau

SEQ ID NO: 2699799 - RNA, 19 nt, Artificial Sequence
  Description of Artificial Sequence: Synthetic oligonucleotide
aaauagcggaaguggaguu

SEQ ID NO: 2699800 - RNA, 19 nt, Artificial Sequence
  Description of Artificial Sequence: Synthetic oligonucleotide
uaccagucggaaccaauca

SEQ ID NO: 2699801 - RNA, 19 nt, Artificial Sequence
  Description of Artificial Sequence: Synthetic oligonucleotide
aacuuacucagggcuucgc

SEQ ID NO: 2699802 - RNA, 19 nt, Artificial Sequence
  Description of Artificial Sequence: Synthetic oligonucleotide
guuagucuucagcaccggg

SEQ ID NO: 2699803 - RNA, 19 nt, Artificial Sequence
  Description of Artificial Sequence: Synthetic oligonucleotide
acuugggcacauuccuggc

SEQ ID NO: 2699804 - RNA, 19 nt, Artificial Sequence
  Description of Artificial Sequence: Synthetic oligonucleotide
gaaccaaucauugucugaa

SEQ ID NO: 2699805 - RNA, 19 nt, Artificial Sequence
  Description of Artificial Sequence: Synthetic oligonucleotide
uaguaggauaugugauagg

SEQ ID NO: 2699806 - RNA, 19 nt, Artificial Sequence
  Description of Artificial Sequence: Synthetic oligonucleotide
ucagggauuuccacugcca

SEQ ID NO: 2699807 - RNA, 19 nt, Artificial Sequence
  Description of Artificial Sequence: Synthetic oligonucleotide
gaggucauggauguaccag

SEQ ID NO: 2699808 - RNA, 19 nt, Artificial Sequence
  Description of Artificial Sequence: Synthetic oligonucleotide
agggacugcaauuucugga

SEQ ID NO: 2699809 - RNA, 19 nt, Artificial Sequence
  Description of Artificial Sequence: Synthetic oligonucleotide
uccggcguuagucuucagc

SEQ ID NO: 2699810 - RNA, 19 nt, Artificial Sequence
  Description of Artificial Sequence: Synthetic oligonucleotide
  modified_base (3)..(3): a, c, u, g, unknown or other
ggnuaagggacugauauuc

SEQ ID NO: 2699811 - RNA, 19 nt, Artificial Sequence
  Description of Artificial Sequence: Synthetic oligonucleotide
aauucccgaucccgggguc

SEQ ID NO: 2699812 - RNA, 19 nt, Artificial Sequence
  Description of Artificial Sequence: Synthetic oligonucleotide
uagggccauaagaugagcu

SEQ ID NO: 2699813 - RNA, 19 nt, Artificial Sequence
  Description of Artificial Sequence: Synthetic oligonucleotide
gauguaccagcauuuucca

SEQ ID NO: 2699814 - RNA, 19 nt, Artificial Sequence
  Description of Artificial Sequence: Synthetic oligonucleotide
auaggaauuucaaacucga

SEQ ID NO: 2699815 - RNA, 19 nt, Artificial Sequence
  Description of Artificial Sequence: Synthetic oligonucleotide
gucagacauauuuugccac

SEQ ID NO: 2699816 - RNA, 19 nt, Artificial Sequence
  Description of Artificial Sequence: Synthetic oligonucleotide
auaugugauaggaauuuca

SEQ ID NO: 2699817 - RNA, 19 nt, Artificial Sequence
  Description of Artificial Sequence: Synthetic oligonucleotide
uccuuuagucgcugcaccc

SEQ ID NO: 2699818 - RNA, 19 nt, Artificial Sequence
  Description of Artificial Sequence: Synthetic oligonucleotide
aucauugucugaauucuug

SEQ ID NO: 2699819 - RNA, 19 nt, Artificial Sequence
  Description of Artificial Sequence: Synthetic oligonucleotide
cacaauucccgaucccggg

SEQ ID NO: 2699820 - RNA, 19 nt, Artificial Sequence
  Description of Artificial Sequence: Synthetic oligonucleotide
ugcaauuucuggagcagua

SEQ ID NO: 2699821 - RNA, 19 nt, Artificial Sequence
  Description of Artificial Sequence: Synthetic oligonucleotide
gaauuucaaacucgauguc

SEQ ID NO: 2699822 - RNA, 19 nt, Artificial Sequence
  Description of Artificial Sequence: Synthetic oligonucleotide
cuaguccaaacuugggcac

SEQ ID NO: 2699823 - RNA, 19 nt, Artificial Sequence
  Description of Artificial Sequence: Synthetic oligonucleotide
agucgcugcacccacaauu

SEQ ID NO: 2699824 - RNA, 19 nt, Artificial Sequence
  Description of Artificial Sequence: Synthetic oligonucleotide
uguacaucuuugcugucuu

SEQ ID NO: 2699825 - RNA, 19 nt, Artificial Sequence
  Description of Artificial Sequence: Synthetic oligonucleotide
guuguucuccacauaccgg

SEQ ID NO: 2699826 - RNA, 19 nt, Artificial Sequence
  Description of Artificial Sequence: Synthetic oligonucleotide
cuuugugcuggaucacacc

SEQ ID NO: 2699827 - RNA, 19 nt, Artificial Sequence
  Description of Artificial Sequence: Synthetic oligonucleotide
gacugcaauuucuggagca

SEQ ID NO: 2699828 - RNA, 19 nt, Artificial Sequence
  Description of Artificial Sequence: Synthetic oligonucleotide
cagucggaaccaaucauug

SEQ ID NO: 2699829 - RNA, 19 nt, Artificial Sequence
  Description of Artificial Sequence: Synthetic oligonucleotide
aauuucuggagcaguagua

SEQ ID NO: 2699830 - RNA, 19 nt, Artificial Sequence
  Description of Artificial Sequence: Synthetic oligonucleotide
gaggaggucauggauguac

SEQ ID NO: 2699831 - RNA, 19 nt, Artificial Sequence
  Description of Artificial Sequence: Synthetic oligonucleotide
guucccuccuuauuggaac

SEQ ID NO: 2699832 - RNA, 19 nt, Artificial Sequence
  Description of Artificial Sequence: Synthetic oligonucleotide
uuagucgcugcacccacaa

SEQ ID NO: 2699833 - RNA, 19 nt, Artificial Sequence
  Description of Artificial Sequence: Synthetic oligonucleotide
uauuccuccuuuagucgcu

SEQ ID NO: 2699834 - RNA, 19 nt, Artificial Sequence
  Description of Artificial Sequence: Synthetic oligonucleotide
gggacugcaauuucuggag

SEQ ID NO: 2699835 - RNA, 19 nt, Artificial Sequence
  Description of Artificial Sequence: Synthetic oligonucleotide
cuaccagucggaaccaauc

SEQ ID NO: 2699836 - RNA, 19 nt, Artificial Sequence
  Description of Artificial Sequence: Synthetic oligonucleotide
augugauaggaauuucaaa

SEQ ID NO: 2699837 - RNA, 19 nt, Artificial Sequence
  Description of Artificial Sequence: Synthetic oligonucleotide
uccuucauugguugcauuu

SEQ ID NO: 2699838 - RNA, 19 nt, Artificial Sequence
  Description of Artificial Sequence: Synthetic oligonucleotide
uggauguaccagcauuuuc

SEQ ID NO: 2699839 - RNA, 19 nt, Artificial Sequence
  Description of Artificial Sequence: Synthetic oligonucleotide
cuuugcugucuuuccgucc

SEQ ID NO: 2699840 - RNA, 19 nt, Artificial Sequence
  Description of Artificial Sequence: Synthetic oligonucleotide
aaaggcccucuguccugcc

SEQ ID NO: 2699841 - RNA, 19 nt, Artificial Sequence
  Description of Artificial Sequence: Synthetic oligonucleotide
auuucaaacucgaugucaa

SEQ ID NO: 2699842 - RNA, 19 nt, Artificial Sequence
  Description of Artificial Sequence: Synthetic oligonucleotide
cucgaugucaaacucauau

SEQ ID NO: 2699843 - RNA, 19 nt, Artificial Sequence
  Description of Artificial Sequence: Synthetic oligonucleotide
agcaccgggaucucggaca

SEQ ID NO: 2699844 - RNA, 19 nt, Artificial Sequence
  Description of Artificial Sequence: Synthetic oligonucleotide
cuuacucagggcuucgcca

SEQ ID NO: 2699845 - RNA, 19 nt, Artificial Sequence
  Description of Artificial Sequence: Synthetic oligonucleotide
guaccagcauuuuccaaac

SEQ ID NO: 2699846 - RNA, 19 nt, Artificial Sequence
  Description of Artificial Sequence: Synthetic oligonucleotide
gugauaggaauuucaaacu

SEQ ID NO: 2699847 - RNA, 19 nt, Artificial Sequence
  Description of Artificial Sequence: Synthetic oligonucleotide
ucucggacacgacccgccg

SEQ ID NO: 2699848 - RNA, 19 nt, Artificial Sequence
  Description of Artificial Sequence: Synthetic oligonucleotide
gcaguaguaggauauguga

SEQ ID NO: 2699849 - RNA, 19 nt, Artificial Sequence
  Description of Artificial Sequence: Synthetic oligonucleotide
aacucauauuugaggaggu

SEQ ID NO: 2699850 - RNA, 19 nt, Artificial Sequence
  Description of Artificial Sequence: Synthetic oligonucleotide
aucacacccuucugaauca

SEQ ID NO: 2699851 - RNA, 19 nt, Artificial Sequence
  Description of Artificial Sequence: Synthetic oligonucleotide
gcuaguccaaacuugggca

SEQ ID NO: 2699852 - RNA, 19 nt, Artificial Sequence
  Description of Artificial Sequence: Synthetic oligonucleotide
aggaggucauggauguacc

SEQ ID NO: 2699853 - RNA, 19 nt, Artificial Sequence
  Description of Artificial Sequence: Synthetic oligonucleotide
aaacuugggcacauuccug

SEQ ID NO: 2699854 - RNA, 19 nt, Artificial Sequence
  Description of Artificial Sequence: Synthetic oligonucleotide
gauaugugauaggaauuuc

SEQ ID NO: 2699855 - RNA, 19 nt, Artificial Sequence
  Description of Artificial Sequence: Synthetic oligonucleotide
cuccuuuagucgcugcacc

SEQ ID NO: 2699856 - RNA, 19 nt, Artificial Sequence
  Description of Artificial Sequence: Synthetic oligonucleotide
uuacucagggcuucgccau

SEQ ID NO: 2699857 - RNA, 19 nt, Artificial Sequence
  Description of Artificial Sequence: Synthetic oligonucleotide
cuccuuauuggaacuacca

SEQ ID NO: 2699858 - RNA, 19 nt, Artificial Sequence
  Description of Artificial Sequence: Synthetic oligonucleotide
gggauuuccacugccagcc

SEQ ID NO: 2699859 - RNA, 19 nt, Artificial Sequence
  Description of Artificial Sequence: Synthetic oligonucleotide
uggaacuaccagucggaac

SEQ ID NO: 2699860 - RNA, 19 nt, Artificial Sequence
  Description of Artificial Sequence: Synthetic oligonucleotide
uccuggcccacaaagguuu

SEQ ID NO: 2699861 - RNA, 19 nt, Artificial Sequence
  Description of Artificial Sequence: Synthetic oligonucleotide
ucuuugcugucuuuccguc

SEQ ID NO: 2699862 - RNA, 19 nt, Artificial Sequence
  Description of Artificial Sequence: Synthetic oligonucleotide
cagggauuuccacugccag

SEQ ID NO: 2699863 - RNA, 19 nt, Artificial Sequence
  Description of Artificial Sequence: Synthetic oligonucleotide
cuugggcacauuccuggcc

SEQ ID NO: 2699864 - RNA, 19 nt, Artificial Sequence
  Description of Artificial Sequence: Synthetic oligonucleotide
augagcuaguccaaacuug

SEQ ID NO: 2699865 - RNA, 19 nt, Artificial Sequence
  Description of Artificial Sequence: Synthetic oligonucleotide
ggcguuagucuucagcacc

SEQ ID NO: 2699866 - RNA, 19 nt, Artificial Sequence
  Description of Artificial Sequence: Synthetic oligonucleotide
cuuuagucgcugcacccac

SEQ ID NO: 2699867 - RNA, 19 nt, Artificial Sequence
  Description of Artificial Sequence: Synthetic oligonucleotide
ucgaugucaaacucauauu

SEQ ID NO: 2699868 - RNA, 19 nt, Artificial Sequence
  Description of Artificial Sequence: Synthetic oligonucleotide
gacauauuuugccaccccu

SEQ ID NO: 2699869 - RNA, 19 nt, Artificial Sequence
  Description of Artificial Sequence: Synthetic oligonucleotide
uuuagucgcugcacccaca

SEQ ID NO: 2699870 - RNA, 19 nt, Artificial Sequence
  Description of Artificial Sequence: Synthetic oligonucleotide
acccacaauucccgauccc

SEQ ID NO: 2699871 - RNA, 19 nt, Artificial Sequence
  Description of Artificial Sequence: Synthetic oligonucleotide
agcaguaguaggauaugug

SEQ ID NO: 2699872 - RNA, 19 nt, Artificial Sequence
  Description of Artificial Sequence: Synthetic oligonucleotide
uuugccaccccuguacauc

SEQ ID NO: 2699873 - RNA, 19 nt, Artificial Sequence
  Description of Artificial Sequence: Synthetic oligonucleotide
aaccaaucauugucugaau

SEQ ID NO: 2699874 - RNA, 19 nt, Artificial Sequence
  Description of Artificial Sequence: Synthetic oligonucleotide
uugugcuggaucacacccu

SEQ ID NO: 2699875 - RNA, 19 nt, Artificial Sequence
  Description of Artificial Sequence: Synthetic oligonucleotide
auuggaacuaccagucgga

SEQ ID NO: 2699876 - RNA, 19 nt, Artificial Sequence
  Description of Artificial Sequence: Synthetic oligonucleotide
uggaguugcuugcaacuua

SEQ ID NO: 2699877 - RNA, 19 nt, Artificial Sequence
  Description of Artificial Sequence: Synthetic oligonucleotide
ccaaacuugggcacauucc

SEQ ID NO: 2699878 - RNA, 19 nt, Artificial Sequence
  Description of Artificial Sequence: Synthetic oligonucleotide
gaucagggauuuccacugc

SEQ ID NO: 2699879 - RNA, 19 nt, Artificial Sequence
  Description of Artificial Sequence: Synthetic oligonucleotide
ucuuggaccagggcacaag

SEQ ID NO: 2699880 - RNA, 19 nt, Artificial Sequence
  Description of Artificial Sequence: Synthetic oligonucleotide
gaugagcuaguccaaacuu

SEQ ID NO: 2699881 - RNA, 19 nt, Artificial Sequence
  Description of Artificial Sequence: Synthetic oligonucleotide
uugccaccccuguacaucu

SEQ ID NO: 2699882 - RNA, 19 nt, Artificial Sequence
  Description of Artificial Sequence: Synthetic oligonucleotide
ugcuugcaacuuacucagg

SEQ ID NO: 2699883 - RNA, 19 nt, Artificial Sequence
  Description of Artificial Sequence: Synthetic oligonucleotide
agucggaaccaaucauugu

SEQ ID NO: 2699884 - RNA, 19 nt, Artificial Sequence
  Description of Artificial Sequence: Synthetic oligonucleotide
aucucggacacgacccgcc

SEQ ID NO: 2699885 - RNA, 19 nt, Artificial Sequence
  Description of Artificial Sequence: Synthetic oligonucleotide
auucccgaucccggggucc

SEQ ID NO: 2699886 - RNA, 19 nt, Artificial Sequence
  Description of Artificial Sequence: Synthetic oligonucleotide
accccuguacaucuuugcu

SEQ ID NO: 2699887 - RNA, 19 nt, Artificial Sequence
  Description of Artificial Sequence: Synthetic oligonucleotide
  modified_base (18)..(18): a, c, u, g, unknown or other
uguucuccacauaccggnu

SEQ ID NO: 2699888 - RNA, 19 nt, Artificial Sequence
  Description of Artificial Sequence: Synthetic oligonucleotide
gagcuaguccaaacuuggg

SEQ ID NO: 2699889 - RNA, 19 nt, Artificial Sequence
  Description of Artificial Sequence: Synthetic oligonucleotide
uucccuccuuauuggaacu

SEQ ID NO: 2699890 - RNA, 19 nt, Artificial Sequence
  Description of Artificial Sequence: Synthetic oligonucleotide
ucuggagcaguaguaggau

SEQ ID NO: 2699891 - RNA, 19 nt, Artificial Sequence
  Description of Artificial Sequence: Synthetic oligonucleotide
accagucggaaccaaucau

SEQ ID NO: 2699892 - RNA, 19 nt, Artificial Sequence
  Description of Artificial Sequence: Synthetic oligonucleotide
cuggaucacacccuucuga

SEQ ID NO: 2699893 - RNA, 19 nt, Artificial Sequence
  Description of Artificial Sequence: Synthetic oligonucleotide
agggccauaagaugagcua

SEQ ID NO: 2699894 - RNA, 19 nt, Artificial Sequence
  Description of Artificial Sequence: Synthetic oligonucleotide
  modified_base (9)..(9): a, c, u, g, unknown or other
cauaccggnuaagggacug

SEQ ID NO: 2699895 - RNA, 19 nt, Artificial Sequence
  Description of Artificial Sequence: Synthetic oligonucleotide
cacccacaauucccgaucc

SEQ ID NO: 2699896 - RNA, 19 nt, Artificial Sequence
  Description of Artificial Sequence: Synthetic oligonucleotide
caccccuguacaucuuugc

SEQ ID NO: 2699897 - RNA, 19 nt, Artificial Sequence
  Description of Artificial Sequence: Synthetic oligonucleotide
gguuugaaaugaucaguca

SEQ ID NO: 2699898 - RNA, 19 nt, Artificial Sequence
  Description of Artificial Sequence: Synthetic oligonucleotide
uuggaccagggcacaagaa

SEQ ID NO: 2699899 - RNA, 19 nt, Artificial Sequence
  Description of Artificial Sequence: Synthetic oligonucleotide
cauauuugaggaggucaug

SEQ ID NO: 2699900 - RNA, 19 nt, Artificial Sequence
  Description of Artificial Sequence: Synthetic oligonucleotide
ccauaagaugagcuagucc

SEQ ID NO: 2699901 - RNA, 19 nt, Artificial Sequence
  Description of Artificial Sequence: Synthetic oligonucleotide
gcggaaguggaguugcuug

SEQ ID NO: 2699902 - RNA, 19 nt, Artificial Sequence
  Description of Artificial Sequence: Synthetic oligonucleotide
  modified_base (7)..(7): a, c, u, g, unknown or other
uaccggnuaagggacugau

SEQ ID NO: 2699903 - RNA, 19 nt, Artificial Sequence
  Description of Artificial Sequence: Synthetic oligonucleotide
auauuuugccaccccugua

SEQ ID NO: 2699904 - RNA, 19 nt, Artificial Sequence
  Description of Artificial Sequence: Synthetic oligonucleotide
uuuugccaccccuguacau

SEQ ID NO: 2699905 - RNA, 19 nt, Artificial Sequence
  Description of Artificial Sequence: Synthetic oligonucleotide
gggccauaagaugagcuag

SEQ ID NO: 2699906 - RNA, 19 nt, Artificial Sequence
  Description of Artificial Sequence: Synthetic oligonucleotide
auuuuccaaaccaccgggu

SEQ ID NO: 2699907 - RNA, 19 nt, Artificial Sequence
  Description of Artificial Sequence: Synthetic oligonucleotide
aucagaucagggauuucca

SEQ ID NO: 2699908 - RNA, 19 nt, Artificial Sequence
  Description of Artificial Sequence: Synthetic oligonucleotide
ccaucuuggaccagggcac

SEQ ID NO: 2699909 - RNA, 19 nt, Artificial Sequence
  Description of Artificial Sequence: Synthetic oligonucleotide
gggaucucggacacgaccc

SEQ ID NO: 2699910 - RNA, 19 nt, Artificial Sequence
  Description of Artificial Sequence: Synthetic oligonucleotide
uuucuuugugcuggaucac

SEQ ID NO: 2699911 - RNA, 19 nt, Artificial Sequence
  Description of Artificial Sequence: Synthetic oligonucleotide
  modified_base (12)..(12): a, c, u, g, unknown or other
ccacauaccggnuaaggga

SEQ ID NO: 2699912 - RNA, 19 nt, Artificial Sequence
  Description of Artificial Sequence: Synthetic oligonucleotide
cuuggaccagggcacaaga

SEQ ID NO: 2699913 - RNA, 19 nt, Artificial Sequence
  Description of Artificial Sequence: Synthetic oligonucleotide
uaguccaaacuugggcaca

SEQ ID NO: 2699914 - RNA, 19 nt, Artificial Sequence
  Description of Artificial Sequence: Synthetic oligonucleotide
gaaguggaguugcuugcaa

SEQ ID NO: 2699915 - RNA, 19 nt, Artificial Sequence
  Description of Artificial Sequence: Synthetic oligonucleotide
acacccuucugaaucagau

SEQ ID NO: 2699916 - RNA, 19 nt, Artificial Sequence
  Description of Artificial Sequence: Synthetic oligonucleotide
aaggcccucuguccugccu

SEQ ID NO: 2699917 - RNA, 19 nt, Artificial Sequence
  Description of Artificial Sequence: Synthetic oligonucleotide
  modified_base (15)..(15): a, c, u, g, unknown or other
ucuccacauaccggnuaag

SEQ ID NO: 2699918 - RNA, 19 nt, Artificial Sequence
  Description of Artificial Sequence: Synthetic oligonucleotide
aggauaugugauaggaauu

SEQ ID NO: 2699919 - RNA, 19 nt, Artificial Sequence
  Description of Artificial Sequence: Synthetic oligonucleotide
ccuucugaaucagaucagg

SEQ ID NO: 2699920 - RNA, 19 nt, Artificial Sequence
  Description of Artificial Sequence: Synthetic oligonucleotide
cauauuuugccaccccugu

SEQ ID NO: 2699921 - RNA, 19 nt, Artificial Sequence
  Description of Artificial Sequence: Synthetic oligonucleotide
auaagaugagcuaguccaa

SEQ ID NO: 2699922 - RNA, 19 nt, Artificial Sequence
  Description of Artificial Sequence: Synthetic oligonucleotide
ccacaauucccgaucccgg

SEQ ID NO: 2699923 - RNA, 19 nt, Artificial Sequence
  Description of Artificial Sequence: Synthetic oligonucleotide
uucccgaucccgggguccg

SEQ ID NO: 2699924 - RNA, 19 nt, Artificial Sequence
  Description of Artificial Sequence: Synthetic oligonucleotide
gaucucggacacgacccgc

SEQ ID NO: 2699925 - RNA, 19 nt, Artificial Sequence
  Description of Artificial Sequence: Synthetic oligonucleotide
agggacugauauuccuccu

SEQ ID NO: 2699926 - RNA, 19 nt, Artificial Sequence
  Description of Artificial Sequence: Synthetic oligonucleotide
uuggaacuaccagucggaa

SEQ ID NO: 2699927 - RNA, 19 nt, Artificial Sequence
  Description of Artificial Sequence: Synthetic oligonucleotide
cagcccuagggccauaaga

SEQ ID NO: 2699928 - RNA, 19 nt, Artificial Sequence
  Description of Artificial Sequence: Synthetic oligonucleotide
agccuaucaaaaggcccuc

SEQ ID NO: 2699929 - RNA, 19 nt, Artificial Sequence
  Description of Artificial Sequence: Synthetic oligonucleotide
cuagggccauaagaugagc

SEQ ID NO: 2699930 - RNA, 19 nt, Artificial Sequence
  Description of Artificial Sequence: Synthetic oligonucleotide
cccacaauucccgaucccg

SEQ ID NO: 2699931 - RNA, 19 nt, Artificial Sequence
  Description of Artificial Sequence: Synthetic oligonucleotide
uugcugucuuuccguccag

SEQ ID NO: 2699932 - RNA, 19 nt, Artificial Sequence
  Description of Artificial Sequence: Synthetic oligonucleotide
ggaucucggacacgacccg

SEQ ID NO: 2699933 - RNA, 19 nt, Artificial Sequence
  Description of Artificial Sequence: Synthetic oligonucleotide
cugauauuccuccuuuagu

SEQ ID NO: 2699934 - RNA, 19 nt, Artificial Sequence
  Description of Artificial Sequence: Synthetic oligonucleotide
caacuuacucagggcuucg

SEQ ID NO: 2699935 - RNA, 19 nt, Artificial Sequence
  Description of Artificial Sequence: Synthetic oligonucleotide
uccagcucagggacugcaa

SEQ ID NO: 2699936 - RNA, 19 nt, Artificial Sequence
  Description of Artificial Sequence: Synthetic oligonucleotide
ggaaccaaucauugucuga

SEQ ID NO: 2699937 - RNA, 19 nt, Artificial Sequence
  Description of Artificial Sequence: Synthetic oligonucleotide
guaggauaugugauaggaa

SEQ ID NO: 2699938 - RNA, 19 nt, Artificial Sequence
  Description of Artificial Sequence: Synthetic oligonucleotide
cucggacacgacccgccgg

SEQ ID NO: 2699939 - RNA, 19 nt, Artificial Sequence
  Description of Artificial Sequence: Synthetic oligonucleotide
agcucagggacugcaauuu

SEQ ID NO: 2699940 - RNA, 19 nt, Artificial Sequence
  Description of Artificial Sequence: Synthetic oligonucleotide
ggaguugcuugcaacuuac

SEQ ID NO: 2699941 - RNA, 19 nt, Artificial Sequence
  Description of Artificial Sequence: Synthetic oligonucleotide
aaacaggaauacagccuau

SEQ ID NO: 2699942 - RNA, 19 nt, Artificial Sequence
  Description of Artificial Sequence: Synthetic oligonucleotide
gacugauauuccuccuuua

SEQ ID NO: 2699943 - RNA, 19 nt, Artificial Sequence
  Description of Artificial Sequence: Synthetic oligonucleotide
cagccuaucaaaaggcccu

SEQ ID NO: 2699944 - RNA, 19 nt, Artificial Sequence
  Description of Artificial Sequence: Synthetic oligonucleotide
auguaccagcauuuuccaa

SEQ ID NO: 2699945 - RNA, 19 nt, Artificial Sequence
  Description of Artificial Sequence: Synthetic oligonucleotide
gucgcugcacccacaauuc

SEQ ID NO: 2699946 - RNA, 19 nt, Artificial Sequence
  Description of Artificial Sequence: Synthetic oligonucleotide
gcguuagucuucagcaccg

SEQ ID NO: 2699947 - RNA, 19 nt, Artificial Sequence
  Description of Artificial Sequence: Synthetic oligonucleotide
ggacugcaauuucuggagc

SEQ ID NO: 2699948 - RNA, 19 nt, Artificial Sequence
  Description of Artificial Sequence: Synthetic oligonucleotide
cucgguggcuugauccuuc

SEQ ID NO: 2699949 - RNA, 19 nt, Artificial Sequence
  Description of Artificial Sequence: Synthetic oligonucleotide
ccuagggccauaagaugag

SEQ ID NO: 2699950 - RNA, 19 nt, Artificial Sequence
  Description of Artificial Sequence: Synthetic oligonucleotide
ccuccuuauuggaacuacc

SEQ ID NO: 2699951 - RNA, 19 nt, Artificial Sequence
  Description of Artificial Sequence: Synthetic oligonucleotide
  modified_base (10)..(10): a, c, u, g, unknown or other
acauaccggnuaagggacu

SEQ ID NO: 2699952 - RNA, 19 nt, Artificial Sequence
  Description of Artificial Sequence: Synthetic oligonucleotide
ugcugucuuuccguccagc

SEQ ID NO: 2699953 - RNA, 19 nt, Artificial Sequence
  Description of Artificial Sequence: Synthetic oligonucleotide
ccuaucaaaaggcccucug

SEQ ID NO: 2699954 - RNA, 19 nt, Artificial Sequence
  Description of Artificial Sequence: Synthetic oligonucleotide
uggcccacaaagguuugaa

SEQ ID NO: 2699955 - RNA, 19 nt, Artificial Sequence
  Description of Artificial Sequence: Synthetic oligonucleotide
ucagggcuucgccaucuuu

SEQ ID NO: 2699956 - RNA, 19 nt, Artificial Sequence
  Description of Artificial Sequence: Synthetic oligonucleotide
caguaguaggauaugugau

SEQ ID NO: 2699957 - RNA, 19 nt, Artificial Sequence
  Description of Artificial Sequence: Synthetic oligonucleotide
cuucagcaccgggaucucg

SEQ ID NO: 2699958 - RNA, 19 nt, Artificial Sequence
  Description of Artificial Sequence: Synthetic oligonucleotide
ccccuguacaucuuugcug

SEQ ID NO: 2699959 - RNA, 19 nt, Artificial Sequence
  Description of Artificial Sequence: Synthetic oligonucleotide
ucgguggcuugauccuuca

SEQ ID NO: 2699960 - RNA, 19 nt, Artificial Sequence
  Description of Artificial Sequence: Synthetic oligonucleotide
cauggauguaccagcauuu

SEQ ID NO: 2699961 - RNA, 19 nt, Artificial Sequence
  Description of Artificial Sequence: Synthetic oligonucleotide
cagccaaggacccagcccu

SEQ ID NO: 2699962 - RNA, 19 nt, Artificial Sequence
  Description of Artificial Sequence: Synthetic oligonucleotide
cagggcuucgccaucuuua

SEQ ID NO: 2699963 - RNA, 19 nt, Artificial Sequence
  Description of Artificial Sequence: Synthetic oligonucleotide
cccuagggccauaagauga

SEQ ID NO: 2699964 - RNA, 19 nt, Artificial Sequence
  Description of Artificial Sequence: Synthetic oligonucleotide
ccggguucccuccuuauug

SEQ ID NO: 2699965 - RNA, 19 nt, Artificial Sequence
  Description of Artificial Sequence: Synthetic oligonucleotide
gaacuaccagucggaacca

SEQ ID NO: 2699966 - RNA, 19 nt, Artificial Sequence
  Description of Artificial Sequence: Synthetic oligonucleotide
ccggcguuagucuucagca

SEQ ID NO: 2699967 - RNA, 19 nt, Artificial Sequence
  Description of Artificial Sequence: Synthetic oligonucleotide
acacgacccgccggguggc

SEQ ID NO: 2699968 - RNA, 19 nt, Artificial Sequence
  Description of Artificial Sequence: Synthetic oligonucleotide
aaccaccggguucccuccu

SEQ ID NO: 2699969 - RNA, 19 nt, Artificial Sequence
  Description of Artificial Sequence: Synthetic oligonucleotide
uacucagggcuucgccauc

SEQ ID NO: 2699970 - RNA, 19 nt, Artificial Sequence
  Description of Artificial Sequence: Synthetic oligonucleotide
uccguccagcucagggacu

SEQ ID NO: 2699971 - RNA, 19 nt, Artificial Sequence
  Description of Artificial Sequence: Synthetic oligonucleotide
ccacaaagguuugaaauga

SEQ ID NO: 2699972 - RNA, 19 nt, Artificial Sequence
  Description of Artificial Sequence: Synthetic oligonucleotide
gagcaguaguaggauaugu

SEQ ID NO: 2699973 - RNA, 19 nt, Artificial Sequence
  Description of Artificial Sequence: Synthetic oligonucleotide
aguccaaacuugggcacau

SEQ ID NO: 2699974 - RNA, 19 nt, Artificial Sequence
  Description of Artificial Sequence: Synthetic oligonucleotide
acucagggcuucgccaucu

SEQ ID NO: 2699975 - RNA, 19 nt, Artificial Sequence
  Description of Artificial Sequence: Synthetic oligonucleotide
acuaccagucggaaccaau

SEQ ID NO: 2699976 - RNA, 19 nt, Artificial Sequence
  Description of Artificial Sequence: Synthetic oligonucleotide
aacuaccagucggaaccaa

SEQ ID NO: 2699977 - RNA, 19 nt, Artificial Sequence
  Description of Artificial Sequence: Synthetic oligonucleotide
gcccacaaagguuugaaau

SEQ ID NO: 2699978 - RNA, 19 nt, Artificial Sequence
  Description of Artificial Sequence: Synthetic oligonucleotide
gcacccacaauucccgauc

SEQ ID NO: 2699979 - RNA, 19 nt, Artificial Sequence
  Description of Artificial Sequence: Synthetic oligonucleotide
ggcuugauccuucauuggu

SEQ ID NO: 2699980 - RNA, 19 nt, Artificial Sequence
  Description of Artificial Sequence: Synthetic oligonucleotide
ucuuuccguccagcucagg

SEQ ID NO: 2699981 - RNA, 19 nt, Artificial Sequence
  Description of Artificial Sequence: Synthetic oligonucleotide
ggaccagggcacaagaaaa

SEQ ID NO: 2699982 - RNA, 19 nt, Artificial Sequence
  Description of Artificial Sequence: Synthetic oligonucleotide
auggauguaccagcauuuu

SEQ ID NO: 2699983 - RNA, 19 nt, Artificial Sequence
  Description of Artificial Sequence: Synthetic oligonucleotide
cucguccgccaucuuggac

SEQ ID NO: 2699984 - RNA, 19 nt, Artificial Sequence
  Description of Artificial Sequence: Synthetic oligonucleotide
cauugucugaauucuuguu

SEQ ID NO: 2699985 - RNA, 19 nt, Artificial Sequence
  Description of Artificial Sequence: Synthetic oligonucleotide
ggagcaguaguaggauaug

SEQ ID NO: 2699986 - RNA, 19 nt, Artificial Sequence
  Description of Artificial Sequence: Synthetic oligonucleotide
gaaucagaucagggauuuc

SEQ ID NO: 2699987 - RNA, 19 nt, Artificial Sequence
  Description of Artificial Sequence: Synthetic oligonucleotide
ggauaugugauaggaauuu

SEQ ID NO: 2699988 - RNA, 19 nt, Artificial Sequence
  Description of Artificial Sequence: Synthetic oligonucleotide
  modified_base (5)..(5): a, c, u, g, unknown or other
ccggnuaagggacugauau

SEQ ID NO: 2699989 - RNA, 19 nt, Artificial Sequence
  Description of Artificial Sequence: Synthetic oligonucleotide
gcaacuuacucagggcuuc

SEQ ID NO: 2699990 - RNA, 19 nt, Artificial Sequence
  Description of Artificial Sequence: Synthetic oligonucleotide
cugaaucagaucagggauu

SEQ ID NO: 2699991 - RNA, 19 nt, Artificial Sequence
  Description of Artificial Sequence: Synthetic oligonucleotide
ggccucguccgccaucuug

SEQ ID NO: 2699992 - RNA, 19 nt, Artificial Sequence
  Description of Artificial Sequence: Synthetic oligonucleotide
  modified_base (8)..(8): a, c, u, g, unknown or other
auaccggnuaagggacuga

SEQ ID NO: 2699993 - RNA, 19 nt, Artificial Sequence
  Description of Artificial Sequence: Synthetic oligonucleotide
cggaaguggaguugcuugc

SEQ ID NO: 2699994 - RNA, 19 nt, Artificial Sequence
  Description of Artificial Sequence: Synthetic oligonucleotide
cacacccuucugaaucaga

SEQ ID NO: 2699995 - RNA, 19 nt, Artificial Sequence
  Description of Artificial Sequence: Synthetic oligonucleotide
gguggcuugauccuucauu

SEQ ID NO: 2699996 - RNA, 19 nt, Artificial Sequence
  Description of Artificial Sequence: Synthetic oligonucleotide
uagucgcugcacccacaau

SEQ ID NO: 2699997 - RNA, 19 nt, Artificial Sequence
  Description of Artificial Sequence: Synthetic oligonucleotide
accggguucccuccuuauu

SEQ ID NO: 2699998 - RNA, 19 nt, Artificial Sequence
  Description of Artificial Sequence: Synthetic oligonucleotide
cuggagcaguaguaggaua

SEQ ID NO: 2699999 - RNA, 19 nt, Artificial Sequence
  Description of Artificial Sequence: Synthetic oligonucleotide
cagcaccgggaucucggac

SEQ ID NO: 2700000 - RNA, 19 nt, Artificial Sequence
  Description of Artificial Sequence: Synthetic oligonucleotide
gucuuuccguccagcucag

SEQ ID NO: 2700001 - RNA, 19 nt, Artificial Sequence
  Description of Artificial Sequence: Synthetic oligonucleotide
ccaaggacccagcccuagg

SEQ ID NO: 2700002 - RNA, 19 nt, Artificial Sequence
  Description of Artificial Sequence: Synthetic oligonucleotide
cuguacaucuuugcugucu

SEQ ID NO: 2700003 - RNA, 19 nt, Artificial Sequence
  Description of Artificial Sequence: Synthetic oligonucleotide
cgggaucucggacacgacc

SEQ ID NO: 2700004 - RNA, 19 nt, Artificial Sequence
  Description of Artificial Sequence: Synthetic oligonucleotide
agcggaaguggaguugcuu

SEQ ID NO: 2700005 - RNA, 19 nt, Artificial Sequence
  Description of Artificial Sequence: Synthetic oligonucleotide
ggaaguggaguugcuugca

SEQ ID NO: 2700006 - RNA, 19 nt, Artificial Sequence
  Description of Artificial Sequence: Synthetic oligonucleotide
ucccuccuuauuggaacua

SEQ ID NO: 2700007 - RNA, 19 nt, Artificial Sequence
  Description of Artificial Sequence: Synthetic oligonucleotide
gccauaagaugagcuaguc

SEQ ID NO: 2700008 - RNA, 19 nt, Artificial Sequence
  Description of Artificial Sequence: Synthetic oligonucleotide
cggguucccuccuuauugg

SEQ ID NO: 2700009 - RNA, 19 nt, Artificial Sequence
  Description of Artificial Sequence: Synthetic oligonucleotide
cccuguacaucuuugcugu

SEQ ID NO: 2700010 - RNA, 19 nt, Artificial Sequence
  Description of Artificial Sequence: Synthetic oligonucleotide
caauucccgaucccggggu

SEQ ID NO: 2700011 - RNA, 19 nt, Artificial Sequence
  Description of Artificial Sequence: Synthetic oligonucleotide
cacaaagguuugaaaugau

SEQ ID NO: 2700012 - RNA, 19 nt, Artificial Sequence
  Description of Artificial Sequence: Synthetic oligonucleotide
gcaccgggaucucggacac

SEQ ID NO: 2700013 - RNA, 19 nt, Artificial Sequence
  Description of Artificial Sequence: Synthetic oligonucleotide
cggaaccaaucauugucug

SEQ ID NO: 2700014 - RNA, 19 nt, Artificial Sequence
  Description of Artificial Sequence: Synthetic oligonucleotide
uccugccucgguggcuuga

SEQ ID NO: 2700015 - RNA, 19 nt, Artificial Sequence
  Description of Artificial Sequence: Synthetic oligonucleotide
gcugucuuuccguccagcu

SEQ ID NO: 2700016 - RNA, 19 nt, Artificial Sequence
  Description of Artificial Sequence: Synthetic oligonucleotide
ccaccccuguacaucuuug

SEQ ID NO: 2700017 - RNA, 19 nt, Artificial Sequence
  Description of Artificial Sequence: Synthetic oligonucleotide
gguucccuccuuauuggaa

SEQ ID NO: 2700018 - RNA, 19 nt, Artificial Sequence
  Description of Artificial Sequence: Synthetic oligonucleotide
ggguucccuccuuauugga

SEQ ID NO: 2700019 - RNA, 19 nt, Artificial Sequence
  Description of Artificial Sequence: Synthetic oligonucleotide
cccuccuuauuggaacuac

SEQ ID NO: 2700020 - RNA, 19 nt, Artificial Sequence
  Description of Artificial Sequence: Synthetic oligonucleotide
ggcccacaaagguuugaaa

SEQ ID NO: 2700021 - RNA, 19 nt, Artificial Sequence
  Description of Artificial Sequence: Synthetic oligonucleotide
gcacauuccuggcccacaa

SEQ ID NO: 2700022 - RNA, 19 nt, Artificial Sequence
  Description of Artificial Sequence: Synthetic oligonucleotide
  modified_base (6)..(6): a, c, u, g, unknown or other
accggnuaagggacugaua

SEQ ID NO: 2700023 - RNA, 19 nt, Artificial Sequence
  Description of Artificial Sequence: Synthetic oligonucleotide
ucccgaucccgggguccgg

SEQ ID NO: 2700024 - RNA, 19 nt, Artificial Sequence
  Description of Artificial Sequence: Synthetic oligonucleotide
cgaugucaaacucauauuu

SEQ ID NO: 2700025 - RNA, 19 nt, Artificial Sequence
  Description of Artificial Sequence: Synthetic oligonucleotide
gacccgccggguggccucg

SEQ ID NO: 2700026 - RNA, 19 nt, Artificial Sequence
  Description of Artificial Sequence: Synthetic oligonucleotide
accaccggguucccuccuu

SEQ ID NO: 2700027 - RNA, 19 nt, Artificial Sequence
  Description of Artificial Sequence: Synthetic oligonucleotide
cacauuccuggcccacaaa

SEQ ID NO: 2700028 - RNA, 19 nt, Artificial Sequence
  Description of Artificial Sequence: Synthetic oligonucleotide
augaucagucagacauauu

SEQ ID NO: 2700029 - RNA, 19 nt, Artificial Sequence
  Description of Artificial Sequence: Synthetic oligonucleotide
gccaaggacccagcccuag

SEQ ID NO: 2700030 - RNA, 19 nt, Artificial Sequence
  Description of Artificial Sequence: Synthetic oligonucleotide
gaguugcuugcaacuuacu

SEQ ID NO: 2700031 - RNA, 19 nt, Artificial Sequence
  Description of Artificial Sequence: Synthetic oligonucleotide
ccuuuagucgcugcaccca

SEQ ID NO: 2700032 - RNA, 19 nt, Artificial Sequence
  Description of Artificial Sequence: Synthetic oligonucleotide
cugccucgguggcuugauc

SEQ ID NO: 2700033 - RNA, 19 nt, Artificial Sequence
  Description of Artificial Sequence: Synthetic oligonucleotide
ugccaccccuguacaucuu

SEQ ID NO: 2700034 - RNA, 19 nt, Artificial Sequence
  Description of Artificial Sequence: Synthetic oligonucleotide
gggacugauauuccuccuu

SEQ ID NO: 2700035 - RNA, 19 nt, Artificial Sequence
  Description of Artificial Sequence: Synthetic oligonucleotide
gguccggcguuagucuuca

SEQ ID NO: 2700036 - RNA, 19 nt, Artificial Sequence
  Description of Artificial Sequence: Synthetic oligonucleotide
guggaguugcuugcaacuu

SEQ ID NO: 2700037 - RNA, 19 nt, Artificial Sequence
  Description of Artificial Sequence: Synthetic oligonucleotide
cuggcccacaaagguuuga

SEQ ID NO: 2700038 - RNA, 19 nt, Artificial Sequence
  Description of Artificial Sequence: Synthetic oligonucleotide
ccuguacaucuuugcuguc

SEQ ID NO: 2700039 - RNA, 19 nt, Artificial Sequence
  Description of Artificial Sequence: Synthetic oligonucleotide
ccuggcccacaaagguuug

SEQ ID NO: 2700040 - RNA, 19 nt, Artificial Sequence
  Description of Artificial Sequence: Synthetic oligonucleotide
cgccggguggccucguccg

SEQ ID NO: 2700041 - RNA, 19 nt, Artificial Sequence
  Description of Artificial Sequence: Synthetic oligonucleotide
ucccgggguccggcguuag

SEQ ID NO: 2700042 - RNA, 19 nt, Artificial Sequence
  Description of Artificial Sequence: Synthetic oligonucleotide
ggcacauuccuggcccaca

SEQ ID NO: 2700043 - RNA, 19 nt, Artificial Sequence
  Description of Artificial Sequence: Synthetic oligonucleotide
cguuagucuucagcaccgg

SEQ ID NO: 2700044 - RNA, 19 nt, Artificial Sequence
  Description of Artificial Sequence: Synthetic oligonucleotide
acucgaugucaaacucaua

SEQ ID NO: 2700045 - RNA, 19 nt, Artificial Sequence
  Description of Artificial Sequence: Synthetic oligonucleotide
ccguccagcucagggacug

SEQ ID NO: 2700046 - RNA, 19 nt, Artificial Sequence
  Description of Artificial Sequence: Synthetic oligonucleotide
caccgggaucucggacacg

SEQ ID NO: 2700047 - RNA, 19 nt, Artificial Sequence
  Description of Artificial Sequence: Synthetic oligonucleotide
gguggccucguccgccauc

SEQ ID NO: 2700048 - RNA, 19 nt, Artificial Sequence
  Description of Artificial Sequence: Synthetic oligonucleotide
ccagucggaaccaaucauu

SEQ ID NO: 2700049 - RNA, 19 nt, Artificial Sequence
  Description of Artificial Sequence: Synthetic oligonucleotide
gaucccgggguccggcguu

SEQ ID NO: 2700050 - RNA, 19 nt, Artificial Sequence
  Description of Artificial Sequence: Synthetic oligonucleotide
cggcguuagucuucagcac

SEQ ID NO: 2700051 - RNA, 19 nt, Artificial Sequence
  Description of Artificial Sequence: Synthetic oligonucleotide
ccgaucccgggguccggcg

SEQ ID NO: 2700052 - RNA, 19 nt, Artificial Sequence
  Description of Artificial Sequence: Synthetic oligonucleotide
guccugccucgguggcuug

SEQ ID NO: 2700053 - RNA, 19 nt, Artificial Sequence
  Description of Artificial Sequence: Synthetic oligonucleotide
ccgggguccggcguuaguc

SEQ ID NO: 2700054 - RNA, 19 nt, Artificial Sequence
  Description of Artificial Sequence: Synthetic oligonucleotide
acgacccgccggguggccu

SEQ ID NO: 2700055 - RNA, 19 nt, Artificial Sequence
  Description of Artificial Sequence: Synthetic oligonucleotide
ccagcccuagggccauaag

SEQ ID NO: 2700056 - RNA, 19 nt, Artificial Sequence
  Description of Artificial Sequence: Synthetic oligonucleotide
guccggcguuagucuucag

SEQ ID NO: 2700057 - RNA, 19 nt, Artificial Sequence
  Description of Artificial Sequence: Synthetic oligonucleotide
ccgccggguggccucgucc

SEQ ID NO: 2700058 - RNA, 19 nt, Artificial Sequence
  Description of Artificial Sequence: Synthetic oligonucleotide
ggguccggcguuagucuuc

SEQ ID NO: 2700059 - RNA, 19 nt, Artificial Sequence
  Description of Artificial Sequence: Synthetic oligonucleotide
gggcacauuccuggcccac

SEQ ID NO: 2700060 - RNA, 19 nt, Artificial Sequence
  Description of Artificial Sequence: Synthetic oligonucleotide
cacgacccgccggguggcc

SEQ ID NO: 2700061 - RNA, 19 nt, Artificial Sequence
  Description of Artificial Sequence: Synthetic oligonucleotide
cgccaucuuggaccagggc

SEQ ID NO: 2700062 - RNA, 19 nt, Artificial Sequence
  Description of Artificial Sequence: Synthetic oligonucleotide
cguccgccaucuuggacca

SEQ ID NO: 2700063 - RNA, 19 nt, Artificial Sequence
  Description of Artificial Sequence: Synthetic oligonucleotide
agccaaggacccagcccua

SEQ ID NO: 2700064 - RNA, 19 nt, Artificial Sequence
  Description of Artificial Sequence: Synthetic oligonucleotide
ccgggaucucggacacgac

SEQ ID NO: 2700065 - RNA, 19 nt, Artificial Sequence
  Description of Artificial Sequence: Synthetic oligonucleotide
cccgaucccgggguccggc

SEQ ID NO: 2700066 - RNA, 19 nt, Artificial Sequence
  Description of Artificial Sequence: Synthetic oligonucleotide
ccuucauugguugcauuuu

SEQ ID NO: 2700067 - RNA, 19 nt, Artificial Sequence
  Description of Artificial Sequence: Synthetic oligonucleotide
aucccgggguccggcguua

SEQ ID NO: 2700068 - RNA, 19 nt, Artificial Sequence
  Description of Artificial Sequence: Synthetic oligonucleotide
caccggguucccuccuuau

SEQ ID NO: 2700069 - RNA, 19 nt, Artificial Sequence
  Description of Artificial Sequence: Synthetic oligonucleotide
gccaccccuguacaucuuu

SEQ ID NO: 2700070 - RNA, 19 nt, Artificial Sequence
  Description of Artificial Sequence: Synthetic oligonucleotide
gggguccggcguuagucuu

SEQ ID NO: 2700071 - RNA, 19 nt, Artificial Sequence
  Description of Artificial Sequence: Synthetic oligonucleotide
  modified_base (4)..(4): a, c, u, g, unknown or other
cggnuaagggacugauauu

SEQ ID NO: 2700072 - RNA, 19 nt, Artificial Sequence
  Description of Artificial Sequence: Synthetic oligonucleotide
guccaaacuugggcacauu

SEQ ID NO: 2700073 - RNA, 19 nt, Artificial Sequence
  Description of Artificial Sequence: Synthetic oligonucleotide
cgacccgccggguggccuc

SEQ ID NO: 2700074 - RNA, 19 nt, Artificial Sequence
  Description of Artificial Sequence: Synthetic oligonucleotide
ccaccggguucccuccuua

SEQ ID NO: 2700075 - RNA, 19 nt, Artificial Sequence
  Description of Artificial Sequence: Synthetic oligonucleotide
cgggguccggcguuagucu

SEQ ID NO: 2700076 - RNA, 19 nt, Artificial Sequence
  Description of Artificial Sequence: Synthetic oligonucleotide
cccucuguccugccucggu

SEQ ID NO: 2700077 - RNA, 19 nt, Artificial Sequence
  Description of Artificial Sequence: Synthetic oligonucleotide
cccagcccuagggccauaa

SEQ ID NO: 2700078 - RNA, 19 nt, Artificial Sequence
  Description of Artificial Sequence: Synthetic oligonucleotide
acccgccggguggccucgu

SEQ ID NO: 2700079 - RNA, 19 nt, Artificial Sequence
  Description of Artificial Sequence: Synthetic oligonucleotide
ccaaaccaccggguucccu

SEQ ID NO: 2700080 - RNA, 19 nt, Artificial Sequence
  Description of Artificial Sequence: Synthetic oligonucleotide
cccgccggguggccucguc

SEQ ID NO: 2700081 - RNA, 19 nt, Artificial Sequence
  Description of Artificial Sequence: Synthetic oligonucleotide
ccugccucgguggcuugau

SEQ ID NO: 2700082 - RNA, 19 nt, Artificial Sequence
  Description of Artificial Sequence: Synthetic oligonucleotide
ccucgguggcuugauccuu

SEQ ID NO: 2700083 - RNA, 19 nt, Artificial Sequence
  Description of Artificial Sequence: Synthetic oligonucleotide
cccgggguccggcguuagu

SEQ ID NO: 2700084 - RNA, 19 nt, Artificial Sequence
  Description of Artificial Sequence: Synthetic oligonucleotide
cgguggcuugauccuucau

SEQ ID NO: 2700085 - RNA, 19 nt, Artificial Sequence
  Description of Artificial Sequence: Synthetic oligonucleotide
cggacacgacccgccgggu

SEQ ID NO: 2700086 - RNA, 19 nt, Artificial Sequence
  Description of Artificial Sequence: Synthetic oligonucleotide
  modified_base (1)..(1): a, c, u, g, unknown or other
nuaagggacugauauuccu

SEQ ID NO: 2700087 - RNA, 19 nt, Artificial Sequence
  Description of Artificial Sequence: Synthetic oligonucleotide
uucacgagcacgugcagcg

SEQ ID NO: 2700088 - RNA, 19 nt, Artificial Sequence
  Description of Artificial Sequence: Synthetic oligonucleotide
gaaguucacgcccaggugc

SEQ ID NO: 2700089 - RNA, 19 nt, Artificial Sequence
  Description of Artificial Sequence: Synthetic oligonucleotide
cuggcgaacagcacgagcg

SEQ ID NO: 2700090 - RNA, 19 nt, Artificial Sequence
  Description of Artificial Sequence: Synthetic oligonucleotide
ucauuuccggcgaugacca

SEQ ID NO: 2700091 - RNA, 19 nt, Artificial Sequence
  Description of Artificial Sequence: Synthetic oligonucleotide
acgagcgccagcuugcucg

SEQ ID NO: 2700092 - RNA, 19 nt, Artificial Sequence
  Description of Artificial Sequence: Synthetic oligonucleotide
auuuccggcgaugaccacc

SEQ ID NO: 2700093 - RNA, 19 nt, Artificial Sequence
  Description of Artificial Sequence: Synthetic oligonucleotide
acggugacgacacgcgacc

SEQ ID NO: 2700094 - RNA, 19 nt, Artificial Sequence
  Description of Artificial Sequence: Synthetic oligonucleotide
aagucgcuggcgaacuucc

SEQ ID NO: 2700095 - RNA, 19 nt, Artificial Sequence
  Description of Artificial Sequence: Synthetic oligonucleotide
agcacgugcagcgggaacc

SEQ ID NO: 2700096 - RNA, 19 nt, Artificial Sequence
  Description of Artificial Sequence: Synthetic oligonucleotide
acagaacaggaagugcacc

SEQ ID NO: 2700097 - RNA, 19 nt, Artificial Sequence
  Description of Artificial Sequence: Synthetic oligonucleotide
uuuccggcgaugaccaccc

SEQ ID NO: 2700098 - RNA, 19 nt, Artificial Sequence
  Description of Artificial Sequence: Synthetic oligonucleotide
gaggcgaggucacagaaca

SEQ ID NO: 2700099 - RNA, 19 nt, Artificial Sequence
  Description of Artificial Sequence: Synthetic oligonucleotide
aacagcacgagcgccagcu

SEQ ID NO: 2700100 - RNA, 19 nt, Artificial Sequence
  Description of Artificial Sequence: Synthetic oligonucleotide
aggaagugcaccuucucgu

SEQ ID NO: 2700101 - RNA, 19 nt, Artificial Sequence
  Description of Artificial Sequence: Synthetic oligonucleotide
agucgccccacguagugcg

SEQ ID NO: 2700102 - RNA, 19 nt, Artificial Sequence
  Description of Artificial Sequence: Synthetic oligonucleotide
ugucgccucgucauuuccg

SEQ ID NO: 2700103 - RNA, 19 nt, Artificial Sequence
  Description of Artificial Sequence: Synthetic oligonucleotide
guuguucacgagcacgugc

SEQ ID NO: 2700104 - RNA, 19 nt, Artificial Sequence
  Description of Artificial Sequence: Synthetic oligonucleotide
caggaagugcaccuucucg

SEQ ID NO: 2700105 - RNA, 19 nt, Artificial Sequence
  Description of Artificial Sequence: Synthetic oligonucleotide
agcgcguccacguccaguc

SEQ ID NO: 2700106 - RNA, 19 nt, Artificial Sequence
  Description of Artificial Sequence: Synthetic oligonucleotide
gucauuuccggcgaugacc

SEQ ID NO: 2700107 - RNA, 19 nt, Artificial Sequence
  Description of Artificial Sequence: Synthetic oligonucleotide
aagugggacaggaaguuca

SEQ ID NO: 2700108 - RNA, 19 nt, Artificial Sequence
  Description of Artificial Sequence: Synthetic oligonucleotide
aaguucacgcccaggugcg

SEQ ID NO: 2700109 - RNA, 19 nt, Artificial Sequence
  Description of Artificial Sequence: Synthetic oligonucleotide
accuccgaccccgugaccc

SEQ ID NO: 2700110 - RNA, 19 nt, Artificial Sequence
  Description of Artificial Sequence: Synthetic oligonucleotide
gaaccccagggacaggaag

SEQ ID NO: 2700111 - RNA, 19 nt, Artificial Sequence
  Description of Artificial Sequence: Synthetic oligonucleotide
uccggcgaugaccacccgg

SEQ ID NO: 2700112 - RNA, 19 nt, Artificial Sequence
  Description of Artificial Sequence: Synthetic oligonucleotide
gaggucacggggucgcccg

SEQ ID NO: 2700113 - RNA, 19 nt, Artificial Sequence
  Description of Artificial Sequence: Synthetic oligonucleotide
ugcggcucgaagccgucgg

SEQ ID NO: 2700114 - RNA, 19 nt, Artificial Sequence
  Description of Artificial Sequence: Synthetic oligonucleotide
cugacggaggccagggagg

SEQ ID NO: 2700115 - RNA, 19 nt, Artificial Sequence
  Description of Artificial Sequence: Synthetic oligonucleotide
gucgccucgucauuuccgg

SEQ ID NO: 2700116 - RNA, 19 nt, Artificial Sequence
  Description of Artificial Sequence: Synthetic oligonucleotide
gacaggaagucgcuggcga

SEQ ID NO: 2700117 - RNA, 19 nt, Artificial Sequence
  Description of Artificial Sequence: Synthetic oligonucleotide
gaacaggaagugcaccuuc

SEQ ID NO: 2700118 - RNA, 19 nt, Artificial Sequence
  Description of Artificial Sequence: Synthetic oligonucleotide
uguucacgagcacgugcag

SEQ ID NO: 2700119 - RNA, 19 nt, Artificial Sequence
  Description of Artificial Sequence: Synthetic oligonucleotide
ucucguucugugucucugc

SEQ ID NO: 2700120 - RNA, 19 nt, Artificial Sequence
  Description of Artificial Sequence: Synthetic oligonucleotide
ucgcuggcgaacuuccuga

SEQ ID NO: 2700121 - RNA, 19 nt, Artificial Sequence
  Description of Artificial Sequence: Synthetic oligonucleotide
accacccggaaguccaggg

SEQ ID NO: 2700122 - RNA, 19 nt, Artificial Sequence
  Description of Artificial Sequence: Synthetic oligonucleotide
gggucggccauguuggagg

SEQ ID NO: 2700123 - RNA, 19 nt, Artificial Sequence
  Description of Artificial Sequence: Synthetic oligonucleotide
acgauggccacgcggcccg

SEQ ID NO: 2700124 - RNA, 19 nt, Artificial Sequence
  Description of Artificial Sequence: Synthetic oligonucleotide
uccacguccagucgcccca

SEQ ID NO: 2700125 - RNA, 19 nt, Artificial Sequence
  Description of Artificial Sequence: Synthetic oligonucleotide
agcacgagcgccagcuugc

SEQ ID NO: 2700126 - RNA, 19 nt, Artificial Sequence
  Description of Artificial Sequence: Synthetic oligonucleotide
gugacgauggccacgcggc

SEQ ID NO: 2700127 - RNA, 19 nt, Artificial Sequence
  Description of Artificial Sequence: Synthetic oligonucleotide
acgacacgcgaccuccgac

SEQ ID NO: 2700128 - RNA, 19 nt, Artificial Sequence
  Description of Artificial Sequence: Synthetic oligonucleotide
ugcgcugucgccucgucau

SEQ ID NO: 2700129 - RNA, 19 nt, Artificial Sequence
  Description of Artificial Sequence: Synthetic oligonucleotide
aucacgcccgcguuguuca

SEQ ID NO: 2700130 - RNA, 19 nt, Artificial Sequence
  Description of Artificial Sequence: Synthetic oligonucleotide
cucguucugugucucugcc

SEQ ID NO: 2700131 - RNA, 19 nt, Artificial Sequence
  Description of Artificial Sequence: Synthetic oligonucleotide
uuccugacggaggccaggg

SEQ ID NO: 2700132 - RNA, 19 nt, Artificial Sequence
  Description of Artificial Sequence: Synthetic oligonucleotide
gacacgcgaccuccgaccc

SEQ ID NO: 2700133 - RNA, 19 nt, Artificial Sequence
  Description of Artificial Sequence: Synthetic oligonucleotide
ggcgaggucacagaacagg

SEQ ID NO: 2700134 - RNA, 19 nt, Artificial Sequence
  Description of Artificial Sequence: Synthetic oligonucleotide
ucgucauuuccggcgauga

SEQ ID NO: 2700135 - RNA, 19 nt, Artificial Sequence
  Description of Artificial Sequence: Synthetic oligonucleotide
gaugaccacccggaagucc

SEQ ID NO: 2700136 - RNA, 19 nt, Artificial Sequence
  Description of Artificial Sequence: Synthetic oligonucleotide
uccgcgucaccacuuccug

SEQ ID NO: 2700137 - RNA, 19 nt, Artificial Sequence
  Description of Artificial Sequence: Synthetic oligonucleotide
gaccccgugaccccgccgc

SEQ ID NO: 2700138 - RNA, 19 nt, Artificial Sequence
  Description of Artificial Sequence: Synthetic oligonucleotide
uggcgaacagcacgagcgc

SEQ ID NO: 2700139 - RNA, 19 nt, Artificial Sequence
  Description of Artificial Sequence: Synthetic oligonucleotide
agugggacaggaaguucac

SEQ ID NO: 2700140 - RNA, 19 nt, Artificial Sequence
  Description of Artificial Sequence: Synthetic oligonucleotide
gacgccacggugacgacac

SEQ ID NO: 2700141 - RNA, 19 nt, Artificial Sequence
  Description of Artificial Sequence: Synthetic oligonucleotide
aggccgaugcccgcggugc

SEQ ID NO: 2700142 - RNA, 19 nt, Artificial Sequence
  Description of Artificial Sequence: Synthetic oligonucleotide
cacggugacgacacgcgac

SEQ ID NO: 2700143 - RNA, 19 nt, Artificial Sequence
  Description of Artificial Sequence: Synthetic oligonucleotide
ucgucagcaggaaguggga

SEQ ID NO: 2700144 - RNA, 19 nt, Artificial Sequence
  Description of Artificial Sequence: Synthetic oligonucleotide
gugacgacacgcgaccucc

SEQ ID NO: 2700145 - RNA, 19 nt, Artificial Sequence
  Description of Artificial Sequence: Synthetic oligonucleotide
ugacgacacgcgaccuccg

SEQ ID NO: 2700146 - RNA, 19 nt, Artificial Sequence
  Description of Artificial Sequence: Synthetic oligonucleotide
ugcguggccgacgccacgg

SEQ ID NO: 2700147 - RNA, 19 nt, Artificial Sequence
  Description of Artificial Sequence: Synthetic oligonucleotide
uuggaggucacggggucgc

SEQ ID NO: 2700148 - RNA, 19 nt, Artificial Sequence
  Description of Artificial Sequence: Synthetic oligonucleotide
gucgcuggcgaacuuccug

SEQ ID NO: 2700149 - RNA, 19 nt, Artificial Sequence
  Description of Artificial Sequence: Synthetic oligonucleotide
aggaagugggacaggaagu

SEQ ID NO: 2700150 - RNA, 19 nt, Artificial Sequence
  Description of Artificial Sequence: Synthetic oligonucleotide
gucaccacuuccugcgcug

SEQ ID NO: 2700151 - RNA, 19 nt, Artificial Sequence
  Description of Artificial Sequence: Synthetic oligonucleotide
gaagucgcuggcgaacuuc

SEQ ID NO: 2700152 - RNA, 19 nt, Artificial Sequence
  Description of Artificial Sequence: Synthetic oligonucleotide
agggcgguggcgaccacgc

SEQ ID NO: 2700153 - RNA, 19 nt, Artificial Sequence
  Description of Artificial Sequence: Synthetic oligonucleotide
uggggcggggccagcauca

SEQ ID NO: 2700154 - RNA, 19 nt, Artificial Sequence
  Description of Artificial Sequence: Synthetic oligonucleotide
uccaggccgaugcccgcgg

SEQ ID NO: 2700155 - RNA, 19 nt, Artificial Sequence
  Description of Artificial Sequence: Synthetic oligonucleotide
cacgcgaccuccgaccccg

SEQ ID NO: 2700156 - RNA, 19 nt, Artificial Sequence
  Description of Artificial Sequence: Synthetic oligonucleotide
ugacgauggccacgcggcc

SEQ ID NO: 2700157 - RNA, 19 nt, Artificial Sequence
  Description of Artificial Sequence: Synthetic oligonucleotide
gauccgcgucaccacuucc

SEQ ID NO: 2700158 - RNA, 19 nt, Artificial Sequence
  Description of Artificial Sequence: Synthetic oligonucleotide
gacaggaaguucacgccca

SEQ ID NO: 2700159 - RNA, 19 nt, Artificial Sequence
  Description of Artificial Sequence: Synthetic oligonucleotide
ugccgcgccgucuccaggc

SEQ ID NO: 2700160 - RNA, 19 nt, Artificial Sequence
  Description of Artificial Sequence: Synthetic oligonucleotide
ggucacagaacaggaagug

SEQ ID NO: 2700161 - RNA, 19 nt, Artificial Sequence
  Description of Artificial Sequence: Synthetic oligonucleotide
ugacggaggccagggaggc

SEQ ID NO: 2700162 - RNA, 19 nt, Artificial Sequence
  Description of Artificial Sequence: Synthetic oligonucleotide
acacgcgaccuccgacccc

SEQ ID NO: 2700163 - RNA, 19 nt, Artificial Sequence
  Description of Artificial Sequence: Synthetic oligonucleotide
ggaaguucacgcccaggug

SEQ ID NO: 2700164 - RNA, 19 nt, Artificial Sequence
  Description of Artificial Sequence: Synthetic oligonucleotide
ggggcuggcgcgcagcgcg

SEQ ID NO: 2700165 - RNA, 19 nt, Artificial Sequence
  Description of Artificial Sequence: Synthetic oligonucleotide
ucacggggucgcccgacgc

SEQ ID NO: 2700166 - RNA, 19 nt, Artificial Sequence
  Description of Artificial Sequence: Synthetic oligonucleotide
ugaccacccggaaguccag

SEQ ID NO: 2700167 - RNA, 19 nt, Artificial Sequence
  Description of Artificial Sequence: Synthetic oligonucleotide
gacgauggccacgcggccc

SEQ ID NO: 2700168 - RNA, 19 nt, Artificial Sequence
  Description of Artificial Sequence: Synthetic oligonucleotide
gaagugggacaggaaguuc

SEQ ID NO: 2700169 - RNA, 19 nt, Artificial Sequence
  Description of Artificial Sequence: Synthetic oligonucleotide
ggcgaugaccacccggaag

SEQ ID NO: 2700170 - RNA, 19 nt, Artificial Sequence
  Description of Artificial Sequence: Synthetic oligonucleotide
ccugacggaggccagggag

SEQ ID NO: 2700171 - RNA, 19 nt, Artificial Sequence
  Description of Artificial Sequence: Synthetic oligonucleotide
agugggcggggcuggcgcg

SEQ ID NO: 2700172 - RNA, 19 nt, Artificial Sequence
  Description of Artificial Sequence: Synthetic oligonucleotide
cgaacuuccugacggaggc

SEQ ID NO: 2700173 - RNA, 19 nt, Artificial Sequence
  Description of Artificial Sequence: Synthetic oligonucleotide
cagcacgagcgccagcuug

SEQ ID NO: 2700174 - RNA, 19 nt, Artificial Sequence
  Description of Artificial Sequence: Synthetic oligonucleotide
uccagucgccccacguagu

SEQ ID NO: 2700175 - RNA, 19 nt, Artificial Sequence
  Description of Artificial Sequence: Synthetic oligonucleotide
cagaacaggaagugcaccu

SEQ ID NO: 2700176 - RNA, 19 nt, Artificial Sequence
  Description of Artificial Sequence: Synthetic oligonucleotide
agccgcugcagccgccugg

SEQ ID NO: 2700177 - RNA, 19 nt, Artificial Sequence
  Description of Artificial Sequence: Synthetic oligonucleotide
cugucgccucgucauuucc

SEQ ID NO: 2700178 - RNA, 19 nt, Artificial Sequence
  Description of Artificial Sequence: Synthetic oligonucleotide
agcaucacgcccgcguugu

SEQ ID NO: 2700179 - RNA, 19 nt, Artificial Sequence
  Description of Artificial Sequence: Synthetic oligonucleotide
uucacgcccaggugcggcu

SEQ ID NO: 2700180 - RNA, 19 nt, Artificial Sequence
  Description of Artificial Sequence: Synthetic oligonucleotide
cuuccugacggaggccagg

SEQ ID NO: 2700181 - RNA, 19 nt, Artificial Sequence
  Description of Artificial Sequence: Synthetic oligonucleotide
cagcgggaaccccagggac

SEQ ID NO: 2700182 - RNA, 19 nt, Artificial Sequence
  Description of Artificial Sequence: Synthetic oligonucleotide
cuugcucgccgcguaggcc

SEQ ID NO: 2700183 - RNA, 19 nt, Artificial Sequence
  Description of Artificial Sequence: Synthetic oligonucleotide
agcuugcucgccgcguagg

SEQ ID NO: 2700184 - RNA, 19 nt, Artificial Sequence
  Description of Artificial Sequence: Synthetic oligonucleotide
uggcgaacuuccugacgga

SEQ ID NO: 2700185 - RNA, 19 nt, Artificial Sequence
  Description of Artificial Sequence: Synthetic oligonucleotide
ccaggugcggcucgaagcc

SEQ ID NO: 2700186 - RNA, 19 nt, Artificial Sequence
  Description of Artificial Sequence: Synthetic oligonucleotide
acggaggccagggaggcga

SEQ ID NO: 2700187 - RNA, 19 nt, Artificial Sequence
  Description of Artificial Sequence: Synthetic oligonucleotide
ggcgguggcgaccacgccc

SEQ ID NO: 2700188 - RNA, 19 nt, Artificial Sequence
  Description of Artificial Sequence: Synthetic oligonucleotide
caggaagucgcuggcgaac

SEQ ID NO: 2700189 - RNA, 19 nt, Artificial Sequence
  Description of Artificial Sequence: Synthetic oligonucleotide
cguucugugucucugccug

SEQ ID NO: 2700190 - RNA, 19 nt, Artificial Sequence
  Description of Artificial Sequence: Synthetic oligonucleotide
agugcaccuucucguucug

SEQ ID NO: 2700191 - RNA, 19 nt, Artificial Sequence
  Description of Artificial Sequence: Synthetic oligonucleotide
acggggucgcccgacgccg

SEQ ID NO: 2700192 - RNA, 19 nt, Artificial Sequence
  Description of Artificial Sequence: Synthetic oligonucleotide
auguuggaggucacggggu

SEQ ID NO: 2700193 - RNA, 19 nt, Artificial Sequence
  Description of Artificial Sequence: Synthetic oligonucleotide
cagggaggcgaggucacag

SEQ ID NO: 2700194 - RNA, 19 nt, Artificial Sequence
  Description of Artificial Sequence: Synthetic oligonucleotide
agggaggcgaggucacaga

SEQ ID NO: 2700195 - RNA, 19 nt, Artificial Sequence
  Description of Artificial Sequence: Synthetic oligonucleotide
cuuccugcgcugucgccuc

SEQ ID NO: 2700196 - RNA, 19 nt, Artificial Sequence
  Description of Artificial Sequence: Synthetic oligonucleotide
gcuggcgaacuuccugacg

SEQ ID NO: 2700197 - RNA, 19 nt, Artificial Sequence
  Description of Artificial Sequence: Synthetic oligonucleotide
cgcgucaccacuuccugcg

SEQ ID NO: 2700198 - RNA, 19 nt, Artificial Sequence
  Description of Artificial Sequence: Synthetic oligonucleotide
agaacaggaagugcaccuu

SEQ ID NO: 2700199 - RNA, 19 nt, Artificial Sequence
  Description of Artificial Sequence: Synthetic oligonucleotide
agugcguggccgacgccac

SEQ ID NO: 2700200 - RNA, 19 nt, Artificial Sequence
  Description of Artificial Sequence: Synthetic oligonucleotide
gucacggggucgcccgacg

SEQ ID NO: 2700201 - RNA, 19 nt, Artificial Sequence
  Description of Artificial Sequence: Synthetic oligonucleotide
ggcggggccagcaucacgc

SEQ ID NO: 2700202 - RNA, 19 nt, Artificial Sequence
  Description of Artificial Sequence: Synthetic oligonucleotide
caggaaguucacgcccagg

SEQ ID NO: 2700203 - RNA, 19 nt, Artificial Sequence
  Description of Artificial Sequence: Synthetic oligonucleotide
gcgaacuuccugacggagg

SEQ ID NO: 2700204 - RNA, 19 nt, Artificial Sequence
  Description of Artificial Sequence: Synthetic oligonucleotide
gaccacccggaaguccagg

SEQ ID NO: 2700205 - RNA, 19 nt, Artificial Sequence
  Description of Artificial Sequence: Synthetic oligonucleotide
gacgacacgcgaccuccga

SEQ ID NO: 2700206 - RNA, 19 nt, Artificial Sequence
  Description of Artificial Sequence: Synthetic oligonucleotide
uuccugcgcugucgccucg

SEQ ID NO: 2700207 - RNA, 19 nt, Artificial Sequence
  Description of Artificial Sequence: Synthetic oligonucleotide
ucgccucgucauuuccggc

SEQ ID NO: 2700208 - RNA, 19 nt, Artificial Sequence
  Description of Artificial Sequence: Synthetic oligonucleotide
uggccgacgccacggugac

SEQ ID NO: 2700209 - RNA, 19 nt, Artificial Sequence
  Description of Artificial Sequence: Synthetic oligonucleotide
acguccagucgccccacgu

SEQ ID NO: 2700210 - RNA, 19 nt, Artificial Sequence
  Description of Artificial Sequence: Synthetic oligonucleotide
gcgaugaccacccggaagu

SEQ ID NO: 2700211 - RNA, 19 nt, Artificial Sequence
  Description of Artificial Sequence: Synthetic oligonucleotide
cacggggucgcccgacgcc

SEQ ID NO: 2700212 - RNA, 19 nt, Artificial Sequence
  Description of Artificial Sequence: Synthetic oligonucleotide
guucacgcccaggugcggc

SEQ ID NO: 2700213 - RNA, 19 nt, Artificial Sequence
  Description of Artificial Sequence: Synthetic oligonucleotide
cucgucauuuccggcgaug

SEQ ID NO: 2700214 - RNA, 19 nt, Artificial Sequence
  Description of Artificial Sequence: Synthetic oligonucleotide
uccugacggaggccaggga

SEQ ID NO: 2700215 - RNA, 19 nt, Artificial Sequence
  Description of Artificial Sequence: Synthetic oligonucleotide
ggcgaccacgcccgggucg

SEQ ID NO: 2700216 - RNA, 19 nt, Artificial Sequence
  Description of Artificial Sequence: Synthetic oligonucleotide
gagcacgugcagcgggaac

SEQ ID NO: 2700217 - RNA, 19 nt, Artificial Sequence
  Description of Artificial Sequence: Synthetic oligonucleotide
acguagugcguggccgacg

SEQ ID NO: 2700218 - RNA, 19 nt, Artificial Sequence
  Description of Artificial Sequence: Synthetic oligonucleotide
cgugacgauggccacgcgg

SEQ ID NO: 2700219 - RNA, 19 nt, Artificial Sequence
  Description of Artificial Sequence: Synthetic oligonucleotide
gaacagcacgagcgccagc

SEQ ID NO: 2700220 - RNA, 19 nt, Artificial Sequence
  Description of Artificial Sequence: Synthetic oligonucleotide
cacgcggcccggcugccgg

SEQ ID NO: 2700221 - RNA, 19 nt, Artificial Sequence
  Description of Artificial Sequence: Synthetic oligonucleotide
ccgccuggcgaacagcacg

SEQ ID NO: 2700222 - RNA, 19 nt, Artificial Sequence
  Description of Artificial Sequence: Synthetic oligonucleotide
caucacgcccgcguuguuc

SEQ ID NO: 2700223 - RNA, 19 nt, Artificial Sequence
  Description of Artificial Sequence: Synthetic oligonucleotide
gccacggugacgacacgcg

SEQ ID NO: 2700224 - RNA, 19 nt, Artificial Sequence
  Description of Artificial Sequence: Synthetic oligonucleotide
ucaccacuuccugcgcugu

SEQ ID NO: 2700225 - RNA, 19 nt, Artificial Sequence
  Description of Artificial Sequence: Synthetic oligonucleotide
aguucacgcccaggugcgg

SEQ ID NO: 2700226 - RNA, 19 nt, Artificial Sequence
  Description of Artificial Sequence: Synthetic oligonucleotide
gugucucugccuggauccg

SEQ ID NO: 2700227 - RNA, 19 nt, Artificial Sequence
  Description of Artificial Sequence: Synthetic oligonucleotide
auccgcgucaccacuuccu

SEQ ID NO: 2700228 - RNA, 19 nt, Artificial Sequence
  Description of Artificial Sequence: Synthetic oligonucleotide
cacuuccugcgcugucgcc

SEQ ID NO: 2700229 - RNA, 19 nt, Artificial Sequence
  Description of Artificial Sequence: Synthetic oligonucleotide
gugccgcccgugacgaugg

SEQ ID NO: 2700230 - RNA, 19 nt, Artificial Sequence
  Description of Artificial Sequence: Synthetic oligonucleotide
agcgggaaccccagggaca

SEQ ID NO: 2700231 - RNA, 19 nt, Artificial Sequence
  Description of Artificial Sequence: Synthetic oligonucleotide
cagcaucacgcccgcguug

SEQ ID NO: 2700232 - RNA, 19 nt, Artificial Sequence
  Description of Artificial Sequence: Synthetic oligonucleotide
ucucugccuggauccgcgu

SEQ ID NO: 2700233 - RNA, 19 nt, Artificial Sequence
  Description of Artificial Sequence: Synthetic oligonucleotide
cucugccuggauccgcguc

SEQ ID NO: 2700234 - RNA, 19 nt, Artificial Sequence
  Description of Artificial Sequence: Synthetic oligonucleotide
ucgcccgacgccgccagca

SEQ ID NO: 2700235 - RNA, 19 nt, Artificial Sequence
  Description of Artificial Sequence: Synthetic oligonucleotide
guggccgacgccacgguga

SEQ ID NO: 2700236 - RNA, 19 nt, Artificial Sequence
  Description of Artificial Sequence: Synthetic oligonucleotide
ugcucgccgcguaggccgc

SEQ ID NO: 2700237 - RNA, 19 nt, Artificial Sequence
  Description of Artificial Sequence: Synthetic oligonucleotide
cgccucgucauuuccggcg

SEQ ID NO: 2700238 - RNA, 19 nt, Artificial Sequence
  Description of Artificial Sequence: Synthetic oligonucleotide
uuccggcgaugaccacccg

SEQ ID NO: 2700239 - RNA, 19 nt, Artificial Sequence
  Description of Artificial Sequence: Synthetic oligonucleotide
uccgaccccgugaccccgc

SEQ ID NO: 2700240 - RNA, 19 nt, Artificial Sequence
  Description of Artificial Sequence: Synthetic oligonucleotide
cuccaggccgaugcccgcg

SEQ ID NO: 2700241 - RNA, 19 nt, Artificial Sequence
  Description of Artificial Sequence: Synthetic oligonucleotide
auggccacgcggcccggcu

SEQ ID NO: 2700242 - RNA, 19 nt, Artificial Sequence
  Description of Artificial Sequence: Synthetic oligonucleotide
uggccacgcggcccggcug

SEQ ID NO: 2700243 - RNA, 19 nt, Artificial Sequence
  Description of Artificial Sequence: Synthetic oligonucleotide
gcccgcguuguucacgagc

SEQ ID NO: 2700244 - RNA, 19 nt, Artificial Sequence
  Description of Artificial Sequence: Synthetic oligonucleotide
cguagugcguggccgacgc

SEQ ID NO: 2700245 - RNA, 19 nt, Artificial Sequence
  Description of Artificial Sequence: Synthetic oligonucleotide
accacgcccgggucggcca

SEQ ID NO: 2700246 - RNA, 19 nt, Artificial Sequence
  Description of Artificial Sequence: Synthetic oligonucleotide
gacggaggccagggaggcg

SEQ ID NO: 2700247 - RNA, 19 nt, Artificial Sequence
  Description of Artificial Sequence: Synthetic oligonucleotide
ccuggcgaacagcacgagc

SEQ ID NO: 2700248 - RNA, 19 nt, Artificial Sequence
  Description of Artificial Sequence: Synthetic oligonucleotide
gcccgggucggccauguug

SEQ ID NO: 2700249 - RNA, 19 nt, Artificial Sequence
  Description of Artificial Sequence: Synthetic oligonucleotide
accccgugaccccgccgcg

SEQ ID NO: 2700250 - RNA, 19 nt, Artificial Sequence
  Description of Artificial Sequence: Synthetic oligonucleotide
gaugcccgcggugccgccc

SEQ ID NO: 2700251 - RNA, 19 nt, Artificial Sequence
  Description of Artificial Sequence: Synthetic oligonucleotide
cagcuugcucgccgcguag

SEQ ID NO: 2700252 - RNA, 19 nt, Artificial Sequence
  Description of Artificial Sequence: Synthetic oligonucleotide
ggugacgacacgcgaccuc

SEQ ID NO: 2700253 - RNA, 19 nt, Artificial Sequence
  Description of Artificial Sequence: Synthetic oligonucleotide
ucgccccacguagugcgug

SEQ ID NO: 2700254 - RNA, 19 nt, Artificial Sequence
  Description of Artificial Sequence: Synthetic oligonucleotide
gguacagggcgguggcgac

SEQ ID NO: 2700255 - RNA, 19 nt, Artificial Sequence
  Description of Artificial Sequence: Synthetic oligonucleotide
caggugcggcucgaagccg

SEQ ID NO: 2700256 - RNA, 19 nt, Artificial Sequence
  Description of Artificial Sequence: Synthetic oligonucleotide
ggcgaacagcacgagcgcc

SEQ ID NO: 2700257 - RNA, 19 nt, Artificial Sequence
  Description of Artificial Sequence: Synthetic oligonucleotide
ggugccgcccgugacgaug

SEQ ID NO: 2700258 - RNA, 19 nt, Artificial Sequence
  Description of Artificial Sequence: Synthetic oligonucleotide
cgcguuguucacgagcacg

SEQ ID NO: 2700259 - RNA, 19 nt, Artificial Sequence
  Description of Artificial Sequence: Synthetic oligonucleotide
gcuugcucgccgcguaggc

SEQ ID NO: 2700260 - RNA, 19 nt, Artificial Sequence
  Description of Artificial Sequence: Synthetic oligonucleotide
cgacacgcgaccuccgacc

SEQ ID NO: 2700261 - RNA, 19 nt, Artificial Sequence
  Description of Artificial Sequence: Synthetic oligonucleotide
cagucgccccacguagugc

SEQ ID NO: 2700262 - RNA, 19 nt, Artificial Sequence
  Description of Artificial Sequence: Synthetic oligonucleotide
acgugcagcgggaacccca

SEQ ID NO: 2700263 - RNA, 19 nt, Artificial Sequence
  Description of Artificial Sequence: Synthetic oligonucleotide
cauuuccggcgaugaccac

SEQ ID NO: 2700264 - RNA, 19 nt, Artificial Sequence
  Description of Artificial Sequence: Synthetic oligonucleotide
guacagggcgguggcgacc

SEQ ID NO: 2700265 - RNA, 19 nt, Artificial Sequence
  Description of Artificial Sequence: Synthetic oligonucleotide
gcgggaaccccagggacag

SEQ ID NO: 2700266 - RNA, 19 nt, Artificial Sequence
  Description of Artificial Sequence: Synthetic oligonucleotide
guagugcguggccgacgcc

SEQ ID NO: 2700267 - RNA, 19 nt, Artificial Sequence
  Description of Artificial Sequence: Synthetic oligonucleotide
cccgcguuguucacgagca

SEQ ID NO: 2700268 - RNA, 19 nt, Artificial Sequence
  Description of Artificial Sequence: Synthetic oligonucleotide
gccgacgccacggugacga

SEQ ID NO: 2700269 - RNA, 19 nt, Artificial Sequence
  Description of Artificial Sequence: Synthetic oligonucleotide
caggccgaugcccgcggug

SEQ ID NO: 2700270 - RNA, 19 nt, Artificial Sequence
  Description of Artificial Sequence: Synthetic oligonucleotide
gaccacgcccgggucggcc

SEQ ID NO: 2700271 - RNA, 19 nt, Artificial Sequence
  Description of Artificial Sequence: Synthetic oligonucleotide
gggaaccccagggacagga

SEQ ID NO: 2700272 - RNA, 19 nt, Artificial Sequence
  Description of Artificial Sequence: Synthetic oligonucleotide
uaggccgcgugcgcggagu

SEQ ID NO: 2700273 - RNA, 19 nt, Artificial Sequence
  Description of Artificial Sequence: Synthetic oligonucleotide
gugcguggccgacgccacg

SEQ ID NO: 2700274 - RNA, 19 nt, Artificial Sequence
  Description of Artificial Sequence: Synthetic oligonucleotide
ugcagccgccuggcgaaca

SEQ ID NO: 2700275 - RNA, 19 nt, Artificial Sequence
  Description of Artificial Sequence: Synthetic oligonucleotide
cuccgaccccgugaccccg

SEQ ID NO: 2700276 - RNA, 19 nt, Artificial Sequence
  Description of Artificial Sequence: Synthetic oligonucleotide
gccgcgugcgcggaguggg

SEQ ID NO: 2700277 - RNA, 19 nt, Artificial Sequence
  Description of Artificial Sequence: Synthetic oligonucleotide
gugcggcucgaagccgucg

SEQ ID NO: 2700278 - RNA, 19 nt, Artificial Sequence
  Description of Artificial Sequence: Synthetic oligonucleotide
gcgaggucacagaacagga

SEQ ID NO: 2700279 - RNA, 19 nt, Artificial Sequence
  Description of Artificial Sequence: Synthetic oligonucleotide
gugcagcgggaaccccagg

SEQ ID NO: 2700280 - RNA, 19 nt, Artificial Sequence
  Description of Artificial Sequence: Synthetic oligonucleotide
cacguagugcguggccgac

SEQ ID NO: 2700281 - RNA, 19 nt, Artificial Sequence
  Description of Artificial Sequence: Synthetic oligonucleotide
gggaggcgaggucacagaa

SEQ ID NO: 2700282 - RNA, 19 nt, Artificial Sequence
  Description of Artificial Sequence: Synthetic oligonucleotide
gcugcagccgccuggcgaa

SEQ ID NO: 2700283 - RNA, 19 nt, Artificial Sequence
  Description of Artificial Sequence: Synthetic oligonucleotide
aggugcggcucgaagccgu

SEQ ID NO: 2700284 - RNA, 19 nt, Artificial Sequence
  Description of Artificial Sequence: Synthetic oligonucleotide
gaccuccgaccccgugacc

SEQ ID NO: 2700285 - RNA, 19 nt, Artificial Sequence
  Description of Artificial Sequence: Synthetic oligonucleotide
cacguccagucgccccacg

SEQ ID NO: 2700286 - RNA, 19 nt, Artificial Sequence
  Description of Artificial Sequence: Synthetic oligonucleotide
gcagcgggaaccccaggga

SEQ ID NO: 2700287 - RNA, 19 nt, Artificial Sequence
  Description of Artificial Sequence: Synthetic oligonucleotide
acgagcacgugcagcggga

SEQ ID NO: 2700288 - RNA, 19 nt, Artificial Sequence
  Description of Artificial Sequence: Synthetic oligonucleotide
cccgugacgauggccacgc

SEQ ID NO: 2700289 - RNA, 19 nt, Artificial Sequence
  Description of Artificial Sequence: Synthetic oligonucleotide
gauggccacgcggcccggc

SEQ ID NO: 2700290 - RNA, 19 nt, Artificial Sequence
  Description of Artificial Sequence: Synthetic oligonucleotide
ggaggcgaggucacagaac

SEQ ID NO: 2700291 - RNA, 19 nt, Artificial Sequence
  Description of Artificial Sequence: Synthetic oligonucleotide
guaggccgcgugcgcggag

SEQ ID NO: 2700292 - RNA, 19 nt, Artificial Sequence
  Description of Artificial Sequence: Synthetic oligonucleotide
guggcgaccacgcccgggu

SEQ ID NO: 2700293 - RNA, 19 nt, Artificial Sequence
  Description of Artificial Sequence: Synthetic oligonucleotide
gcguaggccgcgugcgcgg

SEQ ID NO: 2700294 - RNA, 19 nt, Artificial Sequence
  Description of Artificial Sequence: Synthetic oligonucleotide
ggauccgcgucaccacuuc

SEQ ID NO: 2700295 - RNA, 19 nt, Artificial Sequence
  Description of Artificial Sequence: Synthetic oligonucleotide
gccgcguaggccgcgugcg

SEQ ID NO: 2700296 - RNA, 19 nt, Artificial Sequence
  Description of Artificial Sequence: Synthetic oligonucleotide
uggaggucacggggucgcc

SEQ ID NO: 2700297 - RNA, 19 nt, Artificial Sequence
  Description of Artificial Sequence: Synthetic oligonucleotide
ccacccggaaguccagggc

SEQ ID NO: 2700298 - RNA, 19 nt, Artificial Sequence
  Description of Artificial Sequence: Synthetic oligonucleotide
ccagucgccccacguagug

SEQ ID NO: 2700299 - RNA, 19 nt, Artificial Sequence
  Description of Artificial Sequence: Synthetic oligonucleotide
cugccgcgccgucuccagg

SEQ ID NO: 2700300 - RNA, 19 nt, Artificial Sequence
  Description of Artificial Sequence: Synthetic oligonucleotide
acagcacgagcgccagcuu

SEQ ID NO: 2700301 - RNA, 19 nt, Artificial Sequence
  Description of Artificial Sequence: Synthetic oligonucleotide
gcgugcgcggagugggcgg

SEQ ID NO: 2700302 - RNA, 19 nt, Artificial Sequence
  Description of Artificial Sequence: Synthetic oligonucleotide
acgccacggugacgacacg

SEQ ID NO: 2700303 - RNA, 19 nt, Artificial Sequence
  Description of Artificial Sequence: Synthetic oligonucleotide
gcgaccuccgaccccguga

SEQ ID NO: 2700304 - RNA, 19 nt, Artificial Sequence
  Description of Artificial Sequence: Synthetic oligonucleotide
gccucgucagcaggaagug

SEQ ID NO: 2700305 - RNA, 19 nt, Artificial Sequence
  Description of Artificial Sequence: Synthetic oligonucleotide
ggaggucacggggucgccc

SEQ ID NO: 2700306 - RNA, 19 nt, Artificial Sequence
  Description of Artificial Sequence: Synthetic oligonucleotide
ucacgcccgcguuguucac

SEQ ID NO: 2700307 - RNA, 19 nt, Artificial Sequence
  Description of Artificial Sequence: Synthetic oligonucleotide
ccggcgaugaccacccgga

SEQ ID NO: 2700308 - RNA, 19 nt, Artificial Sequence
  Description of Artificial Sequence: Synthetic oligonucleotide
ucgccgcguaggccgcgug

SEQ ID NO: 2700309 - RNA, 19 nt, Artificial Sequence
  Description of Artificial Sequence: Synthetic oligonucleotide
uggcgaccacgcccggguc

SEQ ID NO: 2700310 - RNA, 19 nt, Artificial Sequence
  Description of Artificial Sequence: Synthetic oligonucleotide
gcggcucgaagccgucggg

SEQ ID NO: 2700311 - RNA, 19 nt, Artificial Sequence
  Description of Artificial Sequence: Synthetic oligonucleotide
gcgaccacgcccgggucgg

SEQ ID NO: 2700312 - RNA, 19 nt, Artificial Sequence
  Description of Artificial Sequence: Synthetic oligonucleotide
ggccacgcggcccggcugc

SEQ ID NO: 2700313 - RNA, 19 nt, Artificial Sequence
  Description of Artificial Sequence: Synthetic oligonucleotide
aggccgcgugcgcggagug

SEQ ID NO: 2700314 - RNA, 19 nt, Artificial Sequence
  Description of Artificial Sequence: Synthetic oligonucleotide
gguggcgaccacgcccggg

SEQ ID NO: 2700315 - RNA, 19 nt, Artificial Sequence
  Description of Artificial Sequence: Synthetic oligonucleotide
aggucacggggucgcccga

SEQ ID NO: 2700316 - RNA, 19 nt, Artificial Sequence
  Description of Artificial Sequence: Synthetic oligonucleotide
ggucgcccgacgccgccag

SEQ ID NO: 2700317 - RNA, 19 nt, Artificial Sequence
  Description of Artificial Sequence: Synthetic oligonucleotide
ccucgucagcaggaagugg

SEQ ID NO: 2700318 - RNA, 19 nt, Artificial Sequence
  Description of Artificial Sequence: Synthetic oligonucleotide
cacgugcagcgggaacccc

SEQ ID NO: 2700319 - RNA, 19 nt, Artificial Sequence
  Description of Artificial Sequence: Synthetic oligonucleotide
gcccaggugcggcucgaag

SEQ ID NO: 2700320 - RNA, 19 nt, Artificial Sequence
  Description of Artificial Sequence: Synthetic oligonucleotide
gcgaacagcacgagcgcca

SEQ ID NO: 2700321 - RNA, 19 nt, Artificial Sequence
  Description of Artificial Sequence: Synthetic oligonucleotide
uccugcgcugucgccucgu

SEQ ID NO: 2700322 - RNA, 19 nt, Artificial Sequence
  Description of Artificial Sequence: Synthetic oligonucleotide
gggcggggccagcaucacg

SEQ ID NO: 2700323 - RNA, 19 nt, Artificial Sequence
  Description of Artificial Sequence: Synthetic oligonucleotide
gcacgugcagcgggaaccc

SEQ ID NO: 2700324 - RNA, 19 nt, Artificial Sequence
  Description of Artificial Sequence: Synthetic oligonucleotide
cacgagcgccagcuugcuc

SEQ ID NO: 2700325 - RNA, 19 nt, Artificial Sequence
  Description of Artificial Sequence: Synthetic oligonucleotide
cuggauccgcgucaccacu

SEQ ID NO: 2700326 - RNA, 19 nt, Artificial Sequence
  Description of Artificial Sequence: Synthetic oligonucleotide
cgugcagcgggaaccccag

SEQ ID NO: 2700327 - RNA, 19 nt, Artificial Sequence
  Description of Artificial Sequence: Synthetic oligonucleotide
cugcgcugucgccucguca

SEQ ID NO: 2700328 - RNA, 19 nt, Artificial Sequence
  Description of Artificial Sequence: Synthetic oligonucleotide
ucacgcccaggugcggcuc

SEQ ID NO: 2700329 - RNA, 19 nt, Artificial Sequence
  Description of Artificial Sequence: Synthetic oligonucleotide
acgcggcccggcugccggg

SEQ ID NO: 2700330 - RNA, 19 nt, Artificial Sequence
  Description of Artificial Sequence: Synthetic oligonucleotide
cgcguccacguccagucgc

SEQ ID NO: 2700331 - RNA, 19 nt, Artificial Sequence
  Description of Artificial Sequence: Synthetic oligonucleotide
ggaagugcaccuucucguu

SEQ ID NO: 2700332 - RNA, 19 nt, Artificial Sequence
  Description of Artificial Sequence: Synthetic oligonucleotide
ggaagugggacaggaaguu

SEQ ID NO: 2700333 - RNA, 19 nt, Artificial Sequence
  Description of Artificial Sequence: Synthetic oligonucleotide
agucgcuggcgaacuuccu

SEQ ID NO: 2700334 - RNA, 19 nt, Artificial Sequence
  Description of Artificial Sequence: Synthetic oligonucleotide
ccgcgucaccacuuccugc

SEQ ID NO: 2700335 - RNA, 19 nt, Artificial Sequence
  Description of Artificial Sequence: Synthetic oligonucleotide
ccuccgaccccgugacccc

SEQ ID NO: 2700336 - RNA, 19 nt, Artificial Sequence
  Description of Artificial Sequence: Synthetic oligonucleotide
ugccgcccgugacgauggc

SEQ ID NO: 2700337 - RNA, 19 nt, Artificial Sequence
  Description of Artificial Sequence: Synthetic oligonucleotide
gacgccgccagcagccgcu

SEQ ID NO: 2700338 - RNA, 19 nt, Artificial Sequence
  Description of Artificial Sequence: Synthetic oligonucleotide
gcgcguccacguccagucg

SEQ ID NO: 2700339 - RNA, 19 nt, Artificial Sequence
  Description of Artificial Sequence: Synthetic oligonucleotide
gccgaugcccgcggugccg

SEQ ID NO: 2700340 - RNA, 19 nt, Artificial Sequence
  Description of Artificial Sequence: Synthetic oligonucleotide
gcguccacguccagucgcc

SEQ ID NO: 2700341 - RNA, 19 nt, Artificial Sequence
  Description of Artificial Sequence: Synthetic oligonucleotide
gcccgugacgauggccacg

SEQ ID NO: 2700342 - RNA, 19 nt, Artificial Sequence
  Description of Artificial Sequence: Synthetic oligonucleotide
accccgccgcgcacagggc

SEQ ID NO: 2700343 - RNA, 19 nt, Artificial Sequence
  Description of Artificial Sequence: Synthetic oligonucleotide
cgcggugccgcccgugacg

SEQ ID NO: 2700344 - RNA, 19 nt, Artificial Sequence
  Description of Artificial Sequence: Synthetic oligonucleotide
gcguuguucacgagcacgu

SEQ ID NO: 2700345 - RNA, 19 nt, Artificial Sequence
  Description of Artificial Sequence: Synthetic oligonucleotide
cgaccuccgaccccgugac

SEQ ID NO: 2700346 - RNA, 19 nt, Artificial Sequence
  Description of Artificial Sequence: Synthetic oligonucleotide
gcggagugggcggggcugg

SEQ ID NO: 2700347 - RNA, 19 nt, Artificial Sequence
  Description of Artificial Sequence: Synthetic oligonucleotide
gcgccagcuugcucgccgc

SEQ ID NO: 2700348 - RNA, 19 nt, Artificial Sequence
  Description of Artificial Sequence: Synthetic oligonucleotide
ccccacguagugcguggcc

SEQ ID NO: 2700349 - RNA, 19 nt, Artificial Sequence
  Description of Artificial Sequence: Synthetic oligonucleotide
ccccagggacaggaagucg

SEQ ID NO: 2700350 - RNA, 19 nt, Artificial Sequence
  Description of Artificial Sequence: Synthetic oligonucleotide
cgucauuuccggcgaugac

SEQ ID NO: 2700351 - RNA, 19 nt, Artificial Sequence
  Description of Artificial Sequence: Synthetic oligonucleotide
cgaacagcacgagcgccag

SEQ ID NO: 2700352 - RNA, 19 nt, Artificial Sequence
  Description of Artificial Sequence: Synthetic oligonucleotide
ugggcggggcuggcgcgca

SEQ ID NO: 2700353 - RNA, 19 nt, Artificial Sequence
  Description of Artificial Sequence: Synthetic oligonucleotide
ggccgaugcccgcggugcc

SEQ ID NO: 2700354 - RNA, 19 nt, Artificial Sequence
  Description of Artificial Sequence: Synthetic oligonucleotide
gccgcugcagccgccuggc

SEQ ID NO: 2700355 - RNA, 19 nt, Artificial Sequence
  Description of Artificial Sequence: Synthetic oligonucleotide
ccacguagugcguggccga

SEQ ID NO: 2700356 - RNA, 19 nt, Artificial Sequence
  Description of Artificial Sequence: Synthetic oligonucleotide
gcccgacgccgccagcagc

SEQ ID NO: 2700357 - RNA, 19 nt, Artificial Sequence
  Description of Artificial Sequence: Synthetic oligonucleotide
cgccacggugacgacacgc

SEQ ID NO: 2700358 - RNA, 19 nt, Artificial Sequence
  Description of Artificial Sequence: Synthetic oligonucleotide
ggucggccauguuggaggu

SEQ ID NO: 2700359 - RNA, 19 nt, Artificial Sequence
  Description of Artificial Sequence: Synthetic oligonucleotide
ccgucuccaggccgaugcc

SEQ ID NO: 2700360 - RNA, 19 nt, Artificial Sequence
  Description of Artificial Sequence: Synthetic oligonucleotide
cgucagcaggaagugggac

SEQ ID NO: 2700361 - RNA, 19 nt, Artificial Sequence
  Description of Artificial Sequence: Synthetic oligonucleotide
cgccccacguagugcgugg

SEQ ID NO: 2700362 - RNA, 19 nt, Artificial Sequence
  Description of Artificial Sequence: Synthetic oligonucleotide
acgcccgggucggccaugu

SEQ ID NO: 2700363 - RNA, 19 nt, Artificial Sequence
  Description of Artificial Sequence: Synthetic oligonucleotide
gucgcccgacgccgccagc

SEQ ID NO: 2700364 - RNA, 19 nt, Artificial Sequence
  Description of Artificial Sequence: Synthetic oligonucleotide
cgcguaggccgcgugcgcg

SEQ ID NO: 2700365 - RNA, 19 nt, Artificial Sequence
  Description of Artificial Sequence: Synthetic oligonucleotide
ggggucgcccgacgccgcc

SEQ ID NO: 2700366 - RNA, 19 nt, Artificial Sequence
  Description of Artificial Sequence: Synthetic oligonucleotide
ggccgcgugcgcggagugg

SEQ ID NO: 2700367 - RNA, 19 nt, Artificial Sequence
  Description of Artificial Sequence: Synthetic oligonucleotide
gccgcccgugacgauggcc

SEQ ID NO: 2700368 - RNA, 19 nt, Artificial Sequence
  Description of Artificial Sequence: Synthetic oligonucleotide
ggucacggggucgcccgac

SEQ ID NO: 2700369 - RNA, 19 nt, Artificial Sequence
  Description of Artificial Sequence: Synthetic oligonucleotide
gccagggaggcgaggucac

SEQ ID NO: 2700370 - RNA, 19 nt, Artificial Sequence
  Description of Artificial Sequence: Synthetic oligonucleotide
cuggcgcgcagcgcgucca

SEQ ID NO: 2700371 - RNA, 19 nt, Artificial Sequence
  Description of Artificial Sequence: Synthetic oligonucleotide
gccgcgccgucuccaggcc

SEQ ID NO: 2700372 - RNA, 19 nt, Artificial Sequence
  Description of Artificial Sequence: Synthetic oligonucleotide
cguuguucacgagcacgug

SEQ ID NO: 2700373 - RNA, 19 nt, Artificial Sequence
  Description of Artificial Sequence: Synthetic oligonucleotide
gucggccauguuggagguc

SEQ ID NO: 2700374 - RNA, 19 nt, Artificial Sequence
  Description of Artificial Sequence: Synthetic oligonucleotide
ccgaugcccgcggugccgc

SEQ ID NO: 2700375 - RNA, 19 nt, Artificial Sequence
  Description of Artificial Sequence: Synthetic oligonucleotide
ccacggugacgacacgcga

SEQ ID NO: 2700376 - RNA, 19 nt, Artificial Sequence
  Description of Artificial Sequence: Synthetic oligonucleotide
ccgcgccgucuccaggccg

SEQ ID NO: 2700377 - RNA, 19 nt, Artificial Sequence
  Description of Artificial Sequence: Synthetic oligonucleotide
cgcuggcgaacuuccugac

SEQ ID NO: 2700378 - RNA, 19 nt, Artificial Sequence
  Description of Artificial Sequence: Synthetic oligonucleotide
gcggugccgcccgugacga

SEQ ID NO: 2700379 - RNA, 19 nt, Artificial Sequence
  Description of Artificial Sequence: Synthetic oligonucleotide
gccuggcgaacagcacgag

SEQ ID NO: 2700380 - RNA, 19 nt, Artificial Sequence
  Description of Artificial Sequence: Synthetic oligonucleotide
cgccuggcgaacagcacga

SEQ ID NO: 2700381 - RNA, 19 nt, Artificial Sequence
  Description of Artificial Sequence: Synthetic oligonucleotide
acgcccaggugcggcucga

SEQ ID NO: 2700382 - RNA, 19 nt, Artificial Sequence
  Description of Artificial Sequence: Synthetic oligonucleotide
gggcgguggcgaccacgcc

SEQ ID NO: 2700383 - RNA, 19 nt, Artificial Sequence
  Description of Artificial Sequence: Synthetic oligonucleotide
gccccacguagugcguggc

SEQ ID NO: 2700384 - RNA, 19 nt, Artificial Sequence
  Description of Artificial Sequence: Synthetic oligonucleotide
cgugcgcggagugggcggg

SEQ ID NO: 2700385 - RNA, 19 nt, Artificial Sequence
  Description of Artificial Sequence: Synthetic oligonucleotide
cguggccgacgccacggug

SEQ ID NO: 2700386 - RNA, 19 nt, Artificial Sequence
  Description of Artificial Sequence: Synthetic oligonucleotide
ccgcguuguucacgagcac

SEQ ID NO: 2700387 - RNA, 19 nt, Artificial Sequence
  Description of Artificial Sequence: Synthetic oligonucleotide
ccgcguaggccgcgugcgc

SEQ ID NO: 2700388 - RNA, 19 nt, Artificial Sequence
  Description of Artificial Sequence: Synthetic oligonucleotide
cgggucggccauguuggag

SEQ ID NO: 2700389 - RNA, 19 nt, Artificial Sequence
  Description of Artificial Sequence: Synthetic oligonucleotide
ggugcggcucgaagccguc

SEQ ID NO: 2700390 - RNA, 19 nt, Artificial Sequence
  Description of Artificial Sequence: Synthetic oligonucleotide
ccagcuugcucgccgcgua

SEQ ID NO: 2700391 - RNA, 19 nt, Artificial Sequence
  Description of Artificial Sequence: Synthetic oligonucleotide
cacgcccgggucggccaug

SEQ ID NO: 2700392 - RNA, 19 nt, Artificial Sequence
  Description of Artificial Sequence: Synthetic oligonucleotide
cgccgcguaggccgcgugc

SEQ ID NO: 2700393 - RNA, 19 nt, Artificial Sequence
  Description of Artificial Sequence: Synthetic oligonucleotide
cccgugaccccgccgcgca

SEQ ID NO: 2700394 - RNA, 19 nt, Artificial Sequence
  Description of Artificial Sequence: Synthetic oligonucleotide
ccugcgcugucgccucguc

SEQ ID NO: 2700395 - RNA, 19 nt, Artificial Sequence
  Description of Artificial Sequence: Synthetic oligonucleotide
ggccgacgccacggugacg

SEQ ID NO: 2700396 - RNA, 19 nt, Artificial Sequence
  Description of Artificial Sequence: Synthetic oligonucleotide
cgguacagggcgguggcga

SEQ ID NO: 2700397 - RNA, 19 nt, Artificial Sequence
  Description of Artificial Sequence: Synthetic oligonucleotide
ccgcgugcgcggagugggc

SEQ ID NO: 2700398 - RNA, 19 nt, Artificial Sequence
  Description of Artificial Sequence: Synthetic oligonucleotide
ccgaccccgugaccccgcc

SEQ ID NO: 2700399 - RNA, 19 nt, Artificial Sequence
  Description of Artificial Sequence: Synthetic oligonucleotide
cgccagcuugcucgccgcg

SEQ ID NO: 2700400 - RNA, 19 nt, Artificial Sequence
  Description of Artificial Sequence: Synthetic oligonucleotide
ccgugacgauggccacgcg

SEQ ID NO: 2700401 - RNA, 19 nt, Artificial Sequence
  Description of Artificial Sequence: Synthetic oligonucleotide
gcgcgcagcgcguccacgu

SEQ ID NO: 2700402 - RNA, 19 nt, Artificial Sequence
  Description of Artificial Sequence: Synthetic oligonucleotide
ggaagucgcuggcgaacuu

SEQ ID NO: 2700403 - RNA, 19 nt, Artificial Sequence
  Description of Artificial Sequence: Synthetic oligonucleotide
ccgacgccgccagcagccg

SEQ ID NO: 2700404 - RNA, 19 nt, Artificial Sequence
  Description of Artificial Sequence: Synthetic oligonucleotide
gcucgccgcguaggccgcg

SEQ ID NO: 2700405 - RNA, 19 nt, Artificial Sequence
  Description of Artificial Sequence: Synthetic oligonucleotide
ggguggggcggggccagca

SEQ ID NO: 2700406 - RNA, 19 nt, Artificial Sequence
  Description of Artificial Sequence: Synthetic oligonucleotide
cagcgcguccacguccagu

SEQ ID NO: 2700407 - RNA, 19 nt, Artificial Sequence
  Description of Artificial Sequence: Synthetic oligonucleotide
ccccgugaccccgccgcgc

SEQ ID NO: 2700408 - RNA, 19 nt, Artificial Sequence
  Description of Artificial Sequence: Synthetic oligonucleotide
cguccacguccagucgccc

SEQ ID NO: 2700409 - RNA, 19 nt, Artificial Sequence
  Description of Artificial Sequence: Synthetic oligonucleotide
cguccagucgccccacgua

SEQ ID NO: 2700410 - RNA, 19 nt, Artificial Sequence
  Description of Artificial Sequence: Synthetic oligonucleotide
cgcgccgucuccaggccga

SEQ ID NO: 2700411 - RNA, 19 nt, Artificial Sequence
  Description of Artificial Sequence: Synthetic oligonucleotide
ccacguccagucgccccac

SEQ ID NO: 2700412 - RNA, 19 nt, Artificial Sequence
  Description of Artificial Sequence: Synthetic oligonucleotide
gguggggcggggccagcau

SEQ ID NO: 2700413 - RNA, 19 nt, Artificial Sequence
  Description of Artificial Sequence: Synthetic oligonucleotide
cgcccgugacgauggccac

SEQ ID NO: 2700414 - RNA, 19 nt, Artificial Sequence
  Description of Artificial Sequence: Synthetic oligonucleotide
ccgcggugccgcccgugac

SEQ ID NO: 2700415 - RNA, 19 nt, Artificial Sequence
  Description of Artificial Sequence: Synthetic oligonucleotide
ccgacgccacggugacgac

SEQ ID NO: 2700416 - RNA, 19 nt, Artificial Sequence
  Description of Artificial Sequence: Synthetic oligonucleotide
cgcccgacgccgccagcag

SEQ ID NO: 2700417 - RNA, 19 nt, Artificial Sequence
  Description of Artificial Sequence: Synthetic oligonucleotide
gucgccccacguagugcgu

SEQ ID NO: 2700418 - RNA, 19 nt, Artificial Sequence
  Description of Artificial Sequence: Synthetic oligonucleotide
cccgcggugccgcccguga

SEQ ID NO: 2700419 - RNA, 19 nt, Artificial Sequence
  Description of Artificial Sequence: Synthetic oligonucleotide
ccacgcggcccggcugccg

SEQ ID NO: 2700420 - RNA, 19 nt, Artificial Sequence
  Description of Artificial Sequence: Synthetic oligonucleotide
gggucgcccgacgccgcca

SEQ ID NO: 2700421 - RNA, 19 nt, Artificial Sequence
  Description of Artificial Sequence: Synthetic oligonucleotide
cggggucgcccgacgccgc

SEQ ID NO: 2700422 - RNA, 19 nt, Artificial Sequence
  Description of Artificial Sequence: Synthetic oligonucleotide
cgucaccacuuccugcgcu

SEQ ID NO: 2700423 - RNA, 19 nt, Artificial Sequence
  Description of Artificial Sequence: Synthetic oligonucleotide
ccgugaccccgccgcgcac

SEQ ID NO: 2700424 - RNA, 19 nt, Artificial Sequence
  Description of Artificial Sequence: Synthetic oligonucleotide
cgaugcccgcggugccgcc

SEQ ID NO: 2700425 - RNA, 19 nt, Artificial Sequence
  Description of Artificial Sequence: Synthetic oligonucleotide
cgacgccacggugacgaca

SEQ ID NO: 2700426 - RNA, 19 nt, Artificial Sequence
  Description of Artificial Sequence: Synthetic oligonucleotide
acgcgaccuccgaccccgu

SEQ ID NO: 2700427 - RNA, 19 nt, Artificial Sequence
  Description of Artificial Sequence: Synthetic oligonucleotide
cgcgaccuccgaccccgug

SEQ ID NO: 2700428 - RNA, 19 nt, Artificial Sequence
  Description of Artificial Sequence: Synthetic oligonucleotide
ccagggaggcgaggucaca

SEQ ID NO: 2700429 - RNA, 19 nt, Artificial Sequence
  Description of Artificial Sequence: Synthetic oligonucleotide
cgugaccccgccgcgcaca

SEQ ID NO: 2700430 - RNA, 19 nt, Artificial Sequence
  Description of Artificial Sequence: Synthetic oligonucleotide
ccgggucggccauguugga

SEQ ID NO: 2700431 - RNA, 19 nt, Artificial Sequence
  Description of Artificial Sequence: Synthetic oligonucleotide
cucgccgcguaggccgcgu

SEQ ID NO: 2700432 - RNA, 19 nt, Artificial Sequence
  Description of Artificial Sequence: Synthetic oligonucleotide
gcacgagcgccagcuugcu

SEQ ID NO: 2700433 - RNA, 19 nt, Artificial Sequence
  Description of Artificial Sequence: Synthetic oligonucleotide
cgcccgcguuguucacgag

SEQ ID NO: 2700434 - RNA, 19 nt, Artificial Sequence
  Description of Artificial Sequence: Synthetic oligonucleotide
gcguggccgacgccacggu

SEQ ID NO: 2700435 - RNA, 19 nt, Artificial Sequence
  Description of Artificial Sequence: Synthetic oligonucleotide
cgauggccacgcggcccgg

SEQ ID NO: 2700436 - RNA, 19 nt, Artificial Sequence
  Description of Artificial Sequence: Synthetic oligonucleotide
cgagcacgugcagcgggaa

SEQ ID NO: 2700437 - RNA, 19 nt, Artificial Sequence
  Description of Artificial Sequence: Synthetic oligonucleotide
cguaggccgcgugcgcgga

SEQ ID NO: 2700438 - RNA, 19 nt, Artificial Sequence
  Description of Artificial Sequence: Synthetic oligonucleotide
ccucgucauuuccggcgau

SEQ ID NO: 2700439 - RNA, 19 nt, Artificial Sequence
  Description of Artificial Sequence: Synthetic oligonucleotide
gcaucacgcccgcguuguu

SEQ ID NO: 2700440 - RNA, 19 nt, Artificial Sequence
  Description of Artificial Sequence: Synthetic oligonucleotide
ccaggccgaugcccgcggu

SEQ ID NO: 2700441 - RNA, 19 nt, Artificial Sequence
  Description of Artificial Sequence: Synthetic oligonucleotide
cgaccacgcccgggucggc

SEQ ID NO: 2700442 - RNA, 19 nt, Artificial Sequence
  Description of Artificial Sequence: Synthetic oligonucleotide
cggugacgacacgcgaccu

SEQ ID NO: 2700443 - RNA, 19 nt, Artificial Sequence
  Description of Artificial Sequence: Synthetic oligonucleotide
ccacgcccgggucggccau

SEQ ID NO: 2700444 - RNA, 19 nt, Artificial Sequence
  Description of Artificial Sequence: Synthetic oligonucleotide
gcgccgucuccaggccgau

SEQ ID NO: 2700445 - RNA, 19 nt, Artificial Sequence
  Description of Artificial Sequence: Synthetic oligonucleotide
cggugccgcccgugacgau

SEQ ID NO: 2700446 - RNA, 19 nt, Artificial Sequence
  Description of Artificial Sequence: Synthetic oligonucleotide
cgcccgggucggccauguu

SEQ ID NO: 2700447 - RNA, 19 nt, Artificial Sequence
  Description of Artificial Sequence: Synthetic oligonucleotide
caaugaugaucacagcucc

SEQ ID NO: 2700448 - RNA, 19 nt, Artificial Sequence
  Description of Artificial Sequence: Synthetic oligonucleotide
ugaugaucacagcuccaag

SEQ ID NO: 2700449 - RNA, 19 nt, Artificial Sequence
  Description of Artificial Sequence: Synthetic oligonucleotide
accaccacagcuccaauga

SEQ ID NO: 2700450 - RNA, 19 nt, Artificial Sequence
  Description of Artificial Sequence: Synthetic oligonucleotide
aaccaccacagcuccaaug

SEQ ID NO: 2700451 - RNA, 19 nt, Artificial Sequence
  Description of Artificial Sequence: Synthetic oligonucleotide
aaaaccaccacagcuccaa

SEQ ID NO: 2700452 - RNA, 19 nt, Artificial Sequence
  Description of Artificial Sequence: Synthetic oligonucleotide
uccgaccccacguggacag

SEQ ID NO: 2700453 - RNA, 19 nt, Artificial Sequence
  Description of Artificial Sequence: Synthetic oligonucleotide
aaugaugaucacagcucca

SEQ ID NO: 2700454 - RNA, 19 nt, Artificial Sequence
  Description of Artificial Sequence: Synthetic oligonucleotide
augaugaucacagcuccaa

SEQ ID NO: 2700455 - RNA, 19 nt, Artificial Sequence
  Description of Artificial Sequence: Synthetic oligonucleotide
gaggccgcccguccgaccc

SEQ ID NO: 2700456 - RNA, 19 nt, Artificial Sequence
  Description of Artificial Sequence: Synthetic oligonucleotide
aaaccaccacagcuccaau

SEQ ID NO: 2700457 - RNA, 19 nt, Artificial Sequence
  Description of Artificial Sequence: Synthetic oligonucleotide
ggaggaggccgcccguccg

SEQ ID NO: 2700458 - RNA, 19 nt, Artificial Sequence
  Description of Artificial Sequence: Synthetic oligonucleotide
gaggaggccgcccguccga

SEQ ID NO: 2700459 - RNA, 19 nt, Artificial Sequence
  Description of Artificial Sequence: Synthetic oligonucleotide
aggccgcccguccgacccc

SEQ ID NO: 2700460 - RNA, 19 nt, Artificial Sequence
  Description of Artificial Sequence: Synthetic oligonucleotide
aggaggccgcccguccgac

SEQ ID NO: 2700461 - RNA, 19 nt, Artificial Sequence
  Description of Artificial Sequence: Synthetic oligonucleotide
uacccgcggaggaggccgc

SEQ ID NO: 2700462 - RNA, 19 nt, Artificial Sequence
  Description of Artificial Sequence: Synthetic oligonucleotide
acccgcggaggaggccgcc

SEQ ID NO: 2700463 - RNA, 19 nt, Artificial Sequence
  Description of Artificial Sequence: Synthetic oligonucleotide
guccgaccccacguggaca

SEQ ID NO: 2700464 - RNA, 19 nt, Artificial Sequence
  Description of Artificial Sequence: Synthetic oligonucleotide
ccgcggaggaggccgcccg

SEQ ID NO: 2700465 - RNA, 19 nt, Artificial Sequence
  Description of Artificial Sequence: Synthetic oligonucleotide
ggaggccgcccguccgacc

SEQ ID NO: 2700466 - RNA, 19 nt, Artificial Sequence
  Description of Artificial Sequence: Synthetic oligonucleotide
cguccgaccccacguggac

SEQ ID NO: 2700467 - RNA, 19 nt, Artificial Sequence
  Description of Artificial Sequence: Synthetic oligonucleotide
cggaggaggccgcccgucc

SEQ ID NO: 2700468 - RNA, 19 nt, Artificial Sequence
  Description of Artificial Sequence: Synthetic oligonucleotide
gcggaggaggccgcccguc

SEQ ID NO: 2700469 - RNA, 19 nt, Artificial Sequence
  Description of Artificial Sequence: Synthetic oligonucleotide
cccgcggaggaggccgccc

SEQ ID NO: 2700470 - RNA, 19 nt, Artificial Sequence
  Description of Artificial Sequence: Synthetic oligonucleotide
ccgaccccacguggacagc

SEQ ID NO: 2700471 - RNA, 19 nt, Artificial Sequence
  Description of Artificial Sequence: Synthetic oligonucleotide
ggccgcccguccgacccca

SEQ ID NO: 2700472 - RNA, 19 nt, Artificial Sequence
  Description of Artificial Sequence: Synthetic oligonucleotide
gccgcccguccgaccccac

SEQ ID NO: 2700473 - RNA, 19 nt, Artificial Sequence
  Description of Artificial Sequence: Synthetic oligonucleotide
cgcggaggaggccgcccgu

SEQ ID NO: 2700474 - RNA, 19 nt, Artificial Sequence
  Description of Artificial Sequence: Synthetic oligonucleotide
agugggaacaaacaguucc

SEQ ID NO: 2700475 - RNA, 19 nt, Artificial Sequence
  Description of Artificial Sequence: Synthetic oligonucleotide
acaaagaucaaugugaccg

SEQ ID NO: 2700476 - RNA, 19 nt, Artificial Sequence
  Description of Artificial Sequence: Synthetic oligonucleotide
ugggauauggucaaggagg

SEQ ID NO: 2700477 - RNA, 19 nt, Artificial Sequence
  Description of Artificial Sequence: Synthetic oligonucleotide
uuuaauaagacaaggugca

SEQ ID NO: 2700478 - RNA, 19 nt, Artificial Sequence
  Description of Artificial Sequence: Synthetic oligonucleotide
ucuucuuacuaaaaguggg

SEQ ID NO: 2700479 - RNA, 19 nt, Artificial Sequence
  Description of Artificial Sequence: Synthetic oligonucleotide
uaaaagugggaacaaacag

SEQ ID NO: 2700480 - RNA, 19 nt, Artificial Sequence
  Description of Artificial Sequence: Synthetic oligonucleotide
aaggaggucaucuuuagug

SEQ ID NO: 2700481 - RNA, 19 nt, Artificial Sequence
  Description of Artificial Sequence: Synthetic oligonucleotide
auaaccugcauccacaaag

SEQ ID NO: 2700482 - RNA, 19 nt, Artificial Sequence
  Description of Artificial Sequence: Synthetic oligonucleotide
aauagcugagagcacaaag

SEQ ID NO: 2700483 - RNA, 19 nt, Artificial Sequence
  Description of Artificial Sequence: Synthetic oligonucleotide
aauacuuugcaucucucug

SEQ ID NO: 2700484 - RNA, 19 nt, Artificial Sequence
  Description of Artificial Sequence: Synthetic oligonucleotide
aaugugaccgcauccacag

SEQ ID NO: 2700485 - RNA, 19 nt, Artificial Sequence
  Description of Artificial Sequence: Synthetic oligonucleotide
aaacucguggcacacacag

SEQ ID NO: 2700486 - RNA, 19 nt, Artificial Sequence
  Description of Artificial Sequence: Synthetic oligonucleotide
cauuuaauaagacaaggug

SEQ ID NO: 2700487 - RNA, 19 nt, Artificial Sequence
  Description of Artificial Sequence: Synthetic oligonucleotide
acucguggcacacacaggc

SEQ ID NO: 2700488 - RNA, 19 nt, Artificial Sequence
  Description of Artificial Sequence: Synthetic oligonucleotide
uuaaaucuaagcauggcau

SEQ ID NO: 2700489 - RNA, 19 nt, Artificial Sequence
  Description of Artificial Sequence: Synthetic oligonucleotide
uuugcuuccagcuuuaaau

SEQ ID NO: 2700490 - RNA, 19 nt, Artificial Sequence
  Description of Artificial Sequence: Synthetic oligonucleotide
agugaaguagagucaaugg

SEQ ID NO: 2700491 - RNA, 19 nt, Artificial Sequence
  Description of Artificial Sequence: Synthetic oligonucleotide
aaacacauauucguuugcc

SEQ ID NO: 2700492 - RNA, 19 nt, Artificial Sequence
  Description of Artificial Sequence: Synthetic oligonucleotide
uguuucucgaaacacauau

SEQ ID NO: 2700493 - RNA, 19 nt, Artificial Sequence
  Description of Artificial Sequence: Synthetic oligonucleotide
uuucucgaaacacauauuc

SEQ ID NO: 2700494 - RNA, 19 nt, Artificial Sequence
  Description of Artificial Sequence: Synthetic oligonucleotide
cauggcaugaucaugcagc

SEQ ID NO: 2700495 - RNA, 19 nt, Artificial Sequence
  Description of Artificial Sequence: Synthetic oligonucleotide
acacauauucguuugccac

SEQ ID NO: 2700496 - RNA, 19 nt, Artificial Sequence
  Description of Artificial Sequence: Synthetic oligonucleotide
aagcauggcaugaucaugc

SEQ ID NO: 2700497 - RNA, 19 nt, Artificial Sequence
  Description of Artificial Sequence: Synthetic oligonucleotide
uucucgaaacacauauucg

SEQ ID NO: 2700498 - RNA, 19 nt, Artificial Sequence
  Description of Artificial Sequence: Synthetic oligonucleotide
aaaggauuuugcuuaacau

SEQ ID NO: 2700499 - RNA, 19 nt, Artificial Sequence
  Description of Artificial Sequence: Synthetic oligonucleotide
ucuaagcauggcaugauca

SEQ ID NO: 2700500 - RNA, 19 nt, Artificial Sequence
  Description of Artificial Sequence: Synthetic oligonucleotide
caaaucuucuuacuaaaag

SEQ ID NO: 2700501 - RNA, 19 nt, Artificial Sequence
  Description of Artificial Sequence: Synthetic oligonucleotide
acuaaaagugggaacaaac

SEQ ID NO: 2700502 - RNA, 19 nt, Artificial Sequence
  Description of Artificial Sequence: Synthetic oligonucleotide
aguucccaaccccacaucc

SEQ ID NO: 2700503 - RNA, 19 nt, Artificial Sequence
  Description of Artificial Sequence: Synthetic oligonucleotide
uauacaaaggauuuugcuu

SEQ ID NO: 2700504 - RNA, 19 nt, Artificial Sequence
  Description of Artificial Sequence: Synthetic oligonucleotide
gaacaaacaguucccaacc

SEQ ID NO: 2700505 - RNA, 19 nt, Artificial Sequence
  Description of Artificial Sequence: Synthetic oligonucleotide
ucuucaaagugaaguagag

SEQ ID NO: 2700506 - RNA, 19 nt, Artificial Sequence
  Description of Artificial Sequence: Synthetic oligonucleotide
uuauacaaaggauuuugcu

SEQ ID NO: 2700507 - RNA, 19 nt, Artificial Sequence
  Description of Artificial Sequence: Synthetic oligonucleotide
aaagauauucaaaucuucu

SEQ ID NO: 2700508 - RNA, 19 nt, Artificial Sequence
  Description of Artificial Sequence: Synthetic oligonucleotide
ucucgaaacacauauucgu

SEQ ID NO: 2700509 - RNA, 19 nt, Artificial Sequence
  Description of Artificial Sequence: Synthetic oligonucleotide
aggauuuugcuuaacauag

SEQ ID NO: 2700510 - RNA, 19 nt, Artificial Sequence
  Description of Artificial Sequence: Synthetic oligonucleotide
aguagagucaaugguaggg

SEQ ID NO: 2700511 - RNA, 19 nt, Artificial Sequence
  Description of Artificial Sequence: Synthetic oligonucleotide
ugaaguagagucaauggua

SEQ ID NO: 2700512 - RNA, 19 nt, Artificial Sequence
  Description of Artificial Sequence: Synthetic oligonucleotide
aaggauuuugcuuaacaua

SEQ ID NO: 2700513 - RNA, 19 nt, Artificial Sequence
  Description of Artificial Sequence: Synthetic oligonucleotide
ugaaggaaaacucguggca

SEQ ID NO: 2700514 - RNA, 19 nt, Artificial Sequence
  Description of Artificial Sequence: Synthetic oligonucleotide
auuauacaaaggauuuugc

SEQ ID NO: 2700515 - RNA, 19 nt, Artificial Sequence
  Description of Artificial Sequence: Synthetic oligonucleotide
aaaaucacaggcauaggca

SEQ ID NO: 2700516 - RNA, 19 nt, Artificial Sequence
  Description of Artificial Sequence: Synthetic oligonucleotide
uccagcuuuaaaucuaagc

SEQ ID NO: 2700517 - RNA, 19 nt, Artificial Sequence
  Description of Artificial Sequence: Synthetic oligonucleotide
uucuucaaagugaaguaga

SEQ ID NO: 2700518 - RNA, 19 nt, Artificial Sequence
  Description of Artificial Sequence: Synthetic oligonucleotide
aaaagugggaacaaacagu

SEQ ID NO: 2700519 - RNA, 19 nt, Artificial Sequence
  Description of Artificial Sequence: Synthetic oligonucleotide
auacaaaggauuuugcuua

SEQ ID NO: 2700520 - RNA, 19 nt, Artificial Sequence
  Description of Artificial Sequence: Synthetic oligonucleotide
gaaguagagucaaugguag

SEQ ID NO: 2700521 - RNA, 19 nt, Artificial Sequence
  Description of Artificial Sequence: Synthetic oligonucleotide
cucuguauuauacaaagga

SEQ ID NO: 2700522 - RNA, 19 nt, Artificial Sequence
  Description of Artificial Sequence: Synthetic oligonucleotide
gauauggucaaggagguca

SEQ ID NO: 2700523 - RNA, 19 nt, Artificial Sequence
  Description of Artificial Sequence: Synthetic oligonucleotide
uagucacggaacaagacac

SEQ ID NO: 2700524 - RNA, 19 nt, Artificial Sequence
  Description of Artificial Sequence: Synthetic oligonucleotide
uaaaucuaagcauggcaug

SEQ ID NO: 2700525 - RNA, 19 nt, Artificial Sequence
  Description of Artificial Sequence: Synthetic oligonucleotide
ucucuguauuauacaaagg

SEQ ID NO: 2700526 - RNA, 19 nt, Artificial Sequence
  Description of Artificial Sequence: Synthetic oligonucleotide
uuucuucaaagugaaguag

SEQ ID NO: 2700527 - RNA, 19 nt, Artificial Sequence
  Description of Artificial Sequence: Synthetic oligonucleotide
acuggaauacuuugcaucu

SEQ ID NO: 2700528 - RNA, 19 nt, Artificial Sequence
  Description of Artificial Sequence: Synthetic oligonucleotide
auagucacggaacaagaca

SEQ ID NO: 2700529 - RNA, 19 nt, Artificial Sequence
  Description of Artificial Sequence: Synthetic oligonucleotide
gguuuuaauaccuuguaca

SEQ ID NO: 2700530 - RNA, 19 nt, Artificial Sequence
  Description of Artificial Sequence: Synthetic oligonucleotide
auucguuugccacuucuuc

SEQ ID NO: 2700531 - RNA, 19 nt, Artificial Sequence
  Description of Artificial Sequence: Synthetic oligonucleotide
aacacauauucguuugcca

SEQ ID NO: 2700532 - RNA, 19 nt, Artificial Sequence
  Description of Artificial Sequence: Synthetic oligonucleotide
uugcuuaacauagucaacu

SEQ ID NO: 2700533 - RNA, 19 nt, Artificial Sequence
  Description of Artificial Sequence: Synthetic oligonucleotide
aagugaaguagagucaaug

SEQ ID NO: 2700534 - RNA, 19 nt, Artificial Sequence
  Description of Artificial Sequence: Synthetic oligonucleotide
aaaucuaagcauggcauga

SEQ ID NO: 2700535 - RNA, 19 nt, Artificial Sequence
  Description of Artificial Sequence: Synthetic oligonucleotide
auggcaugaucaugcagcc

SEQ ID NO: 2700536 - RNA, 19 nt, Artificial Sequence
  Description of Artificial Sequence: Synthetic oligonucleotide
cuuacuaaaagugggaaca

SEQ ID NO: 2700537 - RNA, 19 nt, Artificial Sequence
  Description of Artificial Sequence: Synthetic oligonucleotide
gaaaacucguggcacacac

SEQ ID NO: 2700538 - RNA, 19 nt, Artificial Sequence
  Description of Artificial Sequence: Synthetic oligonucleotide
agcacaaagaucaauguga

SEQ ID NO: 2700539 - RNA, 19 nt, Artificial Sequence
  Description of Artificial Sequence: Synthetic oligonucleotide
uaagacaaggugcaucuuc

SEQ ID NO: 2700540 - RNA, 19 nt, Artificial Sequence
  Description of Artificial Sequence: Synthetic oligonucleotide
ugugaccgcauccacagac

SEQ ID NO: 2700541 - RNA, 19 nt, Artificial Sequence
  Description of Artificial Sequence: Synthetic oligonucleotide
agaucaaugugaccgcauc

SEQ ID NO: 2700542 - RNA, 19 nt, Artificial Sequence
  Description of Artificial Sequence: Synthetic oligonucleotide
cauccacagacucuggugg

SEQ ID NO: 2700543 - RNA, 19 nt, Artificial Sequence
  Description of Artificial Sequence: Synthetic oligonucleotide
aaguagagucaaugguagg

SEQ ID NO: 2700544 - RNA, 19 nt, Artificial Sequence
  Description of Artificial Sequence: Synthetic oligonucleotide
uucaaaucuucuuacuaaa

SEQ ID NO: 2700545 - RNA, 19 nt, Artificial Sequence
  Description of Artificial Sequence: Synthetic oligonucleotide
ucuuacuaaaagugggaac

SEQ ID NO: 2700546 - RNA, 19 nt, Artificial Sequence
  Description of Artificial Sequence: Synthetic oligonucleotide
auccacaaagagcuucgcc

SEQ ID NO: 2700547 - RNA, 19 nt, Artificial Sequence
  Description of Artificial Sequence: Synthetic oligonucleotide
ugguuuuaauaccuuguac

SEQ ID NO: 2700548 - RNA, 19 nt, Artificial Sequence
  Description of Artificial Sequence: Synthetic oligonucleotide
cugaaggaaaacucguggc

SEQ ID NO: 2700549 - RNA, 19 nt, Artificial Sequence
  Description of Artificial Sequence: Synthetic oligonucleotide
uggaauacuuugcaucucu

SEQ ID NO: 2700550 - RNA, 19 nt, Artificial Sequence
  Description of Artificial Sequence: Synthetic oligonucleotide
acucuggugggauaugguc

SEQ ID NO: 2700551 - RNA, 19 nt, Artificial Sequence
  Description of Artificial Sequence: Synthetic oligonucleotide
aaggugcaucuucucaggg

SEQ ID NO: 2700552 - RNA, 19 nt, Artificial Sequence
  Description of Artificial Sequence: Synthetic oligonucleotide
caaagauauucaaaucuuc

SEQ ID NO: 2700553 - RNA, 19 nt, Artificial Sequence
  Description of Artificial Sequence: Synthetic oligonucleotide
auaggaucugguuccaucu

SEQ ID NO: 2700554 - RNA, 19 nt, Artificial Sequence
  Description of Artificial Sequence: Synthetic oligonucleotide
uaacauagucaacugcccu

SEQ ID NO: 2700555 - RNA, 19 nt, Artificial Sequence
  Description of Artificial Sequence: Synthetic oligonucleotide
gaucaaugugaccgcaucc

SEQ ID NO: 2700556 - RNA, 19 nt, Artificial Sequence
  Description of Artificial Sequence: Synthetic oligonucleotide
aucuucuuacuaaaagugg

SEQ ID NO: 2700557 - RNA, 19 nt, Artificial Sequence
  Description of Artificial Sequence: Synthetic oligonucleotide
gagcacaaagaucaaugug

SEQ ID NO: 2700558 - RNA, 19 nt, Artificial Sequence
  Description of Artificial Sequence: Synthetic oligonucleotide
aacauagucaacugcccuu

SEQ ID NO: 2700559 - RNA, 19 nt, Artificial Sequence
  Description of Artificial Sequence: Synthetic oligonucleotide
agcuuuaaaucuaagcaug

SEQ ID NO: 2700560 - RNA, 19 nt, Artificial Sequence
  Description of Artificial Sequence: Synthetic oligonucleotide
agucaacugcccuuggaag

SEQ ID NO: 2700561 - RNA, 19 nt, Artificial Sequence
  Description of Artificial Sequence: Synthetic oligonucleotide
aaggaaaacucguggcaca

SEQ ID NO: 2700562 - RNA, 19 nt, Artificial Sequence
  Description of Artificial Sequence: Synthetic oligonucleotide
ucaucuuuagugaggucac

SEQ ID NO: 2700563 - RNA, 19 nt, Artificial Sequence
  Description of Artificial Sequence: Synthetic oligonucleotide
aaaguuuugcuuccagcuu

SEQ ID NO: 2700564 - RNA, 19 nt, Artificial Sequence
  Description of Artificial Sequence: Synthetic oligonucleotide
uucgccaggaauucaucag

SEQ ID NO: 2700565 - RNA, 19 nt, Artificial Sequence
  Description of Artificial Sequence: Synthetic oligonucleotide
ugccacuucuucauaaccu

SEQ ID NO: 2700566 - RNA, 19 nt, Artificial Sequence
  Description of Artificial Sequence: Synthetic oligonucleotide
agagcacaaagaucaaugu

SEQ ID NO: 2700567 - RNA, 19 nt, Artificial Sequence
  Description of Artificial Sequence: Synthetic oligonucleotide
uaaccugcauccacaaaga

SEQ ID NO: 2700568 - RNA, 19 nt, Artificial Sequence
  Description of Artificial Sequence: Synthetic oligonucleotide
uucguuugccacuucuuca

SEQ ID NO: 2700569 - RNA, 19 nt, Artificial Sequence
  Description of Artificial Sequence: Synthetic oligonucleotide
auacuuugcaucucucugu

SEQ ID NO: 2700570 - RNA, 19 nt, Artificial Sequence
  Description of Artificial Sequence: Synthetic oligonucleotide
ugcuuaacauagucaacug

SEQ ID NO: 2700571 - RNA, 19 nt, Artificial Sequence
  Description of Artificial Sequence: Synthetic oligonucleotide
caaagaucaaugugaccgc

SEQ ID NO: 2700572 - RNA, 19 nt, Artificial Sequence
  Description of Artificial Sequence: Synthetic oligonucleotide
uaauaagacaaggugcauc

SEQ ID NO: 2700573 - RNA, 19 nt, Artificial Sequence
  Description of Artificial Sequence: Synthetic oligonucleotide
uugccacuucuucauaacc

SEQ ID NO: 2700574 - RNA, 19 nt, Artificial Sequence
  Description of Artificial Sequence: Synthetic oligonucleotide
guacacauuuaauaagaca

SEQ ID NO: 2700575 - RNA, 19 nt, Artificial Sequence
  Description of Artificial Sequence: Synthetic oligonucleotide
ucuuuagugaggucacacu

SEQ ID NO: 2700576 - RNA, 19 nt, Artificial Sequence
  Description of Artificial Sequence: Synthetic oligonucleotide
gcugagagcacaaagauca

SEQ ID NO: 2700577 - RNA, 19 nt, Artificial Sequence
  Description of Artificial Sequence: Synthetic oligonucleotide
aucuaagcauggcaugauc

SEQ ID NO: 2700578 - RNA, 19 nt, Artificial Sequence
  Description of Artificial Sequence: Synthetic oligonucleotide
uuuggaggcuuccggaacu

SEQ ID NO: 2700579 - RNA, 19 nt, Artificial Sequence
  Description of Artificial Sequence: Synthetic oligonucleotide
auauucguuugccacuucu

SEQ ID NO: 2700580 - RNA, 19 nt, Artificial Sequence
  Description of Artificial Sequence: Synthetic oligonucleotide
ucucagggugaauagcuga

SEQ ID NO: 2700581 - RNA, 19 nt, Artificial Sequence
  Description of Artificial Sequence: Synthetic oligonucleotide
cuuuaaaucuaagcauggc

SEQ ID NO: 2700582 - RNA, 19 nt, Artificial Sequence
  Description of Artificial Sequence: Synthetic oligonucleotide
aaagagcuucgccaggaau

SEQ ID NO: 2700583 - RNA, 19 nt, Artificial Sequence
  Description of Artificial Sequence: Synthetic oligonucleotide
aaccugcauccacaaagag

SEQ ID NO: 2700584 - RNA, 19 nt, Artificial Sequence
  Description of Artificial Sequence: Synthetic oligonucleotide
gaaggaaaacucguggcac

SEQ ID NO: 2700585 - RNA, 19 nt, Artificial Sequence
  Description of Artificial Sequence: Synthetic oligonucleotide
aagacaaggugcaucuucu

SEQ ID NO: 2700586 - RNA, 19 nt, Artificial Sequence
  Description of Artificial Sequence: Synthetic oligonucleotide
ggaacaaacaguucccaac

SEQ ID NO: 2700587 - RNA, 19 nt, Artificial Sequence
  Description of Artificial Sequence: Synthetic oligonucleotide
ucucucuguauuauacaaa

SEQ ID NO: 2700588 - RNA, 19 nt, Artificial Sequence
  Description of Artificial Sequence: Synthetic oligonucleotide
ucgaaacacauauucguuu

SEQ ID NO: 2700589 - RNA, 19 nt, Artificial Sequence
  Description of Artificial Sequence: Synthetic oligonucleotide
aaagaucaaugugaccgca

SEQ ID NO: 2700590 - RNA, 19 nt, Artificial Sequence
  Description of Artificial Sequence: Synthetic oligonucleotide
uucuuacuaaaagugggaa

SEQ ID NO: 2700591 - RNA, 19 nt, Artificial Sequence
  Description of Artificial Sequence: Synthetic oligonucleotide
uuugccacuucuucauaac

SEQ ID NO: 2700592 - RNA, 19 nt, Artificial Sequence
  Description of Artificial Sequence: Synthetic oligonucleotide
aaugguagggucuguccuu

SEQ ID NO: 2700593 - RNA, 19 nt, Artificial Sequence
  Description of Artificial Sequence: Synthetic oligonucleotide
auagcugagagcacaaaga

SEQ ID NO: 2700594 - RNA, 19 nt, Artificial Sequence
  Description of Artificial Sequence: Synthetic oligonucleotide
aacaguucccaaccccaca

SEQ ID NO: 2700595 - RNA, 19 nt, Artificial Sequence
  Description of Artificial Sequence: Synthetic oligonucleotide
aggaggucaucuuuaguga

SEQ ID NO: 2700596 - RNA, 19 nt, Artificial Sequence
  Description of Artificial Sequence: Synthetic oligonucleotide
ugaauagcugagagcacaa

SEQ ID NO: 2700597 - RNA, 19 nt, Artificial Sequence
  Description of Artificial Sequence: Synthetic oligonucleotide
gaggucaucuuuagugagg

SEQ ID NO: 2700598 - RNA, 19 nt, Artificial Sequence
  Description of Artificial Sequence: Synthetic oligonucleotide
acacauuuaauaagacaag

SEQ ID NO: 2700599 - RNA, 19 nt, Artificial Sequence
  Description of Artificial Sequence: Synthetic oligonucleotide
uuuugcuuccagcuuuaaa

SEQ ID NO: 2700600 - RNA, 19 nt, Artificial Sequence
  Description of Artificial Sequence: Synthetic oligonucleotide
uucccaaaguuuugcuucc

SEQ ID NO: 2700601 - RNA, 19 nt, Artificial Sequence
  Description of Artificial Sequence: Synthetic oligonucleotide
uuuucccaaaguuuugcuu

SEQ ID NO: 2700602 - RNA, 19 nt, Artificial Sequence
  Description of Artificial Sequence: Synthetic oligonucleotide
caaaggauuuugcuuaaca

SEQ ID NO: 2700603 - RNA, 19 nt, Artificial Sequence
  Description of Artificial Sequence: Synthetic oligonucleotide
ccagcuuuaaaucuaagca

SEQ ID NO: 2700604 - RNA, 19 nt, Artificial Sequence
  Description of Artificial Sequence: Synthetic oligonucleotide
uaagcauggcaugaucaug

SEQ ID NO: 2700605 - RNA, 19 nt, Artificial Sequence
  Description of Artificial Sequence: Synthetic oligonucleotide
uucucagggugaauagcug

SEQ ID NO: 2700606 - RNA, 19 nt, Artificial Sequence
  Description of Artificial Sequence: Synthetic oligonucleotide
ggcaaagauauucaaaucu

SEQ ID NO: 2700607 - RNA, 19 nt, Artificial Sequence
  Description of Artificial Sequence: Synthetic oligonucleotide
uggugggauauggucaagg

SEQ ID NO: 2700608 - RNA, 19 nt, Artificial Sequence
  Description of Artificial Sequence: Synthetic oligonucleotide
caaaguuuugcuuccagcu

SEQ ID NO: 2700609 - RNA, 19 nt, Artificial Sequence
  Description of Artificial Sequence: Synthetic oligonucleotide
ucguggcacacacaggccu

SEQ ID NO: 2700610 - RNA, 19 nt, Artificial Sequence
  Description of Artificial Sequence: Synthetic oligonucleotide
cuucuuacuaaaaguggga

SEQ ID NO: 2700611 - RNA, 19 nt, Artificial Sequence
  Description of Artificial Sequence: Synthetic oligonucleotide
ucgccaggaauucaucagu

SEQ ID NO: 2700612 - RNA, 19 nt, Artificial Sequence
  Description of Artificial Sequence: Synthetic oligonucleotide
cucugaaggaaaacucgug

SEQ ID NO: 2700613 - RNA, 19 nt, Artificial Sequence
  Description of Artificial Sequence: Synthetic oligonucleotide
ucuggugggauauggucaa

SEQ ID NO: 2700614 - RNA, 19 nt, Artificial Sequence
  Description of Artificial Sequence: Synthetic oligonucleotide
aggaaaacucguggcacac

SEQ ID NO: 2700615 - RNA, 19 nt, Artificial Sequence
  Description of Artificial Sequence: Synthetic oligonucleotide
aucacaggcauaggcaaag

SEQ ID NO: 2700616 - RNA, 19 nt, Artificial Sequence
  Description of Artificial Sequence: Synthetic oligonucleotide
agagcuucgccaggaauuc

SEQ ID NO: 2700617 - RNA, 19 nt, Artificial Sequence
  Description of Artificial Sequence: Synthetic oligonucleotide
ggcaugaucaugcagccca

SEQ ID NO: 2700618 - RNA, 19 nt, Artificial Sequence
  Description of Artificial Sequence: Synthetic oligonucleotide
acaagacacuucugccugg

SEQ ID NO: 2700619 - RNA, 19 nt, Artificial Sequence
  Description of Artificial Sequence: Synthetic oligonucleotide
aagagcuucgccaggaauu

SEQ ID NO: 2700620 - RNA, 19 nt, Artificial Sequence
  Description of Artificial Sequence: Synthetic oligonucleotide
cacaaagaucaaugugacc

SEQ ID NO: 2700621 - RNA, 19 nt, Artificial Sequence
  Description of Artificial Sequence: Synthetic oligonucleotide
gaacaagacacuucugccu

SEQ ID NO: 2700622 - RNA, 19 nt, Artificial Sequence
  Description of Artificial Sequence: Synthetic oligonucleotide
uccuuuggaggcuuccgga

SEQ ID NO: 2700623 - RNA, 19 nt, Artificial Sequence
  Description of Artificial Sequence: Synthetic oligonucleotide
uaccuuguacacauuuaau

SEQ ID NO: 2700624 - RNA, 19 nt, Artificial Sequence
  Description of Artificial Sequence: Synthetic oligonucleotide
aaaauaggaucugguucca

SEQ ID NO: 2700625 - RNA, 19 nt, Artificial Sequence
  Description of Artificial Sequence: Synthetic oligonucleotide
guucacuguuucucgaaac

SEQ ID NO: 2700626 - RNA, 19 nt, Artificial Sequence
  Description of Artificial Sequence: Synthetic oligonucleotide
uguccuuuggaggcuuccg

SEQ ID NO: 2700627 - RNA, 19 nt, Artificial Sequence
  Description of Artificial Sequence: Synthetic oligonucleotide
caucuugucugacauaaaa

SEQ ID NO: 2700628 - RNA, 19 nt, Artificial Sequence
  Description of Artificial Sequence: Synthetic oligonucleotide
agacacuucugccugguuu

SEQ ID NO: 2700629 - RNA, 19 nt, Artificial Sequence
  Description of Artificial Sequence: Synthetic oligonucleotide
uagagucaaugguaggguc

SEQ ID NO: 2700630 - RNA, 19 nt, Artificial Sequence
  Description of Artificial Sequence: Synthetic oligonucleotide
gcuuuaaaucuaagcaugg

SEQ ID NO: 2700631 - RNA, 19 nt, Artificial Sequence
  Description of Artificial Sequence: Synthetic oligonucleotide
uauucguuugccacuucuu

SEQ ID NO: 2700632 - RNA, 19 nt, Artificial Sequence
  Description of Artificial Sequence: Synthetic oligonucleotide
ucguuugccacuucuucau

SEQ ID NO: 2700633 - RNA, 19 nt, Artificial Sequence
  Description of Artificial Sequence: Synthetic oligonucleotide
agacaaggugcaucuucuc

SEQ ID NO: 2700634 - RNA, 19 nt, Artificial Sequence
  Description of Artificial Sequence: Synthetic oligonucleotide
agacucuggugggauaugg

SEQ ID NO: 2700635 - RNA, 19 nt, Artificial Sequence
  Description of Artificial Sequence: Synthetic oligonucleotide
acauagucaacugcccuug

SEQ ID NO: 2700636 - RNA, 19 nt, Artificial Sequence
  Description of Artificial Sequence: Synthetic oligonucleotide
uccggaacuugcucugaag

SEQ ID NO: 2700637 - RNA, 19 nt, Artificial Sequence
  Description of Artificial Sequence: Synthetic oligonucleotide
ucacggaacaagacacuuc

SEQ ID NO: 2700638 - RNA, 19 nt, Artificial Sequence
  Description of Artificial Sequence: Synthetic oligonucleotide
auagucaacugcccuugga

SEQ ID NO: 2700639 - RNA, 19 nt, Artificial Sequence
  Description of Artificial Sequence: Synthetic oligonucleotide
uacaaaggauuuugcuuaa

SEQ ID NO: 2700640 - RNA, 19 nt, Artificial Sequence
  Description of Artificial Sequence: Synthetic oligonucleotide
ccagcuuccaacaaaguca

SEQ ID NO: 2700641 - RNA, 19 nt, Artificial Sequence
  Description of Artificial Sequence: Synthetic oligonucleotide
gucaacugcccuuggaaga

SEQ ID NO: 2700642 - RNA, 19 nt, Artificial Sequence
  Description of Artificial Sequence: Synthetic oligonucleotide
gagucaaugguagggucug

SEQ ID NO: 2700643 - RNA, 19 nt, Artificial Sequence
  Description of Artificial Sequence: Synthetic oligonucleotide
acaguucccaaccccacau

SEQ ID NO: 2700644 - RNA, 19 nt, Artificial Sequence
  Description of Artificial Sequence: Synthetic oligonucleotide
cuguauuauacaaaggauu

SEQ ID NO: 2700645 - RNA, 19 nt, Artificial Sequence
  Description of Artificial Sequence: Synthetic oligonucleotide
uuacuaaaagugggaacaa

SEQ ID NO: 2700646 - RNA, 19 nt, Artificial Sequence
  Description of Artificial Sequence: Synthetic oligonucleotide
uuccagcuuuaaaucuaag

SEQ ID NO: 2700647 - RNA, 19 nt, Artificial Sequence
  Description of Artificial Sequence: Synthetic oligonucleotide
acauccagcuuccaacaaa

SEQ ID NO: 2700648 - RNA, 19 nt, Artificial Sequence
  Description of Artificial Sequence: Synthetic oligonucleotide
acuguuucucgaaacacau

SEQ ID NO: 2700649 - RNA, 19 nt, Artificial Sequence
  Description of Artificial Sequence: Synthetic oligonucleotide
gugaauagcugagagcaca

SEQ ID NO: 2700650 - RNA, 19 nt, Artificial Sequence
  Description of Artificial Sequence: Synthetic oligonucleotide
gugaaguagagucaauggu

SEQ ID NO: 2700651 - RNA, 19 nt, Artificial Sequence
  Description of Artificial Sequence: Synthetic oligonucleotide
aaucuaagcauggcaugau

SEQ ID NO: 2700652 - RNA, 19 nt, Artificial Sequence
  Description of Artificial Sequence: Synthetic oligonucleotide
cagcccauagucacggaac

SEQ ID NO: 2700653 - RNA, 19 nt, Artificial Sequence
  Description of Artificial Sequence: Synthetic oligonucleotide
auaggcaaagauauucaaa

SEQ ID NO: 2700654 - RNA, 19 nt, Artificial Sequence
  Description of Artificial Sequence: Synthetic oligonucleotide
accgcauccacagacucug

SEQ ID NO: 2700655 - RNA, 19 nt, Artificial Sequence
  Description of Artificial Sequence: Synthetic oligonucleotide
cucuggugggauaugguca

SEQ ID NO: 2700656 - RNA, 19 nt, Artificial Sequence
  Description of Artificial Sequence: Synthetic oligonucleotide
cuuuggaggcuuccggaac

SEQ ID NO: 2700657 - RNA, 19 nt, Artificial Sequence
  Description of Artificial Sequence: Synthetic oligonucleotide
acaaaggauuuugcuuaac

SEQ ID NO: 2700658 - RNA, 19 nt, Artificial Sequence
  Description of Artificial Sequence: Synthetic oligonucleotide
ggaggucaucuuuagugag

SEQ ID NO: 2700659 - RNA, 19 nt, Artificial Sequence
  Description of Artificial Sequence: Synthetic oligonucleotide
ucuucauaaccugcaucca

SEQ ID NO: 2700660 - RNA, 19 nt, Artificial Sequence
  Description of Artificial Sequence: Synthetic oligonucleotide
aagugggaacaaacaguuc

SEQ ID NO: 2700661 - RNA, 19 nt, Artificial Sequence
  Description of Artificial Sequence: Synthetic oligonucleotide
ugaccgcauccacagacuc

SEQ ID NO: 2700662 - RNA, 19 nt, Artificial Sequence
  Description of Artificial Sequence: Synthetic oligonucleotide
aggucaucuuuagugaggu

SEQ ID NO: 2700663 - RNA, 19 nt, Artificial Sequence
  Description of Artificial Sequence: Synthetic oligonucleotide
caaccccacauccagcuuc

SEQ ID NO: 2700664 - RNA, 19 nt, Artificial Sequence
  Description of Artificial Sequence: Synthetic oligonucleotide
ucaacugcccuuggaagaa

SEQ ID NO: 2700665 - RNA, 19 nt, Artificial Sequence
  Description of Artificial Sequence: Synthetic oligonucleotide
uuaauaagacaaggugcau

SEQ ID NO: 2700666 - RNA, 19 nt, Artificial Sequence
  Description of Artificial Sequence: Synthetic oligonucleotide
agagucaaugguagggucu

SEQ ID NO: 2700667 - RNA, 19 nt, Artificial Sequence
  Description of Artificial Sequence: Synthetic oligonucleotide
uacuaaaagugggaacaaa

SEQ ID NO: 2700668 - RNA, 19 nt, Artificial Sequence
  Description of Artificial Sequence: Synthetic oligonucleotide
agcccauagucacggaaca

SEQ ID NO: 2700669 - RNA, 19 nt, Artificial Sequence
  Description of Artificial Sequence: Synthetic oligonucleotide
cacuguuucucgaaacaca

SEQ ID NO: 2700670 - RNA, 19 nt, Artificial Sequence
  Description of Artificial Sequence: Synthetic oligonucleotide
ccaaaguuuugcuuccagc

SEQ ID NO: 2700671 - RNA, 19 nt, Artificial Sequence
  Description of Artificial Sequence: Synthetic oligonucleotide
cauaggcaaagauauucaa

SEQ ID NO: 2700672 - RNA, 19 nt, Artificial Sequence
  Description of Artificial Sequence: Synthetic oligonucleotide
aggugcaucuucucagggu

SEQ ID NO: 2700673 - RNA, 19 nt, Artificial Sequence
  Description of Artificial Sequence: Synthetic oligonucleotide
caaagugaaguagagucaa

SEQ ID NO: 2700674 - RNA, 19 nt, Artificial Sequence
  Description of Artificial Sequence: Synthetic oligonucleotide
ccggaacuugcucugaagg

SEQ ID NO: 2700675 - RNA, 19 nt, Artificial Sequence
  Description of Artificial Sequence: Synthetic oligonucleotide
ugggaacaaacaguuccca

SEQ ID NO: 2700676 - RNA, 19 nt, Artificial Sequence
  Description of Artificial Sequence: Synthetic oligonucleotide
cauagucaacugcccuugg

SEQ ID NO: 2700677 - RNA, 19 nt, Artificial Sequence
  Description of Artificial Sequence: Synthetic oligonucleotide
ugagagcacaaagaucaau

SEQ ID NO: 2700678 - RNA, 19 nt, Artificial Sequence
  Description of Artificial Sequence: Synthetic oligonucleotide
cuucgccaggaauucauca

SEQ ID NO: 2700679 - RNA, 19 nt, Artificial Sequence
  Description of Artificial Sequence: Synthetic oligonucleotide
aggcuuccggaacuugcuc

SEQ ID NO: 2700680 - RNA, 19 nt, Artificial Sequence
  Description of Artificial Sequence: Synthetic oligonucleotide
cuucucagggugaauagcu

SEQ ID NO: 2700681 - RNA, 19 nt, Artificial Sequence
  Description of Artificial Sequence: Synthetic oligonucleotide
aacucguggcacacacagg

SEQ ID NO: 2700682 - RNA, 19 nt, Artificial Sequence
  Description of Artificial Sequence: Synthetic oligonucleotide
caucucucuguauuauaca

SEQ ID NO: 2700683 - RNA, 19 nt, Artificial Sequence
  Description of Artificial Sequence: Synthetic oligonucleotide
caaugugaccgcauccaca

SEQ ID NO: 2700684 - RNA, 19 nt, Artificial Sequence
  Description of Artificial Sequence: Synthetic oligonucleotide
ugcaucucucuguauuaua

SEQ ID NO: 2700685 - RNA, 19 nt, Artificial Sequence
  Description of Artificial Sequence: Synthetic oligonucleotide
aaaacucguggcacacaca

SEQ ID NO: 2700686 - RNA, 19 nt, Artificial Sequence
  Description of Artificial Sequence: Synthetic oligonucleotide
cacggaacaagacacuucu

SEQ ID NO: 2700687 - RNA, 19 nt, Artificial Sequence
  Description of Artificial Sequence: Synthetic oligonucleotide
gaucugguuccaucuuguc

SEQ ID NO: 2700688 - RNA, 19 nt, Artificial Sequence
  Description of Artificial Sequence: Synthetic oligonucleotide
guagggucuguccuuugga

SEQ ID NO: 2700689 - RNA, 19 nt, Artificial Sequence
  Description of Artificial Sequence: Synthetic oligonucleotide
aagaucaaugugaccgcau

SEQ ID NO: 2700690 - RNA, 19 nt, Artificial Sequence
  Description of Artificial Sequence: Synthetic oligonucleotide
cagcuuuaaaucuaagcau

SEQ ID NO: 2700691 - RNA, 19 nt, Artificial Sequence
  Description of Artificial Sequence: Synthetic oligonucleotide
cucguggcacacacaggcc

SEQ ID NO: 2700692 - RNA, 19 nt, Artificial Sequence
  Description of Artificial Sequence: Synthetic oligonucleotide
gcaucucucuguauuauac

SEQ ID NO: 2700693 - RNA, 19 nt, Artificial Sequence
  Description of Artificial Sequence: Synthetic oligonucleotide
acauauucguuugccacuu

SEQ ID NO: 2700694 - RNA, 19 nt, Artificial Sequence
  Description of Artificial Sequence: Synthetic oligonucleotide
gaacuugcucugaaggaaa

SEQ ID NO: 2700695 - RNA, 19 nt, Artificial Sequence
  Description of Artificial Sequence: Synthetic oligonucleotide
ucccaaccccacauccagc

SEQ ID NO: 2700696 - RNA, 19 nt, Artificial Sequence
  Description of Artificial Sequence: Synthetic oligonucleotide
agcauggcaugaucaugca

SEQ ID NO: 2700697 - RNA, 19 nt, Artificial Sequence
  Description of Artificial Sequence: Synthetic oligonucleotide
aaauaggaucugguuccau

SEQ ID NO: 2700698 - RNA, 19 nt, Artificial Sequence
  Description of Artificial Sequence: Synthetic oligonucleotide
uuccggaacuugcucugaa

SEQ ID NO: 2700699 - RNA, 19 nt, Artificial Sequence
  Description of Artificial Sequence: Synthetic oligonucleotide
cagcuuccaacaaagucaa

SEQ ID NO: 2700700 - RNA, 19 nt, Artificial Sequence
  Description of Artificial Sequence: Synthetic oligonucleotide
uaggaucugguuccaucuu

SEQ ID NO: 2700701 - RNA, 19 nt, Artificial Sequence
  Description of Artificial Sequence: Synthetic oligonucleotide
ugcaucuucucagggugaa

SEQ ID NO: 2700702 - RNA, 19 nt, Artificial Sequence
  Description of Artificial Sequence: Synthetic oligonucleotide
uccacagacucugguggga

SEQ ID NO: 2700703 - RNA, 19 nt, Artificial Sequence
  Description of Artificial Sequence: Synthetic oligonucleotide
gccugguuuuaauaccuug

SEQ ID NO: 2700704 - RNA, 19 nt, Artificial Sequence
  Description of Artificial Sequence: Synthetic oligonucleotide
gcacaaagaucaaugugac

SEQ ID NO: 2700705 - RNA, 19 nt, Artificial Sequence
  Description of Artificial Sequence: Synthetic oligonucleotide
cacauauucguuugccacu

SEQ ID NO: 2700706 - RNA, 19 nt, Artificial Sequence
  Description of Artificial Sequence: Synthetic oligonucleotide
uugcaucucucuguauuau

SEQ ID NO: 2700707 - RNA, 19 nt, Artificial Sequence
  Description of Artificial Sequence: Synthetic oligonucleotide
gugaggucacacuggaaua

SEQ ID NO: 2700708 - RNA, 19 nt, Artificial Sequence
  Description of Artificial Sequence: Synthetic oligonucleotide
aucaugcagcccauaguca

SEQ ID NO: 2700709 - RNA, 19 nt, Artificial Sequence
  Description of Artificial Sequence: Synthetic oligonucleotide
aacugcccuuggaagaaaa

SEQ ID NO: 2700710 - RNA, 19 nt, Artificial Sequence
  Description of Artificial Sequence: Synthetic oligonucleotide
caucuucucagggugaaua

SEQ ID NO: 2700711 - RNA, 19 nt, Artificial Sequence
  Description of Artificial Sequence: Synthetic oligonucleotide
uagugaggucacacuggaa

SEQ ID NO: 2700712 - RNA, 19 nt, Artificial Sequence
  Description of Artificial Sequence: Synthetic oligonucleotide
gucaaugguagggucuguc

SEQ ID NO: 2700713 - RNA, 19 nt, Artificial Sequence
  Description of Artificial Sequence: Synthetic oligonucleotide
gcauggcaugaucaugcag

SEQ ID NO: 2700714 - RNA, 19 nt, Artificial Sequence
  Description of Artificial Sequence: Synthetic oligonucleotide
cuaagcauggcaugaucau

SEQ ID NO: 2700715 - RNA, 19 nt, Artificial Sequence
  Description of Artificial Sequence: Synthetic oligonucleotide
guagagucaaugguagggu

SEQ ID NO: 2700716 - RNA, 19 nt, Artificial Sequence
  Description of Artificial Sequence: Synthetic oligonucleotide
cauccacaaagagcuucgc

SEQ ID NO: 2700717 - RNA, 19 nt, Artificial Sequence
  Description of Artificial Sequence: Synthetic oligonucleotide
auauggucaaggaggucau

SEQ ID NO: 2700718 - RNA, 19 nt, Artificial Sequence
  Description of Artificial Sequence: Synthetic oligonucleotide
ugccugguuuuaauaccuu

SEQ ID NO: 2700719 - RNA, 19 nt, Artificial Sequence
  Description of Artificial Sequence: Synthetic oligonucleotide
uggcaugaucaugcagccc

SEQ ID NO: 2700720 - RNA, 19 nt, Artificial Sequence
  Description of Artificial Sequence: Synthetic oligonucleotide
agucacggaacaagacacu

SEQ ID NO: 2700721 - RNA, 19 nt, Artificial Sequence
  Description of Artificial Sequence: Synthetic oligonucleotide
cugccugguuuuaauaccu

SEQ ID NO: 2700722 - RNA, 19 nt, Artificial Sequence
  Description of Artificial Sequence: Synthetic oligonucleotide
ucccaaaguuuugcuucca

SEQ ID NO: 2700723 - RNA, 19 nt, Artificial Sequence
  Description of Artificial Sequence: Synthetic oligonucleotide
cuggaauacuuugcaucuc

SEQ ID NO: 2700724 - RNA, 19 nt, Artificial Sequence
  Description of Artificial Sequence: Synthetic oligonucleotide
ccauagucacggaacaaga

SEQ ID NO: 2700725 - RNA, 19 nt, Artificial Sequence
  Description of Artificial Sequence: Synthetic oligonucleotide
ugguagggucuguccuuug

SEQ ID NO: 2700726 - RNA, 19 nt, Artificial Sequence
  Description of Artificial Sequence: Synthetic oligonucleotide
cauauucguuugccacuuc

SEQ ID NO: 2700727 - RNA, 19 nt, Artificial Sequence
  Description of Artificial Sequence: Synthetic oligonucleotide
cucgaaacacauauucguu

SEQ ID NO: 2700728 - RNA, 19 nt, Artificial Sequence
  Description of Artificial Sequence: Synthetic oligonucleotide
agcuucgccaggaauucau

SEQ ID NO: 2700729 - RNA, 19 nt, Artificial Sequence
  Description of Artificial Sequence: Synthetic oligonucleotide
uggaggcuuccggaacuug

SEQ ID NO: 2700730 - RNA, 19 nt, Artificial Sequence
  Description of Artificial Sequence: Synthetic oligonucleotide
cccaaaguuuugcuuccag

SEQ ID NO: 2700731 - RNA, 19 nt, Artificial Sequence
  Description of Artificial Sequence: Synthetic oligonucleotide
cuucaaagugaaguagagu

SEQ ID NO: 2700732 - RNA, 19 nt, Artificial Sequence
  Description of Artificial Sequence: Synthetic oligonucleotide
gggaacaaacaguucccaa

SEQ ID NO: 2700733 - RNA, 19 nt, Artificial Sequence
  Description of Artificial Sequence: Synthetic oligonucleotide
uauggucaaggaggucauc

SEQ ID NO: 2700734 - RNA, 19 nt, Artificial Sequence
  Description of Artificial Sequence: Synthetic oligonucleotide
cauaaccugcauccacaaa

SEQ ID NO: 2700735 - RNA, 19 nt, Artificial Sequence
  Description of Artificial Sequence: Synthetic oligonucleotide
aguuuugcuuccagcuuua

SEQ ID NO: 2700736 - RNA, 19 nt, Artificial Sequence
  Description of Artificial Sequence: Synthetic oligonucleotide
caguucccaaccccacauc

SEQ ID NO: 2700737 - RNA, 19 nt, Artificial Sequence
  Description of Artificial Sequence: Synthetic oligonucleotide
gcuuccaacaaagucaauu

SEQ ID NO: 2700738 - RNA, 19 nt, Artificial Sequence
  Description of Artificial Sequence: Synthetic oligonucleotide
ccugguuuuaauaccuugu

SEQ ID NO: 2700739 - RNA, 19 nt, Artificial Sequence
  Description of Artificial Sequence: Synthetic oligonucleotide
augugaccgcauccacaga

SEQ ID NO: 2700740 - RNA, 19 nt, Artificial Sequence
  Description of Artificial Sequence: Synthetic oligonucleotide
acggaacaagacacuucug

SEQ ID NO: 2700741 - RNA, 19 nt, Artificial Sequence
  Description of Artificial Sequence: Synthetic oligonucleotide
augguagggucuguccuuu

SEQ ID NO: 2700742 - RNA, 19 nt, Artificial Sequence
  Description of Artificial Sequence: Synthetic oligonucleotide
cuguuucucgaaacacaua

SEQ ID NO: 2700743 - RNA, 19 nt, Artificial Sequence
  Description of Artificial Sequence: Synthetic oligonucleotide
gaggucacacuggaauacu

SEQ ID NO: 2700744 - RNA, 19 nt, Artificial Sequence
  Description of Artificial Sequence: Synthetic oligonucleotide
agucaaugguagggucugu

SEQ ID NO: 2700745 - RNA, 19 nt, Artificial Sequence
  Description of Artificial Sequence: Synthetic oligonucleotide
ugguuccaucuugucugac

SEQ ID NO: 2700746 - RNA, 19 nt, Artificial Sequence
  Description of Artificial Sequence: Synthetic oligonucleotide
uuggaggcuuccggaacuu

SEQ ID NO: 2700747 - RNA, 19 nt, Artificial Sequence
  Description of Artificial Sequence: Synthetic oligonucleotide
gcagcccauagucacggaa

SEQ ID NO: 2700748 - RNA, 19 nt, Artificial Sequence
  Description of Artificial Sequence: Synthetic oligonucleotide
caucuuuagugaggucaca

SEQ ID NO: 2700749 - RNA, 19 nt, Artificial Sequence
  Description of Artificial Sequence: Synthetic oligonucleotide
caaggaggucaucuuuagu

SEQ ID NO: 2700750 - RNA, 19 nt, Artificial Sequence
  Description of Artificial Sequence: Synthetic oligonucleotide
cacaggcauaggcaaagau

SEQ ID NO: 2700751 - RNA, 19 nt, Artificial Sequence
  Description of Artificial Sequence: Synthetic oligonucleotide
gacucuggugggauauggu

SEQ ID NO: 2700752 - RNA, 19 nt, Artificial Sequence
  Description of Artificial Sequence: Synthetic oligonucleotide
gucacggaacaagacacuu

SEQ ID NO: 2700753 - RNA, 19 nt, Artificial Sequence
  Description of Artificial Sequence: Synthetic oligonucleotide
gugcaucuucucaggguga

SEQ ID NO: 2700754 - RNA, 19 nt, Artificial Sequence
  Description of Artificial Sequence: Synthetic oligonucleotide
cuggugggauauggucaag

SEQ ID NO: 2700755 - RNA, 19 nt, Artificial Sequence
  Description of Artificial Sequence: Synthetic oligonucleotide
gagcuucgccaggaauuca

SEQ ID NO: 2700756 - RNA, 19 nt, Artificial Sequence
  Description of Artificial Sequence: Synthetic oligonucleotide
gggauauggucaaggaggu

SEQ ID NO: 2700757 - RNA, 19 nt, Artificial Sequence
  Description of Artificial Sequence: Synthetic oligonucleotide
ggucaucuuuagugagguc

SEQ ID NO: 2700758 - RNA, 19 nt, Artificial Sequence
  Description of Artificial Sequence: Synthetic oligonucleotide
ggaaaacucguggcacaca

SEQ ID NO: 2700759 - RNA, 19 nt, Artificial Sequence
  Description of Artificial Sequence: Synthetic oligonucleotide
gcucugaaggaaaacucgu

SEQ ID NO: 2700760 - RNA, 19 nt, Artificial Sequence
  Description of Artificial Sequence: Synthetic oligonucleotide
gaccgcauccacagacucu

SEQ ID NO: 2700761 - RNA, 19 nt, Artificial Sequence
  Description of Artificial Sequence: Synthetic oligonucleotide
ccuuuggaggcuuccggaa

SEQ ID NO: 2700762 - RNA, 19 nt, Artificial Sequence
  Description of Artificial Sequence: Synthetic oligonucleotide
guuucucgaaacacauauu

SEQ ID NO: 2700763 - RNA, 19 nt, Artificial Sequence
  Description of Artificial Sequence: Synthetic oligonucleotide
aggcauaggcaaagauauu

SEQ ID NO: 2700764 - RNA, 19 nt, Artificial Sequence
  Description of Artificial Sequence: Synthetic oligonucleotide
ggauauggucaaggagguc

SEQ ID NO: 2700765 - RNA, 19 nt, Artificial Sequence
  Description of Artificial Sequence: Synthetic oligonucleotide
gugaccgcauccacagacu

SEQ ID NO: 2700766 - RNA, 19 nt, Artificial Sequence
  Description of Artificial Sequence: Synthetic oligonucleotide
gcuucgccaggaauucauc

SEQ ID NO: 2700767 - RNA, 19 nt, Artificial Sequence
  Description of Artificial Sequence: Synthetic oligonucleotide
cccaaccccacauccagcu

SEQ ID NO: 2700768 - RNA, 19 nt, Artificial Sequence
  Description of Artificial Sequence: Synthetic oligonucleotide
agcuuccaacaaagucaau

SEQ ID NO: 2700769 - RNA, 19 nt, Artificial Sequence
  Description of Artificial Sequence: Synthetic oligonucleotide
ccaucuugucugacauaaa

SEQ ID NO: 2700770 - RNA, 19 nt, Artificial Sequence
  Description of Artificial Sequence: Synthetic oligonucleotide
gcccauagucacggaacaa

SEQ ID NO: 2700771 - RNA, 19 nt, Artificial Sequence
  Description of Artificial Sequence: Synthetic oligonucleotide
cgccaggaauucaucagua

SEQ ID NO: 2700772 - RNA, 19 nt, Artificial Sequence
  Description of Artificial Sequence: Synthetic oligonucleotide
gucuguccuuuggaggcuu

SEQ ID NO: 2700773 - RNA, 19 nt, Artificial Sequence
  Description of Artificial Sequence: Synthetic oligonucleotide
cgcauccacagacucuggu

SEQ ID NO: 2700774 - RNA, 19 nt, Artificial Sequence
  Description of Artificial Sequence: Synthetic oligonucleotide
cguuugccacuucuucaua

SEQ ID NO: 2700775 - RNA, 19 nt, Artificial Sequence
  Description of Artificial Sequence: Synthetic oligonucleotide
ccacagacucuggugggau

SEQ ID NO: 2700776 - RNA, 19 nt, Artificial Sequence
  Description of Artificial Sequence: Synthetic oligonucleotide
cguggcacacacaggccuu

SEQ ID NO: 2700777 - RNA, 19 nt, Artificial Sequence
  Description of Artificial Sequence: Synthetic oligonucleotide
aacaauuaagcccagaggc

SEQ ID NO: 2700778 - RNA, 19 nt, Artificial Sequence
  Description of Artificial Sequence: Synthetic oligonucleotide
uuuauaacaauuaagccca

SEQ ID NO: 2700779 - RNA, 19 nt, Artificial Sequence
  Description of Artificial Sequence: Synthetic oligonucleotide
uuucauaaggugaagauag

SEQ ID NO: 2700780 - RNA, 19 nt, Artificial Sequence
  Description of Artificial Sequence: Synthetic oligonucleotide
uuuucuaacuuuaacacag

SEQ ID NO: 2700781 - RNA, 19 nt, Artificial Sequence
  Description of Artificial Sequence: Synthetic oligonucleotide
uuacuaauagcacagauac

SEQ ID NO: 2700782 - RNA, 19 nt, Artificial Sequence
  Description of Artificial Sequence: Synthetic oligonucleotide
guuuauaacaauuaagccc

SEQ ID NO: 2700783 - RNA, 19 nt, Artificial Sequence
  Description of Artificial Sequence: Synthetic oligonucleotide
ugguuuauaacaauuaagc

SEQ ID NO: 2700784 - RNA, 19 nt, Artificial Sequence
  Description of Artificial Sequence: Synthetic oligonucleotide
uucauuucuauucaucugg

SEQ ID NO: 2700785 - RNA, 19 nt, Artificial Sequence
  Description of Artificial Sequence: Synthetic oligonucleotide
aauggcaucaauugucuac

SEQ ID NO: 2700786 - RNA, 19 nt, Artificial Sequence
  Description of Artificial Sequence: Synthetic oligonucleotide
aacuguuuuacugacagac

SEQ ID NO: 2700787 - RNA, 19 nt, Artificial Sequence
  Description of Artificial Sequence: Synthetic oligonucleotide
agacuaacaauguacacac

SEQ ID NO: 2700788 - RNA, 19 nt, Artificial Sequence
  Description of Artificial Sequence: Synthetic oligonucleotide
agauacaauacuuugacca

SEQ ID NO: 2700789 - RNA, 19 nt, Artificial Sequence
  Description of Artificial Sequence: Synthetic oligonucleotide
agcaauauaaguuuugaug

SEQ ID NO: 2700790 - RNA, 19 nt, Artificial Sequence
  Description of Artificial Sequence: Synthetic oligonucleotide
acagauacaauacuuugac

SEQ ID NO: 2700791 - RNA, 19 nt, Artificial Sequence
  Description of Artificial Sequence: Synthetic oligonucleotide
ucaacuguuuuacugacag

SEQ ID NO: 2700792 - RNA, 19 nt, Artificial Sequence
  Description of Artificial Sequence: Synthetic oligonucleotide
ugaagcaaaacccauuuug

SEQ ID NO: 2700793 - RNA, 19 nt, Artificial Sequence
  Description of Artificial Sequence: Synthetic oligonucleotide
aauagcacagauacaauac

SEQ ID NO: 2700794 - RNA, 19 nt, Artificial Sequence
  Description of Artificial Sequence: Synthetic oligonucleotide
uagucgaagacuaacaaug

SEQ ID NO: 2700795 - RNA, 19 nt, Artificial Sequence
  Description of Artificial Sequence: Synthetic oligonucleotide
accaguaacacucacaaug

SEQ ID NO: 2700796 - RNA, 19 nt, Artificial Sequence
  Description of Artificial Sequence: Synthetic oligonucleotide
aagcaaaacccauuuuggc

SEQ ID NO: 2700797 - RNA, 19 nt, Artificial Sequence
  Description of Artificial Sequence: Synthetic oligonucleotide
auuucaauggcaucaauug

SEQ ID NO: 2700798 - RNA, 19 nt, Artificial Sequence
  Description of Artificial Sequence: Synthetic oligonucleotide
acuagaagcuguuucacac

SEQ ID NO: 2700799 - RNA, 19 nt, Artificial Sequence
  Description of Artificial Sequence: Synthetic oligonucleotide
aauacuuugaccaguaaca

SEQ ID NO: 2700800 - RNA, 19 nt, Artificial Sequence
  Description of Artificial Sequence: Synthetic oligonucleotide
ucuacuuggguaaauaagu

SEQ ID NO: 2700801 - RNA, 19 nt, Artificial Sequence
  Description of Artificial Sequence: Synthetic oligonucleotide
uaacaauuaagcccagagg

SEQ ID NO: 2700802 - RNA, 19 nt, Artificial Sequence
  Description of Artificial Sequence: Synthetic oligonucleotide
uaaguuuugaugcaguuua

SEQ ID NO: 2700803 - RNA, 19 nt, Artificial Sequence
  Description of Artificial Sequence: Synthetic oligonucleotide
aggugaagauaguagauac

SEQ ID NO: 2700804 - RNA, 19 nt, Artificial Sequence
  Description of Artificial Sequence: Synthetic oligonucleotide
aauauaaguuuugaugcag

SEQ ID NO: 2700805 - RNA, 19 nt, Artificial Sequence
  Description of Artificial Sequence: Synthetic oligonucleotide
uuaacacaggcuuugaccu

SEQ ID NO: 2700806 - RNA, 19 nt, Artificial Sequence
  Description of Artificial Sequence: Synthetic oligonucleotide
aucuggaccaguuuacacc

SEQ ID NO: 2700807 - RNA, 19 nt, Artificial Sequence
  Description of Artificial Sequence: Synthetic oligonucleotide
uuuauucacguuuugcuga

SEQ ID NO: 2700808 - RNA, 19 nt, Artificial Sequence
  Description of Artificial Sequence: Synthetic oligonucleotide
aaugguuuauaacaauuaa

SEQ ID NO: 2700809 - RNA, 19 nt, Artificial Sequence
  Description of Artificial Sequence: Synthetic oligonucleotide
uucuuuucuuccaaaaucu

SEQ ID NO: 2700810 - RNA, 19 nt, Artificial Sequence
  Description of Artificial Sequence: Synthetic oligonucleotide
agacuuaucauguagucga

SEQ ID NO: 2700811 - RNA, 19 nt, Artificial Sequence
  Description of Artificial Sequence: Synthetic oligonucleotide
ucgaagacuaacaauguac

SEQ ID NO: 2700812 - RNA, 19 nt, Artificial Sequence
  Description of Artificial Sequence: Synthetic oligonucleotide
ugacuuuucgggcuguugg

SEQ ID NO: 2700813 - RNA, 19 nt, Artificial Sequence
  Description of Artificial Sequence: Synthetic oligonucleotide
cauaaggugaagauaguag

SEQ ID NO: 2700814 - RNA, 19 nt, Artificial Sequence
  Description of Artificial Sequence: Synthetic oligonucleotide
cucacaaugguuuauaaca

SEQ ID NO: 2700815 - RNA, 19 nt, Artificial Sequence
  Description of Artificial Sequence: Synthetic oligonucleotide
ucacuucuuauuucaaugg

SEQ ID NO: 2700816 - RNA, 19 nt, Artificial Sequence
  Description of Artificial Sequence: Synthetic oligonucleotide
ucuuauuucaauggcauca

SEQ ID NO: 2700817 - RNA, 19 nt, Artificial Sequence
  Description of Artificial Sequence: Synthetic oligonucleotide
uuauugguuuuccuaacag

SEQ ID NO: 2700818 - RNA, 19 nt, Artificial Sequence
  Description of Artificial Sequence: Synthetic oligonucleotide
uuuuauucacguuuugcug

SEQ ID NO: 2700819 - RNA, 19 nt, Artificial Sequence
  Description of Artificial Sequence: Synthetic oligonucleotide
gauacaauacuuugaccag

SEQ ID NO: 2700820 - RNA, 19 nt, Artificial Sequence
  Description of Artificial Sequence: Synthetic oligonucleotide
aucagggugacuuuucggg

SEQ ID NO: 2700821 - RNA, 19 nt, Artificial Sequence
  Description of Artificial Sequence: Synthetic oligonucleotide
aagacuaacaauguacaca

SEQ ID NO: 2700822 - RNA, 19 nt, Artificial Sequence
  Description of Artificial Sequence: Synthetic oligonucleotide
uucacacuggcacaucugg

SEQ ID NO: 2700823 - RNA, 19 nt, Artificial Sequence
  Description of Artificial Sequence: Synthetic oligonucleotide
auaguagauacuucuuuuc

SEQ ID NO: 2700824 - RNA, 19 nt, Artificial Sequence
  Description of Artificial Sequence: Synthetic oligonucleotide
ucuaacuuuaacacaggcu

SEQ ID NO: 2700825 - RNA, 19 nt, Artificial Sequence
  Description of Artificial Sequence: Synthetic oligonucleotide
uuuuacucuaucaggguga

SEQ ID NO: 2700826 - RNA, 19 nt, Artificial Sequence
  Description of Artificial Sequence: Synthetic oligonucleotide
acuuuuauucacguuuugc

SEQ ID NO: 2700827 - RNA, 19 nt, Artificial Sequence
  Description of Artificial Sequence: Synthetic oligonucleotide
gaagcaaaacccauuuugg

SEQ ID NO: 2700828 - RNA, 19 nt, Artificial Sequence
  Description of Artificial Sequence: Synthetic oligonucleotide
auaaggugaagauaguaga

SEQ ID NO: 2700829 - RNA, 19 nt, Artificial Sequence
  Description of Artificial Sequence: Synthetic oligonucleotide
uguauaucugcuuuguauc

SEQ ID NO: 2700830 - RNA, 19 nt, Artificial Sequence
  Description of Artificial Sequence: Synthetic oligonucleotide
acuaauagcacagauacaa

SEQ ID NO: 2700831 - RNA, 19 nt, Artificial Sequence
  Description of Artificial Sequence: Synthetic oligonucleotide
uuuacuaauagcacagaua

SEQ ID NO: 2700832 - RNA, 19 nt, Artificial Sequence
  Description of Artificial Sequence: Synthetic oligonucleotide
ugaugcaguuuacuaauag

SEQ ID NO: 2700833 - RNA, 19 nt, Artificial Sequence
  Description of Artificial Sequence: Synthetic oligonucleotide
ugacagacuuaucauguag

SEQ ID NO: 2700834 - RNA, 19 nt, Artificial Sequence
  Description of Artificial Sequence: Synthetic oligonucleotide
ucaauugucuacuugggua

SEQ ID NO: 2700835 - RNA, 19 nt, Artificial Sequence
  Description of Artificial Sequence: Synthetic oligonucleotide
uuuguuauugguuuuccua

SEQ ID NO: 2700836 - RNA, 19 nt, Artificial Sequence
  Description of Artificial Sequence: Synthetic oligonucleotide
uuugaugcaguuuacuaau

SEQ ID NO: 2700837 - RNA, 19 nt, Artificial Sequence
  Description of Artificial Sequence: Synthetic oligonucleotide
uucuaacuuuaacacaggc

SEQ ID NO: 2700838 - RNA, 19 nt, Artificial Sequence
  Description of Artificial Sequence: Synthetic oligonucleotide
acucacaaugguuuauaac

SEQ ID NO: 2700839 - RNA, 19 nt, Artificial Sequence
  Description of Artificial Sequence: Synthetic oligonucleotide
acagacuuaucauguaguc

SEQ ID NO: 2700840 - RNA, 19 nt, Artificial Sequence
  Description of Artificial Sequence: Synthetic oligonucleotide
uuaucauguagucgaagac

SEQ ID NO: 2700841 - RNA, 19 nt, Artificial Sequence
  Description of Artificial Sequence: Synthetic oligonucleotide
aagcccagaggccacauug

SEQ ID NO: 2700842 - RNA, 19 nt, Artificial Sequence
  Description of Artificial Sequence: Synthetic oligonucleotide
gcaucaauugucuacuugg

SEQ ID NO: 2700843 - RNA, 19 nt, Artificial Sequence
  Description of Artificial Sequence: Synthetic oligonucleotide
caguuuacuaauagcacag

SEQ ID NO: 2700844 - RNA, 19 nt, Artificial Sequence
  Description of Artificial Sequence: Synthetic oligonucleotide
acuaacaauguacacacuu

SEQ ID NO: 2700845 - RNA, 19 nt, Artificial Sequence
  Description of Artificial Sequence: Synthetic oligonucleotide
cucacuucuuauuucaaug

SEQ ID NO: 2700846 - RNA, 19 nt, Artificial Sequence
  Description of Artificial Sequence: Synthetic oligonucleotide
ugguuuuccuaacagcagc

SEQ ID NO: 2700847 - RNA, 19 nt, Artificial Sequence
  Description of Artificial Sequence: Synthetic oligonucleotide
uuuccuaacagcagcaaua

SEQ ID NO: 2700848 - RNA, 19 nt, Artificial Sequence
  Description of Artificial Sequence: Synthetic oligonucleotide
gguuuauaacaauuaagcc

SEQ ID NO: 2700849 - RNA, 19 nt, Artificial Sequence
  Description of Artificial Sequence: Synthetic oligonucleotide
gaagauaguagauacuucu

SEQ ID NO: 2700850 - RNA, 19 nt, Artificial Sequence
  Description of Artificial Sequence: Synthetic oligonucleotide
aaaucugaagcaaaaccca

SEQ ID NO: 2700851 - RNA, 19 nt, Artificial Sequence
  Description of Artificial Sequence: Synthetic oligonucleotide
uaguagauacuucuuuucu

SEQ ID NO: 2700852 - RNA, 19 nt, Artificial Sequence
  Description of Artificial Sequence: Synthetic oligonucleotide
agcaaaacccauuuuggcu

SEQ ID NO: 2700853 - RNA, 19 nt, Artificial Sequence
  Description of Artificial Sequence: Synthetic oligonucleotide
uuucauuucuauucaucug

SEQ ID NO: 2700854 - RNA, 19 nt, Artificial Sequence
  Description of Artificial Sequence: Synthetic oligonucleotide
caauacuuugaccaguaac

SEQ ID NO: 2700855 - RNA, 19 nt, Artificial Sequence
  Description of Artificial Sequence: Synthetic oligonucleotide
uagaagcuguuucacacug

SEQ ID NO: 2700856 - RNA, 19 nt, Artificial Sequence
  Description of Artificial Sequence: Synthetic oligonucleotide
uucacuauuuuccaacuuu

SEQ ID NO: 2700857 - RNA, 19 nt, Artificial Sequence
  Description of Artificial Sequence: Synthetic oligonucleotide
uucuucacuauuuuccaac

SEQ ID NO: 2700858 - RNA, 19 nt, Artificial Sequence
  Description of Artificial Sequence: Synthetic oligonucleotide
uaauagcacagauacaaua

SEQ ID NO: 2700859 - RNA, 19 nt, Artificial Sequence
  Description of Artificial Sequence: Synthetic oligonucleotide
uguagucgaagacuaacaa

SEQ ID NO: 2700860 - RNA, 19 nt, Artificial Sequence
  Description of Artificial Sequence: Synthetic oligonucleotide
acaauuaagcccagaggcc

SEQ ID NO: 2700861 - RNA, 19 nt, Artificial Sequence
  Description of Artificial Sequence: Synthetic oligonucleotide
uuucaauggcaucaauugu

SEQ ID NO: 2700862 - RNA, 19 nt, Artificial Sequence
  Description of Artificial Sequence: Synthetic oligonucleotide
acaauguacacacuuuuau

SEQ ID NO: 2700863 - RNA, 19 nt, Artificial Sequence
  Description of Artificial Sequence: Synthetic oligonucleotide
ugcaguuuacuaauagcac

SEQ ID NO: 2700864 - RNA, 19 nt, Artificial Sequence
  Description of Artificial Sequence: Synthetic oligonucleotide
aacuuuaacacaggcuuug

SEQ ID NO: 2700865 - RNA, 19 nt, Artificial Sequence
  Description of Artificial Sequence: Synthetic oligonucleotide
ucugaagcaaaacccauuu

SEQ ID NO: 2700866 - RNA, 19 nt, Artificial Sequence
  Description of Artificial Sequence: Synthetic oligonucleotide
uacaccucagugcucaaca

SEQ ID NO: 2700867 - RNA, 19 nt, Artificial Sequence
  Description of Artificial Sequence: Synthetic oligonucleotide
acacuggcacaucuggacc

SEQ ID NO: 2700868 - RNA, 19 nt, Artificial Sequence
  Description of Artificial Sequence: Synthetic oligonucleotide
guagauacuucuuuucuuc

SEQ ID NO: 2700869 - RNA, 19 nt, Artificial Sequence
  Description of Artificial Sequence: Synthetic oligonucleotide
guauaucugcuuuguaucc

SEQ ID NO: 2700870 - RNA, 19 nt, Artificial Sequence
  Description of Artificial Sequence: Synthetic oligonucleotide
uaucauguagucgaagacu

SEQ ID NO: 2700871 - RNA, 19 nt, Artificial Sequence
  Description of Artificial Sequence: Synthetic oligonucleotide
uugguuuuccuaacagcag

SEQ ID NO: 2700872 - RNA, 19 nt, Artificial Sequence
  Description of Artificial Sequence: Synthetic oligonucleotide
ugcuuuguauccucggacc

SEQ ID NO: 2700873 - RNA, 19 nt, Artificial Sequence
  Description of Artificial Sequence: Synthetic oligonucleotide
cuuaucauguagucgaaga

SEQ ID NO: 2700874 - RNA, 19 nt, Artificial Sequence
  Description of Artificial Sequence: Synthetic oligonucleotide
auaucugcuuuguauccuc

SEQ ID NO: 2700875 - RNA, 19 nt, Artificial Sequence
  Description of Artificial Sequence: Synthetic oligonucleotide
caucaauugucuacuuggg

SEQ ID NO: 2700876 - RNA, 19 nt, Artificial Sequence
  Description of Artificial Sequence: Synthetic oligonucleotide
augguuuauaacaauuaag

SEQ ID NO: 2700877 - RNA, 19 nt, Artificial Sequence
  Description of Artificial Sequence: Synthetic oligonucleotide
uacugacagacuuaucaug

SEQ ID NO: 2700878 - RNA, 19 nt, Artificial Sequence
  Description of Artificial Sequence: Synthetic oligonucleotide
uuauucacguuuugcugag

SEQ ID NO: 2700879 - RNA, 19 nt, Artificial Sequence
  Description of Artificial Sequence: Synthetic oligonucleotide
acagcagcaauauaaguuu

SEQ ID NO: 2700880 - RNA, 19 nt, Artificial Sequence
  Description of Artificial Sequence: Synthetic oligonucleotide
ucacguuuugcugaguagc

SEQ ID NO: 2700881 - RNA, 19 nt, Artificial Sequence
  Description of Artificial Sequence: Synthetic oligonucleotide
uaacaauguacacacuuuu

SEQ ID NO: 2700882 - RNA, 19 nt, Artificial Sequence
  Description of Artificial Sequence: Synthetic oligonucleotide
uguacacacuuuuauucac

SEQ ID NO: 2700883 - RNA, 19 nt, Artificial Sequence
  Description of Artificial Sequence: Synthetic oligonucleotide
uacucuaucagggugacuu

SEQ ID NO: 2700884 - RNA, 19 nt, Artificial Sequence
  Description of Artificial Sequence: Synthetic oligonucleotide
uaucagggugacuuuucgg

SEQ ID NO: 2700885 - RNA, 19 nt, Artificial Sequence
  Description of Artificial Sequence: Synthetic oligonucleotide
gaagacuaacaauguacac

SEQ ID NO: 2700886 - RNA, 19 nt, Artificial Sequence
  Description of Artificial Sequence: Synthetic oligonucleotide
aacccauuuuggcuuagcu

SEQ ID NO: 2700887 - RNA, 19 nt, Artificial Sequence
  Description of Artificial Sequence: Synthetic oligonucleotide
augcaguuuacuaauagca

SEQ ID NO: 2700888 - RNA, 19 nt, Artificial Sequence
  Description of Artificial Sequence: Synthetic oligonucleotide
ugaagauaguagauacuuc

SEQ ID NO: 2700889 - RNA, 19 nt, Artificial Sequence
  Description of Artificial Sequence: Synthetic oligonucleotide
uuugcugaguagcagccuc

SEQ ID NO: 2700890 - RNA, 19 nt, Artificial Sequence
  Description of Artificial Sequence: Synthetic oligonucleotide
uuuggcuuagcuuuucauu

SEQ ID NO: 2700891 - RNA, 19 nt, Artificial Sequence
  Description of Artificial Sequence: Synthetic oligonucleotide
uuuguauccucggaccucc

SEQ ID NO: 2700892 - RNA, 19 nt, Artificial Sequence
  Description of Artificial Sequence: Synthetic oligonucleotide
ucuucacuauuuuccaacu

SEQ ID NO: 2700893 - RNA, 19 nt, Artificial Sequence
  Description of Artificial Sequence: Synthetic oligonucleotide
uacacacuuuuauucacgu

SEQ ID NO: 2700894 - RNA, 19 nt, Artificial Sequence
  Description of Artificial Sequence: Synthetic oligonucleotide
ucauuucuauucaucuggu

SEQ ID NO: 2700895 - RNA, 19 nt, Artificial Sequence
  Description of Artificial Sequence: Synthetic oligonucleotide
uugaccaguaacacucaca

SEQ ID NO: 2700896 - RNA, 19 nt, Artificial Sequence
  Description of Artificial Sequence: Synthetic oligonucleotide
uuagcuuuucauuucuauu

SEQ ID NO: 2700897 - RNA, 19 nt, Artificial Sequence
  Description of Artificial Sequence: Synthetic oligonucleotide
cacuucuuauuucaauggc

SEQ ID NO: 2700898 - RNA, 19 nt, Artificial Sequence
  Description of Artificial Sequence: Synthetic oligonucleotide
uuuucauaaggugaagaua

SEQ ID NO: 2700899 - RNA, 19 nt, Artificial Sequence
  Description of Artificial Sequence: Synthetic oligonucleotide
agauaguagauacuucuuu

SEQ ID NO: 2700900 - RNA, 19 nt, Artificial Sequence
  Description of Artificial Sequence: Synthetic oligonucleotide
uuuuguuauugguuuuccu

SEQ ID NO: 2700901 - RNA, 19 nt, Artificial Sequence
  Description of Artificial Sequence: Synthetic oligonucleotide
uauucaucugguuguuucu

SEQ ID NO: 2700902 - RNA, 19 nt, Artificial Sequence
  Description of Artificial Sequence: Synthetic oligonucleotide
uauaaguuuugaugcaguu

SEQ ID NO: 2700903 - RNA, 19 nt, Artificial Sequence
  Description of Artificial Sequence: Synthetic oligonucleotide
uucacguuuugcugaguag

SEQ ID NO: 2700904 - RNA, 19 nt, Artificial Sequence
  Description of Artificial Sequence: Synthetic oligonucleotide
uuuucucacuucuuauuuc

SEQ ID NO: 2700905 - RNA, 19 nt, Artificial Sequence
  Description of Artificial Sequence: Synthetic oligonucleotide
aauuaagcccagaggccac

SEQ ID NO: 2700906 - RNA, 19 nt, Artificial Sequence
  Description of Artificial Sequence: Synthetic oligonucleotide
uguuauugguuuuccuaac

SEQ ID NO: 2700907 - RNA, 19 nt, Artificial Sequence
  Description of Artificial Sequence: Synthetic oligonucleotide
cuaucagggugacuuuucg

SEQ ID NO: 2700908 - RNA, 19 nt, Artificial Sequence
  Description of Artificial Sequence: Synthetic oligonucleotide
ucaucugguuguuucuuca

SEQ ID NO: 2700909 - RNA, 19 nt, Artificial Sequence
  Description of Artificial Sequence: Synthetic oligonucleotide
uacaauacuuugaccagua

SEQ ID NO: 2700910 - RNA, 19 nt, Artificial Sequence
  Description of Artificial Sequence: Synthetic oligonucleotide
uuacugacagacuuaucau

SEQ ID NO: 2700911 - RNA, 19 nt, Artificial Sequence
  Description of Artificial Sequence: Synthetic oligonucleotide
ugucuacuuggguaaauaa

SEQ ID NO: 2700912 - RNA, 19 nt, Artificial Sequence
  Description of Artificial Sequence: Synthetic oligonucleotide
uguuuuacugacagacuua

SEQ ID NO: 2700913 - RNA, 19 nt, Artificial Sequence
  Description of Artificial Sequence: Synthetic oligonucleotide
ucacuauuuuccaacuuuu

SEQ ID NO: 2700914 - RNA, 19 nt, Artificial Sequence
  Description of Artificial Sequence: Synthetic oligonucleotide
cagacuuaucauguagucg

SEQ ID NO: 2700915 - RNA, 19 nt, Artificial Sequence
  Description of Artificial Sequence: Synthetic oligonucleotide
gucuacuuggguaaauaag

SEQ ID NO: 2700916 - RNA, 19 nt, Artificial Sequence
  Description of Artificial Sequence: Synthetic oligonucleotide
cagauacaauacuuugacc

SEQ ID NO: 2700917 - RNA, 19 nt, Artificial Sequence
  Description of Artificial Sequence: Synthetic oligonucleotide
uaacagcagcaauauaagu

SEQ ID NO: 2700918 - RNA, 19 nt, Artificial Sequence
  Description of Artificial Sequence: Synthetic oligonucleotide
uuccaaaaucugaagcaaa

SEQ ID NO: 2700919 - RNA, 19 nt, Artificial Sequence
  Description of Artificial Sequence: Synthetic oligonucleotide
uggaccaguuuacaccuca

SEQ ID NO: 2700920 - RNA, 19 nt, Artificial Sequence
  Description of Artificial Sequence: Synthetic oligonucleotide
aucaauugucuacuugggu

SEQ ID NO: 2700921 - RNA, 19 nt, Artificial Sequence
  Description of Artificial Sequence: Synthetic oligonucleotide
cuuuuauucacguuuugcu

SEQ ID NO: 2700922 - RNA, 19 nt, Artificial Sequence
  Description of Artificial Sequence: Synthetic oligonucleotide
aaacccauuuuggcuuagc

SEQ ID NO: 2700923 - RNA, 19 nt, Artificial Sequence
  Description of Artificial Sequence: Synthetic oligonucleotide
uauccucggaccuccacca

SEQ ID NO: 2700924 - RNA, 19 nt, Artificial Sequence
  Description of Artificial Sequence: Synthetic oligonucleotide
acugacagacuuaucaugu

SEQ ID NO: 2700925 - RNA, 19 nt, Artificial Sequence
  Description of Artificial Sequence: Synthetic oligonucleotide
aguagauacuucuuuucuu

SEQ ID NO: 2700926 - RNA, 19 nt, Artificial Sequence
  Description of Artificial Sequence: Synthetic oligonucleotide
uuauaacaauuaagcccag

SEQ ID NO: 2700927 - RNA, 19 nt, Artificial Sequence
  Description of Artificial Sequence: Synthetic oligonucleotide
ucuucgccuguauaucugc

SEQ ID NO: 2700928 - RNA, 19 nt, Artificial Sequence
  Description of Artificial Sequence: Synthetic oligonucleotide
uacuuugaccaguaacacu

SEQ ID NO: 2700929 - RNA, 19 nt, Artificial Sequence
  Description of Artificial Sequence: Synthetic oligonucleotide
ucagggugacuuuucgggc

SEQ ID NO: 2700930 - RNA, 19 nt, Artificial Sequence
  Description of Artificial Sequence: Synthetic oligonucleotide
uacuagaagcuguuucaca

SEQ ID NO: 2700931 - RNA, 19 nt, Artificial Sequence
  Description of Artificial Sequence: Synthetic oligonucleotide
guacacacuuuuauucacg

SEQ ID NO: 2700932 - RNA, 19 nt, Artificial Sequence
  Description of Artificial Sequence: Synthetic oligonucleotide
cauguagucgaagacuaac

SEQ ID NO: 2700933 - RNA, 19 nt, Artificial Sequence
  Description of Artificial Sequence: Synthetic oligonucleotide
uuugaccaguaacacucac

SEQ ID NO: 2700934 - RNA, 19 nt, Artificial Sequence
  Description of Artificial Sequence: Synthetic oligonucleotide
ccaguuuacaccucagugc

SEQ ID NO: 2700935 - RNA, 19 nt, Artificial Sequence
  Description of Artificial Sequence: Synthetic oligonucleotide
ugguucaguuuucuucgcc

SEQ ID NO: 2700936 - RNA, 19 nt, Artificial Sequence
  Description of Artificial Sequence: Synthetic oligonucleotide
guuauugguuuuccuaaca

SEQ ID NO: 2700937 - RNA, 19 nt, Artificial Sequence
  Description of Artificial Sequence: Synthetic oligonucleotide
ccaguaacacucacaaugg

SEQ ID NO: 2700938 - RNA, 19 nt, Artificial Sequence
  Description of Artificial Sequence: Synthetic oligonucleotide
ucuaucagggugacuuuuc

SEQ ID NO: 2700939 - RNA, 19 nt, Artificial Sequence
  Description of Artificial Sequence: Synthetic oligonucleotide
uacuuggguaaauaaguuu

SEQ ID NO: 2700940 - RNA, 19 nt, Artificial Sequence
  Description of Artificial Sequence: Synthetic oligonucleotide
uacuaauagcacagauaca

SEQ ID NO: 2700941 - RNA, 19 nt, Artificial Sequence
  Description of Artificial Sequence: Synthetic oligonucleotide
ccuaacagcagcaauauaa

SEQ ID NO: 2700942 - RNA, 19 nt, Artificial Sequence
  Description of Artificial Sequence: Synthetic oligonucleotide
acuucuuauuucaauggca

SEQ ID NO: 2700943 - RNA, 19 nt, Artificial Sequence
  Description of Artificial Sequence: Synthetic oligonucleotide
ucauaaggugaagauagua

SEQ ID NO: 2700944 - RNA, 19 nt, Artificial Sequence
  Description of Artificial Sequence: Synthetic oligonucleotide
uucuucgccuguauaucug

SEQ ID NO: 2700945 - RNA, 19 nt, Artificial Sequence
  Description of Artificial Sequence: Synthetic oligonucleotide
guauccucggaccuccacc

SEQ ID NO: 2700946 - RNA, 19 nt, Artificial Sequence
  Description of Artificial Sequence: Synthetic oligonucleotide
aaggugaagauaguagaua

SEQ ID NO: 2700947 - RNA, 19 nt, Artificial Sequence
  Description of Artificial Sequence: Synthetic oligonucleotide
uucuagccaaaccucacuu

SEQ ID NO: 2700948 - RNA, 19 nt, Artificial Sequence
  Description of Artificial Sequence: Synthetic oligonucleotide
caauauaaguuuugaugca

SEQ ID NO: 2700949 - RNA, 19 nt, Artificial Sequence
  Description of Artificial Sequence: Synthetic oligonucleotide
accucagugcucaacacag

SEQ ID NO: 2700950 - RNA, 19 nt, Artificial Sequence
  Description of Artificial Sequence: Synthetic oligonucleotide
aaguuuuguuauugguuuu

SEQ ID NO: 2700951 - RNA, 19 nt, Artificial Sequence
  Description of Artificial Sequence: Synthetic oligonucleotide
cuagccaaaccucacuuca

SEQ ID NO: 2700952 - RNA, 19 nt, Artificial Sequence
  Description of Artificial Sequence: Synthetic oligonucleotide
uuuucuucgccuguauauc

SEQ ID NO: 2700953 - RNA, 19 nt, Artificial Sequence
  Description of Artificial Sequence: Synthetic oligonucleotide
cacagauacaauacuuuga

SEQ ID NO: 2700954 - RNA, 19 nt, Artificial Sequence
  Description of Artificial Sequence: Synthetic oligonucleotide
uucauaaggugaagauagu

SEQ ID NO: 2700955 - RNA, 19 nt, Artificial Sequence
  Description of Artificial Sequence: Synthetic oligonucleotide
ccagucuucauuaucuuug

SEQ ID NO: 2700956 - RNA, 19 nt, Artificial Sequence
  Description of Artificial Sequence: Synthetic oligonucleotide
uuuuggcuuagcuuuucau

SEQ ID NO: 2700957 - RNA, 19 nt, Artificial Sequence
  Description of Artificial Sequence: Synthetic oligonucleotide
uuuucgggcuguugguuca

SEQ ID NO: 2700958 - RNA, 19 nt, Artificial Sequence
  Description of Artificial Sequence: Synthetic oligonucleotide
gauaguagauacuucuuuu

SEQ ID NO: 2700959 - RNA, 19 nt, Artificial Sequence
  Description of Artificial Sequence: Synthetic oligonucleotide
uagccaaaccucacuucag

SEQ ID NO: 2700960 - RNA, 19 nt, Artificial Sequence
  Description of Artificial Sequence: Synthetic oligonucleotide
guucaguuuucuucgccug

SEQ ID NO: 2700961 - RNA, 19 nt, Artificial Sequence
  Description of Artificial Sequence: Synthetic oligonucleotide
guuuuguuauugguuuucc

SEQ ID NO: 2700962 - RNA, 19 nt, Artificial Sequence
  Description of Artificial Sequence: Synthetic oligonucleotide
uuggggucaacuguuuuac

SEQ ID NO: 2700963 - RNA, 19 nt, Artificial Sequence
  Description of Artificial Sequence: Synthetic oligonucleotide
uuucuucacuauuuuccaa

SEQ ID NO: 2700964 - RNA, 19 nt, Artificial Sequence
  Description of Artificial Sequence: Synthetic oligonucleotide
uucuuauuucaauggcauc

SEQ ID NO: 2700965 - RNA, 19 nt, Artificial Sequence
  Description of Artificial Sequence: Synthetic oligonucleotide
aaucugaagcaaaacccau

SEQ ID NO: 2700966 - RNA, 19 nt, Artificial Sequence
  Description of Artificial Sequence: Synthetic oligonucleotide
uaacuuuaacacaggcuuu

SEQ ID NO: 2700967 - RNA, 19 nt, Artificial Sequence
  Description of Artificial Sequence: Synthetic oligonucleotide
ucuagccaaaccucacuuc

SEQ ID NO: 2700968 - RNA, 19 nt, Artificial Sequence
  Description of Artificial Sequence: Synthetic oligonucleotide
auucacguuuugcugagua

SEQ ID NO: 2700969 - RNA, 19 nt, Artificial Sequence
  Description of Artificial Sequence: Synthetic oligonucleotide
uccaccagucuucauuauc

SEQ ID NO: 2700970 - RNA, 19 nt, Artificial Sequence
  Description of Artificial Sequence: Synthetic oligonucleotide
cacaucuggaccaguuuac

SEQ ID NO: 2700971 - RNA, 19 nt, Artificial Sequence
  Description of Artificial Sequence: Synthetic oligonucleotide
gcaguuuacuaauagcaca

SEQ ID NO: 2700972 - RNA, 19 nt, Artificial Sequence
  Description of Artificial Sequence: Synthetic oligonucleotide
gcacagauacaauacuuug

SEQ ID NO: 2700973 - RNA, 19 nt, Artificial Sequence
  Description of Artificial Sequence: Synthetic oligonucleotide
auauaaguuuugaugcagu

SEQ ID NO: 2700974 - RNA, 19 nt, Artificial Sequence
  Description of Artificial Sequence: Synthetic oligonucleotide
acaaugguuuauaacaauu

SEQ ID NO: 2700975 - RNA, 19 nt, Artificial Sequence
  Description of Artificial Sequence: Synthetic oligonucleotide
caauugucuacuuggguaa

SEQ ID NO: 2700976 - RNA, 19 nt, Artificial Sequence
  Description of Artificial Sequence: Synthetic oligonucleotide
auacaauacuuugaccagu

SEQ ID NO: 2700977 - RNA, 19 nt, Artificial Sequence
  Description of Artificial Sequence: Synthetic oligonucleotide
auuuuggcuuagcuuuuca

SEQ ID NO: 2700978 - RNA, 19 nt, Artificial Sequence
  Description of Artificial Sequence: Synthetic oligonucleotide
uuuacucuaucagggugac

SEQ ID NO: 2700979 - RNA, 19 nt, Artificial Sequence
  Description of Artificial Sequence: Synthetic oligonucleotide
cugcuuuguauccucggac

SEQ ID NO: 2700980 - RNA, 19 nt, Artificial Sequence
  Description of Artificial Sequence: Synthetic oligonucleotide
ucacacuggcacaucugga

SEQ ID NO: 2700981 - RNA, 19 nt, Artificial Sequence
  Description of Artificial Sequence: Synthetic oligonucleotide
acuuaucauguagucgaag

SEQ ID NO: 2700982 - RNA, 19 nt, Artificial Sequence
  Description of Artificial Sequence: Synthetic oligonucleotide
ucagugcucaacacaguuu

SEQ ID NO: 2700983 - RNA, 19 nt, Artificial Sequence
  Description of Artificial Sequence: Synthetic oligonucleotide
auaaguuuugaugcaguuu

SEQ ID NO: 2700984 - RNA, 19 nt, Artificial Sequence
  Description of Artificial Sequence: Synthetic oligonucleotide
ucgccuguauaucugcuuu

SEQ ID NO: 2700985 - RNA, 19 nt, Artificial Sequence
  Description of Artificial Sequence: Synthetic oligonucleotide
uuccuaacagcagcaauau

SEQ ID NO: 2700986 - RNA, 19 nt, Artificial Sequence
  Description of Artificial Sequence: Synthetic oligonucleotide
caauuaagcccagaggcca

SEQ ID NO: 2700987 - RNA, 19 nt, Artificial Sequence
  Description of Artificial Sequence: Synthetic oligonucleotide
guuuucuucgccuguauau

SEQ ID NO: 2700988 - RNA, 19 nt, Artificial Sequence
  Description of Artificial Sequence: Synthetic oligonucleotide
aucauguagucgaagacua

SEQ ID NO: 2700989 - RNA, 19 nt, Artificial Sequence
  Description of Artificial Sequence: Synthetic oligonucleotide
uuuuacugacagacuuauc

SEQ ID NO: 2700990 - RNA, 19 nt, Artificial Sequence
  Description of Artificial Sequence: Synthetic oligonucleotide
uguauccucggaccuccac

SEQ ID NO: 2700991 - RNA, 19 nt, Artificial Sequence
  Description of Artificial Sequence: Synthetic oligonucleotide
cuucuuauuucaauggcau

SEQ ID NO: 2700992 - RNA, 19 nt, Artificial Sequence
  Description of Artificial Sequence: Synthetic oligonucleotide
uucucacuucuuauuucaa

SEQ ID NO: 2700993 - RNA, 19 nt, Artificial Sequence
  Description of Artificial Sequence: Synthetic oligonucleotide
aacacucacaaugguuuau

SEQ ID NO: 2700994 - RNA, 19 nt, Artificial Sequence
  Description of Artificial Sequence: Synthetic oligonucleotide
uugcugaguagcagccuca

SEQ ID NO: 2700995 - RNA, 19 nt, Artificial Sequence
  Description of Artificial Sequence: Synthetic oligonucleotide
aguagcagccucaaguuuu

SEQ ID NO: 2700996 - RNA, 19 nt, Artificial Sequence
  Description of Artificial Sequence: Synthetic oligonucleotide
uugguucaguuuucuucgc

SEQ ID NO: 2700997 - RNA, 19 nt, Artificial Sequence
  Description of Artificial Sequence: Synthetic oligonucleotide
ugguuguuucuucacuauu

SEQ ID NO: 2700998 - RNA, 19 nt, Artificial Sequence
  Description of Artificial Sequence: Synthetic oligonucleotide
ucauguagucgaagacuaa

SEQ ID NO: 2700999 - RNA, 19 nt, Artificial Sequence
  Description of Artificial Sequence: Synthetic oligonucleotide
auguagucgaagacuaaca

SEQ ID NO: 2701000 - RNA, 19 nt, Artificial Sequence
  Description of Artificial Sequence: Synthetic oligonucleotide
caaaccucacuucagauuu

SEQ ID NO: 2701001 - RNA, 19 nt, Artificial Sequence
  Description of Artificial Sequence: Synthetic oligonucleotide
guuuacuaauagcacagau

SEQ ID NO: 2701002 - RNA, 19 nt, Artificial Sequence
  Description of Artificial Sequence: Synthetic oligonucleotide
cuguauaucugcuuuguau

SEQ ID NO: 2701003 - RNA, 19 nt, Artificial Sequence
  Description of Artificial Sequence: Synthetic oligonucleotide
aaaacccauuuuggcuuag

SEQ ID NO: 2701004 - RNA, 19 nt, Artificial Sequence
  Description of Artificial Sequence: Synthetic oligonucleotide
uaacacucacaaugguuua

SEQ ID NO: 2701005 - RNA, 19 nt, Artificial Sequence
  Description of Artificial Sequence: Synthetic oligonucleotide
caucugguuguuucuucac

SEQ ID NO: 2701006 - RNA, 19 nt, Artificial Sequence
  Description of Artificial Sequence: Synthetic oligonucleotide
uugaugcaguuuacuaaua

SEQ ID NO: 2701007 - RNA, 19 nt, Artificial Sequence
  Description of Artificial Sequence: Synthetic oligonucleotide
agcagcaauauaaguuuug

SEQ ID NO: 2701008 - RNA, 19 nt, Artificial Sequence
  Description of Artificial Sequence: Synthetic oligonucleotide
aguuuucuucgccuguaua

SEQ ID NO: 2701009 - RNA, 19 nt, Artificial Sequence
  Description of Artificial Sequence: Synthetic oligonucleotide
uggcuuagcuuuucauuuc

SEQ ID NO: 2701010 - RNA, 19 nt, Artificial Sequence
  Description of Artificial Sequence: Synthetic oligonucleotide
guaacacucacaaugguuu

SEQ ID NO: 2701011 - RNA, 19 nt, Artificial Sequence
  Description of Artificial Sequence: Synthetic oligonucleotide
aauugucuacuuggguaaa

SEQ ID NO: 2701012 - RNA, 19 nt, Artificial Sequence
  Description of Artificial Sequence: Synthetic oligonucleotide
guacuagaagcuguuucac

SEQ ID NO: 2701013 - RNA, 19 nt, Artificial Sequence
  Description of Artificial Sequence: Synthetic oligonucleotide
uccucggaccuccaccagu

SEQ ID NO: 2701014 - RNA, 19 nt, Artificial Sequence
  Description of Artificial Sequence: Synthetic oligonucleotide
aguuuacuaauagcacaga

SEQ ID NO: 2701015 - RNA, 19 nt, Artificial Sequence
  Description of Artificial Sequence: Synthetic oligonucleotide
caguuuacaccucagugcu

SEQ ID NO: 2701016 - RNA, 19 nt, Artificial Sequence
  Description of Artificial Sequence: Synthetic oligonucleotide
agucgaagacuaacaaugu

SEQ ID NO: 2701017 - RNA, 19 nt, Artificial Sequence
  Description of Artificial Sequence: Synthetic oligonucleotide
ccucaaguuuuguuauugg

SEQ ID NO: 2701018 - RNA, 19 nt, Artificial Sequence
  Description of Artificial Sequence: Synthetic oligonucleotide
gggucaacuguuuuacuga

SEQ ID NO: 2701019 - RNA, 19 nt, Artificial Sequence
  Description of Artificial Sequence: Synthetic oligonucleotide
agcacagauacaauacuuu

SEQ ID NO: 2701020 - RNA, 19 nt, Artificial Sequence
  Description of Artificial Sequence: Synthetic oligonucleotide
cacuuuuauucacguuuug

SEQ ID NO: 2701021 - RNA, 19 nt, Artificial Sequence
  Description of Artificial Sequence: Synthetic oligonucleotide
cucaaguuuuguuauuggu

SEQ ID NO: 2701022 - RNA, 19 nt, Artificial Sequence
  Description of Artificial Sequence: Synthetic oligonucleotide
acuguuuuacugacagacu

SEQ ID NO: 2701023 - RNA, 19 nt, Artificial Sequence
  Description of Artificial Sequence: Synthetic oligonucleotide
agggugacuuuucgggcug

SEQ ID NO: 2701024 - RNA, 19 nt, Artificial Sequence
  Description of Artificial Sequence: Synthetic oligonucleotide
gacagacuuaucauguagu

SEQ ID NO: 2701025 - RNA, 19 nt, Artificial Sequence
  Description of Artificial Sequence: Synthetic oligonucleotide
gugaagauaguagauacuu

SEQ ID NO: 2701026 - RNA, 19 nt, Artificial Sequence
  Description of Artificial Sequence: Synthetic oligonucleotide
guuggggucaacuguuuua

SEQ ID NO: 2701027 - RNA, 19 nt, Artificial Sequence
  Description of Artificial Sequence: Synthetic oligonucleotide
cacguuuugcugaguagca

SEQ ID NO: 2701028 - RNA, 19 nt, Artificial Sequence
  Description of Artificial Sequence: Synthetic oligonucleotide
acguuuugcugaguagcag

SEQ ID NO: 2701029 - RNA, 19 nt, Artificial Sequence
  Description of Artificial Sequence: Synthetic oligonucleotide
cuuuguauccucggaccuc

SEQ ID NO: 2701030 - RNA, 19 nt, Artificial Sequence
  Description of Artificial Sequence: Synthetic oligonucleotide
guagucgaagacuaacaau

SEQ ID NO: 2701031 - RNA, 19 nt, Artificial Sequence
  Description of Artificial Sequence: Synthetic oligonucleotide
ggcuuugaccuuguugggg

SEQ ID NO: 2701032 - RNA, 19 nt, Artificial Sequence
  Description of Artificial Sequence: Synthetic oligonucleotide
uucgccuguauaucugcuu

SEQ ID NO: 2701033 - RNA, 19 nt, Artificial Sequence
  Description of Artificial Sequence: Synthetic oligonucleotide
agucuucauuaucuuugaa

SEQ ID NO: 2701034 - RNA, 19 nt, Artificial Sequence
  Description of Artificial Sequence: Synthetic oligonucleotide
cuaacaauguacacacuuu

SEQ ID NO: 2701035 - RNA, 19 nt, Artificial Sequence
  Description of Artificial Sequence: Synthetic oligonucleotide
acuuuaacacaggcuuuga

SEQ ID NO: 2701036 - RNA, 19 nt, Artificial Sequence
  Description of Artificial Sequence: Synthetic oligonucleotide
cuguuuuacugacagacuu

SEQ ID NO: 2701037 - RNA, 19 nt, Artificial Sequence
  Description of Artificial Sequence: Synthetic oligonucleotide
gucgaagacuaacaaugua

SEQ ID NO: 2701038 - RNA, 19 nt, Artificial Sequence
  Description of Artificial Sequence: Synthetic oligonucleotide
ucggaccuccaccagucuu

SEQ ID NO: 2701039 - RNA, 19 nt, Artificial Sequence
  Description of Artificial Sequence: Synthetic oligonucleotide
cuuugaccuuguugggguc

SEQ ID NO: 2701040 - RNA, 19 nt, Artificial Sequence
  Description of Artificial Sequence: Synthetic oligonucleotide
cuuugaccaguaacacuca

SEQ ID NO: 2701041 - RNA, 19 nt, Artificial Sequence
  Description of Artificial Sequence: Synthetic oligonucleotide
cacuggcacaucuggacca

SEQ ID NO: 2701042 - RNA, 19 nt, Artificial Sequence
  Description of Artificial Sequence: Synthetic oligonucleotide
guuuuacugacagacuuau

SEQ ID NO: 2701043 - RNA, 19 nt, Artificial Sequence
  Description of Artificial Sequence: Synthetic oligonucleotide
aguuuacaccucagugcuc

SEQ ID NO: 2701044 - RNA, 19 nt, Artificial Sequence
  Description of Artificial Sequence: Synthetic oligonucleotide
acacacuuuuauucacguu

SEQ ID NO: 2701045 - RNA, 19 nt, Artificial Sequence
  Description of Artificial Sequence: Synthetic oligonucleotide
uccuaacagcagcaauaua

SEQ ID NO: 2701046 - RNA, 19 nt, Artificial Sequence
  Description of Artificial Sequence: Synthetic oligonucleotide
gcagcaauauaaguuuuga

SEQ ID NO: 2701047 - RNA, 19 nt, Artificial Sequence
  Description of Artificial Sequence: Synthetic oligonucleotide
acuggcacaucuggaccag

SEQ ID NO: 2701048 - RNA, 19 nt, Artificial Sequence
  Description of Artificial Sequence: Synthetic oligonucleotide
gacuuuucgggcuguuggu

SEQ ID NO: 2701049 - RNA, 19 nt, Artificial Sequence
  Description of Artificial Sequence: Synthetic oligonucleotide
uaacacaggcuuugaccuu

SEQ ID NO: 2701050 - RNA, 19 nt, Artificial Sequence
  Description of Artificial Sequence: Synthetic oligonucleotide
auuaagcccagaggccaca

SEQ ID NO: 2701051 - RNA, 19 nt, Artificial Sequence
  Description of Artificial Sequence: Synthetic oligonucleotide
auugucuacuuggguaaau

SEQ ID NO: 2701052 - RNA, 19 nt, Artificial Sequence
  Description of Artificial Sequence: Synthetic oligonucleotide
acacucacaaugguuuaua

SEQ ID NO: 2701053 - RNA, 19 nt, Artificial Sequence
  Description of Artificial Sequence: Synthetic oligonucleotide
caccucagugcucaacaca

SEQ ID NO: 2701054 - RNA, 19 nt, Artificial Sequence
  Description of Artificial Sequence: Synthetic oligonucleotide
gugacuuuucgggcuguug

SEQ ID NO: 2701055 - RNA, 19 nt, Artificial Sequence
  Description of Artificial Sequence: Synthetic oligonucleotide
gguucaguuuucuucgccu

SEQ ID NO: 2701056 - RNA, 19 nt, Artificial Sequence
  Description of Artificial Sequence: Synthetic oligonucleotide
gaccaguuuacaccucagu

SEQ ID NO: 2701057 - RNA, 19 nt, Artificial Sequence
  Description of Artificial Sequence: Synthetic oligonucleotide
cuagaagcuguuucacacu

SEQ ID NO: 2701058 - RNA, 19 nt, Artificial Sequence
  Description of Artificial Sequence: Synthetic oligonucleotide
gguuuuccuaacagcagca

SEQ ID NO: 2701059 - RNA, 19 nt, Artificial Sequence
  Description of Artificial Sequence: Synthetic oligonucleotide
acucuaucagggugacuuu

SEQ ID NO: 2701060 - RNA, 19 nt, Artificial Sequence
  Description of Artificial Sequence: Synthetic oligonucleotide
gcaaaacccauuuuggcuu

SEQ ID NO: 2701061 - RNA, 19 nt, Artificial Sequence
  Description of Artificial Sequence: Synthetic oligonucleotide
aucugaagcaaaacccauu

SEQ ID NO: 2701062 - RNA, 19 nt, Artificial Sequence
  Description of Artificial Sequence: Synthetic oligonucleotide
cuaauagcacagauacaau

SEQ ID NO: 2701063 - RNA, 19 nt, Artificial Sequence
  Description of Artificial Sequence: Synthetic oligonucleotide
uuguauccucggaccucca

SEQ ID NO: 2701064 - RNA, 19 nt, Artificial Sequence
  Description of Artificial Sequence: Synthetic oligonucleotide
uauucacguuuugcugagu

SEQ ID NO: 2701065 - RNA, 19 nt, Artificial Sequence
  Description of Artificial Sequence: Synthetic oligonucleotide
cuacuuggguaaauaaguu

SEQ ID NO: 2701066 - RNA, 19 nt, Artificial Sequence
  Description of Artificial Sequence: Synthetic oligonucleotide
cagugcucaacacaguuuu

SEQ ID NO: 2701067 - RNA, 19 nt, Artificial Sequence
  Description of Artificial Sequence: Synthetic oligonucleotide
guuuuccuaacagcagcaa

SEQ ID NO: 2701068 - RNA, 19 nt, Artificial Sequence
  Description of Artificial Sequence: Synthetic oligonucleotide
cccauuuuggcuuagcuuu

SEQ ID NO: 2701069 - RNA, 19 nt, Artificial Sequence
  Description of Artificial Sequence: Synthetic oligonucleotide
caaaacccauuuuggcuua

SEQ ID NO: 2701070 - RNA, 19 nt, Artificial Sequence
  Description of Artificial Sequence: Synthetic oligonucleotide
auccucggaccuccaccag

SEQ ID NO: 2701071 - RNA, 19 nt, Artificial Sequence
  Description of Artificial Sequence: Synthetic oligonucleotide
gacuuaucauguagucgaa

SEQ ID NO: 2701072 - RNA, 19 nt, Artificial Sequence
  Description of Artificial Sequence: Synthetic oligonucleotide
ucgggcuguugguucaguu

SEQ ID NO: 2701073 - RNA, 19 nt, Artificial Sequence
  Description of Artificial Sequence: Synthetic oligonucleotide
gaccuuguuggggucaacu

SEQ ID NO: 2701074 - RNA, 19 nt, Artificial Sequence
  Description of Artificial Sequence: Synthetic oligonucleotide
agccucaaguuuuguuauu

SEQ ID NO: 2701075 - RNA, 19 nt, Artificial Sequence
  Description of Artificial Sequence: Synthetic oligonucleotide
uuacucuaucagggugacu

SEQ ID NO: 2701076 - RNA, 19 nt, Artificial Sequence
  Description of Artificial Sequence: Synthetic oligonucleotide
cucagugcucaacacaguu

SEQ ID NO: 2701077 - RNA, 19 nt, Artificial Sequence
  Description of Artificial Sequence: Synthetic oligonucleotide
cagcaauauaaguuuugau

SEQ ID NO: 2701078 - RNA, 19 nt, Artificial Sequence
  Description of Artificial Sequence: Synthetic oligonucleotide
cagggugacuuuucgggcu

SEQ ID NO: 2701079 - RNA, 19 nt, Artificial Sequence
  Description of Artificial Sequence: Synthetic oligonucleotide
ccaccagucuucauuaucu

SEQ ID NO: 2701080 - RNA, 19 nt, Artificial Sequence
  Description of Artificial Sequence: Synthetic oligonucleotide
ggaccaguuuacaccucag

SEQ ID NO: 2701081 - RNA, 19 nt, Artificial Sequence
  Description of Artificial Sequence: Synthetic oligonucleotide
agcccagaggccacauuga

SEQ ID NO: 2701082 - RNA, 19 nt, Artificial Sequence
  Description of Artificial Sequence: Synthetic oligonucleotide
caauggcaucaauugucua

SEQ ID NO: 2701083 - RNA, 19 nt, Artificial Sequence
  Description of Artificial Sequence: Synthetic oligonucleotide
cugguuguuucuucacuau

SEQ ID NO: 2701084 - RNA, 19 nt, Artificial Sequence
  Description of Artificial Sequence: Synthetic oligonucleotide
ccucggaccuccaccaguc

SEQ ID NO: 2701085 - RNA, 19 nt, Artificial Sequence
  Description of Artificial Sequence: Synthetic oligonucleotide
gcuuuguauccucggaccu

SEQ ID NO: 2701086 - RNA, 19 nt, Artificial Sequence
  Description of Artificial Sequence: Synthetic oligonucleotide
cagccucaaguuuuguuau

SEQ ID NO: 2701087 - RNA, 19 nt, Artificial Sequence
  Description of Artificial Sequence: Synthetic oligonucleotide
caguaacacucacaauggu

SEQ ID NO: 2701088 - RNA, 19 nt, Artificial Sequence
  Description of Artificial Sequence: Synthetic oligonucleotide
ggugaagauaguagauacu

SEQ ID NO: 2701089 - RNA, 19 nt, Artificial Sequence
  Description of Artificial Sequence: Synthetic oligonucleotide
uucgggcuguugguucagu

SEQ ID NO: 2701090 - RNA, 19 nt, Artificial Sequence
  Description of Artificial Sequence: Synthetic oligonucleotide
cuucgccuguauaucugcu

SEQ ID NO: 2701091 - RNA, 19 nt, Artificial Sequence
  Description of Artificial Sequence: Synthetic oligonucleotide
cuucacuauuuuccaacuu

SEQ ID NO: 2701092 - RNA, 19 nt, Artificial Sequence
  Description of Artificial Sequence: Synthetic oligonucleotide
uagcagccucaaguuuugu

SEQ ID NO: 2701093 - RNA, 19 nt, Artificial Sequence
  Description of Artificial Sequence: Synthetic oligonucleotide
gggcuguugguucaguuuu

SEQ ID NO: 2701094 - RNA, 19 nt, Artificial Sequence
  Description of Artificial Sequence: Synthetic oligonucleotide
gacuaacaauguacacacu

SEQ ID NO: 2701095 - RNA, 19 nt, Artificial Sequence
  Description of Artificial Sequence: Synthetic oligonucleotide
ccuccaccagucuucauua

SEQ ID NO: 2701096 - RNA, 19 nt, Artificial Sequence
  Description of Artificial Sequence: Synthetic oligonucleotide
cugaagcaaaacccauuuu

SEQ ID NO: 2701097 - RNA, 19 nt, Artificial Sequence
  Description of Artificial Sequence: Synthetic oligonucleotide
gccaaaccucacuucagau

SEQ ID NO: 2701098 - RNA, 19 nt, Artificial Sequence
  Description of Artificial Sequence: Synthetic oligonucleotide
cagcagcaauauaaguuuu

SEQ ID NO: 2701099 - RNA, 19 nt, Artificial Sequence
  Description of Artificial Sequence: Synthetic oligonucleotide
cgccuguauaucugcuuug

SEQ ID NO: 2701100 - RNA, 19 nt, Artificial Sequence
  Description of Artificial Sequence: Synthetic oligonucleotide
gcccagaggccacauugaa

SEQ ID NO: 2701101 - RNA, 19 nt, Artificial Sequence
  Description of Artificial Sequence: Synthetic oligonucleotide
cucuaucagggugacuuuu

SEQ ID NO: 2701102 - RNA, 19 nt, Artificial Sequence
  Description of Artificial Sequence: Synthetic oligonucleotide
ggaccuccaccagucuuca

SEQ ID NO: 2701103 - RNA, 19 nt, Artificial Sequence
  Description of Artificial Sequence: Synthetic oligonucleotide
ccaaaccucacuucagauu

SEQ ID NO: 2701104 - RNA, 19 nt, Artificial Sequence
  Description of Artificial Sequence: Synthetic oligonucleotide
gccuguauaucugcuuugu

SEQ ID NO: 2701105 - RNA, 19 nt, Artificial Sequence
  Description of Artificial Sequence: Synthetic oligonucleotide
cuguugguucaguuuucuu

SEQ ID NO: 2701106 - RNA, 19 nt, Artificial Sequence
  Description of Artificial Sequence: Synthetic oligonucleotide
caccagucuucauuaucuu

SEQ ID NO: 2701107 - RNA, 19 nt, Artificial Sequence
  Description of Artificial Sequence: Synthetic oligonucleotide
ccuguauaucugcuuugua

SEQ ID NO: 2701108 - RNA, 19 nt, Artificial Sequence
  Description of Artificial Sequence: Synthetic oligonucleotide
ggcacaucuggaccaguuu

SEQ ID NO: 2701109 - RNA, 19 nt, Artificial Sequence
  Description of Artificial Sequence: Synthetic oligonucleotide
gcuuagcuuuucauuucua

SEQ ID NO: 2701110 - RNA, 19 nt, Artificial Sequence
  Description of Artificial Sequence: Synthetic oligonucleotide
cagaggccacauugaauuu

SEQ ID NO: 2701111 - RNA, 19 nt, Artificial Sequence
  Description of Artificial Sequence: Synthetic oligonucleotide
cucggaccuccaccagucu

SEQ ID NO: 2701112 - RNA, 19 nt, Artificial Sequence
  Description of Artificial Sequence: Synthetic oligonucleotide
ccauuuuggcuuagcuuuu

SEQ ID NO: 2701113 - RNA, 19 nt, Artificial Sequence
  Description of Artificial Sequence: Synthetic oligonucleotide
gaccuccaccagucuucau

SEQ ID NO: 2701114 - RNA, 19 nt, Artificial Sequence
  Description of Artificial Sequence: Synthetic oligonucleotide
ccucagugcucaacacagu

SEQ ID NO: 2701115 - RNA, 19 nt, Artificial Sequence
  Description of Artificial Sequence: Synthetic oligonucleotide
cuggcacaucuggaccagu

SEQ ID NO: 2701116 - RNA, 19 nt, Artificial Sequence
  Description of Artificial Sequence: Synthetic oligonucleotide
ggugacuuuucgggcuguu

SEQ ID NO: 2701117 - RNA, 19 nt, Artificial Sequence
  Description of Artificial Sequence: Synthetic oligonucleotide
gggugacuuuucgggcugu

SEQ ID NO: 2701118 - RNA, 19 nt, Artificial Sequence
  Description of Artificial Sequence: Synthetic oligonucleotide
cgggcuguugguucaguuu

SEQ ID NO: 2701119 - RNA, 19 nt, Artificial Sequence
  Description of Artificial Sequence: Synthetic oligonucleotide
aaugccgacaaucucaucg

SEQ ID NO: 2701120 - RNA, 19 nt, Artificial Sequence
  Description of Artificial Sequence: Synthetic oligonucleotide
aaguacacgacuuugaucu

SEQ ID NO: 2701121 - RNA, 19 nt, Artificial Sequence
  Description of Artificial Sequence: Synthetic oligonucleotide
agauauuuucucuuggugc

SEQ ID NO: 2701122 - RNA, 19 nt, Artificial Sequence
  Description of Artificial Sequence: Synthetic oligonucleotide
uucacuguaauccucagac

SEQ ID NO: 2701123 - RNA, 19 nt, Artificial Sequence
  Description of Artificial Sequence: Synthetic oligonucleotide
ugugcagugcccaagaucu

SEQ ID NO: 2701124 - RNA, 19 nt, Artificial Sequence
  Description of Artificial Sequence: Synthetic oligonucleotide
agaucucuuuaauaguucc

SEQ ID NO: 2701125 - RNA, 19 nt, Artificial Sequence
  Description of Artificial Sequence: Synthetic oligonucleotide
uuuuauugagauauuuucu

SEQ ID NO: 2701126 - RNA, 19 nt, Artificial Sequence
  Description of Artificial Sequence: Synthetic oligonucleotide
uuuggagacagacccaggg

SEQ ID NO: 2701127 - RNA, 19 nt, Artificial Sequence
  Description of Artificial Sequence: Synthetic oligonucleotide
acgacuuugaucucguugg

SEQ ID NO: 2701128 - RNA, 19 nt, Artificial Sequence
  Description of Artificial Sequence: Synthetic oligonucleotide
gaaagugauauuuccacug

SEQ ID NO: 2701129 - RNA, 19 nt, Artificial Sequence
  Description of Artificial Sequence: Synthetic oligonucleotide
aagagaguugcaccguggc

SEQ ID NO: 2701130 - RNA, 19 nt, Artificial Sequence
  Description of Artificial Sequence: Synthetic oligonucleotide
uuuaauaguuccagaaagu

SEQ ID NO: 2701131 - RNA, 19 nt, Artificial Sequence
  Description of Artificial Sequence: Synthetic oligonucleotide
uggauggucaguuucacug

SEQ ID NO: 2701132 - RNA, 19 nt, Artificial Sequence
  Description of Artificial Sequence: Synthetic oligonucleotide
uuaaugaucagggcggagg

SEQ ID NO: 2701133 - RNA, 19 nt, Artificial Sequence
  Description of Artificial Sequence: Synthetic oligonucleotide
cacauuacagcccacagac

SEQ ID NO: 2701134 - RNA, 19 nt, Artificial Sequence
  Description of Artificial Sequence: Synthetic oligonucleotide
gaugucaugaggguggcgg

SEQ ID NO: 2701135 - RNA, 19 nt, Artificial Sequence
  Description of Artificial Sequence: Synthetic oligonucleotide
uuuucugguugucacaugu

SEQ ID NO: 2701136 - RNA, 19 nt, Artificial Sequence
  Description of Artificial Sequence: Synthetic oligonucleotide
agugauauuuccacugugc

SEQ ID NO: 2701137 - RNA, 19 nt, Artificial Sequence
  Description of Artificial Sequence: Synthetic oligonucleotide
accaacuuucuuuggagac

SEQ ID NO: 2701138 - RNA, 19 nt, Artificial Sequence
  Description of Artificial Sequence: Synthetic oligonucleotide
aaagugauauuuccacugu

SEQ ID NO: 2701139 - RNA, 19 nt, Artificial Sequence
  Description of Artificial Sequence: Synthetic oligonucleotide
ucgaaagugauauuuccac

SEQ ID NO: 2701140 - RNA, 19 nt, Artificial Sequence
  Description of Artificial Sequence: Synthetic oligonucleotide
ugcuucuuaacuagcuggg

SEQ ID NO: 2701141 - RNA, 19 nt, Artificial Sequence
  Description of Artificial Sequence: Synthetic oligonucleotide
cauuacagcccacagacug

SEQ ID NO: 2701142 - RNA, 19 nt, Artificial Sequence
  Description of Artificial Sequence: Synthetic oligonucleotide
ggcuuuaaugaucagggcg

SEQ ID NO: 2701143 - RNA, 19 nt, Artificial Sequence
  Description of Artificial Sequence: Synthetic oligonucleotide
gagauauuuucucuuggug

SEQ ID NO: 2701144 - RNA, 19 nt, Artificial Sequence
  Description of Artificial Sequence: Synthetic oligonucleotide
ugggcauuccacuacacca

SEQ ID NO: 2701145 - RNA, 19 nt, Artificial Sequence
  Description of Artificial Sequence: Synthetic oligonucleotide
gugcuucuuaacuagcugg

SEQ ID NO: 2701146 - RNA, 19 nt, Artificial Sequence
  Description of Artificial Sequence: Synthetic oligonucleotide
accgaagagaguugcaccg

SEQ ID NO: 2701147 - RNA, 19 nt, Artificial Sequence
  Description of Artificial Sequence: Synthetic oligonucleotide
uuugaucucguuggggucg

SEQ ID NO: 2701148 - RNA, 19 nt, Artificial Sequence
  Description of Artificial Sequence: Synthetic oligonucleotide
caucgaaagugauauuucc

SEQ ID NO: 2701149 - RNA, 19 nt, Artificial Sequence
  Description of Artificial Sequence: Synthetic oligonucleotide
cuuggcggcuccuugaggg

SEQ ID NO: 2701150 - RNA, 19 nt, Artificial Sequence
  Description of Artificial Sequence: Synthetic oligonucleotide
gauauuuccacugugcuua

SEQ ID NO: 2701151 - RNA, 19 nt, Artificial Sequence
  Description of Artificial Sequence: Synthetic oligonucleotide
ucuuccugucucuuggcgg

SEQ ID NO: 2701152 - RNA, 19 nt, Artificial Sequence
  Description of Artificial Sequence: Synthetic oligonucleotide
acuuugaucucguuggggu

SEQ ID NO: 2701153 - RNA, 19 nt, Artificial Sequence
  Description of Artificial Sequence: Synthetic oligonucleotide
caucugacgggcaaugccg

SEQ ID NO: 2701154 - RNA, 19 nt, Artificial Sequence
  Description of Artificial Sequence: Synthetic oligonucleotide
uaaugaucagggcggaggc

SEQ ID NO: 2701155 - RNA, 19 nt, Artificial Sequence
  Description of Artificial Sequence: Synthetic oligonucleotide
aagugauauuuccacugug

SEQ ID NO: 2701156 - RNA, 19 nt, Artificial Sequence
  Description of Artificial Sequence: Synthetic oligonucleotide
ucaucugacgggcaaugcc

SEQ ID NO: 2701157 - RNA, 19 nt, Artificial Sequence
  Description of Artificial Sequence: Synthetic oligonucleotide
ucagggcggaggcagaggg

SEQ ID NO: 2701158 - RNA, 19 nt, Artificial Sequence
  Description of Artificial Sequence: Synthetic oligonucleotide
ugagauauuuucucuuggu

SEQ ID NO: 2701159 - RNA, 19 nt, Artificial Sequence
  Description of Artificial Sequence: Synthetic oligonucleotide
agagaguugcaccguggcc

SEQ ID NO: 2701160 - RNA, 19 nt, Artificial Sequence
  Description of Artificial Sequence: Synthetic oligonucleotide
uuaauguucuucugcuucu

SEQ ID NO: 2701161 - RNA, 19 nt, Artificial Sequence
  Description of Artificial Sequence: Synthetic oligonucleotide
caucaaugaugucaugagg

SEQ ID NO: 2701162 - RNA, 19 nt, Artificial Sequence
  Description of Artificial Sequence: Synthetic oligonucleotide
aagaucucuuuaauaguuc

SEQ ID NO: 2701163 - RNA, 19 nt, Artificial Sequence
  Description of Artificial Sequence: Synthetic oligonucleotide
uucuuccugucucuuggcg

SEQ ID NO: 2701164 - RNA, 19 nt, Artificial Sequence
  Description of Artificial Sequence: Synthetic oligonucleotide
uccacauuacagcccacag

SEQ ID NO: 2701165 - RNA, 19 nt, Artificial Sequence
  Description of Artificial Sequence: Synthetic oligonucleotide
uuccacuacaccacuguug

SEQ ID NO: 2701166 - RNA, 19 nt, Artificial Sequence
  Description of Artificial Sequence: Synthetic oligonucleotide
uuaauaguuccagaaaguu

SEQ ID NO: 2701167 - RNA, 19 nt, Artificial Sequence
  Description of Artificial Sequence: Synthetic oligonucleotide
cccaagaucucuuuaauag

SEQ ID NO: 2701168 - RNA, 19 nt, Artificial Sequence
  Description of Artificial Sequence: Synthetic oligonucleotide
aacuugggcggcauggugg

SEQ ID NO: 2701169 - RNA, 19 nt, Artificial Sequence
  Description of Artificial Sequence: Synthetic oligonucleotide
ucaucgaaagugauauuuc

SEQ ID NO: 2701170 - RNA, 19 nt, Artificial Sequence
  Description of Artificial Sequence: Synthetic oligonucleotide
aucucaucgaaagugauau

SEQ ID NO: 2701171 - RNA, 19 nt, Artificial Sequence
  Description of Artificial Sequence: Synthetic oligonucleotide
gucggaugaacccggaucc

SEQ ID NO: 2701172 - RNA, 19 nt, Artificial Sequence
  Description of Artificial Sequence: Synthetic oligonucleotide
uauugagauauuuucucuu

SEQ ID NO: 2701173 - RNA, 19 nt, Artificial Sequence
  Description of Artificial Sequence: Synthetic oligonucleotide
aaagaccggugccucaucu

SEQ ID NO: 2701174 - RNA, 19 nt, Artificial Sequence
  Description of Artificial Sequence: Synthetic oligonucleotide
ugaacccggauccgggacg

SEQ ID NO: 2701175 - RNA, 19 nt, Artificial Sequence
  Description of Artificial Sequence: Synthetic oligonucleotide
ugucggaugaacccggauc

SEQ ID NO: 2701176 - RNA, 19 nt, Artificial Sequence
  Description of Artificial Sequence: Synthetic oligonucleotide
gcuuuaaugaucagggcgg

SEQ ID NO: 2701177 - RNA, 19 nt, Artificial Sequence
  Description of Artificial Sequence: Synthetic oligonucleotide
ucgaacuugggcggcaugg

SEQ ID NO: 2701178 - RNA, 19 nt, Artificial Sequence
  Description of Artificial Sequence: Synthetic oligonucleotide
uucuuaacuagcugggcau

SEQ ID NO: 2701179 - RNA, 19 nt, Artificial Sequence
  Description of Artificial Sequence: Synthetic oligonucleotide
cucuuuaauaguuccagaa

SEQ ID NO: 2701180 - RNA, 19 nt, Artificial Sequence
  Description of Artificial Sequence: Synthetic oligonucleotide
gaccgaagagaguugcacc

SEQ ID NO: 2701181 - RNA, 19 nt, Artificial Sequence
  Description of Artificial Sequence: Synthetic oligonucleotide
cuuccugucucuuggcggc

SEQ ID NO: 2701182 - RNA, 19 nt, Artificial Sequence
  Description of Artificial Sequence: Synthetic oligonucleotide
ugcaccguggccuccuccg

SEQ ID NO: 2701183 - RNA, 19 nt, Artificial Sequence
  Description of Artificial Sequence: Synthetic oligonucleotide
guuggggucgaacuugggc

SEQ ID NO: 2701184 - RNA, 19 nt, Artificial Sequence
  Description of Artificial Sequence: Synthetic oligonucleotide
guaauccucagaccuuucc

SEQ ID NO: 2701185 - RNA, 19 nt, Artificial Sequence
  Description of Artificial Sequence: Synthetic oligonucleotide
augucaugaggguggcggc

SEQ ID NO: 2701186 - RNA, 19 nt, Artificial Sequence
  Description of Artificial Sequence: Synthetic oligonucleotide
uccggugcaccucaaguac

SEQ ID NO: 2701187 - RNA, 19 nt, Artificial Sequence
  Description of Artificial Sequence: Synthetic oligonucleotide
cuugagggcuuuaaugauc

SEQ ID NO: 2701188 - RNA, 19 nt, Artificial Sequence
  Description of Artificial Sequence: Synthetic oligonucleotide
cuggcuaaagaccggugcc

SEQ ID NO: 2701189 - RNA, 19 nt, Artificial Sequence
  Description of Artificial Sequence: Synthetic oligonucleotide
uccagaaaguucucuggcu

SEQ ID NO: 2701190 - RNA, 19 nt, Artificial Sequence
  Description of Artificial Sequence: Synthetic oligonucleotide
caacuuucuuuggagacag

SEQ ID NO: 2701191 - RNA, 19 nt, Artificial Sequence
  Description of Artificial Sequence: Synthetic oligonucleotide
aacuagcugggcauuccac

SEQ ID NO: 2701192 - RNA, 19 nt, Artificial Sequence
  Description of Artificial Sequence: Synthetic oligonucleotide
cacgacuuugaucucguug

SEQ ID NO: 2701193 - RNA, 19 nt, Artificial Sequence
  Description of Artificial Sequence: Synthetic oligonucleotide
augaacccggauccgggac

SEQ ID NO: 2701194 - RNA, 19 nt, Artificial Sequence
  Description of Artificial Sequence: Synthetic oligonucleotide
uggugucggaugaacccgg

SEQ ID NO: 2701195 - RNA, 19 nt, Artificial Sequence
  Description of Artificial Sequence: Synthetic oligonucleotide
ucuuggugcuucuuaacua

SEQ ID NO: 2701196 - RNA, 19 nt, Artificial Sequence
  Description of Artificial Sequence: Synthetic oligonucleotide
uucugguugucacauguuu

SEQ ID NO: 2701197 - RNA, 19 nt, Artificial Sequence
  Description of Artificial Sequence: Synthetic oligonucleotide
cacuacaccacuguugaug

SEQ ID NO: 2701198 - RNA, 19 nt, Artificial Sequence
  Description of Artificial Sequence: Synthetic oligonucleotide
ucguuggggucgaacuugg

SEQ ID NO: 2701199 - RNA, 19 nt, Artificial Sequence
  Description of Artificial Sequence: Synthetic oligonucleotide
cucaaucugggccugucug

SEQ ID NO: 2701200 - RNA, 19 nt, Artificial Sequence
  Description of Artificial Sequence: Synthetic oligonucleotide
ucugguugucacauguuuu

SEQ ID NO: 2701201 - RNA, 19 nt, Artificial Sequence
  Description of Artificial Sequence: Synthetic oligonucleotide
ccgacaaucucaucgaaag

SEQ ID NO: 2701202 - RNA, 19 nt, Artificial Sequence
  Description of Artificial Sequence: Synthetic oligonucleotide
caccaccucaaucugggcc

SEQ ID NO: 2701203 - RNA, 19 nt, Artificial Sequence
  Description of Artificial Sequence: Synthetic oligonucleotide
uggggucgaacuugggcgg

SEQ ID NO: 2701204 - RNA, 19 nt, Artificial Sequence
  Description of Artificial Sequence: Synthetic oligonucleotide
gacuuugaucucguugggg

SEQ ID NO: 2701205 - RNA, 19 nt, Artificial Sequence
  Description of Artificial Sequence: Synthetic oligonucleotide
ucacuguaauccucagacc

SEQ ID NO: 2701206 - RNA, 19 nt, Artificial Sequence
  Description of Artificial Sequence: Synthetic oligonucleotide
uuuccagucaccgguugcc

SEQ ID NO: 2701207 - RNA, 19 nt, Artificial Sequence
  Description of Artificial Sequence: Synthetic oligonucleotide
augaggguggcggccaucc

SEQ ID NO: 2701208 - RNA, 19 nt, Artificial Sequence
  Description of Artificial Sequence: Synthetic oligonucleotide
cagaccuuuccagucaccg

SEQ ID NO: 2701209 - RNA, 19 nt, Artificial Sequence
  Description of Artificial Sequence: Synthetic oligonucleotide
agaccuuuccagucaccgg

SEQ ID NO: 2701210 - RNA, 19 nt, Artificial Sequence
  Description of Artificial Sequence: Synthetic oligonucleotide
acugugcuuaauguucuuc

SEQ ID NO: 2701211 - RNA, 19 nt, Artificial Sequence
  Description of Artificial Sequence: Synthetic oligonucleotide
augaucagggcggaggcag

SEQ ID NO: 2701212 - RNA, 19 nt, Artificial Sequence
  Description of Artificial Sequence: Synthetic oligonucleotide
cuucuuaacuagcugggca

SEQ ID NO: 2701213 - RNA, 19 nt, Artificial Sequence
  Description of Artificial Sequence: Synthetic oligonucleotide
guacacgacuuugaucucg

SEQ ID NO: 2701214 - RNA, 19 nt, Artificial Sequence
  Description of Artificial Sequence: Synthetic oligonucleotide
caaguacacgacuuugauc

SEQ ID NO: 2701215 - RNA, 19 nt, Artificial Sequence
  Description of Artificial Sequence: Synthetic oligonucleotide
acgggcaaugccgacaauc

SEQ ID NO: 2701216 - RNA, 19 nt, Artificial Sequence
  Description of Artificial Sequence: Synthetic oligonucleotide
ucaaucugggccugucugu

SEQ ID NO: 2701217 - RNA, 19 nt, Artificial Sequence
  Description of Artificial Sequence: Synthetic oligonucleotide
ucaccgguugccuuggcaa

SEQ ID NO: 2701218 - RNA, 19 nt, Artificial Sequence
  Description of Artificial Sequence: Synthetic oligonucleotide
agagggcaccaccucaauc

SEQ ID NO: 2701219 - RNA, 19 nt, Artificial Sequence
  Description of Artificial Sequence: Synthetic oligonucleotide
agacccaggggaccgaucu

SEQ ID NO: 2701220 - RNA, 19 nt, Artificial Sequence
  Description of Artificial Sequence: Synthetic oligonucleotide
uuggugcuucuuaacuagc

SEQ ID NO: 2701221 - RNA, 19 nt, Artificial Sequence
  Description of Artificial Sequence: Synthetic oligonucleotide
uuuaaugaucagggcggag

SEQ ID NO: 2701222 - RNA, 19 nt, Artificial Sequence
  Description of Artificial Sequence: Synthetic oligonucleotide
uccgggacgaccgaagaga

SEQ ID NO: 2701223 - RNA, 19 nt, Artificial Sequence
  Description of Artificial Sequence: Synthetic oligonucleotide
gagggcaccaccucaaucu

SEQ ID NO: 2701224 - RNA, 19 nt, Artificial Sequence
  Description of Artificial Sequence: Synthetic oligonucleotide
aagaccggugccucaucug

SEQ ID NO: 2701225 - RNA, 19 nt, Artificial Sequence
  Description of Artificial Sequence: Synthetic oligonucleotide
agaguugcaccguggccuc

SEQ ID NO: 2701226 - RNA, 19 nt, Artificial Sequence
  Description of Artificial Sequence: Synthetic oligonucleotide
uacacgacuuugaucucgu

SEQ ID NO: 2701227 - RNA, 19 nt, Artificial Sequence
  Description of Artificial Sequence: Synthetic oligonucleotide
acaaucucaucgaaaguga

SEQ ID NO: 2701228 - RNA, 19 nt, Artificial Sequence
  Description of Artificial Sequence: Synthetic oligonucleotide
ucuuggcggcuccuugagg

SEQ ID NO: 2701229 - RNA, 19 nt, Artificial Sequence
  Description of Artificial Sequence: Synthetic oligonucleotide
acagcccacagacugugca

SEQ ID NO: 2701230 - RNA, 19 nt, Artificial Sequence
  Description of Artificial Sequence: Synthetic oligonucleotide
uugggcggcaugguggagg

SEQ ID NO: 2701231 - RNA, 19 nt, Artificial Sequence
  Description of Artificial Sequence: Synthetic oligonucleotide
accggugccucaucugacg

SEQ ID NO: 2701232 - RNA, 19 nt, Artificial Sequence
  Description of Artificial Sequence: Synthetic oligonucleotide
cuuuccagucaccgguugc

SEQ ID NO: 2701233 - RNA, 19 nt, Artificial Sequence
  Description of Artificial Sequence: Synthetic oligonucleotide
caaugaugucaugagggug

SEQ ID NO: 2701234 - RNA, 19 nt, Artificial Sequence
  Description of Artificial Sequence: Synthetic oligonucleotide
aguacacgacuuugaucuc

SEQ ID NO: 2701235 - RNA, 19 nt, Artificial Sequence
  Description of Artificial Sequence: Synthetic oligonucleotide
uuacagcccacagacugug

SEQ ID NO: 2701236 - RNA, 19 nt, Artificial Sequence
  Description of Artificial Sequence: Synthetic oligonucleotide
agaccggugccucaucuga

SEQ ID NO: 2701237 - RNA, 19 nt, Artificial Sequence
  Description of Artificial Sequence: Synthetic oligonucleotide
ugacgggcaaugccgacaa

SEQ ID NO: 2701238 - RNA, 19 nt, Artificial Sequence
  Description of Artificial Sequence: Synthetic oligonucleotide
aucgaaagugauauuucca

SEQ ID NO: 2701239 - RNA, 19 nt, Artificial Sequence
  Description of Artificial Sequence: Synthetic oligonucleotide
gacgaccgaagagaguugc

SEQ ID NO: 2701240 - RNA, 19 nt, Artificial Sequence
  Description of Artificial Sequence: Synthetic oligonucleotide
uccucagaccuuuccaguc

SEQ ID NO: 2701241 - RNA, 19 nt, Artificial Sequence
  Description of Artificial Sequence: Synthetic oligonucleotide
cugggcauuccacuacacc

SEQ ID NO: 2701242 - RNA, 19 nt, Artificial Sequence
  Description of Artificial Sequence: Synthetic oligonucleotide
gaacuugggcggcauggug

SEQ ID NO: 2701243 - RNA, 19 nt, Artificial Sequence
  Description of Artificial Sequence: Synthetic oligonucleotide
cuuugaucucguugggguc

SEQ ID NO: 2701244 - RNA, 19 nt, Artificial Sequence
  Description of Artificial Sequence: Synthetic oligonucleotide
ucucuuggugcuucuuaac

SEQ ID NO: 2701245 - RNA, 19 nt, Artificial Sequence
  Description of Artificial Sequence: Synthetic oligonucleotide
cuggugucggaugaacccg

SEQ ID NO: 2701246 - RNA, 19 nt, Artificial Sequence
  Description of Artificial Sequence: Synthetic oligonucleotide
cacuguaauccucagaccu

SEQ ID NO: 2701247 - RNA, 19 nt, Artificial Sequence
  Description of Artificial Sequence: Synthetic oligonucleotide
ucucuuggcggcuccuuga

SEQ ID NO: 2701248 - RNA, 19 nt, Artificial Sequence
  Description of Artificial Sequence: Synthetic oligonucleotide
gaucucuuuaauaguucca

SEQ ID NO: 2701249 - RNA, 19 nt, Artificial Sequence
  Description of Artificial Sequence: Synthetic oligonucleotide
aaucucaucgaaagugaua

SEQ ID NO: 2701250 - RNA, 19 nt, Artificial Sequence
  Description of Artificial Sequence: Synthetic oligonucleotide
gcuggugucggaugaaccc

SEQ ID NO: 2701251 - RNA, 19 nt, Artificial Sequence
  Description of Artificial Sequence: Synthetic oligonucleotide
ucaccuccggugcaccuca

SEQ ID NO: 2701252 - RNA, 19 nt, Artificial Sequence
  Description of Artificial Sequence: Synthetic oligonucleotide
gaccuuuccagucaccggu

SEQ ID NO: 2701253 - RNA, 19 nt, Artificial Sequence
  Description of Artificial Sequence: Synthetic oligonucleotide
aaugaucagggcggaggca

SEQ ID NO: 2701254 - RNA, 19 nt, Artificial Sequence
  Description of Artificial Sequence: Synthetic oligonucleotide
guggcggccauccacauua

SEQ ID NO: 2701255 - RNA, 19 nt, Artificial Sequence
  Description of Artificial Sequence: Synthetic oligonucleotide
gagaguugcaccguggccu

SEQ ID NO: 2701256 - RNA, 19 nt, Artificial Sequence
  Description of Artificial Sequence: Synthetic oligonucleotide
ucagaccuuuccagucacc

SEQ ID NO: 2701257 - RNA, 19 nt, Artificial Sequence
  Description of Artificial Sequence: Synthetic oligonucleotide
gugauauuuccacugugcu

SEQ ID NO: 2701258 - RNA, 19 nt, Artificial Sequence
  Description of Artificial Sequence: Synthetic oligonucleotide
uuccacugugcuuaauguu

SEQ ID NO: 2701259 - RNA, 19 nt, Artificial Sequence
  Description of Artificial Sequence: Synthetic oligonucleotide
gaugaacccggauccggga

SEQ ID NO: 2701260 - RNA, 19 nt, Artificial Sequence
  Description of Artificial Sequence: Synthetic oligonucleotide
ggccauccacauuacagcc

SEQ ID NO: 2701261 - RNA, 19 nt, Artificial Sequence
  Description of Artificial Sequence: Synthetic oligonucleotide
cuucuuccugucucuuggc

SEQ ID NO: 2701262 - RNA, 19 nt, Artificial Sequence
  Description of Artificial Sequence: Synthetic oligonucleotide
gaggguggcggccauccac

SEQ ID NO: 2701263 - RNA, 19 nt, Artificial Sequence
  Description of Artificial Sequence: Synthetic oligonucleotide
cugugcagugcccaagauc

SEQ ID NO: 2701264 - RNA, 19 nt, Artificial Sequence
  Description of Artificial Sequence: Synthetic oligonucleotide
ugucaugaggguggcggcc

SEQ ID NO: 2701265 - RNA, 19 nt, Artificial Sequence
  Description of Artificial Sequence: Synthetic oligonucleotide
uguaauccucagaccuuuc

SEQ ID NO: 2701266 - RNA, 19 nt, Artificial Sequence
  Description of Artificial Sequence: Synthetic oligonucleotide
ucuggauggucaguuucac

SEQ ID NO: 2701267 - RNA, 19 nt, Artificial Sequence
  Description of Artificial Sequence: Synthetic oligonucleotide
uagcugggcauuccacuac

SEQ ID NO: 2701268 - RNA, 19 nt, Artificial Sequence
  Description of Artificial Sequence: Synthetic oligonucleotide
caagaucucuuuaauaguu

SEQ ID NO: 2701269 - RNA, 19 nt, Artificial Sequence
  Description of Artificial Sequence: Synthetic oligonucleotide
auccgggacgaccgaagag

SEQ ID NO: 2701270 - RNA, 19 nt, Artificial Sequence
  Description of Artificial Sequence: Synthetic oligonucleotide
cucagaccuuuccagucac

SEQ ID NO: 2701271 - RNA, 19 nt, Artificial Sequence
  Description of Artificial Sequence: Synthetic oligonucleotide
uuucugguugucacauguu

SEQ ID NO: 2701272 - RNA, 19 nt, Artificial Sequence
  Description of Artificial Sequence: Synthetic oligonucleotide
cuuaacuagcugggcauuc

SEQ ID NO: 2701273 - RNA, 19 nt, Artificial Sequence
  Description of Artificial Sequence: Synthetic oligonucleotide
acuugggcggcauggugga

SEQ ID NO: 2701274 - RNA, 19 nt, Artificial Sequence
  Description of Artificial Sequence: Synthetic oligonucleotide
gauggucaguuucacugua

SEQ ID NO: 2701275 - RNA, 19 nt, Artificial Sequence
  Description of Artificial Sequence: Synthetic oligonucleotide
cucguuggggucgaacuug

SEQ ID NO: 2701276 - RNA, 19 nt, Artificial Sequence
  Description of Artificial Sequence: Synthetic oligonucleotide
ucggaugaacccggauccg

SEQ ID NO: 2701277 - RNA, 19 nt, Artificial Sequence
  Description of Artificial Sequence: Synthetic oligonucleotide
uggcuaaagaccggugccu

SEQ ID NO: 2701278 - RNA, 19 nt, Artificial Sequence
  Description of Artificial Sequence: Synthetic oligonucleotide
ggcaaugccgacaaucuca

SEQ ID NO: 2701279 - RNA, 19 nt, Artificial Sequence
  Description of Artificial Sequence: Synthetic oligonucleotide
acccggauccgggacgacc

SEQ ID NO: 2701280 - RNA, 19 nt, Artificial Sequence
  Description of Artificial Sequence: Synthetic oligonucleotide
auuccacuacaccacuguu

SEQ ID NO: 2701281 - RNA, 19 nt, Artificial Sequence
  Description of Artificial Sequence: Synthetic oligonucleotide
agcugggcauuccacuaca

SEQ ID NO: 2701282 - RNA, 19 nt, Artificial Sequence
  Description of Artificial Sequence: Synthetic oligonucleotide
auuacagcccacagacugu

SEQ ID NO: 2701283 - RNA, 19 nt, Artificial Sequence
  Description of Artificial Sequence: Synthetic oligonucleotide
ugccucaucugacgggcaa

SEQ ID NO: 2701284 - RNA, 19 nt, Artificial Sequence
  Description of Artificial Sequence: Synthetic oligonucleotide
ugucaucaccaacuuucuu

SEQ ID NO: 2701285 - RNA, 19 nt, Artificial Sequence
  Description of Artificial Sequence: Synthetic oligonucleotide
gaucagggcggaggcagag

SEQ ID NO: 2701286 - RNA, 19 nt, Artificial Sequence
  Description of Artificial Sequence: Synthetic oligonucleotide
agugcccaagaucucuuua

SEQ ID NO: 2701287 - RNA, 19 nt, Artificial Sequence
  Description of Artificial Sequence: Synthetic oligonucleotide
ugagggcuuuaaugaucag

SEQ ID NO: 2701288 - RNA, 19 nt, Artificial Sequence
  Description of Artificial Sequence: Synthetic oligonucleotide
gauccgggacgaccgaaga

SEQ ID NO: 2701289 - RNA, 19 nt, Artificial Sequence
  Description of Artificial Sequence: Synthetic oligonucleotide
gcggccauccacauuacag

SEQ ID NO: 2701290 - RNA, 19 nt, Artificial Sequence
  Description of Artificial Sequence: Synthetic oligonucleotide
cagcccacagacugugcag

SEQ ID NO: 2701291 - RNA, 19 nt, Artificial Sequence
  Description of Artificial Sequence: Synthetic oligonucleotide
auccacauuacagcccaca

SEQ ID NO: 2701292 - RNA, 19 nt, Artificial Sequence
  Description of Artificial Sequence: Synthetic oligonucleotide
ugaucagggcggaggcaga

SEQ ID NO: 2701293 - RNA, 19 nt, Artificial Sequence
  Description of Artificial Sequence: Synthetic oligonucleotide
ugaugucaugaggguggcg

SEQ ID NO: 2701294 - RNA, 19 nt, Artificial Sequence
  Description of Artificial Sequence: Synthetic oligonucleotide
uaaagaccggugccucauc

SEQ ID NO: 2701295 - RNA, 19 nt, Artificial Sequence
  Description of Artificial Sequence: Synthetic oligonucleotide
cucuuggcggcuccuugag

SEQ ID NO: 2701296 - RNA, 19 nt, Artificial Sequence
  Description of Artificial Sequence: Synthetic oligonucleotide
caccaacuuucuuuggaga

SEQ ID NO: 2701297 - RNA, 19 nt, Artificial Sequence
  Description of Artificial Sequence: Synthetic oligonucleotide
cacagacugugcagugccc

SEQ ID NO: 2701298 - RNA, 19 nt, Artificial Sequence
  Description of Artificial Sequence: Synthetic oligonucleotide
accucaaguacacgacuuu

SEQ ID NO: 2701299 - RNA, 19 nt, Artificial Sequence
  Description of Artificial Sequence: Synthetic oligonucleotide
agaaaguucucuggcuaaa

SEQ ID NO: 2701300 - RNA, 19 nt, Artificial Sequence
  Description of Artificial Sequence: Synthetic oligonucleotide
ucuguucuggauggucagu

SEQ ID NO: 2701301 - RNA, 19 nt, Artificial Sequence
  Description of Artificial Sequence: Synthetic oligonucleotide
ggcaaugucaucaccaacu

SEQ ID NO: 2701302 - RNA, 19 nt, Artificial Sequence
  Description of Artificial Sequence: Synthetic oligonucleotide
ggaugaacccggauccggg

SEQ ID NO: 2701303 - RNA, 19 nt, Artificial Sequence
  Description of Artificial Sequence: Synthetic oligonucleotide
ucuuaacuagcugggcauu

SEQ ID NO: 2701304 - RNA, 19 nt, Artificial Sequence
  Description of Artificial Sequence: Synthetic oligonucleotide
uuggcggcuccuugagggc

SEQ ID NO: 2701305 - RNA, 19 nt, Artificial Sequence
  Description of Artificial Sequence: Synthetic oligonucleotide
gucucuuggcggcuccuug

SEQ ID NO: 2701306 - RNA, 19 nt, Artificial Sequence
  Description of Artificial Sequence: Synthetic oligonucleotide
cucaucugacgggcaaugc

SEQ ID NO: 2701307 - RNA, 19 nt, Artificial Sequence
  Description of Artificial Sequence: Synthetic oligonucleotide
ccacagacugugcagugcc

SEQ ID NO: 2701308 - RNA, 19 nt, Artificial Sequence
  Description of Artificial Sequence: Synthetic oligonucleotide
ugccgacaaucucaucgaa

SEQ ID NO: 2701309 - RNA, 19 nt, Artificial Sequence
  Description of Artificial Sequence: Synthetic oligonucleotide
gaucucguuggggucgaac

SEQ ID NO: 2701310 - RNA, 19 nt, Artificial Sequence
  Description of Artificial Sequence: Synthetic oligonucleotide
ucugacgggcaaugccgac

SEQ ID NO: 2701311 - RNA, 19 nt, Artificial Sequence
  Description of Artificial Sequence: Synthetic oligonucleotide
agacugugcagugcccaag

SEQ ID NO: 2701312 - RNA, 19 nt, Artificial Sequence
  Description of Artificial Sequence: Synthetic oligonucleotide
acccaggggaccgaucuug

SEQ ID NO: 2701313 - RNA, 19 nt, Artificial Sequence
  Description of Artificial Sequence: Synthetic oligonucleotide
guggaggcggcuggugucg

SEQ ID NO: 2701314 - RNA, 19 nt, Artificial Sequence
  Description of Artificial Sequence: Synthetic oligonucleotide
cuagcugggcauuccacua

SEQ ID NO: 2701315 - RNA, 19 nt, Artificial Sequence
  Description of Artificial Sequence: Synthetic oligonucleotide
guugccuuggcaaugucau

SEQ ID NO: 2701316 - RNA, 19 nt, Artificial Sequence
  Description of Artificial Sequence: Synthetic oligonucleotide
auauuuccacugugcuuaa

SEQ ID NO: 2701317 - RNA, 19 nt, Artificial Sequence
  Description of Artificial Sequence: Synthetic oligonucleotide
agucaccgguugccuuggc

SEQ ID NO: 2701318 - RNA, 19 nt, Artificial Sequence
  Description of Artificial Sequence: Synthetic oligonucleotide
ggccugucuguucuggaug

SEQ ID NO: 2701319 - RNA, 19 nt, Artificial Sequence
  Description of Artificial Sequence: Synthetic oligonucleotide
cauuccacuacaccacugu

SEQ ID NO: 2701320 - RNA, 19 nt, Artificial Sequence
  Description of Artificial Sequence: Synthetic oligonucleotide
cuuuaaugaucagggcgga

SEQ ID NO: 2701321 - RNA, 19 nt, Artificial Sequence
  Description of Artificial Sequence: Synthetic oligonucleotide
uaauguucuucugcuucuu

SEQ ID NO: 2701322 - RNA, 19 nt, Artificial Sequence
  Description of Artificial Sequence: Synthetic oligonucleotide
cugucuguucuggaugguc

SEQ ID NO: 2701323 - RNA, 19 nt, Artificial Sequence
  Description of Artificial Sequence: Synthetic oligonucleotide
accucaccuccggugcacc

SEQ ID NO: 2701324 - RNA, 19 nt, Artificial Sequence
  Description of Artificial Sequence: Synthetic oligonucleotide
acugugcagugcccaagau

SEQ ID NO: 2701325 - RNA, 19 nt, Artificial Sequence
  Description of Artificial Sequence: Synthetic oligonucleotide
gggcuuuaaugaucagggc

SEQ ID NO: 2701326 - RNA, 19 nt, Artificial Sequence
  Description of Artificial Sequence: Synthetic oligonucleotide
agcccacagacugugcagu

SEQ ID NO: 2701327 - RNA, 19 nt, Artificial Sequence
  Description of Artificial Sequence: Synthetic oligonucleotide
ugggccugucuguucugga

SEQ ID NO: 2701328 - RNA, 19 nt, Artificial Sequence
  Description of Artificial Sequence: Synthetic oligonucleotide
aucagggcggaggcagagg

SEQ ID NO: 2701329 - RNA, 19 nt, Artificial Sequence
  Description of Artificial Sequence: Synthetic oligonucleotide
ucugggccugucuguucug

SEQ ID NO: 2701330 - RNA, 19 nt, Artificial Sequence
  Description of Artificial Sequence: Synthetic oligonucleotide
cccggauccgggacgaccg

SEQ ID NO: 2701331 - RNA, 19 nt, Artificial Sequence
  Description of Artificial Sequence: Synthetic oligonucleotide
cugggccugucuguucugg

SEQ ID NO: 2701332 - RNA, 19 nt, Artificial Sequence
  Description of Artificial Sequence: Synthetic oligonucleotide
uugaucucguuggggucga

SEQ ID NO: 2701333 - RNA, 19 nt, Artificial Sequence
  Description of Artificial Sequence: Synthetic oligonucleotide
uggcgccgaccucaccucc

SEQ ID NO: 2701334 - RNA, 19 nt, Artificial Sequence
  Description of Artificial Sequence: Synthetic oligonucleotide
uuccagucaccgguugccu

SEQ ID NO: 2701335 - RNA, 19 nt, Artificial Sequence
  Description of Artificial Sequence: Synthetic oligonucleotide
accuccggugcaccucaag

SEQ ID NO: 2701336 - RNA, 19 nt, Artificial Sequence
  Description of Artificial Sequence: Synthetic oligonucleotide
uccagucaccgguugccuu

SEQ ID NO: 2701337 - RNA, 19 nt, Artificial Sequence
  Description of Artificial Sequence: Synthetic oligonucleotide
auauuuucucuuggugcuu

SEQ ID NO: 2701338 - RNA, 19 nt, Artificial Sequence
  Description of Artificial Sequence: Synthetic oligonucleotide
gucaccgguugccuuggca

SEQ ID NO: 2701339 - RNA, 19 nt, Artificial Sequence
  Description of Artificial Sequence: Synthetic oligonucleotide
accgguugccuuggcaaug

SEQ ID NO: 2701340 - RNA, 19 nt, Artificial Sequence
  Description of Artificial Sequence: Synthetic oligonucleotide
gcuucuuaacuagcugggc

SEQ ID NO: 2701341 - RNA, 19 nt, Artificial Sequence
  Description of Artificial Sequence: Synthetic oligonucleotide
ccagucaccgguugccuug

SEQ ID NO: 2701342 - RNA, 19 nt, Artificial Sequence
  Description of Artificial Sequence: Synthetic oligonucleotide
ccucaaguacacgacuuug

SEQ ID NO: 2701343 - RNA, 19 nt, Artificial Sequence
  Description of Artificial Sequence: Synthetic oligonucleotide
caccguggccuccuccgag

SEQ ID NO: 2701344 - RNA, 19 nt, Artificial Sequence
  Description of Artificial Sequence: Synthetic oligonucleotide
cuccggugcaccucaagua

SEQ ID NO: 2701345 - RNA, 19 nt, Artificial Sequence
  Description of Artificial Sequence: Synthetic oligonucleotide
aguugcaccguggccuccu

SEQ ID NO: 2701346 - RNA, 19 nt, Artificial Sequence
  Description of Artificial Sequence: Synthetic oligonucleotide
aucugacgggcaaugccga

SEQ ID NO: 2701347 - RNA, 19 nt, Artificial Sequence
  Description of Artificial Sequence: Synthetic oligonucleotide
aaggcggacguggcgccga

SEQ ID NO: 2701348 - RNA, 19 nt, Artificial Sequence
  Description of Artificial Sequence: Synthetic oligonucleotide
gucgaacuugggcggcaug

SEQ ID NO: 2701349 - RNA, 19 nt, Artificial Sequence
  Description of Artificial Sequence: Synthetic oligonucleotide
ucaugaggguggcggccau

SEQ ID NO: 2701350 - RNA, 19 nt, Artificial Sequence
  Description of Artificial Sequence: Synthetic oligonucleotide
ggagacagacccaggggac

SEQ ID NO: 2701351 - RNA, 19 nt, Artificial Sequence
  Description of Artificial Sequence: Synthetic oligonucleotide
cagucaccgguugccuugg

SEQ ID NO: 2701352 - RNA, 19 nt, Artificial Sequence
  Description of Artificial Sequence: Synthetic oligonucleotide
gaacccggauccgggacga

SEQ ID NO: 2701353 - RNA, 19 nt, Artificial Sequence
  Description of Artificial Sequence: Synthetic oligonucleotide
gggcauuccacuacaccac

SEQ ID NO: 2701354 - RNA, 19 nt, Artificial Sequence
  Description of Artificial Sequence: Synthetic oligonucleotide
gguugccuuggcaauguca

SEQ ID NO: 2701355 - RNA, 19 nt, Artificial Sequence
  Description of Artificial Sequence: Synthetic oligonucleotide
cuacaccacuguugauguc

SEQ ID NO: 2701356 - RNA, 19 nt, Artificial Sequence
  Description of Artificial Sequence: Synthetic oligonucleotide
gccaaggcggacguggcgc

SEQ ID NO: 2701357 - RNA, 19 nt, Artificial Sequence
  Description of Artificial Sequence: Synthetic oligonucleotide
uggcggcuccuugagggcu

SEQ ID NO: 2701358 - RNA, 19 nt, Artificial Sequence
  Description of Artificial Sequence: Synthetic oligonucleotide
ccgaccucaccuccggugc

SEQ ID NO: 2701359 - RNA, 19 nt, Artificial Sequence
  Description of Artificial Sequence: Synthetic oligonucleotide
aggguggcggccauccaca

SEQ ID NO: 2701360 - RNA, 19 nt, Artificial Sequence
  Description of Artificial Sequence: Synthetic oligonucleotide
caaucucaucgaaagugau

SEQ ID NO: 2701361 - RNA, 19 nt, Artificial Sequence
  Description of Artificial Sequence: Synthetic oligonucleotide
ggugcaccucaaguacacg

SEQ ID NO: 2701362 - RNA, 19 nt, Artificial Sequence
  Description of Artificial Sequence: Synthetic oligonucleotide
uggaggcggcuggugucgg

SEQ ID NO: 2701363 - RNA, 19 nt, Artificial Sequence
  Description of Artificial Sequence: Synthetic oligonucleotide
gccgaccucaccuccggug

SEQ ID NO: 2701364 - RNA, 19 nt, Artificial Sequence
  Description of Artificial Sequence: Synthetic oligonucleotide
ggauccgggacgaccgaag

SEQ ID NO: 2701365 - RNA, 19 nt, Artificial Sequence
  Description of Artificial Sequence: Synthetic oligonucleotide
gaccggugccucaucugac

SEQ ID NO: 2701366 - RNA, 19 nt, Artificial Sequence
  Description of Artificial Sequence: Synthetic oligonucleotide
gcuaaagaccggugccuca

SEQ ID NO: 2701367 - RNA, 19 nt, Artificial Sequence
  Description of Artificial Sequence: Synthetic oligonucleotide
ggcuggugucggaugaacc

SEQ ID NO: 2701368 - RNA, 19 nt, Artificial Sequence
  Description of Artificial Sequence: Synthetic oligonucleotide
aacccggauccgggacgac

SEQ ID NO: 2701369 - RNA, 19 nt, Artificial Sequence
  Description of Artificial Sequence: Synthetic oligonucleotide
acguggcgccgaccucacc

SEQ ID NO: 2701370 - RNA, 19 nt, Artificial Sequence
  Description of Artificial Sequence: Synthetic oligonucleotide
gguggaggcggcugguguc

SEQ ID NO: 2701371 - RNA, 19 nt, Artificial Sequence
  Description of Artificial Sequence: Synthetic oligonucleotide
ggccaaggcggacguggcg

SEQ ID NO: 2701372 - RNA, 19 nt, Artificial Sequence
  Description of Artificial Sequence: Synthetic oligonucleotide
aggcggcuggugucggaug

SEQ ID NO: 2701373 - RNA, 19 nt, Artificial Sequence
  Description of Artificial Sequence: Synthetic oligonucleotide
cugacgggcaaugccgaca

SEQ ID NO: 2701374 - RNA, 19 nt, Artificial Sequence
  Description of Artificial Sequence: Synthetic oligonucleotide
gccauccacauuacagccc

SEQ ID NO: 2701375 - RNA, 19 nt, Artificial Sequence
  Description of Artificial Sequence: Synthetic oligonucleotide
gaccucaccuccggugcac

SEQ ID NO: 2701376 - RNA, 19 nt, Artificial Sequence
  Description of Artificial Sequence: Synthetic oligonucleotide
ccgggacgaccgaagagag

SEQ ID NO: 2701377 - RNA, 19 nt, Artificial Sequence
  Description of Artificial Sequence: Synthetic oligonucleotide
cucaccuccggugcaccuc

SEQ ID NO: 2701378 - RNA, 19 nt, Artificial Sequence
  Description of Artificial Sequence: Synthetic oligonucleotide
ccggugccucaucugacgg

SEQ ID NO: 2701379 - RNA, 19 nt, Artificial Sequence
  Description of Artificial Sequence: Synthetic oligonucleotide
ccagaaaguucucuggcua

SEQ ID NO: 2701380 - RNA, 19 nt, Artificial Sequence
  Description of Artificial Sequence: Synthetic oligonucleotide
caaugccgacaaucucauc

SEQ ID NO: 2701381 - RNA, 19 nt, Artificial Sequence
  Description of Artificial Sequence: Synthetic oligonucleotide
aggcggacguggcgccgac

SEQ ID NO: 2701382 - RNA, 19 nt, Artificial Sequence
  Description of Artificial Sequence: Synthetic oligonucleotide
gggacgaccgaagagaguu

SEQ ID NO: 2701383 - RNA, 19 nt, Artificial Sequence
  Description of Artificial Sequence: Synthetic oligonucleotide
ggauggucaguuucacugu

SEQ ID NO: 2701384 - RNA, 19 nt, Artificial Sequence
  Description of Artificial Sequence: Synthetic oligonucleotide
ccacauuacagcccacaga

SEQ ID NO: 2701385 - RNA, 19 nt, Artificial Sequence
  Description of Artificial Sequence: Synthetic oligonucleotide
ugucucuuggcggcuccuu

SEQ ID NO: 2701386 - RNA, 19 nt, Artificial Sequence
  Description of Artificial Sequence: Synthetic oligonucleotide
guggcgccgaccucaccuc

SEQ ID NO: 2701387 - RNA, 19 nt, Artificial Sequence
  Description of Artificial Sequence: Synthetic oligonucleotide
uggcggccauccacauuac

SEQ ID NO: 2701388 - RNA, 19 nt, Artificial Sequence
  Description of Artificial Sequence: Synthetic oligonucleotide
cgaagagaguugcaccgug

SEQ ID NO: 2701389 - RNA, 19 nt, Artificial Sequence
  Description of Artificial Sequence: Synthetic oligonucleotide
cagacugugcagugcccaa

SEQ ID NO: 2701390 - RNA, 19 nt, Artificial Sequence
  Description of Artificial Sequence: Synthetic oligonucleotide
gcccaagaucucuuuaaua

SEQ ID NO: 2701391 - RNA, 19 nt, Artificial Sequence
  Description of Artificial Sequence: Synthetic oligonucleotide
ggcuaaagaccggugccuc

SEQ ID NO: 2701392 - RNA, 19 nt, Artificial Sequence
  Description of Artificial Sequence: Synthetic oligonucleotide
gggcaaugccgacaaucuc

SEQ ID NO: 2701393 - RNA, 19 nt, Artificial Sequence
  Description of Artificial Sequence: Synthetic oligonucleotide
acgaccgaagagaguugca

SEQ ID NO: 2701394 - RNA, 19 nt, Artificial Sequence
  Description of Artificial Sequence: Synthetic oligonucleotide
caccucaaguacacgacuu

SEQ ID NO: 2701395 - RNA, 19 nt, Artificial Sequence
  Description of Artificial Sequence: Synthetic oligonucleotide
gcauuccacuacaccacug

SEQ ID NO: 2701396 - RNA, 19 nt, Artificial Sequence
  Description of Artificial Sequence: Synthetic oligonucleotide
cgacuuugaucucguuggg

SEQ ID NO: 2701397 - RNA, 19 nt, Artificial Sequence
  Description of Artificial Sequence: Synthetic oligonucleotide
ggcggcuggugucggauga

SEQ ID NO: 2701398 - RNA, 19 nt, Artificial Sequence
  Description of Artificial Sequence: Synthetic oligonucleotide
ggacguggcgccgaccuca

SEQ ID NO: 2701399 - RNA, 19 nt, Artificial Sequence
  Description of Artificial Sequence: Synthetic oligonucleotide
cuaaagaccggugccucau

SEQ ID NO: 2701400 - RNA, 19 nt, Artificial Sequence
  Description of Artificial Sequence: Synthetic oligonucleotide
cagacccaggggaccgauc

SEQ ID NO: 2701401 - RNA, 19 nt, Artificial Sequence
  Description of Artificial Sequence: Synthetic oligonucleotide
gaguugcaccguggccucc

SEQ ID NO: 2701402 - RNA, 19 nt, Artificial Sequence
  Description of Artificial Sequence: Synthetic oligonucleotide
cuggauggucaguuucacu

SEQ ID NO: 2701403 - RNA, 19 nt, Artificial Sequence
  Description of Artificial Sequence: Synthetic oligonucleotide
acacgacuuugaucucguu

SEQ ID NO: 2701404 - RNA, 19 nt, Artificial Sequence
  Description of Artificial Sequence: Synthetic oligonucleotide
ccucaucugacgggcaaug

SEQ ID NO: 2701405 - RNA, 19 nt, Artificial Sequence
  Description of Artificial Sequence: Synthetic oligonucleotide
acagacccaggggaccgau

SEQ ID NO: 2701406 - RNA, 19 nt, Artificial Sequence
  Description of Artificial Sequence: Synthetic oligonucleotide
ccucagaccuuuccaguca

SEQ ID NO: 2701407 - RNA, 19 nt, Artificial Sequence
  Description of Artificial Sequence: Synthetic oligonucleotide
cgaccgaagagaguugcac

SEQ ID NO: 2701408 - RNA, 19 nt, Artificial Sequence
  Description of Artificial Sequence: Synthetic oligonucleotide
cccacagacugugcagugc

SEQ ID NO: 2701409 - RNA, 19 nt, Artificial Sequence
  Description of Artificial Sequence: Synthetic oligonucleotide
ggcauuccacuacaccacu

SEQ ID NO: 2701410 - RNA, 19 nt, Artificial Sequence
  Description of Artificial Sequence: Synthetic oligonucleotide
cggaugaacccggauccgg

SEQ ID NO: 2701411 - RNA, 19 nt, Artificial Sequence
  Description of Artificial Sequence: Synthetic oligonucleotide
gacguggcgccgaccucac

SEQ ID NO: 2701412 - RNA, 19 nt, Artificial Sequence
  Description of Artificial Sequence: Synthetic oligonucleotide
gcgccgaccucaccuccgg

SEQ ID NO: 2701413 - RNA, 19 nt, Artificial Sequence
  Description of Artificial Sequence: Synthetic oligonucleotide
cuugggcggcaugguggag

SEQ ID NO: 2701414 - RNA, 19 nt, Artificial Sequence
  Description of Artificial Sequence: Synthetic oligonucleotide
cggugcaccucaaguacac

SEQ ID NO: 2701415 - RNA, 19 nt, Artificial Sequence
  Description of Artificial Sequence: Synthetic oligonucleotide
ggacgaccgaagagaguug

SEQ ID NO: 2701416 - RNA, 19 nt, Artificial Sequence
  Description of Artificial Sequence: Synthetic oligonucleotide
ggcgccgaccucaccuccg

SEQ ID NO: 2701417 - RNA, 19 nt, Artificial Sequence
  Description of Artificial Sequence: Synthetic oligonucleotide
accuuuccagucaccgguu

SEQ ID NO: 2701418 - RNA, 19 nt, Artificial Sequence
  Description of Artificial Sequence: Synthetic oligonucleotide
gcaccaccucaaucugggc

SEQ ID NO: 2701419 - RNA, 19 nt, Artificial Sequence
  Description of Artificial Sequence: Synthetic oligonucleotide
gccgacaaucucaucgaaa

SEQ ID NO: 2701420 - RNA, 19 nt, Artificial Sequence
  Description of Artificial Sequence: Synthetic oligonucleotide
cgaaagugauauuuccacu

SEQ ID NO: 2701421 - RNA, 19 nt, Artificial Sequence
  Description of Artificial Sequence: Synthetic oligonucleotide
cggugccucaucugacggg

SEQ ID NO: 2701422 - RNA, 19 nt, Artificial Sequence
  Description of Artificial Sequence: Synthetic oligonucleotide
gcuuaauguucuucugcuu

SEQ ID NO: 2701423 - RNA, 19 nt, Artificial Sequence
  Description of Artificial Sequence: Synthetic oligonucleotide
ggggucgaacuugggcggc

SEQ ID NO: 2701424 - RNA, 19 nt, Artificial Sequence
  Description of Artificial Sequence: Synthetic oligonucleotide
gcugggcauuccacuacac

SEQ ID NO: 2701425 - RNA, 19 nt, Artificial Sequence
  Description of Artificial Sequence: Synthetic oligonucleotide
gcagagggcaccaccucaa

SEQ ID NO: 2701426 - RNA, 19 nt, Artificial Sequence
  Description of Artificial Sequence: Synthetic oligonucleotide
gcggacguggcgccgaccu

SEQ ID NO: 2701427 - RNA, 19 nt, Artificial Sequence
  Description of Artificial Sequence: Synthetic oligonucleotide
ggcggccauccacauuaca

SEQ ID NO: 2701428 - RNA, 19 nt, Artificial Sequence
  Description of Artificial Sequence: Synthetic oligonucleotide
ccggugcaccucaaguaca

SEQ ID NO: 2701429 - RNA, 19 nt, Artificial Sequence
  Description of Artificial Sequence: Synthetic oligonucleotide
ggcuccuugagggcuuuaa

SEQ ID NO: 2701430 - RNA, 19 nt, Artificial Sequence
  Description of Artificial Sequence: Synthetic oligonucleotide
gugucggaugaacccggau

SEQ ID NO: 2701431 - RNA, 19 nt, Artificial Sequence
  Description of Artificial Sequence: Synthetic oligonucleotide
ccguggccuccuccgagcc

SEQ ID NO: 2701432 - RNA, 19 nt, Artificial Sequence
  Description of Artificial Sequence: Synthetic oligonucleotide
gaggcggcuggugucggau

SEQ ID NO: 2701433 - RNA, 19 nt, Artificial Sequence
  Description of Artificial Sequence: Synthetic oligonucleotide
cguuggggucgaacuuggg

SEQ ID NO: 2701434 - RNA, 19 nt, Artificial Sequence
  Description of Artificial Sequence: Synthetic oligonucleotide
gugcagugcccaagaucuc

SEQ ID NO: 2701435 - RNA, 19 nt, Artificial Sequence
  Description of Artificial Sequence: Synthetic oligonucleotide
gcaaugccgacaaucucau

SEQ ID NO: 2701436 - RNA, 19 nt, Artificial Sequence
  Description of Artificial Sequence: Synthetic oligonucleotide
ggugucggaugaacccgga

SEQ ID NO: 2701437 - RNA, 19 nt, Artificial Sequence
  Description of Artificial Sequence: Synthetic oligonucleotide
gggccaaggcggacguggc

SEQ ID NO: 2701438 - RNA, 19 nt, Artificial Sequence
  Description of Artificial Sequence: Synthetic oligonucleotide
caccgguugccuuggcaau

SEQ ID NO: 2701439 - RNA, 19 nt, Artificial Sequence
  Description of Artificial Sequence: Synthetic oligonucleotide
ccuccggugcaccucaagu

SEQ ID NO: 2701440 - RNA, 19 nt, Artificial Sequence
  Description of Artificial Sequence: Synthetic oligonucleotide
gggccugucuguucuggau

SEQ ID NO: 2701441 - RNA, 19 nt, Artificial Sequence
  Description of Artificial Sequence: Synthetic oligonucleotide
cgggcaaugccgacaaucu

SEQ ID NO: 2701442 - RNA, 19 nt, Artificial Sequence
  Description of Artificial Sequence: Synthetic oligonucleotide
cguggccuccuccgagccg

SEQ ID NO: 2701443 - RNA, 19 nt, Artificial Sequence
  Description of Artificial Sequence: Synthetic oligonucleotide
gacccaggggaccgaucuu

SEQ ID NO: 2701444 - RNA, 19 nt, Artificial Sequence
  Description of Artificial Sequence: Synthetic oligonucleotide
cacugugcuuaauguucuu

SEQ ID NO: 2701445 - RNA, 19 nt, Artificial Sequence
  Description of Artificial Sequence: Synthetic oligonucleotide
gcaccguggccuccuccga

SEQ ID NO: 2701446 - RNA, 19 nt, Artificial Sequence
  Description of Artificial Sequence: Synthetic oligonucleotide
ggaggcggcuggugucgga

SEQ ID NO: 2701447 - RNA, 19 nt, Artificial Sequence
  Description of Artificial Sequence: Synthetic oligonucleotide
gggucgaacuugggcggca

SEQ ID NO: 2701448 - RNA, 19 nt, Artificial Sequence
  Description of Artificial Sequence: Synthetic oligonucleotide
cguggcgccgaccucaccu

SEQ ID NO: 2701449 - RNA, 19 nt, Artificial Sequence
  Description of Artificial Sequence: Synthetic oligonucleotide
ccaccucaaucugggccug

SEQ ID NO: 2701450 - RNA, 19 nt, Artificial Sequence
  Description of Artificial Sequence: Synthetic oligonucleotide
cagagggcaccaccucaau

SEQ ID NO: 2701451 - RNA, 19 nt, Artificial Sequence
  Description of Artificial Sequence: Synthetic oligonucleotide
gacgggcaaugccgacaau

SEQ ID NO: 2701452 - RNA, 19 nt, Artificial Sequence
  Description of Artificial Sequence: Synthetic oligonucleotide
ggcggacguggcgccgacc

SEQ ID NO: 2701453 - RNA, 19 nt, Artificial Sequence
  Description of Artificial Sequence: Synthetic oligonucleotide
cggcuggugucggaugaac

SEQ ID NO: 2701454 - RNA, 19 nt, Artificial Sequence
  Description of Artificial Sequence: Synthetic oligonucleotide
cugucucuuggcggcuccu

SEQ ID NO: 2701455 - RNA, 19 nt, Artificial Sequence
  Description of Artificial Sequence: Synthetic oligonucleotide
caccuccggugcaccucaa

SEQ ID NO: 2701456 - RNA, 19 nt, Artificial Sequence
  Description of Artificial Sequence: Synthetic oligonucleotide
gcagugcccaagaucucuu

SEQ ID NO: 2701457 - RNA, 19 nt, Artificial Sequence
  Description of Artificial Sequence: Synthetic oligonucleotide
ggucgaacuugggcggcau

SEQ ID NO: 2701458 - RNA, 19 nt, Artificial Sequence
  Description of Artificial Sequence: Synthetic oligonucleotide
gguggcggccauccacauu

SEQ ID NO: 2701459 - RNA, 19 nt, Artificial Sequence
  Description of Artificial Sequence: Synthetic oligonucleotide
ccgaagagaguugcaccgu

SEQ ID NO: 2701460 - RNA, 19 nt, Artificial Sequence
  Description of Artificial Sequence: Synthetic oligonucleotide
gccucaucugacgggcaau

SEQ ID NO: 2701461 - RNA, 19 nt, Artificial Sequence
  Description of Artificial Sequence: Synthetic oligonucleotide
cgaccucaccuccggugca

SEQ ID NO: 2701462 - RNA, 19 nt, Artificial Sequence
  Description of Artificial Sequence: Synthetic oligonucleotide
caccucaaucugggccugu

SEQ ID NO: 2701463 - RNA, 19 nt, Artificial Sequence
  Description of Artificial Sequence: Synthetic oligonucleotide
ccggauccgggacgaccga

SEQ ID NO: 2701464 - RNA, 19 nt, Artificial Sequence
  Description of Artificial Sequence: Synthetic oligonucleotide
gcggcuggugucggaugaa

SEQ ID NO: 2701465 - RNA, 19 nt, Artificial Sequence
  Description of Artificial Sequence: Synthetic oligonucleotide
cgguugccuuggcaauguc

SEQ ID NO: 2701466 - RNA, 19 nt, Artificial Sequence
  Description of Artificial Sequence: Synthetic oligonucleotide
ggguggcggccauccacau

SEQ ID NO: 2701467 - RNA, 19 nt, Artificial Sequence
  Description of Artificial Sequence: Synthetic oligonucleotide
ccucaccuccggugcaccu

SEQ ID NO: 2701468 - RNA, 19 nt, Artificial Sequence
  Description of Artificial Sequence: Synthetic oligonucleotide
cggacguggcgccgaccuc

SEQ ID NO: 2701469 - RNA, 19 nt, Artificial Sequence
  Description of Artificial Sequence: Synthetic oligonucleotide
cgaacuugggcggcauggu

SEQ ID NO: 2701470 - RNA, 19 nt, Artificial Sequence
  Description of Artificial Sequence: Synthetic oligonucleotide
ccacuacaccacuguugau

SEQ ID NO: 2701471 - RNA, 19 nt, Artificial Sequence
  Description of Artificial Sequence: Synthetic oligonucleotide
ccugucuguucuggauggu

SEQ ID NO: 2701472 - RNA, 19 nt, Artificial Sequence
  Description of Artificial Sequence: Synthetic oligonucleotide
ggccuccuccgagccgaaa

SEQ ID NO: 2701473 - RNA, 19 nt, Artificial Sequence
  Description of Artificial Sequence: Synthetic oligonucleotide
ggcggcuccuugagggcuu

SEQ ID NO: 2701474 - RNA, 19 nt, Artificial Sequence
  Description of Artificial Sequence: Synthetic oligonucleotide
cggauccgggacgaccgaa

SEQ ID NO: 2701475 - RNA, 19 nt, Artificial Sequence
  Description of Artificial Sequence: Synthetic oligonucleotide
cgggacgaccgaagagagu

SEQ ID NO: 2701476 - RNA, 19 nt, Artificial Sequence
  Description of Artificial Sequence: Synthetic oligonucleotide
gcggcuccuugagggcuuu

SEQ ID NO: 2701477 - RNA, 19 nt, Artificial Sequence
  Description of Artificial Sequence: Synthetic oligonucleotide
cgccgaccucaccuccggu

SEQ ID NO: 2701478 - RNA, 19 nt, Artificial Sequence
  Description of Artificial Sequence: Synthetic oligonucleotide
aaaacuucuggauacacug

SEQ ID NO: 2701479 - RNA, 19 nt, Artificial Sequence
  Description of Artificial Sequence: Synthetic oligonucleotide
ucgaauuucuuccugauca

SEQ ID NO: 2701480 - RNA, 19 nt, Artificial Sequence
  Description of Artificial Sequence: Synthetic oligonucleotide
aggacuauaggcugcaucc

SEQ ID NO: 2701481 - RNA, 19 nt, Artificial Sequence
  Description of Artificial Sequence: Synthetic oligonucleotide
ugucuuuaaggaaagaugu

SEQ ID NO: 2701482 - RNA, 19 nt, Artificial Sequence
  Description of Artificial Sequence: Synthetic oligonucleotide
cugaucaacacccaguucg

SEQ ID NO: 2701483 - RNA, 19 nt, Artificial Sequence
  Description of Artificial Sequence: Synthetic oligonucleotide
aaagcaagccucgaaagac

SEQ ID NO: 2701484 - RNA, 19 nt, Artificial Sequence
  Description of Artificial Sequence: Synthetic oligonucleotide
aacucguccaccaaagugc

SEQ ID NO: 2701485 - RNA, 19 nt, Artificial Sequence
  Description of Artificial Sequence: Synthetic oligonucleotide
uuaucaauggaguucuucc

SEQ ID NO: 2701486 - RNA, 19 nt, Artificial Sequence
  Description of Artificial Sequence: Synthetic oligonucleotide
gauacauccucuuugauaa

SEQ ID NO: 2701487 - RNA, 19 nt, Artificial Sequence
  Description of Artificial Sequence: Synthetic oligonucleotide
uacuccuuaguucugauac

SEQ ID NO: 2701488 - RNA, 19 nt, Artificial Sequence
  Description of Artificial Sequence: Synthetic oligonucleotide
ucuuaggucggcuucagag

SEQ ID NO: 2701489 - RNA, 19 nt, Artificial Sequence
  Description of Artificial Sequence: Synthetic oligonucleotide
auaauccugacucaccagg

SEQ ID NO: 2701490 - RNA, 19 nt, Artificial Sequence
  Description of Artificial Sequence: Synthetic oligonucleotide
uccaaguaagccaaggagc

SEQ ID NO: 2701491 - RNA, 19 nt, Artificial Sequence
  Description of Artificial Sequence: Synthetic oligonucleotide
aacuugaucugguuucugg

SEQ ID NO: 2701492 - RNA, 19 nt, Artificial Sequence
  Description of Artificial Sequence: Synthetic oligonucleotide
aaggaaagaugucuggcag

SEQ ID NO: 2701493 - RNA, 19 nt, Artificial Sequence
  Description of Artificial Sequence: Synthetic oligonucleotide
auuugcagaugccugcucc

SEQ ID NO: 2701494 - RNA, 19 nt, Artificial Sequence
  Description of Artificial Sequence: Synthetic oligonucleotide
gauaacuugaucugguuuc

SEQ ID NO: 2701495 - RNA, 19 nt, Artificial Sequence
  Description of Artificial Sequence: Synthetic oligonucleotide
aguucuacuccuuaguucu

SEQ ID NO: 2701496 - RNA, 19 nt, Artificial Sequence
  Description of Artificial Sequence: Synthetic oligonucleotide
ucuuugauaacuugaucug

SEQ ID NO: 2701497 - RNA, 19 nt, Artificial Sequence
  Description of Artificial Sequence: Synthetic oligonucleotide
uccauugacauaauccuga

SEQ ID NO: 2701498 - RNA, 19 nt, Artificial Sequence
  Description of Artificial Sequence: Synthetic oligonucleotide
uucugauacauccucuuug

SEQ ID NO: 2701499 - RNA, 19 nt, Artificial Sequence
  Description of Artificial Sequence: Synthetic oligonucleotide
uuccugaucaguuccauug

SEQ ID NO: 2701500 - RNA, 19 nt, Artificial Sequence
  Description of Artificial Sequence: Synthetic oligonucleotide
ucuuuaaggaaagaugucu

SEQ ID NO: 2701501 - RNA, 19 nt, Artificial Sequence
  Description of Artificial Sequence: Synthetic oligonucleotide
uguuagaaggucucggagc

SEQ ID NO: 2701502 - RNA, 19 nt, Artificial Sequence
  Description of Artificial Sequence: Synthetic oligonucleotide
uuugauaacuugaucuggu

SEQ ID NO: 2701503 - RNA, 19 nt, Artificial Sequence
  Description of Artificial Sequence: Synthetic oligonucleotide
uuucuggacagacaacugc

SEQ ID NO: 2701504 - RNA, 19 nt, Artificial Sequence
  Description of Artificial Sequence: Synthetic oligonucleotide
ugucaagugcuucuggacc

SEQ ID NO: 2701505 - RNA, 19 nt, Artificial Sequence
  Description of Artificial Sequence: Synthetic oligonucleotide
uaggccaugucuuuaagga

SEQ ID NO: 2701506 - RNA, 19 nt, Artificial Sequence
  Description of Artificial Sequence: Synthetic oligonucleotide
uuucuuccugaucaguucc

SEQ ID NO: 2701507 - RNA, 19 nt, Artificial Sequence
  Description of Artificial Sequence: Synthetic oligonucleotide
gagaacaucccaccaagag

SEQ ID NO: 2701508 - RNA, 19 nt, Artificial Sequence
  Description of Artificial Sequence: Synthetic oligonucleotide
aauggaguucuuccauagg

SEQ ID NO: 2701509 - RNA, 19 nt, Artificial Sequence
  Description of Artificial Sequence: Synthetic oligonucleotide
ucuggcaggacuauaggcu

SEQ ID NO: 2701510 - RNA, 19 nt, Artificial Sequence
  Description of Artificial Sequence: Synthetic oligonucleotide
gaacaucccaccaagagac

SEQ ID NO: 2701511 - RNA, 19 nt, Artificial Sequence
  Description of Artificial Sequence: Synthetic oligonucleotide
uggacagacaacugcaacc

SEQ ID NO: 2701512 - RNA, 19 nt, Artificial Sequence
  Description of Artificial Sequence: Synthetic oligonucleotide
uuaguucugauacauccuc

SEQ ID NO: 2701513 - RNA, 19 nt, Artificial Sequence
  Description of Artificial Sequence: Synthetic oligonucleotide
cuuuaaggaaagaugucug

SEQ ID NO: 2701514 - RNA, 19 nt, Artificial Sequence
  Description of Artificial Sequence: Synthetic oligonucleotide
uaauccugacucaccaggg

SEQ ID NO: 2701515 - RNA, 19 nt, Artificial Sequence
  Description of Artificial Sequence: Synthetic oligonucleotide
guuagaaggucucggagcc

SEQ ID NO: 2701516 - RNA, 19 nt, Artificial Sequence
  Description of Artificial Sequence: Synthetic oligonucleotide
ucugauacauccucuuuga

SEQ ID NO: 2701517 - RNA, 19 nt, Artificial Sequence
  Description of Artificial Sequence: Synthetic oligonucleotide
uuaaggaaagaugucuggc

SEQ ID NO: 2701518 - RNA, 19 nt, Artificial Sequence
  Description of Artificial Sequence: Synthetic oligonucleotide
caggaauauuugcagaugc

SEQ ID NO: 2701519 - RNA, 19 nt, Artificial Sequence
  Description of Artificial Sequence: Synthetic oligonucleotide
aagccaaggagcccugagg

SEQ ID NO: 2701520 - RNA, 19 nt, Artificial Sequence
  Description of Artificial Sequence: Synthetic oligonucleotide
auaggccaugucuuuaagg

SEQ ID NO: 2701521 - RNA, 19 nt, Artificial Sequence
  Description of Artificial Sequence: Synthetic oligonucleotide
auuaucaauggaguucuuc

SEQ ID NO: 2701522 - RNA, 19 nt, Artificial Sequence
  Description of Artificial Sequence: Synthetic oligonucleotide
gaaagacgacuccaacucg

SEQ ID NO: 2701523 - RNA, 19 nt, Artificial Sequence
  Description of Artificial Sequence: Synthetic oligonucleotide
uucuggacagacaacugca

SEQ ID NO: 2701524 - RNA, 19 nt, Artificial Sequence
  Description of Artificial Sequence: Synthetic oligonucleotide
cuuaggucggcuucagagg

SEQ ID NO: 2701525 - RNA, 19 nt, Artificial Sequence
  Description of Artificial Sequence: Synthetic oligonucleotide
acauaauccugacucacca

SEQ ID NO: 2701526 - RNA, 19 nt, Artificial Sequence
  Description of Artificial Sequence: Synthetic oligonucleotide
uuaggucggcuucagaggu

SEQ ID NO: 2701527 - RNA, 19 nt, Artificial Sequence
  Description of Artificial Sequence: Synthetic oligonucleotide
ucuggauacacugaucaac

SEQ ID NO: 2701528 - RNA, 19 nt, Artificial Sequence
  Description of Artificial Sequence: Synthetic oligonucleotide
agaacaucccaccaagaga

SEQ ID NO: 2701529 - RNA, 19 nt, Artificial Sequence
  Description of Artificial Sequence: Synthetic oligonucleotide
uggaguucuuccauaggcc

SEQ ID NO: 2701530 - RNA, 19 nt, Artificial Sequence
  Description of Artificial Sequence: Synthetic oligonucleotide
uccaacucguccaccaaag

SEQ ID NO: 2701531 - RNA, 19 nt, Artificial Sequence
  Description of Artificial Sequence: Synthetic oligonucleotide
aacuucuggauacacugau

SEQ ID NO: 2701532 - RNA, 19 nt, Artificial Sequence
  Description of Artificial Sequence: Synthetic oligonucleotide
ucgaaagacgacuccaacu

SEQ ID NO: 2701533 - RNA, 19 nt, Artificial Sequence
  Description of Artificial Sequence: Synthetic oligonucleotide
uccugacucaccagggagg

SEQ ID NO: 2701534 - RNA, 19 nt, Artificial Sequence
  Description of Artificial Sequence: Synthetic oligonucleotide
uaucaauggaguucuucca

SEQ ID NO: 2701535 - RNA, 19 nt, Artificial Sequence
  Description of Artificial Sequence: Synthetic oligonucleotide
uuccauugacauaauccug

SEQ ID NO: 2701536 - RNA, 19 nt, Artificial Sequence
  Description of Artificial Sequence: Synthetic oligonucleotide
ugauaacuugaucugguuu

SEQ ID NO: 2701537 - RNA, 19 nt, Artificial Sequence
  Description of Artificial Sequence: Synthetic oligonucleotide
aggaaagaugucuggcagg

SEQ ID NO: 2701538 - RNA, 19 nt, Artificial Sequence
  Description of Artificial Sequence: Synthetic oligonucleotide
gaugccugcuccaaguaag

SEQ ID NO: 2701539 - RNA, 19 nt, Artificial Sequence
  Description of Artificial Sequence: Synthetic oligonucleotide
acccaguucgaauuucuuc

SEQ ID NO: 2701540 - RNA, 19 nt, Artificial Sequence
  Description of Artificial Sequence: Synthetic oligonucleotide
cuucuggauacacugauca

SEQ ID NO: 2701541 - RNA, 19 nt, Artificial Sequence
  Description of Artificial Sequence: Synthetic oligonucleotide
ugucuggcaggacuauagg

SEQ ID NO: 2701542 - RNA, 19 nt, Artificial Sequence
  Description of Artificial Sequence: Synthetic oligonucleotide
agacgacuccaacucgucc

SEQ ID NO: 2701543 - RNA, 19 nt, Artificial Sequence
  Description of Artificial Sequence: Synthetic oligonucleotide
augucuuuaaggaaagaug

SEQ ID NO: 2701544 - RNA, 19 nt, Artificial Sequence
  Description of Artificial Sequence: Synthetic oligonucleotide
acaucccaccaagagaccc

SEQ ID NO: 2701545 - RNA, 19 nt, Artificial Sequence
  Description of Artificial Sequence: Synthetic oligonucleotide
uucagcuggcuucuugugc

SEQ ID NO: 2701546 - RNA, 19 nt, Artificial Sequence
  Description of Artificial Sequence: Synthetic oligonucleotide
ucaacacccaguucgaauu

SEQ ID NO: 2701547 - RNA, 19 nt, Artificial Sequence
  Description of Artificial Sequence: Synthetic oligonucleotide
auuucagcuggcuucuugu

SEQ ID NO: 2701548 - RNA, 19 nt, Artificial Sequence
  Description of Artificial Sequence: Synthetic oligonucleotide
caauggaguucuuccauag

SEQ ID NO: 2701549 - RNA, 19 nt, Artificial Sequence
  Description of Artificial Sequence: Synthetic oligonucleotide
uauaggcugcaucccaggc

SEQ ID NO: 2701550 - RNA, 19 nt, Artificial Sequence
  Description of Artificial Sequence: Synthetic oligonucleotide
aguucgaauuucuuccuga

SEQ ID NO: 2701551 - RNA, 19 nt, Artificial Sequence
  Description of Artificial Sequence: Synthetic oligonucleotide
aggaauauuugcagaugcc

SEQ ID NO: 2701552 - RNA, 19 nt, Artificial Sequence
  Description of Artificial Sequence: Synthetic oligonucleotide
ugucuugcaauguccaaaa

SEQ ID NO: 2701553 - RNA, 19 nt, Artificial Sequence
  Description of Artificial Sequence: Synthetic oligonucleotide
uugacauaauccugacuca

SEQ ID NO: 2701554 - RNA, 19 nt, Artificial Sequence
  Description of Artificial Sequence: Synthetic oligonucleotide
ugcaguucuacuccuuagu

SEQ ID NO: 2701555 - RNA, 19 nt, Artificial Sequence
  Description of Artificial Sequence: Synthetic oligonucleotide
ggugcaggaauauuugcag

SEQ ID NO: 2701556 - RNA, 19 nt, Artificial Sequence
  Description of Artificial Sequence: Synthetic oligonucleotide
agugccucagcuuugucaa

SEQ ID NO: 2701557 - RNA, 19 nt, Artificial Sequence
  Description of Artificial Sequence: Synthetic oligonucleotide
cuugaucugguuucuggac

SEQ ID NO: 2701558 - RNA, 19 nt, Artificial Sequence
  Description of Artificial Sequence: Synthetic oligonucleotide
uccucuuugauaacuugau

SEQ ID NO: 2701559 - RNA, 19 nt, Artificial Sequence
  Description of Artificial Sequence: Synthetic oligonucleotide
aauccugacucaccaggga

SEQ ID NO: 2701560 - RNA, 19 nt, Artificial Sequence
  Description of Artificial Sequence: Synthetic oligonucleotide
gauuucagcuggcuucuug

SEQ ID NO: 2701561 - RNA, 19 nt, Artificial Sequence
  Description of Artificial Sequence: Synthetic oligonucleotide
aagcaagccucgaaagacg

SEQ ID NO: 2701562 - RNA, 19 nt, Artificial Sequence
  Description of Artificial Sequence: Synthetic oligonucleotide
ggauacacugaucaacacc

SEQ ID NO: 2701563 - RNA, 19 nt, Artificial Sequence
  Description of Artificial Sequence: Synthetic oligonucleotide
aaagacgacuccaacucgu

SEQ ID NO: 2701564 - RNA, 19 nt, Artificial Sequence
  Description of Artificial Sequence: Synthetic oligonucleotide
ugaucaacacccaguucga

SEQ ID NO: 2701565 - RNA, 19 nt, Artificial Sequence
  Description of Artificial Sequence: Synthetic oligonucleotide
aagagaccccgccaugucu

SEQ ID NO: 2701566 - RNA, 19 nt, Artificial Sequence
  Description of Artificial Sequence: Synthetic oligonucleotide
cacauugauguccuccagc

SEQ ID NO: 2701567 - RNA, 19 nt, Artificial Sequence
  Description of Artificial Sequence: Synthetic oligonucleotide
ccaaguaagccaaggagcc

SEQ ID NO: 2701568 - RNA, 19 nt, Artificial Sequence
  Description of Artificial Sequence: Synthetic oligonucleotide
cuguuagaaggucucggag

SEQ ID NO: 2701569 - RNA, 19 nt, Artificial Sequence
  Description of Artificial Sequence: Synthetic oligonucleotide
agugcuguuagaaggucuc

SEQ ID NO: 2701570 - RNA, 19 nt, Artificial Sequence
  Description of Artificial Sequence: Synthetic oligonucleotide
gaggugcaggaauauuugc

SEQ ID NO: 2701571 - RNA, 19 nt, Artificial Sequence
  Description of Artificial Sequence: Synthetic oligonucleotide
cuggauacacugaucaaca

SEQ ID NO: 2701572 - RNA, 19 nt, Artificial Sequence
  Description of Artificial Sequence: Synthetic oligonucleotide
ugacauaauccugacucac

SEQ ID NO: 2701573 - RNA, 19 nt, Artificial Sequence
  Description of Artificial Sequence: Synthetic oligonucleotide
uucugucugucuugcaaug

SEQ ID NO: 2701574 - RNA, 19 nt, Artificial Sequence
  Description of Artificial Sequence: Synthetic oligonucleotide
aucaauggaguucuuccau

SEQ ID NO: 2701575 - RNA, 19 nt, Artificial Sequence
  Description of Artificial Sequence: Synthetic oligonucleotide
aacacccaguucgaauuuc

SEQ ID NO: 2701576 - RNA, 19 nt, Artificial Sequence
  Description of Artificial Sequence: Synthetic oligonucleotide
aagugcuucuggaccagcg

SEQ ID NO: 2701577 - RNA, 19 nt, Artificial Sequence
  Description of Artificial Sequence: Synthetic oligonucleotide
ucguccaccaaagugcugu

SEQ ID NO: 2701578 - RNA, 19 nt, Artificial Sequence
  Description of Artificial Sequence: Synthetic oligonucleotide
cuauaggcugcaucccagg

SEQ ID NO: 2701579 - RNA, 19 nt, Artificial Sequence
  Description of Artificial Sequence: Synthetic oligonucleotide
cauaauccugacucaccag

SEQ ID NO: 2701580 - RNA, 19 nt, Artificial Sequence
  Description of Artificial Sequence: Synthetic oligonucleotide
ugcuccaaguaagccaagg

SEQ ID NO: 2701581 - RNA, 19 nt, Artificial Sequence
  Description of Artificial Sequence: Synthetic oligonucleotide
aucugguuucuggacagac

SEQ ID NO: 2701582 - RNA, 19 nt, Artificial Sequence
  Description of Artificial Sequence: Synthetic oligonucleotide
uucgaauuucuuccugauc

SEQ ID NO: 2701583 - RNA, 19 nt, Artificial Sequence
  Description of Artificial Sequence: Synthetic oligonucleotide
uggccugggagcccgggcg

SEQ ID NO: 2701584 - RNA, 19 nt, Artificial Sequence
  Description of Artificial Sequence: Synthetic oligonucleotide
gucuggcaggacuauaggc

SEQ ID NO: 2701585 - RNA, 19 nt, Artificial Sequence
  Description of Artificial Sequence: Synthetic oligonucleotide
agccucgaaagacgacucc

SEQ ID NO: 2701586 - RNA, 19 nt, Artificial Sequence
  Description of Artificial Sequence: Synthetic oligonucleotide
acgacuccaacucguccac

SEQ ID NO: 2701587 - RNA, 19 nt, Artificial Sequence
  Description of Artificial Sequence: Synthetic oligonucleotide
aggucggcuucagaggugc

SEQ ID NO: 2701588 - RNA, 19 nt, Artificial Sequence
  Description of Artificial Sequence: Synthetic oligonucleotide
aucaacacccaguucgaau

SEQ ID NO: 2701589 - RNA, 19 nt, Artificial Sequence
  Description of Artificial Sequence: Synthetic oligonucleotide
cuggcaggacuauaggcug

SEQ ID NO: 2701590 - RNA, 19 nt, Artificial Sequence
  Description of Artificial Sequence: Synthetic oligonucleotide
ugcugcacauugauguccu

SEQ ID NO: 2701591 - RNA, 19 nt, Artificial Sequence
  Description of Artificial Sequence: Synthetic oligonucleotide
caguucuacuccuuaguuc

SEQ ID NO: 2701592 - RNA, 19 nt, Artificial Sequence
  Description of Artificial Sequence: Synthetic oligonucleotide
ucaauggaguucuuccaua

SEQ ID NO: 2701593 - RNA, 19 nt, Artificial Sequence
  Description of Artificial Sequence: Synthetic oligonucleotide
gacuauaggcugcauccca

SEQ ID NO: 2701594 - RNA, 19 nt, Artificial Sequence
  Description of Artificial Sequence: Synthetic oligonucleotide
aagccucgaaagacgacuc

SEQ ID NO: 2701595 - RNA, 19 nt, Artificial Sequence
  Description of Artificial Sequence: Synthetic oligonucleotide
agggaggcaaagcaagccu

SEQ ID NO: 2701596 - RNA, 19 nt, Artificial Sequence
  Description of Artificial Sequence: Synthetic oligonucleotide
ugacucaccagggaggcaa

SEQ ID NO: 2701597 - RNA, 19 nt, Artificial Sequence
  Description of Artificial Sequence: Synthetic oligonucleotide
agaagcgaggccuggccug

SEQ ID NO: 2701598 - RNA, 19 nt, Artificial Sequence
  Description of Artificial Sequence: Synthetic oligonucleotide
cuugugcugcacauugaug

SEQ ID NO: 2701599 - RNA, 19 nt, Artificial Sequence
  Description of Artificial Sequence: Synthetic oligonucleotide
aagacgacuccaacucguc

SEQ ID NO: 2701600 - RNA, 19 nt, Artificial Sequence
  Description of Artificial Sequence: Synthetic oligonucleotide
ucuggacagacaacugcaa

SEQ ID NO: 2701601 - RNA, 19 nt, Artificial Sequence
  Description of Artificial Sequence: Synthetic oligonucleotide
uucuuccugaucaguucca

SEQ ID NO: 2701602 - RNA, 19 nt, Artificial Sequence
  Description of Artificial Sequence: Synthetic oligonucleotide
ucagcuuugucaagugcuu

SEQ ID NO: 2701603 - RNA, 19 nt, Artificial Sequence
  Description of Artificial Sequence: Synthetic oligonucleotide
auacauccucuuugauaac

SEQ ID NO: 2701604 - RNA, 19 nt, Artificial Sequence
  Description of Artificial Sequence: Synthetic oligonucleotide
gucaagugcuucuggacca

SEQ ID NO: 2701605 - RNA, 19 nt, Artificial Sequence
  Description of Artificial Sequence: Synthetic oligonucleotide
aaacuucuggauacacuga

SEQ ID NO: 2701606 - RNA, 19 nt, Artificial Sequence
  Description of Artificial Sequence: Synthetic oligonucleotide
caucccaccaagagacccc

SEQ ID NO: 2701607 - RNA, 19 nt, Artificial Sequence
  Description of Artificial Sequence: Synthetic oligonucleotide
agaggugcaggaauauuug

SEQ ID NO: 2701608 - RNA, 19 nt, Artificial Sequence
  Description of Artificial Sequence: Synthetic oligonucleotide
gacuccaacucguccacca

SEQ ID NO: 2701609 - RNA, 19 nt, Artificial Sequence
  Description of Artificial Sequence: Synthetic oligonucleotide
cuggacagacaacugcaac

SEQ ID NO: 2701610 - RNA, 19 nt, Artificial Sequence
  Description of Artificial Sequence: Synthetic oligonucleotide
uugauaacuugaucugguu

SEQ ID NO: 2701611 - RNA, 19 nt, Artificial Sequence
  Description of Artificial Sequence: Synthetic oligonucleotide
aagugcuguuagaaggucu

SEQ ID NO: 2701612 - RNA, 19 nt, Artificial Sequence
  Description of Artificial Sequence: Synthetic oligonucleotide
cagagugcucuuaggucgg

SEQ ID NO: 2701613 - RNA, 19 nt, Artificial Sequence
  Description of Artificial Sequence: Synthetic oligonucleotide
cuugcagaagcgaggccug

SEQ ID NO: 2701614 - RNA, 19 nt, Artificial Sequence
  Description of Artificial Sequence: Synthetic oligonucleotide
auaacuugaucugguuucu

SEQ ID NO: 2701615 - RNA, 19 nt, Artificial Sequence
  Description of Artificial Sequence: Synthetic oligonucleotide
uucuacuccuuaguucuga

SEQ ID NO: 2701616 - RNA, 19 nt, Artificial Sequence
  Description of Artificial Sequence: Synthetic oligonucleotide
cucgaaagacgacuccaac

SEQ ID NO: 2701617 - RNA, 19 nt, Artificial Sequence
  Description of Artificial Sequence: Synthetic oligonucleotide
ugcccggagaacaucccac

SEQ ID NO: 2701618 - RNA, 19 nt, Artificial Sequence
  Description of Artificial Sequence: Synthetic oligonucleotide
cugcaguucuacuccuuag

SEQ ID NO: 2701619 - RNA, 19 nt, Artificial Sequence
  Description of Artificial Sequence: Synthetic oligonucleotide
cugaucaguuccauugaca

SEQ ID NO: 2701620 - RNA, 19 nt, Artificial Sequence
  Description of Artificial Sequence: Synthetic oligonucleotide
acuccuuaguucugauaca

SEQ ID NO: 2701621 - RNA, 19 nt, Artificial Sequence
  Description of Artificial Sequence: Synthetic oligonucleotide
cauucugucugucuugcaa

SEQ ID NO: 2701622 - RNA, 19 nt, Artificial Sequence
  Description of Artificial Sequence: Synthetic oligonucleotide
ucugucuugcaauguccaa

SEQ ID NO: 2701623 - RNA, 19 nt, Artificial Sequence
  Description of Artificial Sequence: Synthetic oligonucleotide
uccuuaguucugauacauc

SEQ ID NO: 2701624 - RNA, 19 nt, Artificial Sequence
  Description of Artificial Sequence: Synthetic oligonucleotide
gaccagcgcaucuuuccgc

SEQ ID NO: 2701625 - RNA, 19 nt, Artificial Sequence
  Description of Artificial Sequence: Synthetic oligonucleotide
uucuggauacacugaucaa

SEQ ID NO: 2701626 - RNA, 19 nt, Artificial Sequence
  Description of Artificial Sequence: Synthetic oligonucleotide
acuucuggauacacugauc

SEQ ID NO: 2701627 - RNA, 19 nt, Artificial Sequence
  Description of Artificial Sequence: Synthetic oligonucleotide
uggcaggacuauaggcugc

SEQ ID NO: 2701628 - RNA, 19 nt, Artificial Sequence
  Description of Artificial Sequence: Synthetic oligonucleotide
auccucuuugauaacuuga

SEQ ID NO: 2701629 - RNA, 19 nt, Artificial Sequence
  Description of Artificial Sequence: Synthetic oligonucleotide
cauaggccaugucuuuaag

SEQ ID NO: 2701630 - RNA, 19 nt, Artificial Sequence
  Description of Artificial Sequence: Synthetic oligonucleotide
accagcgcaucuuuccgcu

SEQ ID NO: 2701631 - RNA, 19 nt, Artificial Sequence
  Description of Artificial Sequence: Synthetic oligonucleotide
cucagcuuugucaagugcu

SEQ ID NO: 2701632 - RNA, 19 nt, Artificial Sequence
  Description of Artificial Sequence: Synthetic oligonucleotide
cugcuugcagaagcgaggc

SEQ ID NO: 2701633 - RNA, 19 nt, Artificial Sequence
  Description of Artificial Sequence: Synthetic oligonucleotide
aggugcaggaauauuugca

SEQ ID NO: 2701634 - RNA, 19 nt, Artificial Sequence
  Description of Artificial Sequence: Synthetic oligonucleotide
caggacuauaggcugcauc

SEQ ID NO: 2701635 - RNA, 19 nt, Artificial Sequence
  Description of Artificial Sequence: Synthetic oligonucleotide
ucaagugcuucuggaccag

SEQ ID NO: 2701636 - RNA, 19 nt, Artificial Sequence
  Description of Artificial Sequence: Synthetic oligonucleotide
gaagcgaggccuggccugg

SEQ ID NO: 2701637 - RNA, 19 nt, Artificial Sequence
  Description of Artificial Sequence: Synthetic oligonucleotide
agaugccugcuccaaguaa

SEQ ID NO: 2701638 - RNA, 19 nt, Artificial Sequence
  Description of Artificial Sequence: Synthetic oligonucleotide
augccugcuccaaguaagc

SEQ ID NO: 2701639 - RNA, 19 nt, Artificial Sequence
  Description of Artificial Sequence: Synthetic oligonucleotide
cagcgcaucuuuccgcugc

SEQ ID NO: 2701640 - RNA, 19 nt, Artificial Sequence
  Description of Artificial Sequence: Synthetic oligonucleotide
caggccagagugcucuuag

SEQ ID NO: 2701641 - RNA, 19 nt, Artificial Sequence
  Description of Artificial Sequence: Synthetic oligonucleotide
cagggaggcaaagcaagcc

SEQ ID NO: 2701642 - RNA, 19 nt, Artificial Sequence
  Description of Artificial Sequence: Synthetic oligonucleotide
guuucuggacagacaacug

SEQ ID NO: 2701643 - RNA, 19 nt, Artificial Sequence
  Description of Artificial Sequence: Synthetic oligonucleotide
agugcucuuaggucggcuu

SEQ ID NO: 2701644 - RNA, 19 nt, Artificial Sequence
  Description of Artificial Sequence: Synthetic oligonucleotide
cuuuccgcugcaguucuac

SEQ ID NO: 2701645 - RNA, 19 nt, Artificial Sequence
  Description of Artificial Sequence: Synthetic oligonucleotide
aucccaccaagagaccccg

SEQ ID NO: 2701646 - RNA, 19 nt, Artificial Sequence
  Description of Artificial Sequence: Synthetic oligonucleotide
ugagggauuucagcuggcu

SEQ ID NO: 2701647 - RNA, 19 nt, Artificial Sequence
  Description of Artificial Sequence: Synthetic oligonucleotide
cauugauguccuccagcac

SEQ ID NO: 2701648 - RNA, 19 nt, Artificial Sequence
  Description of Artificial Sequence: Synthetic oligonucleotide
ggaccagcgcaucuuuccg

SEQ ID NO: 2701649 - RNA, 19 nt, Artificial Sequence
  Description of Artificial Sequence: Synthetic oligonucleotide
acagacaacugcaaccuuu

SEQ ID NO: 2701650 - RNA, 19 nt, Artificial Sequence
  Description of Artificial Sequence: Synthetic oligonucleotide
caucuuuccgcugcaguuc

SEQ ID NO: 2701651 - RNA, 19 nt, Artificial Sequence
  Description of Artificial Sequence: Synthetic oligonucleotide
caguucgaauuucuuccug

SEQ ID NO: 2701652 - RNA, 19 nt, Artificial Sequence
  Description of Artificial Sequence: Synthetic oligonucleotide
uaacuugaucugguuucug

SEQ ID NO: 2701653 - RNA, 19 nt, Artificial Sequence
  Description of Artificial Sequence: Synthetic oligonucleotide
cuuaguucugauacauccu

SEQ ID NO: 2701654 - RNA, 19 nt, Artificial Sequence
  Description of Artificial Sequence: Synthetic oligonucleotide
gugcuucuggaccagcgca

SEQ ID NO: 2701655 - RNA, 19 nt, Artificial Sequence
  Description of Artificial Sequence: Synthetic oligonucleotide
gugcugcacauugaugucc

SEQ ID NO: 2701656 - RNA, 19 nt, Artificial Sequence
  Description of Artificial Sequence: Synthetic oligonucleotide
ggaggcaaagcaagccucg

SEQ ID NO: 2701657 - RNA, 19 nt, Artificial Sequence
  Description of Artificial Sequence: Synthetic oligonucleotide
ugcuugcagaagcgaggcc

SEQ ID NO: 2701658 - RNA, 19 nt, Artificial Sequence
  Description of Artificial Sequence: Synthetic oligonucleotide
uuuccgcugcaguucuacu

SEQ ID NO: 2701659 - RNA, 19 nt, Artificial Sequence
  Description of Artificial Sequence: Synthetic oligonucleotide
gucuuuaaggaaagauguc

SEQ ID NO: 2701660 - RNA, 19 nt, Artificial Sequence
  Description of Artificial Sequence: Synthetic oligonucleotide
ggcaaagcaagccucgaaa

SEQ ID NO: 2701661 - RNA, 19 nt, Artificial Sequence
  Description of Artificial Sequence: Synthetic oligonucleotide
aggccaugucuuuaaggaa

SEQ ID NO: 2701662 - RNA, 19 nt, Artificial Sequence
  Description of Artificial Sequence: Synthetic oligonucleotide
agagaccccgccaugucug

SEQ ID NO: 2701663 - RNA, 19 nt, Artificial Sequence
  Description of Artificial Sequence: Synthetic oligonucleotide
accaagagaccccgccaug

SEQ ID NO: 2701664 - RNA, 19 nt, Artificial Sequence
  Description of Artificial Sequence: Synthetic oligonucleotide
uaggucggcuucagaggug

SEQ ID NO: 2701665 - RNA, 19 nt, Artificial Sequence
  Description of Artificial Sequence: Synthetic oligonucleotide
gcugcuugcagaagcgagg

SEQ ID NO: 2701666 - RNA, 19 nt, Artificial Sequence
  Description of Artificial Sequence: Synthetic oligonucleotide
uucagaggugcaggaauau

SEQ ID NO: 2701667 - RNA, 19 nt, Artificial Sequence
  Description of Artificial Sequence: Synthetic oligonucleotide
caugucuuuaaggaaagau

SEQ ID NO: 2701668 - RNA, 19 nt, Artificial Sequence
  Description of Artificial Sequence: Synthetic oligonucleotide
agcaagccucgaaagacga

SEQ ID NO: 2701669 - RNA, 19 nt, Artificial Sequence
  Description of Artificial Sequence: Synthetic oligonucleotide
uuccauaggccaugucuuu

SEQ ID NO: 2701670 - RNA, 19 nt, Artificial Sequence
  Description of Artificial Sequence: Synthetic oligonucleotide
ugccugcuccaaguaagcc

SEQ ID NO: 2701671 - RNA, 19 nt, Artificial Sequence
  Description of Artificial Sequence: Synthetic oligonucleotide
uugcagaagcgaggccugg

SEQ ID NO: 2701672 - RNA, 19 nt, Artificial Sequence
  Description of Artificial Sequence: Synthetic oligonucleotide
caguuccauugacauaauc

SEQ ID NO: 2701673 - RNA, 19 nt, Artificial Sequence
  Description of Artificial Sequence: Synthetic oligonucleotide
agagugcucuuaggucggc

SEQ ID NO: 2701674 - RNA, 19 nt, Artificial Sequence
  Description of Artificial Sequence: Synthetic oligonucleotide
gaggccuggccugggagcc

SEQ ID NO: 2701675 - RNA, 19 nt, Artificial Sequence
  Description of Artificial Sequence: Synthetic oligonucleotide
ugcagaagcgaggccuggc

SEQ ID NO: 2701676 - RNA, 19 nt, Artificial Sequence
  Description of Artificial Sequence: Synthetic oligonucleotide
gguuucuggacagacaacu

SEQ ID NO: 2701677 - RNA, 19 nt, Artificial Sequence
  Description of Artificial Sequence: Synthetic oligonucleotide
cugagggauuucagcuggc

SEQ ID NO: 2701678 - RNA, 19 nt, Artificial Sequence
  Description of Artificial Sequence: Synthetic oligonucleotide
gcuguuagaaggucucgga

SEQ ID NO: 2701679 - RNA, 19 nt, Artificial Sequence
  Description of Artificial Sequence: Synthetic oligonucleotide
gucggcuucagaggugcag

SEQ ID NO: 2701680 - RNA, 19 nt, Artificial Sequence
  Description of Artificial Sequence: Synthetic oligonucleotide
aggcaaagcaagccucgaa

SEQ ID NO: 2701681 - RNA, 19 nt, Artificial Sequence
  Description of Artificial Sequence: Synthetic oligonucleotide
gucugucuugcaaugucca

SEQ ID NO: 2701682 - RNA, 19 nt, Artificial Sequence
  Description of Artificial Sequence: Synthetic oligonucleotide
ugccagugccucagcuuug

SEQ ID NO: 2701683 - RNA, 19 nt, Artificial Sequence
  Description of Artificial Sequence: Synthetic oligonucleotide
ucaguuccauugacauaau

SEQ ID NO: 2701684 - RNA, 19 nt, Artificial Sequence
  Description of Artificial Sequence: Synthetic oligonucleotide
caagagaccccgccauguc

SEQ ID NO: 2701685 - RNA, 19 nt, Artificial Sequence
  Description of Artificial Sequence: Synthetic oligonucleotide
caccaaagugcuguuagaa

SEQ ID NO: 2701686 - RNA, 19 nt, Artificial Sequence
  Description of Artificial Sequence: Synthetic oligonucleotide
acucguccaccaaagugcu

SEQ ID NO: 2701687 - RNA, 19 nt, Artificial Sequence
  Description of Artificial Sequence: Synthetic oligonucleotide
gcagaagcgaggccuggcc

SEQ ID NO: 2701688 - RNA, 19 nt, Artificial Sequence
  Description of Artificial Sequence: Synthetic oligonucleotide
gugcucuuaggucggcuuc

SEQ ID NO: 2701689 - RNA, 19 nt, Artificial Sequence
  Description of Artificial Sequence: Synthetic oligonucleotide
ucagaggugcaggaauauu

SEQ ID NO: 2701690 - RNA, 19 nt, Artificial Sequence
  Description of Artificial Sequence: Synthetic oligonucleotide
gagaccccgccaugucugc

SEQ ID NO: 2701691 - RNA, 19 nt, Artificial Sequence
  Description of Artificial Sequence: Synthetic oligonucleotide
cuuccauaggccaugucuu

SEQ ID NO: 2701692 - RNA, 19 nt, Artificial Sequence
  Description of Artificial Sequence: Synthetic oligonucleotide
cagaggugcaggaauauuu

SEQ ID NO: 2701693 - RNA, 19 nt, Artificial Sequence
  Description of Artificial Sequence: Synthetic oligonucleotide
gccagagugcucuuagguc

SEQ ID NO: 2701694 - RNA, 19 nt, Artificial Sequence
  Description of Artificial Sequence: Synthetic oligonucleotide
acacccaguucgaauuucu

SEQ ID NO: 2701695 - RNA, 19 nt, Artificial Sequence
  Description of Artificial Sequence: Synthetic oligonucleotide
gccaugucuuuaaggaaag

SEQ ID NO: 2701696 - RNA, 19 nt, Artificial Sequence
  Description of Artificial Sequence: Synthetic oligonucleotide
caagccucgaaagacgacu

SEQ ID NO: 2701697 - RNA, 19 nt, Artificial Sequence
  Description of Artificial Sequence: Synthetic oligonucleotide
gcuccaaguaagccaagga

SEQ ID NO: 2701698 - RNA, 19 nt, Artificial Sequence
  Description of Artificial Sequence: Synthetic oligonucleotide
ggccaugucuuuaaggaaa

SEQ ID NO: 2701699 - RNA, 19 nt, Artificial Sequence
  Description of Artificial Sequence: Synthetic oligonucleotide
acuccaacucguccaccaa

SEQ ID NO: 2701700 - RNA, 19 nt, Artificial Sequence
  Description of Artificial Sequence: Synthetic oligonucleotide
ccugaucaguuccauugac

SEQ ID NO: 2701701 - RNA, 19 nt, Artificial Sequence
  Description of Artificial Sequence: Synthetic oligonucleotide
agcgcaucuuuccgcugca

SEQ ID NO: 2701702 - RNA, 19 nt, Artificial Sequence
  Description of Artificial Sequence: Synthetic oligonucleotide
cggagaacaucccaccaag

SEQ ID NO: 2701703 - RNA, 19 nt, Artificial Sequence
  Description of Artificial Sequence: Synthetic oligonucleotide
aguaagccaaggagcccug

SEQ ID NO: 2701704 - RNA, 19 nt, Artificial Sequence
  Description of Artificial Sequence: Synthetic oligonucleotide
ccagggaggcaaagcaagc

SEQ ID NO: 2701705 - RNA, 19 nt, Artificial Sequence
  Description of Artificial Sequence: Synthetic oligonucleotide
ggcgcugcuugcagaagcg

SEQ ID NO: 2701706 - RNA, 19 nt, Artificial Sequence
  Description of Artificial Sequence: Synthetic oligonucleotide
guucuacuccuuaguucug

SEQ ID NO: 2701707 - RNA, 19 nt, Artificial Sequence
  Description of Artificial Sequence: Synthetic oligonucleotide
gcuuugucaagugcuucug

SEQ ID NO: 2701708 - RNA, 19 nt, Artificial Sequence
  Description of Artificial Sequence: Synthetic oligonucleotide
acucaccagggaggcaaag

SEQ ID NO: 2701709 - RNA, 19 nt, Artificial Sequence
  Description of Artificial Sequence: Synthetic oligonucleotide
ccucagcuuugucaagugc

SEQ ID NO: 2701710 - RNA, 19 nt, Artificial Sequence
  Description of Artificial Sequence: Synthetic oligonucleotide
cuccaacucguccaccaaa

SEQ ID NO: 2701711 - RNA, 19 nt, Artificial Sequence
  Description of Artificial Sequence: Synthetic oligonucleotide
ccugacucaccagggaggc

SEQ ID NO: 2701712 - RNA, 19 nt, Artificial Sequence
  Description of Artificial Sequence: Synthetic oligonucleotide
aaggagcccugagggauuu

SEQ ID NO: 2701713 - RNA, 19 nt, Artificial Sequence
  Description of Artificial Sequence: Synthetic oligonucleotide
gaucaacacccaguucgaa

SEQ ID NO: 2701714 - RNA, 19 nt, Artificial Sequence
  Description of Artificial Sequence: Synthetic oligonucleotide
ggacagacaacugcaaccu

SEQ ID NO: 2701715 - RNA, 19 nt, Artificial Sequence
  Description of Artificial Sequence: Synthetic oligonucleotide
gaccccgccaugucugcaa

SEQ ID NO: 2701716 - RNA, 19 nt, Artificial Sequence
  Description of Artificial Sequence: Synthetic oligonucleotide
cacugaucaacacccaguu

SEQ ID NO: 2701717 - RNA, 19 nt, Artificial Sequence
  Description of Artificial Sequence: Synthetic oligonucleotide
guucugauacauccucuuu

SEQ ID NO: 2701718 - RNA, 19 nt, Artificial Sequence
  Description of Artificial Sequence: Synthetic oligonucleotide
gcuugcagaagcgaggccu

SEQ ID NO: 2701719 - RNA, 19 nt, Artificial Sequence
  Description of Artificial Sequence: Synthetic oligonucleotide
aagcgaggccuggccuggg

SEQ ID NO: 2701720 - RNA, 19 nt, Artificial Sequence
  Description of Artificial Sequence: Synthetic oligonucleotide
cccugagggauuucagcug

SEQ ID NO: 2701721 - RNA, 19 nt, Artificial Sequence
  Description of Artificial Sequence: Synthetic oligonucleotide
cucguccaccaaagugcug

SEQ ID NO: 2701722 - RNA, 19 nt, Artificial Sequence
  Description of Artificial Sequence: Synthetic oligonucleotide
gggaggcaaagcaagccuc

SEQ ID NO: 2701723 - RNA, 19 nt, Artificial Sequence
  Description of Artificial Sequence: Synthetic oligonucleotide
ucuuuccgcugcaguucua

SEQ ID NO: 2701724 - RNA, 19 nt, Artificial Sequence
  Description of Artificial Sequence: Synthetic oligonucleotide
cuccuuaguucugauacau

SEQ ID NO: 2701725 - RNA, 19 nt, Artificial Sequence
  Description of Artificial Sequence: Synthetic oligonucleotide
ggccagagugcucuuaggu

SEQ ID NO: 2701726 - RNA, 19 nt, Artificial Sequence
  Description of Artificial Sequence: Synthetic oligonucleotide
cugcccggagaacauccca

SEQ ID NO: 2701727 - RNA, 19 nt, Artificial Sequence
  Description of Artificial Sequence: Synthetic oligonucleotide
cagacaacugcaaccuuuu

SEQ ID NO: 2701728 - RNA, 19 nt, Artificial Sequence
  Description of Artificial Sequence: Synthetic oligonucleotide
gcccugagggauuucagcu

SEQ ID NO: 2701729 - RNA, 19 nt, Artificial Sequence
  Description of Artificial Sequence: Synthetic oligonucleotide
aggcugcccggagaacauc

SEQ ID NO: 2701730 - RNA, 19 nt, Artificial Sequence
  Description of Artificial Sequence: Synthetic oligonucleotide
cgcugcuugcagaagcgag

SEQ ID NO: 2701731 - RNA, 19 nt, Artificial Sequence
  Description of Artificial Sequence: Synthetic oligonucleotide
ggagcccugagggauuuca

SEQ ID NO: 2701732 - RNA, 19 nt, Artificial Sequence
  Description of Artificial Sequence: Synthetic oligonucleotide
agcgaggccuggccuggga

SEQ ID NO: 2701733 - RNA, 19 nt, Artificial Sequence
  Description of Artificial Sequence: Synthetic oligonucleotide
gccucgaaagacgacucca

SEQ ID NO: 2701734 - RNA, 19 nt, Artificial Sequence
  Description of Artificial Sequence: Synthetic oligonucleotide
ggagcccgggcggaggcgg

SEQ ID NO: 2701735 - RNA, 19 nt, Artificial Sequence
  Description of Artificial Sequence: Synthetic oligonucleotide
gcaggcugcccggagaaca

SEQ ID NO: 2701736 - RNA, 19 nt, Artificial Sequence
  Description of Artificial Sequence: Synthetic oligonucleotide
gcgaggccuggccugggag

SEQ ID NO: 2701737 - RNA, 19 nt, Artificial Sequence
  Description of Artificial Sequence: Synthetic oligonucleotide
cucuuaggucggcuucaga

SEQ ID NO: 2701738 - RNA, 19 nt, Artificial Sequence
  Description of Artificial Sequence: Synthetic oligonucleotide
uggggaccagcaggcugcc

SEQ ID NO: 2701739 - RNA, 19 nt, Artificial Sequence
  Description of Artificial Sequence: Synthetic oligonucleotide
cugccagugccucagcuuu

SEQ ID NO: 2701740 - RNA, 19 nt, Artificial Sequence
  Description of Artificial Sequence: Synthetic oligonucleotide
guaagccaaggagcccuga

SEQ ID NO: 2701741 - RNA, 19 nt, Artificial Sequence
  Description of Artificial Sequence: Synthetic oligonucleotide
gcaguucuacuccuuaguu

SEQ ID NO: 2701742 - RNA, 19 nt, Artificial Sequence
  Description of Artificial Sequence: Synthetic oligonucleotide
cagaugccugcuccaagua

SEQ ID NO: 2701743 - RNA, 19 nt, Artificial Sequence
  Description of Artificial Sequence: Synthetic oligonucleotide
ccauaggccaugucuuuaa

SEQ ID NO: 2701744 - RNA, 19 nt, Artificial Sequence
  Description of Artificial Sequence: Synthetic oligonucleotide
cagaagcgaggccuggccu

SEQ ID NO: 2701745 - RNA, 19 nt, Artificial Sequence
  Description of Artificial Sequence: Synthetic oligonucleotide
gacagacaacugcaaccuu

SEQ ID NO: 2701746 - RNA, 19 nt, Artificial Sequence
  Description of Artificial Sequence: Synthetic oligonucleotide
gcucuuaggucggcuucag

SEQ ID NO: 2701747 - RNA, 19 nt, Artificial Sequence
  Description of Artificial Sequence: Synthetic oligonucleotide
caccaagagaccccgccau

SEQ ID NO: 2701748 - RNA, 19 nt, Artificial Sequence
  Description of Artificial Sequence: Synthetic oligonucleotide
ggcaggacuauaggcugca

SEQ ID NO: 2701749 - RNA, 19 nt, Artificial Sequence
  Description of Artificial Sequence: Synthetic oligonucleotide
cugauacauccucuuugau

SEQ ID NO: 2701750 - RNA, 19 nt, Artificial Sequence
  Description of Artificial Sequence: Synthetic oligonucleotide
ccucgaaagacgacuccaa

SEQ ID NO: 2701751 - RNA, 19 nt, Artificial Sequence
  Description of Artificial Sequence: Synthetic oligonucleotide
aggagcccugagggauuuc

SEQ ID NO: 2701752 - RNA, 19 nt, Artificial Sequence
  Description of Artificial Sequence: Synthetic oligonucleotide
agaccccgccaugucugca

SEQ ID NO: 2701753 - RNA, 19 nt, Artificial Sequence
  Description of Artificial Sequence: Synthetic oligonucleotide
gggauuucagcuggcuucu

SEQ ID NO: 2701754 - RNA, 19 nt, Artificial Sequence
  Description of Artificial Sequence: Synthetic oligonucleotide
gacucaccagggaggcaaa

SEQ ID NO: 2701755 - RNA, 19 nt, Artificial Sequence
  Description of Artificial Sequence: Synthetic oligonucleotide
ccaccaaagugcuguuaga

SEQ ID NO: 2701756 - RNA, 19 nt, Artificial Sequence
  Description of Artificial Sequence: Synthetic oligonucleotide
gcaagccucgaaagacgac

SEQ ID NO: 2701757 - RNA, 19 nt, Artificial Sequence
  Description of Artificial Sequence: Synthetic oligonucleotide
guucuuccauaggccaugu

SEQ ID NO: 2701758 - RNA, 19 nt, Artificial Sequence
  Description of Artificial Sequence: Synthetic oligonucleotide
gagugcucuuaggucggcu

SEQ ID NO: 2701759 - RNA, 19 nt, Artificial Sequence
  Description of Artificial Sequence: Synthetic oligonucleotide
ccaccaagagaccccgcca

SEQ ID NO: 2701760 - RNA, 19 nt, Artificial Sequence
  Description of Artificial Sequence: Synthetic oligonucleotide
gcuucuggaccagcgcauc

SEQ ID NO: 2701761 - RNA, 19 nt, Artificial Sequence
  Description of Artificial Sequence: Synthetic oligonucleotide
gcugcccggagaacauccc

SEQ ID NO: 2701762 - RNA, 19 nt, Artificial Sequence
  Description of Artificial Sequence: Synthetic oligonucleotide
ccggagaacaucccaccaa

SEQ ID NO: 2701763 - RNA, 19 nt, Artificial Sequence
  Description of Artificial Sequence: Synthetic oligonucleotide
caacacccaguucgaauuu

SEQ ID NO: 2701764 - RNA, 19 nt, Artificial Sequence
  Description of Artificial Sequence: Synthetic oligonucleotide
guccaccaaagugcuguua

SEQ ID NO: 2701765 - RNA, 19 nt, Artificial Sequence
  Description of Artificial Sequence: Synthetic oligonucleotide
ccagcgcaucuuuccgcug

SEQ ID NO: 2701766 - RNA, 19 nt, Artificial Sequence
  Description of Artificial Sequence: Synthetic oligonucleotide
caaggagcccugagggauu

SEQ ID NO: 2701767 - RNA, 19 nt, Artificial Sequence
  Description of Artificial Sequence: Synthetic oligonucleotide
cugacucaccagggaggca

SEQ ID NO: 2701768 - RNA, 19 nt, Artificial Sequence
  Description of Artificial Sequence: Synthetic oligonucleotide
aggcugcaucccaggccag

SEQ ID NO: 2701769 - RNA, 19 nt, Artificial Sequence
  Description of Artificial Sequence: Synthetic oligonucleotide
cacccaguucgaauuucuu

SEQ ID NO: 2701770 - RNA, 19 nt, Artificial Sequence
  Description of Artificial Sequence: Synthetic oligonucleotide
gagcccgggcggaggcggc

SEQ ID NO: 2701771 - RNA, 19 nt, Artificial Sequence
  Description of Artificial Sequence: Synthetic oligonucleotide
caggcugcccggagaacau

SEQ ID NO: 2701772 - RNA, 19 nt, Artificial Sequence
  Description of Artificial Sequence: Synthetic oligonucleotide
ccaaggagcccugagggau

SEQ ID NO: 2701773 - RNA, 19 nt, Artificial Sequence
  Description of Artificial Sequence: Synthetic oligonucleotide
ggcugcaucccaggccaga

SEQ ID NO: 2701774 - RNA, 19 nt, Artificial Sequence
  Description of Artificial Sequence: Synthetic oligonucleotide
gcgcaucuuuccgcugcag

SEQ ID NO: 2701775 - RNA, 19 nt, Artificial Sequence
  Description of Artificial Sequence: Synthetic oligonucleotide
ccaugucuuuaaggaaaga

SEQ ID NO: 2701776 - RNA, 19 nt, Artificial Sequence
  Description of Artificial Sequence: Synthetic oligonucleotide
ccaagagaccccgccaugu

SEQ ID NO: 2701777 - RNA, 19 nt, Artificial Sequence
  Description of Artificial Sequence: Synthetic oligonucleotide
ccuggccugggagcccggg

SEQ ID NO: 2701778 - RNA, 19 nt, Artificial Sequence
  Description of Artificial Sequence: Synthetic oligonucleotide
ccagugccucagcuuuguc

SEQ ID NO: 2701779 - RNA, 19 nt, Artificial Sequence
  Description of Artificial Sequence: Synthetic oligonucleotide
cccggcgcugcuugcagaa

SEQ ID NO: 2701780 - RNA, 19 nt, Artificial Sequence
  Description of Artificial Sequence: Synthetic oligonucleotide
gcgcugcuugcagaagcga

SEQ ID NO: 2701781 - RNA, 19 nt, Artificial Sequence
  Description of Artificial Sequence: Synthetic oligonucleotide
ggucggcuucagaggugca

SEQ ID NO: 2701782 - RNA, 19 nt, Artificial Sequence
  Description of Artificial Sequence: Synthetic oligonucleotide
ccggcgcugcuugcagaag

SEQ ID NO: 2701783 - RNA, 19 nt, Artificial Sequence
  Description of Artificial Sequence: Synthetic oligonucleotide
cgggcggaggcggcugggg

SEQ ID NO: 2701784 - RNA, 19 nt, Artificial Sequence
  Description of Artificial Sequence: Synthetic oligonucleotide
gcccgggcggaggcggcug

SEQ ID NO: 2701785 - RNA, 19 nt, Artificial Sequence
  Description of Artificial Sequence: Synthetic oligonucleotide
ccccggcgcugcuugcaga

SEQ ID NO: 2701786 - RNA, 19 nt, Artificial Sequence
  Description of Artificial Sequence: Synthetic oligonucleotide
ccaggccagagugcucuua

SEQ ID NO: 2701787 - RNA, 19 nt, Artificial Sequence
  Description of Artificial Sequence: Synthetic oligonucleotide
gcaggacuauaggcugcau

SEQ ID NO: 2701788 - RNA, 19 nt, Artificial Sequence
  Description of Artificial Sequence: Synthetic oligonucleotide
cguccaccaaagugcuguu

SEQ ID NO: 2701789 - RNA, 19 nt, Artificial Sequence
  Description of Artificial Sequence: Synthetic oligonucleotide
uacacuggaauccaaaugg

SEQ ID NO: 2701790 - RNA, 19 nt, Artificial Sequence
  Description of Artificial Sequence: Synthetic oligonucleotide
ugcacauucaaugugaagg

SEQ ID NO: 2701791 - RNA, 19 nt, Artificial Sequence
  Description of Artificial Sequence: Synthetic oligonucleotide
aaccacaauuuucuuagcc

SEQ ID NO: 2701792 - RNA, 19 nt, Artificial Sequence
  Description of Artificial Sequence: Synthetic oligonucleotide
agaaccacaauuuucuuag

SEQ ID NO: 2701793 - RNA, 19 nt, Artificial Sequence
  Description of Artificial Sequence: Synthetic oligonucleotide
ucuaguuuagagcuuccgg

SEQ ID NO: 2701794 - RNA, 19 nt, Artificial Sequence
  Description of Artificial Sequence: Synthetic oligonucleotide
uccuuuauguccaugggcc

SEQ ID NO: 2701795 - RNA, 19 nt, Artificial Sequence
  Description of Artificial Sequence: Synthetic oligonucleotide
agagaucaugaccacauac

SEQ ID NO: 2701796 - RNA, 19 nt, Artificial Sequence
  Description of Artificial Sequence: Synthetic oligonucleotide
cuaguuuagagcuuccggg

SEQ ID NO: 2701797 - RNA, 19 nt, Artificial Sequence
  Description of Artificial Sequence: Synthetic oligonucleotide
uuugccaagacucgaaggu

SEQ ID NO: 2701798 - RNA, 19 nt, Artificial Sequence
  Description of Artificial Sequence: Synthetic oligonucleotide
agaucaugaccacauacuc

SEQ ID NO: 2701799 - RNA, 19 nt, Artificial Sequence
  Description of Artificial Sequence: Synthetic oligonucleotide
uuccgggugaucuucaggg

SEQ ID NO: 2701800 - RNA, 19 nt, Artificial Sequence
  Description of Artificial Sequence: Synthetic oligonucleotide
agggaauacacuggaaucc

SEQ ID NO: 2701801 - RNA, 19 nt, Artificial Sequence
  Description of Artificial Sequence: Synthetic oligonucleotide
ugaccucagaguauucugg

SEQ ID NO: 2701802 - RNA, 19 nt, Artificial Sequence
  Description of Artificial Sequence: Synthetic oligonucleotide
gugaucuucauccaucuug

SEQ ID NO: 2701803 - RNA, 19 nt, Artificial Sequence
  Description of Artificial Sequence: Synthetic oligonucleotide
agaguauucugggagcugc

SEQ ID NO: 2701804 - RNA, 19 nt, Artificial Sequence
  Description of Artificial Sequence: Synthetic oligonucleotide
uguucaggaacagagggug

SEQ ID NO: 2701805 - RNA, 19 nt, Artificial Sequence
  Description of Artificial Sequence: Synthetic oligonucleotide
ucuugaaaagcugaccuca

SEQ ID NO: 2701806 - RNA, 19 nt, Artificial Sequence
  Description of Artificial Sequence: Synthetic oligonucleotide
uaccucugggcccagaacc

SEQ ID NO: 2701807 - RNA, 19 nt, Artificial Sequence
  Description of Artificial Sequence: Synthetic oligonucleotide
ucagagaucaugaccacau

SEQ ID NO: 2701808 - RNA, 19 nt, Artificial Sequence
  Description of Artificial Sequence: Synthetic oligonucleotide
gaagggagagccuuggaac

SEQ ID NO: 2701809 - RNA, 19 nt, Artificial Sequence
  Description of Artificial Sequence: Synthetic oligonucleotide
aaccucgccaucaucuugc

SEQ ID NO: 2701810 - RNA, 19 nt, Artificial Sequence
  Description of Artificial Sequence: Synthetic oligonucleotide
auagggaauacacuggaau

SEQ ID NO: 2701811 - RNA, 19 nt, Artificial Sequence
  Description of Artificial Sequence: Synthetic oligonucleotide
cagaggauagggaauacac

SEQ ID NO: 2701812 - RNA, 19 nt, Artificial Sequence
  Description of Artificial Sequence: Synthetic oligonucleotide
gguguuugaaggcaguggg

SEQ ID NO: 2701813 - RNA, 19 nt, Artificial Sequence
  Description of Artificial Sequence: Synthetic oligonucleotide
uggccucuaguuuagagcu

SEQ ID NO: 2701814 - RNA, 19 nt, Artificial Sequence
  Description of Artificial Sequence: Synthetic oligonucleotide
auacacuggaauccaaaug

SEQ ID NO: 2701815 - RNA, 19 nt, Artificial Sequence
  Description of Artificial Sequence: Synthetic oligonucleotide
uauucugggagcugcacgu

SEQ ID NO: 2701816 - RNA, 19 nt, Artificial Sequence
  Description of Artificial Sequence: Synthetic oligonucleotide
accacaauuuucuuagccu

SEQ ID NO: 2701817 - RNA, 19 nt, Artificial Sequence
  Description of Artificial Sequence: Synthetic oligonucleotide
cuuccaguaccucugggcc

SEQ ID NO: 2701818 - RNA, 19 nt, Artificial Sequence
  Description of Artificial Sequence: Synthetic oligonucleotide
ucuuugccaagacucgaag

SEQ ID NO: 2701819 - RNA, 19 nt, Artificial Sequence
  Description of Artificial Sequence: Synthetic oligonucleotide
ucccucuuugccaagacuc

SEQ ID NO: 2701820 - RNA, 19 nt, Artificial Sequence
  Description of Artificial Sequence: Synthetic oligonucleotide
cuuugccaagacucgaagg

SEQ ID NO: 2701821 - RNA, 19 nt, Artificial Sequence
  Description of Artificial Sequence: Synthetic oligonucleotide
uggaguggucucaucagag

SEQ ID NO: 2701822 - RNA, 19 nt, Artificial Sequence
  Description of Artificial Sequence: Synthetic oligonucleotide
auguccaugggccaggagu

SEQ ID NO: 2701823 - RNA, 19 nt, Artificial Sequence
  Description of Artificial Sequence: Synthetic oligonucleotide
aucuugaaaagcugaccuc

SEQ ID NO: 2701824 - RNA, 19 nt, Artificial Sequence
  Description of Artificial Sequence: Synthetic oligonucleotide
aagggagagccuuggaaca

SEQ ID NO: 2701825 - RNA, 19 nt, Artificial Sequence
  Description of Artificial Sequence: Synthetic oligonucleotide
uguccaugggccaggagug

SEQ ID NO: 2701826 - RNA, 19 nt, Artificial Sequence
  Description of Artificial Sequence: Synthetic oligonucleotide
gcuguucaggaacagaggg

SEQ ID NO: 2701827 - RNA, 19 nt, Artificial Sequence
  Description of Artificial Sequence: Synthetic oligonucleotide
gugaucuucagggacgugg

SEQ ID NO: 2701828 - RNA, 19 nt, Artificial Sequence
  Description of Artificial Sequence: Synthetic oligonucleotide
gaccucagaguauucuggg

SEQ ID NO: 2701829 - RNA, 19 nt, Artificial Sequence
  Description of Artificial Sequence: Synthetic oligonucleotide
ugaagggagagccuuggaa

SEQ ID NO: 2701830 - RNA, 19 nt, Artificial Sequence
  Description of Artificial Sequence: Synthetic oligonucleotide
guauucugggagcugcacg

SEQ ID NO: 2701831 - RNA, 19 nt, Artificial Sequence
  Description of Artificial Sequence: Synthetic oligonucleotide
uaugcagagguugauggcu

SEQ ID NO: 2701832 - RNA, 19 nt, Artificial Sequence
  Description of Artificial Sequence: Synthetic oligonucleotide
ugguggaguggucucauca

SEQ ID NO: 2701833 - RNA, 19 nt, Artificial Sequence
  Description of Artificial Sequence: Synthetic oligonucleotide
acauucaaugugaagggag

SEQ ID NO: 2701834 - RNA, 19 nt, Artificial Sequence
  Description of Artificial Sequence: Synthetic oligonucleotide
uuuauugaaguggguagcu

SEQ ID NO: 2701835 - RNA, 19 nt, Artificial Sequence
  Description of Artificial Sequence: Synthetic oligonucleotide
ccaaauggugucucgaugg

SEQ ID NO: 2701836 - RNA, 19 nt, Artificial Sequence
  Description of Artificial Sequence: Synthetic oligonucleotide
uaguuuagagcuuccgggu

SEQ ID NO: 2701837 - RNA, 19 nt, Artificial Sequence
  Description of Artificial Sequence: Synthetic oligonucleotide
caugugaucuucauccauc

SEQ ID NO: 2701838 - RNA, 19 nt, Artificial Sequence
  Description of Artificial Sequence: Synthetic oligonucleotide
uuuauguccaugggccagg

SEQ ID NO: 2701839 - RNA, 19 nt, Artificial Sequence
  Description of Artificial Sequence: Synthetic oligonucleotide
aaugugaagggagagccuu

SEQ ID NO: 2701840 - RNA, 19 nt, Artificial Sequence
  Description of Artificial Sequence: Synthetic oligonucleotide
cucagaguauucugggagc

SEQ ID NO: 2701841 - RNA, 19 nt, Artificial Sequence
  Description of Artificial Sequence: Synthetic oligonucleotide
ugaaguggguagcugugga

SEQ ID NO: 2701842 - RNA, 19 nt, Artificial Sequence
  Description of Artificial Sequence: Synthetic oligonucleotide
caugagccucuauucaggg

SEQ ID NO: 2701843 - RNA, 19 nt, Artificial Sequence
  Description of Artificial Sequence: Synthetic oligonucleotide
cuccuuuauguccaugggc

SEQ ID NO: 2701844 - RNA, 19 nt, Artificial Sequence
  Description of Artificial Sequence: Synthetic oligonucleotide
aguuuagagcuuccgggug

SEQ ID NO: 2701845 - RNA, 19 nt, Artificial Sequence
  Description of Artificial Sequence: Synthetic oligonucleotide
ucacuuguggcaaccucgc

SEQ ID NO: 2701846 - RNA, 19 nt, Artificial Sequence
  Description of Artificial Sequence: Synthetic oligonucleotide
ugugaagggagagccuugg

SEQ ID NO: 2701847 - RNA, 19 nt, Artificial Sequence
  Description of Artificial Sequence: Synthetic oligonucleotide
aguggccucuaguuuagag

SEQ ID NO: 2701848 - RNA, 19 nt, Artificial Sequence
  Description of Artificial Sequence: Synthetic oligonucleotide
uuugaaggcagugggcagc

SEQ ID NO: 2701849 - RNA, 19 nt, Artificial Sequence
  Description of Artificial Sequence: Synthetic oligonucleotide
uugaaaagcugaccucaga

SEQ ID NO: 2701850 - RNA, 19 nt, Artificial Sequence
  Description of Artificial Sequence: Synthetic oligonucleotide
cuugaaaagcugaccucag

SEQ ID NO: 2701851 - RNA, 19 nt, Artificial Sequence
  Description of Artificial Sequence: Synthetic oligonucleotide
guggccucuaguuuagagc

SEQ ID NO: 2701852 - RNA, 19 nt, Artificial Sequence
  Description of Artificial Sequence: Synthetic oligonucleotide
gaaguggguagcuguggag

SEQ ID NO: 2701853 - RNA, 19 nt, Artificial Sequence
  Description of Artificial Sequence: Synthetic oligonucleotide
cuucauccaucuugaaaag

SEQ ID NO: 2701854 - RNA, 19 nt, Artificial Sequence
  Description of Artificial Sequence: Synthetic oligonucleotide
cuggaauccaaaugguguc

SEQ ID NO: 2701855 - RNA, 19 nt, Artificial Sequence
  Description of Artificial Sequence: Synthetic oligonucleotide
ucaggauccggccacucuc

SEQ ID NO: 2701856 - RNA, 19 nt, Artificial Sequence
  Description of Artificial Sequence: Synthetic oligonucleotide
cucgaagguguuugaaggc

SEQ ID NO: 2701857 - RNA, 19 nt, Artificial Sequence
  Description of Artificial Sequence: Synthetic oligonucleotide
caaauggugucucgauggg

SEQ ID NO: 2701858 - RNA, 19 nt, Artificial Sequence
  Description of Artificial Sequence: Synthetic oligonucleotide
uugaaguggguagcugugg

SEQ ID NO: 2701859 - RNA, 19 nt, Artificial Sequence
  Description of Artificial Sequence: Synthetic oligonucleotide
auucaaugugaagggagag

SEQ ID NO: 2701860 - RNA, 19 nt, Artificial Sequence
  Description of Artificial Sequence: Synthetic oligonucleotide
agccuuggaacacuuccag

SEQ ID NO: 2701861 - RNA, 19 nt, Artificial Sequence
  Description of Artificial Sequence: Synthetic oligonucleotide
uugagggugcucuuggcuc

SEQ ID NO: 2701862 - RNA, 19 nt, Artificial Sequence
  Description of Artificial Sequence: Synthetic oligonucleotide
accacauacuccccuaggu

SEQ ID NO: 2701863 - RNA, 19 nt, Artificial Sequence
  Description of Artificial Sequence: Synthetic oligonucleotide
cuggcugucccucuuugcc

SEQ ID NO: 2701864 - RNA, 19 nt, Artificial Sequence
  Description of Artificial Sequence: Synthetic oligonucleotide
uugauggcucuucugcagu

SEQ ID NO: 2701865 - RNA, 19 nt, Artificial Sequence
  Description of Artificial Sequence: Synthetic oligonucleotide
caagacucgaagguguuug

SEQ ID NO: 2701866 - RNA, 19 nt, Artificial Sequence
  Description of Artificial Sequence: Synthetic oligonucleotide
ugcucuuggcuccuuuaug

SEQ ID NO: 2701867 - RNA, 19 nt, Artificial Sequence
  Description of Artificial Sequence: Synthetic oligonucleotide
accugcugagaucuucagg

SEQ ID NO: 2701868 - RNA, 19 nt, Artificial Sequence
  Description of Artificial Sequence: Synthetic oligonucleotide
aggauagggaauacacugg

SEQ ID NO: 2701869 - RNA, 19 nt, Artificial Sequence
  Description of Artificial Sequence: Synthetic oligonucleotide
gaaggcagugggcagccug

SEQ ID NO: 2701870 - RNA, 19 nt, Artificial Sequence
  Description of Artificial Sequence: Synthetic oligonucleotide
ucgaagguguuugaaggca

SEQ ID NO: 2701871 - RNA, 19 nt, Artificial Sequence
  Description of Artificial Sequence: Synthetic oligonucleotide
uuauugaaguggguagcug

SEQ ID NO: 2701872 - RNA, 19 nt, Artificial Sequence
  Description of Artificial Sequence: Synthetic oligonucleotide
agguguuugaaggcagugg

SEQ ID NO: 2701873 - RNA, 19 nt, Artificial Sequence
  Description of Artificial Sequence: Synthetic oligonucleotide
aguauucugggagcugcac

SEQ ID NO: 2701874 - RNA, 19 nt, Artificial Sequence
  Description of Artificial Sequence: Synthetic oligonucleotide
ucuugcugcagcugcacau

SEQ ID NO: 2701875 - RNA, 19 nt, Artificial Sequence
  Description of Artificial Sequence: Synthetic oligonucleotide
cacuggaauccaaauggug

SEQ ID NO: 2701876 - RNA, 19 nt, Artificial Sequence
  Description of Artificial Sequence: Synthetic oligonucleotide
uggacagaggauagggaau

SEQ ID NO: 2701877 - RNA, 19 nt, Artificial Sequence
  Description of Artificial Sequence: Synthetic oligonucleotide
ugcagucccaucaggccug

SEQ ID NO: 2701878 - RNA, 19 nt, Artificial Sequence
  Description of Artificial Sequence: Synthetic oligonucleotide
uacuccccuagguaugcag

SEQ ID NO: 2701879 - RNA, 19 nt, Artificial Sequence
  Description of Artificial Sequence: Synthetic oligonucleotide
gagggugugcucccugggg

SEQ ID NO: 2701880 - RNA, 19 nt, Artificial Sequence
  Description of Artificial Sequence: Synthetic oligonucleotide
ucagaguauucugggagcu

SEQ ID NO: 2701881 - RNA, 19 nt, Artificial Sequence
  Description of Artificial Sequence: Synthetic oligonucleotide
cuuuauguccaugggccag

SEQ ID NO: 2701882 - RNA, 19 nt, Artificial Sequence
  Description of Artificial Sequence: Synthetic oligonucleotide
cucuauucaggggagggug

SEQ ID NO: 2701883 - RNA, 19 nt, Artificial Sequence
  Description of Artificial Sequence: Synthetic oligonucleotide
uguggcaaccucgccauca

SEQ ID NO: 2701884 - RNA, 19 nt, Artificial Sequence
  Description of Artificial Sequence: Synthetic oligonucleotide
ucucaucagagaucaugac

SEQ ID NO: 2701885 - RNA, 19 nt, Artificial Sequence
  Description of Artificial Sequence: Synthetic oligonucleotide
gaucuucagggacgugggg

SEQ ID NO: 2701886 - RNA, 19 nt, Artificial Sequence
  Description of Artificial Sequence: Synthetic oligonucleotide
caucuugaaaagcugaccu

SEQ ID NO: 2701887 - RNA, 19 nt, Artificial Sequence
  Description of Artificial Sequence: Synthetic oligonucleotide
acgagggccagcucccaac

SEQ ID NO: 2701888 - RNA, 19 nt, Artificial Sequence
  Description of Artificial Sequence: Synthetic oligonucleotide
ucaucuugcugcagcugca

SEQ ID NO: 2701889 - RNA, 19 nt, Artificial Sequence
  Description of Artificial Sequence: Synthetic oligonucleotide
acguaucugacaccugcug

SEQ ID NO: 2701890 - RNA, 19 nt, Artificial Sequence
  Description of Artificial Sequence: Synthetic oligonucleotide
guggucucaucagagauca

SEQ ID NO: 2701891 - RNA, 19 nt, Artificial Sequence
  Description of Artificial Sequence: Synthetic oligonucleotide
cucuaguuuagagcuuccg

SEQ ID NO: 2701892 - RNA, 19 nt, Artificial Sequence
  Description of Artificial Sequence: Synthetic oligonucleotide
aggaguggccucuaguuua

SEQ ID NO: 2701893 - RNA, 19 nt, Artificial Sequence
  Description of Artificial Sequence: Synthetic oligonucleotide
ucgaugggcuccuccaugu

SEQ ID NO: 2701894 - RNA, 19 nt, Artificial Sequence
  Description of Artificial Sequence: Synthetic oligonucleotide
ggaacagagggugugcucc

SEQ ID NO: 2701895 - RNA, 19 nt, Artificial Sequence
  Description of Artificial Sequence: Synthetic oligonucleotide
gaugggcuccuccauguga

SEQ ID NO: 2701896 - RNA, 19 nt, Artificial Sequence
  Description of Artificial Sequence: Synthetic oligonucleotide
acucccaggcuguucagga

SEQ ID NO: 2701897 - RNA, 19 nt, Artificial Sequence
  Description of Artificial Sequence: Synthetic oligonucleotide
ccacaauuuucuuagccug

SEQ ID NO: 2701898 - RNA, 19 nt, Artificial Sequence
  Description of Artificial Sequence: Synthetic oligonucleotide
cuagguaugcagagguuga

SEQ ID NO: 2701899 - RNA, 19 nt, Artificial Sequence
  Description of Artificial Sequence: Synthetic oligonucleotide
auugaaguggguagcugug

SEQ ID NO: 2701900 - RNA, 19 nt, Artificial Sequence
  Description of Artificial Sequence: Synthetic oligonucleotide
gucucaucagagaucauga

SEQ ID NO: 2701901 - RNA, 19 nt, Artificial Sequence
  Description of Artificial Sequence: Synthetic oligonucleotide
agagguugauggcucuucu

SEQ ID NO: 2701902 - RNA, 19 nt, Artificial Sequence
  Description of Artificial Sequence: Synthetic oligonucleotide
uucaggauccggccacucu

SEQ ID NO: 2701903 - RNA, 19 nt, Artificial Sequence
  Description of Artificial Sequence: Synthetic oligonucleotide
gaaccacaauuuucuuagc

SEQ ID NO: 2701904 - RNA, 19 nt, Artificial Sequence
  Description of Artificial Sequence: Synthetic oligonucleotide
cuuccgggugaucuucagg

SEQ ID NO: 2701905 - RNA, 19 nt, Artificial Sequence
  Description of Artificial Sequence: Synthetic oligonucleotide
agagggugugcucccuggg

SEQ ID NO: 2701906 - RNA, 19 nt, Artificial Sequence
  Description of Artificial Sequence: Synthetic oligonucleotide
ucaggaacagagggugugc

SEQ ID NO: 2701907 - RNA, 19 nt, Artificial Sequence
  Description of Artificial Sequence: Synthetic oligonucleotide
ucuugagggugcucuuggc

SEQ ID NO: 2701908 - RNA, 19 nt, Artificial Sequence
  Description of Artificial Sequence: Synthetic oligonucleotide
ccucagaguauucugggag

SEQ ID NO: 2701909 - RNA, 19 nt, Artificial Sequence
  Description of Artificial Sequence: Synthetic oligonucleotide
aggaaugguggaguggucu

SEQ ID NO: 2701910 - RNA, 19 nt, Artificial Sequence
  Description of Artificial Sequence: Synthetic oligonucleotide
ggucucaucagagaucaug

SEQ ID NO: 2701911 - RNA, 19 nt, Artificial Sequence
  Description of Artificial Sequence: Synthetic oligonucleotide
uggaauccaaauggugucu

SEQ ID NO: 2701912 - RNA, 19 nt, Artificial Sequence
  Description of Artificial Sequence: Synthetic oligonucleotide
gaacagagggugugcuccc

SEQ ID NO: 2701913 - RNA, 19 nt, Artificial Sequence
  Description of Artificial Sequence: Synthetic oligonucleotide
gcacguaucugacaccugc

SEQ ID NO: 2701914 - RNA, 19 nt, Artificial Sequence
  Description of Artificial Sequence: Synthetic oligonucleotide
cuccccuagguaugcagag

SEQ ID NO: 2701915 - RNA, 19 nt, Artificial Sequence
  Description of Artificial Sequence: Synthetic oligonucleotide
aaagcugaccucagaguau

SEQ ID NO: 2701916 - RNA, 19 nt, Artificial Sequence
  Description of Artificial Sequence: Synthetic oligonucleotide
cucacgagggccagcuccc

SEQ ID NO: 2701917 - RNA, 19 nt, Artificial Sequence
  Description of Artificial Sequence: Synthetic oligonucleotide
ucaugaccacauacucccc

SEQ ID NO: 2701918 - RNA, 19 nt, Artificial Sequence
  Description of Artificial Sequence: Synthetic oligonucleotide
gagaucaugaccacauacu

SEQ ID NO: 2701919 - RNA, 19 nt, Artificial Sequence
  Description of Artificial Sequence: Synthetic oligonucleotide
ucugggagcugcacguauc

SEQ ID NO: 2701920 - RNA, 19 nt, Artificial Sequence
  Description of Artificial Sequence: Synthetic oligonucleotide
agaggauagggaauacacu

SEQ ID NO: 2701921 - RNA, 19 nt, Artificial Sequence
  Description of Artificial Sequence: Synthetic oligonucleotide
cauacuccccuagguaugc

SEQ ID NO: 2701922 - RNA, 19 nt, Artificial Sequence
  Description of Artificial Sequence: Synthetic oligonucleotide
gguggaguggucucaucag

SEQ ID NO: 2701923 - RNA, 19 nt, Artificial Sequence
  Description of Artificial Sequence: Synthetic oligonucleotide
cagagggugugcucccugg

SEQ ID NO: 2701924 - RNA, 19 nt, Artificial Sequence
  Description of Artificial Sequence: Synthetic oligonucleotide
agcugcacauucaauguga

SEQ ID NO: 2701925 - RNA, 19 nt, Artificial Sequence
  Description of Artificial Sequence: Synthetic oligonucleotide
ggauagggaauacacugga

SEQ ID NO: 2701926 - RNA, 19 nt, Artificial Sequence
  Description of Artificial Sequence: Synthetic oligonucleotide
aaugguggaguggucucau

SEQ ID NO: 2701927 - RNA, 19 nt, Artificial Sequence
  Description of Artificial Sequence: Synthetic oligonucleotide
gacguggggccccuggcug

SEQ ID NO: 2701928 - RNA, 19 nt, Artificial Sequence
  Description of Artificial Sequence: Synthetic oligonucleotide
agggagagccuuggaacac

SEQ ID NO: 2701929 - RNA, 19 nt, Artificial Sequence
  Description of Artificial Sequence: Synthetic oligonucleotide
uccccuagguaugcagagg

SEQ ID NO: 2701930 - RNA, 19 nt, Artificial Sequence
  Description of Artificial Sequence: Synthetic oligonucleotide
aagcugaccucagaguauu

SEQ ID NO: 2701931 - RNA, 19 nt, Artificial Sequence
  Description of Artificial Sequence: Synthetic oligonucleotide
gucccaucaggccuggaca

SEQ ID NO: 2701932 - RNA, 19 nt, Artificial Sequence
  Description of Artificial Sequence: Synthetic oligonucleotide
acagaggauagggaauaca

SEQ ID NO: 2701933 - RNA, 19 nt, Artificial Sequence
  Description of Artificial Sequence: Synthetic oligonucleotide
gcagcaugagccucuauuc

SEQ ID NO: 2701934 - RNA, 19 nt, Artificial Sequence
  Description of Artificial Sequence: Synthetic oligonucleotide
ugauggcucuucugcaguc

SEQ ID NO: 2701935 - RNA, 19 nt, Artificial Sequence
  Description of Artificial Sequence: Synthetic oligonucleotide
uucugggagcugcacguau

SEQ ID NO: 2701936 - RNA, 19 nt, Artificial Sequence
  Description of Artificial Sequence: Synthetic oligonucleotide
aucagagaucaugaccaca

SEQ ID NO: 2701937 - RNA, 19 nt, Artificial Sequence
  Description of Artificial Sequence: Synthetic oligonucleotide
gaguggucucaucagagau

SEQ ID NO: 2701938 - RNA, 19 nt, Artificial Sequence
  Description of Artificial Sequence: Synthetic oligonucleotide
augcagagguugauggcuc

SEQ ID NO: 2701939 - RNA, 19 nt, Artificial Sequence
  Description of Artificial Sequence: Synthetic oligonucleotide
aggauccggccacucucac

SEQ ID NO: 2701940 - RNA, 19 nt, Artificial Sequence
  Description of Artificial Sequence: Synthetic oligonucleotide
ugcagagguugauggcucu

SEQ ID NO: 2701941 - RNA, 19 nt, Artificial Sequence
  Description of Artificial Sequence: Synthetic oligonucleotide
agggacguggggccccugg

SEQ ID NO: 2701942 - RNA, 19 nt, Artificial Sequence
  Description of Artificial Sequence: Synthetic oligonucleotide
gaggguggcccucucuuga

SEQ ID NO: 2701943 - RNA, 19 nt, Artificial Sequence
  Description of Artificial Sequence: Synthetic oligonucleotide
acauacuccccuagguaug

SEQ ID NO: 2701944 - RNA, 19 nt, Artificial Sequence
  Description of Artificial Sequence: Synthetic oligonucleotide
caucaggccuggacagagg

SEQ ID NO: 2701945 - RNA, 19 nt, Artificial Sequence
  Description of Artificial Sequence: Synthetic oligonucleotide
aaggcagugggcagccugu

SEQ ID NO: 2701946 - RNA, 19 nt, Artificial Sequence
  Description of Artificial Sequence: Synthetic oligonucleotide
caaccucgccaucaucuug

SEQ ID NO: 2701947 - RNA, 19 nt, Artificial Sequence
  Description of Artificial Sequence: Synthetic oligonucleotide
ugcacguaucugacaccug

SEQ ID NO: 2701948 - RNA, 19 nt, Artificial Sequence
  Description of Artificial Sequence: Synthetic oligonucleotide
cucgaugggcuccuccaug

SEQ ID NO: 2701949 - RNA, 19 nt, Artificial Sequence
  Description of Artificial Sequence: Synthetic oligonucleotide
gucucgaugggcuccucca

SEQ ID NO: 2701950 - RNA, 19 nt, Artificial Sequence
  Description of Artificial Sequence: Synthetic oligonucleotide
uggugucucgaugggcucc

SEQ ID NO: 2701951 - RNA, 19 nt, Artificial Sequence
  Description of Artificial Sequence: Synthetic oligonucleotide
gcaugagccucuauucagg

SEQ ID NO: 2701952 - RNA, 19 nt, Artificial Sequence
  Description of Artificial Sequence: Synthetic oligonucleotide
guguuugaaggcagugggc

SEQ ID NO: 2701953 - RNA, 19 nt, Artificial Sequence
  Description of Artificial Sequence: Synthetic oligonucleotide
cacuuccaguaccucuggg

SEQ ID NO: 2701954 - RNA, 19 nt, Artificial Sequence
  Description of Artificial Sequence: Synthetic oligonucleotide
ccuagguaugcagagguug

SEQ ID NO: 2701955 - RNA, 19 nt, Artificial Sequence
  Description of Artificial Sequence: Synthetic oligonucleotide
uccgggugaucuucaggga

SEQ ID NO: 2701956 - RNA, 19 nt, Artificial Sequence
  Description of Artificial Sequence: Synthetic oligonucleotide
acagagggugugcucccug

SEQ ID NO: 2701957 - RNA, 19 nt, Artificial Sequence
  Description of Artificial Sequence: Synthetic oligonucleotide
gcuguggagcucacgaggg

SEQ ID NO: 2701958 - RNA, 19 nt, Artificial Sequence
  Description of Artificial Sequence: Synthetic oligonucleotide
ucgccaucaucuugcugca

SEQ ID NO: 2701959 - RNA, 19 nt, Artificial Sequence
  Description of Artificial Sequence: Synthetic oligonucleotide
gacaccugcugagaucuuc

SEQ ID NO: 2701960 - RNA, 19 nt, Artificial Sequence
  Description of Artificial Sequence: Synthetic oligonucleotide
guggaguggucucaucaga

SEQ ID NO: 2701961 - RNA, 19 nt, Artificial Sequence
  Description of Artificial Sequence: Synthetic oligonucleotide
augaccacauacuccccua

SEQ ID NO: 2701962 - RNA, 19 nt, Artificial Sequence
  Description of Artificial Sequence: Synthetic oligonucleotide
gggagcugcacguaucuga

SEQ ID NO: 2701963 - RNA, 19 nt, Artificial Sequence
  Description of Artificial Sequence: Synthetic oligonucleotide
uggcccaggaaugguggag

SEQ ID NO: 2701964 - RNA, 19 nt, Artificial Sequence
  Description of Artificial Sequence: Synthetic oligonucleotide
augguggaguggucucauc

SEQ ID NO: 2701965 - RNA, 19 nt, Artificial Sequence
  Description of Artificial Sequence: Synthetic oligonucleotide
gaaugguggaguggucuca

SEQ ID NO: 2701966 - RNA, 19 nt, Artificial Sequence
  Description of Artificial Sequence: Synthetic oligonucleotide
gagccucuauucaggggag

SEQ ID NO: 2701967 - RNA, 19 nt, Artificial Sequence
  Description of Artificial Sequence: Synthetic oligonucleotide
acacuggaauccaaauggu

SEQ ID NO: 2701968 - RNA, 19 nt, Artificial Sequence
  Description of Artificial Sequence: Synthetic oligonucleotide
gguugauggcucuucugca

SEQ ID NO: 2701969 - RNA, 19 nt, Artificial Sequence
  Description of Artificial Sequence: Synthetic oligonucleotide
aggguggcccucucuugag

SEQ ID NO: 2701970 - RNA, 19 nt, Artificial Sequence
  Description of Artificial Sequence: Synthetic oligonucleotide
uuauguccaugggccagga

SEQ ID NO: 2701971 - RNA, 19 nt, Artificial Sequence
  Description of Artificial Sequence: Synthetic oligonucleotide
cagcaugagccucuauuca

SEQ ID NO: 2701972 - RNA, 19 nt, Artificial Sequence
  Description of Artificial Sequence: Synthetic oligonucleotide
ccaucuugaaaagcugacc

SEQ ID NO: 2701973 - RNA, 19 nt, Artificial Sequence
  Description of Artificial Sequence: Synthetic oligonucleotide
gagccuuggaacacuucca

SEQ ID NO: 2701974 - RNA, 19 nt, Artificial Sequence
  Description of Artificial Sequence: Synthetic oligonucleotide
gccucuauucaggggaggg

SEQ ID NO: 2701975 - RNA, 19 nt, Artificial Sequence
  Description of Artificial Sequence: Synthetic oligonucleotide
cuguggagcucacgagggc

SEQ ID NO: 2701976 - RNA, 19 nt, Artificial Sequence
  Description of Artificial Sequence: Synthetic oligonucleotide
ucaggccuggacagaggau

SEQ ID NO: 2701977 - RNA, 19 nt, Artificial Sequence
  Description of Artificial Sequence: Synthetic oligonucleotide
aacagagggugugcucccu

SEQ ID NO: 2701978 - RNA, 19 nt, Artificial Sequence
  Description of Artificial Sequence: Synthetic oligonucleotide
uucaggggaggguggcccu

SEQ ID NO: 2701979 - RNA, 19 nt, Artificial Sequence
  Description of Artificial Sequence: Synthetic oligonucleotide
ggaaugguggaguggucuc

SEQ ID NO: 2701980 - RNA, 19 nt, Artificial Sequence
  Description of Artificial Sequence: Synthetic oligonucleotide
guaccucugggcccagaac

SEQ ID NO: 2701981 - RNA, 19 nt, Artificial Sequence
  Description of Artificial Sequence: Synthetic oligonucleotide
ccuuggaacacuuccagua

SEQ ID NO: 2701982 - RNA, 19 nt, Artificial Sequence
  Description of Artificial Sequence: Synthetic oligonucleotide
cugacaccugcugagaucu

SEQ ID NO: 2701983 - RNA, 19 nt, Artificial Sequence
  Description of Artificial Sequence: Synthetic oligonucleotide
uagguaugcagagguugau

SEQ ID NO: 2701984 - RNA, 19 nt, Artificial Sequence
  Description of Artificial Sequence: Synthetic oligonucleotide
uucagggacguggggcccc

SEQ ID NO: 2701985 - RNA, 19 nt, Artificial Sequence
  Description of Artificial Sequence: Synthetic oligonucleotide
cacuuguggcaaccucgcc

SEQ ID NO: 2701986 - RNA, 19 nt, Artificial Sequence
  Description of Artificial Sequence: Synthetic oligonucleotide
cacauucaaugugaaggga

SEQ ID NO: 2701987 - RNA, 19 nt, Artificial Sequence
  Description of Artificial Sequence: Synthetic oligonucleotide
cuuguggcaaccucgccau

SEQ ID NO: 2701988 - RNA, 19 nt, Artificial Sequence
  Description of Artificial Sequence: Synthetic oligonucleotide
caucuugcugcagcugcac

SEQ ID NO: 2701989 - RNA, 19 nt, Artificial Sequence
  Description of Artificial Sequence: Synthetic oligonucleotide
cagagguugauggcucuuc

SEQ ID NO: 2701990 - RNA, 19 nt, Artificial Sequence
  Description of Artificial Sequence: Synthetic oligonucleotide
ggaguggucucaucagaga

SEQ ID NO: 2701991 - RNA, 19 nt, Artificial Sequence
  Description of Artificial Sequence: Synthetic oligonucleotide
agccucuauucaggggagg

SEQ ID NO: 2701992 - RNA, 19 nt, Artificial Sequence
  Description of Artificial Sequence: Synthetic oligonucleotide
cuugagggugcucuuggcu

SEQ ID NO: 2701993 - RNA, 19 nt, Artificial Sequence
  Description of Artificial Sequence: Synthetic oligonucleotide
gggaauacacuggaaucca

SEQ ID NO: 2701994 - RNA, 19 nt, Artificial Sequence
  Description of Artificial Sequence: Synthetic oligonucleotide
gcucuuggcuccuuuaugu

SEQ ID NO: 2701995 - RNA, 19 nt, Artificial Sequence
  Description of Artificial Sequence: Synthetic oligonucleotide
aggccuggacagaggauag

SEQ ID NO: 2701996 - RNA, 19 nt, Artificial Sequence
  Description of Artificial Sequence: Synthetic oligonucleotide
cagaguauucugggagcug

SEQ ID NO: 2701997 - RNA, 19 nt, Artificial Sequence
  Description of Artificial Sequence: Synthetic oligonucleotide
cacucucacuuguggcaac

SEQ ID NO: 2701998 - RNA, 19 nt, Artificial Sequence
  Description of Artificial Sequence: Synthetic oligonucleotide
augugaagggagagccuug

SEQ ID NO: 2701999 - RNA, 19 nt, Artificial Sequence
  Description of Artificial Sequence: Synthetic oligonucleotide
cgaagguguuugaaggcag

SEQ ID NO: 2702000 - RNA, 19 nt, Artificial Sequence
  Description of Artificial Sequence: Synthetic oligonucleotide
ugggagcugcacguaucug

SEQ ID NO: 2702001 - RNA, 19 nt, Artificial Sequence
  Description of Artificial Sequence: Synthetic oligonucleotide
caacucccaggcuguucag

SEQ ID NO: 2702002 - RNA, 19 nt, Artificial Sequence
  Description of Artificial Sequence: Synthetic oligonucleotide
cuguucaggaacagagggu

SEQ ID NO: 2702003 - RNA, 19 nt, Artificial Sequence
  Description of Artificial Sequence: Synthetic oligonucleotide
ggaauccaaauggugucuc

SEQ ID NO: 2702004 - RNA, 19 nt, Artificial Sequence
  Description of Artificial Sequence: Synthetic oligonucleotide
agcucacgagggccagcuc

SEQ ID NO: 2702005 - RNA, 19 nt, Artificial Sequence
  Description of Artificial Sequence: Synthetic oligonucleotide
uggggccccuggcuguccc

SEQ ID NO: 2702006 - RNA, 19 nt, Artificial Sequence
  Description of Artificial Sequence: Synthetic oligonucleotide
uggcaaccucgccaucauc

SEQ ID NO: 2702007 - RNA, 19 nt, Artificial Sequence
  Description of Artificial Sequence: Synthetic oligonucleotide
guccaugggccaggagugg

SEQ ID NO: 2702008 - RNA, 19 nt, Artificial Sequence
  Description of Artificial Sequence: Synthetic oligonucleotide
gaagguguuugaaggcagu

SEQ ID NO: 2702009 - RNA, 19 nt, Artificial Sequence
  Description of Artificial Sequence: Synthetic oligonucleotide
ggaguggccucuaguuuag

SEQ ID NO: 2702010 - RNA, 19 nt, Artificial Sequence
  Description of Artificial Sequence: Synthetic oligonucleotide
caggauccggccacucuca

SEQ ID NO: 2702011 - RNA, 19 nt, Artificial Sequence
  Description of Artificial Sequence: Synthetic oligonucleotide
caggaaugguggagugguc

SEQ ID NO: 2702012 - RNA, 19 nt, Artificial Sequence
  Description of Artificial Sequence: Synthetic oligonucleotide
ccgggugaucuucagggac

SEQ ID NO: 2702013 - RNA, 19 nt, Artificial Sequence
  Description of Artificial Sequence: Synthetic oligonucleotide
caggccuggacagaggaua

SEQ ID NO: 2702014 - RNA, 19 nt, Artificial Sequence
  Description of Artificial Sequence: Synthetic oligonucleotide
cagccuguggcccaggaau

SEQ ID NO: 2702015 - RNA, 19 nt, Artificial Sequence
  Description of Artificial Sequence: Synthetic oligonucleotide
accucugggcccagaacca

SEQ ID NO: 2702016 - RNA, 19 nt, Artificial Sequence
  Description of Artificial Sequence: Synthetic oligonucleotide
ggaggguggcccucucuug

SEQ ID NO: 2702017 - RNA, 19 nt, Artificial Sequence
  Description of Artificial Sequence: Synthetic oligonucleotide
gccucuaguuuagagcuuc

SEQ ID NO: 2702018 - RNA, 19 nt, Artificial Sequence
  Description of Artificial Sequence: Synthetic oligonucleotide
ggcaaccucgccaucaucu

SEQ ID NO: 2702019 - RNA, 19 nt, Artificial Sequence
  Description of Artificial Sequence: Synthetic oligonucleotide
gugaagggagagccuugga

SEQ ID NO: 2702020 - RNA, 19 nt, Artificial Sequence
  Description of Artificial Sequence: Synthetic oligonucleotide
ccucuaguuuagagcuucc

SEQ ID NO: 2702021 - RNA, 19 nt, Artificial Sequence
  Description of Artificial Sequence: Synthetic oligonucleotide
agcugaccucagaguauuc

SEQ ID NO: 2702022 - RNA, 19 nt, Artificial Sequence
  Description of Artificial Sequence: Synthetic oligonucleotide
cugcacguaucugacaccu

SEQ ID NO: 2702023 - RNA, 19 nt, Artificial Sequence
  Description of Artificial Sequence: Synthetic oligonucleotide
acguggggccccuggcugu

SEQ ID NO: 2702024 - RNA, 19 nt, Artificial Sequence
  Description of Artificial Sequence: Synthetic oligonucleotide
ggacagaggauagggaaua

SEQ ID NO: 2702025 - RNA, 19 nt, Artificial Sequence
  Description of Artificial Sequence: Synthetic oligonucleotide
gagggccagcucccaacuc

SEQ ID NO: 2702026 - RNA, 19 nt, Artificial Sequence
  Description of Artificial Sequence: Synthetic oligonucleotide
agcucccaacucccaggcu

SEQ ID NO: 2702027 - RNA, 19 nt, Artificial Sequence
  Description of Artificial Sequence: Synthetic oligonucleotide
uggcuccuuuauguccaug

SEQ ID NO: 2702028 - RNA, 19 nt, Artificial Sequence
  Description of Artificial Sequence: Synthetic oligonucleotide
ggcagcaugagccucuauu

SEQ ID NO: 2702029 - RNA, 19 nt, Artificial Sequence
  Description of Artificial Sequence: Synthetic oligonucleotide
ugggcuccuccaugugauc

SEQ ID NO: 2702030 - RNA, 19 nt, Artificial Sequence
  Description of Artificial Sequence: Synthetic oligonucleotide
gcuuccgggugaucuucag

SEQ ID NO: 2702031 - RNA, 19 nt, Artificial Sequence
  Description of Artificial Sequence: Synthetic oligonucleotide
caaugugaagggagagccu

SEQ ID NO: 2702032 - RNA, 19 nt, Artificial Sequence
  Description of Artificial Sequence: Synthetic oligonucleotide
uuguggcaaccucgccauc

SEQ ID NO: 2702033 - RNA, 19 nt, Artificial Sequence
  Description of Artificial Sequence: Synthetic oligonucleotide
gcccagaaccacaauuuuc

SEQ ID NO: 2702034 - RNA, 19 nt, Artificial Sequence
  Description of Artificial Sequence: Synthetic oligonucleotide
auccggccacucucacuug

SEQ ID NO: 2702035 - RNA, 19 nt, Artificial Sequence
  Description of Artificial Sequence: Synthetic oligonucleotide
cacguaucugacaccugcu

SEQ ID NO: 2702036 - RNA, 19 nt, Artificial Sequence
  Description of Artificial Sequence: Synthetic oligonucleotide
ccuggcugucccucuuugc

SEQ ID NO: 2702037 - RNA, 19 nt, Artificial Sequence
  Description of Artificial Sequence: Synthetic oligonucleotide
guggcccaggaauggugga

SEQ ID NO: 2702038 - RNA, 19 nt, Artificial Sequence
  Description of Artificial Sequence: Synthetic oligonucleotide
cguaucugacaccugcuga

SEQ ID NO: 2702039 - RNA, 19 nt, Artificial Sequence
  Description of Artificial Sequence: Synthetic oligonucleotide
ccuuuauguccaugggcca

SEQ ID NO: 2702040 - RNA, 19 nt, Artificial Sequence
  Description of Artificial Sequence: Synthetic oligonucleotide
gagcucacgagggccagcu

SEQ ID NO: 2702041 - RNA, 19 nt, Artificial Sequence
  Description of Artificial Sequence: Synthetic oligonucleotide
uuagagcuuccgggugauc

SEQ ID NO: 2702042 - RNA, 19 nt, Artificial Sequence
  Description of Artificial Sequence: Synthetic oligonucleotide
ggcugucccucuuugccaa

SEQ ID NO: 2702043 - RNA, 19 nt, Artificial Sequence
  Description of Artificial Sequence: Synthetic oligonucleotide
ucacgagggccagcuccca

SEQ ID NO: 2702044 - RNA, 19 nt, Artificial Sequence
  Description of Artificial Sequence: Synthetic oligonucleotide
auacuccccuagguaugca

SEQ ID NO: 2702045 - RNA, 19 nt, Artificial Sequence
  Description of Artificial Sequence: Synthetic oligonucleotide
gggacguggggccccuggc

SEQ ID NO: 2702046 - RNA, 19 nt, Artificial Sequence
  Description of Artificial Sequence: Synthetic oligonucleotide
ccuggacagaggauaggga

SEQ ID NO: 2702047 - RNA, 19 nt, Artificial Sequence
  Description of Artificial Sequence: Synthetic oligonucleotide
uggucucaucagagaucau

SEQ ID NO: 2702048 - RNA, 19 nt, Artificial Sequence
  Description of Artificial Sequence: Synthetic oligonucleotide
ggaauacacuggaauccaa

SEQ ID NO: 2702049 - RNA, 19 nt, Artificial Sequence
  Description of Artificial Sequence: Synthetic oligonucleotide
guggguagcuguggagcuc

SEQ ID NO: 2702050 - RNA, 19 nt, Artificial Sequence
  Description of Artificial Sequence: Synthetic oligonucleotide
gugcucuuggcuccuuuau

SEQ ID NO: 2702051 - RNA, 19 nt, Artificial Sequence
  Description of Artificial Sequence: Synthetic oligonucleotide
auucugggagcugcacgua

SEQ ID NO: 2702052 - RNA, 19 nt, Artificial Sequence
  Description of Artificial Sequence: Synthetic oligonucleotide
ucagggacguggggccccu

SEQ ID NO: 2702053 - RNA, 19 nt, Artificial Sequence
  Description of Artificial Sequence: Synthetic oligonucleotide
cagagaucaugaccacaua

SEQ ID NO: 2702054 - RNA, 19 nt, Artificial Sequence
  Description of Artificial Sequence: Synthetic oligonucleotide
ugacaccugcugagaucuu

SEQ ID NO: 2702055 - RNA, 19 nt, Artificial Sequence
  Description of Artificial Sequence: Synthetic oligonucleotide
ggccuggacagaggauagg

SEQ ID NO: 2702056 - RNA, 19 nt, Artificial Sequence
  Description of Artificial Sequence: Synthetic oligonucleotide
cucccaggcuguucaggaa

SEQ ID NO: 2702057 - RNA, 19 nt, Artificial Sequence
  Description of Artificial Sequence: Synthetic oligonucleotide
guucaggaacagagggugu

SEQ ID NO: 2702058 - RNA, 19 nt, Artificial Sequence
  Description of Artificial Sequence: Synthetic oligonucleotide
ccacauacuccccuaggua

SEQ ID NO: 2702059 - RNA, 19 nt, Artificial Sequence
  Description of Artificial Sequence: Synthetic oligonucleotide
gcugaccucagaguauucu

SEQ ID NO: 2702060 - RNA, 19 nt, Artificial Sequence
  Description of Artificial Sequence: Synthetic oligonucleotide
caggaacagagggugugcu

SEQ ID NO: 2702061 - RNA, 19 nt, Artificial Sequence
  Description of Artificial Sequence: Synthetic oligonucleotide
cugcugagaucuucaggau

SEQ ID NO: 2702062 - RNA, 19 nt, Artificial Sequence
  Description of Artificial Sequence: Synthetic oligonucleotide
caggaguggccucuaguuu

SEQ ID NO: 2702063 - RNA, 19 nt, Artificial Sequence
  Description of Artificial Sequence: Synthetic oligonucleotide
ggccaggaguggccucuag

SEQ ID NO: 2702064 - RNA, 19 nt, Artificial Sequence
  Description of Artificial Sequence: Synthetic oligonucleotide
guggcaaccucgccaucau

SEQ ID NO: 2702065 - RNA, 19 nt, Artificial Sequence
  Description of Artificial Sequence: Synthetic oligonucleotide
guggcccucucuugagggu

SEQ ID NO: 2702066 - RNA, 19 nt, Artificial Sequence
  Description of Artificial Sequence: Synthetic oligonucleotide
ccccuagguaugcagaggu

SEQ ID NO: 2702067 - RNA, 19 nt, Artificial Sequence
  Description of Artificial Sequence: Synthetic oligonucleotide
ccaggaguggccucuaguu

SEQ ID NO: 2702068 - RNA, 19 nt, Artificial Sequence
  Description of Artificial Sequence: Synthetic oligonucleotide
gaggcagcaugagccucua

SEQ ID NO: 2702069 - RNA, 19 nt, Artificial Sequence
  Description of Artificial Sequence: Synthetic oligonucleotide
ccucuuugccaagacucga

SEQ ID NO: 2702070 - RNA, 19 nt, Artificial Sequence
  Description of Artificial Sequence: Synthetic oligonucleotide
ggagcucacgagggccagc

SEQ ID NO: 2702071 - RNA, 19 nt, Artificial Sequence
  Description of Artificial Sequence: Synthetic oligonucleotide
cacgagggccagcucccaa

SEQ ID NO: 2702072 - RNA, 19 nt, Artificial Sequence
  Description of Artificial Sequence: Synthetic oligonucleotide
gggcccagaaccacaauuu

SEQ ID NO: 2702073 - RNA, 19 nt, Artificial Sequence
  Description of Artificial Sequence: Synthetic oligonucleotide
ggauccggccacucucacu

SEQ ID NO: 2702074 - RNA, 19 nt, Artificial Sequence
  Description of Artificial Sequence: Synthetic oligonucleotide
ccucucuugagggugcucu

SEQ ID NO: 2702075 - RNA, 19 nt, Artificial Sequence
  Description of Artificial Sequence: Synthetic oligonucleotide
ggcccagaaccacaauuuu

SEQ ID NO: 2702076 - RNA, 19 nt, Artificial Sequence
  Description of Artificial Sequence: Synthetic oligonucleotide
ucccaacucccaggcuguu

SEQ ID NO: 2702077 - RNA, 19 nt, Artificial Sequence
  Description of Artificial Sequence: Synthetic oligonucleotide
ggacguggggccccuggcu

SEQ ID NO: 2702078 - RNA, 19 nt, Artificial Sequence
  Description of Artificial Sequence: Synthetic oligonucleotide
cucucuugagggugcucuu

SEQ ID NO: 2702079 - RNA, 19 nt, Artificial Sequence
  Description of Artificial Sequence: Synthetic oligonucleotide
gggugaucuucagggacgu

SEQ ID NO: 2702080 - RNA, 19 nt, Artificial Sequence
  Description of Artificial Sequence: Synthetic oligonucleotide
ccacucucacuuguggcaa

SEQ ID NO: 2702081 - RNA, 19 nt, Artificial Sequence
  Description of Artificial Sequence: Synthetic oligonucleotide
gcaaccucgccaucaucuu

SEQ ID NO: 2702082 - RNA, 19 nt, Artificial Sequence
  Description of Artificial Sequence: Synthetic oligonucleotide
cgaugggcuccuccaugug

SEQ ID NO: 2702083 - RNA, 19 nt, Artificial Sequence
  Description of Artificial Sequence: Synthetic oligonucleotide
ggagagccuuggaacacuu

SEQ ID NO: 2702084 - RNA, 19 nt, Artificial Sequence
  Description of Artificial Sequence: Synthetic oligonucleotide
ccucuauucaggggagggu

SEQ ID NO: 2702085 - RNA, 19 nt, Artificial Sequence
  Description of Artificial Sequence: Synthetic oligonucleotide
ggggaggguggcccucucu

SEQ ID NO: 2702086 - RNA, 19 nt, Artificial Sequence
  Description of Artificial Sequence: Synthetic oligonucleotide
agggugcucuuggcuccuu

SEQ ID NO: 2702087 - RNA, 19 nt, Artificial Sequence
  Description of Artificial Sequence: Synthetic oligonucleotide
cccaucaggccuggacaga

SEQ ID NO: 2702088 - RNA, 19 nt, Artificial Sequence
  Description of Artificial Sequence: Synthetic oligonucleotide
cagggacguggggccccug

SEQ ID NO: 2702089 - RNA, 19 nt, Artificial Sequence
  Description of Artificial Sequence: Synthetic oligonucleotide
caggggaggguggcccucu

SEQ ID NO: 2702090 - RNA, 19 nt, Artificial Sequence
  Description of Artificial Sequence: Synthetic oligonucleotide
gccaagacucgaagguguu

SEQ ID NO: 2702091 - RNA, 19 nt, Artificial Sequence
  Description of Artificial Sequence: Synthetic oligonucleotide
cccucucuugagggugcuc

SEQ ID NO: 2702092 - RNA, 19 nt, Artificial Sequence
  Description of Artificial Sequence: Synthetic oligonucleotide
gggugcucuuggcuccuuu

SEQ ID NO: 2702093 - RNA, 19 nt, Artificial Sequence
  Description of Artificial Sequence: Synthetic oligonucleotide
gcagagguugauggcucuu

SEQ ID NO: 2702094 - RNA, 19 nt, Artificial Sequence
  Description of Artificial Sequence: Synthetic oligonucleotide
cccuagguaugcagagguu

SEQ ID NO: 2702095 - RNA, 19 nt, Artificial Sequence
  Description of Artificial Sequence: Synthetic oligonucleotide
cgagggccagcucccaacu

SEQ ID NO: 2702096 - RNA, 19 nt, Artificial Sequence
  Description of Artificial Sequence: Synthetic oligonucleotide
ccaagacucgaagguguuu

SEQ ID NO: 2702097 - RNA, 19 nt, Artificial Sequence
  Description of Artificial Sequence: Synthetic oligonucleotide
ggccucuaguuuagagcuu

SEQ ID NO: 2702098 - RNA, 19 nt, Artificial Sequence
  Description of Artificial Sequence: Synthetic oligonucleotide
ggggccccuggcugucccu

SEQ ID NO: 2702099 - RNA, 19 nt, Artificial Sequence
  Description of Artificial Sequence: Synthetic oligonucleotide
aauauuuaugaauaaauag

SEQ ID NO: 2702100 - RNA, 19 nt, Artificial Sequence
  Description of Artificial Sequence: Synthetic oligonucleotide
aauaaauaguuuuauauga

SEQ ID NO: 2702101 - RNA, 19 nt, Artificial Sequence
  Description of Artificial Sequence: Synthetic oligonucleotide
aauaguuuuauaugacggc

SEQ ID NO: 2702102 - RNA, 19 nt, Artificial Sequence
  Description of Artificial Sequence: Synthetic oligonucleotide
uaaauaguuuuauaugacg

SEQ ID NO: 2702103 - RNA, 19 nt, Artificial Sequence
  Description of Artificial Sequence: Synthetic oligonucleotide
aaauaguuuuauaugacgg

SEQ ID NO: 2702104 - RNA, 19 nt, Artificial Sequence
  Description of Artificial Sequence: Synthetic oligonucleotide
gaauaaauaguuuuauaug

SEQ ID NO: 2702105 - RNA, 19 nt, Artificial Sequence
  Description of Artificial Sequence: Synthetic oligonucleotide
uuuaugaauaaauaguuuu

SEQ ID NO: 2702106 - RNA, 19 nt, Artificial Sequence
  Description of Artificial Sequence: Synthetic oligonucleotide
uauuuaugaauaaauaguu

SEQ ID NO: 2702107 - RNA, 19 nt, Artificial Sequence
  Description of Artificial Sequence: Synthetic oligonucleotide
uggaaaauauuuaugaaua

SEQ ID NO: 2702108 - RNA, 19 nt, Artificial Sequence
  Description of Artificial Sequence: Synthetic oligonucleotide
aggagguugcguuugagcc

SEQ ID NO: 2702109 - RNA, 19 nt, Artificial Sequence
  Description of Artificial Sequence: Synthetic oligonucleotide
ugaacugggaguuguaccg

SEQ ID NO: 2702110 - RNA, 19 nt, Artificial Sequence
  Description of Artificial Sequence: Synthetic oligonucleotide
uuugguaaaccuauuuuca

SEQ ID NO: 2702111 - RNA, 19 nt, Artificial Sequence
  Description of Artificial Sequence: Synthetic oligonucleotide
aaggagguugcguuugagc

SEQ ID NO: 2702112 - RNA, 19 nt, Artificial Sequence
  Description of Artificial Sequence: Synthetic oligonucleotide
auauuuaugaauaaauagu

SEQ ID NO: 2702113 - RNA, 19 nt, Artificial Sequence
  Description of Artificial Sequence: Synthetic oligonucleotide
aaaccuauuuucauuuugg

SEQ ID NO: 2702114 - RNA, 19 nt, Artificial Sequence
  Description of Artificial Sequence: Synthetic oligonucleotide
uuuugguaaaccuauuuuc

SEQ ID NO: 2702115 - RNA, 19 nt, Artificial Sequence
  Description of Artificial Sequence: Synthetic oligonucleotide
aguuuuauaugacggcugg

SEQ ID NO: 2702116 - RNA, 19 nt, Artificial Sequence
  Description of Artificial Sequence: Synthetic oligonucleotide
uuuauaugacggcuggcag

SEQ ID NO: 2702117 - RNA, 19 nt, Artificial Sequence
  Description of Artificial Sequence: Synthetic oligonucleotide
uaaaccuauuuucauuuug

SEQ ID NO: 2702118 - RNA, 19 nt, Artificial Sequence
  Description of Artificial Sequence: Synthetic oligonucleotide
ugucucuucaacuucugcc

SEQ ID NO: 2702119 - RNA, 19 nt, Artificial Sequence
  Description of Artificial Sequence: Synthetic oligonucleotide
auaaauaguuuuauaugac

SEQ ID NO: 2702120 - RNA, 19 nt, Artificial Sequence
  Description of Artificial Sequence: Synthetic oligonucleotide
uuaugaauaaauaguuuua

SEQ ID NO: 2702121 - RNA, 19 nt, Artificial Sequence
  Description of Artificial Sequence: Synthetic oligonucleotide
uucaaugggcagcaguggg

SEQ ID NO: 2702122 - RNA, 19 nt, Artificial Sequence
  Description of Artificial Sequence: Synthetic oligonucleotide
uucugccugaccuugcugg

SEQ ID NO: 2702123 - RNA, 19 nt, Artificial Sequence
  Description of Artificial Sequence: Synthetic oligonucleotide
uuuuauaugacggcuggca

SEQ ID NO: 2702124 - RNA, 19 nt, Artificial Sequence
  Description of Artificial Sequence: Synthetic oligonucleotide
ugaucuucucgucugggcc

SEQ ID NO: 2702125 - RNA, 19 nt, Artificial Sequence
  Description of Artificial Sequence: Synthetic oligonucleotide
aacugggaguuguaccgcc

SEQ ID NO: 2702126 - RNA, 19 nt, Artificial Sequence
  Description of Artificial Sequence: Synthetic oligonucleotide
uuauaugacggcuggcagc

SEQ ID NO: 2702127 - RNA, 19 nt, Artificial Sequence
  Description of Artificial Sequence: Synthetic oligonucleotide
ucaaugggcagcagugggg

SEQ ID NO: 2702128 - RNA, 19 nt, Artificial Sequence
  Description of Artificial Sequence: Synthetic oligonucleotide
uaguuuuauaugacggcug

SEQ ID NO: 2702129 - RNA, 19 nt, Artificial Sequence
  Description of Artificial Sequence: Synthetic oligonucleotide
aaggccauggggcacccuc

SEQ ID NO: 2702130 - RNA, 19 nt, Artificial Sequence
  Description of Artificial Sequence: Synthetic oligonucleotide
agcagugggguucugcugg

SEQ ID NO: 2702131 - RNA, 19 nt, Artificial Sequence
  Description of Artificial Sequence: Synthetic oligonucleotide
ugugccuuuucuuucccag

SEQ ID NO: 2702132 - RNA, 19 nt, Artificial Sequence
  Description of Artificial Sequence: Synthetic oligonucleotide
uugaacugggaguuguacc

SEQ ID NO: 2702133 - RNA, 19 nt, Artificial Sequence
  Description of Artificial Sequence: Synthetic oligonucleotide
aaccuauuuucauuuugga

SEQ ID NO: 2702134 - RNA, 19 nt, Artificial Sequence
  Description of Artificial Sequence: Synthetic oligonucleotide
auaguuuuauaugacggcu

SEQ ID NO: 2702135 - RNA, 19 nt, Artificial Sequence
  Description of Artificial Sequence: Synthetic oligonucleotide
acggcuuucacugcugugc

SEQ ID NO: 2702136 - RNA, 19 nt, Artificial Sequence
  Description of Artificial Sequence: Synthetic oligonucleotide
uucuugaucuucucgucug

SEQ ID NO: 2702137 - RNA, 19 nt, Artificial Sequence
  Description of Artificial Sequence: Synthetic oligonucleotide
ggaaggacggcuuucacug

SEQ ID NO: 2702138 - RNA, 19 nt, Artificial Sequence
  Description of Artificial Sequence: Synthetic oligonucleotide
uauaugacggcuggcagcu

SEQ ID NO: 2702139 - RNA, 19 nt, Artificial Sequence
  Description of Artificial Sequence: Synthetic oligonucleotide
uaugacggcuggcagcugc

SEQ ID NO: 2702140 - RNA, 19 nt, Artificial Sequence
  Description of Artificial Sequence: Synthetic oligonucleotide
ucucgucugggccuugggg

SEQ ID NO: 2702141 - RNA, 19 nt, Artificial Sequence
  Description of Artificial Sequence: Synthetic oligonucleotide
gaccuugcuggguugcucg

SEQ ID NO: 2702142 - RNA, 19 nt, Artificial Sequence
  Description of Artificial Sequence: Synthetic oligonucleotide
uuguacccgggccagcagg

SEQ ID NO: 2702143 - RNA, 19 nt, Artificial Sequence
  Description of Artificial Sequence: Synthetic oligonucleotide
ccuauuuucauuuuggaaa

SEQ ID NO: 2702144 - RNA, 19 nt, Artificial Sequence
  Description of Artificial Sequence: Synthetic oligonucleotide
aagguggcucuuugggccg

SEQ ID NO: 2702145 - RNA, 19 nt, Artificial Sequence
  Description of Artificial Sequence: Synthetic oligonucleotide
aagaguucaaugggcagca

SEQ ID NO: 2702146 - RNA, 19 nt, Artificial Sequence
  Description of Artificial Sequence: Synthetic oligonucleotide
ggagcugguaccaaggagg

SEQ ID NO: 2702147 - RNA, 19 nt, Artificial Sequence
  Description of Artificial Sequence: Synthetic oligonucleotide
uguacccgggccagcaggg

SEQ ID NO: 2702148 - RNA, 19 nt, Artificial Sequence
  Description of Artificial Sequence: Synthetic oligonucleotide
uccaaccgguucuugaucu

SEQ ID NO: 2702149 - RNA, 19 nt, Artificial Sequence
  Description of Artificial Sequence: Synthetic oligonucleotide
acgacgcucagcccggagc

SEQ ID NO: 2702150 - RNA, 19 nt, Artificial Sequence
  Description of Artificial Sequence: Synthetic oligonucleotide
augaauaaauaguuuuaua

SEQ ID NO: 2702151 - RNA, 19 nt, Artificial Sequence
  Description of Artificial Sequence: Synthetic oligonucleotide
cuauuuucauuuuggaaaa

SEQ ID NO: 2702152 - RNA, 19 nt, Artificial Sequence
  Description of Artificial Sequence: Synthetic oligonucleotide
ugcucgagcccucucagcu

SEQ ID NO: 2702153 - RNA, 19 nt, Artificial Sequence
  Description of Artificial Sequence: Synthetic oligonucleotide
accuauuuucauuuuggaa

SEQ ID NO: 2702154 - RNA, 19 nt, Artificial Sequence
  Description of Artificial Sequence: Synthetic oligonucleotide
caagaguucaaugggcagc

SEQ ID NO: 2702155 - RNA, 19 nt, Artificial Sequence
  Description of Artificial Sequence: Synthetic oligonucleotide
uugaucuucucgucugggc

SEQ ID NO: 2702156 - RNA, 19 nt, Artificial Sequence
  Description of Artificial Sequence: Synthetic oligonucleotide
ugccuuuucuuucccaggu

SEQ ID NO: 2702157 - RNA, 19 nt, Artificial Sequence
  Description of Artificial Sequence: Synthetic oligonucleotide
uugguaaaccuauuuucau

SEQ ID NO: 2702158 - RNA, 19 nt, Artificial Sequence
  Description of Artificial Sequence: Synthetic oligonucleotide
aaggacggcuuucacugcu

SEQ ID NO: 2702159 - RNA, 19 nt, Artificial Sequence
  Description of Artificial Sequence: Synthetic oligonucleotide
ucugcucgagcccucucag

SEQ ID NO: 2702160 - RNA, 19 nt, Artificial Sequence
  Description of Artificial Sequence: Synthetic oligonucleotide
acggcuggcagcugcggcc

SEQ ID NO: 2702161 - RNA, 19 nt, Artificial Sequence
  Description of Artificial Sequence: Synthetic oligonucleotide
gcugacgacgcucagcccg

SEQ ID NO: 2702162 - RNA, 19 nt, Artificial Sequence
  Description of Artificial Sequence: Synthetic oligonucleotide
gaagcagggaaagggcagg

SEQ ID NO: 2702163 - RNA, 19 nt, Artificial Sequence
  Description of Artificial Sequence: Synthetic oligonucleotide
cagggaaagggcagggagg

SEQ ID NO: 2702164 - RNA, 19 nt, Artificial Sequence
  Description of Artificial Sequence: Synthetic oligonucleotide
uggaaggacggcuuucacu

SEQ ID NO: 2702165 - RNA, 19 nt, Artificial Sequence
  Description of Artificial Sequence: Synthetic oligonucleotide
uuucccaggugcuucugca

SEQ ID NO: 2702166 - RNA, 19 nt, Artificial Sequence
  Description of Artificial Sequence: Synthetic oligonucleotide
ugguaaaccuauuuucauu

SEQ ID NO: 2702167 - RNA, 19 nt, Artificial Sequence
  Description of Artificial Sequence: Synthetic oligonucleotide
aguuguaccgccgccuccg

SEQ ID NO: 2702168 - RNA, 19 nt, Artificial Sequence
  Description of Artificial Sequence: Synthetic oligonucleotide
ugcguuugagccucugcug

SEQ ID NO: 2702169 - RNA, 19 nt, Artificial Sequence
  Description of Artificial Sequence: Synthetic oligonucleotide
ucugccugaccuugcuggg

SEQ ID NO: 2702170 - RNA, 19 nt, Artificial Sequence
  Description of Artificial Sequence: Synthetic oligonucleotide
gguugcucggccuuguacc

SEQ ID NO: 2702171 - RNA, 19 nt, Artificial Sequence
  Description of Artificial Sequence: Synthetic oligonucleotide
guuuucucuuccucucugc

SEQ ID NO: 2702172 - RNA, 19 nt, Artificial Sequence
  Description of Artificial Sequence: Synthetic oligonucleotide
gagguuuucucuuccucuc

SEQ ID NO: 2702173 - RNA, 19 nt, Artificial Sequence
  Description of Artificial Sequence: Synthetic oligonucleotide
auuuaugaauaaauaguuu

SEQ ID NO: 2702174 - RNA, 19 nt, Artificial Sequence
  Description of Artificial Sequence: Synthetic oligonucleotide
uguaccgccgccuccguuc

SEQ ID NO: 2702175 - RNA, 19 nt, Artificial Sequence
  Description of Artificial Sequence: Synthetic oligonucleotide
cauuuuggaaaauauuuau

SEQ ID NO: 2702176 - RNA, 19 nt, Artificial Sequence
  Description of Artificial Sequence: Synthetic oligonucleotide
ucccaggugcuucugcaug

SEQ ID NO: 2702177 - RNA, 19 nt, Artificial Sequence
  Description of Artificial Sequence: Synthetic oligonucleotide
ucggccuuguacccgggcc

SEQ ID NO: 2702178 - RNA, 19 nt, Artificial Sequence
  Description of Artificial Sequence: Synthetic oligonucleotide
uuucugaggccgcuccucu

SEQ ID NO: 2702179 - RNA, 19 nt, Artificial Sequence
  Description of Artificial Sequence: Synthetic oligonucleotide
cuccucucuggaaggacgg

SEQ ID NO: 2702180 - RNA, 19 nt, Artificial Sequence
  Description of Artificial Sequence: Synthetic oligonucleotide
aacuucugccugaccuugc

SEQ ID NO: 2702181 - RNA, 19 nt, Artificial Sequence
  Description of Artificial Sequence: Synthetic oligonucleotide
ugcucggccuuguacccgg

SEQ ID NO: 2702182 - RNA, 19 nt, Artificial Sequence
  Description of Artificial Sequence: Synthetic oligonucleotide
cuugcuggguugcucggcc

SEQ ID NO: 2702183 - RNA, 19 nt, Artificial Sequence
  Description of Artificial Sequence: Synthetic oligonucleotide
gcuguucuagggaaggugg

SEQ ID NO: 2702184 - RNA, 19 nt, Artificial Sequence
  Description of Artificial Sequence: Synthetic oligonucleotide
guucaaugggcagcagugg

SEQ ID NO: 2702185 - RNA, 19 nt, Artificial Sequence
  Description of Artificial Sequence: Synthetic oligonucleotide
cuugaucuucucgucuggg

SEQ ID NO: 2702186 - RNA, 19 nt, Artificial Sequence
  Description of Artificial Sequence: Synthetic oligonucleotide
agggccucugcucgagccc

SEQ ID NO: 2702187 - RNA, 19 nt, Artificial Sequence
  Description of Artificial Sequence: Synthetic oligonucleotide
uucuagggaagguggcucu

SEQ ID NO: 2702188 - RNA, 19 nt, Artificial Sequence
  Description of Artificial Sequence: Synthetic oligonucleotide
aagcagggaaagggcaggg

SEQ ID NO: 2702189 - RNA, 19 nt, Artificial Sequence
  Description of Artificial Sequence: Synthetic oligonucleotide
ugggccgcuguuucugagg

SEQ ID NO: 2702190 - RNA, 19 nt, Artificial Sequence
  Description of Artificial Sequence: Synthetic oligonucleotide
cuguucuagggaagguggc

SEQ ID NO: 2702191 - RNA, 19 nt, Artificial Sequence
  Description of Artificial Sequence: Synthetic oligonucleotide
uguucuagggaagguggcu

SEQ ID NO: 2702192 - RNA, 19 nt, Artificial Sequence
  Description of Artificial Sequence: Synthetic oligonucleotide
cuuccucucugcccuaccc

SEQ ID NO: 2702193 - RNA, 19 nt, Artificial Sequence
  Description of Artificial Sequence: Synthetic oligonucleotide
ggaaaauauuuaugaauaa

SEQ ID NO: 2702194 - RNA, 19 nt, Artificial Sequence
  Description of Artificial Sequence: Synthetic oligonucleotide
ccuuuucuuucccaggugc

SEQ ID NO: 2702195 - RNA, 19 nt, Artificial Sequence
  Description of Artificial Sequence: Synthetic oligonucleotide
gugccuuuucuuucccagg

SEQ ID NO: 2702196 - RNA, 19 nt, Artificial Sequence
  Description of Artificial Sequence: Synthetic oligonucleotide
ucaacuucugccugaccuu

SEQ ID NO: 2702197 - RNA, 19 nt, Artificial Sequence
  Description of Artificial Sequence: Synthetic oligonucleotide
cucgagcccucucagcugc

SEQ ID NO: 2702198 - RNA, 19 nt, Artificial Sequence
  Description of Artificial Sequence: Synthetic oligonucleotide
guugcucggccuuguaccc

SEQ ID NO: 2702199 - RNA, 19 nt, Artificial Sequence
  Description of Artificial Sequence: Synthetic oligonucleotide
uucucgucugggccuuggg

SEQ ID NO: 2702200 - RNA, 19 nt, Artificial Sequence
  Description of Artificial Sequence: Synthetic oligonucleotide
guugcguuugagccucugc

SEQ ID NO: 2702201 - RNA, 19 nt, Artificial Sequence
  Description of Artificial Sequence: Synthetic oligonucleotide
guugaacugggaguuguac

SEQ ID NO: 2702202 - RNA, 19 nt, Artificial Sequence
  Description of Artificial Sequence: Synthetic oligonucleotide
uuccucucugcccuacccu

SEQ ID NO: 2702203 - RNA, 19 nt, Artificial Sequence
  Description of Artificial Sequence: Synthetic oligonucleotide
uucacugcugugccuuuuc

SEQ ID NO: 2702204 - RNA, 19 nt, Artificial Sequence
  Description of Artificial Sequence: Synthetic oligonucleotide
ugggaguuguaccgccgcc

SEQ ID NO: 2702205 - RNA, 19 nt, Artificial Sequence
  Description of Artificial Sequence: Synthetic oligonucleotide
cugucucuucaacuucugc

SEQ ID NO: 2702206 - RNA, 19 nt, Artificial Sequence
  Description of Artificial Sequence: Synthetic oligonucleotide
agcuguucuagggaaggug

SEQ ID NO: 2702207 - RNA, 19 nt, Artificial Sequence
  Description of Artificial Sequence: Synthetic oligonucleotide
ucuucaacuucugccugac

SEQ ID NO: 2702208 - RNA, 19 nt, Artificial Sequence
  Description of Artificial Sequence: Synthetic oligonucleotide
uuugagccucugcugcgcu

SEQ ID NO: 2702209 - RNA, 19 nt, Artificial Sequence
  Description of Artificial Sequence: Synthetic oligonucleotide
ugcggccucuccuacuccc

SEQ ID NO: 2702210 - RNA, 19 nt, Artificial Sequence
  Description of Artificial Sequence: Synthetic oligonucleotide
caucugucucuucaacuuc

SEQ ID NO: 2702211 - RNA, 19 nt, Artificial Sequence
  Description of Artificial Sequence: Synthetic oligonucleotide
ggaagguggcucuuugggc

SEQ ID NO: 2702212 - RNA, 19 nt, Artificial Sequence
  Description of Artificial Sequence: Synthetic oligonucleotide
gugggguucugcuggcggg

SEQ ID NO: 2702213 - RNA, 19 nt, Artificial Sequence
  Description of Artificial Sequence: Synthetic oligonucleotide
guuuuauaugacggcuggc

SEQ ID NO: 2702214 - RNA, 19 nt, Artificial Sequence
  Description of Artificial Sequence: Synthetic oligonucleotide
uucuuucccaggugcuucu

SEQ ID NO: 2702215 - RNA, 19 nt, Artificial Sequence
  Description of Artificial Sequence: Synthetic oligonucleotide
cugacgacgcucagcccgg

SEQ ID NO: 2702216 - RNA, 19 nt, Artificial Sequence
  Description of Artificial Sequence: Synthetic oligonucleotide
cugguaccaaggagguugc

SEQ ID NO: 2702217 - RNA, 19 nt, Artificial Sequence
  Description of Artificial Sequence: Synthetic oligonucleotide
ucacugcugugccuuuucu

SEQ ID NO: 2702218 - RNA, 19 nt, Artificial Sequence
  Description of Artificial Sequence: Synthetic oligonucleotide
ggagcuguucuagggaagg

SEQ ID NO: 2702219 - RNA, 19 nt, Artificial Sequence
  Description of Artificial Sequence: Synthetic oligonucleotide
gaaggacggcuuucacugc

SEQ ID NO: 2702220 - RNA, 19 nt, Artificial Sequence
  Description of Artificial Sequence: Synthetic oligonucleotide
acuucugccugaccuugcu

SEQ ID NO: 2702221 - RNA, 19 nt, Artificial Sequence
  Description of Artificial Sequence: Synthetic oligonucleotide
accgguucuugaucuucuc

SEQ ID NO: 2702222 - RNA, 19 nt, Artificial Sequence
  Description of Artificial Sequence: Synthetic oligonucleotide
agguuuucucuuccucucu

SEQ ID NO: 2702223 - RNA, 19 nt, Artificial Sequence
  Description of Artificial Sequence: Synthetic oligonucleotide
uucccgcugacgacgcuca

SEQ ID NO: 2702224 - RNA, 19 nt, Artificial Sequence
  Description of Artificial Sequence: Synthetic oligonucleotide
gagguugcguuugagccuc

SEQ ID NO: 2702225 - RNA, 19 nt, Artificial Sequence
  Description of Artificial Sequence: Synthetic oligonucleotide
aagggcagggagguuuucu

SEQ ID NO: 2702226 - RNA, 19 nt, Artificial Sequence
  Description of Artificial Sequence: Synthetic oligonucleotide
gguaaaccuauuuucauuu

SEQ ID NO: 2702227 - RNA, 19 nt, Artificial Sequence
  Description of Artificial Sequence: Synthetic oligonucleotide
cugggaguuguaccgccgc

SEQ ID NO: 2702228 - RNA, 19 nt, Artificial Sequence
  Description of Artificial Sequence: Synthetic oligonucleotide
gguuuucucuuccucucug

SEQ ID NO: 2702229 - RNA, 19 nt, Artificial Sequence
  Description of Artificial Sequence: Synthetic oligonucleotide
gaacugggaguuguaccgc

SEQ ID NO: 2702230 - RNA, 19 nt, Artificial Sequence
  Description of Artificial Sequence: Synthetic oligonucleotide
ugaggccgcuccucucugg

SEQ ID NO: 2702231 - RNA, 19 nt, Artificial Sequence
  Description of Artificial Sequence: Synthetic oligonucleotide
cagggccucugcucgagcc

SEQ ID NO: 2702232 - RNA, 19 nt, Artificial Sequence
  Description of Artificial Sequence: Synthetic oligonucleotide
accaaggagguugcguuug

SEQ ID NO: 2702233 - RNA, 19 nt, Artificial Sequence
  Description of Artificial Sequence: Synthetic oligonucleotide
uuugggccgcuguuucuga

SEQ ID NO: 2702234 - RNA, 19 nt, Artificial Sequence
  Description of Artificial Sequence: Synthetic oligonucleotide
ugggguucugcuggcgggg

SEQ ID NO: 2702235 - RNA, 19 nt, Artificial Sequence
  Description of Artificial Sequence: Synthetic oligonucleotide
cucucugcccuacccuggg

SEQ ID NO: 2702236 - RNA, 19 nt, Artificial Sequence
  Description of Artificial Sequence: Synthetic oligonucleotide
cuuugggccgcuguuucug

SEQ ID NO: 2702237 - RNA, 19 nt, Artificial Sequence
  Description of Artificial Sequence: Synthetic oligonucleotide
cugcuucccgcugacgacg

SEQ ID NO: 2702238 - RNA, 19 nt, Artificial Sequence
  Description of Artificial Sequence: Synthetic oligonucleotide
gaguuguaccgccgccucc

SEQ ID NO: 2702239 - RNA, 19 nt, Artificial Sequence
  Description of Artificial Sequence: Synthetic oligonucleotide
gccgcuguuucugaggccg

SEQ ID NO: 2702240 - RNA, 19 nt, Artificial Sequence
  Description of Artificial Sequence: Synthetic oligonucleotide
aaagggcagggagguuuuc

SEQ ID NO: 2702241 - RNA, 19 nt, Artificial Sequence
  Description of Artificial Sequence: Synthetic oligonucleotide
gcguuugagccucugcugc

SEQ ID NO: 2702242 - RNA, 19 nt, Artificial Sequence
  Description of Artificial Sequence: Synthetic oligonucleotide
gaucuucucgucugggccu

SEQ ID NO: 2702243 - RNA, 19 nt, Artificial Sequence
  Description of Artificial Sequence: Synthetic oligonucleotide
gacggcuuucacugcugug

SEQ ID NO: 2702244 - RNA, 19 nt, Artificial Sequence
  Description of Artificial Sequence: Synthetic oligonucleotide
accuugcuggguugcucgg

SEQ ID NO: 2702245 - RNA, 19 nt, Artificial Sequence
  Description of Artificial Sequence: Synthetic oligonucleotide
caacuucugccugaccuug

SEQ ID NO: 2702246 - RNA, 19 nt, Artificial Sequence
  Description of Artificial Sequence: Synthetic oligonucleotide
ugcuucccgcugacgacgc

SEQ ID NO: 2702247 - RNA, 19 nt, Artificial Sequence
  Description of Artificial Sequence: Synthetic oligonucleotide
guucuagggaagguggcuc

SEQ ID NO: 2702248 - RNA, 19 nt, Artificial Sequence
  Description of Artificial Sequence: Synthetic oligonucleotide
gggagcugguaccaaggag

SEQ ID NO: 2702249 - RNA, 19 nt, Artificial Sequence
  Description of Artificial Sequence: Synthetic oligonucleotide
guucuugaucuucucgucu

SEQ ID NO: 2702250 - RNA, 19 nt, Artificial Sequence
  Description of Artificial Sequence: Synthetic oligonucleotide
agcccggagcuguucuagg

SEQ ID NO: 2702251 - RNA, 19 nt, Artificial Sequence
  Description of Artificial Sequence: Synthetic oligonucleotide
uugggccgcuguuucugag

SEQ ID NO: 2702252 - RNA, 19 nt, Artificial Sequence
  Description of Artificial Sequence: Synthetic oligonucleotide
gacggcuggcagcugcggc

SEQ ID NO: 2702253 - RNA, 19 nt, Artificial Sequence
  Description of Artificial Sequence: Synthetic oligonucleotide
acugggaguuguaccgccg

SEQ ID NO: 2702254 - RNA, 19 nt, Artificial Sequence
  Description of Artificial Sequence: Synthetic oligonucleotide
ccagcagggccucugcucg

SEQ ID NO: 2702255 - RNA, 19 nt, Artificial Sequence
  Description of Artificial Sequence: Synthetic oligonucleotide
ugccugaccuugcuggguu

SEQ ID NO: 2702256 - RNA, 19 nt, Artificial Sequence
  Description of Artificial Sequence: Synthetic oligonucleotide
guuugagccucugcugcgc

SEQ ID NO: 2702257 - RNA, 19 nt, Artificial Sequence
  Description of Artificial Sequence: Synthetic oligonucleotide
ccaagaguucaaugggcag

SEQ ID NO: 2702258 - RNA, 19 nt, Artificial Sequence
  Description of Artificial Sequence: Synthetic oligonucleotide
cugcugugccuuuucuuuc

SEQ ID NO: 2702259 - RNA, 19 nt, Artificial Sequence
  Description of Artificial Sequence: Synthetic oligonucleotide
agggagguuuucucuuccu

SEQ ID NO: 2702260 - RNA, 19 nt, Artificial Sequence
  Description of Artificial Sequence: Synthetic oligonucleotide
uugcucggccuuguacccg

SEQ ID NO: 2702261 - RNA, 19 nt, Artificial Sequence
  Description of Artificial Sequence: Synthetic oligonucleotide
cuucaacuucugccugacc

SEQ ID NO: 2702262 - RNA, 19 nt, Artificial Sequence
  Description of Artificial Sequence: Synthetic oligonucleotide
cucuucaacuucugccuga

SEQ ID NO: 2702263 - RNA, 19 nt, Artificial Sequence
  Description of Artificial Sequence: Synthetic oligonucleotide
uggcucuuugggccgcugu

SEQ ID NO: 2702264 - RNA, 19 nt, Artificial Sequence
  Description of Artificial Sequence: Synthetic oligonucleotide
cuucugccugaccuugcug

SEQ ID NO: 2702265 - RNA, 19 nt, Artificial Sequence
  Description of Artificial Sequence: Synthetic oligonucleotide
cuuguacccgggccagcag

SEQ ID NO: 2702266 - RNA, 19 nt, Artificial Sequence
  Description of Artificial Sequence: Synthetic oligonucleotide
aggccauggggcacccucc

SEQ ID NO: 2702267 - RNA, 19 nt, Artificial Sequence
  Description of Artificial Sequence: Synthetic oligonucleotide
gcuccucucuggaaggacg

SEQ ID NO: 2702268 - RNA, 19 nt, Artificial Sequence
  Description of Artificial Sequence: Synthetic oligonucleotide
ccgcugacgacgcucagcc

SEQ ID NO: 2702269 - RNA, 19 nt, Artificial Sequence
  Description of Artificial Sequence: Synthetic oligonucleotide
aaugggcagcagugggguu

SEQ ID NO: 2702270 - RNA, 19 nt, Artificial Sequence
  Description of Artificial Sequence: Synthetic oligonucleotide
ccgguucuugaucuucucg

SEQ ID NO: 2702271 - RNA, 19 nt, Artificial Sequence
  Description of Artificial Sequence: Synthetic oligonucleotide
uaccaaggagguugcguuu

SEQ ID NO: 2702272 - RNA, 19 nt, Artificial Sequence
  Description of Artificial Sequence: Synthetic oligonucleotide
ccccaagaguucaaugggc

SEQ ID NO: 2702273 - RNA, 19 nt, Artificial Sequence
  Description of Artificial Sequence: Synthetic oligonucleotide
guaccaaggagguugcguu

SEQ ID NO: 2702274 - RNA, 19 nt, Artificial Sequence
  Description of Artificial Sequence: Synthetic oligonucleotide
uucccaggugcuucugcau

SEQ ID NO: 2702275 - RNA, 19 nt, Artificial Sequence
  Description of Artificial Sequence: Synthetic oligonucleotide
caaggagguugcguuugag

SEQ ID NO: 2702276 - RNA, 19 nt, Artificial Sequence
  Description of Artificial Sequence: Synthetic oligonucleotide
ggagguuuucucuuccucu

SEQ ID NO: 2702277 - RNA, 19 nt, Artificial Sequence
  Description of Artificial Sequence: Synthetic oligonucleotide
caaccgguucuugaucuuc

SEQ ID NO: 2702278 - RNA, 19 nt, Artificial Sequence
  Description of Artificial Sequence: Synthetic oligonucleotide
ggccgcuccucucuggaag

SEQ ID NO: 2702279 - RNA, 19 nt, Artificial Sequence
  Description of Artificial Sequence: Synthetic oligonucleotide
guccaaccgguucuugauc

SEQ ID NO: 2702280 - RNA, 19 nt, Artificial Sequence
  Description of Artificial Sequence: Synthetic oligonucleotide
uccccagugagggacuuuu

SEQ ID NO: 2702281 - RNA, 19 nt, Artificial Sequence
  Description of Artificial Sequence: Synthetic oligonucleotide
guuucugaggccgcuccuc

SEQ ID NO: 2702282 - RNA, 19 nt, Artificial Sequence
  Description of Artificial Sequence: Synthetic oligonucleotide
gacgacgcucagcccggag

SEQ ID NO: 2702283 - RNA, 19 nt, Artificial Sequence
  Description of Artificial Sequence: Synthetic oligonucleotide
ugacggcuggcagcugcgg

SEQ ID NO: 2702284 - RNA, 19 nt, Artificial Sequence
  Description of Artificial Sequence: Synthetic oligonucleotide
augacggcuggcagcugcg

SEQ ID NO: 2702285 - RNA, 19 nt, Artificial Sequence
  Description of Artificial Sequence: Synthetic oligonucleotide
ugguaccaaggagguugcg

SEQ ID NO: 2702286 - RNA, 19 nt, Artificial Sequence
  Description of Artificial Sequence: Synthetic oligonucleotide
ucuuucccaggugcuucug

SEQ ID NO: 2702287 - RNA, 19 nt, Artificial Sequence
  Description of Artificial Sequence: Synthetic oligonucleotide
gggccgcuguuucugaggc

SEQ ID NO: 2702288 - RNA, 19 nt, Artificial Sequence
  Description of Artificial Sequence: Synthetic oligonucleotide
cuucucgucugggccuugg

SEQ ID NO: 2702289 - RNA, 19 nt, Artificial Sequence
  Description of Artificial Sequence: Synthetic oligonucleotide
gaggccgcuccucucugga

SEQ ID NO: 2702290 - RNA, 19 nt, Artificial Sequence
  Description of Artificial Sequence: Synthetic oligonucleotide
cugcucgagcccucucagc

SEQ ID NO: 2702291 - RNA, 19 nt, Artificial Sequence
  Description of Artificial Sequence: Synthetic oligonucleotide
gagcccucucagcugcuuc

SEQ ID NO: 2702292 - RNA, 19 nt, Artificial Sequence
  Description of Artificial Sequence: Synthetic oligonucleotide
cucugcucgagcccucuca

SEQ ID NO: 2702293 - RNA, 19 nt, Artificial Sequence
  Description of Artificial Sequence: Synthetic oligonucleotide
ugcuggguugcucggccuu

SEQ ID NO: 2702294 - RNA, 19 nt, Artificial Sequence
  Description of Artificial Sequence: Synthetic oligonucleotide
uccucucuggaaggacggc

SEQ ID NO: 2702295 - RNA, 19 nt, Artificial Sequence
  Description of Artificial Sequence: Synthetic oligonucleotide
cuucccgcugacgacgcuc

SEQ ID NO: 2702296 - RNA, 19 nt, Artificial Sequence
  Description of Artificial Sequence: Synthetic oligonucleotide
uugcuggguugcucggccu

SEQ ID NO: 2702297 - RNA, 19 nt, Artificial Sequence
  Description of Artificial Sequence: Synthetic oligonucleotide
ugaccuugcuggguugcuc

SEQ ID NO: 2702298 - RNA, 19 nt, Artificial Sequence
  Description of Artificial Sequence: Synthetic oligonucleotide
gcccggagcuguucuaggg

SEQ ID NO: 2702299 - RNA, 19 nt, Artificial Sequence
  Description of Artificial Sequence: Synthetic oligonucleotide
cccaagaguucaaugggca

SEQ ID NO: 2702300 - RNA, 19 nt, Artificial Sequence
  Description of Artificial Sequence: Synthetic oligonucleotide
uucugaggccgcuccucuc

SEQ ID NO: 2702301 - RNA, 19 nt, Artificial Sequence
  Description of Artificial Sequence: Synthetic oligonucleotide
gggagguuuucucuuccuc

SEQ ID NO: 2702302 - RNA, 19 nt, Artificial Sequence
  Description of Artificial Sequence: Synthetic oligonucleotide
gccgcuccucucuggaagg

SEQ ID NO: 2702303 - RNA, 19 nt, Artificial Sequence
  Description of Artificial Sequence: Synthetic oligonucleotide
agguggcucuuugggccgc

SEQ ID NO: 2702304 - RNA, 19 nt, Artificial Sequence
  Description of Artificial Sequence: Synthetic oligonucleotide
accgccgccuccguucauc

SEQ ID NO: 2702305 - RNA, 19 nt, Artificial Sequence
  Description of Artificial Sequence: Synthetic oligonucleotide
ggggcgccgggccagcugg

SEQ ID NO: 2702306 - RNA, 19 nt, Artificial Sequence
  Description of Artificial Sequence: Synthetic oligonucleotide
ggaguuguaccgccgccuc

SEQ ID NO: 2702307 - RNA, 19 nt, Artificial Sequence
  Description of Artificial Sequence: Synthetic oligonucleotide
guaaaccuauuuucauuuu

SEQ ID NO: 2702308 - RNA, 19 nt, Artificial Sequence
  Description of Artificial Sequence: Synthetic oligonucleotide
ggguugcucggccuuguac

SEQ ID NO: 2702309 - RNA, 19 nt, Artificial Sequence
  Description of Artificial Sequence: Synthetic oligonucleotide
cucggccuuguacccgggc

SEQ ID NO: 2702310 - RNA, 19 nt, Artificial Sequence
  Description of Artificial Sequence: Synthetic oligonucleotide
cagcccggagcuguucuag

SEQ ID NO: 2702311 - RNA, 19 nt, Artificial Sequence
  Description of Artificial Sequence: Synthetic oligonucleotide
gccuuuucuuucccaggug

SEQ ID NO: 2702312 - RNA, 19 nt, Artificial Sequence
  Description of Artificial Sequence: Synthetic oligonucleotide
uuucacugcugugccuuuu

SEQ ID NO: 2702313 - RNA, 19 nt, Artificial Sequence
  Description of Artificial Sequence: Synthetic oligonucleotide
agcagggccucugcucgag

SEQ ID NO: 2702314 - RNA, 19 nt, Artificial Sequence
  Description of Artificial Sequence: Synthetic oligonucleotide
ucagcccggagcuguucua

SEQ ID NO: 2702315 - RNA, 19 nt, Artificial Sequence
  Description of Artificial Sequence: Synthetic oligonucleotide
ucuagggaagguggcucuu

SEQ ID NO: 2702316 - RNA, 19 nt, Artificial Sequence
  Description of Artificial Sequence: Synthetic oligonucleotide
uccguucaucugucucuuc

SEQ ID NO: 2702317 - RNA, 19 nt, Artificial Sequence
  Description of Artificial Sequence: Synthetic oligonucleotide
cguuugagccucugcugcg

SEQ ID NO: 2702318 - RNA, 19 nt, Artificial Sequence
  Description of Artificial Sequence: Synthetic oligonucleotide
cugugccuuuucuuuccca

SEQ ID NO: 2702319 - RNA, 19 nt, Artificial Sequence
  Description of Artificial Sequence: Synthetic oligonucleotide
ggguccaaccgguucuuga

SEQ ID NO: 2702320 - RNA, 19 nt, Artificial Sequence
  Description of Artificial Sequence: Synthetic oligonucleotide
gcugugccuuuucuuuccc

SEQ ID NO: 2702321 - RNA, 19 nt, Artificial Sequence
  Description of Artificial Sequence: Synthetic oligonucleotide
agcugcggccucuccuacu

SEQ ID NO: 2702322 - RNA, 19 nt, Artificial Sequence
  Description of Artificial Sequence: Synthetic oligonucleotide
acgcucagcccggagcugu

SEQ ID NO: 2702323 - RNA, 19 nt, Artificial Sequence
  Description of Artificial Sequence: Synthetic oligonucleotide
gcugcggccucuccuacuc

SEQ ID NO: 2702324 - RNA, 19 nt, Artificial Sequence
  Description of Artificial Sequence: Synthetic oligonucleotide
aggacggcuuucacugcug

SEQ ID NO: 2702325 - RNA, 19 nt, Artificial Sequence
  Description of Artificial Sequence: Synthetic oligonucleotide
ccguucaucugucucuuca

SEQ ID NO: 2702326 - RNA, 19 nt, Artificial Sequence
  Description of Artificial Sequence: Synthetic oligonucleotide
uuguaccgccgccuccguu

SEQ ID NO: 2702327 - RNA, 19 nt, Artificial Sequence
  Description of Artificial Sequence: Synthetic oligonucleotide
ggagguugcguuugagccu

SEQ ID NO: 2702328 - RNA, 19 nt, Artificial Sequence
  Description of Artificial Sequence: Synthetic oligonucleotide
uggcagcugcggccucucc

SEQ ID NO: 2702329 - RNA, 19 nt, Artificial Sequence
  Description of Artificial Sequence: Synthetic oligonucleotide
cagugggguucugcuggcg

SEQ ID NO: 2702330 - RNA, 19 nt, Artificial Sequence
  Description of Artificial Sequence: Synthetic oligonucleotide
caaugggcagcaguggggu

SEQ ID NO: 2702331 - RNA, 19 nt, Artificial Sequence
  Description of Artificial Sequence: Synthetic oligonucleotide
gccuccguucaucugucuc

SEQ ID NO: 2702332 - RNA, 19 nt, Artificial Sequence
  Description of Artificial Sequence: Synthetic oligonucleotide
ggugcuucugcaugucccu

SEQ ID NO: 2702333 - RNA, 19 nt, Artificial Sequence
  Description of Artificial Sequence: Synthetic oligonucleotide
uggguugcucggccuugua

SEQ ID NO: 2702334 - RNA, 19 nt, Artificial Sequence
  Description of Artificial Sequence: Synthetic oligonucleotide
guaccgccgccuccguuca

SEQ ID NO: 2702335 - RNA, 19 nt, Artificial Sequence
  Description of Artificial Sequence: Synthetic oligonucleotide
ucgagcccucucagcugcu

SEQ ID NO: 2702336 - RNA, 19 nt, Artificial Sequence
  Description of Artificial Sequence: Synthetic oligonucleotide
cugcggccucuccuacucc

SEQ ID NO: 2702337 - RNA, 19 nt, Artificial Sequence
  Description of Artificial Sequence: Synthetic oligonucleotide
ggggagcugguaccaagga

SEQ ID NO: 2702338 - RNA, 19 nt, Artificial Sequence
  Description of Artificial Sequence: Synthetic oligonucleotide
gcucgagcccucucagcug

SEQ ID NO: 2702339 - RNA, 19 nt, Artificial Sequence
  Description of Artificial Sequence: Synthetic oligonucleotide
gacgcucagcccggagcug

SEQ ID NO: 2702340 - RNA, 19 nt, Artificial Sequence
  Description of Artificial Sequence: Synthetic oligonucleotide
ggcagcagugggguucugc

SEQ ID NO: 2702341 - RNA, 19 nt, Artificial Sequence
  Description of Artificial Sequence: Synthetic oligonucleotide
ggccauggggcacccuccc

SEQ ID NO: 2702342 - RNA, 19 nt, Artificial Sequence
  Description of Artificial Sequence: Synthetic oligonucleotide
ucuucucgucugggccuug

SEQ ID NO: 2702343 - RNA, 19 nt, Artificial Sequence
  Description of Artificial Sequence: Synthetic oligonucleotide
ggaaagggcagggagguuu

SEQ ID NO: 2702344 - RNA, 19 nt, Artificial Sequence
  Description of Artificial Sequence: Synthetic oligonucleotide
aucuucucgucugggccuu

SEQ ID NO: 2702345 - RNA, 19 nt, Artificial Sequence
  Description of Artificial Sequence: Synthetic oligonucleotide
gcagugggguucugcuggc

SEQ ID NO: 2702346 - RNA, 19 nt, Artificial Sequence
  Description of Artificial Sequence: Synthetic oligonucleotide
gguccaaccgguucuugau

SEQ ID NO: 2702347 - RNA, 19 nt, Artificial Sequence
  Description of Artificial Sequence: Synthetic oligonucleotide
ccugaccuugcuggguugc

SEQ ID NO: 2702348 - RNA, 19 nt, Artificial Sequence
  Description of Artificial Sequence: Synthetic oligonucleotide
cccaggaagcagggaaagg

SEQ ID NO: 2702349 - RNA, 19 nt, Artificial Sequence
  Description of Artificial Sequence: Synthetic oligonucleotide
auaugacggcuggcagcug

SEQ ID NO: 2702350 - RNA, 19 nt, Artificial Sequence
  Description of Artificial Sequence: Synthetic oligonucleotide
cucucuggaaggacggcuu

SEQ ID NO: 2702351 - RNA, 19 nt, Artificial Sequence
  Description of Artificial Sequence: Synthetic oligonucleotide
gaaagggcagggagguuuu

SEQ ID NO: 2702352 - RNA, 19 nt, Artificial Sequence
  Description of Artificial Sequence: Synthetic oligonucleotide
gugcuucugcaugucccuc

SEQ ID NO: 2702353 - RNA, 19 nt, Artificial Sequence
  Description of Artificial Sequence: Synthetic oligonucleotide
ggccuuguacccgggccag

SEQ ID NO: 2702354 - RNA, 19 nt, Artificial Sequence
  Description of Artificial Sequence: Synthetic oligonucleotide
cggcuuucacugcugugcc

SEQ ID NO: 2702355 - RNA, 19 nt, Artificial Sequence
  Description of Artificial Sequence: Synthetic oligonucleotide
guacccgggccagcagggc

SEQ ID NO: 2702356 - RNA, 19 nt, Artificial Sequence
  Description of Artificial Sequence: Synthetic oligonucleotide
gccgccuccguucaucugu

SEQ ID NO: 2702357 - RNA, 19 nt, Artificial Sequence
  Description of Artificial Sequence: Synthetic oligonucleotide
aggccgcuccucucuggaa

SEQ ID NO: 2702358 - RNA, 19 nt, Artificial Sequence
  Description of Artificial Sequence: Synthetic oligonucleotide
ccccaggaagcagggaaag

SEQ ID NO: 2702359 - RNA, 19 nt, Artificial Sequence
  Description of Artificial Sequence: Synthetic oligonucleotide
cagcugcuucccgcugacg

SEQ ID NO: 2702360 - RNA, 19 nt, Artificial Sequence
  Description of Artificial Sequence: Synthetic oligonucleotide
cccaaggccauggggcacc

SEQ ID NO: 2702361 - RNA, 19 nt, Artificial Sequence
  Description of Artificial Sequence: Synthetic oligonucleotide
gagcuguucuagggaaggu

SEQ ID NO: 2702362 - RNA, 19 nt, Artificial Sequence
  Description of Artificial Sequence: Synthetic oligonucleotide
cccucucagcugcuucccg

SEQ ID NO: 2702363 - RNA, 19 nt, Artificial Sequence
  Description of Artificial Sequence: Synthetic oligonucleotide
gcagcugcggccucuccua

SEQ ID NO: 2702364 - RNA, 19 nt, Artificial Sequence
  Description of Artificial Sequence: Synthetic oligonucleotide
cggagcuguucuagggaag

SEQ ID NO: 2702365 - RNA, 19 nt, Artificial Sequence
  Description of Artificial Sequence: Synthetic oligonucleotide
ugacgacgcucagcccgga

SEQ ID NO: 2702366 - RNA, 19 nt, Artificial Sequence
  Description of Artificial Sequence: Synthetic oligonucleotide
gguugcguuugagccucug

SEQ ID NO: 2702367 - RNA, 19 nt, Artificial Sequence
  Description of Artificial Sequence: Synthetic oligonucleotide
gccugaccuugcuggguug

SEQ ID NO: 2702368 - RNA, 19 nt, Artificial Sequence
  Description of Artificial Sequence: Synthetic oligonucleotide
ccggagcuguucuagggaa

SEQ ID NO: 2702369 - RNA, 19 nt, Artificial Sequence
  Description of Artificial Sequence: Synthetic oligonucleotide
ggguugaacugggaguugu

SEQ ID NO: 2702370 - RNA, 19 nt, Artificial Sequence
  Description of Artificial Sequence: Synthetic oligonucleotide
ccuccguucaucugucucu

SEQ ID NO: 2702371 - RNA, 19 nt, Artificial Sequence
  Description of Artificial Sequence: Synthetic oligonucleotide
ccuugcuggguugcucggc

SEQ ID NO: 2702372 - RNA, 19 nt, Artificial Sequence
  Description of Artificial Sequence: Synthetic oligonucleotide
ggccgcuguuucugaggcc

SEQ ID NO: 2702373 - RNA, 19 nt, Artificial Sequence
  Description of Artificial Sequence: Synthetic oligonucleotide
gggguugaacugggaguug

SEQ ID NO: 2702374 - RNA, 19 nt, Artificial Sequence
  Description of Artificial Sequence: Synthetic oligonucleotide
gcuggguugcucggccuug

SEQ ID NO: 2702375 - RNA, 19 nt, Artificial Sequence
  Description of Artificial Sequence: Synthetic oligonucleotide
gccauggggcacccucccc

SEQ ID NO: 2702376 - RNA, 19 nt, Artificial Sequence
  Description of Artificial Sequence: Synthetic oligonucleotide
ggcagggagguuuucucuu

SEQ ID NO: 2702377 - RNA, 19 nt, Artificial Sequence
  Description of Artificial Sequence: Synthetic oligonucleotide
cgguucuugaucuucucgu

SEQ ID NO: 2702378 - RNA, 19 nt, Artificial Sequence
  Description of Artificial Sequence: Synthetic oligonucleotide
cccggagcuguucuaggga

SEQ ID NO: 2702379 - RNA, 19 nt, Artificial Sequence
  Description of Artificial Sequence: Synthetic oligonucleotide
gcuuucacugcugugccuu

SEQ ID NO: 2702380 - RNA, 19 nt, Artificial Sequence
  Description of Artificial Sequence: Synthetic oligonucleotide
cccgcugacgacgcucagc

SEQ ID NO: 2702381 - RNA, 19 nt, Artificial Sequence
  Description of Artificial Sequence: Synthetic oligonucleotide
cguucaucugucucuucaa

SEQ ID NO: 2702382 - RNA, 19 nt, Artificial Sequence
  Description of Artificial Sequence: Synthetic oligonucleotide
guggcucuuugggccgcug

SEQ ID NO: 2702383 - RNA, 19 nt, Artificial Sequence
  Description of Artificial Sequence: Synthetic oligonucleotide
gguugaacugggaguugua

SEQ ID NO: 2702384 - RNA, 19 nt, Artificial Sequence
  Description of Artificial Sequence: Synthetic oligonucleotide
gcagggccucugcucgagc

SEQ ID NO: 2702385 - RNA, 19 nt, Artificial Sequence
  Description of Artificial Sequence: Synthetic oligonucleotide
ggacggcuuucacugcugu

SEQ ID NO: 2702386 - RNA, 19 nt, Artificial Sequence
  Description of Artificial Sequence: Synthetic oligonucleotide
gggaguuguaccgccgccu

SEQ ID NO: 2702387 - RNA, 19 nt, Artificial Sequence
  Description of Artificial Sequence: Synthetic oligonucleotide
cuuucacugcugugccuuu

SEQ ID NO: 2702388 - RNA, 19 nt, Artificial Sequence
  Description of Artificial Sequence: Synthetic oligonucleotide
guuguaccgccgccuccgu

SEQ ID NO: 2702389 - RNA, 19 nt, Artificial Sequence
  Description of Artificial Sequence: Synthetic oligonucleotide
ccgcuguuucugaggccgc

SEQ ID NO: 2702390 - RNA, 19 nt, Artificial Sequence
  Description of Artificial Sequence: Synthetic oligonucleotide
cagcagggccucugcucga

SEQ ID NO: 2702391 - RNA, 19 nt, Artificial Sequence
  Description of Artificial Sequence: Synthetic oligonucleotide
ccaaggagguugcguuuga

SEQ ID NO: 2702392 - RNA, 19 nt, Artificial Sequence
  Description of Artificial Sequence: Synthetic oligonucleotide
uaccgccgccuccguucau

SEQ ID NO: 2702393 - RNA, 19 nt, Artificial Sequence
  Description of Artificial Sequence: Synthetic oligonucleotide
gggguccaaccgguucuug

SEQ ID NO: 2702394 - RNA, 19 nt, Artificial Sequence
  Description of Artificial Sequence: Synthetic oligonucleotide
ggcuuucacugcugugccu

SEQ ID NO: 2702395 - RNA, 19 nt, Artificial Sequence
  Description of Artificial Sequence: Synthetic oligonucleotide
ggcucuuugggccgcuguu

SEQ ID NO: 2702396 - RNA, 19 nt, Artificial Sequence
  Description of Artificial Sequence: Synthetic oligonucleotide
ccgccuccguucaucuguc

SEQ ID NO: 2702397 - RNA, 19 nt, Artificial Sequence
  Description of Artificial Sequence: Synthetic oligonucleotide
cuagggaagguggcucuuu

SEQ ID NO: 2702398 - RNA, 19 nt, Artificial Sequence
  Description of Artificial Sequence: Synthetic oligonucleotide
cuccguucaucugucucuu

SEQ ID NO: 2702399 - RNA, 19 nt, Artificial Sequence
  Description of Artificial Sequence: Synthetic oligonucleotide
cugaccuugcuggguugcu

SEQ ID NO: 2702400 - RNA, 19 nt, Artificial Sequence
  Description of Artificial Sequence: Synthetic oligonucleotide
ccaaggccauggggcaccc

SEQ ID NO: 2702401 - RNA, 19 nt, Artificial Sequence
  Description of Artificial Sequence: Synthetic oligonucleotide
cugccugaccuugcugggu

SEQ ID NO: 2702402 - RNA, 19 nt, Artificial Sequence
  Description of Artificial Sequence: Synthetic oligonucleotide
gcucggccuuguacccggg

SEQ ID NO: 2702403 - RNA, 19 nt, Artificial Sequence
  Description of Artificial Sequence: Synthetic oligonucleotide
ccucucuggaaggacggcu

SEQ ID NO: 2702404 - RNA, 19 nt, Artificial Sequence
  Description of Artificial Sequence: Synthetic oligonucleotide
agguugcguuugagccucu

SEQ ID NO: 2702405 - RNA, 19 nt, Artificial Sequence
  Description of Artificial Sequence: Synthetic oligonucleotide
cggccuuguacccgggcca

SEQ ID NO: 2702406 - RNA, 19 nt, Artificial Sequence
  Description of Artificial Sequence: Synthetic oligonucleotide
cgcugacgacgcucagccc

SEQ ID NO: 2702407 - RNA, 19 nt, Artificial Sequence
  Description of Artificial Sequence: Synthetic oligonucleotide
cuggguugcucggccuugu

SEQ ID NO: 2702408 - RNA, 19 nt, Artificial Sequence
  Description of Artificial Sequence: Synthetic oligonucleotide
cgcuccucucuggaaggac

SEQ ID NO: 2702409 - RNA, 19 nt, Artificial Sequence
  Description of Artificial Sequence: Synthetic oligonucleotide
gggccucugcucgagcccu

SEQ ID NO: 2702410 - RNA, 19 nt, Artificial Sequence
  Description of Artificial Sequence: Synthetic oligonucleotide
ggccagcagggccucugcu

SEQ ID NO: 2702411 - RNA, 19 nt, Artificial Sequence
  Description of Artificial Sequence: Synthetic oligonucleotide
gcucuuugggccgcuguuu

SEQ ID NO: 2702412 - RNA, 19 nt, Artificial Sequence
  Description of Artificial Sequence: Synthetic oligonucleotide
cgacgcucagcccggagcu

SEQ ID NO: 2702413 - RNA, 19 nt, Artificial Sequence
  Description of Artificial Sequence: Synthetic oligonucleotide
ggcuggcagcugcggccuc

SEQ ID NO: 2702414 - RNA, 19 nt, Artificial Sequence
  Description of Artificial Sequence: Synthetic oligonucleotide
gcuggcagcugcggccucu

SEQ ID NO: 2702415 - RNA, 19 nt, Artificial Sequence
  Description of Artificial Sequence: Synthetic oligonucleotide
cgggccagcagggccucug

SEQ ID NO: 2702416 - RNA, 19 nt, Artificial Sequence
  Description of Artificial Sequence: Synthetic oligonucleotide
ggccucugcucgagcccuc

SEQ ID NO: 2702417 - RNA, 19 nt, Artificial Sequence
  Description of Artificial Sequence: Synthetic oligonucleotide
ccaaccgguucuugaucuu

SEQ ID NO: 2702418 - RNA, 19 nt, Artificial Sequence
  Description of Artificial Sequence: Synthetic oligonucleotide
cgccgccuccguucaucug

SEQ ID NO: 2702419 - RNA, 19 nt, Artificial Sequence
  Description of Artificial Sequence: Synthetic oligonucleotide
gcuucccgcugacgacgcu

SEQ ID NO: 2702420 - RNA, 19 nt, Artificial Sequence
  Description of Artificial Sequence: Synthetic oligonucleotide
ccgcuccucucuggaagga

SEQ ID NO: 2702421 - RNA, 19 nt, Artificial Sequence
  Description of Artificial Sequence: Synthetic oligonucleotide
gguggcucuuugggccgcu

SEQ ID NO: 2702422 - RNA, 19 nt, Artificial Sequence
  Description of Artificial Sequence: Synthetic oligonucleotide
gccucugcucgagcccucu

SEQ ID NO: 2702423 - RNA, 19 nt, Artificial Sequence
  Description of Artificial Sequence: Synthetic oligonucleotide
caaggccauggggcacccu

SEQ ID NO: 2702424 - RNA, 19 nt, Artificial Sequence
  Description of Artificial Sequence: Synthetic oligonucleotide
ccgccgccuccguucaucu

SEQ ID NO: 2702425 - RNA, 19 nt, Artificial Sequence
  Description of Artificial Sequence: Synthetic oligonucleotide
cccuccccagugagggacu

SEQ ID NO: 2702426 - RNA, 19 nt, Artificial Sequence
  Description of Artificial Sequence: Synthetic oligonucleotide
cuccccagugagggacuuu

SEQ ID NO: 2702427 - RNA, 19 nt, Artificial Sequence
  Description of Artificial Sequence: Synthetic oligonucleotide
cggcuggcagcugcggccu

SEQ ID NO: 2702428 - RNA, 19 nt, Artificial Sequence
  Description of Artificial Sequence: Synthetic oligonucleotide
cgccuccguucaucugucu

SEQ ID NO: 2702429 - RNA, 19 nt, Artificial Sequence
  Description of Artificial Sequence: Synthetic oligonucleotide
ccuccccagugagggacuu

SEQ ID NO: 2702430 - RNA, 19 nt, Artificial Sequence
  Description of Artificial Sequence: Synthetic oligonucleotide
cgagcccucucagcugcuu

SEQ ID NO: 2702431 - RNA, 19 nt, Artificial Sequence
  Description of Artificial Sequence: Synthetic oligonucleotide
ccgggccagcagggccucu

SEQ ID NO: 2702432 - RNA, 19 nt, Artificial Sequence
  Description of Artificial Sequence: Synthetic oligonucleotide
aaugcuuugguccauacac

SEQ ID NO: 2702433 - RNA, 19 nt, Artificial Sequence
  Description of Artificial Sequence: Synthetic oligonucleotide
auaacaaaugcuuuggucc

SEQ ID NO: 2702434 - RNA, 19 nt, Artificial Sequence
  Description of Artificial Sequence: Synthetic oligonucleotide
uuaaaguacaccaagaaga

SEQ ID NO: 2702435 - RNA, 19 nt, Artificial Sequence
  Description of Artificial Sequence: Synthetic oligonucleotide
acaaauacuguauaaauuc

SEQ ID NO: 2702436 - RNA, 19 nt, Artificial Sequence
  Description of Artificial Sequence: Synthetic oligonucleotide
uguauagauaacaauaggc

SEQ ID NO: 2702437 - RNA, 19 nt, Artificial Sequence
  Description of Artificial Sequence: Synthetic oligonucleotide
uuauacaggacacagaaca

SEQ ID NO: 2702438 - RNA, 19 nt, Artificial Sequence
  Description of Artificial Sequence: Synthetic oligonucleotide
uauacaaaucaaaagacug

SEQ ID NO: 2702439 - RNA, 19 nt, Artificial Sequence
  Description of Artificial Sequence: Synthetic oligonucleotide
agcuauuugauuuucuucc

SEQ ID NO: 2702440 - RNA, 19 nt, Artificial Sequence
  Description of Artificial Sequence: Synthetic oligonucleotide
aauaacaaaugcuuugguc

SEQ ID NO: 2702441 - RNA, 19 nt, Artificial Sequence
  Description of Artificial Sequence: Synthetic oligonucleotide
  modified_base (11)..(11): a, c, u, g, unknown or other
aagaacacccnccaaagac

SEQ ID NO: 2702442 - RNA, 19 nt, Artificial Sequence
  Description of Artificial Sequence: Synthetic oligonucleotide
aauguuaaaguacaccaag

SEQ ID NO: 2702443 - RNA, 19 nt, Artificial Sequence
  Description of Artificial Sequence: Synthetic oligonucleotide
uauaauuuagagcuaagca

SEQ ID NO: 2702444 - RNA, 19 nt, Artificial Sequence
  Description of Artificial Sequence: Synthetic oligonucleotide
uuuguauagauaacaauag

SEQ ID NO: 2702445 - RNA, 19 nt, Artificial Sequence
  Description of Artificial Sequence: Synthetic oligonucleotide
aaaauaacaaaugcuuugg

SEQ ID NO: 2702446 - RNA, 19 nt, Artificial Sequence
  Description of Artificial Sequence: Synthetic oligonucleotide
uuagagcuaagcaaaaugc

SEQ ID NO: 2702447 - RNA, 19 nt, Artificial Sequence
  Description of Artificial Sequence: Synthetic oligonucleotide
auaacaauaggcauugacc

SEQ ID NO: 2702448 - RNA, 19 nt, Artificial Sequence
  Description of Artificial Sequence: Synthetic oligonucleotide
aauucugggaaggaaaacg

SEQ ID NO: 2702449 - RNA, 19 nt, Artificial Sequence
  Description of Artificial Sequence: Synthetic oligonucleotide
agcaaaaugccaaugaccc

SEQ ID NO: 2702450 - RNA, 19 nt, Artificial Sequence
  Description of Artificial Sequence: Synthetic oligonucleotide
uuuagagcuaagcaaaaug

SEQ ID NO: 2702451 - RNA, 19 nt, Artificial Sequence
  Description of Artificial Sequence: Synthetic oligonucleotide
ugacacaaacuacaaaacg

SEQ ID NO: 2702452 - RNA, 19 nt, Artificial Sequence
  Description of Artificial Sequence: Synthetic oligonucleotide
aauacuguauaaauucugg

SEQ ID NO: 2702453 - RNA, 19 nt, Artificial Sequence
  Description of Artificial Sequence: Synthetic oligonucleotide
ucuguuuauaauuuagagc

SEQ ID NO: 2702454 - RNA, 19 nt, Artificial Sequence
  Description of Artificial Sequence: Synthetic oligonucleotide
uuuguuugggaaaacagcu

SEQ ID NO: 2702455 - RNA, 19 nt, Artificial Sequence
  Description of Artificial Sequence: Synthetic oligonucleotide
aaaugaaguuuauacagga

SEQ ID NO: 2702456 - RNA, 19 nt, Artificial Sequence
  Description of Artificial Sequence: Synthetic oligonucleotide
acaauguuaaaguacacca

SEQ ID NO: 2702457 - RNA, 19 nt, Artificial Sequence
  Description of Artificial Sequence: Synthetic oligonucleotide
uaacaauaggcauugacca

SEQ ID NO: 2702458 - RNA, 19 nt, Artificial Sequence
  Description of Artificial Sequence: Synthetic oligonucleotide
uccuaugacaccaugauuc

SEQ ID NO: 2702459 - RNA, 19 nt, Artificial Sequence
  Description of Artificial Sequence: Synthetic oligonucleotide
uaauuuagagcuaagcaaa

SEQ ID NO: 2702460 - RNA, 19 nt, Artificial Sequence
  Description of Artificial Sequence: Synthetic oligonucleotide
auaauuuagagcuaagcaa

SEQ ID NO: 2702461 - RNA, 19 nt, Artificial Sequence
  Description of Artificial Sequence: Synthetic oligonucleotide
uuguauagauaacaauagg

SEQ ID NO: 2702462 - RNA, 19 nt, Artificial Sequence
  Description of Artificial Sequence: Synthetic oligonucleotide
aagcaaaaugccaaugacc

SEQ ID NO: 2702463 - RNA, 19 nt, Artificial Sequence
  Description of Artificial Sequence: Synthetic oligonucleotide
aaacguaaaagccugggaa

SEQ ID NO: 2702464 - RNA, 19 nt, Artificial Sequence
  Description of Artificial Sequence: Synthetic oligonucleotide
agauacuccaagaacaccc

SEQ ID NO: 2702465 - RNA, 19 nt, Artificial Sequence
  Description of Artificial Sequence: Synthetic oligonucleotide
aucuguuuauaauuuagag

SEQ ID NO: 2702466 - RNA, 19 nt, Artificial Sequence
  Description of Artificial Sequence: Synthetic oligonucleotide
uucagugugacacucaaaa

SEQ ID NO: 2702467 - RNA, 19 nt, Artificial Sequence
  Description of Artificial Sequence: Synthetic oligonucleotide
uguauaaauucugggaagg

SEQ ID NO: 2702468 - RNA, 19 nt, Artificial Sequence
  Description of Artificial Sequence: Synthetic oligonucleotide
ugacagaaacagcaaaggg

SEQ ID NO: 2702469 - RNA, 19 nt, Artificial Sequence
  Description of Artificial Sequence: Synthetic oligonucleotide
aagucugguaguuucuggg

SEQ ID NO: 2702470 - RNA, 19 nt, Artificial Sequence
  Description of Artificial Sequence: Synthetic oligonucleotide
ugcuuauacaaaucaaaag

SEQ ID NO: 2702471 - RNA, 19 nt, Artificial Sequence
  Description of Artificial Sequence: Synthetic oligonucleotide
cuguuuauaauuuagagcu

SEQ ID NO: 2702472 - RNA, 19 nt, Artificial Sequence
  Description of Artificial Sequence: Synthetic oligonucleotide
augaaguuuauacaggaca

SEQ ID NO: 2702473 - RNA, 19 nt, Artificial Sequence
  Description of Artificial Sequence: Synthetic oligonucleotide
ugggaaaacagcuauuuga

SEQ ID NO: 2702474 - RNA, 19 nt, Artificial Sequence
  Description of Artificial Sequence: Synthetic oligonucleotide
ugaaguuuauacaggacac

SEQ ID NO: 2702475 - RNA, 19 nt, Artificial Sequence
  Description of Artificial Sequence: Synthetic oligonucleotide
acgauuacaauguuaaagu

SEQ ID NO: 2702476 - RNA, 19 nt, Artificial Sequence
  Description of Artificial Sequence: Synthetic oligonucleotide
aaaucaaaagacugcauuu

SEQ ID NO: 2702477 - RNA, 19 nt, Artificial Sequence
  Description of Artificial Sequence: Synthetic oligonucleotide
gaaggaaaacguaaaagcc

SEQ ID NO: 2702478 - RNA, 19 nt, Artificial Sequence
  Description of Artificial Sequence: Synthetic oligonucleotide
acacaauuuguauagauaa

SEQ ID NO: 2702479 - RNA, 19 nt, Artificial Sequence
  Description of Artificial Sequence: Synthetic oligonucleotide
auuuguuugggaaaacagc

SEQ ID NO: 2702480 - RNA, 19 nt, Artificial Sequence
  Description of Artificial Sequence: Synthetic oligonucleotide
aacuacaaaacgccaucac

SEQ ID NO: 2702481 - RNA, 19 nt, Artificial Sequence
  Description of Artificial Sequence: Synthetic oligonucleotide
ugauucuaaagauguaugc

SEQ ID NO: 2702482 - RNA, 19 nt, Artificial Sequence
  Description of Artificial Sequence: Synthetic oligonucleotide
aaguuuauacaggacacag

SEQ ID NO: 2702483 - RNA, 19 nt, Artificial Sequence
  Description of Artificial Sequence: Synthetic oligonucleotide
gacacaaacuacaaaacgc

SEQ ID NO: 2702484 - RNA, 19 nt, Artificial Sequence
  Description of Artificial Sequence: Synthetic oligonucleotide
aaagauguaugcuugcuua

SEQ ID NO: 2702485 - RNA, 19 nt, Artificial Sequence
  Description of Artificial Sequence: Synthetic oligonucleotide
uucuaaagauguaugcuug

SEQ ID NO: 2702486 - RNA, 19 nt, Artificial Sequence
  Description of Artificial Sequence: Synthetic oligonucleotide
uuauaauuuagagcuaagc

SEQ ID NO: 2702487 - RNA, 19 nt, Artificial Sequence
  Description of Artificial Sequence: Synthetic oligonucleotide
acacaaacuacaaaacgcc

SEQ ID NO: 2702488 - RNA, 19 nt, Artificial Sequence
  Description of Artificial Sequence: Synthetic oligonucleotide
gaaagaaacaaauacugua

SEQ ID NO: 2702489 - RNA, 19 nt, Artificial Sequence
  Description of Artificial Sequence: Synthetic oligonucleotide
uauagauaacaauaggcau

SEQ ID NO: 2702490 - RNA, 19 nt, Artificial Sequence
  Description of Artificial Sequence: Synthetic oligonucleotide
gacagaaacagcaaagggc

SEQ ID NO: 2702491 - RNA, 19 nt, Artificial Sequence
  Description of Artificial Sequence: Synthetic oligonucleotide
ggaaggaaaacguaaaagc

SEQ ID NO: 2702492 - RNA, 19 nt, Artificial Sequence
  Description of Artificial Sequence: Synthetic oligonucleotide
agugugacacucaaaaucg

SEQ ID NO: 2702493 - RNA, 19 nt, Artificial Sequence
  Description of Artificial Sequence: Synthetic oligonucleotide
uguuaaaguacaccaagaa

SEQ ID NO: 2702494 - RNA, 19 nt, Artificial Sequence
  Description of Artificial Sequence: Synthetic oligonucleotide
aaugccaaugacccuagca

SEQ ID NO: 2702495 - RNA, 19 nt, Artificial Sequence
  Description of Artificial Sequence: Synthetic oligonucleotide
auacuguauaaauucuggg

SEQ ID NO: 2702496 - RNA, 19 nt, Artificial Sequence
  Description of Artificial Sequence: Synthetic oligonucleotide
auaagauacuccaagaaca

SEQ ID NO: 2702497 - RNA, 19 nt, Artificial Sequence
  Description of Artificial Sequence: Synthetic oligonucleotide
acuguauaaauucugggaa

SEQ ID NO: 2702498 - RNA, 19 nt, Artificial Sequence
  Description of Artificial Sequence: Synthetic oligonucleotide
gauuacaauguuaaaguac

SEQ ID NO: 2702499 - RNA, 19 nt, Artificial Sequence
  Description of Artificial Sequence: Synthetic oligonucleotide
uuuauaauuuagagcuaag

SEQ ID NO: 2702500 - RNA, 19 nt, Artificial Sequence
  Description of Artificial Sequence: Synthetic oligonucleotide
auuacaauguuaaaguaca

SEQ ID NO: 2702501 - RNA, 19 nt, Artificial Sequence
  Description of Artificial Sequence: Synthetic oligonucleotide
auauaaaauaacaaaugcu

SEQ ID NO: 2702502 - RNA, 19 nt, Artificial Sequence
  Description of Artificial Sequence: Synthetic oligonucleotide
agcaaagggcgucagcugc

SEQ ID NO: 2702503 - RNA, 19 nt, Artificial Sequence
  Description of Artificial Sequence: Synthetic oligonucleotide
acucaaaaucgucagaaga

SEQ ID NO: 2702504 - RNA, 19 nt, Artificial Sequence
  Description of Artificial Sequence: Synthetic oligonucleotide
aaugaaguuuauacaggac

SEQ ID NO: 2702505 - RNA, 19 nt, Artificial Sequence
  Description of Artificial Sequence: Synthetic oligonucleotide
gcuuauacaaaucaaaaga

SEQ ID NO: 2702506 - RNA, 19 nt, Artificial Sequence
  Description of Artificial Sequence: Synthetic oligonucleotide
aaagaaacaaauacuguau

SEQ ID NO: 2702507 - RNA, 19 nt, Artificial Sequence
  Description of Artificial Sequence: Synthetic oligonucleotide
aaugguagagcuccaucug

SEQ ID NO: 2702508 - RNA, 19 nt, Artificial Sequence
  Description of Artificial Sequence: Synthetic oligonucleotide
acacagaacacaccaguac

SEQ ID NO: 2702509 - RNA, 19 nt, Artificial Sequence
  Description of Artificial Sequence: Synthetic oligonucleotide
ucauaagauacuccaagaa

SEQ ID NO: 2702510 - RNA, 19 nt, Artificial Sequence
  Description of Artificial Sequence: Synthetic oligonucleotide
uagagcuaagcaaaaugcc

SEQ ID NO: 2702511 - RNA, 19 nt, Artificial Sequence
  Description of Artificial Sequence: Synthetic oligonucleotide
aaaacguaaaagccuggga

SEQ ID NO: 2702512 - RNA, 19 nt, Artificial Sequence
  Description of Artificial Sequence: Synthetic oligonucleotide
guuuauacaggacacagaa

SEQ ID NO: 2702513 - RNA, 19 nt, Artificial Sequence
  Description of Artificial Sequence: Synthetic oligonucleotide
aaauaacaaaugcuuuggu

SEQ ID NO: 2702514 - RNA, 19 nt, Artificial Sequence
  Description of Artificial Sequence: Synthetic oligonucleotide
auuuguauagauaacaaua

SEQ ID NO: 2702515 - RNA, 19 nt, Artificial Sequence
  Description of Artificial Sequence: Synthetic oligonucleotide
augccaaugacccuagcag

SEQ ID NO: 2702516 - RNA, 19 nt, Artificial Sequence
  Description of Artificial Sequence: Synthetic oligonucleotide
uguaugcuugcuuauacaa

SEQ ID NO: 2702517 - RNA, 19 nt, Artificial Sequence
  Description of Artificial Sequence: Synthetic oligonucleotide
aaauacuguauaaauucug

SEQ ID NO: 2702518 - RNA, 19 nt, Artificial Sequence
  Description of Artificial Sequence: Synthetic oligonucleotide
aagauacuccaagaacacc

SEQ ID NO: 2702519 - RNA, 19 nt, Artificial Sequence
  Description of Artificial Sequence: Synthetic oligonucleotide
aaaaucgucagaagaacca

SEQ ID NO: 2702520 - RNA, 19 nt, Artificial Sequence
  Description of Artificial Sequence: Synthetic oligonucleotide
cacgauuacaauguuaaag

SEQ ID NO: 2702521 - RNA, 19 nt, Artificial Sequence
  Description of Artificial Sequence: Synthetic oligonucleotide
ugcuugcuuauacaaauca

SEQ ID NO: 2702522 - RNA, 19 nt, Artificial Sequence
  Description of Artificial Sequence: Synthetic oligonucleotide
uagauaacaauaggcauug

SEQ ID NO: 2702523 - RNA, 19 nt, Artificial Sequence
  Description of Artificial Sequence: Synthetic oligonucleotide
uaagauacuccaagaacac

SEQ ID NO: 2702524 - RNA, 19 nt, Artificial Sequence
  Description of Artificial Sequence: Synthetic oligonucleotide
aaggaaaacguaaaagccu

SEQ ID NO: 2702525 - RNA, 19 nt, Artificial Sequence
  Description of Artificial Sequence: Synthetic oligonucleotide
caaaaucgucagaagaacc

SEQ ID NO: 2702526 - RNA, 19 nt, Artificial Sequence
  Description of Artificial Sequence: Synthetic oligonucleotide
agaaccaucgugaugacug

SEQ ID NO: 2702527 - RNA, 19 nt, Artificial Sequence
  Description of Artificial Sequence: Synthetic oligonucleotide
gaaaacguaaaagccuggg

SEQ ID NO: 2702528 - RNA, 19 nt, Artificial Sequence
  Description of Artificial Sequence: Synthetic oligonucleotide
agugcucucacacagugga

SEQ ID NO: 2702529 - RNA, 19 nt, Artificial Sequence
  Description of Artificial Sequence: Synthetic oligonucleotide
uaaauucugggaaggaaaa

SEQ ID NO: 2702530 - RNA, 19 nt, Artificial Sequence
  Description of Artificial Sequence: Synthetic oligonucleotide
ucugggaaggaaaacguaa

SEQ ID NO: 2702531 - RNA, 19 nt, Artificial Sequence
  Description of Artificial Sequence: Synthetic oligonucleotide
aacguaaaagccugggaaa

SEQ ID NO: 2702532 - RNA, 19 nt, Artificial Sequence
  Description of Artificial Sequence: Synthetic oligonucleotide
guauagauaacaauaggca

SEQ ID NO: 2702533 - RNA, 19 nt, Artificial Sequence
  Description of Artificial Sequence: Synthetic oligonucleotide
gauguaugcuugcuuauac

SEQ ID NO: 2702534 - RNA, 19 nt, Artificial Sequence
  Description of Artificial Sequence: Synthetic oligonucleotide
acuacaaaacgccaucacu

SEQ ID NO: 2702535 - RNA, 19 nt, Artificial Sequence
  Description of Artificial Sequence: Synthetic oligonucleotide
aaaacagcuauuugauuuu

SEQ ID NO: 2702536 - RNA, 19 nt, Artificial Sequence
  Description of Artificial Sequence: Synthetic oligonucleotide
uuuggaaucccacacgauu

SEQ ID NO: 2702537 - RNA, 19 nt, Artificial Sequence
  Description of Artificial Sequence: Synthetic oligonucleotide
uuuccuaugacaccaugau

SEQ ID NO: 2702538 - RNA, 19 nt, Artificial Sequence
  Description of Artificial Sequence: Synthetic oligonucleotide
ugacacucaaaaucgucag

SEQ ID NO: 2702539 - RNA, 19 nt, Artificial Sequence
  Description of Artificial Sequence: Synthetic oligonucleotide
aagacugcauuuguuuggg

SEQ ID NO: 2702540 - RNA, 19 nt, Artificial Sequence
  Description of Artificial Sequence: Synthetic oligonucleotide
cagagaaugguagagcucc

SEQ ID NO: 2702541 - RNA, 19 nt, Artificial Sequence
  Description of Artificial Sequence: Synthetic oligonucleotide
aaauggcagagaaugguag

SEQ ID NO: 2702542 - RNA, 19 nt, Artificial Sequence
  Description of Artificial Sequence: Synthetic oligonucleotide
ucuaaagauguaugcuugc

SEQ ID NO: 2702543 - RNA, 19 nt, Artificial Sequence
  Description of Artificial Sequence: Synthetic oligonucleotide
gaaagacgccuccugacag

SEQ ID NO: 2702544 - RNA, 19 nt, Artificial Sequence
  Description of Artificial Sequence: Synthetic oligonucleotide
uaacaaaugcuuuggucca

SEQ ID NO: 2702545 - RNA, 19 nt, Artificial Sequence
  Description of Artificial Sequence: Synthetic oligonucleotide
auucuaaagauguaugcuu

SEQ ID NO: 2702546 - RNA, 19 nt, Artificial Sequence
  Description of Artificial Sequence: Synthetic oligonucleotide
ugccaaugacccuagcagg

SEQ ID NO: 2702547 - RNA, 19 nt, Artificial Sequence
  Description of Artificial Sequence: Synthetic oligonucleotide
cagugugacacucaaaauc

SEQ ID NO: 2702548 - RNA, 19 nt, Artificial Sequence
  Description of Artificial Sequence: Synthetic oligonucleotide
  modified_base (17)..(17): a, c, u, g, unknown or other
uacuccaagaacacccncc

SEQ ID NO: 2702549 - RNA, 19 nt, Artificial Sequence
  Description of Artificial Sequence: Synthetic oligonucleotide
  modified_base (7)..(7): a, c, u, g, unknown or other
acacccnccaaagacaaag

SEQ ID NO: 2702550 - RNA, 19 nt, Artificial Sequence
  Description of Artificial Sequence: Synthetic oligonucleotide
cuguauaaauucugggaag

SEQ ID NO: 2702551 - RNA, 19 nt, Artificial Sequence
  Description of Artificial Sequence: Synthetic oligonucleotide
agaaugguagagcuccauc

SEQ ID NO: 2702552 - RNA, 19 nt, Artificial Sequence
  Description of Artificial Sequence: Synthetic oligonucleotide
uacacaauuuguauagaua

SEQ ID NO: 2702553 - RNA, 19 nt, Artificial Sequence
  Description of Artificial Sequence: Synthetic oligonucleotide
ucccacacgauuacaaugu

SEQ ID NO: 2702554 - RNA, 19 nt, Artificial Sequence
  Description of Artificial Sequence: Synthetic oligonucleotide
  modified_base (5)..(5): a, c, u, g, unknown or other
acccnccaaagacaaagac

SEQ ID NO: 2702555 - RNA, 19 nt, Artificial Sequence
  Description of Artificial Sequence: Synthetic oligonucleotide
aacaaauacuguauaaauu

SEQ ID NO: 2702556 - RNA, 19 nt, Artificial Sequence
  Description of Artificial Sequence: Synthetic oligonucleotide
ucaaaaucgucagaagaac

SEQ ID NO: 2702557 - RNA, 19 nt, Artificial Sequence
  Description of Artificial Sequence: Synthetic oligonucleotide
uauacaggacacagaacac

SEQ ID NO: 2702558 - RNA, 19 nt, Artificial Sequence
  Description of Artificial Sequence: Synthetic oligonucleotide
uauuugauuuucuuccgau

SEQ ID NO: 2702559 - RNA, 19 nt, Artificial Sequence
  Description of Artificial Sequence: Synthetic oligonucleotide
  modified_base (16)..(16): a, c, u, g, unknown or other
acuccaagaacacccncca

SEQ ID NO: 2702560 - RNA, 19 nt, Artificial Sequence
  Description of Artificial Sequence: Synthetic oligonucleotide
uuuauacaggacacagaac

SEQ ID NO: 2702561 - RNA, 19 nt, Artificial Sequence
  Description of Artificial Sequence: Synthetic oligonucleotide
ucugguaguuucuggggag

SEQ ID NO: 2702562 - RNA, 19 nt, Artificial Sequence
  Description of Artificial Sequence: Synthetic oligonucleotide
accaguacagaaaacaagu

SEQ ID NO: 2702563 - RNA, 19 nt, Artificial Sequence
  Description of Artificial Sequence: Synthetic oligonucleotide
cugacagaaacagcaaagg

SEQ ID NO: 2702564 - RNA, 19 nt, Artificial Sequence
  Description of Artificial Sequence: Synthetic oligonucleotide
aaugacccuagcagguccc

SEQ ID NO: 2702565 - RNA, 19 nt, Artificial Sequence
  Description of Artificial Sequence: Synthetic oligonucleotide
acaguggaaaggaagugac

SEQ ID NO: 2702566 - RNA, 19 nt, Artificial Sequence
  Description of Artificial Sequence: Synthetic oligonucleotide
cuugcuuauacaaaucaaa

SEQ ID NO: 2702567 - RNA, 19 nt, Artificial Sequence
  Description of Artificial Sequence: Synthetic oligonucleotide
uaggcauugaccauuucuu

SEQ ID NO: 2702568 - RNA, 19 nt, Artificial Sequence
  Description of Artificial Sequence: Synthetic oligonucleotide
uggaaaggaagugacacaa

SEQ ID NO: 2702569 - RNA, 19 nt, Artificial Sequence
  Description of Artificial Sequence: Synthetic oligonucleotide
ugugacacucaaaaucguc

SEQ ID NO: 2702570 - RNA, 19 nt, Artificial Sequence
  Description of Artificial Sequence: Synthetic oligonucleotide
cacacgauuacaauguuaa

SEQ ID NO: 2702571 - RNA, 19 nt, Artificial Sequence
  Description of Artificial Sequence: Synthetic oligonucleotide
uuggaaucccacacgauua

SEQ ID NO: 2702572 - RNA, 19 nt, Artificial Sequence
  Description of Artificial Sequence: Synthetic oligonucleotide
uccauacacaauuuguaua

SEQ ID NO: 2702573 - RNA, 19 nt, Artificial Sequence
  Description of Artificial Sequence: Synthetic oligonucleotide
agaaacagcaaagggcguc

SEQ ID NO: 2702574 - RNA, 19 nt, Artificial Sequence
  Description of Artificial Sequence: Synthetic oligonucleotide
uugggaaaacagcuauuug

SEQ ID NO: 2702575 - RNA, 19 nt, Artificial Sequence
  Description of Artificial Sequence: Synthetic oligonucleotide
aacaauaggcauugaccau

SEQ ID NO: 2702576 - RNA, 19 nt, Artificial Sequence
  Description of Artificial Sequence: Synthetic oligonucleotide
aaucgucagaagaaccauc

SEQ ID NO: 2702577 - RNA, 19 nt, Artificial Sequence
  Description of Artificial Sequence: Synthetic oligonucleotide
cuaagcaaaaugccaauga

SEQ ID NO: 2702578 - RNA, 19 nt, Artificial Sequence
  Description of Artificial Sequence: Synthetic oligonucleotide
caaacuacaaaacgccauc

SEQ ID NO: 2702579 - RNA, 19 nt, Artificial Sequence
  Description of Artificial Sequence: Synthetic oligonucleotide
aaaugccaaugacccuagc

SEQ ID NO: 2702580 - RNA, 19 nt, Artificial Sequence
  Description of Artificial Sequence: Synthetic oligonucleotide
aaacuacaaaacgccauca

SEQ ID NO: 2702581 - RNA, 19 nt, Artificial Sequence
  Description of Artificial Sequence: Synthetic oligonucleotide
aaagccugggaaagacgcc

SEQ ID NO: 2702582 - RNA, 19 nt, Artificial Sequence
  Description of Artificial Sequence: Synthetic oligonucleotide
aucccacacgauuacaaug

SEQ ID NO: 2702583 - RNA, 19 nt, Artificial Sequence
  Description of Artificial Sequence: Synthetic oligonucleotide
cucaaaaucgucagaagaa

SEQ ID NO: 2702584 - RNA, 19 nt, Artificial Sequence
  Description of Artificial Sequence: Synthetic oligonucleotide
cauuucuuuuccuaugaca

SEQ ID NO: 2702585 - RNA, 19 nt, Artificial Sequence
  Description of Artificial Sequence: Synthetic oligonucleotide
aggaaaacguaaaagccug

SEQ ID NO: 2702586 - RNA, 19 nt, Artificial Sequence
  Description of Artificial Sequence: Synthetic oligonucleotide
uuugggaaaacagcuauuu

SEQ ID NO: 2702587 - RNA, 19 nt, Artificial Sequence
  Description of Artificial Sequence: Synthetic oligonucleotide
ucaaaagacugcauuuguu

SEQ ID NO: 2702588 - RNA, 19 nt, Artificial Sequence
  Description of Artificial Sequence: Synthetic oligonucleotide
  modified_base (18)..(18): a, c, u, g, unknown or other
auacuccaagaacacccnc

SEQ ID NO: 2702589 - RNA, 19 nt, Artificial Sequence
  Description of Artificial Sequence: Synthetic oligonucleotide
aaucccacacgauuacaau

SEQ ID NO: 2702590 - RNA, 19 nt, Artificial Sequence
  Description of Artificial Sequence: Synthetic oligonucleotide
acaccaugauucuaaagau

SEQ ID NO: 2702591 - RNA, 19 nt, Artificial Sequence
  Description of Artificial Sequence: Synthetic oligonucleotide
uacaaaacgccaucacuaa

SEQ ID NO: 2702592 - RNA, 19 nt, Artificial Sequence
  Description of Artificial Sequence: Synthetic oligonucleotide
cacaauuuguauagauaac

SEQ ID NO: 2702593 - RNA, 19 nt, Artificial Sequence
  Description of Artificial Sequence: Synthetic oligonucleotide
aauaggcauugaccauuuc

SEQ ID NO: 2702594 - RNA, 19 nt, Artificial Sequence
  Description of Artificial Sequence: Synthetic oligonucleotide
aagauguaugcuugcuuau

SEQ ID NO: 2702595 - RNA, 19 nt, Artificial Sequence
  Description of Artificial Sequence: Synthetic oligonucleotide
  modified_base (3)..(3): a, c, u, g, unknown or other
ccnccaaagacaaagacca

SEQ ID NO: 2702596 - RNA, 19 nt, Artificial Sequence
  Description of Artificial Sequence: Synthetic oligonucleotide
acagaaaacaagucuggua

SEQ ID NO: 2702597 - RNA, 19 nt, Artificial Sequence
  Description of Artificial Sequence: Synthetic oligonucleotide
  modified_base (10)..(10): a, c, u, g, unknown or other
agaacacccnccaaagaca

SEQ ID NO: 2702598 - RNA, 19 nt, Artificial Sequence
  Description of Artificial Sequence: Synthetic oligonucleotide
uugaccauuucuuuuccua

SEQ ID NO: 2702599 - RNA, 19 nt, Artificial Sequence
  Description of Artificial Sequence: Synthetic oligonucleotide
gaccauuucuuuuccuaug

SEQ ID NO: 2702600 - RNA, 19 nt, Artificial Sequence
  Description of Artificial Sequence: Synthetic oligonucleotide
augauucuaaagauguaug

SEQ ID NO: 2702601 - RNA, 19 nt, Artificial Sequence
  Description of Artificial Sequence: Synthetic oligonucleotide
caagucugguaguuucugg

SEQ ID NO: 2702602 - RNA, 19 nt, Artificial Sequence
  Description of Artificial Sequence: Synthetic oligonucleotide
gaaugguagagcuccaucu

SEQ ID NO: 2702603 - RNA, 19 nt, Artificial Sequence
  Description of Artificial Sequence: Synthetic oligonucleotide
auagauaacaauaggcauu

SEQ ID NO: 2702604 - RNA, 19 nt, Artificial Sequence
  Description of Artificial Sequence: Synthetic oligonucleotide
agagcuaagcaaaaugcca

SEQ ID NO: 2702605 - RNA, 19 nt, Artificial Sequence
  Description of Artificial Sequence: Synthetic oligonucleotide
guuuauaauuuagagcuaa

SEQ ID NO: 2702606 - RNA, 19 nt, Artificial Sequence
  Description of Artificial Sequence: Synthetic oligonucleotide
gucagaagaaccaucguga

SEQ ID NO: 2702607 - RNA, 19 nt, Artificial Sequence
  Description of Artificial Sequence: Synthetic oligonucleotide
gucauaagauacuccaaga

SEQ ID NO: 2702608 - RNA, 19 nt, Artificial Sequence
  Description of Artificial Sequence: Synthetic oligonucleotide
ugcuuugguccauacacaa

SEQ ID NO: 2702609 - RNA, 19 nt, Artificial Sequence
  Description of Artificial Sequence: Synthetic oligonucleotide
agaaaacaagucugguagu

SEQ ID NO: 2702610 - RNA, 19 nt, Artificial Sequence
  Description of Artificial Sequence: Synthetic oligonucleotide
agaacacaccaguacagaa

SEQ ID NO: 2702611 - RNA, 19 nt, Artificial Sequence
  Description of Artificial Sequence: Synthetic oligonucleotide
caauuuguauagauaacaa

SEQ ID NO: 2702612 - RNA, 19 nt, Artificial Sequence
  Description of Artificial Sequence: Synthetic oligonucleotide
caaaacgccaucacuaaaa

SEQ ID NO: 2702613 - RNA, 19 nt, Artificial Sequence
  Description of Artificial Sequence: Synthetic oligonucleotide
aggaagugacacaaacuac

SEQ ID NO: 2702614 - RNA, 19 nt, Artificial Sequence
  Description of Artificial Sequence: Synthetic oligonucleotide
uguuuauaauuuagagcua

SEQ ID NO: 2702615 - RNA, 19 nt, Artificial Sequence
  Description of Artificial Sequence: Synthetic oligonucleotide
aaaucgucagaagaaccau

SEQ ID NO: 2702616 - RNA, 19 nt, Artificial Sequence
  Description of Artificial Sequence: Synthetic oligonucleotide
aaaaugccaaugacccuag

SEQ ID NO: 2702617 - RNA, 19 nt, Artificial Sequence
  Description of Artificial Sequence: Synthetic oligonucleotide
aaagacgccuccugacaga

SEQ ID NO: 2702618 - RNA, 19 nt, Artificial Sequence
  Description of Artificial Sequence: Synthetic oligonucleotide
guaaaagccugggaaagac

SEQ ID NO: 2702619 - RNA, 19 nt, Artificial Sequence
  Description of Artificial Sequence: Synthetic oligonucleotide
ugcaguuguuccucagaag

SEQ ID NO: 2702620 - RNA, 19 nt, Artificial Sequence
  Description of Artificial Sequence: Synthetic oligonucleotide
aaaauggcagagaauggua

SEQ ID NO: 2702621 - RNA, 19 nt, Artificial Sequence
  Description of Artificial Sequence: Synthetic oligonucleotide
ugaccauuucuuuuccuau

SEQ ID NO: 2702622 - RNA, 19 nt, Artificial Sequence
  Description of Artificial Sequence: Synthetic oligonucleotide
gauucuaaagauguaugcu

SEQ ID NO: 2702623 - RNA, 19 nt, Artificial Sequence
  Description of Artificial Sequence: Synthetic oligonucleotide
acacucaaaaucgucagaa

SEQ ID NO: 2702624 - RNA, 19 nt, Artificial Sequence
  Description of Artificial Sequence: Synthetic oligonucleotide
acguaaaagccugggaaag

SEQ ID NO: 2702625 - RNA, 19 nt, Artificial Sequence
  Description of Artificial Sequence: Synthetic oligonucleotide
aagggcgucagcugcaguu

SEQ ID NO: 2702626 - RNA, 19 nt, Artificial Sequence
  Description of Artificial Sequence: Synthetic oligonucleotide
caucuguuuauaauuuaga

SEQ ID NO: 2702627 - RNA, 19 nt, Artificial Sequence
  Description of Artificial Sequence: Synthetic oligonucleotide
cauugaccauuucuuuucc

SEQ ID NO: 2702628 - RNA, 19 nt, Artificial Sequence
  Description of Artificial Sequence: Synthetic oligonucleotide
  modified_base (4)..(4): a, c, u, g, unknown or other
cccnccaaagacaaagacc

SEQ ID NO: 2702629 - RNA, 19 nt, Artificial Sequence
  Description of Artificial Sequence: Synthetic oligonucleotide
caccaugauucuaaagaug

SEQ ID NO: 2702630 - RNA, 19 nt, Artificial Sequence
  Description of Artificial Sequence: Synthetic oligonucleotide
caaugacccuagcaggucc

SEQ ID NO: 2702631 - RNA, 19 nt, Artificial Sequence
  Description of Artificial Sequence: Synthetic oligonucleotide
cagcuauuugauuuucuuc

SEQ ID NO: 2702632 - RNA, 19 nt, Artificial Sequence
  Description of Artificial Sequence: Synthetic oligonucleotide
aauuuagagcuaagcaaaa

SEQ ID NO: 2702633 - RNA, 19 nt, Artificial Sequence
  Description of Artificial Sequence: Synthetic oligonucleotide
acagaacacaccaguacag

SEQ ID NO: 2702634 - RNA, 19 nt, Artificial Sequence
  Description of Artificial Sequence: Synthetic oligonucleotide
auguaugcuugcuuauaca

SEQ ID NO: 2702635 - RNA, 19 nt, Artificial Sequence
  Description of Artificial Sequence: Synthetic oligonucleotide
ucagaagaaccaucgugau

SEQ ID NO: 2702636 - RNA, 19 nt, Artificial Sequence
  Description of Artificial Sequence: Synthetic oligonucleotide
auuugauuuucuuccgauu

SEQ ID NO: 2702637 - RNA, 19 nt, Artificial Sequence
  Description of Artificial Sequence: Synthetic oligonucleotide
augguagagcuccaucugu

SEQ ID NO: 2702638 - RNA, 19 nt, Artificial Sequence
  Description of Artificial Sequence: Synthetic oligonucleotide
uuugguccauacacaauuu

SEQ ID NO: 2702639 - RNA, 19 nt, Artificial Sequence
  Description of Artificial Sequence: Synthetic oligonucleotide
uuguuugggaaaacagcua

SEQ ID NO: 2702640 - RNA, 19 nt, Artificial Sequence
  Description of Artificial Sequence: Synthetic oligonucleotide
ucagugugacacucaaaau

SEQ ID NO: 2702641 - RNA, 19 nt, Artificial Sequence
  Description of Artificial Sequence: Synthetic oligonucleotide
gugacacaaacuacaaaac

SEQ ID NO: 2702642 - RNA, 19 nt, Artificial Sequence
  Description of Artificial Sequence: Synthetic oligonucleotide
aaaguacaccaagaagaaa

SEQ ID NO: 2702643 - RNA, 19 nt, Artificial Sequence
  Description of Artificial Sequence: Synthetic oligonucleotide
gugacacucaaaaucguca

SEQ ID NO: 2702644 - RNA, 19 nt, Artificial Sequence
  Description of Artificial Sequence: Synthetic oligonucleotide
gaaguuuauacaggacaca

SEQ ID NO: 2702645 - RNA, 19 nt, Artificial Sequence
  Description of Artificial Sequence: Synthetic oligonucleotide
cugaagaaagaaacaaaua

SEQ ID NO: 2702646 - RNA, 19 nt, Artificial Sequence
  Description of Artificial Sequence: Synthetic oligonucleotide
auucugggaaggaaaacgu

SEQ ID NO: 2702647 - RNA, 19 nt, Artificial Sequence
  Description of Artificial Sequence: Synthetic oligonucleotide
uccaucuguuuauaauuua

SEQ ID NO: 2702648 - RNA, 19 nt, Artificial Sequence
  Description of Artificial Sequence: Synthetic oligonucleotide
gaagaaaaugaaguuuaua

SEQ ID NO: 2702649 - RNA, 19 nt, Artificial Sequence
  Description of Artificial Sequence: Synthetic oligonucleotide
acaauaggcauugaccauu

SEQ ID NO: 2702650 - RNA, 19 nt, Artificial Sequence
  Description of Artificial Sequence: Synthetic oligonucleotide
cacaaacuacaaaacgcca

SEQ ID NO: 2702651 - RNA, 19 nt, Artificial Sequence
  Description of Artificial Sequence: Synthetic oligonucleotide
uccucagaagugcucucac

SEQ ID NO: 2702652 - RNA, 19 nt, Artificial Sequence
  Description of Artificial Sequence: Synthetic oligonucleotide
  modified_base (19)..(19): a, c, u, g, unknown or other
gauacuccaagaacacccn

SEQ ID NO: 2702653 - RNA, 19 nt, Artificial Sequence
  Description of Artificial Sequence: Synthetic oligonucleotide
cuuuuccuaugacaccaug

SEQ ID NO: 2702654 - RNA, 19 nt, Artificial Sequence
  Description of Artificial Sequence: Synthetic oligonucleotide
uucugggaaggaaaacgua

SEQ ID NO: 2702655 - RNA, 19 nt, Artificial Sequence
  Description of Artificial Sequence: Synthetic oligonucleotide
aagugcucucacacagugg

SEQ ID NO: 2702656 - RNA, 19 nt, Artificial Sequence
  Description of Artificial Sequence: Synthetic oligonucleotide
caauguuaaaguacaccaa

SEQ ID NO: 2702657 - RNA, 19 nt, Artificial Sequence
  Description of Artificial Sequence: Synthetic oligonucleotide
gagcuaagcaaaaugccaa

SEQ ID NO: 2702658 - RNA, 19 nt, Artificial Sequence
  Description of Artificial Sequence: Synthetic oligonucleotide
caaauacuguauaaauucu

SEQ ID NO: 2702659 - RNA, 19 nt, Artificial Sequence
  Description of Artificial Sequence: Synthetic oligonucleotide
gaaacagcaaagggcguca

SEQ ID NO: 2702660 - RNA, 19 nt, Artificial Sequence
  Description of Artificial Sequence: Synthetic oligonucleotide
caaaaugccaaugacccua

SEQ ID NO: 2702661 - RNA, 19 nt, Artificial Sequence
  Description of Artificial Sequence: Synthetic oligonucleotide
ugcucucacacaguggaaa

SEQ ID NO: 2702662 - RNA, 19 nt, Artificial Sequence
  Description of Artificial Sequence: Synthetic oligonucleotide
acaaaacgccaucacuaaa

SEQ ID NO: 2702663 - RNA, 19 nt, Artificial Sequence
  Description of Artificial Sequence: Synthetic oligonucleotide
cuauuugauuuucuuccga

SEQ ID NO: 2702664 - RNA, 19 nt, Artificial Sequence
  Description of Artificial Sequence: Synthetic oligonucleotide
aggguucagugugacacuc

SEQ ID NO: 2702665 - RNA, 19 nt, Artificial Sequence
  Description of Artificial Sequence: Synthetic oligonucleotide
uuccuaugacaccaugauu

SEQ ID NO: 2702666 - RNA, 19 nt, Artificial Sequence
  Description of Artificial Sequence: Synthetic oligonucleotide
ggucccagucauaagauac

SEQ ID NO: 2702667 - RNA, 19 nt, Artificial Sequence
  Description of Artificial Sequence: Synthetic oligonucleotide
agcuaagcaaaaugccaau

SEQ ID NO: 2702668 - RNA, 19 nt, Artificial Sequence
  Description of Artificial Sequence: Synthetic oligonucleotide
auuuagagcuaagcaaaau

SEQ ID NO: 2702669 - RNA, 19 nt, Artificial Sequence
  Description of Artificial Sequence: Synthetic oligonucleotide
cagaagaaccaucgugaug

SEQ ID NO: 2702670 - RNA, 19 nt, Artificial Sequence
  Description of Artificial Sequence: Synthetic oligonucleotide
gaacacaccaguacagaaa

SEQ ID NO: 2702671 - RNA, 19 nt, Artificial Sequence
  Description of Artificial Sequence: Synthetic oligonucleotide
gcauugaccauuucuuuuc

SEQ ID NO: 2702672 - RNA, 19 nt, Artificial Sequence
  Description of Artificial Sequence: Synthetic oligonucleotide
caaaucaaaagacugcauu

SEQ ID NO: 2702673 - RNA, 19 nt, Artificial Sequence
  Description of Artificial Sequence: Synthetic oligonucleotide
aguuuauacaggacacaga

SEQ ID NO: 2702674 - RNA, 19 nt, Artificial Sequence
  Description of Artificial Sequence: Synthetic oligonucleotide
aagaaccaucgugaugacu

SEQ ID NO: 2702675 - RNA, 19 nt, Artificial Sequence
  Description of Artificial Sequence: Synthetic oligonucleotide
aaacagcaaagggcgucag

SEQ ID NO: 2702676 - RNA, 19 nt, Artificial Sequence
  Description of Artificial Sequence: Synthetic oligonucleotide
ucgucagaagaaccaucgu

SEQ ID NO: 2702677 - RNA, 19 nt, Artificial Sequence
  Description of Artificial Sequence: Synthetic oligonucleotide
ccuccugacagaaacagca

SEQ ID NO: 2702678 - RNA, 19 nt, Artificial Sequence
  Description of Artificial Sequence: Synthetic oligonucleotide
caaaagacugcauuuguuu

SEQ ID NO: 2702679 - RNA, 19 nt, Artificial Sequence
  Description of Artificial Sequence: Synthetic oligonucleotide
uaguuucuggggaggguuc

SEQ ID NO: 2702680 - RNA, 19 nt, Artificial Sequence
  Description of Artificial Sequence: Synthetic oligonucleotide
  modified_base (9)..(9): a, c, u, g, unknown or other
gaacacccnccaaagacaa

SEQ ID NO: 2702681 - RNA, 19 nt, Artificial Sequence
  Description of Artificial Sequence: Synthetic oligonucleotide
accaucgugaugacugaag

SEQ ID NO: 2702682 - RNA, 19 nt, Artificial Sequence
  Description of Artificial Sequence: Synthetic oligonucleotide
cuuugguccauacacaauu

SEQ ID NO: 2702683 - RNA, 19 nt, Artificial Sequence
  Description of Artificial Sequence: Synthetic oligonucleotide
gucugguaguuucugggga

SEQ ID NO: 2702684 - RNA, 19 nt, Artificial Sequence
  Description of Artificial Sequence: Synthetic oligonucleotide
guauaaauucugggaagga

SEQ ID NO: 2702685 - RNA, 19 nt, Artificial Sequence
  Description of Artificial Sequence: Synthetic oligonucleotide
acacaguggaaaggaagug

SEQ ID NO: 2702686 - RNA, 19 nt, Artificial Sequence
  Description of Artificial Sequence: Synthetic oligonucleotide
ucuuuuccuaugacaccau

SEQ ID NO: 2702687 - RNA, 19 nt, Artificial Sequence
  Description of Artificial Sequence: Synthetic oligonucleotide
cugguaguuucuggggagg

SEQ ID NO: 2702688 - RNA, 19 nt, Artificial Sequence
  Description of Artificial Sequence: Synthetic oligonucleotide
gcaguuguuccucagaagu

SEQ ID NO: 2702689 - RNA, 19 nt, Artificial Sequence
  Description of Artificial Sequence: Synthetic oligonucleotide
ucccagucauaagauacuc

SEQ ID NO: 2702690 - RNA, 19 nt, Artificial Sequence
  Description of Artificial Sequence: Synthetic oligonucleotide
gcaggucccagucauaaga

SEQ ID NO: 2702691 - RNA, 19 nt, Artificial Sequence
  Description of Artificial Sequence: Synthetic oligonucleotide
guggaaaggaagugacaca

SEQ ID NO: 2702692 - RNA, 19 nt, Artificial Sequence
  Description of Artificial Sequence: Synthetic oligonucleotide
cugggaaagacgccuccug

SEQ ID NO: 2702693 - RNA, 19 nt, Artificial Sequence
  Description of Artificial Sequence: Synthetic oligonucleotide
caugauucuaaagauguau

SEQ ID NO: 2702694 - RNA, 19 nt, Artificial Sequence
  Description of Artificial Sequence: Synthetic oligonucleotide
aagacgccuccugacagaa

SEQ ID NO: 2702695 - RNA, 19 nt, Artificial Sequence
  Description of Artificial Sequence: Synthetic oligonucleotide
gaaccaucgugaugacuga

SEQ ID NO: 2702696 - RNA, 19 nt, Artificial Sequence
  Description of Artificial Sequence: Synthetic oligonucleotide
gaagaaccaucgugaugac

SEQ ID NO: 2702697 - RNA, 19 nt, Artificial Sequence
  Description of Artificial Sequence: Synthetic oligonucleotide
ggaaaacguaaaagccugg

SEQ ID NO: 2702698 - RNA, 19 nt, Artificial Sequence
  Description of Artificial Sequence: Synthetic oligonucleotide
cacaguggaaaggaaguga

SEQ ID NO: 2702699 - RNA, 19 nt, Artificial Sequence
  Description of Artificial Sequence: Synthetic oligonucleotide
agcaggucccagucauaag

SEQ ID NO: 2702700 - RNA, 19 nt, Artificial Sequence
  Description of Artificial Sequence: Synthetic oligonucleotide
aaagggcgucagcugcagu

SEQ ID NO: 2702701 - RNA, 19 nt, Artificial Sequence
  Description of Artificial Sequence: Synthetic oligonucleotide
guagagcuccaucuguuua

SEQ ID NO: 2702702 - RNA, 19 nt, Artificial Sequence
  Description of Artificial Sequence: Synthetic oligonucleotide
acacgauuacaauguuaaa

SEQ ID NO: 2702703 - RNA, 19 nt, Artificial Sequence
  Description of Artificial Sequence: Synthetic oligonucleotide
ugcauuuguuugggaaaac

SEQ ID NO: 2702704 - RNA, 19 nt, Artificial Sequence
  Description of Artificial Sequence: Synthetic oligonucleotide
agcugcaguuguuccucag

SEQ ID NO: 2702705 - RNA, 19 nt, Artificial Sequence
  Description of Artificial Sequence: Synthetic oligonucleotide
ggaaagacgccuccugaca

SEQ ID NO: 2702706 - RNA, 19 nt, Artificial Sequence
  Description of Artificial Sequence: Synthetic oligonucleotide
gcuaagcaaaaugccaaug

SEQ ID NO: 2702707 - RNA, 19 nt, Artificial Sequence
  Description of Artificial Sequence: Synthetic oligonucleotide
guccauacacaauuuguau

SEQ ID NO: 2702708 - RNA, 19 nt, Artificial Sequence
  Description of Artificial Sequence: Synthetic oligonucleotide
caucgugaugacugaagaa

SEQ ID NO: 2702709 - RNA, 19 nt, Artificial Sequence
  Description of Artificial Sequence: Synthetic oligonucleotide
aggacacagaacacaccag

SEQ ID NO: 2702710 - RNA, 19 nt, Artificial Sequence
  Description of Artificial Sequence: Synthetic oligonucleotide
gacacagaacacaccagua

SEQ ID NO: 2702711 - RNA, 19 nt, Artificial Sequence
  Description of Artificial Sequence: Synthetic oligonucleotide
cagcaaagggcgucagcug

SEQ ID NO: 2702712 - RNA, 19 nt, Artificial Sequence
  Description of Artificial Sequence: Synthetic oligonucleotide
uggggaggguucaguguga

SEQ ID NO: 2702713 - RNA, 19 nt, Artificial Sequence
  Description of Artificial Sequence: Synthetic oligonucleotide
cugcaguuguuccucagaa

SEQ ID NO: 2702714 - RNA, 19 nt, Artificial Sequence
  Description of Artificial Sequence: Synthetic oligonucleotide
gggaaagacgccuccugac

SEQ ID NO: 2702715 - RNA, 19 nt, Artificial Sequence
  Description of Artificial Sequence: Synthetic oligonucleotide
ccaguacagaaaacaaguc

SEQ ID NO: 2702716 - RNA, 19 nt, Artificial Sequence
  Description of Artificial Sequence: Synthetic oligonucleotide
ggcagagaaugguagagcu

SEQ ID NO: 2702717 - RNA, 19 nt, Artificial Sequence
  Description of Artificial Sequence: Synthetic oligonucleotide
agauguaugcuugcuuaua

SEQ ID NO: 2702718 - RNA, 19 nt, Artificial Sequence
  Description of Artificial Sequence: Synthetic oligonucleotide
cccagucauaagauacucc

SEQ ID NO: 2702719 - RNA, 19 nt, Artificial Sequence
  Description of Artificial Sequence: Synthetic oligonucleotide
aaccaucgugaugacugaa

SEQ ID NO: 2702720 - RNA, 19 nt, Artificial Sequence
  Description of Artificial Sequence: Synthetic oligonucleotide
uuccgauuucucccauuuu

SEQ ID NO: 2702721 - RNA, 19 nt, Artificial Sequence
  Description of Artificial Sequence: Synthetic oligonucleotide
gguucagugugacacucaa

SEQ ID NO: 2702722 - RNA, 19 nt, Artificial Sequence
  Description of Artificial Sequence: Synthetic oligonucleotide
cauacacaauuuguauaga

SEQ ID NO: 2702723 - RNA, 19 nt, Artificial Sequence
  Description of Artificial Sequence: Synthetic oligonucleotide
ugacccuagcaggucccag

SEQ ID NO: 2702724 - RNA, 19 nt, Artificial Sequence
  Description of Artificial Sequence: Synthetic oligonucleotide
augcuuugguccauacaca

SEQ ID NO: 2702725 - RNA, 19 nt, Artificial Sequence
  Description of Artificial Sequence: Synthetic oligonucleotide
caguggaaaggaagugaca

SEQ ID NO: 2702726 - RNA, 19 nt, Artificial Sequence
  Description of Artificial Sequence: Synthetic oligonucleotide
cuaaagauguaugcuugcu

SEQ ID NO: 2702727 - RNA, 19 nt, Artificial Sequence
  Description of Artificial Sequence: Synthetic oligonucleotide
agacugcauuuguuuggga

SEQ ID NO: 2702728 - RNA, 19 nt, Artificial Sequence
  Description of Artificial Sequence: Synthetic oligonucleotide
caaagggcgucagcugcag

SEQ ID NO: 2702729 - RNA, 19 nt, Artificial Sequence
  Description of Artificial Sequence: Synthetic oligonucleotide
cagaacacaccaguacaga

SEQ ID NO: 2702730 - RNA, 19 nt, Artificial Sequence
  Description of Artificial Sequence: Synthetic oligonucleotide
agggcgucagcugcaguug

SEQ ID NO: 2702731 - RNA, 19 nt, Artificial Sequence
  Description of Artificial Sequence: Synthetic oligonucleotide
aggucccagucauaagaua

SEQ ID NO: 2702732 - RNA, 19 nt, Artificial Sequence
  Description of Artificial Sequence: Synthetic oligonucleotide
guuccucagaagugcucuc

SEQ ID NO: 2702733 - RNA, 19 nt, Artificial Sequence
  Description of Artificial Sequence: Synthetic oligonucleotide
  modified_base (6)..(6): a, c, u, g, unknown or other
cacccnccaaagacaaaga

SEQ ID NO: 2702734 - RNA, 19 nt, Artificial Sequence
  Description of Artificial Sequence: Synthetic oligonucleotide
ccauuucuuuuccuaugac

SEQ ID NO: 2702735 - RNA, 19 nt, Artificial Sequence
  Description of Artificial Sequence: Synthetic oligonucleotide
gcuccaucuguuuauaauu

SEQ ID NO: 2702736 - RNA, 19 nt, Artificial Sequence
  Description of Artificial Sequence: Synthetic oligonucleotide
gacccuagcaggucccagu

SEQ ID NO: 2702737 - RNA, 19 nt, Artificial Sequence
  Description of Artificial Sequence: Synthetic oligonucleotide
agauaacaauaggcauuga

SEQ ID NO: 2702738 - RNA, 19 nt, Artificial Sequence
  Description of Artificial Sequence: Synthetic oligonucleotide
ccaucgugaugacugaaga

SEQ ID NO: 2702739 - RNA, 19 nt, Artificial Sequence
  Description of Artificial Sequence: Synthetic oligonucleotide
gggaaaacagcuauuugau

SEQ ID NO: 2702740 - RNA, 19 nt, Artificial Sequence
  Description of Artificial Sequence: Synthetic oligonucleotide
agagaaugguagagcucca

SEQ ID NO: 2702741 - RNA, 19 nt, Artificial Sequence
  Description of Artificial Sequence: Synthetic oligonucleotide
gcuugcuuauacaaaucaa

SEQ ID NO: 2702742 - RNA, 19 nt, Artificial Sequence
  Description of Artificial Sequence: Synthetic oligonucleotide
agagcuccaucuguuuaua

SEQ ID NO: 2702743 - RNA, 19 nt, Artificial Sequence
  Description of Artificial Sequence: Synthetic oligonucleotide
guuguuccucagaagugcu

SEQ ID NO: 2702744 - RNA, 19 nt, Artificial Sequence
  Description of Artificial Sequence: Synthetic oligonucleotide
  modified_base (8)..(8): a, c, u, g, unknown or other
aacacccnccaaagacaaa

SEQ ID NO: 2702745 - RNA, 19 nt, Artificial Sequence
  Description of Artificial Sequence: Synthetic oligonucleotide
ggcauugaccauuucuuuu

SEQ ID NO: 2702746 - RNA, 19 nt, Artificial Sequence
  Description of Artificial Sequence: Synthetic oligonucleotide
  modified_base (2)..(2): a, c, u, g, unknown or other
cnccaaagacaaagaccaa

SEQ ID NO: 2702747 - RNA, 19 nt, Artificial Sequence
  Description of Artificial Sequence: Synthetic oligonucleotide
augacccuagcagguccca

SEQ ID NO: 2702748 - RNA, 19 nt, Artificial Sequence
  Description of Artificial Sequence: Synthetic oligonucleotide
caauaggcauugaccauuu

SEQ ID NO: 2702749 - RNA, 19 nt, Artificial Sequence
  Description of Artificial Sequence: Synthetic oligonucleotide
gcagagaaugguagagcuc

SEQ ID NO: 2702750 - RNA, 19 nt, Artificial Sequence
  Description of Artificial Sequence: Synthetic oligonucleotide
guucagugugacacucaaa

SEQ ID NO: 2702751 - RNA, 19 nt, Artificial Sequence
  Description of Artificial Sequence: Synthetic oligonucleotide
gagaaugguagagcuccau

SEQ ID NO: 2702752 - RNA, 19 nt, Artificial Sequence
  Description of Artificial Sequence: Synthetic oligonucleotide
cuaugacaccaugauucua

SEQ ID NO: 2702753 - RNA, 19 nt, Artificial Sequence
  Description of Artificial Sequence: Synthetic oligonucleotide
caggucccagucauaagau

SEQ ID NO: 2702754 - RNA, 19 nt, Artificial Sequence
  Description of Artificial Sequence: Synthetic oligonucleotide
cgauuacaauguuaaagua

SEQ ID NO: 2702755 - RNA, 19 nt, Artificial Sequence
  Description of Artificial Sequence: Synthetic oligonucleotide
gucccagucauaagauacu

SEQ ID NO: 2702756 - RNA, 19 nt, Artificial Sequence
  Description of Artificial Sequence: Synthetic oligonucleotide
gcaaaaugccaaugacccu

SEQ ID NO: 2702757 - RNA, 19 nt, Artificial Sequence
  Description of Artificial Sequence: Synthetic oligonucleotide
cagaaacagcaaagggcgu

SEQ ID NO: 2702758 - RNA, 19 nt, Artificial Sequence
  Description of Artificial Sequence: Synthetic oligonucleotide
  modified_base (15)..(15): a, c, u, g, unknown or other
cuccaagaacacccnccaa

SEQ ID NO: 2702759 - RNA, 19 nt, Artificial Sequence
  Description of Artificial Sequence: Synthetic oligonucleotide
acgccuccugacagaaaca

SEQ ID NO: 2702760 - RNA, 19 nt, Artificial Sequence
  Description of Artificial Sequence: Synthetic oligonucleotide
cgccuccugacagaaacag

SEQ ID NO: 2702761 - RNA, 19 nt, Artificial Sequence
  Description of Artificial Sequence: Synthetic oligonucleotide
ccaaugacccuagcagguc

SEQ ID NO: 2702762 - RNA, 19 nt, Artificial Sequence
  Description of Artificial Sequence: Synthetic oligonucleotide
gugugacacucaaaaucgu

SEQ ID NO: 2702763 - RNA, 19 nt, Artificial Sequence
  Description of Artificial Sequence: Synthetic oligonucleotide
ccucagaagugcucucaca

SEQ ID NO: 2702764 - RNA, 19 nt, Artificial Sequence
  Description of Artificial Sequence: Synthetic oligonucleotide
ccacacgauuacaauguua

SEQ ID NO: 2702765 - RNA, 19 nt, Artificial Sequence
  Description of Artificial Sequence: Synthetic oligonucleotide
gcgucagcugcaguuguuc

SEQ ID NO: 2702766 - RNA, 19 nt, Artificial Sequence
  Description of Artificial Sequence: Synthetic oligonucleotide
gguagagcuccaucuguuu

SEQ ID NO: 2702767 - RNA, 19 nt, Artificial Sequence
  Description of Artificial Sequence: Synthetic oligonucleotide
gccaaugacccuagcaggu

SEQ ID NO: 2702768 - RNA, 19 nt, Artificial Sequence
  Description of Artificial Sequence: Synthetic oligonucleotide
gcaaagggcgucagcugca

SEQ ID NO: 2702769 - RNA, 19 nt, Artificial Sequence
  Description of Artificial Sequence: Synthetic oligonucleotide
ggguucagugugacacuca

SEQ ID NO: 2702770 - RNA, 19 nt, Artificial Sequence
  Description of Artificial Sequence: Synthetic oligonucleotide
cguaaaagccugggaaaga

SEQ ID NO: 2702771 - RNA, 19 nt, Artificial Sequence
  Description of Artificial Sequence: Synthetic oligonucleotide
gugcucucacacaguggaa

SEQ ID NO: 2702772 - RNA, 19 nt, Artificial Sequence
  Description of Artificial Sequence: Synthetic oligonucleotide
gcuuugguccauacacaau

SEQ ID NO: 2702773 - RNA, 19 nt, Artificial Sequence
  Description of Artificial Sequence: Synthetic oligonucleotide
gggcgucagcugcaguugu

SEQ ID NO: 2702774 - RNA, 19 nt, Artificial Sequence
  Description of Artificial Sequence: Synthetic oligonucleotide
cccacacgauuacaauguu

SEQ ID NO: 2702775 - RNA, 19 nt, Artificial Sequence
  Description of Artificial Sequence: Synthetic oligonucleotide
ggcgucagcugcaguuguu

SEQ ID NO: 2702776 - RNA, 19 nt, Artificial Sequence
  Description of Artificial Sequence: Synthetic oligonucleotide
aaauuuugcaguuuaaaac

SEQ ID NO: 2702777 - RNA, 19 nt, Artificial Sequence
  Description of Artificial Sequence: Synthetic oligonucleotide
aacauuaggauacacaaac

SEQ ID NO: 2702778 - RNA, 19 nt, Artificial Sequence
  Description of Artificial Sequence: Synthetic oligonucleotide
uugaauaacaauuagagga

SEQ ID NO: 2702779 - RNA, 19 nt, Artificial Sequence
  Description of Artificial Sequence: Synthetic oligonucleotide
aaaccaauaagaaacaugg

SEQ ID NO: 2702780 - RNA, 19 nt, Artificial Sequence
  Description of Artificial Sequence: Synthetic oligonucleotide
auagaaauggauuuuacuc

SEQ ID NO: 2702781 - RNA, 19 nt, Artificial Sequence
  Description of Artificial Sequence: Synthetic oligonucleotide
uuacauuccauuuuaauag

SEQ ID NO: 2702782 - RNA, 19 nt, Artificial Sequence
  Description of Artificial Sequence: Synthetic oligonucleotide
aauuuugcaguuuaaaaca

SEQ ID NO: 2702783 - RNA, 19 nt, Artificial Sequence
  Description of Artificial Sequence: Synthetic oligonucleotide
ugaagguuaauuaaaauac

SEQ ID NO: 2702784 - RNA, 19 nt, Artificial Sequence
  Description of Artificial Sequence: Synthetic oligonucleotide
aacugaauacacuugaaag

SEQ ID NO: 2702785 - RNA, 19 nt, Artificial Sequence
  Description of Artificial Sequence: Synthetic oligonucleotide
cuauuuauaaaacacagug

SEQ ID NO: 2702786 - RNA, 19 nt, Artificial Sequence
  Description of Artificial Sequence: Synthetic oligonucleotide
auuuauaaaacacagugca

SEQ ID NO: 2702787 - RNA, 19 nt, Artificial Sequence
  Description of Artificial Sequence: Synthetic oligonucleotide
aaauggauuuuacucaacg

SEQ ID NO: 2702788 - RNA, 19 nt, Artificial Sequence
  Description of Artificial Sequence: Synthetic oligonucleotide
ucuccuacaaaauaaacca

SEQ ID NO: 2702789 - RNA, 19 nt, Artificial Sequence
  Description of Artificial Sequence: Synthetic oligonucleotide
aauggauuuuacucaacgg

SEQ ID NO: 2702790 - RNA, 19 nt, Artificial Sequence
  Description of Artificial Sequence: Synthetic oligonucleotide
auuugaauaacaauuagag

SEQ ID NO: 2702791 - RNA, 19 nt, Artificial Sequence
  Description of Artificial Sequence: Synthetic oligonucleotide
acugaauacacuugaaagg

SEQ ID NO: 2702792 - RNA, 19 nt, Artificial Sequence
  Description of Artificial Sequence: Synthetic oligonucleotide
ugaagaugaagcuugaaga

SEQ ID NO: 2702793 - RNA, 19 nt, Artificial Sequence
  Description of Artificial Sequence: Synthetic oligonucleotide
uuuaaugcacacuacagcu

SEQ ID NO: 2702794 - RNA, 19 nt, Artificial Sequence
  Description of Artificial Sequence: Synthetic oligonucleotide
accaauaagaaacauggag

SEQ ID NO: 2702795 - RNA, 19 nt, Artificial Sequence
  Description of Artificial Sequence: Synthetic oligonucleotide
uuugaauaacaauuagagg

SEQ ID NO: 2702796 - RNA, 19 nt, Artificial Sequence
  Description of Artificial Sequence: Synthetic oligonucleotide
aaaauuuugcaguuuaaaa

SEQ ID NO: 2702797 - RNA, 19 nt, Artificial Sequence
  Description of Artificial Sequence: Synthetic oligonucleotide
caauaagaaacauggaggg

SEQ ID NO: 2702798 - RNA, 19 nt, Artificial Sequence
  Description of Artificial Sequence: Synthetic oligonucleotide
uuuaacugaauacacuuga

SEQ ID NO: 2702799 - RNA, 19 nt, Artificial Sequence
  Description of Artificial Sequence: Synthetic oligonucleotide
aaauuuaacuuacauucca

SEQ ID NO: 2702800 - RNA, 19 nt, Artificial Sequence
  Description of Artificial Sequence: Synthetic oligonucleotide
aaugacacggaacagugca

SEQ ID NO: 2702801 - RNA, 19 nt, Artificial Sequence
  Description of Artificial Sequence: Synthetic oligonucleotide
uauuugaauaacaauuaga

SEQ ID NO: 2702802 - RNA, 19 nt, Artificial Sequence
  Description of Artificial Sequence: Synthetic oligonucleotide
uuaucuuuaaugcacacua

SEQ ID NO: 2702803 - RNA, 19 nt, Artificial Sequence
  Description of Artificial Sequence: Synthetic oligonucleotide
uucuccuacaaaauaaacc

SEQ ID NO: 2702804 - RNA, 19 nt, Artificial Sequence
  Description of Artificial Sequence: Synthetic oligonucleotide
ugaacauuaggauacacaa

SEQ ID NO: 2702805 - RNA, 19 nt, Artificial Sequence
  Description of Artificial Sequence: Synthetic oligonucleotide
acaauuagaggacaaaugu

SEQ ID NO: 2702806 - RNA, 19 nt, Artificial Sequence
  Description of Artificial Sequence: Synthetic oligonucleotide
ugaaguuuauuuuauuuga

SEQ ID NO: 2702807 - RNA, 19 nt, Artificial Sequence
  Description of Artificial Sequence: Synthetic oligonucleotide
ugagagaaccacuauaagc

SEQ ID NO: 2702808 - RNA, 19 nt, Artificial Sequence
  Description of Artificial Sequence: Synthetic oligonucleotide
ugcacauccacaaaaggcc

SEQ ID NO: 2702809 - RNA, 19 nt, Artificial Sequence
  Description of Artificial Sequence: Synthetic oligonucleotide
ucuuuaaugcacacuacag

SEQ ID NO: 2702810 - RNA, 19 nt, Artificial Sequence
  Description of Artificial Sequence: Synthetic oligonucleotide
aucgauguuaucuuuaaug

SEQ ID NO: 2702811 - RNA, 19 nt, Artificial Sequence
  Description of Artificial Sequence: Synthetic oligonucleotide
ucuaacuuuaacugaauac

SEQ ID NO: 2702812 - RNA, 19 nt, Artificial Sequence
  Description of Artificial Sequence: Synthetic oligonucleotide
uaaaccaauaagaaacaug

SEQ ID NO: 2702813 - RNA, 19 nt, Artificial Sequence
  Description of Artificial Sequence: Synthetic oligonucleotide
ugcaguuuaaaacaugcac

SEQ ID NO: 2702814 - RNA, 19 nt, Artificial Sequence
  Description of Artificial Sequence: Synthetic oligonucleotide
ucgauguuaucuuuaaugc

SEQ ID NO: 2702815 - RNA, 19 nt, Artificial Sequence
  Description of Artificial Sequence: Synthetic oligonucleotide
agcaguuucgacaaaaugg

SEQ ID NO: 2702816 - RNA, 19 nt, Artificial Sequence
  Description of Artificial Sequence: Synthetic oligonucleotide
gaagaugaagcuugaagag

SEQ ID NO: 2702817 - RNA, 19 nt, Artificial Sequence
  Description of Artificial Sequence: Synthetic oligonucleotide
aacaacaaacugcacccac

SEQ ID NO: 2702818 - RNA, 19 nt, Artificial Sequence
  Description of Artificial Sequence: Synthetic oligonucleotide
ugaauaacaauuagaggac

SEQ ID NO: 2702819 - RNA, 19 nt, Artificial Sequence
  Description of Artificial Sequence: Synthetic oligonucleotide
gguuaauuaaaauacagca

SEQ ID NO: 2702820 - RNA, 19 nt, Artificial Sequence
  Description of Artificial Sequence: Synthetic oligonucleotide
gacaaaauggcuuuuccac

SEQ ID NO: 2702821 - RNA, 19 nt, Artificial Sequence
  Description of Artificial Sequence: Synthetic oligonucleotide
aguaacuauuuauaaaaca

SEQ ID NO: 2702822 - RNA, 19 nt, Artificial Sequence
  Description of Artificial Sequence: Synthetic oligonucleotide
uaaaacaugcacauccaca

SEQ ID NO: 2702823 - RNA, 19 nt, Artificial Sequence
  Description of Artificial Sequence: Synthetic oligonucleotide
aagguuaauuaaaauacag

SEQ ID NO: 2702824 - RNA, 19 nt, Artificial Sequence
  Description of Artificial Sequence: Synthetic oligonucleotide
uauaaaacacagugcauug

SEQ ID NO: 2702825 - RNA, 19 nt, Artificial Sequence
  Description of Artificial Sequence: Synthetic oligonucleotide
acacaaaccugagagaacc

SEQ ID NO: 2702826 - RNA, 19 nt, Artificial Sequence
  Description of Artificial Sequence: Synthetic oligonucleotide
gaaagggugaagaugaagc

SEQ ID NO: 2702827 - RNA, 19 nt, Artificial Sequence
  Description of Artificial Sequence: Synthetic oligonucleotide
ggauacacaaaccugagag

SEQ ID NO: 2702828 - RNA, 19 nt, Artificial Sequence
  Description of Artificial Sequence: Synthetic oligonucleotide
guaacuauuuauaaaacac

SEQ ID NO: 2702829 - RNA, 19 nt, Artificial Sequence
  Description of Artificial Sequence: Synthetic oligonucleotide
uuuaauagcuguugaaggu

SEQ ID NO: 2702830 - RNA, 19 nt, Artificial Sequence
  Description of Artificial Sequence: Synthetic oligonucleotide
auuuuaauagcuguugaag

SEQ ID NO: 2702831 - RNA, 19 nt, Artificial Sequence
  Description of Artificial Sequence: Synthetic oligonucleotide
cugaauacacuugaaaggg

SEQ ID NO: 2702832 - RNA, 19 nt, Artificial Sequence
  Description of Artificial Sequence: Synthetic oligonucleotide
aauggugaaguuuauuuua

SEQ ID NO: 2702833 - RNA, 19 nt, Artificial Sequence
  Description of Artificial Sequence: Synthetic oligonucleotide
aacgguaguaacuauuuau

SEQ ID NO: 2702834 - RNA, 19 nt, Artificial Sequence
  Description of Artificial Sequence: Synthetic oligonucleotide
agguuaauuaaaauacagc

SEQ ID NO: 2702835 - RNA, 19 nt, Artificial Sequence
  Description of Artificial Sequence: Synthetic oligonucleotide
gaggcuaacaacaaacugc

SEQ ID NO: 2702836 - RNA, 19 nt, Artificial Sequence
  Description of Artificial Sequence: Synthetic oligonucleotide
cuugaaagggugaagauga

SEQ ID NO: 2702837 - RNA, 19 nt, Artificial Sequence
  Description of Artificial Sequence: Synthetic oligonucleotide
cuuuaaugcacacuacagc

SEQ ID NO: 2702838 - RNA, 19 nt, Artificial Sequence
  Description of Artificial Sequence: Synthetic oligonucleotide
ccaauaagaaacauggagg

SEQ ID NO: 2702839 - RNA, 19 nt, Artificial Sequence
  Description of Artificial Sequence: Synthetic oligonucleotide
uugaacauuaggauacaca

SEQ ID NO: 2702840 - RNA, 19 nt, Artificial Sequence
  Description of Artificial Sequence: Synthetic oligonucleotide
gugaaguuuauuuuauuug

SEQ ID NO: 2702841 - RNA, 19 nt, Artificial Sequence
  Description of Artificial Sequence: Synthetic oligonucleotide
auaagaaacauggagggca

SEQ ID NO: 2702842 - RNA, 19 nt, Artificial Sequence
  Description of Artificial Sequence: Synthetic oligonucleotide
aacaaacugcacccacugc

SEQ ID NO: 2702843 - RNA, 19 nt, Artificial Sequence
  Description of Artificial Sequence: Synthetic oligonucleotide
uaacuuuaacugaauacac

SEQ ID NO: 2702844 - RNA, 19 nt, Artificial Sequence
  Description of Artificial Sequence: Synthetic oligonucleotide
cacaaaaggccaaugacac

SEQ ID NO: 2702845 - RNA, 19 nt, Artificial Sequence
  Description of Artificial Sequence: Synthetic oligonucleotide
aacaauuagaggacaaaug

SEQ ID NO: 2702846 - RNA, 19 nt, Artificial Sequence
  Description of Artificial Sequence: Synthetic oligonucleotide
cuugaagaggcuaacaaca

SEQ ID NO: 2702847 - RNA, 19 nt, Artificial Sequence
  Description of Artificial Sequence: Synthetic oligonucleotide
aauuagaggacaaauguuu

SEQ ID NO: 2702848 - RNA, 19 nt, Artificial Sequence
  Description of Artificial Sequence: Synthetic oligonucleotide
uuuaacuuacauuccauuu

SEQ ID NO: 2702849 - RNA, 19 nt, Artificial Sequence
  Description of Artificial Sequence: Synthetic oligonucleotide
uuaacuuacauuccauuuu

SEQ ID NO: 2702850 - RNA, 19 nt, Artificial Sequence
  Description of Artificial Sequence: Synthetic oligonucleotide
uauaagcacagauucgaca

SEQ ID NO: 2702851 - RNA, 19 nt, Artificial Sequence
  Description of Artificial Sequence: Synthetic oligonucleotide
agugcauugaacauuagga

SEQ ID NO: 2702852 - RNA, 19 nt, Artificial Sequence
  Description of Artificial Sequence: Synthetic oligonucleotide
gugaagaugaagcuugaag

SEQ ID NO: 2702853 - RNA, 19 nt, Artificial Sequence
  Description of Artificial Sequence: Synthetic oligonucleotide
auggcuucuagucuaugac

SEQ ID NO: 2702854 - RNA, 19 nt, Artificial Sequence
  Description of Artificial Sequence: Synthetic oligonucleotide
ucuacagcaguuucgacaa

SEQ ID NO: 2702855 - RNA, 19 nt, Artificial Sequence
  Description of Artificial Sequence: Synthetic oligonucleotide
augcacauccacaaaaggc

SEQ ID NO: 2702856 - RNA, 19 nt, Artificial Sequence
  Description of Artificial Sequence: Synthetic oligonucleotide
ugccuucuaacuuuaacug

SEQ ID NO: 2702857 - RNA, 19 nt, Artificial Sequence
  Description of Artificial Sequence: Synthetic oligonucleotide
acuuuaacugaauacacuu

SEQ ID NO: 2702858 - RNA, 19 nt, Artificial Sequence
  Description of Artificial Sequence: Synthetic oligonucleotide
ucuaugacugggaauuaug

SEQ ID NO: 2702859 - RNA, 19 nt, Artificial Sequence
  Description of Artificial Sequence: Synthetic oligonucleotide
uccacaaaaggccaaugac

SEQ ID NO: 2702860 - RNA, 19 nt, Artificial Sequence
  Description of Artificial Sequence: Synthetic oligonucleotide
uuauaaaacacagugcauu

SEQ ID NO: 2702861 - RNA, 19 nt, Artificial Sequence
  Description of Artificial Sequence: Synthetic oligonucleotide
gaagaggcuaacaacaaac

SEQ ID NO: 2702862 - RNA, 19 nt, Artificial Sequence
  Description of Artificial Sequence: Synthetic oligonucleotide
agcgucacaaucucuacag

SEQ ID NO: 2702863 - RNA, 19 nt, Artificial Sequence
  Description of Artificial Sequence: Synthetic oligonucleotide
agugcauagaaauggauuu

SEQ ID NO: 2702864 - RNA, 19 nt, Artificial Sequence
  Description of Artificial Sequence: Synthetic oligonucleotide
cuaacuuuaacugaauaca

SEQ ID NO: 2702865 - RNA, 19 nt, Artificial Sequence
  Description of Artificial Sequence: Synthetic oligonucleotide
uaguaacuauuuauaaaac

SEQ ID NO: 2702866 - RNA, 19 nt, Artificial Sequence
  Description of Artificial Sequence: Synthetic oligonucleotide
uaacugaauacacuugaaa

SEQ ID NO: 2702867 - RNA, 19 nt, Artificial Sequence
  Description of Artificial Sequence: Synthetic oligonucleotide
aucuuuaaugcacacuaca

SEQ ID NO: 2702868 - RNA, 19 nt, Artificial Sequence
  Description of Artificial Sequence: Synthetic oligonucleotide
agagaaccacuauaagcac

SEQ ID NO: 2702869 - RNA, 19 nt, Artificial Sequence
  Description of Artificial Sequence: Synthetic oligonucleotide
uucacagccgccuuccaag

SEQ ID NO: 2702870 - RNA, 19 nt, Artificial Sequence
  Description of Artificial Sequence: Synthetic oligonucleotide
gaauacacuugaaagggug

SEQ ID NO: 2702871 - RNA, 19 nt, Artificial Sequence
  Description of Artificial Sequence: Synthetic oligonucleotide
uuuauaaaacacagugcau

SEQ ID NO: 2702872 - RNA, 19 nt, Artificial Sequence
  Description of Artificial Sequence: Synthetic oligonucleotide
aaccacuauaagcacagau

SEQ ID NO: 2702873 - RNA, 19 nt, Artificial Sequence
  Description of Artificial Sequence: Synthetic oligonucleotide
acagauucgacacucccca

SEQ ID NO: 2702874 - RNA, 19 nt, Artificial Sequence
  Description of Artificial Sequence: Synthetic oligonucleotide
cacuacagcuuucacagcc

SEQ ID NO: 2702875 - RNA, 19 nt, Artificial Sequence
  Description of Artificial Sequence: Synthetic oligonucleotide
uaacuuacauuccauuuua

SEQ ID NO: 2702876 - RNA, 19 nt, Artificial Sequence
  Description of Artificial Sequence: Synthetic oligonucleotide
uuacucaacgguaguaacu

SEQ ID NO: 2702877 - RNA, 19 nt, Artificial Sequence
  Description of Artificial Sequence: Synthetic oligonucleotide
cuuacauuccauuuuaaua

SEQ ID NO: 2702878 - RNA, 19 nt, Artificial Sequence
  Description of Artificial Sequence: Synthetic oligonucleotide
accaagaaacacaaacagc

SEQ ID NO: 2702879 - RNA, 19 nt, Artificial Sequence
  Description of Artificial Sequence: Synthetic oligonucleotide
acuauaagcacagauucga

SEQ ID NO: 2702880 - RNA, 19 nt, Artificial Sequence
  Description of Artificial Sequence: Synthetic oligonucleotide
uggauuuuacucaacggua

SEQ ID NO: 2702881 - RNA, 19 nt, Artificial Sequence
  Description of Artificial Sequence: Synthetic oligonucleotide
ugcauugaacauuaggaua

SEQ ID NO: 2702882 - RNA, 19 nt, Artificial Sequence
  Description of Artificial Sequence: Synthetic oligonucleotide
augacugggaauuauguua

SEQ ID NO: 2702883 - RNA, 19 nt, Artificial Sequence
  Description of Artificial Sequence: Synthetic oligonucleotide
ucgacaaaauggcuuuucc

SEQ ID NO: 2702884 - RNA, 19 nt, Artificial Sequence
  Description of Artificial Sequence: Synthetic oligonucleotide
agaggcuaacaacaaacug

SEQ ID NO: 2702885 - RNA, 19 nt, Artificial Sequence
  Description of Artificial Sequence: Synthetic oligonucleotide
cuuuaacugaauacacuug

SEQ ID NO: 2702886 - RNA, 19 nt, Artificial Sequence
  Description of Artificial Sequence: Synthetic oligonucleotide
ucaugcagcgucacaaucu

SEQ ID NO: 2702887 - RNA, 19 nt, Artificial Sequence
  Description of Artificial Sequence: Synthetic oligonucleotide
uuuacucaacgguaguaac

SEQ ID NO: 2702888 - RNA, 19 nt, Artificial Sequence
  Description of Artificial Sequence: Synthetic oligonucleotide
agaaacauggagggcauuc

SEQ ID NO: 2702889 - RNA, 19 nt, Artificial Sequence
  Description of Artificial Sequence: Synthetic oligonucleotide
aagcacagauucgacacuc

SEQ ID NO: 2702890 - RNA, 19 nt, Artificial Sequence
  Description of Artificial Sequence: Synthetic oligonucleotide
uguuuaaaauuuugcaguu

SEQ ID NO: 2702891 - RNA, 19 nt, Artificial Sequence
  Description of Artificial Sequence: Synthetic oligonucleotide
uguucuccuacaaaauaaa

SEQ ID NO: 2702892 - RNA, 19 nt, Artificial Sequence
  Description of Artificial Sequence: Synthetic oligonucleotide
agaaauggauuuuacucaa

SEQ ID NO: 2702893 - RNA, 19 nt, Artificial Sequence
  Description of Artificial Sequence: Synthetic oligonucleotide
ugacugggaauuauguuaa

SEQ ID NO: 2702894 - RNA, 19 nt, Artificial Sequence
  Description of Artificial Sequence: Synthetic oligonucleotide
ucaacgguaguaacuauuu

SEQ ID NO: 2702895 - RNA, 19 nt, Artificial Sequence
  Description of Artificial Sequence: Synthetic oligonucleotide
cacuauaagcacagauucg

SEQ ID NO: 2702896 - RNA, 19 nt, Artificial Sequence
  Description of Artificial Sequence: Synthetic oligonucleotide
auuaggauacacaaaccug

SEQ ID NO: 2702897 - RNA, 19 nt, Artificial Sequence
  Description of Artificial Sequence: Synthetic oligonucleotide
ucuagucuaugacugggaa

SEQ ID NO: 2702898 - RNA, 19 nt, Artificial Sequence
  Description of Artificial Sequence: Synthetic oligonucleotide
auuuauggcuucuagucua

SEQ ID NO: 2702899 - RNA, 19 nt, Artificial Sequence
  Description of Artificial Sequence: Synthetic oligonucleotide
ugcauuuauggcuucuagu

SEQ ID NO: 2702900 - RNA, 19 nt, Artificial Sequence
  Description of Artificial Sequence: Synthetic oligonucleotide
aaggccaaugacacggaac

SEQ ID NO: 2702901 - RNA, 19 nt, Artificial Sequence
  Description of Artificial Sequence: Synthetic oligonucleotide
caugcacauccacaaaagg

SEQ ID NO: 2702902 - RNA, 19 nt, Artificial Sequence
  Description of Artificial Sequence: Synthetic oligonucleotide
uaacaauuagaggacaaau

SEQ ID NO: 2702903 - RNA, 19 nt, Artificial Sequence
  Description of Artificial Sequence: Synthetic oligonucleotide
uuaacugaauacacuugaa

SEQ ID NO: 2702904 - RNA, 19 nt, Artificial Sequence
  Description of Artificial Sequence: Synthetic oligonucleotide
acauuaggauacacaaacc

SEQ ID NO: 2702905 - RNA, 19 nt, Artificial Sequence
  Description of Artificial Sequence: Synthetic oligonucleotide
uaaugcacacuacagcuuu

SEQ ID NO: 2702906 - RNA, 19 nt, Artificial Sequence
  Description of Artificial Sequence: Synthetic oligonucleotide
gaaacauggagggcauucg

SEQ ID NO: 2702907 - RNA, 19 nt, Artificial Sequence
  Description of Artificial Sequence: Synthetic oligonucleotide
aacuuuaacugaauacacu

SEQ ID NO: 2702908 - RNA, 19 nt, Artificial Sequence
  Description of Artificial Sequence: Synthetic oligonucleotide
uagucuaugacugggaauu

SEQ ID NO: 2702909 - RNA, 19 nt, Artificial Sequence
  Description of Artificial Sequence: Synthetic oligonucleotide
agaaccacuauaagcacag

SEQ ID NO: 2702910 - RNA, 19 nt, Artificial Sequence
  Description of Artificial Sequence: Synthetic oligonucleotide
cagugcauugaacauuagg

SEQ ID NO: 2702911 - RNA, 19 nt, Artificial Sequence
  Description of Artificial Sequence: Synthetic oligonucleotide
acaaaccugagagaaccac

SEQ ID NO: 2702912 - RNA, 19 nt, Artificial Sequence
  Description of Artificial Sequence: Synthetic oligonucleotide
ugaauacacuugaaagggu

SEQ ID NO: 2702913 - RNA, 19 nt, Artificial Sequence
  Description of Artificial Sequence: Synthetic oligonucleotide
ucacaaucucuacagcagu

SEQ ID NO: 2702914 - RNA, 19 nt, Artificial Sequence
  Description of Artificial Sequence: Synthetic oligonucleotide
acuugaaagggugaagaug

SEQ ID NO: 2702915 - RNA, 19 nt, Artificial Sequence
  Description of Artificial Sequence: Synthetic oligonucleotide
uaauggugaaguuuauuuu

SEQ ID NO: 2702916 - RNA, 19 nt, Artificial Sequence
  Description of Artificial Sequence: Synthetic oligonucleotide
auuuaacuuacauuccauu

SEQ ID NO: 2702917 - RNA, 19 nt, Artificial Sequence
  Description of Artificial Sequence: Synthetic oligonucleotide
aauuuaacuuacauuccau

SEQ ID NO: 2702918 - RNA, 19 nt, Artificial Sequence
  Description of Artificial Sequence: Synthetic oligonucleotide
auugaacauuaggauacac

SEQ ID NO: 2702919 - RNA, 19 nt, Artificial Sequence
  Description of Artificial Sequence: Synthetic oligonucleotide
uaucuuuaaugcacacuac

SEQ ID NO: 2702920 - RNA, 19 nt, Artificial Sequence
  Description of Artificial Sequence: Synthetic oligonucleotide
acuuacauuccauuuuaau

SEQ ID NO: 2702921 - RNA, 19 nt, Artificial Sequence
  Description of Artificial Sequence: Synthetic oligonucleotide
aauacacuugaaaggguga

SEQ ID NO: 2702922 - RNA, 19 nt, Artificial Sequence
  Description of Artificial Sequence: Synthetic oligonucleotide
uccuuuuccucaaaauuua

SEQ ID NO: 2702923 - RNA, 19 nt, Artificial Sequence
  Description of Artificial Sequence: Synthetic oligonucleotide
caaacagcuguucuccuac

SEQ ID NO: 2702924 - RNA, 19 nt, Artificial Sequence
  Description of Artificial Sequence: Synthetic oligonucleotide
cuucuagucuaugacuggg

SEQ ID NO: 2702925 - RNA, 19 nt, Artificial Sequence
  Description of Artificial Sequence: Synthetic oligonucleotide
gaagguuaauuaaaauaca

SEQ ID NO: 2702926 - RNA, 19 nt, Artificial Sequence
  Description of Artificial Sequence: Synthetic oligonucleotide
uguuaucuuuaaugcacac

SEQ ID NO: 2702927 - RNA, 19 nt, Artificial Sequence
  Description of Artificial Sequence: Synthetic oligonucleotide
aaggcugccuucuaacuuu

SEQ ID NO: 2702928 - RNA, 19 nt, Artificial Sequence
  Description of Artificial Sequence: Synthetic oligonucleotide
uaauagcuguugaagguua

SEQ ID NO: 2702929 - RNA, 19 nt, Artificial Sequence
  Description of Artificial Sequence: Synthetic oligonucleotide
gcacccacugcauuuaugg

SEQ ID NO: 2702930 - RNA, 19 nt, Artificial Sequence
  Description of Artificial Sequence: Synthetic oligonucleotide
cacagauucgacacucccc

SEQ ID NO: 2702931 - RNA, 19 nt, Artificial Sequence
  Description of Artificial Sequence: Synthetic oligonucleotide
agaggacaaauguuuaaaa

SEQ ID NO: 2702932 - RNA, 19 nt, Artificial Sequence
  Description of Artificial Sequence: Synthetic oligonucleotide
ugaagaggcuaacaacaaa

SEQ ID NO: 2702933 - RNA, 19 nt, Artificial Sequence
  Description of Artificial Sequence: Synthetic oligonucleotide
uugcaguuuaaaacaugca

SEQ ID NO: 2702934 - RNA, 19 nt, Artificial Sequence
  Description of Artificial Sequence: Synthetic oligonucleotide
auucgcuuccuuuuccuca

SEQ ID NO: 2702935 - RNA, 19 nt, Artificial Sequence
  Description of Artificial Sequence: Synthetic oligonucleotide
uugaagaggcuaacaacaa

SEQ ID NO: 2702936 - RNA, 19 nt, Artificial Sequence
  Description of Artificial Sequence: Synthetic oligonucleotide
acccacugcauuuauggcu

SEQ ID NO: 2702937 - RNA, 19 nt, Artificial Sequence
  Description of Artificial Sequence: Synthetic oligonucleotide
agcuugaagaggcuaacaa

SEQ ID NO: 2702938 - RNA, 19 nt, Artificial Sequence
  Description of Artificial Sequence: Synthetic oligonucleotide
agcuguugaagguuaauua

SEQ ID NO: 2702939 - RNA, 19 nt, Artificial Sequence
  Description of Artificial Sequence: Synthetic oligonucleotide
gucacaaucucuacagcag

SEQ ID NO: 2702940 - RNA, 19 nt, Artificial Sequence
  Description of Artificial Sequence: Synthetic oligonucleotide
aagaggcuaacaacaaacu

SEQ ID NO: 2702941 - RNA, 19 nt, Artificial Sequence
  Description of Artificial Sequence: Synthetic oligonucleotide
uuaauagcuguugaagguu

SEQ ID NO: 2702942 - RNA, 19 nt, Artificial Sequence
  Description of Artificial Sequence: Synthetic oligonucleotide
aguuuaaaacaugcacauc

SEQ ID NO: 2702943 - RNA, 19 nt, Artificial Sequence
  Description of Artificial Sequence: Synthetic oligonucleotide
uaagaaacauggagggcau

SEQ ID NO: 2702944 - RNA, 19 nt, Artificial Sequence
  Description of Artificial Sequence: Synthetic oligonucleotide
ugcagcgucacaaucucua

SEQ ID NO: 2702945 - RNA, 19 nt, Artificial Sequence
  Description of Artificial Sequence: Synthetic oligonucleotide
agggugaagaugaagcuug

SEQ ID NO: 2702946 - RNA, 19 nt, Artificial Sequence
  Description of Artificial Sequence: Synthetic oligonucleotide
uucuagucuaugacuggga

SEQ ID NO: 2702947 - RNA, 19 nt, Artificial Sequence
  Description of Artificial Sequence: Synthetic oligonucleotide
uagaggacaaauguuuaaa

SEQ ID NO: 2702948 - RNA, 19 nt, Artificial Sequence
  Description of Artificial Sequence: Synthetic oligonucleotide
gacacggaacagugcauag

SEQ ID NO: 2702949 - RNA, 19 nt, Artificial Sequence
  Description of Artificial Sequence: Synthetic oligonucleotide
guaauggugaaguuuauuu

SEQ ID NO: 2702950 - RNA, 19 nt, Artificial Sequence
  Description of Artificial Sequence: Synthetic oligonucleotide
cuauaagcacagauucgac

SEQ ID NO: 2702951 - RNA, 19 nt, Artificial Sequence
  Description of Artificial Sequence: Synthetic oligonucleotide
gauucgacacuccccacuc

SEQ ID NO: 2702952 - RNA, 19 nt, Artificial Sequence
  Description of Artificial Sequence: Synthetic oligonucleotide
uggcuucuagucuaugacu

SEQ ID NO: 2702953 - RNA, 19 nt, Artificial Sequence
  Description of Artificial Sequence: Synthetic oligonucleotide
uacacaaaccugagagaac

SEQ ID NO: 2702954 - RNA, 19 nt, Artificial Sequence
  Description of Artificial Sequence: Synthetic oligonucleotide
gcauugaacauuaggauac

SEQ ID NO: 2702955 - RNA, 19 nt, Artificial Sequence
  Description of Artificial Sequence: Synthetic oligonucleotide
aacugcacccacugcauuu

SEQ ID NO: 2702956 - RNA, 19 nt, Artificial Sequence
  Description of Artificial Sequence: Synthetic oligonucleotide
uacucaacgguaguaacua

SEQ ID NO: 2702957 - RNA, 19 nt, Artificial Sequence
  Description of Artificial Sequence: Synthetic oligonucleotide
agauucgacacuccccacu

SEQ ID NO: 2702958 - RNA, 19 nt, Artificial Sequence
  Description of Artificial Sequence: Synthetic oligonucleotide
gcaguuucgacaaaauggc

SEQ ID NO: 2702959 - RNA, 19 nt, Artificial Sequence
  Description of Artificial Sequence: Synthetic oligonucleotide
cauuaggauacacaaaccu

SEQ ID NO: 2702960 - RNA, 19 nt, Artificial Sequence
  Description of Artificial Sequence: Synthetic oligonucleotide
uacacuugaaagggugaag

SEQ ID NO: 2702961 - RNA, 19 nt, Artificial Sequence
  Description of Artificial Sequence: Synthetic oligonucleotide
uaagcacagauucgacacu

SEQ ID NO: 2702962 - RNA, 19 nt, Artificial Sequence
  Description of Artificial Sequence: Synthetic oligonucleotide
ccacuauaagcacagauuc

SEQ ID NO: 2702963 - RNA, 19 nt, Artificial Sequence
  Description of Artificial Sequence: Synthetic oligonucleotide
aacagugcauagaaaugga

SEQ ID NO: 2702964 - RNA, 19 nt, Artificial Sequence
  Description of Artificial Sequence: Synthetic oligonucleotide
aaacaugcacauccacaaa

SEQ ID NO: 2702965 - RNA, 19 nt, Artificial Sequence
  Description of Artificial Sequence: Synthetic oligonucleotide
gguaguaacuauuuauaaa

SEQ ID NO: 2702966 - RNA, 19 nt, Artificial Sequence
  Description of Artificial Sequence: Synthetic oligonucleotide
cacacaaaaccaagaaaca

SEQ ID NO: 2702967 - RNA, 19 nt, Artificial Sequence
  Description of Artificial Sequence: Synthetic oligonucleotide
aacagcuguucuccuacaa

SEQ ID NO: 2702968 - RNA, 19 nt, Artificial Sequence
  Description of Artificial Sequence: Synthetic oligonucleotide
cauuuuaauagcuguugaa

SEQ ID NO: 2702969 - RNA, 19 nt, Artificial Sequence
  Description of Artificial Sequence: Synthetic oligonucleotide
ugcauagaaauggauuuua

SEQ ID NO: 2702970 - RNA, 19 nt, Artificial Sequence
  Description of Artificial Sequence: Synthetic oligonucleotide
aggcuaacaacaaacugca

SEQ ID NO: 2702971 - RNA, 19 nt, Artificial Sequence
  Description of Artificial Sequence: Synthetic oligonucleotide
cugagagaaccacuauaag

SEQ ID NO: 2702972 - RNA, 19 nt, Artificial Sequence
  Description of Artificial Sequence: Synthetic oligonucleotide
ccaagaaacacaaacagcu

SEQ ID NO: 2702973 - RNA, 19 nt, Artificial Sequence
  Description of Artificial Sequence: Synthetic oligonucleotide
ggauuuuacucaacgguag

SEQ ID NO: 2702974 - RNA, 19 nt, Artificial Sequence
  Description of Artificial Sequence: Synthetic oligonucleotide
cuguucuccuacaaaauaa

SEQ ID NO: 2702975 - RNA, 19 nt, Artificial Sequence
  Description of Artificial Sequence: Synthetic oligonucleotide
auaacaauuagaggacaaa

SEQ ID NO: 2702976 - RNA, 19 nt, Artificial Sequence
  Description of Artificial Sequence: Synthetic oligonucleotide
ucacagccgccuuccaagg

SEQ ID NO: 2702977 - RNA, 19 nt, Artificial Sequence
  Description of Artificial Sequence: Synthetic oligonucleotide
acaucgauguuaucuuuaa

SEQ ID NO: 2702978 - RNA, 19 nt, Artificial Sequence
  Description of Artificial Sequence: Synthetic oligonucleotide
gaaguuuauuuuauuugaa

SEQ ID NO: 2702979 - RNA, 19 nt, Artificial Sequence
  Description of Artificial Sequence: Synthetic oligonucleotide
acacuacagcuuucacagc

SEQ ID NO: 2702980 - RNA, 19 nt, Artificial Sequence
  Description of Artificial Sequence: Synthetic oligonucleotide
aaugcacacuacagcuuuc

SEQ ID NO: 2702981 - RNA, 19 nt, Artificial Sequence
  Description of Artificial Sequence: Synthetic oligonucleotide
uucgacacuccccacucau

SEQ ID NO: 2702982 - RNA, 19 nt, Artificial Sequence
  Description of Artificial Sequence: Synthetic oligonucleotide
auaaaacacagugcauuga

SEQ ID NO: 2702983 - RNA, 19 nt, Artificial Sequence
  Description of Artificial Sequence: Synthetic oligonucleotide
cugcauuuauggcuucuag

SEQ ID NO: 2702984 - RNA, 19 nt, Artificial Sequence
  Description of Artificial Sequence: Synthetic oligonucleotide
gaaacacaaacagcuguuc

SEQ ID NO: 2702985 - RNA, 19 nt, Artificial Sequence
  Description of Artificial Sequence: Synthetic oligonucleotide
uacagcaguuucgacaaaa

SEQ ID NO: 2702986 - RNA, 19 nt, Artificial Sequence
  Description of Artificial Sequence: Synthetic oligonucleotide
uuucacagccgccuuccaa

SEQ ID NO: 2702987 - RNA, 19 nt, Artificial Sequence
  Description of Artificial Sequence: Synthetic oligonucleotide
auaaaccaauaagaaacau

SEQ ID NO: 2702988 - RNA, 19 nt, Artificial Sequence
  Description of Artificial Sequence: Synthetic oligonucleotide
uacagcuuucacagccgcc

SEQ ID NO: 2702989 - RNA, 19 nt, Artificial Sequence
  Description of Artificial Sequence: Synthetic oligonucleotide
aguuucgacaaaauggcuu

SEQ ID NO: 2702990 - RNA, 19 nt, Artificial Sequence
  Description of Artificial Sequence: Synthetic oligonucleotide
aaacagcuguucuccuaca

SEQ ID NO: 2702991 - RNA, 19 nt, Artificial Sequence
  Description of Artificial Sequence: Synthetic oligonucleotide
gcaguuuaaaacaugcaca

SEQ ID NO: 2702992 - RNA, 19 nt, Artificial Sequence
  Description of Artificial Sequence: Synthetic oligonucleotide
aucucuacagcaguuucga

SEQ ID NO: 2702993 - RNA, 19 nt, Artificial Sequence
  Description of Artificial Sequence: Synthetic oligonucleotide
caaugacacggaacagugc

SEQ ID NO: 2702994 - RNA, 19 nt, Artificial Sequence
  Description of Artificial Sequence: Synthetic oligonucleotide
cagcaguuucgacaaaaug

SEQ ID NO: 2702995 - RNA, 19 nt, Artificial Sequence
  Description of Artificial Sequence: Synthetic oligonucleotide
cuguugaagguuaauuaaa

SEQ ID NO: 2702996 - RNA, 19 nt, Artificial Sequence
  Description of Artificial Sequence: Synthetic oligonucleotide
acagccgccuuccaaggcu

SEQ ID NO: 2702997 - RNA, 19 nt, Artificial Sequence
  Description of Artificial Sequence: Synthetic oligonucleotide
aggauacacaaaccugaga

SEQ ID NO: 2702998 - RNA, 19 nt, Artificial Sequence
  Description of Artificial Sequence: Synthetic oligonucleotide
gcuugaagaggcuaacaac

SEQ ID NO: 2702999 - RNA, 19 nt, Artificial Sequence
  Description of Artificial Sequence: Synthetic oligonucleotide
cucaaaauuuaacuuacau

SEQ ID NO: 2703000 - RNA, 19 nt, Artificial Sequence
  Description of Artificial Sequence: Synthetic oligonucleotide
aaccaauaagaaacaugga

SEQ ID NO: 2703001 - RNA, 19 nt, Artificial Sequence
  Description of Artificial Sequence: Synthetic oligonucleotide
ccaaugacacggaacagug

SEQ ID NO: 2703002 - RNA, 19 nt, Artificial Sequence
  Description of Artificial Sequence: Synthetic oligonucleotide
uguaauggugaaguuuauu

SEQ ID NO: 2703003 - RNA, 19 nt, Artificial Sequence
  Description of Artificial Sequence: Synthetic oligonucleotide
guucuccuacaaaauaaac

SEQ ID NO: 2703004 - RNA, 19 nt, Artificial Sequence
  Description of Artificial Sequence: Synthetic oligonucleotide
accacuauaagcacagauu

SEQ ID NO: 2703005 - RNA, 19 nt, Artificial Sequence
  Description of Artificial Sequence: Synthetic oligonucleotide
uucgcuuccuuuuccucaa

SEQ ID NO: 2703006 - RNA, 19 nt, Artificial Sequence
  Description of Artificial Sequence: Synthetic oligonucleotide
aaccugagagaaccacuau

SEQ ID NO: 2703007 - RNA, 19 nt, Artificial Sequence
  Description of Artificial Sequence: Synthetic oligonucleotide
uccccacucaugcagcguc

SEQ ID NO: 2703008 - RNA, 19 nt, Artificial Sequence
  Description of Artificial Sequence: Synthetic oligonucleotide
gagaaccacuauaagcaca

SEQ ID NO: 2703009 - RNA, 19 nt, Artificial Sequence
  Description of Artificial Sequence: Synthetic oligonucleotide
acauggagggcauucgcuu

SEQ ID NO: 2703010 - RNA, 19 nt, Artificial Sequence
  Description of Artificial Sequence: Synthetic oligonucleotide
cugccuucuaacuuuaacu

SEQ ID NO: 2703011 - RNA, 19 nt, Artificial Sequence
  Description of Artificial Sequence: Synthetic oligonucleotide
auuuuacucaacgguagua

SEQ ID NO: 2703012 - RNA, 19 nt, Artificial Sequence
  Description of Artificial Sequence: Synthetic oligonucleotide
gaagcuugaagaggcuaac

SEQ ID NO: 2703013 - RNA, 19 nt, Artificial Sequence
  Description of Artificial Sequence: Synthetic oligonucleotide
gauuuuacucaacgguagu

SEQ ID NO: 2703014 - RNA, 19 nt, Artificial Sequence
  Description of Artificial Sequence: Synthetic oligonucleotide
ggcuucuagucuaugacug

SEQ ID NO: 2703015 - RNA, 19 nt, Artificial Sequence
  Description of Artificial Sequence: Synthetic oligonucleotide
ugcacccacugcauuuaug

SEQ ID NO: 2703016 - RNA, 19 nt, Artificial Sequence
  Description of Artificial Sequence: Synthetic oligonucleotide
uucgacaaaauggcuuuuc

SEQ ID NO: 2703017 - RNA, 19 nt, Artificial Sequence
  Description of Artificial Sequence: Synthetic oligonucleotide
gcuguugaagguuaauuaa

SEQ ID NO: 2703018 - RNA, 19 nt, Artificial Sequence
  Description of Artificial Sequence: Synthetic oligonucleotide
uaacaacaaacugcaccca

SEQ ID NO: 2703019 - RNA, 19 nt, Artificial Sequence
  Description of Artificial Sequence: Synthetic oligonucleotide
auuagaggacaaauguuua

SEQ ID NO: 2703020 - RNA, 19 nt, Artificial Sequence
  Description of Artificial Sequence: Synthetic oligonucleotide
cacggaacagugcauagaa

SEQ ID NO: 2703021 - RNA, 19 nt, Artificial Sequence
  Description of Artificial Sequence: Synthetic oligonucleotide
cuaugacugggaauuaugu

SEQ ID NO: 2703022 - RNA, 19 nt, Artificial Sequence
  Description of Artificial Sequence: Synthetic oligonucleotide
agcacagauucgacacucc

SEQ ID NO: 2703023 - RNA, 19 nt, Artificial Sequence
  Description of Artificial Sequence: Synthetic oligonucleotide
cucaugcagcgucacaauc

SEQ ID NO: 2703024 - RNA, 19 nt, Artificial Sequence
  Description of Artificial Sequence: Synthetic oligonucleotide
cacagugcauugaacauua

SEQ ID NO: 2703025 - RNA, 19 nt, Artificial Sequence
  Description of Artificial Sequence: Synthetic oligonucleotide
cagcuguucuccuacaaaa

SEQ ID NO: 2703026 - RNA, 19 nt, Artificial Sequence
  Description of Artificial Sequence: Synthetic oligonucleotide
agggcauucgcuuccuuuu

SEQ ID NO: 2703027 - RNA, 19 nt, Artificial Sequence
  Description of Artificial Sequence: Synthetic oligonucleotide
agaaacacaaacagcuguu

SEQ ID NO: 2703028 - RNA, 19 nt, Artificial Sequence
  Description of Artificial Sequence: Synthetic oligonucleotide
ucgacacuccccacucaug

SEQ ID NO: 2703029 - RNA, 19 nt, Artificial Sequence
  Description of Artificial Sequence: Synthetic oligonucleotide
gaacauuaggauacacaaa

SEQ ID NO: 2703030 - RNA, 19 nt, Artificial Sequence
  Description of Artificial Sequence: Synthetic oligonucleotide
aaacugcacccacugcauu

SEQ ID NO: 2703031 - RNA, 19 nt, Artificial Sequence
  Description of Artificial Sequence: Synthetic oligonucleotide
uugaaagggugaagaugaa

SEQ ID NO: 2703032 - RNA, 19 nt, Artificial Sequence
  Description of Artificial Sequence: Synthetic oligonucleotide
auacacuugaaagggugaa

SEQ ID NO: 2703033 - RNA, 19 nt, Artificial Sequence
  Description of Artificial Sequence: Synthetic oligonucleotide
aauagcuguugaagguuaa

SEQ ID NO: 2703034 - RNA, 19 nt, Artificial Sequence
  Description of Artificial Sequence: Synthetic oligonucleotide
acgguaguaacuauuuaua

SEQ ID NO: 2703035 - RNA, 19 nt, Artificial Sequence
  Description of Artificial Sequence: Synthetic oligonucleotide
cacccacugcauuuauggc

SEQ ID NO: 2703036 - RNA, 19 nt, Artificial Sequence
  Description of Artificial Sequence: Synthetic oligonucleotide
ccacaaaaggccaaugaca

SEQ ID NO: 2703037 - RNA, 19 nt, Artificial Sequence
  Description of Artificial Sequence: Synthetic oligonucleotide
guuucgacaaaauggcuuu

SEQ ID NO: 2703038 - RNA, 19 nt, Artificial Sequence
  Description of Artificial Sequence: Synthetic oligonucleotide
ugacacggaacagugcaua

SEQ ID NO: 2703039 - RNA, 19 nt, Artificial Sequence
  Description of Artificial Sequence: Synthetic oligonucleotide
uggugaaguuuauuuuauu

SEQ ID NO: 2703040 - RNA, 19 nt, Artificial Sequence
  Description of Artificial Sequence: Synthetic oligonucleotide
ggugaaguuuauuuuauuu

SEQ ID NO: 2703041 - RNA, 19 nt, Artificial Sequence
  Description of Artificial Sequence: Synthetic oligonucleotide
cauuuauggcuucuagucu

SEQ ID NO: 2703042 - RNA, 19 nt, Artificial Sequence
  Description of Artificial Sequence: Synthetic oligonucleotide
gugcauugaacauuaggau

SEQ ID NO: 2703043 - RNA, 19 nt, Artificial Sequence
  Description of Artificial Sequence: Synthetic oligonucleotide
guuaucuuuaaugcacacu

SEQ ID NO: 2703044 - RNA, 19 nt, Artificial Sequence
  Description of Artificial Sequence: Synthetic oligonucleotide
ccugagagaaccacuauaa

SEQ ID NO: 2703045 - RNA, 19 nt, Artificial Sequence
  Description of Artificial Sequence: Synthetic oligonucleotide
cuccuacaaaauaaaccaa

SEQ ID NO: 2703046 - RNA, 19 nt, Artificial Sequence
  Description of Artificial Sequence: Synthetic oligonucleotide
gcacacuacagcuuucaca

SEQ ID NO: 2703047 - RNA, 19 nt, Artificial Sequence
  Description of Artificial Sequence: Synthetic oligonucleotide
gacaucgauguuaucuuua

SEQ ID NO: 2703048 - RNA, 19 nt, Artificial Sequence
  Description of Artificial Sequence: Synthetic oligonucleotide
acucaugcagcgucacaau

SEQ ID NO: 2703049 - RNA, 19 nt, Artificial Sequence
  Description of Artificial Sequence: Synthetic oligonucleotide
gcugccuucuaacuuuaac

SEQ ID NO: 2703050 - RNA, 19 nt, Artificial Sequence
  Description of Artificial Sequence: Synthetic oligonucleotide
caauuagaggacaaauguu

SEQ ID NO: 2703051 - RNA, 19 nt, Artificial Sequence
  Description of Artificial Sequence: Synthetic oligonucleotide
ggcauucgcuuccuuuucc

SEQ ID NO: 2703052 - RNA, 19 nt, Artificial Sequence
  Description of Artificial Sequence: Synthetic oligonucleotide
caaaccugagagaaccacu

SEQ ID NO: 2703053 - RNA, 19 nt, Artificial Sequence
  Description of Artificial Sequence: Synthetic oligonucleotide
acucaacgguaguaacuau

SEQ ID NO: 2703054 - RNA, 19 nt, Artificial Sequence
  Description of Artificial Sequence: Synthetic oligonucleotide
cacucaugcagcgucacaa

SEQ ID NO: 2703055 - RNA, 19 nt, Artificial Sequence
  Description of Artificial Sequence: Synthetic oligonucleotide
cauccacaaaaggccaaug

SEQ ID NO: 2703056 - RNA, 19 nt, Artificial Sequence
  Description of Artificial Sequence: Synthetic oligonucleotide
auucgacacuccccacuca

SEQ ID NO: 2703057 - RNA, 19 nt, Artificial Sequence
  Description of Artificial Sequence: Synthetic oligonucleotide
acauccacaaaaggccaau

SEQ ID NO: 2703058 - RNA, 19 nt, Artificial Sequence
  Description of Artificial Sequence: Synthetic oligonucleotide
gagcuggacaucgauguua

SEQ ID NO: 2703059 - RNA, 19 nt, Artificial Sequence
  Description of Artificial Sequence: Synthetic oligonucleotide
acacggaacagugcauaga

SEQ ID NO: 2703060 - RNA, 19 nt, Artificial Sequence
  Description of Artificial Sequence: Synthetic oligonucleotide
auagcuguugaagguuaau

SEQ ID NO: 2703061 - RNA, 19 nt, Artificial Sequence
  Description of Artificial Sequence: Synthetic oligonucleotide
ccuacaaaauaaaccaaua

SEQ ID NO: 2703062 - RNA, 19 nt, Artificial Sequence
  Description of Artificial Sequence: Synthetic oligonucleotide
cagugcauagaaauggauu

SEQ ID NO: 2703063 - RNA, 19 nt, Artificial Sequence
  Description of Artificial Sequence: Synthetic oligonucleotide
gcuguucuccuacaaaaua

SEQ ID NO: 2703064 - RNA, 19 nt, Artificial Sequence
  Description of Artificial Sequence: Synthetic oligonucleotide
ccauuuuaauagcuguuga

SEQ ID NO: 2703065 - RNA, 19 nt, Artificial Sequence
  Description of Artificial Sequence: Synthetic oligonucleotide
gcauagaaauggauuuuac

SEQ ID NO: 2703066 - RNA, 19 nt, Artificial Sequence
  Description of Artificial Sequence: Synthetic oligonucleotide
acagcaguuucgacaaaau

SEQ ID NO: 2703067 - RNA, 19 nt, Artificial Sequence
  Description of Artificial Sequence: Synthetic oligonucleotide
agcuggacaucgauguuau

SEQ ID NO: 2703068 - RNA, 19 nt, Artificial Sequence
  Description of Artificial Sequence: Synthetic oligonucleotide
agcuguucuccuacaaaau

SEQ ID NO: 2703069 - RNA, 19 nt, Artificial Sequence
  Description of Artificial Sequence: Synthetic oligonucleotide
cacagccgccuuccaaggc

SEQ ID NO: 2703070 - RNA, 19 nt, Artificial Sequence
  Description of Artificial Sequence: Synthetic oligonucleotide
acugcauuuauggcuucua

SEQ ID NO: 2703071 - RNA, 19 nt, Artificial Sequence
  Description of Artificial Sequence: Synthetic oligonucleotide
cagauucgacacuccccac

SEQ ID NO: 2703072 - RNA, 19 nt, Artificial Sequence
  Description of Artificial Sequence: Synthetic oligonucleotide
uuucgacaaaauggcuuuu

SEQ ID NO: 2703073 - RNA, 19 nt, Artificial Sequence
  Description of Artificial Sequence: Synthetic oligonucleotide
cauugaacauuaggauaca

SEQ ID NO: 2703074 - RNA, 19 nt, Artificial Sequence
  Description of Artificial Sequence: Synthetic oligonucleotide
cagcgucacaaucucuaca

SEQ ID NO: 2703075 - RNA, 19 nt, Artificial Sequence
  Description of Artificial Sequence: Synthetic oligonucleotide
aagaaacauggagggcauu

SEQ ID NO: 2703076 - RNA, 19 nt, Artificial Sequence
  Description of Artificial Sequence: Synthetic oligonucleotide
cuagucuaugacugggaau

SEQ ID NO: 2703077 - RNA, 19 nt, Artificial Sequence
  Description of Artificial Sequence: Synthetic oligonucleotide
cucaacgguaguaacuauu

SEQ ID NO: 2703078 - RNA, 19 nt, Artificial Sequence
  Description of Artificial Sequence: Synthetic oligonucleotide
cagccgccuuccaaggcug

SEQ ID NO: 2703079 - RNA, 19 nt, Artificial Sequence
  Description of Artificial Sequence: Synthetic oligonucleotide
gaugaagcuugaagaggcu

SEQ ID NO: 2703080 - RNA, 19 nt, Artificial Sequence
  Description of Artificial Sequence: Synthetic oligonucleotide
gagggcauucgcuuccuuu

SEQ ID NO: 2703081 - RNA, 19 nt, Artificial Sequence
  Description of Artificial Sequence: Synthetic oligonucleotide
gcagcgucacaaucucuac

SEQ ID NO: 2703082 - RNA, 19 nt, Artificial Sequence
  Description of Artificial Sequence: Synthetic oligonucleotide
gcgucacaaucucuacagc

SEQ ID NO: 2703083 - RNA, 19 nt, Artificial Sequence
  Description of Artificial Sequence: Synthetic oligonucleotide
gaaccacuauaagcacaga

SEQ ID NO: 2703084 - RNA, 19 nt, Artificial Sequence
  Description of Artificial Sequence: Synthetic oligonucleotide
caguuucgacaaaauggcu

SEQ ID NO: 2703085 - RNA, 19 nt, Artificial Sequence
  Description of Artificial Sequence: Synthetic oligonucleotide
agucuaugacugggaauua

SEQ ID NO: 2703086 - RNA, 19 nt, Artificial Sequence
  Description of Artificial Sequence: Synthetic oligonucleotide
cgacaaaauggcuuuucca

SEQ ID NO: 2703087 - RNA, 19 nt, Artificial Sequence
  Description of Artificial Sequence: Synthetic oligonucleotide
cacuugaaagggugaagau

SEQ ID NO: 2703088 - RNA, 19 nt, Artificial Sequence
  Description of Artificial Sequence: Synthetic oligonucleotide
cacaaucucuacagcaguu

SEQ ID NO: 2703089 - RNA, 19 nt, Artificial Sequence
  Description of Artificial Sequence: Synthetic oligonucleotide
ucgcuuccuuuuccucaaa

SEQ ID NO: 2703090 - RNA, 19 nt, Artificial Sequence
  Description of Artificial Sequence: Synthetic oligonucleotide
acggaacagugcauagaaa

SEQ ID NO: 2703091 - RNA, 19 nt, Artificial Sequence
  Description of Artificial Sequence: Synthetic oligonucleotide
cuuucacagccgccuucca

SEQ ID NO: 2703092 - RNA, 19 nt, Artificial Sequence
  Description of Artificial Sequence: Synthetic oligonucleotide
gccaaugacacggaacagu

SEQ ID NO: 2703093 - RNA, 19 nt, Artificial Sequence
  Description of Artificial Sequence: Synthetic oligonucleotide
gucuaugacugggaauuau

SEQ ID NO: 2703094 - RNA, 19 nt, Artificial Sequence
  Description of Artificial Sequence: Synthetic oligonucleotide
augcagcgucacaaucucu

SEQ ID NO: 2703095 - RNA, 19 nt, Artificial Sequence
  Description of Artificial Sequence: Synthetic oligonucleotide
caucgauguuaucuuuaau

SEQ ID NO: 2703096 - RNA, 19 nt, Artificial Sequence
  Description of Artificial Sequence: Synthetic oligonucleotide
ggugaagaugaagcuugaa

SEQ ID NO: 2703097 - RNA, 19 nt, Artificial Sequence
  Description of Artificial Sequence: Synthetic oligonucleotide
gcauucgcuuccuuuuccu

SEQ ID NO: 2703098 - RNA, 19 nt, Artificial Sequence
  Description of Artificial Sequence: Synthetic oligonucleotide
gugcauagaaauggauuuu

SEQ ID NO: 2703099 - RNA, 19 nt, Artificial Sequence
  Description of Artificial Sequence: Synthetic oligonucleotide
cacugcauuuauggcuucu

SEQ ID NO: 2703100 - RNA, 19 nt, Artificial Sequence
  Description of Artificial Sequence: Synthetic oligonucleotide
aggcugccuucuaacuuua

SEQ ID NO: 2703101 - RNA, 19 nt, Artificial Sequence
  Description of Artificial Sequence: Synthetic oligonucleotide
gcuggacaucgauguuauc

SEQ ID NO: 2703102 - RNA, 19 nt, Artificial Sequence
  Description of Artificial Sequence: Synthetic oligonucleotide
cccacucaugcagcgucac

SEQ ID NO: 2703103 - RNA, 19 nt, Artificial Sequence
  Description of Artificial Sequence: Synthetic oligonucleotide
gccgccuuccaaggcugcc

SEQ ID NO: 2703104 - RNA, 19 nt, Artificial Sequence
  Description of Artificial Sequence: Synthetic oligonucleotide
ccacugcauuuauggcuuc

SEQ ID NO: 2703105 - RNA, 19 nt, Artificial Sequence
  Description of Artificial Sequence: Synthetic oligonucleotide
ccacucaugcagcgucaca

SEQ ID NO: 2703106 - RNA, 19 nt, Artificial Sequence
  Description of Artificial Sequence: Synthetic oligonucleotide
ccccacucaugcagcguca

SEQ ID NO: 2703107 - RNA, 19 nt, Artificial Sequence
  Description of Artificial Sequence: Synthetic oligonucleotide
cugcacccacugcauuuau

SEQ ID NO: 2703108 - RNA, 19 nt, Artificial Sequence
  Description of Artificial Sequence: Synthetic oligonucleotide
ggcugccuucuaacuuuaa

SEQ ID NO: 2703109 - RNA, 19 nt, Artificial Sequence
  Description of Artificial Sequence: Synthetic oligonucleotide
ggagggcauucgcuuccuu

SEQ ID NO: 2703110 - RNA, 19 nt, Artificial Sequence
  Description of Artificial Sequence: Synthetic oligonucleotide
ccgccuuccaaggcugccu

SEQ ID NO: 2703111 - RNA, 19 nt, Artificial Sequence
  Description of Artificial Sequence: Synthetic oligonucleotide
uaaacuaacccguugaggg

SEQ ID NO: 2703112 - RNA, 19 nt, Artificial Sequence
  Description of Artificial Sequence: Synthetic oligonucleotide
aacacuaauaccuugggga

SEQ ID NO: 2703113 - RNA, 19 nt, Artificial Sequence
  Description of Artificial Sequence: Synthetic oligonucleotide
uguccuugaaaccagagag

SEQ ID NO: 2703114 - RNA, 19 nt, Artificial Sequence
  Description of Artificial Sequence: Synthetic oligonucleotide
aaguauucugaauacuugg

SEQ ID NO: 2703115 - RNA, 19 nt, Artificial Sequence
  Description of Artificial Sequence: Synthetic oligonucleotide
uguaauuccaggcucguag

SEQ ID NO: 2703116 - RNA, 19 nt, Artificial Sequence
  Description of Artificial Sequence: Synthetic oligonucleotide
aaagaaggaagacggcacc

SEQ ID NO: 2703117 - RNA, 19 nt, Artificial Sequence
  Description of Artificial Sequence: Synthetic oligonucleotide
ugaucugccagcuggaugg

SEQ ID NO: 2703118 - RNA, 19 nt, Artificial Sequence
  Description of Artificial Sequence: Synthetic oligonucleotide
aaaauggacagccugcuga

SEQ ID NO: 2703119 - RNA, 19 nt, Artificial Sequence
  Description of Artificial Sequence: Synthetic oligonucleotide
uagaagauguggcagaacc

SEQ ID NO: 2703120 - RNA, 19 nt, Artificial Sequence
  Description of Artificial Sequence: Synthetic oligonucleotide
aagaguauccuccuuucuc

SEQ ID NO: 2703121 - RNA, 19 nt, Artificial Sequence
  Description of Artificial Sequence: Synthetic oligonucleotide
aaaagaguauccuccuuuc

SEQ ID NO: 2703122 - RNA, 19 nt, Artificial Sequence
  Description of Artificial Sequence: Synthetic oligonucleotide
ugcacuaagccccaaaggc

SEQ ID NO: 2703123 - RNA, 19 nt, Artificial Sequence
  Description of Artificial Sequence: Synthetic oligonucleotide
agaguauccuccuuucucc

SEQ ID NO: 2703124 - RNA, 19 nt, Artificial Sequence
  Description of Artificial Sequence: Synthetic oligonucleotide
uauucugaauacuugggcc

SEQ ID NO: 2703125 - RNA, 19 nt, Artificial Sequence
  Description of Artificial Sequence: Synthetic oligonucleotide
agugaaguauucugaauac

SEQ ID NO: 2703126 - RNA, 19 nt, Artificial Sequence
  Description of Artificial Sequence: Synthetic oligonucleotide
gaaauauccauccucugug

SEQ ID NO: 2703127 - RNA, 19 nt, Artificial Sequence
  Description of Artificial Sequence: Synthetic oligonucleotide
aaccugaucugccagcugg

SEQ ID NO: 2703128 - RNA, 19 nt, Artificial Sequence
  Description of Artificial Sequence: Synthetic oligonucleotide
ucaacuguguaauuccagg

SEQ ID NO: 2703129 - RNA, 19 nt, Artificial Sequence
  Description of Artificial Sequence: Synthetic oligonucleotide
ugaacugcuacuugaagcc

SEQ ID NO: 2703130 - RNA, 19 nt, Artificial Sequence
  Description of Artificial Sequence: Synthetic oligonucleotide
ugagccacgaucaaguacu

SEQ ID NO: 2703131 - RNA, 19 nt, Artificial Sequence
  Description of Artificial Sequence: Synthetic oligonucleotide
agcuacguaaacuaacccg

SEQ ID NO: 2703132 - RNA, 19 nt, Artificial Sequence
  Description of Artificial Sequence: Synthetic oligonucleotide
caacagaaaaugucgaacc

SEQ ID NO: 2703133 - RNA, 19 nt, Artificial Sequence
  Description of Artificial Sequence: Synthetic oligonucleotide
ugagcuacguaaacuaacc

SEQ ID NO: 2703134 - RNA, 19 nt, Artificial Sequence
  Description of Artificial Sequence: Synthetic oligonucleotide
ugaacacuaauaccuuggg

SEQ ID NO: 2703135 - RNA, 19 nt, Artificial Sequence
  Description of Artificial Sequence: Synthetic oligonucleotide
ugaaccuaacagcaugggg

SEQ ID NO: 2703136 - RNA, 19 nt, Artificial Sequence
  Description of Artificial Sequence: Synthetic oligonucleotide
gaaggaugcacuaagcccc

SEQ ID NO: 2703137 - RNA, 19 nt, Artificial Sequence
  Description of Artificial Sequence: Synthetic oligonucleotide
cuugaaaccagagagccgc

SEQ ID NO: 2703138 - RNA, 19 nt, Artificial Sequence
  Description of Artificial Sequence: Synthetic oligonucleotide
ucaaccgcaacagaaaaug

SEQ ID NO: 2703139 - RNA, 19 nt, Artificial Sequence
  Description of Artificial Sequence: Synthetic oligonucleotide
uaggaaauauccauccucu

SEQ ID NO: 2703140 - RNA, 19 nt, Artificial Sequence
  Description of Artificial Sequence: Synthetic oligonucleotide
aagacggcaccucccacgc

SEQ ID NO: 2703141 - RNA, 19 nt, Artificial Sequence
  Description of Artificial Sequence: Synthetic oligonucleotide
aacuguguaauuccaggcu

SEQ ID NO: 2703142 - RNA, 19 nt, Artificial Sequence
  Description of Artificial Sequence: Synthetic oligonucleotide
aacagaaaaugucgaacca

SEQ ID NO: 2703143 - RNA, 19 nt, Artificial Sequence
  Description of Artificial Sequence: Synthetic oligonucleotide
aaguacuucccauccgggg

SEQ ID NO: 2703144 - RNA, 19 nt, Artificial Sequence
  Description of Artificial Sequence: Synthetic oligonucleotide
gaucaaguacuucccaucc

SEQ ID NO: 2703145 - RNA, 19 nt, Artificial Sequence
  Description of Artificial Sequence: Synthetic oligonucleotide
uuugcacuuguuuugcccc

SEQ ID NO: 2703146 - RNA, 19 nt, Artificial Sequence
  Description of Artificial Sequence: Synthetic oligonucleotide
aaauggacagccugcugag

SEQ ID NO: 2703147 - RNA, 19 nt, Artificial Sequence
  Description of Artificial Sequence: Synthetic oligonucleotide
uccggggugaaccuaacag

SEQ ID NO: 2703148 - RNA, 19 nt, Artificial Sequence
  Description of Artificial Sequence: Synthetic oligonucleotide
gaaccagugaaguauucug

SEQ ID NO: 2703149 - RNA, 19 nt, Artificial Sequence
  Description of Artificial Sequence: Synthetic oligonucleotide
auauccauccucugugaac

SEQ ID NO: 2703150 - RNA, 19 nt, Artificial Sequence
  Description of Artificial Sequence: Synthetic oligonucleotide
ucguaggaaauauccaucc

SEQ ID NO: 2703151 - RNA, 19 nt, Artificial Sequence
  Description of Artificial Sequence: Synthetic oligonucleotide
gaugcacuaagccccaaag

SEQ ID NO: 2703152 - RNA, 19 nt, Artificial Sequence
  Description of Artificial Sequence: Synthetic oligonucleotide
gaacacuaauaccuugggg

SEQ ID NO: 2703153 - RNA, 19 nt, Artificial Sequence
  Description of Artificial Sequence: Synthetic oligonucleotide
uuuugcacuuguuuugccc

SEQ ID NO: 2703154 - RNA, 19 nt, Artificial Sequence
  Description of Artificial Sequence: Synthetic oligonucleotide
cuugggccaacccaaaucc

SEQ ID NO: 2703155 - RNA, 19 nt, Artificial Sequence
  Description of Artificial Sequence: Synthetic oligonucleotide
gaaaaugucgaaccaguga

SEQ ID NO: 2703156 - RNA, 19 nt, Artificial Sequence
  Description of Artificial Sequence: Synthetic oligonucleotide
aaccuaacagcauggggug

SEQ ID NO: 2703157 - RNA, 19 nt, Artificial Sequence
  Description of Artificial Sequence: Synthetic oligonucleotide
uuuugucaacuucuagaag

SEQ ID NO: 2703158 - RNA, 19 nt, Artificial Sequence
  Description of Artificial Sequence: Synthetic oligonucleotide
aaauccagccggaaaagag

SEQ ID NO: 2703159 - RNA, 19 nt, Artificial Sequence
  Description of Artificial Sequence: Synthetic oligonucleotide
ugagguucaacugagccac

SEQ ID NO: 2703160 - RNA, 19 nt, Artificial Sequence
  Description of Artificial Sequence: Synthetic oligonucleotide
uccuugaaaccagagagcc

SEQ ID NO: 2703161 - RNA, 19 nt, Artificial Sequence
  Description of Artificial Sequence: Synthetic oligonucleotide
gauguuauccccucuuuga

SEQ ID NO: 2703162 - RNA, 19 nt, Artificial Sequence
  Description of Artificial Sequence: Synthetic oligonucleotide
aaugucgaaccagugaagu

SEQ ID NO: 2703163 - RNA, 19 nt, Artificial Sequence
  Description of Artificial Sequence: Synthetic oligonucleotide
ugcuacauagacugcuccg

SEQ ID NO: 2703164 - RNA, 19 nt, Artificial Sequence
  Description of Artificial Sequence: Synthetic oligonucleotide
guauucugaauacuugggc

SEQ ID NO: 2703165 - RNA, 19 nt, Artificial Sequence
  Description of Artificial Sequence: Synthetic oligonucleotide
uguuuugccccaauuucug

SEQ ID NO: 2703166 - RNA, 19 nt, Artificial Sequence
  Description of Artificial Sequence: Synthetic oligonucleotide
uuguuuugccccaauuucu

SEQ ID NO: 2703167 - RNA, 19 nt, Artificial Sequence
  Description of Artificial Sequence: Synthetic oligonucleotide
gaagacggcaccucccacg

SEQ ID NO: 2703168 - RNA, 19 nt, Artificial Sequence
  Description of Artificial Sequence: Synthetic oligonucleotide
aaauauccauccucuguga

SEQ ID NO: 2703169 - RNA, 19 nt, Artificial Sequence
  Description of Artificial Sequence: Synthetic oligonucleotide
uguagcacgaaugcaaaac

SEQ ID NO: 2703170 - RNA, 19 nt, Artificial Sequence
  Description of Artificial Sequence: Synthetic oligonucleotide
aaccgcaacagaaaauguc

SEQ ID NO: 2703171 - RNA, 19 nt, Artificial Sequence
  Description of Artificial Sequence: Synthetic oligonucleotide
accgcaacagaaaaugucg

SEQ ID NO: 2703172 - RNA, 19 nt, Artificial Sequence
  Description of Artificial Sequence: Synthetic oligonucleotide
aggcucguaggaaauaucc

SEQ ID NO: 2703173 - RNA, 19 nt, Artificial Sequence
  Description of Artificial Sequence: Synthetic oligonucleotide
aacuaacccguugagggag

SEQ ID NO: 2703174 - RNA, 19 nt, Artificial Sequence
  Description of Artificial Sequence: Synthetic oligonucleotide
ugugaacacuaauaccuug

SEQ ID NO: 2703175 - RNA, 19 nt, Artificial Sequence
  Description of Artificial Sequence: Synthetic oligonucleotide
accaaaauggacagccugc

SEQ ID NO: 2703176 - RNA, 19 nt, Artificial Sequence
  Description of Artificial Sequence: Synthetic oligonucleotide
aguauucugaauacuuggg

SEQ ID NO: 2703177 - RNA, 19 nt, Artificial Sequence
  Description of Artificial Sequence: Synthetic oligonucleotide
uugagcuacguaaacuaac

SEQ ID NO: 2703178 - RNA, 19 nt, Artificial Sequence
  Description of Artificial Sequence: Synthetic oligonucleotide
cuccgaugcuuccagaugg

SEQ ID NO: 2703179 - RNA, 19 nt, Artificial Sequence
  Description of Artificial Sequence: Synthetic oligonucleotide
aauacuugggccaacccaa

SEQ ID NO: 2703180 - RNA, 19 nt, Artificial Sequence
  Description of Artificial Sequence: Synthetic oligonucleotide
uugaagccccuucaggaag

SEQ ID NO: 2703181 - RNA, 19 nt, Artificial Sequence
  Description of Artificial Sequence: Synthetic oligonucleotide
cccaauuucugcuacauag

SEQ ID NO: 2703182 - RNA, 19 nt, Artificial Sequence
  Description of Artificial Sequence: Synthetic oligonucleotide
gaagauguggcagaaccug

SEQ ID NO: 2703183 - RNA, 19 nt, Artificial Sequence
  Description of Artificial Sequence: Synthetic oligonucleotide
aauaccuuggggauguuau

SEQ ID NO: 2703184 - RNA, 19 nt, Artificial Sequence
  Description of Artificial Sequence: Synthetic oligonucleotide
caauuucugcuacauagac

SEQ ID NO: 2703185 - RNA, 19 nt, Artificial Sequence
  Description of Artificial Sequence: Synthetic oligonucleotide
guaggaaauauccauccuc

SEQ ID NO: 2703186 - RNA, 19 nt, Artificial Sequence
  Description of Artificial Sequence: Synthetic oligonucleotide
guagcacgaaugcaaaacc

SEQ ID NO: 2703187 - RNA, 19 nt, Artificial Sequence
  Description of Artificial Sequence: Synthetic oligonucleotide
aaagaguauccuccuuucu

SEQ ID NO: 2703188 - RNA, 19 nt, Artificial Sequence
  Description of Artificial Sequence: Synthetic oligonucleotide
ugaagccccuucaggaagg

SEQ ID NO: 2703189 - RNA, 19 nt, Artificial Sequence
  Description of Artificial Sequence: Synthetic oligonucleotide
uacguaaacuaacccguug

SEQ ID NO: 2703190 - RNA, 19 nt, Artificial Sequence
  Description of Artificial Sequence: Synthetic oligonucleotide
uguuauccccucuuugagc

SEQ ID NO: 2703191 - RNA, 19 nt, Artificial Sequence
  Description of Artificial Sequence: Synthetic oligonucleotide
guaaacuaacccguugagg

SEQ ID NO: 2703192 - RNA, 19 nt, Artificial Sequence
  Description of Artificial Sequence: Synthetic oligonucleotide
aacagcaugggguguguca

SEQ ID NO: 2703193 - RNA, 19 nt, Artificial Sequence
  Description of Artificial Sequence: Synthetic oligonucleotide
aaacuaacccguugaggga

SEQ ID NO: 2703194 - RNA, 19 nt, Artificial Sequence
  Description of Artificial Sequence: Synthetic oligonucleotide
cacgaaugcaaaaccagac

SEQ ID NO: 2703195 - RNA, 19 nt, Artificial Sequence
  Description of Artificial Sequence: Synthetic oligonucleotide
cacuaagccccaaaggcag

SEQ ID NO: 2703196 - RNA, 19 nt, Artificial Sequence
  Description of Artificial Sequence: Synthetic oligonucleotide
gugucaacuguguaauucc

SEQ ID NO: 2703197 - RNA, 19 nt, Artificial Sequence
  Description of Artificial Sequence: Synthetic oligonucleotide
caacuguguaauuccaggc

SEQ ID NO: 2703198 - RNA, 19 nt, Artificial Sequence
  Description of Artificial Sequence: Synthetic oligonucleotide
gugaacacuaauaccuugg

SEQ ID NO: 2703199 - RNA, 19 nt, Artificial Sequence
  Description of Artificial Sequence: Synthetic oligonucleotide
acagaaaaugucgaaccag

SEQ ID NO: 2703200 - RNA, 19 nt, Artificial Sequence
  Description of Artificial Sequence: Synthetic oligonucleotide
accuuggggauguuauccc

SEQ ID NO: 2703201 - RNA, 19 nt, Artificial Sequence
  Description of Artificial Sequence: Synthetic oligonucleotide
ugaggcguugaacugcuac

SEQ ID NO: 2703202 - RNA, 19 nt, Artificial Sequence
  Description of Artificial Sequence: Synthetic oligonucleotide
augcacuaagccccaaagg

SEQ ID NO: 2703203 - RNA, 19 nt, Artificial Sequence
  Description of Artificial Sequence: Synthetic oligonucleotide
ugugucaacuguguaauuc

SEQ ID NO: 2703204 - RNA, 19 nt, Artificial Sequence
  Description of Artificial Sequence: Synthetic oligonucleotide
aauauccauccucugugaa

SEQ ID NO: 2703205 - RNA, 19 nt, Artificial Sequence
  Description of Artificial Sequence: Synthetic oligonucleotide
aguacuucccauccggggu

SEQ ID NO: 2703206 - RNA, 19 nt, Artificial Sequence
  Description of Artificial Sequence: Synthetic oligonucleotide
auguuauccccucuuugag

SEQ ID NO: 2703207 - RNA, 19 nt, Artificial Sequence
  Description of Artificial Sequence: Synthetic oligonucleotide
uagcacgaaugcaaaacca

SEQ ID NO: 2703208 - RNA, 19 nt, Artificial Sequence
  Description of Artificial Sequence: Synthetic oligonucleotide
ugugccauggaacguauuu

SEQ ID NO: 2703209 - RNA, 19 nt, Artificial Sequence
  Description of Artificial Sequence: Synthetic oligonucleotide
ugggccaacccaaauccag

SEQ ID NO: 2703210 - RNA, 19 nt, Artificial Sequence
  Description of Artificial Sequence: Synthetic oligonucleotide
acguaaacuaacccguuga

SEQ ID NO: 2703211 - RNA, 19 nt, Artificial Sequence
  Description of Artificial Sequence: Synthetic oligonucleotide
uuugagcuacguaaacuaa

SEQ ID NO: 2703212 - RNA, 19 nt, Artificial Sequence
  Description of Artificial Sequence: Synthetic oligonucleotide
gaaggaagacggcaccucc

SEQ ID NO: 2703213 - RNA, 19 nt, Artificial Sequence
  Description of Artificial Sequence: Synthetic oligonucleotide
aucaaguacuucccauccg

SEQ ID NO: 2703214 - RNA, 19 nt, Artificial Sequence
  Description of Artificial Sequence: Synthetic oligonucleotide
aaggaagacggcaccuccc

SEQ ID NO: 2703215 - RNA, 19 nt, Artificial Sequence
  Description of Artificial Sequence: Synthetic oligonucleotide
ucuuugagcuacguaaacu

SEQ ID NO: 2703216 - RNA, 19 nt, Artificial Sequence
  Description of Artificial Sequence: Synthetic oligonucleotide
ugucaacuguguaauucca

SEQ ID NO: 2703217 - RNA, 19 nt, Artificial Sequence
  Description of Artificial Sequence: Synthetic oligonucleotide
ugucgaaccagugaaguau

SEQ ID NO: 2703218 - RNA, 19 nt, Artificial Sequence
  Description of Artificial Sequence: Synthetic oligonucleotide
aauguccuugaaaccagag

SEQ ID NO: 2703219 - RNA, 19 nt, Artificial Sequence
  Description of Artificial Sequence: Synthetic oligonucleotide
acuaauaccuuggggaugu

SEQ ID NO: 2703220 - RNA, 19 nt, Artificial Sequence
  Description of Artificial Sequence: Synthetic oligonucleotide
gccacgaucaaguacuucc

SEQ ID NO: 2703221 - RNA, 19 nt, Artificial Sequence
  Description of Artificial Sequence: Synthetic oligonucleotide
acgaaugcaaaaccagaca

SEQ ID NO: 2703222 - RNA, 19 nt, Artificial Sequence
  Description of Artificial Sequence: Synthetic oligonucleotide
uaccuuggggauguuaucc

SEQ ID NO: 2703223 - RNA, 19 nt, Artificial Sequence
  Description of Artificial Sequence: Synthetic oligonucleotide
cugaccacagaacagucuc

SEQ ID NO: 2703224 - RNA, 19 nt, Artificial Sequence
  Description of Artificial Sequence: Synthetic oligonucleotide
cuucuagaagauguggcag

SEQ ID NO: 2703225 - RNA, 19 nt, Artificial Sequence
  Description of Artificial Sequence: Synthetic oligonucleotide
aauccagccggaaaagagu

SEQ ID NO: 2703226 - RNA, 19 nt, Artificial Sequence
  Description of Artificial Sequence: Synthetic oligonucleotide
gaaccuaacagcauggggu

SEQ ID NO: 2703227 - RNA, 19 nt, Artificial Sequence
  Description of Artificial Sequence: Synthetic oligonucleotide
gacggcaccucccacgcag

SEQ ID NO: 2703228 - RNA, 19 nt, Artificial Sequence
  Description of Artificial Sequence: Synthetic oligonucleotide
aaaugucgaaccagugaag

SEQ ID NO: 2703229 - RNA, 19 nt, Artificial Sequence
  Description of Artificial Sequence: Synthetic oligonucleotide
gagcuacguaaacuaaccc

SEQ ID NO: 2703230 - RNA, 19 nt, Artificial Sequence
  Description of Artificial Sequence: Synthetic oligonucleotide
acacuaauaccuuggggau

SEQ ID NO: 2703231 - RNA, 19 nt, Artificial Sequence
  Description of Artificial Sequence: Synthetic oligonucleotide
caaguacuucccauccggg

SEQ ID NO: 2703232 - RNA, 19 nt, Artificial Sequence
  Description of Artificial Sequence: Synthetic oligonucleotide
agagagccgcuguagcacg

SEQ ID NO: 2703233 - RNA, 19 nt, Artificial Sequence
  Description of Artificial Sequence: Synthetic oligonucleotide
cacagaacagucuccgaug

SEQ ID NO: 2703234 - RNA, 19 nt, Artificial Sequence
  Description of Artificial Sequence: Synthetic oligonucleotide
ucuccgaugcuuccagaug

SEQ ID NO: 2703235 - RNA, 19 nt, Artificial Sequence
  Description of Artificial Sequence: Synthetic oligonucleotide
cucguaggaaauauccauc

SEQ ID NO: 2703236 - RNA, 19 nt, Artificial Sequence
  Description of Artificial Sequence: Synthetic oligonucleotide
cuuugagcuacguaaacua

SEQ ID NO: 2703237 - RNA, 19 nt, Artificial Sequence
  Description of Artificial Sequence: Synthetic oligonucleotide
gagggagucaaccgcaaca

SEQ ID NO: 2703238 - RNA, 19 nt, Artificial Sequence
  Description of Artificial Sequence: Synthetic oligonucleotide
uucugcuacauagacugcu

SEQ ID NO: 2703239 - RNA, 19 nt, Artificial Sequence
  Description of Artificial Sequence: Synthetic oligonucleotide
ccggaaaagaguauccucc

SEQ ID NO: 2703240 - RNA, 19 nt, Artificial Sequence
  Description of Artificial Sequence: Synthetic oligonucleotide
aaccagugaaguauucuga

SEQ ID NO: 2703241 - RNA, 19 nt, Artificial Sequence
  Description of Artificial Sequence: Synthetic oligonucleotide
auaccuuggggauguuauc

SEQ ID NO: 2703242 - RNA, 19 nt, Artificial Sequence
  Description of Artificial Sequence: Synthetic oligonucleotide
ucugcuacauagacugcuc

SEQ ID NO: 2703243 - RNA, 19 nt, Artificial Sequence
  Description of Artificial Sequence: Synthetic oligonucleotide
caccaaaauggacagccug

SEQ ID NO: 2703244 - RNA, 19 nt, Artificial Sequence
  Description of Artificial Sequence: Synthetic oligonucleotide
ucugaggcguugaacugcu

SEQ ID NO: 2703245 - RNA, 19 nt, Artificial Sequence
  Description of Artificial Sequence: Synthetic oligonucleotide
agcacgaaugcaaaaccag

SEQ ID NO: 2703246 - RNA, 19 nt, Artificial Sequence
  Description of Artificial Sequence: Synthetic oligonucleotide
agucaaccgcaacagaaaa

SEQ ID NO: 2703247 - RNA, 19 nt, Artificial Sequence
  Description of Artificial Sequence: Synthetic oligonucleotide
uucccauccggggugaacc

SEQ ID NO: 2703248 - RNA, 19 nt, Artificial Sequence
  Description of Artificial Sequence: Synthetic oligonucleotide
ugguggggccaccaaaaug

SEQ ID NO: 2703249 - RNA, 19 nt, Artificial Sequence
  Description of Artificial Sequence: Synthetic oligonucleotide
aagaaggaagacggcaccu

SEQ ID NO: 2703250 - RNA, 19 nt, Artificial Sequence
  Description of Artificial Sequence: Synthetic oligonucleotide
accagugaaguauucugaa

SEQ ID NO: 2703251 - RNA, 19 nt, Artificial Sequence
  Description of Artificial Sequence: Synthetic oligonucleotide
guuauccccucuuugagcu

SEQ ID NO: 2703252 - RNA, 19 nt, Artificial Sequence
  Description of Artificial Sequence: Synthetic oligonucleotide
cagugaaguauucugaaua

SEQ ID NO: 2703253 - RNA, 19 nt, Artificial Sequence
  Description of Artificial Sequence: Synthetic oligonucleotide
aauggacagccugcugagg

SEQ ID NO: 2703254 - RNA, 19 nt, Artificial Sequence
  Description of Artificial Sequence: Synthetic oligonucleotide
aggaaauauccauccucug

SEQ ID NO: 2703255 - RNA, 19 nt, Artificial Sequence
  Description of Artificial Sequence: Synthetic oligonucleotide
auuccaggcucguaggaaa

SEQ ID NO: 2703256 - RNA, 19 nt, Artificial Sequence
  Description of Artificial Sequence: Synthetic oligonucleotide
aaccagagagccgcuguag

SEQ ID NO: 2703257 - RNA, 19 nt, Artificial Sequence
  Description of Artificial Sequence: Synthetic oligonucleotide
ugcuacuugaagccccuuc

SEQ ID NO: 2703258 - RNA, 19 nt, Artificial Sequence
  Description of Artificial Sequence: Synthetic oligonucleotide
agggagucaaccgcaacag

SEQ ID NO: 2703259 - RNA, 19 nt, Artificial Sequence
  Description of Artificial Sequence: Synthetic oligonucleotide
agaaggaagacggcaccuc

SEQ ID NO: 2703260 - RNA, 19 nt, Artificial Sequence
  Description of Artificial Sequence: Synthetic oligonucleotide
caggaaggaugcacuaagc

SEQ ID NO: 2703261 - RNA, 19 nt, Artificial Sequence
  Description of Artificial Sequence: Synthetic oligonucleotide
cgaaugcaaaaccagacag

SEQ ID NO: 2703262 - RNA, 19 nt, Artificial Sequence
  Description of Artificial Sequence: Synthetic oligonucleotide
ucuagaagauguggcagaa

SEQ ID NO: 2703263 - RNA, 19 nt, Artificial Sequence
  Description of Artificial Sequence: Synthetic oligonucleotide
cugcuacauagacugcucc

SEQ ID NO: 2703264 - RNA, 19 nt, Artificial Sequence
  Description of Artificial Sequence: Synthetic oligonucleotide
gcaaauguccuugaaacca

SEQ ID NO: 2703265 - RNA, 19 nt, Artificial Sequence
  Description of Artificial Sequence: Synthetic oligonucleotide
guuuugccccaauuucugc

SEQ ID NO: 2703266 - RNA, 19 nt, Artificial Sequence
  Description of Artificial Sequence: Synthetic oligonucleotide
agaaaaugucgaaccagug

SEQ ID NO: 2703267 - RNA, 19 nt, Artificial Sequence
  Description of Artificial Sequence: Synthetic oligonucleotide
uuucugcuacauagacugc

SEQ ID NO: 2703268 - RNA, 19 nt, Artificial Sequence
  Description of Artificial Sequence: Synthetic oligonucleotide
uggggugugucaacugugu

SEQ ID NO: 2703269 - RNA, 19 nt, Artificial Sequence
  Description of Artificial Sequence: Synthetic oligonucleotide
gccaccaaaauggacagcc

SEQ ID NO: 2703270 - RNA, 19 nt, Artificial Sequence
  Description of Artificial Sequence: Synthetic oligonucleotide
acgaucaaguacuucccau

SEQ ID NO: 2703271 - RNA, 19 nt, Artificial Sequence
  Description of Artificial Sequence: Synthetic oligonucleotide
cagccggaaaagaguaucc

SEQ ID NO: 2703272 - RNA, 19 nt, Artificial Sequence
  Description of Artificial Sequence: Synthetic oligonucleotide
ggugaaccuaacagcaugg

SEQ ID NO: 2703273 - RNA, 19 nt, Artificial Sequence
  Description of Artificial Sequence: Synthetic oligonucleotide
uacauagacugcuccgguc

SEQ ID NO: 2703274 - RNA, 19 nt, Artificial Sequence
  Description of Artificial Sequence: Synthetic oligonucleotide
cugagccacgaucaaguac

SEQ ID NO: 2703275 - RNA, 19 nt, Artificial Sequence
  Description of Artificial Sequence: Synthetic oligonucleotide
cuaagccccaaaggcaggg

SEQ ID NO: 2703276 - RNA, 19 nt, Artificial Sequence
  Description of Artificial Sequence: Synthetic oligonucleotide
aaaccagagagccgcugua

SEQ ID NO: 2703277 - RNA, 19 nt, Artificial Sequence
  Description of Artificial Sequence: Synthetic oligonucleotide
gcuacauagacugcuccgg

SEQ ID NO: 2703278 - RNA, 19 nt, Artificial Sequence
  Description of Artificial Sequence: Synthetic oligonucleotide
cugagguucaacugagcca

SEQ ID NO: 2703279 - RNA, 19 nt, Artificial Sequence
  Description of Artificial Sequence: Synthetic oligonucleotide
gauguggcagaaccugauc

SEQ ID NO: 2703280 - RNA, 19 nt, Artificial Sequence
  Description of Artificial Sequence: Synthetic oligonucleotide
ccaacccaaauccagccgg

SEQ ID NO: 2703281 - RNA, 19 nt, Artificial Sequence
  Description of Artificial Sequence: Synthetic oligonucleotide
gucaacuguguaauuccag

SEQ ID NO: 2703282 - RNA, 19 nt, Artificial Sequence
  Description of Artificial Sequence: Synthetic oligonucleotide
aacccguugagggagucaa

SEQ ID NO: 2703283 - RNA, 19 nt, Artificial Sequence
  Description of Artificial Sequence: Synthetic oligonucleotide
agaacagucuccgaugcuu

SEQ ID NO: 2703284 - RNA, 19 nt, Artificial Sequence
  Description of Artificial Sequence: Synthetic oligonucleotide
uuugccccaauuucugcua

SEQ ID NO: 2703285 - RNA, 19 nt, Artificial Sequence
  Description of Artificial Sequence: Synthetic oligonucleotide
aagauguggcagaaccuga

SEQ ID NO: 2703286 - RNA, 19 nt, Artificial Sequence
  Description of Artificial Sequence: Synthetic oligonucleotide
uauccccucuuugagcuac

SEQ ID NO: 2703287 - RNA, 19 nt, Artificial Sequence
  Description of Artificial Sequence: Synthetic oligonucleotide
ggaaagaaggaagacggca

SEQ ID NO: 2703288 - RNA, 19 nt, Artificial Sequence
  Description of Artificial Sequence: Synthetic oligonucleotide
gggugaaccuaacagcaug

SEQ ID NO: 2703289 - RNA, 19 nt, Artificial Sequence
  Description of Artificial Sequence: Synthetic oligonucleotide
gcaacagaaaaugucgaac

SEQ ID NO: 2703290 - RNA, 19 nt, Artificial Sequence
  Description of Artificial Sequence: Synthetic oligonucleotide
gugaaccuaacagcauggg

SEQ ID NO: 2703291 - RNA, 19 nt, Artificial Sequence
  Description of Artificial Sequence: Synthetic oligonucleotide
cucugaggcguugaacugc

SEQ ID NO: 2703292 - RNA, 19 nt, Artificial Sequence
  Description of Artificial Sequence: Synthetic oligonucleotide
gaacugcuacuugaagccc

SEQ ID NO: 2703293 - RNA, 19 nt, Artificial Sequence
  Description of Artificial Sequence: Synthetic oligonucleotide
agacccagacucuugccau

SEQ ID NO: 2703294 - RNA, 19 nt, Artificial Sequence
  Description of Artificial Sequence: Synthetic oligonucleotide
agaaccugaucugccagcu

SEQ ID NO: 2703295 - RNA, 19 nt, Artificial Sequence
  Description of Artificial Sequence: Synthetic oligonucleotide
ugcugaccacagaacaguc

SEQ ID NO: 2703296 - RNA, 19 nt, Artificial Sequence
  Description of Artificial Sequence: Synthetic oligonucleotide
cugaucugccagcuggaug

SEQ ID NO: 2703297 - RNA, 19 nt, Artificial Sequence
  Description of Artificial Sequence: Synthetic oligonucleotide
ugagggagucaaccgcaac

SEQ ID NO: 2703298 - RNA, 19 nt, Artificial Sequence
  Description of Artificial Sequence: Synthetic oligonucleotide
uugggccaacccaaaucca

SEQ ID NO: 2703299 - RNA, 19 nt, Artificial Sequence
  Description of Artificial Sequence: Synthetic oligonucleotide
cagaaaaugucgaaccagu

SEQ ID NO: 2703300 - RNA, 19 nt, Artificial Sequence
  Description of Artificial Sequence: Synthetic oligonucleotide
uugcacuuguuuugcccca

SEQ ID NO: 2703301 - RNA, 19 nt, Artificial Sequence
  Description of Artificial Sequence: Synthetic oligonucleotide
agaagauguggcagaaccu

SEQ ID NO: 2703302 - RNA, 19 nt, Artificial Sequence
  Description of Artificial Sequence: Synthetic oligonucleotide
gcaaaaccagacaggaaag

SEQ ID NO: 2703303 - RNA, 19 nt, Artificial Sequence
  Description of Artificial Sequence: Synthetic oligonucleotide
uucugaauacuugggccaa

SEQ ID NO: 2703304 - RNA, 19 nt, Artificial Sequence
  Description of Artificial Sequence: Synthetic oligonucleotide
uugccccaauuucugcuac

SEQ ID NO: 2703305 - RNA, 19 nt, Artificial Sequence
  Description of Artificial Sequence: Synthetic oligonucleotide
ucgaaccagugaaguauuc

SEQ ID NO: 2703306 - RNA, 19 nt, Artificial Sequence
  Description of Artificial Sequence: Synthetic oligonucleotide
ggaaauauccauccucugu

SEQ ID NO: 2703307 - RNA, 19 nt, Artificial Sequence
  Description of Artificial Sequence: Synthetic oligonucleotide
guugagggagucaaccgca

SEQ ID NO: 2703308 - RNA, 19 nt, Artificial Sequence
  Description of Artificial Sequence: Synthetic oligonucleotide
uuggggauguuauccccuc

SEQ ID NO: 2703309 - RNA, 19 nt, Artificial Sequence
  Description of Artificial Sequence: Synthetic oligonucleotide
uugaaaccagagagccgcu

SEQ ID NO: 2703310 - RNA, 19 nt, Artificial Sequence
  Description of Artificial Sequence: Synthetic oligonucleotide
gccgcuguagcacgaaugc

SEQ ID NO: 2703311 - RNA, 19 nt, Artificial Sequence
  Description of Artificial Sequence: Synthetic oligonucleotide
uugagggagucaaccgcaa

SEQ ID NO: 2703312 - RNA, 19 nt, Artificial Sequence
  Description of Artificial Sequence: Synthetic oligonucleotide
uccgaugcuuccagauggu

SEQ ID NO: 2703313 - RNA, 19 nt, Artificial Sequence
  Description of Artificial Sequence: Synthetic oligonucleotide
cuuucuccaugguauguaa

SEQ ID NO: 2703314 - RNA, 19 nt, Artificial Sequence
  Description of Artificial Sequence: Synthetic oligonucleotide
cuugaagccccuucaggaa

SEQ ID NO: 2703315 - RNA, 19 nt, Artificial Sequence
  Description of Artificial Sequence: Synthetic oligonucleotide
cagagagccgcuguagcac

SEQ ID NO: 2703316 - RNA, 19 nt, Artificial Sequence
  Description of Artificial Sequence: Synthetic oligonucleotide
gaacagucuccgaugcuuc

SEQ ID NO: 2703317 - RNA, 19 nt, Artificial Sequence
  Description of Artificial Sequence: Synthetic oligonucleotide
cuccuuucuccaugguaug

SEQ ID NO: 2703318 - RNA, 19 nt, Artificial Sequence
  Description of Artificial Sequence: Synthetic oligonucleotide
cgaugcuuccagauggugg

SEQ ID NO: 2703319 - RNA, 19 nt, Artificial Sequence
  Description of Artificial Sequence: Synthetic oligonucleotide
uacuugggccaacccaaau

SEQ ID NO: 2703320 - RNA, 19 nt, Artificial Sequence
  Description of Artificial Sequence: Synthetic oligonucleotide
uaauaccuuggggauguua

SEQ ID NO: 2703321 - RNA, 19 nt, Artificial Sequence
  Description of Artificial Sequence: Synthetic oligonucleotide
uggggccaccaaaauggac

SEQ ID NO: 2703322 - RNA, 19 nt, Artificial Sequence
  Description of Artificial Sequence: Synthetic oligonucleotide
ggugcugaccacagaacag

SEQ ID NO: 2703323 - RNA, 19 nt, Artificial Sequence
  Description of Artificial Sequence: Synthetic oligonucleotide
gagucaaccgcaacagaaa

SEQ ID NO: 2703324 - RNA, 19 nt, Artificial Sequence
  Description of Artificial Sequence: Synthetic oligonucleotide
cccucuuugagcuacguaa

SEQ ID NO: 2703325 - RNA, 19 nt, Artificial Sequence
  Description of Artificial Sequence: Synthetic oligonucleotide
cacuaauaccuuggggaug

SEQ ID NO: 2703326 - RNA, 19 nt, Artificial Sequence
  Description of Artificial Sequence: Synthetic oligonucleotide
ggccaacccaaauccagcc

SEQ ID NO: 2703327 - RNA, 19 nt, Artificial Sequence
  Description of Artificial Sequence: Synthetic oligonucleotide
acccaaauccagccggaaa

SEQ ID NO: 2703328 - RNA, 19 nt, Artificial Sequence
  Description of Artificial Sequence: Synthetic oligonucleotide
augucgaaccagugaagua

SEQ ID NO: 2703329 - RNA, 19 nt, Artificial Sequence
  Description of Artificial Sequence: Synthetic oligonucleotide
acuaagccccaaaggcagg

SEQ ID NO: 2703330 - RNA, 19 nt, Artificial Sequence
  Description of Artificial Sequence: Synthetic oligonucleotide
gaggcguugaacugcuacu

SEQ ID NO: 2703331 - RNA, 19 nt, Artificial Sequence
  Description of Artificial Sequence: Synthetic oligonucleotide
uggggauguuauccccucu

SEQ ID NO: 2703332 - RNA, 19 nt, Artificial Sequence
  Description of Artificial Sequence: Synthetic oligonucleotide
gggccaccaaaauggacag

SEQ ID NO: 2703333 - RNA, 19 nt, Artificial Sequence
  Description of Artificial Sequence: Synthetic oligonucleotide
ggagucaaccgcaacagaa

SEQ ID NO: 2703334 - RNA, 19 nt, Artificial Sequence
  Description of Artificial Sequence: Synthetic oligonucleotide
cagacccagacucuugcca

SEQ ID NO: 2703335 - RNA, 19 nt, Artificial Sequence
  Description of Artificial Sequence: Synthetic oligonucleotide
aaggaugcacuaagcccca

SEQ ID NO: 2703336 - RNA, 19 nt, Artificial Sequence
  Description of Artificial Sequence: Synthetic oligonucleotide
gccaacccaaauccagccg

SEQ ID NO: 2703337 - RNA, 19 nt, Artificial Sequence
  Description of Artificial Sequence: Synthetic oligonucleotide
ucccacgcagacccagacu

SEQ ID NO: 2703338 - RNA, 19 nt, Artificial Sequence
  Description of Artificial Sequence: Synthetic oligonucleotide
ucugaauacuugggccaac

SEQ ID NO: 2703339 - RNA, 19 nt, Artificial Sequence
  Description of Artificial Sequence: Synthetic oligonucleotide
cuagaagauguggcagaac

SEQ ID NO: 2703340 - RNA, 19 nt, Artificial Sequence
  Description of Artificial Sequence: Synthetic oligonucleotide
agccggaaaagaguauccu

SEQ ID NO: 2703341 - RNA, 19 nt, Artificial Sequence
  Description of Artificial Sequence: Synthetic oligonucleotide
ccuugaaaccagagagccg

SEQ ID NO: 2703342 - RNA, 19 nt, Artificial Sequence
  Description of Artificial Sequence: Synthetic oligonucleotide
ugccccaauuucugcuaca

SEQ ID NO: 2703343 - RNA, 19 nt, Artificial Sequence
  Description of Artificial Sequence: Synthetic oligonucleotide
cccacgcagacccagacuc

SEQ ID NO: 2703344 - RNA, 19 nt, Artificial Sequence
  Description of Artificial Sequence: Synthetic oligonucleotide
caggcucguaggaaauauc

SEQ ID NO: 2703345 - RNA, 19 nt, Artificial Sequence
  Description of Artificial Sequence: Synthetic oligonucleotide
auggggugugucaacugug

SEQ ID NO: 2703346 - RNA, 19 nt, Artificial Sequence
  Description of Artificial Sequence: Synthetic oligonucleotide
gggugugucaacuguguaa

SEQ ID NO: 2703347 - RNA, 19 nt, Artificial Sequence
  Description of Artificial Sequence: Synthetic oligonucleotide
agguucaacugagccacga

SEQ ID NO: 2703348 - RNA, 19 nt, Artificial Sequence
  Description of Artificial Sequence: Synthetic oligonucleotide
gcuacguaaacuaacccgu

SEQ ID NO: 2703349 - RNA, 19 nt, Artificial Sequence
  Description of Artificial Sequence: Synthetic oligonucleotide
cacgaucaaguacuuccca

SEQ ID NO: 2703350 - RNA, 19 nt, Artificial Sequence
  Description of Artificial Sequence: Synthetic oligonucleotide
ccguugagggagucaaccg

SEQ ID NO: 2703351 - RNA, 19 nt, Artificial Sequence
  Description of Artificial Sequence: Synthetic oligonucleotide
cguaaacuaacccguugag

SEQ ID NO: 2703352 - RNA, 19 nt, Artificial Sequence
  Description of Artificial Sequence: Synthetic oligonucleotide
agccgcuguagcacgaaug

SEQ ID NO: 2703353 - RNA, 19 nt, Artificial Sequence
  Description of Artificial Sequence: Synthetic oligonucleotide
ccuuggggauguuaucccc

SEQ ID NO: 2703354 - RNA, 19 nt, Artificial Sequence
  Description of Artificial Sequence: Synthetic oligonucleotide
gccggaaaagaguauccuc

SEQ ID NO: 2703355 - RNA, 19 nt, Artificial Sequence
  Description of Artificial Sequence: Synthetic oligonucleotide
cguugagggagucaaccgc

SEQ ID NO: 2703356 - RNA, 19 nt, Artificial Sequence
  Description of Artificial Sequence: Synthetic oligonucleotide
aacccaaauccagccggaa

SEQ ID NO: 2703357 - RNA, 19 nt, Artificial Sequence
  Description of Artificial Sequence: Synthetic oligonucleotide
ggcguugaacugcuacuug

SEQ ID NO: 2703358 - RNA, 19 nt, Artificial Sequence
  Description of Artificial Sequence: Synthetic oligonucleotide
caaauccagccggaaaaga

SEQ ID NO: 2703359 - RNA, 19 nt, Artificial Sequence
  Description of Artificial Sequence: Synthetic oligonucleotide
uaacccguugagggaguca

SEQ ID NO: 2703360 - RNA, 19 nt, Artificial Sequence
  Description of Artificial Sequence: Synthetic oligonucleotide
auccggggugaaccuaaca

SEQ ID NO: 2703361 - RNA, 19 nt, Artificial Sequence
  Description of Artificial Sequence: Synthetic oligonucleotide
agauguggcagaaccugau

SEQ ID NO: 2703362 - RNA, 19 nt, Artificial Sequence
  Description of Artificial Sequence: Synthetic oligonucleotide
agccacgaucaaguacuuc

SEQ ID NO: 2703363 - RNA, 19 nt, Artificial Sequence
  Description of Artificial Sequence: Synthetic oligonucleotide
uggacagccugcugagguu

SEQ ID NO: 2703364 - RNA, 19 nt, Artificial Sequence
  Description of Artificial Sequence: Synthetic oligonucleotide
cucccacgcagacccagac

SEQ ID NO: 2703365 - RNA, 19 nt, Artificial Sequence
  Description of Artificial Sequence: Synthetic oligonucleotide
augguggggccaccaaaau

SEQ ID NO: 2703366 - RNA, 19 nt, Artificial Sequence
  Description of Artificial Sequence: Synthetic oligonucleotide
gagguucaacugagccacg

SEQ ID NO: 2703367 - RNA, 19 nt, Artificial Sequence
  Description of Artificial Sequence: Synthetic oligonucleotide
ucccauccggggugaaccu

SEQ ID NO: 2703368 - RNA, 19 nt, Artificial Sequence
  Description of Artificial Sequence: Synthetic oligonucleotide
augcuuccagauggugggg

SEQ ID NO: 2703369 - RNA, 19 nt, Artificial Sequence
  Description of Artificial Sequence: Synthetic oligonucleotide
gcuuccagaugguggggcc

SEQ ID NO: 2703370 - RNA, 19 nt, Artificial Sequence
  Description of Artificial Sequence: Synthetic oligonucleotide
cccguugagggagucaacc

SEQ ID NO: 2703371 - RNA, 19 nt, Artificial Sequence
  Description of Artificial Sequence: Synthetic oligonucleotide
cuuggggauguuauccccu

SEQ ID NO: 2703372 - RNA, 19 nt, Artificial Sequence
  Description of Artificial Sequence: Synthetic oligonucleotide
caacccaaauccagccgga

SEQ ID NO: 2703373 - RNA, 19 nt, Artificial Sequence
  Description of Artificial Sequence: Synthetic oligonucleotide
cauggggugugucaacugu

SEQ ID NO: 2703374 - RNA, 19 nt, Artificial Sequence
  Description of Artificial Sequence: Synthetic oligonucleotide
gugaaguauucugaauacu

SEQ ID NO: 2703375 - RNA, 19 nt, Artificial Sequence
  Description of Artificial Sequence: Synthetic oligonucleotide
aggcguugaacugcuacuu

SEQ ID NO: 2703376 - RNA, 19 nt, Artificial Sequence
  Description of Artificial Sequence: Synthetic oligonucleotide
gcucguaggaaauauccau

SEQ ID NO: 2703377 - RNA, 19 nt, Artificial Sequence
  Description of Artificial Sequence: Synthetic oligonucleotide
cgaucaaguacuucccauc

SEQ ID NO: 2703378 - RNA, 19 nt, Artificial Sequence
  Description of Artificial Sequence: Synthetic oligonucleotide
ugcacuuguuuugccccaa

SEQ ID NO: 2703379 - RNA, 19 nt, Artificial Sequence
  Description of Artificial Sequence: Synthetic oligonucleotide
uuauccccucuuugagcua

SEQ ID NO: 2703380 - RNA, 19 nt, Artificial Sequence
  Description of Artificial Sequence: Synthetic oligonucleotide
uagacugcuccggucuuuu

SEQ ID NO: 2703381 - RNA, 19 nt, Artificial Sequence
  Description of Artificial Sequence: Synthetic oligonucleotide
gcacgaaugcaaaaccaga

SEQ ID NO: 2703382 - RNA, 19 nt, Artificial Sequence
  Description of Artificial Sequence: Synthetic oligonucleotide
cuguagcacgaaugcaaaa

SEQ ID NO: 2703383 - RNA, 19 nt, Artificial Sequence
  Description of Artificial Sequence: Synthetic oligonucleotide
ccuaacagcauggggugug

SEQ ID NO: 2703384 - RNA, 19 nt, Artificial Sequence
  Description of Artificial Sequence: Synthetic oligonucleotide
ggugugucaacuguguaau

SEQ ID NO: 2703385 - RNA, 19 nt, Artificial Sequence
  Description of Artificial Sequence: Synthetic oligonucleotide
uaacagcaugggguguguc

SEQ ID NO: 2703386 - RNA, 19 nt, Artificial Sequence
  Description of Artificial Sequence: Synthetic oligonucleotide
cagcauggggugugucaac

SEQ ID NO: 2703387 - RNA, 19 nt, Artificial Sequence
  Description of Artificial Sequence: Synthetic oligonucleotide
cauccggggugaaccuaac

SEQ ID NO: 2703388 - RNA, 19 nt, Artificial Sequence
  Description of Artificial Sequence: Synthetic oligonucleotide
cuacauagacugcuccggu

SEQ ID NO: 2703389 - RNA, 19 nt, Artificial Sequence
  Description of Artificial Sequence: Synthetic oligonucleotide
gugcugaccacagaacagu

SEQ ID NO: 2703390 - RNA, 19 nt, Artificial Sequence
  Description of Artificial Sequence: Synthetic oligonucleotide
uccaggcucguaggaaaua

SEQ ID NO: 2703391 - RNA, 19 nt, Artificial Sequence
  Description of Artificial Sequence: Synthetic oligonucleotide
gucuccgaugcuuccagau

SEQ ID NO: 2703392 - RNA, 19 nt, Artificial Sequence
  Description of Artificial Sequence: Synthetic oligonucleotide
cuucccauccggggugaac

SEQ ID NO: 2703393 - RNA, 19 nt, Artificial Sequence
  Description of Artificial Sequence: Synthetic oligonucleotide
caaccgcaacagaaaaugu

SEQ ID NO: 2703394 - RNA, 19 nt, Artificial Sequence
  Description of Artificial Sequence: Synthetic oligonucleotide
augcaaaaccagacaggaa

SEQ ID NO: 2703395 - RNA, 19 nt, Artificial Sequence
  Description of Artificial Sequence: Synthetic oligonucleotide
gggccaacccaaauccagc

SEQ ID NO: 2703396 - RNA, 19 nt, Artificial Sequence
  Description of Artificial Sequence: Synthetic oligonucleotide
cuaacccguugagggaguc

SEQ ID NO: 2703397 - RNA, 19 nt, Artificial Sequence
  Description of Artificial Sequence: Synthetic oligonucleotide
gcauggggugugucaacug

SEQ ID NO: 2703398 - RNA, 19 nt, Artificial Sequence
  Description of Artificial Sequence: Synthetic oligonucleotide
acuaacccguugagggagu

SEQ ID NO: 2703399 - RNA, 19 nt, Artificial Sequence
  Description of Artificial Sequence: Synthetic oligonucleotide
auccuccuuucuccauggu

SEQ ID NO: 2703400 - RNA, 19 nt, Artificial Sequence
  Description of Artificial Sequence: Synthetic oligonucleotide
cuuccagaugguggggcca

SEQ ID NO: 2703401 - RNA, 19 nt, Artificial Sequence
  Description of Artificial Sequence: Synthetic oligonucleotide
cauccucugugaacacuaa

SEQ ID NO: 2703402 - RNA, 19 nt, Artificial Sequence
  Description of Artificial Sequence: Synthetic oligonucleotide
auagacugcuccggucuuu

SEQ ID NO: 2703403 - RNA, 19 nt, Artificial Sequence
  Description of Artificial Sequence: Synthetic oligonucleotide
uccagaugguggggccacc

SEQ ID NO: 2703404 - RNA, 19 nt, Artificial Sequence
  Description of Artificial Sequence: Synthetic oligonucleotide
ggaagacggcaccucccac

SEQ ID NO: 2703405 - RNA, 19 nt, Artificial Sequence
  Description of Artificial Sequence: Synthetic oligonucleotide
uccccucuuugagcuacgu

SEQ ID NO: 2703406 - RNA, 19 nt, Artificial Sequence
  Description of Artificial Sequence: Synthetic oligonucleotide
acccguugagggagucaac

SEQ ID NO: 2703407 - RNA, 19 nt, Artificial Sequence
  Description of Artificial Sequence: Synthetic oligonucleotide
ccagagagccgcuguagca

SEQ ID NO: 2703408 - RNA, 19 nt, Artificial Sequence
  Description of Artificial Sequence: Synthetic oligonucleotide
ggaugcacuaagccccaaa

SEQ ID NO: 2703409 - RNA, 19 nt, Artificial Sequence
  Description of Artificial Sequence: Synthetic oligonucleotide
cgcagacccagacucuugc

SEQ ID NO: 2703410 - RNA, 19 nt, Artificial Sequence
  Description of Artificial Sequence: Synthetic oligonucleotide
ccucuuugagcuacguaaa

SEQ ID NO: 2703411 - RNA, 19 nt, Artificial Sequence
  Description of Artificial Sequence: Synthetic oligonucleotide
ccauccucugugaacacua

SEQ ID NO: 2703412 - RNA, 19 nt, Artificial Sequence
  Description of Artificial Sequence: Synthetic oligonucleotide
auacuugggccaacccaaa

SEQ ID NO: 2703413 - RNA, 19 nt, Artificial Sequence
  Description of Artificial Sequence: Synthetic oligonucleotide
gcuguagcacgaaugcaaa

SEQ ID NO: 2703414 - RNA, 19 nt, Artificial Sequence
  Description of Artificial Sequence: Synthetic oligonucleotide
aagccccuucaggaaggau

SEQ ID NO: 2703415 - RNA, 19 nt, Artificial Sequence
  Description of Artificial Sequence: Synthetic oligonucleotide
auccccucuuugagcuacg

SEQ ID NO: 2703416 - RNA, 19 nt, Artificial Sequence
  Description of Artificial Sequence: Synthetic oligonucleotide
cgcuguagcacgaaugcaa

SEQ ID NO: 2703417 - RNA, 19 nt, Artificial Sequence
  Description of Artificial Sequence: Synthetic oligonucleotide
ccuucaggaaggaugcacu

SEQ ID NO: 2703418 - RNA, 19 nt, Artificial Sequence
  Description of Artificial Sequence: Synthetic oligonucleotide
gggagucaaccgcaacaga

SEQ ID NO: 2703419 - RNA, 19 nt, Artificial Sequence
  Description of Artificial Sequence: Synthetic oligonucleotide
ccgcaacagaaaaugucga

SEQ ID NO: 2703420 - RNA, 19 nt, Artificial Sequence
  Description of Artificial Sequence: Synthetic oligonucleotide
cuacguaaacuaacccguu

SEQ ID NO: 2703421 - RNA, 19 nt, Artificial Sequence
  Description of Artificial Sequence: Synthetic oligonucleotide
gagagccgcuguagcacga

SEQ ID NO: 2703422 - RNA, 19 nt, Artificial Sequence
  Description of Artificial Sequence: Synthetic oligonucleotide
acgcagacccagacucuug

SEQ ID NO: 2703423 - RNA, 19 nt, Artificial Sequence
  Description of Artificial Sequence: Synthetic oligonucleotide
gucaaccgcaacagaaaau

SEQ ID NO: 2703424 - RNA, 19 nt, Artificial Sequence
  Description of Artificial Sequence: Synthetic oligonucleotide
agacggcaccucccacgca

SEQ ID NO: 2703425 - RNA, 19 nt, Artificial Sequence
  Description of Artificial Sequence: Synthetic oligonucleotide
agagccgcuguagcacgaa

SEQ ID NO: 2703426 - RNA, 19 nt, Artificial Sequence
  Description of Artificial Sequence: Synthetic oligonucleotide
ggaaaagaguauccuccuu

SEQ ID NO: 2703427 - RNA, 19 nt, Artificial Sequence
  Description of Artificial Sequence: Synthetic oligonucleotide
guggggccaccaaaaugga

SEQ ID NO: 2703428 - RNA, 19 nt, Artificial Sequence
  Description of Artificial Sequence: Synthetic oligonucleotide
guguaauuccaggcucgua

SEQ ID NO: 2703429 - RNA, 19 nt, Artificial Sequence
  Description of Artificial Sequence: Synthetic oligonucleotide
gugccauggaacguauuuu

SEQ ID NO: 2703430 - RNA, 19 nt, Artificial Sequence
  Description of Artificial Sequence: Synthetic oligonucleotide
gucgaaccagugaaguauu

SEQ ID NO: 2703431 - RNA, 19 nt, Artificial Sequence
  Description of Artificial Sequence: Synthetic oligonucleotide
gguucaacugagccacgau

SEQ ID NO: 2703432 - RNA, 19 nt, Artificial Sequence
  Description of Artificial Sequence: Synthetic oligonucleotide
ggcugugccauggaacgua

SEQ ID NO: 2703433 - RNA, 19 nt, Artificial Sequence
  Description of Artificial Sequence: Synthetic oligonucleotide
cacuuguuuugccccaauu

SEQ ID NO: 2703434 - RNA, 19 nt, Artificial Sequence
  Description of Artificial Sequence: Synthetic oligonucleotide
cagaacagucuccgaugcu

SEQ ID NO: 2703435 - RNA, 19 nt, Artificial Sequence
  Description of Artificial Sequence: Synthetic oligonucleotide
cuaacagcauggggugugu

SEQ ID NO: 2703436 - RNA, 19 nt, Artificial Sequence
  Description of Artificial Sequence: Synthetic oligonucleotide
ggggugugucaacugugua

SEQ ID NO: 2703437 - RNA, 19 nt, Artificial Sequence
  Description of Artificial Sequence: Synthetic oligonucleotide
ccauccggggugaaccuaa

SEQ ID NO: 2703438 - RNA, 19 nt, Artificial Sequence
  Description of Artificial Sequence: Synthetic oligonucleotide
ggggauguuauccccucuu

SEQ ID NO: 2703439 - RNA, 19 nt, Artificial Sequence
  Description of Artificial Sequence: Synthetic oligonucleotide
cauagacugcuccggucuu

SEQ ID NO: 2703440 - RNA, 19 nt, Artificial Sequence
  Description of Artificial Sequence: Synthetic oligonucleotide
ggccaccaaaauggacagc

SEQ ID NO: 2703441 - RNA, 19 nt, Artificial Sequence
  Description of Artificial Sequence: Synthetic oligonucleotide
gagccgcuguagcacgaau

SEQ ID NO: 2703442 - RNA, 19 nt, Artificial Sequence
  Description of Artificial Sequence: Synthetic oligonucleotide
ccaaaauggacagccugcu

SEQ ID NO: 2703443 - RNA, 19 nt, Artificial Sequence
  Description of Artificial Sequence: Synthetic oligonucleotide
ccagugaaguauucugaau

SEQ ID NO: 2703444 - RNA, 19 nt, Artificial Sequence
  Description of Artificial Sequence: Synthetic oligonucleotide
acggcaccucccacgcaga

SEQ ID NO: 2703445 - RNA, 19 nt, Artificial Sequence
  Description of Artificial Sequence: Synthetic oligonucleotide
ccuuucuccaugguaugua

SEQ ID NO: 2703446 - RNA, 19 nt, Artificial Sequence
  Description of Artificial Sequence: Synthetic oligonucleotide
aggaugcacuaagccccaa

SEQ ID NO: 2703447 - RNA, 19 nt, Artificial Sequence
  Description of Artificial Sequence: Synthetic oligonucleotide
gugugucaacuguguaauu

SEQ ID NO: 2703448 - RNA, 19 nt, Artificial Sequence
  Description of Artificial Sequence: Synthetic oligonucleotide
cggaaaagaguauccuccu

SEQ ID NO: 2703449 - RNA, 19 nt, Artificial Sequence
  Description of Artificial Sequence: Synthetic oligonucleotide
cguaggaaauauccauccu

SEQ ID NO: 2703450 - RNA, 19 nt, Artificial Sequence
  Description of Artificial Sequence: Synthetic oligonucleotide
ccagaugguggggccacca

SEQ ID NO: 2703451 - RNA, 19 nt, Artificial Sequence
  Description of Artificial Sequence: Synthetic oligonucleotide
cacgcagacccagacucuu

SEQ ID NO: 2703452 - RNA, 19 nt, Artificial Sequence
  Description of Artificial Sequence: Synthetic oligonucleotide
ccaccaaaauggacagccu

SEQ ID NO: 2703453 - RNA, 19 nt, Artificial Sequence
  Description of Artificial Sequence: Synthetic oligonucleotide
cugaggcguugaacugcua

SEQ ID NO: 2703454 - RNA, 19 nt, Artificial Sequence
  Description of Artificial Sequence: Synthetic oligonucleotide
gccccaauuucugcuacau

SEQ ID NO: 2703455 - RNA, 19 nt, Artificial Sequence
  Description of Artificial Sequence: Synthetic oligonucleotide
cgaaccagugaaguauucu

SEQ ID NO: 2703456 - RNA, 19 nt, Artificial Sequence
  Description of Artificial Sequence: Synthetic oligonucleotide
caccucccacgcagaccca

SEQ ID NO: 2703457 - RNA, 19 nt, Artificial Sequence
  Description of Artificial Sequence: Synthetic oligonucleotide
ccucccacgcagacccaga

SEQ ID NO: 2703458 - RNA, 19 nt, Artificial Sequence
  Description of Artificial Sequence: Synthetic oligonucleotide
ccaggcucguaggaaauau

SEQ ID NO: 2703459 - RNA, 19 nt, Artificial Sequence
  Description of Artificial Sequence: Synthetic oligonucleotide
gagccacgaucaaguacuu

SEQ ID NO: 2703460 - RNA, 19 nt, Artificial Sequence
  Description of Artificial Sequence: Synthetic oligonucleotide
ccgcuguagcacgaaugca

SEQ ID NO: 2703461 - RNA, 19 nt, Artificial Sequence
  Description of Artificial Sequence: Synthetic oligonucleotide
gcacuuguuuugccccaau

SEQ ID NO: 2703462 - RNA, 19 nt, Artificial Sequence
  Description of Artificial Sequence: Synthetic oligonucleotide
gcugugccauggaacguau

SEQ ID NO: 2703463 - RNA, 19 nt, Artificial Sequence
  Description of Artificial Sequence: Synthetic oligonucleotide
ccccucuuugagcuacgua

SEQ ID NO: 2703464 - RNA, 19 nt, Artificial Sequence
  Description of Artificial Sequence: Synthetic oligonucleotide
cggcaccucccacgcagac

SEQ ID NO: 2703465 - RNA, 19 nt, Artificial Sequence
  Description of Artificial Sequence: Synthetic oligonucleotide
ccacgcagacccagacucu

SEQ ID NO: 2703466 - RNA, 19 nt, Artificial Sequence
  Description of Artificial Sequence: Synthetic oligonucleotide
gggcugugccauggaacgu

SEQ ID NO: 2703467 - RNA, 19 nt, Artificial Sequence
  Description of Artificial Sequence: Synthetic oligonucleotide
cuaauaccuuggggauguu

SEQ ID NO: 2703468 - RNA, 19 nt, Artificial Sequence
  Description of Artificial Sequence: Synthetic oligonucleotide
ccugaucugccagcuggau

SEQ ID NO: 2703469 - RNA, 19 nt, Artificial Sequence
  Description of Artificial Sequence: Synthetic oligonucleotide
cugcuacuugaagccccuu

SEQ ID NO: 2703470 - RNA, 19 nt, Artificial Sequence
  Description of Artificial Sequence: Synthetic oligonucleotide
aauacauuaaaucaguuuc

SEQ ID NO: 2703471 - RNA, 19 nt, Artificial Sequence
  Description of Artificial Sequence: Synthetic oligonucleotide
aauuucagauaauaaauac

SEQ ID NO: 2703472 - RNA, 19 nt, Artificial Sequence
  Description of Artificial Sequence: Synthetic oligonucleotide
uaaaucacaaucaauaacc

SEQ ID NO: 2703473 - RNA, 19 nt, Artificial Sequence
  Description of Artificial Sequence: Synthetic oligonucleotide
aauaaauacaauaauauca

SEQ ID NO: 2703474 - RNA, 19 nt, Artificial Sequence
  Description of Artificial Sequence: Synthetic oligonucleotide
uuuuaauacauuaaaucag

SEQ ID NO: 2703475 - RNA, 19 nt, Artificial Sequence
  Description of Artificial Sequence: Synthetic oligonucleotide
aauguuuccaaacucucac

SEQ ID NO: 2703476 - RNA, 19 nt, Artificial Sequence
  Description of Artificial Sequence: Synthetic oligonucleotide
acauaaguaaaucacaauc

SEQ ID NO: 2703477 - RNA, 19 nt, Artificial Sequence
  Description of Artificial Sequence: Synthetic oligonucleotide
aaauaauuuacauaaguaa

SEQ ID NO: 2703478 - RNA, 19 nt, Artificial Sequence
  Description of Artificial Sequence: Synthetic oligonucleotide
aaggcuuccagacugacac

SEQ ID NO: 2703479 - RNA, 19 nt, Artificial Sequence
  Description of Artificial Sequence: Synthetic oligonucleotide
aacaccacagcuuuggaac

SEQ ID NO: 2703480 - RNA, 19 nt, Artificial Sequence
  Description of Artificial Sequence: Synthetic oligonucleotide
caaucaauaaccaaaacac

SEQ ID NO: 2703481 - RNA, 19 nt, Artificial Sequence
  Description of Artificial Sequence: Synthetic oligonucleotide
cauuaaaucaguuucacug

SEQ ID NO: 2703482 - RNA, 19 nt, Artificial Sequence
  Description of Artificial Sequence: Synthetic oligonucleotide
aauuuauuauuuaaugugg

SEQ ID NO: 2703483 - RNA, 19 nt, Artificial Sequence
  Description of Artificial Sequence: Synthetic oligonucleotide
aagacaugcaucuacaugu

SEQ ID NO: 2703484 - RNA, 19 nt, Artificial Sequence
  Description of Artificial Sequence: Synthetic oligonucleotide
acugacaccuuccugaucc

SEQ ID NO: 2703485 - RNA, 19 nt, Artificial Sequence
  Description of Artificial Sequence: Synthetic oligonucleotide
uuuggaacugucauggugg

SEQ ID NO: 2703486 - RNA, 19 nt, Artificial Sequence
  Description of Artificial Sequence: Synthetic oligonucleotide
uuucagauaauaaauacaa

SEQ ID NO: 2703487 - RNA, 19 nt, Artificial Sequence
  Description of Artificial Sequence: Synthetic oligonucleotide
uuuaauguggaaaacaaua

SEQ ID NO: 2703488 - RNA, 19 nt, Artificial Sequence
  Description of Artificial Sequence: Synthetic oligonucleotide
uucgauuucucacuggugg

SEQ ID NO: 2703489 - RNA, 19 nt, Artificial Sequence
  Description of Artificial Sequence: Synthetic oligonucleotide
aauuuacauaaguaaauca

SEQ ID NO: 2703490 - RNA, 19 nt, Artificial Sequence
  Description of Artificial Sequence: Synthetic oligonucleotide
auaaauacaauaauaucac

SEQ ID NO: 2703491 - RNA, 19 nt, Artificial Sequence
  Description of Artificial Sequence: Synthetic oligonucleotide
uuuaauacauuaaaucagu

SEQ ID NO: 2703492 - RNA, 19 nt, Artificial Sequence
  Description of Artificial Sequence: Synthetic oligonucleotide
aaucccguugcucacauag

SEQ ID NO: 2703493 - RNA, 19 nt, Artificial Sequence
  Description of Artificial Sequence: Synthetic oligonucleotide
ucagauaauaaauacaaua

SEQ ID NO: 2703494 - RNA, 19 nt, Artificial Sequence
  Description of Artificial Sequence: Synthetic oligonucleotide
aauacaauaauaucacuuu

SEQ ID NO: 2703495 - RNA, 19 nt, Artificial Sequence
  Description of Artificial Sequence: Synthetic oligonucleotide
uuuacauaaguaaaucaca

SEQ ID NO: 2703496 - RNA, 19 nt, Artificial Sequence
  Description of Artificial Sequence: Synthetic oligonucleotide
auuuacauaaguaaaucac

SEQ ID NO: 2703497 - RNA, 19 nt, Artificial Sequence
  Description of Artificial Sequence: Synthetic oligonucleotide
acaaucaauaaccaaaaca

SEQ ID NO: 2703498 - RNA, 19 nt, Artificial Sequence
  Description of Artificial Sequence: Synthetic oligonucleotide
auaaccaaaacaccacagc

SEQ ID NO: 2703499 - RNA, 19 nt, Artificial Sequence
  Description of Artificial Sequence: Synthetic oligonucleotide
aagcauaugaggaaggagg

SEQ ID NO: 2703500 - RNA, 19 nt, Artificial Sequence
  Description of Artificial Sequence: Synthetic oligonucleotide
aaucaauaaccaaaacacc

SEQ ID NO: 2703501 - RNA, 19 nt, Artificial Sequence
  Description of Artificial Sequence: Synthetic oligonucleotide
uuuauaaauaauuuacaua

SEQ ID NO: 2703502 - RNA, 19 nt, Artificial Sequence
  Description of Artificial Sequence: Synthetic oligonucleotide
aauaauuuacauaaguaaa

SEQ ID NO: 2703503 - RNA, 19 nt, Artificial Sequence
  Description of Artificial Sequence: Synthetic oligonucleotide
ugaauuuuauaaauaauuu

SEQ ID NO: 2703504 - RNA, 19 nt, Artificial Sequence
  Description of Artificial Sequence: Synthetic oligonucleotide
ucuucuuuaagcuuggaau

SEQ ID NO: 2703505 - RNA, 19 nt, Artificial Sequence
  Description of Artificial Sequence: Synthetic oligonucleotide
uauuuaauguggaaaacaa

SEQ ID NO: 2703506 - RNA, 19 nt, Artificial Sequence
  Description of Artificial Sequence: Synthetic oligonucleotide
ucuaauguuuccaaacucu

SEQ ID NO: 2703507 - RNA, 19 nt, Artificial Sequence
  Description of Artificial Sequence: Synthetic oligonucleotide
ucuacauguucguuaaagg

SEQ ID NO: 2703508 - RNA, 19 nt, Artificial Sequence
  Description of Artificial Sequence: Synthetic oligonucleotide
aucuucacaaucccguugc

SEQ ID NO: 2703509 - RNA, 19 nt, Artificial Sequence
  Description of Artificial Sequence: Synthetic oligonucleotide
cacauagugggauagaaug

SEQ ID NO: 2703510 - RNA, 19 nt, Artificial Sequence
  Description of Artificial Sequence: Synthetic oligonucleotide
auaauaaauacaauaauau

SEQ ID NO: 2703511 - RNA, 19 nt, Artificial Sequence
  Description of Artificial Sequence: Synthetic oligonucleotide
uccacaacuucacaucugg

SEQ ID NO: 2703512 - RNA, 19 nt, Artificial Sequence
  Description of Artificial Sequence: Synthetic oligonucleotide
uuacauaaguaaaucacaa

SEQ ID NO: 2703513 - RNA, 19 nt, Artificial Sequence
  Description of Artificial Sequence: Synthetic oligonucleotide
guuaaaggcuuccagacug

SEQ ID NO: 2703514 - RNA, 19 nt, Artificial Sequence
  Description of Artificial Sequence: Synthetic oligonucleotide
uacauguucguuaaaggcu

SEQ ID NO: 2703515 - RNA, 19 nt, Artificial Sequence
  Description of Artificial Sequence: Synthetic oligonucleotide
uuaauguggaaaacaauaa

SEQ ID NO: 2703516 - RNA, 19 nt, Artificial Sequence
  Description of Artificial Sequence: Synthetic oligonucleotide
uaaccaaaacaccacagcu

SEQ ID NO: 2703517 - RNA, 19 nt, Artificial Sequence
  Description of Artificial Sequence: Synthetic oligonucleotide
aaguaaaucacaaucaaua

SEQ ID NO: 2703518 - RNA, 19 nt, Artificial Sequence
  Description of Artificial Sequence: Synthetic oligonucleotide
ucacucaucuucuuuaagc

SEQ ID NO: 2703519 - RNA, 19 nt, Artificial Sequence
  Description of Artificial Sequence: Synthetic oligonucleotide
aaaucaguuucacugaauu

SEQ ID NO: 2703520 - RNA, 19 nt, Artificial Sequence
  Description of Artificial Sequence: Synthetic oligonucleotide
uuauuuaauguggaaaaca

SEQ ID NO: 2703521 - RNA, 19 nt, Artificial Sequence
  Description of Artificial Sequence: Synthetic oligonucleotide
cuacauguucguuaaaggc

SEQ ID NO: 2703522 - RNA, 19 nt, Artificial Sequence
  Description of Artificial Sequence: Synthetic oligonucleotide
aaauaaauuucagauaaua

SEQ ID NO: 2703523 - RNA, 19 nt, Artificial Sequence
  Description of Artificial Sequence: Synthetic oligonucleotide
aauguggaaaacaauaaaa

SEQ ID NO: 2703524 - RNA, 19 nt, Artificial Sequence
  Description of Artificial Sequence: Synthetic oligonucleotide
ucaauaaccaaaacaccac

SEQ ID NO: 2703525 - RNA, 19 nt, Artificial Sequence
  Description of Artificial Sequence: Synthetic oligonucleotide
aaauacaauaauaucacuu

SEQ ID NO: 2703526 - RNA, 19 nt, Artificial Sequence
  Description of Artificial Sequence: Synthetic oligonucleotide
uucacaaucccguugcuca

SEQ ID NO: 2703527 - RNA, 19 nt, Artificial Sequence
  Description of Artificial Sequence: Synthetic oligonucleotide
aauaaauuucagauaauaa

SEQ ID NO: 2703528 - RNA, 19 nt, Artificial Sequence
  Description of Artificial Sequence: Synthetic oligonucleotide
gauagaauggugcacaucu

SEQ ID NO: 2703529 - RNA, 19 nt, Artificial Sequence
  Description of Artificial Sequence: Synthetic oligonucleotide
accaccaccagaucuacac

SEQ ID NO: 2703530 - RNA, 19 nt, Artificial Sequence
  Description of Artificial Sequence: Synthetic oligonucleotide
uucacugaauuuuauaaau

SEQ ID NO: 2703531 - RNA, 19 nt, Artificial Sequence
  Description of Artificial Sequence: Synthetic oligonucleotide
aauaaccaaaacaccacag

SEQ ID NO: 2703532 - RNA, 19 nt, Artificial Sequence
  Description of Artificial Sequence: Synthetic oligonucleotide
uuuucgauuucucacuggu

SEQ ID NO: 2703533 - RNA, 19 nt, Artificial Sequence
  Description of Artificial Sequence: Synthetic oligonucleotide
uuuaagcuuggaauggcug

SEQ ID NO: 2703534 - RNA, 19 nt, Artificial Sequence
  Description of Artificial Sequence: Synthetic oligonucleotide
cauaaguaaaucacaauca

SEQ ID NO: 2703535 - RNA, 19 nt, Artificial Sequence
  Description of Artificial Sequence: Synthetic oligonucleotide
auuaaaucaguuucacuga

SEQ ID NO: 2703536 - RNA, 19 nt, Artificial Sequence
  Description of Artificial Sequence: Synthetic oligonucleotide
uccaucaagacaugcaucu

SEQ ID NO: 2703537 - RNA, 19 nt, Artificial Sequence
  Description of Artificial Sequence: Synthetic oligonucleotide
gaucccuaaagcaaacugg

SEQ ID NO: 2703538 - RNA, 19 nt, Artificial Sequence
  Description of Artificial Sequence: Synthetic oligonucleotide
acaacuucacaucugggug

SEQ ID NO: 2703539 - RNA, 19 nt, Artificial Sequence
  Description of Artificial Sequence: Synthetic oligonucleotide
agauaauaaauacaauaau

SEQ ID NO: 2703540 - RNA, 19 nt, Artificial Sequence
  Description of Artificial Sequence: Synthetic oligonucleotide
auuauuuaauguggaaaac

SEQ ID NO: 2703541 - RNA, 19 nt, Artificial Sequence
  Description of Artificial Sequence: Synthetic oligonucleotide
cuucuuuaagcuuggaaug

SEQ ID NO: 2703542 - RNA, 19 nt, Artificial Sequence
  Description of Artificial Sequence: Synthetic oligonucleotide
ugaucccuaaagcaaacug

SEQ ID NO: 2703543 - RNA, 19 nt, Artificial Sequence
  Description of Artificial Sequence: Synthetic oligonucleotide
uuuauuauuuaauguggaa

SEQ ID NO: 2703544 - RNA, 19 nt, Artificial Sequence
  Description of Artificial Sequence: Synthetic oligonucleotide
cucaucuucuuuaagcuug

SEQ ID NO: 2703545 - RNA, 19 nt, Artificial Sequence
  Description of Artificial Sequence: Synthetic oligonucleotide
guaaaucacaaucaauaac

SEQ ID NO: 2703546 - RNA, 19 nt, Artificial Sequence
  Description of Artificial Sequence: Synthetic oligonucleotide
augucugacaguuacguga

SEQ ID NO: 2703547 - RNA, 19 nt, Artificial Sequence
  Description of Artificial Sequence: Synthetic oligonucleotide
agcuuuggaacugucaugg

SEQ ID NO: 2703548 - RNA, 19 nt, Artificial Sequence
  Description of Artificial Sequence: Synthetic oligonucleotide
ucucuaauguuuccaaacu

SEQ ID NO: 2703549 - RNA, 19 nt, Artificial Sequence
  Description of Artificial Sequence: Synthetic oligonucleotide
cuguaaagcuugcugaucc

SEQ ID NO: 2703550 - RNA, 19 nt, Artificial Sequence
  Description of Artificial Sequence: Synthetic oligonucleotide
uucucuaauguuuccaaac

SEQ ID NO: 2703551 - RNA, 19 nt, Artificial Sequence
  Description of Artificial Sequence: Synthetic oligonucleotide
uaauguggaaaacaauaaa

SEQ ID NO: 2703552 - RNA, 19 nt, Artificial Sequence
  Description of Artificial Sequence: Synthetic oligonucleotide
aucaauaaccaaaacacca

SEQ ID NO: 2703553 - RNA, 19 nt, Artificial Sequence
  Description of Artificial Sequence: Synthetic oligonucleotide
cagauaauaaauacaauaa

SEQ ID NO: 2703554 - RNA, 19 nt, Artificial Sequence
  Description of Artificial Sequence: Synthetic oligonucleotide
uacgugaauucucuaaugu

SEQ ID NO: 2703555 - RNA, 19 nt, Artificial Sequence
  Description of Artificial Sequence: Synthetic oligonucleotide
uucuuuaagcuuggaaugg

SEQ ID NO: 2703556 - RNA, 19 nt, Artificial Sequence
  Description of Artificial Sequence: Synthetic oligonucleotide
uccaucuucacaaucccgu

SEQ ID NO: 2703557 - RNA, 19 nt, Artificial Sequence
  Description of Artificial Sequence: Synthetic oligonucleotide
aucuacaccaucugcugac

SEQ ID NO: 2703558 - RNA, 19 nt, Artificial Sequence
  Description of Artificial Sequence: Synthetic oligonucleotide
uaauuuacauaaguaaauc

SEQ ID NO: 2703559 - RNA, 19 nt, Artificial Sequence
  Description of Artificial Sequence: Synthetic oligonucleotide
guuucacugaauuuuauaa

SEQ ID NO: 2703560 - RNA, 19 nt, Artificial Sequence
  Description of Artificial Sequence: Synthetic oligonucleotide
uaauacauuaaaucaguuu

SEQ ID NO: 2703561 - RNA, 19 nt, Artificial Sequence
  Description of Artificial Sequence: Synthetic oligonucleotide
caaacucucacucaucuuc

SEQ ID NO: 2703562 - RNA, 19 nt, Artificial Sequence
  Description of Artificial Sequence: Synthetic oligonucleotide
uucguuaaaggcuuccaga

SEQ ID NO: 2703563 - RNA, 19 nt, Artificial Sequence
  Description of Artificial Sequence: Synthetic oligonucleotide
aguaaaucacaaucaauaa

SEQ ID NO: 2703564 - RNA, 19 nt, Artificial Sequence
  Description of Artificial Sequence: Synthetic oligonucleotide
aaacuggacacgugaaugu

SEQ ID NO: 2703565 - RNA, 19 nt, Artificial Sequence
  Description of Artificial Sequence: Synthetic oligonucleotide
aagcaaacuggacacguga

SEQ ID NO: 2703566 - RNA, 19 nt, Artificial Sequence
  Description of Artificial Sequence: Synthetic oligonucleotide
ugaaugucugacaguuacg

SEQ ID NO: 2703567 - RNA, 19 nt, Artificial Sequence
  Description of Artificial Sequence: Synthetic oligonucleotide
uagugggauagaauggugc

SEQ ID NO: 2703568 - RNA, 19 nt, Artificial Sequence
  Description of Artificial Sequence: Synthetic oligonucleotide
uccaaacucucacucaucu

SEQ ID NO: 2703569 - RNA, 19 nt, Artificial Sequence
  Description of Artificial Sequence: Synthetic oligonucleotide
acaugcaucuacauguucg

SEQ ID NO: 2703570 - RNA, 19 nt, Artificial Sequence
  Description of Artificial Sequence: Synthetic oligonucleotide
uguuuccaaacucucacuc

SEQ ID NO: 2703571 - RNA, 19 nt, Artificial Sequence
  Description of Artificial Sequence: Synthetic oligonucleotide
uaaguaaaucacaaucaau

SEQ ID NO: 2703572 - RNA, 19 nt, Artificial Sequence
  Description of Artificial Sequence: Synthetic oligonucleotide
uaauguuuccaaacucuca

SEQ ID NO: 2703573 - RNA, 19 nt, Artificial Sequence
  Description of Artificial Sequence: Synthetic oligonucleotide
auuuuauaaauaauuuaca

SEQ ID NO: 2703574 - RNA, 19 nt, Artificial Sequence
  Description of Artificial Sequence: Synthetic oligonucleotide
uaaauacaauaauaucacu

SEQ ID NO: 2703575 - RNA, 19 nt, Artificial Sequence
  Description of Artificial Sequence: Synthetic oligonucleotide
uuaaaucaguuucacugaa

SEQ ID NO: 2703576 - RNA, 19 nt, Artificial Sequence
  Description of Artificial Sequence: Synthetic oligonucleotide
ucguuaaaggcuuccagac

SEQ ID NO: 2703577 - RNA, 19 nt, Artificial Sequence
  Description of Artificial Sequence: Synthetic oligonucleotide
aaucacaaucaauaaccaa

SEQ ID NO: 2703578 - RNA, 19 nt, Artificial Sequence
  Description of Artificial Sequence: Synthetic oligonucleotide
uuaagcuuggaauggcugu

SEQ ID NO: 2703579 - RNA, 19 nt, Artificial Sequence
  Description of Artificial Sequence: Synthetic oligonucleotide
acacgugaaugucugacag

SEQ ID NO: 2703580 - RNA, 19 nt, Artificial Sequence
  Description of Artificial Sequence: Synthetic oligonucleotide
auuucucacugguggaugg

SEQ ID NO: 2703581 - RNA, 19 nt, Artificial Sequence
  Description of Artificial Sequence: Synthetic oligonucleotide
caaaacaccacagcuuugg

SEQ ID NO: 2703582 - RNA, 19 nt, Artificial Sequence
  Description of Artificial Sequence: Synthetic oligonucleotide
gugaaugucugacaguuac

SEQ ID NO: 2703583 - RNA, 19 nt, Artificial Sequence
  Description of Artificial Sequence: Synthetic oligonucleotide
aucacaaucaauaaccaaa

SEQ ID NO: 2703584 - RNA, 19 nt, Artificial Sequence
  Description of Artificial Sequence: Synthetic oligonucleotide
aaauuucagauaauaaaua

SEQ ID NO: 2703585 - RNA, 19 nt, Artificial Sequence
  Description of Artificial Sequence: Synthetic oligonucleotide
uuuccaaacucucacucau

SEQ ID NO: 2703586 - RNA, 19 nt, Artificial Sequence
  Description of Artificial Sequence: Synthetic oligonucleotide
aaugucugacaguuacgug

SEQ ID NO: 2703587 - RNA, 19 nt, Artificial Sequence
  Description of Artificial Sequence: Synthetic oligonucleotide
aucuacauguucguuaaag

SEQ ID NO: 2703588 - RNA, 19 nt, Artificial Sequence
  Description of Artificial Sequence: Synthetic oligonucleotide
agcauaugaggaaggaggc

SEQ ID NO: 2703589 - RNA, 19 nt, Artificial Sequence
  Description of Artificial Sequence: Synthetic oligonucleotide
uugcugauccacaacuuca

SEQ ID NO: 2703590 - RNA, 19 nt, Artificial Sequence
  Description of Artificial Sequence: Synthetic oligonucleotide
ugaggaaggaggcauuuuc

SEQ ID NO: 2703591 - RNA, 19 nt, Artificial Sequence
  Description of Artificial Sequence: Synthetic oligonucleotide
auaauuuacauaaguaaau

SEQ ID NO: 2703592 - RNA, 19 nt, Artificial Sequence
  Description of Artificial Sequence: Synthetic oligonucleotide
aaagcuugcugauccacaa

SEQ ID NO: 2703593 - RNA, 19 nt, Artificial Sequence
  Description of Artificial Sequence: Synthetic oligonucleotide
auuucagauaauaaauaca

SEQ ID NO: 2703594 - RNA, 19 nt, Artificial Sequence
  Description of Artificial Sequence: Synthetic oligonucleotide
uggaugguccaucaagaca

SEQ ID NO: 2703595 - RNA, 19 nt, Artificial Sequence
  Description of Artificial Sequence: Synthetic oligonucleotide
uuacgugaauucucuaaug

SEQ ID NO: 2703596 - RNA, 19 nt, Artificial Sequence
  Description of Artificial Sequence: Synthetic oligonucleotide
ugcugaggaagcauaugag

SEQ ID NO: 2703597 - RNA, 19 nt, Artificial Sequence
  Description of Artificial Sequence: Synthetic oligonucleotide
ugcaccaccaccaccagau

SEQ ID NO: 2703598 - RNA, 19 nt, Artificial Sequence
  Description of Artificial Sequence: Synthetic oligonucleotide
aaaucacaaucaauaacca

SEQ ID NO: 2703599 - RNA, 19 nt, Artificial Sequence
  Description of Artificial Sequence: Synthetic oligonucleotide
uagaauggugcacaucuuc

SEQ ID NO: 2703600 - RNA, 19 nt, Artificial Sequence
  Description of Artificial Sequence: Synthetic oligonucleotide
uaaagcuugcugauccaca

SEQ ID NO: 2703601 - RNA, 19 nt, Artificial Sequence
  Description of Artificial Sequence: Synthetic oligonucleotide
cuaauguuuccaaacucuc

SEQ ID NO: 2703602 - RNA, 19 nt, Artificial Sequence
  Description of Artificial Sequence: Synthetic oligonucleotide
uuaauacauuaaaucaguu

SEQ ID NO: 2703603 - RNA, 19 nt, Artificial Sequence
  Description of Artificial Sequence: Synthetic oligonucleotide
auuuucgauuucucacugg

SEQ ID NO: 2703604 - RNA, 19 nt, Artificial Sequence
  Description of Artificial Sequence: Synthetic oligonucleotide
acagcuuuggaacugucau

SEQ ID NO: 2703605 - RNA, 19 nt, Artificial Sequence
  Description of Artificial Sequence: Synthetic oligonucleotide
ucuccaucuucacaauccc

SEQ ID NO: 2703606 - RNA, 19 nt, Artificial Sequence
  Description of Artificial Sequence: Synthetic oligonucleotide
caugguggaacucacucug

SEQ ID NO: 2703607 - RNA, 19 nt, Artificial Sequence
  Description of Artificial Sequence: Synthetic oligonucleotide
ugauccacaacuucacauc

SEQ ID NO: 2703608 - RNA, 19 nt, Artificial Sequence
  Description of Artificial Sequence: Synthetic oligonucleotide
aaucaguuucacugaauuu

SEQ ID NO: 2703609 - RNA, 19 nt, Artificial Sequence
  Description of Artificial Sequence: Synthetic oligonucleotide
cuuuggaacugucauggug

SEQ ID NO: 2703610 - RNA, 19 nt, Artificial Sequence
  Description of Artificial Sequence: Synthetic oligonucleotide
aguuacgugaauucucuaa

SEQ ID NO: 2703611 - RNA, 19 nt, Artificial Sequence
  Description of Artificial Sequence: Synthetic oligonucleotide
agaucuacaccaucugcug

SEQ ID NO: 2703612 - RNA, 19 nt, Artificial Sequence
  Description of Artificial Sequence: Synthetic oligonucleotide
caucaagacaugcaucuac

SEQ ID NO: 2703613 - RNA, 19 nt, Artificial Sequence
  Description of Artificial Sequence: Synthetic oligonucleotide
uaaagcaaacuggacacgu

SEQ ID NO: 2703614 - RNA, 19 nt, Artificial Sequence
  Description of Artificial Sequence: Synthetic oligonucleotide
aaacaccacagcuuuggaa

SEQ ID NO: 2703615 - RNA, 19 nt, Artificial Sequence
  Description of Artificial Sequence: Synthetic oligonucleotide
uuccugaucccuaaagcaa

SEQ ID NO: 2703616 - RNA, 19 nt, Artificial Sequence
  Description of Artificial Sequence: Synthetic oligonucleotide
aagcuugcugauccacaac

SEQ ID NO: 2703617 - RNA, 19 nt, Artificial Sequence
  Description of Artificial Sequence: Synthetic oligonucleotide
uacauuaaaucaguuucac

SEQ ID NO: 2703618 - RNA, 19 nt, Artificial Sequence
  Description of Artificial Sequence: Synthetic oligonucleotide
agugggauagaauggugca

SEQ ID NO: 2703619 - RNA, 19 nt, Artificial Sequence
  Description of Artificial Sequence: Synthetic oligonucleotide
aaggaggcauuuucgauuu

SEQ ID NO: 2703620 - RNA, 19 nt, Artificial Sequence
  Description of Artificial Sequence: Synthetic oligonucleotide
aucaguuucacugaauuuu

SEQ ID NO: 2703621 - RNA, 19 nt, Artificial Sequence
  Description of Artificial Sequence: Synthetic oligonucleotide
accaaaacaccacagcuuu

SEQ ID NO: 2703622 - RNA, 19 nt, Artificial Sequence
  Description of Artificial Sequence: Synthetic oligonucleotide
gaagcauaugaggaaggag

SEQ ID NO: 2703623 - RNA, 19 nt, Artificial Sequence
  Description of Artificial Sequence: Synthetic oligonucleotide
ucccguugcucacauagug

SEQ ID NO: 2703624 - RNA, 19 nt, Artificial Sequence
  Description of Artificial Sequence: Synthetic oligonucleotide
uucagauaauaaauacaau

SEQ ID NO: 2703625 - RNA, 19 nt, Artificial Sequence
  Description of Artificial Sequence: Synthetic oligonucleotide
cugacaguuacgugaauuc

SEQ ID NO: 2703626 - RNA, 19 nt, Artificial Sequence
  Description of Artificial Sequence: Synthetic oligonucleotide
cugaauuuuauaaauaauu

SEQ ID NO: 2703627 - RNA, 19 nt, Artificial Sequence
  Description of Artificial Sequence: Synthetic oligonucleotide
ugcaucuacauguucguua

SEQ ID NO: 2703628 - RNA, 19 nt, Artificial Sequence
  Description of Artificial Sequence: Synthetic oligonucleotide
gaggaaggaggcauuuucg

SEQ ID NO: 2703629 - RNA, 19 nt, Artificial Sequence
  Description of Artificial Sequence: Synthetic oligonucleotide
gcugaggaagcauaugagg

SEQ ID NO: 2703630 - RNA, 19 nt, Artificial Sequence
  Description of Artificial Sequence: Synthetic oligonucleotide
ccuaaagcaaacuggacac

SEQ ID NO: 2703631 - RNA, 19 nt, Artificial Sequence
  Description of Artificial Sequence: Synthetic oligonucleotide
auggugcacaucuuccuuc

SEQ ID NO: 2703632 - RNA, 19 nt, Artificial Sequence
  Description of Artificial Sequence: Synthetic oligonucleotide
aacuggacacgugaauguc

SEQ ID NO: 2703633 - RNA, 19 nt, Artificial Sequence
  Description of Artificial Sequence: Synthetic oligonucleotide
ucaguuucacugaauuuua

SEQ ID NO: 2703634 - RNA, 19 nt, Artificial Sequence
  Description of Artificial Sequence: Synthetic oligonucleotide
guucguuaaaggcuuccag

SEQ ID NO: 2703635 - RNA, 19 nt, Artificial Sequence
  Description of Artificial Sequence: Synthetic oligonucleotide
gugcacaucuuccuucugg

SEQ ID NO: 2703636 - RNA, 19 nt, Artificial Sequence
  Description of Artificial Sequence: Synthetic oligonucleotide
caaacuggacacgugaaug

SEQ ID NO: 2703637 - RNA, 19 nt, Artificial Sequence
  Description of Artificial Sequence: Synthetic oligonucleotide
ucucacugguggauggucc

SEQ ID NO: 2703638 - RNA, 19 nt, Artificial Sequence
  Description of Artificial Sequence: Synthetic oligonucleotide
acauagugggauagaaugg

SEQ ID NO: 2703639 - RNA, 19 nt, Artificial Sequence
  Description of Artificial Sequence: Synthetic oligonucleotide
uuucgauuucucacuggug

SEQ ID NO: 2703640 - RNA, 19 nt, Artificial Sequence
  Description of Artificial Sequence: Synthetic oligonucleotide
auacaauaauaucacuuuu

SEQ ID NO: 2703641 - RNA, 19 nt, Artificial Sequence
  Description of Artificial Sequence: Synthetic oligonucleotide
acauuaaaucaguuucacu

SEQ ID NO: 2703642 - RNA, 19 nt, Artificial Sequence
  Description of Artificial Sequence: Synthetic oligonucleotide
ugggauagaauggugcaca

SEQ ID NO: 2703643 - RNA, 19 nt, Artificial Sequence
  Description of Artificial Sequence: Synthetic oligonucleotide
ugguccaucaagacaugca

SEQ ID NO: 2703644 - RNA, 19 nt, Artificial Sequence
  Description of Artificial Sequence: Synthetic oligonucleotide
ucuuuaagcuuggaauggc

SEQ ID NO: 2703645 - RNA, 19 nt, Artificial Sequence
  Description of Artificial Sequence: Synthetic oligonucleotide
aaaacaccacagcuuugga

SEQ ID NO: 2703646 - RNA, 19 nt, Artificial Sequence
  Description of Artificial Sequence: Synthetic oligonucleotide
aauggugcacaucuuccuu

SEQ ID NO: 2703647 - RNA, 19 nt, Artificial Sequence
  Description of Artificial Sequence: Synthetic oligonucleotide
cuuccugaucccuaaagca

SEQ ID NO: 2703648 - RNA, 19 nt, Artificial Sequence
  Description of Artificial Sequence: Synthetic oligonucleotide
acucuguacaucagggugg

SEQ ID NO: 2703649 - RNA, 19 nt, Artificial Sequence
  Description of Artificial Sequence: Synthetic oligonucleotide
ggcauuuucgauuucucac

SEQ ID NO: 2703650 - RNA, 19 nt, Artificial Sequence
  Description of Artificial Sequence: Synthetic oligonucleotide
cagacugacaccuuccuga

SEQ ID NO: 2703651 - RNA, 19 nt, Artificial Sequence
  Description of Artificial Sequence: Synthetic oligonucleotide
ugucugacaguuacgugaa

SEQ ID NO: 2703652 - RNA, 19 nt, Artificial Sequence
  Description of Artificial Sequence: Synthetic oligonucleotide
cucuaauguuuccaaacuc

SEQ ID NO: 2703653 - RNA, 19 nt, Artificial Sequence
  Description of Artificial Sequence: Synthetic oligonucleotide
gaccucuccaucuucacaa

SEQ ID NO: 2703654 - RNA, 19 nt, Artificial Sequence
  Description of Artificial Sequence: Synthetic oligonucleotide
cauuuucgauuucucacug

SEQ ID NO: 2703655 - RNA, 19 nt, Artificial Sequence
  Description of Artificial Sequence: Synthetic oligonucleotide
uccugaucccuaaagcaaa

SEQ ID NO: 2703656 - RNA, 19 nt, Artificial Sequence
  Description of Artificial Sequence: Synthetic oligonucleotide
gucaugguggaacucacuc

SEQ ID NO: 2703657 - RNA, 19 nt, Artificial Sequence
  Description of Artificial Sequence: Synthetic oligonucleotide
ucaugguggaacucacucu

SEQ ID NO: 2703658 - RNA, 19 nt, Artificial Sequence
  Description of Artificial Sequence: Synthetic oligonucleotide
ugcugauccacaacuucac

SEQ ID NO: 2703659 - RNA, 19 nt, Artificial Sequence
  Description of Artificial Sequence: Synthetic oligonucleotide
uacaccaucugcugacgug

SEQ ID NO: 2703660 - RNA, 19 nt, Artificial Sequence
  Description of Artificial Sequence: Synthetic oligonucleotide
auguucguuaaaggcuucc

SEQ ID NO: 2703661 - RNA, 19 nt, Artificial Sequence
  Description of Artificial Sequence: Synthetic oligonucleotide
auacauuaaaucaguuuca

SEQ ID NO: 2703662 - RNA, 19 nt, Artificial Sequence
  Description of Artificial Sequence: Synthetic oligonucleotide
ugacgugaccucuccaucu

SEQ ID NO: 2703663 - RNA, 19 nt, Artificial Sequence
  Description of Artificial Sequence: Synthetic oligonucleotide
gaauucucuaauguuucca

SEQ ID NO: 2703664 - RNA, 19 nt, Artificial Sequence
  Description of Artificial Sequence: Synthetic oligonucleotide
aucuucuuuaagcuuggaa

SEQ ID NO: 2703665 - RNA, 19 nt, Artificial Sequence
  Description of Artificial Sequence: Synthetic oligonucleotide
uguaaagcuugcugaucca

SEQ ID NO: 2703666 - RNA, 19 nt, Artificial Sequence
  Description of Artificial Sequence: Synthetic oligonucleotide
aggccuguaaagcuugcug

SEQ ID NO: 2703667 - RNA, 19 nt, Artificial Sequence
  Description of Artificial Sequence: Synthetic oligonucleotide
ucacauagugggauagaau

SEQ ID NO: 2703668 - RNA, 19 nt, Artificial Sequence
  Description of Artificial Sequence: Synthetic oligonucleotide
aggaaggaggcauuuucga

SEQ ID NO: 2703669 - RNA, 19 nt, Artificial Sequence
  Description of Artificial Sequence: Synthetic oligonucleotide
uaagcuuggaauggcugug

SEQ ID NO: 2703670 - RNA, 19 nt, Artificial Sequence
  Description of Artificial Sequence: Synthetic oligonucleotide
uguacaucaggguggucuc

SEQ ID NO: 2703671 - RNA, 19 nt, Artificial Sequence
  Description of Artificial Sequence: Synthetic oligonucleotide
cuggacacgugaaugucug

SEQ ID NO: 2703672 - RNA, 19 nt, Artificial Sequence
  Description of Artificial Sequence: Synthetic oligonucleotide
augguccaucaagacaugc

SEQ ID NO: 2703673 - RNA, 19 nt, Artificial Sequence
  Description of Artificial Sequence: Synthetic oligonucleotide
gauuucucacugguggaug

SEQ ID NO: 2703674 - RNA, 19 nt, Artificial Sequence
  Description of Artificial Sequence: Synthetic oligonucleotide
aaacucucacucaucuucu

SEQ ID NO: 2703675 - RNA, 19 nt, Artificial Sequence
  Description of Artificial Sequence: Synthetic oligonucleotide
ugugaggccuguaaagcuu

SEQ ID NO: 2703676 - RNA, 19 nt, Artificial Sequence
  Description of Artificial Sequence: Synthetic oligonucleotide
ugacaguuacgugaauucu

SEQ ID NO: 2703677 - RNA, 19 nt, Artificial Sequence
  Description of Artificial Sequence: Synthetic oligonucleotide
acugucaugguggaacuca

SEQ ID NO: 2703678 - RNA, 19 nt, Artificial Sequence
  Description of Artificial Sequence: Synthetic oligonucleotide
ucuacaccaucugcugacg

SEQ ID NO: 2703679 - RNA, 19 nt, Artificial Sequence
  Description of Artificial Sequence: Synthetic oligonucleotide
ugcucacauagugggauag

SEQ ID NO: 2703680 - RNA, 19 nt, Artificial Sequence
  Description of Artificial Sequence: Synthetic oligonucleotide
cuccaucuucacaaucccg

SEQ ID NO: 2703681 - RNA, 19 nt, Artificial Sequence
  Description of Artificial Sequence: Synthetic oligonucleotide
ucgauuucucacuggugga

SEQ ID NO: 2703682 - RNA, 19 nt, Artificial Sequence
  Description of Artificial Sequence: Synthetic oligonucleotide
acugaauuuuauaaauaau

SEQ ID NO: 2703683 - RNA, 19 nt, Artificial Sequence
  Description of Artificial Sequence: Synthetic oligonucleotide
gacaguuacgugaauucuc

SEQ ID NO: 2703684 - RNA, 19 nt, Artificial Sequence
  Description of Artificial Sequence: Synthetic oligonucleotide
ucugacaguuacgugaauu

SEQ ID NO: 2703685 - RNA, 19 nt, Artificial Sequence
  Description of Artificial Sequence: Synthetic oligonucleotide
ggaacugucaugguggaac

SEQ ID NO: 2703686 - RNA, 19 nt, Artificial Sequence
  Description of Artificial Sequence: Synthetic oligonucleotide
ugaccucuccaucuucaca

SEQ ID NO: 2703687 - RNA, 19 nt, Artificial Sequence
  Description of Artificial Sequence: Synthetic oligonucleotide
caauaaccaaaacaccaca

SEQ ID NO: 2703688 - RNA, 19 nt, Artificial Sequence
  Description of Artificial Sequence: Synthetic oligonucleotide
aaagcaaacuggacacgug

SEQ ID NO: 2703689 - RNA, 19 nt, Artificial Sequence
  Description of Artificial Sequence: Synthetic oligonucleotide
aacuucacaucugggugug

SEQ ID NO: 2703690 - RNA, 19 nt, Artificial Sequence
  Description of Artificial Sequence: Synthetic oligonucleotide
accagaucuacaccaucug

SEQ ID NO: 2703691 - RNA, 19 nt, Artificial Sequence
  Description of Artificial Sequence: Synthetic oligonucleotide
acaguuacgugaauucucu

SEQ ID NO: 2703692 - RNA, 19 nt, Artificial Sequence
  Description of Artificial Sequence: Synthetic oligonucleotide
ucaagacaugcaucuacau

SEQ ID NO: 2703693 - RNA, 19 nt, Artificial Sequence
  Description of Artificial Sequence: Synthetic oligonucleotide
uuccuucuggccagcaacu

SEQ ID NO: 2703694 - RNA, 19 nt, Artificial Sequence
  Description of Artificial Sequence: Synthetic oligonucleotide
aaccaaaacaccacagcuu

SEQ ID NO: 2703695 - RNA, 19 nt, Artificial Sequence
  Description of Artificial Sequence: Synthetic oligonucleotide
uguucguuaaaggcuucca

SEQ ID NO: 2703696 - RNA, 19 nt, Artificial Sequence
  Description of Artificial Sequence: Synthetic oligonucleotide
guuuccaaacucucacuca

SEQ ID NO: 2703697 - RNA, 19 nt, Artificial Sequence
  Description of Artificial Sequence: Synthetic oligonucleotide
gaucuacaccaucugcuga

SEQ ID NO: 2703698 - RNA, 19 nt, Artificial Sequence
  Description of Artificial Sequence: Synthetic oligonucleotide
caucuucacaaucccguug

SEQ ID NO: 2703699 - RNA, 19 nt, Artificial Sequence
  Description of Artificial Sequence: Synthetic oligonucleotide
cacaaucaauaaccaaaac

SEQ ID NO: 2703700 - RNA, 19 nt, Artificial Sequence
  Description of Artificial Sequence: Synthetic oligonucleotide
aucccuaaagcaaacugga

SEQ ID NO: 2703701 - RNA, 19 nt, Artificial Sequence
  Description of Artificial Sequence: Synthetic oligonucleotide
gacacgugaaugucugaca

SEQ ID NO: 2703702 - RNA, 19 nt, Artificial Sequence
  Description of Artificial Sequence: Synthetic oligonucleotide
ucacucuguacaucagggu

SEQ ID NO: 2703703 - RNA, 19 nt, Artificial Sequence
  Description of Artificial Sequence: Synthetic oligonucleotide
gaaugucugacaguuacgu

SEQ ID NO: 2703704 - RNA, 19 nt, Artificial Sequence
  Description of Artificial Sequence: Synthetic oligonucleotide
cugcugaggaagcauauga

SEQ ID NO: 2703705 - RNA, 19 nt, Artificial Sequence
  Description of Artificial Sequence: Synthetic oligonucleotide
auuuaauguggaaaacaau

SEQ ID NO: 2703706 - RNA, 19 nt, Artificial Sequence
  Description of Artificial Sequence: Synthetic oligonucleotide
caucaggguggucucaaac

SEQ ID NO: 2703707 - RNA, 19 nt, Artificial Sequence
  Description of Artificial Sequence: Synthetic oligonucleotide
ucucacucaucuucuuuaa

SEQ ID NO: 2703708 - RNA, 19 nt, Artificial Sequence
  Description of Artificial Sequence: Synthetic oligonucleotide
acgugaauucucuaauguu

SEQ ID NO: 2703709 - RNA, 19 nt, Artificial Sequence
  Description of Artificial Sequence: Synthetic oligonucleotide
gauccacaacuucacaucu

SEQ ID NO: 2703710 - RNA, 19 nt, Artificial Sequence
  Description of Artificial Sequence: Synthetic oligonucleotide
aacugucaugguggaacuc

SEQ ID NO: 2703711 - RNA, 19 nt, Artificial Sequence
  Description of Artificial Sequence: Synthetic oligonucleotide
ucccuaaagcaaacuggac

SEQ ID NO: 2703712 - RNA, 19 nt, Artificial Sequence
  Description of Artificial Sequence: Synthetic oligonucleotide
cuggccagcaacugcugag

SEQ ID NO: 2703713 - RNA, 19 nt, Artificial Sequence
  Description of Artificial Sequence: Synthetic oligonucleotide
acugguggaugguccauca

SEQ ID NO: 2703714 - RNA, 19 nt, Artificial Sequence
  Description of Artificial Sequence: Synthetic oligonucleotide
ucuggccagcaacugcuga

SEQ ID NO: 2703715 - RNA, 19 nt, Artificial Sequence
  Description of Artificial Sequence: Synthetic oligonucleotide
aucaagacaugcaucuaca

SEQ ID NO: 2703716 - RNA, 19 nt, Artificial Sequence
  Description of Artificial Sequence: Synthetic oligonucleotide
uuggaacugucauggugga

SEQ ID NO: 2703717 - RNA, 19 nt, Artificial Sequence
  Description of Artificial Sequence: Synthetic oligonucleotide
acgugaaugucugacaguu

SEQ ID NO: 2703718 - RNA, 19 nt, Artificial Sequence
  Description of Artificial Sequence: Synthetic oligonucleotide
aggaagcauaugaggaagg

SEQ ID NO: 2703719 - RNA, 19 nt, Artificial Sequence
  Description of Artificial Sequence: Synthetic oligonucleotide
uggugcacaucuuccuucu

SEQ ID NO: 2703720 - RNA, 19 nt, Artificial Sequence
  Description of Artificial Sequence: Synthetic oligonucleotide
ccguugcucacauaguggg

SEQ ID NO: 2703721 - RNA, 19 nt, Artificial Sequence
  Description of Artificial Sequence: Synthetic oligonucleotide
accugccucugccucugcc

SEQ ID NO: 2703722 - RNA, 19 nt, Artificial Sequence
  Description of Artificial Sequence: Synthetic oligonucleotide
ugucaugguggaacucacu

SEQ ID NO: 2703723 - RNA, 19 nt, Artificial Sequence
  Description of Artificial Sequence: Synthetic oligonucleotide
aggcuuccagacugacacc

SEQ ID NO: 2703724 - RNA, 19 nt, Artificial Sequence
  Description of Artificial Sequence: Synthetic oligonucleotide
acucaucuucuuuaagcuu

SEQ ID NO: 2703725 - RNA, 19 nt, Artificial Sequence
  Description of Artificial Sequence: Synthetic oligonucleotide
acaccaucugcugacguga

SEQ ID NO: 2703726 - RNA, 19 nt, Artificial Sequence
  Description of Artificial Sequence: Synthetic oligonucleotide
guaaagcuugcugauccac

SEQ ID NO: 2703727 - RNA, 19 nt, Artificial Sequence
  Description of Artificial Sequence: Synthetic oligonucleotide
ucugcugacgugaccucuc

SEQ ID NO: 2703728 - RNA, 19 nt, Artificial Sequence
  Description of Artificial Sequence: Synthetic oligonucleotide
gaaggaggcauuuucgauu

SEQ ID NO: 2703729 - RNA, 19 nt, Artificial Sequence
  Description of Artificial Sequence: Synthetic oligonucleotide
gacaugcaucuacauguuc

SEQ ID NO: 2703730 - RNA, 19 nt, Artificial Sequence
  Description of Artificial Sequence: Synthetic oligonucleotide
aaaggcuuccagacugaca

SEQ ID NO: 2703731 - RNA, 19 nt, Artificial Sequence
  Description of Artificial Sequence: Synthetic oligonucleotide
guuacgugaauucucuaau

SEQ ID NO: 2703732 - RNA, 19 nt, Artificial Sequence
  Description of Artificial Sequence: Synthetic oligonucleotide
ggcugugaggccuguaaag

SEQ ID NO: 2703733 - RNA, 19 nt, Artificial Sequence
  Description of Artificial Sequence: Synthetic oligonucleotide
acaccacagcuuuggaacu

SEQ ID NO: 2703734 - RNA, 19 nt, Artificial Sequence
  Description of Artificial Sequence: Synthetic oligonucleotide
guggaugguccaucaagac

SEQ ID NO: 2703735 - RNA, 19 nt, Artificial Sequence
  Description of Artificial Sequence: Synthetic oligonucleotide
ugguggaacucacucugua

SEQ ID NO: 2703736 - RNA, 19 nt, Artificial Sequence
  Description of Artificial Sequence: Synthetic oligonucleotide
cacaacuucacaucugggu

SEQ ID NO: 2703737 - RNA, 19 nt, Artificial Sequence
  Description of Artificial Sequence: Synthetic oligonucleotide
uuccaaacucucacucauc

SEQ ID NO: 2703738 - RNA, 19 nt, Artificial Sequence
  Description of Artificial Sequence: Synthetic oligonucleotide
ucacaaucccguugcucac

SEQ ID NO: 2703739 - RNA, 19 nt, Artificial Sequence
  Description of Artificial Sequence: Synthetic oligonucleotide
cagaucuacaccaucugcu

SEQ ID NO: 2703740 - RNA, 19 nt, Artificial Sequence
  Description of Artificial Sequence: Synthetic oligonucleotide
ucuucacaaucccguugcu

SEQ ID NO: 2703741 - RNA, 19 nt, Artificial Sequence
  Description of Artificial Sequence: Synthetic oligonucleotide
auagugggauagaauggug

SEQ ID NO: 2703742 - RNA, 19 nt, Artificial Sequence
  Description of Artificial Sequence: Synthetic oligonucleotide
ccuuccugaucccuaaagc

SEQ ID NO: 2703743 - RNA, 19 nt, Artificial Sequence
  Description of Artificial Sequence: Synthetic oligonucleotide
cugucaugguggaacucac

SEQ ID NO: 2703744 - RNA, 19 nt, Artificial Sequence
  Description of Artificial Sequence: Synthetic oligonucleotide
cacucaucuucuuuaagcu

SEQ ID NO: 2703745 - RNA, 19 nt, Artificial Sequence
  Description of Artificial Sequence: Synthetic oligonucleotide
uaaaggcuuccagacugac

SEQ ID NO: 2703746 - RNA, 19 nt, Artificial Sequence
  Description of Artificial Sequence: Synthetic oligonucleotide
uaugaggaaggaggcauuu

SEQ ID NO: 2703747 - RNA, 19 nt, Artificial Sequence
  Description of Artificial Sequence: Synthetic oligonucleotide
acgugaccucuccaucuuc

SEQ ID NO: 2703748 - RNA, 19 nt, Artificial Sequence
  Description of Artificial Sequence: Synthetic oligonucleotide
cucucacucaucuucuuua

SEQ ID NO: 2703749 - RNA, 19 nt, Artificial Sequence
  Description of Artificial Sequence: Synthetic oligonucleotide
aagcuuggaauggcuguga

SEQ ID NO: 2703750 - RNA, 19 nt, Artificial Sequence
  Description of Artificial Sequence: Synthetic oligonucleotide
ccagaucuacaccaucugc

SEQ ID NO: 2703751 - RNA, 19 nt, Artificial Sequence
  Description of Artificial Sequence: Synthetic oligonucleotide
acucucacucaucuucuuu

SEQ ID NO: 2703752 - RNA, 19 nt, Artificial Sequence
  Description of Artificial Sequence: Synthetic oligonucleotide
ggccuguaaagcuugcuga

SEQ ID NO: 2703753 - RNA, 19 nt, Artificial Sequence
  Description of Artificial Sequence: Synthetic oligonucleotide
acaaucccguugcucacau

SEQ ID NO: 2703754 - RNA, 19 nt, Artificial Sequence
  Description of Artificial Sequence: Synthetic oligonucleotide
aacugcugaggaagcauau

SEQ ID NO: 2703755 - RNA, 19 nt, Artificial Sequence
  Description of Artificial Sequence: Synthetic oligonucleotide
agacugacaccuuccugau

SEQ ID NO: 2703756 - RNA, 19 nt, Artificial Sequence
  Description of Artificial Sequence: Synthetic oligonucleotide
cccuaaagcaaacuggaca

SEQ ID NO: 2703757 - RNA, 19 nt, Artificial Sequence
  Description of Artificial Sequence: Synthetic oligonucleotide
cacagcuuuggaacuguca

SEQ ID NO: 2703758 - RNA, 19 nt, Artificial Sequence
  Description of Artificial Sequence: Synthetic oligonucleotide
acugcugaggaagcauaug

SEQ ID NO: 2703759 - RNA, 19 nt, Artificial Sequence
  Description of Artificial Sequence: Synthetic oligonucleotide
acuggacacgugaaugucu

SEQ ID NO: 2703760 - RNA, 19 nt, Artificial Sequence
  Description of Artificial Sequence: Synthetic oligonucleotide
cuucacaaucccguugcuc

SEQ ID NO: 2703761 - RNA, 19 nt, Artificial Sequence
  Description of Artificial Sequence: Synthetic oligonucleotide
uacaucaggguggucucaa

SEQ ID NO: 2703762 - RNA, 19 nt, Artificial Sequence
  Description of Artificial Sequence: Synthetic oligonucleotide
cugacgugaccucuccauc

SEQ ID NO: 2703763 - RNA, 19 nt, Artificial Sequence
  Description of Artificial Sequence: Synthetic oligonucleotide
cuuuaagcuuggaauggcu

SEQ ID NO: 2703764 - RNA, 19 nt, Artificial Sequence
  Description of Artificial Sequence: Synthetic oligonucleotide
gcaucuacauguucguuaa

SEQ ID NO: 2703765 - RNA, 19 nt, Artificial Sequence
  Description of Artificial Sequence: Synthetic oligonucleotide
uucucacugguggaugguc

SEQ ID NO: 2703766 - RNA, 19 nt, Artificial Sequence
  Description of Artificial Sequence: Synthetic oligonucleotide
acaccuuccugaucccuaa

SEQ ID NO: 2703767 - RNA, 19 nt, Artificial Sequence
  Description of Artificial Sequence: Synthetic oligonucleotide
gugaggccuguaaagcuug

SEQ ID NO: 2703768 - RNA, 19 nt, Artificial Sequence
  Description of Artificial Sequence: Synthetic oligonucleotide
ugcugacgugaccucucca

SEQ ID NO: 2703769 - RNA, 19 nt, Artificial Sequence
  Description of Artificial Sequence: Synthetic oligonucleotide
ggaugguccaucaagacau

SEQ ID NO: 2703770 - RNA, 19 nt, Artificial Sequence
  Description of Artificial Sequence: Synthetic oligonucleotide
gaacugucaugguggaacu

SEQ ID NO: 2703771 - RNA, 19 nt, Artificial Sequence
  Description of Artificial Sequence: Synthetic oligonucleotide
cauguucguuaaaggcuuc

SEQ ID NO: 2703772 - RNA, 19 nt, Artificial Sequence
  Description of Artificial Sequence: Synthetic oligonucleotide
cccguugcucacauagugg

SEQ ID NO: 2703773 - RNA, 19 nt, Artificial Sequence
  Description of Artificial Sequence: Synthetic oligonucleotide
cucacauagugggauagaa

SEQ ID NO: 2703774 - RNA, 19 nt, Artificial Sequence
  Description of Artificial Sequence: Synthetic oligonucleotide
cauaugaggaaggaggcau

SEQ ID NO: 2703775 - RNA, 19 nt, Artificial Sequence
  Description of Artificial Sequence: Synthetic oligonucleotide
cugauccacaacuucacau

SEQ ID NO: 2703776 - RNA, 19 nt, Artificial Sequence
  Description of Artificial Sequence: Synthetic oligonucleotide
uuucucacugguggauggu

SEQ ID NO: 2703777 - RNA, 19 nt, Artificial Sequence
  Description of Artificial Sequence: Synthetic oligonucleotide
cauagugggauagaauggu

SEQ ID NO: 2703778 - RNA, 19 nt, Artificial Sequence
  Description of Artificial Sequence: Synthetic oligonucleotide
cugacaccuuccugauccc

SEQ ID NO: 2703779 - RNA, 19 nt, Artificial Sequence
  Description of Artificial Sequence: Synthetic oligonucleotide
ggacacgugaaugucugac

SEQ ID NO: 2703780 - RNA, 19 nt, Artificial Sequence
  Description of Artificial Sequence: Synthetic oligonucleotide
uccuucuggccagcaacug

SEQ ID NO: 2703781 - RNA, 19 nt, Artificial Sequence
  Description of Artificial Sequence: Synthetic oligonucleotide
gaugguccaucaagacaug

SEQ ID NO: 2703782 - RNA, 19 nt, Artificial Sequence
  Description of Artificial Sequence: Synthetic oligonucleotide
gugggauagaauggugcac

SEQ ID NO: 2703783 - RNA, 19 nt, Artificial Sequence
  Description of Artificial Sequence: Synthetic oligonucleotide
caccagaucuacaccaucu

SEQ ID NO: 2703784 - RNA, 19 nt, Artificial Sequence
  Description of Artificial Sequence: Synthetic oligonucleotide
uugcucacauagugggaua

SEQ ID NO: 2703785 - RNA, 19 nt, Artificial Sequence
  Description of Artificial Sequence: Synthetic oligonucleotide
cugcugacgugaccucucc

SEQ ID NO: 2703786 - RNA, 19 nt, Artificial Sequence
  Description of Artificial Sequence: Synthetic oligonucleotide
caugcaucuacauguucgu

SEQ ID NO: 2703787 - RNA, 19 nt, Artificial Sequence
  Description of Artificial Sequence: Synthetic oligonucleotide
cucacugguggauggucca

SEQ ID NO: 2703788 - RNA, 19 nt, Artificial Sequence
  Description of Artificial Sequence: Synthetic oligonucleotide
gcauuuucgauuucucacu

SEQ ID NO: 2703789 - RNA, 19 nt, Artificial Sequence
  Description of Artificial Sequence: Synthetic oligonucleotide
aggaggcauuuucgauuuc

SEQ ID NO: 2703790 - RNA, 19 nt, Artificial Sequence
  Description of Artificial Sequence: Synthetic oligonucleotide
ugacaccuuccugaucccu

SEQ ID NO: 2703791 - RNA, 19 nt, Artificial Sequence
  Description of Artificial Sequence: Synthetic oligonucleotide
caacuucacaucugggugu

SEQ ID NO: 2703792 - RNA, 19 nt, Artificial Sequence
  Description of Artificial Sequence: Synthetic oligonucleotide
guccaucaagacaugcauc

SEQ ID NO: 2703793 - RNA, 19 nt, Artificial Sequence
  Description of Artificial Sequence: Synthetic oligonucleotide
agcaacugcugaggaagca

SEQ ID NO: 2703794 - RNA, 19 nt, Artificial Sequence
  Description of Artificial Sequence: Synthetic oligonucleotide
agcaaacuggacacgugaa

SEQ ID NO: 2703795 - RNA, 19 nt, Artificial Sequence
  Description of Artificial Sequence: Synthetic oligonucleotide
aucugcugacgugaccucu

SEQ ID NO: 2703796 - RNA, 19 nt, Artificial Sequence
  Description of Artificial Sequence: Synthetic oligonucleotide
guugcucacauagugggau

SEQ ID NO: 2703797 - RNA, 19 nt, Artificial Sequence
  Description of Artificial Sequence: Synthetic oligonucleotide
ugccucugccucugccucc

SEQ ID NO: 2703798 - RNA, 19 nt, Artificial Sequence
  Description of Artificial Sequence: Synthetic oligonucleotide
auccacaacuucacaucug

SEQ ID NO: 2703799 - RNA, 19 nt, Artificial Sequence
  Description of Artificial Sequence: Synthetic oligonucleotide
caacugcugaggaagcaua

SEQ ID NO: 2703800 - RNA, 19 nt, Artificial Sequence
  Description of Artificial Sequence: Synthetic oligonucleotide
accacagcuuuggaacugu

SEQ ID NO: 2703801 - RNA, 19 nt, Artificial Sequence
  Description of Artificial Sequence: Synthetic oligonucleotide
ccuucuggccagcaacugc

SEQ ID NO: 2703802 - RNA, 19 nt, Artificial Sequence
  Description of Artificial Sequence: Synthetic oligonucleotide
ccacaacuucacaucuggg

SEQ ID NO: 2703803 - RNA, 19 nt, Artificial Sequence
  Description of Artificial Sequence: Synthetic oligonucleotide
cugccucugccucugccuc

SEQ ID NO: 2703804 - RNA, 19 nt, Artificial Sequence
  Description of Artificial Sequence: Synthetic oligonucleotide
gguccaucaagacaugcau

SEQ ID NO: 2703805 - RNA, 19 nt, Artificial Sequence
  Description of Artificial Sequence: Synthetic oligonucleotide
gacugacaccuuccugauc

SEQ ID NO: 2703806 - RNA, 19 nt, Artificial Sequence
  Description of Artificial Sequence: Synthetic oligonucleotide
caucugcugacgugaccuc

SEQ ID NO: 2703807 - RNA, 19 nt, Artificial Sequence
  Description of Artificial Sequence: Synthetic oligonucleotide
ccugaucccuaaagcaaac

SEQ ID NO: 2703808 - RNA, 19 nt, Artificial Sequence
  Description of Artificial Sequence: Synthetic oligonucleotide
caccaucugcugacgugac

SEQ ID NO: 2703809 - RNA, 19 nt, Artificial Sequence
  Description of Artificial Sequence: Synthetic oligonucleotide
gacaccuuccugaucccua

SEQ ID NO: 2703810 - RNA, 19 nt, Artificial Sequence
  Description of Artificial Sequence: Synthetic oligonucleotide
caccacagcuuuggaacug

SEQ ID NO: 2703811 - RNA, 19 nt, Artificial Sequence
  Description of Artificial Sequence: Synthetic oligonucleotide
accucuccaucuucacaau

SEQ ID NO: 2703812 - RNA, 19 nt, Artificial Sequence
  Description of Artificial Sequence: Synthetic oligonucleotide
auaugaggaaggaggcauu

SEQ ID NO: 2703813 - RNA, 19 nt, Artificial Sequence
  Description of Artificial Sequence: Synthetic oligonucleotide
auagaauggugcacaucuu

SEQ ID NO: 2703814 - RNA, 19 nt, Artificial Sequence
  Description of Artificial Sequence: Synthetic oligonucleotide
gcugauccacaacuucaca

SEQ ID NO: 2703815 - RNA, 19 nt, Artificial Sequence
  Description of Artificial Sequence: Synthetic oligonucleotide
agacaugcaucuacauguu

SEQ ID NO: 2703816 - RNA, 19 nt, Artificial Sequence
  Description of Artificial Sequence: Synthetic oligonucleotide
ccaaaacaccacagcuuug

SEQ ID NO: 2703817 - RNA, 19 nt, Artificial Sequence
  Description of Artificial Sequence: Synthetic oligonucleotide
uggaacugucaugguggaa

SEQ ID NO: 2703818 - RNA, 19 nt, Artificial Sequence
  Description of Artificial Sequence: Synthetic oligonucleotide
aauggcugugaggccugua

SEQ ID NO: 2703819 - RNA, 19 nt, Artificial Sequence
  Description of Artificial Sequence: Synthetic oligonucleotide
augguggaacucacucugu

SEQ ID NO: 2703820 - RNA, 19 nt, Artificial Sequence
  Description of Artificial Sequence: Synthetic oligonucleotide
cacugguggaugguccauc

SEQ ID NO: 2703821 - RNA, 19 nt, Artificial Sequence
  Description of Artificial Sequence: Synthetic oligonucleotide
augaggaaggaggcauuuu

SEQ ID NO: 2703822 - RNA, 19 nt, Artificial Sequence
  Description of Artificial Sequence: Synthetic oligonucleotide
ggaaggaggcauuuucgau

SEQ ID NO: 2703823 - RNA, 19 nt, Artificial Sequence
  Description of Artificial Sequence: Synthetic oligonucleotide
ccagacugacaccuuccug

SEQ ID NO: 2703824 - RNA, 19 nt, Artificial Sequence
  Description of Artificial Sequence: Synthetic oligonucleotide
ggauagaauggugcacauc

SEQ ID NO: 2703825 - RNA, 19 nt, Artificial Sequence
  Description of Artificial Sequence: Synthetic oligonucleotide
accaccagaucuacaccau

SEQ ID NO: 2703826 - RNA, 19 nt, Artificial Sequence
  Description of Artificial Sequence: Synthetic oligonucleotide
ggaggcauuuucgauuucu

SEQ ID NO: 2703827 - RNA, 19 nt, Artificial Sequence
  Description of Artificial Sequence: Synthetic oligonucleotide
ggugcacaucuuccuucug

SEQ ID NO: 2703828 - RNA, 19 nt, Artificial Sequence
  Description of Artificial Sequence: Synthetic oligonucleotide
ggaauggcugugaggccug

SEQ ID NO: 2703829 - RNA, 19 nt, Artificial Sequence
  Description of Artificial Sequence: Synthetic oligonucleotide
aucccguugcucacauagu

SEQ ID NO: 2703830 - RNA, 19 nt, Artificial Sequence
  Description of Artificial Sequence: Synthetic oligonucleotide
ccuguaaagcuugcugauc

SEQ ID NO: 2703831 - RNA, 19 nt, Artificial Sequence
  Description of Artificial Sequence: Synthetic oligonucleotide
cacaaucccguugcucaca

SEQ ID NO: 2703832 - RNA, 19 nt, Artificial Sequence
  Description of Artificial Sequence: Synthetic oligonucleotide
gcauaugaggaaggaggca

SEQ ID NO: 2703833 - RNA, 19 nt, Artificial Sequence
  Description of Artificial Sequence: Synthetic oligonucleotide
guacaucaggguggucuca

SEQ ID NO: 2703834 - RNA, 19 nt, Artificial Sequence
  Description of Artificial Sequence: Synthetic oligonucleotide
caucuuccuucuggccagc

SEQ ID NO: 2703835 - RNA, 19 nt, Artificial Sequence
  Description of Artificial Sequence: Synthetic oligonucleotide
gacgugaccucuccaucuu

SEQ ID NO: 2703836 - RNA, 19 nt, Artificial Sequence
  Description of Artificial Sequence: Synthetic oligonucleotide
ccucuccaucuucacaauc

SEQ ID NO: 2703837 - RNA, 19 nt, Artificial Sequence
  Description of Artificial Sequence: Synthetic oligonucleotide
cacgugaaugucugacagu

SEQ ID NO: 2703838 - RNA, 19 nt, Artificial Sequence
  Description of Artificial Sequence: Synthetic oligonucleotide
gcugacgugaccucuccau

SEQ ID NO: 2703839 - RNA, 19 nt, Artificial Sequence
  Description of Artificial Sequence: Synthetic oligonucleotide
caguuacgugaauucucua

SEQ ID NO: 2703840 - RNA, 19 nt, Artificial Sequence
  Description of Artificial Sequence: Synthetic oligonucleotide
cuacaccaucugcugacgu

SEQ ID NO: 2703841 - RNA, 19 nt, Artificial Sequence
  Description of Artificial Sequence: Synthetic oligonucleotide
gcaaacuggacacgugaau

SEQ ID NO: 2703842 - RNA, 19 nt, Artificial Sequence
  Description of Artificial Sequence: Synthetic oligonucleotide
ccaccagaucuacaccauc

SEQ ID NO: 2703843 - RNA, 19 nt, Artificial Sequence
  Description of Artificial Sequence: Synthetic oligonucleotide
caucuacauguucguuaaa

SEQ ID NO: 2703844 - RNA, 19 nt, Artificial Sequence
  Description of Artificial Sequence: Synthetic oligonucleotide
ggccagcaacugcugagga

SEQ ID NO: 2703845 - RNA, 19 nt, Artificial Sequence
  Description of Artificial Sequence: Synthetic oligonucleotide
gaggccuguaaagcuugcu

SEQ ID NO: 2703846 - RNA, 19 nt, Artificial Sequence
  Description of Artificial Sequence: Synthetic oligonucleotide
cugaucccuaaagcaaacu

SEQ ID NO: 2703847 - RNA, 19 nt, Artificial Sequence
  Description of Artificial Sequence: Synthetic oligonucleotide
cucuguacaucaggguggu

SEQ ID NO: 2703848 - RNA, 19 nt, Artificial Sequence
  Description of Artificial Sequence: Synthetic oligonucleotide
ccaucugcugacgugaccu

SEQ ID NO: 2703849 - RNA, 19 nt, Artificial Sequence
  Description of Artificial Sequence: Synthetic oligonucleotide
cugguggaugguccaucaa

SEQ ID NO: 2703850 - RNA, 19 nt, Artificial Sequence
  Description of Artificial Sequence: Synthetic oligonucleotide
caccaccaccagaucuaca

SEQ ID NO: 2703851 - RNA, 19 nt, Artificial Sequence
  Description of Artificial Sequence: Synthetic oligonucleotide
gccuguaaagcuugcugau

SEQ ID NO: 2703852 - RNA, 19 nt, Artificial Sequence
  Description of Artificial Sequence: Synthetic oligonucleotide
gcucacauagugggauaga

SEQ ID NO: 2703853 - RNA, 19 nt, Artificial Sequence
  Description of Artificial Sequence: Synthetic oligonucleotide
gggauagaauggugcacau

SEQ ID NO: 2703854 - RNA, 19 nt, Artificial Sequence
  Description of Artificial Sequence: Synthetic oligonucleotide
ccacagcuuuggaacuguc

SEQ ID NO: 2703855 - RNA, 19 nt, Artificial Sequence
  Description of Artificial Sequence: Synthetic oligonucleotide
caccuuccugaucccuaaa

SEQ ID NO: 2703856 - RNA, 19 nt, Artificial Sequence
  Description of Artificial Sequence: Synthetic oligonucleotide
gaauggcugugaggccugu

SEQ ID NO: 2703857 - RNA, 19 nt, Artificial Sequence
  Description of Artificial Sequence: Synthetic oligonucleotide
gcuuuggaacugucauggu

SEQ ID NO: 2703858 - RNA, 19 nt, Artificial Sequence
  Description of Artificial Sequence: Synthetic oligonucleotide
cguugcucacauaguggga

SEQ ID NO: 2703859 - RNA, 19 nt, Artificial Sequence
  Description of Artificial Sequence: Synthetic oligonucleotide
caaucccguugcucacaua

SEQ ID NO: 2703860 - RNA, 19 nt, Artificial Sequence
  Description of Artificial Sequence: Synthetic oligonucleotide
cguuaaaggcuuccagacu

SEQ ID NO: 2703861 - RNA, 19 nt, Artificial Sequence
  Description of Artificial Sequence: Synthetic oligonucleotide
gucugacaguuacgugaau

SEQ ID NO: 2703862 - RNA, 19 nt, Artificial Sequence
  Description of Artificial Sequence: Synthetic oligonucleotide
cgugaaugucugacaguua

SEQ ID NO: 2703863 - RNA, 19 nt, Artificial Sequence
  Description of Artificial Sequence: Synthetic oligonucleotide
ccaaacucucacucaucuu

SEQ ID NO: 2703864 - RNA, 19 nt, Artificial Sequence
  Description of Artificial Sequence: Synthetic oligonucleotide
cgauuucucacugguggau

SEQ ID NO: 2703865 - RNA, 19 nt, Artificial Sequence
  Description of Artificial Sequence: Synthetic oligonucleotide
aaaaguuccacauugguuc

SEQ ID NO: 2703866 - RNA, 19 nt, Artificial Sequence
  Description of Artificial Sequence: Synthetic oligonucleotide
aaagauucuaccuccgugc

SEQ ID NO: 2703867 - RNA, 19 nt, Artificial Sequence
  Description of Artificial Sequence: Synthetic oligonucleotide
aaaaucuuaaucuugugga

SEQ ID NO: 2703868 - RNA, 19 nt, Artificial Sequence
  Description of Artificial Sequence: Synthetic oligonucleotide
uaaaaucuuaaucuugugg

SEQ ID NO: 2703869 - RNA, 19 nt, Artificial Sequence
  Description of Artificial Sequence: Synthetic oligonucleotide
gauacgugaggucugaugg

SEQ ID NO: 2703870 - RNA, 19 nt, Artificial Sequence
  Description of Artificial Sequence: Synthetic oligonucleotide
agugauagggcccaaacuc

SEQ ID NO: 2703871 - RNA, 19 nt, Artificial Sequence
  Description of Artificial Sequence: Synthetic oligonucleotide
auacuuuugcuuuggagcc

SEQ ID NO: 2703872 - RNA, 19 nt, Artificial Sequence
  Description of Artificial Sequence: Synthetic oligonucleotide
aaagccaggacguugaagu

SEQ ID NO: 2703873 - RNA, 19 nt, Artificial Sequence
  Description of Artificial Sequence: Synthetic oligonucleotide
agaacuucacaacuugucc

SEQ ID NO: 2703874 - RNA, 19 nt, Artificial Sequence
  Description of Artificial Sequence: Synthetic oligonucleotide
aaugugacuccguaguuuc

SEQ ID NO: 2703875 - RNA, 19 nt, Artificial Sequence
  Description of Artificial Sequence: Synthetic oligonucleotide
caagaaaucuaaaugcagg

SEQ ID NO: 2703876 - RNA, 19 nt, Artificial Sequence
  Description of Artificial Sequence: Synthetic oligonucleotide
guuucaggaacuuuaauug

SEQ ID NO: 2703877 - RNA, 19 nt, Artificial Sequence
  Description of Artificial Sequence: Synthetic oligonucleotide
gaacuuuaauuguaggagg

SEQ ID NO: 2703878 - RNA, 19 nt, Artificial Sequence
  Description of Artificial Sequence: Synthetic oligonucleotide
aaaagauucuaccuccgug

SEQ ID NO: 2703879 - RNA, 19 nt, Artificial Sequence
  Description of Artificial Sequence: Synthetic oligonucleotide
aaaguuccacauugguucc

SEQ ID NO: 2703880 - RNA, 19 nt, Artificial Sequence
  Description of Artificial Sequence: Synthetic oligonucleotide
ugcacagaaccauagacag

SEQ ID NO: 2703881 - RNA, 19 nt, Artificial Sequence
  Description of Artificial Sequence: Synthetic oligonucleotide
aagaaaucuaaaugcaggu

SEQ ID NO: 2703882 - RNA, 19 nt, Artificial Sequence
  Description of Artificial Sequence: Synthetic oligonucleotide
aagaugggaaaugugacuc

SEQ ID NO: 2703883 - RNA, 19 nt, Artificial Sequence
  Description of Artificial Sequence: Synthetic oligonucleotide
gaaaucuaaaugcagguuc

SEQ ID NO: 2703884 - RNA, 19 nt, Artificial Sequence
  Description of Artificial Sequence: Synthetic oligonucleotide
uuuuaagaaucauuugccc

SEQ ID NO: 2703885 - RNA, 19 nt, Artificial Sequence
  Description of Artificial Sequence: Synthetic oligonucleotide
agauacuuccaaaaguucc

SEQ ID NO: 2703886 - RNA, 19 nt, Artificial Sequence
  Description of Artificial Sequence: Synthetic oligonucleotide
acagcaacacggcaaauac

SEQ ID NO: 2703887 - RNA, 19 nt, Artificial Sequence
  Description of Artificial Sequence: Synthetic oligonucleotide
ggucaaguaacuuuugucg

SEQ ID NO: 2703888 - RNA, 19 nt, Artificial Sequence
  Description of Artificial Sequence: Synthetic oligonucleotide
acguugaagugauagggcc

SEQ ID NO: 2703889 - RNA, 19 nt, Artificial Sequence
  Description of Artificial Sequence: Synthetic oligonucleotide
uggaagaugggaaauguga

SEQ ID NO: 2703890 - RNA, 19 nt, Artificial Sequence
  Description of Artificial Sequence: Synthetic oligonucleotide
ugcaaaagauucuaccucc

SEQ ID NO: 2703891 - RNA, 19 nt, Artificial Sequence
  Description of Artificial Sequence: Synthetic oligonucleotide
gaauagaagcuguugauuc

SEQ ID NO: 2703892 - RNA, 19 nt, Artificial Sequence
  Description of Artificial Sequence: Synthetic oligonucleotide
gauucuaccuccgugcugg

SEQ ID NO: 2703893 - RNA, 19 nt, Artificial Sequence
  Description of Artificial Sequence: Synthetic oligonucleotide
aaucuuaaucuuguggaag

SEQ ID NO: 2703894 - RNA, 19 nt, Artificial Sequence
  Description of Artificial Sequence: Synthetic oligonucleotide
aaccauuugugauacguga

SEQ ID NO: 2703895 - RNA, 19 nt, Artificial Sequence
  Description of Artificial Sequence: Synthetic oligonucleotide
cuuggaagaaucaacaaga

SEQ ID NO: 2703896 - RNA, 19 nt, Artificial Sequence
  Description of Artificial Sequence: Synthetic oligonucleotide
aacuuuuccagagacacga

SEQ ID NO: 2703897 - RNA, 19 nt, Artificial Sequence
  Description of Artificial Sequence: Synthetic oligonucleotide
ucaggaacuuuaauuguag

SEQ ID NO: 2703898 - RNA, 19 nt, Artificial Sequence
  Description of Artificial Sequence: Synthetic oligonucleotide
ucuucuggccuccagaacu

SEQ ID NO: 2703899 - RNA, 19 nt, Artificial Sequence
  Description of Artificial Sequence: Synthetic oligonucleotide
uugauucucgguuucagga

SEQ ID NO: 2703900 - RNA, 19 nt, Artificial Sequence
  Description of Artificial Sequence: Synthetic oligonucleotide
uuaauuguaggaggaaaag

SEQ ID NO: 2703901 - RNA, 19 nt, Artificial Sequence
  Description of Artificial Sequence: Synthetic oligonucleotide
gauugcaugggaaagccag

SEQ ID NO: 2703902 - RNA, 19 nt, Artificial Sequence
  Description of Artificial Sequence: Synthetic oligonucleotide
gaagcuuugccuuugaacu

SEQ ID NO: 2703903 - RNA, 19 nt, Artificial Sequence
  Description of Artificial Sequence: Synthetic oligonucleotide
uuugugauacgugaggucu

SEQ ID NO: 2703904 - RNA, 19 nt, Artificial Sequence
  Description of Artificial Sequence: Synthetic oligonucleotide
uguaccggcagucacuagc

SEQ ID NO: 2703905 - RNA, 19 nt, Artificial Sequence
  Description of Artificial Sequence: Synthetic oligonucleotide
gucaaguaacuuuugucgg

SEQ ID NO: 2703906 - RNA, 19 nt, Artificial Sequence
  Description of Artificial Sequence: Synthetic oligonucleotide
cacaacuugucccucaggg

SEQ ID NO: 2703907 - RNA, 19 nt, Artificial Sequence
  Description of Artificial Sequence: Synthetic oligonucleotide
aacaagaaaucuaaaugca

SEQ ID NO: 2703908 - RNA, 19 nt, Artificial Sequence
  Description of Artificial Sequence: Synthetic oligonucleotide
uccaaaaguuccacauugg

SEQ ID NO: 2703909 - RNA, 19 nt, Artificial Sequence
  Description of Artificial Sequence: Synthetic oligonucleotide
gacacgaucuuuccuuugg

SEQ ID NO: 2703910 - RNA, 19 nt, Artificial Sequence
  Description of Artificial Sequence: Synthetic oligonucleotide
aacuucacaacuugucccu

SEQ ID NO: 2703911 - RNA, 19 nt, Artificial Sequence
  Description of Artificial Sequence: Synthetic oligonucleotide
aacuagggaagcuuugccu

SEQ ID NO: 2703912 - RNA, 19 nt, Artificial Sequence
  Description of Artificial Sequence: Synthetic oligonucleotide
aggaggaaaagcaucacgg

SEQ ID NO: 2703913 - RNA, 19 nt, Artificial Sequence
  Description of Artificial Sequence: Synthetic oligonucleotide
aaaucuuaaucuuguggaa

SEQ ID NO: 2703914 - RNA, 19 nt, Artificial Sequence
  Description of Artificial Sequence: Synthetic oligonucleotide
aggaacuuuaauuguagga

SEQ ID NO: 2703915 - RNA, 19 nt, Artificial Sequence
  Description of Artificial Sequence: Synthetic oligonucleotide
ucuuucacuucaaaggaau

SEQ ID NO: 2703916 - RNA, 19 nt, Artificial Sequence
  Description of Artificial Sequence: Synthetic oligonucleotide
cucaggguugaccagauac

SEQ ID NO: 2703917 - RNA, 19 nt, Artificial Sequence
  Description of Artificial Sequence: Synthetic oligonucleotide
uaauuguaggaggaaaagc

SEQ ID NO: 2703918 - RNA, 19 nt, Artificial Sequence
  Description of Artificial Sequence: Synthetic oligonucleotide
uuugcuuuggagccggaac

SEQ ID NO: 2703919 - RNA, 19 nt, Artificial Sequence
  Description of Artificial Sequence: Synthetic oligonucleotide
aagaaucaacaagaaaucu

SEQ ID NO: 2703920 - RNA, 19 nt, Artificial Sequence
  Description of Artificial Sequence: Synthetic oligonucleotide
uucaaaggaauagaagcug

SEQ ID NO: 2703921 - RNA, 19 nt, Artificial Sequence
  Description of Artificial Sequence: Synthetic oligonucleotide
ucuccaaacugauugcaug

SEQ ID NO: 2703922 - RNA, 19 nt, Artificial Sequence
  Description of Artificial Sequence: Synthetic oligonucleotide
ggaacuuuaauuguaggag

SEQ ID NO: 2703923 - RNA, 19 nt, Artificial Sequence
  Description of Artificial Sequence: Synthetic oligonucleotide
aaucuuguggaagauggga

SEQ ID NO: 2703924 - RNA, 19 nt, Artificial Sequence
  Description of Artificial Sequence: Synthetic oligonucleotide
acugauugcaugggaaagc

SEQ ID NO: 2703925 - RNA, 19 nt, Artificial Sequence
  Description of Artificial Sequence: Synthetic oligonucleotide
aacuuuugucgguguaccg

SEQ ID NO: 2703926 - RNA, 19 nt, Artificial Sequence
  Description of Artificial Sequence: Synthetic oligonucleotide
cuccaaacugauugcaugg

SEQ ID NO: 2703927 - RNA, 19 nt, Artificial Sequence
  Description of Artificial Sequence: Synthetic oligonucleotide
agaugggaaaugugacucc

SEQ ID NO: 2703928 - RNA, 19 nt, Artificial Sequence
  Description of Artificial Sequence: Synthetic oligonucleotide
auuugugauacgugagguc

SEQ ID NO: 2703929 - RNA, 19 nt, Artificial Sequence
  Description of Artificial Sequence: Synthetic oligonucleotide
gaagaaucaacaagaaauc

SEQ ID NO: 2703930 - RNA, 19 nt, Artificial Sequence
  Description of Artificial Sequence: Synthetic oligonucleotide
acuagccacguuuacaacu

SEQ ID NO: 2703931 - RNA, 19 nt, Artificial Sequence
  Description of Artificial Sequence: Synthetic oligonucleotide
acaacuagggaagcuuugc

SEQ ID NO: 2703932 - RNA, 19 nt, Artificial Sequence
  Description of Artificial Sequence: Synthetic oligonucleotide
aucuuaaucuuguggaaga

SEQ ID NO: 2703933 - RNA, 19 nt, Artificial Sequence
  Description of Artificial Sequence: Synthetic oligonucleotide
accagauacuuccaaaagu

SEQ ID NO: 2703934 - RNA, 19 nt, Artificial Sequence
  Description of Artificial Sequence: Synthetic oligonucleotide
aaaucuaaaugcagguucu

SEQ ID NO: 2703935 - RNA, 19 nt, Artificial Sequence
  Description of Artificial Sequence: Synthetic oligonucleotide
aagugauagggcccaaacu

SEQ ID NO: 2703936 - RNA, 19 nt, Artificial Sequence
  Description of Artificial Sequence: Synthetic oligonucleotide
caucacggugcacagaacc

SEQ ID NO: 2703937 - RNA, 19 nt, Artificial Sequence
  Description of Artificial Sequence: Synthetic oligonucleotide
gaugggaaaugugacuccg

SEQ ID NO: 2703938 - RNA, 19 nt, Artificial Sequence
  Description of Artificial Sequence: Synthetic oligonucleotide
uuucaggaacuuuaauugu

SEQ ID NO: 2703939 - RNA, 19 nt, Artificial Sequence
  Description of Artificial Sequence: Synthetic oligonucleotide
ucacuagccacguuuacaa

SEQ ID NO: 2703940 - RNA, 19 nt, Artificial Sequence
  Description of Artificial Sequence: Synthetic oligonucleotide
uccuugagggucaaguaac

SEQ ID NO: 2703941 - RNA, 19 nt, Artificial Sequence
  Description of Artificial Sequence: Synthetic oligonucleotide
agaaucauuugcccaacca

SEQ ID NO: 2703942 - RNA, 19 nt, Artificial Sequence
  Description of Artificial Sequence: Synthetic oligonucleotide
aacuuuaauuguaggagga

SEQ ID NO: 2703943 - RNA, 19 nt, Artificial Sequence
  Description of Artificial Sequence: Synthetic oligonucleotide
gaccagauacuuccaaaag

SEQ ID NO: 2703944 - RNA, 19 nt, Artificial Sequence
  Description of Artificial Sequence: Synthetic oligonucleotide
cacguuuacaacuagggaa

SEQ ID NO: 2703945 - RNA, 19 nt, Artificial Sequence
  Description of Artificial Sequence: Synthetic oligonucleotide
agccggaacauuucagugg

SEQ ID NO: 2703946 - RNA, 19 nt, Artificial Sequence
  Description of Artificial Sequence: Synthetic oligonucleotide
uagaagcuguugauucucg

SEQ ID NO: 2703947 - RNA, 19 nt, Artificial Sequence
  Description of Artificial Sequence: Synthetic oligonucleotide
auacgugaggucugauggc

SEQ ID NO: 2703948 - RNA, 19 nt, Artificial Sequence
  Description of Artificial Sequence: Synthetic oligonucleotide
cuuuugucgguguaccggc

SEQ ID NO: 2703949 - RNA, 19 nt, Artificial Sequence
  Description of Artificial Sequence: Synthetic oligonucleotide
guugauucucgguuucagg

SEQ ID NO: 2703950 - RNA, 19 nt, Artificial Sequence
  Description of Artificial Sequence: Synthetic oligonucleotide
gaagugauagggcccaaac

SEQ ID NO: 2703951 - RNA, 19 nt, Artificial Sequence
  Description of Artificial Sequence: Synthetic oligonucleotide
ucaaguaacuuuugucggu

SEQ ID NO: 2703952 - RNA, 19 nt, Artificial Sequence
  Description of Artificial Sequence: Synthetic oligonucleotide
ugucccucaggguugacca

SEQ ID NO: 2703953 - RNA, 19 nt, Artificial Sequence
  Description of Artificial Sequence: Synthetic oligonucleotide
uuucauagguccucuuucu

SEQ ID NO: 2703954 - RNA, 19 nt, Artificial Sequence
  Description of Artificial Sequence: Synthetic oligonucleotide
acuuuugucgguguaccgg

SEQ ID NO: 2703955 - RNA, 19 nt, Artificial Sequence
  Description of Artificial Sequence: Synthetic oligonucleotide
acacggcaaauacuuuugc

SEQ ID NO: 2703956 - RNA, 19 nt, Artificial Sequence
  Description of Artificial Sequence: Synthetic oligonucleotide
uucaggaacuuuaauugua

SEQ ID NO: 2703957 - RNA, 19 nt, Artificial Sequence
  Description of Artificial Sequence: Synthetic oligonucleotide
aagauucuaccuccgugcu

SEQ ID NO: 2703958 - RNA, 19 nt, Artificial Sequence
  Description of Artificial Sequence: Synthetic oligonucleotide
cuucaaggggcucuucugg

SEQ ID NO: 2703959 - RNA, 19 nt, Artificial Sequence
  Description of Artificial Sequence: Synthetic oligonucleotide
uccuuuggcaucuuucacu

SEQ ID NO: 2703960 - RNA, 19 nt, Artificial Sequence
  Description of Artificial Sequence: Synthetic oligonucleotide
ugauacgugaggucugaug

SEQ ID NO: 2703961 - RNA, 19 nt, Artificial Sequence
  Description of Artificial Sequence: Synthetic oligonucleotide
auagaagcuguugauucuc

SEQ ID NO: 2703962 - RNA, 19 nt, Artificial Sequence
  Description of Artificial Sequence: Synthetic oligonucleotide
acacgaucuuuccuuuggc

SEQ ID NO: 2703963 - RNA, 19 nt, Artificial Sequence
  Description of Artificial Sequence: Synthetic oligonucleotide
gauucucgguuucaggaac

SEQ ID NO: 2703964 - RNA, 19 nt, Artificial Sequence
  Description of Artificial Sequence: Synthetic oligonucleotide
uggaagaaucaacaagaaa

SEQ ID NO: 2703965 - RNA, 19 nt, Artificial Sequence
  Description of Artificial Sequence: Synthetic oligonucleotide
ugaccagauacuuccaaaa

SEQ ID NO: 2703966 - RNA, 19 nt, Artificial Sequence
  Description of Artificial Sequence: Synthetic oligonucleotide
aagcuguugauucucgguu

SEQ ID NO: 2703967 - RNA, 19 nt, Artificial Sequence
  Description of Artificial Sequence: Synthetic oligonucleotide
aggacguugaagugauagg

SEQ ID NO: 2703968 - RNA, 19 nt, Artificial Sequence
  Description of Artificial Sequence: Synthetic oligonucleotide
ucugcuucgggcccuaaaa

SEQ ID NO: 2703969 - RNA, 19 nt, Artificial Sequence
  Description of Artificial Sequence: Synthetic oligonucleotide
cuaaaaucuuaaucuugug

SEQ ID NO: 2703970 - RNA, 19 nt, Artificial Sequence
  Description of Artificial Sequence: Synthetic oligonucleotide
uaacuuuugucgguguacc

SEQ ID NO: 2703971 - RNA, 19 nt, Artificial Sequence
  Description of Artificial Sequence: Synthetic oligonucleotide
uucacaacuugucccucag

SEQ ID NO: 2703972 - RNA, 19 nt, Artificial Sequence
  Description of Artificial Sequence: Synthetic oligonucleotide
acguuuacaacuagggaag

SEQ ID NO: 2703973 - RNA, 19 nt, Artificial Sequence
  Description of Artificial Sequence: Synthetic oligonucleotide
agagacacgaucuuuccuu

SEQ ID NO: 2703974 - RNA, 19 nt, Artificial Sequence
  Description of Artificial Sequence: Synthetic oligonucleotide
uuuacaacuagggaagcuu

SEQ ID NO: 2703975 - RNA, 19 nt, Artificial Sequence
  Description of Artificial Sequence: Synthetic oligonucleotide
gauacuuccaaaaguucca

SEQ ID NO: 2703976 - RNA, 19 nt, Artificial Sequence
  Description of Artificial Sequence: Synthetic oligonucleotide
uccagagacacgaucuuuc

SEQ ID NO: 2703977 - RNA, 19 nt, Artificial Sequence
  Description of Artificial Sequence: Synthetic oligonucleotide
uuugucgguguaccggcag

SEQ ID NO: 2703978 - RNA, 19 nt, Artificial Sequence
  Description of Artificial Sequence: Synthetic oligonucleotide
uugaacuuuuccagagaca

SEQ ID NO: 2703979 - RNA, 19 nt, Artificial Sequence
  Description of Artificial Sequence: Synthetic oligonucleotide
ucaggguugaccagauacu

SEQ ID NO: 2703980 - RNA, 19 nt, Artificial Sequence
  Description of Artificial Sequence: Synthetic oligonucleotide
aacacggcaaauacuuuug

SEQ ID NO: 2703981 - RNA, 19 nt, Artificial Sequence
  Description of Artificial Sequence: Synthetic oligonucleotide
agaaccauagacagcaaca

SEQ ID NO: 2703982 - RNA, 19 nt, Artificial Sequence
  Description of Artificial Sequence: Synthetic oligonucleotide
uacaacuagggaagcuuug

SEQ ID NO: 2703983 - RNA, 19 nt, Artificial Sequence
  Description of Artificial Sequence: Synthetic oligonucleotide
ggacguugaagugauaggg

SEQ ID NO: 2703984 - RNA, 19 nt, Artificial Sequence
  Description of Artificial Sequence: Synthetic oligonucleotide
uguggaagaugggaaaugu

SEQ ID NO: 2703985 - RNA, 19 nt, Artificial Sequence
  Description of Artificial Sequence: Synthetic oligonucleotide
agcaucacggugcacagaa

SEQ ID NO: 2703986 - RNA, 19 nt, Artificial Sequence
  Description of Artificial Sequence: Synthetic oligonucleotide
caucuuucacuucaaagga

SEQ ID NO: 2703987 - RNA, 19 nt, Artificial Sequence
  Description of Artificial Sequence: Synthetic oligonucleotide
uccaaacugauugcauggg

SEQ ID NO: 2703988 - RNA, 19 nt, Artificial Sequence
  Description of Artificial Sequence: Synthetic oligonucleotide
caggaacuuuaauuguagg

SEQ ID NO: 2703989 - RNA, 19 nt, Artificial Sequence
  Description of Artificial Sequence: Synthetic oligonucleotide
ucauuugcccaaccauuug

SEQ ID NO: 2703990 - RNA, 19 nt, Artificial Sequence
  Description of Artificial Sequence: Synthetic oligonucleotide
gucugauggcuucaagggg

SEQ ID NO: 2703991 - RNA, 19 nt, Artificial Sequence
  Description of Artificial Sequence: Synthetic oligonucleotide
aaucauuugcccaaccauu

SEQ ID NO: 2703992 - RNA, 19 nt, Artificial Sequence
  Description of Artificial Sequence: Synthetic oligonucleotide
cagaacuucacaacuuguc

SEQ ID NO: 2703993 - RNA, 19 nt, Artificial Sequence
  Description of Artificial Sequence: Synthetic oligonucleotide
acggcaaauacuuuugcuu

SEQ ID NO: 2703994 - RNA, 19 nt, Artificial Sequence
  Description of Artificial Sequence: Synthetic oligonucleotide
uagacagcaacacggcaaa

SEQ ID NO: 2703995 - RNA, 19 nt, Artificial Sequence
  Description of Artificial Sequence: Synthetic oligonucleotide
uuugcccaaccauuuguga

SEQ ID NO: 2703996 - RNA, 19 nt, Artificial Sequence
  Description of Artificial Sequence: Synthetic oligonucleotide
caggacguugaagugauag

SEQ ID NO: 2703997 - RNA, 19 nt, Artificial Sequence
  Description of Artificial Sequence: Synthetic oligonucleotide
uguugauucucgguuucag

SEQ ID NO: 2703998 - RNA, 19 nt, Artificial Sequence
  Description of Artificial Sequence: Synthetic oligonucleotide
uuucaguggguaggcagcg

SEQ ID NO: 2703999 - RNA, 19 nt, Artificial Sequence
  Description of Artificial Sequence: Synthetic oligonucleotide
aggaauagaagcuguugau

SEQ ID NO: 2704000 - RNA, 19 nt, Artificial Sequence
  Description of Artificial Sequence: Synthetic oligonucleotide
ggugcacagaaccauagac

SEQ ID NO: 2704001 - RNA, 19 nt, Artificial Sequence
  Description of Artificial Sequence: Synthetic oligonucleotide
ugauagggcccaaacuccu

SEQ ID NO: 2704002 - RNA, 19 nt, Artificial Sequence
  Description of Artificial Sequence: Synthetic oligonucleotide
auacuuccaaaaguuccac

SEQ ID NO: 2704003 - RNA, 19 nt, Artificial Sequence
  Description of Artificial Sequence: Synthetic oligonucleotide
uuacaacuagggaagcuuu

SEQ ID NO: 2704004 - RNA, 19 nt, Artificial Sequence
  Description of Artificial Sequence: Synthetic oligonucleotide
aaguaacuuuugucggugu

SEQ ID NO: 2704005 - RNA, 19 nt, Artificial Sequence
  Description of Artificial Sequence: Synthetic oligonucleotide
cugauugcaugggaaagcc

SEQ ID NO: 2704006 - RNA, 19 nt, Artificial Sequence
  Description of Artificial Sequence: Synthetic oligonucleotide
uucuugcaaaagauucuac

SEQ ID NO: 2704007 - RNA, 19 nt, Artificial Sequence
  Description of Artificial Sequence: Synthetic oligonucleotide
uucaaggggcucuucuggc

SEQ ID NO: 2704008 - RNA, 19 nt, Artificial Sequence
  Description of Artificial Sequence: Synthetic oligonucleotide
acuagggaagcuuugccuu

SEQ ID NO: 2704009 - RNA, 19 nt, Artificial Sequence
  Description of Artificial Sequence: Synthetic oligonucleotide
gagccggaacauuucagug

SEQ ID NO: 2704010 - RNA, 19 nt, Artificial Sequence
  Description of Artificial Sequence: Synthetic oligonucleotide
ucacaacuugucccucagg

SEQ ID NO: 2704011 - RNA, 19 nt, Artificial Sequence
  Description of Artificial Sequence: Synthetic oligonucleotide
aaaugugacuccguaguuu

SEQ ID NO: 2704012 - RNA, 19 nt, Artificial Sequence
  Description of Artificial Sequence: Synthetic oligonucleotide
gacguugaagugauagggc

SEQ ID NO: 2704013 - RNA, 19 nt, Artificial Sequence
  Description of Artificial Sequence: Synthetic oligonucleotide
ugauucucgguuucaggaa

SEQ ID NO: 2704014 - RNA, 19 nt, Artificial Sequence
  Description of Artificial Sequence: Synthetic oligonucleotide
uuccacauugguuccuucu

SEQ ID NO: 2704015 - RNA, 19 nt, Artificial Sequence
  Description of Artificial Sequence: Synthetic oligonucleotide
agaaucaacaagaaaucua

SEQ ID NO: 2704016 - RNA, 19 nt, Artificial Sequence
  Description of Artificial Sequence: Synthetic oligonucleotide
agucacuagccacguuuac

SEQ ID NO: 2704017 - RNA, 19 nt, Artificial Sequence
  Description of Artificial Sequence: Synthetic oligonucleotide
ggaagcuuugccuuugaac

SEQ ID NO: 2704018 - RNA, 19 nt, Artificial Sequence
  Description of Artificial Sequence: Synthetic oligonucleotide
uccgauucuccaaacugau

SEQ ID NO: 2704019 - RNA, 19 nt, Artificial Sequence
  Description of Artificial Sequence: Synthetic oligonucleotide
uuuggagccggaacauuuc

SEQ ID NO: 2704020 - RNA, 19 nt, Artificial Sequence
  Description of Artificial Sequence: Synthetic oligonucleotide
caacuagggaagcuuugcc

SEQ ID NO: 2704021 - RNA, 19 nt, Artificial Sequence
  Description of Artificial Sequence: Synthetic oligonucleotide
uugugauacgugaggucug

SEQ ID NO: 2704022 - RNA, 19 nt, Artificial Sequence
  Description of Artificial Sequence: Synthetic oligonucleotide
uuggagccggaacauuuca

SEQ ID NO: 2704023 - RNA, 19 nt, Artificial Sequence
  Description of Artificial Sequence: Synthetic oligonucleotide
uggagccggaacauuucag

SEQ ID NO: 2704024 - RNA, 19 nt, Artificial Sequence
  Description of Artificial Sequence: Synthetic oligonucleotide
ucaaggggcucuucuggcc

SEQ ID NO: 2704025 - RNA, 19 nt, Artificial Sequence
  Description of Artificial Sequence: Synthetic oligonucleotide
ugggaaaugugacuccgua

SEQ ID NO: 2704026 - RNA, 19 nt, Artificial Sequence
  Description of Artificial Sequence: Synthetic oligonucleotide
ucaguggguaggcagcgaa

SEQ ID NO: 2704027 - RNA, 19 nt, Artificial Sequence
  Description of Artificial Sequence: Synthetic oligonucleotide
cuccguaguuucuucuugc

SEQ ID NO: 2704028 - RNA, 19 nt, Artificial Sequence
  Description of Artificial Sequence: Synthetic oligonucleotide
agcaacacggcaaauacuu

SEQ ID NO: 2704029 - RNA, 19 nt, Artificial Sequence
  Description of Artificial Sequence: Synthetic oligonucleotide
gccggaacauuucaguggg

SEQ ID NO: 2704030 - RNA, 19 nt, Artificial Sequence
  Description of Artificial Sequence: Synthetic oligonucleotide
cagauacuuccaaaaguuc

SEQ ID NO: 2704031 - RNA, 19 nt, Artificial Sequence
  Description of Artificial Sequence: Synthetic oligonucleotide
cuucaaaggaauagaagcu

SEQ ID NO: 2704032 - RNA, 19 nt, Artificial Sequence
  Description of Artificial Sequence: Synthetic oligonucleotide
acuccguaguuucuucuug

SEQ ID NO: 2704033 - RNA, 19 nt, Artificial Sequence
  Description of Artificial Sequence: Synthetic oligonucleotide
ugcuucgggcccuaaaauc

SEQ ID NO: 2704034 - RNA, 19 nt, Artificial Sequence
  Description of Artificial Sequence: Synthetic oligonucleotide
uacuuccaaaaguuccaca

SEQ ID NO: 2704035 - RNA, 19 nt, Artificial Sequence
  Description of Artificial Sequence: Synthetic oligonucleotide
guaacuuuugucgguguac

SEQ ID NO: 2704036 - RNA, 19 nt, Artificial Sequence
  Description of Artificial Sequence: Synthetic oligonucleotide
caaacugauugcaugggaa

SEQ ID NO: 2704037 - RNA, 19 nt, Artificial Sequence
  Description of Artificial Sequence: Synthetic oligonucleotide
uacuuuugcuuuggagccg

SEQ ID NO: 2704038 - RNA, 19 nt, Artificial Sequence
  Description of Artificial Sequence: Synthetic oligonucleotide
acaacuugucccucagggu

SEQ ID NO: 2704039 - RNA, 19 nt, Artificial Sequence
  Description of Artificial Sequence: Synthetic oligonucleotide
cagaaccauagacagcaac

SEQ ID NO: 2704040 - RNA, 19 nt, Artificial Sequence
  Description of Artificial Sequence: Synthetic oligonucleotide
caaguaacuuuugucggug

SEQ ID NO: 2704041 - RNA, 19 nt, Artificial Sequence
  Description of Artificial Sequence: Synthetic oligonucleotide
gaaucauuugcccaaccau

SEQ ID NO: 2704042 - RNA, 19 nt, Artificial Sequence
  Description of Artificial Sequence: Synthetic oligonucleotide
agggucaaguaacuuuugu

SEQ ID NO: 2704043 - RNA, 19 nt, Artificial Sequence
  Description of Artificial Sequence: Synthetic oligonucleotide
guaggcagcgaagggaucc

SEQ ID NO: 2704044 - RNA, 19 nt, Artificial Sequence
  Description of Artificial Sequence: Synthetic oligonucleotide
uugcccaaccauuugugau

SEQ ID NO: 2704045 - RNA, 19 nt, Artificial Sequence
  Description of Artificial Sequence: Synthetic oligonucleotide
uucuccaaacugauugcau

SEQ ID NO: 2704046 - RNA, 19 nt, Artificial Sequence
  Description of Artificial Sequence: Synthetic oligonucleotide
gaagaugggaaaugugacu

SEQ ID NO: 2704047 - RNA, 19 nt, Artificial Sequence
  Description of Artificial Sequence: Synthetic oligonucleotide
uccuugugcagcuccuuga

SEQ ID NO: 2704048 - RNA, 19 nt, Artificial Sequence
  Description of Artificial Sequence: Synthetic oligonucleotide
ucgguuucaggaacuuuaa

SEQ ID NO: 2704049 - RNA, 19 nt, Artificial Sequence
  Description of Artificial Sequence: Synthetic oligonucleotide
gccacguuuacaacuaggg

SEQ ID NO: 2704050 - RNA, 19 nt, Artificial Sequence
  Description of Artificial Sequence: Synthetic oligonucleotide
aagcuuugccuuugaacuu

SEQ ID NO: 2704051 - RNA, 19 nt, Artificial Sequence
  Description of Artificial Sequence: Synthetic oligonucleotide
uccacauugguuccuucuu

SEQ ID NO: 2704052 - RNA, 19 nt, Artificial Sequence
  Description of Artificial Sequence: Synthetic oligonucleotide
uccgugcuggaccugggcu

SEQ ID NO: 2704053 - RNA, 19 nt, Artificial Sequence
  Description of Artificial Sequence: Synthetic oligonucleotide
cuuuaauuguaggaggaaa

SEQ ID NO: 2704054 - RNA, 19 nt, Artificial Sequence
  Description of Artificial Sequence: Synthetic oligonucleotide
aaggggcucuucuggccuc

SEQ ID NO: 2704055 - RNA, 19 nt, Artificial Sequence
  Description of Artificial Sequence: Synthetic oligonucleotide
gugauagggcccaaacucc

SEQ ID NO: 2704056 - RNA, 19 nt, Artificial Sequence
  Description of Artificial Sequence: Synthetic oligonucleotide
accauuugugauacgugag

SEQ ID NO: 2704057 - RNA, 19 nt, Artificial Sequence
  Description of Artificial Sequence: Synthetic oligonucleotide
ccauuugugauacgugagg

SEQ ID NO: 2704058 - RNA, 19 nt, Artificial Sequence
  Description of Artificial Sequence: Synthetic oligonucleotide
uacgugaggucugauggcu

SEQ ID NO: 2704059 - RNA, 19 nt, Artificial Sequence
  Description of Artificial Sequence: Synthetic oligonucleotide
ugugauacgugaggucuga

SEQ ID NO: 2704060 - RNA, 19 nt, Artificial Sequence
  Description of Artificial Sequence: Synthetic oligonucleotide
aaucaacaagaaaucuaaa

SEQ ID NO: 2704061 - RNA, 19 nt, Artificial Sequence
  Description of Artificial Sequence: Synthetic oligonucleotide
uggguaggcagcgaaggga

SEQ ID NO: 2704062 - RNA, 19 nt, Artificial Sequence
  Description of Artificial Sequence: Synthetic oligonucleotide
uuuugucgguguaccggca

SEQ ID NO: 2704063 - RNA, 19 nt, Artificial Sequence
  Description of Artificial Sequence: Synthetic oligonucleotide
ugcccaaccauuugugaua

SEQ ID NO: 2704064 - RNA, 19 nt, Artificial Sequence
  Description of Artificial Sequence: Synthetic oligonucleotide
ggaaaugugacuccguagu

SEQ ID NO: 2704065 - RNA, 19 nt, Artificial Sequence
  Description of Artificial Sequence: Synthetic oligonucleotide
cucgguuucaggaacuuua

SEQ ID NO: 2704066 - RNA, 19 nt, Artificial Sequence
  Description of Artificial Sequence: Synthetic oligonucleotide
ccuucuuggaagaaucaac

SEQ ID NO: 2704067 - RNA, 19 nt, Artificial Sequence
  Description of Artificial Sequence: Synthetic oligonucleotide
auucuccaaacugauugca

SEQ ID NO: 2704068 - RNA, 19 nt, Artificial Sequence
  Description of Artificial Sequence: Synthetic oligonucleotide
ugcaugggaaagccaggac

SEQ ID NO: 2704069 - RNA, 19 nt, Artificial Sequence
  Description of Artificial Sequence: Synthetic oligonucleotide
agaaaucuaaaugcagguu

SEQ ID NO: 2704070 - RNA, 19 nt, Artificial Sequence
  Description of Artificial Sequence: Synthetic oligonucleotide
uuuccagagacacgaucuu

SEQ ID NO: 2704071 - RNA, 19 nt, Artificial Sequence
  Description of Artificial Sequence: Synthetic oligonucleotide
gcuccgauucuccaaacug

SEQ ID NO: 2704072 - RNA, 19 nt, Artificial Sequence
  Description of Artificial Sequence: Synthetic oligonucleotide
ugacuccguaguuucuucu

SEQ ID NO: 2704073 - RNA, 19 nt, Artificial Sequence
  Description of Artificial Sequence: Synthetic oligonucleotide
auuugcccaaccauuugug

SEQ ID NO: 2704074 - RNA, 19 nt, Artificial Sequence
  Description of Artificial Sequence: Synthetic oligonucleotide
agauucuaccuccgugcug

SEQ ID NO: 2704075 - RNA, 19 nt, Artificial Sequence
  Description of Artificial Sequence: Synthetic oligonucleotide
gggaaaugugacuccguag

SEQ ID NO: 2704076 - RNA, 19 nt, Artificial Sequence
  Description of Artificial Sequence: Synthetic oligonucleotide
ugggcuccgauucuccaaa

SEQ ID NO: 2704077 - RNA, 19 nt, Artificial Sequence
  Description of Artificial Sequence: Synthetic oligonucleotide
uccuucuuggaagaaucaa

SEQ ID NO: 2704078 - RNA, 19 nt, Artificial Sequence
  Description of Artificial Sequence: Synthetic oligonucleotide
uucauagguccucuuucuu

SEQ ID NO: 2704079 - RNA, 19 nt, Artificial Sequence
  Description of Artificial Sequence: Synthetic oligonucleotide
cuccgauucuccaaacuga

SEQ ID NO: 2704080 - RNA, 19 nt, Artificial Sequence
  Description of Artificial Sequence: Synthetic oligonucleotide
gaagcuguugauucucggu

SEQ ID NO: 2704081 - RNA, 19 nt, Artificial Sequence
  Description of Artificial Sequence: Synthetic oligonucleotide
ucgguguaccggcagucac

SEQ ID NO: 2704082 - RNA, 19 nt, Artificial Sequence
  Description of Artificial Sequence: Synthetic oligonucleotide
cccuaaaaucuuaaucuug

SEQ ID NO: 2704083 - RNA, 19 nt, Artificial Sequence
  Description of Artificial Sequence: Synthetic oligonucleotide
gggucaaguaacuuuuguc

SEQ ID NO: 2704084 - RNA, 19 nt, Artificial Sequence
  Description of Artificial Sequence: Synthetic oligonucleotide
uagccacguuuacaacuag

SEQ ID NO: 2704085 - RNA, 19 nt, Artificial Sequence
  Description of Artificial Sequence: Synthetic oligonucleotide
acuuuaauuguaggaggaa

SEQ ID NO: 2704086 - RNA, 19 nt, Artificial Sequence
  Description of Artificial Sequence: Synthetic oligonucleotide
cuuugaacuuuuccagaga

SEQ ID NO: 2704087 - RNA, 19 nt, Artificial Sequence
  Description of Artificial Sequence: Synthetic oligonucleotide
agacacgaucuuuccuuug

SEQ ID NO: 2704088 - RNA, 19 nt, Artificial Sequence
  Description of Artificial Sequence: Synthetic oligonucleotide
gugcacagaaccauagaca

SEQ ID NO: 2704089 - RNA, 19 nt, Artificial Sequence
  Description of Artificial Sequence: Synthetic oligonucleotide
gggcccuaaaaucuuaauc

SEQ ID NO: 2704090 - RNA, 19 nt, Artificial Sequence
  Description of Artificial Sequence: Synthetic oligonucleotide
agccacguuuacaacuagg

SEQ ID NO: 2704091 - RNA, 19 nt, Artificial Sequence
  Description of Artificial Sequence: Synthetic oligonucleotide
uugucgguguaccggcagu

SEQ ID NO: 2704092 - RNA, 19 nt, Artificial Sequence
  Description of Artificial Sequence: Synthetic oligonucleotide
uugucccucaggguugacc

SEQ ID NO: 2704093 - RNA, 19 nt, Artificial Sequence
  Description of Artificial Sequence: Synthetic oligonucleotide
guaccggcagucacuagcc

SEQ ID NO: 2704094 - RNA, 19 nt, Artificial Sequence
  Description of Artificial Sequence: Synthetic oligonucleotide
agcuguugauucucgguuu

SEQ ID NO: 2704095 - RNA, 19 nt, Artificial Sequence
  Description of Artificial Sequence: Synthetic oligonucleotide
aggguugaccagauacuuc

SEQ ID NO: 2704096 - RNA, 19 nt, Artificial Sequence
  Description of Artificial Sequence: Synthetic oligonucleotide
acuucacaacuugucccuc

SEQ ID NO: 2704097 - RNA, 19 nt, Artificial Sequence
  Description of Artificial Sequence: Synthetic oligonucleotide
aucuuguggaagaugggaa

SEQ ID NO: 2704098 - RNA, 19 nt, Artificial Sequence
  Description of Artificial Sequence: Synthetic oligonucleotide
cuagccacguuuacaacua

SEQ ID NO: 2704099 - RNA, 19 nt, Artificial Sequence
  Description of Artificial Sequence: Synthetic oligonucleotide
ugugacuccguaguuucuu

SEQ ID NO: 2704100 - RNA, 19 nt, Artificial Sequence
  Description of Artificial Sequence: Synthetic oligonucleotide
gcaaaagauucuaccuccg

SEQ ID NO: 2704101 - RNA, 19 nt, Artificial Sequence
  Description of Artificial Sequence: Synthetic oligonucleotide
guggaagaugggaaaugug

SEQ ID NO: 2704102 - RNA, 19 nt, Artificial Sequence
  Description of Artificial Sequence: Synthetic oligonucleotide
gucacuagccacguuuaca

SEQ ID NO: 2704103 - RNA, 19 nt, Artificial Sequence
  Description of Artificial Sequence: Synthetic oligonucleotide
ucgggcccuaaaaucuuaa

SEQ ID NO: 2704104 - RNA, 19 nt, Artificial Sequence
  Description of Artificial Sequence: Synthetic oligonucleotide
ucuuuccuuuggcaucuuu

SEQ ID NO: 2704105 - RNA, 19 nt, Artificial Sequence
  Description of Artificial Sequence: Synthetic oligonucleotide
ggcccaaacuccuugugca

SEQ ID NO: 2704106 - RNA, 19 nt, Artificial Sequence
  Description of Artificial Sequence: Synthetic oligonucleotide
cagguucugcuucgggccc

SEQ ID NO: 2704107 - RNA, 19 nt, Artificial Sequence
  Description of Artificial Sequence: Synthetic oligonucleotide
ugaagugauagggcccaaa

SEQ ID NO: 2704108 - RNA, 19 nt, Artificial Sequence
  Description of Artificial Sequence: Synthetic oligonucleotide
ucacggugcacagaaccau

SEQ ID NO: 2704109 - RNA, 19 nt, Artificial Sequence
  Description of Artificial Sequence: Synthetic oligonucleotide
caguggguaggcagcgaag

SEQ ID NO: 2704110 - RNA, 19 nt, Artificial Sequence
  Description of Artificial Sequence: Synthetic oligonucleotide
uucugcuucgggcccuaaa

SEQ ID NO: 2704111 - RNA, 19 nt, Artificial Sequence
  Description of Artificial Sequence: Synthetic oligonucleotide
aucacggugcacagaacca

SEQ ID NO: 2704112 - RNA, 19 nt, Artificial Sequence
  Description of Artificial Sequence: Synthetic oligonucleotide
acggugcacagaaccauag

SEQ ID NO: 2704113 - RNA, 19 nt, Artificial Sequence
  Description of Artificial Sequence: Synthetic oligonucleotide
aaguuccacauugguuccu

SEQ ID NO: 2704114 - RNA, 19 nt, Artificial Sequence
  Description of Artificial Sequence: Synthetic oligonucleotide
cuuucacuucaaaggaaua

SEQ ID NO: 2704115 - RNA, 19 nt, Artificial Sequence
  Description of Artificial Sequence: Synthetic oligonucleotide
gcuucaaggggcucuucug

SEQ ID NO: 2704116 - RNA, 19 nt, Artificial Sequence
  Description of Artificial Sequence: Synthetic oligonucleotide
agggcccaaacuccuugug

SEQ ID NO: 2704117 - RNA, 19 nt, Artificial Sequence
  Description of Artificial Sequence: Synthetic oligonucleotide
uucgggcccuaaaaucuua

SEQ ID NO: 2704118 - RNA, 19 nt, Artificial Sequence
  Description of Artificial Sequence: Synthetic oligonucleotide
ccagagacacgaucuuucc

SEQ ID NO: 2704119 - RNA, 19 nt, Artificial Sequence
  Description of Artificial Sequence: Synthetic oligonucleotide
accuccgugcuggaccugg

SEQ ID NO: 2704120 - RNA, 19 nt, Artificial Sequence
  Description of Artificial Sequence: Synthetic oligonucleotide
aucuuucacuucaaaggaa

SEQ ID NO: 2704121 - RNA, 19 nt, Artificial Sequence
  Description of Artificial Sequence: Synthetic oligonucleotide
gagggucaaguaacuuuug

SEQ ID NO: 2704122 - RNA, 19 nt, Artificial Sequence
  Description of Artificial Sequence: Synthetic oligonucleotide
ccggcagucacuagccacg

SEQ ID NO: 2704123 - RNA, 19 nt, Artificial Sequence
  Description of Artificial Sequence: Synthetic oligonucleotide
cacuagccacguuuacaac

SEQ ID NO: 2704124 - RNA, 19 nt, Artificial Sequence
  Description of Artificial Sequence: Synthetic oligonucleotide
guaggaggaaaagcaucac

SEQ ID NO: 2704125 - RNA, 19 nt, Artificial Sequence
  Description of Artificial Sequence: Synthetic oligonucleotide
cauuugcccaaccauuugu

SEQ ID NO: 2704126 - RNA, 19 nt, Artificial Sequence
  Description of Artificial Sequence: Synthetic oligonucleotide
gugacuccguaguuucuuc

SEQ ID NO: 2704127 - RNA, 19 nt, Artificial Sequence
  Description of Artificial Sequence: Synthetic oligonucleotide
cauuugugauacgugaggu

SEQ ID NO: 2704128 - RNA, 19 nt, Artificial Sequence
  Description of Artificial Sequence: Synthetic oligonucleotide
cguugaagugauagggccc

SEQ ID NO: 2704129 - RNA, 19 nt, Artificial Sequence
  Description of Artificial Sequence: Synthetic oligonucleotide
gauggcuucaaggggcucu

SEQ ID NO: 2704130 - RNA, 19 nt, Artificial Sequence
  Description of Artificial Sequence: Synthetic oligonucleotide
auucucgguuucaggaacu

SEQ ID NO: 2704131 - RNA, 19 nt, Artificial Sequence
  Description of Artificial Sequence: Synthetic oligonucleotide
gaaaugugacuccguaguu

SEQ ID NO: 2704132 - RNA, 19 nt, Artificial Sequence
  Description of Artificial Sequence: Synthetic oligonucleotide
gggcccaaacuccuugugc

SEQ ID NO: 2704133 - RNA, 19 nt, Artificial Sequence
  Description of Artificial Sequence: Synthetic oligonucleotide
ugucgguguaccggcaguc

SEQ ID NO: 2704134 - RNA, 19 nt, Artificial Sequence
  Description of Artificial Sequence: Synthetic oligonucleotide
uuccagagacacgaucuuu

SEQ ID NO: 2704135 - RNA, 19 nt, Artificial Sequence
  Description of Artificial Sequence: Synthetic oligonucleotide
uaccggcagucacuagcca

SEQ ID NO: 2704136 - RNA, 19 nt, Artificial Sequence
  Description of Artificial Sequence: Synthetic oligonucleotide
caacuugucccucaggguu

SEQ ID NO: 2704137 - RNA, 19 nt, Artificial Sequence
  Description of Artificial Sequence: Synthetic oligonucleotide
cauagguccucuuucuuuu

SEQ ID NO: 2704138 - RNA, 19 nt, Artificial Sequence
  Description of Artificial Sequence: Synthetic oligonucleotide
cuuuggagccggaacauuu

SEQ ID NO: 2704139 - RNA, 19 nt, Artificial Sequence
  Description of Artificial Sequence: Synthetic oligonucleotide
ugaggucugauggcuucaa

SEQ ID NO: 2704140 - RNA, 19 nt, Artificial Sequence
  Description of Artificial Sequence: Synthetic oligonucleotide
aggggcucuucuggccucc

SEQ ID NO: 2704141 - RNA, 19 nt, Artificial Sequence
  Description of Artificial Sequence: Synthetic oligonucleotide
ccuugugcagcuccuugag

SEQ ID NO: 2704142 - RNA, 19 nt, Artificial Sequence
  Description of Artificial Sequence: Synthetic oligonucleotide
acauuucaguggguaggca

SEQ ID NO: 2704143 - RNA, 19 nt, Artificial Sequence
  Description of Artificial Sequence: Synthetic oligonucleotide
caacacggcaaauacuuuu

SEQ ID NO: 2704144 - RNA, 19 nt, Artificial Sequence
  Description of Artificial Sequence: Synthetic oligonucleotide
agggaagcuuugccuuuga

SEQ ID NO: 2704145 - RNA, 19 nt, Artificial Sequence
  Description of Artificial Sequence: Synthetic oligonucleotide
gccuuugaacuuuuccaga

SEQ ID NO: 2704146 - RNA, 19 nt, Artificial Sequence
  Description of Artificial Sequence: Synthetic oligonucleotide
cacggcaaauacuuuugcu

SEQ ID NO: 2704147 - RNA, 19 nt, Artificial Sequence
  Description of Artificial Sequence: Synthetic oligonucleotide
guuuacaacuagggaagcu

SEQ ID NO: 2704148 - RNA, 19 nt, Artificial Sequence
  Description of Artificial Sequence: Synthetic oligonucleotide
cuccgugcuggaccugggc

SEQ ID NO: 2704149 - RNA, 19 nt, Artificial Sequence
  Description of Artificial Sequence: Synthetic oligonucleotide
uucaguggguaggcagcga

SEQ ID NO: 2704150 - RNA, 19 nt, Artificial Sequence
  Description of Artificial Sequence: Synthetic oligonucleotide
ccagauacuuccaaaaguu

SEQ ID NO: 2704151 - RNA, 19 nt, Artificial Sequence
  Description of Artificial Sequence: Synthetic oligonucleotide
gucccucaggguugaccag

SEQ ID NO: 2704152 - RNA, 19 nt, Artificial Sequence
  Description of Artificial Sequence: Synthetic oligonucleotide
cgaucuuuccuuuggcauc

SEQ ID NO: 2704153 - RNA, 19 nt, Artificial Sequence
  Description of Artificial Sequence: Synthetic oligonucleotide
gcccaaacuccuugugcag

SEQ ID NO: 2704154 - RNA, 19 nt, Artificial Sequence
  Description of Artificial Sequence: Synthetic oligonucleotide
ucucgguuucaggaacuuu

SEQ ID NO: 2704155 - RNA, 19 nt, Artificial Sequence
  Description of Artificial Sequence: Synthetic oligonucleotide
ggagccggaacauuucagu

SEQ ID NO: 2704156 - RNA, 19 nt, Artificial Sequence
  Description of Artificial Sequence: Synthetic oligonucleotide
cagucacuagccacguuua

SEQ ID NO: 2704157 - RNA, 19 nt, Artificial Sequence
  Description of Artificial Sequence: Synthetic oligonucleotide
uucuaccuccgugcuggac

SEQ ID NO: 2704158 - RNA, 19 nt, Artificial Sequence
  Description of Artificial Sequence: Synthetic oligonucleotide
uucucgguuucaggaacuu

SEQ ID NO: 2704159 - RNA, 19 nt, Artificial Sequence
  Description of Artificial Sequence: Synthetic oligonucleotide
augggaaaugugacuccgu

SEQ ID NO: 2704160 - RNA, 19 nt, Artificial Sequence
  Description of Artificial Sequence: Synthetic oligonucleotide
acuugucccucaggguuga

SEQ ID NO: 2704161 - RNA, 19 nt, Artificial Sequence
  Description of Artificial Sequence: Synthetic oligonucleotide
gagacacgaucuuuccuuu

SEQ ID NO: 2704162 - RNA, 19 nt, Artificial Sequence
  Description of Artificial Sequence: Synthetic oligonucleotide
caaaggaauagaagcuguu

SEQ ID NO: 2704163 - RNA, 19 nt, Artificial Sequence
  Description of Artificial Sequence: Synthetic oligonucleotide
gacuccguaguuucuucuu

SEQ ID NO: 2704164 - RNA, 19 nt, Artificial Sequence
  Description of Artificial Sequence: Synthetic oligonucleotide
ccaaacugauugcauggga

SEQ ID NO: 2704165 - RNA, 19 nt, Artificial Sequence
  Description of Artificial Sequence: Synthetic oligonucleotide
ccacguuuacaacuaggga

SEQ ID NO: 2704166 - RNA, 19 nt, Artificial Sequence
  Description of Artificial Sequence: Synthetic oligonucleotide
guguaccggcagucacuag

SEQ ID NO: 2704167 - RNA, 19 nt, Artificial Sequence
  Description of Artificial Sequence: Synthetic oligonucleotide
gcccaaccauuugugauac

SEQ ID NO: 2704168 - RNA, 19 nt, Artificial Sequence
  Description of Artificial Sequence: Synthetic oligonucleotide
gcuucgggcccuaaaaucu

SEQ ID NO: 2704169 - RNA, 19 nt, Artificial Sequence
  Description of Artificial Sequence: Synthetic oligonucleotide
cuuccaaaaguuccacauu

SEQ ID NO: 2704170 - RNA, 19 nt, Artificial Sequence
  Description of Artificial Sequence: Synthetic oligonucleotide
cuguugauucucgguuuca

SEQ ID NO: 2704171 - RNA, 19 nt, Artificial Sequence
  Description of Artificial Sequence: Synthetic oligonucleotide
gaccugggcuccgauucuc

SEQ ID NO: 2704172 - RNA, 19 nt, Artificial Sequence
  Description of Artificial Sequence: Synthetic oligonucleotide
cugggcuccgauucuccaa

SEQ ID NO: 2704173 - RNA, 19 nt, Artificial Sequence
  Description of Artificial Sequence: Synthetic oligonucleotide
ggaauagaagcuguugauu

SEQ ID NO: 2704174 - RNA, 19 nt, Artificial Sequence
  Description of Artificial Sequence: Synthetic oligonucleotide
uugaagugauagggcccaa

SEQ ID NO: 2704175 - RNA, 19 nt, Artificial Sequence
  Description of Artificial Sequence: Synthetic oligonucleotide
ccaaaaguuccacauuggu

SEQ ID NO: 2704176 - RNA, 19 nt, Artificial Sequence
  Description of Artificial Sequence: Synthetic oligonucleotide
cacggugcacagaaccaua

SEQ ID NO: 2704177 - RNA, 19 nt, Artificial Sequence
  Description of Artificial Sequence: Synthetic oligonucleotide
cagagacacgaucuuuccu

SEQ ID NO: 2704178 - RNA, 19 nt, Artificial Sequence
  Description of Artificial Sequence: Synthetic oligonucleotide
ccaaccauuugugauacgu

SEQ ID NO: 2704179 - RNA, 19 nt, Artificial Sequence
  Description of Artificial Sequence: Synthetic oligonucleotide
cuaccuccgugcuggaccu

SEQ ID NO: 2704180 - RNA, 19 nt, Artificial Sequence
  Description of Artificial Sequence: Synthetic oligonucleotide
gucgguguaccggcaguca

SEQ ID NO: 2704181 - RNA, 19 nt, Artificial Sequence
  Description of Artificial Sequence: Synthetic oligonucleotide
cagcaacacggcaaauacu

SEQ ID NO: 2704182 - RNA, 19 nt, Artificial Sequence
  Description of Artificial Sequence: Synthetic oligonucleotide
cugauggcuucaaggggcu

SEQ ID NO: 2704183 - RNA, 19 nt, Artificial Sequence
  Description of Artificial Sequence: Synthetic oligonucleotide
auggcuucaaggggcucuu

SEQ ID NO: 2704184 - RNA, 19 nt, Artificial Sequence
  Description of Artificial Sequence: Synthetic oligonucleotide
agguucugcuucgggcccu

SEQ ID NO: 2704185 - RNA, 19 nt, Artificial Sequence
  Description of Artificial Sequence: Synthetic oligonucleotide
cgugaggucugauggcuuc

SEQ ID NO: 2704186 - RNA, 19 nt, Artificial Sequence
  Description of Artificial Sequence: Synthetic oligonucleotide
ccuccagaacuucacaacu

SEQ ID NO: 2704187 - RNA, 19 nt, Artificial Sequence
  Description of Artificial Sequence: Synthetic oligonucleotide
gguguaccggcagucacua

SEQ ID NO: 2704188 - RNA, 19 nt, Artificial Sequence
  Description of Artificial Sequence: Synthetic oligonucleotide
ugcuggaccugggcuccga

SEQ ID NO: 2704189 - RNA, 19 nt, Artificial Sequence
  Description of Artificial Sequence: Synthetic oligonucleotide
cuuuugcuuuggagccgga

SEQ ID NO: 2704190 - RNA, 19 nt, Artificial Sequence
  Description of Artificial Sequence: Synthetic oligonucleotide
cguuuacaacuagggaagc

SEQ ID NO: 2704191 - RNA, 19 nt, Artificial Sequence
  Description of Artificial Sequence: Synthetic oligonucleotide
acagaaccauagacagcaa

SEQ ID NO: 2704192 - RNA, 19 nt, Artificial Sequence
  Description of Artificial Sequence: Synthetic oligonucleotide
augggaaagccaggacguu

SEQ ID NO: 2704193 - RNA, 19 nt, Artificial Sequence
  Description of Artificial Sequence: Synthetic oligonucleotide
gcccuaaaaucuuaaucuu

SEQ ID NO: 2704194 - RNA, 19 nt, Artificial Sequence
  Description of Artificial Sequence: Synthetic oligonucleotide
ccgugcuggaccugggcuc

SEQ ID NO: 2704195 - RNA, 19 nt, Artificial Sequence
  Description of Artificial Sequence: Synthetic oligonucleotide
agacagcaacacggcaaau

SEQ ID NO: 2704196 - RNA, 19 nt, Artificial Sequence
  Description of Artificial Sequence: Synthetic oligonucleotide
gggaagcuuugccuuugaa

SEQ ID NO: 2704197 - RNA, 19 nt, Artificial Sequence
  Description of Artificial Sequence: Synthetic oligonucleotide
cugcuucgggcccuaaaau

SEQ ID NO: 2704198 - RNA, 19 nt, Artificial Sequence
  Description of Artificial Sequence: Synthetic oligonucleotide
gguuccuucuuggaagaau

SEQ ID NO: 2704199 - RNA, 19 nt, Artificial Sequence
  Description of Artificial Sequence: Synthetic oligonucleotide
cccaaccauuugugauacg

SEQ ID NO: 2704200 - RNA, 19 nt, Artificial Sequence
  Description of Artificial Sequence: Synthetic oligonucleotide
caggguugaccagauacuu

SEQ ID NO: 2704201 - RNA, 19 nt, Artificial Sequence
  Description of Artificial Sequence: Synthetic oligonucleotide
cuucgggcccuaaaaucuu

SEQ ID NO: 2704202 - RNA, 19 nt, Artificial Sequence
  Description of Artificial Sequence: Synthetic oligonucleotide
ggcuccgauucuccaaacu

SEQ ID NO: 2704203 - RNA, 19 nt, Artificial Sequence
  Description of Artificial Sequence: Synthetic oligonucleotide
acgugaggucugauggcuu

SEQ ID NO: 2704204 - RNA, 19 nt, Artificial Sequence
  Description of Artificial Sequence: Synthetic oligonucleotide
ccguaguuucuucuugcaa

SEQ ID NO: 2704205 - RNA, 19 nt, Artificial Sequence
  Description of Artificial Sequence: Synthetic oligonucleotide
gggcuccgauucuccaaac

SEQ ID NO: 2704206 - RNA, 19 nt, Artificial Sequence
  Description of Artificial Sequence: Synthetic oligonucleotide
ccuccgugcuggaccuggg

SEQ ID NO: 2704207 - RNA, 19 nt, Artificial Sequence
  Description of Artificial Sequence: Synthetic oligonucleotide
cgugcuggaccugggcucc

SEQ ID NO: 2704208 - RNA, 19 nt, Artificial Sequence
  Description of Artificial Sequence: Synthetic oligonucleotide
gugcuggaccugggcuccg

SEQ ID NO: 2704209 - RNA, 19 nt, Artificial Sequence
  Description of Artificial Sequence: Synthetic oligonucleotide
gguaggcagcgaagggauc

SEQ ID NO: 2704210 - RNA, 19 nt, Artificial Sequence
  Description of Artificial Sequence: Synthetic oligonucleotide
uaccuccgugcuggaccug

SEQ ID NO: 2704211 - RNA, 19 nt, Artificial Sequence
  Description of Artificial Sequence: Synthetic oligonucleotide
cuugucccucaggguugac

SEQ ID NO: 2704212 - RNA, 19 nt, Artificial Sequence
  Description of Artificial Sequence: Synthetic oligonucleotide
cggaacauuucagugggua

SEQ ID NO: 2704213 - RNA, 19 nt, Artificial Sequence
  Description of Artificial Sequence: Synthetic oligonucleotide
gcaucacggugcacagaac

SEQ ID NO: 2704214 - RNA, 19 nt, Artificial Sequence
  Description of Artificial Sequence: Synthetic oligonucleotide
cuggaccugggcuccgauu

SEQ ID NO: 2704215 - RNA, 19 nt, Artificial Sequence
  Description of Artificial Sequence: Synthetic oligonucleotide
gugauacgugaggucugau

SEQ ID NO: 2704216 - RNA, 19 nt, Artificial Sequence
  Description of Artificial Sequence: Synthetic oligonucleotide
gcaacacggcaaauacuuu

SEQ ID NO: 2704217 - RNA, 19 nt, Artificial Sequence
  Description of Artificial Sequence: Synthetic oligonucleotide
gcuuuggagccggaacauu

SEQ ID NO: 2704218 - RNA, 19 nt, Artificial Sequence
  Description of Artificial Sequence: Synthetic oligonucleotide
cgguguaccggcagucacu

SEQ ID NO: 2704219 - RNA, 19 nt, Artificial Sequence
  Description of Artificial Sequence: Synthetic oligonucleotide
ccgauucuccaaacugauu

SEQ ID NO: 2704220 - RNA, 19 nt, Artificial Sequence
  Description of Artificial Sequence: Synthetic oligonucleotide
gcuggaccugggcuccgau

SEQ ID NO: 2704221 - RNA, 19 nt, Artificial Sequence
  Description of Artificial Sequence: Synthetic oligonucleotide
cccucaggguugaccagau

SEQ ID NO: 2704222 - RNA, 19 nt, Artificial Sequence
  Description of Artificial Sequence: Synthetic oligonucleotide
cgguuucaggaacuuuaau

SEQ ID NO: 2704223 - RNA, 19 nt, Artificial Sequence
  Description of Artificial Sequence: Synthetic oligonucleotide
ccucaggguugaccagaua

SEQ ID NO: 2704224 - RNA, 19 nt, Artificial Sequence
  Description of Artificial Sequence: Synthetic oligonucleotide
ccggaacauuucagugggu

SEQ ID NO: 2704225 - RNA, 19 nt, Artificial Sequence
  Description of Artificial Sequence: Synthetic oligonucleotide
cgggcccuaaaaucuuaau

SEQ ID NO: 2704226 - RNA, 19 nt, Artificial Sequence
  Description of Artificial Sequence: Synthetic oligonucleotide
aaagauagcagcuuccagg

SEQ ID NO: 2704227 - RNA, 19 nt, Artificial Sequence
  Description of Artificial Sequence: Synthetic oligonucleotide
ucauaauuaaacuuguuag

SEQ ID NO: 2704228 - RNA, 19 nt, Artificial Sequence
  Description of Artificial Sequence: Synthetic oligonucleotide
uuugcuuccauguugaaga

SEQ ID NO: 2704229 - RNA, 19 nt, Artificial Sequence
  Description of Artificial Sequence: Synthetic oligonucleotide
aaacuggucuucuugguac

SEQ ID NO: 2704230 - RNA, 19 nt, Artificial Sequence
  Description of Artificial Sequence: Synthetic oligonucleotide
aagaaaagauagcagcuuc

SEQ ID NO: 2704231 - RNA, 19 nt, Artificial Sequence
  Description of Artificial Sequence: Synthetic oligonucleotide
uuuugcuaggccaugaggc

SEQ ID NO: 2704232 - RNA, 19 nt, Artificial Sequence
  Description of Artificial Sequence: Synthetic oligonucleotide
ugcaagaaaagauagcagc

SEQ ID NO: 2704233 - RNA, 19 nt, Artificial Sequence
  Description of Artificial Sequence: Synthetic oligonucleotide
aagaaacuggucuucuugg

SEQ ID NO: 2704234 - RNA, 19 nt, Artificial Sequence
  Description of Artificial Sequence: Synthetic oligonucleotide
ucugcagucucucagaaga

SEQ ID NO: 2704235 - RNA, 19 nt, Artificial Sequence
  Description of Artificial Sequence: Synthetic oligonucleotide
aguuuugucauuauauccc

SEQ ID NO: 2704236 - RNA, 19 nt, Artificial Sequence
  Description of Artificial Sequence: Synthetic oligonucleotide
uguaguuuugucauuauau

SEQ ID NO: 2704237 - RNA, 19 nt, Artificial Sequence
  Description of Artificial Sequence: Synthetic oligonucleotide
agggcugacacucaugugc

SEQ ID NO: 2704238 - RNA, 19 nt, Artificial Sequence
  Description of Artificial Sequence: Synthetic oligonucleotide
aauuaaacuuguuaguuuu

SEQ ID NO: 2704239 - RNA, 19 nt, Artificial Sequence
  Description of Artificial Sequence: Synthetic oligonucleotide
ucagaagaguucaucauag

SEQ ID NO: 2704240 - RNA, 19 nt, Artificial Sequence
  Description of Artificial Sequence: Synthetic oligonucleotide
ugcuguaccagagaaaagg

SEQ ID NO: 2704241 - RNA, 19 nt, Artificial Sequence
  Description of Artificial Sequence: Synthetic oligonucleotide
ugugcaagaaaagauagca

SEQ ID NO: 2704242 - RNA, 19 nt, Artificial Sequence
  Description of Artificial Sequence: Synthetic oligonucleotide
aagauuaugcuguaccaga

SEQ ID NO: 2704243 - RNA, 19 nt, Artificial Sequence
  Description of Artificial Sequence: Synthetic oligonucleotide
uuuucauaauuaaacuugu

SEQ ID NO: 2704244 - RNA, 19 nt, Artificial Sequence
  Description of Artificial Sequence: Synthetic oligonucleotide
gaggucuagaguuccaugg

SEQ ID NO: 2704245 - RNA, 19 nt, Artificial Sequence
  Description of Artificial Sequence: Synthetic oligonucleotide
aaagggcugacacucaugu

SEQ ID NO: 2704246 - RNA, 19 nt, Artificial Sequence
  Description of Artificial Sequence: Synthetic oligonucleotide
aucauagcaaugaacagcg

SEQ ID NO: 2704247 - RNA, 19 nt, Artificial Sequence
  Description of Artificial Sequence: Synthetic oligonucleotide
aaugaacagcggaagaaac

SEQ ID NO: 2704248 - RNA, 19 nt, Artificial Sequence
  Description of Artificial Sequence: Synthetic oligonucleotide
cauguugaagaaaggagcc

SEQ ID NO: 2704249 - RNA, 19 nt, Artificial Sequence
  Description of Artificial Sequence: Synthetic oligonucleotide
caugugcaagaaaagauag

SEQ ID NO: 2704250 - RNA, 19 nt, Artificial Sequence
  Description of Artificial Sequence: Synthetic oligonucleotide
aagauagcagcuuccagga

SEQ ID NO: 2704251 - RNA, 19 nt, Artificial Sequence
  Description of Artificial Sequence: Synthetic oligonucleotide
uguguugagaggucuagag

SEQ ID NO: 2704252 - RNA, 19 nt, Artificial Sequence
  Description of Artificial Sequence: Synthetic oligonucleotide
aaaagauagcagcuuccag

SEQ ID NO: 2704253 - RNA, 19 nt, Artificial Sequence
  Description of Artificial Sequence: Synthetic oligonucleotide
aagaguucaucauagcaau

SEQ ID NO: 2704254 - RNA, 19 nt, Artificial Sequence
  Description of Artificial Sequence: Synthetic oligonucleotide
ucuguuauuuucacuggcc

SEQ ID NO: 2704255 - RNA, 19 nt, Artificial Sequence
  Description of Artificial Sequence: Synthetic oligonucleotide
uuugucauuauaucccgug

SEQ ID NO: 2704256 - RNA, 19 nt, Artificial Sequence
  Description of Artificial Sequence: Synthetic oligonucleotide
agaagaguucaucauagca

SEQ ID NO: 2704257 - RNA, 19 nt, Artificial Sequence
  Description of Artificial Sequence: Synthetic oligonucleotide
guaaccugugcuuucagag

SEQ ID NO: 2704258 - RNA, 19 nt, Artificial Sequence
  Description of Artificial Sequence: Synthetic oligonucleotide
uuuuauucuagcucucucu

SEQ ID NO: 2704259 - RNA, 19 nt, Artificial Sequence
  Description of Artificial Sequence: Synthetic oligonucleotide
gaagaaacuggucuucuug

SEQ ID NO: 2704260 - RNA, 19 nt, Artificial Sequence
  Description of Artificial Sequence: Synthetic oligonucleotide
ucucucucgacacacacac

SEQ ID NO: 2704261 - RNA, 19 nt, Artificial Sequence
  Description of Artificial Sequence: Synthetic oligonucleotide
uuucagagaagcagggaag

SEQ ID NO: 2704262 - RNA, 19 nt, Artificial Sequence
  Description of Artificial Sequence: Synthetic oligonucleotide
gaggcuggaauccacuugg

SEQ ID NO: 2704263 - RNA, 19 nt, Artificial Sequence
  Description of Artificial Sequence: Synthetic oligonucleotide
ucucucgacacacacacac

SEQ ID NO: 2704264 - RNA, 19 nt, Artificial Sequence
  Description of Artificial Sequence: Synthetic oligonucleotide
guuuugucauuauaucccg

SEQ ID NO: 2704265 - RNA, 19 nt, Artificial Sequence
  Description of Artificial Sequence: Synthetic oligonucleotide
ucuguuguaguuuugucau

SEQ ID NO: 2704266 - RNA, 19 nt, Artificial Sequence
  Description of Artificial Sequence: Synthetic oligonucleotide
uguugagaggucuagaguu

SEQ ID NO: 2704267 - RNA, 19 nt, Artificial Sequence
  Description of Artificial Sequence: Synthetic oligonucleotide
uucuguuguaguuuuguca

SEQ ID NO: 2704268 - RNA, 19 nt, Artificial Sequence
  Description of Artificial Sequence: Synthetic oligonucleotide
aacuggucuucuugguacc

SEQ ID NO: 2704269 - RNA, 19 nt, Artificial Sequence
  Description of Artificial Sequence: Synthetic oligonucleotide
uuuauucuagcucucucuc

SEQ ID NO: 2704270 - RNA, 19 nt, Artificial Sequence
  Description of Artificial Sequence: Synthetic oligonucleotide
uaugcuguaccagagaaaa

SEQ ID NO: 2704271 - RNA, 19 nt, Artificial Sequence
  Description of Artificial Sequence: Synthetic oligonucleotide
gacacacacacacacacac

SEQ ID NO: 2704272 - RNA, 19 nt, Artificial Sequence
  Description of Artificial Sequence: Synthetic oligonucleotide
ucauuugcuuccauguuga

SEQ ID NO: 2704273 - RNA, 19 nt, Artificial Sequence
  Description of Artificial Sequence: Synthetic oligonucleotide
ugucauuauaucccgugca

SEQ ID NO: 2704274 - RNA, 19 nt, Artificial Sequence
  Description of Artificial Sequence: Synthetic oligonucleotide
aucauuugcuuccauguug

SEQ ID NO: 2704275 - RNA, 19 nt, Artificial Sequence
  Description of Artificial Sequence: Synthetic oligonucleotide
ugaugaauugcugucauuc

SEQ ID NO: 2704276 - RNA, 19 nt, Artificial Sequence
  Description of Artificial Sequence: Synthetic oligonucleotide
aaggagccugcucuuuugc

SEQ ID NO: 2704277 - RNA, 19 nt, Artificial Sequence
  Description of Artificial Sequence: Synthetic oligonucleotide
aguuccauggugcucuccg

SEQ ID NO: 2704278 - RNA, 19 nt, Artificial Sequence
  Description of Artificial Sequence: Synthetic oligonucleotide
ugaacagcggaagaaacug

SEQ ID NO: 2704279 - RNA, 19 nt, Artificial Sequence
  Description of Artificial Sequence: Synthetic oligonucleotide
auugcugucauucuauuuu

SEQ ID NO: 2704280 - RNA, 19 nt, Artificial Sequence
  Description of Artificial Sequence: Synthetic oligonucleotide
ucgacacacacacacacac

SEQ ID NO: 2704281 - RNA, 19 nt, Artificial Sequence
  Description of Artificial Sequence: Synthetic oligonucleotide
uggcauucuguguugagag

SEQ ID NO: 2704282 - RNA, 19 nt, Artificial Sequence
  Description of Artificial Sequence: Synthetic oligonucleotide
agagaagcagggaagggcc

SEQ ID NO: 2704283 - RNA, 19 nt, Artificial Sequence
  Description of Artificial Sequence: Synthetic oligonucleotide
auuaugcuguaccagagaa

SEQ ID NO: 2704284 - RNA, 19 nt, Artificial Sequence
  Description of Artificial Sequence: Synthetic oligonucleotide
uaagauuaugcuguaccag

SEQ ID NO: 2704285 - RNA, 19 nt, Artificial Sequence
  Description of Artificial Sequence: Synthetic oligonucleotide
agaaaagauagcagcuucc

SEQ ID NO: 2704286 - RNA, 19 nt, Artificial Sequence
  Description of Artificial Sequence: Synthetic oligonucleotide
gauagcagcuuccaggaca

SEQ ID NO: 2704287 - RNA, 19 nt, Artificial Sequence
  Description of Artificial Sequence: Synthetic oligonucleotide
uucuguuauuuucacuggc

SEQ ID NO: 2704288 - RNA, 19 nt, Artificial Sequence
  Description of Artificial Sequence: Synthetic oligonucleotide
ugugucuccacaucauuug

SEQ ID NO: 2704289 - RNA, 19 nt, Artificial Sequence
  Description of Artificial Sequence: Synthetic oligonucleotide
uguugaagaaaggagccug

SEQ ID NO: 2704290 - RNA, 19 nt, Artificial Sequence
  Description of Artificial Sequence: Synthetic oligonucleotide
ugcuuucagagaagcaggg

SEQ ID NO: 2704291 - RNA, 19 nt, Artificial Sequence
  Description of Artificial Sequence: Synthetic oligonucleotide
uauucuagcucucucucuc

SEQ ID NO: 2704292 - RNA, 19 nt, Artificial Sequence
  Description of Artificial Sequence: Synthetic oligonucleotide
uucagagaagcagggaagg

SEQ ID NO: 2704293 - RNA, 19 nt, Artificial Sequence
  Description of Artificial Sequence: Synthetic oligonucleotide
ugaauugcugucauucuau

SEQ ID NO: 2704294 - RNA, 19 nt, Artificial Sequence
  Description of Artificial Sequence: Synthetic oligonucleotide
ucucgacacacacacacac

SEQ ID NO: 2704295 - RNA, 19 nt, Artificial Sequence
  Description of Artificial Sequence: Synthetic oligonucleotide
uguuauuuucacuggccca

SEQ ID NO: 2704296 - RNA, 19 nt, Artificial Sequence
  Description of Artificial Sequence: Synthetic oligonucleotide
uuauaucccgugcaagugu

SEQ ID NO: 2704297 - RNA, 19 nt, Artificial Sequence
  Description of Artificial Sequence: Synthetic oligonucleotide
auaauuaaacuuguuaguu

SEQ ID NO: 2704298 - RNA, 19 nt, Artificial Sequence
  Description of Artificial Sequence: Synthetic oligonucleotide
gaagaaaggagccugcucu

SEQ ID NO: 2704299 - RNA, 19 nt, Artificial Sequence
  Description of Artificial Sequence: Synthetic oligonucleotide
gagaaaagggcugacacuc

SEQ ID NO: 2704300 - RNA, 19 nt, Artificial Sequence
  Description of Artificial Sequence: Synthetic oligonucleotide
cacaccuaagauuaugcug

SEQ ID NO: 2704301 - RNA, 19 nt, Artificial Sequence
  Description of Artificial Sequence: Synthetic oligonucleotide
uaauuaaacuuguuaguuu

SEQ ID NO: 2704302 - RNA, 19 nt, Artificial Sequence
  Description of Artificial Sequence: Synthetic oligonucleotide
aaccugugcuuucagagaa

SEQ ID NO: 2704303 - RNA, 19 nt, Artificial Sequence
  Description of Artificial Sequence: Synthetic oligonucleotide
cagagaaaagggcugacac

SEQ ID NO: 2704304 - RNA, 19 nt, Artificial Sequence
  Description of Artificial Sequence: Synthetic oligonucleotide
cacacaccuaagauuaugc

SEQ ID NO: 2704305 - RNA, 19 nt, Artificial Sequence
  Description of Artificial Sequence: Synthetic oligonucleotide
acaccuaagauuaugcugu

SEQ ID NO: 2704306 - RNA, 19 nt, Artificial Sequence
  Description of Artificial Sequence: Synthetic oligonucleotide
cuuuugcuaggccaugagg

SEQ ID NO: 2704307 - RNA, 19 nt, Artificial Sequence
  Description of Artificial Sequence: Synthetic oligonucleotide
cacacacacacacacacac

SEQ ID NO: 2704308 - RNA, 19 nt, Artificial Sequence
  Description of Artificial Sequence: Synthetic oligonucleotide
guauucugcagucucucag

SEQ ID NO: 2704309 - RNA, 19 nt, Artificial Sequence
  Description of Artificial Sequence: Synthetic oligonucleotide
guaguuuugucauuauauc

SEQ ID NO: 2704310 - RNA, 19 nt, Artificial Sequence
  Description of Artificial Sequence: Synthetic oligonucleotide
uuccauguugaagaaagga

SEQ ID NO: 2704311 - RNA, 19 nt, Artificial Sequence
  Description of Artificial Sequence: Synthetic oligonucleotide
agcagcuuccaggacaggc

SEQ ID NO: 2704312 - RNA, 19 nt, Artificial Sequence
  Description of Artificial Sequence: Synthetic oligonucleotide
ucauuauaucccgugcaag

SEQ ID NO: 2704313 - RNA, 19 nt, Artificial Sequence
  Description of Artificial Sequence: Synthetic oligonucleotide
gaagaguucaucauagcaa

SEQ ID NO: 2704314 - RNA, 19 nt, Artificial Sequence
  Description of Artificial Sequence: Synthetic oligonucleotide
ccuaagauuaugcuguacc

SEQ ID NO: 2704315 - RNA, 19 nt, Artificial Sequence
  Description of Artificial Sequence: Synthetic oligonucleotide
uauucugcagucucucaga

SEQ ID NO: 2704316 - RNA, 19 nt, Artificial Sequence
  Description of Artificial Sequence: Synthetic oligonucleotide
ugcuaggccaugaggcugg

SEQ ID NO: 2704317 - RNA, 19 nt, Artificial Sequence
  Description of Artificial Sequence: Synthetic oligonucleotide
ccauguugaagaaaggagc

SEQ ID NO: 2704318 - RNA, 19 nt, Artificial Sequence
  Description of Artificial Sequence: Synthetic oligonucleotide
ugaggugacucugaggcug

SEQ ID NO: 2704319 - RNA, 19 nt, Artificial Sequence
  Description of Artificial Sequence: Synthetic oligonucleotide
uagaguuccauggugcucu

SEQ ID NO: 2704320 - RNA, 19 nt, Artificial Sequence
  Description of Artificial Sequence: Synthetic oligonucleotide
gaguucaucauagcaauga

SEQ ID NO: 2704321 - RNA, 19 nt, Artificial Sequence
  Description of Artificial Sequence: Synthetic oligonucleotide
cuaagauuaugcuguacca

SEQ ID NO: 2704322 - RNA, 19 nt, Artificial Sequence
  Description of Artificial Sequence: Synthetic oligonucleotide
ugcgugugucuccacauca

SEQ ID NO: 2704323 - RNA, 19 nt, Artificial Sequence
  Description of Artificial Sequence: Synthetic oligonucleotide
auuauaucccgugcaagug

SEQ ID NO: 2704324 - RNA, 19 nt, Artificial Sequence
  Description of Artificial Sequence: Synthetic oligonucleotide
gacaggcaguaaaacaagg

SEQ ID NO: 2704325 - RNA, 19 nt, Artificial Sequence
  Description of Artificial Sequence: Synthetic oligonucleotide
uuugcuaggccaugaggcu

SEQ ID NO: 2704326 - RNA, 19 nt, Artificial Sequence
  Description of Artificial Sequence: Synthetic oligonucleotide
cuagguauucugcagucuc

SEQ ID NO: 2704327 - RNA, 19 nt, Artificial Sequence
  Description of Artificial Sequence: Synthetic oligonucleotide
agagaaaagggcugacacu

SEQ ID NO: 2704328 - RNA, 19 nt, Artificial Sequence
  Description of Artificial Sequence: Synthetic oligonucleotide
ugaggcuggaauccacuug

SEQ ID NO: 2704329 - RNA, 19 nt, Artificial Sequence
  Description of Artificial Sequence: Synthetic oligonucleotide
cauagcaaugaacagcgga

SEQ ID NO: 2704330 - RNA, 19 nt, Artificial Sequence
  Description of Artificial Sequence: Synthetic oligonucleotide
auuugcuuccauguugaag

SEQ ID NO: 2704331 - RNA, 19 nt, Artificial Sequence
  Description of Artificial Sequence: Synthetic oligonucleotide
ucuagaguuccauggugcu

SEQ ID NO: 2704332 - RNA, 19 nt, Artificial Sequence
  Description of Artificial Sequence: Synthetic oligonucleotide
auccacuuggcauucugug

SEQ ID NO: 2704333 - RNA, 19 nt, Artificial Sequence
  Description of Artificial Sequence: Synthetic oligonucleotide
uuauucuagcucucucucu

SEQ ID NO: 2704334 - RNA, 19 nt, Artificial Sequence
  Description of Artificial Sequence: Synthetic oligonucleotide
ugaagaaaggagccugcuc

SEQ ID NO: 2704335 - RNA, 19 nt, Artificial Sequence
  Description of Artificial Sequence: Synthetic oligonucleotide
cacaucauuugcuuccaug

SEQ ID NO: 2704336 - RNA, 19 nt, Artificial Sequence
  Description of Artificial Sequence: Synthetic oligonucleotide
augugcaagaaaagauagc

SEQ ID NO: 2704337 - RNA, 19 nt, Artificial Sequence
  Description of Artificial Sequence: Synthetic oligonucleotide
ucuguguugagaggucuag

SEQ ID NO: 2704338 - RNA, 19 nt, Artificial Sequence
  Description of Artificial Sequence: Synthetic oligonucleotide
gaaaagauagcagcuucca

SEQ ID NO: 2704339 - RNA, 19 nt, Artificial Sequence
  Description of Artificial Sequence: Synthetic oligonucleotide
cuuucagagaagcagggaa

SEQ ID NO: 2704340 - RNA, 19 nt, Artificial Sequence
  Description of Artificial Sequence: Synthetic oligonucleotide
aacccaguuggguccugcg

SEQ ID NO: 2704341 - RNA, 19 nt, Artificial Sequence
  Description of Artificial Sequence: Synthetic oligonucleotide
acucaugugcaagaaaaga

SEQ ID NO: 2704342 - RNA, 19 nt, Artificial Sequence
  Description of Artificial Sequence: Synthetic oligonucleotide
uuuugucauuauaucccgu

SEQ ID NO: 2704343 - RNA, 19 nt, Artificial Sequence
  Description of Artificial Sequence: Synthetic oligonucleotide
cauaauuaaacuuguuagu

SEQ ID NO: 2704344 - RNA, 19 nt, Artificial Sequence
  Description of Artificial Sequence: Synthetic oligonucleotide
gaauccacuuggcauucug

SEQ ID NO: 2704345 - RNA, 19 nt, Artificial Sequence
  Description of Artificial Sequence: Synthetic oligonucleotide
ucacuggcccaccugcucc

SEQ ID NO: 2704346 - RNA, 19 nt, Artificial Sequence
  Description of Artificial Sequence: Synthetic oligonucleotide
cuuccauguugaagaaagg

SEQ ID NO: 2704347 - RNA, 19 nt, Artificial Sequence
  Description of Artificial Sequence: Synthetic oligonucleotide
aaacccaguuggguccugc

SEQ ID NO: 2704348 - RNA, 19 nt, Artificial Sequence
  Description of Artificial Sequence: Synthetic oligonucleotide
ucucagaagaguucaucau

SEQ ID NO: 2704349 - RNA, 19 nt, Artificial Sequence
  Description of Artificial Sequence: Synthetic oligonucleotide
acacacacacaccuaagau

SEQ ID NO: 2704350 - RNA, 19 nt, Artificial Sequence
  Description of Artificial Sequence: Synthetic oligonucleotide
uauaucccgugcaagugua

SEQ ID NO: 2704351 - RNA, 19 nt, Artificial Sequence
  Description of Artificial Sequence: Synthetic oligonucleotide
cucucagaagaguucauca

SEQ ID NO: 2704352 - RNA, 19 nt, Artificial Sequence
  Description of Artificial Sequence: Synthetic oligonucleotide
ucagagaagcagggaaggg

SEQ ID NO: 2704353 - RNA, 19 nt, Artificial Sequence
  Description of Artificial Sequence: Synthetic oligonucleotide
ucauagcaaugaacagcgg

SEQ ID NO: 2704354 - RNA, 19 nt, Artificial Sequence
  Description of Artificial Sequence: Synthetic oligonucleotide
gauuaugcuguaccagaga

SEQ ID NO: 2704355 - RNA, 19 nt, Artificial Sequence
  Description of Artificial Sequence: Synthetic oligonucleotide
uagcaaugaacagcggaag

SEQ ID NO: 2704356 - RNA, 19 nt, Artificial Sequence
  Description of Artificial Sequence: Synthetic oligonucleotide
uuguaguuuugucauuaua

SEQ ID NO: 2704357 - RNA, 19 nt, Artificial Sequence
  Description of Artificial Sequence: Synthetic oligonucleotide
ucucucucucucucucucg

SEQ ID NO: 2704358 - RNA, 19 nt, Artificial Sequence
  Description of Artificial Sequence: Synthetic oligonucleotide
aacagcggaagaaacuggu

SEQ ID NO: 2704359 - RNA, 19 nt, Artificial Sequence
  Description of Artificial Sequence: Synthetic oligonucleotide
aggccaugaggcuggaauc

SEQ ID NO: 2704360 - RNA, 19 nt, Artificial Sequence
  Description of Artificial Sequence: Synthetic oligonucleotide
uuucauaauuaaacuuguu

SEQ ID NO: 2704361 - RNA, 19 nt, Artificial Sequence
  Description of Artificial Sequence: Synthetic oligonucleotide
uuaugcuguaccagagaaa

SEQ ID NO: 2704362 - RNA, 19 nt, Artificial Sequence
  Description of Artificial Sequence: Synthetic oligonucleotide
acacucaugugcaagaaaa

SEQ ID NO: 2704363 - RNA, 19 nt, Artificial Sequence
  Description of Artificial Sequence: Synthetic oligonucleotide
uccaggacaggcaguaaaa

SEQ ID NO: 2704364 - RNA, 19 nt, Artificial Sequence
  Description of Artificial Sequence: Synthetic oligonucleotide
acacacacaccuaagauua

SEQ ID NO: 2704365 - RNA, 19 nt, Artificial Sequence
  Description of Artificial Sequence: Synthetic oligonucleotide
uugagaggucuagaguucc

SEQ ID NO: 2704366 - RNA, 19 nt, Artificial Sequence
  Description of Artificial Sequence: Synthetic oligonucleotide
acacaccuaagauuaugcu

SEQ ID NO: 2704367 - RNA, 19 nt, Artificial Sequence
  Description of Artificial Sequence: Synthetic oligonucleotide
ucugaggcuggguaaccug

SEQ ID NO: 2704368 - RNA, 19 nt, Artificial Sequence
  Description of Artificial Sequence: Synthetic oligonucleotide
agauuaugcuguaccagag

SEQ ID NO: 2704369 - RNA, 19 nt, Artificial Sequence
  Description of Artificial Sequence: Synthetic oligonucleotide
auagcaaugaacagcggaa

SEQ ID NO: 2704370 - RNA, 19 nt, Artificial Sequence
  Description of Artificial Sequence: Synthetic oligonucleotide
uagguauucugcagucucu

SEQ ID NO: 2704371 - RNA, 19 nt, Artificial Sequence
  Description of Artificial Sequence: Synthetic oligonucleotide
aguucaucauagcaaugaa

SEQ ID NO: 2704372 - RNA, 19 nt, Artificial Sequence
  Description of Artificial Sequence: Synthetic oligonucleotide
ucucucucucucucgacac

SEQ ID NO: 2704373 - RNA, 19 nt, Artificial Sequence
  Description of Artificial Sequence: Synthetic oligonucleotide
auuuucacuggcccaccug

SEQ ID NO: 2704374 - RNA, 19 nt, Artificial Sequence
  Description of Artificial Sequence: Synthetic oligonucleotide
cacucaugugcaagaaaag

SEQ ID NO: 2704375 - RNA, 19 nt, Artificial Sequence
  Description of Artificial Sequence: Synthetic oligonucleotide
aggacaggcaguaaaacaa

SEQ ID NO: 2704376 - RNA, 19 nt, Artificial Sequence
  Description of Artificial Sequence: Synthetic oligonucleotide
uccgcagcagccaggugag

SEQ ID NO: 2704377 - RNA, 19 nt, Artificial Sequence
  Description of Artificial Sequence: Synthetic oligonucleotide
agcucucucucucucucuc

SEQ ID NO: 2704378 - RNA, 19 nt, Artificial Sequence
  Description of Artificial Sequence: Synthetic oligonucleotide
gucuagaguuccauggugc

SEQ ID NO: 2704379 - RNA, 19 nt, Artificial Sequence
  Description of Artificial Sequence: Synthetic oligonucleotide
augaauugcugucauucua

SEQ ID NO: 2704380 - RNA, 19 nt, Artificial Sequence
  Description of Artificial Sequence: Synthetic oligonucleotide
ugcucuuuugcuaggccau

SEQ ID NO: 2704381 - RNA, 19 nt, Artificial Sequence
  Description of Artificial Sequence: Synthetic oligonucleotide
uauuuucacuggcccaccu

SEQ ID NO: 2704382 - RNA, 19 nt, Artificial Sequence
  Description of Artificial Sequence: Synthetic oligonucleotide
uuggcauucuguguugaga

SEQ ID NO: 2704383 - RNA, 19 nt, Artificial Sequence
  Description of Artificial Sequence: Synthetic oligonucleotide
agucucucagaagaguuca

SEQ ID NO: 2704384 - RNA, 19 nt, Artificial Sequence
  Description of Artificial Sequence: Synthetic oligonucleotide
cagggaagggcccucuagg

SEQ ID NO: 2704385 - RNA, 19 nt, Artificial Sequence
  Description of Artificial Sequence: Synthetic oligonucleotide
ucuugguaccgguuuucug

SEQ ID NO: 2704386 - RNA, 19 nt, Artificial Sequence
  Description of Artificial Sequence: Synthetic oligonucleotide
ugcuccugaugaauugcug

SEQ ID NO: 2704387 - RNA, 19 nt, Artificial Sequence
  Description of Artificial Sequence: Synthetic oligonucleotide
aagaaaggagccugcucuu

SEQ ID NO: 2704388 - RNA, 19 nt, Artificial Sequence
  Description of Artificial Sequence: Synthetic oligonucleotide
agauagcagcuuccaggac

SEQ ID NO: 2704389 - RNA, 19 nt, Artificial Sequence
  Description of Artificial Sequence: Synthetic oligonucleotide
ucuagcucucucucucucu

SEQ ID NO: 2704390 - RNA, 19 nt, Artificial Sequence
  Description of Artificial Sequence: Synthetic oligonucleotide
agguauucugcagucucuc

SEQ ID NO: 2704391 - RNA, 19 nt, Artificial Sequence
  Description of Artificial Sequence: Synthetic oligonucleotide
cuugguaccgguuuucugu

SEQ ID NO: 2704392 - RNA, 19 nt, Artificial Sequence
  Description of Artificial Sequence: Synthetic oligonucleotide
gugcaagaaaagauagcag

SEQ ID NO: 2704393 - RNA, 19 nt, Artificial Sequence
  Description of Artificial Sequence: Synthetic oligonucleotide
uucugcagucucucagaag

SEQ ID NO: 2704394 - RNA, 19 nt, Artificial Sequence
  Description of Artificial Sequence: Synthetic oligonucleotide
cuccugaugaauugcuguc

SEQ ID NO: 2704395 - RNA, 19 nt, Artificial Sequence
  Description of Artificial Sequence: Synthetic oligonucleotide
cucuagguauucugcaguc

SEQ ID NO: 2704396 - RNA, 19 nt, Artificial Sequence
  Description of Artificial Sequence: Synthetic oligonucleotide
aaaagggcugacacucaug

SEQ ID NO: 2704397 - RNA, 19 nt, Artificial Sequence
  Description of Artificial Sequence: Synthetic oligonucleotide
guugaagaaaggagccugc

SEQ ID NO: 2704398 - RNA, 19 nt, Artificial Sequence
  Description of Artificial Sequence: Synthetic oligonucleotide
aauccacuuggcauucugu

SEQ ID NO: 2704399 - RNA, 19 nt, Artificial Sequence
  Description of Artificial Sequence: Synthetic oligonucleotide
caggcaguaaaacaaggaa

SEQ ID NO: 2704400 - RNA, 19 nt, Artificial Sequence
  Description of Artificial Sequence: Synthetic oligonucleotide
acacacacacacacacacc

SEQ ID NO: 2704401 - RNA, 19 nt, Artificial Sequence
  Description of Artificial Sequence: Synthetic oligonucleotide
ucuucuugguaccgguuuu

SEQ ID NO: 2704402 - RNA, 19 nt, Artificial Sequence
  Description of Artificial Sequence: Synthetic oligonucleotide
gaaacuggucuucuuggua

SEQ ID NO: 2704403 - RNA, 19 nt, Artificial Sequence
  Description of Artificial Sequence: Synthetic oligonucleotide
aggugaggugacucugagg

SEQ ID NO: 2704404 - RNA, 19 nt, Artificial Sequence
  Description of Artificial Sequence: Synthetic oligonucleotide
aggucuagaguuccauggu

SEQ ID NO: 2704405 - RNA, 19 nt, Artificial Sequence
  Description of Artificial Sequence: Synthetic oligonucleotide
gugucuccacaucauuugc

SEQ ID NO: 2704406 - RNA, 19 nt, Artificial Sequence
  Description of Artificial Sequence: Synthetic oligonucleotide
aagggcugacacucaugug

SEQ ID NO: 2704407 - RNA, 19 nt, Artificial Sequence
  Description of Artificial Sequence: Synthetic oligonucleotide
aggcaguaaaacaaggaaa

SEQ ID NO: 2704408 - RNA, 19 nt, Artificial Sequence
  Description of Artificial Sequence: Synthetic oligonucleotide
ugaggcuggguaaccugug

SEQ ID NO: 2704409 - RNA, 19 nt, Artificial Sequence
  Description of Artificial Sequence: Synthetic oligonucleotide
cauuauaucccgugcaagu

SEQ ID NO: 2704410 - RNA, 19 nt, Artificial Sequence
  Description of Artificial Sequence: Synthetic oligonucleotide
gucauuauaucccgugcaa

SEQ ID NO: 2704411 - RNA, 19 nt, Artificial Sequence
  Description of Artificial Sequence: Synthetic oligonucleotide
ugagaggucuagaguucca

SEQ ID NO: 2704412 - RNA, 19 nt, Artificial Sequence
  Description of Artificial Sequence: Synthetic oligonucleotide
ucucucucucucgacacac

SEQ ID NO: 2704413 - RNA, 19 nt, Artificial Sequence
  Description of Artificial Sequence: Synthetic oligonucleotide
ugcucuccgcagcagccag

SEQ ID NO: 2704414 - RNA, 19 nt, Artificial Sequence
  Description of Artificial Sequence: Synthetic oligonucleotide
ucuccacaucauuugcuuc

SEQ ID NO: 2704415 - RNA, 19 nt, Artificial Sequence
  Description of Artificial Sequence: Synthetic oligonucleotide
cuuggcauucuguguugag

SEQ ID NO: 2704416 - RNA, 19 nt, Artificial Sequence
  Description of Artificial Sequence: Synthetic oligonucleotide
caggacaggcaguaaaaca

SEQ ID NO: 2704417 - RNA, 19 nt, Artificial Sequence
  Description of Artificial Sequence: Synthetic oligonucleotide
uugaagaaaggagccugcu

SEQ ID NO: 2704418 - RNA, 19 nt, Artificial Sequence
  Description of Artificial Sequence: Synthetic oligonucleotide
ggcaguaaaacaaggaaaa

SEQ ID NO: 2704419 - RNA, 19 nt, Artificial Sequence
  Description of Artificial Sequence: Synthetic oligonucleotide
acaggcaguaaaacaagga

SEQ ID NO: 2704420 - RNA, 19 nt, Artificial Sequence
  Description of Artificial Sequence: Synthetic oligonucleotide
ucuagguauucugcagucu

SEQ ID NO: 2704421 - RNA, 19 nt, Artificial Sequence
  Description of Artificial Sequence: Synthetic oligonucleotide
ucucucagaagaguucauc

SEQ ID NO: 2704422 - RNA, 19 nt, Artificial Sequence
  Description of Artificial Sequence: Synthetic oligonucleotide
accuaagauuaugcuguac

SEQ ID NO: 2704423 - RNA, 19 nt, Artificial Sequence
  Description of Artificial Sequence: Synthetic oligonucleotide
uucuagcucucucucucuc

SEQ ID NO: 2704424 - RNA, 19 nt, Artificial Sequence
  Description of Artificial Sequence: Synthetic oligonucleotide
cuagcucucucucucucuc

SEQ ID NO: 2704425 - RNA, 19 nt, Artificial Sequence
  Description of Artificial Sequence: Synthetic oligonucleotide
acacacaccuaagauuaug

SEQ ID NO: 2704426 - RNA, 19 nt, Artificial Sequence
  Description of Artificial Sequence: Synthetic oligonucleotide
uggugcucuccgcagcagc

SEQ ID NO: 2704427 - RNA, 19 nt, Artificial Sequence
  Description of Artificial Sequence: Synthetic oligonucleotide
augaacagcggaagaaacu

SEQ ID NO: 2704428 - RNA, 19 nt, Artificial Sequence
  Description of Artificial Sequence: Synthetic oligonucleotide
uccugcgugugucuccaca

SEQ ID NO: 2704429 - RNA, 19 nt, Artificial Sequence
  Description of Artificial Sequence: Synthetic oligonucleotide
uggucuucuugguaccggu

SEQ ID NO: 2704430 - RNA, 19 nt, Artificial Sequence
  Description of Artificial Sequence: Synthetic oligonucleotide
auucuagcucucucucucu

SEQ ID NO: 2704431 - RNA, 19 nt, Artificial Sequence
  Description of Artificial Sequence: Synthetic oligonucleotide
accugcuccugaugaauug

SEQ ID NO: 2704432 - RNA, 19 nt, Artificial Sequence
  Description of Artificial Sequence: Synthetic oligonucleotide
uuucacuggcccaccugcu

SEQ ID NO: 2704433 - RNA, 19 nt, Artificial Sequence
  Description of Artificial Sequence: Synthetic oligonucleotide
ugacucugaggcuggguaa

SEQ ID NO: 2704434 - RNA, 19 nt, Artificial Sequence
  Description of Artificial Sequence: Synthetic oligonucleotide
uugcuaggccaugaggcug

SEQ ID NO: 2704435 - RNA, 19 nt, Artificial Sequence
  Description of Artificial Sequence: Synthetic oligonucleotide
cauucuguguugagagguc

SEQ ID NO: 2704436 - RNA, 19 nt, Artificial Sequence
  Description of Artificial Sequence: Synthetic oligonucleotide
agcggaagaaacuggucuu

SEQ ID NO: 2704437 - RNA, 19 nt, Artificial Sequence
  Description of Artificial Sequence: Synthetic oligonucleotide
cucaugugcaagaaaagau

SEQ ID NO: 2704438 - RNA, 19 nt, Artificial Sequence
  Description of Artificial Sequence: Synthetic oligonucleotide
ugcagucucucagaagagu

SEQ ID NO: 2704439 - RNA, 19 nt, Artificial Sequence
  Description of Artificial Sequence: Synthetic oligonucleotide
auucuguguugagaggucu

SEQ ID NO: 2704440 - RNA, 19 nt, Artificial Sequence
  Description of Artificial Sequence: Synthetic oligonucleotide
ggucuagaguuccauggug

SEQ ID NO: 2704441 - RNA, 19 nt, Artificial Sequence
  Description of Artificial Sequence: Synthetic oligonucleotide
gguuuucuguuauuuucac

SEQ ID NO: 2704442 - RNA, 19 nt, Artificial Sequence
  Description of Artificial Sequence: Synthetic oligonucleotide
acuggucuucuugguaccg

SEQ ID NO: 2704443 - RNA, 19 nt, Artificial Sequence
  Description of Artificial Sequence: Synthetic oligonucleotide
cugacacucaugugcaaga

SEQ ID NO: 2704444 - RNA, 19 nt, Artificial Sequence
  Description of Artificial Sequence: Synthetic oligonucleotide
cuccgcagcagccagguga

SEQ ID NO: 2704445 - RNA, 19 nt, Artificial Sequence
  Description of Artificial Sequence: Synthetic oligonucleotide
acucugaggcuggguaacc

SEQ ID NO: 2704446 - RNA, 19 nt, Artificial Sequence
  Description of Artificial Sequence: Synthetic oligonucleotide
cucagaagaguucaucaua

SEQ ID NO: 2704447 - RNA, 19 nt, Artificial Sequence
  Description of Artificial Sequence: Synthetic oligonucleotide
cagucucucagaagaguuc

SEQ ID NO: 2704448 - RNA, 19 nt, Artificial Sequence
  Description of Artificial Sequence: Synthetic oligonucleotide
uucacuggcccaccugcuc

SEQ ID NO: 2704449 - RNA, 19 nt, Artificial Sequence
  Description of Artificial Sequence: Synthetic oligonucleotide
cugcucuuuugcuaggcca

SEQ ID NO: 2704450 - RNA, 19 nt, Artificial Sequence
  Description of Artificial Sequence: Synthetic oligonucleotide
cacacacacacaccuaaga

SEQ ID NO: 2704451 - RNA, 19 nt, Artificial Sequence
  Description of Artificial Sequence: Synthetic oligonucleotide
cacacacacacacacaccu

SEQ ID NO: 2704452 - RNA, 19 nt, Artificial Sequence
  Description of Artificial Sequence: Synthetic oligonucleotide
accagagaaaagggcugac

SEQ ID NO: 2704453 - RNA, 19 nt, Artificial Sequence
  Description of Artificial Sequence: Synthetic oligonucleotide
uucuguguugagaggucua

SEQ ID NO: 2704454 - RNA, 19 nt, Artificial Sequence
  Description of Artificial Sequence: Synthetic oligonucleotide
acagcggaagaaacugguc

SEQ ID NO: 2704455 - RNA, 19 nt, Artificial Sequence
  Description of Artificial Sequence: Synthetic oligonucleotide
gacacucaugugcaagaaa

SEQ ID NO: 2704456 - RNA, 19 nt, Artificial Sequence
  Description of Artificial Sequence: Synthetic oligonucleotide
ucucucucucucucucucu

SEQ ID NO: 2704457 - RNA, 19 nt, Artificial Sequence
  Description of Artificial Sequence: Synthetic oligonucleotide
cacacacacacacaccuaa

SEQ ID NO: 2704458 - RNA, 19 nt, Artificial Sequence
  Description of Artificial Sequence: Synthetic oligonucleotide
uaucccgugcaaguguaaa

SEQ ID NO: 2704459 - RNA, 19 nt, Artificial Sequence
  Description of Artificial Sequence: Synthetic oligonucleotide
uccacaucauuugcuucca

SEQ ID NO: 2704460 - RNA, 19 nt, Artificial Sequence
  Description of Artificial Sequence: Synthetic oligonucleotide
ggcauucuguguugagagg

SEQ ID NO: 2704461 - RNA, 19 nt, Artificial Sequence
  Description of Artificial Sequence: Synthetic oligonucleotide
uucuugguaccgguuuucu

SEQ ID NO: 2704462 - RNA, 19 nt, Artificial Sequence
  Description of Artificial Sequence: Synthetic oligonucleotide
uggguaaccugugcuuuca

SEQ ID NO: 2704463 - RNA, 19 nt, Artificial Sequence
  Description of Artificial Sequence: Synthetic oligonucleotide
gaggugacucugaggcugg

SEQ ID NO: 2704464 - RNA, 19 nt, Artificial Sequence
  Description of Artificial Sequence: Synthetic oligonucleotide
ccgguuuucuguuauuuuc

SEQ ID NO: 2704465 - RNA, 19 nt, Artificial Sequence
  Description of Artificial Sequence: Synthetic oligonucleotide
cugcagucucucagaagag

SEQ ID NO: 2704466 - RNA, 19 nt, Artificial Sequence
  Description of Artificial Sequence: Synthetic oligonucleotide
gacucugaggcuggguaac

SEQ ID NO: 2704467 - RNA, 19 nt, Artificial Sequence
  Description of Artificial Sequence: Synthetic oligonucleotide
caggugaggugacucugag

SEQ ID NO: 2704468 - RNA, 19 nt, Artificial Sequence
  Description of Artificial Sequence: Synthetic oligonucleotide
uugguaccgguuuucuguu

SEQ ID NO: 2704469 - RNA, 19 nt, Artificial Sequence
  Description of Artificial Sequence: Synthetic oligonucleotide
guugagaggucuagaguuc

SEQ ID NO: 2704470 - RNA, 19 nt, Artificial Sequence
  Description of Artificial Sequence: Synthetic oligonucleotide
cucucucucucucucucuc

SEQ ID NO: 2704471 - RNA, 19 nt, Artificial Sequence
  Description of Artificial Sequence: Synthetic oligonucleotide
gugacucugaggcugggua

SEQ ID NO: 2704472 - RNA, 19 nt, Artificial Sequence
  Description of Artificial Sequence: Synthetic oligonucleotide
guuccauggugcucuccgc

SEQ ID NO: 2704473 - RNA, 19 nt, Artificial Sequence
  Description of Artificial Sequence: Synthetic oligonucleotide
ugacacucaugugcaagaa

SEQ ID NO: 2704474 - RNA, 19 nt, Artificial Sequence
  Description of Artificial Sequence: Synthetic oligonucleotide
aggagccugcucuuuugcu

SEQ ID NO: 2704475 - RNA, 19 nt, Artificial Sequence
  Description of Artificial Sequence: Synthetic oligonucleotide
cuggucuucuugguaccgg

SEQ ID NO: 2704476 - RNA, 19 nt, Artificial Sequence
  Description of Artificial Sequence: Synthetic oligonucleotide
caaugaacagcggaagaaa

SEQ ID NO: 2704477 - RNA, 19 nt, Artificial Sequence
  Description of Artificial Sequence: Synthetic oligonucleotide
uaccgguuuucuguuauuu

SEQ ID NO: 2704478 - RNA, 19 nt, Artificial Sequence
  Description of Artificial Sequence: Synthetic oligonucleotide
accgguuuucuguuauuuu

SEQ ID NO: 2704479 - RNA, 19 nt, Artificial Sequence
  Description of Artificial Sequence: Synthetic oligonucleotide
agaguuccauggugcucuc

SEQ ID NO: 2704480 - RNA, 19 nt, Artificial Sequence
  Description of Artificial Sequence: Synthetic oligonucleotide
aucccgugcaaguguaaaa

SEQ ID NO: 2704481 - RNA, 19 nt, Artificial Sequence
  Description of Artificial Sequence: Synthetic oligonucleotide
cacuuggcauucuguguug

SEQ ID NO: 2704482 - RNA, 19 nt, Artificial Sequence
  Description of Artificial Sequence: Synthetic oligonucleotide
ucucucucucucucucgac

SEQ ID NO: 2704483 - RNA, 19 nt, Artificial Sequence
  Description of Artificial Sequence: Synthetic oligonucleotide
gagaagcagggaagggccc

SEQ ID NO: 2704484 - RNA, 19 nt, Artificial Sequence
  Description of Artificial Sequence: Synthetic oligonucleotide
ggacaggcaguaaaacaag

SEQ ID NO: 2704485 - RNA, 19 nt, Artificial Sequence
  Description of Artificial Sequence: Synthetic oligonucleotide
agaguucaucauagcaaug

SEQ ID NO: 2704486 - RNA, 19 nt, Artificial Sequence
  Description of Artificial Sequence: Synthetic oligonucleotide
cucucucucucucucgaca

SEQ ID NO: 2704487 - RNA, 19 nt, Artificial Sequence
  Description of Artificial Sequence: Synthetic oligonucleotide
augaggcuggaauccacuu

SEQ ID NO: 2704488 - RNA, 19 nt, Artificial Sequence
  Description of Artificial Sequence: Synthetic oligonucleotide
gcugacacucaugugcaag

SEQ ID NO: 2704489 - RNA, 19 nt, Artificial Sequence
  Description of Artificial Sequence: Synthetic oligonucleotide
gaaaagggcugacacucau

SEQ ID NO: 2704490 - RNA, 19 nt, Artificial Sequence
  Description of Artificial Sequence: Synthetic oligonucleotide
cuggguaaccugugcuuuc

SEQ ID NO: 2704491 - RNA, 19 nt, Artificial Sequence
  Description of Artificial Sequence: Synthetic oligonucleotide
acacacacacacaccuaag

SEQ ID NO: 2704492 - RNA, 19 nt, Artificial Sequence
  Description of Artificial Sequence: Synthetic oligonucleotide
aguuggguccugcgugugu

SEQ ID NO: 2704493 - RNA, 19 nt, Artificial Sequence
  Description of Artificial Sequence: Synthetic oligonucleotide
agccaggugaggugacucu

SEQ ID NO: 2704494 - RNA, 19 nt, Artificial Sequence
  Description of Artificial Sequence: Synthetic oligonucleotide
uggaauccacuuggcauuc

SEQ ID NO: 2704495 - RNA, 19 nt, Artificial Sequence
  Description of Artificial Sequence: Synthetic oligonucleotide
agaagcagggaagggcccu

SEQ ID NO: 2704496 - RNA, 19 nt, Artificial Sequence
  Description of Artificial Sequence: Synthetic oligonucleotide
cuagaguuccauggugcuc

SEQ ID NO: 2704497 - RNA, 19 nt, Artificial Sequence
  Description of Artificial Sequence: Synthetic oligonucleotide
gguaaccugugcuuucaga

SEQ ID NO: 2704498 - RNA, 19 nt, Artificial Sequence
  Description of Artificial Sequence: Synthetic oligonucleotide
acccaguuggguccugcgu

SEQ ID NO: 2704499 - RNA, 19 nt, Artificial Sequence
  Description of Artificial Sequence: Synthetic oligonucleotide
cagcggaagaaacuggucu

SEQ ID NO: 2704500 - RNA, 19 nt, Artificial Sequence
  Description of Artificial Sequence: Synthetic oligonucleotide
cucgacacacacacacaca

SEQ ID NO: 2704501 - RNA, 19 nt, Artificial Sequence
  Description of Artificial Sequence: Synthetic oligonucleotide
uagcucucucucucucucu

SEQ ID NO: 2704502 - RNA, 19 nt, Artificial Sequence
  Description of Artificial Sequence: Synthetic oligonucleotide
cuucuugguaccgguuuuc

SEQ ID NO: 2704503 - RNA, 19 nt, Artificial Sequence
  Description of Artificial Sequence: Synthetic oligonucleotide
aagggcccucuagguauuc

SEQ ID NO: 2704504 - RNA, 19 nt, Artificial Sequence
  Description of Artificial Sequence: Synthetic oligonucleotide
guguugagaggucuagagu

SEQ ID NO: 2704505 - RNA, 19 nt, Artificial Sequence
  Description of Artificial Sequence: Synthetic oligonucleotide
agaaaagggcugacacuca

SEQ ID NO: 2704506 - RNA, 19 nt, Artificial Sequence
  Description of Artificial Sequence: Synthetic oligonucleotide
gcuggaauccacuuggcau

SEQ ID NO: 2704507 - RNA, 19 nt, Artificial Sequence
  Description of Artificial Sequence: Synthetic oligonucleotide
aggcuggaauccacuuggc

SEQ ID NO: 2704508 - RNA, 19 nt, Artificial Sequence
  Description of Artificial Sequence: Synthetic oligonucleotide
cacacacacaccuaagauu

SEQ ID NO: 2704509 - RNA, 19 nt, Artificial Sequence
  Description of Artificial Sequence: Synthetic oligonucleotide
cucucucucucucucucga

SEQ ID NO: 2704510 - RNA, 19 nt, Artificial Sequence
  Description of Artificial Sequence: Synthetic oligonucleotide
ugcuuccauguugaagaaa

SEQ ID NO: 2704511 - RNA, 19 nt, Artificial Sequence
  Description of Artificial Sequence: Synthetic oligonucleotide
acuuggcauucuguguuga

SEQ ID NO: 2704512 - RNA, 19 nt, Artificial Sequence
  Description of Artificial Sequence: Synthetic oligonucleotide
gcagggaagggcccucuag

SEQ ID NO: 2704513 - RNA, 19 nt, Artificial Sequence
  Description of Artificial Sequence: Synthetic oligonucleotide
gcaagaaaagauagcagcu

SEQ ID NO: 2704514 - RNA, 19 nt, Artificial Sequence
  Description of Artificial Sequence: Synthetic oligonucleotide
cucucgacacacacacaca

SEQ ID NO: 2704515 - RNA, 19 nt, Artificial Sequence
  Description of Artificial Sequence: Synthetic oligonucleotide
gguauucugcagucucuca

SEQ ID NO: 2704516 - RNA, 19 nt, Artificial Sequence
  Description of Artificial Sequence: Synthetic oligonucleotide
ggccaugaggcuggaaucc

SEQ ID NO: 2704517 - RNA, 19 nt, Artificial Sequence
  Description of Artificial Sequence: Synthetic oligonucleotide
cccucuagguauucugcag

SEQ ID NO: 2704518 - RNA, 19 nt, Artificial Sequence
  Description of Artificial Sequence: Synthetic oligonucleotide
aaaacccaguuggguccug

SEQ ID NO: 2704519 - RNA, 19 nt, Artificial Sequence
  Description of Artificial Sequence: Synthetic oligonucleotide
cccaguuggguccugcgug

SEQ ID NO: 2704520 - RNA, 19 nt, Artificial Sequence
  Description of Artificial Sequence: Synthetic oligonucleotide
augcuguaccagagaaaag

SEQ ID NO: 2704521 - RNA, 19 nt, Artificial Sequence
  Description of Artificial Sequence: Synthetic oligonucleotide
gaaaggagccugcucuuuu

SEQ ID NO: 2704522 - RNA, 19 nt, Artificial Sequence
  Description of Artificial Sequence: Synthetic oligonucleotide
acacacacacacacacaca

SEQ ID NO: 2704523 - RNA, 19 nt, Artificial Sequence
  Description of Artificial Sequence: Synthetic oligonucleotide
cuggaauccacuuggcauu

SEQ ID NO: 2704524 - RNA, 19 nt, Artificial Sequence
  Description of Artificial Sequence: Synthetic oligonucleotide
ggaagggcccucuagguau

SEQ ID NO: 2704525 - RNA, 19 nt, Artificial Sequence
  Description of Artificial Sequence: Synthetic oligonucleotide
gggcccucuagguauucug

SEQ ID NO: 2704526 - RNA, 19 nt, Artificial Sequence
  Description of Artificial Sequence: Synthetic oligonucleotide
agaaaggagccugcucuuu

SEQ ID NO: 2704527 - RNA, 19 nt, Artificial Sequence
  Description of Artificial Sequence: Synthetic oligonucleotide
caugaggcuggaauccacu

SEQ ID NO: 2704528 - RNA, 19 nt, Artificial Sequence
  Description of Artificial Sequence: Synthetic oligonucleotide
ggugcucuccgcagcagcc

SEQ ID NO: 2704529 - RNA, 19 nt, Artificial Sequence
  Description of Artificial Sequence: Synthetic oligonucleotide
cugcgugugucuccacauc

SEQ ID NO: 2704530 - RNA, 19 nt, Artificial Sequence
  Description of Artificial Sequence: Synthetic oligonucleotide
gcuccugaugaauugcugu

SEQ ID NO: 2704531 - RNA, 19 nt, Artificial Sequence
  Description of Artificial Sequence: Synthetic oligonucleotide
ccugcuccugaugaauugc

SEQ ID NO: 2704532 - RNA, 19 nt, Artificial Sequence
  Description of Artificial Sequence: Synthetic oligonucleotide
ccugcucuuuugcuaggcc

SEQ ID NO: 2704533 - RNA, 19 nt, Artificial Sequence
  Description of Artificial Sequence: Synthetic oligonucleotide
ggcuggaauccacuuggca

SEQ ID NO: 2704534 - RNA, 19 nt, Artificial Sequence
  Description of Artificial Sequence: Synthetic oligonucleotide
gaguuccauggugcucucc

SEQ ID NO: 2704535 - RNA, 19 nt, Artificial Sequence
  Description of Artificial Sequence: Synthetic oligonucleotide
gcauucuguguugagaggu

SEQ ID NO: 2704536 - RNA, 19 nt, Artificial Sequence
  Description of Artificial Sequence: Synthetic oligonucleotide
caagaaaagauagcagcuu

SEQ ID NO: 2704537 - RNA, 19 nt, Artificial Sequence
  Description of Artificial Sequence: Synthetic oligonucleotide
ggcccucuagguauucugc

SEQ ID NO: 2704538 - RNA, 19 nt, Artificial Sequence
  Description of Artificial Sequence: Synthetic oligonucleotide
agcagccaggugaggugac

SEQ ID NO: 2704539 - RNA, 19 nt, Artificial Sequence
  Description of Artificial Sequence: Synthetic oligonucleotide
cugaggcuggguaaccugu

SEQ ID NO: 2704540 - RNA, 19 nt, Artificial Sequence
  Description of Artificial Sequence: Synthetic oligonucleotide
ugguaccgguuuucuguua

SEQ ID NO: 2704541 - RNA, 19 nt, Artificial Sequence
  Description of Artificial Sequence: Synthetic oligonucleotide
ucuccgcagcagccaggug

SEQ ID NO: 2704542 - RNA, 19 nt, Artificial Sequence
  Description of Artificial Sequence: Synthetic oligonucleotide
cagccaggugaggugacuc

SEQ ID NO: 2704543 - RNA, 19 nt, Artificial Sequence
  Description of Artificial Sequence: Synthetic oligonucleotide
ggguaaccugugcuuucag

SEQ ID NO: 2704544 - RNA, 19 nt, Artificial Sequence
  Description of Artificial Sequence: Synthetic oligonucleotide
uggcccaccugcuccugau

SEQ ID NO: 2704545 - RNA, 19 nt, Artificial Sequence
  Description of Artificial Sequence: Synthetic oligonucleotide
auggugcucuccgcagcag

SEQ ID NO: 2704546 - RNA, 19 nt, Artificial Sequence
  Description of Artificial Sequence: Synthetic oligonucleotide
cucucucucucucgacaca

SEQ ID NO: 2704547 - RNA, 19 nt, Artificial Sequence
  Description of Artificial Sequence: Synthetic oligonucleotide
cuguguugagaggucuaga

SEQ ID NO: 2704548 - RNA, 19 nt, Artificial Sequence
  Description of Artificial Sequence: Synthetic oligonucleotide
ccaggacaggcaguaaaac

SEQ ID NO: 2704549 - RNA, 19 nt, Artificial Sequence
  Description of Artificial Sequence: Synthetic oligonucleotide
uggguccugcgugugucuc

SEQ ID NO: 2704550 - RNA, 19 nt, Artificial Sequence
  Description of Artificial Sequence: Synthetic oligonucleotide
gcccucuagguauucugca

SEQ ID NO: 2704551 - RNA, 19 nt, Artificial Sequence
  Description of Artificial Sequence: Synthetic oligonucleotide
gguaccgguuuucuguuau

SEQ ID NO: 2704552 - RNA, 19 nt, Artificial Sequence
  Description of Artificial Sequence: Synthetic oligonucleotide
gcccaccugcuccugauga

SEQ ID NO: 2704553 - RNA, 19 nt, Artificial Sequence
  Description of Artificial Sequence: Synthetic oligonucleotide
cugcuccugaugaauugcu

SEQ ID NO: 2704554 - RNA, 19 nt, Artificial Sequence
  Description of Artificial Sequence: Synthetic oligonucleotide
cauuugcuuccauguugaa

SEQ ID NO: 2704555 - RNA, 19 nt, Artificial Sequence
  Description of Artificial Sequence: Synthetic oligonucleotide
ggguccugcgugugucucc

SEQ ID NO: 2704556 - RNA, 19 nt, Artificial Sequence
  Description of Artificial Sequence: Synthetic oligonucleotide
gggcugacacucaugugca

SEQ ID NO: 2704557 - RNA, 19 nt, Artificial Sequence
  Description of Artificial Sequence: Synthetic oligonucleotide
caucauuugcuuccauguu

SEQ ID NO: 2704558 - RNA, 19 nt, Artificial Sequence
  Description of Artificial Sequence: Synthetic oligonucleotide
cucucucgacacacacaca

SEQ ID NO: 2704559 - RNA, 19 nt, Artificial Sequence
  Description of Artificial Sequence: Synthetic oligonucleotide
gccaggugaggugacucug

SEQ ID NO: 2704560 - RNA, 19 nt, Artificial Sequence
  Description of Artificial Sequence: Synthetic oligonucleotide
cagcagccaggugagguga

SEQ ID NO: 2704561 - RNA, 19 nt, Artificial Sequence
  Description of Artificial Sequence: Synthetic oligonucleotide
acacacacacacacaccua

SEQ ID NO: 2704562 - RNA, 19 nt, Artificial Sequence
  Description of Artificial Sequence: Synthetic oligonucleotide
agggcccucuagguauucu

SEQ ID NO: 2704563 - RNA, 19 nt, Artificial Sequence
  Description of Artificial Sequence: Synthetic oligonucleotide
auaucccgugcaaguguaa

SEQ ID NO: 2704564 - RNA, 19 nt, Artificial Sequence
  Description of Artificial Sequence: Synthetic oligonucleotide
gcuuccaggacaggcagua

SEQ ID NO: 2704565 - RNA, 19 nt, Artificial Sequence
  Description of Artificial Sequence: Synthetic oligonucleotide
caguuggguccugcgugug

SEQ ID NO: 2704566 - RNA, 19 nt, Artificial Sequence
  Description of Artificial Sequence: Synthetic oligonucleotide
gggaagggcccucuaggua

SEQ ID NO: 2704567 - RNA, 19 nt, Artificial Sequence
  Description of Artificial Sequence: Synthetic oligonucleotide
gguccugcgugugucucca

SEQ ID NO: 2704568 - RNA, 19 nt, Artificial Sequence
  Description of Artificial Sequence: Synthetic oligonucleotide
ccagagaaaagggcugaca

SEQ ID NO: 2704569 - RNA, 19 nt, Artificial Sequence
  Description of Artificial Sequence: Synthetic oligonucleotide
gugcucuccgcagcagcca

SEQ ID NO: 2704570 - RNA, 19 nt, Artificial Sequence
  Description of Artificial Sequence: Synthetic oligonucleotide
ccucuagguauucugcagu

SEQ ID NO: 2704571 - RNA, 19 nt, Artificial Sequence
  Description of Artificial Sequence: Synthetic oligonucleotide
ccaggugaggugacucuga

SEQ ID NO: 2704572 - RNA, 19 nt, Artificial Sequence
  Description of Artificial Sequence: Synthetic oligonucleotide
cugaugaauugcugucauu

SEQ ID NO: 2704573 - RNA, 19 nt, Artificial Sequence
  Description of Artificial Sequence: Synthetic oligonucleotide
gccaugaggcuggaaucca

SEQ ID NO: 2704574 - RNA, 19 nt, Artificial Sequence
  Description of Artificial Sequence: Synthetic oligonucleotide
ggcccaccugcuccugaug

SEQ ID NO: 2704575 - RNA, 19 nt, Artificial Sequence
  Description of Artificial Sequence: Synthetic oligonucleotide
gcucuccgcagcagccagg

SEQ ID NO: 2704576 - RNA, 19 nt, Artificial Sequence
  Description of Artificial Sequence: Synthetic oligonucleotide
cuguuguaguuuugucauu

SEQ ID NO: 2704577 - RNA, 19 nt, Artificial Sequence
  Description of Artificial Sequence: Synthetic oligonucleotide
cucugaggcuggguaaccu

SEQ ID NO: 2704578 - RNA, 19 nt, Artificial Sequence
  Description of Artificial Sequence: Synthetic oligonucleotide
cucuccgcagcagccaggu

SEQ ID NO: 2704579 - RNA, 19 nt, Artificial Sequence
  Description of Artificial Sequence: Synthetic oligonucleotide
caccugcuccugaugaauu

SEQ ID NO: 2704580 - RNA, 19 nt, Artificial Sequence
  Description of Artificial Sequence: Synthetic oligonucleotide
ccugaugaauugcugucau

SEQ ID NO: 2704581 - RNA, 19 nt, Artificial Sequence
  Description of Artificial Sequence: Synthetic oligonucleotide
ccacuuggcauucuguguu

SEQ ID NO: 2704582 - RNA, 19 nt, Artificial Sequence
  Description of Artificial Sequence: Synthetic oligonucleotide
guaccgguuuucuguuauu

SEQ ID NO: 2704583 - RNA, 19 nt, Artificial Sequence
  Description of Artificial Sequence: Synthetic oligonucleotide
cuuccaggacaggcaguaa

SEQ ID NO: 2704584 - RNA, 19 nt, Artificial Sequence
  Description of Artificial Sequence: Synthetic oligonucleotide
ggcuggguaaccugugcuu

SEQ ID NO: 2704585 - RNA, 19 nt, Artificial Sequence
  Description of Artificial Sequence: Synthetic oligonucleotide
cacacacaccuaagauuau

SEQ ID NO: 2704586 - RNA, 19 nt, Artificial Sequence
  Description of Artificial Sequence: Synthetic oligonucleotide
guccugcgugugucuccac

SEQ ID NO: 2704587 - RNA, 19 nt, Artificial Sequence
  Description of Artificial Sequence: Synthetic oligonucleotide
cgacacacacacacacaca

SEQ ID NO: 2704588 - RNA, 19 nt, Artificial Sequence
  Description of Artificial Sequence: Synthetic oligonucleotide
ggcugacacucaugugcaa

SEQ ID NO: 2704589 - RNA, 19 nt, Artificial Sequence
  Description of Artificial Sequence: Synthetic oligonucleotide
cacuggcccaccugcuccu

SEQ ID NO: 2704590 - RNA, 19 nt, Artificial Sequence
  Description of Artificial Sequence: Synthetic oligonucleotide
gcucucucucucucucucu

SEQ ID NO: 2704591 - RNA, 19 nt, Artificial Sequence
  Description of Artificial Sequence: Synthetic oligonucleotide
gaagggcccucuagguauu

SEQ ID NO: 2704592 - RNA, 19 nt, Artificial Sequence
  Description of Artificial Sequence: Synthetic oligonucleotide
gcuggguaaccugugcuuu

SEQ ID NO: 2704593 - RNA, 19 nt, Artificial Sequence
  Description of Artificial Sequence: Synthetic oligonucleotide
ccaguuggguccugcgugu

SEQ ID NO: 2704594 - RNA, 19 nt, Artificial Sequence
  Description of Artificial Sequence: Synthetic oligonucleotide
ccugcgugugucuccacau

SEQ ID NO: 2704595 - RNA, 19 nt, Artificial Sequence
  Description of Artificial Sequence: Synthetic oligonucleotide
cuaggccaugaggcuggaa

SEQ ID NO: 2704596 - RNA, 19 nt, Artificial Sequence
  Description of Artificial Sequence: Synthetic oligonucleotide
ggucuucuugguaccgguu

SEQ ID NO: 2704597 - RNA, 19 nt, Artificial Sequence
  Description of Artificial Sequence: Synthetic oligonucleotide
gcgugugucuccacaucau

SEQ ID NO: 2704598 - RNA, 19 nt, Artificial Sequence
  Description of Artificial Sequence: Synthetic oligonucleotide
gcagccaggugaggugacu

SEQ ID NO: 2704599 - RNA, 19 nt, Artificial Sequence
  Description of Artificial Sequence: Synthetic oligonucleotide
gcuaggccaugaggcugga

SEQ ID NO: 2704600 - RNA, 19 nt, Artificial Sequence
  Description of Artificial Sequence: Synthetic oligonucleotide
ccgcagcagccaggugagg

SEQ ID NO: 2704601 - RNA, 19 nt, Artificial Sequence
  Description of Artificial Sequence: Synthetic oligonucleotide
ccacaucauuugcuuccau

SEQ ID NO: 2704602 - RNA, 19 nt, Artificial Sequence
  Description of Artificial Sequence: Synthetic oligonucleotide
ucauccuccaacacgaugg

SEQ ID NO: 2704603 - RNA, 19 nt, Artificial Sequence
  Description of Artificial Sequence: Synthetic oligonucleotide
aacacgauggugaacuggc

SEQ ID NO: 2704604 - RNA, 19 nt, Artificial Sequence
  Description of Artificial Sequence: Synthetic oligonucleotide
cugagaacucuucaaagcc

SEQ ID NO: 2704605 - RNA, 19 nt, Artificial Sequence
  Description of Artificial Sequence: Synthetic oligonucleotide
uccuccaacacgaugguga

SEQ ID NO: 2704606 - RNA, 19 nt, Artificial Sequence
  Description of Artificial Sequence: Synthetic oligonucleotide
ugaaccacccagaccaccg

SEQ ID NO: 2704607 - RNA, 19 nt, Artificial Sequence
  Description of Artificial Sequence: Synthetic oligonucleotide
ucuauucaguucccguugg

SEQ ID NO: 2704608 - RNA, 19 nt, Artificial Sequence
  Description of Artificial Sequence: Synthetic oligonucleotide
uucuauucaguucccguug

SEQ ID NO: 2704609 - RNA, 19 nt, Artificial Sequence
  Description of Artificial Sequence: Synthetic oligonucleotide
agagcuugguacuuucuuc

SEQ ID NO: 2704610 - RNA, 19 nt, Artificial Sequence
  Description of Artificial Sequence: Synthetic oligonucleotide
acgauggugaacuggcugg

SEQ ID NO: 2704611 - RNA, 19 nt, Artificial Sequence
  Description of Artificial Sequence: Synthetic oligonucleotide
uccaacacgauggugaacu

SEQ ID NO: 2704612 - RNA, 19 nt, Artificial Sequence
  Description of Artificial Sequence: Synthetic oligonucleotide
auggugaacuggcuggccc

SEQ ID NO: 2704613 - RNA, 19 nt, Artificial Sequence
  Description of Artificial Sequence: Synthetic oligonucleotide
uauucaguucccguuggcg

SEQ ID NO: 2704614 - RNA, 19 nt, Artificial Sequence
  Description of Artificial Sequence: Synthetic oligonucleotide
guuaacgaggcucccaccc

SEQ ID NO: 2704615 - RNA, 19 nt, Artificial Sequence
  Description of Artificial Sequence: Synthetic oligonucleotide
uuaacgaggcucccacccg

SEQ ID NO: 2704616 - RNA, 19 nt, Artificial Sequence
  Description of Artificial Sequence: Synthetic oligonucleotide
gaaccugcgcuccugcugg

SEQ ID NO: 2704617 - RNA, 19 nt, Artificial Sequence
  Description of Artificial Sequence: Synthetic oligonucleotide
gacaucugugccuuggcug

SEQ ID NO: 2704618 - RNA, 19 nt, Artificial Sequence
  Description of Artificial Sequence: Synthetic oligonucleotide
gucucuuccgcccacuggg

SEQ ID NO: 2704619 - RNA, 19 nt, Artificial Sequence
  Description of Artificial Sequence: Synthetic oligonucleotide
uuggcugccgucauccucc

SEQ ID NO: 2704620 - RNA, 19 nt, Artificial Sequence
  Description of Artificial Sequence: Synthetic oligonucleotide
aaacuccacuucugucucc

SEQ ID NO: 2704621 - RNA, 19 nt, Artificial Sequence
  Description of Artificial Sequence: Synthetic oligonucleotide
aguucugggguuaacgagg

SEQ ID NO: 2704622 - RNA, 19 nt, Artificial Sequence
  Description of Artificial Sequence: Synthetic oligonucleotide
ucuucuauucaguucccgu

SEQ ID NO: 2704623 - RNA, 19 nt, Artificial Sequence
  Description of Artificial Sequence: Synthetic oligonucleotide
aguccugaaccacccagac

SEQ ID NO: 2704624 - RNA, 19 nt, Artificial Sequence
  Description of Artificial Sequence: Synthetic oligonucleotide
gauguggccuccaaacagg

SEQ ID NO: 2704625 - RNA, 19 nt, Artificial Sequence
  Description of Artificial Sequence: Synthetic oligonucleotide
cagaccaccggacacaaac

SEQ ID NO: 2704626 - RNA, 19 nt, Artificial Sequence
  Description of Artificial Sequence: Synthetic oligonucleotide
uguccuuuggggaggagaa

SEQ ID NO: 2704627 - RNA, 19 nt, Artificial Sequence
  Description of Artificial Sequence: Synthetic oligonucleotide
caggauguggccuccaaac

SEQ ID NO: 2704628 - RNA, 19 nt, Artificial Sequence
  Description of Artificial Sequence: Synthetic oligonucleotide
acccucaugaggaaccugc

SEQ ID NO: 2704629 - RNA, 19 nt, Artificial Sequence
  Description of Artificial Sequence: Synthetic oligonucleotide
gaacucuucaaagcccacg

SEQ ID NO: 2704630 - RNA, 19 nt, Artificial Sequence
  Description of Artificial Sequence: Synthetic oligonucleotide
aagcccacggcugccaugg

SEQ ID NO: 2704631 - RNA, 19 nt, Artificial Sequence
  Description of Artificial Sequence: Synthetic oligonucleotide
uuauccucugcaccuggug

SEQ ID NO: 2704632 - RNA, 19 nt, Artificial Sequence
  Description of Artificial Sequence: Synthetic oligonucleotide
accugcucgaucucccggc

SEQ ID NO: 2704633 - RNA, 19 nt, Artificial Sequence
  Description of Artificial Sequence: Synthetic oligonucleotide
aaagccccucuuucucugg

SEQ ID NO: 2704634 - RNA, 19 nt, Artificial Sequence
  Description of Artificial Sequence: Synthetic oligonucleotide
guacggguguccuuugggg

SEQ ID NO: 2704635 - RNA, 19 nt, Artificial Sequence
  Description of Artificial Sequence: Synthetic oligonucleotide
uaggaguccagcacccuca

SEQ ID NO: 2704636 - RNA, 19 nt, Artificial Sequence
  Description of Artificial Sequence: Synthetic oligonucleotide
cucagcauugccuggggug

SEQ ID NO: 2704637 - RNA, 19 nt, Artificial Sequence
  Description of Artificial Sequence: Synthetic oligonucleotide
ucugggguuaacgaggcuc

SEQ ID NO: 2704638 - RNA, 19 nt, Artificial Sequence
  Description of Artificial Sequence: Synthetic oligonucleotide
agagcaagcucugagccug

SEQ ID NO: 2704639 - RNA, 19 nt, Artificial Sequence
  Description of Artificial Sequence: Synthetic oligonucleotide
cugggguuaacgaggcucc

SEQ ID NO: 2704640 - RNA, 19 nt, Artificial Sequence
  Description of Artificial Sequence: Synthetic oligonucleotide
ucgaucucccggcagcgcc

SEQ ID NO: 2704641 - RNA, 19 nt, Artificial Sequence
  Description of Artificial Sequence: Synthetic oligonucleotide
uucuucuauucaguucccg

SEQ ID NO: 2704642 - RNA, 19 nt, Artificial Sequence
  Description of Artificial Sequence: Synthetic oligonucleotide
ugcucgaucucccggcagc

SEQ ID NO: 2704643 - RNA, 19 nt, Artificial Sequence
  Description of Artificial Sequence: Synthetic oligonucleotide
gaaagccccucuuucucug

SEQ ID NO: 2704644 - RNA, 19 nt, Artificial Sequence
  Description of Artificial Sequence: Synthetic oligonucleotide
caguucugggguuaacgag

SEQ ID NO: 2704645 - RNA, 19 nt, Artificial Sequence
  Description of Artificial Sequence: Synthetic oligonucleotide
cuucaaagcccacggcugc

SEQ ID NO: 2704646 - RNA, 19 nt, Artificial Sequence
  Description of Artificial Sequence: Synthetic oligonucleotide
uggagucuccgaguuaucc

SEQ ID NO: 2704647 - RNA, 19 nt, Artificial Sequence
  Description of Artificial Sequence: Synthetic oligonucleotide
guggccuccaaacagggga

SEQ ID NO: 2704648 - RNA, 19 nt, Artificial Sequence
  Description of Artificial Sequence: Synthetic oligonucleotide
uucaguucccguuggcgac

SEQ ID NO: 2704649 - RNA, 19 nt, Artificial Sequence
  Description of Artificial Sequence: Synthetic oligonucleotide
gacacaaacuccacuucug

SEQ ID NO: 2704650 - RNA, 19 nt, Artificial Sequence
  Description of Artificial Sequence: Synthetic oligonucleotide
uagucguccccguaggagu

SEQ ID NO: 2704651 - RNA, 19 nt, Artificial Sequence
  Description of Artificial Sequence: Synthetic oligonucleotide
aagacgcgcucguucaccu

SEQ ID NO: 2704652 - RNA, 19 nt, Artificial Sequence
  Description of Artificial Sequence: Synthetic oligonucleotide
uugguacuuucuucuauuc

SEQ ID NO: 2704653 - RNA, 19 nt, Artificial Sequence
  Description of Artificial Sequence: Synthetic oligonucleotide
uguggccuccaaacagggg

SEQ ID NO: 2704654 - RNA, 19 nt, Artificial Sequence
  Description of Artificial Sequence: Synthetic oligonucleotide
accaccggacacaaacucc

SEQ ID NO: 2704655 - RNA, 19 nt, Artificial Sequence
  Description of Artificial Sequence: Synthetic oligonucleotide
gacgcgcucguucaccugc

SEQ ID NO: 2704656 - RNA, 19 nt, Artificial Sequence
  Description of Artificial Sequence: Synthetic oligonucleotide
cucuucaucccgcucccgg

SEQ ID NO: 2704657 - RNA, 19 nt, Artificial Sequence
  Description of Artificial Sequence: Synthetic oligonucleotide
uagagcuugguacuuucuu

SEQ ID NO: 2704658 - RNA, 19 nt, Artificial Sequence
  Description of Artificial Sequence: Synthetic oligonucleotide
cauucucagcauugccugg

SEQ ID NO: 2704659 - RNA, 19 nt, Artificial Sequence
  Description of Artificial Sequence: Synthetic oligonucleotide
uacggguguccuuugggga

SEQ ID NO: 2704660 - RNA, 19 nt, Artificial Sequence
  Description of Artificial Sequence: Synthetic oligonucleotide
acggguguccuuuggggag

SEQ ID NO: 2704661 - RNA, 19 nt, Artificial Sequence
  Description of Artificial Sequence: Synthetic oligonucleotide
ugggguggggacaucugug

SEQ ID NO: 2704662 - RNA, 19 nt, Artificial Sequence
  Description of Artificial Sequence: Synthetic oligonucleotide
ucaugaggaaccugcgcuc

SEQ ID NO: 2704663 - RNA, 19 nt, Artificial Sequence
  Description of Artificial Sequence: Synthetic oligonucleotide
ucuuccgcccacugggccc

SEQ ID NO: 2704664 - RNA, 19 nt, Artificial Sequence
  Description of Artificial Sequence: Synthetic oligonucleotide
uggccuccaaacaggggag

SEQ ID NO: 2704665 - RNA, 19 nt, Artificial Sequence
  Description of Artificial Sequence: Synthetic oligonucleotide
uccgaguuauccucugcac

SEQ ID NO: 2704666 - RNA, 19 nt, Artificial Sequence
  Description of Artificial Sequence: Synthetic oligonucleotide
guggagccuguucaagacg

SEQ ID NO: 2704667 - RNA, 19 nt, Artificial Sequence
  Description of Artificial Sequence: Synthetic oligonucleotide
caaacuccacuucugucuc

SEQ ID NO: 2704668 - RNA, 19 nt, Artificial Sequence
  Description of Artificial Sequence: Synthetic oligonucleotide
cacgauggugaacuggcug

SEQ ID NO: 2704669 - RNA, 19 nt, Artificial Sequence
  Description of Artificial Sequence: Synthetic oligonucleotide
uuggcgacgccugcgaccc

SEQ ID NO: 2704670 - RNA, 19 nt, Artificial Sequence
  Description of Artificial Sequence: Synthetic oligonucleotide
caacacgauggugaacugg

SEQ ID NO: 2704671 - RNA, 19 nt, Artificial Sequence
  Description of Artificial Sequence: Synthetic oligonucleotide
ucuucaucccgcucccgga

SEQ ID NO: 2704672 - RNA, 19 nt, Artificial Sequence
  Description of Artificial Sequence: Synthetic oligonucleotide
ucuccgaguuauccucugc

SEQ ID NO: 2704673 - RNA, 19 nt, Artificial Sequence
  Description of Artificial Sequence: Synthetic oligonucleotide
guucaagacgcgcucguuc

SEQ ID NO: 2704674 - RNA, 19 nt, Artificial Sequence
  Description of Artificial Sequence: Synthetic oligonucleotide
uguagucguccccguagga

SEQ ID NO: 2704675 - RNA, 19 nt, Artificial Sequence
  Description of Artificial Sequence: Synthetic oligonucleotide
uaacgaggcucccacccgu

SEQ ID NO: 2704676 - RNA, 19 nt, Artificial Sequence
  Description of Artificial Sequence: Synthetic oligonucleotide
cuguagucguccccguagg

SEQ ID NO: 2704677 - RNA, 19 nt, Artificial Sequence
  Description of Artificial Sequence: Synthetic oligonucleotide
gaccaccggacacaaacuc

SEQ ID NO: 2704678 - RNA, 19 nt, Artificial Sequence
  Description of Artificial Sequence: Synthetic oligonucleotide
aaagcccacggcugccaug

SEQ ID NO: 2704679 - RNA, 19 nt, Artificial Sequence
  Description of Artificial Sequence: Synthetic oligonucleotide
ggaguccugaaccacccag

SEQ ID NO: 2704680 - RNA, 19 nt, Artificial Sequence
  Description of Artificial Sequence: Synthetic oligonucleotide
aggauguggccuccaaaca

SEQ ID NO: 2704681 - RNA, 19 nt, Artificial Sequence
  Description of Artificial Sequence: Synthetic oligonucleotide
gguacggguguccuuuggg

SEQ ID NO: 2704682 - RNA, 19 nt, Artificial Sequence
  Description of Artificial Sequence: Synthetic oligonucleotide
guagucguccccguaggag

SEQ ID NO: 2704683 - RNA, 19 nt, Artificial Sequence
  Description of Artificial Sequence: Synthetic oligonucleotide
gaacuggcuggcccuguag

SEQ ID NO: 2704684 - RNA, 19 nt, Artificial Sequence
  Description of Artificial Sequence: Synthetic oligonucleotide
ucaguucccguuggcgacg

SEQ ID NO: 2704685 - RNA, 19 nt, Artificial Sequence
  Description of Artificial Sequence: Synthetic oligonucleotide
cuauucaguucccguuggc

SEQ ID NO: 2704686 - RNA, 19 nt, Artificial Sequence
  Description of Artificial Sequence: Synthetic oligonucleotide
guacccgccgucucuuccg

SEQ ID NO: 2704687 - RNA, 19 nt, Artificial Sequence
  Description of Artificial Sequence: Synthetic oligonucleotide
guuggcgacgccugcgacc

SEQ ID NO: 2704688 - RNA, 19 nt, Artificial Sequence
  Description of Artificial Sequence: Synthetic oligonucleotide
caugaggaaccugcgcucc

SEQ ID NO: 2704689 - RNA, 19 nt, Artificial Sequence
  Description of Artificial Sequence: Synthetic oligonucleotide
uucccguuggcgacgccug

SEQ ID NO: 2704690 - RNA, 19 nt, Artificial Sequence
  Description of Artificial Sequence: Synthetic oligonucleotide
gagcuugguacuuucuucu

SEQ ID NO: 2704691 - RNA, 19 nt, Artificial Sequence
  Description of Artificial Sequence: Synthetic oligonucleotide
uggugaacuggcuggcccu

SEQ ID NO: 2704692 - RNA, 19 nt, Artificial Sequence
  Description of Artificial Sequence: Synthetic oligonucleotide
cuggcuggcccuguagucg

SEQ ID NO: 2704693 - RNA, 19 nt, Artificial Sequence
  Description of Artificial Sequence: Synthetic oligonucleotide
agccugguggcgcugagaa

SEQ ID NO: 2704694 - RNA, 19 nt, Artificial Sequence
  Description of Artificial Sequence: Synthetic oligonucleotide
uggcgcugagaacucuuca

SEQ ID NO: 2704695 - RNA, 19 nt, Artificial Sequence
  Description of Artificial Sequence: Synthetic oligonucleotide
cuucaucccgcucccggag

SEQ ID NO: 2704696 - RNA, 19 nt, Artificial Sequence
  Description of Artificial Sequence: Synthetic oligonucleotide
cucaugaggaaccugcgcu

SEQ ID NO: 2704697 - RNA, 19 nt, Artificial Sequence
  Description of Artificial Sequence: Synthetic oligonucleotide
ucucuuccgcccacugggc

SEQ ID NO: 2704698 - RNA, 19 nt, Artificial Sequence
  Description of Artificial Sequence: Synthetic oligonucleotide
accggacacaaacuccacu

SEQ ID NO: 2704699 - RNA, 19 nt, Artificial Sequence
  Description of Artificial Sequence: Synthetic oligonucleotide
accccgggcugccucuucc

SEQ ID NO: 2704700 - RNA, 19 nt, Artificial Sequence
  Description of Artificial Sequence: Synthetic oligonucleotide
uccccguaggaguccagca

SEQ ID NO: 2704701 - RNA, 19 nt, Artificial Sequence
  Description of Artificial Sequence: Synthetic oligonucleotide
gaggaaccugcgcuccugc

SEQ ID NO: 2704702 - RNA, 19 nt, Artificial Sequence
  Description of Artificial Sequence: Synthetic oligonucleotide
gagccuguucaagacgcgc

SEQ ID NO: 2704703 - RNA, 19 nt, Artificial Sequence
  Description of Artificial Sequence: Synthetic oligonucleotide
guaggaguccagcacccuc

SEQ ID NO: 2704704 - RNA, 19 nt, Artificial Sequence
  Description of Artificial Sequence: Synthetic oligonucleotide
guucugggguuaacgaggc

SEQ ID NO: 2704705 - RNA, 19 nt, Artificial Sequence
  Description of Artificial Sequence: Synthetic oligonucleotide
agaacucuucaaagcccac

SEQ ID NO: 2704706 - RNA, 19 nt, Artificial Sequence
  Description of Artificial Sequence: Synthetic oligonucleotide
gauggugaacuggcuggcc

SEQ ID NO: 2704707 - RNA, 19 nt, Artificial Sequence
  Description of Artificial Sequence: Synthetic oligonucleotide
gguggagccuguucaagac

SEQ ID NO: 2704708 - RNA, 19 nt, Artificial Sequence
  Description of Artificial Sequence: Synthetic oligonucleotide
auguggccuccaaacaggg

SEQ ID NO: 2704709 - RNA, 19 nt, Artificial Sequence
  Description of Artificial Sequence: Synthetic oligonucleotide
gcugccgucauccuccaac

SEQ ID NO: 2704710 - RNA, 19 nt, Artificial Sequence
  Description of Artificial Sequence: Synthetic oligonucleotide
cuuggcugccgucauccuc

SEQ ID NO: 2704711 - RNA, 19 nt, Artificial Sequence
  Description of Artificial Sequence: Synthetic oligonucleotide
cucuccaggauguggccuc

SEQ ID NO: 2704712 - RNA, 19 nt, Artificial Sequence
  Description of Artificial Sequence: Synthetic oligonucleotide
uucaucccgcucccggagu

SEQ ID NO: 2704713 - RNA, 19 nt, Artificial Sequence
  Description of Artificial Sequence: Synthetic oligonucleotide
gacgccugcgaccccgggc

SEQ ID NO: 2704714 - RNA, 19 nt, Artificial Sequence
  Description of Artificial Sequence: Synthetic oligonucleotide
gccaguucugggguuaacg

SEQ ID NO: 2704715 - RNA, 19 nt, Artificial Sequence
  Description of Artificial Sequence: Synthetic oligonucleotide
cccacggcugccauggucc

SEQ ID NO: 2704716 - RNA, 19 nt, Artificial Sequence
  Description of Artificial Sequence: Synthetic oligonucleotide
gaguuauccucugcaccug

SEQ ID NO: 2704717 - RNA, 19 nt, Artificial Sequence
  Description of Artificial Sequence: Synthetic oligonucleotide
acgaggcucccacccgugg

SEQ ID NO: 2704718 - RNA, 19 nt, Artificial Sequence
  Description of Artificial Sequence: Synthetic oligonucleotide
ucaucccgcucccggaguc

SEQ ID NO: 2704719 - RNA, 19 nt, Artificial Sequence
  Description of Artificial Sequence: Synthetic oligonucleotide
cuccgaguuauccucugca

SEQ ID NO: 2704720 - RNA, 19 nt, Artificial Sequence
  Description of Artificial Sequence: Synthetic oligonucleotide
guccugaaccacccagacc

SEQ ID NO: 2704721 - RNA, 19 nt, Artificial Sequence
  Description of Artificial Sequence: Synthetic oligonucleotide
ccgaguuauccucugcacc

SEQ ID NO: 2704722 - RNA, 19 nt, Artificial Sequence
  Description of Artificial Sequence: Synthetic oligonucleotide
guucaccugcucgaucucc

SEQ ID NO: 2704723 - RNA, 19 nt, Artificial Sequence
  Description of Artificial Sequence: Synthetic oligonucleotide
cucuuccgcccacugggcc

SEQ ID NO: 2704724 - RNA, 19 nt, Artificial Sequence
  Description of Artificial Sequence: Synthetic oligonucleotide
ggguuaacgaggcucccac

SEQ ID NO: 2704725 - RNA, 19 nt, Artificial Sequence
  Description of Artificial Sequence: Synthetic oligonucleotide
ccuguagucguccccguag

SEQ ID NO: 2704726 - RNA, 19 nt, Artificial Sequence
  Description of Artificial Sequence: Synthetic oligonucleotide
caccugcucgaucucccgg

SEQ ID NO: 2704727 - RNA, 19 nt, Artificial Sequence
  Description of Artificial Sequence: Synthetic oligonucleotide
ggaaccugcgcuccugcug

SEQ ID NO: 2704728 - RNA, 19 nt, Artificial Sequence
  Description of Artificial Sequence: Synthetic oligonucleotide
cuggaggcucauucucagc

SEQ ID NO: 2704729 - RNA, 19 nt, Artificial Sequence
  Description of Artificial Sequence: Synthetic oligonucleotide
cucuggaggcucauucuca

SEQ ID NO: 2704730 - RNA, 19 nt, Artificial Sequence
  Description of Artificial Sequence: Synthetic oligonucleotide
uccucugcaccugguggag

SEQ ID NO: 2704731 - RNA, 19 nt, Artificial Sequence
  Description of Artificial Sequence: Synthetic oligonucleotide
agcgccgaccuagagcuug

SEQ ID NO: 2704732 - RNA, 19 nt, Artificial Sequence
  Description of Artificial Sequence: Synthetic oligonucleotide
agucguccccguaggaguc

SEQ ID NO: 2704733 - RNA, 19 nt, Artificial Sequence
  Description of Artificial Sequence: Synthetic oligonucleotide
cugaaccacccagaccacc

SEQ ID NO: 2704734 - RNA, 19 nt, Artificial Sequence
  Description of Artificial Sequence: Synthetic oligonucleotide
auugccugggguggggaca

SEQ ID NO: 2704735 - RNA, 19 nt, Artificial Sequence
  Description of Artificial Sequence: Synthetic oligonucleotide
uggcccuguagucgucccc

SEQ ID NO: 2704736 - RNA, 19 nt, Artificial Sequence
  Description of Artificial Sequence: Synthetic oligonucleotide
caggggaggcagagcaagc

SEQ ID NO: 2704737 - RNA, 19 nt, Artificial Sequence
  Description of Artificial Sequence: Synthetic oligonucleotide
ggcagcgccgaccuagagc

SEQ ID NO: 2704738 - RNA, 19 nt, Artificial Sequence
  Description of Artificial Sequence: Synthetic oligonucleotide
ucugugccuuggcugccgu

SEQ ID NO: 2704739 - RNA, 19 nt, Artificial Sequence
  Description of Artificial Sequence: Synthetic oligonucleotide
cccguaggaguccagcacc

SEQ ID NO: 2704740 - RNA, 19 nt, Artificial Sequence
  Description of Artificial Sequence: Synthetic oligonucleotide
gaguccugaaccacccaga

SEQ ID NO: 2704741 - RNA, 19 nt, Artificial Sequence
  Description of Artificial Sequence: Synthetic oligonucleotide
gcagcgccgaccuagagcu

SEQ ID NO: 2704742 - RNA, 19 nt, Artificial Sequence
  Description of Artificial Sequence: Synthetic oligonucleotide
aucugugccuuggcugccg

SEQ ID NO: 2704743 - RNA, 19 nt, Artificial Sequence
  Description of Artificial Sequence: Synthetic oligonucleotide
gucuccgaguuauccucug

SEQ ID NO: 2704744 - RNA, 19 nt, Artificial Sequence
  Description of Artificial Sequence: Synthetic oligonucleotide
cuucuauucaguucccguu

SEQ ID NO: 2704745 - RNA, 19 nt, Artificial Sequence
  Description of Artificial Sequence: Synthetic oligonucleotide
aggggaggcagagcaagcu

SEQ ID NO: 2704746 - RNA, 19 nt, Artificial Sequence
  Description of Artificial Sequence: Synthetic oligonucleotide
ucucccggcagcgccgacc

SEQ ID NO: 2704747 - RNA, 19 nt, Artificial Sequence
  Description of Artificial Sequence: Synthetic oligonucleotide
gguuaacgaggcucccacc

SEQ ID NO: 2704748 - RNA, 19 nt, Artificial Sequence
  Description of Artificial Sequence: Synthetic oligonucleotide
guguccuuuggggaggaga

SEQ ID NO: 2704749 - RNA, 19 nt, Artificial Sequence
  Description of Artificial Sequence: Synthetic oligonucleotide
cuugguacuuucuucuauu

SEQ ID NO: 2704750 - RNA, 19 nt, Artificial Sequence
  Description of Artificial Sequence: Synthetic oligonucleotide
agccuguucaagacgcgcu

SEQ ID NO: 2704751 - RNA, 19 nt, Artificial Sequence
  Description of Artificial Sequence: Synthetic oligonucleotide
agcuugguacuuucuucua

SEQ ID NO: 2704752 - RNA, 19 nt, Artificial Sequence
  Description of Artificial Sequence: Synthetic oligonucleotide
cgcugagaacucuucaaag

SEQ ID NO: 2704753 - RNA, 19 nt, Artificial Sequence
  Description of Artificial Sequence: Synthetic oligonucleotide
gcgcucguucaccugcucg

SEQ ID NO: 2704754 - RNA, 19 nt, Artificial Sequence
  Description of Artificial Sequence: Synthetic oligonucleotide
gggucuagggguacgggug

SEQ ID NO: 2704755 - RNA, 19 nt, Artificial Sequence
  Description of Artificial Sequence: Synthetic oligonucleotide
augguccccucccucugcu

SEQ ID NO: 2704756 - RNA, 19 nt, Artificial Sequence
  Description of Artificial Sequence: Synthetic oligonucleotide
aggaaccugcgcuccugcu

SEQ ID NO: 2704757 - RNA, 19 nt, Artificial Sequence
  Description of Artificial Sequence: Synthetic oligonucleotide
aggcucccacccgugguac

SEQ ID NO: 2704758 - RNA, 19 nt, Artificial Sequence
  Description of Artificial Sequence: Synthetic oligonucleotide
aacgaggcucccacccgug

SEQ ID NO: 2704759 - RNA, 19 nt, Artificial Sequence
  Description of Artificial Sequence: Synthetic oligonucleotide
ggcccuguagucguccccg

SEQ ID NO: 2704760 - RNA, 19 nt, Artificial Sequence
  Description of Artificial Sequence: Synthetic oligonucleotide
cucgccaggggccgggcug

SEQ ID NO: 2704761 - RNA, 19 nt, Artificial Sequence
  Description of Artificial Sequence: Synthetic oligonucleotide
cuggcccuguagucguccc

SEQ ID NO: 2704762 - RNA, 19 nt, Artificial Sequence
  Description of Artificial Sequence: Synthetic oligonucleotide
aguucccguuggcgacgcc

SEQ ID NO: 2704763 - RNA, 19 nt, Artificial Sequence
  Description of Artificial Sequence: Synthetic oligonucleotide
gguacccgccgucucuucc

SEQ ID NO: 2704764 - RNA, 19 nt, Artificial Sequence
  Description of Artificial Sequence: Synthetic oligonucleotide
ggacacaaacuccacuucu

SEQ ID NO: 2704765 - RNA, 19 nt, Artificial Sequence
  Description of Artificial Sequence: Synthetic oligonucleotide
agaccaccggacacaaacu

SEQ ID NO: 2704766 - RNA, 19 nt, Artificial Sequence
  Description of Artificial Sequence: Synthetic oligonucleotide
agggguacggguguccuuu

SEQ ID NO: 2704767 - RNA, 19 nt, Artificial Sequence
  Description of Artificial Sequence: Synthetic oligonucleotide
ccuagagcuugguacuuuc

SEQ ID NO: 2704768 - RNA, 19 nt, Artificial Sequence
  Description of Artificial Sequence: Synthetic oligonucleotide
ugcaccugguggagccugu

SEQ ID NO: 2704769 - RNA, 19 nt, Artificial Sequence
  Description of Artificial Sequence: Synthetic oligonucleotide
ccucaugaggaaccugcgc

SEQ ID NO: 2704770 - RNA, 19 nt, Artificial Sequence
  Description of Artificial Sequence: Synthetic oligonucleotide
uguucaagacgcgcucguu

SEQ ID NO: 2704771 - RNA, 19 nt, Artificial Sequence
  Description of Artificial Sequence: Synthetic oligonucleotide
ucccguuggcgacgccugc

SEQ ID NO: 2704772 - RNA, 19 nt, Artificial Sequence
  Description of Artificial Sequence: Synthetic oligonucleotide
ugggguuaacgaggcuccc

SEQ ID NO: 2704773 - RNA, 19 nt, Artificial Sequence
  Description of Artificial Sequence: Synthetic oligonucleotide
gagcaagcucugagccugg

SEQ ID NO: 2704774 - RNA, 19 nt, Artificial Sequence
  Description of Artificial Sequence: Synthetic oligonucleotide
agucuccgaguuauccucu

SEQ ID NO: 2704775 - RNA, 19 nt, Artificial Sequence
  Description of Artificial Sequence: Synthetic oligonucleotide
cuuccgcccacugggcccc

SEQ ID NO: 2704776 - RNA, 19 nt, Artificial Sequence
  Description of Artificial Sequence: Synthetic oligonucleotide
gaggagaaagccccucuuu

SEQ ID NO: 2704777 - RNA, 19 nt, Artificial Sequence
  Description of Artificial Sequence: Synthetic oligonucleotide
ccaguucugggguuaacga

SEQ ID NO: 2704778 - RNA, 19 nt, Artificial Sequence
  Description of Artificial Sequence: Synthetic oligonucleotide
aacaggggaggcagagcaa

SEQ ID NO: 2704779 - RNA, 19 nt, Artificial Sequence
  Description of Artificial Sequence: Synthetic oligonucleotide
cucuuucucuggaggcuca

SEQ ID NO: 2704780 - RNA, 19 nt, Artificial Sequence
  Description of Artificial Sequence: Synthetic oligonucleotide
ccuguucaagacgcgcucg

SEQ ID NO: 2704781 - RNA, 19 nt, Artificial Sequence
  Description of Artificial Sequence: Synthetic oligonucleotide
caccggacacaaacuccac

SEQ ID NO: 2704782 - RNA, 19 nt, Artificial Sequence
  Description of Artificial Sequence: Synthetic oligonucleotide
ugcgaccccgggcugccuc

SEQ ID NO: 2704783 - RNA, 19 nt, Artificial Sequence
  Description of Artificial Sequence: Synthetic oligonucleotide
cugcucgaucucccggcag

SEQ ID NO: 2704784 - RNA, 19 nt, Artificial Sequence
  Description of Artificial Sequence: Synthetic oligonucleotide
cccucaugaggaaccugcg

SEQ ID NO: 2704785 - RNA, 19 nt, Artificial Sequence
  Description of Artificial Sequence: Synthetic oligonucleotide
ggguacggguguccuuugg

SEQ ID NO: 2704786 - RNA, 19 nt, Artificial Sequence
  Description of Artificial Sequence: Synthetic oligonucleotide
ggcgcugagaacucuucaa

SEQ ID NO: 2704787 - RNA, 19 nt, Artificial Sequence
  Description of Artificial Sequence: Synthetic oligonucleotide
guccccguaggaguccagc

SEQ ID NO: 2704788 - RNA, 19 nt, Artificial Sequence
  Description of Artificial Sequence: Synthetic oligonucleotide
auccuccaacacgauggug

SEQ ID NO: 2704789 - RNA, 19 nt, Artificial Sequence
  Description of Artificial Sequence: Synthetic oligonucleotide
cccggaguccugaaccacc

SEQ ID NO: 2704790 - RNA, 19 nt, Artificial Sequence
  Description of Artificial Sequence: Synthetic oligonucleotide
ucccacccgugguacccgc

SEQ ID NO: 2704791 - RNA, 19 nt, Artificial Sequence
  Description of Artificial Sequence: Synthetic oligonucleotide
ccggaguccugaaccaccc

SEQ ID NO: 2704792 - RNA, 19 nt, Artificial Sequence
  Description of Artificial Sequence: Synthetic oligonucleotide
ucccggaguccugaaccac

SEQ ID NO: 2704793 - RNA, 19 nt, Artificial Sequence
  Description of Artificial Sequence: Synthetic oligonucleotide
cucccggaguccugaacca

SEQ ID NO: 2704794 - RNA, 19 nt, Artificial Sequence
  Description of Artificial Sequence: Synthetic oligonucleotide
ccguaggaguccagcaccc

SEQ ID NO: 2704795 - RNA, 19 nt, Artificial Sequence
  Description of Artificial Sequence: Synthetic oligonucleotide
ucugcaccugguggagccu

SEQ ID NO: 2704796 - RNA, 19 nt, Artificial Sequence
  Description of Artificial Sequence: Synthetic oligonucleotide
gaggcucauucucagcauu

SEQ ID NO: 2704797 - RNA, 19 nt, Artificial Sequence
  Description of Artificial Sequence: Synthetic oligonucleotide
cuagagcuugguacuuucu

SEQ ID NO: 2704798 - RNA, 19 nt, Artificial Sequence
  Description of Artificial Sequence: Synthetic oligonucleotide
ccaggggccgggcugcugg

SEQ ID NO: 2704799 - RNA, 19 nt, Artificial Sequence
  Description of Artificial Sequence: Synthetic oligonucleotide
gcaagcucugagccuggug

SEQ ID NO: 2704800 - RNA, 19 nt, Artificial Sequence
  Description of Artificial Sequence: Synthetic oligonucleotide
ucugagccugguggcgcug

SEQ ID NO: 2704801 - RNA, 19 nt, Artificial Sequence
  Description of Artificial Sequence: Synthetic oligonucleotide
caccugguggagccuguuc

SEQ ID NO: 2704802 - RNA, 19 nt, Artificial Sequence
  Description of Artificial Sequence: Synthetic oligonucleotide
ggagucuccgaguuauccu

SEQ ID NO: 2704803 - RNA, 19 nt, Artificial Sequence
  Description of Artificial Sequence: Synthetic oligonucleotide
uugccugggguggggacau

SEQ ID NO: 2704804 - RNA, 19 nt, Artificial Sequence
  Description of Artificial Sequence: Synthetic oligonucleotide
cagcauugccugggguggg

SEQ ID NO: 2704805 - RNA, 19 nt, Artificial Sequence
  Description of Artificial Sequence: Synthetic oligonucleotide
ucguccccguaggagucca

SEQ ID NO: 2704806 - RNA, 19 nt, Artificial Sequence
  Description of Artificial Sequence: Synthetic oligonucleotide
cucgaucucccggcagcgc

SEQ ID NO: 2704807 - RNA, 19 nt, Artificial Sequence
  Description of Artificial Sequence: Synthetic oligonucleotide
ugccuuggcugccgucauc

SEQ ID NO: 2704808 - RNA, 19 nt, Artificial Sequence
  Description of Artificial Sequence: Synthetic oligonucleotide
ucgccaggggccgggcugc

SEQ ID NO: 2704809 - RNA, 19 nt, Artificial Sequence
  Description of Artificial Sequence: Synthetic oligonucleotide
cugcaccugguggagccug

SEQ ID NO: 2704810 - RNA, 19 nt, Artificial Sequence
  Description of Artificial Sequence: Synthetic oligonucleotide
acacgauggugaacuggcu

SEQ ID NO: 2704811 - RNA, 19 nt, Artificial Sequence
  Description of Artificial Sequence: Synthetic oligonucleotide
ggcgacgccugcgaccccg

SEQ ID NO: 2704812 - RNA, 19 nt, Artificial Sequence
  Description of Artificial Sequence: Synthetic oligonucleotide
gcgcugagaacucuucaaa

SEQ ID NO: 2704813 - RNA, 19 nt, Artificial Sequence
  Description of Artificial Sequence: Synthetic oligonucleotide
gccuguucaagacgcgcuc

SEQ ID NO: 2704814 - RNA, 19 nt, Artificial Sequence
  Description of Artificial Sequence: Synthetic oligonucleotide
cucccacccgugguacccg

SEQ ID NO: 2704815 - RNA, 19 nt, Artificial Sequence
  Description of Artificial Sequence: Synthetic oligonucleotide
uggggacaucugugccuug

SEQ ID NO: 2704816 - RNA, 19 nt, Artificial Sequence
  Description of Artificial Sequence: Synthetic oligonucleotide
cuccaacacgauggugaac

SEQ ID NO: 2704817 - RNA, 19 nt, Artificial Sequence
  Description of Artificial Sequence: Synthetic oligonucleotide
gguggggacaucugugccu

SEQ ID NO: 2704818 - RNA, 19 nt, Artificial Sequence
  Description of Artificial Sequence: Synthetic oligonucleotide
ccacccgugguacccgccg

SEQ ID NO: 2704819 - RNA, 19 nt, Artificial Sequence
  Description of Artificial Sequence: Synthetic oligonucleotide
caguucccguuggcgacgc

SEQ ID NO: 2704820 - RNA, 19 nt, Artificial Sequence
  Description of Artificial Sequence: Synthetic oligonucleotide
guggcgcugagaacucuuc

SEQ ID NO: 2704821 - RNA, 19 nt, Artificial Sequence
  Description of Artificial Sequence: Synthetic oligonucleotide
cccgccgucucuuccgccc

SEQ ID NO: 2704822 - RNA, 19 nt, Artificial Sequence
  Description of Artificial Sequence: Synthetic oligonucleotide
guucccguuggcgacgccu

SEQ ID NO: 2704823 - RNA, 19 nt, Artificial Sequence
  Description of Artificial Sequence: Synthetic oligonucleotide
aucucccggcagcgccgac

SEQ ID NO: 2704824 - RNA, 19 nt, Artificial Sequence
  Description of Artificial Sequence: Synthetic oligonucleotide
ugguacccgccgucucuuc

SEQ ID NO: 2704825 - RNA, 19 nt, Artificial Sequence
  Description of Artificial Sequence: Synthetic oligonucleotide
uggcugccgucauccucca

SEQ ID NO: 2704826 - RNA, 19 nt, Artificial Sequence
  Description of Artificial Sequence: Synthetic oligonucleotide
gcucugagccugguggcgc

SEQ ID NO: 2704827 - RNA, 19 nt, Artificial Sequence
  Description of Artificial Sequence: Synthetic oligonucleotide
ccugguggcgcugagaacu

SEQ ID NO: 2704828 - RNA, 19 nt, Artificial Sequence
  Description of Artificial Sequence: Synthetic oligonucleotide
ccaacacgauggugaacug

SEQ ID NO: 2704829 - RNA, 19 nt, Artificial Sequence
  Description of Artificial Sequence: Synthetic oligonucleotide
gucguccccguaggagucc

SEQ ID NO: 2704830 - RNA, 19 nt, Artificial Sequence
  Description of Artificial Sequence: Synthetic oligonucleotide
cuguucaagacgcgcucgu

SEQ ID NO: 2704831 - RNA, 19 nt, Artificial Sequence
  Description of Artificial Sequence: Synthetic oligonucleotide
ccccguaggaguccagcac

SEQ ID NO: 2704832 - RNA, 19 nt, Artificial Sequence
  Description of Artificial Sequence: Synthetic oligonucleotide
cgaguuauccucugcaccu

SEQ ID NO: 2704833 - RNA, 19 nt, Artificial Sequence
  Description of Artificial Sequence: Synthetic oligonucleotide
gcucccacccgugguaccc

SEQ ID NO: 2704834 - RNA, 19 nt, Artificial Sequence
  Description of Artificial Sequence: Synthetic oligonucleotide
aucccgcucccggaguccu

SEQ ID NO: 2704835 - RNA, 19 nt, Artificial Sequence
  Description of Artificial Sequence: Synthetic oligonucleotide
gaucucccggcagcgccga

SEQ ID NO: 2704836 - RNA, 19 nt, Artificial Sequence
  Description of Artificial Sequence: Synthetic oligonucleotide
gcuugguacuuucuucuau

SEQ ID NO: 2704837 - RNA, 19 nt, Artificial Sequence
  Description of Artificial Sequence: Synthetic oligonucleotide
ugguccccucccucugcuc

SEQ ID NO: 2704838 - RNA, 19 nt, Artificial Sequence
  Description of Artificial Sequence: Synthetic oligonucleotide
cugggguggggacaucugu

SEQ ID NO: 2704839 - RNA, 19 nt, Artificial Sequence
  Description of Artificial Sequence: Synthetic oligonucleotide
cugggccccucgccagggg

SEQ ID NO: 2704840 - RNA, 19 nt, Artificial Sequence
  Description of Artificial Sequence: Synthetic oligonucleotide
cauccuccaacacgauggu

SEQ ID NO: 2704841 - RNA, 19 nt, Artificial Sequence
  Description of Artificial Sequence: Synthetic oligonucleotide
cgaucucccggcagcgccg

SEQ ID NO: 2704842 - RNA, 19 nt, Artificial Sequence
  Description of Artificial Sequence: Synthetic oligonucleotide
ggucuagggguacgggugu

SEQ ID NO: 2704843 - RNA, 19 nt, Artificial Sequence
  Description of Artificial Sequence: Synthetic oligonucleotide
cacggcugccauggucccc

SEQ ID NO: 2704844 - RNA, 19 nt, Artificial Sequence
  Description of Artificial Sequence: Synthetic oligonucleotide
gcuggcccuguagucgucc

SEQ ID NO: 2704845 - RNA, 19 nt, Artificial Sequence
  Description of Artificial Sequence: Synthetic oligonucleotide
ccugaaccacccagaccac

SEQ ID NO: 2704846 - RNA, 19 nt, Artificial Sequence
  Description of Artificial Sequence: Synthetic oligonucleotide
gggguuaacgaggcuccca

SEQ ID NO: 2704847 - RNA, 19 nt, Artificial Sequence
  Description of Artificial Sequence: Synthetic oligonucleotide
gggguacggguguccuuug

SEQ ID NO: 2704848 - RNA, 19 nt, Artificial Sequence
  Description of Artificial Sequence: Synthetic oligonucleotide
ccaugguccccucccucug

SEQ ID NO: 2704849 - RNA, 19 nt, Artificial Sequence
  Description of Artificial Sequence: Synthetic oligonucleotide
cuagggguacggguguccu

SEQ ID NO: 2704850 - RNA, 19 nt, Artificial Sequence
  Description of Artificial Sequence: Synthetic oligonucleotide
ggcucccacccgugguacc

SEQ ID NO: 2704851 - RNA, 19 nt, Artificial Sequence
  Description of Artificial Sequence: Synthetic oligonucleotide
cgauggugaacuggcuggc

SEQ ID NO: 2704852 - RNA, 19 nt, Artificial Sequence
  Description of Artificial Sequence: Synthetic oligonucleotide
ccggacacaaacuccacuu

SEQ ID NO: 2704853 - RNA, 19 nt, Artificial Sequence
  Description of Artificial Sequence: Synthetic oligonucleotide
cccguuggcgacgccugcg

SEQ ID NO: 2704854 - RNA, 19 nt, Artificial Sequence
  Description of Artificial Sequence: Synthetic oligonucleotide
cugagccugguggcgcuga

SEQ ID NO: 2704855 - RNA, 19 nt, Artificial Sequence
  Description of Artificial Sequence: Synthetic oligonucleotide
gccaugguccccucccucu

SEQ ID NO: 2704856 - RNA, 19 nt, Artificial Sequence
  Description of Artificial Sequence: Synthetic oligonucleotide
cucccggcagcgccgaccu

SEQ ID NO: 2704857 - RNA, 19 nt, Artificial Sequence
  Description of Artificial Sequence: Synthetic oligonucleotide
cccacugggccccucgcca

SEQ ID NO: 2704858 - RNA, 19 nt, Artificial Sequence
  Description of Artificial Sequence: Synthetic oligonucleotide
ggggaggagaaagccccuc

SEQ ID NO: 2704859 - RNA, 19 nt, Artificial Sequence
  Description of Artificial Sequence: Synthetic oligonucleotide
uggcgacgccugcgacccc

SEQ ID NO: 2704860 - RNA, 19 nt, Artificial Sequence
  Description of Artificial Sequence: Synthetic oligonucleotide
cgcucguucaccugcucga

SEQ ID NO: 2704861 - RNA, 19 nt, Artificial Sequence
  Description of Artificial Sequence: Synthetic oligonucleotide
acgcgcucguucaccugcu

SEQ ID NO: 2704862 - RNA, 19 nt, Artificial Sequence
  Description of Artificial Sequence: Synthetic oligonucleotide
gcgccgaccuagagcuugg

SEQ ID NO: 2704863 - RNA, 19 nt, Artificial Sequence
  Description of Artificial Sequence: Synthetic oligonucleotide
ccacccagaccaccggaca

SEQ ID NO: 2704864 - RNA, 19 nt, Artificial Sequence
  Description of Artificial Sequence: Synthetic oligonucleotide
ccaggauguggccuccaaa

SEQ ID NO: 2704865 - RNA, 19 nt, Artificial Sequence
  Description of Artificial Sequence: Synthetic oligonucleotide
gguguccuuuggggaggag

SEQ ID NO: 2704866 - RNA, 19 nt, Artificial Sequence
  Description of Artificial Sequence: Synthetic oligonucleotide
gccugguggcgcugagaac

SEQ ID NO: 2704867 - RNA, 19 nt, Artificial Sequence
  Description of Artificial Sequence: Synthetic oligonucleotide
ccgucucuuccgcccacug

SEQ ID NO: 2704868 - RNA, 19 nt, Artificial Sequence
  Description of Artificial Sequence: Synthetic oligonucleotide
ccucugcaccugguggagc

SEQ ID NO: 2704869 - RNA, 19 nt, Artificial Sequence
  Description of Artificial Sequence: Synthetic oligonucleotide
gccgaccuagagcuuggua

SEQ ID NO: 2704870 - RNA, 19 nt, Artificial Sequence
  Description of Artificial Sequence: Synthetic oligonucleotide
agcccacggcugccauggu

SEQ ID NO: 2704871 - RNA, 19 nt, Artificial Sequence
  Description of Artificial Sequence: Synthetic oligonucleotide
cggguguccuuuggggagg

SEQ ID NO: 2704872 - RNA, 19 nt, Artificial Sequence
  Description of Artificial Sequence: Synthetic oligonucleotide
cccacccgugguacccgcc

SEQ ID NO: 2704873 - RNA, 19 nt, Artificial Sequence
  Description of Artificial Sequence: Synthetic oligonucleotide
caaagcccacggcugccau

SEQ ID NO: 2704874 - RNA, 19 nt, Artificial Sequence
  Description of Artificial Sequence: Synthetic oligonucleotide
ccgcccacugggccccucg

SEQ ID NO: 2704875 - RNA, 19 nt, Artificial Sequence
  Description of Artificial Sequence: Synthetic oligonucleotide
ccugcucgaucucccggca

SEQ ID NO: 2704876 - RNA, 19 nt, Artificial Sequence
  Description of Artificial Sequence: Synthetic oligonucleotide
cguuggcgacgccugcgac

SEQ ID NO: 2704877 - RNA, 19 nt, Artificial Sequence
  Description of Artificial Sequence: Synthetic oligonucleotide
cuccaggauguggccucca

SEQ ID NO: 2704878 - RNA, 19 nt, Artificial Sequence
  Description of Artificial Sequence: Synthetic oligonucleotide
ggccaguucugggguuaac

SEQ ID NO: 2704879 - RNA, 19 nt, Artificial Sequence
  Description of Artificial Sequence: Synthetic oligonucleotide
ccguuggcgacgccugcga

SEQ ID NO: 2704880 - RNA, 19 nt, Artificial Sequence
  Description of Artificial Sequence: Synthetic oligonucleotide
ggggccaguucugggguua

SEQ ID NO: 2704881 - RNA, 19 nt, Artificial Sequence
  Description of Artificial Sequence: Synthetic oligonucleotide
ggguguccuuuggggagga

SEQ ID NO: 2704882 - RNA, 19 nt, Artificial Sequence
  Description of Artificial Sequence: Synthetic oligonucleotide
ccgugguacccgccgucuc

SEQ ID NO: 2704883 - RNA, 19 nt, Artificial Sequence
  Description of Artificial Sequence: Synthetic oligonucleotide
gcgacgccugcgaccccgg

SEQ ID NO: 2704884 - RNA, 19 nt, Artificial Sequence
  Description of Artificial Sequence: Synthetic oligonucleotide
gugguacccgccgucucuu

SEQ ID NO: 2704885 - RNA, 19 nt, Artificial Sequence
  Description of Artificial Sequence: Synthetic oligonucleotide
ucccggcagcgccgaccua

SEQ ID NO: 2704886 - RNA, 19 nt, Artificial Sequence
  Description of Artificial Sequence: Synthetic oligonucleotide
cacccgugguacccgccgu

SEQ ID NO: 2704887 - RNA, 19 nt, Artificial Sequence
  Description of Artificial Sequence: Synthetic oligonucleotide
gguggcgcugagaacucuu

SEQ ID NO: 2704888 - RNA, 19 nt, Artificial Sequence
  Description of Artificial Sequence: Synthetic oligonucleotide
cccagaccaccggacacaa

SEQ ID NO: 2704889 - RNA, 19 nt, Artificial Sequence
  Description of Artificial Sequence: Synthetic oligonucleotide
gcacccucaugaggaaccu

SEQ ID NO: 2704890 - RNA, 19 nt, Artificial Sequence
  Description of Artificial Sequence: Synthetic oligonucleotide
cgugguacccgccgucucu

SEQ ID NO: 2704891 - RNA, 19 nt, Artificial Sequence
  Description of Artificial Sequence: Synthetic oligonucleotide
cccgcucccggaguccuga

SEQ ID NO: 2704892 - RNA, 19 nt, Artificial Sequence
  Description of Artificial Sequence: Synthetic oligonucleotide
ccggcagcgccgaccuaga

SEQ ID NO: 2704893 - RNA, 19 nt, Artificial Sequence
  Description of Artificial Sequence: Synthetic oligonucleotide
cguccccguaggaguccag

SEQ ID NO: 2704894 - RNA, 19 nt, Artificial Sequence
  Description of Artificial Sequence: Synthetic oligonucleotide
cgacgccugcgaccccggg

SEQ ID NO: 2704895 - RNA, 19 nt, Artificial Sequence
  Description of Artificial Sequence: Synthetic oligonucleotide
cccuguagucguccccgua

SEQ ID NO: 2704896 - RNA, 19 nt, Artificial Sequence
  Description of Artificial Sequence: Synthetic oligonucleotide
gcgaccccgggcugccucu

SEQ ID NO: 2704897 - RNA, 19 nt, Artificial Sequence
  Description of Artificial Sequence: Synthetic oligonucleotide
ccgccgucucuuccgccca

SEQ ID NO: 2704898 - RNA, 19 nt, Artificial Sequence
  Description of Artificial Sequence: Synthetic oligonucleotide
cggcagcgccgaccuagag

SEQ ID NO: 2704899 - RNA, 19 nt, Artificial Sequence
  Description of Artificial Sequence: Synthetic oligonucleotide
ggcuggcccuguagucguc

SEQ ID NO: 2704900 - RNA, 19 nt, Artificial Sequence
  Description of Artificial Sequence: Synthetic oligonucleotide
ccagaccaccggacacaaa

SEQ ID NO: 2704901 - RNA, 19 nt, Artificial Sequence
  Description of Artificial Sequence: Synthetic oligonucleotide
gcccuguagucguccccgu

SEQ ID NO: 2704902 - RNA, 19 nt, Artificial Sequence
  Description of Artificial Sequence: Synthetic oligonucleotide
ggcugccgucauccuccaa

SEQ ID NO: 2704903 - RNA, 19 nt, Artificial Sequence
  Description of Artificial Sequence: Synthetic oligonucleotide
ggccgggcugcuggggucu

SEQ ID NO: 2704904 - RNA, 19 nt, Artificial Sequence
  Description of Artificial Sequence: Synthetic oligonucleotide
gccccucgccaggggccgg

SEQ ID NO: 2704905 - RNA, 19 nt, Artificial Sequence
  Description of Artificial Sequence: Synthetic oligonucleotide
cgcgcucguucaccugcuc

SEQ ID NO: 2704906 - RNA, 19 nt, Artificial Sequence
  Description of Artificial Sequence: Synthetic oligonucleotide
ccgggcugcuggggucuag

SEQ ID NO: 2704907 - RNA, 19 nt, Artificial Sequence
  Description of Artificial Sequence: Synthetic oligonucleotide
cgccgucucuuccgcccac

SEQ ID NO: 2704908 - RNA, 19 nt, Artificial Sequence
  Description of Artificial Sequence: Synthetic oligonucleotide
cgaggcucccacccguggu

SEQ ID NO: 2704909 - RNA, 19 nt, Artificial Sequence
  Description of Artificial Sequence: Synthetic oligonucleotide
gccgucucuuccgcccacu

SEQ ID NO: 2704910 - RNA, 19 nt, Artificial Sequence
  Description of Artificial Sequence: Synthetic oligonucleotide
cccgugguacccgccgucu

SEQ ID NO: 2704911 - RNA, 19 nt, Artificial Sequence
  Description of Artificial Sequence: Synthetic oligonucleotide
cguaggaguccagcacccu

SEQ ID NO: 2704912 - RNA, 19 nt, Artificial Sequence
  Description of Artificial Sequence: Synthetic oligonucleotide
ccccgggcugccucuuccu

SEQ ID NO: 2704913 - RNA, 19 nt, Artificial Sequence
  Description of Artificial Sequence: Synthetic oligonucleotide
cagcgccgaccuagagcuu

SEQ ID NO: 2704914 - RNA, 19 nt, Artificial Sequence
  Description of Artificial Sequence: Synthetic oligonucleotide
gcaccugguggagccuguu

SEQ ID NO: 2704915 - RNA, 19 nt, Artificial Sequence
  Description of Artificial Sequence: Synthetic oligonucleotide
ccgcucccggaguccugaa

SEQ ID NO: 2704916 - RNA, 19 nt, Artificial Sequence
  Description of Artificial Sequence: Synthetic oligonucleotide
cgccgaccuagagcuuggu

SEQ ID NO: 2704917 - RNA, 19 nt, Artificial Sequence
  Description of Artificial Sequence: Synthetic oligonucleotide
cgccaggggccgggcugcu

SEQ ID NO: 2704918 - RNA, 19 nt, Artificial Sequence
  Description of Artificial Sequence: Synthetic oligonucleotide
uuuauuaacaguaagaucc

SEQ ID NO: 2704919 - RNA, 19 nt, Artificial Sequence
  Description of Artificial Sequence: Synthetic oligonucleotide
uuaacaguaagauccaggg

SEQ ID NO: 2704920 - RNA, 19 nt, Artificial Sequence
  Description of Artificial Sequence: Synthetic oligonucleotide
aaugucaacacccaugaug

SEQ ID NO: 2704921 - RNA, 19 nt, Artificial Sequence
  Description of Artificial Sequence: Synthetic oligonucleotide
ucauaaacaaccuuuucag

SEQ ID NO: 2704922 - RNA, 19 nt, Artificial Sequence
  Description of Artificial Sequence: Synthetic oligonucleotide
aacaguaagauccaggguu

SEQ ID NO: 2704923 - RNA, 19 nt, Artificial Sequence
  Description of Artificial Sequence: Synthetic oligonucleotide
agcacaaccugauugaagg

SEQ ID NO: 2704924 - RNA, 19 nt, Artificial Sequence
  Description of Artificial Sequence: Synthetic oligonucleotide
aacgugaggaucuugccuc

SEQ ID NO: 2704925 - RNA, 19 nt, Artificial Sequence
  Description of Artificial Sequence: Synthetic oligonucleotide
guuagugcgacucauaaac

SEQ ID NO: 2704926 - RNA, 19 nt, Artificial Sequence
  Description of Artificial Sequence: Synthetic oligonucleotide
uacagcuugacuagcagcc

SEQ ID NO: 2704927 - RNA, 19 nt, Artificial Sequence
  Description of Artificial Sequence: Synthetic oligonucleotide
uguucucucggccaggaag

SEQ ID NO: 2704928 - RNA, 19 nt, Artificial Sequence
  Description of Artificial Sequence: Synthetic oligonucleotide
ugugacaguccccacaacc

SEQ ID NO: 2704929 - RNA, 19 nt, Artificial Sequence
  Description of Artificial Sequence: Synthetic oligonucleotide
augucaacacccaugaugg

SEQ ID NO: 2704930 - RNA, 19 nt, Artificial Sequence
  Description of Artificial Sequence: Synthetic oligonucleotide
ucaggauucgacuucgggc

SEQ ID NO: 2704931 - RNA, 19 nt, Artificial Sequence
  Description of Artificial Sequence: Synthetic oligonucleotide
agagcuaacuggucaaacg

SEQ ID NO: 2704932 - RNA, 19 nt, Artificial Sequence
  Description of Artificial Sequence: Synthetic oligonucleotide
uuuuauuaacaguaagauc

SEQ ID NO: 2704933 - RNA, 19 nt, Artificial Sequence
  Description of Artificial Sequence: Synthetic oligonucleotide
ugauugaagguggaguugg

SEQ ID NO: 2704934 - RNA, 19 nt, Artificial Sequence
  Description of Artificial Sequence: Synthetic oligonucleotide
aaugccgguauaccucucg

SEQ ID NO: 2704935 - RNA, 19 nt, Artificial Sequence
  Description of Artificial Sequence: Synthetic oligonucleotide
uuugguauggcuguguggu

SEQ ID NO: 2704936 - RNA, 19 nt, Artificial Sequence
  Description of Artificial Sequence: Synthetic oligonucleotide
aaaaugccgguauaccucu

SEQ ID NO: 2704937 - RNA, 19 nt, Artificial Sequence
  Description of Artificial Sequence: Synthetic oligonucleotide
aaccuuucgguccuuguug

SEQ ID NO: 2704938 - RNA, 19 nt, Artificial Sequence
  Description of Artificial Sequence: Synthetic oligonucleotide
agugcacacaccuucagcu

SEQ ID NO: 2704939 - RNA, 19 nt, Artificial Sequence
  Description of Artificial Sequence: Synthetic oligonucleotide
gauguccuggcucuuaggc

SEQ ID NO: 2704940 - RNA, 19 nt, Artificial Sequence
  Description of Artificial Sequence: Synthetic oligonucleotide
ucgaaugucaacacccaug

SEQ ID NO: 2704941 - RNA, 19 nt, Artificial Sequence
  Description of Artificial Sequence: Synthetic oligonucleotide
uuauuaacaguaagaucca

SEQ ID NO: 2704942 - RNA, 19 nt, Artificial Sequence
  Description of Artificial Sequence: Synthetic oligonucleotide
caggauucgacuucgggcc

SEQ ID NO: 2704943 - RNA, 19 nt, Artificial Sequence
  Description of Artificial Sequence: Synthetic oligonucleotide
uucgagaauccgcacauca

SEQ ID NO: 2704944 - RNA, 19 nt, Artificial Sequence
  Description of Artificial Sequence: Synthetic oligonucleotide
aacuggucaaacgugagga

SEQ ID NO: 2704945 - RNA, 19 nt, Artificial Sequence
  Description of Artificial Sequence: Synthetic oligonucleotide
uaacuggucaaacgugagg

SEQ ID NO: 2704946 - RNA, 19 nt, Artificial Sequence
  Description of Artificial Sequence: Synthetic oligonucleotide
aaccacagcugucuuguuc

SEQ ID NO: 2704947 - RNA, 19 nt, Artificial Sequence
  Description of Artificial Sequence: Synthetic oligonucleotide
uucaggauucgacuucggg

SEQ ID NO: 2704948 - RNA, 19 nt, Artificial Sequence
  Description of Artificial Sequence: Synthetic oligonucleotide
aacuuccggcccuuggagc

SEQ ID NO: 2704949 - RNA, 19 nt, Artificial Sequence
  Description of Artificial Sequence: Synthetic oligonucleotide
aaacgugaggaucuugccu

SEQ ID NO: 2704950 - RNA, 19 nt, Artificial Sequence
  Description of Artificial Sequence: Synthetic oligonucleotide
auuaacaguaagauccagg

SEQ ID NO: 2704951 - RNA, 19 nt, Artificial Sequence
  Description of Artificial Sequence: Synthetic oligonucleotide
gagguggccgguuagugcg

SEQ ID NO: 2704952 - RNA, 19 nt, Artificial Sequence
  Description of Artificial Sequence: Synthetic oligonucleotide
ucagcuugggcacuucgag

SEQ ID NO: 2704953 - RNA, 19 nt, Artificial Sequence
  Description of Artificial Sequence: Synthetic oligonucleotide
cucauaaacaaccuuuuca

SEQ ID NO: 2704954 - RNA, 19 nt, Artificial Sequence
  Description of Artificial Sequence: Synthetic oligonucleotide
ugugucgaaugucaacacc

SEQ ID NO: 2704955 - RNA, 19 nt, Artificial Sequence
  Description of Artificial Sequence: Synthetic oligonucleotide
uggucaaacgugaggaucu

SEQ ID NO: 2704956 - RNA, 19 nt, Artificial Sequence
  Description of Artificial Sequence: Synthetic oligonucleotide
uucagcacaaccugauuga

SEQ ID NO: 2704957 - RNA, 19 nt, Artificial Sequence
  Description of Artificial Sequence: Synthetic oligonucleotide
aaaccuguacagcuugacu

SEQ ID NO: 2704958 - RNA, 19 nt, Artificial Sequence
  Description of Artificial Sequence: Synthetic oligonucleotide
caaccuuuucagcacaacc

SEQ ID NO: 2704959 - RNA, 19 nt, Artificial Sequence
  Description of Artificial Sequence: Synthetic oligonucleotide
aaacaaccuuuucagcaca

SEQ ID NO: 2704960 - RNA, 19 nt, Artificial Sequence
  Description of Artificial Sequence: Synthetic oligonucleotide
agagguggccgguuagugc

SEQ ID NO: 2704961 - RNA, 19 nt, Artificial Sequence
  Description of Artificial Sequence: Synthetic oligonucleotide
agagcacagugccacggcc

SEQ ID NO: 2704962 - RNA, 19 nt, Artificial Sequence
  Description of Artificial Sequence: Synthetic oligonucleotide
caaaaugccgguauaccuc

SEQ ID NO: 2704963 - RNA, 19 nt, Artificial Sequence
  Description of Artificial Sequence: Synthetic oligonucleotide
ugaagguggaguugguucu

SEQ ID NO: 2704964 - RNA, 19 nt, Artificial Sequence
  Description of Artificial Sequence: Synthetic oligonucleotide
gguucuucuggccagaaac

SEQ ID NO: 2704965 - RNA, 19 nt, Artificial Sequence
  Description of Artificial Sequence: Synthetic oligonucleotide
ucaucugugacagucccca

SEQ ID NO: 2704966 - RNA, 19 nt, Artificial Sequence
  Description of Artificial Sequence: Synthetic oligonucleotide
acuuccggcccuuggagcg

SEQ ID NO: 2704967 - RNA, 19 nt, Artificial Sequence
  Description of Artificial Sequence: Synthetic oligonucleotide
gucaacacccaugauggcg

SEQ ID NO: 2704968 - RNA, 19 nt, Artificial Sequence
  Description of Artificial Sequence: Synthetic oligonucleotide
acaaccugauugaaggugg

SEQ ID NO: 2704969 - RNA, 19 nt, Artificial Sequence
  Description of Artificial Sequence: Synthetic oligonucleotide
aagauccaggguuaguuuu

SEQ ID NO: 2704970 - RNA, 19 nt, Artificial Sequence
  Description of Artificial Sequence: Synthetic oligonucleotide
cuuguugugucgaauguca

SEQ ID NO: 2704971 - RNA, 19 nt, Artificial Sequence
  Description of Artificial Sequence: Synthetic oligonucleotide
accuuuucagcacaaccug

SEQ ID NO: 2704972 - RNA, 19 nt, Artificial Sequence
  Description of Artificial Sequence: Synthetic oligonucleotide
uggggccuugccaaaaugc

SEQ ID NO: 2704973 - RNA, 19 nt, Artificial Sequence
  Description of Artificial Sequence: Synthetic oligonucleotide
gacaagagcacagugccac

SEQ ID NO: 2704974 - RNA, 19 nt, Artificial Sequence
  Description of Artificial Sequence: Synthetic oligonucleotide
uuagugcgacucauaaaca

SEQ ID NO: 2704975 - RNA, 19 nt, Artificial Sequence
  Description of Artificial Sequence: Synthetic oligonucleotide
accuguacagcuugacuag

SEQ ID NO: 2704976 - RNA, 19 nt, Artificial Sequence
  Description of Artificial Sequence: Synthetic oligonucleotide
gugucgaaugucaacaccc

SEQ ID NO: 2704977 - RNA, 19 nt, Artificial Sequence
  Description of Artificial Sequence: Synthetic oligonucleotide
agugcgacucauaaacaac

SEQ ID NO: 2704978 - RNA, 19 nt, Artificial Sequence
  Description of Artificial Sequence: Synthetic oligonucleotide
guugugucgaaugucaaca

SEQ ID NO: 2704979 - RNA, 19 nt, Artificial Sequence
  Description of Artificial Sequence: Synthetic oligonucleotide
gaucauccgggacagggac

SEQ ID NO: 2704980 - RNA, 19 nt, Artificial Sequence
  Description of Artificial Sequence: Synthetic oligonucleotide
uagauguccuggcucuuag

SEQ ID NO: 2704981 - RNA, 19 nt, Artificial Sequence
  Description of Artificial Sequence: Synthetic oligonucleotide
cucuuaggcuccuugcgcc

SEQ ID NO: 2704982 - RNA, 19 nt, Artificial Sequence
  Description of Artificial Sequence: Synthetic oligonucleotide
ucuucuggccagaaaccug

SEQ ID NO: 2704983 - RNA, 19 nt, Artificial Sequence
  Description of Artificial Sequence: Synthetic oligonucleotide
uguugugucgaaugucaac

SEQ ID NO: 2704984 - RNA, 19 nt, Artificial Sequence
  Description of Artificial Sequence: Synthetic oligonucleotide
uaacaguaagauccagggu

SEQ ID NO: 2704985 - RNA, 19 nt, Artificial Sequence
  Description of Artificial Sequence: Synthetic oligonucleotide
ugucgaaugucaacaccca

SEQ ID NO: 2704986 - RNA, 19 nt, Artificial Sequence
  Description of Artificial Sequence: Synthetic oligonucleotide
gacauaggguuugguaugg

SEQ ID NO: 2704987 - RNA, 19 nt, Artificial Sequence
  Description of Artificial Sequence: Synthetic oligonucleotide
gagacuccagagcuaacug

SEQ ID NO: 2704988 - RNA, 19 nt, Artificial Sequence
  Description of Artificial Sequence: Synthetic oligonucleotide
uaggguuugguauggcugu

SEQ ID NO: 2704989 - RNA, 19 nt, Artificial Sequence
  Description of Artificial Sequence: Synthetic oligonucleotide
uguuccuggggccuugcca

SEQ ID NO: 2704990 - RNA, 19 nt, Artificial Sequence
  Description of Artificial Sequence: Synthetic oligonucleotide
uagugcgacucauaaacaa

SEQ ID NO: 2704991 - RNA, 19 nt, Artificial Sequence
  Description of Artificial Sequence: Synthetic oligonucleotide
ugucuuguucucucggcca

SEQ ID NO: 2704992 - RNA, 19 nt, Artificial Sequence
  Description of Artificial Sequence: Synthetic oligonucleotide
ucacccgaagugcacacac

SEQ ID NO: 2704993 - RNA, 19 nt, Artificial Sequence
  Description of Artificial Sequence: Synthetic oligonucleotide
gaacuuccggcccuuggag

SEQ ID NO: 2704994 - RNA, 19 nt, Artificial Sequence
  Description of Artificial Sequence: Synthetic oligonucleotide
ucuuaggcuccuugcgccg

SEQ ID NO: 2704995 - RNA, 19 nt, Artificial Sequence
  Description of Artificial Sequence: Synthetic oligonucleotide
cuaacuggucaaacgugag

SEQ ID NO: 2704996 - RNA, 19 nt, Artificial Sequence
  Description of Artificial Sequence: Synthetic oligonucleotide
ucgacuucgggcccggcug

SEQ ID NO: 2704997 - RNA, 19 nt, Artificial Sequence
  Description of Artificial Sequence: Synthetic oligonucleotide
acguucgaacuuccggccc

SEQ ID NO: 2704998 - RNA, 19 nt, Artificial Sequence
  Description of Artificial Sequence: Synthetic oligonucleotide
auaggguuugguauggcug

SEQ ID NO: 2704999 - RNA, 19 nt, Artificial Sequence
  Description of Artificial Sequence: Synthetic oligonucleotide
acuucgagaauccgcacau

SEQ ID NO: 2705000 - RNA, 19 nt, Artificial Sequence
  Description of Artificial Sequence: Synthetic oligonucleotide
ucgaacuuccggcccuugg

SEQ ID NO: 2705001 - RNA, 19 nt, Artificial Sequence
  Description of Artificial Sequence: Synthetic oligonucleotide
ugauggcgccuccugcucg

SEQ ID NO: 2705002 - RNA, 19 nt, Artificial Sequence
  Description of Artificial Sequence: Synthetic oligonucleotide
ugcgacucauaaacaaccu

SEQ ID NO: 2705003 - RNA, 19 nt, Artificial Sequence
  Description of Artificial Sequence: Synthetic oligonucleotide
uuuauagccgcggcuggcc

SEQ ID NO: 2705004 - RNA, 19 nt, Artificial Sequence
  Description of Artificial Sequence: Synthetic oligonucleotide
accagacaagagcacagug

SEQ ID NO: 2705005 - RNA, 19 nt, Artificial Sequence
  Description of Artificial Sequence: Synthetic oligonucleotide
uucagcuugggcacuucga

SEQ ID NO: 2705006 - RNA, 19 nt, Artificial Sequence
  Description of Artificial Sequence: Synthetic oligonucleotide
uugccuccagccuucagga

SEQ ID NO: 2705007 - RNA, 19 nt, Artificial Sequence
  Description of Artificial Sequence: Synthetic oligonucleotide
cuugcgccgaaccuuucgg

SEQ ID NO: 2705008 - RNA, 19 nt, Artificial Sequence
  Description of Artificial Sequence: Synthetic oligonucleotide
agcugucuuguucucucgg

SEQ ID NO: 2705009 - RNA, 19 nt, Artificial Sequence
  Description of Artificial Sequence: Synthetic oligonucleotide
aggauucgacuucgggccc

SEQ ID NO: 2705010 - RNA, 19 nt, Artificial Sequence
  Description of Artificial Sequence: Synthetic oligonucleotide
gaagugcacacaccuucag

SEQ ID NO: 2705011 - RNA, 19 nt, Artificial Sequence
  Description of Artificial Sequence: Synthetic oligonucleotide
uccugcucggccagguccg

SEQ ID NO: 2705012 - RNA, 19 nt, Artificial Sequence
  Description of Artificial Sequence: Synthetic oligonucleotide
gugcgacucauaaacaacc

SEQ ID NO: 2705013 - RNA, 19 nt, Artificial Sequence
  Description of Artificial Sequence: Synthetic oligonucleotide
ugacaguccccacaaccac

SEQ ID NO: 2705014 - RNA, 19 nt, Artificial Sequence
  Description of Artificial Sequence: Synthetic oligonucleotide
cugucuuguucucucggcc

SEQ ID NO: 2705015 - RNA, 19 nt, Artificial Sequence
  Description of Artificial Sequence: Synthetic oligonucleotide
uucggaucauccgggacag

SEQ ID NO: 2705016 - RNA, 19 nt, Artificial Sequence
  Description of Artificial Sequence: Synthetic oligonucleotide
gacuagcagccgcagguag

SEQ ID NO: 2705017 - RNA, 19 nt, Artificial Sequence
  Description of Artificial Sequence: Synthetic oligonucleotide
cagaaaccuguacagcuug

SEQ ID NO: 2705018 - RNA, 19 nt, Artificial Sequence
  Description of Artificial Sequence: Synthetic oligonucleotide
acccgaagugcacacaccu

SEQ ID NO: 2705019 - RNA, 19 nt, Artificial Sequence
  Description of Artificial Sequence: Synthetic oligonucleotide
aauccgcacaucaucugug

SEQ ID NO: 2705020 - RNA, 19 nt, Artificial Sequence
  Description of Artificial Sequence: Synthetic oligonucleotide
acgugaggaucuugccucc

SEQ ID NO: 2705021 - RNA, 19 nt, Artificial Sequence
  Description of Artificial Sequence: Synthetic oligonucleotide
cuuccgaggaccagacaag

SEQ ID NO: 2705022 - RNA, 19 nt, Artificial Sequence
  Description of Artificial Sequence: Synthetic oligonucleotide
uauaccucucggcccuucc

SEQ ID NO: 2705023 - RNA, 19 nt, Artificial Sequence
  Description of Artificial Sequence: Synthetic oligonucleotide
uuauagccgcggcuggccc

SEQ ID NO: 2705024 - RNA, 19 nt, Artificial Sequence
  Description of Artificial Sequence: Synthetic oligonucleotide
ggcacguucgaacuuccgg

SEQ ID NO: 2705025 - RNA, 19 nt, Artificial Sequence
  Description of Artificial Sequence: Synthetic oligonucleotide
cacaaccugauugaaggug

SEQ ID NO: 2705026 - RNA, 19 nt, Artificial Sequence
  Description of Artificial Sequence: Synthetic oligonucleotide
ccuuggagcggacauaggg

SEQ ID NO: 2705027 - RNA, 19 nt, Artificial Sequence
  Description of Artificial Sequence: Synthetic oligonucleotide
cuugacuagcagccgcagg

SEQ ID NO: 2705028 - RNA, 19 nt, Artificial Sequence
  Description of Artificial Sequence: Synthetic oligonucleotide
acaagagcacagugccacg

SEQ ID NO: 2705029 - RNA, 19 nt, Artificial Sequence
  Description of Artificial Sequence: Synthetic oligonucleotide
auaccucucggcccuuccg

SEQ ID NO: 2705030 - RNA, 19 nt, Artificial Sequence
  Description of Artificial Sequence: Synthetic oligonucleotide
uucuucuggccagaaaccu

SEQ ID NO: 2705031 - RNA, 19 nt, Artificial Sequence
  Description of Artificial Sequence: Synthetic oligonucleotide
agaauccgcacaucaucug

SEQ ID NO: 2705032 - RNA, 19 nt, Artificial Sequence
  Description of Artificial Sequence: Synthetic oligonucleotide
uuuuauagccgcggcuggc

SEQ ID NO: 2705033 - RNA, 19 nt, Artificial Sequence
  Description of Artificial Sequence: Synthetic oligonucleotide
uaagauccaggguuaguuu

SEQ ID NO: 2705034 - RNA, 19 nt, Artificial Sequence
  Description of Artificial Sequence: Synthetic oligonucleotide
cacguucgaacuuccggcc

SEQ ID NO: 2705035 - RNA, 19 nt, Artificial Sequence
  Description of Artificial Sequence: Synthetic oligonucleotide
uccgggacagggacagagg

SEQ ID NO: 2705036 - RNA, 19 nt, Artificial Sequence
  Description of Artificial Sequence: Synthetic oligonucleotide
gaguugguucuucuggcca

SEQ ID NO: 2705037 - RNA, 19 nt, Artificial Sequence
  Description of Artificial Sequence: Synthetic oligonucleotide
uccagagcuaacuggucaa

SEQ ID NO: 2705038 - RNA, 19 nt, Artificial Sequence
  Description of Artificial Sequence: Synthetic oligonucleotide
gagcuaacuggucaaacgu

SEQ ID NO: 2705039 - RNA, 19 nt, Artificial Sequence
  Description of Artificial Sequence: Synthetic oligonucleotide
uuggagcggacauaggguu

SEQ ID NO: 2705040 - RNA, 19 nt, Artificial Sequence
  Description of Artificial Sequence: Synthetic oligonucleotide
augccgguauaccucucgg

SEQ ID NO: 2705041 - RNA, 19 nt, Artificial Sequence
  Description of Artificial Sequence: Synthetic oligonucleotide
accugauugaagguggagu

SEQ ID NO: 2705042 - RNA, 19 nt, Artificial Sequence
  Description of Artificial Sequence: Synthetic oligonucleotide
uugugucgaaugucaacac

SEQ ID NO: 2705043 - RNA, 19 nt, Artificial Sequence
  Description of Artificial Sequence: Synthetic oligonucleotide
ccagacaagagcacagugc

SEQ ID NO: 2705044 - RNA, 19 nt, Artificial Sequence
  Description of Artificial Sequence: Synthetic oligonucleotide
guucucucggccaggaagc

SEQ ID NO: 2705045 - RNA, 19 nt, Artificial Sequence
  Description of Artificial Sequence: Synthetic oligonucleotide
acacaccuucagcuugggc

SEQ ID NO: 2705046 - RNA, 19 nt, Artificial Sequence
  Description of Artificial Sequence: Synthetic oligonucleotide
acaaccuuuucagcacaac

SEQ ID NO: 2705047 - RNA, 19 nt, Artificial Sequence
  Description of Artificial Sequence: Synthetic oligonucleotide
gacagagguggccgguuag

SEQ ID NO: 2705048 - RNA, 19 nt, Artificial Sequence
  Description of Artificial Sequence: Synthetic oligonucleotide
uuucgguccuuguuguguc

SEQ ID NO: 2705049 - RNA, 19 nt, Artificial Sequence
  Description of Artificial Sequence: Synthetic oligonucleotide
uucgguccuuguugugucg

SEQ ID NO: 2705050 - RNA, 19 nt, Artificial Sequence
  Description of Artificial Sequence: Synthetic oligonucleotide
aggcuccuugcgccgaacc

SEQ ID NO: 2705051 - RNA, 19 nt, Artificial Sequence
  Description of Artificial Sequence: Synthetic oligonucleotide
gucuuguucucucggccag

SEQ ID NO: 2705052 - RNA, 19 nt, Artificial Sequence
  Description of Artificial Sequence: Synthetic oligonucleotide
ugccaaaaugccgguauac

SEQ ID NO: 2705053 - RNA, 19 nt, Artificial Sequence
  Description of Artificial Sequence: Synthetic oligonucleotide
cuccugcucggccaggucc

SEQ ID NO: 2705054 - RNA, 19 nt, Artificial Sequence
  Description of Artificial Sequence: Synthetic oligonucleotide
ucgagaauccgcacaucau

SEQ ID NO: 2705055 - RNA, 19 nt, Artificial Sequence
  Description of Artificial Sequence: Synthetic oligonucleotide
ggacauaggguuugguaug

SEQ ID NO: 2705056 - RNA, 19 nt, Artificial Sequence
  Description of Artificial Sequence: Synthetic oligonucleotide
gaaaccuguacagcuugac

SEQ ID NO: 2705057 - RNA, 19 nt, Artificial Sequence
  Description of Artificial Sequence: Synthetic oligonucleotide
uggcucuuaggcuccuugc

SEQ ID NO: 2705058 - RNA, 19 nt, Artificial Sequence
  Description of Artificial Sequence: Synthetic oligonucleotide
uuuucagcacaaccugauu

SEQ ID NO: 2705059 - RNA, 19 nt, Artificial Sequence
  Description of Artificial Sequence: Synthetic oligonucleotide
augauggcgccuccugcuc

SEQ ID NO: 2705060 - RNA, 19 nt, Artificial Sequence
  Description of Artificial Sequence: Synthetic oligonucleotide
ugguauggcuguguggugu

SEQ ID NO: 2705061 - RNA, 19 nt, Artificial Sequence
  Description of Artificial Sequence: Synthetic oligonucleotide
uaccucucggcccuuccga

SEQ ID NO: 2705062 - RNA, 19 nt, Artificial Sequence
  Description of Artificial Sequence: Synthetic oligonucleotide
uuguugugucgaaugucaa

SEQ ID NO: 2705063 - RNA, 19 nt, Artificial Sequence
  Description of Artificial Sequence: Synthetic oligonucleotide
cagcacaaccugauugaag

SEQ ID NO: 2705064 - RNA, 19 nt, Artificial Sequence
  Description of Artificial Sequence: Synthetic oligonucleotide
uucgacuucgggcccggcu

SEQ ID NO: 2705065 - RNA, 19 nt, Artificial Sequence
  Description of Artificial Sequence: Synthetic oligonucleotide
ucuggcacguucgaacuuc

SEQ ID NO: 2705066 - RNA, 19 nt, Artificial Sequence
  Description of Artificial Sequence: Synthetic oligonucleotide
gcacguucgaacuuccggc

SEQ ID NO: 2705067 - RNA, 19 nt, Artificial Sequence
  Description of Artificial Sequence: Synthetic oligonucleotide
ggcucuuaggcuccuugcg

SEQ ID NO: 2705068 - RNA, 19 nt, Artificial Sequence
  Description of Artificial Sequence: Synthetic oligonucleotide
accuuucgguccuuguugu

SEQ ID NO: 2705069 - RNA, 19 nt, Artificial Sequence
  Description of Artificial Sequence: Synthetic oligonucleotide
acacccaugauggcgccuc

SEQ ID NO: 2705070 - RNA, 19 nt, Artificial Sequence
  Description of Artificial Sequence: Synthetic oligonucleotide
cagcuugacuagcagccgc

SEQ ID NO: 2705071 - RNA, 19 nt, Artificial Sequence
  Description of Artificial Sequence: Synthetic oligonucleotide
cuggucaaacgugaggauc

SEQ ID NO: 2705072 - RNA, 19 nt, Artificial Sequence
  Description of Artificial Sequence: Synthetic oligonucleotide
gccgguauaccucucggcc

SEQ ID NO: 2705073 - RNA, 19 nt, Artificial Sequence
  Description of Artificial Sequence: Synthetic oligonucleotide
acagcuugacuagcagccg

SEQ ID NO: 2705074 - RNA, 19 nt, Artificial Sequence
  Description of Artificial Sequence: Synthetic oligonucleotide
agcuaacuggucaaacgug

SEQ ID NO: 2705075 - RNA, 19 nt, Artificial Sequence
  Description of Artificial Sequence: Synthetic oligonucleotide
acauaggguuugguauggc

SEQ ID NO: 2705076 - RNA, 19 nt, Artificial Sequence
  Description of Artificial Sequence: Synthetic oligonucleotide
auccgggacagggacagag

SEQ ID NO: 2705077 - RNA, 19 nt, Artificial Sequence
  Description of Artificial Sequence: Synthetic oligonucleotide
ugccgguauaccucucggc

SEQ ID NO: 2705078 - RNA, 19 nt, Artificial Sequence
  Description of Artificial Sequence: Synthetic oligonucleotide
uccgcacaucaucugugac

SEQ ID NO: 2705079 - RNA, 19 nt, Artificial Sequence
  Description of Artificial Sequence: Synthetic oligonucleotide
cugugugguguuccugggg

SEQ ID NO: 2705080 - RNA, 19 nt, Artificial Sequence
  Description of Artificial Sequence: Synthetic oligonucleotide
uggcacguucgaacuuccg

SEQ ID NO: 2705081 - RNA, 19 nt, Artificial Sequence
  Description of Artificial Sequence: Synthetic oligonucleotide
cuugggcacuucgagaauc

SEQ ID NO: 2705082 - RNA, 19 nt, Artificial Sequence
  Description of Artificial Sequence: Synthetic oligonucleotide
ugcgccgaaccuuucgguc

SEQ ID NO: 2705083 - RNA, 19 nt, Artificial Sequence
  Description of Artificial Sequence: Synthetic oligonucleotide
cugauugaagguggaguug

SEQ ID NO: 2705084 - RNA, 19 nt, Artificial Sequence
  Description of Artificial Sequence: Synthetic oligonucleotide
cuucaggauucgacuucgg

SEQ ID NO: 2705085 - RNA, 19 nt, Artificial Sequence
  Description of Artificial Sequence: Synthetic oligonucleotide
gguuugguauggcugugug

SEQ ID NO: 2705086 - RNA, 19 nt, Artificial Sequence
  Description of Artificial Sequence: Synthetic oligonucleotide
auccgcacaucaucuguga

SEQ ID NO: 2705087 - RNA, 19 nt, Artificial Sequence
  Description of Artificial Sequence: Synthetic oligonucleotide
uugguauggcuguguggug

SEQ ID NO: 2705088 - RNA, 19 nt, Artificial Sequence
  Description of Artificial Sequence: Synthetic oligonucleotide
cuccagagcuaacugguca

SEQ ID NO: 2705089 - RNA, 19 nt, Artificial Sequence
  Description of Artificial Sequence: Synthetic oligonucleotide
gagaauccgcacaucaucu

SEQ ID NO: 2705090 - RNA, 19 nt, Artificial Sequence
  Description of Artificial Sequence: Synthetic oligonucleotide
ugggcacuucgagaauccg

SEQ ID NO: 2705091 - RNA, 19 nt, Artificial Sequence
  Description of Artificial Sequence: Synthetic oligonucleotide
ggaguugguucuucuggcc

SEQ ID NO: 2705092 - RNA, 19 nt, Artificial Sequence
  Description of Artificial Sequence: Synthetic oligonucleotide
uugccaaaaugccgguaua

SEQ ID NO: 2705093 - RNA, 19 nt, Artificial Sequence
  Description of Artificial Sequence: Synthetic oligonucleotide
cuggcucuuaggcuccuug

SEQ ID NO: 2705094 - RNA, 19 nt, Artificial Sequence
  Description of Artificial Sequence: Synthetic oligonucleotide
aguaagauccaggguuagu

SEQ ID NO: 2705095 - RNA, 19 nt, Artificial Sequence
  Description of Artificial Sequence: Synthetic oligonucleotide
ucggccaggaagcuucauu

SEQ ID NO: 2705096 - RNA, 19 nt, Artificial Sequence
  Description of Artificial Sequence: Synthetic oligonucleotide
uauagccgcggcuggcccu

SEQ ID NO: 2705097 - RNA, 19 nt, Artificial Sequence
  Description of Artificial Sequence: Synthetic oligonucleotide
gcucuuaggcuccuugcgc

SEQ ID NO: 2705098 - RNA, 19 nt, Artificial Sequence
  Description of Artificial Sequence: Synthetic oligonucleotide
gguggaguugguucuucug

SEQ ID NO: 2705099 - RNA, 19 nt, Artificial Sequence
  Description of Artificial Sequence: Synthetic oligonucleotide
agccuucaggauucgacuu

SEQ ID NO: 2705100 - RNA, 19 nt, Artificial Sequence
  Description of Artificial Sequence: Synthetic oligonucleotide
gauucgacuucgggcccgg

SEQ ID NO: 2705101 - RNA, 19 nt, Artificial Sequence
  Description of Artificial Sequence: Synthetic oligonucleotide
cagagcuaacuggucaaac

SEQ ID NO: 2705102 - RNA, 19 nt, Artificial Sequence
  Description of Artificial Sequence: Synthetic oligonucleotide
aacaaccuuuucagcacaa

SEQ ID NO: 2705103 - RNA, 19 nt, Artificial Sequence
  Description of Artificial Sequence: Synthetic oligonucleotide
cuggcacguucgaacuucc

SEQ ID NO: 2705104 - RNA, 19 nt, Artificial Sequence
  Description of Artificial Sequence: Synthetic oligonucleotide
accucucggcccuuccgag

SEQ ID NO: 2705105 - RNA, 19 nt, Artificial Sequence
  Description of Artificial Sequence: Synthetic oligonucleotide
aaaugccgguauaccucuc

SEQ ID NO: 2705106 - RNA, 19 nt, Artificial Sequence
  Description of Artificial Sequence: Synthetic oligonucleotide
ugcucacccgaagugcaca

SEQ ID NO: 2705107 - RNA, 19 nt, Artificial Sequence
  Description of Artificial Sequence: Synthetic oligonucleotide
ccagccuucaggauucgac

SEQ ID NO: 2705108 - RNA, 19 nt, Artificial Sequence
  Description of Artificial Sequence: Synthetic oligonucleotide
cuuggagcggacauagggu

SEQ ID NO: 2705109 - RNA, 19 nt, Artificial Sequence
  Description of Artificial Sequence: Synthetic oligonucleotide
gcugucuuguucucucggc

SEQ ID NO: 2705110 - RNA, 19 nt, Artificial Sequence
  Description of Artificial Sequence: Synthetic oligonucleotide
agguggaguugguucuucu

SEQ ID NO: 2705111 - RNA, 19 nt, Artificial Sequence
  Description of Artificial Sequence: Synthetic oligonucleotide
cuugccaaaaugccgguau

SEQ ID NO: 2705112 - RNA, 19 nt, Artificial Sequence
  Description of Artificial Sequence: Synthetic oligonucleotide
uugcgccgaaccuuucggu

SEQ ID NO: 2705113 - RNA, 19 nt, Artificial Sequence
  Description of Artificial Sequence: Synthetic oligonucleotide
gacaguccccacaaccaca

SEQ ID NO: 2705114 - RNA, 19 nt, Artificial Sequence
  Description of Artificial Sequence: Synthetic oligonucleotide
gcuaacuggucaaacguga

SEQ ID NO: 2705115 - RNA, 19 nt, Artificial Sequence
  Description of Artificial Sequence: Synthetic oligonucleotide
guaagauccaggguuaguu

SEQ ID NO: 2705116 - RNA, 19 nt, Artificial Sequence
  Description of Artificial Sequence: Synthetic oligonucleotide
cacccgaagugcacacacc

SEQ ID NO: 2705117 - RNA, 19 nt, Artificial Sequence
  Description of Artificial Sequence: Synthetic oligonucleotide
gccaaaaugccgguauacc

SEQ ID NO: 2705118 - RNA, 19 nt, Artificial Sequence
  Description of Artificial Sequence: Synthetic oligonucleotide
ggaccagacaagagcacag

SEQ ID NO: 2705119 - RNA, 19 nt, Artificial Sequence
  Description of Artificial Sequence: Synthetic oligonucleotide
acuccagagcuaacugguc

SEQ ID NO: 2705120 - RNA, 19 nt, Artificial Sequence
  Description of Artificial Sequence: Synthetic oligonucleotide
cucggccagguccggaaag

SEQ ID NO: 2705121 - RNA, 19 nt, Artificial Sequence
  Description of Artificial Sequence: Synthetic oligonucleotide
uugggagacuccagagcua

SEQ ID NO: 2705122 - RNA, 19 nt, Artificial Sequence
  Description of Artificial Sequence: Synthetic oligonucleotide
cuuuucagcacaaccugau

SEQ ID NO: 2705123 - RNA, 19 nt, Artificial Sequence
  Description of Artificial Sequence: Synthetic oligonucleotide
uggccgguuagugcgacuc

SEQ ID NO: 2705124 - RNA, 19 nt, Artificial Sequence
  Description of Artificial Sequence: Synthetic oligonucleotide
auggcugugugguguuccu

SEQ ID NO: 2705125 - RNA, 19 nt, Artificial Sequence
  Description of Artificial Sequence: Synthetic oligonucleotide
ccgaagugcacacaccuuc

SEQ ID NO: 2705126 - RNA, 19 nt, Artificial Sequence
  Description of Artificial Sequence: Synthetic oligonucleotide
gaucuugccuccagccuuc

SEQ ID NO: 2705127 - RNA, 19 nt, Artificial Sequence
  Description of Artificial Sequence: Synthetic oligonucleotide
cauaggguuugguauggcu

SEQ ID NO: 2705128 - RNA, 19 nt, Artificial Sequence
  Description of Artificial Sequence: Synthetic oligonucleotide
gugccacggcccuugggag

SEQ ID NO: 2705129 - RNA, 19 nt, Artificial Sequence
  Description of Artificial Sequence: Synthetic oligonucleotide
ucgguccuuguugugucga

SEQ ID NO: 2705130 - RNA, 19 nt, Artificial Sequence
  Description of Artificial Sequence: Synthetic oligonucleotide
ccuucaggauucgacuucg

SEQ ID NO: 2705131 - RNA, 19 nt, Artificial Sequence
  Description of Artificial Sequence: Synthetic oligonucleotide
uggagcggacauaggguuu

SEQ ID NO: 2705132 - RNA, 19 nt, Artificial Sequence
  Description of Artificial Sequence: Synthetic oligonucleotide
gccagaaaccuguacagcu

SEQ ID NO: 2705133 - RNA, 19 nt, Artificial Sequence
  Description of Artificial Sequence: Synthetic oligonucleotide
ccuugggagacuccagagc

SEQ ID NO: 2705134 - RNA, 19 nt, Artificial Sequence
  Description of Artificial Sequence: Synthetic oligonucleotide
uuaggcuccuugcgccgaa

SEQ ID NO: 2705135 - RNA, 19 nt, Artificial Sequence
  Description of Artificial Sequence: Synthetic oligonucleotide
ucggcccuuccgaggacca

SEQ ID NO: 2705136 - RNA, 19 nt, Artificial Sequence
  Description of Artificial Sequence: Synthetic oligonucleotide
cuggggccuugccaaaaug

SEQ ID NO: 2705137 - RNA, 19 nt, Artificial Sequence
  Description of Artificial Sequence: Synthetic oligonucleotide
cacagugccacggcccuug

SEQ ID NO: 2705138 - RNA, 19 nt, Artificial Sequence
  Description of Artificial Sequence: Synthetic oligonucleotide
ggggccuugccaaaaugcc

SEQ ID NO: 2705139 - RNA, 19 nt, Artificial Sequence
  Description of Artificial Sequence: Synthetic oligonucleotide
gaggaccagacaagagcac

SEQ ID NO: 2705140 - RNA, 19 nt, Artificial Sequence
  Description of Artificial Sequence: Synthetic oligonucleotide
agaaaccuguacagcuuga

SEQ ID NO: 2705141 - RNA, 19 nt, Artificial Sequence
  Description of Artificial Sequence: Synthetic oligonucleotide
gaaccuuucgguccuuguu

SEQ ID NO: 2705142 - RNA, 19 nt, Artificial Sequence
  Description of Artificial Sequence: Synthetic oligonucleotide
ccgguauaccucucggccc

SEQ ID NO: 2705143 - RNA, 19 nt, Artificial Sequence
  Description of Artificial Sequence: Synthetic oligonucleotide
ccuuccgaggaccagacaa

SEQ ID NO: 2705144 - RNA, 19 nt, Artificial Sequence
  Description of Artificial Sequence: Synthetic oligonucleotide
gacucauaaacaaccuuuu

SEQ ID NO: 2705145 - RNA, 19 nt, Artificial Sequence
  Description of Artificial Sequence: Synthetic oligonucleotide
cucucggcccuuccgagga

SEQ ID NO: 2705146 - RNA, 19 nt, Artificial Sequence
  Description of Artificial Sequence: Synthetic oligonucleotide
cagagguggccgguuagug

SEQ ID NO: 2705147 - RNA, 19 nt, Artificial Sequence
  Description of Artificial Sequence: Synthetic oligonucleotide
ggagcggacauaggguuug

SEQ ID NO: 2705148 - RNA, 19 nt, Artificial Sequence
  Description of Artificial Sequence: Synthetic oligonucleotide
acagugccacggcccuugg

SEQ ID NO: 2705149 - RNA, 19 nt, Artificial Sequence
  Description of Artificial Sequence: Synthetic oligonucleotide
acagagguggccgguuagu

SEQ ID NO: 2705150 - RNA, 19 nt, Artificial Sequence
  Description of Artificial Sequence: Synthetic oligonucleotide
agcuugacuagcagccgca

SEQ ID NO: 2705151 - RNA, 19 nt, Artificial Sequence
  Description of Artificial Sequence: Synthetic oligonucleotide
caugauggcgccuccugcu

SEQ ID NO: 2705152 - RNA, 19 nt, Artificial Sequence
  Description of Artificial Sequence: Synthetic oligonucleotide
gcgccgaaccuuucggucc

SEQ ID NO: 2705153 - RNA, 19 nt, Artificial Sequence
  Description of Artificial Sequence: Synthetic oligonucleotide
caaccugauugaaggugga

SEQ ID NO: 2705154 - RNA, 19 nt, Artificial Sequence
  Description of Artificial Sequence: Synthetic oligonucleotide
cugcucacccgaagugcac

SEQ ID NO: 2705155 - RNA, 19 nt, Artificial Sequence
  Description of Artificial Sequence: Synthetic oligonucleotide
gguuagugcgacucauaaa

SEQ ID NO: 2705156 - RNA, 19 nt, Artificial Sequence
  Description of Artificial Sequence: Synthetic oligonucleotide
caucugugacaguccccac

SEQ ID NO: 2705157 - RNA, 19 nt, Artificial Sequence
  Description of Artificial Sequence: Synthetic oligonucleotide
gagcggacauaggguuugg

SEQ ID NO: 2705158 - RNA, 19 nt, Artificial Sequence
  Description of Artificial Sequence: Synthetic oligonucleotide
gcccuuggagcggacauag

SEQ ID NO: 2705159 - RNA, 19 nt, Artificial Sequence
  Description of Artificial Sequence: Synthetic oligonucleotide
ccuugcgccgaaccuuucg

SEQ ID NO: 2705160 - RNA, 19 nt, Artificial Sequence
  Description of Artificial Sequence: Synthetic oligonucleotide
cagcuugggcacuucgaga

SEQ ID NO: 2705161 - RNA, 19 nt, Artificial Sequence
  Description of Artificial Sequence: Synthetic oligonucleotide
ggauucgacuucgggcccg

SEQ ID NO: 2705162 - RNA, 19 nt, Artificial Sequence
  Description of Artificial Sequence: Synthetic oligonucleotide
cggaucauccgggacaggg

SEQ ID NO: 2705163 - RNA, 19 nt, Artificial Sequence
  Description of Artificial Sequence: Synthetic oligonucleotide
cgaggaccagacaagagca

SEQ ID NO: 2705164 - RNA, 19 nt, Artificial Sequence
  Description of Artificial Sequence: Synthetic oligonucleotide
cuuguucucucggccagga

SEQ ID NO: 2705165 - RNA, 19 nt, Artificial Sequence
  Description of Artificial Sequence: Synthetic oligonucleotide
cagccgcagguagaugucc

SEQ ID NO: 2705166 - RNA, 19 nt, Artificial Sequence
  Description of Artificial Sequence: Synthetic oligonucleotide
cucggcccuuccgaggacc

SEQ ID NO: 2705167 - RNA, 19 nt, Artificial Sequence
  Description of Artificial Sequence: Synthetic oligonucleotide
ccaaaaugccgguauaccu

SEQ ID NO: 2705168 - RNA, 19 nt, Artificial Sequence
  Description of Artificial Sequence: Synthetic oligonucleotide
gggcacuucgagaauccgc

SEQ ID NO: 2705169 - RNA, 19 nt, Artificial Sequence
  Description of Artificial Sequence: Synthetic oligonucleotide
cuuucgguccuuguugugu

SEQ ID NO: 2705170 - RNA, 19 nt, Artificial Sequence
  Description of Artificial Sequence: Synthetic oligonucleotide
cagccuucaggauucgacu

SEQ ID NO: 2705171 - RNA, 19 nt, Artificial Sequence
  Description of Artificial Sequence: Synthetic oligonucleotide
ccaugauggcgccuccugc

SEQ ID NO: 2705172 - RNA, 19 nt, Artificial Sequence
  Description of Artificial Sequence: Synthetic oligonucleotide
cccuugggagacuccagag

SEQ ID NO: 2705173 - RNA, 19 nt, Artificial Sequence
  Description of Artificial Sequence: Synthetic oligonucleotide
ggcugcucacccgaagugc

SEQ ID NO: 2705174 - RNA, 19 nt, Artificial Sequence
  Description of Artificial Sequence: Synthetic oligonucleotide
cuuccggcccuuggagcgg

SEQ ID NO: 2705175 - RNA, 19 nt, Artificial Sequence
  Description of Artificial Sequence: Synthetic oligonucleotide
uucgaacuuccggcccuug

SEQ ID NO: 2705176 - RNA, 19 nt, Artificial Sequence
  Description of Artificial Sequence: Synthetic oligonucleotide
ccuuuucagcacaaccuga

SEQ ID NO: 2705177 - RNA, 19 nt, Artificial Sequence
  Description of Artificial Sequence: Synthetic oligonucleotide
auucgacuucgggcccggc

SEQ ID NO: 2705178 - RNA, 19 nt, Artificial Sequence
  Description of Artificial Sequence: Synthetic oligonucleotide
uccagccuucaggauucga

SEQ ID NO: 2705179 - RNA, 19 nt, Artificial Sequence
  Description of Artificial Sequence: Synthetic oligonucleotide
aucauccgggacagggaca

SEQ ID NO: 2705180 - RNA, 19 nt, Artificial Sequence
  Description of Artificial Sequence: Synthetic oligonucleotide
gccuucaggauucgacuuc

SEQ ID NO: 2705181 - RNA, 19 nt, Artificial Sequence
  Description of Artificial Sequence: Synthetic oligonucleotide
cagugccacggcccuuggg

SEQ ID NO: 2705182 - RNA, 19 nt, Artificial Sequence
  Description of Artificial Sequence: Synthetic oligonucleotide
cuucgagaauccgcacauc

SEQ ID NO: 2705183 - RNA, 19 nt, Artificial Sequence
  Description of Artificial Sequence: Synthetic oligonucleotide
guguuccuggggccuugcc

SEQ ID NO: 2705184 - RNA, 19 nt, Artificial Sequence
  Description of Artificial Sequence: Synthetic oligonucleotide
ggagacuccagagcuaacu

SEQ ID NO: 2705185 - RNA, 19 nt, Artificial Sequence
  Description of Artificial Sequence: Synthetic oligonucleotide
ccuuguugugucgaauguc

SEQ ID NO: 2705186 - RNA, 19 nt, Artificial Sequence
  Description of Artificial Sequence: Synthetic oligonucleotide
ucucggcccuuccgaggac

SEQ ID NO: 2705187 - RNA, 19 nt, Artificial Sequence
  Description of Artificial Sequence: Synthetic oligonucleotide
cuucgggcccggcugcuca

SEQ ID NO: 2705188 - RNA, 19 nt, Artificial Sequence
  Description of Artificial Sequence: Synthetic oligonucleotide
ccgcacaucaucugugaca

SEQ ID NO: 2705189 - RNA, 19 nt, Artificial Sequence
  Description of Artificial Sequence: Synthetic oligonucleotide
ucggaucauccgggacagg

SEQ ID NO: 2705190 - RNA, 19 nt, Artificial Sequence
  Description of Artificial Sequence: Synthetic oligonucleotide
ccuguacagcuugacuagc

SEQ ID NO: 2705191 - RNA, 19 nt, Artificial Sequence
  Description of Artificial Sequence: Synthetic oligonucleotide
gucgaaugucaacacccau

SEQ ID NO: 2705192 - RNA, 19 nt, Artificial Sequence
  Description of Artificial Sequence: Synthetic oligonucleotide
cacccaugauggcgccucc

SEQ ID NO: 2705193 - RNA, 19 nt, Artificial Sequence
  Description of Artificial Sequence: Synthetic oligonucleotide
uuccuggggccuugccaaa

SEQ ID NO: 2705194 - RNA, 19 nt, Artificial Sequence
  Description of Artificial Sequence: Synthetic oligonucleotide
gcccuucugccucuggcac

SEQ ID NO: 2705195 - RNA, 19 nt, Artificial Sequence
  Description of Artificial Sequence: Synthetic oligonucleotide
uccuggggccuugccaaaa

SEQ ID NO: 2705196 - RNA, 19 nt, Artificial Sequence
  Description of Artificial Sequence: Synthetic oligonucleotide
gaccagacaagagcacagu

SEQ ID NO: 2705197 - RNA, 19 nt, Artificial Sequence
  Description of Artificial Sequence: Synthetic oligonucleotide
agcggacauaggguuuggu

SEQ ID NO: 2705198 - RNA, 19 nt, Artificial Sequence
  Description of Artificial Sequence: Synthetic oligonucleotide
uucgggcccggcugcucac

SEQ ID NO: 2705199 - RNA, 19 nt, Artificial Sequence
  Description of Artificial Sequence: Synthetic oligonucleotide
auggcgccuccugcucggc

SEQ ID NO: 2705200 - RNA, 19 nt, Artificial Sequence
  Description of Artificial Sequence: Synthetic oligonucleotide
gcucacccgaagugcacac

SEQ ID NO: 2705201 - RNA, 19 nt, Artificial Sequence
  Description of Artificial Sequence: Synthetic oligonucleotide
gcuugacuagcagccgcag

SEQ ID NO: 2705202 - RNA, 19 nt, Artificial Sequence
  Description of Artificial Sequence: Synthetic oligonucleotide
cuuaggcuccuugcgccga

SEQ ID NO: 2705203 - RNA, 19 nt, Artificial Sequence
  Description of Artificial Sequence: Synthetic oligonucleotide
ccucucggcccuuccgagg

SEQ ID NO: 2705204 - RNA, 19 nt, Artificial Sequence
  Description of Artificial Sequence: Synthetic oligonucleotide
cgcagguagauguccuggc

SEQ ID NO: 2705205 - RNA, 19 nt, Artificial Sequence
  Description of Artificial Sequence: Synthetic oligonucleotide
uccuugcgccgaaccuuuc

SEQ ID NO: 2705206 - RNA, 19 nt, Artificial Sequence
  Description of Artificial Sequence: Synthetic oligonucleotide
ugccucuggcacguucgaa

SEQ ID NO: 2705207 - RNA, 19 nt, Artificial Sequence
  Description of Artificial Sequence: Synthetic oligonucleotide
ggaucauccgggacaggga

SEQ ID NO: 2705208 - RNA, 19 nt, Artificial Sequence
  Description of Artificial Sequence: Synthetic oligonucleotide
uuccggcccuuggagcgga

SEQ ID NO: 2705209 - RNA, 19 nt, Artificial Sequence
  Description of Artificial Sequence: Synthetic oligonucleotide
ccugauugaagguggaguu

SEQ ID NO: 2705210 - RNA, 19 nt, Artificial Sequence
  Description of Artificial Sequence: Synthetic oligonucleotide
gcacuucgagaauccgcac

SEQ ID NO: 2705211 - RNA, 19 nt, Artificial Sequence
  Description of Artificial Sequence: Synthetic oligonucleotide
guauggcugugugguguuc

SEQ ID NO: 2705212 - RNA, 19 nt, Artificial Sequence
  Description of Artificial Sequence: Synthetic oligonucleotide
cuagcagccgcagguagau

SEQ ID NO: 2705213 - RNA, 19 nt, Artificial Sequence
  Description of Artificial Sequence: Synthetic oligonucleotide
cgacucauaaacaaccuuu

SEQ ID NO: 2705214 - RNA, 19 nt, Artificial Sequence
  Description of Artificial Sequence: Synthetic oligonucleotide
ccuuucgguccuuguugug

SEQ ID NO: 2705215 - RNA, 19 nt, Artificial Sequence
  Description of Artificial Sequence: Synthetic oligonucleotide
cacggcccuugggagacuc

SEQ ID NO: 2705216 - RNA, 19 nt, Artificial Sequence
  Description of Artificial Sequence: Synthetic oligonucleotide
auagccgcggcuggcccuu

SEQ ID NO: 2705217 - RNA, 19 nt, Artificial Sequence
  Description of Artificial Sequence: Synthetic oligonucleotide
cggacauaggguuugguau

SEQ ID NO: 2705218 - RNA, 19 nt, Artificial Sequence
  Description of Artificial Sequence: Synthetic oligonucleotide
cucacccgaagugcacaca

SEQ ID NO: 2705219 - RNA, 19 nt, Artificial Sequence
  Description of Artificial Sequence: Synthetic oligonucleotide
gccacggcccuugggagac

SEQ ID NO: 2705220 - RNA, 19 nt, Artificial Sequence
  Description of Artificial Sequence: Synthetic oligonucleotide
gugcacacaccuucagcuu

SEQ ID NO: 2705221 - RNA, 19 nt, Artificial Sequence
  Description of Artificial Sequence: Synthetic oligonucleotide
cugccucuggcacguucga

SEQ ID NO: 2705222 - RNA, 19 nt, Artificial Sequence
  Description of Artificial Sequence: Synthetic oligonucleotide
cgaacuuccggcccuugga

SEQ ID NO: 2705223 - RNA, 19 nt, Artificial Sequence
  Description of Artificial Sequence: Synthetic oligonucleotide
cgguuagugcgacucauaa

SEQ ID NO: 2705224 - RNA, 19 nt, Artificial Sequence
  Description of Artificial Sequence: Synthetic oligonucleotide
gcacaaccugauugaaggu

SEQ ID NO: 2705225 - RNA, 19 nt, Artificial Sequence
  Description of Artificial Sequence: Synthetic oligonucleotide
gaagguggaguugguucuu

SEQ ID NO: 2705226 - RNA, 19 nt, Artificial Sequence
  Description of Artificial Sequence: Synthetic oligonucleotide
cccuuggagcggacauagg

SEQ ID NO: 2705227 - RNA, 19 nt, Artificial Sequence
  Description of Artificial Sequence: Synthetic oligonucleotide
ggcccuuccgaggaccaga

SEQ ID NO: 2705228 - RNA, 19 nt, Artificial Sequence
  Description of Artificial Sequence: Synthetic oligonucleotide
cuccuugcgccgaaccuuu

SEQ ID NO: 2705229 - RNA, 19 nt, Artificial Sequence
  Description of Artificial Sequence: Synthetic oligonucleotide
gcgacucauaaacaaccuu

SEQ ID NO: 2705230 - RNA, 19 nt, Artificial Sequence
  Description of Artificial Sequence: Synthetic oligonucleotide
ggacagggacagagguggc

SEQ ID NO: 2705231 - RNA, 19 nt, Artificial Sequence
  Description of Artificial Sequence: Synthetic oligonucleotide
cgcggcuggcccuucugcc

SEQ ID NO: 2705232 - RNA, 19 nt, Artificial Sequence
  Description of Artificial Sequence: Synthetic oligonucleotide
cacagcugucuuguucucu

SEQ ID NO: 2705233 - RNA, 19 nt, Artificial Sequence
  Description of Artificial Sequence: Synthetic oligonucleotide
uccggcccuuggagcggac

SEQ ID NO: 2705234 - RNA, 19 nt, Artificial Sequence
  Description of Artificial Sequence: Synthetic oligonucleotide
gguggccgguuagugcgac

SEQ ID NO: 2705235 - RNA, 19 nt, Artificial Sequence
  Description of Artificial Sequence: Synthetic oligonucleotide
ggccgguuagugcgacuca

SEQ ID NO: 2705236 - RNA, 19 nt, Artificial Sequence
  Description of Artificial Sequence: Synthetic oligonucleotide
agguggccgguuagugcga

SEQ ID NO: 2705237 - RNA, 19 nt, Artificial Sequence
  Description of Artificial Sequence: Synthetic oligonucleotide
gguauggcugugugguguu

SEQ ID NO: 2705238 - RNA, 19 nt, Artificial Sequence
  Description of Artificial Sequence: Synthetic oligonucleotide
agccgcggcuggcccuucu

SEQ ID NO: 2705239 - RNA, 19 nt, Artificial Sequence
  Description of Artificial Sequence: Synthetic oligonucleotide
ccucuggcacguucgaacu

SEQ ID NO: 2705240 - RNA, 19 nt, Artificial Sequence
  Description of Artificial Sequence: Synthetic oligonucleotide
gcccuuccgaggaccagac

SEQ ID NO: 2705241 - RNA, 19 nt, Artificial Sequence
  Description of Artificial Sequence: Synthetic oligonucleotide
ccgcggcuggcccuucugc

SEQ ID NO: 2705242 - RNA, 19 nt, Artificial Sequence
  Description of Artificial Sequence: Synthetic oligonucleotide
ccagaaaccuguacagcuu

SEQ ID NO: 2705243 - RNA, 19 nt, Artificial Sequence
  Description of Artificial Sequence: Synthetic oligonucleotide
cggcugcucacccgaagug

SEQ ID NO: 2705244 - RNA, 19 nt, Artificial Sequence
  Description of Artificial Sequence: Synthetic oligonucleotide
ccgggacagggacagaggu

SEQ ID NO: 2705245 - RNA, 19 nt, Artificial Sequence
  Description of Artificial Sequence: Synthetic oligonucleotide
gccgcggcuggcccuucug

SEQ ID NO: 2705246 - RNA, 19 nt, Artificial Sequence
  Description of Artificial Sequence: Synthetic oligonucleotide
gggagacuccagagcuaac

SEQ ID NO: 2705247 - RNA, 19 nt, Artificial Sequence
  Description of Artificial Sequence: Synthetic oligonucleotide
ccgaaccuuucgguccuug

SEQ ID NO: 2705248 - RNA, 19 nt, Artificial Sequence
  Description of Artificial Sequence: Synthetic oligonucleotide
cucuggcacguucgaacuu

SEQ ID NO: 2705249 - RNA, 19 nt, Artificial Sequence
  Description of Artificial Sequence: Synthetic oligonucleotide
guggccgguuagugcgacu

SEQ ID NO: 2705250 - RNA, 19 nt, Artificial Sequence
  Description of Artificial Sequence: Synthetic oligonucleotide
ccagagcuaacuggucaaa

SEQ ID NO: 2705251 - RNA, 19 nt, Artificial Sequence
  Description of Artificial Sequence: Synthetic oligonucleotide
gccuugccaaaaugccggu

SEQ ID NO: 2705252 - RNA, 19 nt, Artificial Sequence
  Description of Artificial Sequence: Synthetic oligonucleotide
ccgguuagugcgacucaua

SEQ ID NO: 2705253 - RNA, 19 nt, Artificial Sequence
  Description of Artificial Sequence: Synthetic oligonucleotide
ccugcucggccagguccgg

SEQ ID NO: 2705254 - RNA, 19 nt, Artificial Sequence
  Description of Artificial Sequence: Synthetic oligonucleotide
guucgaacuuccggcccuu

SEQ ID NO: 2705255 - RNA, 19 nt, Artificial Sequence
  Description of Artificial Sequence: Synthetic oligonucleotide
cgguauaccucucggcccu

SEQ ID NO: 2705256 - RNA, 19 nt, Artificial Sequence
  Description of Artificial Sequence: Synthetic oligonucleotide
cguucgaacuuccggcccu

SEQ ID NO: 2705257 - RNA, 19 nt, Artificial Sequence
  Description of Artificial Sequence: Synthetic oligonucleotide
gccgguuagugcgacucau

SEQ ID NO: 2705258 - RNA, 19 nt, Artificial Sequence
  Description of Artificial Sequence: Synthetic oligonucleotide
ggcccuuggagcggacaua

SEQ ID NO: 2705259 - RNA, 19 nt, Artificial Sequence
  Description of Artificial Sequence: Synthetic oligonucleotide
cgaaccuuucgguccuugu

SEQ ID NO: 2705260 - RNA, 19 nt, Artificial Sequence
  Description of Artificial Sequence: Synthetic oligonucleotide
ggucaaacgugaggaucuu

SEQ ID NO: 2705261 - RNA, 19 nt, Artificial Sequence
  Description of Artificial Sequence: Synthetic oligonucleotide
ccuugccaaaaugccggua

SEQ ID NO: 2705262 - RNA, 19 nt, Artificial Sequence
  Description of Artificial Sequence: Synthetic oligonucleotide
cggcccuugggagacucca

SEQ ID NO: 2705263 - RNA, 19 nt, Artificial Sequence
  Description of Artificial Sequence: Synthetic oligonucleotide
cgugaggaucuugccucca

SEQ ID NO: 2705264 - RNA, 19 nt, Artificial Sequence
  Description of Artificial Sequence: Synthetic oligonucleotide
cccgaagugcacacaccuu

SEQ ID NO: 2705265 - RNA, 19 nt, Artificial Sequence
  Description of Artificial Sequence: Synthetic oligonucleotide
ccuggggccuugccaaaau

SEQ ID NO: 2705266 - RNA, 19 nt, Artificial Sequence
  Description of Artificial Sequence: Synthetic oligonucleotide
cgguccuuguugugucgaa

SEQ ID NO: 2705267 - RNA, 19 nt, Artificial Sequence
  Description of Artificial Sequence: Synthetic oligonucleotide
cucggccaggaagcuucau

SEQ ID NO: 2705268 - RNA, 19 nt, Artificial Sequence
  Description of Artificial Sequence: Synthetic oligonucleotide
ccggcccuuggagcggaca

SEQ ID NO: 2705269 - RNA, 19 nt, Artificial Sequence
  Description of Artificial Sequence: Synthetic oligonucleotide
cggcccuuccgaggaccag

SEQ ID NO: 2705270 - RNA, 19 nt, Artificial Sequence
  Description of Artificial Sequence: Synthetic oligonucleotide
gccgaaccuuucgguccuu

SEQ ID NO: 2705271 - RNA, 19 nt, Artificial Sequence
  Description of Artificial Sequence: Synthetic oligonucleotide
ccacggcccuugggagacu

SEQ ID NO: 2705272 - RNA, 19 nt, Artificial Sequence
  Description of Artificial Sequence: Synthetic oligonucleotide
aaagagguagcucaggguc

SEQ ID NO: 2705273 - RNA, 19 nt, Artificial Sequence
  Description of Artificial Sequence: Synthetic oligonucleotide
ucaaauggguaguugaugg

SEQ ID NO: 2705274 - RNA, 19 nt, Artificial Sequence
  Description of Artificial Sequence: Synthetic oligonucleotide
aaugucauagcguguaguc

SEQ ID NO: 2705275 - RNA, 19 nt, Artificial Sequence
  Description of Artificial Sequence: Synthetic oligonucleotide
auacuuauaaguugcugcc

SEQ ID NO: 2705276 - RNA, 19 nt, Artificial Sequence
  Description of Artificial Sequence: Synthetic oligonucleotide
cauacuuauaaguugcugc

SEQ ID NO: 2705277 - RNA, 19 nt, Artificial Sequence
  Description of Artificial Sequence: Synthetic oligonucleotide
ucacauacuuauaaguugc

SEQ ID NO: 2705278 - RNA, 19 nt, Artificial Sequence
  Description of Artificial Sequence: Synthetic oligonucleotide
ugucauagcguguaguccg

SEQ ID NO: 2705279 - RNA, 19 nt, Artificial Sequence
  Description of Artificial Sequence: Synthetic oligonucleotide
uguucauucacauacuuau

SEQ ID NO: 2705280 - RNA, 19 nt, Artificial Sequence
  Description of Artificial Sequence: Synthetic oligonucleotide
ucaugucaaugucauagcg

SEQ ID NO: 2705281 - RNA, 19 nt, Artificial Sequence
  Description of Artificial Sequence: Synthetic oligonucleotide
acuuauaaguugcugccac

SEQ ID NO: 2705282 - RNA, 19 nt, Artificial Sequence
  Description of Artificial Sequence: Synthetic oligonucleotide
ucagccucaauggugaugg

SEQ ID NO: 2705283 - RNA, 19 nt, Artificial Sequence
  Description of Artificial Sequence: Synthetic oligonucleotide
uucauucacauacuuauaa

SEQ ID NO: 2705284 - RNA, 19 nt, Artificial Sequence
  Description of Artificial Sequence: Synthetic oligonucleotide
cacgauugcgucaacaggg

SEQ ID NO: 2705285 - RNA, 19 nt, Artificial Sequence
  Description of Artificial Sequence: Synthetic oligonucleotide
ugugcguauggccugaacc

SEQ ID NO: 2705286 - RNA, 19 nt, Artificial Sequence
  Description of Artificial Sequence: Synthetic oligonucleotide
ucagucacggacuucaugu

SEQ ID NO: 2705287 - RNA, 19 nt, Artificial Sequence
  Description of Artificial Sequence: Synthetic oligonucleotide
acaguagauacacuugguc

SEQ ID NO: 2705288 - RNA, 19 nt, Artificial Sequence
  Description of Artificial Sequence: Synthetic oligonucleotide
ucauucacauacuuauaag

SEQ ID NO: 2705289 - RNA, 19 nt, Artificial Sequence
  Description of Artificial Sequence: Synthetic oligonucleotide
agcguucuuccccagaugg

SEQ ID NO: 2705290 - RNA, 19 nt, Artificial Sequence
  Description of Artificial Sequence: Synthetic oligonucleotide
uguacagcaacuccucaug

SEQ ID NO: 2705291 - RNA, 19 nt, Artificial Sequence
  Description of Artificial Sequence: Synthetic oligonucleotide
uucucaaauggguaguuga

SEQ ID NO: 2705292 - RNA, 19 nt, Artificial Sequence
  Description of Artificial Sequence: Synthetic oligonucleotide
cuuggcucagccucaaugg

SEQ ID NO: 2705293 - RNA, 19 nt, Artificial Sequence
  Description of Artificial Sequence: Synthetic oligonucleotide
agucacggacuucaugucc

SEQ ID NO: 2705294 - RNA, 19 nt, Artificial Sequence
  Description of Artificial Sequence: Synthetic oligonucleotide
uaaguucuguccacaacag

SEQ ID NO: 2705295 - RNA, 19 nt, Artificial Sequence
  Description of Artificial Sequence: Synthetic oligonucleotide
aauggguaguugauggugg

SEQ ID NO: 2705296 - RNA, 19 nt, Artificial Sequence
  Description of Artificial Sequence: Synthetic oligonucleotide
guuggcggaaaucucagcc

SEQ ID NO: 2705297 - RNA, 19 nt, Artificial Sequence
  Description of Artificial Sequence: Synthetic oligonucleotide
cuaugagauguccugugcg

SEQ ID NO: 2705298 - RNA, 19 nt, Artificial Sequence
  Description of Artificial Sequence: Synthetic oligonucleotide
agcaugaaugaagucagac

SEQ ID NO: 2705299 - RNA, 19 nt, Artificial Sequence
  Description of Artificial Sequence: Synthetic oligonucleotide
gauacacuuggucauguca

SEQ ID NO: 2705300 - RNA, 19 nt, Artificial Sequence
  Description of Artificial Sequence: Synthetic oligonucleotide
aguagauacacuuggucau

SEQ ID NO: 2705301 - RNA, 19 nt, Artificial Sequence
  Description of Artificial Sequence: Synthetic oligonucleotide
auguccugugcguauggcc

SEQ ID NO: 2705302 - RNA, 19 nt, Artificial Sequence
  Description of Artificial Sequence: Synthetic oligonucleotide
uccacgauugcgucaacag

SEQ ID NO: 2705303 - RNA, 19 nt, Artificial Sequence
  Description of Artificial Sequence: Synthetic oligonucleotide
uuauaaguugcugccacug

SEQ ID NO: 2705304 - RNA, 19 nt, Artificial Sequence
  Description of Artificial Sequence: Synthetic oligonucleotide
ucccgaaagagguagcuca

SEQ ID NO: 2705305 - RNA, 19 nt, Artificial Sequence
  Description of Artificial Sequence: Synthetic oligonucleotide
uauaaguugcugccacugc

SEQ ID NO: 2705306 - RNA, 19 nt, Artificial Sequence
  Description of Artificial Sequence: Synthetic oligonucleotide
cuguccacaacagaguccg

SEQ ID NO: 2705307 - RNA, 19 nt, Artificial Sequence
  Description of Artificial Sequence: Synthetic oligonucleotide
gacagacagccucacagag

SEQ ID NO: 2705308 - RNA, 19 nt, Artificial Sequence
  Description of Artificial Sequence: Synthetic oligonucleotide
acagaguccgagcugcgcg

SEQ ID NO: 2705309 - RNA, 19 nt, Artificial Sequence
  Description of Artificial Sequence: Synthetic oligonucleotide
auagcguguaguccggcgg

SEQ ID NO: 2705310 - RNA, 19 nt, Artificial Sequence
  Description of Artificial Sequence: Synthetic oligonucleotide
ucagccucccauuuguccc

SEQ ID NO: 2705311 - RNA, 19 nt, Artificial Sequence
  Description of Artificial Sequence: Synthetic oligonucleotide
cucaguggagaacucaaag

SEQ ID NO: 2705312 - RNA, 19 nt, Artificial Sequence
  Description of Artificial Sequence: Synthetic oligonucleotide
uguccugugcguauggccu

SEQ ID NO: 2705313 - RNA, 19 nt, Artificial Sequence
  Description of Artificial Sequence: Synthetic oligonucleotide
ugugucucaguggagaacu

SEQ ID NO: 2705314 - RNA, 19 nt, Artificial Sequence
  Description of Artificial Sequence: Synthetic oligonucleotide
cagaaaccacaguagauac

SEQ ID NO: 2705315 - RNA, 19 nt, Artificial Sequence
  Description of Artificial Sequence: Synthetic oligonucleotide
gauugcgucaacagggcag

SEQ ID NO: 2705316 - RNA, 19 nt, Artificial Sequence
  Description of Artificial Sequence: Synthetic oligonucleotide
acuuggucaugucaauguc

SEQ ID NO: 2705317 - RNA, 19 nt, Artificial Sequence
  Description of Artificial Sequence: Synthetic oligonucleotide
ugaaccaaggcccguggca

SEQ ID NO: 2705318 - RNA, 19 nt, Artificial Sequence
  Description of Artificial Sequence: Synthetic oligonucleotide
uaugagauguccugugcgu

SEQ ID NO: 2705319 - RNA, 19 nt, Artificial Sequence
  Description of Artificial Sequence: Synthetic oligonucleotide
augucauagcguguagucc

SEQ ID NO: 2705320 - RNA, 19 nt, Artificial Sequence
  Description of Artificial Sequence: Synthetic oligonucleotide
uggauguuggcggaaaucu

SEQ ID NO: 2705321 - RNA, 19 nt, Artificial Sequence
  Description of Artificial Sequence: Synthetic oligonucleotide
gauaaguucuguccacaac

SEQ ID NO: 2705322 - RNA, 19 nt, Artificial Sequence
  Description of Artificial Sequence: Synthetic oligonucleotide
uggguagcggcgcaaugcg

SEQ ID NO: 2705323 - RNA, 19 nt, Artificial Sequence
  Description of Artificial Sequence: Synthetic oligonucleotide
gcaugaaugaagucagacg

SEQ ID NO: 2705324 - RNA, 19 nt, Artificial Sequence
  Description of Artificial Sequence: Synthetic oligonucleotide
ugcgcggucagucacggac

SEQ ID NO: 2705325 - RNA, 19 nt, Artificial Sequence
  Description of Artificial Sequence: Synthetic oligonucleotide
acggacuucauguccaucu

SEQ ID NO: 2705326 - RNA, 19 nt, Artificial Sequence
  Description of Artificial Sequence: Synthetic oligonucleotide
ucccuucucaaauggguag

SEQ ID NO: 2705327 - RNA, 19 nt, Artificial Sequence
  Description of Artificial Sequence: Synthetic oligonucleotide
uccucaugugucucagugg

SEQ ID NO: 2705328 - RNA, 19 nt, Artificial Sequence
  Description of Artificial Sequence: Synthetic oligonucleotide
caguagauacacuugguca

SEQ ID NO: 2705329 - RNA, 19 nt, Artificial Sequence
  Description of Artificial Sequence: Synthetic oligonucleotide
auggguaguugaugguggc

SEQ ID NO: 2705330 - RNA, 19 nt, Artificial Sequence
  Description of Artificial Sequence: Synthetic oligonucleotide
ucuguccacaacagagucc

SEQ ID NO: 2705331 - RNA, 19 nt, Artificial Sequence
  Description of Artificial Sequence: Synthetic oligonucleotide
auggguagcggcgcaaugc

SEQ ID NO: 2705332 - RNA, 19 nt, Artificial Sequence
  Description of Artificial Sequence: Synthetic oligonucleotide
ucaaugucauagcguguag

SEQ ID NO: 2705333 - RNA, 19 nt, Artificial Sequence
  Description of Artificial Sequence: Synthetic oligonucleotide
agguagucagccuggaugu

SEQ ID NO: 2705334 - RNA, 19 nt, Artificial Sequence
  Description of Artificial Sequence: Synthetic oligonucleotide
ucaugugucucaguggaga

SEQ ID NO: 2705335 - RNA, 19 nt, Artificial Sequence
  Description of Artificial Sequence: Synthetic oligonucleotide
ugcguguuccccacggaag

SEQ ID NO: 2705336 - RNA, 19 nt, Artificial Sequence
  Description of Artificial Sequence: Synthetic oligonucleotide
agguagcucagggucaugc

SEQ ID NO: 2705337 - RNA, 19 nt, Artificial Sequence
  Description of Artificial Sequence: Synthetic oligonucleotide
guuugcaggcgaugcagcg

SEQ ID NO: 2705338 - RNA, 19 nt, Artificial Sequence
  Description of Artificial Sequence: Synthetic oligonucleotide
gacagccucacagaguuug

SEQ ID NO: 2705339 - RNA, 19 nt, Artificial Sequence
  Description of Artificial Sequence: Synthetic oligonucleotide
gguacagguagucagccug

SEQ ID NO: 2705340 - RNA, 19 nt, Artificial Sequence
  Description of Artificial Sequence: Synthetic oligonucleotide
auugcgucaacagggcagg

SEQ ID NO: 2705341 - RNA, 19 nt, Artificial Sequence
  Description of Artificial Sequence: Synthetic oligonucleotide
aggucaccgguacagguag

SEQ ID NO: 2705342 - RNA, 19 nt, Artificial Sequence
  Description of Artificial Sequence: Synthetic oligonucleotide
ugcuaugagauguccugug

SEQ ID NO: 2705343 - RNA, 19 nt, Artificial Sequence
  Description of Artificial Sequence: Synthetic oligonucleotide
gauguuggcggaaaucuca

SEQ ID NO: 2705344 - RNA, 19 nt, Artificial Sequence
  Description of Artificial Sequence: Synthetic oligonucleotide
agcguggacucaguggucc

SEQ ID NO: 2705345 - RNA, 19 nt, Artificial Sequence
  Description of Artificial Sequence: Synthetic oligonucleotide
uacagcaacuccucaugug

SEQ ID NO: 2705346 - RNA, 19 nt, Artificial Sequence
  Description of Artificial Sequence: Synthetic oligonucleotide
guagcucagggucaugccc

SEQ ID NO: 2705347 - RNA, 19 nt, Artificial Sequence
  Description of Artificial Sequence: Synthetic oligonucleotide
ucacagaguuugcaggcga

SEQ ID NO: 2705348 - RNA, 19 nt, Artificial Sequence
  Description of Artificial Sequence: Synthetic oligonucleotide
ucaagcuccuguucauuca

SEQ ID NO: 2705349 - RNA, 19 nt, Artificial Sequence
  Description of Artificial Sequence: Synthetic oligonucleotide
gaagcguggacucaguggu

SEQ ID NO: 2705350 - RNA, 19 nt, Artificial Sequence
  Description of Artificial Sequence: Synthetic oligonucleotide
gaguuugcaggcgaugcag

SEQ ID NO: 2705351 - RNA, 19 nt, Artificial Sequence
  Description of Artificial Sequence: Synthetic oligonucleotide
cauagcguguaguccggcg

SEQ ID NO: 2705352 - RNA, 19 nt, Artificial Sequence
  Description of Artificial Sequence: Synthetic oligonucleotide
ugaaugaagucagacgaua

SEQ ID NO: 2705353 - RNA, 19 nt, Artificial Sequence
  Description of Artificial Sequence: Synthetic oligonucleotide
cauucacauacuuauaagu

SEQ ID NO: 2705354 - RNA, 19 nt, Artificial Sequence
  Description of Artificial Sequence: Synthetic oligonucleotide
ggaagcguggacucagugg

SEQ ID NO: 2705355 - RNA, 19 nt, Artificial Sequence
  Description of Artificial Sequence: Synthetic oligonucleotide
cuccucaugugucucagug

SEQ ID NO: 2705356 - RNA, 19 nt, Artificial Sequence
  Description of Artificial Sequence: Synthetic oligonucleotide
augaagucagacgauacau

SEQ ID NO: 2705357 - RNA, 19 nt, Artificial Sequence
  Description of Artificial Sequence: Synthetic oligonucleotide
caaugcguguuccccacgg

SEQ ID NO: 2705358 - RNA, 19 nt, Artificial Sequence
  Description of Artificial Sequence: Synthetic oligonucleotide
uggucccuucucaaauggg

SEQ ID NO: 2705359 - RNA, 19 nt, Artificial Sequence
  Description of Artificial Sequence: Synthetic oligonucleotide
gaugcagcguucuucccca

SEQ ID NO: 2705360 - RNA, 19 nt, Artificial Sequence
  Description of Artificial Sequence: Synthetic oligonucleotide
agauacacuuggucauguc

SEQ ID NO: 2705361 - RNA, 19 nt, Artificial Sequence
  Description of Artificial Sequence: Synthetic oligonucleotide
gaacucaaaguuggggccc

SEQ ID NO: 2705362 - RNA, 19 nt, Artificial Sequence
  Description of Artificial Sequence: Synthetic oligonucleotide
uuguacagcaacuccucau

SEQ ID NO: 2705363 - RNA, 19 nt, Artificial Sequence
  Description of Artificial Sequence: Synthetic oligonucleotide
uggcucagccucaauggug

SEQ ID NO: 2705364 - RNA, 19 nt, Artificial Sequence
  Description of Artificial Sequence: Synthetic oligonucleotide
caccgguacagguagucag

SEQ ID NO: 2705365 - RNA, 19 nt, Artificial Sequence
  Description of Artificial Sequence: Synthetic oligonucleotide
uuggcggaaaucucagccu

SEQ ID NO: 2705366 - RNA, 19 nt, Artificial Sequence
  Description of Artificial Sequence: Synthetic oligonucleotide
aguggucccuucucaaaug

SEQ ID NO: 2705367 - RNA, 19 nt, Artificial Sequence
  Description of Artificial Sequence: Synthetic oligonucleotide
aguuugcaggcgaugcagc

SEQ ID NO: 2705368 - RNA, 19 nt, Artificial Sequence
  Description of Artificial Sequence: Synthetic oligonucleotide
cagaguuugcaggcgaugc

SEQ ID NO: 2705369 - RNA, 19 nt, Artificial Sequence
  Description of Artificial Sequence: Synthetic oligonucleotide
aacuccucaugugucucag

SEQ ID NO: 2705370 - RNA, 19 nt, Artificial Sequence
  Description of Artificial Sequence: Synthetic oligonucleotide
cucaagcuccuguucauuc

SEQ ID NO: 2705371 - RNA, 19 nt, Artificial Sequence
  Description of Artificial Sequence: Synthetic oligonucleotide
guugcugccacugcacugc

SEQ ID NO: 2705372 - RNA, 19 nt, Artificial Sequence
  Description of Artificial Sequence: Synthetic oligonucleotide
uacuuauaaguugcugcca

SEQ ID NO: 2705373 - RNA, 19 nt, Artificial Sequence
  Description of Artificial Sequence: Synthetic oligonucleotide
aaguuggggcccuccacga

SEQ ID NO: 2705374 - RNA, 19 nt, Artificial Sequence
  Description of Artificial Sequence: Synthetic oligonucleotide
ccacaguagauacacuugg

SEQ ID NO: 2705375 - RNA, 19 nt, Artificial Sequence
  Description of Artificial Sequence: Synthetic oligonucleotide
cucaaauggguaguugaug

SEQ ID NO: 2705376 - RNA, 19 nt, Artificial Sequence
  Description of Artificial Sequence: Synthetic oligonucleotide
ucggauaaguucuguccac

SEQ ID NO: 2705377 - RNA, 19 nt, Artificial Sequence
  Description of Artificial Sequence: Synthetic oligonucleotide
acgauugcgucaacagggc

SEQ ID NO: 2705378 - RNA, 19 nt, Artificial Sequence
  Description of Artificial Sequence: Synthetic oligonucleotide
uggccugaaccaaggcccg

SEQ ID NO: 2705379 - RNA, 19 nt, Artificial Sequence
  Description of Artificial Sequence: Synthetic oligonucleotide
uagcguguaguccggcggc

SEQ ID NO: 2705380 - RNA, 19 nt, Artificial Sequence
  Description of Artificial Sequence: Synthetic oligonucleotide
ugucaaugucauagcgugu

SEQ ID NO: 2705381 - RNA, 19 nt, Artificial Sequence
  Description of Artificial Sequence: Synthetic oligonucleotide
aaugcguguuccccacgga

SEQ ID NO: 2705382 - RNA, 19 nt, Artificial Sequence
  Description of Artificial Sequence: Synthetic oligonucleotide
uuggcucagccucaauggu

SEQ ID NO: 2705383 - RNA, 19 nt, Artificial Sequence
  Description of Artificial Sequence: Synthetic oligonucleotide
ugauggccugugcaggaca

SEQ ID NO: 2705384 - RNA, 19 nt, Artificial Sequence
  Description of Artificial Sequence: Synthetic oligonucleotide
ggcagcaugaaugaaguca

SEQ ID NO: 2705385 - RNA, 19 nt, Artificial Sequence
  Description of Artificial Sequence: Synthetic oligonucleotide
gugcguauggccugaacca

SEQ ID NO: 2705386 - RNA, 19 nt, Artificial Sequence
  Description of Artificial Sequence: Synthetic oligonucleotide
gcugccaucagcucuuggc

SEQ ID NO: 2705387 - RNA, 19 nt, Artificial Sequence
  Description of Artificial Sequence: Synthetic oligonucleotide
ccucggauaaguucugucc

SEQ ID NO: 2705388 - RNA, 19 nt, Artificial Sequence
  Description of Artificial Sequence: Synthetic oligonucleotide
ugagauguccugugcguau

SEQ ID NO: 2705389 - RNA, 19 nt, Artificial Sequence
  Description of Artificial Sequence: Synthetic oligonucleotide
agaguuugcaggcgaugca

SEQ ID NO: 2705390 - RNA, 19 nt, Artificial Sequence
  Description of Artificial Sequence: Synthetic oligonucleotide
uguuccccacggaagcgug

SEQ ID NO: 2705391 - RNA, 19 nt, Artificial Sequence
  Description of Artificial Sequence: Synthetic oligonucleotide
cucggauaaguucugucca

SEQ ID NO: 2705392 - RNA, 19 nt, Artificial Sequence
  Description of Artificial Sequence: Synthetic oligonucleotide
gcagcaugaaugaagucag

SEQ ID NO: 2705393 - RNA, 19 nt, Artificial Sequence
  Description of Artificial Sequence: Synthetic oligonucleotide
uccccagauggguagcggc

SEQ ID NO: 2705394 - RNA, 19 nt, Artificial Sequence
  Description of Artificial Sequence: Synthetic oligonucleotide
uuggggcccuccacgauug

SEQ ID NO: 2705395 - RNA, 19 nt, Artificial Sequence
  Description of Artificial Sequence: Synthetic oligonucleotide
caagcuccuguucauucac

SEQ ID NO: 2705396 - RNA, 19 nt, Artificial Sequence
  Description of Artificial Sequence: Synthetic oligonucleotide
auacacuuggucaugucaa

SEQ ID NO: 2705397 - RNA, 19 nt, Artificial Sequence
  Description of Artificial Sequence: Synthetic oligonucleotide
accgguacagguagucagc

SEQ ID NO: 2705398 - RNA, 19 nt, Artificial Sequence
  Description of Artificial Sequence: Synthetic oligonucleotide
caucucaagcuccuguuca

SEQ ID NO: 2705399 - RNA, 19 nt, Artificial Sequence
  Description of Artificial Sequence: Synthetic oligonucleotide
ugccacugcacugcuauga

SEQ ID NO: 2705400 - RNA, 19 nt, Artificial Sequence
  Description of Artificial Sequence: Synthetic oligonucleotide
ucucaguggagaacucaaa

SEQ ID NO: 2705401 - RNA, 19 nt, Artificial Sequence
  Description of Artificial Sequence: Synthetic oligonucleotide
aagagguagcucaggguca

SEQ ID NO: 2705402 - RNA, 19 nt, Artificial Sequence
  Description of Artificial Sequence: Synthetic oligonucleotide
guaguugaugguggcaggc

SEQ ID NO: 2705403 - RNA, 19 nt, Artificial Sequence
  Description of Artificial Sequence: Synthetic oligonucleotide
cucagggucaugcccaguc

SEQ ID NO: 2705404 - RNA, 19 nt, Artificial Sequence
  Description of Artificial Sequence: Synthetic oligonucleotide
acucaguggucccuucuca

SEQ ID NO: 2705405 - RNA, 19 nt, Artificial Sequence
  Description of Artificial Sequence: Synthetic oligonucleotide
uagauacacuuggucaugu

SEQ ID NO: 2705406 - RNA, 19 nt, Artificial Sequence
  Description of Artificial Sequence: Synthetic oligonucleotide
uguuggcggaaaucucagc

SEQ ID NO: 2705407 - RNA, 19 nt, Artificial Sequence
  Description of Artificial Sequence: Synthetic oligonucleotide
guacagguagucagccugg

SEQ ID NO: 2705408 - RNA, 19 nt, Artificial Sequence
  Description of Artificial Sequence: Synthetic oligonucleotide
augugucucaguggagaac

SEQ ID NO: 2705409 - RNA, 19 nt, Artificial Sequence
  Description of Artificial Sequence: Synthetic oligonucleotide
ucaguggucccuucucaaa

SEQ ID NO: 2705410 - RNA, 19 nt, Artificial Sequence
  Description of Artificial Sequence: Synthetic oligonucleotide
guugaugguggcaggcucc

SEQ ID NO: 2705411 - RNA, 19 nt, Artificial Sequence
  Description of Artificial Sequence: Synthetic oligonucleotide
ugcacugcuaugagauguc

SEQ ID NO: 2705412 - RNA, 19 nt, Artificial Sequence
  Description of Artificial Sequence: Synthetic oligonucleotide
gaaagagguagcucagggu

SEQ ID NO: 2705413 - RNA, 19 nt, Artificial Sequence
  Description of Artificial Sequence: Synthetic oligonucleotide
uccaucucaagcuccuguu

SEQ ID NO: 2705414 - RNA, 19 nt, Artificial Sequence
  Description of Artificial Sequence: Synthetic oligonucleotide
cagaguccgagcugcgcgg

SEQ ID NO: 2705415 - RNA, 19 nt, Artificial Sequence
  Description of Artificial Sequence: Synthetic oligonucleotide
guagauacacuuggucaug

SEQ ID NO: 2705416 - RNA, 19 nt, Artificial Sequence
  Description of Artificial Sequence: Synthetic oligonucleotide
caaaguuggggcccuccac

SEQ ID NO: 2705417 - RNA, 19 nt, Artificial Sequence
  Description of Artificial Sequence: Synthetic oligonucleotide
uugcaggcgaugcagcguu

SEQ ID NO: 2705418 - RNA, 19 nt, Artificial Sequence
  Description of Artificial Sequence: Synthetic oligonucleotide
gauggguagcggcgcaaug

SEQ ID NO: 2705419 - RNA, 19 nt, Artificial Sequence
  Description of Artificial Sequence: Synthetic oligonucleotide
uccucggauaaguucuguc

SEQ ID NO: 2705420 - RNA, 19 nt, Artificial Sequence
  Description of Artificial Sequence: Synthetic oligonucleotide
ggcgaugcagcguucuucc

SEQ ID NO: 2705421 - RNA, 19 nt, Artificial Sequence
  Description of Artificial Sequence: Synthetic oligonucleotide
cacaacagaguccgagcug

SEQ ID NO: 2705422 - RNA, 19 nt, Artificial Sequence
  Description of Artificial Sequence: Synthetic oligonucleotide
gguggcaggcucccgaaag

SEQ ID NO: 2705423 - RNA, 19 nt, Artificial Sequence
  Description of Artificial Sequence: Synthetic oligonucleotide
gacuucauguccaucucaa

SEQ ID NO: 2705424 - RNA, 19 nt, Artificial Sequence
  Description of Artificial Sequence: Synthetic oligonucleotide
aacucaaaguuggggcccu

SEQ ID NO: 2705425 - RNA, 19 nt, Artificial Sequence
  Description of Artificial Sequence: Synthetic oligonucleotide
ggguaguugaugguggcag

SEQ ID NO: 2705426 - RNA, 19 nt, Artificial Sequence
  Description of Artificial Sequence: Synthetic oligonucleotide
uggcaggcucccgaaagag

SEQ ID NO: 2705427 - RNA, 19 nt, Artificial Sequence
  Description of Artificial Sequence: Synthetic oligonucleotide
ugcgucaacagggcaggcc

SEQ ID NO: 2705428 - RNA, 19 nt, Artificial Sequence
  Description of Artificial Sequence: Synthetic oligonucleotide
uuugcaggcgaugcagcgu

SEQ ID NO: 2705429 - RNA, 19 nt, Artificial Sequence
  Description of Artificial Sequence: Synthetic oligonucleotide
cuucucaaauggguaguug

SEQ ID NO: 2705430 - RNA, 19 nt, Artificial Sequence
  Description of Artificial Sequence: Synthetic oligonucleotide
gcuaugagauguccugugc

SEQ ID NO: 2705431 - RNA, 19 nt, Artificial Sequence
  Description of Artificial Sequence: Synthetic oligonucleotide
agcggcgcaaugcguguuc

SEQ ID NO: 2705432 - RNA, 19 nt, Artificial Sequence
  Description of Artificial Sequence: Synthetic oligonucleotide
aggcgaugcagcguucuuc

SEQ ID NO: 2705433 - RNA, 19 nt, Artificial Sequence
  Description of Artificial Sequence: Synthetic oligonucleotide
guuguacagcaacuccuca

SEQ ID NO: 2705434 - RNA, 19 nt, Artificial Sequence
  Description of Artificial Sequence: Synthetic oligonucleotide
cucaugugucucaguggag

SEQ ID NO: 2705435 - RNA, 19 nt, Artificial Sequence
  Description of Artificial Sequence: Synthetic oligonucleotide
aggcucccgaaagagguag

SEQ ID NO: 2705436 - RNA, 19 nt, Artificial Sequence
  Description of Artificial Sequence: Synthetic oligonucleotide
ccucacagaguuugcaggc

SEQ ID NO: 2705437 - RNA, 19 nt, Artificial Sequence
  Description of Artificial Sequence: Synthetic oligonucleotide
gucaaugucauagcgugua

SEQ ID NO: 2705438 - RNA, 19 nt, Artificial Sequence
  Description of Artificial Sequence: Synthetic oligonucleotide
gagauguccugugcguaug

SEQ ID NO: 2705439 - RNA, 19 nt, Artificial Sequence
  Description of Artificial Sequence: Synthetic oligonucleotide
ucaugcccaguccucggau

SEQ ID NO: 2705440 - RNA, 19 nt, Artificial Sequence
  Description of Artificial Sequence: Synthetic oligonucleotide
cugaaccaaggcccguggc

SEQ ID NO: 2705441 - RNA, 19 nt, Artificial Sequence
  Description of Artificial Sequence: Synthetic oligonucleotide
caguccucggauaaguucu

SEQ ID NO: 2705442 - RNA, 19 nt, Artificial Sequence
  Description of Artificial Sequence: Synthetic oligonucleotide
augcguguuccccacggaa

SEQ ID NO: 2705443 - RNA, 19 nt, Artificial Sequence
  Description of Artificial Sequence: Synthetic oligonucleotide
gucauagcguguaguccgg

SEQ ID NO: 2705444 - RNA, 19 nt, Artificial Sequence
  Description of Artificial Sequence: Synthetic oligonucleotide
ugcagcguucuuccccaga

SEQ ID NO: 2705445 - RNA, 19 nt, Artificial Sequence
  Description of Artificial Sequence: Synthetic oligonucleotide
cucaaaguuggggcccucc

SEQ ID NO: 2705446 - RNA, 19 nt, Artificial Sequence
  Description of Artificial Sequence: Synthetic oligonucleotide
uuccccagauggguagcgg

SEQ ID NO: 2705447 - RNA, 19 nt, Artificial Sequence
  Description of Artificial Sequence: Synthetic oligonucleotide
acagaguuugcaggcgaug

SEQ ID NO: 2705448 - RNA, 19 nt, Artificial Sequence
  Description of Artificial Sequence: Synthetic oligonucleotide
cguggcagcaugaaugaag

SEQ ID NO: 2705449 - RNA, 19 nt, Artificial Sequence
  Description of Artificial Sequence: Synthetic oligonucleotide
ucaccgguacagguaguca

SEQ ID NO: 2705450 - RNA, 19 nt, Artificial Sequence
  Description of Artificial Sequence: Synthetic oligonucleotide
uggguaguugaugguggca

SEQ ID NO: 2705451 - RNA, 19 nt, Artificial Sequence
  Description of Artificial Sequence: Synthetic oligonucleotide
cuguucauucacauacuua

SEQ ID NO: 2705452 - RNA, 19 nt, Artificial Sequence
  Description of Artificial Sequence: Synthetic oligonucleotide
cacuuggucaugucaaugu

SEQ ID NO: 2705453 - RNA, 19 nt, Artificial Sequence
  Description of Artificial Sequence: Synthetic oligonucleotide
ccacgauugcgucaacagg

SEQ ID NO: 2705454 - RNA, 19 nt, Artificial Sequence
  Description of Artificial Sequence: Synthetic oligonucleotide
gguagcucagggucaugcc

SEQ ID NO: 2705455 - RNA, 19 nt, Artificial Sequence
  Description of Artificial Sequence: Synthetic oligonucleotide
augcccaguccucggauaa

SEQ ID NO: 2705456 - RNA, 19 nt, Artificial Sequence
  Description of Artificial Sequence: Synthetic oligonucleotide
gucacggacuucaugucca

SEQ ID NO: 2705457 - RNA, 19 nt, Artificial Sequence
  Description of Artificial Sequence: Synthetic oligonucleotide
cacggaagcguggacucag

SEQ ID NO: 2705458 - RNA, 19 nt, Artificial Sequence
  Description of Artificial Sequence: Synthetic oligonucleotide
ugcguauggccugaaccaa

SEQ ID NO: 2705459 - RNA, 19 nt, Artificial Sequence
  Description of Artificial Sequence: Synthetic oligonucleotide
gucaacagggcaggccucc

SEQ ID NO: 2705460 - RNA, 19 nt, Artificial Sequence
  Description of Artificial Sequence: Synthetic oligonucleotide
cagccucccauuugucccc

SEQ ID NO: 2705461 - RNA, 19 nt, Artificial Sequence
  Description of Artificial Sequence: Synthetic oligonucleotide
cuuccccagauggguagcg

SEQ ID NO: 2705462 - RNA, 19 nt, Artificial Sequence
  Description of Artificial Sequence: Synthetic oligonucleotide
gguagcggcgcaaugcgug

SEQ ID NO: 2705463 - RNA, 19 nt, Artificial Sequence
  Description of Artificial Sequence: Synthetic oligonucleotide
aagcguggacucagugguc

SEQ ID NO: 2705464 - RNA, 19 nt, Artificial Sequence
  Description of Artificial Sequence: Synthetic oligonucleotide
ucauagcguguaguccggc

SEQ ID NO: 2705465 - RNA, 19 nt, Artificial Sequence
  Description of Artificial Sequence: Synthetic oligonucleotide
caugugucucaguggagaa

SEQ ID NO: 2705466 - RNA, 19 nt, Artificial Sequence
  Description of Artificial Sequence: Synthetic oligonucleotide
cauuguugagcagcuucuc

SEQ ID NO: 2705467 - RNA, 19 nt, Artificial Sequence
  Description of Artificial Sequence: Synthetic oligonucleotide
uuccccacggaagcgugga

SEQ ID NO: 2705468 - RNA, 19 nt, Artificial Sequence
  Description of Artificial Sequence: Synthetic oligonucleotide
cagucacggacuucauguc

SEQ ID NO: 2705469 - RNA, 19 nt, Artificial Sequence
  Description of Artificial Sequence: Synthetic oligonucleotide
aguccggcggcugccauca

SEQ ID NO: 2705470 - RNA, 19 nt, Artificial Sequence
  Description of Artificial Sequence: Synthetic oligonucleotide
gcagaaaccacaguagaua

SEQ ID NO: 2705471 - RNA, 19 nt, Artificial Sequence
  Description of Artificial Sequence: Synthetic oligonucleotide
ccucaugugucucagugga

SEQ ID NO: 2705472 - RNA, 19 nt, Artificial Sequence
  Description of Artificial Sequence: Synthetic oligonucleotide
ggucaugcccaguccucgg

SEQ ID NO: 2705473 - RNA, 19 nt, Artificial Sequence
  Description of Artificial Sequence: Synthetic oligonucleotide
gagcugcgcggucagucac

SEQ ID NO: 2705474 - RNA, 19 nt, Artificial Sequence
  Description of Artificial Sequence: Synthetic oligonucleotide
agggucaugcccaguccuc

SEQ ID NO: 2705475 - RNA, 19 nt, Artificial Sequence
  Description of Artificial Sequence: Synthetic oligonucleotide
cuuauaaguugcugccacu

SEQ ID NO: 2705476 - RNA, 19 nt, Artificial Sequence
  Description of Artificial Sequence: Synthetic oligonucleotide
cagacagccucacagaguu

SEQ ID NO: 2705477 - RNA, 19 nt, Artificial Sequence
  Description of Artificial Sequence: Synthetic oligonucleotide
gcccguggcagcaugaaug

SEQ ID NO: 2705478 - RNA, 19 nt, Artificial Sequence
  Description of Artificial Sequence: Synthetic oligonucleotide
acagacagccucacagagu

SEQ ID NO: 2705479 - RNA, 19 nt, Artificial Sequence
  Description of Artificial Sequence: Synthetic oligonucleotide
gcguguuccccacggaagc

SEQ ID NO: 2705480 - RNA, 19 nt, Artificial Sequence
  Description of Artificial Sequence: Synthetic oligonucleotide
ggauaaguucuguccacaa

SEQ ID NO: 2705481 - RNA, 19 nt, Artificial Sequence
  Description of Artificial Sequence: Synthetic oligonucleotide
ccaguccucggauaaguuc

SEQ ID NO: 2705482 - RNA, 19 nt, Artificial Sequence
  Description of Artificial Sequence: Synthetic oligonucleotide
ccuggcagaaaccacagua

SEQ ID NO: 2705483 - RNA, 19 nt, Artificial Sequence
  Description of Artificial Sequence: Synthetic oligonucleotide
cucagccucaauggugaug

SEQ ID NO: 2705484 - RNA, 19 nt, Artificial Sequence
  Description of Artificial Sequence: Synthetic oligonucleotide
ggacuucauguccaucuca

SEQ ID NO: 2705485 - RNA, 19 nt, Artificial Sequence
  Description of Artificial Sequence: Synthetic oligonucleotide
gucucaguggagaacucaa

SEQ ID NO: 2705486 - RNA, 19 nt, Artificial Sequence
  Description of Artificial Sequence: Synthetic oligonucleotide
guggcagcaugaaugaagu

SEQ ID NO: 2705487 - RNA, 19 nt, Artificial Sequence
  Description of Artificial Sequence: Synthetic oligonucleotide
ggcgcaaugcguguucccc

SEQ ID NO: 2705488 - RNA, 19 nt, Artificial Sequence
  Description of Artificial Sequence: Synthetic oligonucleotide
ggaaaucucagccucccau

SEQ ID NO: 2705489 - RNA, 19 nt, Artificial Sequence
  Description of Artificial Sequence: Synthetic oligonucleotide
gccacugcacugcuaugag

SEQ ID NO: 2705490 - RNA, 19 nt, Artificial Sequence
  Description of Artificial Sequence: Synthetic oligonucleotide
guacagcaacuccucaugu

SEQ ID NO: 2705491 - RNA, 19 nt, Artificial Sequence
  Description of Artificial Sequence: Synthetic oligonucleotide
ucucaagcuccuguucauu

SEQ ID NO: 2705492 - RNA, 19 nt, Artificial Sequence
  Description of Artificial Sequence: Synthetic oligonucleotide
gggucaugcccaguccucg

SEQ ID NO: 2705493 - RNA, 19 nt, Artificial Sequence
  Description of Artificial Sequence: Synthetic oligonucleotide
aguccgagcugcgcgguca

SEQ ID NO: 2705494 - RNA, 19 nt, Artificial Sequence
  Description of Artificial Sequence: Synthetic oligonucleotide
ucacggacuucauguccau

SEQ ID NO: 2705495 - RNA, 19 nt, Artificial Sequence
  Description of Artificial Sequence: Synthetic oligonucleotide
gucaccgguacagguaguc

SEQ ID NO: 2705496 - RNA, 19 nt, Artificial Sequence
  Description of Artificial Sequence: Synthetic oligonucleotide
uggcagcaugaaugaaguc

SEQ ID NO: 2705497 - RNA, 19 nt, Artificial Sequence
  Description of Artificial Sequence: Synthetic oligonucleotide
ggugauggccugugcagga

SEQ ID NO: 2705498 - RNA, 19 nt, Artificial Sequence
  Description of Artificial Sequence: Synthetic oligonucleotide
guuccccacggaagcgugg

SEQ ID NO: 2705499 - RNA, 19 nt, Artificial Sequence
  Description of Artificial Sequence: Synthetic oligonucleotide
ccugaaccaaggcccgugg

SEQ ID NO: 2705500 - RNA, 19 nt, Artificial Sequence
  Description of Artificial Sequence: Synthetic oligonucleotide
guggcaggcucccgaaaga

SEQ ID NO: 2705501 - RNA, 19 nt, Artificial Sequence
  Description of Artificial Sequence: Synthetic oligonucleotide
caacuccucaugugucuca

SEQ ID NO: 2705502 - RNA, 19 nt, Artificial Sequence
  Description of Artificial Sequence: Synthetic oligonucleotide
uguccacaacagaguccga

SEQ ID NO: 2705503 - RNA, 19 nt, Artificial Sequence
  Description of Artificial Sequence: Synthetic oligonucleotide
uugcugccacugcacugcu

SEQ ID NO: 2705504 - RNA, 19 nt, Artificial Sequence
  Description of Artificial Sequence: Synthetic oligonucleotide
caaauggguaguugauggu

SEQ ID NO: 2705505 - RNA, 19 nt, Artificial Sequence
  Description of Artificial Sequence: Synthetic oligonucleotide
ugcccaguccucggauaag

SEQ ID NO: 2705506 - RNA, 19 nt, Artificial Sequence
  Description of Artificial Sequence: Synthetic oligonucleotide
guucauucacauacuuaua

SEQ ID NO: 2705507 - RNA, 19 nt, Artificial Sequence
  Description of Artificial Sequence: Synthetic oligonucleotide
cacaguagauacacuuggu

SEQ ID NO: 2705508 - RNA, 19 nt, Artificial Sequence
  Description of Artificial Sequence: Synthetic oligonucleotide
uggccaggucaccgguaca

SEQ ID NO: 2705509 - RNA, 19 nt, Artificial Sequence
  Description of Artificial Sequence: Synthetic oligonucleotide
cgaugcagcguucuucccc

SEQ ID NO: 2705510 - RNA, 19 nt, Artificial Sequence
  Description of Artificial Sequence: Synthetic oligonucleotide
guucuguccacaacagagu

SEQ ID NO: 2705511 - RNA, 19 nt, Artificial Sequence
  Description of Artificial Sequence: Synthetic oligonucleotide
cacauacuuauaaguugcu

SEQ ID NO: 2705512 - RNA, 19 nt, Artificial Sequence
  Description of Artificial Sequence: Synthetic oligonucleotide
uccugugcguauggccuga

SEQ ID NO: 2705513 - RNA, 19 nt, Artificial Sequence
  Description of Artificial Sequence: Synthetic oligonucleotide
cugcacugcuaugagaugu

SEQ ID NO: 2705514 - RNA, 19 nt, Artificial Sequence
  Description of Artificial Sequence: Synthetic oligonucleotide
caacagggcaggccuccug

SEQ ID NO: 2705515 - RNA, 19 nt, Artificial Sequence
  Description of Artificial Sequence: Synthetic oligonucleotide
cagcguucuuccccagaug

SEQ ID NO: 2705516 - RNA, 19 nt, Artificial Sequence
  Description of Artificial Sequence: Synthetic oligonucleotide
uggucaugucaaugucaua

SEQ ID NO: 2705517 - RNA, 19 nt, Artificial Sequence
  Description of Artificial Sequence: Synthetic oligonucleotide
ggcaggcucccgaaagagg

SEQ ID NO: 2705518 - RNA, 19 nt, Artificial Sequence
  Description of Artificial Sequence: Synthetic oligonucleotide
cccgaaagagguagcucag

SEQ ID NO: 2705519 - RNA, 19 nt, Artificial Sequence
  Description of Artificial Sequence: Synthetic oligonucleotide
ucaacagggcaggccuccu

SEQ ID NO: 2705520 - RNA, 19 nt, Artificial Sequence
  Description of Artificial Sequence: Synthetic oligonucleotide
aguccucggauaaguucug

SEQ ID NO: 2705521 - RNA, 19 nt, Artificial Sequence
  Description of Artificial Sequence: Synthetic oligonucleotide
cugugcguauggccugaac

SEQ ID NO: 2705522 - RNA, 19 nt, Artificial Sequence
  Description of Artificial Sequence: Synthetic oligonucleotide
gcaaugcguguuccccacg

SEQ ID NO: 2705523 - RNA, 19 nt, Artificial Sequence
  Description of Artificial Sequence: Synthetic oligonucleotide
aaggcccguggcagcauga

SEQ ID NO: 2705524 - RNA, 19 nt, Artificial Sequence
  Description of Artificial Sequence: Synthetic oligonucleotide
caggucaccgguacaggua

SEQ ID NO: 2705525 - RNA, 19 nt, Artificial Sequence
  Description of Artificial Sequence: Synthetic oligonucleotide
uaguccggcggcugccauc

SEQ ID NO: 2705526 - RNA, 19 nt, Artificial Sequence
  Description of Artificial Sequence: Synthetic oligonucleotide
guguaguccggcggcugcc

SEQ ID NO: 2705527 - RNA, 19 nt, Artificial Sequence
  Description of Artificial Sequence: Synthetic oligonucleotide
cacugcuaugagauguccu

SEQ ID NO: 2705528 - RNA, 19 nt, Artificial Sequence
  Description of Artificial Sequence: Synthetic oligonucleotide
gcggaaaucucagccuccc

SEQ ID NO: 2705529 - RNA, 19 nt, Artificial Sequence
  Description of Artificial Sequence: Synthetic oligonucleotide
guccgagcugcgcggucag

SEQ ID NO: 2705530 - RNA, 19 nt, Artificial Sequence
  Description of Artificial Sequence: Synthetic oligonucleotide
caaugucauagcguguagu

SEQ ID NO: 2705531 - RNA, 19 nt, Artificial Sequence
  Description of Artificial Sequence: Synthetic oligonucleotide
augcagcguucuuccccag

SEQ ID NO: 2705532 - RNA, 19 nt, Artificial Sequence
  Description of Artificial Sequence: Synthetic oligonucleotide
agcucuuggcucagccuca

SEQ ID NO: 2705533 - RNA, 19 nt, Artificial Sequence
  Description of Artificial Sequence: Synthetic oligonucleotide
cagcaugaaugaagucaga

SEQ ID NO: 2705534 - RNA, 19 nt, Artificial Sequence
  Description of Artificial Sequence: Synthetic oligonucleotide
cccacggaagcguggacuc

SEQ ID NO: 2705535 - RNA, 19 nt, Artificial Sequence
  Description of Artificial Sequence: Synthetic oligonucleotide
ugcaggcgaugcagcguuc

SEQ ID NO: 2705536 - RNA, 19 nt, Artificial Sequence
  Description of Artificial Sequence: Synthetic oligonucleotide
cugccacugcacugcuaug

SEQ ID NO: 2705537 - RNA, 19 nt, Artificial Sequence
  Description of Artificial Sequence: Synthetic oligonucleotide
cuccacgauugcgucaaca

SEQ ID NO: 2705538 - RNA, 19 nt, Artificial Sequence
  Description of Artificial Sequence: Synthetic oligonucleotide
gugauggccugugcaggac

SEQ ID NO: 2705539 - RNA, 19 nt, Artificial Sequence
  Description of Artificial Sequence: Synthetic oligonucleotide
ggauguuggcggaaaucuc

SEQ ID NO: 2705540 - RNA, 19 nt, Artificial Sequence
  Description of Artificial Sequence: Synthetic oligonucleotide
gcguucuuccccagauggg

SEQ ID NO: 2705541 - RNA, 19 nt, Artificial Sequence
  Description of Artificial Sequence: Synthetic oligonucleotide
gcacugcuaugagaugucc

SEQ ID NO: 2705542 - RNA, 19 nt, Artificial Sequence
  Description of Artificial Sequence: Synthetic oligonucleotide
agaguccgagcugcgcggu

SEQ ID NO: 2705543 - RNA, 19 nt, Artificial Sequence
  Description of Artificial Sequence: Synthetic oligonucleotide
ccgaaagagguagcucagg

SEQ ID NO: 2705544 - RNA, 19 nt, Artificial Sequence
  Description of Artificial Sequence: Synthetic oligonucleotide
gcguauggccugaaccaag

SEQ ID NO: 2705545 - RNA, 19 nt, Artificial Sequence
  Description of Artificial Sequence: Synthetic oligonucleotide
uugcgucaacagggcaggc

SEQ ID NO: 2705546 - RNA, 19 nt, Artificial Sequence
  Description of Artificial Sequence: Synthetic oligonucleotide
gcugccacugcacugcuau

SEQ ID NO: 2705547 - RNA, 19 nt, Artificial Sequence
  Description of Artificial Sequence: Synthetic oligonucleotide
gcgucaacagggcaggccu

SEQ ID NO: 2705548 - RNA, 19 nt, Artificial Sequence
  Description of Artificial Sequence: Synthetic oligonucleotide
ccgguacagguagucagcc

SEQ ID NO: 2705549 - RNA, 19 nt, Artificial Sequence
  Description of Artificial Sequence: Synthetic oligonucleotide
gccucaauggugauggccu

SEQ ID NO: 2705550 - RNA, 19 nt, Artificial Sequence
  Description of Artificial Sequence: Synthetic oligonucleotide
ggcggaaaucucagccucc

SEQ ID NO: 2705551 - RNA, 19 nt, Artificial Sequence
  Description of Artificial Sequence: Synthetic oligonucleotide
caugcccaguccucggaua

SEQ ID NO: 2705552 - RNA, 19 nt, Artificial Sequence
  Description of Artificial Sequence: Synthetic oligonucleotide
uggggcccuccacgauugc

SEQ ID NO: 2705553 - RNA, 19 nt, Artificial Sequence
  Description of Artificial Sequence: Synthetic oligonucleotide
ggggcccuccacgauugcg

SEQ ID NO: 2705554 - RNA, 19 nt, Artificial Sequence
  Description of Artificial Sequence: Synthetic oligonucleotide
agcguguaguccggcggcu

SEQ ID NO: 2705555 - RNA, 19 nt, Artificial Sequence
  Description of Artificial Sequence: Synthetic oligonucleotide
guucuuccccagaugggua

SEQ ID NO: 2705556 - RNA, 19 nt, Artificial Sequence
  Description of Artificial Sequence: Synthetic oligonucleotide
guagcggcgcaaugcgugu

SEQ ID NO: 2705557 - RNA, 19 nt, Artificial Sequence
  Description of Artificial Sequence: Synthetic oligonucleotide
gcaggcucccgaaagaggu

SEQ ID NO: 2705558 - RNA, 19 nt, Artificial Sequence
  Description of Artificial Sequence: Synthetic oligonucleotide
gaguccgagcugcgcgguc

SEQ ID NO: 2705559 - RNA, 19 nt, Artificial Sequence
  Description of Artificial Sequence: Synthetic oligonucleotide
cacggacuucauguccauc

SEQ ID NO: 2705560 - RNA, 19 nt, Artificial Sequence
  Description of Artificial Sequence: Synthetic oligonucleotide
gagguagcucagggucaug

SEQ ID NO: 2705561 - RNA, 19 nt, Artificial Sequence
  Description of Artificial Sequence: Synthetic oligonucleotide
cccagauggguagcggcgc

SEQ ID NO: 2705562 - RNA, 19 nt, Artificial Sequence
  Description of Artificial Sequence: Synthetic oligonucleotide
gccugaaccaaggcccgug

SEQ ID NO: 2705563 - RNA, 19 nt, Artificial Sequence
  Description of Artificial Sequence: Synthetic oligonucleotide
cccguggcagcaugaauga

SEQ ID NO: 2705564 - RNA, 19 nt, Artificial Sequence
  Description of Artificial Sequence: Synthetic oligonucleotide
cguguaguccggcggcugc

SEQ ID NO: 2705565 - RNA, 19 nt, Artificial Sequence
  Description of Artificial Sequence: Synthetic oligonucleotide
gcgcaaugcguguucccca

SEQ ID NO: 2705566 - RNA, 19 nt, Artificial Sequence
  Description of Artificial Sequence: Synthetic oligonucleotide
cacagaguuugcaggcgau

SEQ ID NO: 2705567 - RNA, 19 nt, Artificial Sequence
  Description of Artificial Sequence: Synthetic oligonucleotide
ggcagaaaccacaguagau

SEQ ID NO: 2705568 - RNA, 19 nt, Artificial Sequence
  Description of Artificial Sequence: Synthetic oligonucleotide
gcguggacucagugguccc

SEQ ID NO: 2705569 - RNA, 19 nt, Artificial Sequence
  Description of Artificial Sequence: Synthetic oligonucleotide
cgcaaugcguguuccccac

SEQ ID NO: 2705570 - RNA, 19 nt, Artificial Sequence
  Description of Artificial Sequence: Synthetic oligonucleotide
gcgaugcagcguucuuccc

SEQ ID NO: 2705571 - RNA, 19 nt, Artificial Sequence
  Description of Artificial Sequence: Synthetic oligonucleotide
cguguuccccacggaagcg

SEQ ID NO: 2705572 - RNA, 19 nt, Artificial Sequence
  Description of Artificial Sequence: Synthetic oligonucleotide
caggcucccgaaagaggua

SEQ ID NO: 2705573 - RNA, 19 nt, Artificial Sequence
  Description of Artificial Sequence: Synthetic oligonucleotide
guguuccccacggaagcgu

SEQ ID NO: 2705574 - RNA, 19 nt, Artificial Sequence
  Description of Artificial Sequence: Synthetic oligonucleotide
agccucccauuugucccca

SEQ ID NO: 2705575 - RNA, 19 nt, Artificial Sequence
  Description of Artificial Sequence: Synthetic oligonucleotide
aguggccaggucaccggua

SEQ ID NO: 2705576 - RNA, 19 nt, Artificial Sequence
  Description of Artificial Sequence: Synthetic oligonucleotide
ggacucaguggucccuucu

SEQ ID NO: 2705577 - RNA, 19 nt, Artificial Sequence
  Description of Artificial Sequence: Synthetic oligonucleotide
uagcggcgcaaugcguguu

SEQ ID NO: 2705578 - RNA, 19 nt, Artificial Sequence
  Description of Artificial Sequence: Synthetic oligonucleotide
ggcucccgaaagagguagc

SEQ ID NO: 2705579 - RNA, 19 nt, Artificial Sequence
  Description of Artificial Sequence: Synthetic oligonucleotide
cggucagucacggacuuca

SEQ ID NO: 2705580 - RNA, 19 nt, Artificial Sequence
  Description of Artificial Sequence: Synthetic oligonucleotide
aggcccguggcagcaugaa

SEQ ID NO: 2705581 - RNA, 19 nt, Artificial Sequence
  Description of Artificial Sequence: Synthetic oligonucleotide
uccgagcugcgcggucagu

SEQ ID NO: 2705582 - RNA, 19 nt, Artificial Sequence
  Description of Artificial Sequence: Synthetic oligonucleotide
cggaagcguggacucagug

SEQ ID NO: 2705583 - RNA, 19 nt, Artificial Sequence
  Description of Artificial Sequence: Synthetic oligonucleotide
ccgagcugcgcggucaguc

SEQ ID NO: 2705584 - RNA, 19 nt, Artificial Sequence
  Description of Artificial Sequence: Synthetic oligonucleotide
gcggcgcaaugcguguucc

SEQ ID NO: 2705585 - RNA, 19 nt, Artificial Sequence
  Description of Artificial Sequence: Synthetic oligonucleotide
cagauggguagcggcgcaa

SEQ ID NO: 2705586 - RNA, 19 nt, Artificial Sequence
  Description of Artificial Sequence: Synthetic oligonucleotide
ccaggucaccgguacaggu

SEQ ID NO: 2705587 - RNA, 19 nt, Artificial Sequence
  Description of Artificial Sequence: Synthetic oligonucleotide
gcucccgaaagagguagcu

SEQ ID NO: 2705588 - RNA, 19 nt, Artificial Sequence
  Description of Artificial Sequence: Synthetic oligonucleotide
ccagauggguagcggcgca

SEQ ID NO: 2705589 - RNA, 19 nt, Artificial Sequence
  Description of Artificial Sequence: Synthetic oligonucleotide
guccucggauaaguucugu

SEQ ID NO: 2705590 - RNA, 19 nt, Artificial Sequence
  Description of Artificial Sequence: Synthetic oligonucleotide
gcccuccacgauugcguca

SEQ ID NO: 2705591 - RNA, 19 nt, Artificial Sequence
  Description of Artificial Sequence: Synthetic oligonucleotide
cggauaaguucuguccaca

SEQ ID NO: 2705592 - RNA, 19 nt, Artificial Sequence
  Description of Artificial Sequence: Synthetic oligonucleotide
cccuccacgauugcgucaa

SEQ ID NO: 2705593 - RNA, 19 nt, Artificial Sequence
  Description of Artificial Sequence: Synthetic oligonucleotide
agacagccucacagaguuu

SEQ ID NO: 2705594 - RNA, 19 nt, Artificial Sequence
  Description of Artificial Sequence: Synthetic oligonucleotide
cgucaacagggcaggccuc

SEQ ID NO: 2705595 - RNA, 19 nt, Artificial Sequence
  Description of Artificial Sequence: Synthetic oligonucleotide
cgauugcgucaacagggca

SEQ ID NO: 2705596 - RNA, 19 nt, Artificial Sequence
  Description of Artificial Sequence: Synthetic oligonucleotide
gggcccuccacgauugcgu

SEQ ID NO: 2705597 - RNA, 19 nt, Artificial Sequence
  Description of Artificial Sequence: Synthetic oligonucleotide
guggacucaguggucccuu

SEQ ID NO: 2705598 - RNA, 19 nt, Artificial Sequence
  Description of Artificial Sequence: Synthetic oligonucleotide
cgagcugcgcggucaguca

SEQ ID NO: 2705599 - RNA, 19 nt, Artificial Sequence
  Description of Artificial Sequence: Synthetic oligonucleotide
cguucuuccccagaugggu

SEQ ID NO: 2705600 - RNA, 19 nt, Artificial Sequence
  Description of Artificial Sequence: Synthetic oligonucleotide
gcccaguccucggauaagu

SEQ ID NO: 2705601 - RNA, 19 nt, Artificial Sequence
  Description of Artificial Sequence: Synthetic oligonucleotide
cggcgcaaugcguguuccc

SEQ ID NO: 2705602 - RNA, 19 nt, Artificial Sequence
  Description of Artificial Sequence: Synthetic oligonucleotide
guccggcggcugccaucag

SEQ ID NO: 2705603 - RNA, 19 nt, Artificial Sequence
  Description of Artificial Sequence: Synthetic oligonucleotide
gcaggcgaugcagcguucu

SEQ ID NO: 2705604 - RNA, 19 nt, Artificial Sequence
  Description of Artificial Sequence: Synthetic oligonucleotide
cugcgcggucagucacgga

SEQ ID NO: 2705605 - RNA, 19 nt, Artificial Sequence
  Description of Artificial Sequence: Synthetic oligonucleotide
cccuucucaaauggguagu

SEQ ID NO: 2705606 - RNA, 19 nt, Artificial Sequence
  Description of Artificial Sequence: Synthetic oligonucleotide
caggcgaugcagcguucuu

SEQ ID NO: 2705607 - RNA, 19 nt, Artificial Sequence
  Description of Artificial Sequence: Synthetic oligonucleotide
gcggucagucacggacuuc

SEQ ID NO: 2705608 - RNA, 19 nt, Artificial Sequence
  Description of Artificial Sequence: Synthetic oligonucleotide
ggcccguggcagcaugaau

SEQ ID NO: 2705609 - RNA, 19 nt, Artificial Sequence
  Description of Artificial Sequence: Synthetic oligonucleotide
ccuccacgauugcgucaac

SEQ ID NO: 2705610 - RNA, 19 nt, Artificial Sequence
  Description of Artificial Sequence: Synthetic oligonucleotide
gcgcggucagucacggacu

SEQ ID NO: 2705611 - RNA, 19 nt, Artificial Sequence
  Description of Artificial Sequence: Synthetic oligonucleotide
ccacggaagcguggacuca

SEQ ID NO: 2705612 - RNA, 19 nt, Artificial Sequence
  Description of Artificial Sequence: Synthetic oligonucleotide
gguagucagccuggauguu

SEQ ID NO: 2705613 - RNA, 19 nt, Artificial Sequence
  Description of Artificial Sequence: Synthetic oligonucleotide
ggucaccgguacagguagu

SEQ ID NO: 2705614 - RNA, 19 nt, Artificial Sequence
  Description of Artificial Sequence: Synthetic oligonucleotide
gcggcugccaucagcucuu

SEQ ID NO: 2705615 - RNA, 19 nt, Artificial Sequence
  Description of Artificial Sequence: Synthetic oligonucleotide
ggucagucacggacuucau

SEQ ID NO: 2705616 - RNA, 19 nt, Artificial Sequence
  Description of Artificial Sequence: Synthetic oligonucleotide
cccaguccucggauaaguu

SEQ ID NO: 2705617 - RNA, 19 nt, Artificial Sequence
  Description of Artificial Sequence: Synthetic oligonucleotide
cgguacagguagucagccu

SEQ ID NO: 2705618 - RNA, 19 nt, Artificial Sequence
  Description of Artificial Sequence: Synthetic oligonucleotide
ggccugaaccaaggcccgu

SEQ ID NO: 2705619 - RNA, 19 nt, Artificial Sequence
  Description of Artificial Sequence: Synthetic oligonucleotide
ccguggcagcaugaaugaa

SEQ ID NO: 2705620 - RNA, 19 nt, Artificial Sequence
  Description of Artificial Sequence: Synthetic oligonucleotide
cguggacucaguggucccu

SEQ ID NO: 2705621 - RNA, 19 nt, Artificial Sequence
  Description of Artificial Sequence: Synthetic oligonucleotide
ccugugcguauggccugaa

SEQ ID NO: 2705622 - RNA, 19 nt, Artificial Sequence
  Description of Artificial Sequence: Synthetic oligonucleotide
cggcugccaucagcucuug

SEQ ID NO: 2705623 - RNA, 19 nt, Artificial Sequence
  Description of Artificial Sequence: Synthetic oligonucleotide
gccucccauuuguccccau

SEQ ID NO: 2705624 - RNA, 19 nt, Artificial Sequence
  Description of Artificial Sequence: Synthetic oligonucleotide
cgcggucagucacggacuu

SEQ ID NO: 2705625 - RNA, 19 nt, Artificial Sequence
  Description of Artificial Sequence: Synthetic oligonucleotide
ccaaggcccguggcagcau

SEQ ID NO: 2705626 - RNA, 19 nt, Artificial Sequence
  Description of Artificial Sequence: Synthetic oligonucleotide
ccccauuguugagcagcuu

SEQ ID NO: 2705627 - RNA, 19 nt, Artificial Sequence
  Description of Artificial Sequence: Synthetic oligonucleotide
uaaaucuuaaucuucagag

SEQ ID NO: 2705628 - RNA, 19 nt, Artificial Sequence
  Description of Artificial Sequence: Synthetic oligonucleotide
aaaagcauggucuaccauc

SEQ ID NO: 2705629 - RNA, 19 nt, Artificial Sequence
  Description of Artificial Sequence: Synthetic oligonucleotide
aauugucuugcccuugugc

SEQ ID NO: 2705630 - RNA, 19 nt, Artificial Sequence
  Description of Artificial Sequence: Synthetic oligonucleotide
cuugaacucgccuagaucc

SEQ ID NO: 2705631 - RNA, 19 nt, Artificial Sequence
  Description of Artificial Sequence: Synthetic oligonucleotide
uaaucuucagagaauauca

SEQ ID NO: 2705632 - RNA, 19 nt, Artificial Sequence
  Description of Artificial Sequence: Synthetic oligonucleotide
aguaacacucuucagcccc

SEQ ID NO: 2705633 - RNA, 19 nt, Artificial Sequence
  Description of Artificial Sequence: Synthetic oligonucleotide
aaucuuaaucuucagagaa

SEQ ID NO: 2705634 - RNA, 19 nt, Artificial Sequence
  Description of Artificial Sequence: Synthetic oligonucleotide
aauugugaucaucaaaucu

SEQ ID NO: 2705635 - RNA, 19 nt, Artificial Sequence
  Description of Artificial Sequence: Synthetic oligonucleotide
uucaguaacacucuucagc

SEQ ID NO: 2705636 - RNA, 19 nt, Artificial Sequence
  Description of Artificial Sequence: Synthetic oligonucleotide
ucagcuuccacgcaguccg

SEQ ID NO: 2705637 - RNA, 19 nt, Artificial Sequence
  Description of Artificial Sequence: Synthetic oligonucleotide
auauuuaaguaguguaggc

SEQ ID NO: 2705638 - RNA, 19 nt, Artificial Sequence
  Description of Artificial Sequence: Synthetic oligonucleotide
uucuuuuaagcaaaccagg

SEQ ID NO: 2705639 - RNA, 19 nt, Artificial Sequence
  Description of Artificial Sequence: Synthetic oligonucleotide
uucaaagcaaguauguggc

SEQ ID NO: 2705640 - RNA, 19 nt, Artificial Sequence
  Description of Artificial Sequence: Synthetic oligonucleotide
gagaauaucauuuccacga

SEQ ID NO: 2705641 - RNA, 19 nt, Artificial Sequence
  Description of Artificial Sequence: Synthetic oligonucleotide
cauuuguagaccaugcugg

SEQ ID NO: 2705642 - RNA, 19 nt, Artificial Sequence
  Description of Artificial Sequence: Synthetic oligonucleotide
aaagugcuaucauuaaauc

SEQ ID NO: 2705643 - RNA, 19 nt, Artificial Sequence
  Description of Artificial Sequence: Synthetic oligonucleotide
agauuugucuccuacuugg

SEQ ID NO: 2705644 - RNA, 19 nt, Artificial Sequence
  Description of Artificial Sequence: Synthetic oligonucleotide
ucaauucaaagcaaguaug

SEQ ID NO: 2705645 - RNA, 19 nt, Artificial Sequence
  Description of Artificial Sequence: Synthetic oligonucleotide
aguaagauuugucuccuac

SEQ ID NO: 2705646 - RNA, 19 nt, Artificial Sequence
  Description of Artificial Sequence: Synthetic oligonucleotide
ucuucaguaacacucuuca

SEQ ID NO: 2705647 - RNA, 19 nt, Artificial Sequence
  Description of Artificial Sequence: Synthetic oligonucleotide
uuaaaucuuaaucuucaga

SEQ ID NO: 2705648 - RNA, 19 nt, Artificial Sequence
  Description of Artificial Sequence: Synthetic oligonucleotide
cuucuuuuaagcaaaccag

SEQ ID NO: 2705649 - RNA, 19 nt, Artificial Sequence
  Description of Artificial Sequence: Synthetic oligonucleotide
auuauuugggucuuuccag

SEQ ID NO: 2705650 - RNA, 19 nt, Artificial Sequence
  Description of Artificial Sequence: Synthetic oligonucleotide
gaucaucaaaucuuguuug

SEQ ID NO: 2705651 - RNA, 19 nt, Artificial Sequence
  Description of Artificial Sequence: Synthetic oligonucleotide
aauaucauuuccacgaggu

SEQ ID NO: 2705652 - RNA, 19 nt, Artificial Sequence
  Description of Artificial Sequence: Synthetic oligonucleotide
aagugcuaucauuaaaucu

SEQ ID NO: 2705653 - RNA, 19 nt, Artificial Sequence
  Description of Artificial Sequence: Synthetic oligonucleotide
uuugucuccuacuuggcag

SEQ ID NO: 2705654 - RNA, 19 nt, Artificial Sequence
  Description of Artificial Sequence: Synthetic oligonucleotide
gacacauucaccuccuugc

SEQ ID NO: 2705655 - RNA, 19 nt, Artificial Sequence
  Description of Artificial Sequence: Synthetic oligonucleotide
aaaucuuaaucuucagaga

SEQ ID NO: 2705656 - RNA, 19 nt, Artificial Sequence
  Description of Artificial Sequence: Synthetic oligonucleotide
cauauuuaaguaguguagg

SEQ ID NO: 2705657 - RNA, 19 nt, Artificial Sequence
  Description of Artificial Sequence: Synthetic oligonucleotide
uucaccuccuugcaggugg

SEQ ID NO: 2705658 - RNA, 19 nt, Artificial Sequence
  Description of Artificial Sequence: Synthetic oligonucleotide
uucagagaauaucauuucc

SEQ ID NO: 2705659 - RNA, 19 nt, Artificial Sequence
  Description of Artificial Sequence: Synthetic oligonucleotide
acauucaccuccuugcagg

SEQ ID NO: 2705660 - RNA, 19 nt, Artificial Sequence
  Description of Artificial Sequence: Synthetic oligonucleotide
agagaauaucauuuccacg

SEQ ID NO: 2705661 - RNA, 19 nt, Artificial Sequence
  Description of Artificial Sequence: Synthetic oligonucleotide
uccaguaagauuugucucc

SEQ ID NO: 2705662 - RNA, 19 nt, Artificial Sequence
  Description of Artificial Sequence: Synthetic oligonucleotide
uaucauuuccacgagguug

SEQ ID NO: 2705663 - RNA, 19 nt, Artificial Sequence
  Description of Artificial Sequence: Synthetic oligonucleotide
uauguggcuucuuuuaagc

SEQ ID NO: 2705664 - RNA, 19 nt, Artificial Sequence
  Description of Artificial Sequence: Synthetic oligonucleotide
aaaucaacacacaauugug

SEQ ID NO: 2705665 - RNA, 19 nt, Artificial Sequence
  Description of Artificial Sequence: Synthetic oligonucleotide
aucaauucaaagcaaguau

SEQ ID NO: 2705666 - RNA, 19 nt, Artificial Sequence
  Description of Artificial Sequence: Synthetic oligonucleotide
ucauuaaaucuuaaucuuc

SEQ ID NO: 2705667 - RNA, 19 nt, Artificial Sequence
  Description of Artificial Sequence: Synthetic oligonucleotide
uuuaagcaaaccaggaaau

SEQ ID NO: 2705668 - RNA, 19 nt, Artificial Sequence
  Description of Artificial Sequence: Synthetic oligonucleotide
aggcacugcaguuacuugc

SEQ ID NO: 2705669 - RNA, 19 nt, Artificial Sequence
  Description of Artificial Sequence: Synthetic oligonucleotide
aggaaaucaacacacaauu

SEQ ID NO: 2705670 - RNA, 19 nt, Artificial Sequence
  Description of Artificial Sequence: Synthetic oligonucleotide
uggucuaccaucacaaagu

SEQ ID NO: 2705671 - RNA, 19 nt, Artificial Sequence
  Description of Artificial Sequence: Synthetic oligonucleotide
ugaucaucaaaucuuguuu

SEQ ID NO: 2705672 - RNA, 19 nt, Artificial Sequence
  Description of Artificial Sequence: Synthetic oligonucleotide
gaauaucauuuccacgagg

SEQ ID NO: 2705673 - RNA, 19 nt, Artificial Sequence
  Description of Artificial Sequence: Synthetic oligonucleotide
uccauauuuaaguagugua

SEQ ID NO: 2705674 - RNA, 19 nt, Artificial Sequence
  Description of Artificial Sequence: Synthetic oligonucleotide
aucaucaaaucuuguuugg

SEQ ID NO: 2705675 - RNA, 19 nt, Artificial Sequence
  Description of Artificial Sequence: Synthetic oligonucleotide
aagccggacacauucaccu

SEQ ID NO: 2705676 - RNA, 19 nt, Artificial Sequence
  Description of Artificial Sequence: Synthetic oligonucleotide
agggguuccauauuuaagu

SEQ ID NO: 2705677 - RNA, 19 nt, Artificial Sequence
  Description of Artificial Sequence: Synthetic oligonucleotide
ucacaaagugcuaucauua

SEQ ID NO: 2705678 - RNA, 19 nt, Artificial Sequence
  Description of Artificial Sequence: Synthetic oligonucleotide
uuuuguagggguuccauau

SEQ ID NO: 2705679 - RNA, 19 nt, Artificial Sequence
  Description of Artificial Sequence: Synthetic oligonucleotide
uuaaucuucagagaauauc

SEQ ID NO: 2705680 - RNA, 19 nt, Artificial Sequence
  Description of Artificial Sequence: Synthetic oligonucleotide
aagauuugucuccuacuug

SEQ ID NO: 2705681 - RNA, 19 nt, Artificial Sequence
  Description of Artificial Sequence: Synthetic oligonucleotide
auuaaaucuuaaucuucag

SEQ ID NO: 2705682 - RNA, 19 nt, Artificial Sequence
  Description of Artificial Sequence: Synthetic oligonucleotide
ucgaacuccucgaagccgg

SEQ ID NO: 2705683 - RNA, 19 nt, Artificial Sequence
  Description of Artificial Sequence: Synthetic oligonucleotide
aaaauugucuugcccuugu

SEQ ID NO: 2705684 - RNA, 19 nt, Artificial Sequence
  Description of Artificial Sequence: Synthetic oligonucleotide
aauucaaagcaaguaugug

SEQ ID NO: 2705685 - RNA, 19 nt, Artificial Sequence
  Description of Artificial Sequence: Synthetic oligonucleotide
acaauugugaucaucaaau

SEQ ID NO: 2705686 - RNA, 19 nt, Artificial Sequence
  Description of Artificial Sequence: Synthetic oligonucleotide
ucaaaucuuguuugguuug

SEQ ID NO: 2705687 - RNA, 19 nt, Artificial Sequence
  Description of Artificial Sequence: Synthetic oligonucleotide
auugucuugcccuugugcu

SEQ ID NO: 2705688 - RNA, 19 nt, Artificial Sequence
  Description of Artificial Sequence: Synthetic oligonucleotide
auggucuaccaucacaaag

SEQ ID NO: 2705689 - RNA, 19 nt, Artificial Sequence
  Description of Artificial Sequence: Synthetic oligonucleotide
uggcaguagaugaacacgc

SEQ ID NO: 2705690 - RNA, 19 nt, Artificial Sequence
  Description of Artificial Sequence: Synthetic oligonucleotide
uugugaucaucaaaucuug

SEQ ID NO: 2705691 - RNA, 19 nt, Artificial Sequence
  Description of Artificial Sequence: Synthetic oligonucleotide
ugggauuaaaagcaugguc

SEQ ID NO: 2705692 - RNA, 19 nt, Artificial Sequence
  Description of Artificial Sequence: Synthetic oligonucleotide
uuaaaagcauggucuacca

SEQ ID NO: 2705693 - RNA, 19 nt, Artificial Sequence
  Description of Artificial Sequence: Synthetic oligonucleotide
uaagauuugucuccuacuu

SEQ ID NO: 2705694 - RNA, 19 nt, Artificial Sequence
  Description of Artificial Sequence: Synthetic oligonucleotide
aucauuaaaucuuaaucuu

SEQ ID NO: 2705695 - RNA, 19 nt, Artificial Sequence
  Description of Artificial Sequence: Synthetic oligonucleotide
ugaucaauucaaagcaagu

SEQ ID NO: 2705696 - RNA, 19 nt, Artificial Sequence
  Description of Artificial Sequence: Synthetic oligonucleotide
uuggcaguagaugaacacg

SEQ ID NO: 2705697 - RNA, 19 nt, Artificial Sequence
  Description of Artificial Sequence: Synthetic oligonucleotide
uugucugaagucauuauuu

SEQ ID NO: 2705698 - RNA, 19 nt, Artificial Sequence
  Description of Artificial Sequence: Synthetic oligonucleotide
uagaugaacacgcagucuu

SEQ ID NO: 2705699 - RNA, 19 nt, Artificial Sequence
  Description of Artificial Sequence: Synthetic oligonucleotide
ugcaguuguugucugaagu

SEQ ID NO: 2705700 - RNA, 19 nt, Artificial Sequence
  Description of Artificial Sequence: Synthetic oligonucleotide
uuuaaguaguguaggcacu

SEQ ID NO: 2705701 - RNA, 19 nt, Artificial Sequence
  Description of Artificial Sequence: Synthetic oligonucleotide
ugucugaagucauuauuug

SEQ ID NO: 2705702 - RNA, 19 nt, Artificial Sequence
  Description of Artificial Sequence: Synthetic oligonucleotide
ugcaguuacuugcaguugu

SEQ ID NO: 2705703 - RNA, 19 nt, Artificial Sequence
  Description of Artificial Sequence: Synthetic oligonucleotide
cuuagagccgcugaaguag

SEQ ID NO: 2705704 - RNA, 19 nt, Artificial Sequence
  Description of Artificial Sequence: Synthetic oligonucleotide
gaagucauuauuugggucu

SEQ ID NO: 2705705 - RNA, 19 nt, Artificial Sequence
  Description of Artificial Sequence: Synthetic oligonucleotide
aaucaacacacaauuguga

SEQ ID NO: 2705706 - RNA, 19 nt, Artificial Sequence
  Description of Artificial Sequence: Synthetic oligonucleotide
uuuguggcuguccugggac

SEQ ID NO: 2705707 - RNA, 19 nt, Artificial Sequence
  Description of Artificial Sequence: Synthetic oligonucleotide
uggucgaacuccucgaagc

SEQ ID NO: 2705708 - RNA, 19 nt, Artificial Sequence
  Description of Artificial Sequence: Synthetic oligonucleotide
agugcuaucauuaaaucuu

SEQ ID NO: 2705709 - RNA, 19 nt, Artificial Sequence
  Description of Artificial Sequence: Synthetic oligonucleotide
cagagaauaucauuuccac

SEQ ID NO: 2705710 - RNA, 19 nt, Artificial Sequence
  Description of Artificial Sequence: Synthetic oligonucleotide
ucauuauuugggucuuucc

SEQ ID NO: 2705711 - RNA, 19 nt, Artificial Sequence
  Description of Artificial Sequence: Synthetic oligonucleotide
ucuuaaucuucagagaaua

SEQ ID NO: 2705712 - RNA, 19 nt, Artificial Sequence
  Description of Artificial Sequence: Synthetic oligonucleotide
cuugugcuccuucacagcc

SEQ ID NO: 2705713 - RNA, 19 nt, Artificial Sequence
  Description of Artificial Sequence: Synthetic oligonucleotide
aaguauguggcuucuuuua

SEQ ID NO: 2705714 - RNA, 19 nt, Artificial Sequence
  Description of Artificial Sequence: Synthetic oligonucleotide
uagggguuccauauuuaag

SEQ ID NO: 2705715 - RNA, 19 nt, Artificial Sequence
  Description of Artificial Sequence: Synthetic oligonucleotide
ccugagagcacucagauuc

SEQ ID NO: 2705716 - RNA, 19 nt, Artificial Sequence
  Description of Artificial Sequence: Synthetic oligonucleotide
aaagcauggucuaccauca

SEQ ID NO: 2705717 - RNA, 19 nt, Artificial Sequence
  Description of Artificial Sequence: Synthetic oligonucleotide
acgagguuggccugagagc

SEQ ID NO: 2705718 - RNA, 19 nt, Artificial Sequence
  Description of Artificial Sequence: Synthetic oligonucleotide
aucaacacacaauugugau

SEQ ID NO: 2705719 - RNA, 19 nt, Artificial Sequence
  Description of Artificial Sequence: Synthetic oligonucleotide
aucaaaucuuguuugguuu

SEQ ID NO: 2705720 - RNA, 19 nt, Artificial Sequence
  Description of Artificial Sequence: Synthetic oligonucleotide
uuaaguaguguaggcacug

SEQ ID NO: 2705721 - RNA, 19 nt, Artificial Sequence
  Description of Artificial Sequence: Synthetic oligonucleotide
aaguaguguaggcacugca

SEQ ID NO: 2705722 - RNA, 19 nt, Artificial Sequence
  Description of Artificial Sequence: Synthetic oligonucleotide
cucgccuagauccaccugc

SEQ ID NO: 2705723 - RNA, 19 nt, Artificial Sequence
  Description of Artificial Sequence: Synthetic oligonucleotide
ucgcauuuguagaccaugc

SEQ ID NO: 2705724 - RNA, 19 nt, Artificial Sequence
  Description of Artificial Sequence: Synthetic oligonucleotide
accagcucuucccuucugc

SEQ ID NO: 2705725 - RNA, 19 nt, Artificial Sequence
  Description of Artificial Sequence: Synthetic oligonucleotide
ucuccuacuuggcaguaga

SEQ ID NO: 2705726 - RNA, 19 nt, Artificial Sequence
  Description of Artificial Sequence: Synthetic oligonucleotide
cauuauuugggucuuucca

SEQ ID NO: 2705727 - RNA, 19 nt, Artificial Sequence
  Description of Artificial Sequence: Synthetic oligonucleotide
acacgcagucuucaguaac

SEQ ID NO: 2705728 - RNA, 19 nt, Artificial Sequence
  Description of Artificial Sequence: Synthetic oligonucleotide
ugaagucauuauuuggguc

SEQ ID NO: 2705729 - RNA, 19 nt, Artificial Sequence
  Description of Artificial Sequence: Synthetic oligonucleotide
auugugaucaucaaaucuu

SEQ ID NO: 2705730 - RNA, 19 nt, Artificial Sequence
  Description of Artificial Sequence: Synthetic oligonucleotide
ucuucagccccucucgaac

SEQ ID NO: 2705731 - RNA, 19 nt, Artificial Sequence
  Description of Artificial Sequence: Synthetic oligonucleotide
aacuccucgaagccggaca

SEQ ID NO: 2705732 - RNA, 19 nt, Artificial Sequence
  Description of Artificial Sequence: Synthetic oligonucleotide
cacgagguuggccugagag

SEQ ID NO: 2705733 - RNA, 19 nt, Artificial Sequence
  Description of Artificial Sequence: Synthetic oligonucleotide
gcuucuuuuaagcaaacca

SEQ ID NO: 2705734 - RNA, 19 nt, Artificial Sequence
  Description of Artificial Sequence: Synthetic oligonucleotide
ucugcauccuuagagccgc

SEQ ID NO: 2705735 - RNA, 19 nt, Artificial Sequence
  Description of Artificial Sequence: Synthetic oligonucleotide
cuuggcaguagaugaacac

SEQ ID NO: 2705736 - RNA, 19 nt, Artificial Sequence
  Description of Artificial Sequence: Synthetic oligonucleotide
ccauauuuaaguaguguag

SEQ ID NO: 2705737 - RNA, 19 nt, Artificial Sequence
  Description of Artificial Sequence: Synthetic oligonucleotide
agagcacucagauuccaca

SEQ ID NO: 2705738 - RNA, 19 nt, Artificial Sequence
  Description of Artificial Sequence: Synthetic oligonucleotide
cucgaagccggacacauuc

SEQ ID NO: 2705739 - RNA, 19 nt, Artificial Sequence
  Description of Artificial Sequence: Synthetic oligonucleotide
cuuuccaguaagauuuguc

SEQ ID NO: 2705740 - RNA, 19 nt, Artificial Sequence
  Description of Artificial Sequence: Synthetic oligonucleotide
aaucuuguuugguuugguu

SEQ ID NO: 2705741 - RNA, 19 nt, Artificial Sequence
  Description of Artificial Sequence: Synthetic oligonucleotide
gaaccacuggcucagcuuc

SEQ ID NO: 2705742 - RNA, 19 nt, Artificial Sequence
  Description of Artificial Sequence: Synthetic oligonucleotide
aucacaaagugcuaucauu

SEQ ID NO: 2705743 - RNA, 19 nt, Artificial Sequence
  Description of Artificial Sequence: Synthetic oligonucleotide
ucaacacacaauugugauc

SEQ ID NO: 2705744 - RNA, 19 nt, Artificial Sequence
  Description of Artificial Sequence: Synthetic oligonucleotide
ucuugaacucgccuagauc

SEQ ID NO: 2705745 - RNA, 19 nt, Artificial Sequence
  Description of Artificial Sequence: Synthetic oligonucleotide
guguuuguggcuguccugg

SEQ ID NO: 2705746 - RNA, 19 nt, Artificial Sequence
  Description of Artificial Sequence: Synthetic oligonucleotide
ugugaucaucaaaucuugu

SEQ ID NO: 2705747 - RNA, 19 nt, Artificial Sequence
  Description of Artificial Sequence: Synthetic oligonucleotide
cuuuguguguuuguggcug

SEQ ID NO: 2705748 - RNA, 19 nt, Artificial Sequence
  Description of Artificial Sequence: Synthetic oligonucleotide
uuccauauuuaaguagugu

SEQ ID NO: 2705749 - RNA, 19 nt, Artificial Sequence
  Description of Artificial Sequence: Synthetic oligonucleotide
auuugucuccuacuuggca

SEQ ID NO: 2705750 - RNA, 19 nt, Artificial Sequence
  Description of Artificial Sequence: Synthetic oligonucleotide
gcauuuguagaccaugcug

SEQ ID NO: 2705751 - RNA, 19 nt, Artificial Sequence
  Description of Artificial Sequence: Synthetic oligonucleotide
ugggacucgcauuuguaga

SEQ ID NO: 2705752 - RNA, 19 nt, Artificial Sequence
  Description of Artificial Sequence: Synthetic oligonucleotide
ugucuugcccuugugcucc

SEQ ID NO: 2705753 - RNA, 19 nt, Artificial Sequence
  Description of Artificial Sequence: Synthetic oligonucleotide
uuguagggguuccauauuu

SEQ ID NO: 2705754 - RNA, 19 nt, Artificial Sequence
  Description of Artificial Sequence: Synthetic oligonucleotide
cugggacucgcauuuguag

SEQ ID NO: 2705755 - RNA, 19 nt, Artificial Sequence
  Description of Artificial Sequence: Synthetic oligonucleotide
aguaguguaggcacugcag

SEQ ID NO: 2705756 - RNA, 19 nt, Artificial Sequence
  Description of Artificial Sequence: Synthetic oligonucleotide
uucccuucugcauccuuag

SEQ ID NO: 2705757 - RNA, 19 nt, Artificial Sequence
  Description of Artificial Sequence: Synthetic oligonucleotide
gauuaaaagcauggucuac

SEQ ID NO: 2705758 - RNA, 19 nt, Artificial Sequence
  Description of Artificial Sequence: Synthetic oligonucleotide
cacucuucagccccucucg

SEQ ID NO: 2705759 - RNA, 19 nt, Artificial Sequence
  Description of Artificial Sequence: Synthetic oligonucleotide
uuggccugagagcacucag

SEQ ID NO: 2705760 - RNA, 19 nt, Artificial Sequence
  Description of Artificial Sequence: Synthetic oligonucleotide
caaaucuuguuugguuugg

SEQ ID NO: 2705761 - RNA, 19 nt, Artificial Sequence
  Description of Artificial Sequence: Synthetic oligonucleotide
aacucgccuagauccaccu

SEQ ID NO: 2705762 - RNA, 19 nt, Artificial Sequence
  Description of Artificial Sequence: Synthetic oligonucleotide
aguauguggcuucuuuuaa

SEQ ID NO: 2705763 - RNA, 19 nt, Artificial Sequence
  Description of Artificial Sequence: Synthetic oligonucleotide
agcacucagauuccacaag

SEQ ID NO: 2705764 - RNA, 19 nt, Artificial Sequence
  Description of Artificial Sequence: Synthetic oligonucleotide
aagcaaaccaggaaaucaa

SEQ ID NO: 2705765 - RNA, 19 nt, Artificial Sequence
  Description of Artificial Sequence: Synthetic oligonucleotide
caauugugaucaucaaauc

SEQ ID NO: 2705766 - RNA, 19 nt, Artificial Sequence
  Description of Artificial Sequence: Synthetic oligonucleotide
ucaucaaaucuuguuuggu

SEQ ID NO: 2705767 - RNA, 19 nt, Artificial Sequence
  Description of Artificial Sequence: Synthetic oligonucleotide
acucagauuccacaaguuu

SEQ ID NO: 2705768 - RNA, 19 nt, Artificial Sequence
  Description of Artificial Sequence: Synthetic oligonucleotide
gaacacgcagucuucagua

SEQ ID NO: 2705769 - RNA, 19 nt, Artificial Sequence
  Description of Artificial Sequence: Synthetic oligonucleotide
uuaagcaaaccaggaaauc

SEQ ID NO: 2705770 - RNA, 19 nt, Artificial Sequence
  Description of Artificial Sequence: Synthetic oligonucleotide
agcaaaccaggaaaucaac

SEQ ID NO: 2705771 - RNA, 19 nt, Artificial Sequence
  Description of Artificial Sequence: Synthetic oligonucleotide
caaagugcuaucauuaaau

SEQ ID NO: 2705772 - RNA, 19 nt, Artificial Sequence
  Description of Artificial Sequence: Synthetic oligonucleotide
uugaacucgccuagaucca

SEQ ID NO: 2705773 - RNA, 19 nt, Artificial Sequence
  Description of Artificial Sequence: Synthetic oligonucleotide
ucucgaaccacuggcucag

SEQ ID NO: 2705774 - RNA, 19 nt, Artificial Sequence
  Description of Artificial Sequence: Synthetic oligonucleotide
ucuuuguguguuuguggcu

SEQ ID NO: 2705775 - RNA, 19 nt, Artificial Sequence
  Description of Artificial Sequence: Synthetic oligonucleotide
uguuuguggcuguccuggg

SEQ ID NO: 2705776 - RNA, 19 nt, Artificial Sequence
  Description of Artificial Sequence: Synthetic oligonucleotide
uaaaagcauggucuaccau

SEQ ID NO: 2705777 - RNA, 19 nt, Artificial Sequence
  Description of Artificial Sequence: Synthetic oligonucleotide
ucaaagcaaguauguggcu

SEQ ID NO: 2705778 - RNA, 19 nt, Artificial Sequence
  Description of Artificial Sequence: Synthetic oligonucleotide
uguugucugaagucauuau

SEQ ID NO: 2705779 - RNA, 19 nt, Artificial Sequence
  Description of Artificial Sequence: Synthetic oligonucleotide
aaaucuuguuugguuuggu

SEQ ID NO: 2705780 - RNA, 19 nt, Artificial Sequence
  Description of Artificial Sequence: Synthetic oligonucleotide
cuucagccccucucgaacc

SEQ ID NO: 2705781 - RNA, 19 nt, Artificial Sequence
  Description of Artificial Sequence: Synthetic oligonucleotide
cuucaguaacacucuucag

SEQ ID NO: 2705782 - RNA, 19 nt, Artificial Sequence
  Description of Artificial Sequence: Synthetic oligonucleotide
uguagggguuccauauuua

SEQ ID NO: 2705783 - RNA, 19 nt, Artificial Sequence
  Description of Artificial Sequence: Synthetic oligonucleotide
uugcaguuguugucugaag

SEQ ID NO: 2705784 - RNA, 19 nt, Artificial Sequence
  Description of Artificial Sequence: Synthetic oligonucleotide
uugucuccuacuuggcagu

SEQ ID NO: 2705785 - RNA, 19 nt, Artificial Sequence
  Description of Artificial Sequence: Synthetic oligonucleotide
uugggucuuuccaguaaga

SEQ ID NO: 2705786 - RNA, 19 nt, Artificial Sequence
  Description of Artificial Sequence: Synthetic oligonucleotide
auuugggucuuuccaguaa

SEQ ID NO: 2705787 - RNA, 19 nt, Artificial Sequence
  Description of Artificial Sequence: Synthetic oligonucleotide
gggauuaaaagcauggucu

SEQ ID NO: 2705788 - RNA, 19 nt, Artificial Sequence
  Description of Artificial Sequence: Synthetic oligonucleotide
aacacgcagucuucaguaa

SEQ ID NO: 2705789 - RNA, 19 nt, Artificial Sequence
  Description of Artificial Sequence: Synthetic oligonucleotide
gauuugucuccuacuuggc

SEQ ID NO: 2705790 - RNA, 19 nt, Artificial Sequence
  Description of Artificial Sequence: Synthetic oligonucleotide
ugcuaucauuaaaucuuaa

SEQ ID NO: 2705791 - RNA, 19 nt, Artificial Sequence
  Description of Artificial Sequence: Synthetic oligonucleotide
caauucaaagcaaguaugu

SEQ ID NO: 2705792 - RNA, 19 nt, Artificial Sequence
  Description of Artificial Sequence: Synthetic oligonucleotide
gcaguagaugaacacgcag

SEQ ID NO: 2705793 - RNA, 19 nt, Artificial Sequence
  Description of Artificial Sequence: Synthetic oligonucleotide
cacauucaccuccuugcag

SEQ ID NO: 2705794 - RNA, 19 nt, Artificial Sequence
  Description of Artificial Sequence: Synthetic oligonucleotide
uuuguagggguuccauauu

SEQ ID NO: 2705795 - RNA, 19 nt, Artificial Sequence
  Description of Artificial Sequence: Synthetic oligonucleotide
gacucgcauuuguagacca

SEQ ID NO: 2705796 - RNA, 19 nt, Artificial Sequence
  Description of Artificial Sequence: Synthetic oligonucleotide
uauuugggucuuuccagua

SEQ ID NO: 2705797 - RNA, 19 nt, Artificial Sequence
  Description of Artificial Sequence: Synthetic oligonucleotide
uuguugucugaagucauua

SEQ ID NO: 2705798 - RNA, 19 nt, Artificial Sequence
  Description of Artificial Sequence: Synthetic oligonucleotide
cugagagcacucagauucc

SEQ ID NO: 2705799 - RNA, 19 nt, Artificial Sequence
  Description of Artificial Sequence: Synthetic oligonucleotide
uaaguaguguaggcacugc

SEQ ID NO: 2705800 - RNA, 19 nt, Artificial Sequence
  Description of Artificial Sequence: Synthetic oligonucleotide
ccuucugcauccuuagagc

SEQ ID NO: 2705801 - RNA, 19 nt, Artificial Sequence
  Description of Artificial Sequence: Synthetic oligonucleotide
ucgccuagauccaccugcc

SEQ ID NO: 2705802 - RNA, 19 nt, Artificial Sequence
  Description of Artificial Sequence: Synthetic oligonucleotide
gaagccggacacauucacc

SEQ ID NO: 2705803 - RNA, 19 nt, Artificial Sequence
  Description of Artificial Sequence: Synthetic oligonucleotide
aacacucuucagccccucu

SEQ ID NO: 2705804 - RNA, 19 nt, Artificial Sequence
  Description of Artificial Sequence: Synthetic oligonucleotide
ucgaaccacuggcucagcu

SEQ ID NO: 2705805 - RNA, 19 nt, Artificial Sequence
  Description of Artificial Sequence: Synthetic oligonucleotide
cucgcauuuguagaccaug

SEQ ID NO: 2705806 - RNA, 19 nt, Artificial Sequence
  Description of Artificial Sequence: Synthetic oligonucleotide
agaugaacacgcagucuuc

SEQ ID NO: 2705807 - RNA, 19 nt, Artificial Sequence
  Description of Artificial Sequence: Synthetic oligonucleotide
uacuugcaguuguugucug

SEQ ID NO: 2705808 - RNA, 19 nt, Artificial Sequence
  Description of Artificial Sequence: Synthetic oligonucleotide
guaagauuugucuccuacu

SEQ ID NO: 2705809 - RNA, 19 nt, Artificial Sequence
  Description of Artificial Sequence: Synthetic oligonucleotide
ggaaaucaacacacaauug

SEQ ID NO: 2705810 - RNA, 19 nt, Artificial Sequence
  Description of Artificial Sequence: Synthetic oligonucleotide
ggucuaccaucacaaagug

SEQ ID NO: 2705811 - RNA, 19 nt, Artificial Sequence
  Description of Artificial Sequence: Synthetic oligonucleotide
guagggguuccauauuuaa

SEQ ID NO: 2705812 - RNA, 19 nt, Artificial Sequence
  Description of Artificial Sequence: Synthetic oligonucleotide
auaucauuuccacgagguu

SEQ ID NO: 2705813 - RNA, 19 nt, Artificial Sequence
  Description of Artificial Sequence: Synthetic oligonucleotide
uccugggacucgcauuugu

SEQ ID NO: 2705814 - RNA, 19 nt, Artificial Sequence
  Description of Artificial Sequence: Synthetic oligonucleotide
guguaggcacugcaguuac

SEQ ID NO: 2705815 - RNA, 19 nt, Artificial Sequence
  Description of Artificial Sequence: Synthetic oligonucleotide
ucgaagccggacacauuca

SEQ ID NO: 2705816 - RNA, 19 nt, Artificial Sequence
  Description of Artificial Sequence: Synthetic oligonucleotide
acacaauugugaucaucaa

SEQ ID NO: 2705817 - RNA, 19 nt, Artificial Sequence
  Description of Artificial Sequence: Synthetic oligonucleotide
ugcagguggccauggguac

SEQ ID NO: 2705818 - RNA, 19 nt, Artificial Sequence
  Description of Artificial Sequence: Synthetic oligonucleotide
cccuucugcauccuuagag

SEQ ID NO: 2705819 - RNA, 19 nt, Artificial Sequence
  Description of Artificial Sequence: Synthetic oligonucleotide
ggacacauucaccuccuug

SEQ ID NO: 2705820 - RNA, 19 nt, Artificial Sequence
  Description of Artificial Sequence: Synthetic oligonucleotide
gucauuauuugggucuuuc

SEQ ID NO: 2705821 - RNA, 19 nt, Artificial Sequence
  Description of Artificial Sequence: Synthetic oligonucleotide
auccuuagagccgcugaag

SEQ ID NO: 2705822 - RNA, 19 nt, Artificial Sequence
  Description of Artificial Sequence: Synthetic oligonucleotide
guaguguaggcacugcagu

SEQ ID NO: 2705823 - RNA, 19 nt, Artificial Sequence
  Description of Artificial Sequence: Synthetic oligonucleotide
aagucauuauuugggucuu

SEQ ID NO: 2705824 - RNA, 19 nt, Artificial Sequence
  Description of Artificial Sequence: Synthetic oligonucleotide
caguagaugaacacgcagu

SEQ ID NO: 2705825 - RNA, 19 nt, Artificial Sequence
  Description of Artificial Sequence: Synthetic oligonucleotide
gcaguuguugucugaaguc

SEQ ID NO: 2705826 - RNA, 19 nt, Artificial Sequence
  Description of Artificial Sequence: Synthetic oligonucleotide
uuccacgcaguccgggcac

SEQ ID NO: 2705827 - RNA, 19 nt, Artificial Sequence
  Description of Artificial Sequence: Synthetic oligonucleotide
cacgcagucuucaguaaca

SEQ ID NO: 2705828 - RNA, 19 nt, Artificial Sequence
  Description of Artificial Sequence: Synthetic oligonucleotide
acugaucaauucaaagcaa

SEQ ID NO: 2705829 - RNA, 19 nt, Artificial Sequence
  Description of Artificial Sequence: Synthetic oligonucleotide
ugaacucgccuagauccac

SEQ ID NO: 2705830 - RNA, 19 nt, Artificial Sequence
  Description of Artificial Sequence: Synthetic oligonucleotide
ggucgaacuccucgaagcc

SEQ ID NO: 2705831 - RNA, 19 nt, Artificial Sequence
  Description of Artificial Sequence: Synthetic oligonucleotide
uggcuucuuuuaagcaaac

SEQ ID NO: 2705832 - RNA, 19 nt, Artificial Sequence
  Description of Artificial Sequence: Synthetic oligonucleotide
cacagccuggucgaacucc

SEQ ID NO: 2705833 - RNA, 19 nt, Artificial Sequence
  Description of Artificial Sequence: Synthetic oligonucleotide
uagagccgcugaaguaggc

SEQ ID NO: 2705834 - RNA, 19 nt, Artificial Sequence
  Description of Artificial Sequence: Synthetic oligonucleotide
gagccgcugaaguaggcaa

SEQ ID NO: 2705835 - RNA, 19 nt, Artificial Sequence
  Description of Artificial Sequence: Synthetic oligonucleotide
agccggacacauucaccuc

SEQ ID NO: 2705836 - RNA, 19 nt, Artificial Sequence
  Description of Artificial Sequence: Synthetic oligonucleotide
caguuguugucugaaguca

SEQ ID NO: 2705837 - RNA, 19 nt, Artificial Sequence
  Description of Artificial Sequence: Synthetic oligonucleotide
ggauuaaaagcauggucua

SEQ ID NO: 2705838 - RNA, 19 nt, Artificial Sequence
  Description of Artificial Sequence: Synthetic oligonucleotide
gggacucgcauuuguagac

SEQ ID NO: 2705839 - RNA, 19 nt, Artificial Sequence
  Description of Artificial Sequence: Synthetic oligonucleotide
aucuuaaucuucagagaau

SEQ ID NO: 2705840 - RNA, 19 nt, Artificial Sequence
  Description of Artificial Sequence: Synthetic oligonucleotide
cacaaagugcuaucauuaa

SEQ ID NO: 2705841 - RNA, 19 nt, Artificial Sequence
  Description of Artificial Sequence: Synthetic oligonucleotide
gaacucgccuagauccacc

SEQ ID NO: 2705842 - RNA, 19 nt, Artificial Sequence
  Description of Artificial Sequence: Synthetic oligonucleotide
guugucugaagucauuauu

SEQ ID NO: 2705843 - RNA, 19 nt, Artificial Sequence
  Description of Artificial Sequence: Synthetic oligonucleotide
gguuccauauuuaaguagu

SEQ ID NO: 2705844 - RNA, 19 nt, Artificial Sequence
  Description of Artificial Sequence: Synthetic oligonucleotide
gugaucaucaaaucuuguu

SEQ ID NO: 2705845 - RNA, 19 nt, Artificial Sequence
  Description of Artificial Sequence: Synthetic oligonucleotide
aguguaggcacugcaguua

SEQ ID NO: 2705846 - RNA, 19 nt, Artificial Sequence
  Description of Artificial Sequence: Synthetic oligonucleotide
cauuuccacgagguuggcc

SEQ ID NO: 2705847 - RNA, 19 nt, Artificial Sequence
  Description of Artificial Sequence: Synthetic oligonucleotide
cucucgaaccacuggcuca

SEQ ID NO: 2705848 - RNA, 19 nt, Artificial Sequence
  Description of Artificial Sequence: Synthetic oligonucleotide
uguaggcacugcaguuacu

SEQ ID NO: 2705849 - RNA, 19 nt, Artificial Sequence
  Description of Artificial Sequence: Synthetic oligonucleotide
caguuacuugcaguuguug

SEQ ID NO: 2705850 - RNA, 19 nt, Artificial Sequence
  Description of Artificial Sequence: Synthetic oligonucleotide
cugaagucauuauuugggu

SEQ ID NO: 2705851 - RNA, 19 nt, Artificial Sequence
  Description of Artificial Sequence: Synthetic oligonucleotide
caggaaaucaacacacaau

SEQ ID NO: 2705852 - RNA, 19 nt, Artificial Sequence
  Description of Artificial Sequence: Synthetic oligonucleotide
guggcuucuuuuaagcaaa

SEQ ID NO: 2705853 - RNA, 19 nt, Artificial Sequence
  Description of Artificial Sequence: Synthetic oligonucleotide
gccggacacauucaccucc

SEQ ID NO: 2705854 - RNA, 19 nt, Artificial Sequence
  Description of Artificial Sequence: Synthetic oligonucleotide
gagagcacucagauuccac

SEQ ID NO: 2705855 - RNA, 19 nt, Artificial Sequence
  Description of Artificial Sequence: Synthetic oligonucleotide
agagccgcugaaguaggca

SEQ ID NO: 2705856 - RNA, 19 nt, Artificial Sequence
  Description of Artificial Sequence: Synthetic oligonucleotide
cuugcaguuguugucugaa

SEQ ID NO: 2705857 - RNA, 19 nt, Artificial Sequence
  Description of Artificial Sequence: Synthetic oligonucleotide
ugcauccuuagagccgcug

SEQ ID NO: 2705858 - RNA, 19 nt, Artificial Sequence
  Description of Artificial Sequence: Synthetic oligonucleotide
caucaaaucuuguuugguu

SEQ ID NO: 2705859 - RNA, 19 nt, Artificial Sequence
  Description of Artificial Sequence: Synthetic oligonucleotide
ucccuucugcauccuuaga

SEQ ID NO: 2705860 - RNA, 19 nt, Artificial Sequence
  Description of Artificial Sequence: Synthetic oligonucleotide
cuucccuucugcauccuua

SEQ ID NO: 2705861 - RNA, 19 nt, Artificial Sequence
  Description of Artificial Sequence: Synthetic oligonucleotide
agcuuccacgcaguccggg

SEQ ID NO: 2705862 - RNA, 19 nt, Artificial Sequence
  Description of Artificial Sequence: Synthetic oligonucleotide
gcuaucauuaaaucuuaau

SEQ ID NO: 2705863 - RNA, 19 nt, Artificial Sequence
  Description of Artificial Sequence: Synthetic oligonucleotide
gccuagauccaccugccuc

SEQ ID NO: 2705864 - RNA, 19 nt, Artificial Sequence
  Description of Artificial Sequence: Synthetic oligonucleotide
cuuaaucuucagagaauau

SEQ ID NO: 2705865 - RNA, 19 nt, Artificial Sequence
  Description of Artificial Sequence: Synthetic oligonucleotide
acucgccuagauccaccug

SEQ ID NO: 2705866 - RNA, 19 nt, Artificial Sequence
  Description of Artificial Sequence: Synthetic oligonucleotide
accaggaaaucaacacaca

SEQ ID NO: 2705867 - RNA, 19 nt, Artificial Sequence
  Description of Artificial Sequence: Synthetic oligonucleotide
cauccuuagagccgcugaa

SEQ ID NO: 2705868 - RNA, 19 nt, Artificial Sequence
  Description of Artificial Sequence: Synthetic oligonucleotide
agguuggccugagagcacu

SEQ ID NO: 2705869 - RNA, 19 nt, Artificial Sequence
  Description of Artificial Sequence: Synthetic oligonucleotide
cuuccacgcaguccgggca

SEQ ID NO: 2705870 - RNA, 19 nt, Artificial Sequence
  Description of Artificial Sequence: Synthetic oligonucleotide
accuccuugcagguggcca

SEQ ID NO: 2705871 - RNA, 19 nt, Artificial Sequence
  Description of Artificial Sequence: Synthetic oligonucleotide
gcauggucuaccaucacaa

SEQ ID NO: 2705872 - RNA, 19 nt, Artificial Sequence
  Description of Artificial Sequence: Synthetic oligonucleotide
guguguuuguggcuguccu

SEQ ID NO: 2705873 - RNA, 19 nt, Artificial Sequence
  Description of Artificial Sequence: Synthetic oligonucleotide
ccaggaaaucaacacacaa

SEQ ID NO: 2705874 - RNA, 19 nt, Artificial Sequence
  Description of Artificial Sequence: Synthetic oligonucleotide
gucuccuacuuggcaguag

SEQ ID NO: 2705875 - RNA, 19 nt, Artificial Sequence
  Description of Artificial Sequence: Synthetic oligonucleotide
cagucuucaguaacacucu

SEQ ID NO: 2705876 - RNA, 19 nt, Artificial Sequence
  Description of Artificial Sequence: Synthetic oligonucleotide
gcauccuuagagccgcuga

SEQ ID NO: 2705877 - RNA, 19 nt, Artificial Sequence
  Description of Artificial Sequence: Synthetic oligonucleotide
ccuugugcuccuucacagc

SEQ ID NO: 2705878 - RNA, 19 nt, Artificial Sequence
  Description of Artificial Sequence: Synthetic oligonucleotide
cauggucuaccaucacaaa

SEQ ID NO: 2705879 - RNA, 19 nt, Artificial Sequence
  Description of Artificial Sequence: Synthetic oligonucleotide
gugcuaucauuaaaucuua

SEQ ID NO: 2705880 - RNA, 19 nt, Artificial Sequence
  Description of Artificial Sequence: Synthetic oligonucleotide
gaacuccucgaagccggac

SEQ ID NO: 2705881 - RNA, 19 nt, Artificial Sequence
  Description of Artificial Sequence: Synthetic oligonucleotide
guagaugaacacgcagucu

SEQ ID NO: 2705882 - RNA, 19 nt, Artificial Sequence
  Description of Artificial Sequence: Synthetic oligonucleotide
ggacucgcauuuguagacc

SEQ ID NO: 2705883 - RNA, 19 nt, Artificial Sequence
  Description of Artificial Sequence: Synthetic oligonucleotide
gggguuccauauuuaagua

SEQ ID NO: 2705884 - RNA, 19 nt, Artificial Sequence
  Description of Artificial Sequence: Synthetic oligonucleotide
gcacucagauuccacaagu

SEQ ID NO: 2705885 - RNA, 19 nt, Artificial Sequence
  Description of Artificial Sequence: Synthetic oligonucleotide
ccgggcaccagcucuuccc

SEQ ID NO: 2705886 - RNA, 19 nt, Artificial Sequence
  Description of Artificial Sequence: Synthetic oligonucleotide
uaacacucuucagccccuc

SEQ ID NO: 2705887 - RNA, 19 nt, Artificial Sequence
  Description of Artificial Sequence: Synthetic oligonucleotide
guaggcacugcaguuacuu

SEQ ID NO: 2705888 - RNA, 19 nt, Artificial Sequence
  Description of Artificial Sequence: Synthetic oligonucleotide
guuggccugagagcacuca

SEQ ID NO: 2705889 - RNA, 19 nt, Artificial Sequence
  Description of Artificial Sequence: Synthetic oligonucleotide
cucuucagccccucucgaa

SEQ ID NO: 2705890 - RNA, 19 nt, Artificial Sequence
  Description of Artificial Sequence: Synthetic oligonucleotide
cuaccaucacaaagugcua

SEQ ID NO: 2705891 - RNA, 19 nt, Artificial Sequence
  Description of Artificial Sequence: Synthetic oligonucleotide
ugucuccuacuuggcagua

SEQ ID NO: 2705892 - RNA, 19 nt, Artificial Sequence
  Description of Artificial Sequence: Synthetic oligonucleotide
uccacgcaguccgggcacc

SEQ ID NO: 2705893 - RNA, 19 nt, Artificial Sequence
  Description of Artificial Sequence: Synthetic oligonucleotide
gagguuggccugagagcac

SEQ ID NO: 2705894 - RNA, 19 nt, Artificial Sequence
  Description of Artificial Sequence: Synthetic oligonucleotide
gccccucucgaaccacugg

SEQ ID NO: 2705895 - RNA, 19 nt, Artificial Sequence
  Description of Artificial Sequence: Synthetic oligonucleotide
ccuagauccaccugccucu

SEQ ID NO: 2705896 - RNA, 19 nt, Artificial Sequence
  Description of Artificial Sequence: Synthetic oligonucleotide
gcaaguauguggcuucuuu

SEQ ID NO: 2705897 - RNA, 19 nt, Artificial Sequence
  Description of Artificial Sequence: Synthetic oligonucleotide
cgagguuggccugagagca

SEQ ID NO: 2705898 - RNA, 19 nt, Artificial Sequence
  Description of Artificial Sequence: Synthetic oligonucleotide
gggucuuuccaguaagauu

SEQ ID NO: 2705899 - RNA, 19 nt, Artificial Sequence
  Description of Artificial Sequence: Synthetic oligonucleotide
ggcaguagaugaacacgca

SEQ ID NO: 2705900 - RNA, 19 nt, Artificial Sequence
  Description of Artificial Sequence: Synthetic oligonucleotide
cgaagccggacacauucac

SEQ ID NO: 2705901 - RNA, 19 nt, Artificial Sequence
  Description of Artificial Sequence: Synthetic oligonucleotide
acucgcauuuguagaccau

SEQ ID NO: 2705902 - RNA, 19 nt, Artificial Sequence
  Description of Artificial Sequence: Synthetic oligonucleotide
caccagcucuucccuucug

SEQ ID NO: 2705903 - RNA, 19 nt, Artificial Sequence
  Description of Artificial Sequence: Synthetic oligonucleotide
gccuggucgaacuccucga

SEQ ID NO: 2705904 - RNA, 19 nt, Artificial Sequence
  Description of Artificial Sequence: Synthetic oligonucleotide
agccccucucgaaccacug

SEQ ID NO: 2705905 - RNA, 19 nt, Artificial Sequence
  Description of Artificial Sequence: Synthetic oligonucleotide
cacucagauuccacaaguu

SEQ ID NO: 2705906 - RNA, 19 nt, Artificial Sequence
  Description of Artificial Sequence: Synthetic oligonucleotide
caguccgggcaccagcucu

SEQ ID NO: 2705907 - RNA, 19 nt, Artificial Sequence
  Description of Artificial Sequence: Synthetic oligonucleotide
agcaaguauguggcuucuu

SEQ ID NO: 2705908 - RNA, 19 nt, Artificial Sequence
  Description of Artificial Sequence: Synthetic oligonucleotide
ccuugcagguggccauggg

SEQ ID NO: 2705909 - RNA, 19 nt, Artificial Sequence
  Description of Artificial Sequence: Synthetic oligonucleotide
cacgcaguccgggcaccag

SEQ ID NO: 2705910 - RNA, 19 nt, Artificial Sequence
  Description of Artificial Sequence: Synthetic oligonucleotide
cucgaaccacuggcucagc

SEQ ID NO: 2705911 - RNA, 19 nt, Artificial Sequence
  Description of Artificial Sequence: Synthetic oligonucleotide
caggguuucuuuguguguu

SEQ ID NO: 2705912 - RNA, 19 nt, Artificial Sequence
  Description of Artificial Sequence: Synthetic oligonucleotide
cuggcucagcuuccacgca

SEQ ID NO: 2705913 - RNA, 19 nt, Artificial Sequence
  Description of Artificial Sequence: Synthetic oligonucleotide
caguaagauuugucuccua

SEQ ID NO: 2705914 - RNA, 19 nt, Artificial Sequence
  Description of Artificial Sequence: Synthetic oligonucleotide
guuguugucugaagucauu

SEQ ID NO: 2705915 - RNA, 19 nt, Artificial Sequence
  Description of Artificial Sequence: Synthetic oligonucleotide
ccuuagagccgcugaagua

SEQ ID NO: 2705916 - RNA, 19 nt, Artificial Sequence
  Description of Artificial Sequence: Synthetic oligonucleotide
caccuccuugcagguggcc

SEQ ID NO: 2705917 - RNA, 19 nt, Artificial Sequence
  Description of Artificial Sequence: Synthetic oligonucleotide
cagccuggucgaacuccuc

SEQ ID NO: 2705918 - RNA, 19 nt, Artificial Sequence
  Description of Artificial Sequence: Synthetic oligonucleotide
aguccgggcaccagcucuu

SEQ ID NO: 2705919 - RNA, 19 nt, Artificial Sequence
  Description of Artificial Sequence: Synthetic oligonucleotide
guccugggacucgcauuug

SEQ ID NO: 2705920 - RNA, 19 nt, Artificial Sequence
  Description of Artificial Sequence: Synthetic oligonucleotide
cuccuacuuggcaguagau

SEQ ID NO: 2705921 - RNA, 19 nt, Artificial Sequence
  Description of Artificial Sequence: Synthetic oligonucleotide
cagcucuucccuucugcau

SEQ ID NO: 2705922 - RNA, 19 nt, Artificial Sequence
  Description of Artificial Sequence: Synthetic oligonucleotide
cuguccugggacucgcauu

SEQ ID NO: 2705923 - RNA, 19 nt, Artificial Sequence
  Description of Artificial Sequence: Synthetic oligonucleotide
ccugggacucgcauuugua

SEQ ID NO: 2705924 - RNA, 19 nt, Artificial Sequence
  Description of Artificial Sequence: Synthetic oligonucleotide
ccaguaagauuugucuccu

SEQ ID NO: 2705925 - RNA, 19 nt, Artificial Sequence
  Description of Artificial Sequence: Synthetic oligonucleotide
gcuguccugggacucgcau

SEQ ID NO: 2705926 - RNA, 19 nt, Artificial Sequence
  Description of Artificial Sequence: Synthetic oligonucleotide
gguuggccugagagcacuc

SEQ ID NO: 2705927 - RNA, 19 nt, Artificial Sequence
  Description of Artificial Sequence: Synthetic oligonucleotide
guccgggcaccagcucuuc

SEQ ID NO: 2705928 - RNA, 19 nt, Artificial Sequence
  Description of Artificial Sequence: Synthetic oligonucleotide
cgcauuuguagaccaugcu

SEQ ID NO: 2705929 - RNA, 19 nt, Artificial Sequence
  Description of Artificial Sequence: Synthetic oligonucleotide
gcaguuacuugcaguuguu

SEQ ID NO: 2705930 - RNA, 19 nt, Artificial Sequence
  Description of Artificial Sequence: Synthetic oligonucleotide
cugcauccuuagagccgcu

SEQ ID NO: 2705931 - RNA, 19 nt, Artificial Sequence
  Description of Artificial Sequence: Synthetic oligonucleotide
cgcagucuucaguaacacu

SEQ ID NO: 2705932 - RNA, 19 nt, Artificial Sequence
  Description of Artificial Sequence: Synthetic oligonucleotide
ccacgagguuggccugaga

SEQ ID NO: 2705933 - RNA, 19 nt, Artificial Sequence
  Description of Artificial Sequence: Synthetic oligonucleotide
cgggcaccagcucuucccu

SEQ ID NO: 2705934 - RNA, 19 nt, Artificial Sequence
  Description of Artificial Sequence: Synthetic oligonucleotide
ccucgaagccggacacauu

SEQ ID NO: 2705935 - RNA, 19 nt, Artificial Sequence
  Description of Artificial Sequence: Synthetic oligonucleotide
cgccuagauccaccugccu

SEQ ID NO: 2705936 - RNA, 19 nt, Artificial Sequence
  Description of Artificial Sequence: Synthetic oligonucleotide
aagaucuucccacagccgg

SEQ ID NO: 2705937 - RNA, 19 nt, Artificial Sequence
  Description of Artificial Sequence: Synthetic oligonucleotide
auaugaaaaugccacagag

SEQ ID NO: 2705938 - RNA, 19 nt, Artificial Sequence
  Description of Artificial Sequence: Synthetic oligonucleotide
uucaugagacacaagaccu

SEQ ID NO: 2705939 - RNA, 19 nt, Artificial Sequence
  Description of Artificial Sequence: Synthetic oligonucleotide
gugaccaccacucuguugg

SEQ ID NO: 2705940 - RNA, 19 nt, Artificial Sequence
  Description of Artificial Sequence: Synthetic oligonucleotide
auaagaaucagggucacag

SEQ ID NO: 2705941 - RNA, 19 nt, Artificial Sequence
  Description of Artificial Sequence: Synthetic oligonucleotide
gacacaagaccucaguuag

SEQ ID NO: 2705942 - RNA, 19 nt, Artificial Sequence
  Description of Artificial Sequence: Synthetic oligonucleotide
ucuaccagaagucccggcg

SEQ ID NO: 2705943 - RNA, 19 nt, Artificial Sequence
  Description of Artificial Sequence: Synthetic oligonucleotide
auguucaugagacacaaga

SEQ ID NO: 2705944 - RNA, 19 nt, Artificial Sequence
  Description of Artificial Sequence: Synthetic oligonucleotide
aucucgauggacuugacca

SEQ ID NO: 2705945 - RNA, 19 nt, Artificial Sequence
  Description of Artificial Sequence: Synthetic oligonucleotide
aacgucuuccacaaucucc

SEQ ID NO: 2705946 - RNA, 19 nt, Artificial Sequence
  Description of Artificial Sequence: Synthetic oligonucleotide
aauaugaaaaugccacaga

SEQ ID NO: 2705947 - RNA, 19 nt, Artificial Sequence
  Description of Artificial Sequence: Synthetic oligonucleotide
ucaggcagcaccauguuca

SEQ ID NO: 2705948 - RNA, 19 nt, Artificial Sequence
  Description of Artificial Sequence: Synthetic oligonucleotide
ucuguuggcgaacuugcgg

SEQ ID NO: 2705949 - RNA, 19 nt, Artificial Sequence
  Description of Artificial Sequence: Synthetic oligonucleotide
guucaugagacacaagacc

SEQ ID NO: 2705950 - RNA, 19 nt, Artificial Sequence
  Description of Artificial Sequence: Synthetic oligonucleotide
uaugaaaaugccacagaga

SEQ ID NO: 2705951 - RNA, 19 nt, Artificial Sequence
  Description of Artificial Sequence: Synthetic oligonucleotide
aaaguccccagcccagccc

SEQ ID NO: 2705952 - RNA, 19 nt, Artificial Sequence
  Description of Artificial Sequence: Synthetic oligonucleotide
ucaaacaccgaggugaacu

SEQ ID NO: 2705953 - RNA, 19 nt, Artificial Sequence
  Description of Artificial Sequence: Synthetic oligonucleotide
uguucaugagacacaagac

SEQ ID NO: 2705954 - RNA, 19 nt, Artificial Sequence
  Description of Artificial Sequence: Synthetic oligonucleotide
aagaaucagggucacagua

SEQ ID NO: 2705955 - RNA, 19 nt, Artificial Sequence
  Description of Artificial Sequence: Synthetic oligonucleotide
ucaucuucagagaggggag

SEQ ID NO: 2705956 - RNA, 19 nt, Artificial Sequence
  Description of Artificial Sequence: Synthetic oligonucleotide
uucuggcagucaaacaccg

SEQ ID NO: 2705957 - RNA, 19 nt, Artificial Sequence
  Description of Artificial Sequence: Synthetic oligonucleotide
gcaaauaugaaaaugccac

SEQ ID NO: 2705958 - RNA, 19 nt, Artificial Sequence
  Description of Artificial Sequence: Synthetic oligonucleotide
ucgaacgucuuccacaauc

SEQ ID NO: 2705959 - RNA, 19 nt, Artificial Sequence
  Description of Artificial Sequence: Synthetic oligonucleotide
uuugcuucgccuucgccug

SEQ ID NO: 2705960 - RNA, 19 nt, Artificial Sequence
  Description of Artificial Sequence: Synthetic oligonucleotide
cacaagaccucaguuagcg

SEQ ID NO: 2705961 - RNA, 19 nt, Artificial Sequence
  Description of Artificial Sequence: Synthetic oligonucleotide
ugucccgagaggcacugcg

SEQ ID NO: 2705962 - RNA, 19 nt, Artificial Sequence
  Description of Artificial Sequence: Synthetic oligonucleotide
aaacaccgaggugaacucc

SEQ ID NO: 2705963 - RNA, 19 nt, Artificial Sequence
  Description of Artificial Sequence: Synthetic oligonucleotide
aguacuucgugaccaccac

SEQ ID NO: 2705964 - RNA, 19 nt, Artificial Sequence
  Description of Artificial Sequence: Synthetic oligonucleotide
aaugccacagagauugcug

SEQ ID NO: 2705965 - RNA, 19 nt, Artificial Sequence
  Description of Artificial Sequence: Synthetic oligonucleotide
cuguuggcgaacuugcggc

SEQ ID NO: 2705966 - RNA, 19 nt, Artificial Sequence
  Description of Artificial Sequence: Synthetic oligonucleotide
ucaaagguuugcuucgccu

SEQ ID NO: 2705967 - RNA, 19 nt, Artificial Sequence
  Description of Artificial Sequence: Synthetic oligonucleotide
uacuucgugaccaccacuc

SEQ ID NO: 2705968 - RNA, 19 nt, Artificial Sequence
  Description of Artificial Sequence: Synthetic oligonucleotide
uucgugaccaccacucugu

SEQ ID NO: 2705969 - RNA, 19 nt, Artificial Sequence
  Description of Artificial Sequence: Synthetic oligonucleotide
gaucccggcuucgagagcg

SEQ ID NO: 2705970 - RNA, 19 nt, Artificial Sequence
  Description of Artificial Sequence: Synthetic oligonucleotide
gugaacuccacaaagaucu

SEQ ID NO: 2705971 - RNA, 19 nt, Artificial Sequence
  Description of Artificial Sequence: Synthetic oligonucleotide
acucuguuggcgaacuugc

SEQ ID NO: 2705972 - RNA, 19 nt, Artificial Sequence
  Description of Artificial Sequence: Synthetic oligonucleotide
uggcagucaaacaccgagg

SEQ ID NO: 2705973 - RNA, 19 nt, Artificial Sequence
  Description of Artificial Sequence: Synthetic oligonucleotide
cuugcggccggucaggccc

SEQ ID NO: 2705974 - RNA, 19 nt, Artificial Sequence
  Description of Artificial Sequence: Synthetic oligonucleotide
aaagaucuucccacagccg

SEQ ID NO: 2705975 - RNA, 19 nt, Artificial Sequence
  Description of Artificial Sequence: Synthetic oligonucleotide
cuccucauacuccucgucg

SEQ ID NO: 2705976 - RNA, 19 nt, Artificial Sequence
  Description of Artificial Sequence: Synthetic oligonucleotide
agagauugcugccauucca

SEQ ID NO: 2705977 - RNA, 19 nt, Artificial Sequence
  Description of Artificial Sequence: Synthetic oligonucleotide
uucgccuucgccugucccg

SEQ ID NO: 2705978 - RNA, 19 nt, Artificial Sequence
  Description of Artificial Sequence: Synthetic oligonucleotide
ucaguuagcgccucugguc

SEQ ID NO: 2705979 - RNA, 19 nt, Artificial Sequence
  Description of Artificial Sequence: Synthetic oligonucleotide
acagccgggcaccucaacg

SEQ ID NO: 2705980 - RNA, 19 nt, Artificial Sequence
  Description of Artificial Sequence: Synthetic oligonucleotide
ugucauucggcugucacuc

SEQ ID NO: 2705981 - RNA, 19 nt, Artificial Sequence
  Description of Artificial Sequence: Synthetic oligonucleotide
auacuugcugcacucgucu

SEQ ID NO: 2705982 - RNA, 19 nt, Artificial Sequence
  Description of Artificial Sequence: Synthetic oligonucleotide
ucacaguacuucgugacca

SEQ ID NO: 2705983 - RNA, 19 nt, Artificial Sequence
  Description of Artificial Sequence: Synthetic oligonucleotide
acaagaccucaguuagcgc

SEQ ID NO: 2705984 - RNA, 19 nt, Artificial Sequence
  Description of Artificial Sequence: Synthetic oligonucleotide
ucucgauggacuugaccag

SEQ ID NO: 2705985 - RNA, 19 nt, Artificial Sequence
  Description of Artificial Sequence: Synthetic oligonucleotide
gagauugcugccauuccag

SEQ ID NO: 2705986 - RNA, 19 nt, Artificial Sequence
  Description of Artificial Sequence: Synthetic oligonucleotide
gcggugauaagaaucaggg

SEQ ID NO: 2705987 - RNA, 19 nt, Artificial Sequence
  Description of Artificial Sequence: Synthetic oligonucleotide
cucaacgccguccacgggc

SEQ ID NO: 2705988 - RNA, 19 nt, Artificial Sequence
  Description of Artificial Sequence: Synthetic oligonucleotide
uguggcuacgcuuccggug

SEQ ID NO: 2705989 - RNA, 19 nt, Artificial Sequence
  Description of Artificial Sequence: Synthetic oligonucleotide
cagucaaacaccgagguga

SEQ ID NO: 2705990 - RNA, 19 nt, Artificial Sequence
  Description of Artificial Sequence: Synthetic oligonucleotide
gaucucgauggacuugacc

SEQ ID NO: 2705991 - RNA, 19 nt, Artificial Sequence
  Description of Artificial Sequence: Synthetic oligonucleotide
ugccauuccaguugcugcc

SEQ ID NO: 2705992 - RNA, 19 nt, Artificial Sequence
  Description of Artificial Sequence: Synthetic oligonucleotide
gauggacuugaccagccca

SEQ ID NO: 2705993 - RNA, 19 nt, Artificial Sequence
  Description of Artificial Sequence: Synthetic oligonucleotide
ugcguuuacgaucccggcu

SEQ ID NO: 2705994 - RNA, 19 nt, Artificial Sequence
  Description of Artificial Sequence: Synthetic oligonucleotide
ucucgaacgucuuccacaa

SEQ ID NO: 2705995 - RNA, 19 nt, Artificial Sequence
  Description of Artificial Sequence: Synthetic oligonucleotide
agacacaagaccucaguua

SEQ ID NO: 2705996 - RNA, 19 nt, Artificial Sequence
  Description of Artificial Sequence: Synthetic oligonucleotide
gcugcacucgucucgaacg

SEQ ID NO: 2705997 - RNA, 19 nt, Artificial Sequence
  Description of Artificial Sequence: Synthetic oligonucleotide
cugccauuccaguugcugc

SEQ ID NO: 2705998 - RNA, 19 nt, Artificial Sequence
  Description of Artificial Sequence: Synthetic oligonucleotide
aggugaacuccacaaagau

SEQ ID NO: 2705999 - RNA, 19 nt, Artificial Sequence
  Description of Artificial Sequence: Synthetic oligonucleotide
gugauaagaaucaggguca

SEQ ID NO: 2706000 - RNA, 19 nt, Artificial Sequence
  Description of Artificial Sequence: Synthetic oligonucleotide
aaaugccacagagauugcu

SEQ ID NO: 2706001 - RNA, 19 nt, Artificial Sequence
  Description of Artificial Sequence: Synthetic oligonucleotide
uaagaaucagggucacagu

SEQ ID NO: 2706002 - RNA, 19 nt, Artificial Sequence
  Description of Artificial Sequence: Synthetic oligonucleotide
cuaccagaagucccggcgg

SEQ ID NO: 2706003 - RNA, 19 nt, Artificial Sequence
  Description of Artificial Sequence: Synthetic oligonucleotide
agcgccucuggucaaaggu

SEQ ID NO: 2706004 - RNA, 19 nt, Artificial Sequence
  Description of Artificial Sequence: Synthetic oligonucleotide
aaguccccagcccagcccu

SEQ ID NO: 2706005 - RNA, 19 nt, Artificial Sequence
  Description of Artificial Sequence: Synthetic oligonucleotide
aaaaugccacagagauugc

SEQ ID NO: 2706006 - RNA, 19 nt, Artificial Sequence
  Description of Artificial Sequence: Synthetic oligonucleotide
cucgucguccagcaguucc

SEQ ID NO: 2706007 - RNA, 19 nt, Artificial Sequence
  Description of Artificial Sequence: Synthetic oligonucleotide
uuacgaucccggcuucgag

SEQ ID NO: 2706008 - RNA, 19 nt, Artificial Sequence
  Description of Artificial Sequence: Synthetic oligonucleotide
caccauguucaugagacac

SEQ ID NO: 2706009 - RNA, 19 nt, Artificial Sequence
  Description of Artificial Sequence: Synthetic oligonucleotide
uucgccugucccgagaggc

SEQ ID NO: 2706010 - RNA, 19 nt, Artificial Sequence
  Description of Artificial Sequence: Synthetic oligonucleotide
cacgguuccgccgaucucg

SEQ ID NO: 2706011 - RNA, 19 nt, Artificial Sequence
  Description of Artificial Sequence: Synthetic oligonucleotide
acaguacuucgugaccacc

SEQ ID NO: 2706012 - RNA, 19 nt, Artificial Sequence
  Description of Artificial Sequence: Synthetic oligonucleotide
ucauucggcugucacuccu

SEQ ID NO: 2706013 - RNA, 19 nt, Artificial Sequence
  Description of Artificial Sequence: Synthetic oligonucleotide
accgaggugaacuccacaa

SEQ ID NO: 2706014 - RNA, 19 nt, Artificial Sequence
  Description of Artificial Sequence: Synthetic oligonucleotide
guggcuacgcuuccggugc

SEQ ID NO: 2706015 - RNA, 19 nt, Artificial Sequence
  Description of Artificial Sequence: Synthetic oligonucleotide
uacgaucccggcuucgaga

SEQ ID NO: 2706016 - RNA, 19 nt, Artificial Sequence
  Description of Artificial Sequence: Synthetic oligonucleotide
cucgucucgaacgucuucc

SEQ ID NO: 2706017 - RNA, 19 nt, Artificial Sequence
  Description of Artificial Sequence: Synthetic oligonucleotide
auggcuuucuggcagucaa

SEQ ID NO: 2706018 - RNA, 19 nt, Artificial Sequence
  Description of Artificial Sequence: Synthetic oligonucleotide
ucaacgccguccacgggcc

SEQ ID NO: 2706019 - RNA, 19 nt, Artificial Sequence
  Description of Artificial Sequence: Synthetic oligonucleotide
uccucauacuccucgucgu

SEQ ID NO: 2706020 - RNA, 19 nt, Artificial Sequence
  Description of Artificial Sequence: Synthetic oligonucleotide
cuuccggugccgauucucc

SEQ ID NO: 2706021 - RNA, 19 nt, Artificial Sequence
  Description of Artificial Sequence: Synthetic oligonucleotide
accucuaccagaagucccg

SEQ ID NO: 2706022 - RNA, 19 nt, Artificial Sequence
  Description of Artificial Sequence: Synthetic oligonucleotide
uguuggcgaacuugcggcc

SEQ ID NO: 2706023 - RNA, 19 nt, Artificial Sequence
  Description of Artificial Sequence: Synthetic oligonucleotide
aacaccgaggugaacucca

SEQ ID NO: 2706024 - RNA, 19 nt, Artificial Sequence
  Description of Artificial Sequence: Synthetic oligonucleotide
gucucgaacgucuuccaca

SEQ ID NO: 2706025 - RNA, 19 nt, Artificial Sequence
  Description of Artificial Sequence: Synthetic oligonucleotide
auacuccucgucguccagc

SEQ ID NO: 2706026 - RNA, 19 nt, Artificial Sequence
  Description of Artificial Sequence: Synthetic oligonucleotide
gaaucagggucacaguacu

SEQ ID NO: 2706027 - RNA, 19 nt, Artificial Sequence
  Description of Artificial Sequence: Synthetic oligonucleotide
uuuacgaucccggcuucga

SEQ ID NO: 2706028 - RNA, 19 nt, Artificial Sequence
  Description of Artificial Sequence: Synthetic oligonucleotide
caaacaccgaggugaacuc

SEQ ID NO: 2706029 - RNA, 19 nt, Artificial Sequence
  Description of Artificial Sequence: Synthetic oligonucleotide
accaccacucuguuggcga

SEQ ID NO: 2706030 - RNA, 19 nt, Artificial Sequence
  Description of Artificial Sequence: Synthetic oligonucleotide
cuucgugaccaccacucug

SEQ ID NO: 2706031 - RNA, 19 nt, Artificial Sequence
  Description of Artificial Sequence: Synthetic oligonucleotide
uucgagagcggcuguggcu

SEQ ID NO: 2706032 - RNA, 19 nt, Artificial Sequence
  Description of Artificial Sequence: Synthetic oligonucleotide
guuugcuucgccuucgccu

SEQ ID NO: 2706033 - RNA, 19 nt, Artificial Sequence
  Description of Artificial Sequence: Synthetic oligonucleotide
uccugcguuuacgaucccg

SEQ ID NO: 2706034 - RNA, 19 nt, Artificial Sequence
  Description of Artificial Sequence: Synthetic oligonucleotide
ucccgagaggcacugcgcu

SEQ ID NO: 2706035 - RNA, 19 nt, Artificial Sequence
  Description of Artificial Sequence: Synthetic oligonucleotide
gacagguggggagaaaguc

SEQ ID NO: 2706036 - RNA, 19 nt, Artificial Sequence
  Description of Artificial Sequence: Synthetic oligonucleotide
agguuugcuucgccuucgc

SEQ ID NO: 2706037 - RNA, 19 nt, Artificial Sequence
  Description of Artificial Sequence: Synthetic oligonucleotide
uucggcuccugcguuuacg

SEQ ID NO: 2706038 - RNA, 19 nt, Artificial Sequence
  Description of Artificial Sequence: Synthetic oligonucleotide
ugauaagaaucagggucac

SEQ ID NO: 2706039 - RNA, 19 nt, Artificial Sequence
  Description of Artificial Sequence: Synthetic oligonucleotide
ucggcuccugcguuuacga

SEQ ID NO: 2706040 - RNA, 19 nt, Artificial Sequence
  Description of Artificial Sequence: Synthetic oligonucleotide
cucuguuggcgaacuugcg

SEQ ID NO: 2706041 - RNA, 19 nt, Artificial Sequence
  Description of Artificial Sequence: Synthetic oligonucleotide
acuugcggccggucaggcc

SEQ ID NO: 2706042 - RNA, 19 nt, Artificial Sequence
  Description of Artificial Sequence: Synthetic oligonucleotide
acucgucucgaacgucuuc

SEQ ID NO: 2706043 - RNA, 19 nt, Artificial Sequence
  Description of Artificial Sequence: Synthetic oligonucleotide
ccugcguuuacgaucccgg

SEQ ID NO: 2706044 - RNA, 19 nt, Artificial Sequence
  Description of Artificial Sequence: Synthetic oligonucleotide
gucaaagguuugcuucgcc

SEQ ID NO: 2706045 - RNA, 19 nt, Artificial Sequence
  Description of Artificial Sequence: Synthetic oligonucleotide
cacucuguuggcgaacuug

SEQ ID NO: 2706046 - RNA, 19 nt, Artificial Sequence
  Description of Artificial Sequence: Synthetic oligonucleotide
ggagaaaguccccagccca

SEQ ID NO: 2706047 - RNA, 19 nt, Artificial Sequence
  Description of Artificial Sequence: Synthetic oligonucleotide
acacaagaccucaguuagc

SEQ ID NO: 2706048 - RNA, 19 nt, Artificial Sequence
  Description of Artificial Sequence: Synthetic oligonucleotide
ugaccagcccauacuugcu

SEQ ID NO: 2706049 - RNA, 19 nt, Artificial Sequence
  Description of Artificial Sequence: Synthetic oligonucleotide
gaacuugcggccggucagg

SEQ ID NO: 2706050 - RNA, 19 nt, Artificial Sequence
  Description of Artificial Sequence: Synthetic oligonucleotide
ucgucguccagcaguuccu

SEQ ID NO: 2706051 - RNA, 19 nt, Artificial Sequence
  Description of Artificial Sequence: Synthetic oligonucleotide
agagcggcuguggcuacgc

SEQ ID NO: 2706052 - RNA, 19 nt, Artificial Sequence
  Description of Artificial Sequence: Synthetic oligonucleotide
uaccagaagucccggcggu

SEQ ID NO: 2706053 - RNA, 19 nt, Artificial Sequence
  Description of Artificial Sequence: Synthetic oligonucleotide
cucgauggacuugaccagc

SEQ ID NO: 2706054 - RNA, 19 nt, Artificial Sequence
  Description of Artificial Sequence: Synthetic oligonucleotide
cuucgagagcggcuguggc

SEQ ID NO: 2706055 - RNA, 19 nt, Artificial Sequence
  Description of Artificial Sequence: Synthetic oligonucleotide
ucuggcagucaaacaccga

SEQ ID NO: 2706056 - RNA, 19 nt, Artificial Sequence
  Description of Artificial Sequence: Synthetic oligonucleotide
caugagacacaagaccuca

SEQ ID NO: 2706057 - RNA, 19 nt, Artificial Sequence
  Description of Artificial Sequence: Synthetic oligonucleotide
acgcuuccggugccgauuc

SEQ ID NO: 2706058 - RNA, 19 nt, Artificial Sequence
  Description of Artificial Sequence: Synthetic oligonucleotide
aacgccguccacgggccgg

SEQ ID NO: 2706059 - RNA, 19 nt, Artificial Sequence
  Description of Artificial Sequence: Synthetic oligonucleotide
cauguucaugagacacaag

SEQ ID NO: 2706060 - RNA, 19 nt, Artificial Sequence
  Description of Artificial Sequence: Synthetic oligonucleotide
guuggcgaacuugcggccg

SEQ ID NO: 2706061 - RNA, 19 nt, Artificial Sequence
  Description of Artificial Sequence: Synthetic oligonucleotide
gaacgucuuccacaaucuc

SEQ ID NO: 2706062 - RNA, 19 nt, Artificial Sequence
  Description of Artificial Sequence: Synthetic oligonucleotide
caccucaacgccguccacg

SEQ ID NO: 2706063 - RNA, 19 nt, Artificial Sequence
  Description of Artificial Sequence: Synthetic oligonucleotide
caguacuucgugaccacca

SEQ ID NO: 2706064 - RNA, 19 nt, Artificial Sequence
  Description of Artificial Sequence: Synthetic oligonucleotide
ggcggugauaagaaucagg

SEQ ID NO: 2706065 - RNA, 19 nt, Artificial Sequence
  Description of Artificial Sequence: Synthetic oligonucleotide
acugcgcuggucacgguuc

SEQ ID NO: 2706066 - RNA, 19 nt, Artificial Sequence
  Description of Artificial Sequence: Synthetic oligonucleotide
caucaucuucagagagggg

SEQ ID NO: 2706067 - RNA, 19 nt, Artificial Sequence
  Description of Artificial Sequence: Synthetic oligonucleotide
cuccacaaagaucuuccca

SEQ ID NO: 2706068 - RNA, 19 nt, Artificial Sequence
  Description of Artificial Sequence: Synthetic oligonucleotide
agcccauacuugcugcacu

SEQ ID NO: 2706069 - RNA, 19 nt, Artificial Sequence
  Description of Artificial Sequence: Synthetic oligonucleotide
agucccggcggugauaaga

SEQ ID NO: 2706070 - RNA, 19 nt, Artificial Sequence
  Description of Artificial Sequence: Synthetic oligonucleotide
cugcguuuacgaucccggc

SEQ ID NO: 2706071 - RNA, 19 nt, Artificial Sequence
  Description of Artificial Sequence: Synthetic oligonucleotide
acuucgugaccaccacucu

SEQ ID NO: 2706072 - RNA, 19 nt, Artificial Sequence
  Description of Artificial Sequence: Synthetic oligonucleotide
guuuacgaucccggcuucg

SEQ ID NO: 2706073 - RNA, 19 nt, Artificial Sequence
  Description of Artificial Sequence: Synthetic oligonucleotide
auucggcugucacuccucu

SEQ ID NO: 2706074 - RNA, 19 nt, Artificial Sequence
  Description of Artificial Sequence: Synthetic oligonucleotide
uuagcgccucuggucaaag

SEQ ID NO: 2706075 - RNA, 19 nt, Artificial Sequence
  Description of Artificial Sequence: Synthetic oligonucleotide
ucgagagcggcuguggcua

SEQ ID NO: 2706076 - RNA, 19 nt, Artificial Sequence
  Description of Artificial Sequence: Synthetic oligonucleotide
cacuccucugcccaucauc

SEQ ID NO: 2706077 - RNA, 19 nt, Artificial Sequence
  Description of Artificial Sequence: Synthetic oligonucleotide
cuucccacagccgggcacc

SEQ ID NO: 2706078 - RNA, 19 nt, Artificial Sequence
  Description of Artificial Sequence: Synthetic oligonucleotide
cacaguacuucgugaccac

SEQ ID NO: 2706079 - RNA, 19 nt, Artificial Sequence
  Description of Artificial Sequence: Synthetic oligonucleotide
gcuguggcuacgcuuccgg

SEQ ID NO: 2706080 - RNA, 19 nt, Artificial Sequence
  Description of Artificial Sequence: Synthetic oligonucleotide
gaccaccacucuguuggcg

SEQ ID NO: 2706081 - RNA, 19 nt, Artificial Sequence
  Description of Artificial Sequence: Synthetic oligonucleotide
ugcauggcuuucuggcagu

SEQ ID NO: 2706082 - RNA, 19 nt, Artificial Sequence
  Description of Artificial Sequence: Synthetic oligonucleotide
cucuaccagaagucccggc

SEQ ID NO: 2706083 - RNA, 19 nt, Artificial Sequence
  Description of Artificial Sequence: Synthetic oligonucleotide
auuccaguugcugccggcu

SEQ ID NO: 2706084 - RNA, 19 nt, Artificial Sequence
  Description of Artificial Sequence: Synthetic oligonucleotide
gggagaaaguccccagccc

SEQ ID NO: 2706085 - RNA, 19 nt, Artificial Sequence
  Description of Artificial Sequence: Synthetic oligonucleotide
guccagcaguuccucaggc

SEQ ID NO: 2706086 - RNA, 19 nt, Artificial Sequence
  Description of Artificial Sequence: Synthetic oligonucleotide
gcuccugcguuuacgaucc

SEQ ID NO: 2706087 - RNA, 19 nt, Artificial Sequence
  Description of Artificial Sequence: Synthetic oligonucleotide
gaagucccggcggugauaa

SEQ ID NO: 2706088 - RNA, 19 nt, Artificial Sequence
  Description of Artificial Sequence: Synthetic oligonucleotide
ucgucucgaacgucuucca

SEQ ID NO: 2706089 - RNA, 19 nt, Artificial Sequence
  Description of Artificial Sequence: Synthetic oligonucleotide
cgaggugaacuccacaaag

SEQ ID NO: 2706090 - RNA, 19 nt, Artificial Sequence
  Description of Artificial Sequence: Synthetic oligonucleotide
gauaagaaucagggucaca

SEQ ID NO: 2706091 - RNA, 19 nt, Artificial Sequence
  Description of Artificial Sequence: Synthetic oligonucleotide
gggacagguggggagaaag

SEQ ID NO: 2706092 - RNA, 19 nt, Artificial Sequence
  Description of Artificial Sequence: Synthetic oligonucleotide
cugccggcugucauucggc

SEQ ID NO: 2706093 - RNA, 19 nt, Artificial Sequence
  Description of Artificial Sequence: Synthetic oligonucleotide
gagacacaagaccucaguu

SEQ ID NO: 2706094 - RNA, 19 nt, Artificial Sequence
  Description of Artificial Sequence: Synthetic oligonucleotide
cuucgccuucgccuguccc

SEQ ID NO: 2706095 - RNA, 19 nt, Artificial Sequence
  Description of Artificial Sequence: Synthetic oligonucleotide
uccucgucguccagcaguu

SEQ ID NO: 2706096 - RNA, 19 nt, Artificial Sequence
  Description of Artificial Sequence: Synthetic oligonucleotide
cauucggcugucacuccuc

SEQ ID NO: 2706097 - RNA, 19 nt, Artificial Sequence
  Description of Artificial Sequence: Synthetic oligonucleotide
gcugccggcugucauucgg

SEQ ID NO: 2706098 - RNA, 19 nt, Artificial Sequence
  Description of Artificial Sequence: Synthetic oligonucleotide
ggcuccugcguuuacgauc

SEQ ID NO: 2706099 - RNA, 19 nt, Artificial Sequence
  Description of Artificial Sequence: Synthetic oligonucleotide
uacuugcugcacucgucuc

SEQ ID NO: 2706100 - RNA, 19 nt, Artificial Sequence
  Description of Artificial Sequence: Synthetic oligonucleotide
aguugcugccggcugucau

SEQ ID NO: 2706101 - RNA, 19 nt, Artificial Sequence
  Description of Artificial Sequence: Synthetic oligonucleotide
gcuggucacgguuccgccg

SEQ ID NO: 2706102 - RNA, 19 nt, Artificial Sequence
  Description of Artificial Sequence: Synthetic oligonucleotide
ggugaacuccacaaagauc

SEQ ID NO: 2706103 - RNA, 19 nt, Artificial Sequence
  Description of Artificial Sequence: Synthetic oligonucleotide
cauacuccucgucguccag

SEQ ID NO: 2706104 - RNA, 19 nt, Artificial Sequence
  Description of Artificial Sequence: Synthetic oligonucleotide
augagacacaagaccucag

SEQ ID NO: 2706105 - RNA, 19 nt, Artificial Sequence
  Description of Artificial Sequence: Synthetic oligonucleotide
ucgccugucccgagaggca

SEQ ID NO: 2706106 - RNA, 19 nt, Artificial Sequence
  Description of Artificial Sequence: Synthetic oligonucleotide
uucggcugucacuccucug

SEQ ID NO: 2706107 - RNA, 19 nt, Artificial Sequence
  Description of Artificial Sequence: Synthetic oligonucleotide
gcugucauucggcugucac

SEQ ID NO: 2706108 - RNA, 19 nt, Artificial Sequence
  Description of Artificial Sequence: Synthetic oligonucleotide
gucauucggcugucacucc

SEQ ID NO: 2706109 - RNA, 19 nt, Artificial Sequence
  Description of Artificial Sequence: Synthetic oligonucleotide
accacucuguuggcgaacu

SEQ ID NO: 2706110 - RNA, 19 nt, Artificial Sequence
  Description of Artificial Sequence: Synthetic oligonucleotide
gcugucacuccucugccca

SEQ ID NO: 2706111 - RNA, 19 nt, Artificial Sequence
  Description of Artificial Sequence: Synthetic oligonucleotide
ggcuuucuggcagucaaac

SEQ ID NO: 2706112 - RNA, 19 nt, Artificial Sequence
  Description of Artificial Sequence: Synthetic oligonucleotide
uugcugccggcugucauuc

SEQ ID NO: 2706113 - RNA, 19 nt, Artificial Sequence
  Description of Artificial Sequence: Synthetic oligonucleotide
gaggcacugcgcuggucac

SEQ ID NO: 2706114 - RNA, 19 nt, Artificial Sequence
  Description of Artificial Sequence: Synthetic oligonucleotide
auggacuugaccagcccau

SEQ ID NO: 2706115 - RNA, 19 nt, Artificial Sequence
  Description of Artificial Sequence: Synthetic oligonucleotide
ggacuugaccagcccauac

SEQ ID NO: 2706116 - RNA, 19 nt, Artificial Sequence
  Description of Artificial Sequence: Synthetic oligonucleotide
cuucgccugucccgagagg

SEQ ID NO: 2706117 - RNA, 19 nt, Artificial Sequence
  Description of Artificial Sequence: Synthetic oligonucleotide
uccggugccgauucuccuu

SEQ ID NO: 2706118 - RNA, 19 nt, Artificial Sequence
  Description of Artificial Sequence: Synthetic oligonucleotide
ucucggcuucggcuccugc

SEQ ID NO: 2706119 - RNA, 19 nt, Artificial Sequence
  Description of Artificial Sequence: Synthetic oligonucleotide
ugccggcugucauucggcu

SEQ ID NO: 2706120 - RNA, 19 nt, Artificial Sequence
  Description of Artificial Sequence: Synthetic oligonucleotide
cuggucacgguuccgccga

SEQ ID NO: 2706121 - RNA, 19 nt, Artificial Sequence
  Description of Artificial Sequence: Synthetic oligonucleotide
agcggcuguggcuacgcuu

SEQ ID NO: 2706122 - RNA, 19 nt, Artificial Sequence
  Description of Artificial Sequence: Synthetic oligonucleotide
gcagucaaacaccgaggug

SEQ ID NO: 2706123 - RNA, 19 nt, Artificial Sequence
  Description of Artificial Sequence: Synthetic oligonucleotide
agguggggagaaagucccc

SEQ ID NO: 2706124 - RNA, 19 nt, Artificial Sequence
  Description of Artificial Sequence: Synthetic oligonucleotide
acaccgaggugaacuccac

SEQ ID NO: 2706125 - RNA, 19 nt, Artificial Sequence
  Description of Artificial Sequence: Synthetic oligonucleotide
cuugcugcacucgucucga

SEQ ID NO: 2706126 - RNA, 19 nt, Artificial Sequence
  Description of Artificial Sequence: Synthetic oligonucleotide
gguuugcuucgccuucgcc

SEQ ID NO: 2706127 - RNA, 19 nt, Artificial Sequence
  Description of Artificial Sequence: Synthetic oligonucleotide
ccucaguuagcgccucugg

SEQ ID NO: 2706128 - RNA, 19 nt, Artificial Sequence
  Description of Artificial Sequence: Synthetic oligonucleotide
cccggcggugauaagaauc

SEQ ID NO: 2706129 - RNA, 19 nt, Artificial Sequence
  Description of Artificial Sequence: Synthetic oligonucleotide
ucacgguuccgccgaucuc

SEQ ID NO: 2706130 - RNA, 19 nt, Artificial Sequence
  Description of Artificial Sequence: Synthetic oligonucleotide
ggcagucaaacaccgaggu

SEQ ID NO: 2706131 - RNA, 19 nt, Artificial Sequence
  Description of Artificial Sequence: Synthetic oligonucleotide
ccggucaggcccugcaugg

SEQ ID NO: 2706132 - RNA, 19 nt, Artificial Sequence
  Description of Artificial Sequence: Synthetic oligonucleotide
gucacgguuccgccgaucu

SEQ ID NO: 2706133 - RNA, 19 nt, Artificial Sequence
  Description of Artificial Sequence: Synthetic oligonucleotide
gagagcggcuguggcuacg

SEQ ID NO: 2706134 - RNA, 19 nt, Artificial Sequence
  Description of Artificial Sequence: Synthetic oligonucleotide
agaccucaguuagcgccuc

SEQ ID NO: 2706135 - RNA, 19 nt, Artificial Sequence
  Description of Artificial Sequence: Synthetic oligonucleotide
ugcgcuggucacgguuccg

SEQ ID NO: 2706136 - RNA, 19 nt, Artificial Sequence
  Description of Artificial Sequence: Synthetic oligonucleotide
aagucccggcggugauaag

SEQ ID NO: 2706137 - RNA, 19 nt, Artificial Sequence
  Description of Artificial Sequence: Synthetic oligonucleotide
caaagguuugcuucgccuu

SEQ ID NO: 2706138 - RNA, 19 nt, Artificial Sequence
  Description of Artificial Sequence: Synthetic oligonucleotide
uacgcuuccggugccgauu

SEQ ID NO: 2706139 - RNA, 19 nt, Artificial Sequence
  Description of Artificial Sequence: Synthetic oligonucleotide
ugcugccggcugucauucg

SEQ ID NO: 2706140 - RNA, 19 nt, Artificial Sequence
  Description of Artificial Sequence: Synthetic oligonucleotide
uggcuacgcuuccggugcc

SEQ ID NO: 2706141 - RNA, 19 nt, Artificial Sequence
  Description of Artificial Sequence: Synthetic oligonucleotide
aguuagcgccucuggucaa

SEQ ID NO: 2706142 - RNA, 19 nt, Artificial Sequence
  Description of Artificial Sequence: Synthetic oligonucleotide
gggaucucgauggacuuga

SEQ ID NO: 2706143 - RNA, 19 nt, Artificial Sequence
  Description of Artificial Sequence: Synthetic oligonucleotide
uccgccgaucucggcuucg

SEQ ID NO: 2706144 - RNA, 19 nt, Artificial Sequence
  Description of Artificial Sequence: Synthetic oligonucleotide
ugucacuccucugcccauc

SEQ ID NO: 2706145 - RNA, 19 nt, Artificial Sequence
  Description of Artificial Sequence: Synthetic oligonucleotide
cugcgcuggucacgguucc

SEQ ID NO: 2706146 - RNA, 19 nt, Artificial Sequence
  Description of Artificial Sequence: Synthetic oligonucleotide
ggucaaagguuugcuucgc

SEQ ID NO: 2706147 - RNA, 19 nt, Artificial Sequence
  Description of Artificial Sequence: Synthetic oligonucleotide
gcuuucuggcagucaaaca

SEQ ID NO: 2706148 - RNA, 19 nt, Artificial Sequence
  Description of Artificial Sequence: Synthetic oligonucleotide
cugucauucggcugucacu

SEQ ID NO: 2706149 - RNA, 19 nt, Artificial Sequence
  Description of Artificial Sequence: Synthetic oligonucleotide
ccgagaggcacugcgcugg

SEQ ID NO: 2706150 - RNA, 19 nt, Artificial Sequence
  Description of Artificial Sequence: Synthetic oligonucleotide
ccgaucucggcuucggcuc

SEQ ID NO: 2706151 - RNA, 19 nt, Artificial Sequence
  Description of Artificial Sequence: Synthetic oligonucleotide
cucaguuagcgccucuggu

SEQ ID NO: 2706152 - RNA, 19 nt, Artificial Sequence
  Description of Artificial Sequence: Synthetic oligonucleotide
ugcacucgucucgaacguc

SEQ ID NO: 2706153 - RNA, 19 nt, Artificial Sequence
  Description of Artificial Sequence: Synthetic oligonucleotide
uugcuucgccuucgccugu

SEQ ID NO: 2706154 - RNA, 19 nt, Artificial Sequence
  Description of Artificial Sequence: Synthetic oligonucleotide
gggucacaguacuucguga

SEQ ID NO: 2706155 - RNA, 19 nt, Artificial Sequence
  Description of Artificial Sequence: Synthetic oligonucleotide
accagaagucccggcggug

SEQ ID NO: 2706156 - RNA, 19 nt, Artificial Sequence
  Description of Artificial Sequence: Synthetic oligonucleotide
cagcccauacuugcugcac

SEQ ID NO: 2706157 - RNA, 19 nt, Artificial Sequence
  Description of Artificial Sequence: Synthetic oligonucleotide
caucuucagagaggggaga

SEQ ID NO: 2706158 - RNA, 19 nt, Artificial Sequence
  Description of Artificial Sequence: Synthetic oligonucleotide
acgguuccgccgaucucgg

SEQ ID NO: 2706159 - RNA, 19 nt, Artificial Sequence
  Description of Artificial Sequence: Synthetic oligonucleotide
ccggcggugauaagaauca

SEQ ID NO: 2706160 - RNA, 19 nt, Artificial Sequence
  Description of Artificial Sequence: Synthetic oligonucleotide
uggacuugaccagcccaua

SEQ ID NO: 2706161 - RNA, 19 nt, Artificial Sequence
  Description of Artificial Sequence: Synthetic oligonucleotide
gucccgagaggcacugcgc

SEQ ID NO: 2706162 - RNA, 19 nt, Artificial Sequence
  Description of Artificial Sequence: Synthetic oligonucleotide
ggcugucacuccucugccc

SEQ ID NO: 2706163 - RNA, 19 nt, Artificial Sequence
  Description of Artificial Sequence: Synthetic oligonucleotide
gguggggagaaagucccca

SEQ ID NO: 2706164 - RNA, 19 nt, Artificial Sequence
  Description of Artificial Sequence: Synthetic oligonucleotide
gguuccgccgaucucggcu

SEQ ID NO: 2706165 - RNA, 19 nt, Artificial Sequence
  Description of Artificial Sequence: Synthetic oligonucleotide
cgaacuugcggccggucag

SEQ ID NO: 2706166 - RNA, 19 nt, Artificial Sequence
  Description of Artificial Sequence: Synthetic oligonucleotide
guacuucgugaccaccacu

SEQ ID NO: 2706167 - RNA, 19 nt, Artificial Sequence
  Description of Artificial Sequence: Synthetic oligonucleotide
ccuucgccugucccgagag

SEQ ID NO: 2706168 - RNA, 19 nt, Artificial Sequence
  Description of Artificial Sequence: Synthetic oligonucleotide
gccggucaggcccugcaug

SEQ ID NO: 2706169 - RNA, 19 nt, Artificial Sequence
  Description of Artificial Sequence: Synthetic oligonucleotide
ccucuggucaaagguuugc

SEQ ID NO: 2706170 - RNA, 19 nt, Artificial Sequence
  Description of Artificial Sequence: Synthetic oligonucleotide
acgcccaccucuaccagaa

SEQ ID NO: 2706171 - RNA, 19 nt, Artificial Sequence
  Description of Artificial Sequence: Synthetic oligonucleotide
uugcggccggucaggcccu

SEQ ID NO: 2706172 - RNA, 19 nt, Artificial Sequence
  Description of Artificial Sequence: Synthetic oligonucleotide
ucccggcuucgagagcggc

SEQ ID NO: 2706173 - RNA, 19 nt, Artificial Sequence
  Description of Artificial Sequence: Synthetic oligonucleotide
gcgaacuugcggccgguca

SEQ ID NO: 2706174 - RNA, 19 nt, Artificial Sequence
  Description of Artificial Sequence: Synthetic oligonucleotide
cccauacuugcugcacucg

SEQ ID NO: 2706175 - RNA, 19 nt, Artificial Sequence
  Description of Artificial Sequence: Synthetic oligonucleotide
ccauguucaugagacacaa

SEQ ID NO: 2706176 - RNA, 19 nt, Artificial Sequence
  Description of Artificial Sequence: Synthetic oligonucleotide
uuccgccgaucucggcuuc

SEQ ID NO: 2706177 - RNA, 19 nt, Artificial Sequence
  Description of Artificial Sequence: Synthetic oligonucleotide
caacgccguccacgggccg

SEQ ID NO: 2706178 - RNA, 19 nt, Artificial Sequence
  Description of Artificial Sequence: Synthetic oligonucleotide
gucccggcggugauaagaa

SEQ ID NO: 2706179 - RNA, 19 nt, Artificial Sequence
  Description of Artificial Sequence: Synthetic oligonucleotide
ucccggcggugauaagaau

SEQ ID NO: 2706180 - RNA, 19 nt, Artificial Sequence
  Description of Artificial Sequence: Synthetic oligonucleotide
caccacucuguuggcgaac

SEQ ID NO: 2706181 - RNA, 19 nt, Artificial Sequence
  Description of Artificial Sequence: Synthetic oligonucleotide
guugcugccggcugucauu

SEQ ID NO: 2706182 - RNA, 19 nt, Artificial Sequence
  Description of Artificial Sequence: Synthetic oligonucleotide
caccgaggugaacuccaca

SEQ ID NO: 2706183 - RNA, 19 nt, Artificial Sequence
  Description of Artificial Sequence: Synthetic oligonucleotide
ccugcauggcuuucuggca

SEQ ID NO: 2706184 - RNA, 19 nt, Artificial Sequence
  Description of Artificial Sequence: Synthetic oligonucleotide
cuucggcuccugcguuuac

SEQ ID NO: 2706185 - RNA, 19 nt, Artificial Sequence
  Description of Artificial Sequence: Synthetic oligonucleotide
ggggaucucgauggacuug

SEQ ID NO: 2706186 - RNA, 19 nt, Artificial Sequence
  Description of Artificial Sequence: Synthetic oligonucleotide
guuagcgccucuggucaaa

SEQ ID NO: 2706187 - RNA, 19 nt, Artificial Sequence
  Description of Artificial Sequence: Synthetic oligonucleotide
ugcuucgccuucgccuguc

SEQ ID NO: 2706188 - RNA, 19 nt, Artificial Sequence
  Description of Artificial Sequence: Synthetic oligonucleotide
agaagucccggcggugaua

SEQ ID NO: 2706189 - RNA, 19 nt, Artificial Sequence
  Description of Artificial Sequence: Synthetic oligonucleotide
gcguuuacgaucccggcuu

SEQ ID NO: 2706190 - RNA, 19 nt, Artificial Sequence
  Description of Artificial Sequence: Synthetic oligonucleotide
ggcuguggcuacgcuuccg

SEQ ID NO: 2706191 - RNA, 19 nt, Artificial Sequence
  Description of Artificial Sequence: Synthetic oligonucleotide
ggcccugcauggcuuucug

SEQ ID NO: 2706192 - RNA, 19 nt, Artificial Sequence
  Description of Artificial Sequence: Synthetic oligonucleotide
aggcccugcauggcuuucu

SEQ ID NO: 2706193 - RNA, 19 nt, Artificial Sequence
  Description of Artificial Sequence: Synthetic oligonucleotide
cucuggucaaagguuugcu

SEQ ID NO: 2706194 - RNA, 19 nt, Artificial Sequence
  Description of Artificial Sequence: Synthetic oligonucleotide
uugcugcacucgucucgaa

SEQ ID NO: 2706195 - RNA, 19 nt, Artificial Sequence
  Description of Artificial Sequence: Synthetic oligonucleotide
ccggugccgauucuccuug

SEQ ID NO: 2706196 - RNA, 19 nt, Artificial Sequence
  Description of Artificial Sequence: Synthetic oligonucleotide
ccucuaccagaagucccgg

SEQ ID NO: 2706197 - RNA, 19 nt, Artificial Sequence
  Description of Artificial Sequence: Synthetic oligonucleotide
gcaccauguucaugagaca

SEQ ID NO: 2706198 - RNA, 19 nt, Artificial Sequence
  Description of Artificial Sequence: Synthetic oligonucleotide
gccgaucucggcuucggcu

SEQ ID NO: 2706199 - RNA, 19 nt, Artificial Sequence
  Description of Artificial Sequence: Synthetic oligonucleotide
gccggcugucauucggcug

SEQ ID NO: 2706200 - RNA, 19 nt, Artificial Sequence
  Description of Artificial Sequence: Synthetic oligonucleotide
cagggucacaguacuucgu

SEQ ID NO: 2706201 - RNA, 19 nt, Artificial Sequence
  Description of Artificial Sequence: Synthetic oligonucleotide
uggucacgguuccgccgau

SEQ ID NO: 2706202 - RNA, 19 nt, Artificial Sequence
  Description of Artificial Sequence: Synthetic oligonucleotide
gggcaccucaacgccgucc

SEQ ID NO: 2706203 - RNA, 19 nt, Artificial Sequence
  Description of Artificial Sequence: Synthetic oligonucleotide
ggcuacgcuuccggugccg

SEQ ID NO: 2706204 - RNA, 19 nt, Artificial Sequence
  Description of Artificial Sequence: Synthetic oligonucleotide
aucccggcuucgagagcgg

SEQ ID NO: 2706205 - RNA, 19 nt, Artificial Sequence
  Description of Artificial Sequence: Synthetic oligonucleotide
gccgggcaccucaacgccg

SEQ ID NO: 2706206 - RNA, 19 nt, Artificial Sequence
  Description of Artificial Sequence: Synthetic oligonucleotide
guuccgccgaucucggcuu

SEQ ID NO: 2706207 - RNA, 19 nt, Artificial Sequence
  Description of Artificial Sequence: Synthetic oligonucleotide
cugcacucgucucgaacgu

SEQ ID NO: 2706208 - RNA, 19 nt, Artificial Sequence
  Description of Artificial Sequence: Synthetic oligonucleotide
ggcuucgagagcggcugug

SEQ ID NO: 2706209 - RNA, 19 nt, Artificial Sequence
  Description of Artificial Sequence: Synthetic oligonucleotide
uggcgaacuugcggccggu

SEQ ID NO: 2706210 - RNA, 19 nt, Artificial Sequence
  Description of Artificial Sequence: Synthetic oligonucleotide
gcgcuggucacgguuccgc

SEQ ID NO: 2706211 - RNA, 19 nt, Artificial Sequence
  Description of Artificial Sequence: Synthetic oligonucleotide
gccucuggucaaagguuug

SEQ ID NO: 2706212 - RNA, 19 nt, Artificial Sequence
  Description of Artificial Sequence: Synthetic oligonucleotide
ggucaggcccugcauggcu

SEQ ID NO: 2706213 - RNA, 19 nt, Artificial Sequence
  Description of Artificial Sequence: Synthetic oligonucleotide
cccgagaggcacugcgcug

SEQ ID NO: 2706214 - RNA, 19 nt, Artificial Sequence
  Description of Artificial Sequence: Synthetic oligonucleotide
cugucccgagaggcacugc

SEQ ID NO: 2706215 - RNA, 19 nt, Artificial Sequence
  Description of Artificial Sequence: Synthetic oligonucleotide
cuccugcguuuacgauccc

SEQ ID NO: 2706216 - RNA, 19 nt, Artificial Sequence
  Description of Artificial Sequence: Synthetic oligonucleotide
cgaacgucuuccacaaucu

SEQ ID NO: 2706217 - RNA, 19 nt, Artificial Sequence
  Description of Artificial Sequence: Synthetic oligonucleotide
cgaucucggcuucggcucc

SEQ ID NO: 2706218 - RNA, 19 nt, Artificial Sequence
  Description of Artificial Sequence: Synthetic oligonucleotide
gaccucaguuagcgccucu

SEQ ID NO: 2706219 - RNA, 19 nt, Artificial Sequence
  Description of Artificial Sequence: Synthetic oligonucleotide
cgucucgaacgucuuccac

SEQ ID NO: 2706220 - RNA, 19 nt, Artificial Sequence
  Description of Artificial Sequence: Synthetic oligonucleotide
cuguggcuacgcuuccggu

SEQ ID NO: 2706221 - RNA, 19 nt, Artificial Sequence
  Description of Artificial Sequence: Synthetic oligonucleotide
gcacucgucucgaacgucu

SEQ ID NO: 2706222 - RNA, 19 nt, Artificial Sequence
  Description of Artificial Sequence: Synthetic oligonucleotide
ccagaagucccggcgguga

SEQ ID NO: 2706223 - RNA, 19 nt, Artificial Sequence
  Description of Artificial Sequence: Synthetic oligonucleotide
ccugucccgagaggcacug

SEQ ID NO: 2706224 - RNA, 19 nt, Artificial Sequence
  Description of Artificial Sequence: Synthetic oligonucleotide
ccucaacgccguccacggg

SEQ ID NO: 2706225 - RNA, 19 nt, Artificial Sequence
  Description of Artificial Sequence: Synthetic oligonucleotide
cgcuggucacgguuccgcc

SEQ ID NO: 2706226 - RNA, 19 nt, Artificial Sequence
  Description of Artificial Sequence: Synthetic oligonucleotide
ggaucucgauggacuugac

SEQ ID NO: 2706227 - RNA, 19 nt, Artificial Sequence
  Description of Artificial Sequence: Synthetic oligonucleotide
cacugcgcuggucacgguu

SEQ ID NO: 2706228 - RNA, 19 nt, Artificial Sequence
  Description of Artificial Sequence: Synthetic oligonucleotide
aguccccagcccagcccug

SEQ ID NO: 2706229 - RNA, 19 nt, Artificial Sequence
  Description of Artificial Sequence: Synthetic oligonucleotide
gcuacgcuuccggugccga

SEQ ID NO: 2706230 - RNA, 19 nt, Artificial Sequence
  Description of Artificial Sequence: Synthetic oligonucleotide
gccuucgccugucccgaga

SEQ ID NO: 2706231 - RNA, 19 nt, Artificial Sequence
  Description of Artificial Sequence: Synthetic oligonucleotide
cguuuacgaucccggcuuc

SEQ ID NO: 2706232 - RNA, 19 nt, Artificial Sequence
  Description of Artificial Sequence: Synthetic oligonucleotide
gaucucggcuucggcuccu

SEQ ID NO: 2706233 - RNA, 19 nt, Artificial Sequence
  Description of Artificial Sequence: Synthetic oligonucleotide
caggcagcaccauguucau

SEQ ID NO: 2706234 - RNA, 19 nt, Artificial Sequence
  Description of Artificial Sequence: Synthetic oligonucleotide
ccaguugcugccggcuguc

SEQ ID NO: 2706235 - RNA, 19 nt, Artificial Sequence
  Description of Artificial Sequence: Synthetic oligonucleotide
gagcggcuguggcuacgcu

SEQ ID NO: 2706236 - RNA, 19 nt, Artificial Sequence
  Description of Artificial Sequence: Synthetic oligonucleotide
caguugcugccggcuguca

SEQ ID NO: 2706237 - RNA, 19 nt, Artificial Sequence
  Description of Artificial Sequence: Synthetic oligonucleotide
cagaagucccggcggugau

SEQ ID NO: 2706238 - RNA, 19 nt, Artificial Sequence
  Description of Artificial Sequence: Synthetic oligonucleotide
gcaccucaacgccguccac

SEQ ID NO: 2706239 - RNA, 19 nt, Artificial Sequence
  Description of Artificial Sequence: Synthetic oligonucleotide
cugucacuccucugcccau

SEQ ID NO: 2706240 - RNA, 19 nt, Artificial Sequence
  Description of Artificial Sequence: Synthetic oligonucleotide
cacucgucucgaacgucuu

SEQ ID NO: 2706241 - RNA, 19 nt, Artificial Sequence
  Description of Artificial Sequence: Synthetic oligonucleotide
ccgccgaucucggcuucgg

SEQ ID NO: 2706242 - RNA, 19 nt, Artificial Sequence
  Description of Artificial Sequence: Synthetic oligonucleotide
cuacgcuuccggugccgau

SEQ ID NO: 2706243 - RNA, 19 nt, Artificial Sequence
  Description of Artificial Sequence: Synthetic oligonucleotide
cgucuuccacaaucuccuc

SEQ ID NO: 2706244 - RNA, 19 nt, Artificial Sequence
  Description of Artificial Sequence: Synthetic oligonucleotide
ggucacgguuccgccgauc

SEQ ID NO: 2706245 - RNA, 19 nt, Artificial Sequence
  Description of Artificial Sequence: Synthetic oligonucleotide
ugcggccggucaggcccug

SEQ ID NO: 2706246 - RNA, 19 nt, Artificial Sequence
  Description of Artificial Sequence: Synthetic oligonucleotide
ccaccacucuguuggcgaa

SEQ ID NO: 2706247 - RNA, 19 nt, Artificial Sequence
  Description of Artificial Sequence: Synthetic oligonucleotide
ggcgaacuugcggccgguc

SEQ ID NO: 2706248 - RNA, 19 nt, Artificial Sequence
  Description of Artificial Sequence: Synthetic oligonucleotide
gcuucggcuccugcguuua

SEQ ID NO: 2706249 - RNA, 19 nt, Artificial Sequence
  Description of Artificial Sequence: Synthetic oligonucleotide
cgccugucccgagaggcac

SEQ ID NO: 2706250 - RNA, 19 nt, Artificial Sequence
  Description of Artificial Sequence: Synthetic oligonucleotide
ggcugucauucggcuguca

SEQ ID NO: 2706251 - RNA, 19 nt, Artificial Sequence
  Description of Artificial Sequence: Synthetic oligonucleotide
cgagagcggcuguggcuac

SEQ ID NO: 2706252 - RNA, 19 nt, Artificial Sequence
  Description of Artificial Sequence: Synthetic oligonucleotide
cgccgaucucggcuucggc

SEQ ID NO: 2706253 - RNA, 19 nt, Artificial Sequence
  Description of Artificial Sequence: Synthetic oligonucleotide
cggcggugauaagaaucag

SEQ ID NO: 2706254 - RNA, 19 nt, Artificial Sequence
  Description of Artificial Sequence: Synthetic oligonucleotide
cucgaacgucuuccacaau

SEQ ID NO: 2706255 - RNA, 19 nt, Artificial Sequence
  Description of Artificial Sequence: Synthetic oligonucleotide
ggcuucggcuccugcguuu

SEQ ID NO: 2706256 - RNA, 19 nt, Artificial Sequence
  Description of Artificial Sequence: Synthetic oligonucleotide
gcgccucuggucaaagguu

SEQ ID NO: 2706257 - RNA, 19 nt, Artificial Sequence
  Description of Artificial Sequence: Synthetic oligonucleotide
ccgggcaccucaacgccgu

SEQ ID NO: 2706258 - RNA, 19 nt, Artificial Sequence
  Description of Artificial Sequence: Synthetic oligonucleotide
ggggacagguggggagaaa

SEQ ID NO: 2706259 - RNA, 19 nt, Artificial Sequence
  Description of Artificial Sequence: Synthetic oligonucleotide
cgguuccgccgaucucggc

SEQ ID NO: 2706260 - RNA, 19 nt, Artificial Sequence
  Description of Artificial Sequence: Synthetic oligonucleotide
cgccucuggucaaagguuu

SEQ ID NO: 2706261 - RNA, 19 nt, Artificial Sequence
  Description of Artificial Sequence: Synthetic oligonucleotide
ccucgucguccagcaguuc

SEQ ID NO: 2706262 - RNA, 19 nt, Artificial Sequence
  Description of Artificial Sequence: Synthetic oligonucleotide
cgcccaccucuaccagaag

SEQ ID NO: 2706263 - RNA, 19 nt, Artificial Sequence
  Description of Artificial Sequence: Synthetic oligonucleotide
cgccuucgccugucccgag

SEQ ID NO: 2706264 - RNA, 19 nt, Artificial Sequence
  Description of Artificial Sequence: Synthetic oligonucleotide
gcggccggucaggcccugc

SEQ ID NO: 2706265 - RNA, 19 nt, Artificial Sequence
  Description of Artificial Sequence: Synthetic oligonucleotide
gccugucccgagaggcacu

SEQ ID NO: 2706266 - RNA, 19 nt, Artificial Sequence
  Description of Artificial Sequence: Synthetic oligonucleotide
cggccggucaggcccugca

SEQ ID NO: 2706267 - RNA, 19 nt, Artificial Sequence
  Description of Artificial Sequence: Synthetic oligonucleotide
gcacugcgcuggucacggu

SEQ ID NO: 2706268 - RNA, 19 nt, Artificial Sequence
  Description of Artificial Sequence: Synthetic oligonucleotide
cgggcaccucaacgccguc

SEQ ID NO: 2706269 - RNA, 19 nt, Artificial Sequence
  Description of Artificial Sequence: Synthetic oligonucleotide
ccacucuguuggcgaacuu

SEQ ID NO: 2706270 - RNA, 19 nt, Artificial Sequence
  Description of Artificial Sequence: Synthetic oligonucleotide
cgagaggcacugcgcuggu

SEQ ID NO: 2706271 - RNA, 19 nt, Artificial Sequence
  Description of Artificial Sequence: Synthetic oligonucleotide
cggcuccugcguuuacgau

SEQ ID NO: 2706272 - RNA, 19 nt, Artificial Sequence
  Description of Artificial Sequence: Synthetic oligonucleotide
cggcuucgagagcggcugu

SEQ ID NO: 2706273 - RNA, 19 nt, Artificial Sequence
  Description of Artificial Sequence: Synthetic oligonucleotide
cgcuuccggugccgauucu

SEQ ID NO: 2706274 - RNA, 19 nt, Artificial Sequence
  Description of Artificial Sequence: Synthetic oligonucleotide
augacgaggauauucaugg

SEQ ID NO: 2706275 - RNA, 19 nt, Artificial Sequence
  Description of Artificial Sequence: Synthetic oligonucleotide
uuaaagguguucaugcagg

SEQ ID NO: 2706276 - RNA, 19 nt, Artificial Sequence
  Description of Artificial Sequence: Synthetic oligonucleotide
uguuguacagcuuccaccg

SEQ ID NO: 2706277 - RNA, 19 nt, Artificial Sequence
  Description of Artificial Sequence: Synthetic oligonucleotide
aaaccugacucgcaugccc

SEQ ID NO: 2706278 - RNA, 19 nt, Artificial Sequence
  Description of Artificial Sequence: Synthetic oligonucleotide
uccaugaaggcgaaggcgg

SEQ ID NO: 2706279 - RNA, 19 nt, Artificial Sequence
  Description of Artificial Sequence: Synthetic oligonucleotide
uauucaugguccaugggag

SEQ ID NO: 2706280 - RNA, 19 nt, Artificial Sequence
  Description of Artificial Sequence: Synthetic oligonucleotide
ugaaagggcagcacggugg

SEQ ID NO: 2706281 - RNA, 19 nt, Artificial Sequence
  Description of Artificial Sequence: Synthetic oligonucleotide
cuggaguugaccuagggag

SEQ ID NO: 2706282 - RNA, 19 nt, Artificial Sequence
  Description of Artificial Sequence: Synthetic oligonucleotide
guauaugucccugagaacc

SEQ ID NO: 2706283 - RNA, 19 nt, Artificial Sequence
  Description of Artificial Sequence: Synthetic oligonucleotide
acagaauugaggcacacga

SEQ ID NO: 2706284 - RNA, 19 nt, Artificial Sequence
  Description of Artificial Sequence: Synthetic oligonucleotide
accaggacaguccagcagc

SEQ ID NO: 2706285 - RNA, 19 nt, Artificial Sequence
  Description of Artificial Sequence: Synthetic oligonucleotide
uaugcuuuucaagaugacg

SEQ ID NO: 2706286 - RNA, 19 nt, Artificial Sequence
  Description of Artificial Sequence: Synthetic oligonucleotide
aagguguucaugcagguau

SEQ ID NO: 2706287 - RNA, 19 nt, Artificial Sequence
  Description of Artificial Sequence: Synthetic oligonucleotide
auauucaugguccauggga

SEQ ID NO: 2706288 - RNA, 19 nt, Artificial Sequence
  Description of Artificial Sequence: Synthetic oligonucleotide
acugucucuggcuucagcg

SEQ ID NO: 2706289 - RNA, 19 nt, Artificial Sequence
  Description of Artificial Sequence: Synthetic oligonucleotide
gauauggccguucugcagc

SEQ ID NO: 2706290 - RNA, 19 nt, Artificial Sequence
  Description of Artificial Sequence: Synthetic oligonucleotide
agguauaugucccugagaa

SEQ ID NO: 2706291 - RNA, 19 nt, Artificial Sequence
  Description of Artificial Sequence: Synthetic oligonucleotide
aacaucucagugcuggugu

SEQ ID NO: 2706292 - RNA, 19 nt, Artificial Sequence
  Description of Artificial Sequence: Synthetic oligonucleotide
acgaggauauucauggucc

SEQ ID NO: 2706293 - RNA, 19 nt, Artificial Sequence
  Description of Artificial Sequence: Synthetic oligonucleotide
uguccuucccuuaaaggug

SEQ ID NO: 2706294 - RNA, 19 nt, Artificial Sequence
  Description of Artificial Sequence: Synthetic oligonucleotide
uuguuguacagcuuccacc

SEQ ID NO: 2706295 - RNA, 19 nt, Artificial Sequence
  Description of Artificial Sequence: Synthetic oligonucleotide
ucaugcagguauauguccc

SEQ ID NO: 2706296 - RNA, 19 nt, Artificial Sequence
  Description of Artificial Sequence: Synthetic oligonucleotide
gaaccuguggaucuccucc

SEQ ID NO: 2706297 - RNA, 19 nt, Artificial Sequence
  Description of Artificial Sequence: Synthetic oligonucleotide
aaugcacaggcacacgggu

SEQ ID NO: 2706298 - RNA, 19 nt, Artificial Sequence
  Description of Artificial Sequence: Synthetic oligonucleotide
uucaugcagguauaugucc

SEQ ID NO: 2706299 - RNA, 19 nt, Artificial Sequence
  Description of Artificial Sequence: Synthetic oligonucleotide
aauugaggcacacgauaug

SEQ ID NO: 2706300 - RNA, 19 nt, Artificial Sequence
  Description of Artificial Sequence: Synthetic oligonucleotide
ugcagcuccagcaugcgug

SEQ ID NO: 2706301 - RNA, 19 nt, Artificial Sequence
  Description of Artificial Sequence: Synthetic oligonucleotide
cuuuucaagaugacgagga

SEQ ID NO: 2706302 - RNA, 19 nt, Artificial Sequence
  Description of Artificial Sequence: Synthetic oligonucleotide
aucguggcuccucucaggc

SEQ ID NO: 2706303 - RNA, 19 nt, Artificial Sequence
  Description of Artificial Sequence: Synthetic oligonucleotide
gaugugcaguagucgaugg

SEQ ID NO: 2706304 - RNA, 19 nt, Artificial Sequence
  Description of Artificial Sequence: Synthetic oligonucleotide
gauauucaugguccauggg

SEQ ID NO: 2706305 - RNA, 19 nt, Artificial Sequence
  Description of Artificial Sequence: Synthetic oligonucleotide
uuuguuguacagcuuccac

SEQ ID NO: 2706306 - RNA, 19 nt, Artificial Sequence
  Description of Artificial Sequence: Synthetic oligonucleotide
uguacagcuuccaccgucc

SEQ ID NO: 2706307 - RNA, 19 nt, Artificial Sequence
  Description of Artificial Sequence: Synthetic oligonucleotide
ggcaagaaggccuuggaag

SEQ ID NO: 2706308 - RNA, 19 nt, Artificial Sequence
  Description of Artificial Sequence: Synthetic oligonucleotide
aaggcggaugcuuucgaug

SEQ ID NO: 2706309 - RNA, 19 nt, Artificial Sequence
  Description of Artificial Sequence: Synthetic oligonucleotide
gaugggccaaugcacaggc

SEQ ID NO: 2706310 - RNA, 19 nt, Artificial Sequence
  Description of Artificial Sequence: Synthetic oligonucleotide
uuucgaugugcaguagucg

SEQ ID NO: 2706311 - RNA, 19 nt, Artificial Sequence
  Description of Artificial Sequence: Synthetic oligonucleotide
gaguaugcuuuucaagaug

SEQ ID NO: 2706312 - RNA, 19 nt, Artificial Sequence
  Description of Artificial Sequence: Synthetic oligonucleotide
agaauugaggcacacgaua

SEQ ID NO: 2706313 - RNA, 19 nt, Artificial Sequence
  Description of Artificial Sequence: Synthetic oligonucleotide
ugggaguaugcuuuucaag

SEQ ID NO: 2706314 - RNA, 19 nt, Artificial Sequence
  Description of Artificial Sequence: Synthetic oligonucleotide
augcuuuucaagaugacga

SEQ ID NO: 2706315 - RNA, 19 nt, Artificial Sequence
  Description of Artificial Sequence: Synthetic oligonucleotide
cugcucacccagcagaugg

SEQ ID NO: 2706316 - RNA, 19 nt, Artificial Sequence
  Description of Artificial Sequence: Synthetic oligonucleotide
ugggccaaugcacaggcac

SEQ ID NO: 2706317 - RNA, 19 nt, Artificial Sequence
  Description of Artificial Sequence: Synthetic oligonucleotide
uauaugucccugagaaccu

SEQ ID NO: 2706318 - RNA, 19 nt, Artificial Sequence
  Description of Artificial Sequence: Synthetic oligonucleotide
ggauauucaugguccaugg

SEQ ID NO: 2706319 - RNA, 19 nt, Artificial Sequence
  Description of Artificial Sequence: Synthetic oligonucleotide
guagucgauggcuccaggg

SEQ ID NO: 2706320 - RNA, 19 nt, Artificial Sequence
  Description of Artificial Sequence: Synthetic oligonucleotide
aguaugcuuuucaagauga

SEQ ID NO: 2706321 - RNA, 19 nt, Artificial Sequence
  Description of Artificial Sequence: Synthetic oligonucleotide
gacgaggauauucaugguc

SEQ ID NO: 2706322 - RNA, 19 nt, Artificial Sequence
  Description of Artificial Sequence: Synthetic oligonucleotide
uucagcggugggaagaggu

SEQ ID NO: 2706323 - RNA, 19 nt, Artificial Sequence
  Description of Artificial Sequence: Synthetic oligonucleotide
ugucccugagaaccugugg

SEQ ID NO: 2706324 - RNA, 19 nt, Artificial Sequence
  Description of Artificial Sequence: Synthetic oligonucleotide
gaugacgaggauauucaug

SEQ ID NO: 2706325 - RNA, 19 nt, Artificial Sequence
  Description of Artificial Sequence: Synthetic oligonucleotide
caagaugacgaggauauuc

SEQ ID NO: 2706326 - RNA, 19 nt, Artificial Sequence
  Description of Artificial Sequence: Synthetic oligonucleotide
aagagguugggaaaccuga

SEQ ID NO: 2706327 - RNA, 19 nt, Artificial Sequence
  Description of Artificial Sequence: Synthetic oligonucleotide
agccgcagaaucuuccccg

SEQ ID NO: 2706328 - RNA, 19 nt, Artificial Sequence
  Description of Artificial Sequence: Synthetic oligonucleotide
cuuucgaugugcaguaguc

SEQ ID NO: 2706329 - RNA, 19 nt, Artificial Sequence
  Description of Artificial Sequence: Synthetic oligonucleotide
augugcaguagucgauggc

SEQ ID NO: 2706330 - RNA, 19 nt, Artificial Sequence
  Description of Artificial Sequence: Synthetic oligonucleotide
agcagaugggccaaugcac

SEQ ID NO: 2706331 - RNA, 19 nt, Artificial Sequence
  Description of Artificial Sequence: Synthetic oligonucleotide
gaggcacacgauauggccg

SEQ ID NO: 2706332 - RNA, 19 nt, Artificial Sequence
  Description of Artificial Sequence: Synthetic oligonucleotide
uggaguugaccuagggagc

SEQ ID NO: 2706333 - RNA, 19 nt, Artificial Sequence
  Description of Artificial Sequence: Synthetic oligonucleotide
ugaaggcgaaggcggaugc

SEQ ID NO: 2706334 - RNA, 19 nt, Artificial Sequence
  Description of Artificial Sequence: Synthetic oligonucleotide
gggaguaugcuuuucaaga

SEQ ID NO: 2706335 - RNA, 19 nt, Artificial Sequence
  Description of Artificial Sequence: Synthetic oligonucleotide
cuauguccuucccuuaaag

SEQ ID NO: 2706336 - RNA, 19 nt, Artificial Sequence
  Description of Artificial Sequence: Synthetic oligonucleotide
acucgcaugcccuggaaca

SEQ ID NO: 2706337 - RNA, 19 nt, Artificial Sequence
  Description of Artificial Sequence: Synthetic oligonucleotide
uugaggcacacgauauggc

SEQ ID NO: 2706338 - RNA, 19 nt, Artificial Sequence
  Description of Artificial Sequence: Synthetic oligonucleotide
caaugcacaggcacacggg

SEQ ID NO: 2706339 - RNA, 19 nt, Artificial Sequence
  Description of Artificial Sequence: Synthetic oligonucleotide
uccuggaguugaccuaggg

SEQ ID NO: 2706340 - RNA, 19 nt, Artificial Sequence
  Description of Artificial Sequence: Synthetic oligonucleotide
uaucguggcuccucucagg

SEQ ID NO: 2706341 - RNA, 19 nt, Artificial Sequence
  Description of Artificial Sequence: Synthetic oligonucleotide
aggauauucaugguccaug

SEQ ID NO: 2706342 - RNA, 19 nt, Artificial Sequence
  Description of Artificial Sequence: Synthetic oligonucleotide
gacaggaacaguccugcuc

SEQ ID NO: 2706343 - RNA, 19 nt, Artificial Sequence
  Description of Artificial Sequence: Synthetic oligonucleotide
ugucucuggcuucagcggu

SEQ ID NO: 2706344 - RNA, 19 nt, Artificial Sequence
  Description of Artificial Sequence: Synthetic oligonucleotide
ugcaguagucgauggcucc

SEQ ID NO: 2706345 - RNA, 19 nt, Artificial Sequence
  Description of Artificial Sequence: Synthetic oligonucleotide
aguugaccuagggagccgc

SEQ ID NO: 2706346 - RNA, 19 nt, Artificial Sequence
  Description of Artificial Sequence: Synthetic oligonucleotide
gaaucuuccccggggacag

SEQ ID NO: 2706347 - RNA, 19 nt, Artificial Sequence
  Description of Artificial Sequence: Synthetic oligonucleotide
uuuuguuguacagcuucca

SEQ ID NO: 2706348 - RNA, 19 nt, Artificial Sequence
  Description of Artificial Sequence: Synthetic oligonucleotide
cccuuaaagguguucaugc

SEQ ID NO: 2706349 - RNA, 19 nt, Artificial Sequence
  Description of Artificial Sequence: Synthetic oligonucleotide
aggcacacgggugugugcc

SEQ ID NO: 2706350 - RNA, 19 nt, Artificial Sequence
  Description of Artificial Sequence: Synthetic oligonucleotide
aggcggaugcuuucgaugu

SEQ ID NO: 2706351 - RNA, 19 nt, Artificial Sequence
  Description of Artificial Sequence: Synthetic oligonucleotide
uggaucuccuccagugcag

SEQ ID NO: 2706352 - RNA, 19 nt, Artificial Sequence
  Description of Artificial Sequence: Synthetic oligonucleotide
aaccuguggaucuccucca

SEQ ID NO: 2706353 - RNA, 19 nt, Artificial Sequence
  Description of Artificial Sequence: Synthetic oligonucleotide
uggcacugacaccaggaca

SEQ ID NO: 2706354 - RNA, 19 nt, Artificial Sequence
  Description of Artificial Sequence: Synthetic oligonucleotide
cugucucuggcuucagcgg

SEQ ID NO: 2706355 - RNA, 19 nt, Artificial Sequence
  Description of Artificial Sequence: Synthetic oligonucleotide
ggcacugacaccaggacag

SEQ ID NO: 2706356 - RNA, 19 nt, Artificial Sequence
  Description of Artificial Sequence: Synthetic oligonucleotide
gugugaaagggcagcacgg

SEQ ID NO: 2706357 - RNA, 19 nt, Artificial Sequence
  Description of Artificial Sequence: Synthetic oligonucleotide
agcaugcguggcaagaagg

SEQ ID NO: 2706358 - RNA, 19 nt, Artificial Sequence
  Description of Artificial Sequence: Synthetic oligonucleotide
ugggaaaccugacucgcau

SEQ ID NO: 2706359 - RNA, 19 nt, Artificial Sequence
  Description of Artificial Sequence: Synthetic oligonucleotide
ucccuuaaagguguucaug

SEQ ID NO: 2706360 - RNA, 19 nt, Artificial Sequence
  Description of Artificial Sequence: Synthetic oligonucleotide
ugcucacccagcagauggg

SEQ ID NO: 2706361 - RNA, 19 nt, Artificial Sequence
  Description of Artificial Sequence: Synthetic oligonucleotide
acaaagguccuggaguuga

SEQ ID NO: 2706362 - RNA, 19 nt, Artificial Sequence
  Description of Artificial Sequence: Synthetic oligonucleotide
aguccagcagccccaaggu

SEQ ID NO: 2706363 - RNA, 19 nt, Artificial Sequence
  Description of Artificial Sequence: Synthetic oligonucleotide
guugggaaaccugacucgc

SEQ ID NO: 2706364 - RNA, 19 nt, Artificial Sequence
  Description of Artificial Sequence: Synthetic oligonucleotide
uccagugcagccuguggga

SEQ ID NO: 2706365 - RNA, 19 nt, Artificial Sequence
  Description of Artificial Sequence: Synthetic oligonucleotide
ugggaagagguugggaaac

SEQ ID NO: 2706366 - RNA, 19 nt, Artificial Sequence
  Description of Artificial Sequence: Synthetic oligonucleotide
ugugcccagguaucguggc

SEQ ID NO: 2706367 - RNA, 19 nt, Artificial Sequence
  Description of Artificial Sequence: Synthetic oligonucleotide
agggauggccgacagugca

SEQ ID NO: 2706368 - RNA, 19 nt, Artificial Sequence
  Description of Artificial Sequence: Synthetic oligonucleotide
gucccugagaaccugugga

SEQ ID NO: 2706369 - RNA, 19 nt, Artificial Sequence
  Description of Artificial Sequence: Synthetic oligonucleotide
guaucguggcuccucucag

SEQ ID NO: 2706370 - RNA, 19 nt, Artificial Sequence
  Description of Artificial Sequence: Synthetic oligonucleotide
ugcuggugugaaagggcag

SEQ ID NO: 2706371 - RNA, 19 nt, Artificial Sequence
  Description of Artificial Sequence: Synthetic oligonucleotide
cucucaggcuccauggcuc

SEQ ID NO: 2706372 - RNA, 19 nt, Artificial Sequence
  Description of Artificial Sequence: Synthetic oligonucleotide
uuccccggggacaggaaca

SEQ ID NO: 2706373 - RNA, 19 nt, Artificial Sequence
  Description of Artificial Sequence: Synthetic oligonucleotide
cuucccuuaaagguguuca

SEQ ID NO: 2706374 - RNA, 19 nt, Artificial Sequence
  Description of Artificial Sequence: Synthetic oligonucleotide
ugagaaccuguggaucucc

SEQ ID NO: 2706375 - RNA, 19 nt, Artificial Sequence
  Description of Artificial Sequence: Synthetic oligonucleotide
ugugaaagggcagcacggu

SEQ ID NO: 2706376 - RNA, 19 nt, Artificial Sequence
  Description of Artificial Sequence: Synthetic oligonucleotide
uggccgacagugcaagcac

SEQ ID NO: 2706377 - RNA, 19 nt, Artificial Sequence
  Description of Artificial Sequence: Synthetic oligonucleotide
uacugucucuggcuucagc

SEQ ID NO: 2706378 - RNA, 19 nt, Artificial Sequence
  Description of Artificial Sequence: Synthetic oligonucleotide
ccaaugcacaggcacacgg

SEQ ID NO: 2706379 - RNA, 19 nt, Artificial Sequence
  Description of Artificial Sequence: Synthetic oligonucleotide
gcuuuucaagaugacgagg

SEQ ID NO: 2706380 - RNA, 19 nt, Artificial Sequence
  Description of Artificial Sequence: Synthetic oligonucleotide
aggcacacgauauggccgu

SEQ ID NO: 2706381 - RNA, 19 nt, Artificial Sequence
  Description of Artificial Sequence: Synthetic oligonucleotide
gugaaagggcagcacggug

SEQ ID NO: 2706382 - RNA, 19 nt, Artificial Sequence
  Description of Artificial Sequence: Synthetic oligonucleotide
acgauauggccguucugca

SEQ ID NO: 2706383 - RNA, 19 nt, Artificial Sequence
  Description of Artificial Sequence: Synthetic oligonucleotide
cacagaauugaggcacacg

SEQ ID NO: 2706384 - RNA, 19 nt, Artificial Sequence
  Description of Artificial Sequence: Synthetic oligonucleotide
gaucuccuccagugcagcc

SEQ ID NO: 2706385 - RNA, 19 nt, Artificial Sequence
  Description of Artificial Sequence: Synthetic oligonucleotide
ugguggcacugacaccagg

SEQ ID NO: 2706386 - RNA, 19 nt, Artificial Sequence
  Description of Artificial Sequence: Synthetic oligonucleotide
ggugguggcacugacacca

SEQ ID NO: 2706387 - RNA, 19 nt, Artificial Sequence
  Description of Artificial Sequence: Synthetic oligonucleotide
ucgaugugcaguagucgau

SEQ ID NO: 2706388 - RNA, 19 nt, Artificial Sequence
  Description of Artificial Sequence: Synthetic oligonucleotide
aagaaggccuuggaagaaa

SEQ ID NO: 2706389 - RNA, 19 nt, Artificial Sequence
  Description of Artificial Sequence: Synthetic oligonucleotide
gacucgcaugcccuggaac

SEQ ID NO: 2706390 - RNA, 19 nt, Artificial Sequence
  Description of Artificial Sequence: Synthetic oligonucleotide
gagccgcagaaucuucccc

SEQ ID NO: 2706391 - RNA, 19 nt, Artificial Sequence
  Description of Artificial Sequence: Synthetic oligonucleotide
agaugacgaggauauucau

SEQ ID NO: 2706392 - RNA, 19 nt, Artificial Sequence
  Description of Artificial Sequence: Synthetic oligonucleotide
gaaaccugacucgcaugcc

SEQ ID NO: 2706393 - RNA, 19 nt, Artificial Sequence
  Description of Artificial Sequence: Synthetic oligonucleotide
acaucucagugcuggugug

SEQ ID NO: 2706394 - RNA, 19 nt, Artificial Sequence
  Description of Artificial Sequence: Synthetic oligonucleotide
uugaccuagggagccgcag

SEQ ID NO: 2706395 - RNA, 19 nt, Artificial Sequence
  Description of Artificial Sequence: Synthetic oligonucleotide
ugcccuggaacaucucagu

SEQ ID NO: 2706396 - RNA, 19 nt, Artificial Sequence
  Description of Artificial Sequence: Synthetic oligonucleotide
caagcacagaauugaggca

SEQ ID NO: 2706397 - RNA, 19 nt, Artificial Sequence
  Description of Artificial Sequence: Synthetic oligonucleotide
cuccucaggugccucuucc

SEQ ID NO: 2706398 - RNA, 19 nt, Artificial Sequence
  Description of Artificial Sequence: Synthetic oligonucleotide
augaaggcgaaggcggaug

SEQ ID NO: 2706399 - RNA, 19 nt, Artificial Sequence
  Description of Artificial Sequence: Synthetic oligonucleotide
aaccugacucgcaugcccu

SEQ ID NO: 2706400 - RNA, 19 nt, Artificial Sequence
  Description of Artificial Sequence: Synthetic oligonucleotide
aaagguguucaugcaggua

SEQ ID NO: 2706401 - RNA, 19 nt, Artificial Sequence
  Description of Artificial Sequence: Synthetic oligonucleotide
aaggcgaaggcggaugcuu

SEQ ID NO: 2706402 - RNA, 19 nt, Artificial Sequence
  Description of Artificial Sequence: Synthetic oligonucleotide
caugcccuggaacaucuca

SEQ ID NO: 2706403 - RNA, 19 nt, Artificial Sequence
  Description of Artificial Sequence: Synthetic oligonucleotide
ugacaccaggacaguccag

SEQ ID NO: 2706404 - RNA, 19 nt, Artificial Sequence
  Description of Artificial Sequence: Synthetic oligonucleotide
auauggccguucugcagcu

SEQ ID NO: 2706405 - RNA, 19 nt, Artificial Sequence
  Description of Artificial Sequence: Synthetic oligonucleotide
gaauugaggcacacgauau

SEQ ID NO: 2706406 - RNA, 19 nt, Artificial Sequence
  Description of Artificial Sequence: Synthetic oligonucleotide
augcguggcaagaaggccu

SEQ ID NO: 2706407 - RNA, 19 nt, Artificial Sequence
  Description of Artificial Sequence: Synthetic oligonucleotide
auggccgacagugcaagca

SEQ ID NO: 2706408 - RNA, 19 nt, Artificial Sequence
  Description of Artificial Sequence: Synthetic oligonucleotide
ugacgaggauauucauggu

SEQ ID NO: 2706409 - RNA, 19 nt, Artificial Sequence
  Description of Artificial Sequence: Synthetic oligonucleotide
gguaucguggcuccucuca

SEQ ID NO: 2706410 - RNA, 19 nt, Artificial Sequence
  Description of Artificial Sequence: Synthetic oligonucleotide
caugguccaugggagcagg

SEQ ID NO: 2706411 - RNA, 19 nt, Artificial Sequence
  Description of Artificial Sequence: Synthetic oligonucleotide
caccaggacaguccagcag

SEQ ID NO: 2706412 - RNA, 19 nt, Artificial Sequence
  Description of Artificial Sequence: Synthetic oligonucleotide
cagcaugcguggcaagaag

SEQ ID NO: 2706413 - RNA, 19 nt, Artificial Sequence
  Description of Artificial Sequence: Synthetic oligonucleotide
gguauaugucccugagaac

SEQ ID NO: 2706414 - RNA, 19 nt, Artificial Sequence
  Description of Artificial Sequence: Synthetic oligonucleotide
cagaaucuuccccggggac

SEQ ID NO: 2706415 - RNA, 19 nt, Artificial Sequence
  Description of Artificial Sequence: Synthetic oligonucleotide
ggaguugaccuagggagcc

SEQ ID NO: 2706416 - RNA, 19 nt, Artificial Sequence
  Description of Artificial Sequence: Synthetic oligonucleotide
cugacaccaggacagucca

SEQ ID NO: 2706417 - RNA, 19 nt, Artificial Sequence
  Description of Artificial Sequence: Synthetic oligonucleotide
gaguugaccuagggagccg

SEQ ID NO: 2706418 - RNA, 19 nt, Artificial Sequence
  Description of Artificial Sequence: Synthetic oligonucleotide
uccugcucacccagcagau

SEQ ID NO: 2706419 - RNA, 19 nt, Artificial Sequence
  Description of Artificial Sequence: Synthetic oligonucleotide
auaugucccugagaaccug

SEQ ID NO: 2706420 - RNA, 19 nt, Artificial Sequence
  Description of Artificial Sequence: Synthetic oligonucleotide
uccucaggugccucuuccu

SEQ ID NO: 2706421 - RNA, 19 nt, Artificial Sequence
  Description of Artificial Sequence: Synthetic oligonucleotide
gguccuggaguugaccuag

SEQ ID NO: 2706422 - RNA, 19 nt, Artificial Sequence
  Description of Artificial Sequence: Synthetic oligonucleotide
gauggccgacagugcaagc

SEQ ID NO: 2706423 - RNA, 19 nt, Artificial Sequence
  Description of Artificial Sequence: Synthetic oligonucleotide
cuuccccggggacaggaac

SEQ ID NO: 2706424 - RNA, 19 nt, Artificial Sequence
  Description of Artificial Sequence: Synthetic oligonucleotide
agguaucguggcuccucuc

SEQ ID NO: 2706425 - RNA, 19 nt, Artificial Sequence
  Description of Artificial Sequence: Synthetic oligonucleotide
cuccauggcuccucaggug

SEQ ID NO: 2706426 - RNA, 19 nt, Artificial Sequence
  Description of Artificial Sequence: Synthetic oligonucleotide
cuuccaccguccuccgggc

SEQ ID NO: 2706427 - RNA, 19 nt, Artificial Sequence
  Description of Artificial Sequence: Synthetic oligonucleotide
ggugugugcccagguaucg

SEQ ID NO: 2706428 - RNA, 19 nt, Artificial Sequence
  Description of Artificial Sequence: Synthetic oligonucleotide
caaagguccuggaguugac

SEQ ID NO: 2706429 - RNA, 19 nt, Artificial Sequence
  Description of Artificial Sequence: Synthetic oligonucleotide
acacgauauggccguucug

SEQ ID NO: 2706430 - RNA, 19 nt, Artificial Sequence
  Description of Artificial Sequence: Synthetic oligonucleotide
guguucaugcagguauaug

SEQ ID NO: 2706431 - RNA, 19 nt, Artificial Sequence
  Description of Artificial Sequence: Synthetic oligonucleotide
gagggccugguuuuguugu

SEQ ID NO: 2706432 - RNA, 19 nt, Artificial Sequence
  Description of Artificial Sequence: Synthetic oligonucleotide
uccaccguccuccgggcua

SEQ ID NO: 2706433 - RNA, 19 nt, Artificial Sequence
  Description of Artificial Sequence: Synthetic oligonucleotide
ugcguggcaagaaggccuu

SEQ ID NO: 2706434 - RNA, 19 nt, Artificial Sequence
  Description of Artificial Sequence: Synthetic oligonucleotide
gaccuagggagccgcagaa

SEQ ID NO: 2706435 - RNA, 19 nt, Artificial Sequence
  Description of Artificial Sequence: Synthetic oligonucleotide
gaaagggcagcacgguggu

SEQ ID NO: 2706436 - RNA, 19 nt, Artificial Sequence
  Description of Artificial Sequence: Synthetic oligonucleotide
acaggcacacgggugugug

SEQ ID NO: 2706437 - RNA, 19 nt, Artificial Sequence
  Description of Artificial Sequence: Synthetic oligonucleotide
ugcccagguaucguggcuc

SEQ ID NO: 2706438 - RNA, 19 nt, Artificial Sequence
  Description of Artificial Sequence: Synthetic oligonucleotide
uccgggcuacugucucugg

SEQ ID NO: 2706439 - RNA, 19 nt, Artificial Sequence
  Description of Artificial Sequence: Synthetic oligonucleotide
ccuagggagccgcagaauc

SEQ ID NO: 2706440 - RNA, 19 nt, Artificial Sequence
  Description of Artificial Sequence: Synthetic oligonucleotide
cagggauggccgacagugc

SEQ ID NO: 2706441 - RNA, 19 nt, Artificial Sequence
  Description of Artificial Sequence: Synthetic oligonucleotide
aggugccucuuccucuaug

SEQ ID NO: 2706442 - RNA, 19 nt, Artificial Sequence
  Description of Artificial Sequence: Synthetic oligonucleotide
ggagccgcagaaucuuccc

SEQ ID NO: 2706443 - RNA, 19 nt, Artificial Sequence
  Description of Artificial Sequence: Synthetic oligonucleotide
guaugcuuuucaagaugac

SEQ ID NO: 2706444 - RNA, 19 nt, Artificial Sequence
  Description of Artificial Sequence: Synthetic oligonucleotide
ugacucgcaugcccuggaa

SEQ ID NO: 2706445 - RNA, 19 nt, Artificial Sequence
  Description of Artificial Sequence: Synthetic oligonucleotide
ugcuuucgaugugcaguag

SEQ ID NO: 2706446 - RNA, 19 nt, Artificial Sequence
  Description of Artificial Sequence: Synthetic oligonucleotide
gcuggugugaaagggcagc

SEQ ID NO: 2706447 - RNA, 19 nt, Artificial Sequence
  Description of Artificial Sequence: Synthetic oligonucleotide
cucuauguccuucccuuaa

SEQ ID NO: 2706448 - RNA, 19 nt, Artificial Sequence
  Description of Artificial Sequence: Synthetic oligonucleotide
uccccggggacaggaacag

SEQ ID NO: 2706449 - RNA, 19 nt, Artificial Sequence
  Description of Artificial Sequence: Synthetic oligonucleotide
uggugugaaagggcagcac

SEQ ID NO: 2706450 - RNA, 19 nt, Artificial Sequence
  Description of Artificial Sequence: Synthetic oligonucleotide
ugcagccugugggaguaug

SEQ ID NO: 2706451 - RNA, 19 nt, Artificial Sequence
  Description of Artificial Sequence: Synthetic oligonucleotide
aaucuuccccggggacagg

SEQ ID NO: 2706452 - RNA, 19 nt, Artificial Sequence
  Description of Artificial Sequence: Synthetic oligonucleotide
accugacucgcaugcccug

SEQ ID NO: 2706453 - RNA, 19 nt, Artificial Sequence
  Description of Artificial Sequence: Synthetic oligonucleotide
agugcagccugugggagua

SEQ ID NO: 2706454 - RNA, 19 nt, Artificial Sequence
  Description of Artificial Sequence: Synthetic oligonucleotide
aucucagugcuggugugaa

SEQ ID NO: 2706455 - RNA, 19 nt, Artificial Sequence
  Description of Artificial Sequence: Synthetic oligonucleotide
uggccguucugcagcucca

SEQ ID NO: 2706456 - RNA, 19 nt, Artificial Sequence
  Description of Artificial Sequence: Synthetic oligonucleotide
uagggagccgcagaaucuu

SEQ ID NO: 2706457 - RNA, 19 nt, Artificial Sequence
  Description of Artificial Sequence: Synthetic oligonucleotide
cagguauaugucccugaga

SEQ ID NO: 2706458 - RNA, 19 nt, Artificial Sequence
  Description of Artificial Sequence: Synthetic oligonucleotide
ggauggccgacagugcaag

SEQ ID NO: 2706459 - RNA, 19 nt, Artificial Sequence
  Description of Artificial Sequence: Synthetic oligonucleotide
agcuuccaccguccuccgg

SEQ ID NO: 2706460 - RNA, 19 nt, Artificial Sequence
  Description of Artificial Sequence: Synthetic oligonucleotide
caggcacacgggugugugc

SEQ ID NO: 2706461 - RNA, 19 nt, Artificial Sequence
  Description of Artificial Sequence: Synthetic oligonucleotide
agccugugggaguaugcuu

SEQ ID NO: 2706462 - RNA, 19 nt, Artificial Sequence
  Description of Artificial Sequence: Synthetic oligonucleotide
gccgcagaaucuuccccgg

SEQ ID NO: 2706463 - RNA, 19 nt, Artificial Sequence
  Description of Artificial Sequence: Synthetic oligonucleotide
augcacaggcacacgggug

SEQ ID NO: 2706464 - RNA, 19 nt, Artificial Sequence
  Description of Artificial Sequence: Synthetic oligonucleotide
cuagggagccgcagaaucu

SEQ ID NO: 2706465 - RNA, 19 nt, Artificial Sequence
  Description of Artificial Sequence: Synthetic oligonucleotide
agguccuggaguugaccua

SEQ ID NO: 2706466 - RNA, 19 nt, Artificial Sequence
  Description of Artificial Sequence: Synthetic oligonucleotide
gcccuggaacaucucagug

SEQ ID NO: 2706467 - RNA, 19 nt, Artificial Sequence
  Description of Artificial Sequence: Synthetic oligonucleotide
cagccccaaggucaggcuc

SEQ ID NO: 2706468 - RNA, 19 nt, Artificial Sequence
  Description of Artificial Sequence: Synthetic oligonucleotide
ucguggcuccucucaggcu

SEQ ID NO: 2706469 - RNA, 19 nt, Artificial Sequence
  Description of Artificial Sequence: Synthetic oligonucleotide
gguggcacugacaccagga

SEQ ID NO: 2706470 - RNA, 19 nt, Artificial Sequence
  Description of Artificial Sequence: Synthetic oligonucleotide
cccggggacaggaacaguc

SEQ ID NO: 2706471 - RNA, 19 nt, Artificial Sequence
  Description of Artificial Sequence: Synthetic oligonucleotide
cugagaaccuguggaucuc

SEQ ID NO: 2706472 - RNA, 19 nt, Artificial Sequence
  Description of Artificial Sequence: Synthetic oligonucleotide
augucccugagaaccugug

SEQ ID NO: 2706473 - RNA, 19 nt, Artificial Sequence
  Description of Artificial Sequence: Synthetic oligonucleotide
ggaguaugcuuuucaagau

SEQ ID NO: 2706474 - RNA, 19 nt, Artificial Sequence
  Description of Artificial Sequence: Synthetic oligonucleotide
aggucaggcucuccaugaa

SEQ ID NO: 2706475 - RNA, 19 nt, Artificial Sequence
  Description of Artificial Sequence: Synthetic oligonucleotide
gcggaugcuuucgaugugc

SEQ ID NO: 2706476 - RNA, 19 nt, Artificial Sequence
  Description of Artificial Sequence: Synthetic oligonucleotide
ccuuaaagguguucaugca

SEQ ID NO: 2706477 - RNA, 19 nt, Artificial Sequence
  Description of Artificial Sequence: Synthetic oligonucleotide
uuccaccguccuccgggcu

SEQ ID NO: 2706478 - RNA, 19 nt, Artificial Sequence
  Description of Artificial Sequence: Synthetic oligonucleotide
agggagccgcagaaucuuc

SEQ ID NO: 2706479 - RNA, 19 nt, Artificial Sequence
  Description of Artificial Sequence: Synthetic oligonucleotide
gaaggcggaugcuuucgau

SEQ ID NO: 2706480 - RNA, 19 nt, Artificial Sequence
  Description of Artificial Sequence: Synthetic oligonucleotide
gucucuggcuucagcggug

SEQ ID NO: 2706481 - RNA, 19 nt, Artificial Sequence
  Description of Artificial Sequence: Synthetic oligonucleotide
acacgggugugugcccagg

SEQ ID NO: 2706482 - RNA, 19 nt, Artificial Sequence
  Description of Artificial Sequence: Synthetic oligonucleotide
gcgaaggcggaugcuuucg

SEQ ID NO: 2706483 - RNA, 19 nt, Artificial Sequence
  Description of Artificial Sequence: Synthetic oligonucleotide
gcagaugggccaaugcaca

SEQ ID NO: 2706484 - RNA, 19 nt, Artificial Sequence
  Description of Artificial Sequence: Synthetic oligonucleotide
caggacaguccagcagccc

SEQ ID NO: 2706485 - RNA, 19 nt, Artificial Sequence
  Description of Artificial Sequence: Synthetic oligonucleotide
cuccgggcuacugucucug

SEQ ID NO: 2706486 - RNA, 19 nt, Artificial Sequence
  Description of Artificial Sequence: Synthetic oligonucleotide
ccaggacaguccagcagcc

SEQ ID NO: 2706487 - RNA, 19 nt, Artificial Sequence
  Description of Artificial Sequence: Synthetic oligonucleotide
cucaggugccucuuccucu

SEQ ID NO: 2706488 - RNA, 19 nt, Artificial Sequence
  Description of Artificial Sequence: Synthetic oligonucleotide
cagcuuccaccguccuccg

SEQ ID NO: 2706489 - RNA, 19 nt, Artificial Sequence
  Description of Artificial Sequence: Synthetic oligonucleotide
ccggggacaggaacagucc

SEQ ID NO: 2706490 - RNA, 19 nt, Artificial Sequence
  Description of Artificial Sequence: Synthetic oligonucleotide
ucaagaugacgaggauauu

SEQ ID NO: 2706491 - RNA, 19 nt, Artificial Sequence
  Description of Artificial Sequence: Synthetic oligonucleotide
gcuacugucucuggcuuca

SEQ ID NO: 2706492 - RNA, 19 nt, Artificial Sequence
  Description of Artificial Sequence: Synthetic oligonucleotide
cacacgauauggccguucu

SEQ ID NO: 2706493 - RNA, 19 nt, Artificial Sequence
  Description of Artificial Sequence: Synthetic oligonucleotide
ccuggaguugaccuaggga

SEQ ID NO: 2706494 - RNA, 19 nt, Artificial Sequence
  Description of Artificial Sequence: Synthetic oligonucleotide
gccgacagugcaagcacag

SEQ ID NO: 2706495 - RNA, 19 nt, Artificial Sequence
  Description of Artificial Sequence: Synthetic oligonucleotide
ggcagcacggugguggcac

SEQ ID NO: 2706496 - RNA, 19 nt, Artificial Sequence
  Description of Artificial Sequence: Synthetic oligonucleotide
gggaagagguugggaaacc

SEQ ID NO: 2706497 - RNA, 19 nt, Artificial Sequence
  Description of Artificial Sequence: Synthetic oligonucleotide
caagaaggccuuggaagaa

SEQ ID NO: 2706498 - RNA, 19 nt, Artificial Sequence
  Description of Artificial Sequence: Synthetic oligonucleotide
acgggugugugcccaggua

SEQ ID NO: 2706499 - RNA, 19 nt, Artificial Sequence
  Description of Artificial Sequence: Synthetic oligonucleotide
cuccagcaugcguggcaag

SEQ ID NO: 2706500 - RNA, 19 nt, Artificial Sequence
  Description of Artificial Sequence: Synthetic oligonucleotide
agcacggugguggcacuga

SEQ ID NO: 2706501 - RNA, 19 nt, Artificial Sequence
  Description of Artificial Sequence: Synthetic oligonucleotide
ggccaaugcacaggcacac

SEQ ID NO: 2706502 - RNA, 19 nt, Artificial Sequence
  Description of Artificial Sequence: Synthetic oligonucleotide
gggagccgcagaaucuucc

SEQ ID NO: 2706503 - RNA, 19 nt, Artificial Sequence
  Description of Artificial Sequence: Synthetic oligonucleotide
cgauauggccguucugcag

SEQ ID NO: 2706504 - RNA, 19 nt, Artificial Sequence
  Description of Artificial Sequence: Synthetic oligonucleotide
cagaauugaggcacacgau

SEQ ID NO: 2706505 - RNA, 19 nt, Artificial Sequence
  Description of Artificial Sequence: Synthetic oligonucleotide
cucuggcuucagcgguggg

SEQ ID NO: 2706506 - RNA, 19 nt, Artificial Sequence
  Description of Artificial Sequence: Synthetic oligonucleotide
caucucagugcugguguga

SEQ ID NO: 2706507 - RNA, 19 nt, Artificial Sequence
  Description of Artificial Sequence: Synthetic oligonucleotide
guccuucccuuaaaggugu

SEQ ID NO: 2706508 - RNA, 19 nt, Artificial Sequence
  Description of Artificial Sequence: Synthetic oligonucleotide
ggcuucagcggugggaaga

SEQ ID NO: 2706509 - RNA, 19 nt, Artificial Sequence
  Description of Artificial Sequence: Synthetic oligonucleotide
guccuggaguugaccuagg

SEQ ID NO: 2706510 - RNA, 19 nt, Artificial Sequence
  Description of Artificial Sequence: Synthetic oligonucleotide
cugacucgcaugcccugga

SEQ ID NO: 2706511 - RNA, 19 nt, Artificial Sequence
  Description of Artificial Sequence: Synthetic oligonucleotide
gcuuucgaugugcaguagu

SEQ ID NO: 2706512 - RNA, 19 nt, Artificial Sequence
  Description of Artificial Sequence: Synthetic oligonucleotide
ccugagaaccuguggaucu

SEQ ID NO: 2706513 - RNA, 19 nt, Artificial Sequence
  Description of Artificial Sequence: Synthetic oligonucleotide
gaggauauucaugguccau

SEQ ID NO: 2706514 - RNA, 19 nt, Artificial Sequence
  Description of Artificial Sequence: Synthetic oligonucleotide
uccuucccuuaaagguguu

SEQ ID NO: 2706515 - RNA, 19 nt, Artificial Sequence
  Description of Artificial Sequence: Synthetic oligonucleotide
ggcggaugcuuucgaugug

SEQ ID NO: 2706516 - RNA, 19 nt, Artificial Sequence
  Description of Artificial Sequence: Synthetic oligonucleotide
gcccagguaucguggcucc

SEQ ID NO: 2706517 - RNA, 19 nt, Artificial Sequence
  Description of Artificial Sequence: Synthetic oligonucleotide
ccugacucgcaugcccugg

SEQ ID NO: 2706518 - RNA, 19 nt, Artificial Sequence
  Description of Artificial Sequence: Synthetic oligonucleotide
ggcuacugucucuggcuuc

SEQ ID NO: 2706519 - RNA, 19 nt, Artificial Sequence
  Description of Artificial Sequence: Synthetic oligonucleotide
ggcgaaggcggaugcuuuc

SEQ ID NO: 2706520 - RNA, 19 nt, Artificial Sequence
  Description of Artificial Sequence: Synthetic oligonucleotide
cuacugucucuggcuucag

SEQ ID NO: 2706521 - RNA, 19 nt, Artificial Sequence
  Description of Artificial Sequence: Synthetic oligonucleotide
cugugggaguaugcuuuuc

SEQ ID NO: 2706522 - RNA, 19 nt, Artificial Sequence
  Description of Artificial Sequence: Synthetic oligonucleotide
gcagccugugggaguaugc

SEQ ID NO: 2706523 - RNA, 19 nt, Artificial Sequence
  Description of Artificial Sequence: Synthetic oligonucleotide
agguguucaugcagguaua

SEQ ID NO: 2706524 - RNA, 19 nt, Artificial Sequence
  Description of Artificial Sequence: Synthetic oligonucleotide
ccucaggugccucuuccuc

SEQ ID NO: 2706525 - RNA, 19 nt, Artificial Sequence
  Description of Artificial Sequence: Synthetic oligonucleotide
ccauggcuccucaggugcc

SEQ ID NO: 2706526 - RNA, 19 nt, Artificial Sequence
  Description of Artificial Sequence: Synthetic oligonucleotide
guugaccuagggagccgca

SEQ ID NO: 2706527 - RNA, 19 nt, Artificial Sequence
  Description of Artificial Sequence: Synthetic oligonucleotide
ccgggcuacugucucuggc

SEQ ID NO: 2706528 - RNA, 19 nt, Artificial Sequence
  Description of Artificial Sequence: Synthetic oligonucleotide
cgaugugcaguagucgaug

SEQ ID NO: 2706529 - RNA, 19 nt, Artificial Sequence
  Description of Artificial Sequence: Synthetic oligonucleotide
gagaaccuguggaucuccu

SEQ ID NO: 2706530 - RNA, 19 nt, Artificial Sequence
  Description of Artificial Sequence: Synthetic oligonucleotide
ggcacacgggugugugccc

SEQ ID NO: 2706531 - RNA, 19 nt, Artificial Sequence
  Description of Artificial Sequence: Synthetic oligonucleotide
accuagggagccgcagaau

SEQ ID NO: 2706532 - RNA, 19 nt, Artificial Sequence
  Description of Artificial Sequence: Synthetic oligonucleotide
gcaguagucgauggcucca

SEQ ID NO: 2706533 - RNA, 19 nt, Artificial Sequence
  Description of Artificial Sequence: Synthetic oligonucleotide
caggaggagggccugguuu

SEQ ID NO: 2706534 - RNA, 19 nt, Artificial Sequence
  Description of Artificial Sequence: Synthetic oligonucleotide
uauggccguucugcagcuc

SEQ ID NO: 2706535 - RNA, 19 nt, Artificial Sequence
  Description of Artificial Sequence: Synthetic oligonucleotide
cagguaucguggcuccucu

SEQ ID NO: 2706536 - RNA, 19 nt, Artificial Sequence
  Description of Artificial Sequence: Synthetic oligonucleotide
ggacaguccagcagcccca

SEQ ID NO: 2706537 - RNA, 19 nt, Artificial Sequence
  Description of Artificial Sequence: Synthetic oligonucleotide
ggaagagguugggaaaccu

SEQ ID NO: 2706538 - RNA, 19 nt, Artificial Sequence
  Description of Artificial Sequence: Synthetic oligonucleotide
gcacagaauugaggcacac

SEQ ID NO: 2706539 - RNA, 19 nt, Artificial Sequence
  Description of Artificial Sequence: Synthetic oligonucleotide
cccugagaaccuguggauc

SEQ ID NO: 2706540 - RNA, 19 nt, Artificial Sequence
  Description of Artificial Sequence: Synthetic oligonucleotide
gggccaaugcacaggcaca

SEQ ID NO: 2706541 - RNA, 19 nt, Artificial Sequence
  Description of Artificial Sequence: Synthetic oligonucleotide
gggugugugcccagguauc

SEQ ID NO: 2706542 - RNA, 19 nt, Artificial Sequence
  Description of Artificial Sequence: Synthetic oligonucleotide
aggcgaaggcggaugcuuu

SEQ ID NO: 2706543 - RNA, 19 nt, Artificial Sequence
  Description of Artificial Sequence: Synthetic oligonucleotide
cagcacggugguggcacug

SEQ ID NO: 2706544 - RNA, 19 nt, Artificial Sequence
  Description of Artificial Sequence: Synthetic oligonucleotide
ccagguaucguggcuccuc

SEQ ID NO: 2706545 - RNA, 19 nt, Artificial Sequence
  Description of Artificial Sequence: Synthetic oligonucleotide
ggaacaucucagugcuggu

SEQ ID NO: 2706546 - RNA, 19 nt, Artificial Sequence
  Description of Artificial Sequence: Synthetic oligonucleotide
accguccuccgggcuacug

SEQ ID NO: 2706547 - RNA, 19 nt, Artificial Sequence
  Description of Artificial Sequence: Synthetic oligonucleotide
ccaugaaggcgaaggcgga

SEQ ID NO: 2706548 - RNA, 19 nt, Artificial Sequence
  Description of Artificial Sequence: Synthetic oligonucleotide
cagcuccagcaugcguggc

SEQ ID NO: 2706549 - RNA, 19 nt, Artificial Sequence
  Description of Artificial Sequence: Synthetic oligonucleotide
gcggugggaagagguuggg

SEQ ID NO: 2706550 - RNA, 19 nt, Artificial Sequence
  Description of Artificial Sequence: Synthetic oligonucleotide
augggccaaugcacaggca

SEQ ID NO: 2706551 - RNA, 19 nt, Artificial Sequence
  Description of Artificial Sequence: Synthetic oligonucleotide
cguccuccgggcuacuguc

SEQ ID NO: 2706552 - RNA, 19 nt, Artificial Sequence
  Description of Artificial Sequence: Synthetic oligonucleotide
cgaggauauucauggucca

SEQ ID NO: 2706553 - RNA, 19 nt, Artificial Sequence
  Description of Artificial Sequence: Synthetic oligonucleotide
ccuucccuuaaagguguuc

SEQ ID NO: 2706554 - RNA, 19 nt, Artificial Sequence
  Description of Artificial Sequence: Synthetic oligonucleotide
cagccugugggaguaugcu

SEQ ID NO: 2706555 - RNA, 19 nt, Artificial Sequence
  Description of Artificial Sequence: Synthetic oligonucleotide
gcuccagcaugcguggcaa

SEQ ID NO: 2706556 - RNA, 19 nt, Artificial Sequence
  Description of Artificial Sequence: Synthetic oligonucleotide
gcacacgauauggccguuc

SEQ ID NO: 2706557 - RNA, 19 nt, Artificial Sequence
  Description of Artificial Sequence: Synthetic oligonucleotide
gguguucaugcagguauau

SEQ ID NO: 2706558 - RNA, 19 nt, Artificial Sequence
  Description of Artificial Sequence: Synthetic oligonucleotide
ggccgacagugcaagcaca

SEQ ID NO: 2706559 - RNA, 19 nt, Artificial Sequence
  Description of Artificial Sequence: Synthetic oligonucleotide
caugaaggcgaaggcggau

SEQ ID NO: 2706560 - RNA, 19 nt, Artificial Sequence
  Description of Artificial Sequence: Synthetic oligonucleotide
gccugugggaguaugcuuu

SEQ ID NO: 2706561 - RNA, 19 nt, Artificial Sequence
  Description of Artificial Sequence: Synthetic oligonucleotide
gggauggccgacagugcaa

SEQ ID NO: 2706562 - RNA, 19 nt, Artificial Sequence
  Description of Artificial Sequence: Synthetic oligonucleotide
cagcagccccaaggucagg

SEQ ID NO: 2706563 - RNA, 19 nt, Artificial Sequence
  Description of Artificial Sequence: Synthetic oligonucleotide
gcacacgggugugugccca

SEQ ID NO: 2706564 - RNA, 19 nt, Artificial Sequence
  Description of Artificial Sequence: Synthetic oligonucleotide
gugugugcccagguaucgu

SEQ ID NO: 2706565 - RNA, 19 nt, Artificial Sequence
  Description of Artificial Sequence: Synthetic oligonucleotide
cugcagcuccagcaugcgu

SEQ ID NO: 2706566 - RNA, 19 nt, Artificial Sequence
  Description of Artificial Sequence: Synthetic oligonucleotide
ccugcucacccagcagaug

SEQ ID NO: 2706567 - RNA, 19 nt, Artificial Sequence
  Description of Artificial Sequence: Synthetic oligonucleotide
cauggcuccucaggugccu

SEQ ID NO: 2706568 - RNA, 19 nt, Artificial Sequence
  Description of Artificial Sequence: Synthetic oligonucleotide
cacgggugugugcccaggu

SEQ ID NO: 2706569 - RNA, 19 nt, Artificial Sequence
  Description of Artificial Sequence: Synthetic oligonucleotide
ggacaggaacaguccugcu

SEQ ID NO: 2706570 - RNA, 19 nt, Artificial Sequence
  Description of Artificial Sequence: Synthetic oligonucleotide
gcucuccaugaaggcgaag

SEQ ID NO: 2706571 - RNA, 19 nt, Artificial Sequence
  Description of Artificial Sequence: Synthetic oligonucleotide
ccaccguccuccgggcuac

SEQ ID NO: 2706572 - RNA, 19 nt, Artificial Sequence
  Description of Artificial Sequence: Synthetic oligonucleotide
ccagcaugcguggcaagaa

SEQ ID NO: 2706573 - RNA, 19 nt, Artificial Sequence
  Description of Artificial Sequence: Synthetic oligonucleotide
cggugguggcacugacacc

SEQ ID NO: 2706574 - RNA, 19 nt, Artificial Sequence
  Description of Artificial Sequence: Synthetic oligonucleotide
cgaaggcggaugcuuucga

SEQ ID NO: 2706575 - RNA, 19 nt, Artificial Sequence
  Description of Artificial Sequence: Synthetic oligonucleotide
ccaaggucaggcucuccau

SEQ ID NO: 2706576 - RNA, 19 nt, Artificial Sequence
  Description of Artificial Sequence: Synthetic oligonucleotide
cacaggcacacgggugugu

SEQ ID NO: 2706577 - RNA, 19 nt, Artificial Sequence
  Description of Artificial Sequence: Synthetic oligonucleotide
cgggcuacugucucuggcu

SEQ ID NO: 2706578 - RNA, 19 nt, Artificial Sequence
  Description of Artificial Sequence: Synthetic oligonucleotide
ggcucuccaugaaggcgaa

SEQ ID NO: 2706579 - RNA, 19 nt, Artificial Sequence
  Description of Artificial Sequence: Synthetic oligonucleotide
ccuguggaucuccuccagu

SEQ ID NO: 2706580 - RNA, 19 nt, Artificial Sequence
  Description of Artificial Sequence: Synthetic oligonucleotide
ccgacagugcaagcacaga

SEQ ID NO: 2706581 - RNA, 19 nt, Artificial Sequence
  Description of Artificial Sequence: Synthetic oligonucleotide
gcguggcaagaaggccuug

SEQ ID NO: 2706582 - RNA, 19 nt, Artificial Sequence
  Description of Artificial Sequence: Synthetic oligonucleotide
gccccaaggucaggcucuc

SEQ ID NO: 2706583 - RNA, 19 nt, Artificial Sequence
  Description of Artificial Sequence: Synthetic oligonucleotide
ccugugggaguaugcuuuu

SEQ ID NO: 2706584 - RNA, 19 nt, Artificial Sequence
  Description of Artificial Sequence: Synthetic oligonucleotide
gcagcacggugguggcacu

SEQ ID NO: 2706585 - RNA, 19 nt, Artificial Sequence
  Description of Artificial Sequence: Synthetic oligonucleotide
ccguccuccgggcuacugu

SEQ ID NO: 2706586 - RNA, 19 nt, Artificial Sequence
  Description of Artificial Sequence: Synthetic oligonucleotide
gggcagcacggugguggca

SEQ ID NO: 2706587 - RNA, 19 nt, Artificial Sequence
  Description of Artificial Sequence: Synthetic oligonucleotide
ccuccgggcuacugucucu

SEQ ID NO: 2706588 - RNA, 19 nt, Artificial Sequence
  Description of Artificial Sequence: Synthetic oligonucleotide
cggugggaagagguuggga

SEQ ID NO: 2706589 - RNA, 19 nt, Artificial Sequence
  Description of Artificial Sequence: Synthetic oligonucleotide
ggcuccucaggugccucuu

SEQ ID NO: 2706590 - RNA, 19 nt, Artificial Sequence
  Description of Artificial Sequence: Synthetic oligonucleotide
gugcagccugugggaguau

SEQ ID NO: 2706591 - RNA, 19 nt, Artificial Sequence
  Description of Artificial Sequence: Synthetic oligonucleotide
ggcacacgauauggccguu

SEQ ID NO: 2706592 - RNA, 19 nt, Artificial Sequence
  Description of Artificial Sequence: Synthetic oligonucleotide
cccagguaucguggcuccu

SEQ ID NO: 2706593 - RNA, 19 nt, Artificial Sequence
  Description of Artificial Sequence: Synthetic oligonucleotide
caccguccuccgggcuacu

SEQ ID NO: 2706594 - RNA, 19 nt, Artificial Sequence
  Description of Artificial Sequence: Synthetic oligonucleotide
ccccggggacaggaacagu

SEQ ID NO: 2706595 - RNA, 19 nt, Artificial Sequence
  Description of Artificial Sequence: Synthetic oligonucleotide
aaaacuucaucauuaguag

SEQ ID NO: 2706596 - RNA, 19 nt, Artificial Sequence
  Description of Artificial Sequence: Synthetic oligonucleotide
aaagcggaaagcuucuugc

SEQ ID NO: 2706597 - RNA, 19 nt, Artificial Sequence
  Description of Artificial Sequence: Synthetic oligonucleotide
uuaaaucgcagaaagugag

SEQ ID NO: 2706598 - RNA, 19 nt, Artificial Sequence
  Description of Artificial Sequence: Synthetic oligonucleotide
aucgguaugucccagaguc

SEQ ID NO: 2706599 - RNA, 19 nt, Artificial Sequence
  Description of Artificial Sequence: Synthetic oligonucleotide
ucagguuuaccaaauuugg

SEQ ID NO: 2706600 - RNA, 19 nt, Artificial Sequence
  Description of Artificial Sequence: Synthetic oligonucleotide
auuaguagagaugaugccc

SEQ ID NO: 2706601 - RNA, 19 nt, Artificial Sequence
  Description of Artificial Sequence: Synthetic oligonucleotide
gaaagugagaguuggcucg

SEQ ID NO: 2706602 - RNA, 19 nt, Artificial Sequence
  Description of Artificial Sequence: Synthetic oligonucleotide
uggagcaucccacagaucc

SEQ ID NO: 2706603 - RNA, 19 nt, Artificial Sequence
  Description of Artificial Sequence: Synthetic oligonucleotide
uuuuauugaacaaaacaaa

SEQ ID NO: 2706604 - RNA, 19 nt, Artificial Sequence
  Description of Artificial Sequence: Synthetic oligonucleotide
ugagaguuggcucggaagg

SEQ ID NO: 2706605 - RNA, 19 nt, Artificial Sequence
  Description of Artificial Sequence: Synthetic oligonucleotide
uugacaaugacucucccca

SEQ ID NO: 2706606 - RNA, 19 nt, Artificial Sequence
  Description of Artificial Sequence: Synthetic oligonucleotide
uggaaauucagguuuacca

SEQ ID NO: 2706607 - RNA, 19 nt, Artificial Sequence
  Description of Artificial Sequence: Synthetic oligonucleotide
aaauagagccucuugacaa

SEQ ID NO: 2706608 - RNA, 19 nt, Artificial Sequence
  Description of Artificial Sequence: Synthetic oligonucleotide
aaauuuggaggaaggaccc

SEQ ID NO: 2706609 - RNA, 19 nt, Artificial Sequence
  Description of Artificial Sequence: Synthetic oligonucleotide
uucagguuuaccaaauuug

SEQ ID NO: 2706610 - RNA, 19 nt, Artificial Sequence
  Description of Artificial Sequence: Synthetic oligonucleotide
uuuaaaucgcagaaaguga

SEQ ID NO: 2706611 - RNA, 19 nt, Artificial Sequence
  Description of Artificial Sequence: Synthetic oligonucleotide
guuuaaaucgcagaaagug

SEQ ID NO: 2706612 - RNA, 19 nt, Artificial Sequence
  Description of Artificial Sequence: Synthetic oligonucleotide
ucuagauuaauuucccagc

SEQ ID NO: 2706613 - RNA, 19 nt, Artificial Sequence
  Description of Artificial Sequence: Synthetic oligonucleotide
agguuuaccaaauuuggag

SEQ ID NO: 2706614 - RNA, 19 nt, Artificial Sequence
  Description of Artificial Sequence: Synthetic oligonucleotide
uuaguagagaugaugcccc

SEQ ID NO: 2706615 - RNA, 19 nt, Artificial Sequence
  Description of Artificial Sequence: Synthetic oligonucleotide
gagucauacucauaggcgg

SEQ ID NO: 2706616 - RNA, 19 nt, Artificial Sequence
  Description of Artificial Sequence: Synthetic oligonucleotide
aaaauagagccucuugaca

SEQ ID NO: 2706617 - RNA, 19 nt, Artificial Sequence
  Description of Artificial Sequence: Synthetic oligonucleotide
aauggugaaauggagcauc

SEQ ID NO: 2706618 - RNA, 19 nt, Artificial Sequence
  Description of Artificial Sequence: Synthetic oligonucleotide
aaaguuaagggagguaagg

SEQ ID NO: 2706619 - RNA, 19 nt, Artificial Sequence
  Description of Artificial Sequence: Synthetic oligonucleotide
aaguuaagggagguaaggc

SEQ ID NO: 2706620 - RNA, 19 nt, Artificial Sequence
  Description of Artificial Sequence: Synthetic oligonucleotide
aaugacucuccccacagcu

SEQ ID NO: 2706621 - RNA, 19 nt, Artificial Sequence
  Description of Artificial Sequence: Synthetic oligonucleotide
aacuucaucauuaguagag

SEQ ID NO: 2706622 - RNA, 19 nt, Artificial Sequence
  Description of Artificial Sequence: Synthetic oligonucleotide
uggucagacacuccaaacg

SEQ ID NO: 2706623 - RNA, 19 nt, Artificial Sequence
  Description of Artificial Sequence: Synthetic oligonucleotide
auugacaaugacucucccc

SEQ ID NO: 2706624 - RNA, 19 nt, Artificial Sequence
  Description of Artificial Sequence: Synthetic oligonucleotide
cauguuacaguacauguug

SEQ ID NO: 2706625 - RNA, 19 nt, Artificial Sequence
  Description of Artificial Sequence: Synthetic oligonucleotide
aaaucgcagaaagugagag

SEQ ID NO: 2706626 - RNA, 19 nt, Artificial Sequence
  Description of Artificial Sequence: Synthetic oligonucleotide
gaugucugagcugagacag

SEQ ID NO: 2706627 - RNA, 19 nt, Artificial Sequence
  Description of Artificial Sequence: Synthetic oligonucleotide
agaaagugagaguuggcuc

SEQ ID NO: 2706628 - RNA, 19 nt, Artificial Sequence
  Description of Artificial Sequence: Synthetic oligonucleotide
cauaggcggguuuaaaucg

SEQ ID NO: 2706629 - RNA, 19 nt, Artificial Sequence
  Description of Artificial Sequence: Synthetic oligonucleotide
aauggagcaucccacagau

SEQ ID NO: 2706630 - RNA, 19 nt, Artificial Sequence
  Description of Artificial Sequence: Synthetic oligonucleotide
caucacaucgguauguccc

SEQ ID NO: 2706631 - RNA, 19 nt, Artificial Sequence
  Description of Artificial Sequence: Synthetic oligonucleotide
aagcggaaagcuucuugcc

SEQ ID NO: 2706632 - RNA, 19 nt, Artificial Sequence
  Description of Artificial Sequence: Synthetic oligonucleotide
cuuguuguagcuucuuggg

SEQ ID NO: 2706633 - RNA, 19 nt, Artificial Sequence
  Description of Artificial Sequence: Synthetic oligonucleotide
uguggcauugacaaugacu

SEQ ID NO: 2706634 - RNA, 19 nt, Artificial Sequence
  Description of Artificial Sequence: Synthetic oligonucleotide
uguuguagcuucuugggga

SEQ ID NO: 2706635 - RNA, 19 nt, Artificial Sequence
  Description of Artificial Sequence: Synthetic oligonucleotide
uucaucauuaguagagaug

SEQ ID NO: 2706636 - RNA, 19 nt, Artificial Sequence
  Description of Artificial Sequence: Synthetic oligonucleotide
gucuagauuaauuucccag

SEQ ID NO: 2706637 - RNA, 19 nt, Artificial Sequence
  Description of Artificial Sequence: Synthetic oligonucleotide
uguuguggcauugacaaug

SEQ ID NO: 2706638 - RNA, 19 nt, Artificial Sequence
  Description of Artificial Sequence: Synthetic oligonucleotide
cuagauuaauuucccagcc

SEQ ID NO: 2706639 - RNA, 19 nt, Artificial Sequence
  Description of Artificial Sequence: Synthetic oligonucleotide
guugucuagauuaauuucc

SEQ ID NO: 2706640 - RNA, 19 nt, Artificial Sequence
  Description of Artificial Sequence: Synthetic oligonucleotide
uggacaauggugaaaugga

SEQ ID NO: 2706641 - RNA, 19 nt, Artificial Sequence
  Description of Artificial Sequence: Synthetic oligonucleotide
aggaugucugagcugagac

SEQ ID NO: 2706642 - RNA, 19 nt, Artificial Sequence
  Description of Artificial Sequence: Synthetic oligonucleotide
aauuuguuuuauugaacaa

SEQ ID NO: 2706643 - RNA, 19 nt, Artificial Sequence
  Description of Artificial Sequence: Synthetic oligonucleotide
auggacaauggugaaaugg

SEQ ID NO: 2706644 - RNA, 19 nt, Artificial Sequence
  Description of Artificial Sequence: Synthetic oligonucleotide
uaccaaauuuggaggaagg

SEQ ID NO: 2706645 - RNA, 19 nt, Artificial Sequence
  Description of Artificial Sequence: Synthetic oligonucleotide
gguuuaccaaauuuggagg

SEQ ID NO: 2706646 - RNA, 19 nt, Artificial Sequence
  Description of Artificial Sequence: Synthetic oligonucleotide
ucuaggaugucugagcuga

SEQ ID NO: 2706647 - RNA, 19 nt, Artificial Sequence
  Description of Artificial Sequence: Synthetic oligonucleotide
guuacaguacauguugugg

SEQ ID NO: 2706648 - RNA, 19 nt, Artificial Sequence
  Description of Artificial Sequence: Synthetic oligonucleotide
agcggaaagcuucuugccc

SEQ ID NO: 2706649 - RNA, 19 nt, Artificial Sequence
  Description of Artificial Sequence: Synthetic oligonucleotide
uuguuguagcuucuugggg

SEQ ID NO: 2706650 - RNA, 19 nt, Artificial Sequence
  Description of Artificial Sequence: Synthetic oligonucleotide
uugucuagauuaauuuccc

SEQ ID NO: 2706651 - RNA, 19 nt, Artificial Sequence
  Description of Artificial Sequence: Synthetic oligonucleotide
caaaauagagccucuugac

SEQ ID NO: 2706652 - RNA, 19 nt, Artificial Sequence
  Description of Artificial Sequence: Synthetic oligonucleotide
accucuaggaugucugagc

SEQ ID NO: 2706653 - RNA, 19 nt, Artificial Sequence
  Description of Artificial Sequence: Synthetic oligonucleotide
uuccccauggacaauggug

SEQ ID NO: 2706654 - RNA, 19 nt, Artificial Sequence
  Description of Artificial Sequence: Synthetic oligonucleotide
cagagucauacucauaggc

SEQ ID NO: 2706655 - RNA, 19 nt, Artificial Sequence
  Description of Artificial Sequence: Synthetic oligonucleotide
uccuuguacgccaaggcca

SEQ ID NO: 2706656 - RNA, 19 nt, Artificial Sequence
  Description of Artificial Sequence: Synthetic oligonucleotide
uccaaaauagagccucuug

SEQ ID NO: 2706657 - RNA, 19 nt, Artificial Sequence
  Description of Artificial Sequence: Synthetic oligonucleotide
ucagacacuccaaacgcug

SEQ ID NO: 2706658 - RNA, 19 nt, Artificial Sequence
  Description of Artificial Sequence: Synthetic oligonucleotide
uaaagcggaaagcuucuug

SEQ ID NO: 2706659 - RNA, 19 nt, Artificial Sequence
  Description of Artificial Sequence: Synthetic oligonucleotide
aaggccacauguuacagua

SEQ ID NO: 2706660 - RNA, 19 nt, Artificial Sequence
  Description of Artificial Sequence: Synthetic oligonucleotide
uagauuaauuucccagccc

SEQ ID NO: 2706661 - RNA, 19 nt, Artificial Sequence
  Description of Artificial Sequence: Synthetic oligonucleotide
aucccacagauccaguugg

SEQ ID NO: 2706662 - RNA, 19 nt, Artificial Sequence
  Description of Artificial Sequence: Synthetic oligonucleotide
aaagcuucuugccccaccu

SEQ ID NO: 2706663 - RNA, 19 nt, Artificial Sequence
  Description of Artificial Sequence: Synthetic oligonucleotide
augucccagagucauacuc

SEQ ID NO: 2706664 - RNA, 19 nt, Artificial Sequence
  Description of Artificial Sequence: Synthetic oligonucleotide
gaaauggagcaucccacag

SEQ ID NO: 2706665 - RNA, 19 nt, Artificial Sequence
  Description of Artificial Sequence: Synthetic oligonucleotide
aucaggacccaccucacag

SEQ ID NO: 2706666 - RNA, 19 nt, Artificial Sequence
  Description of Artificial Sequence: Synthetic oligonucleotide
aaauggagcaucccacaga

SEQ ID NO: 2706667 - RNA, 19 nt, Artificial Sequence
  Description of Artificial Sequence: Synthetic oligonucleotide
agagucauacucauaggcg

SEQ ID NO: 2706668 - RNA, 19 nt, Artificial Sequence
  Description of Artificial Sequence: Synthetic oligonucleotide
uccccauggacaaugguga

SEQ ID NO: 2706669 - RNA, 19 nt, Artificial Sequence
  Description of Artificial Sequence: Synthetic oligonucleotide
aaaaguuaagggagguaag

SEQ ID NO: 2706670 - RNA, 19 nt, Artificial Sequence
  Description of Artificial Sequence: Synthetic oligonucleotide
ggguuuaaaucgcagaaag

SEQ ID NO: 2706671 - RNA, 19 nt, Artificial Sequence
  Description of Artificial Sequence: Synthetic oligonucleotide
ucauaggcggguuuaaauc

SEQ ID NO: 2706672 - RNA, 19 nt, Artificial Sequence
  Description of Artificial Sequence: Synthetic oligonucleotide
aucauuaguagagaugaug

SEQ ID NO: 2706673 - RNA, 19 nt, Artificial Sequence
  Description of Artificial Sequence: Synthetic oligonucleotide
aacucuuccccauggacaa

SEQ ID NO: 2706674 - RNA, 19 nt, Artificial Sequence
  Description of Artificial Sequence: Synthetic oligonucleotide
uuccuuguacgccaaggcc

SEQ ID NO: 2706675 - RNA, 19 nt, Artificial Sequence
  Description of Artificial Sequence: Synthetic oligonucleotide
uuaagggagguaaggcuug

SEQ ID NO: 2706676 - RNA, 19 nt, Artificial Sequence
  Description of Artificial Sequence: Synthetic oligonucleotide
guggcauugacaaugacuc

SEQ ID NO: 2706677 - RNA, 19 nt, Artificial Sequence
  Description of Artificial Sequence: Synthetic oligonucleotide
uuaccaaauuuggaggaag

SEQ ID NO: 2706678 - RNA, 19 nt, Artificial Sequence
  Description of Artificial Sequence: Synthetic oligonucleotide
agguaaagcggaaagcuuc

SEQ ID NO: 2706679 - RNA, 19 nt, Artificial Sequence
  Description of Artificial Sequence: Synthetic oligonucleotide
ugaaauggagcaucccaca

SEQ ID NO: 2706680 - RNA, 19 nt, Artificial Sequence
  Description of Artificial Sequence: Synthetic oligonucleotide
ugacucuccccacagcuug

SEQ ID NO: 2706681 - RNA, 19 nt, Artificial Sequence
  Description of Artificial Sequence: Synthetic oligonucleotide
ucuuccuuguacgccaagg

SEQ ID NO: 2706682 - RNA, 19 nt, Artificial Sequence
  Description of Artificial Sequence: Synthetic oligonucleotide
acaaugacucuccccacag

SEQ ID NO: 2706683 - RNA, 19 nt, Artificial Sequence
  Description of Artificial Sequence: Synthetic oligonucleotide
ucagcagcugcacaucaca

SEQ ID NO: 2706684 - RNA, 19 nt, Artificial Sequence
  Description of Artificial Sequence: Synthetic oligonucleotide
uaaaucgcagaaagugaga

SEQ ID NO: 2706685 - RNA, 19 nt, Artificial Sequence
  Description of Artificial Sequence: Synthetic oligonucleotide
auggaaauucagguuuacc

SEQ ID NO: 2706686 - RNA, 19 nt, Artificial Sequence
  Description of Artificial Sequence: Synthetic oligonucleotide
cucacagacggucucuucc

SEQ ID NO: 2706687 - RNA, 19 nt, Artificial Sequence
  Description of Artificial Sequence: Synthetic oligonucleotide
gaggaaggacccucaaucc

SEQ ID NO: 2706688 - RNA, 19 nt, Artificial Sequence
  Description of Artificial Sequence: Synthetic oligonucleotide
guuuaccaaauuuggagga

SEQ ID NO: 2706689 - RNA, 19 nt, Artificial Sequence
  Description of Artificial Sequence: Synthetic oligonucleotide
cacagauccaguuggucag

SEQ ID NO: 2706690 - RNA, 19 nt, Artificial Sequence
  Description of Artificial Sequence: Synthetic oligonucleotide
aauagagccucuugacaaa

SEQ ID NO: 2706691 - RNA, 19 nt, Artificial Sequence
  Description of Artificial Sequence: Synthetic oligonucleotide
aaacgcugggaccugcacu

SEQ ID NO: 2706692 - RNA, 19 nt, Artificial Sequence
  Description of Artificial Sequence: Synthetic oligonucleotide
aaucgcagaaagugagagu

SEQ ID NO: 2706693 - RNA, 19 nt, Artificial Sequence
  Description of Artificial Sequence: Synthetic oligonucleotide
auucagguuuaccaaauuu

SEQ ID NO: 2706694 - RNA, 19 nt, Artificial Sequence
  Description of Artificial Sequence: Synthetic oligonucleotide
uagagaugaugccccgacg

SEQ ID NO: 2706695 - RNA, 19 nt, Artificial Sequence
  Description of Artificial Sequence: Synthetic oligonucleotide
acggucucuuccuuguacg

SEQ ID NO: 2706696 - RNA, 19 nt, Artificial Sequence
  Description of Artificial Sequence: Synthetic oligonucleotide
uacauguuguggcauugac

SEQ ID NO: 2706697 - RNA, 19 nt, Artificial Sequence
  Description of Artificial Sequence: Synthetic oligonucleotide
ucaauccaaaauagagccu

SEQ ID NO: 2706698 - RNA, 19 nt, Artificial Sequence
  Description of Artificial Sequence: Synthetic oligonucleotide
cucagcucaaacucuuccc

SEQ ID NO: 2706699 - RNA, 19 nt, Artificial Sequence
  Description of Artificial Sequence: Synthetic oligonucleotide
ggaaugguugucuagauua

SEQ ID NO: 2706700 - RNA, 19 nt, Artificial Sequence
  Description of Artificial Sequence: Synthetic oligonucleotide
acaucgguaugucccagag

SEQ ID NO: 2706701 - RNA, 19 nt, Artificial Sequence
  Description of Artificial Sequence: Synthetic oligonucleotide
cuuccuuguacgccaaggc

SEQ ID NO: 2706702 - RNA, 19 nt, Artificial Sequence
  Description of Artificial Sequence: Synthetic oligonucleotide
gacugauggaaauucaggu

SEQ ID NO: 2706703 - RNA, 19 nt, Artificial Sequence
  Description of Artificial Sequence: Synthetic oligonucleotide
auuaauuucccagcccuca

SEQ ID NO: 2706704 - RNA, 19 nt, Artificial Sequence
  Description of Artificial Sequence: Synthetic oligonucleotide
auuuggaggaaggacccuc

SEQ ID NO: 2706705 - RNA, 19 nt, Artificial Sequence
  Description of Artificial Sequence: Synthetic oligonucleotide
gacccucaauccaaaauag

SEQ ID NO: 2706706 - RNA, 19 nt, Artificial Sequence
  Description of Artificial Sequence: Synthetic oligonucleotide
agacacuccaaacgcuggg

SEQ ID NO: 2706707 - RNA, 19 nt, Artificial Sequence
  Description of Artificial Sequence: Synthetic oligonucleotide
agcugagacagcucagcuc

SEQ ID NO: 2706708 - RNA, 19 nt, Artificial Sequence
  Description of Artificial Sequence: Synthetic oligonucleotide
cccucaauccaaaauagag

SEQ ID NO: 2706709 - RNA, 19 nt, Artificial Sequence
  Description of Artificial Sequence: Synthetic oligonucleotide
aacgcugggaccugcacuu

SEQ ID NO: 2706710 - RNA, 19 nt, Artificial Sequence
  Description of Artificial Sequence: Synthetic oligonucleotide
gacgcaagcuuccagguaa

SEQ ID NO: 2706711 - RNA, 19 nt, Artificial Sequence
  Description of Artificial Sequence: Synthetic oligonucleotide
ugcacaucacaucgguaug

SEQ ID NO: 2706712 - RNA, 19 nt, Artificial Sequence
  Description of Artificial Sequence: Synthetic oligonucleotide
aucgcagaaagugagaguu

SEQ ID NO: 2706713 - RNA, 19 nt, Artificial Sequence
  Description of Artificial Sequence: Synthetic oligonucleotide
gagguaaggcuuggaaugg

SEQ ID NO: 2706714 - RNA, 19 nt, Artificial Sequence
  Description of Artificial Sequence: Synthetic oligonucleotide
ugucuagauuaauuuccca

SEQ ID NO: 2706715 - RNA, 19 nt, Artificial Sequence
  Description of Artificial Sequence: Synthetic oligonucleotide
aauucagguuuaccaaauu

SEQ ID NO: 2706716 - RNA, 19 nt, Artificial Sequence
  Description of Artificial Sequence: Synthetic oligonucleotide
gugagaguuggcucggaag

SEQ ID NO: 2706717 - RNA, 19 nt, Artificial Sequence
  Description of Artificial Sequence: Synthetic oligonucleotide
acugauggaaauucagguu

SEQ ID NO: 2706718 - RNA, 19 nt, Artificial Sequence
  Description of Artificial Sequence: Synthetic oligonucleotide
ggaggaaggacccucaauc

SEQ ID NO: 2706719 - RNA, 19 nt, Artificial Sequence
  Description of Artificial Sequence: Synthetic oligonucleotide
ggucagacacuccaaacgc

SEQ ID NO: 2706720 - RNA, 19 nt, Artificial Sequence
  Description of Artificial Sequence: Synthetic oligonucleotide
auaggcggguuuaaaucgc

SEQ ID NO: 2706721 - RNA, 19 nt, Artificial Sequence
  Description of Artificial Sequence: Synthetic oligonucleotide
ccucaauccaaaauagagc

SEQ ID NO: 2706722 - RNA, 19 nt, Artificial Sequence
  Description of Artificial Sequence: Synthetic oligonucleotide
agacagcucagcucaaacu

SEQ ID NO: 2706723 - RNA, 19 nt, Artificial Sequence
  Description of Artificial Sequence: Synthetic oligonucleotide
uuggucagacacuccaaac

SEQ ID NO: 2706724 - RNA, 19 nt, Artificial Sequence
  Description of Artificial Sequence: Synthetic oligonucleotide
uaguagagaugaugccccg

SEQ ID NO: 2706725 - RNA, 19 nt, Artificial Sequence
  Description of Artificial Sequence: Synthetic oligonucleotide
gaaagcuucuugccccacc

SEQ ID NO: 2706726 - RNA, 19 nt, Artificial Sequence
  Description of Artificial Sequence: Synthetic oligonucleotide
caucuacuaacuucugguc

SEQ ID NO: 2706727 - RNA, 19 nt, Artificial Sequence
  Description of Artificial Sequence: Synthetic oligonucleotide
agcuucuugccccaccucu

SEQ ID NO: 2706728 - RNA, 19 nt, Artificial Sequence
  Description of Artificial Sequence: Synthetic oligonucleotide
uccagguaaagcggaaagc

SEQ ID NO: 2706729 - RNA, 19 nt, Artificial Sequence
  Description of Artificial Sequence: Synthetic oligonucleotide
ugagcugagacagcucagc

SEQ ID NO: 2706730 - RNA, 19 nt, Artificial Sequence
  Description of Artificial Sequence: Synthetic oligonucleotide
gcugagacagcucagcuca

SEQ ID NO: 2706731 - RNA, 19 nt, Artificial Sequence
  Description of Artificial Sequence: Synthetic oligonucleotide
guaugucccagagucauac

SEQ ID NO: 2706732 - RNA, 19 nt, Artificial Sequence
  Description of Artificial Sequence: Synthetic oligonucleotide
agagccucuugacaaauuu

SEQ ID NO: 2706733 - RNA, 19 nt, Artificial Sequence
  Description of Artificial Sequence: Synthetic oligonucleotide
ggugaaauggagcauccca

SEQ ID NO: 2706734 - RNA, 19 nt, Artificial Sequence
  Description of Artificial Sequence: Synthetic oligonucleotide
agucauacucauaggcggg

SEQ ID NO: 2706735 - RNA, 19 nt, Artificial Sequence
  Description of Artificial Sequence: Synthetic oligonucleotide
aggaaggacccucaaucca

SEQ ID NO: 2706736 - RNA, 19 nt, Artificial Sequence
  Description of Artificial Sequence: Synthetic oligonucleotide
cagacacuccaaacgcugg

SEQ ID NO: 2706737 - RNA, 19 nt, Artificial Sequence
  Description of Artificial Sequence: Synthetic oligonucleotide
gguugucuagauuaauuuc

SEQ ID NO: 2706738 - RNA, 19 nt, Artificial Sequence
  Description of Artificial Sequence: Synthetic oligonucleotide
uuuaccaaauuuggaggaa

SEQ ID NO: 2706739 - RNA, 19 nt, Artificial Sequence
  Description of Artificial Sequence: Synthetic oligonucleotide
acuccaaacgcugggaccu

SEQ ID NO: 2706740 - RNA, 19 nt, Artificial Sequence
  Description of Artificial Sequence: Synthetic oligonucleotide
ucagugagggacugaugga

SEQ ID NO: 2706741 - RNA, 19 nt, Artificial Sequence
  Description of Artificial Sequence: Synthetic oligonucleotide
uucuugccccaccucuagg

SEQ ID NO: 2706742 - RNA, 19 nt, Artificial Sequence
  Description of Artificial Sequence: Synthetic oligonucleotide
aaugguugucuagauuaau

SEQ ID NO: 2706743 - RNA, 19 nt, Artificial Sequence
  Description of Artificial Sequence: Synthetic oligonucleotide
aagcuucuugccccaccuc

SEQ ID NO: 2706744 - RNA, 19 nt, Artificial Sequence
  Description of Artificial Sequence: Synthetic oligonucleotide
gaugaugccccgacgcaag

SEQ ID NO: 2706745 - RNA, 19 nt, Artificial Sequence
  Description of Artificial Sequence: Synthetic oligonucleotide
agccucuugacaaauuuca

SEQ ID NO: 2706746 - RNA, 19 nt, Artificial Sequence
  Description of Artificial Sequence: Synthetic oligonucleotide
gagaguuggcucggaaggg

SEQ ID NO: 2706747 - RNA, 19 nt, Artificial Sequence
  Description of Artificial Sequence: Synthetic oligonucleotide
aucacaucgguauguccca

SEQ ID NO: 2706748 - RNA, 19 nt, Artificial Sequence
  Description of Artificial Sequence: Synthetic oligonucleotide
uccaguuggucagacacuc

SEQ ID NO: 2706749 - RNA, 19 nt, Artificial Sequence
  Description of Artificial Sequence: Synthetic oligonucleotide
agcuuguuguagcuucuug

SEQ ID NO: 2706750 - RNA, 19 nt, Artificial Sequence
  Description of Artificial Sequence: Synthetic oligonucleotide
gacaaugacucuccccaca

SEQ ID NO: 2706751 - RNA, 19 nt, Artificial Sequence
  Description of Artificial Sequence: Synthetic oligonucleotide
gacggucucuuccuuguac

SEQ ID NO: 2706752 - RNA, 19 nt, Artificial Sequence
  Description of Artificial Sequence: Synthetic oligonucleotide
augaugccccgacgcaagc

SEQ ID NO: 2706753 - RNA, 19 nt, Artificial Sequence
  Description of Artificial Sequence: Synthetic oligonucleotide
ucuugacaaauuucagguu

SEQ ID NO: 2706754 - RNA, 19 nt, Artificial Sequence
  Description of Artificial Sequence: Synthetic oligonucleotide
cuuggaaugguugucuaga

SEQ ID NO: 2706755 - RNA, 19 nt, Artificial Sequence
  Description of Artificial Sequence: Synthetic oligonucleotide
gagggacugauggaaauuc

SEQ ID NO: 2706756 - RNA, 19 nt, Artificial Sequence
  Description of Artificial Sequence: Synthetic oligonucleotide
aguacauguuguggcauug

SEQ ID NO: 2706757 - RNA, 19 nt, Artificial Sequence
  Description of Artificial Sequence: Synthetic oligonucleotide
agcugcacaucacaucggu

SEQ ID NO: 2706758 - RNA, 19 nt, Artificial Sequence
  Description of Artificial Sequence: Synthetic oligonucleotide
aggacccucaauccaaaau

SEQ ID NO: 2706759 - RNA, 19 nt, Artificial Sequence
  Description of Artificial Sequence: Synthetic oligonucleotide
aauccaaaauagagccucu

SEQ ID NO: 2706760 - RNA, 19 nt, Artificial Sequence
  Description of Artificial Sequence: Synthetic oligonucleotide
ucaggacccaccucacaga

SEQ ID NO: 2706761 - RNA, 19 nt, Artificial Sequence
  Description of Artificial Sequence: Synthetic oligonucleotide
acagacggucucuuccuug

SEQ ID NO: 2706762 - RNA, 19 nt, Artificial Sequence
  Description of Artificial Sequence: Synthetic oligonucleotide
acuucaucauuaguagaga

SEQ ID NO: 2706763 - RNA, 19 nt, Artificial Sequence
  Description of Artificial Sequence: Synthetic oligonucleotide
ucgcagaaagugagaguug

SEQ ID NO: 2706764 - RNA, 19 nt, Artificial Sequence
  Description of Artificial Sequence: Synthetic oligonucleotide
uuggaaugguugucuagau

SEQ ID NO: 2706765 - RNA, 19 nt, Artificial Sequence
  Description of Artificial Sequence: Synthetic oligonucleotide
cuugacaaauuucagguuu

SEQ ID NO: 2706766 - RNA, 19 nt, Artificial Sequence
  Description of Artificial Sequence: Synthetic oligonucleotide
gagcaucccacagauccag

SEQ ID NO: 2706767 - RNA, 19 nt, Artificial Sequence
  Description of Artificial Sequence: Synthetic oligonucleotide
uaagggagguaaggcuugg

SEQ ID NO: 2706768 - RNA, 19 nt, Artificial Sequence
  Description of Artificial Sequence: Synthetic oligonucleotide
cauugacaaugacucuccc

SEQ ID NO: 2706769 - RNA, 19 nt, Artificial Sequence
  Description of Artificial Sequence: Synthetic oligonucleotide
uggaaugguugucuagauu

SEQ ID NO: 2706770 - RNA, 19 nt, Artificial Sequence
  Description of Artificial Sequence: Synthetic oligonucleotide
accugcacuuccuccucac

SEQ ID NO: 2706771 - RNA, 19 nt, Artificial Sequence
  Description of Artificial Sequence: Synthetic oligonucleotide
uaggcggguuuaaaucgca

SEQ ID NO: 2706772 - RNA, 19 nt, Artificial Sequence
  Description of Artificial Sequence: Synthetic oligonucleotide
uucccagcccucaucuacu

SEQ ID NO: 2706773 - RNA, 19 nt, Artificial Sequence
  Description of Artificial Sequence: Synthetic oligonucleotide
aauuuggaggaaggacccu

SEQ ID NO: 2706774 - RNA, 19 nt, Artificial Sequence
  Description of Artificial Sequence: Synthetic oligonucleotide
agggagguaaggcuuggaa

SEQ ID NO: 2706775 - RNA, 19 nt, Artificial Sequence
  Description of Artificial Sequence: Synthetic oligonucleotide
cuucuugccccaccucuag

SEQ ID NO: 2706776 - RNA, 19 nt, Artificial Sequence
  Description of Artificial Sequence: Synthetic oligonucleotide
ccaaauuuggaggaaggac

SEQ ID NO: 2706777 - RNA, 19 nt, Artificial Sequence
  Description of Artificial Sequence: Synthetic oligonucleotide
gagaugaugccccgacgca

SEQ ID NO: 2706778 - RNA, 19 nt, Artificial Sequence
  Description of Artificial Sequence: Synthetic oligonucleotide
cagguuuaccaaauuugga

SEQ ID NO: 2706779 - RNA, 19 nt, Artificial Sequence
  Description of Artificial Sequence: Synthetic oligonucleotide
ugacaaugacucuccccac

SEQ ID NO: 2706780 - RNA, 19 nt, Artificial Sequence
  Description of Artificial Sequence: Synthetic oligonucleotide
caguuggucagacacucca

SEQ ID NO: 2706781 - RNA, 19 nt, Artificial Sequence
  Description of Artificial Sequence: Synthetic oligonucleotide
ucgguaugucccagaguca

SEQ ID NO: 2706782 - RNA, 19 nt, Artificial Sequence
  Description of Artificial Sequence: Synthetic oligonucleotide
acauguuguggcauugaca

SEQ ID NO: 2706783 - RNA, 19 nt, Artificial Sequence
  Description of Artificial Sequence: Synthetic oligonucleotide
cugauggaaauucagguuu

SEQ ID NO: 2706784 - RNA, 19 nt, Artificial Sequence
  Description of Artificial Sequence: Synthetic oligonucleotide
guuggucagacacuccaaa

SEQ ID NO: 2706785 - RNA, 19 nt, Artificial Sequence
  Description of Artificial Sequence: Synthetic oligonucleotide
ugguccucagugagggacu

SEQ ID NO: 2706786 - RNA, 19 nt, Artificial Sequence
  Description of Artificial Sequence: Synthetic oligonucleotide
caggacccaccucacagac

SEQ ID NO: 2706787 - RNA, 19 nt, Artificial Sequence
  Description of Artificial Sequence: Synthetic oligonucleotide
acccaccucacagacgguc

SEQ ID NO: 2706788 - RNA, 19 nt, Artificial Sequence
  Description of Artificial Sequence: Synthetic oligonucleotide
uacgccaaggccacauguu

SEQ ID NO: 2706789 - RNA, 19 nt, Artificial Sequence
  Description of Artificial Sequence: Synthetic oligonucleotide
ggacccucaauccaaaaua

SEQ ID NO: 2706790 - RNA, 19 nt, Artificial Sequence
  Description of Artificial Sequence: Synthetic oligonucleotide
uaggaugucugagcugaga

SEQ ID NO: 2706791 - RNA, 19 nt, Artificial Sequence
  Description of Artificial Sequence: Synthetic oligonucleotide
aaggacccucaauccaaaa

SEQ ID NO: 2706792 - RNA, 19 nt, Artificial Sequence
  Description of Artificial Sequence: Synthetic oligonucleotide
agugagaguuggcucggaa

SEQ ID NO: 2706793 - RNA, 19 nt, Artificial Sequence
  Description of Artificial Sequence: Synthetic oligonucleotide
caaugacucuccccacagc

SEQ ID NO: 2706794 - RNA, 19 nt, Artificial Sequence
  Description of Artificial Sequence: Synthetic oligonucleotide
cugagcugagacagcucag

SEQ ID NO: 2706795 - RNA, 19 nt, Artificial Sequence
  Description of Artificial Sequence: Synthetic oligonucleotide
cucuuccccauggacaaug

SEQ ID NO: 2706796 - RNA, 19 nt, Artificial Sequence
  Description of Artificial Sequence: Synthetic oligonucleotide
augguugucuagauuaauu

SEQ ID NO: 2706797 - RNA, 19 nt, Artificial Sequence
  Description of Artificial Sequence: Synthetic oligonucleotide
gggacugauggaaauucag

SEQ ID NO: 2706798 - RNA, 19 nt, Artificial Sequence
  Description of Artificial Sequence: Synthetic oligonucleotide
uaugucccagagucauacu

SEQ ID NO: 2706799 - RNA, 19 nt, Artificial Sequence
  Description of Artificial Sequence: Synthetic oligonucleotide
cucuaggaugucugagcug

SEQ ID NO: 2706800 - RNA, 19 nt, Artificial Sequence
  Description of Artificial Sequence: Synthetic oligonucleotide
gcuuggaaugguugucuag

SEQ ID NO: 2706801 - RNA, 19 nt, Artificial Sequence
  Description of Artificial Sequence: Synthetic oligonucleotide
uggugaaauggagcauccc

SEQ ID NO: 2706802 - RNA, 19 nt, Artificial Sequence
  Description of Artificial Sequence: Synthetic oligonucleotide
acauguuacaguacauguu

SEQ ID NO: 2706803 - RNA, 19 nt, Artificial Sequence
  Description of Artificial Sequence: Synthetic oligonucleotide
ggccacauguuacaguaca

SEQ ID NO: 2706804 - RNA, 19 nt, Artificial Sequence
  Description of Artificial Sequence: Synthetic oligonucleotide
agaguuggcucggaagggu

SEQ ID NO: 2706805 - RNA, 19 nt, Artificial Sequence
  Description of Artificial Sequence: Synthetic oligonucleotide
ugccccgacgcaagcuucc

SEQ ID NO: 2706806 - RNA, 19 nt, Artificial Sequence
  Description of Artificial Sequence: Synthetic oligonucleotide
cugcacaucacaucgguau

SEQ ID NO: 2706807 - RNA, 19 nt, Artificial Sequence
  Description of Artificial Sequence: Synthetic oligonucleotide
gagccucuugacaaauuuc

SEQ ID NO: 2706808 - RNA, 19 nt, Artificial Sequence
  Description of Artificial Sequence: Synthetic oligonucleotide
uuggaggaaggacccucaa

SEQ ID NO: 2706809 - RNA, 19 nt, Artificial Sequence
  Description of Artificial Sequence: Synthetic oligonucleotide
gaaugguugucuagauuaa

SEQ ID NO: 2706810 - RNA, 19 nt, Artificial Sequence
  Description of Artificial Sequence: Synthetic oligonucleotide
acagcucagcucaaacucu

SEQ ID NO: 2706811 - RNA, 19 nt, Artificial Sequence
  Description of Artificial Sequence: Synthetic oligonucleotide
ccagcccucaucuacuaac

SEQ ID NO: 2706812 - RNA, 19 nt, Artificial Sequence
  Description of Artificial Sequence: Synthetic oligonucleotide
ucacaucgguaugucccag

SEQ ID NO: 2706813 - RNA, 19 nt, Artificial Sequence
  Description of Artificial Sequence: Synthetic oligonucleotide
gcauugacaaugacucucc

SEQ ID NO: 2706814 - RNA, 19 nt, Artificial Sequence
  Description of Artificial Sequence: Synthetic oligonucleotide
caaacgcugggaccugcac

SEQ ID NO: 2706815 - RNA, 19 nt, Artificial Sequence
  Description of Artificial Sequence: Synthetic oligonucleotide
auagagccucuugacaaau

SEQ ID NO: 2706816 - RNA, 19 nt, Artificial Sequence
  Description of Artificial Sequence: Synthetic oligonucleotide
uuguacgccaaggccacau

SEQ ID NO: 2706817 - RNA, 19 nt, Artificial Sequence
  Description of Artificial Sequence: Synthetic oligonucleotide
cccgacgcaagcuuccagg

SEQ ID NO: 2706818 - RNA, 19 nt, Artificial Sequence
  Description of Artificial Sequence: Synthetic oligonucleotide
ugagggacugauggaaauu

SEQ ID NO: 2706819 - RNA, 19 nt, Artificial Sequence
  Description of Artificial Sequence: Synthetic oligonucleotide
aguagagaugaugccccga

SEQ ID NO: 2706820 - RNA, 19 nt, Artificial Sequence
  Description of Artificial Sequence: Synthetic oligonucleotide
ccagagucauacucauagg

SEQ ID NO: 2706821 - RNA, 19 nt, Artificial Sequence
  Description of Artificial Sequence: Synthetic oligonucleotide
acgccaaggccacauguua

SEQ ID NO: 2706822 - RNA, 19 nt, Artificial Sequence
  Description of Artificial Sequence: Synthetic oligonucleotide
ucccacagauccaguuggu

SEQ ID NO: 2706823 - RNA, 19 nt, Artificial Sequence
  Description of Artificial Sequence: Synthetic oligonucleotide
aggcuuggaaugguugucu

SEQ ID NO: 2706824 - RNA, 19 nt, Artificial Sequence
  Description of Artificial Sequence: Synthetic oligonucleotide
acaguacauguuguggcau

SEQ ID NO: 2706825 - RNA, 19 nt, Artificial Sequence
  Description of Artificial Sequence: Synthetic oligonucleotide
agaugaugccccgacgcaa

SEQ ID NO: 2706826 - RNA, 19 nt, Artificial Sequence
  Description of Artificial Sequence: Synthetic oligonucleotide
cuaggaugucugagcugag

SEQ ID NO: 2706827 - RNA, 19 nt, Artificial Sequence
  Description of Artificial Sequence: Synthetic oligonucleotide
ucucuuccuuguacgccaa

SEQ ID NO: 2706828 - RNA, 19 nt, Artificial Sequence
  Description of Artificial Sequence: Synthetic oligonucleotide
auacucauaggcggguuua

SEQ ID NO: 2706829 - RNA, 19 nt, Artificial Sequence
  Description of Artificial Sequence: Synthetic oligonucleotide
cuccucacuccaucaggac

SEQ ID NO: 2706830 - RNA, 19 nt, Artificial Sequence
  Description of Artificial Sequence: Synthetic oligonucleotide
guuguggcauugacaauga

SEQ ID NO: 2706831 - RNA, 19 nt, Artificial Sequence
  Description of Artificial Sequence: Synthetic oligonucleotide
cagaaagugagaguuggcu

SEQ ID NO: 2706832 - RNA, 19 nt, Artificial Sequence
  Description of Artificial Sequence: Synthetic oligonucleotide
ucuuggggauggccagugu

SEQ ID NO: 2706833 - RNA, 19 nt, Artificial Sequence
  Description of Artificial Sequence: Synthetic oligonucleotide
ugagacagcucagcucaaa

SEQ ID NO: 2706834 - RNA, 19 nt, Artificial Sequence
  Description of Artificial Sequence: Synthetic oligonucleotide
cacaucacaucgguauguc

SEQ ID NO: 2706835 - RNA, 19 nt, Artificial Sequence
  Description of Artificial Sequence: Synthetic oligonucleotide
uccaaacgcugggaccugc

SEQ ID NO: 2706836 - RNA, 19 nt, Artificial Sequence
  Description of Artificial Sequence: Synthetic oligonucleotide
gcccucaucuacuaacuuc

SEQ ID NO: 2706837 - RNA, 19 nt, Artificial Sequence
  Description of Artificial Sequence: Synthetic oligonucleotide
ggaugucugagcugagaca

SEQ ID NO: 2706838 - RNA, 19 nt, Artificial Sequence
  Description of Artificial Sequence: Synthetic oligonucleotide
uagagccucuugacaaauu

SEQ ID NO: 2706839 - RNA, 19 nt, Artificial Sequence
  Description of Artificial Sequence: Synthetic oligonucleotide
gcggguuuaaaucgcagaa

SEQ ID NO: 2706840 - RNA, 19 nt, Artificial Sequence
  Description of Artificial Sequence: Synthetic oligonucleotide
ugaugccccgacgcaagcu

SEQ ID NO: 2706841 - RNA, 19 nt, Artificial Sequence
  Description of Artificial Sequence: Synthetic oligonucleotide
cucauaggcggguuuaaau

SEQ ID NO: 2706842 - RNA, 19 nt, Artificial Sequence
  Description of Artificial Sequence: Synthetic oligonucleotide
ggucucuuccuuguacgcc

SEQ ID NO: 2706843 - RNA, 19 nt, Artificial Sequence
  Description of Artificial Sequence: Synthetic oligonucleotide
ggcggguuuaaaucgcaga

SEQ ID NO: 2706844 - RNA, 19 nt, Artificial Sequence
  Description of Artificial Sequence: Synthetic oligonucleotide
ccacauguuacaguacaug

SEQ ID NO: 2706845 - RNA, 19 nt, Artificial Sequence
  Description of Artificial Sequence: Synthetic oligonucleotide
ccuuguacgccaaggccac

SEQ ID NO: 2706846 - RNA, 19 nt, Artificial Sequence
  Description of Artificial Sequence: Synthetic oligonucleotide
acccucaauccaaaauaga

SEQ ID NO: 2706847 - RNA, 19 nt, Artificial Sequence
  Description of Artificial Sequence: Synthetic oligonucleotide
ucauacucauaggcggguu

SEQ ID NO: 2706848 - RNA, 19 nt, Artificial Sequence
  Description of Artificial Sequence: Synthetic oligonucleotide
cccaccucuaggaugucug

SEQ ID NO: 2706849 - RNA, 19 nt, Artificial Sequence
  Description of Artificial Sequence: Synthetic oligonucleotide
agggacugauggaaauuca

SEQ ID NO: 2706850 - RNA, 19 nt, Artificial Sequence
  Description of Artificial Sequence: Synthetic oligonucleotide
gagcugagacagcucagcu

SEQ ID NO: 2706851 - RNA, 19 nt, Artificial Sequence
  Description of Artificial Sequence: Synthetic oligonucleotide
aggccacauguuacaguac

SEQ ID NO: 2706852 - RNA, 19 nt, Artificial Sequence
  Description of Artificial Sequence: Synthetic oligonucleotide
guacgccaaggccacaugu

SEQ ID NO: 2706853 - RNA, 19 nt, Artificial Sequence
  Description of Artificial Sequence: Synthetic oligonucleotide
agguaaggcuuggaauggu

SEQ ID NO: 2706854 - RNA, 19 nt, Artificial Sequence
  Description of Artificial Sequence: Synthetic oligonucleotide
aagugagaguuggcucgga

SEQ ID NO: 2706855 - RNA, 19 nt, Artificial Sequence
  Description of Artificial Sequence: Synthetic oligonucleotide
gaaggacccucaauccaaa

SEQ ID NO: 2706856 - RNA, 19 nt, Artificial Sequence
  Description of Artificial Sequence: Synthetic oligonucleotide
guacauguuguggcauuga

SEQ ID NO: 2706857 - RNA, 19 nt, Artificial Sequence
  Description of Artificial Sequence: Synthetic oligonucleotide
auccaguuggucagacacu

SEQ ID NO: 2706858 - RNA, 19 nt, Artificial Sequence
  Description of Artificial Sequence: Synthetic oligonucleotide
ggaaggacccucaauccaa

SEQ ID NO: 2706859 - RNA, 19 nt, Artificial Sequence
  Description of Artificial Sequence: Synthetic oligonucleotide
acucauaggcggguuuaaa

SEQ ID NO: 2706860 - RNA, 19 nt, Artificial Sequence
  Description of Artificial Sequence: Synthetic oligonucleotide
cucuuccuuguacgccaag

SEQ ID NO: 2706861 - RNA, 19 nt, Artificial Sequence
  Description of Artificial Sequence: Synthetic oligonucleotide
auccaaaauagagccucuu

SEQ ID NO: 2706862 - RNA, 19 nt, Artificial Sequence
  Description of Artificial Sequence: Synthetic oligonucleotide
gaccugcacuuccuccuca

SEQ ID NO: 2706863 - RNA, 19 nt, Artificial Sequence
  Description of Artificial Sequence: Synthetic oligonucleotide
aggacccaccucacagacg

SEQ ID NO: 2706864 - RNA, 19 nt, Artificial Sequence
  Description of Artificial Sequence: Synthetic oligonucleotide
aguuggucagacacuccaa

SEQ ID NO: 2706865 - RNA, 19 nt, Artificial Sequence
  Description of Artificial Sequence: Synthetic oligonucleotide
ucccagagucauacucaua

SEQ ID NO: 2706866 - RNA, 19 nt, Artificial Sequence
  Description of Artificial Sequence: Synthetic oligonucleotide
agcccucaucuacuaacuu

SEQ ID NO: 2706867 - RNA, 19 nt, Artificial Sequence
  Description of Artificial Sequence: Synthetic oligonucleotide
ggcucggaaggguuuaaaa

SEQ ID NO: 2706868 - RNA, 19 nt, Artificial Sequence
  Description of Artificial Sequence: Synthetic oligonucleotide
aggcggguuuaaaucgcag

SEQ ID NO: 2706869 - RNA, 19 nt, Artificial Sequence
  Description of Artificial Sequence: Synthetic oligonucleotide
cacaucgguaugucccaga

SEQ ID NO: 2706870 - RNA, 19 nt, Artificial Sequence
  Description of Artificial Sequence: Synthetic oligonucleotide
gaugccccgacgcaagcuu

SEQ ID NO: 2706871 - RNA, 19 nt, Artificial Sequence
  Description of Artificial Sequence: Synthetic oligonucleotide
augccccgacgcaagcuuc

SEQ ID NO: 2706872 - RNA, 19 nt, Artificial Sequence
  Description of Artificial Sequence: Synthetic oligonucleotide
cccucaucuacuaacuucu

SEQ ID NO: 2706873 - RNA, 19 nt, Artificial Sequence
  Description of Artificial Sequence: Synthetic oligonucleotide
cuuccagguaaagcggaaa

SEQ ID NO: 2706874 - RNA, 19 nt, Artificial Sequence
  Description of Artificial Sequence: Synthetic oligonucleotide
cugggaccugcacuuccuc

SEQ ID NO: 2706875 - RNA, 19 nt, Artificial Sequence
  Description of Artificial Sequence: Synthetic oligonucleotide
gugagggacugauggaaau

SEQ ID NO: 2706876 - RNA, 19 nt, Artificial Sequence
  Description of Artificial Sequence: Synthetic oligonucleotide
gcagaaagugagaguuggc

SEQ ID NO: 2706877 - RNA, 19 nt, Artificial Sequence
  Description of Artificial Sequence: Synthetic oligonucleotide
ucccagcccucaucuacua

SEQ ID NO: 2706878 - RNA, 19 nt, Artificial Sequence
  Description of Artificial Sequence: Synthetic oligonucleotide
gggagguaaggcuuggaau

SEQ ID NO: 2706879 - RNA, 19 nt, Artificial Sequence
  Description of Artificial Sequence: Synthetic oligonucleotide
gguuuaaaucgcagaaagu

SEQ ID NO: 2706880 - RNA, 19 nt, Artificial Sequence
  Description of Artificial Sequence: Synthetic oligonucleotide
auggagcaucccacagauc

SEQ ID NO: 2706881 - RNA, 19 nt, Artificial Sequence
  Description of Artificial Sequence: Synthetic oligonucleotide
cagacggucucuuccuugu

SEQ ID NO: 2706882 - RNA, 19 nt, Artificial Sequence
  Description of Artificial Sequence: Synthetic oligonucleotide
caaggccacauguuacagu

SEQ ID NO: 2706883 - RNA, 19 nt, Artificial Sequence
  Description of Artificial Sequence: Synthetic oligonucleotide
ccaaggccacauguuacag

SEQ ID NO: 2706884 - RNA, 19 nt, Artificial Sequence
  Description of Artificial Sequence: Synthetic oligonucleotide
ccuccucacuccaucagga

SEQ ID NO: 2706885 - RNA, 19 nt, Artificial Sequence
  Description of Artificial Sequence: Synthetic oligonucleotide
uggcucggaaggguuuaaa

SEQ ID NO: 2706886 - RNA, 19 nt, Artificial Sequence
  Description of Artificial Sequence: Synthetic oligonucleotide
gguaaagcggaaagcuucu

SEQ ID NO: 2706887 - RNA, 19 nt, Artificial Sequence
  Description of Artificial Sequence: Synthetic oligonucleotide
aguuggcucggaaggguuu

SEQ ID NO: 2706888 - RNA, 19 nt, Artificial Sequence
  Description of Artificial Sequence: Synthetic oligonucleotide
gucccagagucauacucau

SEQ ID NO: 2706889 - RNA, 19 nt, Artificial Sequence
  Description of Artificial Sequence: Synthetic oligonucleotide
gucagacacuccaaacgcu

SEQ ID NO: 2706890 - RNA, 19 nt, Artificial Sequence
  Description of Artificial Sequence: Synthetic oligonucleotide
uuggcucggaaggguuuaa

SEQ ID NO: 2706891 - RNA, 19 nt, Artificial Sequence
  Description of Artificial Sequence: Synthetic oligonucleotide
ccagguaaagcggaaagcu

SEQ ID NO: 2706892 - RNA, 19 nt, Artificial Sequence
  Description of Artificial Sequence: Synthetic oligonucleotide
cagguaaagcggaaagcuu

SEQ ID NO: 2706893 - RNA, 19 nt, Artificial Sequence
  Description of Artificial Sequence: Synthetic oligonucleotide
guuggcucggaaggguuua

SEQ ID NO: 2706894 - RNA, 19 nt, Artificial Sequence
  Description of Artificial Sequence: Synthetic oligonucleotide
cagcccucaucuacuaacu

SEQ ID NO: 2706895 - RNA, 19 nt, Artificial Sequence
  Description of Artificial Sequence: Synthetic oligonucleotide
agacggucucuuccuugua

SEQ ID NO: 2706896 - RNA, 19 nt, Artificial Sequence
  Description of Artificial Sequence: Synthetic oligonucleotide
ccucaucuacuaacuucug

SEQ ID NO: 2706897 - RNA, 19 nt, Artificial Sequence
  Description of Artificial Sequence: Synthetic oligonucleotide
gucauacucauaggcgggu

SEQ ID NO: 2706898 - RNA, 19 nt, Artificial Sequence
  Description of Artificial Sequence: Synthetic oligonucleotide
cauacucauaggcggguuu

SEQ ID NO: 2706899 - RNA, 19 nt, Artificial Sequence
  Description of Artificial Sequence: Synthetic oligonucleotide
gguccucagugagggacug

SEQ ID NO: 2706900 - RNA, 19 nt, Artificial Sequence
  Description of Artificial Sequence: Synthetic oligonucleotide
cggucucuuccuuguacgc

SEQ ID NO: 2706901 - RNA, 19 nt, Artificial Sequence
  Description of Artificial Sequence: Synthetic oligonucleotide
acgcugggaccugcacuuc

SEQ ID NO: 2706902 - RNA, 19 nt, Artificial Sequence
  Description of Artificial Sequence: Synthetic oligonucleotide
accucacagacggucucuu

SEQ ID NO: 2706903 - RNA, 19 nt, Artificial Sequence
  Description of Artificial Sequence: Synthetic oligonucleotide
cuccaaacgcugggaccug

SEQ ID NO: 2706904 - RNA, 19 nt, Artificial Sequence
  Description of Artificial Sequence: Synthetic oligonucleotide
ccucuaggaugucugagcu

SEQ ID NO: 2706905 - RNA, 19 nt, Artificial Sequence
  Description of Artificial Sequence: Synthetic oligonucleotide
ggcuuggaaugguugucua

SEQ ID NO: 2706906 - RNA, 19 nt, Artificial Sequence
  Description of Artificial Sequence: Synthetic oligonucleotide
caguacauguuguggcauu

SEQ ID NO: 2706907 - RNA, 19 nt, Artificial Sequence
  Description of Artificial Sequence: Synthetic oligonucleotide
caucgguaugucccagagu

SEQ ID NO: 2706908 - RNA, 19 nt, Artificial Sequence
  Description of Artificial Sequence: Synthetic oligonucleotide
cuuccccauggacaauggu

SEQ ID NO: 2706909 - RNA, 19 nt, Artificial Sequence
  Description of Artificial Sequence: Synthetic oligonucleotide
cuugccccaccucuaggau

SEQ ID NO: 2706910 - RNA, 19 nt, Artificial Sequence
  Description of Artificial Sequence: Synthetic oligonucleotide
cugagacagcucagcucaa

SEQ ID NO: 2706911 - RNA, 19 nt, Artificial Sequence
  Description of Artificial Sequence: Synthetic oligonucleotide
acgcaagcuuccagguaaa

SEQ ID NO: 2706912 - RNA, 19 nt, Artificial Sequence
  Description of Artificial Sequence: Synthetic oligonucleotide
cagcagcugcacaucacau

SEQ ID NO: 2706913 - RNA, 19 nt, Artificial Sequence
  Description of Artificial Sequence: Synthetic oligonucleotide
ccucacagacggucucuuc

SEQ ID NO: 2706914 - RNA, 19 nt, Artificial Sequence
  Description of Artificial Sequence: Synthetic oligonucleotide
cccacagauccaguugguc

SEQ ID NO: 2706915 - RNA, 19 nt, Artificial Sequence
  Description of Artificial Sequence: Synthetic oligonucleotide
caauggugaaauggagcau

SEQ ID NO: 2706916 - RNA, 19 nt, Artificial Sequence
  Description of Artificial Sequence: Synthetic oligonucleotide
gcacaucacaucgguaugu

SEQ ID NO: 2706917 - RNA, 19 nt, Artificial Sequence
  Description of Artificial Sequence: Synthetic oligonucleotide
gaguuggcucggaaggguu

SEQ ID NO: 2706918 - RNA, 19 nt, Artificial Sequence
  Description of Artificial Sequence: Synthetic oligonucleotide
cagcucagcucaaacucuu

SEQ ID NO: 2706919 - RNA, 19 nt, Artificial Sequence
  Description of Artificial Sequence: Synthetic oligonucleotide
cucacuccaucaggaccca

SEQ ID NO: 2706920 - RNA, 19 nt, Artificial Sequence
  Description of Artificial Sequence: Synthetic oligonucleotide
acucuuccccauggacaau

SEQ ID NO: 2706921 - RNA, 19 nt, Artificial Sequence
  Description of Artificial Sequence: Synthetic oligonucleotide
ccaaacgcugggaccugca

SEQ ID NO: 2706922 - RNA, 19 nt, Artificial Sequence
  Description of Artificial Sequence: Synthetic oligonucleotide
cuuguacgccaaggccaca

SEQ ID NO: 2706923 - RNA, 19 nt, Artificial Sequence
  Description of Artificial Sequence: Synthetic oligonucleotide
ccaccucuaggaugucuga

SEQ ID NO: 2706924 - RNA, 19 nt, Artificial Sequence
  Description of Artificial Sequence: Synthetic oligonucleotide
gguaaggcuuggaaugguu

SEQ ID NO: 2706925 - RNA, 19 nt, Artificial Sequence
  Description of Artificial Sequence: Synthetic oligonucleotide
guaaagcggaaagcuucuu

SEQ ID NO: 2706926 - RNA, 19 nt, Artificial Sequence
  Description of Artificial Sequence: Synthetic oligonucleotide
guccucagugagggacuga

SEQ ID NO: 2706927 - RNA, 19 nt, Artificial Sequence
  Description of Artificial Sequence: Synthetic oligonucleotide
gguaugucccagagucaua

SEQ ID NO: 2706928 - RNA, 19 nt, Artificial Sequence
  Description of Artificial Sequence: Synthetic oligonucleotide
cccacagcuuguuguagcu

SEQ ID NO: 2706929 - RNA, 19 nt, Artificial Sequence
  Description of Artificial Sequence: Synthetic oligonucleotide
ccccgacgcaagcuuccag

SEQ ID NO: 2706930 - RNA, 19 nt, Artificial Sequence
  Description of Artificial Sequence: Synthetic oligonucleotide
gcugcacaucacaucggua

SEQ ID NO: 2706931 - RNA, 19 nt, Artificial Sequence
  Description of Artificial Sequence: Synthetic oligonucleotide
cggguuuaaaucgcagaaa

SEQ ID NO: 2706932 - RNA, 19 nt, Artificial Sequence
  Description of Artificial Sequence: Synthetic oligonucleotide
ccgacgcaagcuuccaggu

SEQ ID NO: 2706933 - RNA, 19 nt, Artificial Sequence
  Description of Artificial Sequence: Synthetic oligonucleotide
gccacauguuacaguacau

SEQ ID NO: 2706934 - RNA, 19 nt, Artificial Sequence
  Description of Artificial Sequence: Synthetic oligonucleotide
gacccaccucacagacggu

SEQ ID NO: 2706935 - RNA, 19 nt, Artificial Sequence
  Description of Artificial Sequence: Synthetic oligonucleotide
cagcuuguuguagcuucuu

SEQ ID NO: 2706936 - RNA, 19 nt, Artificial Sequence
  Description of Artificial Sequence: Synthetic oligonucleotide
cccagcccucaucuacuaa

SEQ ID NO: 2706937 - RNA, 19 nt, Artificial Sequence
  Description of Artificial Sequence: Synthetic oligonucleotide
cgguaugucccagagucau

SEQ ID NO: 2706938 - RNA, 19 nt, Artificial Sequence
  Description of Artificial Sequence: Synthetic oligonucleotide
gccccgacgcaagcuucca

SEQ ID NO: 2706939 - RNA, 19 nt, Artificial Sequence
  Description of Artificial Sequence: Synthetic oligonucleotide
cgacgcaagcuuccaggua

SEQ ID NO: 2706940 - RNA, 19 nt, Artificial Sequence
  Description of Artificial Sequence: Synthetic oligonucleotide
ccacagcuuguuguagcuu

SEQ ID NO: 2706941 - RNA, 19 nt, Artificial Sequence
  Description of Artificial Sequence: Synthetic oligonucleotide
gccccaccucuaggauguc

SEQ ID NO: 2706942 - RNA, 19 nt, Artificial Sequence
  Description of Artificial Sequence: Synthetic oligonucleotide
aacucuauugcucccaggg

SEQ ID NO: 2706943 - RNA, 19 nt, Artificial Sequence
  Description of Artificial Sequence: Synthetic oligonucleotide
aaauucaugacgaagucuc

SEQ ID NO: 2706944 - RNA, 19 nt, Artificial Sequence
  Description of Artificial Sequence: Synthetic oligonucleotide
auauaugccauccacaaug

SEQ ID NO: 2706945 - RNA, 19 nt, Artificial Sequence
  Description of Artificial Sequence: Synthetic oligonucleotide
aauacucucucucucaaga

SEQ ID NO: 2706946 - RNA, 19 nt, Artificial Sequence
  Description of Artificial Sequence: Synthetic oligonucleotide
aacauaagguucuuucguc

SEQ ID NO: 2706947 - RNA, 19 nt, Artificial Sequence
  Description of Artificial Sequence: Synthetic oligonucleotide
aucagagaauuucucauac

SEQ ID NO: 2706948 - RNA, 19 nt, Artificial Sequence
  Description of Artificial Sequence: Synthetic oligonucleotide
cucagaaucaaauucauga

SEQ ID NO: 2706949 - RNA, 19 nt, Artificial Sequence
  Description of Artificial Sequence: Synthetic oligonucleotide
ugcugaaacggcaucagag

SEQ ID NO: 2706950 - RNA, 19 nt, Artificial Sequence
  Description of Artificial Sequence: Synthetic oligonucleotide
uuucucauacagcugguag

SEQ ID NO: 2706951 - RNA, 19 nt, Artificial Sequence
  Description of Artificial Sequence: Synthetic oligonucleotide
ucuguugcugcugaaacgg

SEQ ID NO: 2706952 - RNA, 19 nt, Artificial Sequence
  Description of Artificial Sequence: Synthetic oligonucleotide
uccacuguccagcagaggc

SEQ ID NO: 2706953 - RNA, 19 nt, Artificial Sequence
  Description of Artificial Sequence: Synthetic oligonucleotide
agucucuggauauuggagg

SEQ ID NO: 2706954 - RNA, 19 nt, Artificial Sequence
  Description of Artificial Sequence: Synthetic oligonucleotide
agaauggaugucuugaaca

SEQ ID NO: 2706955 - RNA, 19 nt, Artificial Sequence
  Description of Artificial Sequence: Synthetic oligonucleotide
aacggcaucagagaauuuc

SEQ ID NO: 2706956 - RNA, 19 nt, Artificial Sequence
  Description of Artificial Sequence: Synthetic oligonucleotide
ugugcagcuuugaagaacc

SEQ ID NO: 2706957 - RNA, 19 nt, Artificial Sequence
  Description of Artificial Sequence: Synthetic oligonucleotide
cagaaucaaauucaugacg

SEQ ID NO: 2706958 - RNA, 19 nt, Artificial Sequence
  Description of Artificial Sequence: Synthetic oligonucleotide
acagcuuacagagggagcc

SEQ ID NO: 2706959 - RNA, 19 nt, Artificial Sequence
  Description of Artificial Sequence: Synthetic oligonucleotide
cagagaauuucucauacag

SEQ ID NO: 2706960 - RNA, 19 nt, Artificial Sequence
  Description of Artificial Sequence: Synthetic oligonucleotide
uucaugacgaagucucugg

SEQ ID NO: 2706961 - RNA, 19 nt, Artificial Sequence
  Description of Artificial Sequence: Synthetic oligonucleotide
agaauucagaaggugcucc

SEQ ID NO: 2706962 - RNA, 19 nt, Artificial Sequence
  Description of Artificial Sequence: Synthetic oligonucleotide
uugaacauaagguucuuuc

SEQ ID NO: 2706963 - RNA, 19 nt, Artificial Sequence
  Description of Artificial Sequence: Synthetic oligonucleotide
auuggaggcaacuccagag

SEQ ID NO: 2706964 - RNA, 19 nt, Artificial Sequence
  Description of Artificial Sequence: Synthetic oligonucleotide
ucucucucaagauuccccg

SEQ ID NO: 2706965 - RNA, 19 nt, Artificial Sequence
  Description of Artificial Sequence: Synthetic oligonucleotide
uuaucaaccguucuucauc

SEQ ID NO: 2706966 - RNA, 19 nt, Artificial Sequence
  Description of Artificial Sequence: Synthetic oligonucleotide
uguucuguagugugguggg

SEQ ID NO: 2706967 - RNA, 19 nt, Artificial Sequence
  Description of Artificial Sequence: Synthetic oligonucleotide
caugcucagaaucaaauuc

SEQ ID NO: 2706968 - RNA, 19 nt, Artificial Sequence
  Description of Artificial Sequence: Synthetic oligonucleotide
aauucagaaggugcucccc

SEQ ID NO: 2706969 - RNA, 19 nt, Artificial Sequence
  Description of Artificial Sequence: Synthetic oligonucleotide
agguucuuucgucaggucg

SEQ ID NO: 2706970 - RNA, 19 nt, Artificial Sequence
  Description of Artificial Sequence: Synthetic oligonucleotide
uguggcaaggacaacucug

SEQ ID NO: 2706971 - RNA, 19 nt, Artificial Sequence
  Description of Artificial Sequence: Synthetic oligonucleotide
agagacaagugccucauca

SEQ ID NO: 2706972 - RNA, 19 nt, Artificial Sequence
  Description of Artificial Sequence: Synthetic oligonucleotide
agacaagugccucaucagg

SEQ ID NO: 2706973 - RNA, 19 nt, Artificial Sequence
  Description of Artificial Sequence: Synthetic oligonucleotide
ucauacagcugguagguga

SEQ ID NO: 2706974 - RNA, 19 nt, Artificial Sequence
  Description of Artificial Sequence: Synthetic oligonucleotide
aaccuggggcacuucaaac

SEQ ID NO: 2706975 - RNA, 19 nt, Artificial Sequence
  Description of Artificial Sequence: Synthetic oligonucleotide
gucacaaccaaauacucuc

SEQ ID NO: 2706976 - RNA, 19 nt, Artificial Sequence
  Description of Artificial Sequence: Synthetic oligonucleotide
gcaaggacaacucuguggg

SEQ ID NO: 2706977 - RNA, 19 nt, Artificial Sequence
  Description of Artificial Sequence: Synthetic oligonucleotide
uauaugccauccacaaugc

SEQ ID NO: 2706978 - RNA, 19 nt, Artificial Sequence
  Description of Artificial Sequence: Synthetic oligonucleotide
accaaauacucucucucuc

SEQ ID NO: 2706979 - RNA, 19 nt, Artificial Sequence
  Description of Artificial Sequence: Synthetic oligonucleotide
aaauacucucucucucaag

SEQ ID NO: 2706980 - RNA, 19 nt, Artificial Sequence
  Description of Artificial Sequence: Synthetic oligonucleotide
aaccaaauacucucucucu

SEQ ID NO: 2706981 - RNA, 19 nt, Artificial Sequence
  Description of Artificial Sequence: Synthetic oligonucleotide
aucaaauucaugacgaagu

SEQ ID NO: 2706982 - RNA, 19 nt, Artificial Sequence
  Description of Artificial Sequence: Synthetic oligonucleotide
ucaaauucaugacgaaguc

SEQ ID NO: 2706983 - RNA, 19 nt, Artificial Sequence
  Description of Artificial Sequence: Synthetic oligonucleotide
aacuccaguguucuguagu

SEQ ID NO: 2706984 - RNA, 19 nt, Artificial Sequence
  Description of Artificial Sequence: Synthetic oligonucleotide
cacaaugccauaccucucg

SEQ ID NO: 2706985 - RNA, 19 nt, Artificial Sequence
  Description of Artificial Sequence: Synthetic oligonucleotide
accguucuucaucuguugc

SEQ ID NO: 2706986 - RNA, 19 nt, Artificial Sequence
  Description of Artificial Sequence: Synthetic oligonucleotide
ucaaccguucuucaucugu

SEQ ID NO: 2706987 - RNA, 19 nt, Artificial Sequence
  Description of Artificial Sequence: Synthetic oligonucleotide
auaagguucuuucgucagg

SEQ ID NO: 2706988 - RNA, 19 nt, Artificial Sequence
  Description of Artificial Sequence: Synthetic oligonucleotide
acucuauugcucccagggc

SEQ ID NO: 2706989 - RNA, 19 nt, Artificial Sequence
  Description of Artificial Sequence: Synthetic oligonucleotide
ugguaguccgcuagaagag

SEQ ID NO: 2706990 - RNA, 19 nt, Artificial Sequence
  Description of Artificial Sequence: Synthetic oligonucleotide
uucugcguggaucugugug

SEQ ID NO: 2706991 - RNA, 19 nt, Artificial Sequence
  Description of Artificial Sequence: Synthetic oligonucleotide
ucucgaugaaugcugugca

SEQ ID NO: 2706992 - RNA, 19 nt, Artificial Sequence
  Description of Artificial Sequence: Synthetic oligonucleotide
uccgcuagaagagacaagu

SEQ ID NO: 2706993 - RNA, 19 nt, Artificial Sequence
  Description of Artificial Sequence: Synthetic oligonucleotide
gaggcaacuccagagagcc

SEQ ID NO: 2706994 - RNA, 19 nt, Artificial Sequence
  Description of Artificial Sequence: Synthetic oligonucleotide
ugugucaggauguggcaag

SEQ ID NO: 2706995 - RNA, 19 nt, Artificial Sequence
  Description of Artificial Sequence: Synthetic oligonucleotide
ucaaacccagaauucagaa

SEQ ID NO: 2706996 - RNA, 19 nt, Artificial Sequence
  Description of Artificial Sequence: Synthetic oligonucleotide
uggaggcaacuccagagag

SEQ ID NO: 2706997 - RNA, 19 nt, Artificial Sequence
  Description of Artificial Sequence: Synthetic oligonucleotide
aaugcugugguaguccgcu

SEQ ID NO: 2706998 - RNA, 19 nt, Artificial Sequence
  Description of Artificial Sequence: Synthetic oligonucleotide
uaucaaccguucuucaucu

SEQ ID NO: 2706999 - RNA, 19 nt, Artificial Sequence
  Description of Artificial Sequence: Synthetic oligonucleotide
uuuuaucaaccguucuuca

SEQ ID NO: 2707000 - RNA, 19 nt, Artificial Sequence
  Description of Artificial Sequence: Synthetic oligonucleotide
ugugguaguccgcuagaag

SEQ ID NO: 2707001 - RNA, 19 nt, Artificial Sequence
  Description of Artificial Sequence: Synthetic oligonucleotide
augucuugaacauaagguu

SEQ ID NO: 2707002 - RNA, 19 nt, Artificial Sequence
  Description of Artificial Sequence: Synthetic oligonucleotide
ugacccaaugcugugguag

SEQ ID NO: 2707003 - RNA, 19 nt, Artificial Sequence
  Description of Artificial Sequence: Synthetic oligonucleotide
aucuguugcugcugaaacg

SEQ ID NO: 2707004 - RNA, 19 nt, Artificial Sequence
  Description of Artificial Sequence: Synthetic oligonucleotide
uagaacaguccacugucca

SEQ ID NO: 2707005 - RNA, 19 nt, Artificial Sequence
  Description of Artificial Sequence: Synthetic oligonucleotide
cauaagguucuuucgucag

SEQ ID NO: 2707006 - RNA, 19 nt, Artificial Sequence
  Description of Artificial Sequence: Synthetic oligonucleotide
uccaguguucuguagugug

SEQ ID NO: 2707007 - RNA, 19 nt, Artificial Sequence
  Description of Artificial Sequence: Synthetic oligonucleotide
cuuugaagaaccuggggca

SEQ ID NO: 2707008 - RNA, 19 nt, Artificial Sequence
  Description of Artificial Sequence: Synthetic oligonucleotide
ucaacucuauugcucccag

SEQ ID NO: 2707009 - RNA, 19 nt, Artificial Sequence
  Description of Artificial Sequence: Synthetic oligonucleotide
auaugccauccacaaugcc

SEQ ID NO: 2707010 - RNA, 19 nt, Artificial Sequence
  Description of Artificial Sequence: Synthetic oligonucleotide
gugguaguccgcuagaaga

SEQ ID NO: 2707011 - RNA, 19 nt, Artificial Sequence
  Description of Artificial Sequence: Synthetic oligonucleotide
uaccucucgaugaaugcug

SEQ ID NO: 2707012 - RNA, 19 nt, Artificial Sequence
  Description of Artificial Sequence: Synthetic oligonucleotide
gagacaagugccucaucag

SEQ ID NO: 2707013 - RNA, 19 nt, Artificial Sequence
  Description of Artificial Sequence: Synthetic oligonucleotide
cauaccucucgaugaaugc

SEQ ID NO: 2707014 - RNA, 19 nt, Artificial Sequence
  Description of Artificial Sequence: Synthetic oligonucleotide
cagagagccgauauaugcc

SEQ ID NO: 2707015 - RNA, 19 nt, Artificial Sequence
  Description of Artificial Sequence: Synthetic oligonucleotide
gaauucagaaggugcuccc

SEQ ID NO: 2707016 - RNA, 19 nt, Artificial Sequence
  Description of Artificial Sequence: Synthetic oligonucleotide
gauauuggaggcaacucca

SEQ ID NO: 2707017 - RNA, 19 nt, Artificial Sequence
  Description of Artificial Sequence: Synthetic oligonucleotide
agagagccgauauaugcca

SEQ ID NO: 2707018 - RNA, 19 nt, Artificial Sequence
  Description of Artificial Sequence: Synthetic oligonucleotide
acaaccaaauacucucucu

SEQ ID NO: 2707019 - RNA, 19 nt, Artificial Sequence
  Description of Artificial Sequence: Synthetic oligonucleotide
uuugggaguucccggaagu

SEQ ID NO: 2707020 - RNA, 19 nt, Artificial Sequence
  Description of Artificial Sequence: Synthetic oligonucleotide
ggauauuggaggcaacucc

SEQ ID NO: 2707021 - RNA, 19 nt, Artificial Sequence
  Description of Artificial Sequence: Synthetic oligonucleotide
ucucucaagauuccccgcu

SEQ ID NO: 2707022 - RNA, 19 nt, Artificial Sequence
  Description of Artificial Sequence: Synthetic oligonucleotide
ucgaugaaugcugugcagc

SEQ ID NO: 2707023 - RNA, 19 nt, Artificial Sequence
  Description of Artificial Sequence: Synthetic oligonucleotide
uuuaucaaccguucuucau

SEQ ID NO: 2707024 - RNA, 19 nt, Artificial Sequence
  Description of Artificial Sequence: Synthetic oligonucleotide
ugcugugguaguccgcuag

SEQ ID NO: 2707025 - RNA, 19 nt, Artificial Sequence
  Description of Artificial Sequence: Synthetic oligonucleotide
cauacagcugguaggugag

SEQ ID NO: 2707026 - RNA, 19 nt, Artificial Sequence
  Description of Artificial Sequence: Synthetic oligonucleotide
ggaucugugugucaggaug

SEQ ID NO: 2707027 - RNA, 19 nt, Artificial Sequence
  Description of Artificial Sequence: Synthetic oligonucleotide
uauuggaggcaacuccaga

SEQ ID NO: 2707028 - RNA, 19 nt, Artificial Sequence
  Description of Artificial Sequence: Synthetic oligonucleotide
gaacaguccacuguccagc

SEQ ID NO: 2707029 - RNA, 19 nt, Artificial Sequence
  Description of Artificial Sequence: Synthetic oligonucleotide
ggcaaggacaacucugugg

SEQ ID NO: 2707030 - RNA, 19 nt, Artificial Sequence
  Description of Artificial Sequence: Synthetic oligonucleotide
uaagguucuuucgucaggu

SEQ ID NO: 2707031 - RNA, 19 nt, Artificial Sequence
  Description of Artificial Sequence: Synthetic oligonucleotide
caucuguugcugcugaaac

SEQ ID NO: 2707032 - RNA, 19 nt, Artificial Sequence
  Description of Artificial Sequence: Synthetic oligonucleotide
uuggaggcaacuccagaga

SEQ ID NO: 2707033 - RNA, 19 nt, Artificial Sequence
  Description of Artificial Sequence: Synthetic oligonucleotide
ucucaagauuccccgcugc

SEQ ID NO: 2707034 - RNA, 19 nt, Artificial Sequence
  Description of Artificial Sequence: Synthetic oligonucleotide
aaccguucuucaucuguug

SEQ ID NO: 2707035 - RNA, 19 nt, Artificial Sequence
  Description of Artificial Sequence: Synthetic oligonucleotide
guguucuguaguguggugg

SEQ ID NO: 2707036 - RNA, 19 nt, Artificial Sequence
  Description of Artificial Sequence: Synthetic oligonucleotide
ucagagaauuucucauaca

SEQ ID NO: 2707037 - RNA, 19 nt, Artificial Sequence
  Description of Artificial Sequence: Synthetic oligonucleotide
auagaacaguccacugucc

SEQ ID NO: 2707038 - RNA, 19 nt, Artificial Sequence
  Description of Artificial Sequence: Synthetic oligonucleotide
gcuagaagagacaagugcc

SEQ ID NO: 2707039 - RNA, 19 nt, Artificial Sequence
  Description of Artificial Sequence: Synthetic oligonucleotide
gucucuggauauuggaggc

SEQ ID NO: 2707040 - RNA, 19 nt, Artificial Sequence
  Description of Artificial Sequence: Synthetic oligonucleotide
ugaaacggcaucagagaau

SEQ ID NO: 2707041 - RNA, 19 nt, Artificial Sequence
  Description of Artificial Sequence: Synthetic oligonucleotide
cucucgaugaaugcugugc

SEQ ID NO: 2707042 - RNA, 19 nt, Artificial Sequence
  Description of Artificial Sequence: Synthetic oligonucleotide
ucaugacgaagucucugga

SEQ ID NO: 2707043 - RNA, 19 nt, Artificial Sequence
  Description of Artificial Sequence: Synthetic oligonucleotide
gaggguuugggaguucccg

SEQ ID NO: 2707044 - RNA, 19 nt, Artificial Sequence
  Description of Artificial Sequence: Synthetic oligonucleotide
gcuucaacucuauugcucc

SEQ ID NO: 2707045 - RNA, 19 nt, Artificial Sequence
  Description of Artificial Sequence: Synthetic oligonucleotide
uacagcuuacagagggagc

SEQ ID NO: 2707046 - RNA, 19 nt, Artificial Sequence
  Description of Artificial Sequence: Synthetic oligonucleotide
augccauaccucucgauga

SEQ ID NO: 2707047 - RNA, 19 nt, Artificial Sequence
  Description of Artificial Sequence: Synthetic oligonucleotide
ucacaaccaaauacucucu

SEQ ID NO: 2707048 - RNA, 19 nt, Artificial Sequence
  Description of Artificial Sequence: Synthetic oligonucleotide
gaacauaagguucuuucgu

SEQ ID NO: 2707049 - RNA, 19 nt, Artificial Sequence
  Description of Artificial Sequence: Synthetic oligonucleotide
acuccaguguucuguagug

SEQ ID NO: 2707050 - RNA, 19 nt, Artificial Sequence
  Description of Artificial Sequence: Synthetic oligonucleotide
ucugcguggaucugugugu

SEQ ID NO: 2707051 - RNA, 19 nt, Artificial Sequence
  Description of Artificial Sequence: Synthetic oligonucleotide
augacgaagucucuggaua

SEQ ID NO: 2707052 - RNA, 19 nt, Artificial Sequence
  Description of Artificial Sequence: Synthetic oligonucleotide
agagccgauauaugccauc

SEQ ID NO: 2707053 - RNA, 19 nt, Artificial Sequence
  Description of Artificial Sequence: Synthetic oligonucleotide
uuccccgcugcuuuuagcu

SEQ ID NO: 2707054 - RNA, 19 nt, Artificial Sequence
  Description of Artificial Sequence: Synthetic oligonucleotide
ucaggaacuccaguguucu

SEQ ID NO: 2707055 - RNA, 19 nt, Artificial Sequence
  Description of Artificial Sequence: Synthetic oligonucleotide
aacaguccacuguccagca

SEQ ID NO: 2707056 - RNA, 19 nt, Artificial Sequence
  Description of Artificial Sequence: Synthetic oligonucleotide
augaaugcugugcagcuuu

SEQ ID NO: 2707057 - RNA, 19 nt, Artificial Sequence
  Description of Artificial Sequence: Synthetic oligonucleotide
guacagcuuacagagggag

SEQ ID NO: 2707058 - RNA, 19 nt, Artificial Sequence
  Description of Artificial Sequence: Synthetic oligonucleotide
aagagacaagugccucauc

SEQ ID NO: 2707059 - RNA, 19 nt, Artificial Sequence
  Description of Artificial Sequence: Synthetic oligonucleotide
ugcucagaaucaaauucau

SEQ ID NO: 2707060 - RNA, 19 nt, Artificial Sequence
  Description of Artificial Sequence: Synthetic oligonucleotide
gguucuuucgucaggucgg

SEQ ID NO: 2707061 - RNA, 19 nt, Artificial Sequence
  Description of Artificial Sequence: Synthetic oligonucleotide
aagugccucaucaggaacu

SEQ ID NO: 2707062 - RNA, 19 nt, Artificial Sequence
  Description of Artificial Sequence: Synthetic oligonucleotide
cagaauggaugucuugaac

SEQ ID NO: 2707063 - RNA, 19 nt, Artificial Sequence
  Description of Artificial Sequence: Synthetic oligonucleotide
auggaugucuugaacauaa

SEQ ID NO: 2707064 - RNA, 19 nt, Artificial Sequence
  Description of Artificial Sequence: Synthetic oligonucleotide
ugacgaagucucuggauau

SEQ ID NO: 2707065 - RNA, 19 nt, Artificial Sequence
  Description of Artificial Sequence: Synthetic oligonucleotide
cccagaauucagaaggugc

SEQ ID NO: 2707066 - RNA, 19 nt, Artificial Sequence
  Description of Artificial Sequence: Synthetic oligonucleotide
auucaugacgaagucucug

SEQ ID NO: 2707067 - RNA, 19 nt, Artificial Sequence
  Description of Artificial Sequence: Synthetic oligonucleotide
uacucucucucucaagauu

SEQ ID NO: 2707068 - RNA, 19 nt, Artificial Sequence
  Description of Artificial Sequence: Synthetic oligonucleotide
ugguaggugagcagagggu

SEQ ID NO: 2707069 - RNA, 19 nt, Artificial Sequence
  Description of Artificial Sequence: Synthetic oligonucleotide
gagccgauauaugccaucc

SEQ ID NO: 2707070 - RNA, 19 nt, Artificial Sequence
  Description of Artificial Sequence: Synthetic oligonucleotide
gaaguacagcuuacagagg

SEQ ID NO: 2707071 - RNA, 19 nt, Artificial Sequence
  Description of Artificial Sequence: Synthetic oligonucleotide
aggacaacucugugggcag

SEQ ID NO: 2707072 - RNA, 19 nt, Artificial Sequence
  Description of Artificial Sequence: Synthetic oligonucleotide
uacagagggagcccacaga

SEQ ID NO: 2707073 - RNA, 19 nt, Artificial Sequence
  Description of Artificial Sequence: Synthetic oligonucleotide
gacaagugccucaucagga

SEQ ID NO: 2707074 - RNA, 19 nt, Artificial Sequence
  Description of Artificial Sequence: Synthetic oligonucleotide
uucaacucuauugcuccca

SEQ ID NO: 2707075 - RNA, 19 nt, Artificial Sequence
  Description of Artificial Sequence: Synthetic oligonucleotide
augcucagaaucaaauuca

SEQ ID NO: 2707076 - RNA, 19 nt, Artificial Sequence
  Description of Artificial Sequence: Synthetic oligonucleotide
uucccggaaguacagcuua

SEQ ID NO: 2707077 - RNA, 19 nt, Artificial Sequence
  Description of Artificial Sequence: Synthetic oligonucleotide
gagggagcccacagaaugg

SEQ ID NO: 2707078 - RNA, 19 nt, Artificial Sequence
  Description of Artificial Sequence: Synthetic oligonucleotide
ccaggucacaaccaaauac

SEQ ID NO: 2707079 - RNA, 19 nt, Artificial Sequence
  Description of Artificial Sequence: Synthetic oligonucleotide
ugaaugcugugcagcuuug

SEQ ID NO: 2707080 - RNA, 19 nt, Artificial Sequence
  Description of Artificial Sequence: Synthetic oligonucleotide
guuugggaguucccggaag

SEQ ID NO: 2707081 - RNA, 19 nt, Artificial Sequence
  Description of Artificial Sequence: Synthetic oligonucleotide
cuucaacucuauugcuccc

SEQ ID NO: 2707082 - RNA, 19 nt, Artificial Sequence
  Description of Artificial Sequence: Synthetic oligonucleotide
acaugcucagaaucaaauu

SEQ ID NO: 2707083 - RNA, 19 nt, Artificial Sequence
  Description of Artificial Sequence: Synthetic oligonucleotide
cauucugcguggaucugug

SEQ ID NO: 2707084 - RNA, 19 nt, Artificial Sequence
  Description of Artificial Sequence: Synthetic oligonucleotide
acagcugguaggugagcag

SEQ ID NO: 2707085 - RNA, 19 nt, Artificial Sequence
  Description of Artificial Sequence: Synthetic oligonucleotide
cucgaugaaugcugugcag

SEQ ID NO: 2707086 - RNA, 19 nt, Artificial Sequence
  Description of Artificial Sequence: Synthetic oligonucleotide
aauuucucauacagcuggu

SEQ ID NO: 2707087 - RNA, 19 nt, Artificial Sequence
  Description of Artificial Sequence: Synthetic oligonucleotide
aucaggaacuccaguguuc

SEQ ID NO: 2707088 - RNA, 19 nt, Artificial Sequence
  Description of Artificial Sequence: Synthetic oligonucleotide
gaauggaugucuugaacau

SEQ ID NO: 2707089 - RNA, 19 nt, Artificial Sequence
  Description of Artificial Sequence: Synthetic oligonucleotide
gauguggcaaggacaacuc

SEQ ID NO: 2707090 - RNA, 19 nt, Artificial Sequence
  Description of Artificial Sequence: Synthetic oligonucleotide
acaagugccucaucaggaa

SEQ ID NO: 2707091 - RNA, 19 nt, Artificial Sequence
  Description of Artificial Sequence: Synthetic oligonucleotide
auccacaaugccauaccuc

SEQ ID NO: 2707092 - RNA, 19 nt, Artificial Sequence
  Description of Artificial Sequence: Synthetic oligonucleotide
uggauauuggaggcaacuc

SEQ ID NO: 2707093 - RNA, 19 nt, Artificial Sequence
  Description of Artificial Sequence: Synthetic oligonucleotide
caacucugugggcaggaag

SEQ ID NO: 2707094 - RNA, 19 nt, Artificial Sequence
  Description of Artificial Sequence: Synthetic oligonucleotide
uaguccgcuagaagagaca

SEQ ID NO: 2707095 - RNA, 19 nt, Artificial Sequence
  Description of Artificial Sequence: Synthetic oligonucleotide
acgaagucucuggauauug

SEQ ID NO: 2707096 - RNA, 19 nt, Artificial Sequence
  Description of Artificial Sequence: Synthetic oligonucleotide
uagaagagacaagugccuc

SEQ ID NO: 2707097 - RNA, 19 nt, Artificial Sequence
  Description of Artificial Sequence: Synthetic oligonucleotide
gaacuccaguguucuguag

SEQ ID NO: 2707098 - RNA, 19 nt, Artificial Sequence
  Description of Artificial Sequence: Synthetic oligonucleotide
agugccucaucaggaacuc

SEQ ID NO: 2707099 - RNA, 19 nt, Artificial Sequence
  Description of Artificial Sequence: Synthetic oligonucleotide
aauggaugucuugaacaua

SEQ ID NO: 2707100 - RNA, 19 nt, Artificial Sequence
  Description of Artificial Sequence: Synthetic oligonucleotide
auaccucucgaugaaugcu

SEQ ID NO: 2707101 - RNA, 19 nt, Artificial Sequence
  Description of Artificial Sequence: Synthetic oligonucleotide
gauuccccgcugcuuuuag

SEQ ID NO: 2707102 - RNA, 19 nt, Artificial Sequence
  Description of Artificial Sequence: Synthetic oligonucleotide
ucauucugcguggaucugu

SEQ ID NO: 2707103 - RNA, 19 nt, Artificial Sequence
  Description of Artificial Sequence: Synthetic oligonucleotide
ucuggauauuggaggcaac

SEQ ID NO: 2707104 - RNA, 19 nt, Artificial Sequence
  Description of Artificial Sequence: Synthetic oligonucleotide
aguguucuguaguguggug

SEQ ID NO: 2707105 - RNA, 19 nt, Artificial Sequence
  Description of Artificial Sequence: Synthetic oligonucleotide
ggcaucagagaauuucuca

SEQ ID NO: 2707106 - RNA, 19 nt, Artificial Sequence
  Description of Artificial Sequence: Synthetic oligonucleotide
caagugccucaucaggaac

SEQ ID NO: 2707107 - RNA, 19 nt, Artificial Sequence
  Description of Artificial Sequence: Synthetic oligonucleotide
uggcaaggacaacucugug

SEQ ID NO: 2707108 - RNA, 19 nt, Artificial Sequence
  Description of Artificial Sequence: Synthetic oligonucleotide
caacucuauugcucccagg

SEQ ID NO: 2707109 - RNA, 19 nt, Artificial Sequence
  Description of Artificial Sequence: Synthetic oligonucleotide
cugaaacggcaucagagaa

SEQ ID NO: 2707110 - RNA, 19 nt, Artificial Sequence
  Description of Artificial Sequence: Synthetic oligonucleotide
ugccauaccucucgaugaa

SEQ ID NO: 2707111 - RNA, 19 nt, Artificial Sequence
  Description of Artificial Sequence: Synthetic oligonucleotide
ugggaguucccggaaguac

SEQ ID NO: 2707112 - RNA, 19 nt, Artificial Sequence
  Description of Artificial Sequence: Synthetic oligonucleotide
gccgauauaugccauccac

SEQ ID NO: 2707113 - RNA, 19 nt, Artificial Sequence
  Description of Artificial Sequence: Synthetic oligonucleotide
auauuggaggcaacuccag

SEQ ID NO: 2707114 - RNA, 19 nt, Artificial Sequence
  Description of Artificial Sequence: Synthetic oligonucleotide
cgcuagaagagacaagugc

SEQ ID NO: 2707115 - RNA, 19 nt, Artificial Sequence
  Description of Artificial Sequence: Synthetic oligonucleotide
aacccagaauucagaaggu

SEQ ID NO: 2707116 - RNA, 19 nt, Artificial Sequence
  Description of Artificial Sequence: Synthetic oligonucleotide
auacagcugguaggugagc

SEQ ID NO: 2707117 - RNA, 19 nt, Artificial Sequence
  Description of Artificial Sequence: Synthetic oligonucleotide
acaaugccauaccucucga

SEQ ID NO: 2707118 - RNA, 19 nt, Artificial Sequence
  Description of Artificial Sequence: Synthetic oligonucleotide
aguccgcuagaagagacaa

SEQ ID NO: 2707119 - RNA, 19 nt, Artificial Sequence
  Description of Artificial Sequence: Synthetic oligonucleotide
cagggcucauucugcgugg

SEQ ID NO: 2707120 - RNA, 19 nt, Artificial Sequence
  Description of Artificial Sequence: Synthetic oligonucleotide
gaaacggcaucagagaauu

SEQ ID NO: 2707121 - RNA, 19 nt, Artificial Sequence
  Description of Artificial Sequence: Synthetic oligonucleotide
cuagaagagacaagugccu

SEQ ID NO: 2707122 - RNA, 19 nt, Artificial Sequence
  Description of Artificial Sequence: Synthetic oligonucleotide
guaguccgcuagaagagac

SEQ ID NO: 2707123 - RNA, 19 nt, Artificial Sequence
  Description of Artificial Sequence: Synthetic oligonucleotide
cuggaugacaucauggauu

SEQ ID NO: 2707124 - RNA, 19 nt, Artificial Sequence
  Description of Artificial Sequence: Synthetic oligonucleotide
auguggcaaggacaacucu

SEQ ID NO: 2707125 - RNA, 19 nt, Artificial Sequence
  Description of Artificial Sequence: Synthetic oligonucleotide
gcugaaacggcaucagaga

SEQ ID NO: 2707126 - RNA, 19 nt, Artificial Sequence
  Description of Artificial Sequence: Synthetic oligonucleotide
ccaaugcugugguaguccg

SEQ ID NO: 2707127 - RNA, 19 nt, Artificial Sequence
  Description of Artificial Sequence: Synthetic oligonucleotide
cucucaagauuccccgcug

SEQ ID NO: 2707128 - RNA, 19 nt, Artificial Sequence
  Description of Artificial Sequence: Synthetic oligonucleotide
cucuauugcucccagggcu

SEQ ID NO: 2707129 - RNA, 19 nt, Artificial Sequence
  Description of Artificial Sequence: Synthetic oligonucleotide
caaggacaacucugugggc

SEQ ID NO: 2707130 - RNA, 19 nt, Artificial Sequence
  Description of Artificial Sequence: Synthetic oligonucleotide
caaauacucucucucucaa

SEQ ID NO: 2707131 - RNA, 19 nt, Artificial Sequence
  Description of Artificial Sequence: Synthetic oligonucleotide
ucucuggauauuggaggca

SEQ ID NO: 2707132 - RNA, 19 nt, Artificial Sequence
  Description of Artificial Sequence: Synthetic oligonucleotide
aggucggggacaugcucag

SEQ ID NO: 2707133 - RNA, 19 nt, Artificial Sequence
  Description of Artificial Sequence: Synthetic oligonucleotide
acggcaucagagaauuucu

SEQ ID NO: 2707134 - RNA, 19 nt, Artificial Sequence
  Description of Artificial Sequence: Synthetic oligonucleotide
caaugcugugguaguccgc

SEQ ID NO: 2707135 - RNA, 19 nt, Artificial Sequence
  Description of Artificial Sequence: Synthetic oligonucleotide
guucuuucgucaggucggg

SEQ ID NO: 2707136 - RNA, 19 nt, Artificial Sequence
  Description of Artificial Sequence: Synthetic oligonucleotide
gacaugcucagaaucaaau

SEQ ID NO: 2707137 - RNA, 19 nt, Artificial Sequence
  Description of Artificial Sequence: Synthetic oligonucleotide
cugugcagcuuugaagaac

SEQ ID NO: 2707138 - RNA, 19 nt, Artificial Sequence
  Description of Artificial Sequence: Synthetic oligonucleotide
ccauaccucucgaugaaug

SEQ ID NO: 2707139 - RNA, 19 nt, Artificial Sequence
  Description of Artificial Sequence: Synthetic oligonucleotide
caucagagaauuucucaua

SEQ ID NO: 2707140 - RNA, 19 nt, Artificial Sequence
  Description of Artificial Sequence: Synthetic oligonucleotide
ucaagauuccccgcugcuu

SEQ ID NO: 2707141 - RNA, 19 nt, Artificial Sequence
  Description of Artificial Sequence: Synthetic oligonucleotide
acccagaauucagaaggug

SEQ ID NO: 2707142 - RNA, 19 nt, Artificial Sequence
  Description of Artificial Sequence: Synthetic oligonucleotide
gucggggacaugcucagaa

SEQ ID NO: 2707143 - RNA, 19 nt, Artificial Sequence
  Description of Artificial Sequence: Synthetic oligonucleotide
uucuuucgucaggucgggg

SEQ ID NO: 2707144 - RNA, 19 nt, Artificial Sequence
  Description of Artificial Sequence: Synthetic oligonucleotide
cagaauucagaaggugcuc

SEQ ID NO: 2707145 - RNA, 19 nt, Artificial Sequence
  Description of Artificial Sequence: Synthetic oligonucleotide
uugcucccagggcucauuc

SEQ ID NO: 2707146 - RNA, 19 nt, Artificial Sequence
  Description of Artificial Sequence: Synthetic oligonucleotide
uugcugcugaaacggcauc

SEQ ID NO: 2707147 - RNA, 19 nt, Artificial Sequence
  Description of Artificial Sequence: Synthetic oligonucleotide
ugucaggauguggcaagga

SEQ ID NO: 2707148 - RNA, 19 nt, Artificial Sequence
  Description of Artificial Sequence: Synthetic oligonucleotide
gugucaggauguggcaagg

SEQ ID NO: 2707149 - RNA, 19 nt, Artificial Sequence
  Description of Artificial Sequence: Synthetic oligonucleotide
caggucggggacaugcuca

SEQ ID NO: 2707150 - RNA, 19 nt, Artificial Sequence
  Description of Artificial Sequence: Synthetic oligonucleotide
guucuguaguguggugggg

SEQ ID NO: 2707151 - RNA, 19 nt, Artificial Sequence
  Description of Artificial Sequence: Synthetic oligonucleotide
uuucgucaggucggggaca

SEQ ID NO: 2707152 - RNA, 19 nt, Artificial Sequence
  Description of Artificial Sequence: Synthetic oligonucleotide
gucuugaacauaagguucu

SEQ ID NO: 2707153 - RNA, 19 nt, Artificial Sequence
  Description of Artificial Sequence: Synthetic oligonucleotide
uucaucuguugcugcugaa

SEQ ID NO: 2707154 - RNA, 19 nt, Artificial Sequence
  Description of Artificial Sequence: Synthetic oligonucleotide
aucaaccguucuucaucug

SEQ ID NO: 2707155 - RNA, 19 nt, Artificial Sequence
  Description of Artificial Sequence: Synthetic oligonucleotide
agcuuacagagggagccca

SEQ ID NO: 2707156 - RNA, 19 nt, Artificial Sequence
  Description of Artificial Sequence: Synthetic oligonucleotide
ggcaacuccagagagccga

SEQ ID NO: 2707157 - RNA, 19 nt, Artificial Sequence
  Description of Artificial Sequence: Synthetic oligonucleotide
acccaaugcugugguaguc

SEQ ID NO: 2707158 - RNA, 19 nt, Artificial Sequence
  Description of Artificial Sequence: Synthetic oligonucleotide
ccauccacaaugccauacc

SEQ ID NO: 2707159 - RNA, 19 nt, Artificial Sequence
  Description of Artificial Sequence: Synthetic oligonucleotide
ccggaaguacagcuuacag

SEQ ID NO: 2707160 - RNA, 19 nt, Artificial Sequence
  Description of Artificial Sequence: Synthetic oligonucleotide
uggaucugugugucaggau

SEQ ID NO: 2707161 - RNA, 19 nt, Artificial Sequence
  Description of Artificial Sequence: Synthetic oligonucleotide
agccgauauaugccaucca

SEQ ID NO: 2707162 - RNA, 19 nt, Artificial Sequence
  Description of Artificial Sequence: Synthetic oligonucleotide
ccaaauacucucucucuca

SEQ ID NO: 2707163 - RNA, 19 nt, Artificial Sequence
  Description of Artificial Sequence: Synthetic oligonucleotide
caaauucaugacgaagucu

SEQ ID NO: 2707164 - RNA, 19 nt, Artificial Sequence
  Description of Artificial Sequence: Synthetic oligonucleotide
gacaacucugugggcagga

SEQ ID NO: 2707165 - RNA, 19 nt, Artificial Sequence
  Description of Artificial Sequence: Synthetic oligonucleotide
agcugguaggugagcagag

SEQ ID NO: 2707166 - RNA, 19 nt, Artificial Sequence
  Description of Artificial Sequence: Synthetic oligonucleotide
ucggggacaugcucagaau

SEQ ID NO: 2707167 - RNA, 19 nt, Artificial Sequence
  Description of Artificial Sequence: Synthetic oligonucleotide
ucuugaacauaagguucuu

SEQ ID NO: 2707168 - RNA, 19 nt, Artificial Sequence
  Description of Artificial Sequence: Synthetic oligonucleotide
ugcguggaucuguguguca

SEQ ID NO: 2707169 - RNA, 19 nt, Artificial Sequence
  Description of Artificial Sequence: Synthetic oligonucleotide
gcagaggcugcuucaacuc

SEQ ID NO: 2707170 - RNA, 19 nt, Artificial Sequence
  Description of Artificial Sequence: Synthetic oligonucleotide
auucugcguggaucugugu

SEQ ID NO: 2707171 - RNA, 19 nt, Artificial Sequence
  Description of Artificial Sequence: Synthetic oligonucleotide
aucugugugucaggaugug

SEQ ID NO: 2707172 - RNA, 19 nt, Artificial Sequence
  Description of Artificial Sequence: Synthetic oligonucleotide
agggagcccacagaaugga

SEQ ID NO: 2707173 - RNA, 19 nt, Artificial Sequence
  Description of Artificial Sequence: Synthetic oligonucleotide
ggaguucccggaaguacag

SEQ ID NO: 2707174 - RNA, 19 nt, Artificial Sequence
  Description of Artificial Sequence: Synthetic oligonucleotide
ccagggcucauucugcgug

SEQ ID NO: 2707175 - RNA, 19 nt, Artificial Sequence
  Description of Artificial Sequence: Synthetic oligonucleotide
aggauguggcaaggacaac

SEQ ID NO: 2707176 - RNA, 19 nt, Artificial Sequence
  Description of Artificial Sequence: Synthetic oligonucleotide
uucgucaggucggggacau

SEQ ID NO: 2707177 - RNA, 19 nt, Artificial Sequence
  Description of Artificial Sequence: Synthetic oligonucleotide
gggcacuucaaacccagaa

SEQ ID NO: 2707178 - RNA, 19 nt, Artificial Sequence
  Description of Artificial Sequence: Synthetic oligonucleotide
cagcuuacagagggagccc

SEQ ID NO: 2707179 - RNA, 19 nt, Artificial Sequence
  Description of Artificial Sequence: Synthetic oligonucleotide
cgauauaugccauccacaa

SEQ ID NO: 2707180 - RNA, 19 nt, Artificial Sequence
  Description of Artificial Sequence: Synthetic oligonucleotide
ggggacaugcucagaauca

SEQ ID NO: 2707181 - RNA, 19 nt, Artificial Sequence
  Description of Artificial Sequence: Synthetic oligonucleotide
uugggaguucccggaagua

SEQ ID NO: 2707182 - RNA, 19 nt, Artificial Sequence
  Description of Artificial Sequence: Synthetic oligonucleotide
gacccaaugcugugguagu

SEQ ID NO: 2707183 - RNA, 19 nt, Artificial Sequence
  Description of Artificial Sequence: Synthetic oligonucleotide
ggcucauucugcguggauc

SEQ ID NO: 2707184 - RNA, 19 nt, Artificial Sequence
  Description of Artificial Sequence: Synthetic oligonucleotide
cucauacagcugguaggug

SEQ ID NO: 2707185 - RNA, 19 nt, Artificial Sequence
  Description of Artificial Sequence: Synthetic oligonucleotide
ggauguggcaaggacaacu

SEQ ID NO: 2707186 - RNA, 19 nt, Artificial Sequence
  Description of Artificial Sequence: Synthetic oligonucleotide
gcucagaaucaaauucaug

SEQ ID NO: 2707187 - RNA, 19 nt, Artificial Sequence
  Description of Artificial Sequence: Synthetic oligonucleotide
gcugcugaaacggcaucag

SEQ ID NO: 2707188 - RNA, 19 nt, Artificial Sequence
  Description of Artificial Sequence: Synthetic oligonucleotide
cauccacaaugccauaccu

SEQ ID NO: 2707189 - RNA, 19 nt, Artificial Sequence
  Description of Artificial Sequence: Synthetic oligonucleotide
ggaggcaacuccagagagc

SEQ ID NO: 2707190 - RNA, 19 nt, Artificial Sequence
  Description of Artificial Sequence: Synthetic oligonucleotide
ccgauauaugccauccaca

SEQ ID NO: 2707191 - RNA, 19 nt, Artificial Sequence
  Description of Artificial Sequence: Synthetic oligonucleotide
gcucauucugcguggaucu

SEQ ID NO: 2707192 - RNA, 19 nt, Artificial Sequence
  Description of Artificial Sequence: Synthetic oligonucleotide
gggguaggcugcuggauga

SEQ ID NO: 2707193 - RNA, 19 nt, Artificial Sequence
  Description of Artificial Sequence: Synthetic oligonucleotide
cccaaugcugugguagucc

SEQ ID NO: 2707194 - RNA, 19 nt, Artificial Sequence
  Description of Artificial Sequence: Synthetic oligonucleotide
cuggauauuggaggcaacu

SEQ ID NO: 2707195 - RNA, 19 nt, Artificial Sequence
  Description of Artificial Sequence: Synthetic oligonucleotide
agcccacagaauggauguc

SEQ ID NO: 2707196 - RNA, 19 nt, Artificial Sequence
  Description of Artificial Sequence: Synthetic oligonucleotide
cagcagaggcugcuucaac

SEQ ID NO: 2707197 - RNA, 19 nt, Artificial Sequence
  Description of Artificial Sequence: Synthetic oligonucleotide
caagauuccccgcugcuuu

SEQ ID NO: 2707198 - RNA, 19 nt, Artificial Sequence
  Description of Artificial Sequence: Synthetic oligonucleotide
caugacgaagucucuggau

SEQ ID NO: 2707199 - RNA, 19 nt, Artificial Sequence
  Description of Artificial Sequence: Synthetic oligonucleotide
accucucgaugaaugcugu

SEQ ID NO: 2707200 - RNA, 19 nt, Artificial Sequence
  Description of Artificial Sequence: Synthetic oligonucleotide
ggguuugggaguucccgga

SEQ ID NO: 2707201 - RNA, 19 nt, Artificial Sequence
  Description of Artificial Sequence: Synthetic oligonucleotide
guggcaaggacaacucugu

SEQ ID NO: 2707202 - RNA, 19 nt, Artificial Sequence
  Description of Artificial Sequence: Synthetic oligonucleotide
gggaguucccggaaguaca

SEQ ID NO: 2707203 - RNA, 19 nt, Artificial Sequence
  Description of Artificial Sequence: Synthetic oligonucleotide
cagcugguaggugagcaga

SEQ ID NO: 2707204 - RNA, 19 nt, Artificial Sequence
  Description of Artificial Sequence: Synthetic oligonucleotide
cugcguggaucuguguguc

SEQ ID NO: 2707205 - RNA, 19 nt, Artificial Sequence
  Description of Artificial Sequence: Synthetic oligonucleotide
guccgcuagaagagacaag

SEQ ID NO: 2707206 - RNA, 19 nt, Artificial Sequence
  Description of Artificial Sequence: Synthetic oligonucleotide
agcagaggguuugggaguu

SEQ ID NO: 2707207 - RNA, 19 nt, Artificial Sequence
  Description of Artificial Sequence: Synthetic oligonucleotide
agaggcugcuucaacucua

SEQ ID NO: 2707208 - RNA, 19 nt, Artificial Sequence
  Description of Artificial Sequence: Synthetic oligonucleotide
cugcugaaacggcaucaga

SEQ ID NO: 2707209 - RNA, 19 nt, Artificial Sequence
  Description of Artificial Sequence: Synthetic oligonucleotide
ggcacuucaaacccagaau

SEQ ID NO: 2707210 - RNA, 19 nt, Artificial Sequence
  Description of Artificial Sequence: Synthetic oligonucleotide
ggaacuccaguguucugua

SEQ ID NO: 2707211 - RNA, 19 nt, Artificial Sequence
  Description of Artificial Sequence: Synthetic oligonucleotide
ccacagaauggaugucuug

SEQ ID NO: 2707212 - RNA, 19 nt, Artificial Sequence
  Description of Artificial Sequence: Synthetic oligonucleotide
gccauccacaaugccauac

SEQ ID NO: 2707213 - RNA, 19 nt, Artificial Sequence
  Description of Artificial Sequence: Synthetic oligonucleotide
cgucaggucggggacaugc

SEQ ID NO: 2707214 - RNA, 19 nt, Artificial Sequence
  Description of Artificial Sequence: Synthetic oligonucleotide
gguaguccgcuagaagaga

SEQ ID NO: 2707215 - RNA, 19 nt, Artificial Sequence
  Description of Artificial Sequence: Synthetic oligonucleotide
guccacuguccagcagagg

SEQ ID NO: 2707216 - RNA, 19 nt, Artificial Sequence
  Description of Artificial Sequence: Synthetic oligonucleotide
cucaagauuccccgcugcu

SEQ ID NO: 2707217 - RNA, 19 nt, Artificial Sequence
  Description of Artificial Sequence: Synthetic oligonucleotide
cugcuucaacucuauugcu

SEQ ID NO: 2707218 - RNA, 19 nt, Artificial Sequence
  Description of Artificial Sequence: Synthetic oligonucleotide
ccgcuagaagagacaagug

SEQ ID NO: 2707219 - RNA, 19 nt, Artificial Sequence
  Description of Artificial Sequence: Synthetic oligonucleotide
gguuugggaguucccggaa

SEQ ID NO: 2707220 - RNA, 19 nt, Artificial Sequence
  Description of Artificial Sequence: Synthetic oligonucleotide
caucaggaacuccaguguu

SEQ ID NO: 2707221 - RNA, 19 nt, Artificial Sequence
  Description of Artificial Sequence: Synthetic oligonucleotide
acaacucugugggcaggaa

SEQ ID NO: 2707222 - RNA, 19 nt, Artificial Sequence
  Description of Artificial Sequence: Synthetic oligonucleotide
aggcaacuccagagagccg

SEQ ID NO: 2707223 - RNA, 19 nt, Artificial Sequence
  Description of Artificial Sequence: Synthetic oligonucleotide
cuauugcucccagggcuca

SEQ ID NO: 2707224 - RNA, 19 nt, Artificial Sequence
  Description of Artificial Sequence: Synthetic oligonucleotide
caaccguucuucaucuguu

SEQ ID NO: 2707225 - RNA, 19 nt, Artificial Sequence
  Description of Artificial Sequence: Synthetic oligonucleotide
gugccucaucaggaacucc

SEQ ID NO: 2707226 - RNA, 19 nt, Artificial Sequence
  Description of Artificial Sequence: Synthetic oligonucleotide
ccccgcugcuuuuagcuuc

SEQ ID NO: 2707227 - RNA, 19 nt, Artificial Sequence
  Description of Artificial Sequence: Synthetic oligonucleotide
uauugcucccagggcucau

SEQ ID NO: 2707228 - RNA, 19 nt, Artificial Sequence
  Description of Artificial Sequence: Synthetic oligonucleotide
gaugaaugcugugcagcuu

SEQ ID NO: 2707229 - RNA, 19 nt, Artificial Sequence
  Description of Artificial Sequence: Synthetic oligonucleotide
auugcucccagggcucauu

SEQ ID NO: 2707230 - RNA, 19 nt, Artificial Sequence
  Description of Artificial Sequence: Synthetic oligonucleotide
caguguucuguaguguggu

SEQ ID NO: 2707231 - RNA, 19 nt, Artificial Sequence
  Description of Artificial Sequence: Synthetic oligonucleotide
cggggacaugcucagaauc

SEQ ID NO: 2707232 - RNA, 19 nt, Artificial Sequence
  Description of Artificial Sequence: Synthetic oligonucleotide
cagaggcugcuucaacucu

SEQ ID NO: 2707233 - RNA, 19 nt, Artificial Sequence
  Description of Artificial Sequence: Synthetic oligonucleotide
aaacggcaucagagaauuu

SEQ ID NO: 2707234 - RNA, 19 nt, Artificial Sequence
  Description of Artificial Sequence: Synthetic oligonucleotide
agauuccccgcugcuuuua

SEQ ID NO: 2707235 - RNA, 19 nt, Artificial Sequence
  Description of Artificial Sequence: Synthetic oligonucleotide
gggacaugcucagaaucaa

SEQ ID NO: 2707236 - RNA, 19 nt, Artificial Sequence
  Description of Artificial Sequence: Synthetic oligonucleotide
cugugguaguccgcuagaa

SEQ ID NO: 2707237 - RNA, 19 nt, Artificial Sequence
  Description of Artificial Sequence: Synthetic oligonucleotide
gguaggugagcagaggguu

SEQ ID NO: 2707238 - RNA, 19 nt, Artificial Sequence
  Description of Artificial Sequence: Synthetic oligonucleotide
cccugacccaaugcugugg

SEQ ID NO: 2707239 - RNA, 19 nt, Artificial Sequence
  Description of Artificial Sequence: Synthetic oligonucleotide
augcugugguaguccgcua

SEQ ID NO: 2707240 - RNA, 19 nt, Artificial Sequence
  Description of Artificial Sequence: Synthetic oligonucleotide
ggacaugcucagaaucaaa

SEQ ID NO: 2707241 - RNA, 19 nt, Artificial Sequence
  Description of Artificial Sequence: Synthetic oligonucleotide
cuugaacauaagguucuuu

SEQ ID NO: 2707242 - RNA, 19 nt, Artificial Sequence
  Description of Artificial Sequence: Synthetic oligonucleotide
caaugccauaccucucgau

SEQ ID NO: 2707243 - RNA, 19 nt, Artificial Sequence
  Description of Artificial Sequence: Synthetic oligonucleotide
gagagccgauauaugccau

SEQ ID NO: 2707244 - RNA, 19 nt, Artificial Sequence
  Description of Artificial Sequence: Synthetic oligonucleotide
gacgaagucucuggauauu

SEQ ID NO: 2707245 - RNA, 19 nt, Artificial Sequence
  Description of Artificial Sequence: Synthetic oligonucleotide
gcuuacagagggagcccac

SEQ ID NO: 2707246 - RNA, 19 nt, Artificial Sequence
  Description of Artificial Sequence: Synthetic oligonucleotide
gaggcugcuucaacucuau

SEQ ID NO: 2707247 - RNA, 19 nt, Artificial Sequence
  Description of Artificial Sequence: Synthetic oligonucleotide
cugacccaaugcuguggua

SEQ ID NO: 2707248 - RNA, 19 nt, Artificial Sequence
  Description of Artificial Sequence: Synthetic oligonucleotide
ucgucaggucggggacaug

SEQ ID NO: 2707249 - RNA, 19 nt, Artificial Sequence
  Description of Artificial Sequence: Synthetic oligonucleotide
cuccaguguucuguagugu

SEQ ID NO: 2707250 - RNA, 19 nt, Artificial Sequence
  Description of Artificial Sequence: Synthetic oligonucleotide
cgaugaaugcugugcagcu

SEQ ID NO: 2707251 - RNA, 19 nt, Artificial Sequence
  Description of Artificial Sequence: Synthetic oligonucleotide
ccccugacccaaugcugug

SEQ ID NO: 2707252 - RNA, 19 nt, Artificial Sequence
  Description of Artificial Sequence: Synthetic oligonucleotide
gucaggucggggacaugcu

SEQ ID NO: 2707253 - RNA, 19 nt, Artificial Sequence
  Description of Artificial Sequence: Synthetic oligonucleotide
ggguaggcugcuggaugac

SEQ ID NO: 2707254 - RNA, 19 nt, Artificial Sequence
  Description of Artificial Sequence: Synthetic oligonucleotide
ccccaggucacaaccaaau

SEQ ID NO: 2707255 - RNA, 19 nt, Artificial Sequence
  Description of Artificial Sequence: Synthetic oligonucleotide
cccggaaguacagcuuaca

SEQ ID NO: 2707256 - RNA, 19 nt, Artificial Sequence
  Description of Artificial Sequence: Synthetic oligonucleotide
ggggcacuucaaacccaga

SEQ ID NO: 2707257 - RNA, 19 nt, Artificial Sequence
  Description of Artificial Sequence: Synthetic oligonucleotide
cccacagaauggaugucuu

SEQ ID NO: 2707258 - RNA, 19 nt, Artificial Sequence
  Description of Artificial Sequence: Synthetic oligonucleotide
ggucggggacaugcucaga

SEQ ID NO: 2707259 - RNA, 19 nt, Artificial Sequence
  Description of Artificial Sequence: Synthetic oligonucleotide
gccauaccucucgaugaau

SEQ ID NO: 2707260 - RNA, 19 nt, Artificial Sequence
  Description of Artificial Sequence: Synthetic oligonucleotide
cccgcugcuuuuagcuucu

SEQ ID NO: 2707261 - RNA, 19 nt, Artificial Sequence
  Description of Artificial Sequence: Synthetic oligonucleotide
gggcucauucugcguggau

SEQ ID NO: 2707262 - RNA, 19 nt, Artificial Sequence
  Description of Artificial Sequence: Synthetic oligonucleotide
gcaacuccagagagccgau

SEQ ID NO: 2707263 - RNA, 19 nt, Artificial Sequence
  Description of Artificial Sequence: Synthetic oligonucleotide
ccgcugcuuuuagcuucug

SEQ ID NO: 2707264 - RNA, 19 nt, Artificial Sequence
  Description of Artificial Sequence: Synthetic oligonucleotide
ucuaguaauaaacucaucg

SEQ ID NO: 2707265 - RNA, 19 nt, Artificial Sequence
  Description of Artificial Sequence: Synthetic oligonucleotide
ucuuacauaacucugaaca

SEQ ID NO: 2707266 - RNA, 19 nt, Artificial Sequence
  Description of Artificial Sequence: Synthetic oligonucleotide
aaagauaucacacaucaca

SEQ ID NO: 2707267 - RNA, 19 nt, Artificial Sequence
  Description of Artificial Sequence: Synthetic oligonucleotide
aaauauuaaauacaaugug

SEQ ID NO: 2707268 - RNA, 19 nt, Artificial Sequence
  Description of Artificial Sequence: Synthetic oligonucleotide
acaguuaaauuccaaaccc

SEQ ID NO: 2707269 - RNA, 19 nt, Artificial Sequence
  Description of Artificial Sequence: Synthetic oligonucleotide
gaaacgaagaaacacaaag

SEQ ID NO: 2707270 - RNA, 19 nt, Artificial Sequence
  Description of Artificial Sequence: Synthetic oligonucleotide
uaaauauuaaauacaaugu

SEQ ID NO: 2707271 - RNA, 19 nt, Artificial Sequence
  Description of Artificial Sequence: Synthetic oligonucleotide
aauacaaugugaaagcagg

SEQ ID NO: 2707272 - RNA, 19 nt, Artificial Sequence
  Description of Artificial Sequence: Synthetic oligonucleotide
aaauucucuaguaauaaac

SEQ ID NO: 2707273 - RNA, 19 nt, Artificial Sequence
  Description of Artificial Sequence: Synthetic oligonucleotide
caaacuaugauauuuuccc

SEQ ID NO: 2707274 - RNA, 19 nt, Artificial Sequence
  Description of Artificial Sequence: Synthetic oligonucleotide
aagaauauuuuccaguucu

SEQ ID NO: 2707275 - RNA, 19 nt, Artificial Sequence
  Description of Artificial Sequence: Synthetic oligonucleotide
uuaaauacaaugugaaagc

SEQ ID NO: 2707276 - RNA, 19 nt, Artificial Sequence
  Description of Artificial Sequence: Synthetic oligonucleotide
aauaaacucaucgauauca

SEQ ID NO: 2707277 - RNA, 19 nt, Artificial Sequence
  Description of Artificial Sequence: Synthetic oligonucleotide
aacaauuggauuuuccuug

SEQ ID NO: 2707278 - RNA, 19 nt, Artificial Sequence
  Description of Artificial Sequence: Synthetic oligonucleotide
aacgaagaaacacaaagcu

SEQ ID NO: 2707279 - RNA, 19 nt, Artificial Sequence
  Description of Artificial Sequence: Synthetic oligonucleotide
  modified_base (3)..(3): a, c, u, g, unknown or other
uangguuuugagaugagag

SEQ ID NO: 2707280 - RNA, 19 nt, Artificial Sequence
  Description of Artificial Sequence: Synthetic oligonucleotide
aaucuuggguuucaaauuc

SEQ ID NO: 2707281 - RNA, 19 nt, Artificial Sequence
  Description of Artificial Sequence: Synthetic oligonucleotide
uguaucuggauaaugaggu

SEQ ID NO: 2707282 - RNA, 19 nt, Artificial Sequence
  Description of Artificial Sequence: Synthetic oligonucleotide
aauauuaaauacaauguga

SEQ ID NO: 2707283 - RNA, 19 nt, Artificial Sequence
  Description of Artificial Sequence: Synthetic oligonucleotide
ucuguauuucucaugaggc

SEQ ID NO: 2707284 - RNA, 19 nt, Artificial Sequence
  Description of Artificial Sequence: Synthetic oligonucleotide
aaacgaagaaacacaaagc

SEQ ID NO: 2707285 - RNA, 19 nt, Artificial Sequence
  Description of Artificial Sequence: Synthetic oligonucleotide
uaacucugaacaaaauugg

SEQ ID NO: 2707286 - RNA, 19 nt, Artificial Sequence
  Description of Artificial Sequence: Synthetic oligonucleotide
aaugaaaaguaugagguga

SEQ ID NO: 2707287 - RNA, 19 nt, Artificial Sequence
  Description of Artificial Sequence: Synthetic oligonucleotide
uaggaaaucucuuagcagc

SEQ ID NO: 2707288 - RNA, 19 nt, Artificial Sequence
  Description of Artificial Sequence: Synthetic oligonucleotide
uuaaauuccaaacccauua

SEQ ID NO: 2707289 - RNA, 19 nt, Artificial Sequence
  Description of Artificial Sequence: Synthetic oligonucleotide
uuugagaugagaguuaaug

SEQ ID NO: 2707290 - RNA, 19 nt, Artificial Sequence
  Description of Artificial Sequence: Synthetic oligonucleotide
agcaaagaaacgaagaaac

SEQ ID NO: 2707291 - RNA, 19 nt, Artificial Sequence
  Description of Artificial Sequence: Synthetic oligonucleotide
uucucuaguaauaaacuca

SEQ ID NO: 2707292 - RNA, 19 nt, Artificial Sequence
  Description of Artificial Sequence: Synthetic oligonucleotide
aucgcuacagcaaagaaac

SEQ ID NO: 2707293 - RNA, 19 nt, Artificial Sequence
  Description of Artificial Sequence: Synthetic oligonucleotide
  modified_base (10)..(10): a, c, u, g, unknown or other
aagucuguangguuuugag

SEQ ID NO: 2707294 - RNA, 19 nt, Artificial Sequence
  Description of Artificial Sequence: Synthetic oligonucleotide
aaagaauauuuuccaguuc

SEQ ID NO: 2707295 - RNA, 19 nt, Artificial Sequence
  Description of Artificial Sequence: Synthetic oligonucleotide
agaaacacaaagcugguca

SEQ ID NO: 2707296 - RNA, 19 nt, Artificial Sequence
  Description of Artificial Sequence: Synthetic oligonucleotide
aaaaguaugaggugauagu

SEQ ID NO: 2707297 - RNA, 19 nt, Artificial Sequence
  Description of Artificial Sequence: Synthetic oligonucleotide
gaacaugaggguuauuagg

SEQ ID NO: 2707298 - RNA, 19 nt, Artificial Sequence
  Description of Artificial Sequence: Synthetic oligonucleotide
gauaucagaauucccaaac

SEQ ID NO: 2707299 - RNA, 19 nt, Artificial Sequence
  Description of Artificial Sequence: Synthetic oligonucleotide
aaacccauuaaauauuaaa

SEQ ID NO: 2707300 - RNA, 19 nt, Artificial Sequence
  Description of Artificial Sequence: Synthetic oligonucleotide
aguaugaggugauaguauc

SEQ ID NO: 2707301 - RNA, 19 nt, Artificial Sequence
  Description of Artificial Sequence: Synthetic oligonucleotide
auucucuaguaauaaacuc

SEQ ID NO: 2707302 - RNA, 19 nt, Artificial Sequence
  Description of Artificial Sequence: Synthetic oligonucleotide
uaucuggauaaugaggucg

SEQ ID NO: 2707303 - RNA, 19 nt, Artificial Sequence
  Description of Artificial Sequence: Synthetic oligonucleotide
gauauuuucccaacaauug

SEQ ID NO: 2707304 - RNA, 19 nt, Artificial Sequence
  Description of Artificial Sequence: Synthetic oligonucleotide
aaauucacacaugacugac

SEQ ID NO: 2707305 - RNA, 19 nt, Artificial Sequence
  Description of Artificial Sequence: Synthetic oligonucleotide
uuaauguccuauuugucug

SEQ ID NO: 2707306 - RNA, 19 nt, Artificial Sequence
  Description of Artificial Sequence: Synthetic oligonucleotide
augacugacuuuuggaacg

SEQ ID NO: 2707307 - RNA, 19 nt, Artificial Sequence
  Description of Artificial Sequence: Synthetic oligonucleotide
ucucaugaggcucaucuag

SEQ ID NO: 2707308 - RNA, 19 nt, Artificial Sequence
  Description of Artificial Sequence: Synthetic oligonucleotide
agaguacugaacaugaggg

SEQ ID NO: 2707309 - RNA, 19 nt, Artificial Sequence
  Description of Artificial Sequence: Synthetic oligonucleotide
aaagaaacgaagaaacaca

SEQ ID NO: 2707310 - RNA, 19 nt, Artificial Sequence
  Description of Artificial Sequence: Synthetic oligonucleotide
acuaugauauuuucccaac

SEQ ID NO: 2707311 - RNA, 19 nt, Artificial Sequence
  Description of Artificial Sequence: Synthetic oligonucleotide
uauuuucccaacaauugga

SEQ ID NO: 2707312 - RNA, 19 nt, Artificial Sequence
  Description of Artificial Sequence: Synthetic oligonucleotide
ugauauuuucccaacaauu

SEQ ID NO: 2707313 - RNA, 19 nt, Artificial Sequence
  Description of Artificial Sequence: Synthetic oligonucleotide
uaugauauuuucccaacaa

SEQ ID NO: 2707314 - RNA, 19 nt, Artificial Sequence
  Description of Artificial Sequence: Synthetic oligonucleotide
gcaaaugaaaaguaugagg

SEQ ID NO: 2707315 - RNA, 19 nt, Artificial Sequence
  Description of Artificial Sequence: Synthetic oligonucleotide
ugagaugagaguuaauguc

SEQ ID NO: 2707316 - RNA, 19 nt, Artificial Sequence
  Description of Artificial Sequence: Synthetic oligonucleotide
uguguaucuggauaaugag

SEQ ID NO: 2707317 - RNA, 19 nt, Artificial Sequence
  Description of Artificial Sequence: Synthetic oligonucleotide
uuaggaaaucucuuagcag

SEQ ID NO: 2707318 - RNA, 19 nt, Artificial Sequence
  Description of Artificial Sequence: Synthetic oligonucleotide
uacagcaaagaaacgaaga

SEQ ID NO: 2707319 - RNA, 19 nt, Artificial Sequence
  Description of Artificial Sequence: Synthetic oligonucleotide
acaauuggauuuuccuugc

SEQ ID NO: 2707320 - RNA, 19 nt, Artificial Sequence
  Description of Artificial Sequence: Synthetic oligonucleotide
ucgcaaaugaaaaguauga

SEQ ID NO: 2707321 - RNA, 19 nt, Artificial Sequence
  Description of Artificial Sequence: Synthetic oligonucleotide
augaggcucaucuagcuuc

SEQ ID NO: 2707322 - RNA, 19 nt, Artificial Sequence
  Description of Artificial Sequence: Synthetic oligonucleotide
aagauaucacacaucacag

SEQ ID NO: 2707323 - RNA, 19 nt, Artificial Sequence
  Description of Artificial Sequence: Synthetic oligonucleotide
uuuggaacgagacuucuuc

SEQ ID NO: 2707324 - RNA, 19 nt, Artificial Sequence
  Description of Artificial Sequence: Synthetic oligonucleotide
uaguaauaaacucaucgau

SEQ ID NO: 2707325 - RNA, 19 nt, Artificial Sequence
  Description of Artificial Sequence: Synthetic oligonucleotide
agaaauucacacaugacug

SEQ ID NO: 2707326 - RNA, 19 nt, Artificial Sequence
  Description of Artificial Sequence: Synthetic oligonucleotide
uuuauuugcuggauugucu

SEQ ID NO: 2707327 - RNA, 19 nt, Artificial Sequence
  Description of Artificial Sequence: Synthetic oligonucleotide
uuucaaauucucuaguaau

SEQ ID NO: 2707328 - RNA, 19 nt, Artificial Sequence
  Description of Artificial Sequence: Synthetic oligonucleotide
  modified_base (2)..(2): a, c, u, g, unknown or other
angguuuugagaugagagu

SEQ ID NO: 2707329 - RNA, 19 nt, Artificial Sequence
  Description of Artificial Sequence: Synthetic oligonucleotide
auaaugaggucgcaaauga

SEQ ID NO: 2707330 - RNA, 19 nt, Artificial Sequence
  Description of Artificial Sequence: Synthetic oligonucleotide
aacuaugauauuuucccaa

SEQ ID NO: 2707331 - RNA, 19 nt, Artificial Sequence
  Description of Artificial Sequence: Synthetic oligonucleotide
aauucucuaguaauaaacu

SEQ ID NO: 2707332 - RNA, 19 nt, Artificial Sequence
  Description of Artificial Sequence: Synthetic oligonucleotide
agaguuaauguccuauuug

SEQ ID NO: 2707333 - RNA, 19 nt, Artificial Sequence
  Description of Artificial Sequence: Synthetic oligonucleotide
ugauaguaucgcuacagca

SEQ ID NO: 2707334 - RNA, 19 nt, Artificial Sequence
  Description of Artificial Sequence: Synthetic oligonucleotide
caaagaaacgaagaaacac

SEQ ID NO: 2707335 - RNA, 19 nt, Artificial Sequence
  Description of Artificial Sequence: Synthetic oligonucleotide
uuugccucagagaauaaaa

SEQ ID NO: 2707336 - RNA, 19 nt, Artificial Sequence
  Description of Artificial Sequence: Synthetic oligonucleotide
ugaacaugaggguuauuag

SEQ ID NO: 2707337 - RNA, 19 nt, Artificial Sequence
  Description of Artificial Sequence: Synthetic oligonucleotide
ucugcucuuacauaacucu

SEQ ID NO: 2707338 - RNA, 19 nt, Artificial Sequence
  Description of Artificial Sequence: Synthetic oligonucleotide
caaaugaaaaguaugaggu

SEQ ID NO: 2707339 - RNA, 19 nt, Artificial Sequence
  Description of Artificial Sequence: Synthetic oligonucleotide
uauuaggaaaucucuuagc

SEQ ID NO: 2707340 - RNA, 19 nt, Artificial Sequence
  Description of Artificial Sequence: Synthetic oligonucleotide
aacaaaauugggugaauua

SEQ ID NO: 2707341 - RNA, 19 nt, Artificial Sequence
  Description of Artificial Sequence: Synthetic oligonucleotide
ucaucuagcuucucuauga

SEQ ID NO: 2707342 - RNA, 19 nt, Artificial Sequence
  Description of Artificial Sequence: Synthetic oligonucleotide
aaaucuuggguuucaaauu

SEQ ID NO: 2707343 - RNA, 19 nt, Artificial Sequence
  Description of Artificial Sequence: Synthetic oligonucleotide
uuucccaacaauuggauuu

SEQ ID NO: 2707344 - RNA, 19 nt, Artificial Sequence
  Description of Artificial Sequence: Synthetic oligonucleotide
ugcagaguacugaacauga

SEQ ID NO: 2707345 - RNA, 19 nt, Artificial Sequence
  Description of Artificial Sequence: Synthetic oligonucleotide
gagaugagaguuaaugucc

SEQ ID NO: 2707346 - RNA, 19 nt, Artificial Sequence
  Description of Artificial Sequence: Synthetic oligonucleotide
uggguuucaaauucucuag

SEQ ID NO: 2707347 - RNA, 19 nt, Artificial Sequence
  Description of Artificial Sequence: Synthetic oligonucleotide
cgaagaaacacaaagcugg

SEQ ID NO: 2707348 - RNA, 19 nt, Artificial Sequence
  Description of Artificial Sequence: Synthetic oligonucleotide
aacccauuaaauauuaaau

SEQ ID NO: 2707349 - RNA, 19 nt, Artificial Sequence
  Description of Artificial Sequence: Synthetic oligonucleotide
aaacuaugauauuuuccca

SEQ ID NO: 2707350 - RNA, 19 nt, Artificial Sequence
  Description of Artificial Sequence: Synthetic oligonucleotide
aacaugaggguuauuagga

SEQ ID NO: 2707351 - RNA, 19 nt, Artificial Sequence
  Description of Artificial Sequence: Synthetic oligonucleotide
agaauucccaaacaguuaa

SEQ ID NO: 2707352 - RNA, 19 nt, Artificial Sequence
  Description of Artificial Sequence: Synthetic oligonucleotide
cagaguacugaacaugagg

SEQ ID NO: 2707353 - RNA, 19 nt, Artificial Sequence
  Description of Artificial Sequence: Synthetic oligonucleotide
ucucuaguaauaaacucau

SEQ ID NO: 2707354 - RNA, 19 nt, Artificial Sequence
  Description of Artificial Sequence: Synthetic oligonucleotide
auagauuccccaguuuccc

SEQ ID NO: 2707355 - RNA, 19 nt, Artificial Sequence
  Description of Artificial Sequence: Synthetic oligonucleotide
aaauuccaaacccauuaaa

SEQ ID NO: 2707356 - RNA, 19 nt, Artificial Sequence
  Description of Artificial Sequence: Synthetic oligonucleotide
aacucugaacaaaauuggg

SEQ ID NO: 2707357 - RNA, 19 nt, Artificial Sequence
  Description of Artificial Sequence: Synthetic oligonucleotide
uucaaauucucuaguaaua

SEQ ID NO: 2707358 - RNA, 19 nt, Artificial Sequence
  Description of Artificial Sequence: Synthetic oligonucleotide
gauaaugaggucgcaaaug

SEQ ID NO: 2707359 - RNA, 19 nt, Artificial Sequence
  Description of Artificial Sequence: Synthetic oligonucleotide
ucaucgauaucagaauucc

SEQ ID NO: 2707360 - RNA, 19 nt, Artificial Sequence
  Description of Artificial Sequence: Synthetic oligonucleotide
gaauauuuuccaguucucc

SEQ ID NO: 2707361 - RNA, 19 nt, Artificial Sequence
  Description of Artificial Sequence: Synthetic oligonucleotide
uuugagaaauucacacaug

SEQ ID NO: 2707362 - RNA, 19 nt, Artificial Sequence
  Description of Artificial Sequence: Synthetic oligonucleotide
uaucgcuacagcaaagaaa

SEQ ID NO: 2707363 - RNA, 19 nt, Artificial Sequence
  Description of Artificial Sequence: Synthetic oligonucleotide
auauuaaauacaaugugaa

SEQ ID NO: 2707364 - RNA, 19 nt, Artificial Sequence
  Description of Artificial Sequence: Synthetic oligonucleotide
aaaguaugaggugauagua

SEQ ID NO: 2707365 - RNA, 19 nt, Artificial Sequence
  Description of Artificial Sequence: Synthetic oligonucleotide
uaugaggugauaguaucgc

SEQ ID NO: 2707366 - RNA, 19 nt, Artificial Sequence
  Description of Artificial Sequence: Synthetic oligonucleotide
aacacaaagcuggucacug

SEQ ID NO: 2707367 - RNA, 19 nt, Artificial Sequence
  Description of Artificial Sequence: Synthetic oligonucleotide
cuaguaauaaacucaucga

SEQ ID NO: 2707368 - RNA, 19 nt, Artificial Sequence
  Description of Artificial Sequence: Synthetic oligonucleotide
agccauuugccucagagaa

SEQ ID NO: 2707369 - RNA, 19 nt, Artificial Sequence
  Description of Artificial Sequence: Synthetic oligonucleotide
aaugaggucgcaaaugaaa

SEQ ID NO: 2707370 - RNA, 19 nt, Artificial Sequence
  Description of Artificial Sequence: Synthetic oligonucleotide
aacucaucgauaucagaau

SEQ ID NO: 2707371 - RNA, 19 nt, Artificial Sequence
  Description of Artificial Sequence: Synthetic oligonucleotide
aaaauugggugaauuaaaa

SEQ ID NO: 2707372 - RNA, 19 nt, Artificial Sequence
  Description of Artificial Sequence: Synthetic oligonucleotide
uauuuugcacuacuugauc

SEQ ID NO: 2707373 - RNA, 19 nt, Artificial Sequence
  Description of Artificial Sequence: Synthetic oligonucleotide
ugagaaauucacacaugac

SEQ ID NO: 2707374 - RNA, 19 nt, Artificial Sequence
  Description of Artificial Sequence: Synthetic oligonucleotide
acagcaaagaaacgaagaa

SEQ ID NO: 2707375 - RNA, 19 nt, Artificial Sequence
  Description of Artificial Sequence: Synthetic oligonucleotide
acccauuaaauauuaaaua

SEQ ID NO: 2707376 - RNA, 19 nt, Artificial Sequence
  Description of Artificial Sequence: Synthetic oligonucleotide
uacaaugugaaagcaggug

SEQ ID NO: 2707377 - RNA, 19 nt, Artificial Sequence
  Description of Artificial Sequence: Synthetic oligonucleotide
uuggguuucaaauucucua

SEQ ID NO: 2707378 - RNA, 19 nt, Artificial Sequence
  Description of Artificial Sequence: Synthetic oligonucleotide
caugacugacuuuuggaac

SEQ ID NO: 2707379 - RNA, 19 nt, Artificial Sequence
  Description of Artificial Sequence: Synthetic oligonucleotide
uggauaaugaggucgcaaa

SEQ ID NO: 2707380 - RNA, 19 nt, Artificial Sequence
  Description of Artificial Sequence: Synthetic oligonucleotide
uguauuucucaugaggcuc

SEQ ID NO: 2707381 - RNA, 19 nt, Artificial Sequence
  Description of Artificial Sequence: Synthetic oligonucleotide
agcaggugucaucaaaguc

SEQ ID NO: 2707382 - RNA, 19 nt, Artificial Sequence
  Description of Artificial Sequence: Synthetic oligonucleotide
aucgauaucagaauuccca

SEQ ID NO: 2707383 - RNA, 19 nt, Artificial Sequence
  Description of Artificial Sequence: Synthetic oligonucleotide
ucaguuggccaaacuauga

SEQ ID NO: 2707384 - RNA, 19 nt, Artificial Sequence
  Description of Artificial Sequence: Synthetic oligonucleotide
ugaggucgcaaaugaaaag

SEQ ID NO: 2707385 - RNA, 19 nt, Artificial Sequence
  Description of Artificial Sequence: Synthetic oligonucleotide
gaggugauaguaucgcuac

SEQ ID NO: 2707386 - RNA, 19 nt, Artificial Sequence
  Description of Artificial Sequence: Synthetic oligonucleotide
  modified_base (7)..(7): a, c, u, g, unknown or other
ucuguangguuuugagaug

SEQ ID NO: 2707387 - RNA, 19 nt, Artificial Sequence
  Description of Artificial Sequence: Synthetic oligonucleotide
gauagauuccccaguuucc

SEQ ID NO: 2707388 - RNA, 19 nt, Artificial Sequence
  Description of Artificial Sequence: Synthetic oligonucleotide
aagaaacacaaagcugguc

SEQ ID NO: 2707389 - RNA, 19 nt, Artificial Sequence
  Description of Artificial Sequence: Synthetic oligonucleotide
uguccuauuugucugugua

SEQ ID NO: 2707390 - RNA, 19 nt, Artificial Sequence
  Description of Artificial Sequence: Synthetic oligonucleotide
cucuuagcagccauuugcc

SEQ ID NO: 2707391 - RNA, 19 nt, Artificial Sequence
  Description of Artificial Sequence: Synthetic oligonucleotide
guuaauguccuauuugucu

SEQ ID NO: 2707392 - RNA, 19 nt, Artificial Sequence
  Description of Artificial Sequence: Synthetic oligonucleotide
aggguuauuaggaaaucuc

SEQ ID NO: 2707393 - RNA, 19 nt, Artificial Sequence
  Description of Artificial Sequence: Synthetic oligonucleotide
aagaaacgaagaaacacaa

SEQ ID NO: 2707394 - RNA, 19 nt, Artificial Sequence
  Description of Artificial Sequence: Synthetic oligonucleotide
guguaucuggauaaugagg

SEQ ID NO: 2707395 - RNA, 19 nt, Artificial Sequence
  Description of Artificial Sequence: Synthetic oligonucleotide
ucuuucuguauuucucaug

SEQ ID NO: 2707396 - RNA, 19 nt, Artificial Sequence
  Description of Artificial Sequence: Synthetic oligonucleotide
guaauaaacucaucgauau

SEQ ID NO: 2707397 - RNA, 19 nt, Artificial Sequence
  Description of Artificial Sequence: Synthetic oligonucleotide
acaaaauugggugaauuaa

SEQ ID NO: 2707398 - RNA, 19 nt, Artificial Sequence
  Description of Artificial Sequence: Synthetic oligonucleotide
uugucuguguaucuggaua

SEQ ID NO: 2707399 - RNA, 19 nt, Artificial Sequence
  Description of Artificial Sequence: Synthetic oligonucleotide
uuacauaacucugaacaaa

SEQ ID NO: 2707400 - RNA, 19 nt, Artificial Sequence
  Description of Artificial Sequence: Synthetic oligonucleotide
cuuagcagccauuugccuc

SEQ ID NO: 2707401 - RNA, 19 nt, Artificial Sequence
  Description of Artificial Sequence: Synthetic oligonucleotide
ugucuguguaucuggauaa

SEQ ID NO: 2707402 - RNA, 19 nt, Artificial Sequence
  Description of Artificial Sequence: Synthetic oligonucleotide
ugaggugauaguaucgcua

SEQ ID NO: 2707403 - RNA, 19 nt, Artificial Sequence
  Description of Artificial Sequence: Synthetic oligonucleotide
uucuccaucaguuggccaa

SEQ ID NO: 2707404 - RNA, 19 nt, Artificial Sequence
  Description of Artificial Sequence: Synthetic oligonucleotide
uacuugaucuuuucuuucu

SEQ ID NO: 2707405 - RNA, 19 nt, Artificial Sequence
  Description of Artificial Sequence: Synthetic oligonucleotide
auaguaucgcuacagcaaa

SEQ ID NO: 2707406 - RNA, 19 nt, Artificial Sequence
  Description of Artificial Sequence: Synthetic oligonucleotide
gaguuaauguccuauuugu

SEQ ID NO: 2707407 - RNA, 19 nt, Artificial Sequence
  Description of Artificial Sequence: Synthetic oligonucleotide
acuacuugaucuuuucuuu

SEQ ID NO: 2707408 - RNA, 19 nt, Artificial Sequence
  Description of Artificial Sequence: Synthetic oligonucleotide
  modified_base (9)..(9): a, c, u, g, unknown or other
agucuguangguuuugaga

SEQ ID NO: 2707409 - RNA, 19 nt, Artificial Sequence
  Description of Artificial Sequence: Synthetic oligonucleotide
aggaaaucucuuagcagcc

SEQ ID NO: 2707410 - RNA, 19 nt, Artificial Sequence
  Description of Artificial Sequence: Synthetic oligonucleotide
uggaacgagacuucuucug

SEQ ID NO: 2707411 - RNA, 19 nt, Artificial Sequence
  Description of Artificial Sequence: Synthetic oligonucleotide
cuacagcaaagaaacgaag

SEQ ID NO: 2707412 - RNA, 19 nt, Artificial Sequence
  Description of Artificial Sequence: Synthetic oligonucleotide
acaugacugacuuuuggaa

SEQ ID NO: 2707413 - RNA, 19 nt, Artificial Sequence
  Description of Artificial Sequence: Synthetic oligonucleotide
aucuggauaaugaggucgc

SEQ ID NO: 2707414 - RNA, 19 nt, Artificial Sequence
  Description of Artificial Sequence: Synthetic oligonucleotide
acacaaagcuggucacugc

SEQ ID NO: 2707415 - RNA, 19 nt, Artificial Sequence
  Description of Artificial Sequence: Synthetic oligonucleotide
  modified_base (5)..(5): a, c, u, g, unknown or other
uguangguuuugagaugag

SEQ ID NO: 2707416 - RNA, 19 nt, Artificial Sequence
  Description of Artificial Sequence: Synthetic oligonucleotide
uauuuuccaguucuccauc

SEQ ID NO: 2707417 - RNA, 19 nt, Artificial Sequence
  Description of Artificial Sequence: Synthetic oligonucleotide
ugaucuuuucuuucuguau

SEQ ID NO: 2707418 - RNA, 19 nt, Artificial Sequence
  Description of Artificial Sequence: Synthetic oligonucleotide
ucgauaucagaauucccaa

SEQ ID NO: 2707419 - RNA, 19 nt, Artificial Sequence
  Description of Artificial Sequence: Synthetic oligonucleotide
  modified_base (11)..(11): a, c, u, g, unknown or other
aaagucuguangguuuuga

SEQ ID NO: 2707420 - RNA, 19 nt, Artificial Sequence
  Description of Artificial Sequence: Synthetic oligonucleotide
gucgcaaaugaaaaguaug

SEQ ID NO: 2707421 - RNA, 19 nt, Artificial Sequence
  Description of Artificial Sequence: Synthetic oligonucleotide
guaugaggugauaguaucg

SEQ ID NO: 2707422 - RNA, 19 nt, Artificial Sequence
  Description of Artificial Sequence: Synthetic oligonucleotide
  modified_base (8)..(8): a, c, u, g, unknown or other
gucuguangguuuugagau

SEQ ID NO: 2707423 - RNA, 19 nt, Artificial Sequence
  Description of Artificial Sequence: Synthetic oligonucleotide
cuguguaucuggauaauga

SEQ ID NO: 2707424 - RNA, 19 nt, Artificial Sequence
  Description of Artificial Sequence: Synthetic oligonucleotide
aguucuccaucaguuggcc

SEQ ID NO: 2707425 - RNA, 19 nt, Artificial Sequence
  Description of Artificial Sequence: Synthetic oligonucleotide
ggaacgagacuucuucugg

SEQ ID NO: 2707426 - RNA, 19 nt, Artificial Sequence
  Description of Artificial Sequence: Synthetic oligonucleotide
agucaaugucugcucuuac

SEQ ID NO: 2707427 - RNA, 19 nt, Artificial Sequence
  Description of Artificial Sequence: Synthetic oligonucleotide
uaauaaacucaucgauauc

SEQ ID NO: 2707428 - RNA, 19 nt, Artificial Sequence
  Description of Artificial Sequence: Synthetic oligonucleotide
aguuaauguccuauuuguc

SEQ ID NO: 2707429 - RNA, 19 nt, Artificial Sequence
  Description of Artificial Sequence: Synthetic oligonucleotide
cucaugaggcucaucuagc

SEQ ID NO: 2707430 - RNA, 19 nt, Artificial Sequence
  Description of Artificial Sequence: Synthetic oligonucleotide
ccaaacuaugauauuuucc

SEQ ID NO: 2707431 - RNA, 19 nt, Artificial Sequence
  Description of Artificial Sequence: Synthetic oligonucleotide
aguaauaaacucaucgaua

SEQ ID NO: 2707432 - RNA, 19 nt, Artificial Sequence
  Description of Artificial Sequence: Synthetic oligonucleotide
uugaucuuuucuuucugua

SEQ ID NO: 2707433 - RNA, 19 nt, Artificial Sequence
  Description of Artificial Sequence: Synthetic oligonucleotide
caaugugaaagcagguguc

SEQ ID NO: 2707434 - RNA, 19 nt, Artificial Sequence
  Description of Artificial Sequence: Synthetic oligonucleotide
auuuuccuugcuuccauau

SEQ ID NO: 2707435 - RNA, 19 nt, Artificial Sequence
  Description of Artificial Sequence: Synthetic oligonucleotide
aacgagacuucuucuggau

SEQ ID NO: 2707436 - RNA, 19 nt, Artificial Sequence
  Description of Artificial Sequence: Synthetic oligonucleotide
ucuguguaucuggauaaug

SEQ ID NO: 2707437 - RNA, 19 nt, Artificial Sequence
  Description of Artificial Sequence: Synthetic oligonucleotide
uccuauuugucuguguauc

SEQ ID NO: 2707438 - RNA, 19 nt, Artificial Sequence
  Description of Artificial Sequence: Synthetic oligonucleotide
auaaacucaucgauaucag

SEQ ID NO: 2707439 - RNA, 19 nt, Artificial Sequence
  Description of Artificial Sequence: Synthetic oligonucleotide
ugcuuccauauuuugcacu

SEQ ID NO: 2707440 - RNA, 19 nt, Artificial Sequence
  Description of Artificial Sequence: Synthetic oligonucleotide
uccccaguuucccaaaguc

SEQ ID NO: 2707441 - RNA, 19 nt, Artificial Sequence
  Description of Artificial Sequence: Synthetic oligonucleotide
ugugaaagcaggugucauc

SEQ ID NO: 2707442 - RNA, 19 nt, Artificial Sequence
  Description of Artificial Sequence: Synthetic oligonucleotide
ggugauaguaucgcuacag

SEQ ID NO: 2707443 - RNA, 19 nt, Artificial Sequence
  Description of Artificial Sequence: Synthetic oligonucleotide
uaguaucgcuacagcaaag

SEQ ID NO: 2707444 - RNA, 19 nt, Artificial Sequence
  Description of Artificial Sequence: Synthetic oligonucleotide
uccauauuuugcacuacuu

SEQ ID NO: 2707445 - RNA, 19 nt, Artificial Sequence
  Description of Artificial Sequence: Synthetic oligonucleotide
aauguccuauuugucugug

SEQ ID NO: 2707446 - RNA, 19 nt, Artificial Sequence
  Description of Artificial Sequence: Synthetic oligonucleotide
ggauagauuccccaguuuc

SEQ ID NO: 2707447 - RNA, 19 nt, Artificial Sequence
  Description of Artificial Sequence: Synthetic oligonucleotide
aguuaaauuccaaacccau

SEQ ID NO: 2707448 - RNA, 19 nt, Artificial Sequence
  Description of Artificial Sequence: Synthetic oligonucleotide
uuuugcacuacuugaucuu

SEQ ID NO: 2707449 - RNA, 19 nt, Artificial Sequence
  Description of Artificial Sequence: Synthetic oligonucleotide
caucgauaucagaauuccc

SEQ ID NO: 2707450 - RNA, 19 nt, Artificial Sequence
  Description of Artificial Sequence: Synthetic oligonucleotide
uaauguccuauuugucugu

SEQ ID NO: 2707451 - RNA, 19 nt, Artificial Sequence
  Description of Artificial Sequence: Synthetic oligonucleotide
gugauaguaucgcuacagc

SEQ ID NO: 2707452 - RNA, 19 nt, Artificial Sequence
  Description of Artificial Sequence: Synthetic oligonucleotide
cuuacauaacucugaacaa

SEQ ID NO: 2707453 - RNA, 19 nt, Artificial Sequence
  Description of Artificial Sequence: Synthetic oligonucleotide
aaguaugaggugauaguau

SEQ ID NO: 2707454 - RNA, 19 nt, Artificial Sequence
  Description of Artificial Sequence: Synthetic oligonucleotide
cuacuugaucuuuucuuuc

SEQ ID NO: 2707455 - RNA, 19 nt, Artificial Sequence
  Description of Artificial Sequence: Synthetic oligonucleotide
acgaagaaacacaaagcug

SEQ ID NO: 2707456 - RNA, 19 nt, Artificial Sequence
  Description of Artificial Sequence: Synthetic oligonucleotide
uaaugaggucgcaaaugaa

SEQ ID NO: 2707457 - RNA, 19 nt, Artificial Sequence
  Description of Artificial Sequence: Synthetic oligonucleotide
aguaucgcuacagcaaaga

SEQ ID NO: 2707458 - RNA, 19 nt, Artificial Sequence
  Description of Artificial Sequence: Synthetic oligonucleotide
ugagaguuaauguccuauu

SEQ ID NO: 2707459 - RNA, 19 nt, Artificial Sequence
  Description of Artificial Sequence: Synthetic oligonucleotide
gugaaagcaggugucauca

SEQ ID NO: 2707460 - RNA, 19 nt, Artificial Sequence
  Description of Artificial Sequence: Synthetic oligonucleotide
uuggaacgagacuucuucu

SEQ ID NO: 2707461 - RNA, 19 nt, Artificial Sequence
  Description of Artificial Sequence: Synthetic oligonucleotide
ucuuagcagccauuugccu

SEQ ID NO: 2707462 - RNA, 19 nt, Artificial Sequence
  Description of Artificial Sequence: Synthetic oligonucleotide
ugcacuacuugaucuuuuc

SEQ ID NO: 2707463 - RNA, 19 nt, Artificial Sequence
  Description of Artificial Sequence: Synthetic oligonucleotide
aguuggccaaacuaugaua

SEQ ID NO: 2707464 - RNA, 19 nt, Artificial Sequence
  Description of Artificial Sequence: Synthetic oligonucleotide
caguucuccaucaguuggc

SEQ ID NO: 2707465 - RNA, 19 nt, Artificial Sequence
  Description of Artificial Sequence: Synthetic oligonucleotide
caguuaaauuccaaaccca

SEQ ID NO: 2707466 - RNA, 19 nt, Artificial Sequence
  Description of Artificial Sequence: Synthetic oligonucleotide
cacugcagaguacugaaca

SEQ ID NO: 2707467 - RNA, 19 nt, Artificial Sequence
  Description of Artificial Sequence: Synthetic oligonucleotide
uucuuucuguauuucucau

SEQ ID NO: 2707468 - RNA, 19 nt, Artificial Sequence
  Description of Artificial Sequence: Synthetic oligonucleotide
gcagccauuugccucagag

SEQ ID NO: 2707469 - RNA, 19 nt, Artificial Sequence
  Description of Artificial Sequence: Synthetic oligonucleotide
auauuuugcacuacuugau

SEQ ID NO: 2707470 - RNA, 19 nt, Artificial Sequence
  Description of Artificial Sequence: Synthetic oligonucleotide
uccuugcuuccauauuuug

SEQ ID NO: 2707471 - RNA, 19 nt, Artificial Sequence
  Description of Artificial Sequence: Synthetic oligonucleotide
cucaucuagcuucucuaug

SEQ ID NO: 2707472 - RNA, 19 nt, Artificial Sequence
  Description of Artificial Sequence: Synthetic oligonucleotide
uuuucccaacaauuggauu

SEQ ID NO: 2707473 - RNA, 19 nt, Artificial Sequence
  Description of Artificial Sequence: Synthetic oligonucleotide
acuuuuggaacgagacuuc

SEQ ID NO: 2707474 - RNA, 19 nt, Artificial Sequence
  Description of Artificial Sequence: Synthetic oligonucleotide
uggccaaacuaugauauuu

SEQ ID NO: 2707475 - RNA, 19 nt, Artificial Sequence
  Description of Artificial Sequence: Synthetic oligonucleotide
augagaguuaauguccuau

SEQ ID NO: 2707476 - RNA, 19 nt, Artificial Sequence
  Description of Artificial Sequence: Synthetic oligonucleotide
gaacgagacuucuucugga

SEQ ID NO: 2707477 - RNA, 19 nt, Artificial Sequence
  Description of Artificial Sequence: Synthetic oligonucleotide
ucgcuacagcaaagaaacg

SEQ ID NO: 2707478 - RNA, 19 nt, Artificial Sequence
  Description of Artificial Sequence: Synthetic oligonucleotide
ccauauuuugcacuacuug

SEQ ID NO: 2707479 - RNA, 19 nt, Artificial Sequence
  Description of Artificial Sequence: Synthetic oligonucleotide
augaggugauaguaucgcu

SEQ ID NO: 2707480 - RNA, 19 nt, Artificial Sequence
  Description of Artificial Sequence: Synthetic oligonucleotide
cucuuacauaacucugaac

SEQ ID NO: 2707481 - RNA, 19 nt, Artificial Sequence
  Description of Artificial Sequence: Synthetic oligonucleotide
cuaugauauuuucccaaca

SEQ ID NO: 2707482 - RNA, 19 nt, Artificial Sequence
  Description of Artificial Sequence: Synthetic oligonucleotide
uggauuuuccuugcuucca

SEQ ID NO: 2707483 - RNA, 19 nt, Artificial Sequence
  Description of Artificial Sequence: Synthetic oligonucleotide
cugaacaugaggguuauua

SEQ ID NO: 2707484 - RNA, 19 nt, Artificial Sequence
  Description of Artificial Sequence: Synthetic oligonucleotide
uuuuggaacgagacuucuu

SEQ ID NO: 2707485 - RNA, 19 nt, Artificial Sequence
  Description of Artificial Sequence: Synthetic oligonucleotide
  modified_base (6)..(6): a, c, u, g, unknown or other
cuguangguuuugagauga

SEQ ID NO: 2707486 - RNA, 19 nt, Artificial Sequence
  Description of Artificial Sequence: Synthetic oligonucleotide
aucaguuggccaaacuaug

SEQ ID NO: 2707487 - RNA, 19 nt, Artificial Sequence
  Description of Artificial Sequence: Synthetic oligonucleotide
uccaucaguuggccaaacu

SEQ ID NO: 2707488 - RNA, 19 nt, Artificial Sequence
  Description of Artificial Sequence: Synthetic oligonucleotide
augaggguuauuaggaaau

SEQ ID NO: 2707489 - RNA, 19 nt, Artificial Sequence
  Description of Artificial Sequence: Synthetic oligonucleotide
caugaggguuauuaggaaa

SEQ ID NO: 2707490 - RNA, 19 nt, Artificial Sequence
  Description of Artificial Sequence: Synthetic oligonucleotide
acaugaggguuauuaggaa

SEQ ID NO: 2707491 - RNA, 19 nt, Artificial Sequence
  Description of Artificial Sequence: Synthetic oligonucleotide
ccuugcuuccauauuuugc

SEQ ID NO: 2707492 - RNA, 19 nt, Artificial Sequence
  Description of Artificial Sequence: Synthetic oligonucleotide
agaugagaguuaauguccu

SEQ ID NO: 2707493 - RNA, 19 nt, Artificial Sequence
  Description of Artificial Sequence: Synthetic oligonucleotide
aagucaaugucugcucuua

SEQ ID NO: 2707494 - RNA, 19 nt, Artificial Sequence
  Description of Artificial Sequence: Synthetic oligonucleotide
uuuugagaugagaguuaau

SEQ ID NO: 2707495 - RNA, 19 nt, Artificial Sequence
  Description of Artificial Sequence: Synthetic oligonucleotide
  modified_base (4)..(4): a, c, u, g, unknown or other
guangguuuugagaugaga

SEQ ID NO: 2707496 - RNA, 19 nt, Artificial Sequence
  Description of Artificial Sequence: Synthetic oligonucleotide
augaggucgcaaaugaaaa

SEQ ID NO: 2707497 - RNA, 19 nt, Artificial Sequence
  Description of Artificial Sequence: Synthetic oligonucleotide
  modified_base (19)..(19): a, c, u, g, unknown or other
aguuucccaaagucuguan

SEQ ID NO: 2707498 - RNA, 19 nt, Artificial Sequence
  Description of Artificial Sequence: Synthetic oligonucleotide
uuugcacuacuugaucuuu

SEQ ID NO: 2707499 - RNA, 19 nt, Artificial Sequence
  Description of Artificial Sequence: Synthetic oligonucleotide
auuuucccaacaauuggau

SEQ ID NO: 2707500 - RNA, 19 nt, Artificial Sequence
  Description of Artificial Sequence: Synthetic oligonucleotide
guuuugagaugagaguuaa

SEQ ID NO: 2707501 - RNA, 19 nt, Artificial Sequence
  Description of Artificial Sequence: Synthetic oligonucleotide
cauaacucugaacaaaauu

SEQ ID NO: 2707502 - RNA, 19 nt, Artificial Sequence
  Description of Artificial Sequence: Synthetic oligonucleotide
uuccuugcuuccauauuuu

SEQ ID NO: 2707503 - RNA, 19 nt, Artificial Sequence
  Description of Artificial Sequence: Synthetic oligonucleotide
uuccccaguuucccaaagu

SEQ ID NO: 2707504 - RNA, 19 nt, Artificial Sequence
  Description of Artificial Sequence: Synthetic oligonucleotide
aggcucaucuagcuucucu

SEQ ID NO: 2707505 - RNA, 19 nt, Artificial Sequence
  Description of Artificial Sequence: Synthetic oligonucleotide
auuugcuggauugucuuuu

SEQ ID NO: 2707506 - RNA, 19 nt, Artificial Sequence
  Description of Artificial Sequence: Synthetic oligonucleotide
uauuugcuggauugucuuu

SEQ ID NO: 2707507 - RNA, 19 nt, Artificial Sequence
  Description of Artificial Sequence: Synthetic oligonucleotide
agcuggucacugcagagua

SEQ ID NO: 2707508 - RNA, 19 nt, Artificial Sequence
  Description of Artificial Sequence: Synthetic oligonucleotide
auacaaugugaaagcaggu

SEQ ID NO: 2707509 - RNA, 19 nt, Artificial Sequence
  Description of Artificial Sequence: Synthetic oligonucleotide
acugacuuuuggaacgaga

SEQ ID NO: 2707510 - RNA, 19 nt, Artificial Sequence
  Description of Artificial Sequence: Synthetic oligonucleotide
ugaggguuauuaggaaauc

SEQ ID NO: 2707511 - RNA, 19 nt, Artificial Sequence
  Description of Artificial Sequence: Synthetic oligonucleotide
guuggccaaacuaugauau

SEQ ID NO: 2707512 - RNA, 19 nt, Artificial Sequence
  Description of Artificial Sequence: Synthetic oligonucleotide
guaucuggauaaugagguc

SEQ ID NO: 2707513 - RNA, 19 nt, Artificial Sequence
  Description of Artificial Sequence: Synthetic oligonucleotide
uggauagauuccccaguuu

SEQ ID NO: 2707514 - RNA, 19 nt, Artificial Sequence
  Description of Artificial Sequence: Synthetic oligonucleotide
auuugccucagagaauaaa

SEQ ID NO: 2707515 - RNA, 19 nt, Artificial Sequence
  Description of Artificial Sequence: Synthetic oligonucleotide
cucuaguaauaaacucauc

SEQ ID NO: 2707516 - RNA, 19 nt, Artificial Sequence
  Description of Artificial Sequence: Synthetic oligonucleotide
gaaaucucuuagcagccau

SEQ ID NO: 2707517 - RNA, 19 nt, Artificial Sequence
  Description of Artificial Sequence: Synthetic oligonucleotide
caaagcuggucacugcaga

SEQ ID NO: 2707518 - RNA, 19 nt, Artificial Sequence
  Description of Artificial Sequence: Synthetic oligonucleotide
ugacugacuuuuggaacga

SEQ ID NO: 2707519 - RNA, 19 nt, Artificial Sequence
  Description of Artificial Sequence: Synthetic oligonucleotide
uggucacugcagaguacug

SEQ ID NO: 2707520 - RNA, 19 nt, Artificial Sequence
  Description of Artificial Sequence: Synthetic oligonucleotide
uucucaugaggcucaucua

SEQ ID NO: 2707521 - RNA, 19 nt, Artificial Sequence
  Description of Artificial Sequence: Synthetic oligonucleotide
guaucgcuacagcaaagaa

SEQ ID NO: 2707522 - RNA, 19 nt, Artificial Sequence
  Description of Artificial Sequence: Synthetic oligonucleotide
gagaguuaauguccuauuu

SEQ ID NO: 2707523 - RNA, 19 nt, Artificial Sequence
  Description of Artificial Sequence: Synthetic oligonucleotide
gaguacugaacaugagggu

SEQ ID NO: 2707524 - RNA, 19 nt, Artificial Sequence
  Description of Artificial Sequence: Synthetic oligonucleotide
caucaguuggccaaacuau

SEQ ID NO: 2707525 - RNA, 19 nt, Artificial Sequence
  Description of Artificial Sequence: Synthetic oligonucleotide
uugcacuacuugaucuuuu

SEQ ID NO: 2707526 - RNA, 19 nt, Artificial Sequence
  Description of Artificial Sequence: Synthetic oligonucleotide
cuugaucuuuucuuucugu

SEQ ID NO: 2707527 - RNA, 19 nt, Artificial Sequence
  Description of Artificial Sequence: Synthetic oligonucleotide
gauuuuccuugcuuccaua

SEQ ID NO: 2707528 - RNA, 19 nt, Artificial Sequence
  Description of Artificial Sequence: Synthetic oligonucleotide
uucccaacaauuggauuuu

SEQ ID NO: 2707529 - RNA, 19 nt, Artificial Sequence
  Description of Artificial Sequence: Synthetic oligonucleotide
ucuggauaaugaggucgca

SEQ ID NO: 2707530 - RNA, 19 nt, Artificial Sequence
  Description of Artificial Sequence: Synthetic oligonucleotide
gaggguuauuaggaaaucu

SEQ ID NO: 2707531 - RNA, 19 nt, Artificial Sequence
  Description of Artificial Sequence: Synthetic oligonucleotide
aggugauaguaucgcuaca

SEQ ID NO: 2707532 - RNA, 19 nt, Artificial Sequence
  Description of Artificial Sequence: Synthetic oligonucleotide
cagaauucccaaacaguua

SEQ ID NO: 2707533 - RNA, 19 nt, Artificial Sequence
  Description of Artificial Sequence: Synthetic oligonucleotide
cuuggguuucaaauucucu

SEQ ID NO: 2707534 - RNA, 19 nt, Artificial Sequence
  Description of Artificial Sequence: Synthetic oligonucleotide
acgagacuucuucuggaua

SEQ ID NO: 2707535 - RNA, 19 nt, Artificial Sequence
  Description of Artificial Sequence: Synthetic oligonucleotide
gaugagaguuaauguccua

SEQ ID NO: 2707536 - RNA, 19 nt, Artificial Sequence
  Description of Artificial Sequence: Synthetic oligonucleotide
gucugcucuuacauaacuc

SEQ ID NO: 2707537 - RNA, 19 nt, Artificial Sequence
  Description of Artificial Sequence: Synthetic oligonucleotide
uacugaacaugaggguuau

SEQ ID NO: 2707538 - RNA, 19 nt, Artificial Sequence
  Description of Artificial Sequence: Synthetic oligonucleotide
acauaacucugaacaaaau

SEQ ID NO: 2707539 - RNA, 19 nt, Artificial Sequence
  Description of Artificial Sequence: Synthetic oligonucleotide
  modified_base (12)..(12): a, c, u, g, unknown or other
caaagucuguangguuuug

SEQ ID NO: 2707540 - RNA, 19 nt, Artificial Sequence
  Description of Artificial Sequence: Synthetic oligonucleotide
cuguauuucucaugaggcu

SEQ ID NO: 2707541 - RNA, 19 nt, Artificial Sequence
  Description of Artificial Sequence: Synthetic oligonucleotide
caaagucaaugucugcucu

SEQ ID NO: 2707542 - RNA, 19 nt, Artificial Sequence
  Description of Artificial Sequence: Synthetic oligonucleotide
cacuacuugaucuuuucuu

SEQ ID NO: 2707543 - RNA, 19 nt, Artificial Sequence
  Description of Artificial Sequence: Synthetic oligonucleotide
agcuucucuaugaugcuuu

SEQ ID NO: 2707544 - RNA, 19 nt, Artificial Sequence
  Description of Artificial Sequence: Synthetic oligonucleotide
gcaaagaaacgaagaaaca

SEQ ID NO: 2707545 - RNA, 19 nt, Artificial Sequence
  Description of Artificial Sequence: Synthetic oligonucleotide
caaacccauuaaauauuaa

SEQ ID NO: 2707546 - RNA, 19 nt, Artificial Sequence
  Description of Artificial Sequence: Synthetic oligonucleotide
gcuacagcaaagaaacgaa

SEQ ID NO: 2707547 - RNA, 19 nt, Artificial Sequence
  Description of Artificial Sequence: Synthetic oligonucleotide
gcuuccauauuuugcacua

SEQ ID NO: 2707548 - RNA, 19 nt, Artificial Sequence
  Description of Artificial Sequence: Synthetic oligonucleotide
augugaaagcaggugucau

SEQ ID NO: 2707549 - RNA, 19 nt, Artificial Sequence
  Description of Artificial Sequence: Synthetic oligonucleotide
agacuucuucuggauagau

SEQ ID NO: 2707550 - RNA, 19 nt, Artificial Sequence
  Description of Artificial Sequence: Synthetic oligonucleotide
gagacuucuucuggauaga

SEQ ID NO: 2707551 - RNA, 19 nt, Artificial Sequence
  Description of Artificial Sequence: Synthetic oligonucleotide
aggucgcaaaugaaaagua

SEQ ID NO: 2707552 - RNA, 19 nt, Artificial Sequence
  Description of Artificial Sequence: Synthetic oligonucleotide
gcucuuacauaacucugaa

SEQ ID NO: 2707553 - RNA, 19 nt, Artificial Sequence
  Description of Artificial Sequence: Synthetic oligonucleotide
uauuucucaugaggcucau

SEQ ID NO: 2707554 - RNA, 19 nt, Artificial Sequence
  Description of Artificial Sequence: Synthetic oligonucleotide
ggguuauuaggaaaucucu

SEQ ID NO: 2707555 - RNA, 19 nt, Artificial Sequence
  Description of Artificial Sequence: Synthetic oligonucleotide
cuggauaaugaggucgcaa

SEQ ID NO: 2707556 - RNA, 19 nt, Artificial Sequence
  Description of Artificial Sequence: Synthetic oligonucleotide
guuaaauuccaaacccauu

SEQ ID NO: 2707557 - RNA, 19 nt, Artificial Sequence
  Description of Artificial Sequence: Synthetic oligonucleotide
ccaaacccauuaaauauua

SEQ ID NO: 2707558 - RNA, 19 nt, Artificial Sequence
  Description of Artificial Sequence: Synthetic oligonucleotide
gcagaguacugaacaugag

SEQ ID NO: 2707559 - RNA, 19 nt, Artificial Sequence
  Description of Artificial Sequence: Synthetic oligonucleotide
ucccaacaauuggauuuuc

SEQ ID NO: 2707560 - RNA, 19 nt, Artificial Sequence
  Description of Artificial Sequence: Synthetic oligonucleotide
guccuauuugucuguguau

SEQ ID NO: 2707561 - RNA, 19 nt, Artificial Sequence
  Description of Artificial Sequence: Synthetic oligonucleotide
cuggucacugcagaguacu

SEQ ID NO: 2707562 - RNA, 19 nt, Artificial Sequence
  Description of Artificial Sequence: Synthetic oligonucleotide
gguuuugagaugagaguua

SEQ ID NO: 2707563 - RNA, 19 nt, Artificial Sequence
  Description of Artificial Sequence: Synthetic oligonucleotide
cuuuuggaacgagacuucu

SEQ ID NO: 2707564 - RNA, 19 nt, Artificial Sequence
  Description of Artificial Sequence: Synthetic oligonucleotide
ggaaaucucuuagcagcca

SEQ ID NO: 2707565 - RNA, 19 nt, Artificial Sequence
  Description of Artificial Sequence: Synthetic oligonucleotide
ggguuucaaauucucuagu

SEQ ID NO: 2707566 - RNA, 19 nt, Artificial Sequence
  Description of Artificial Sequence: Synthetic oligonucleotide
ccauuugccucagagaaua

SEQ ID NO: 2707567 - RNA, 19 nt, Artificial Sequence
  Description of Artificial Sequence: Synthetic oligonucleotide
  modified_base (14)..(14): a, c, u, g, unknown or other
cccaaagucuguangguuu

SEQ ID NO: 2707568 - RNA, 19 nt, Artificial Sequence
  Description of Artificial Sequence: Synthetic oligonucleotide
gguuauuaggaaaucucuu

SEQ ID NO: 2707569 - RNA, 19 nt, Artificial Sequence
  Description of Artificial Sequence: Synthetic oligonucleotide
cuggauagauuccccaguu

SEQ ID NO: 2707570 - RNA, 19 nt, Artificial Sequence
  Description of Artificial Sequence: Synthetic oligonucleotide
cgcuacagcaaagaaacga

SEQ ID NO: 2707571 - RNA, 19 nt, Artificial Sequence
  Description of Artificial Sequence: Synthetic oligonucleotide
cauuugccucagagaauaa

SEQ ID NO: 2707572 - RNA, 19 nt, Artificial Sequence
  Description of Artificial Sequence: Synthetic oligonucleotide
caguuggccaaacuaugau

SEQ ID NO: 2707573 - RNA, 19 nt, Artificial Sequence
  Description of Artificial Sequence: Synthetic oligonucleotide
cuccaucaguuggccaaac

SEQ ID NO: 2707574 - RNA, 19 nt, Artificial Sequence
  Description of Artificial Sequence: Synthetic oligonucleotide
caucuagcuucucuaugau

SEQ ID NO: 2707575 - RNA, 19 nt, Artificial Sequence
  Description of Artificial Sequence: Synthetic oligonucleotide
ggauuuuccuugcuuccau

SEQ ID NO: 2707576 - RNA, 19 nt, Artificial Sequence
  Description of Artificial Sequence: Synthetic oligonucleotide
caauuggauuuuccuugcu

SEQ ID NO: 2707577 - RNA, 19 nt, Artificial Sequence
  Description of Artificial Sequence: Synthetic oligonucleotide
ccuauuugucuguguaucu

SEQ ID NO: 2707578 - RNA, 19 nt, Artificial Sequence
  Description of Artificial Sequence: Synthetic oligonucleotide
gcacuacuugaucuuuucu

SEQ ID NO: 2707579 - RNA, 19 nt, Artificial Sequence
  Description of Artificial Sequence: Synthetic oligonucleotide
ggucgcaaaugaaaaguau

SEQ ID NO: 2707580 - RNA, 19 nt, Artificial Sequence
  Description of Artificial Sequence: Synthetic oligonucleotide
caugaggcucaucuagcuu

SEQ ID NO: 2707581 - RNA, 19 nt, Artificial Sequence
  Description of Artificial Sequence: Synthetic oligonucleotide
agcagccauuugccucaga

SEQ ID NO: 2707582 - RNA, 19 nt, Artificial Sequence
  Description of Artificial Sequence: Synthetic oligonucleotide
gcucaucuagcuucucuau

SEQ ID NO: 2707583 - RNA, 19 nt, Artificial Sequence
  Description of Artificial Sequence: Synthetic oligonucleotide
cgauaucagaauucccaaa

SEQ ID NO: 2707584 - RNA, 19 nt, Artificial Sequence
  Description of Artificial Sequence: Synthetic oligonucleotide
gcuggucacugcagaguac

SEQ ID NO: 2707585 - RNA, 19 nt, Artificial Sequence
  Description of Artificial Sequence: Synthetic oligonucleotide
acugaacaugaggguuauu

SEQ ID NO: 2707586 - RNA, 19 nt, Artificial Sequence
  Description of Artificial Sequence: Synthetic oligonucleotide
ggccaaacuaugauauuuu

SEQ ID NO: 2707587 - RNA, 19 nt, Artificial Sequence
  Description of Artificial Sequence: Synthetic oligonucleotide
ccccaguuucccaaagucu

SEQ ID NO: 2707588 - RNA, 19 nt, Artificial Sequence
  Description of Artificial Sequence: Synthetic oligonucleotide
gucuguguaucuggauaau

SEQ ID NO: 2707589 - RNA, 19 nt, Artificial Sequence
  Description of Artificial Sequence: Synthetic oligonucleotide
gccauuugccucagagaau

SEQ ID NO: 2707590 - RNA, 19 nt, Artificial Sequence
  Description of Artificial Sequence: Synthetic oligonucleotide
  modified_base (1)..(1): a, c, u, g, unknown or other
ngguuuugagaugagaguu

SEQ ID NO: 2707591 - RNA, 19 nt, Artificial Sequence
  Description of Artificial Sequence: Synthetic oligonucleotide
aucaguaucaaguagauag

SEQ ID NO: 2707592 - RNA, 19 nt, Artificial Sequence
  Description of Artificial Sequence: Synthetic oligonucleotide
auuuauauuaguaaaaugg

SEQ ID NO: 2707593 - RNA, 19 nt, Artificial Sequence
  Description of Artificial Sequence: Synthetic oligonucleotide
aauauaacuacuuauacuu

SEQ ID NO: 2707594 - RNA, 19 nt, Artificial Sequence
  Description of Artificial Sequence: Synthetic oligonucleotide
aauaauagaaacaaaagcu

SEQ ID NO: 2707595 - RNA, 19 nt, Artificial Sequence
  Description of Artificial Sequence: Synthetic oligonucleotide
aaggaugagaaccaaaccg

SEQ ID NO: 2707596 - RNA, 19 nt, Artificial Sequence
  Description of Artificial Sequence: Synthetic oligonucleotide
uuaaauauaaaugucaugu

SEQ ID NO: 2707597 - RNA, 19 nt, Artificial Sequence
  Description of Artificial Sequence: Synthetic oligonucleotide
aaucaagagacaaagaagg

SEQ ID NO: 2707598 - RNA, 19 nt, Artificial Sequence
  Description of Artificial Sequence: Synthetic oligonucleotide
gaauaauagaaacaaaagc

SEQ ID NO: 2707599 - RNA, 19 nt, Artificial Sequence
  Description of Artificial Sequence: Synthetic oligonucleotide
aaacugcuuaucuagacuc

SEQ ID NO: 2707600 - RNA, 19 nt, Artificial Sequence
  Description of Artificial Sequence: Synthetic oligonucleotide
uuuauauuaguaaaaugga

SEQ ID NO: 2707601 - RNA, 19 nt, Artificial Sequence
  Description of Artificial Sequence: Synthetic oligonucleotide
aacaaaagcuacuuuaaug

SEQ ID NO: 2707602 - RNA, 19 nt, Artificial Sequence
  Description of Artificial Sequence: Synthetic oligonucleotide
aaguagauagcuaaacugc

SEQ ID NO: 2707603 - RNA, 19 nt, Artificial Sequence
  Description of Artificial Sequence: Synthetic oligonucleotide
uuucaaaacagccaagggc

SEQ ID NO: 2707604 - RNA, 19 nt, Artificial Sequence
  Description of Artificial Sequence: Synthetic oligonucleotide
uauacgacugacaacgggg

SEQ ID NO: 2707605 - RNA, 19 nt, Artificial Sequence
  Description of Artificial Sequence: Synthetic oligonucleotide
aaauauaacuacuuauacu

SEQ ID NO: 2707606 - RNA, 19 nt, Artificial Sequence
  Description of Artificial Sequence: Synthetic oligonucleotide
uauauuaguaaaauggaau

SEQ ID NO: 2707607 - RNA, 19 nt, Artificial Sequence
  Description of Artificial Sequence: Synthetic oligonucleotide
uaguaaaauggaauaauag

SEQ ID NO: 2707608 - RNA, 19 nt, Artificial Sequence
  Description of Artificial Sequence: Synthetic oligonucleotide
uggaauaauagaaacaaaa

SEQ ID NO: 2707609 - RNA, 19 nt, Artificial Sequence
  Description of Artificial Sequence: Synthetic oligonucleotide
aguaaaauggaauaauaga

SEQ ID NO: 2707610 - RNA, 19 nt, Artificial Sequence
  Description of Artificial Sequence: Synthetic oligonucleotide
uaaauauaacuacuuauac

SEQ ID NO: 2707611 - RNA, 19 nt, Artificial Sequence
  Description of Artificial Sequence: Synthetic oligonucleotide
aauggaauaauagaaacaa

SEQ ID NO: 2707612 - RNA, 19 nt, Artificial Sequence
  Description of Artificial Sequence: Synthetic oligonucleotide
acaaaagcuacuuuaauga

SEQ ID NO: 2707613 - RNA, 19 nt, Artificial Sequence
  Description of Artificial Sequence: Synthetic oligonucleotide
uuaaauauaacuacuuaua

SEQ ID NO: 2707614 - RNA, 19 nt, Artificial Sequence
  Description of Artificial Sequence: Synthetic oligonucleotide
aacuuuugaagauccagag

SEQ ID NO: 2707615 - RNA, 19 nt, Artificial Sequence
  Description of Artificial Sequence: Synthetic oligonucleotide
caagagacaaagaaggugc

SEQ ID NO: 2707616 - RNA, 19 nt, Artificial Sequence
  Description of Artificial Sequence: Synthetic oligonucleotide
uucuauuuauuuauauuag

SEQ ID NO: 2707617 - RNA, 19 nt, Artificial Sequence
  Description of Artificial Sequence: Synthetic oligonucleotide
aauccauugguaucugcac

SEQ ID NO: 2707618 - RNA, 19 nt, Artificial Sequence
  Description of Artificial Sequence: Synthetic oligonucleotide
uuuaccauuggauucuugc

SEQ ID NO: 2707619 - RNA, 19 nt, Artificial Sequence
  Description of Artificial Sequence: Synthetic oligonucleotide
uaauagaaacaaaagcuac

SEQ ID NO: 2707620 - RNA, 19 nt, Artificial Sequence
  Description of Artificial Sequence: Synthetic oligonucleotide
aaugucauguacuuccuga

SEQ ID NO: 2707621 - RNA, 19 nt, Artificial Sequence
  Description of Artificial Sequence: Synthetic oligonucleotide
aaaucaagagacaaagaag

SEQ ID NO: 2707622 - RNA, 19 nt, Artificial Sequence
  Description of Artificial Sequence: Synthetic oligonucleotide
aaaccuucuauuuauuuau

SEQ ID NO: 2707623 - RNA, 19 nt, Artificial Sequence
  Description of Artificial Sequence: Synthetic oligonucleotide
acuacuuauacuuuaaaua

SEQ ID NO: 2707624 - RNA, 19 nt, Artificial Sequence
  Description of Artificial Sequence: Synthetic oligonucleotide
cuuucuuaggccauauacg

SEQ ID NO: 2707625 - RNA, 19 nt, Artificial Sequence
  Description of Artificial Sequence: Synthetic oligonucleotide
uuaucuagacuccuggucu

SEQ ID NO: 2707626 - RNA, 19 nt, Artificial Sequence
  Description of Artificial Sequence: Synthetic oligonucleotide
uuucuuaggccauauacga

SEQ ID NO: 2707627 - RNA, 19 nt, Artificial Sequence
  Description of Artificial Sequence: Synthetic oligonucleotide
uuauauuaguaaaauggaa

SEQ ID NO: 2707628 - RNA, 19 nt, Artificial Sequence
  Description of Artificial Sequence: Synthetic oligonucleotide
uuuguagguaauccauugg

SEQ ID NO: 2707629 - RNA, 19 nt, Artificial Sequence
  Description of Artificial Sequence: Synthetic oligonucleotide
caaguagauagcuaaacug

SEQ ID NO: 2707630 - RNA, 19 nt, Artificial Sequence
  Description of Artificial Sequence: Synthetic oligonucleotide
uuccugaucaguaucaagu

SEQ ID NO: 2707631 - RNA, 19 nt, Artificial Sequence
  Description of Artificial Sequence: Synthetic oligonucleotide
aacuacuuauacuuuaaau

SEQ ID NO: 2707632 - RNA, 19 nt, Artificial Sequence
  Description of Artificial Sequence: Synthetic oligonucleotide
acuuuugaagauccagagc

SEQ ID NO: 2707633 - RNA, 19 nt, Artificial Sequence
  Description of Artificial Sequence: Synthetic oligonucleotide
agugucugcucacacaaac

SEQ ID NO: 2707634 - RNA, 19 nt, Artificial Sequence
  Description of Artificial Sequence: Synthetic oligonucleotide
agaaacaaaagcuacuuua

SEQ ID NO: 2707635 - RNA, 19 nt, Artificial Sequence
  Description of Artificial Sequence: Synthetic oligonucleotide
cuugaguuccuaaacgugc

SEQ ID NO: 2707636 - RNA, 19 nt, Artificial Sequence
  Description of Artificial Sequence: Synthetic oligonucleotide
augagaaccaaaccgccac

SEQ ID NO: 2707637 - RNA, 19 nt, Artificial Sequence
  Description of Artificial Sequence: Synthetic oligonucleotide
uuaucagagaucucuguug

SEQ ID NO: 2707638 - RNA, 19 nt, Artificial Sequence
  Description of Artificial Sequence: Synthetic oligonucleotide
ugcuuaucuagacuccugg

SEQ ID NO: 2707639 - RNA, 19 nt, Artificial Sequence
  Description of Artificial Sequence: Synthetic oligonucleotide
ucuauuuauuuauauuagu

SEQ ID NO: 2707640 - RNA, 19 nt, Artificial Sequence
  Description of Artificial Sequence: Synthetic oligonucleotide
aaagaaacucaggaugagg

SEQ ID NO: 2707641 - RNA, 19 nt, Artificial Sequence
  Description of Artificial Sequence: Synthetic oligonucleotide
auagcuaaacugcuuaucu

SEQ ID NO: 2707642 - RNA, 19 nt, Artificial Sequence
  Description of Artificial Sequence: Synthetic oligonucleotide
ucaaguagauagcuaaacu

SEQ ID NO: 2707643 - RNA, 19 nt, Artificial Sequence
  Description of Artificial Sequence: Synthetic oligonucleotide
uaucagagaucucuguugc

SEQ ID NO: 2707644 - RNA, 19 nt, Artificial Sequence
  Description of Artificial Sequence: Synthetic oligonucleotide
ucuugcacggcuuucuuag

SEQ ID NO: 2707645 - RNA, 19 nt, Artificial Sequence
  Description of Artificial Sequence: Synthetic oligonucleotide
uaauccauugguaucugca

SEQ ID NO: 2707646 - RNA, 19 nt, Artificial Sequence
  Description of Artificial Sequence: Synthetic oligonucleotide
ucuuaggccauauacgacu

SEQ ID NO: 2707647 - RNA, 19 nt, Artificial Sequence
  Description of Artificial Sequence: Synthetic oligonucleotide
aaaaccacacuagucuuuc

SEQ ID NO: 2707648 - RNA, 19 nt, Artificial Sequence
  Description of Artificial Sequence: Synthetic oligonucleotide
uugaguuccuaaacgugcg

SEQ ID NO: 2707649 - RNA, 19 nt, Artificial Sequence
  Description of Artificial Sequence: Synthetic oligonucleotide
aaagcuacuuuaaugaaaa

SEQ ID NO: 2707650 - RNA, 19 nt, Artificial Sequence
  Description of Artificial Sequence: Synthetic oligonucleotide
acuuuaaauauaaauguca

SEQ ID NO: 2707651 - RNA, 19 nt, Artificial Sequence
  Description of Artificial Sequence: Synthetic oligonucleotide
cuucuauuuauuuauauua

SEQ ID NO: 2707652 - RNA, 19 nt, Artificial Sequence
  Description of Artificial Sequence: Synthetic oligonucleotide
aauagaaacaaaagcuacu

SEQ ID NO: 2707653 - RNA, 19 nt, Artificial Sequence
  Description of Artificial Sequence: Synthetic oligonucleotide
auccauugguaucugcacc

SEQ ID NO: 2707654 - RNA, 19 nt, Artificial Sequence
  Description of Artificial Sequence: Synthetic oligonucleotide
uuguagguaauccauuggu

SEQ ID NO: 2707655 - RNA, 19 nt, Artificial Sequence
  Description of Artificial Sequence: Synthetic oligonucleotide
aggugcuucauauuaucgg

SEQ ID NO: 2707656 - RNA, 19 nt, Artificial Sequence
  Description of Artificial Sequence: Synthetic oligonucleotide
aagaaacucaggaugaggu

SEQ ID NO: 2707657 - RNA, 19 nt, Artificial Sequence
  Description of Artificial Sequence: Synthetic oligonucleotide
cauuucaaaacagccaagg

SEQ ID NO: 2707658 - RNA, 19 nt, Artificial Sequence
  Description of Artificial Sequence: Synthetic oligonucleotide
aggaugagaaccaaaccgc

SEQ ID NO: 2707659 - RNA, 19 nt, Artificial Sequence
  Description of Artificial Sequence: Synthetic oligonucleotide
aagaccggugcggagacgc

SEQ ID NO: 2707660 - RNA, 19 nt, Artificial Sequence
  Description of Artificial Sequence: Synthetic oligonucleotide
ucuacuuugccuauauuuu

SEQ ID NO: 2707661 - RNA, 19 nt, Artificial Sequence
  Description of Artificial Sequence: Synthetic oligonucleotide
uauaacuacuuauacuuua

SEQ ID NO: 2707662 - RNA, 19 nt, Artificial Sequence
  Description of Artificial Sequence: Synthetic oligonucleotide
aaauggaauaauagaaaca

SEQ ID NO: 2707663 - RNA, 19 nt, Artificial Sequence
  Description of Artificial Sequence: Synthetic oligonucleotide
uaaacugcuuaucuagacu

SEQ ID NO: 2707664 - RNA, 19 nt, Artificial Sequence
  Description of Artificial Sequence: Synthetic oligonucleotide
accauuggauucuugcacg

SEQ ID NO: 2707665 - RNA, 19 nt, Artificial Sequence
  Description of Artificial Sequence: Synthetic oligonucleotide
ugucugcucacacaaaccu

SEQ ID NO: 2707666 - RNA, 19 nt, Artificial Sequence
  Description of Artificial Sequence: Synthetic oligonucleotide
ccauauacgacugacaacg

SEQ ID NO: 2707667 - RNA, 19 nt, Artificial Sequence
  Description of Artificial Sequence: Synthetic oligonucleotide
aucaaguagauagcuaaac

SEQ ID NO: 2707668 - RNA, 19 nt, Artificial Sequence
  Description of Artificial Sequence: Synthetic oligonucleotide
gaugacgacacaaggaaug

SEQ ID NO: 2707669 - RNA, 19 nt, Artificial Sequence
  Description of Artificial Sequence: Synthetic oligonucleotide
uauuaucggguccauuuca

SEQ ID NO: 2707670 - RNA, 19 nt, Artificial Sequence
  Description of Artificial Sequence: Synthetic oligonucleotide
uaaacgugcggguccaagg

SEQ ID NO: 2707671 - RNA, 19 nt, Artificial Sequence
  Description of Artificial Sequence: Synthetic oligonucleotide
auauacgacugacaacggg

SEQ ID NO: 2707672 - RNA, 19 nt, Artificial Sequence
  Description of Artificial Sequence: Synthetic oligonucleotide
aggucgauagacgaagacc

SEQ ID NO: 2707673 - RNA, 19 nt, Artificial Sequence
  Description of Artificial Sequence: Synthetic oligonucleotide
acagccaagggcuuucagg

SEQ ID NO: 2707674 - RNA, 19 nt, Artificial Sequence
  Description of Artificial Sequence: Synthetic oligonucleotide
uuuugaagauccagagcag

SEQ ID NO: 2707675 - RNA, 19 nt, Artificial Sequence
  Description of Artificial Sequence: Synthetic oligonucleotide
auauuaucggguccauuuc

SEQ ID NO: 2707676 - RNA, 19 nt, Artificial Sequence
  Description of Artificial Sequence: Synthetic oligonucleotide
ggaauaauagaaacaaaag

SEQ ID NO: 2707677 - RNA, 19 nt, Artificial Sequence
  Description of Artificial Sequence: Synthetic oligonucleotide
agaacugggaugacgacac

SEQ ID NO: 2707678 - RNA, 19 nt, Artificial Sequence
  Description of Artificial Sequence: Synthetic oligonucleotide
guaucaaguagauagcuaa

SEQ ID NO: 2707679 - RNA, 19 nt, Artificial Sequence
  Description of Artificial Sequence: Synthetic oligonucleotide
uuuaucagagaucucuguu

SEQ ID NO: 2707680 - RNA, 19 nt, Artificial Sequence
  Description of Artificial Sequence: Synthetic oligonucleotide
uauuaguaaaauggaauaa

SEQ ID NO: 2707681 - RNA, 19 nt, Artificial Sequence
  Description of Artificial Sequence: Synthetic oligonucleotide
auauaaaugucauguacuu

SEQ ID NO: 2707682 - RNA, 19 nt, Artificial Sequence
  Description of Artificial Sequence: Synthetic oligonucleotide
aaggaaugcacaccauugu

SEQ ID NO: 2707683 - RNA, 19 nt, Artificial Sequence
  Description of Artificial Sequence: Synthetic oligonucleotide
uccauugguaucugcaccc

SEQ ID NO: 2707684 - RNA, 19 nt, Artificial Sequence
  Description of Artificial Sequence: Synthetic oligonucleotide
uagauagcuaaacugcuua

SEQ ID NO: 2707685 - RNA, 19 nt, Artificial Sequence
  Description of Artificial Sequence: Synthetic oligonucleotide
aggaaugcacaccauuguc

SEQ ID NO: 2707686 - RNA, 19 nt, Artificial Sequence
  Description of Artificial Sequence: Synthetic oligonucleotide
ggugcuucauauuaucggg

SEQ ID NO: 2707687 - RNA, 19 nt, Artificial Sequence
  Description of Artificial Sequence: Synthetic oligonucleotide
uaccauuggauucuugcac

SEQ ID NO: 2707688 - RNA, 19 nt, Artificial Sequence
  Description of Artificial Sequence: Synthetic oligonucleotide
ggucgauagacgaagaccg

SEQ ID NO: 2707689 - RNA, 19 nt, Artificial Sequence
  Description of Artificial Sequence: Synthetic oligonucleotide
aaaagaaacucaggaugag

SEQ ID NO: 2707690 - RNA, 19 nt, Artificial Sequence
  Description of Artificial Sequence: Synthetic oligonucleotide
agaaacucaggaugagguc

SEQ ID NO: 2707691 - RNA, 19 nt, Artificial Sequence
  Description of Artificial Sequence: Synthetic oligonucleotide
uaaauauaaaugucaugua

SEQ ID NO: 2707692 - RNA, 19 nt, Artificial Sequence
  Description of Artificial Sequence: Synthetic oligonucleotide
gacaacgggguauauguac

SEQ ID NO: 2707693 - RNA, 19 nt, Artificial Sequence
  Description of Artificial Sequence: Synthetic oligonucleotide
auagacgaagaccggugcg

SEQ ID NO: 2707694 - RNA, 19 nt, Artificial Sequence
  Description of Artificial Sequence: Synthetic oligonucleotide
aggcuugaguuccuaaacg

SEQ ID NO: 2707695 - RNA, 19 nt, Artificial Sequence
  Description of Artificial Sequence: Synthetic oligonucleotide
cuaaacugcuuaucuagac

SEQ ID NO: 2707696 - RNA, 19 nt, Artificial Sequence
  Description of Artificial Sequence: Synthetic oligonucleotide
uuaccauuggauucuugca

SEQ ID NO: 2707697 - RNA, 19 nt, Artificial Sequence
  Description of Artificial Sequence: Synthetic oligonucleotide
aacugcuuaucuagacucc

SEQ ID NO: 2707698 - RNA, 19 nt, Artificial Sequence
  Description of Artificial Sequence: Synthetic oligonucleotide
aaggugcuucauauuaucg

SEQ ID NO: 2707699 - RNA, 19 nt, Artificial Sequence
  Description of Artificial Sequence: Synthetic oligonucleotide
gauagacgaagaccggugc

SEQ ID NO: 2707700 - RNA, 19 nt, Artificial Sequence
  Description of Artificial Sequence: Synthetic oligonucleotide
uuuuaucagagaucucugu

SEQ ID NO: 2707701 - RNA, 19 nt, Artificial Sequence
  Description of Artificial Sequence: Synthetic oligonucleotide
aaaugucauguacuuccug

SEQ ID NO: 2707702 - RNA, 19 nt, Artificial Sequence
  Description of Artificial Sequence: Synthetic oligonucleotide
gucauguacuuccugauca

SEQ ID NO: 2707703 - RNA, 19 nt, Artificial Sequence
  Description of Artificial Sequence: Synthetic oligonucleotide
auuggauucuugcacggcu

SEQ ID NO: 2707704 - RNA, 19 nt, Artificial Sequence
  Description of Artificial Sequence: Synthetic oligonucleotide
ugagaaccaaaccgccacg

SEQ ID NO: 2707705 - RNA, 19 nt, Artificial Sequence
  Description of Artificial Sequence: Synthetic oligonucleotide
aacgggguauauguacggc

SEQ ID NO: 2707706 - RNA, 19 nt, Artificial Sequence
  Description of Artificial Sequence: Synthetic oligonucleotide
ugggaugacgacacaagga

SEQ ID NO: 2707707 - RNA, 19 nt, Artificial Sequence
  Description of Artificial Sequence: Synthetic oligonucleotide
guauauguacggcuccagg

SEQ ID NO: 2707708 - RNA, 19 nt, Artificial Sequence
  Description of Artificial Sequence: Synthetic oligonucleotide
auaauagaaacaaaagcua

SEQ ID NO: 2707709 - RNA, 19 nt, Artificial Sequence
  Description of Artificial Sequence: Synthetic oligonucleotide
cuuaucuagacuccugguc

SEQ ID NO: 2707710 - RNA, 19 nt, Artificial Sequence
  Description of Artificial Sequence: Synthetic oligonucleotide
gaaacucaggaugagguca

SEQ ID NO: 2707711 - RNA, 19 nt, Artificial Sequence
  Description of Artificial Sequence: Synthetic oligonucleotide
aaacgugcggguccaagga

SEQ ID NO: 2707712 - RNA, 19 nt, Artificial Sequence
  Description of Artificial Sequence: Synthetic oligonucleotide
ugaguuccuaaacgugcgg

SEQ ID NO: 2707713 - RNA, 19 nt, Artificial Sequence
  Description of Artificial Sequence: Synthetic oligonucleotide
aaccaaaccgccacggaag

SEQ ID NO: 2707714 - RNA, 19 nt, Artificial Sequence
  Description of Artificial Sequence: Synthetic oligonucleotide
uacuuauacuuuaaauaua

SEQ ID NO: 2707715 - RNA, 19 nt, Artificial Sequence
  Description of Artificial Sequence: Synthetic oligonucleotide
cugaucaguaucaaguaga

SEQ ID NO: 2707716 - RNA, 19 nt, Artificial Sequence
  Description of Artificial Sequence: Synthetic oligonucleotide
uccuuuuguagguaaucca

SEQ ID NO: 2707717 - RNA, 19 nt, Artificial Sequence
  Description of Artificial Sequence: Synthetic oligonucleotide
uguagguaauccauuggua

SEQ ID NO: 2707718 - RNA, 19 nt, Artificial Sequence
  Description of Artificial Sequence: Synthetic oligonucleotide
ugaucaguaucaaguagau

SEQ ID NO: 2707719 - RNA, 19 nt, Artificial Sequence
  Description of Artificial Sequence: Synthetic oligonucleotide
uuugaagauccagagcaga

SEQ ID NO: 2707720 - RNA, 19 nt, Artificial Sequence
  Description of Artificial Sequence: Synthetic oligonucleotide
uuccuaaacgugcgggucc

SEQ ID NO: 2707721 - RNA, 19 nt, Artificial Sequence
  Description of Artificial Sequence: Synthetic oligonucleotide
gguaucugcacccuugcag

SEQ ID NO: 2707722 - RNA, 19 nt, Artificial Sequence
  Description of Artificial Sequence: Synthetic oligonucleotide
caaggaugagaaccaaacc

SEQ ID NO: 2707723 - RNA, 19 nt, Artificial Sequence
  Description of Artificial Sequence: Synthetic oligonucleotide
ucaggaugaggucauuaaa

SEQ ID NO: 2707724 - RNA, 19 nt, Artificial Sequence
  Description of Artificial Sequence: Synthetic oligonucleotide
uagacgaagaccggugcgg

SEQ ID NO: 2707725 - RNA, 19 nt, Artificial Sequence
  Description of Artificial Sequence: Synthetic oligonucleotide
uauguacggcuccaggaac

SEQ ID NO: 2707726 - RNA, 19 nt, Artificial Sequence
  Description of Artificial Sequence: Synthetic oligonucleotide
agggcuuucaggaaaacca

SEQ ID NO: 2707727 - RNA, 19 nt, Artificial Sequence
  Description of Artificial Sequence: Synthetic oligonucleotide
gaugaggucauuaaauaua

SEQ ID NO: 2707728 - RNA, 19 nt, Artificial Sequence
  Description of Artificial Sequence: Synthetic oligonucleotide
gaguuccuaaacgugcggg

SEQ ID NO: 2707729 - RNA, 19 nt, Artificial Sequence
  Description of Artificial Sequence: Synthetic oligonucleotide
gaaggugcuucauauuauc

SEQ ID NO: 2707730 - RNA, 19 nt, Artificial Sequence
  Description of Artificial Sequence: Synthetic oligonucleotide
uaucaaguagauagcuaaa

SEQ ID NO: 2707731 - RNA, 19 nt, Artificial Sequence
  Description of Artificial Sequence: Synthetic oligonucleotide
uaacuacuuauacuuuaaa

SEQ ID NO: 2707732 - RNA, 19 nt, Artificial Sequence
  Description of Artificial Sequence: Synthetic oligonucleotide
uagguaauccauugguauc

SEQ ID NO: 2707733 - RNA, 19 nt, Artificial Sequence
  Description of Artificial Sequence: Synthetic oligonucleotide
uugcacggcuuucuuaggc

SEQ ID NO: 2707734 - RNA, 19 nt, Artificial Sequence
  Description of Artificial Sequence: Synthetic oligonucleotide
ucggguccauuucaaaaca

SEQ ID NO: 2707735 - RNA, 19 nt, Artificial Sequence
  Description of Artificial Sequence: Synthetic oligonucleotide
gaacuuuugaagauccaga

SEQ ID NO: 2707736 - RNA, 19 nt, Artificial Sequence
  Description of Artificial Sequence: Synthetic oligonucleotide
gacacaaggaaugcacacc

SEQ ID NO: 2707737 - RNA, 19 nt, Artificial Sequence
  Description of Artificial Sequence: Synthetic oligonucleotide
auauguacggcuccaggaa

SEQ ID NO: 2707738 - RNA, 19 nt, Artificial Sequence
  Description of Artificial Sequence: Synthetic oligonucleotide
gaagauccagagcagaacu

SEQ ID NO: 2707739 - RNA, 19 nt, Artificial Sequence
  Description of Artificial Sequence: Synthetic oligonucleotide
ugcuucauauuaucggguc

SEQ ID NO: 2707740 - RNA, 19 nt, Artificial Sequence
  Description of Artificial Sequence: Synthetic oligonucleotide
cagagaucucuguugcucc

SEQ ID NO: 2707741 - RNA, 19 nt, Artificial Sequence
  Description of Artificial Sequence: Synthetic oligonucleotide
acggaaggaagggacaccg

SEQ ID NO: 2707742 - RNA, 19 nt, Artificial Sequence
  Description of Artificial Sequence: Synthetic oligonucleotide
aaagaaggugcuucauauu

SEQ ID NO: 2707743 - RNA, 19 nt, Artificial Sequence
  Description of Artificial Sequence: Synthetic oligonucleotide
aaccacacuagucuuucuu

SEQ ID NO: 2707744 - RNA, 19 nt, Artificial Sequence
  Description of Artificial Sequence: Synthetic oligonucleotide
gagaaccaaaccgccacgg

SEQ ID NO: 2707745 - RNA, 19 nt, Artificial Sequence
  Description of Artificial Sequence: Synthetic oligonucleotide
gacaccgaggucgauagac

SEQ ID NO: 2707746 - RNA, 19 nt, Artificial Sequence
  Description of Artificial Sequence: Synthetic oligonucleotide
uucuuaggccauauacgac

SEQ ID NO: 2707747 - RNA, 19 nt, Artificial Sequence
  Description of Artificial Sequence: Synthetic oligonucleotide
acaacgggguauauguacg

SEQ ID NO: 2707748 - RNA, 19 nt, Artificial Sequence
  Description of Artificial Sequence: Synthetic oligonucleotide
cauauacgacugacaacgg

SEQ ID NO: 2707749 - RNA, 19 nt, Artificial Sequence
  Description of Artificial Sequence: Synthetic oligonucleotide
ugucccaggcuugaguucc

SEQ ID NO: 2707750 - RNA, 19 nt, Artificial Sequence
  Description of Artificial Sequence: Synthetic oligonucleotide
ggaacuuuugaagauccag

SEQ ID NO: 2707751 - RNA, 19 nt, Artificial Sequence
  Description of Artificial Sequence: Synthetic oligonucleotide
cuuaggccauauacgacug

SEQ ID NO: 2707752 - RNA, 19 nt, Artificial Sequence
  Description of Artificial Sequence: Synthetic oligonucleotide
auugucccaggcuugaguu

SEQ ID NO: 2707753 - RNA, 19 nt, Artificial Sequence
  Description of Artificial Sequence: Synthetic oligonucleotide
accaaaccgccacggaagg

SEQ ID NO: 2707754 - RNA, 19 nt, Artificial Sequence
  Description of Artificial Sequence: Synthetic oligonucleotide
agguaauccauugguaucu

SEQ ID NO: 2707755 - RNA, 19 nt, Artificial Sequence
  Description of Artificial Sequence: Synthetic oligonucleotide
accuucuauuuauuuauau

SEQ ID NO: 2707756 - RNA, 19 nt, Artificial Sequence
  Description of Artificial Sequence: Synthetic oligonucleotide
ugucauguacuuccugauc

SEQ ID NO: 2707757 - RNA, 19 nt, Artificial Sequence
  Description of Artificial Sequence: Synthetic oligonucleotide
uugcagucuacuuugccua

SEQ ID NO: 2707758 - RNA, 19 nt, Artificial Sequence
  Description of Artificial Sequence: Synthetic oligonucleotide
gauccagagcagaacuggg

SEQ ID NO: 2707759 - RNA, 19 nt, Artificial Sequence
  Description of Artificial Sequence: Synthetic oligonucleotide
ugcacggcuuucuuaggcc

SEQ ID NO: 2707760 - RNA, 19 nt, Artificial Sequence
  Description of Artificial Sequence: Synthetic oligonucleotide
aguagauagcuaaacugcu

SEQ ID NO: 2707761 - RNA, 19 nt, Artificial Sequence
  Description of Artificial Sequence: Synthetic oligonucleotide
gauagcuaaacugcuuauc

SEQ ID NO: 2707762 - RNA, 19 nt, Artificial Sequence
  Description of Artificial Sequence: Synthetic oligonucleotide
aguuccuaaacgugcgggu

SEQ ID NO: 2707763 - RNA, 19 nt, Artificial Sequence
  Description of Artificial Sequence: Synthetic oligonucleotide
uuuuaccauuggauucuug

SEQ ID NO: 2707764 - RNA, 19 nt, Artificial Sequence
  Description of Artificial Sequence: Synthetic oligonucleotide
uccaggaacuuuugaagau

SEQ ID NO: 2707765 - RNA, 19 nt, Artificial Sequence
  Description of Artificial Sequence: Synthetic oligonucleotide
aaugcacaccauuguccca

SEQ ID NO: 2707766 - RNA, 19 nt, Artificial Sequence
  Description of Artificial Sequence: Synthetic oligonucleotide
acaccauugucccaggcuu

SEQ ID NO: 2707767 - RNA, 19 nt, Artificial Sequence
  Description of Artificial Sequence: Synthetic oligonucleotide
acaaggaaugcacaccauu

SEQ ID NO: 2707768 - RNA, 19 nt, Artificial Sequence
  Description of Artificial Sequence: Synthetic oligonucleotide
ggguccaaggaugagaacc

SEQ ID NO: 2707769 - RNA, 19 nt, Artificial Sequence
  Description of Artificial Sequence: Synthetic oligonucleotide
caacgggguauauguacgg

SEQ ID NO: 2707770 - RNA, 19 nt, Artificial Sequence
  Description of Artificial Sequence: Synthetic oligonucleotide
auugguaucugcacccuug

SEQ ID NO: 2707771 - RNA, 19 nt, Artificial Sequence
  Description of Artificial Sequence: Synthetic oligonucleotide
gguccauuucaaaacagcc

SEQ ID NO: 2707772 - RNA, 19 nt, Artificial Sequence
  Description of Artificial Sequence: Synthetic oligonucleotide
acaaagaaggugcuucaua

SEQ ID NO: 2707773 - RNA, 19 nt, Artificial Sequence
  Description of Artificial Sequence: Synthetic oligonucleotide
caaaccuucuauuuauuua

SEQ ID NO: 2707774 - RNA, 19 nt, Artificial Sequence
  Description of Artificial Sequence: Synthetic oligonucleotide
cugacaacgggguauaugu

SEQ ID NO: 2707775 - RNA, 19 nt, Artificial Sequence
  Description of Artificial Sequence: Synthetic oligonucleotide
gcuccaggaacuuuugaag

SEQ ID NO: 2707776 - RNA, 19 nt, Artificial Sequence
  Description of Artificial Sequence: Synthetic oligonucleotide
uccugaucaguaucaagua

SEQ ID NO: 2707777 - RNA, 19 nt, Artificial Sequence
  Description of Artificial Sequence: Synthetic oligonucleotide
agcagaacugggaugacga

SEQ ID NO: 2707778 - RNA, 19 nt, Artificial Sequence
  Description of Artificial Sequence: Synthetic oligonucleotide
ugaggucauuaaauauaac

SEQ ID NO: 2707779 - RNA, 19 nt, Artificial Sequence
  Description of Artificial Sequence: Synthetic oligonucleotide
uaggccauauacgacugac

SEQ ID NO: 2707780 - RNA, 19 nt, Artificial Sequence
  Description of Artificial Sequence: Synthetic oligonucleotide
caggcuugaguuccuaaac

SEQ ID NO: 2707781 - RNA, 19 nt, Artificial Sequence
  Description of Artificial Sequence: Synthetic oligonucleotide
acgggguauauguacggcu

SEQ ID NO: 2707782 - RNA, 19 nt, Artificial Sequence
  Description of Artificial Sequence: Synthetic oligonucleotide
guagguaauccauugguau

SEQ ID NO: 2707783 - RNA, 19 nt, Artificial Sequence
  Description of Artificial Sequence: Synthetic oligonucleotide
agauagcuaaacugcuuau

SEQ ID NO: 2707784 - RNA, 19 nt, Artificial Sequence
  Description of Artificial Sequence: Synthetic oligonucleotide
ucgauagacgaagaccggu

SEQ ID NO: 2707785 - RNA, 19 nt, Artificial Sequence
  Description of Artificial Sequence: Synthetic oligonucleotide
gaggucgauagacgaagac

SEQ ID NO: 2707786 - RNA, 19 nt, Artificial Sequence
  Description of Artificial Sequence: Synthetic oligonucleotide
cauauuaucggguccauuu

SEQ ID NO: 2707787 - RNA, 19 nt, Artificial Sequence
  Description of Artificial Sequence: Synthetic oligonucleotide
gucuacuuugccuauauuu

SEQ ID NO: 2707788 - RNA, 19 nt, Artificial Sequence
  Description of Artificial Sequence: Synthetic oligonucleotide
cuucauauuaucgggucca

SEQ ID NO: 2707789 - RNA, 19 nt, Artificial Sequence
  Description of Artificial Sequence: Synthetic oligonucleotide
cagccaagggcuuucagga

SEQ ID NO: 2707790 - RNA, 19 nt, Artificial Sequence
  Description of Artificial Sequence: Synthetic oligonucleotide
uacggcuccaggaacuuuu

SEQ ID NO: 2707791 - RNA, 19 nt, Artificial Sequence
  Description of Artificial Sequence: Synthetic oligonucleotide
acugggaugacgacacaag

SEQ ID NO: 2707792 - RNA, 19 nt, Artificial Sequence
  Description of Artificial Sequence: Synthetic oligonucleotide
uagcuaaacugcuuaucua

SEQ ID NO: 2707793 - RNA, 19 nt, Artificial Sequence
  Description of Artificial Sequence: Synthetic oligonucleotide
aaaccacacuagucuuucu

SEQ ID NO: 2707794 - RNA, 19 nt, Artificial Sequence
  Description of Artificial Sequence: Synthetic oligonucleotide
caaagaaggugcuucauau

SEQ ID NO: 2707795 - RNA, 19 nt, Artificial Sequence
  Description of Artificial Sequence: Synthetic oligonucleotide
augucauguacuuccugau

SEQ ID NO: 2707796 - RNA, 19 nt, Artificial Sequence
  Description of Artificial Sequence: Synthetic oligonucleotide
caaaagcuacuuuaaugaa

SEQ ID NO: 2707797 - RNA, 19 nt, Artificial Sequence
  Description of Artificial Sequence: Synthetic oligonucleotide
uuaggccauauacgacuga

SEQ ID NO: 2707798 - RNA, 19 nt, Artificial Sequence
  Description of Artificial Sequence: Synthetic oligonucleotide
uuaucggguccauuucaaa

SEQ ID NO: 2707799 - RNA, 19 nt, Artificial Sequence
  Description of Artificial Sequence: Synthetic oligonucleotide
acugacaacgggguauaug

SEQ ID NO: 2707800 - RNA, 19 nt, Artificial Sequence
  Description of Artificial Sequence: Synthetic oligonucleotide
accacacuagucuuucuuu

SEQ ID NO: 2707801 - RNA, 19 nt, Artificial Sequence
  Description of Artificial Sequence: Synthetic oligonucleotide
uuggauucuugcacggcuu

SEQ ID NO: 2707802 - RNA, 19 nt, Artificial Sequence
  Description of Artificial Sequence: Synthetic oligonucleotide
cuugcacggcuuucuuagg

SEQ ID NO: 2707803 - RNA, 19 nt, Artificial Sequence
  Description of Artificial Sequence: Synthetic oligonucleotide
guccauuucaaaacagcca

SEQ ID NO: 2707804 - RNA, 19 nt, Artificial Sequence
  Description of Artificial Sequence: Synthetic oligonucleotide
agaaccaaaccgccacgga

SEQ ID NO: 2707805 - RNA, 19 nt, Artificial Sequence
  Description of Artificial Sequence: Synthetic oligonucleotide
gcuucauauuaucgggucc

SEQ ID NO: 2707806 - RNA, 19 nt, Artificial Sequence
  Description of Artificial Sequence: Synthetic oligonucleotide
gggaugacgacacaaggaa

SEQ ID NO: 2707807 - RNA, 19 nt, Artificial Sequence
  Description of Artificial Sequence: Synthetic oligonucleotide
aacgugcggguccaaggau

SEQ ID NO: 2707808 - RNA, 19 nt, Artificial Sequence
  Description of Artificial Sequence: Synthetic oligonucleotide
ucaaaacagccaagggcuu

SEQ ID NO: 2707809 - RNA, 19 nt, Artificial Sequence
  Description of Artificial Sequence: Synthetic oligonucleotide
cuugcagucuacuuugccu

SEQ ID NO: 2707810 - RNA, 19 nt, Artificial Sequence
  Description of Artificial Sequence: Synthetic oligonucleotide
ucuagacuccuggucucag

SEQ ID NO: 2707811 - RNA, 19 nt, Artificial Sequence
  Description of Artificial Sequence: Synthetic oligonucleotide
ggccauauacgacugacaa

SEQ ID NO: 2707812 - RNA, 19 nt, Artificial Sequence
  Description of Artificial Sequence: Synthetic oligonucleotide
ugcggguccaaggaugaga

SEQ ID NO: 2707813 - RNA, 19 nt, Artificial Sequence
  Description of Artificial Sequence: Synthetic oligonucleotide
aaaccgccacggaaggaag

SEQ ID NO: 2707814 - RNA, 19 nt, Artificial Sequence
  Description of Artificial Sequence: Synthetic oligonucleotide
aaacucaggaugaggucau

SEQ ID NO: 2707815 - RNA, 19 nt, Artificial Sequence
  Description of Artificial Sequence: Synthetic oligonucleotide
ugguaucugcacccuugca

SEQ ID NO: 2707816 - RNA, 19 nt, Artificial Sequence
  Description of Artificial Sequence: Synthetic oligonucleotide
ccugaucaguaucaaguag

SEQ ID NO: 2707817 - RNA, 19 nt, Artificial Sequence
  Description of Artificial Sequence: Synthetic oligonucleotide
accgccacggaaggaaggg

SEQ ID NO: 2707818 - RNA, 19 nt, Artificial Sequence
  Description of Artificial Sequence: Synthetic oligonucleotide
gacgaagaccggugcggag

SEQ ID NO: 2707819 - RNA, 19 nt, Artificial Sequence
  Description of Artificial Sequence: Synthetic oligonucleotide
cugcuuaucuagacuccug

SEQ ID NO: 2707820 - RNA, 19 nt, Artificial Sequence
  Description of Artificial Sequence: Synthetic oligonucleotide
cuaaacgugcggguccaag

SEQ ID NO: 2707821 - RNA, 19 nt, Artificial Sequence
  Description of Artificial Sequence: Synthetic oligonucleotide
ucugcacccuugcagucua

SEQ ID NO: 2707822 - RNA, 19 nt, Artificial Sequence
  Description of Artificial Sequence: Synthetic oligonucleotide
aaccgccacggaaggaagg

SEQ ID NO: 2707823 - RNA, 19 nt, Artificial Sequence
  Description of Artificial Sequence: Synthetic oligonucleotide
aguaucaaguagauagcua

SEQ ID NO: 2707824 - RNA, 19 nt, Artificial Sequence
  Description of Artificial Sequence: Synthetic oligonucleotide
aucagagaucucuguugcu

SEQ ID NO: 2707825 - RNA, 19 nt, Artificial Sequence
  Description of Artificial Sequence: Synthetic oligonucleotide
cauuggauucuugcacggc

SEQ ID NO: 2707826 - RNA, 19 nt, Artificial Sequence
  Description of Artificial Sequence: Synthetic oligonucleotide
acaccgaggucgauagacg

SEQ ID NO: 2707827 - RNA, 19 nt, Artificial Sequence
  Description of Artificial Sequence: Synthetic oligonucleotide
acgacugacaacgggguau

SEQ ID NO: 2707828 - RNA, 19 nt, Artificial Sequence
  Description of Artificial Sequence: Synthetic oligonucleotide
uggauucuugcacggcuuu

SEQ ID NO: 2707829 - RNA, 19 nt, Artificial Sequence
  Description of Artificial Sequence: Synthetic oligonucleotide
auauaacuacuuauacuuu

SEQ ID NO: 2707830 - RNA, 19 nt, Artificial Sequence
  Description of Artificial Sequence: Synthetic oligonucleotide
gucgauagacgaagaccgg

SEQ ID NO: 2707831 - RNA, 19 nt, Artificial Sequence
  Description of Artificial Sequence: Synthetic oligonucleotide
auacgacugacaacggggu

SEQ ID NO: 2707832 - RNA, 19 nt, Artificial Sequence
  Description of Artificial Sequence: Synthetic oligonucleotide
ugcuccuuuuguagguaau

SEQ ID NO: 2707833 - RNA, 19 nt, Artificial Sequence
  Description of Artificial Sequence: Synthetic oligonucleotide
gugucugcucacacaaacc

SEQ ID NO: 2707834 - RNA, 19 nt, Artificial Sequence
  Description of Artificial Sequence: Synthetic oligonucleotide
ugacaacgggguauaugua

SEQ ID NO: 2707835 - RNA, 19 nt, Artificial Sequence
  Description of Artificial Sequence: Synthetic oligonucleotide
uaucugcacccuugcaguc

SEQ ID NO: 2707836 - RNA, 19 nt, Artificial Sequence
  Description of Artificial Sequence: Synthetic oligonucleotide
uccuaaacgugcgggucca

SEQ ID NO: 2707837 - RNA, 19 nt, Artificial Sequence
  Description of Artificial Sequence: Synthetic oligonucleotide
acgaagaccggugcggaga

SEQ ID NO: 2707838 - RNA, 19 nt, Artificial Sequence
  Description of Artificial Sequence: Synthetic oligonucleotide
caggaugaggucauuaaau

SEQ ID NO: 2707839 - RNA, 19 nt, Artificial Sequence
  Description of Artificial Sequence: Synthetic oligonucleotide
auuaucggguccauuucaa

SEQ ID NO: 2707840 - RNA, 19 nt, Artificial Sequence
  Description of Artificial Sequence: Synthetic oligonucleotide
auggaauaauagaaacaaa

SEQ ID NO: 2707841 - RNA, 19 nt, Artificial Sequence
  Description of Artificial Sequence: Synthetic oligonucleotide
ggugcggagacgcgaggcg

SEQ ID NO: 2707842 - RNA, 19 nt, Artificial Sequence
  Description of Artificial Sequence: Synthetic oligonucleotide
ccauuggauucuugcacgg

SEQ ID NO: 2707843 - RNA, 19 nt, Artificial Sequence
  Description of Artificial Sequence: Synthetic oligonucleotide
ggguccauuucaaaacagc

SEQ ID NO: 2707844 - RNA, 19 nt, Artificial Sequence
  Description of Artificial Sequence: Synthetic oligonucleotide
uacgacugacaacggggua

SEQ ID NO: 2707845 - RNA, 19 nt, Artificial Sequence
  Description of Artificial Sequence: Synthetic oligonucleotide
ugcagucuacuuugccuau

SEQ ID NO: 2707846 - RNA, 19 nt, Artificial Sequence
  Description of Artificial Sequence: Synthetic oligonucleotide
agacuccuggucucagaga

SEQ ID NO: 2707847 - RNA, 19 nt, Artificial Sequence
  Description of Artificial Sequence: Synthetic oligonucleotide
ugcucacacaaaccuucua

SEQ ID NO: 2707848 - RNA, 19 nt, Artificial Sequence
  Description of Artificial Sequence: Synthetic oligonucleotide
agaucucuguugcuccuuu

SEQ ID NO: 2707849 - RNA, 19 nt, Artificial Sequence
  Description of Artificial Sequence: Synthetic oligonucleotide
gggguauauguacggcucc

SEQ ID NO: 2707850 - RNA, 19 nt, Artificial Sequence
  Description of Artificial Sequence: Synthetic oligonucleotide
cagaacugggaugacgaca

SEQ ID NO: 2707851 - RNA, 19 nt, Artificial Sequence
  Description of Artificial Sequence: Synthetic oligonucleotide
gcuugaguuccuaaacgug

SEQ ID NO: 2707852 - RNA, 19 nt, Artificial Sequence
  Description of Artificial Sequence: Synthetic oligonucleotide
caccauugucccaggcuug

SEQ ID NO: 2707853 - RNA, 19 nt, Artificial Sequence
  Description of Artificial Sequence: Synthetic oligonucleotide
aaccuucuauuuauuuaua

SEQ ID NO: 2707854 - RNA, 19 nt, Artificial Sequence
  Description of Artificial Sequence: Synthetic oligonucleotide
gguauauguacggcuccag

SEQ ID NO: 2707855 - RNA, 19 nt, Artificial Sequence
  Description of Artificial Sequence: Synthetic oligonucleotide
uugucccaggcuugaguuc

SEQ ID NO: 2707856 - RNA, 19 nt, Artificial Sequence
  Description of Artificial Sequence: Synthetic oligonucleotide
caaaccgccacggaaggaa

SEQ ID NO: 2707857 - RNA, 19 nt, Artificial Sequence
  Description of Artificial Sequence: Synthetic oligonucleotide
agagcagaacugggaugac

SEQ ID NO: 2707858 - RNA, 19 nt, Artificial Sequence
  Description of Artificial Sequence: Synthetic oligonucleotide
uucauauuaucggguccau

SEQ ID NO: 2707859 - RNA, 19 nt, Artificial Sequence
  Description of Artificial Sequence: Synthetic oligonucleotide
auguacggcuccaggaacu

SEQ ID NO: 2707860 - RNA, 19 nt, Artificial Sequence
  Description of Artificial Sequence: Synthetic oligonucleotide
caccgaggucgauagacga

SEQ ID NO: 2707861 - RNA, 19 nt, Artificial Sequence
  Description of Artificial Sequence: Synthetic oligonucleotide
auucuugcacggcuuucuu

SEQ ID NO: 2707862 - RNA, 19 nt, Artificial Sequence
  Description of Artificial Sequence: Synthetic oligonucleotide
ucauauuaucggguccauu

SEQ ID NO: 2707863 - RNA, 19 nt, Artificial Sequence
  Description of Artificial Sequence: Synthetic oligonucleotide
gccauauacgacugacaac

SEQ ID NO: 2707864 - RNA, 19 nt, Artificial Sequence
  Description of Artificial Sequence: Synthetic oligonucleotide
ugcacccuugcagucuacu

SEQ ID NO: 2707865 - RNA, 19 nt, Artificial Sequence
  Description of Artificial Sequence: Synthetic oligonucleotide
cucuguugcuccuuuugua

SEQ ID NO: 2707866 - RNA, 19 nt, Artificial Sequence
  Description of Artificial Sequence: Synthetic oligonucleotide
agagacaaagaaggugcuu

SEQ ID NO: 2707867 - RNA, 19 nt, Artificial Sequence
  Description of Artificial Sequence: Synthetic oligonucleotide
accauugucccaggcuuga

SEQ ID NO: 2707868 - RNA, 19 nt, Artificial Sequence
  Description of Artificial Sequence: Synthetic oligonucleotide
cuuucaggaaaaccacacu

SEQ ID NO: 2707869 - RNA, 19 nt, Artificial Sequence
  Description of Artificial Sequence: Synthetic oligonucleotide
aucugcacccuugcagucu

SEQ ID NO: 2707870 - RNA, 19 nt, Artificial Sequence
  Description of Artificial Sequence: Synthetic oligonucleotide
agacgaagaccggugcgga

SEQ ID NO: 2707871 - RNA, 19 nt, Artificial Sequence
  Description of Artificial Sequence: Synthetic oligonucleotide
acgugcggguccaaggaug

SEQ ID NO: 2707872 - RNA, 19 nt, Artificial Sequence
  Description of Artificial Sequence: Synthetic oligonucleotide
cacggaaggaagggacacc

SEQ ID NO: 2707873 - RNA, 19 nt, Artificial Sequence
  Description of Artificial Sequence: Synthetic oligonucleotide
gacgcgaggcgagggcagg

SEQ ID NO: 2707874 - RNA, 19 nt, Artificial Sequence
  Description of Artificial Sequence: Synthetic oligonucleotide
gagacgcgaggcgagggca

SEQ ID NO: 2707875 - RNA, 19 nt, Artificial Sequence
  Description of Artificial Sequence: Synthetic oligonucleotide
gaagggacaccgaggucga

SEQ ID NO: 2707876 - RNA, 19 nt, Artificial Sequence
  Description of Artificial Sequence: Synthetic oligonucleotide
gaucaguaucaaguagaua

SEQ ID NO: 2707877 - RNA, 19 nt, Artificial Sequence
  Description of Artificial Sequence: Synthetic oligonucleotide
gaagaccggugcggagacg

SEQ ID NO: 2707878 - RNA, 19 nt, Artificial Sequence
  Description of Artificial Sequence: Synthetic oligonucleotide
gguccaaggaugagaacca

SEQ ID NO: 2707879 - RNA, 19 nt, Artificial Sequence
  Description of Artificial Sequence: Synthetic oligonucleotide
cuagacuccuggucucaga

SEQ ID NO: 2707880 - RNA, 19 nt, Artificial Sequence
  Description of Artificial Sequence: Synthetic oligonucleotide
caguaucaaguagauagcu

SEQ ID NO: 2707881 - RNA, 19 nt, Artificial Sequence
  Description of Artificial Sequence: Synthetic oligonucleotide
ccuugcagucuacuuugcc

SEQ ID NO: 2707882 - RNA, 19 nt, Artificial Sequence
  Description of Artificial Sequence: Synthetic oligonucleotide
gaggcgagggcaggcuacc

SEQ ID NO: 2707883 - RNA, 19 nt, Artificial Sequence
  Description of Artificial Sequence: Synthetic oligonucleotide
ccgaggucgauagacgaag

SEQ ID NO: 2707884 - RNA, 19 nt, Artificial Sequence
  Description of Artificial Sequence: Synthetic oligonucleotide
cgauagacgaagaccggug

SEQ ID NO: 2707885 - RNA, 19 nt, Artificial Sequence
  Description of Artificial Sequence: Synthetic oligonucleotide
aggaacuuuugaagaucca

SEQ ID NO: 2707886 - RNA, 19 nt, Artificial Sequence
  Description of Artificial Sequence: Synthetic oligonucleotide
uguacggcuccaggaacuu

SEQ ID NO: 2707887 - RNA, 19 nt, Artificial Sequence
  Description of Artificial Sequence: Synthetic oligonucleotide
gguaauccauugguaucug

SEQ ID NO: 2707888 - RNA, 19 nt, Artificial Sequence
  Description of Artificial Sequence: Synthetic oligonucleotide
cgacacaaggaaugcacac

SEQ ID NO: 2707889 - RNA, 19 nt, Artificial Sequence
  Description of Artificial Sequence: Synthetic oligonucleotide
aggccauauacgacugaca

SEQ ID NO: 2707890 - RNA, 19 nt, Artificial Sequence
  Description of Artificial Sequence: Synthetic oligonucleotide
agccaagggcuuucaggaa

SEQ ID NO: 2707891 - RNA, 19 nt, Artificial Sequence
  Description of Artificial Sequence: Synthetic oligonucleotide
ggagacgcgaggcgagggc

SEQ ID NO: 2707892 - RNA, 19 nt, Artificial Sequence
  Description of Artificial Sequence: Synthetic oligonucleotide
gggcuuucaggaaaaccac

SEQ ID NO: 2707893 - RNA, 19 nt, Artificial Sequence
  Description of Artificial Sequence: Synthetic oligonucleotide
gcucacacaaaccuucuau

SEQ ID NO: 2707894 - RNA, 19 nt, Artificial Sequence
  Description of Artificial Sequence: Synthetic oligonucleotide
cacaccauugucccaggcu

SEQ ID NO: 2707895 - RNA, 19 nt, Artificial Sequence
  Description of Artificial Sequence: Synthetic oligonucleotide
gccaagggcuuucaggaaa

SEQ ID NO: 2707896 - RNA, 19 nt, Artificial Sequence
  Description of Artificial Sequence: Synthetic oligonucleotide
acgcgaggcgagggcaggc

SEQ ID NO: 2707897 - RNA, 19 nt, Artificial Sequence
  Description of Artificial Sequence: Synthetic oligonucleotide
accggugcggagacgcgag

SEQ ID NO: 2707898 - RNA, 19 nt, Artificial Sequence
  Description of Artificial Sequence: Synthetic oligonucleotide
gaacugggaugacgacaca

SEQ ID NO: 2707899 - RNA, 19 nt, Artificial Sequence
  Description of Artificial Sequence: Synthetic oligonucleotide
ggaaaaccacacuagucuu

SEQ ID NO: 2707900 - RNA, 19 nt, Artificial Sequence
  Description of Artificial Sequence: Synthetic oligonucleotide
cauugucccaggcuugagu

SEQ ID NO: 2707901 - RNA, 19 nt, Artificial Sequence
  Description of Artificial Sequence: Synthetic oligonucleotide
agggacaccgaggucgaua

SEQ ID NO: 2707902 - RNA, 19 nt, Artificial Sequence
  Description of Artificial Sequence: Synthetic oligonucleotide
agacgcgaggcgagggcag

SEQ ID NO: 2707903 - RNA, 19 nt, Artificial Sequence
  Description of Artificial Sequence: Synthetic oligonucleotide
gcagaacugggaugacgac

SEQ ID NO: 2707904 - RNA, 19 nt, Artificial Sequence
  Description of Artificial Sequence: Synthetic oligonucleotide
gcacggcuuucuuaggcca

SEQ ID NO: 2707905 - RNA, 19 nt, Artificial Sequence
  Description of Artificial Sequence: Synthetic oligonucleotide
ggcuuucaggaaaaccaca

SEQ ID NO: 2707906 - RNA, 19 nt, Artificial Sequence
  Description of Artificial Sequence: Synthetic oligonucleotide
guagauagcuaaacugcuu

SEQ ID NO: 2707907 - RNA, 19 nt, Artificial Sequence
  Description of Artificial Sequence: Synthetic oligonucleotide
cgggguauauguacggcuc

SEQ ID NO: 2707908 - RNA, 19 nt, Artificial Sequence
  Description of Artificial Sequence: Synthetic oligonucleotide
gaccggugcggagacgcga

SEQ ID NO: 2707909 - RNA, 19 nt, Artificial Sequence
  Description of Artificial Sequence: Synthetic oligonucleotide
gugcuucauauuaucgggu

SEQ ID NO: 2707910 - RNA, 19 nt, Artificial Sequence
  Description of Artificial Sequence: Synthetic oligonucleotide
accgaggucgauagacgaa

SEQ ID NO: 2707911 - RNA, 19 nt, Artificial Sequence
  Description of Artificial Sequence: Synthetic oligonucleotide
gcuuaucuagacuccuggu

SEQ ID NO: 2707912 - RNA, 19 nt, Artificial Sequence
  Description of Artificial Sequence: Synthetic oligonucleotide
agaccggugcggagacgcg

SEQ ID NO: 2707913 - RNA, 19 nt, Artificial Sequence
  Description of Artificial Sequence: Synthetic oligonucleotide
aacucaggaugaggucauu

SEQ ID NO: 2707914 - RNA, 19 nt, Artificial Sequence
  Description of Artificial Sequence: Synthetic oligonucleotide
guugcuccuuuuguaggua

SEQ ID NO: 2707915 - RNA, 19 nt, Artificial Sequence
  Description of Artificial Sequence: Synthetic oligonucleotide
ggguauauguacggcucca

SEQ ID NO: 2707916 - RNA, 19 nt, Artificial Sequence
  Description of Artificial Sequence: Synthetic oligonucleotide
cagucuacuuugccuauau

SEQ ID NO: 2707917 - RNA, 19 nt, Artificial Sequence
  Description of Artificial Sequence: Synthetic oligonucleotide
ccaggcuugaguuccuaaa

SEQ ID NO: 2707918 - RNA, 19 nt, Artificial Sequence
  Description of Artificial Sequence: Synthetic oligonucleotide
cggguccauuucaaaacag

SEQ ID NO: 2707919 - RNA, 19 nt, Artificial Sequence
  Description of Artificial Sequence: Synthetic oligonucleotide
gugcggagacgcgaggcga

SEQ ID NO: 2707920 - RNA, 19 nt, Artificial Sequence
  Description of Artificial Sequence: Synthetic oligonucleotide
cacccuugcagucuacuuu

SEQ ID NO: 2707921 - RNA, 19 nt, Artificial Sequence
  Description of Artificial Sequence: Synthetic oligonucleotide
ggauucuugcacggcuuuc

SEQ ID NO: 2707922 - RNA, 19 nt, Artificial Sequence
  Description of Artificial Sequence: Synthetic oligonucleotide
cgccacggaaggaagggac

SEQ ID NO: 2707923 - RNA, 19 nt, Artificial Sequence
  Description of Artificial Sequence: Synthetic oligonucleotide
gagugucugcucacacaaa

SEQ ID NO: 2707924 - RNA, 19 nt, Artificial Sequence
  Description of Artificial Sequence: Synthetic oligonucleotide
cugcucacacaaaccuucu

SEQ ID NO: 2707925 - RNA, 19 nt, Artificial Sequence
  Description of Artificial Sequence: Synthetic oligonucleotide
cacaaaccuucuauuuauu

SEQ ID NO: 2707926 - RNA, 19 nt, Artificial Sequence
  Description of Artificial Sequence: Synthetic oligonucleotide
acggcuuucuuaggccaua

SEQ ID NO: 2707927 - RNA, 19 nt, Artificial Sequence
  Description of Artificial Sequence: Synthetic oligonucleotide
guccaaggaugagaaccaa

SEQ ID NO: 2707928 - RNA, 19 nt, Artificial Sequence
  Description of Artificial Sequence: Synthetic oligonucleotide
gcggguccaaggaugagaa

SEQ ID NO: 2707929 - RNA, 19 nt, Artificial Sequence
  Description of Artificial Sequence: Synthetic oligonucleotide
cccuugcagucuacuuugc

SEQ ID NO: 2707930 - RNA, 19 nt, Artificial Sequence
  Description of Artificial Sequence: Synthetic oligonucleotide
cugcacccuugcagucuac

SEQ ID NO: 2707931 - RNA, 19 nt, Artificial Sequence
  Description of Artificial Sequence: Synthetic oligonucleotide
cgaagaccggugcggagac

SEQ ID NO: 2707932 - RNA, 19 nt, Artificial Sequence
  Description of Artificial Sequence: Synthetic oligonucleotide
gugcggguccaaggaugag

SEQ ID NO: 2707933 - RNA, 19 nt, Artificial Sequence
  Description of Artificial Sequence: Synthetic oligonucleotide
aagggacaccgaggucgau

SEQ ID NO: 2707934 - RNA, 19 nt, Artificial Sequence
  Description of Artificial Sequence: Synthetic oligonucleotide
caaaacagccaagggcuuu

SEQ ID NO: 2707935 - RNA, 19 nt, Artificial Sequence
  Description of Artificial Sequence: Synthetic oligonucleotide
gccacggaaggaagggaca

SEQ ID NO: 2707936 - RNA, 19 nt, Artificial Sequence
  Description of Artificial Sequence: Synthetic oligonucleotide
ucccaggcuugaguuccua

SEQ ID NO: 2707937 - RNA, 19 nt, Artificial Sequence
  Description of Artificial Sequence: Synthetic oligonucleotide
gcggagacgcgaggcgagg

SEQ ID NO: 2707938 - RNA, 19 nt, Artificial Sequence
  Description of Artificial Sequence: Synthetic oligonucleotide
gagaucucuguugcuccuu

SEQ ID NO: 2707939 - RNA, 19 nt, Artificial Sequence
  Description of Artificial Sequence: Synthetic oligonucleotide
cauugguaucugcacccuu

SEQ ID NO: 2707940 - RNA, 19 nt, Artificial Sequence
  Description of Artificial Sequence: Synthetic oligonucleotide
gucugcucacacaaaccuu

SEQ ID NO: 2707941 - RNA, 19 nt, Artificial Sequence
  Description of Artificial Sequence: Synthetic oligonucleotide
ggaugacgacacaaggaau

SEQ ID NO: 2707942 - RNA, 19 nt, Artificial Sequence
  Description of Artificial Sequence: Synthetic oligonucleotide
ggcuuucuuaggccauaua

SEQ ID NO: 2707943 - RNA, 19 nt, Artificial Sequence
  Description of Artificial Sequence: Synthetic oligonucleotide
cacggcuuucuuaggccau

SEQ ID NO: 2707944 - RNA, 19 nt, Artificial Sequence
  Description of Artificial Sequence: Synthetic oligonucleotide
cgugcggguccaaggauga

SEQ ID NO: 2707945 - RNA, 19 nt, Artificial Sequence
  Description of Artificial Sequence: Synthetic oligonucleotide
ccauugucccaggcuugag

SEQ ID NO: 2707946 - RNA, 19 nt, Artificial Sequence
  Description of Artificial Sequence: Synthetic oligonucleotide
ccacacuagucuuucuuuu

SEQ ID NO: 2707947 - RNA, 19 nt, Artificial Sequence
  Description of Artificial Sequence: Synthetic oligonucleotide
ggacaccgaggucgauaga

SEQ ID NO: 2707948 - RNA, 19 nt, Artificial Sequence
  Description of Artificial Sequence: Synthetic oligonucleotide
cgaggucgauagacgaaga

SEQ ID NO: 2707949 - RNA, 19 nt, Artificial Sequence
  Description of Artificial Sequence: Synthetic oligonucleotide
ccggugcggagacgcgagg

SEQ ID NO: 2707950 - RNA, 19 nt, Artificial Sequence
  Description of Artificial Sequence: Synthetic oligonucleotide
cggugcggagacgcgaggc

SEQ ID NO: 2707951 - RNA, 19 nt, Artificial Sequence
  Description of Artificial Sequence: Synthetic oligonucleotide
gacugacaacgggguauau

SEQ ID NO: 2707952 - RNA, 19 nt, Artificial Sequence
  Description of Artificial Sequence: Synthetic oligonucleotide
cggagacgcgaggcgaggg

SEQ ID NO: 2707953 - RNA, 19 nt, Artificial Sequence
  Description of Artificial Sequence: Synthetic oligonucleotide
gcagucuacuuugccuaua

SEQ ID NO: 2707954 - RNA, 19 nt, Artificial Sequence
  Description of Artificial Sequence: Synthetic oligonucleotide
cccaggcuugaguuccuaa

SEQ ID NO: 2707955 - RNA, 19 nt, Artificial Sequence
  Description of Artificial Sequence: Synthetic oligonucleotide
gcgaggcgagggcaggcua

SEQ ID NO: 2707956 - RNA, 19 nt, Artificial Sequence
  Description of Artificial Sequence: Synthetic oligonucleotide
cggguccaaggaugagaac

SEQ ID NO: 2707957 - RNA, 19 nt, Artificial Sequence
  Description of Artificial Sequence: Synthetic oligonucleotide
ccaaaccgccacggaagga

SEQ ID NO: 2707958 - RNA, 19 nt, Artificial Sequence
  Description of Artificial Sequence: Synthetic oligonucleotide
guacggcuccaggaacuuu

SEQ ID NO: 2707959 - RNA, 19 nt, Artificial Sequence
  Description of Artificial Sequence: Synthetic oligonucleotide
gucccaggcuugaguuccu

SEQ ID NO: 2707960 - RNA, 19 nt, Artificial Sequence
  Description of Artificial Sequence: Synthetic oligonucleotide
ccgccacggaaggaaggga

SEQ ID NO: 2707961 - RNA, 19 nt, Artificial Sequence
  Description of Artificial Sequence: Synthetic oligonucleotide
cgacugacaacgggguaua

SEQ ID NO: 2707962 - RNA, 19 nt, Artificial Sequence
  Description of Artificial Sequence: Synthetic oligonucleotide
ccuaaacgugcggguccaa

SEQ ID NO: 2707963 - RNA, 19 nt, Artificial Sequence
  Description of Artificial Sequence: Synthetic oligonucleotide
cgcgaggcgagggcaggcu

SEQ ID NO: 2707964 - RNA, 19 nt, Artificial Sequence
  Description of Artificial Sequence: Synthetic oligonucleotide
ugaucuuugaauuuguggg

SEQ ID NO: 2707965 - RNA, 19 nt, Artificial Sequence
  Description of Artificial Sequence: Synthetic oligonucleotide
gaugauaaaguuuggaggg

SEQ ID NO: 2707966 - RNA, 19 nt, Artificial Sequence
  Description of Artificial Sequence: Synthetic oligonucleotide
uauugagucacaaucaucc

SEQ ID NO: 2707967 - RNA, 19 nt, Artificial Sequence
  Description of Artificial Sequence: Synthetic oligonucleotide
aaaggaucugguuacacgg

SEQ ID NO: 2707968 - RNA, 19 nt, Artificial Sequence
  Description of Artificial Sequence: Synthetic oligonucleotide
augacugugaucuucuccc

SEQ ID NO: 2707969 - RNA, 19 nt, Artificial Sequence
  Description of Artificial Sequence: Synthetic oligonucleotide
aaacuuguuauugagucac

SEQ ID NO: 2707970 - RNA, 19 nt, Artificial Sequence
  Description of Artificial Sequence: Synthetic oligonucleotide
agaguggggagcuauaggc

SEQ ID NO: 2707971 - RNA, 19 nt, Artificial Sequence
  Description of Artificial Sequence: Synthetic oligonucleotide
ugagucacaaucauccggg

SEQ ID NO: 2707972 - RNA, 19 nt, Artificial Sequence
  Description of Artificial Sequence: Synthetic oligonucleotide
uuguuauugagucacaauc

SEQ ID NO: 2707973 - RNA, 19 nt, Artificial Sequence
  Description of Artificial Sequence: Synthetic oligonucleotide
aagaaucccaccuucucuc

SEQ ID NO: 2707974 - RNA, 19 nt, Artificial Sequence
  Description of Artificial Sequence: Synthetic oligonucleotide
aacagccccaccuugcggc

SEQ ID NO: 2707975 - RNA, 19 nt, Artificial Sequence
  Description of Artificial Sequence: Synthetic oligonucleotide
uccuucagcauacuguugg

SEQ ID NO: 2707976 - RNA, 19 nt, Artificial Sequence
  Description of Artificial Sequence: Synthetic oligonucleotide
ucgucaaugacugugaucu

SEQ ID NO: 2707977 - RNA, 19 nt, Artificial Sequence
  Description of Artificial Sequence: Synthetic oligonucleotide
uguuauugagucacaauca

SEQ ID NO: 2707978 - RNA, 19 nt, Artificial Sequence
  Description of Artificial Sequence: Synthetic oligonucleotide
ugaauuugugggcuugucg

SEQ ID NO: 2707979 - RNA, 19 nt, Artificial Sequence
  Description of Artificial Sequence: Synthetic oligonucleotide
uugagucacaaucauccgg

SEQ ID NO: 2707980 - RNA, 19 nt, Artificial Sequence
  Description of Artificial Sequence: Synthetic oligonucleotide
gacaucacaaaacuugggc

SEQ ID NO: 2707981 - RNA, 19 nt, Artificial Sequence
  Description of Artificial Sequence: Synthetic oligonucleotide
uagaccuugacguagccgc

SEQ ID NO: 2707982 - RNA, 19 nt, Artificial Sequence
  Description of Artificial Sequence: Synthetic oligonucleotide
uguugguugcuguagagug

SEQ ID NO: 2707983 - RNA, 19 nt, Artificial Sequence
  Description of Artificial Sequence: Synthetic oligonucleotide
aagaagugaucuuugaauu

SEQ ID NO: 2707984 - RNA, 19 nt, Artificial Sequence
  Description of Artificial Sequence: Synthetic oligonucleotide
gugaucuuugaauuugugg

SEQ ID NO: 2707985 - RNA, 19 nt, Artificial Sequence
  Description of Artificial Sequence: Synthetic oligonucleotide
aguggggagcuauaggcgc

SEQ ID NO: 2707986 - RNA, 19 nt, Artificial Sequence
  Description of Artificial Sequence: Synthetic oligonucleotide
aaguuuggagggaagaauc

SEQ ID NO: 2707987 - RNA, 19 nt, Artificial Sequence
  Description of Artificial Sequence: Synthetic oligonucleotide
cuaaaucuccuccaggaag

SEQ ID NO: 2707988 - RNA, 19 nt, Artificial Sequence
  Description of Artificial Sequence: Synthetic oligonucleotide
aagucggcgggaaacagcc

SEQ ID NO: 2707989 - RNA, 19 nt, Artificial Sequence
  Description of Artificial Sequence: Synthetic oligonucleotide
uuggagucgucaaugacug

SEQ ID NO: 2707990 - RNA, 19 nt, Artificial Sequence
  Description of Artificial Sequence: Synthetic oligonucleotide
uucuugaaagaagugaucu

SEQ ID NO: 2707991 - RNA, 19 nt, Artificial Sequence
  Description of Artificial Sequence: Synthetic oligonucleotide
acagacaucacaaaacuug

SEQ ID NO: 2707992 - RNA, 19 nt, Artificial Sequence
  Description of Artificial Sequence: Synthetic oligonucleotide
uaaaucuccuccaggaagu

SEQ ID NO: 2707993 - RNA, 19 nt, Artificial Sequence
  Description of Artificial Sequence: Synthetic oligonucleotide
cauaggauuggcaauguuc

SEQ ID NO: 2707994 - RNA, 19 nt, Artificial Sequence
  Description of Artificial Sequence: Synthetic oligonucleotide
gaucuuugaauuugugggc

SEQ ID NO: 2707995 - RNA, 19 nt, Artificial Sequence
  Description of Artificial Sequence: Synthetic oligonucleotide
uccagaucauccuucagca

SEQ ID NO: 2707996 - RNA, 19 nt, Artificial Sequence
  Description of Artificial Sequence: Synthetic oligonucleotide
auggauguugguuuugcag

SEQ ID NO: 2707997 - RNA, 19 nt, Artificial Sequence
  Description of Artificial Sequence: Synthetic oligonucleotide
cagacaucacaaaacuugg

SEQ ID NO: 2707998 - RNA, 19 nt, Artificial Sequence
  Description of Artificial Sequence: Synthetic oligonucleotide
aaccaggugggaucuugcc

SEQ ID NO: 2707999 - RNA, 19 nt, Artificial Sequence
  Description of Artificial Sequence: Synthetic oligonucleotide
caauguucauggauguugg

SEQ ID NO: 2708000 - RNA, 19 nt, Artificial Sequence
  Description of Artificial Sequence: Synthetic oligonucleotide
ggauuggcaauguucaugg

SEQ ID NO: 2708001 - RNA, 19 nt, Artificial Sequence
  Description of Artificial Sequence: Synthetic oligonucleotide
uuuggagggaagaauccca

SEQ ID NO: 2708002 - RNA, 19 nt, Artificial Sequence
  Description of Artificial Sequence: Synthetic oligonucleotide
ucaaugacugugaucuucu

SEQ ID NO: 2708003 - RNA, 19 nt, Artificial Sequence
  Description of Artificial Sequence: Synthetic oligonucleotide
aaauccagaucauccuuca

SEQ ID NO: 2708004 - RNA, 19 nt, Artificial Sequence
  Description of Artificial Sequence: Synthetic oligonucleotide
gguuuugcaguucuuacag

SEQ ID NO: 2708005 - RNA, 19 nt, Artificial Sequence
  Description of Artificial Sequence: Synthetic oligonucleotide
aguucuuacagcggagccc

SEQ ID NO: 2708006 - RNA, 19 nt, Artificial Sequence
  Description of Artificial Sequence: Synthetic oligonucleotide
uguucauggauguugguuu

SEQ ID NO: 2708007 - RNA, 19 nt, Artificial Sequence
  Description of Artificial Sequence: Synthetic oligonucleotide
acguucuccagcccggacc

SEQ ID NO: 2708008 - RNA, 19 nt, Artificial Sequence
  Description of Artificial Sequence: Synthetic oligonucleotide
gucacaaucauccgggcac

SEQ ID NO: 2708009 - RNA, 19 nt, Artificial Sequence
  Description of Artificial Sequence: Synthetic oligonucleotide
accuaaaucuccuccagga

SEQ ID NO: 2708010 - RNA, 19 nt, Artificial Sequence
  Description of Artificial Sequence: Synthetic oligonucleotide
auugagucacaaucauccg

SEQ ID NO: 2708011 - RNA, 19 nt, Artificial Sequence
  Description of Artificial Sequence: Synthetic oligonucleotide
ugugaucugcccgaucucg

SEQ ID NO: 2708012 - RNA, 19 nt, Artificial Sequence
  Description of Artificial Sequence: Synthetic oligonucleotide
aucugaucuuucuucagug

SEQ ID NO: 2708013 - RNA, 19 nt, Artificial Sequence
  Description of Artificial Sequence: Synthetic oligonucleotide
uugguugcuguagaguggg

SEQ ID NO: 2708014 - RNA, 19 nt, Artificial Sequence
  Description of Artificial Sequence: Synthetic oligonucleotide
acugggcccgcccaggacc

SEQ ID NO: 2708015 - RNA, 19 nt, Artificial Sequence
  Description of Artificial Sequence: Synthetic oligonucleotide
auaggauuggcaauguuca

SEQ ID NO: 2708016 - RNA, 19 nt, Artificial Sequence
  Description of Artificial Sequence: Synthetic oligonucleotide
gaaacagccccaccuugcg

SEQ ID NO: 2708017 - RNA, 19 nt, Artificial Sequence
  Description of Artificial Sequence: Synthetic oligonucleotide
ucagcauacuguugguugc

SEQ ID NO: 2708018 - RNA, 19 nt, Artificial Sequence
  Description of Artificial Sequence: Synthetic oligonucleotide
aguuuggagggaagaaucc

SEQ ID NO: 2708019 - RNA, 19 nt, Artificial Sequence
  Description of Artificial Sequence: Synthetic oligonucleotide
uagaguggggagcuauagg

SEQ ID NO: 2708020 - RNA, 19 nt, Artificial Sequence
  Description of Artificial Sequence: Synthetic oligonucleotide
ucuccuuucugcaccacga

SEQ ID NO: 2708021 - RNA, 19 nt, Artificial Sequence
  Description of Artificial Sequence: Synthetic oligonucleotide
agggaagaaucccaccuuc

SEQ ID NO: 2708022 - RNA, 19 nt, Artificial Sequence
  Description of Artificial Sequence: Synthetic oligonucleotide
caaucauccgggcacagac

SEQ ID NO: 2708023 - RNA, 19 nt, Artificial Sequence
  Description of Artificial Sequence: Synthetic oligonucleotide
acggaaaccaggugggauc

SEQ ID NO: 2708024 - RNA, 19 nt, Artificial Sequence
  Description of Artificial Sequence: Synthetic oligonucleotide
cuucucuccgauuuucccc

SEQ ID NO: 2708025 - RNA, 19 nt, Artificial Sequence
  Description of Artificial Sequence: Synthetic oligonucleotide
ucugguuacacggugcaca

SEQ ID NO: 2708026 - RNA, 19 nt, Artificial Sequence
  Description of Artificial Sequence: Synthetic oligonucleotide
agaaucccaccuucucucc

SEQ ID NO: 2708027 - RNA, 19 nt, Artificial Sequence
  Description of Artificial Sequence: Synthetic oligonucleotide
uuauugagucacaaucauc

SEQ ID NO: 2708028 - RNA, 19 nt, Artificial Sequence
  Description of Artificial Sequence: Synthetic oligonucleotide
aaaguuuggagggaagaau

SEQ ID NO: 2708029 - RNA, 19 nt, Artificial Sequence
  Description of Artificial Sequence: Synthetic oligonucleotide
uugcaguucuuacagcgga

SEQ ID NO: 2708030 - RNA, 19 nt, Artificial Sequence
  Description of Artificial Sequence: Synthetic oligonucleotide
uucagugugaucugcccga

SEQ ID NO: 2708031 - RNA, 19 nt, Artificial Sequence
  Description of Artificial Sequence: Synthetic oligonucleotide
ggugccaacaccuaaaucu

SEQ ID NO: 2708032 - RNA, 19 nt, Artificial Sequence
  Description of Artificial Sequence: Synthetic oligonucleotide
cuugcggccgguauagacc

SEQ ID NO: 2708033 - RNA, 19 nt, Artificial Sequence
  Description of Artificial Sequence: Synthetic oligonucleotide
uuccccacaaaggaucugg

SEQ ID NO: 2708034 - RNA, 19 nt, Artificial Sequence
  Description of Artificial Sequence: Synthetic oligonucleotide
agaucauccuucagcauac

SEQ ID NO: 2708035 - RNA, 19 nt, Artificial Sequence
  Description of Artificial Sequence: Synthetic oligonucleotide
gaauuugugggcuugucgu

SEQ ID NO: 2708036 - RNA, 19 nt, Artificial Sequence
  Description of Artificial Sequence: Synthetic oligonucleotide
caacaccuaaaucuccucc

SEQ ID NO: 2708037 - RNA, 19 nt, Artificial Sequence
  Description of Artificial Sequence: Synthetic oligonucleotide
auuggagucgucaaugacu

SEQ ID NO: 2708038 - RNA, 19 nt, Artificial Sequence
  Description of Artificial Sequence: Synthetic oligonucleotide
aaaccaggugggaucuugc

SEQ ID NO: 2708039 - RNA, 19 nt, Artificial Sequence
  Description of Artificial Sequence: Synthetic oligonucleotide
ggagcuauaggcgcgacgg

SEQ ID NO: 2708040 - RNA, 19 nt, Artificial Sequence
  Description of Artificial Sequence: Synthetic oligonucleotide
accaggugggaucuugccg

SEQ ID NO: 2708041 - RNA, 19 nt, Artificial Sequence
  Description of Artificial Sequence: Synthetic oligonucleotide
ccaaacuuguuauugaguc

SEQ ID NO: 2708042 - RNA, 19 nt, Artificial Sequence
  Description of Artificial Sequence: Synthetic oligonucleotide
aaacuugggcuucuugaaa

SEQ ID NO: 2708043 - RNA, 19 nt, Artificial Sequence
  Description of Artificial Sequence: Synthetic oligonucleotide
cacgaucugaucuuucuuc

SEQ ID NO: 2708044 - RNA, 19 nt, Artificial Sequence
  Description of Artificial Sequence: Synthetic oligonucleotide
uauagaccuugacguagcc

SEQ ID NO: 2708045 - RNA, 19 nt, Artificial Sequence
  Description of Artificial Sequence: Synthetic oligonucleotide
ugacguagccgccagcuuc

SEQ ID NO: 2708046 - RNA, 19 nt, Artificial Sequence
  Description of Artificial Sequence: Synthetic oligonucleotide
gccgguauagaccuugacg

SEQ ID NO: 2708047 - RNA, 19 nt, Artificial Sequence
  Description of Artificial Sequence: Synthetic oligonucleotide
uaaaguuuggagggaagaa

SEQ ID NO: 2708048 - RNA, 19 nt, Artificial Sequence
  Description of Artificial Sequence: Synthetic oligonucleotide
acuguugguugcuguagag

SEQ ID NO: 2708049 - RNA, 19 nt, Artificial Sequence
  Description of Artificial Sequence: Synthetic oligonucleotide
ucauuggagucgucaauga

SEQ ID NO: 2708050 - RNA, 19 nt, Artificial Sequence
  Description of Artificial Sequence: Synthetic oligonucleotide
aaucccaccuucucuccga

SEQ ID NO: 2708051 - RNA, 19 nt, Artificial Sequence
  Description of Artificial Sequence: Synthetic oligonucleotide
gaaucccaccuucucuccg

SEQ ID NO: 2708052 - RNA, 19 nt, Artificial Sequence
  Description of Artificial Sequence: Synthetic oligonucleotide
acaccuaaaucuccuccag

SEQ ID NO: 2708053 - RNA, 19 nt, Artificial Sequence
  Description of Artificial Sequence: Synthetic oligonucleotide
uucugcaccacgaucugau

SEQ ID NO: 2708054 - RNA, 19 nt, Artificial Sequence
  Description of Artificial Sequence: Synthetic oligonucleotide
ucgcgguuccccacaaagg

SEQ ID NO: 2708055 - RNA, 19 nt, Artificial Sequence
  Description of Artificial Sequence: Synthetic oligonucleotide
acaaaacuugggcuucuug

SEQ ID NO: 2708056 - RNA, 19 nt, Artificial Sequence
  Description of Artificial Sequence: Synthetic oligonucleotide
acccggaugauaaaguuug

SEQ ID NO: 2708057 - RNA, 19 nt, Artificial Sequence
  Description of Artificial Sequence: Synthetic oligonucleotide
uacacggugcacacguucu

SEQ ID NO: 2708058 - RNA, 19 nt, Artificial Sequence
  Description of Artificial Sequence: Synthetic oligonucleotide
cuuacagcggagcccaaac

SEQ ID NO: 2708059 - RNA, 19 nt, Artificial Sequence
  Description of Artificial Sequence: Synthetic oligonucleotide
ugcaguucuuacagcggag

SEQ ID NO: 2708060 - RNA, 19 nt, Artificial Sequence
  Description of Artificial Sequence: Synthetic oligonucleotide
uuacacggugcacacguuc

SEQ ID NO: 2708061 - RNA, 19 nt, Artificial Sequence
  Description of Artificial Sequence: Synthetic oligonucleotide
gaucugcccgaucucgcgg

SEQ ID NO: 2708062 - RNA, 19 nt, Artificial Sequence
  Description of Artificial Sequence: Synthetic oligonucleotide
ugauaaaguuuggagggaa

SEQ ID NO: 2708063 - RNA, 19 nt, Artificial Sequence
  Description of Artificial Sequence: Synthetic oligonucleotide
uacagcggagcccaaacuu

SEQ ID NO: 2708064 - RNA, 19 nt, Artificial Sequence
  Description of Artificial Sequence: Synthetic oligonucleotide
cucauuggagucgucaaug

SEQ ID NO: 2708065 - RNA, 19 nt, Artificial Sequence
  Description of Artificial Sequence: Synthetic oligonucleotide
acgaucugaucuuucuuca

SEQ ID NO: 2708066 - RNA, 19 nt, Artificial Sequence
  Description of Artificial Sequence: Synthetic oligonucleotide
cuucuugaaagaagugauc

SEQ ID NO: 2708067 - RNA, 19 nt, Artificial Sequence
  Description of Artificial Sequence: Synthetic oligonucleotide
aauuugugggcuugucguu

SEQ ID NO: 2708068 - RNA, 19 nt, Artificial Sequence
  Description of Artificial Sequence: Synthetic oligonucleotide
uacuguugguugcuguaga

SEQ ID NO: 2708069 - RNA, 19 nt, Artificial Sequence
  Description of Artificial Sequence: Synthetic oligonucleotide
ucauggauguugguuuugc

SEQ ID NO: 2708070 - RNA, 19 nt, Artificial Sequence
  Description of Artificial Sequence: Synthetic oligonucleotide
gguauagaccuugacguag

SEQ ID NO: 2708071 - RNA, 19 nt, Artificial Sequence
  Description of Artificial Sequence: Synthetic oligonucleotide
cucgcgguuccccacaaag

SEQ ID NO: 2708072 - RNA, 19 nt, Artificial Sequence
  Description of Artificial Sequence: Synthetic oligonucleotide
aucauccuucagcauacug

SEQ ID NO: 2708073 - RNA, 19 nt, Artificial Sequence
  Description of Artificial Sequence: Synthetic oligonucleotide
auagaccuugacguagccg

SEQ ID NO: 2708074 - RNA, 19 nt, Artificial Sequence
  Description of Artificial Sequence: Synthetic oligonucleotide
aggcguaggugucucccgc

SEQ ID NO: 2708075 - RNA, 19 nt, Artificial Sequence
  Description of Artificial Sequence: Synthetic oligonucleotide
uccacauaggauuggcaau

SEQ ID NO: 2708076 - RNA, 19 nt, Artificial Sequence
  Description of Artificial Sequence: Synthetic oligonucleotide
aggaucugguuacacggug

SEQ ID NO: 2708077 - RNA, 19 nt, Artificial Sequence
  Description of Artificial Sequence: Synthetic oligonucleotide
gaguggggagcuauaggcg

SEQ ID NO: 2708078 - RNA, 19 nt, Artificial Sequence
  Description of Artificial Sequence: Synthetic oligonucleotide
aggauuggcaauguucaug

SEQ ID NO: 2708079 - RNA, 19 nt, Artificial Sequence
  Description of Artificial Sequence: Synthetic oligonucleotide
ugccaacaccuaaaucucc

SEQ ID NO: 2708080 - RNA, 19 nt, Artificial Sequence
  Description of Artificial Sequence: Synthetic oligonucleotide
ucuccacauaggauuggca

SEQ ID NO: 2708081 - RNA, 19 nt, Artificial Sequence
  Description of Artificial Sequence: Synthetic oligonucleotide
ucucccgccagcaggugcc

SEQ ID NO: 2708082 - RNA, 19 nt, Artificial Sequence
  Description of Artificial Sequence: Synthetic oligonucleotide
auaggcgcgacggaaacca

SEQ ID NO: 2708083 - RNA, 19 nt, Artificial Sequence
  Description of Artificial Sequence: Synthetic oligonucleotide
accacgaucugaucuuucu

SEQ ID NO: 2708084 - RNA, 19 nt, Artificial Sequence
  Description of Artificial Sequence: Synthetic oligonucleotide
ucuugaaagaagugaucuu

SEQ ID NO: 2708085 - RNA, 19 nt, Artificial Sequence
  Description of Artificial Sequence: Synthetic oligonucleotide
gaaaccaggugggaucuug

SEQ ID NO: 2708086 - RNA, 19 nt, Artificial Sequence
  Description of Artificial Sequence: Synthetic oligonucleotide
gaucugguuacacggugca

SEQ ID NO: 2708087 - RNA, 19 nt, Artificial Sequence
  Description of Artificial Sequence: Synthetic oligonucleotide
gcaauguucauggauguug

SEQ ID NO: 2708088 - RNA, 19 nt, Artificial Sequence
  Description of Artificial Sequence: Synthetic oligonucleotide
guuuggagggaagaauccc

SEQ ID NO: 2708089 - RNA, 19 nt, Artificial Sequence
  Description of Artificial Sequence: Synthetic oligonucleotide
gaagaaucccaccuucucu

SEQ ID NO: 2708090 - RNA, 19 nt, Artificial Sequence
  Description of Artificial Sequence: Synthetic oligonucleotide
uggcaauguucauggaugu

SEQ ID NO: 2708091 - RNA, 19 nt, Artificial Sequence
  Description of Artificial Sequence: Synthetic oligonucleotide
auacuguugguugcuguag

SEQ ID NO: 2708092 - RNA, 19 nt, Artificial Sequence
  Description of Artificial Sequence: Synthetic oligonucleotide
uuacagcggagcccaaacu

SEQ ID NO: 2708093 - RNA, 19 nt, Artificial Sequence
  Description of Artificial Sequence: Synthetic oligonucleotide
caguucuuacagcggagcc

SEQ ID NO: 2708094 - RNA, 19 nt, Artificial Sequence
  Description of Artificial Sequence: Synthetic oligonucleotide
guugguugcuguagagugg

SEQ ID NO: 2708095 - RNA, 19 nt, Artificial Sequence
  Description of Artificial Sequence: Synthetic oligonucleotide
uuugugggcuugucguuga

SEQ ID NO: 2708096 - RNA, 19 nt, Artificial Sequence
  Description of Artificial Sequence: Synthetic oligonucleotide
caccuaaaucuccuccagg

SEQ ID NO: 2708097 - RNA, 19 nt, Artificial Sequence
  Description of Artificial Sequence: Synthetic oligonucleotide
cuugccgaagcaccucugc

SEQ ID NO: 2708098 - RNA, 19 nt, Artificial Sequence
  Description of Artificial Sequence: Synthetic oligonucleotide
uugcggccgguauagaccu

SEQ ID NO: 2708099 - RNA, 19 nt, Artificial Sequence
  Description of Artificial Sequence: Synthetic oligonucleotide
gucggcgggaaacagcccc

SEQ ID NO: 2708100 - RNA, 19 nt, Artificial Sequence
  Description of Artificial Sequence: Synthetic oligonucleotide
caaacuuguuauugaguca

SEQ ID NO: 2708101 - RNA, 19 nt, Artificial Sequence
  Description of Artificial Sequence: Synthetic oligonucleotide
agacaucacaaaacuuggg

SEQ ID NO: 2708102 - RNA, 19 nt, Artificial Sequence
  Description of Artificial Sequence: Synthetic oligonucleotide
cauuggagucgucaaugac

SEQ ID NO: 2708103 - RNA, 19 nt, Artificial Sequence
  Description of Artificial Sequence: Synthetic oligonucleotide
uuugaauuugugggcuugu

SEQ ID NO: 2708104 - RNA, 19 nt, Artificial Sequence
  Description of Artificial Sequence: Synthetic oligonucleotide
guagaguggggagcuauag

SEQ ID NO: 2708105 - RNA, 19 nt, Artificial Sequence
  Description of Artificial Sequence: Synthetic oligonucleotide
gugcacacguucuccagcc

SEQ ID NO: 2708106 - RNA, 19 nt, Artificial Sequence
  Description of Artificial Sequence: Synthetic oligonucleotide
agcccaaacuuguuauuga

SEQ ID NO: 2708107 - RNA, 19 nt, Artificial Sequence
  Description of Artificial Sequence: Synthetic oligonucleotide
aggugccaacaccuaaauc

SEQ ID NO: 2708108 - RNA, 19 nt, Artificial Sequence
  Description of Artificial Sequence: Synthetic oligonucleotide
gaucugaucuuucuucagu

SEQ ID NO: 2708109 - RNA, 19 nt, Artificial Sequence
  Description of Artificial Sequence: Synthetic oligonucleotide
cuauaggcgcgacggaaac

SEQ ID NO: 2708110 - RNA, 19 nt, Artificial Sequence
  Description of Artificial Sequence: Synthetic oligonucleotide
ggugggaucuugccgaagc

SEQ ID NO: 2708111 - RNA, 19 nt, Artificial Sequence
  Description of Artificial Sequence: Synthetic oligonucleotide
cuccacauaggauuggcaa

SEQ ID NO: 2708112 - RNA, 19 nt, Artificial Sequence
  Description of Artificial Sequence: Synthetic oligonucleotide
uggagggaagaaucccacc

SEQ ID NO: 2708113 - RNA, 19 nt, Artificial Sequence
  Description of Artificial Sequence: Synthetic oligonucleotide
cugguuacacggugcacac

SEQ ID NO: 2708114 - RNA, 19 nt, Artificial Sequence
  Description of Artificial Sequence: Synthetic oligonucleotide
ggagucgucaaugacugug

SEQ ID NO: 2708115 - RNA, 19 nt, Artificial Sequence
  Description of Artificial Sequence: Synthetic oligonucleotide
guauagaccuugacguagc

SEQ ID NO: 2708116 - RNA, 19 nt, Artificial Sequence
  Description of Artificial Sequence: Synthetic oligonucleotide
acuugggcuucuugaaaga

SEQ ID NO: 2708117 - RNA, 19 nt, Artificial Sequence
  Description of Artificial Sequence: Synthetic oligonucleotide
uccgggcacagacaucaca

SEQ ID NO: 2708118 - RNA, 19 nt, Artificial Sequence
  Description of Artificial Sequence: Synthetic oligonucleotide
gaagucggcgggaaacagc

SEQ ID NO: 2708119 - RNA, 19 nt, Artificial Sequence
  Description of Artificial Sequence: Synthetic oligonucleotide
ugcaccacgaucugaucuu

SEQ ID NO: 2708120 - RNA, 19 nt, Artificial Sequence
  Description of Artificial Sequence: Synthetic oligonucleotide
guuauugagucacaaucau

SEQ ID NO: 2708121 - RNA, 19 nt, Artificial Sequence
  Description of Artificial Sequence: Synthetic oligonucleotide
aucuugccgaagcaccucu

SEQ ID NO: 2708122 - RNA, 19 nt, Artificial Sequence
  Description of Artificial Sequence: Synthetic oligonucleotide
ugcccgaucucgcgguucc

SEQ ID NO: 2708123 - RNA, 19 nt, Artificial Sequence
  Description of Artificial Sequence: Synthetic oligonucleotide
cgggaaauccagaucaucc

SEQ ID NO: 2708124 - RNA, 19 nt, Artificial Sequence
  Description of Artificial Sequence: Synthetic oligonucleotide
acuuguuauugagucacaa

SEQ ID NO: 2708125 - RNA, 19 nt, Artificial Sequence
  Description of Artificial Sequence: Synthetic oligonucleotide
uucuccagcccggacccgg

SEQ ID NO: 2708126 - RNA, 19 nt, Artificial Sequence
  Description of Artificial Sequence: Synthetic oligonucleotide
gagucacaaucauccgggc

SEQ ID NO: 2708127 - RNA, 19 nt, Artificial Sequence
  Description of Artificial Sequence: Synthetic oligonucleotide
guaggugucucccgccagc

SEQ ID NO: 2708128 - RNA, 19 nt, Artificial Sequence
  Description of Artificial Sequence: Synthetic oligonucleotide
augauaaaguuuggaggga

SEQ ID NO: 2708129 - RNA, 19 nt, Artificial Sequence
  Description of Artificial Sequence: Synthetic oligonucleotide
uauaggcgcgacggaaacc

SEQ ID NO: 2708130 - RNA, 19 nt, Artificial Sequence
  Description of Artificial Sequence: Synthetic oligonucleotide
guagccgccagcuucgucu

SEQ ID NO: 2708131 - RNA, 19 nt, Artificial Sequence
  Description of Artificial Sequence: Synthetic oligonucleotide
ggcacagacaucacaaaac

SEQ ID NO: 2708132 - RNA, 19 nt, Artificial Sequence
  Description of Artificial Sequence: Synthetic oligonucleotide
ucuuugaauuugugggcuu

SEQ ID NO: 2708133 - RNA, 19 nt, Artificial Sequence
  Description of Artificial Sequence: Synthetic oligonucleotide
cauccgggcacagacauca

SEQ ID NO: 2708134 - RNA, 19 nt, Artificial Sequence
  Description of Artificial Sequence: Synthetic oligonucleotide
aaggaucugguuacacggu

SEQ ID NO: 2708135 - RNA, 19 nt, Artificial Sequence
  Description of Artificial Sequence: Synthetic oligonucleotide
auguucauggauguugguu

SEQ ID NO: 2708136 - RNA, 19 nt, Artificial Sequence
  Description of Artificial Sequence: Synthetic oligonucleotide
ugccgaagcaccucugcau

SEQ ID NO: 2708137 - RNA, 19 nt, Artificial Sequence
  Description of Artificial Sequence: Synthetic oligonucleotide
ccacaaaggaucugguuac

SEQ ID NO: 2708138 - RNA, 19 nt, Artificial Sequence
  Description of Artificial Sequence: Synthetic oligonucleotide
caggaagucggcgggaaac

SEQ ID NO: 2708139 - RNA, 19 nt, Artificial Sequence
  Description of Artificial Sequence: Synthetic oligonucleotide
ucuugccgaagcaccucug

SEQ ID NO: 2708140 - RNA, 19 nt, Artificial Sequence
  Description of Artificial Sequence: Synthetic oligonucleotide
uucauggauguugguuuug

SEQ ID NO: 2708141 - RNA, 19 nt, Artificial Sequence
  Description of Artificial Sequence: Synthetic oligonucleotide
gcacacguucuccagcccg

SEQ ID NO: 2708142 - RNA, 19 nt, Artificial Sequence
  Description of Artificial Sequence: Synthetic oligonucleotide
ucacaaucauccgggcaca

SEQ ID NO: 2708143 - RNA, 19 nt, Artificial Sequence
  Description of Artificial Sequence: Synthetic oligonucleotide
agaccuugacguagccgcc

SEQ ID NO: 2708144 - RNA, 19 nt, Artificial Sequence
  Description of Artificial Sequence: Synthetic oligonucleotide
acagcggagcccaaacuug

SEQ ID NO: 2708145 - RNA, 19 nt, Artificial Sequence
  Description of Artificial Sequence: Synthetic oligonucleotide
ugggcuugucguugacaag

SEQ ID NO: 2708146 - RNA, 19 nt, Artificial Sequence
  Description of Artificial Sequence: Synthetic oligonucleotide
accuugacguagccgccag

SEQ ID NO: 2708147 - RNA, 19 nt, Artificial Sequence
  Description of Artificial Sequence: Synthetic oligonucleotide
ugguugcuguagagugggg

SEQ ID NO: 2708148 - RNA, 19 nt, Artificial Sequence
  Description of Artificial Sequence: Synthetic oligonucleotide
accaggcguaggugucucc

SEQ ID NO: 2708149 - RNA, 19 nt, Artificial Sequence
  Description of Artificial Sequence: Synthetic oligonucleotide
agcaggugccaacaccuaa

SEQ ID NO: 2708150 - RNA, 19 nt, Artificial Sequence
  Description of Artificial Sequence: Synthetic oligonucleotide
uugaauuugugggcuuguc

SEQ ID NO: 2708151 - RNA, 19 nt, Artificial Sequence
  Description of Artificial Sequence: Synthetic oligonucleotide
guugguuuugcaguucuua

SEQ ID NO: 2708152 - RNA, 19 nt, Artificial Sequence
  Description of Artificial Sequence: Synthetic oligonucleotide
gucgucaaugacugugauc

SEQ ID NO: 2708153 - RNA, 19 nt, Artificial Sequence
  Description of Artificial Sequence: Synthetic oligonucleotide
gauguugguuuugcaguuc

SEQ ID NO: 2708154 - RNA, 19 nt, Artificial Sequence
  Description of Artificial Sequence: Synthetic oligonucleotide
ugcacacguucuccagccc

SEQ ID NO: 2708155 - RNA, 19 nt, Artificial Sequence
  Description of Artificial Sequence: Synthetic oligonucleotide
aucugguuacacggugcac

SEQ ID NO: 2708156 - RNA, 19 nt, Artificial Sequence
  Description of Artificial Sequence: Synthetic oligonucleotide
aacuuguuauugagucaca

SEQ ID NO: 2708157 - RNA, 19 nt, Artificial Sequence
  Description of Artificial Sequence: Synthetic oligonucleotide
caggcguaggugucucccg

SEQ ID NO: 2708158 - RNA, 19 nt, Artificial Sequence
  Description of Artificial Sequence: Synthetic oligonucleotide
cuugaaagaagugaucuuu

SEQ ID NO: 2708159 - RNA, 19 nt, Artificial Sequence
  Description of Artificial Sequence: Synthetic oligonucleotide
gguuacacggugcacacgu

SEQ ID NO: 2708160 - RNA, 19 nt, Artificial Sequence
  Description of Artificial Sequence: Synthetic oligonucleotide
cauacuguugguugcugua

SEQ ID NO: 2708161 - RNA, 19 nt, Artificial Sequence
  Description of Artificial Sequence: Synthetic oligonucleotide
gggaucuugccgaagcacc

SEQ ID NO: 2708162 - RNA, 19 nt, Artificial Sequence
  Description of Artificial Sequence: Synthetic oligonucleotide
cgcgacggaaaccaggugg

SEQ ID NO: 2708163 - RNA, 19 nt, Artificial Sequence
  Description of Artificial Sequence: Synthetic oligonucleotide
ggugcacacguucuccagc

SEQ ID NO: 2708164 - RNA, 19 nt, Artificial Sequence
  Description of Artificial Sequence: Synthetic oligonucleotide
gagucgucaaugacuguga

SEQ ID NO: 2708165 - RNA, 19 nt, Artificial Sequence
  Description of Artificial Sequence: Synthetic oligonucleotide
uaggauuggcaauguucau

SEQ ID NO: 2708166 - RNA, 19 nt, Artificial Sequence
  Description of Artificial Sequence: Synthetic oligonucleotide
agucgucaaugacugugau

SEQ ID NO: 2708167 - RNA, 19 nt, Artificial Sequence
  Description of Artificial Sequence: Synthetic oligonucleotide
ugguuacacggugcacacg

SEQ ID NO: 2708168 - RNA, 19 nt, Artificial Sequence
  Description of Artificial Sequence: Synthetic oligonucleotide
aucugcccgaucucgcggu

SEQ ID NO: 2708169 - RNA, 19 nt, Artificial Sequence
  Description of Artificial Sequence: Synthetic oligonucleotide
ucggcgggaaacagcccca

SEQ ID NO: 2708170 - RNA, 19 nt, Artificial Sequence
  Description of Artificial Sequence: Synthetic oligonucleotide
cacggugcacacguucucc

SEQ ID NO: 2708171 - RNA, 19 nt, Artificial Sequence
  Description of Artificial Sequence: Synthetic oligonucleotide
agcuauaggcgcgacggaa

SEQ ID NO: 2708172 - RNA, 19 nt, Artificial Sequence
  Description of Artificial Sequence: Synthetic oligonucleotide
caucacaaaacuugggcuu

SEQ ID NO: 2708173 - RNA, 19 nt, Artificial Sequence
  Description of Artificial Sequence: Synthetic oligonucleotide
ucuuacagcggagcccaaa

SEQ ID NO: 2708174 - RNA, 19 nt, Artificial Sequence
  Description of Artificial Sequence: Synthetic oligonucleotide
ggaaacagccccaccuugc

SEQ ID NO: 2708175 - RNA, 19 nt, Artificial Sequence
  Description of Artificial Sequence: Synthetic oligonucleotide
gaucucgcgguuccccaca

SEQ ID NO: 2708176 - RNA, 19 nt, Artificial Sequence
  Description of Artificial Sequence: Synthetic oligonucleotide
caccuugcggccgguauag

SEQ ID NO: 2708177 - RNA, 19 nt, Artificial Sequence
  Description of Artificial Sequence: Synthetic oligonucleotide
caucuccacauaggauugg

SEQ ID NO: 2708178 - RNA, 19 nt, Artificial Sequence
  Description of Artificial Sequence: Synthetic oligonucleotide
ggagggaagaaucccaccu

SEQ ID NO: 2708179 - RNA, 19 nt, Artificial Sequence
  Description of Artificial Sequence: Synthetic oligonucleotide
cuuguuauugagucacaau

SEQ ID NO: 2708180 - RNA, 19 nt, Artificial Sequence
  Description of Artificial Sequence: Synthetic oligonucleotide
ucugcaccacgaucugauc

SEQ ID NO: 2708181 - RNA, 19 nt, Artificial Sequence
  Description of Artificial Sequence: Synthetic oligonucleotide
uaggugucucccgccagca

SEQ ID NO: 2708182 - RNA, 19 nt, Artificial Sequence
  Description of Artificial Sequence: Synthetic oligonucleotide
caaugacugugaucuucuc

SEQ ID NO: 2708183 - RNA, 19 nt, Artificial Sequence
  Description of Artificial Sequence: Synthetic oligonucleotide
ccgguauagaccuugacgu

SEQ ID NO: 2708184 - RNA, 19 nt, Artificial Sequence
  Description of Artificial Sequence: Synthetic oligonucleotide
ggaucugguuacacggugc

SEQ ID NO: 2708185 - RNA, 19 nt, Artificial Sequence
  Description of Artificial Sequence: Synthetic oligonucleotide
agcauacuguugguugcug

SEQ ID NO: 2708186 - RNA, 19 nt, Artificial Sequence
  Description of Artificial Sequence: Synthetic oligonucleotide
gcacagacaucacaaaacu

SEQ ID NO: 2708187 - RNA, 19 nt, Artificial Sequence
  Description of Artificial Sequence: Synthetic oligonucleotide
aggaagucggcgggaaaca

SEQ ID NO: 2708188 - RNA, 19 nt, Artificial Sequence
  Description of Artificial Sequence: Synthetic oligonucleotide
uaggcgcgacggaaaccag

SEQ ID NO: 2708189 - RNA, 19 nt, Artificial Sequence
  Description of Artificial Sequence: Synthetic oligonucleotide
gcgacggaaaccagguggg

SEQ ID NO: 2708190 - RNA, 19 nt, Artificial Sequence
  Description of Artificial Sequence: Synthetic oligonucleotide
acaaucauccgggcacaga

SEQ ID NO: 2708191 - RNA, 19 nt, Artificial Sequence
  Description of Artificial Sequence: Synthetic oligonucleotide
ccacauaggauuggcaaug

SEQ ID NO: 2708192 - RNA, 19 nt, Artificial Sequence
  Description of Artificial Sequence: Synthetic oligonucleotide
gaucuugccgaagcaccuc

SEQ ID NO: 2708193 - RNA, 19 nt, Artificial Sequence
  Description of Artificial Sequence: Synthetic oligonucleotide
gucucccgccagcaggugc

SEQ ID NO: 2708194 - RNA, 19 nt, Artificial Sequence
  Description of Artificial Sequence: Synthetic oligonucleotide
gggagcuauaggcgcgacg

SEQ ID NO: 2708195 - RNA, 19 nt, Artificial Sequence
  Description of Artificial Sequence: Synthetic oligonucleotide
gcaguucuuacagcggagc

SEQ ID NO: 2708196 - RNA, 19 nt, Artificial Sequence
  Description of Artificial Sequence: Synthetic oligonucleotide
agccccaccuugcggccgg

SEQ ID NO: 2708197 - RNA, 19 nt, Artificial Sequence
  Description of Artificial Sequence: Synthetic oligonucleotide
gugaucugcccgaucucgc

SEQ ID NO: 2708198 - RNA, 19 nt, Artificial Sequence
  Description of Artificial Sequence: Synthetic oligonucleotide
aggcgcgacggaaaccagg

SEQ ID NO: 2708199 - RNA, 19 nt, Artificial Sequence
  Description of Artificial Sequence: Synthetic oligonucleotide
gaucuuucuucagugugau

SEQ ID NO: 2708200 - RNA, 19 nt, Artificial Sequence
  Description of Artificial Sequence: Synthetic oligonucleotide
uugacguagccgccagcuu

SEQ ID NO: 2708201 - RNA, 19 nt, Artificial Sequence
  Description of Artificial Sequence: Synthetic oligonucleotide
aagcaccucugcaucucca

SEQ ID NO: 2708202 - RNA, 19 nt, Artificial Sequence
  Description of Artificial Sequence: Synthetic oligonucleotide
cccacaaaggaucugguua

SEQ ID NO: 2708203 - RNA, 19 nt, Artificial Sequence
  Description of Artificial Sequence: Synthetic oligonucleotide
ucauccgggcacagacauc

SEQ ID NO: 2708204 - RNA, 19 nt, Artificial Sequence
  Description of Artificial Sequence: Synthetic oligonucleotide
ccaggugggaucuugccga

SEQ ID NO: 2708205 - RNA, 19 nt, Artificial Sequence
  Description of Artificial Sequence: Synthetic oligonucleotide
ucuccagcccggacccgga

SEQ ID NO: 2708206 - RNA, 19 nt, Artificial Sequence
  Description of Artificial Sequence: Synthetic oligonucleotide
aggugucucccgccagcag

SEQ ID NO: 2708207 - RNA, 19 nt, Artificial Sequence
  Description of Artificial Sequence: Synthetic oligonucleotide
gggcacagacaucacaaaa

SEQ ID NO: 2708208 - RNA, 19 nt, Artificial Sequence
  Description of Artificial Sequence: Synthetic oligonucleotide
gggaaauccagaucauccu

SEQ ID NO: 2708209 - RNA, 19 nt, Artificial Sequence
  Description of Artificial Sequence: Synthetic oligonucleotide
gguugcuguagagugggga

SEQ ID NO: 2708210 - RNA, 19 nt, Artificial Sequence
  Description of Artificial Sequence: Synthetic oligonucleotide
cuugacguagccgccagcu

SEQ ID NO: 2708211 - RNA, 19 nt, Artificial Sequence
  Description of Artificial Sequence: Synthetic oligonucleotide
cugcaccacgaucugaucu

SEQ ID NO: 2708212 - RNA, 19 nt, Artificial Sequence
  Description of Artificial Sequence: Synthetic oligonucleotide
agccgccagcuucgucucc

SEQ ID NO: 2708213 - RNA, 19 nt, Artificial Sequence
  Description of Artificial Sequence: Synthetic oligonucleotide
ggaagucggcgggaaacag

SEQ ID NO: 2708214 - RNA, 19 nt, Artificial Sequence
  Description of Artificial Sequence: Synthetic oligonucleotide
agucggcgggaaacagccc

SEQ ID NO: 2708215 - RNA, 19 nt, Artificial Sequence
  Description of Artificial Sequence: Synthetic oligonucleotide
ccuugcggccgguauagac

SEQ ID NO: 2708216 - RNA, 19 nt, Artificial Sequence
  Description of Artificial Sequence: Synthetic oligonucleotide
uggggagcuauaggcgcga

SEQ ID NO: 2708217 - RNA, 19 nt, Artificial Sequence
  Description of Artificial Sequence: Synthetic oligonucleotide
gccaccacuccucauugga

SEQ ID NO: 2708218 - RNA, 19 nt, Artificial Sequence
  Description of Artificial Sequence: Synthetic oligonucleotide
gagcuauaggcgcgacgga

SEQ ID NO: 2708219 - RNA, 19 nt, Artificial Sequence
  Description of Artificial Sequence: Synthetic oligonucleotide
accucugcaucuccacaua

SEQ ID NO: 2708220 - RNA, 19 nt, Artificial Sequence
  Description of Artificial Sequence: Synthetic oligonucleotide
uggagucgucaaugacugu

SEQ ID NO: 2708221 - RNA, 19 nt, Artificial Sequence
  Description of Artificial Sequence: Synthetic oligonucleotide
caccacgaucugaucuuuc

SEQ ID NO: 2708222 - RNA, 19 nt, Artificial Sequence
  Description of Artificial Sequence: Synthetic oligonucleotide
ccucugcaucuccacauag

SEQ ID NO: 2708223 - RNA, 19 nt, Artificial Sequence
  Description of Artificial Sequence: Synthetic oligonucleotide
gccagcuucgucuccuuuc

SEQ ID NO: 2708224 - RNA, 19 nt, Artificial Sequence
  Description of Artificial Sequence: Synthetic oligonucleotide
cacaaucauccgggcacag

SEQ ID NO: 2708225 - RNA, 19 nt, Artificial Sequence
  Description of Artificial Sequence: Synthetic oligonucleotide
gaccuugacguagccgcca

SEQ ID NO: 2708226 - RNA, 19 nt, Artificial Sequence
  Description of Artificial Sequence: Synthetic oligonucleotide
gccgaagcaccucugcauc

SEQ ID NO: 2708227 - RNA, 19 nt, Artificial Sequence
  Description of Artificial Sequence: Synthetic oligonucleotide
cguucuccagcccggaccc

SEQ ID NO: 2708228 - RNA, 19 nt, Artificial Sequence
  Description of Artificial Sequence: Synthetic oligonucleotide
ggaaauccagaucauccuu

SEQ ID NO: 2708229 - RNA, 19 nt, Artificial Sequence
  Description of Artificial Sequence: Synthetic oligonucleotide
ccaacaccuaaaucuccuc

SEQ ID NO: 2708230 - RNA, 19 nt, Artificial Sequence
  Description of Artificial Sequence: Synthetic oligonucleotide
ggcguaggugucucccgcc

SEQ ID NO: 2708231 - RNA, 19 nt, Artificial Sequence
  Description of Artificial Sequence: Synthetic oligonucleotide
cccggaugauaaaguuugg

SEQ ID NO: 2708232 - RNA, 19 nt, Artificial Sequence
  Description of Artificial Sequence: Synthetic oligonucleotide
gacggaaaccaggugggau

SEQ ID NO: 2708233 - RNA, 19 nt, Artificial Sequence
  Description of Artificial Sequence: Synthetic oligonucleotide
caggaccaggcguaggugu

SEQ ID NO: 2708234 - RNA, 19 nt, Artificial Sequence
  Description of Artificial Sequence: Synthetic oligonucleotide
ucucgcgguuccccacaaa

SEQ ID NO: 2708235 - RNA, 19 nt, Artificial Sequence
  Description of Artificial Sequence: Synthetic oligonucleotide
aucccaccuucucuccgau

SEQ ID NO: 2708236 - RNA, 19 nt, Artificial Sequence
  Description of Artificial Sequence: Synthetic oligonucleotide
cgaucugaucuuucuucag

SEQ ID NO: 2708237 - RNA, 19 nt, Artificial Sequence
  Description of Artificial Sequence: Synthetic oligonucleotide
uucuuacagcggagcccaa

SEQ ID NO: 2708238 - RNA, 19 nt, Artificial Sequence
  Description of Artificial Sequence: Synthetic oligonucleotide
aucucgcgguuccccacaa

SEQ ID NO: 2708239 - RNA, 19 nt, Artificial Sequence
  Description of Artificial Sequence: Synthetic oligonucleotide
cggcgggaaauccagauca

SEQ ID NO: 2708240 - RNA, 19 nt, Artificial Sequence
  Description of Artificial Sequence: Synthetic oligonucleotide
ccaggcguaggugucuccc

SEQ ID NO: 2708241 - RNA, 19 nt, Artificial Sequence
  Description of Artificial Sequence: Synthetic oligonucleotide
cgguuccccacaaaggauc

SEQ ID NO: 2708242 - RNA, 19 nt, Artificial Sequence
  Description of Artificial Sequence: Synthetic oligonucleotide
cacaaaggaucugguuaca

SEQ ID NO: 2708243 - RNA, 19 nt, Artificial Sequence
  Description of Artificial Sequence: Synthetic oligonucleotide
gcgggaaacagccccaccu

SEQ ID NO: 2708244 - RNA, 19 nt, Artificial Sequence
  Description of Artificial Sequence: Synthetic oligonucleotide
ucugcccgaucucgcgguu

SEQ ID NO: 2708245 - RNA, 19 nt, Artificial Sequence
  Description of Artificial Sequence: Synthetic oligonucleotide
gaccaggcguaggugucuc

SEQ ID NO: 2708246 - RNA, 19 nt, Artificial Sequence
  Description of Artificial Sequence: Synthetic oligonucleotide
aggugggaucuugccgaag

SEQ ID NO: 2708247 - RNA, 19 nt, Artificial Sequence
  Description of Artificial Sequence: Synthetic oligonucleotide
ccgggcacagacaucacaa

SEQ ID NO: 2708248 - RNA, 19 nt, Artificial Sequence
  Description of Artificial Sequence: Synthetic oligonucleotide
caccucugcaucuccacau

SEQ ID NO: 2708249 - RNA, 19 nt, Artificial Sequence
  Description of Artificial Sequence: Synthetic oligonucleotide
ccagcaggugccaacaccu

SEQ ID NO: 2708250 - RNA, 19 nt, Artificial Sequence
  Description of Artificial Sequence: Synthetic oligonucleotide
ccggacccggaugauaaag

SEQ ID NO: 2708251 - RNA, 19 nt, Artificial Sequence
  Description of Artificial Sequence: Synthetic oligonucleotide
gacccggaugauaaaguuu

SEQ ID NO: 2708252 - RNA, 19 nt, Artificial Sequence
  Description of Artificial Sequence: Synthetic oligonucleotide
ccuaaaucuccuccaggaa

SEQ ID NO: 2708253 - RNA, 19 nt, Artificial Sequence
  Description of Artificial Sequence: Synthetic oligonucleotide
ugucucccgccagcaggug

SEQ ID NO: 2708254 - RNA, 19 nt, Artificial Sequence
  Description of Artificial Sequence: Synthetic oligonucleotide
cuguugguugcuguagagu

SEQ ID NO: 2708255 - RNA, 19 nt, Artificial Sequence
  Description of Artificial Sequence: Synthetic oligonucleotide
cacugggcccgcccaggac

SEQ ID NO: 2708256 - RNA, 19 nt, Artificial Sequence
  Description of Artificial Sequence: Synthetic oligonucleotide
ggauguugguuuugcaguu

SEQ ID NO: 2708257 - RNA, 19 nt, Artificial Sequence
  Description of Artificial Sequence: Synthetic oligonucleotide
gcuauaggcgcgacggaaa

SEQ ID NO: 2708258 - RNA, 19 nt, Artificial Sequence
  Description of Artificial Sequence: Synthetic oligonucleotide
auccgggcacagacaucac

SEQ ID NO: 2708259 - RNA, 19 nt, Artificial Sequence
  Description of Artificial Sequence: Synthetic oligonucleotide
gcauacuguugguugcugu

SEQ ID NO: 2708260 - RNA, 19 nt, Artificial Sequence
  Description of Artificial Sequence: Synthetic oligonucleotide
cagcggagcccaaacuugu

SEQ ID NO: 2708261 - RNA, 19 nt, Artificial Sequence
  Description of Artificial Sequence: Synthetic oligonucleotide
ggcgggaaacagccccacc

SEQ ID NO: 2708262 - RNA, 19 nt, Artificial Sequence
  Description of Artificial Sequence: Synthetic oligonucleotide
gcggccgguauagaccuug

SEQ ID NO: 2708263 - RNA, 19 nt, Artificial Sequence
  Description of Artificial Sequence: Synthetic oligonucleotide
gcaggugccaacaccuaaa

SEQ ID NO: 2708264 - RNA, 19 nt, Artificial Sequence
  Description of Artificial Sequence: Synthetic oligonucleotide
cugggcccgcccaggacca

SEQ ID NO: 2708265 - RNA, 19 nt, Artificial Sequence
  Description of Artificial Sequence: Synthetic oligonucleotide
ggccgguauagaccuugac

SEQ ID NO: 2708266 - RNA, 19 nt, Artificial Sequence
  Description of Artificial Sequence: Synthetic oligonucleotide
cgcgguuccccacaaagga

SEQ ID NO: 2708267 - RNA, 19 nt, Artificial Sequence
  Description of Artificial Sequence: Synthetic oligonucleotide
ccggaugauaaaguuugga

SEQ ID NO: 2708268 - RNA, 19 nt, Artificial Sequence
  Description of Artificial Sequence: Synthetic oligonucleotide
ucccaccuucucuccgauu

SEQ ID NO: 2708269 - RNA, 19 nt, Artificial Sequence
  Description of Artificial Sequence: Synthetic oligonucleotide
gcgggaaauccagaucauc

SEQ ID NO: 2708270 - RNA, 19 nt, Artificial Sequence
  Description of Artificial Sequence: Synthetic oligonucleotide
gccaacaccuaaaucuccu

SEQ ID NO: 2708271 - RNA, 19 nt, Artificial Sequence
  Description of Artificial Sequence: Synthetic oligonucleotide
cagccccaccuugcggccg

SEQ ID NO: 2708272 - RNA, 19 nt, Artificial Sequence
  Description of Artificial Sequence: Synthetic oligonucleotide
ggacccggaugauaaaguu

SEQ ID NO: 2708273 - RNA, 19 nt, Artificial Sequence
  Description of Artificial Sequence: Synthetic oligonucleotide
cacauaggauuggcaaugu

SEQ ID NO: 2708274 - RNA, 19 nt, Artificial Sequence
  Description of Artificial Sequence: Synthetic oligonucleotide
gcguaggugucucccgcca

SEQ ID NO: 2708275 - RNA, 19 nt, Artificial Sequence
  Description of Artificial Sequence: Synthetic oligonucleotide
gcggagcccaaacuuguua

SEQ ID NO: 2708276 - RNA, 19 nt, Artificial Sequence
  Description of Artificial Sequence: Synthetic oligonucleotide
ggaucuugccgaagcaccu

SEQ ID NO: 2708277 - RNA, 19 nt, Artificial Sequence
  Description of Artificial Sequence: Synthetic oligonucleotide
caggugccaacaccuaaau

SEQ ID NO: 2708278 - RNA, 19 nt, Artificial Sequence
  Description of Artificial Sequence: Synthetic oligonucleotide
ccagcccggacccggauga

SEQ ID NO: 2708279 - RNA, 19 nt, Artificial Sequence
  Description of Artificial Sequence: Synthetic oligonucleotide
ccgccaccacuccucauug

SEQ ID NO: 2708280 - RNA, 19 nt, Artificial Sequence
  Description of Artificial Sequence: Synthetic oligonucleotide
cccgaucucgcgguucccc

SEQ ID NO: 2708281 - RNA, 19 nt, Artificial Sequence
  Description of Artificial Sequence: Synthetic oligonucleotide
cugcccgaucucgcgguuc

SEQ ID NO: 2708282 - RNA, 19 nt, Artificial Sequence
  Description of Artificial Sequence: Synthetic oligonucleotide
caggugggaucuugccgaa

SEQ ID NO: 2708283 - RNA, 19 nt, Artificial Sequence
  Description of Artificial Sequence: Synthetic oligonucleotide
cguaggugucucccgccag

SEQ ID NO: 2708284 - RNA, 19 nt, Artificial Sequence
  Description of Artificial Sequence: Synthetic oligonucleotide
gggaagaaucccaccuucu

SEQ ID NO: 2708285 - RNA, 19 nt, Artificial Sequence
  Description of Artificial Sequence: Synthetic oligonucleotide
gguuccccacaaaggaucu

SEQ ID NO: 2708286 - RNA, 19 nt, Artificial Sequence
  Description of Artificial Sequence: Synthetic oligonucleotide
ccggcgggaaauccagauc

SEQ ID NO: 2708287 - RNA, 19 nt, Artificial Sequence
  Description of Artificial Sequence: Synthetic oligonucleotide
ggcgcgacggaaaccaggu

SEQ ID NO: 2708288 - RNA, 19 nt, Artificial Sequence
  Description of Artificial Sequence: Synthetic oligonucleotide
ccaggaccaggcguaggug

SEQ ID NO: 2708289 - RNA, 19 nt, Artificial Sequence
  Description of Artificial Sequence: Synthetic oligonucleotide
agcggagcccaaacuuguu

SEQ ID NO: 2708290 - RNA, 19 nt, Artificial Sequence
  Description of Artificial Sequence: Synthetic oligonucleotide
cagcauacuguugguugcu

SEQ ID NO: 2708291 - RNA, 19 nt, Artificial Sequence
  Description of Artificial Sequence: Synthetic oligonucleotide
gcccggacccggaugauaa

SEQ ID NO: 2708292 - RNA, 19 nt, Artificial Sequence
  Description of Artificial Sequence: Synthetic oligonucleotide
cagcaggugccaacaccua

SEQ ID NO: 2708293 - RNA, 19 nt, Artificial Sequence
  Description of Artificial Sequence: Synthetic oligonucleotide
cggugcacacguucuccag

SEQ ID NO: 2708294 - RNA, 19 nt, Artificial Sequence
  Description of Artificial Sequence: Synthetic oligonucleotide
cuccuuucugcaccacgau

SEQ ID NO: 2708295 - RNA, 19 nt, Artificial Sequence
  Description of Artificial Sequence: Synthetic oligonucleotide
agcccggacccggaugaua

SEQ ID NO: 2708296 - RNA, 19 nt, Artificial Sequence
  Description of Artificial Sequence: Synthetic oligonucleotide
ugcggccgguauagaccuu

SEQ ID NO: 2708297 - RNA, 19 nt, Artificial Sequence
  Description of Artificial Sequence: Synthetic oligonucleotide
cccagcccgcacugggccc

SEQ ID NO: 2708298 - RNA, 19 nt, Artificial Sequence
  Description of Artificial Sequence: Synthetic oligonucleotide
ggagcccaaacuuguuauu

SEQ ID NO: 2708299 - RNA, 19 nt, Artificial Sequence
  Description of Artificial Sequence: Synthetic oligonucleotide
gcgcgacggaaaccaggug

SEQ ID NO: 2708300 - RNA, 19 nt, Artificial Sequence
  Description of Artificial Sequence: Synthetic oligonucleotide
gggcccgcccaggaccagg

SEQ ID NO: 2708301 - RNA, 19 nt, Artificial Sequence
  Description of Artificial Sequence: Synthetic oligonucleotide
ccgaucucgcgguucccca

SEQ ID NO: 2708302 - RNA, 19 nt, Artificial Sequence
  Description of Artificial Sequence: Synthetic oligonucleotide
accuugcggccgguauaga

SEQ ID NO: 2708303 - RNA, 19 nt, Artificial Sequence
  Description of Artificial Sequence: Synthetic oligonucleotide
ugggcccgcccaggaccag

SEQ ID NO: 2708304 - RNA, 19 nt, Artificial Sequence
  Description of Artificial Sequence: Synthetic oligonucleotide
ggcccgcccaggaccaggc

SEQ ID NO: 2708305 - RNA, 19 nt, Artificial Sequence
  Description of Artificial Sequence: Synthetic oligonucleotide
cgccaccacuccucauugg

SEQ ID NO: 2708306 - RNA, 19 nt, Artificial Sequence
  Description of Artificial Sequence: Synthetic oligonucleotide
acguagccgccagcuucgu

SEQ ID NO: 2708307 - RNA, 19 nt, Artificial Sequence
  Description of Artificial Sequence: Synthetic oligonucleotide
gcccaggaccaggcguagg

SEQ ID NO: 2708308 - RNA, 19 nt, Artificial Sequence
  Description of Artificial Sequence: Synthetic oligonucleotide
ucccgccagcaggugccaa

SEQ ID NO: 2708309 - RNA, 19 nt, Artificial Sequence
  Description of Artificial Sequence: Synthetic oligonucleotide
gcccgcccaggaccaggcg

SEQ ID NO: 2708310 - RNA, 19 nt, Artificial Sequence
  Description of Artificial Sequence: Synthetic oligonucleotide
gcacugggcccgcccagga

SEQ ID NO: 2708311 - RNA, 19 nt, Artificial Sequence
  Description of Artificial Sequence: Synthetic oligonucleotide
cccuccccagcccgcacug

SEQ ID NO: 2708312 - RNA, 19 nt, Artificial Sequence
  Description of Artificial Sequence: Synthetic oligonucleotide
cccaggaccaggcguaggu

SEQ ID NO: 2708313 - RNA, 19 nt, Artificial Sequence
  Description of Artificial Sequence: Synthetic oligonucleotide
gcccgcacugggcccgccc

SEQ ID NO: 2708314 - RNA, 19 nt, Artificial Sequence
  Description of Artificial Sequence: Synthetic oligonucleotide
guuacacggugcacacguu

SEQ ID NO: 2708315 - RNA, 19 nt, Artificial Sequence
  Description of Artificial Sequence: Synthetic oligonucleotide
ggggagcuauaggcgcgac

SEQ ID NO: 2708316 - RNA, 19 nt, Artificial Sequence
  Description of Artificial Sequence: Synthetic oligonucleotide
ccucauuggagucgucaau

SEQ ID NO: 2708317 - RNA, 19 nt, Artificial Sequence
  Description of Artificial Sequence: Synthetic oligonucleotide
cgguauagaccuugacgua

SEQ ID NO: 2708318 - RNA, 19 nt, Artificial Sequence
  Description of Artificial Sequence: Synthetic oligonucleotide
ccgaagcaccucugcaucu

SEQ ID NO: 2708319 - RNA, 19 nt, Artificial Sequence
  Description of Artificial Sequence: Synthetic oligonucleotide
cggagcccaaacuuguuau

SEQ ID NO: 2708320 - RNA, 19 nt, Artificial Sequence
  Description of Artificial Sequence: Synthetic oligonucleotide
cacaaaacuugggcuucuu

SEQ ID NO: 2708321 - RNA, 19 nt, Artificial Sequence
  Description of Artificial Sequence: Synthetic oligonucleotide
ggaccaggcguaggugucu

SEQ ID NO: 2708322 - RNA, 19 nt, Artificial Sequence
  Description of Artificial Sequence: Synthetic oligonucleotide
ccaccuugcggccgguaua

SEQ ID NO: 2708323 - RNA, 19 nt, Artificial Sequence
  Description of Artificial Sequence: Synthetic oligonucleotide
ccaggaagucggcgggaaa

SEQ ID NO: 2708324 - RNA, 19 nt, Artificial Sequence
  Description of Artificial Sequence: Synthetic oligonucleotide
ccgcccaggaccaggcgua

SEQ ID NO: 2708325 - RNA, 19 nt, Artificial Sequence
  Description of Artificial Sequence: Synthetic oligonucleotide
cggacccggaugauaaagu

SEQ ID NO: 2708326 - RNA, 19 nt, Artificial Sequence
  Description of Artificial Sequence: Synthetic oligonucleotide
cccggcgggaaauccagau

SEQ ID NO: 2708327 - RNA, 19 nt, Artificial Sequence
  Description of Artificial Sequence: Synthetic oligonucleotide
ccagaucauccuucagcau

SEQ ID NO: 2708328 - RNA, 19 nt, Artificial Sequence
  Description of Artificial Sequence: Synthetic oligonucleotide
ccgccagcaggugccaaca

SEQ ID NO: 2708329 - RNA, 19 nt, Artificial Sequence
  Description of Artificial Sequence: Synthetic oligonucleotide
cccgcacugggcccgccca

SEQ ID NO: 2708330 - RNA, 19 nt, Artificial Sequence
  Description of Artificial Sequence: Synthetic oligonucleotide
gcgguuccccacaaaggau

SEQ ID NO: 2708331 - RNA, 19 nt, Artificial Sequence
  Description of Artificial Sequence: Synthetic oligonucleotide
ccacgaucugaucuuucuu

SEQ ID NO: 2708332 - RNA, 19 nt, Artificial Sequence
  Description of Artificial Sequence: Synthetic oligonucleotide
cucccgccagcaggugcca

SEQ ID NO: 2708333 - RNA, 19 nt, Artificial Sequence
  Description of Artificial Sequence: Synthetic oligonucleotide
cgggcacagacaucacaaa

SEQ ID NO: 2708334 - RNA, 19 nt, Artificial Sequence
  Description of Artificial Sequence: Synthetic oligonucleotide
cguagccgccagcuucguc

SEQ ID NO: 2708335 - RNA, 19 nt, Artificial Sequence
  Description of Artificial Sequence: Synthetic oligonucleotide
ggcgggaaauccagaucau

SEQ ID NO: 2708336 - RNA, 19 nt, Artificial Sequence
  Description of Artificial Sequence: Synthetic oligonucleotide
cccgcccaggaccaggcgu

SEQ ID NO: 2708337 - RNA, 19 nt, Artificial Sequence
  Description of Artificial Sequence: Synthetic oligonucleotide
gcccgaucucgcgguuccc

SEQ ID NO: 2708338 - RNA, 19 nt, Artificial Sequence
  Description of Artificial Sequence: Synthetic oligonucleotide
cgccagcaggugccaacac

SEQ ID NO: 2708339 - RNA, 19 nt, Artificial Sequence
  Description of Artificial Sequence: Synthetic oligonucleotide
cccgccaccacuccucauu

SEQ ID NO: 2708340 - RNA, 19 nt, Artificial Sequence
  Description of Artificial Sequence: Synthetic oligonucleotide
ccccacaaaggaucugguu

SEQ ID NO: 2708341 - RNA, 19 nt, Artificial Sequence
  Description of Artificial Sequence: Synthetic oligonucleotide
gcaccacgaucugaucuuu

SEQ ID NO: 2708342 - RNA, 19 nt, Artificial Sequence
  Description of Artificial Sequence: Synthetic oligonucleotide
cccggacccggaugauaaa

SEQ ID NO: 2708343 - RNA, 19 nt, Artificial Sequence
  Description of Artificial Sequence: Synthetic oligonucleotide
ccccggcgggaaauccaga

SEQ ID NO: 2708344 - RNA, 19 nt, Artificial Sequence
  Description of Artificial Sequence: Synthetic oligonucleotide
cggcgggaaacagccccac

SEQ ID NO: 2708345 - RNA, 19 nt, Artificial Sequence
  Description of Artificial Sequence: Synthetic oligonucleotide
cggccgguauagaccuuga

SEQ ID NO: 2708346 - RNA, 19 nt, Artificial Sequence
  Description of Artificial Sequence: Synthetic oligonucleotide
cgacggaaaccagguggga

SEQ ID NO: 2708347 - RNA, 19 nt, Artificial Sequence
  Description of Artificial Sequence: Synthetic oligonucleotide
cgcccaggaccaggcguag

SEQ ID NO: 2708348 - RNA, 19 nt, Artificial Sequence
  Description of Artificial Sequence: Synthetic oligonucleotide
cgggaaacagccccaccuu

SEQ ID NO: 2708349 - RNA, 19 nt, Artificial Sequence
  Description of Artificial Sequence: Synthetic oligonucleotide
ggaaaccaggugggaucuu

SEQ ID NO: 2708350 - RNA, 19 nt, Artificial Sequence
  Description of Artificial Sequence: Synthetic oligonucleotide
ccaccuucucuccgauuuu

SEQ ID NO: 2708351 - RNA, 19 nt, Artificial Sequence
  Description of Artificial Sequence: Synthetic oligonucleotide
cgucaaugacugugaucuu

SEQ ID NO: 2708352 - RNA, 19 nt, Artificial Sequence
  Description of Artificial Sequence: Synthetic oligonucleotide
cagcccggacccggaugau

SEQ ID NO: 2708353 - RNA, 19 nt, Artificial Sequence
  Description of Artificial Sequence: Synthetic oligonucleotide
cgccagcuucgucuccuuu

SEQ ID NO: 2708354 - RNA, 19 nt, Artificial Sequence
  Description of Artificial Sequence: Synthetic oligonucleotide
ccccgccaccacuccucau

SEQ ID NO: 2708355 - RNA, 19 nt, Artificial Sequence
  Description of Artificial Sequence: Synthetic oligonucleotide
gccccaccuugcggccggu

SEQ ID NO: 2708356 - RNA, 19 nt, Artificial Sequence
  Description of Artificial Sequence: Synthetic oligonucleotide
aauauauuuaguaugaagc

SEQ ID NO: 2708357 - RNA, 19 nt, Artificial Sequence
  Description of Artificial Sequence: Synthetic oligonucleotide
aaaguauaaaacuaggauc

SEQ ID NO: 2708358 - RNA, 19 nt, Artificial Sequence
  Description of Artificial Sequence: Synthetic oligonucleotide
auuacuauauaauagaucu

SEQ ID NO: 2708359 - RNA, 19 nt, Artificial Sequence
  Description of Artificial Sequence: Synthetic oligonucleotide
aaaccaauguucuugaguc

SEQ ID NO: 2708360 - RNA, 19 nt, Artificial Sequence
  Description of Artificial Sequence: Synthetic oligonucleotide
uguauuauuauacaaauau

SEQ ID NO: 2708361 - RNA, 19 nt, Artificial Sequence
  Description of Artificial Sequence: Synthetic oligonucleotide
aauacaauucaucagaaaa

SEQ ID NO: 2708362 - RNA, 19 nt, Artificial Sequence
  Description of Artificial Sequence: Synthetic oligonucleotide
aaaacaaccacaucuucac

SEQ ID NO: 2708363 - RNA, 19 nt, Artificial Sequence
  Description of Artificial Sequence: Synthetic oligonucleotide
uauuauuauacaaauauau

SEQ ID NO: 2708364 - RNA, 19 nt, Artificial Sequence
  Description of Artificial Sequence: Synthetic oligonucleotide
uaaauuuugcaucagugcc

SEQ ID NO: 2708365 - RNA, 19 nt, Artificial Sequence
  Description of Artificial Sequence: Synthetic oligonucleotide
uaauuacaagaaaagauag

SEQ ID NO: 2708366 - RNA, 19 nt, Artificial Sequence
  Description of Artificial Sequence: Synthetic oligonucleotide
uaagaaaguauaaaacuag

SEQ ID NO: 2708367 - RNA, 19 nt, Artificial Sequence
  Description of Artificial Sequence: Synthetic oligonucleotide
aaaacuaggauccuuuuga

SEQ ID NO: 2708368 - RNA, 19 nt, Artificial Sequence
  Description of Artificial Sequence: Synthetic oligonucleotide
aagauuacuauauaauaga

SEQ ID NO: 2708369 - RNA, 19 nt, Artificial Sequence
  Description of Artificial Sequence: Synthetic oligonucleotide
uuaauuacaagaaaagaua

SEQ ID NO: 2708370 - RNA, 19 nt, Artificial Sequence
  Description of Artificial Sequence: Synthetic oligonucleotide
uuuuaaacauaccugauua

SEQ ID NO: 2708371 - RNA, 19 nt, Artificial Sequence
  Description of Artificial Sequence: Synthetic oligonucleotide
uugcuaauuaauuacaaga

SEQ ID NO: 2708372 - RNA, 19 nt, Artificial Sequence
  Description of Artificial Sequence: Synthetic oligonucleotide
uuuguugugaucuugugcu

SEQ ID NO: 2708373 - RNA, 19 nt, Artificial Sequence
  Description of Artificial Sequence: Synthetic oligonucleotide
aagcuggaugaauuuaugc

SEQ ID NO: 2708374 - RNA, 19 nt, Artificial Sequence
  Description of Artificial Sequence: Synthetic oligonucleotide
caagauuacuauauaauag

SEQ ID NO: 2708375 - RNA, 19 nt, Artificial Sequence
  Description of Artificial Sequence: Synthetic oligonucleotide
cuugaguccaaacaaagcc

SEQ ID NO: 2708376 - RNA, 19 nt, Artificial Sequence
  Description of Artificial Sequence: Synthetic oligonucleotide
uuaagaaaguauaaaacua

SEQ ID NO: 2708377 - RNA, 19 nt, Artificial Sequence
  Description of Artificial Sequence: Synthetic oligonucleotide
uuuaguaugaagcaauuuu

SEQ ID NO: 2708378 - RNA, 19 nt, Artificial Sequence
  Description of Artificial Sequence: Synthetic oligonucleotide
uuuagaguuaaauuuugca

SEQ ID NO: 2708379 - RNA, 19 nt, Artificial Sequence
  Description of Artificial Sequence: Synthetic oligonucleotide
aauuaauuacaagaaaaga

SEQ ID NO: 2708380 - RNA, 19 nt, Artificial Sequence
  Description of Artificial Sequence: Synthetic oligonucleotide
uauuguauuauuauacaaa

SEQ ID NO: 2708381 - RNA, 19 nt, Artificial Sequence
  Description of Artificial Sequence: Synthetic oligonucleotide
aauagaucuauguuuugca

SEQ ID NO: 2708382 - RNA, 19 nt, Artificial Sequence
  Description of Artificial Sequence: Synthetic oligonucleotide
gaaaauaagucuugggaug

SEQ ID NO: 2708383 - RNA, 19 nt, Artificial Sequence
  Description of Artificial Sequence: Synthetic oligonucleotide
augaaaauaagucuuggga

SEQ ID NO: 2708384 - RNA, 19 nt, Artificial Sequence
  Description of Artificial Sequence: Synthetic oligonucleotide
aacauaccugauuaucugg

SEQ ID NO: 2708385 - RNA, 19 nt, Artificial Sequence
  Description of Artificial Sequence: Synthetic oligonucleotide
uacaagaaaagauagguua

SEQ ID NO: 2708386 - RNA, 19 nt, Artificial Sequence
  Description of Artificial Sequence: Synthetic oligonucleotide
guaugaagcaauuuuaaac

SEQ ID NO: 2708387 - RNA, 19 nt, Artificial Sequence
  Description of Artificial Sequence: Synthetic oligonucleotide
uacacuuuaagaaaguaua

SEQ ID NO: 2708388 - RNA, 19 nt, Artificial Sequence
  Description of Artificial Sequence: Synthetic oligonucleotide
aaaagauagguuaaacaag

SEQ ID NO: 2708389 - RNA, 19 nt, Artificial Sequence
  Description of Artificial Sequence: Synthetic oligonucleotide
uggaaugacaguaacuggc

SEQ ID NO: 2708390 - RNA, 19 nt, Artificial Sequence
  Description of Artificial Sequence: Synthetic oligonucleotide
uaaacauaccugauuaucu

SEQ ID NO: 2708391 - RNA, 19 nt, Artificial Sequence
  Description of Artificial Sequence: Synthetic oligonucleotide
uauauaauagaucuauguu

SEQ ID NO: 2708392 - RNA, 19 nt, Artificial Sequence
  Description of Artificial Sequence: Synthetic oligonucleotide
aguuguaagcaucuuuuac

SEQ ID NO: 2708393 - RNA, 19 nt, Artificial Sequence
  Description of Artificial Sequence: Synthetic oligonucleotide
ucuggaaugacaguaacug

SEQ ID NO: 2708394 - RNA, 19 nt, Artificial Sequence
  Description of Artificial Sequence: Synthetic oligonucleotide
auauauuuaguaugaagca

SEQ ID NO: 2708395 - RNA, 19 nt, Artificial Sequence
  Description of Artificial Sequence: Synthetic oligonucleotide
auuguauuauuauacaaau

SEQ ID NO: 2708396 - RNA, 19 nt, Artificial Sequence
  Description of Artificial Sequence: Synthetic oligonucleotide
ugaaaauaagucuugggau

SEQ ID NO: 2708397 - RNA, 19 nt, Artificial Sequence
  Description of Artificial Sequence: Synthetic oligonucleotide
uuugcuaauuaauuacaag

SEQ ID NO: 2708398 - RNA, 19 nt, Artificial Sequence
  Description of Artificial Sequence: Synthetic oligonucleotide
ucuucuuuuguugugaucu

SEQ ID NO: 2708399 - RNA, 19 nt, Artificial Sequence
  Description of Artificial Sequence: Synthetic oligonucleotide
uuagaguuaaauuuugcau

SEQ ID NO: 2708400 - RNA, 19 nt, Artificial Sequence
  Description of Artificial Sequence: Synthetic oligonucleotide
aaagauagguuaaacaaga

SEQ ID NO: 2708401 - RNA, 19 nt, Artificial Sequence
  Description of Artificial Sequence: Synthetic oligonucleotide
aagaaaguauaaaacuagg

SEQ ID NO: 2708402 - RNA, 19 nt, Artificial Sequence
  Description of Artificial Sequence: Synthetic oligonucleotide
aauuacaagaaaagauagg

SEQ ID NO: 2708403 - RNA, 19 nt, Artificial Sequence
  Description of Artificial Sequence: Synthetic oligonucleotide
aaacauaccugauuaucug

SEQ ID NO: 2708404 - RNA, 19 nt, Artificial Sequence
  Description of Artificial Sequence: Synthetic oligonucleotide
uuuuguugugaucuugugc

SEQ ID NO: 2708405 - RNA, 19 nt, Artificial Sequence
  Description of Artificial Sequence: Synthetic oligonucleotide
gaagcaauuuuaaacauac

SEQ ID NO: 2708406 - RNA, 19 nt, Artificial Sequence
  Description of Artificial Sequence: Synthetic oligonucleotide
aucuauguuuugcaugugc

SEQ ID NO: 2708407 - RNA, 19 nt, Artificial Sequence
  Description of Artificial Sequence: Synthetic oligonucleotide
auuaauuacaagaaaagau

SEQ ID NO: 2708408 - RNA, 19 nt, Artificial Sequence
  Description of Artificial Sequence: Synthetic oligonucleotide
ugcuuuuagaguuaaauuu

SEQ ID NO: 2708409 - RNA, 19 nt, Artificial Sequence
  Description of Artificial Sequence: Synthetic oligonucleotide
uuugugaacagguaugcac

SEQ ID NO: 2708410 - RNA, 19 nt, Artificial Sequence
  Description of Artificial Sequence: Synthetic oligonucleotide
uagaguuaaauuuugcauc

SEQ ID NO: 2708411 - RNA, 19 nt, Artificial Sequence
  Description of Artificial Sequence: Synthetic oligonucleotide
ucaagauuacuauauaaua

SEQ ID NO: 2708412 - RNA, 19 nt, Artificial Sequence
  Description of Artificial Sequence: Synthetic oligonucleotide
uguucuugaguccaaacaa

SEQ ID NO: 2708413 - RNA, 19 nt, Artificial Sequence
  Description of Artificial Sequence: Synthetic oligonucleotide
ucugcuauuuccucgacac

SEQ ID NO: 2708414 - RNA, 19 nt, Artificial Sequence
  Description of Artificial Sequence: Synthetic oligonucleotide
ugcaccuacacuuuaagaa

SEQ ID NO: 2708415 - RNA, 19 nt, Artificial Sequence
  Description of Artificial Sequence: Synthetic oligonucleotide
uuuugcaugugcaauucug

SEQ ID NO: 2708416 - RNA, 19 nt, Artificial Sequence
  Description of Artificial Sequence: Synthetic oligonucleotide
uuuuagaguuaaauuuugc

SEQ ID NO: 2708417 - RNA, 19 nt, Artificial Sequence
  Description of Artificial Sequence: Synthetic oligonucleotide
aaaucaguucauuucugcu

SEQ ID NO: 2708418 - RNA, 19 nt, Artificial Sequence
  Description of Artificial Sequence: Synthetic oligonucleotide
ugaauuuaugccauucuuc

SEQ ID NO: 2708419 - RNA, 19 nt, Artificial Sequence
  Description of Artificial Sequence: Synthetic oligonucleotide
uacaauucaucagaaaaug

SEQ ID NO: 2708420 - RNA, 19 nt, Artificial Sequence
  Description of Artificial Sequence: Synthetic oligonucleotide
ucuauguuuugcaugugca

SEQ ID NO: 2708421 - RNA, 19 nt, Artificial Sequence
  Description of Artificial Sequence: Synthetic oligonucleotide
agaucuauguuuugcaugu

SEQ ID NO: 2708422 - RNA, 19 nt, Artificial Sequence
  Description of Artificial Sequence: Synthetic oligonucleotide
aaccaauguucuugagucc

SEQ ID NO: 2708423 - RNA, 19 nt, Artificial Sequence
  Description of Artificial Sequence: Synthetic oligonucleotide
auucaucagaaaauguacc

SEQ ID NO: 2708424 - RNA, 19 nt, Artificial Sequence
  Description of Artificial Sequence: Synthetic oligonucleotide
ugaauauuguauuauuaua

SEQ ID NO: 2708425 - RNA, 19 nt, Artificial Sequence
  Description of Artificial Sequence: Synthetic oligonucleotide
acuaggauccuuuugaauu

SEQ ID NO: 2708426 - RNA, 19 nt, Artificial Sequence
  Description of Artificial Sequence: Synthetic oligonucleotide
guuaaauuuugcaucagug

SEQ ID NO: 2708427 - RNA, 19 nt, Artificial Sequence
  Description of Artificial Sequence: Synthetic oligonucleotide
aggacuacacgguuccucc

SEQ ID NO: 2708428 - RNA, 19 nt, Artificial Sequence
  Description of Artificial Sequence: Synthetic oligonucleotide
uaauagaucuauguuuugc

SEQ ID NO: 2708429 - RNA, 19 nt, Artificial Sequence
  Description of Artificial Sequence: Synthetic oligonucleotide
ucuguagucgacugggaag

SEQ ID NO: 2708430 - RNA, 19 nt, Artificial Sequence
  Description of Artificial Sequence: Synthetic oligonucleotide
auaccugauuaucuggcac

SEQ ID NO: 2708431 - RNA, 19 nt, Artificial Sequence
  Description of Artificial Sequence: Synthetic oligonucleotide
agcaaaucaguucauuucu

SEQ ID NO: 2708432 - RNA, 19 nt, Artificial Sequence
  Description of Artificial Sequence: Synthetic oligonucleotide
ucuucacacacauuuguga

SEQ ID NO: 2708433 - RNA, 19 nt, Artificial Sequence
  Description of Artificial Sequence: Synthetic oligonucleotide
gaaaguauaaaacuaggau

SEQ ID NO: 2708434 - RNA, 19 nt, Artificial Sequence
  Description of Artificial Sequence: Synthetic oligonucleotide
gauagguuaaacaagagau

SEQ ID NO: 2708435 - RNA, 19 nt, Artificial Sequence
  Description of Artificial Sequence: Synthetic oligonucleotide
agauagguuaaacaagaga

SEQ ID NO: 2708436 - RNA, 19 nt, Artificial Sequence
  Description of Artificial Sequence: Synthetic oligonucleotide
aaugacaguaacuggcaau

SEQ ID NO: 2708437 - RNA, 19 nt, Artificial Sequence
  Description of Artificial Sequence: Synthetic oligonucleotide
uagaucuauguuuugcaug

SEQ ID NO: 2708438 - RNA, 19 nt, Artificial Sequence
  Description of Artificial Sequence: Synthetic oligonucleotide
auauuguauuauuauacaa

SEQ ID NO: 2708439 - RNA, 19 nt, Artificial Sequence
  Description of Artificial Sequence: Synthetic oligonucleotide
ucuaaaauuccuccuccac

SEQ ID NO: 2708440 - RNA, 19 nt, Artificial Sequence
  Description of Artificial Sequence: Synthetic oligonucleotide
aaucaguucauuucugcua

SEQ ID NO: 2708441 - RNA, 19 nt, Artificial Sequence
  Description of Artificial Sequence: Synthetic oligonucleotide
uuaaacauaccugauuauc

SEQ ID NO: 2708442 - RNA, 19 nt, Artificial Sequence
  Description of Artificial Sequence: Synthetic oligonucleotide
ucgacugggaaguuguaag

SEQ ID NO: 2708443 - RNA, 19 nt, Artificial Sequence
  Description of Artificial Sequence: Synthetic oligonucleotide
uugaguccaaacaaagccu

SEQ ID NO: 2708444 - RNA, 19 nt, Artificial Sequence
  Description of Artificial Sequence: Synthetic oligonucleotide
uauauuuaguaugaagcaa

SEQ ID NO: 2708445 - RNA, 19 nt, Artificial Sequence
  Description of Artificial Sequence: Synthetic oligonucleotide
uuugcaugugcaauucugu

SEQ ID NO: 2708446 - RNA, 19 nt, Artificial Sequence
  Description of Artificial Sequence: Synthetic oligonucleotide
auuaucuggcacucgcuuc

SEQ ID NO: 2708447 - RNA, 19 nt, Artificial Sequence
  Description of Artificial Sequence: Synthetic oligonucleotide
cucgacacugugauaaggg

SEQ ID NO: 2708448 - RNA, 19 nt, Artificial Sequence
  Description of Artificial Sequence: Synthetic oligonucleotide
cuucuaaaauuccuccucc

SEQ ID NO: 2708449 - RNA, 19 nt, Artificial Sequence
  Description of Artificial Sequence: Synthetic oligonucleotide
ucuuuuguugugaucuugu

SEQ ID NO: 2708450 - RNA, 19 nt, Artificial Sequence
  Description of Artificial Sequence: Synthetic oligonucleotide
uguaccugaauauuguauu

SEQ ID NO: 2708451 - RNA, 19 nt, Artificial Sequence
  Description of Artificial Sequence: Synthetic oligonucleotide
ugaacagguaugcaccuac

SEQ ID NO: 2708452 - RNA, 19 nt, Artificial Sequence
  Description of Artificial Sequence: Synthetic oligonucleotide
auuuagggaggacuacacg

SEQ ID NO: 2708453 - RNA, 19 nt, Artificial Sequence
  Description of Artificial Sequence: Synthetic oligonucleotide
aguuaaauuuugcaucagu

SEQ ID NO: 2708454 - RNA, 19 nt, Artificial Sequence
  Description of Artificial Sequence: Synthetic oligonucleotide
ugcuauuuccucgacacug

SEQ ID NO: 2708455 - RNA, 19 nt, Artificial Sequence
  Description of Artificial Sequence: Synthetic oligonucleotide
acacgguuccuccugcugc

SEQ ID NO: 2708456 - RNA, 19 nt, Artificial Sequence
  Description of Artificial Sequence: Synthetic oligonucleotide
uaguaugaagcaauuuuaa

SEQ ID NO: 2708457 - RNA, 19 nt, Artificial Sequence
  Description of Artificial Sequence: Synthetic oligonucleotide
gaauuuaugccauucuucu

SEQ ID NO: 2708458 - RNA, 19 nt, Artificial Sequence
  Description of Artificial Sequence: Synthetic oligonucleotide
ugugauaagggucuuucuu

SEQ ID NO: 2708459 - RNA, 19 nt, Artificial Sequence
  Description of Artificial Sequence: Synthetic oligonucleotide
ugggaaaccaauguucuug

SEQ ID NO: 2708460 - RNA, 19 nt, Artificial Sequence
  Description of Artificial Sequence: Synthetic oligonucleotide
auuuccucgacacugugau

SEQ ID NO: 2708461 - RNA, 19 nt, Artificial Sequence
  Description of Artificial Sequence: Synthetic oligonucleotide
acauaccugauuaucuggc

SEQ ID NO: 2708462 - RNA, 19 nt, Artificial Sequence
  Description of Artificial Sequence: Synthetic oligonucleotide
gauuacuauauaauagauc

SEQ ID NO: 2708463 - RNA, 19 nt, Artificial Sequence
  Description of Artificial Sequence: Synthetic oligonucleotide
uuaucuggcacucgcuucu

SEQ ID NO: 2708464 - RNA, 19 nt, Artificial Sequence
  Description of Artificial Sequence: Synthetic oligonucleotide
auguucuugaguccaaaca

SEQ ID NO: 2708465 - RNA, 19 nt, Artificial Sequence
  Description of Artificial Sequence: Synthetic oligonucleotide
gccagugucgcauuuaggg

SEQ ID NO: 2708466 - RNA, 19 nt, Artificial Sequence
  Description of Artificial Sequence: Synthetic oligonucleotide
cugauuaucuggcacucgc

SEQ ID NO: 2708467 - RNA, 19 nt, Artificial Sequence
  Description of Artificial Sequence: Synthetic oligonucleotide
aaauuuugcaucagugcca

SEQ ID NO: 2708468 - RNA, 19 nt, Artificial Sequence
  Description of Artificial Sequence: Synthetic oligonucleotide
ugcaucagugccaucuuca

SEQ ID NO: 2708469 - RNA, 19 nt, Artificial Sequence
  Description of Artificial Sequence: Synthetic oligonucleotide
gagcaaaucaguucauuuc

SEQ ID NO: 2708470 - RNA, 19 nt, Artificial Sequence
  Description of Artificial Sequence: Synthetic oligonucleotide
augaacucaagauuacuau

SEQ ID NO: 2708471 - RNA, 19 nt, Artificial Sequence
  Description of Artificial Sequence: Synthetic oligonucleotide
acugugauaagggucuuuc

SEQ ID NO: 2708472 - RNA, 19 nt, Artificial Sequence
  Description of Artificial Sequence: Synthetic oligonucleotide
ucaucagaaaauguaccug

SEQ ID NO: 2708473 - RNA, 19 nt, Artificial Sequence
  Description of Artificial Sequence: Synthetic oligonucleotide
cuauauaauagaucuaugu

SEQ ID NO: 2708474 - RNA, 19 nt, Artificial Sequence
  Description of Artificial Sequence: Synthetic oligonucleotide
aaaauacaauucaucagaa

SEQ ID NO: 2708475 - RNA, 19 nt, Artificial Sequence
  Description of Artificial Sequence: Synthetic oligonucleotide
ugaguccaaacaaagccuc

SEQ ID NO: 2708476 - RNA, 19 nt, Artificial Sequence
  Description of Artificial Sequence: Synthetic oligonucleotide
acuacacgguuccuccugc

SEQ ID NO: 2708477 - RNA, 19 nt, Artificial Sequence
  Description of Artificial Sequence: Synthetic oligonucleotide
aguaugaagcaauuuuaaa

SEQ ID NO: 2708478 - RNA, 19 nt, Artificial Sequence
  Description of Artificial Sequence: Synthetic oligonucleotide
ucuuuuacuucuggaauga

SEQ ID NO: 2708479 - RNA, 19 nt, Artificial Sequence
  Description of Artificial Sequence: Synthetic oligonucleotide
cagugucgcauuuagggag

SEQ ID NO: 2708480 - RNA, 19 nt, Artificial Sequence
  Description of Artificial Sequence: Synthetic oligonucleotide
ugccauucuucuuuuguug

SEQ ID NO: 2708481 - RNA, 19 nt, Artificial Sequence
  Description of Artificial Sequence: Synthetic oligonucleotide
ugaacucaagauuacuaua

SEQ ID NO: 2708482 - RNA, 19 nt, Artificial Sequence
  Description of Artificial Sequence: Synthetic oligonucleotide
uuuaaacauaccugauuau

SEQ ID NO: 2708483 - RNA, 19 nt, Artificial Sequence
  Description of Artificial Sequence: Synthetic oligonucleotide
ugcaauucugugagaagcu

SEQ ID NO: 2708484 - RNA, 19 nt, Artificial Sequence
  Description of Artificial Sequence: Synthetic oligonucleotide
agaaaguauaaaacuagga

SEQ ID NO: 2708485 - RNA, 19 nt, Artificial Sequence
  Description of Artificial Sequence: Synthetic oligonucleotide
ugugcaauucugugagaag

SEQ ID NO: 2708486 - RNA, 19 nt, Artificial Sequence
  Description of Artificial Sequence: Synthetic oligonucleotide
uuguaagcaucuuuuacuu

SEQ ID NO: 2708487 - RNA, 19 nt, Artificial Sequence
  Description of Artificial Sequence: Synthetic oligonucleotide
acagguaugcaccuacacu

SEQ ID NO: 2708488 - RNA, 19 nt, Artificial Sequence
  Description of Artificial Sequence: Synthetic oligonucleotide
ucuucagagcaaaucaguu

SEQ ID NO: 2708489 - RNA, 19 nt, Artificial Sequence
  Description of Artificial Sequence: Synthetic oligonucleotide
aauguaccugaauauugua

SEQ ID NO: 2708490 - RNA, 19 nt, Artificial Sequence
  Description of Artificial Sequence: Synthetic oligonucleotide
cuggaaugacaguaacugg

SEQ ID NO: 2708491 - RNA, 19 nt, Artificial Sequence
  Description of Artificial Sequence: Synthetic oligonucleotide
ugggaaguuguaagcaucu

SEQ ID NO: 2708492 - RNA, 19 nt, Artificial Sequence
  Description of Artificial Sequence: Synthetic oligonucleotide
aaauaagucuugggauggg

SEQ ID NO: 2708493 - RNA, 19 nt, Artificial Sequence
  Description of Artificial Sequence: Synthetic oligonucleotide
auauuuaguaugaagcaau

SEQ ID NO: 2708494 - RNA, 19 nt, Artificial Sequence
  Description of Artificial Sequence: Synthetic oligonucleotide
gugcaauucugugagaagc

SEQ ID NO: 2708495 - RNA, 19 nt, Artificial Sequence
  Description of Artificial Sequence: Synthetic oligonucleotide
caucagaaaauguaccuga

SEQ ID NO: 2708496 - RNA, 19 nt, Artificial Sequence
  Description of Artificial Sequence: Synthetic oligonucleotide
cagaaaauguaccugaaua

SEQ ID NO: 2708497 - RNA, 19 nt, Artificial Sequence
  Description of Artificial Sequence: Synthetic oligonucleotide
augacaguaacuggcaaug

SEQ ID NO: 2708498 - RNA, 19 nt, Artificial Sequence
  Description of Artificial Sequence: Synthetic oligonucleotide
aaacuaggauccuuuugaa

SEQ ID NO: 2708499 - RNA, 19 nt, Artificial Sequence
  Description of Artificial Sequence: Synthetic oligonucleotide
caauucaucagaaaaugua

SEQ ID NO: 2708500 - RNA, 19 nt, Artificial Sequence
  Description of Artificial Sequence: Synthetic oligonucleotide
augaauuuaugccauucuu

SEQ ID NO: 2708501 - RNA, 19 nt, Artificial Sequence
  Description of Artificial Sequence: Synthetic oligonucleotide
uucuggaaugacaguaacu

SEQ ID NO: 2708502 - RNA, 19 nt, Artificial Sequence
  Description of Artificial Sequence: Synthetic oligonucleotide
uuccucgacacugugauaa

SEQ ID NO: 2708503 - RNA, 19 nt, Artificial Sequence
  Description of Artificial Sequence: Synthetic oligonucleotide
caguaacuggcaauggcag

SEQ ID NO: 2708504 - RNA, 19 nt, Artificial Sequence
  Description of Artificial Sequence: Synthetic oligonucleotide
uauuuccucgacacuguga

SEQ ID NO: 2708505 - RNA, 19 nt, Artificial Sequence
  Description of Artificial Sequence: Synthetic oligonucleotide
uauuuaguaugaagcaauu

SEQ ID NO: 2708506 - RNA, 19 nt, Artificial Sequence
  Description of Artificial Sequence: Synthetic oligonucleotide
ucagaaaauguaccugaau

SEQ ID NO: 2708507 - RNA, 19 nt, Artificial Sequence
  Description of Artificial Sequence: Synthetic oligonucleotide
uagucgacugggaaguugu

SEQ ID NO: 2708508 - RNA, 19 nt, Artificial Sequence
  Description of Artificial Sequence: Synthetic oligonucleotide
cauuugugaacagguaugc

SEQ ID NO: 2708509 - RNA, 19 nt, Artificial Sequence
  Description of Artificial Sequence: Synthetic oligonucleotide
uucuaaaauuccuccucca

SEQ ID NO: 2708510 - RNA, 19 nt, Artificial Sequence
  Description of Artificial Sequence: Synthetic oligonucleotide
guuguaagcaucuuuuacu

SEQ ID NO: 2708511 - RNA, 19 nt, Artificial Sequence
  Description of Artificial Sequence: Synthetic oligonucleotide
agagcaaaucaguucauuu

SEQ ID NO: 2708512 - RNA, 19 nt, Artificial Sequence
  Description of Artificial Sequence: Synthetic oligonucleotide
aauaagucuugggauggga

SEQ ID NO: 2708513 - RNA, 19 nt, Artificial Sequence
  Description of Artificial Sequence: Synthetic oligonucleotide
gugauaagggucuuucuuc

SEQ ID NO: 2708514 - RNA, 19 nt, Artificial Sequence
  Description of Artificial Sequence: Synthetic oligonucleotide
uaagucuugggaugggaaa

SEQ ID NO: 2708515 - RNA, 19 nt, Artificial Sequence
  Description of Artificial Sequence: Synthetic oligonucleotide
aagauagguuaaacaagag

SEQ ID NO: 2708516 - RNA, 19 nt, Artificial Sequence
  Description of Artificial Sequence: Synthetic oligonucleotide
cauuuagggaggacuacac

SEQ ID NO: 2708517 - RNA, 19 nt, Artificial Sequence
  Description of Artificial Sequence: Synthetic oligonucleotide
uugcaugugcaauucugug

SEQ ID NO: 2708518 - RNA, 19 nt, Artificial Sequence
  Description of Artificial Sequence: Synthetic oligonucleotide
auagaucuauguuuugcau

SEQ ID NO: 2708519 - RNA, 19 nt, Artificial Sequence
  Description of Artificial Sequence: Synthetic oligonucleotide
aauuuaugccauucuucuu

SEQ ID NO: 2708520 - RNA, 19 nt, Artificial Sequence
  Description of Artificial Sequence: Synthetic oligonucleotide
augaagcaauuuuaaacau

SEQ ID NO: 2708521 - RNA, 19 nt, Artificial Sequence
  Description of Artificial Sequence: Synthetic oligonucleotide
uaccugauuaucuggcacu

SEQ ID NO: 2708522 - RNA, 19 nt, Artificial Sequence
  Description of Artificial Sequence: Synthetic oligonucleotide
gaaaccaauguucuugagu

SEQ ID NO: 2708523 - RNA, 19 nt, Artificial Sequence
  Description of Artificial Sequence: Synthetic oligonucleotide
acauuugugaacagguaug

SEQ ID NO: 2708524 - RNA, 19 nt, Artificial Sequence
  Description of Artificial Sequence: Synthetic oligonucleotide
agucuugggaugggaaacc

SEQ ID NO: 2708525 - RNA, 19 nt, Artificial Sequence
  Description of Artificial Sequence: Synthetic oligonucleotide
aacucaagauuacuauaua

SEQ ID NO: 2708526 - RNA, 19 nt, Artificial Sequence
  Description of Artificial Sequence: Synthetic oligonucleotide
auacaauucaucagaaaau

SEQ ID NO: 2708527 - RNA, 19 nt, Artificial Sequence
  Description of Artificial Sequence: Synthetic oligonucleotide
cucugcacagccagugucg

SEQ ID NO: 2708528 - RNA, 19 nt, Artificial Sequence
  Description of Artificial Sequence: Synthetic oligonucleotide
acaaccacaucuucacaca

SEQ ID NO: 2708529 - RNA, 19 nt, Artificial Sequence
  Description of Artificial Sequence: Synthetic oligonucleotide
uuacuauauaauagaucua

SEQ ID NO: 2708530 - RNA, 19 nt, Artificial Sequence
  Description of Artificial Sequence: Synthetic oligonucleotide
uucuguagucgacugggaa

SEQ ID NO: 2708531 - RNA, 19 nt, Artificial Sequence
  Description of Artificial Sequence: Synthetic oligonucleotide
ugugaacagguaugcaccu

SEQ ID NO: 2708532 - RNA, 19 nt, Artificial Sequence
  Description of Artificial Sequence: Synthetic oligonucleotide
aauggcaggaugaacucaa

SEQ ID NO: 2708533 - RNA, 19 nt, Artificial Sequence
  Description of Artificial Sequence: Synthetic oligonucleotide
ugauuaucuggcacucgcu

SEQ ID NO: 2708534 - RNA, 19 nt, Artificial Sequence
  Description of Artificial Sequence: Synthetic oligonucleotide
gaugaacucaagauuacua

SEQ ID NO: 2708535 - RNA, 19 nt, Artificial Sequence
  Description of Artificial Sequence: Synthetic oligonucleotide
acaguaacuggcaauggca

SEQ ID NO: 2708536 - RNA, 19 nt, Artificial Sequence
  Description of Artificial Sequence: Synthetic oligonucleotide
caggaugaacucaagauua

SEQ ID NO: 2708537 - RNA, 19 nt, Artificial Sequence
  Description of Artificial Sequence: Synthetic oligonucleotide
gaugaauuuaugccauucu

SEQ ID NO: 2708538 - RNA, 19 nt, Artificial Sequence
  Description of Artificial Sequence: Synthetic oligonucleotide
cuuuuguugugaucuugug

SEQ ID NO: 2708539 - RNA, 19 nt, Artificial Sequence
  Description of Artificial Sequence: Synthetic oligonucleotide
uucugcuauuuccucgaca

SEQ ID NO: 2708540 - RNA, 19 nt, Artificial Sequence
  Description of Artificial Sequence: Synthetic oligonucleotide
agauuacuauauaauagau

SEQ ID NO: 2708541 - RNA, 19 nt, Artificial Sequence
  Description of Artificial Sequence: Synthetic oligonucleotide
acuauauaauagaucuaug

SEQ ID NO: 2708542 - RNA, 19 nt, Artificial Sequence
  Description of Artificial Sequence: Synthetic oligonucleotide
ucgacacugugauaagggu

SEQ ID NO: 2708543 - RNA, 19 nt, Artificial Sequence
  Description of Artificial Sequence: Synthetic oligonucleotide
accaauguucuugagucca

SEQ ID NO: 2708544 - RNA, 19 nt, Artificial Sequence
  Description of Artificial Sequence: Synthetic oligonucleotide
uguuuugcaugugcaauuc

SEQ ID NO: 2708545 - RNA, 19 nt, Artificial Sequence
  Description of Artificial Sequence: Synthetic oligonucleotide
cuucuggaaugacaguaac

SEQ ID NO: 2708546 - RNA, 19 nt, Artificial Sequence
  Description of Artificial Sequence: Synthetic oligonucleotide
acaagaaaagauagguuaa

SEQ ID NO: 2708547 - RNA, 19 nt, Artificial Sequence
  Description of Artificial Sequence: Synthetic oligonucleotide
gacuacacgguuccuccug

SEQ ID NO: 2708548 - RNA, 19 nt, Artificial Sequence
  Description of Artificial Sequence: Synthetic oligonucleotide
gaagcuggaugaauuuaug

SEQ ID NO: 2708549 - RNA, 19 nt, Artificial Sequence
  Description of Artificial Sequence: Synthetic oligonucleotide
cugaauauuguauuauuau

SEQ ID NO: 2708550 - RNA, 19 nt, Artificial Sequence
  Description of Artificial Sequence: Synthetic oligonucleotide
agggucuuucuucuaaaau

SEQ ID NO: 2708551 - RNA, 19 nt, Artificial Sequence
  Description of Artificial Sequence: Synthetic oligonucleotide
uuuaugccauucuucuuuu

SEQ ID NO: 2708552 - RNA, 19 nt, Artificial Sequence
  Description of Artificial Sequence: Synthetic oligonucleotide
cuucacacacauuugugaa

SEQ ID NO: 2708553 - RNA, 19 nt, Artificial Sequence
  Description of Artificial Sequence: Synthetic oligonucleotide
uacacgguuccuccugcug

SEQ ID NO: 2708554 - RNA, 19 nt, Artificial Sequence
  Description of Artificial Sequence: Synthetic oligonucleotide
ucgcauuuagggaggacua

SEQ ID NO: 2708555 - RNA, 19 nt, Artificial Sequence
  Description of Artificial Sequence: Synthetic oligonucleotide
gacacugugauaagggucu

SEQ ID NO: 2708556 - RNA, 19 nt, Artificial Sequence
  Description of Artificial Sequence: Synthetic oligonucleotide
guaacuggcaauggcagga

SEQ ID NO: 2708557 - RNA, 19 nt, Artificial Sequence
  Description of Artificial Sequence: Synthetic oligonucleotide
accugaauauuguauuauu

SEQ ID NO: 2708558 - RNA, 19 nt, Artificial Sequence
  Description of Artificial Sequence: Synthetic oligonucleotide
cacacauuugugaacaggu

SEQ ID NO: 2708559 - RNA, 19 nt, Artificial Sequence
  Description of Artificial Sequence: Synthetic oligonucleotide
augcaccuacacuuuaaga

SEQ ID NO: 2708560 - RNA, 19 nt, Artificial Sequence
  Description of Artificial Sequence: Synthetic oligonucleotide
gaacucaagauuacuauau

SEQ ID NO: 2708561 - RNA, 19 nt, Artificial Sequence
  Description of Artificial Sequence: Synthetic oligonucleotide
gaugggaaaccaauguucu

SEQ ID NO: 2708562 - RNA, 19 nt, Artificial Sequence
  Description of Artificial Sequence: Synthetic oligonucleotide
accugauuaucuggcacuc

SEQ ID NO: 2708563 - RNA, 19 nt, Artificial Sequence
  Description of Artificial Sequence: Synthetic oligonucleotide
gaaguuguaagcaucuuuu

SEQ ID NO: 2708564 - RNA, 19 nt, Artificial Sequence
  Description of Artificial Sequence: Synthetic oligonucleotide
gaguuaaauuuugcaucag

SEQ ID NO: 2708565 - RNA, 19 nt, Artificial Sequence
  Description of Artificial Sequence: Synthetic oligonucleotide
agugucgcauuuagggagg

SEQ ID NO: 2708566 - RNA, 19 nt, Artificial Sequence
  Description of Artificial Sequence: Synthetic oligonucleotide
uaccugaauauuguauuau

SEQ ID NO: 2708567 - RNA, 19 nt, Artificial Sequence
  Description of Artificial Sequence: Synthetic oligonucleotide
aguauaaaacuaggauccu

SEQ ID NO: 2708568 - RNA, 19 nt, Artificial Sequence
  Description of Artificial Sequence: Synthetic oligonucleotide
augugcaauucugugagaa

SEQ ID NO: 2708569 - RNA, 19 nt, Artificial Sequence
  Description of Artificial Sequence: Synthetic oligonucleotide
uuaugccauucuucuuuug

SEQ ID NO: 2708570 - RNA, 19 nt, Artificial Sequence
  Description of Artificial Sequence: Synthetic oligonucleotide
agaagcuggaugaauuuau

SEQ ID NO: 2708571 - RNA, 19 nt, Artificial Sequence
  Description of Artificial Sequence: Synthetic oligonucleotide
caaccacaucuucacacac

SEQ ID NO: 2708572 - RNA, 19 nt, Artificial Sequence
  Description of Artificial Sequence: Synthetic oligonucleotide
ugugagaagcuggaugaau

SEQ ID NO: 2708573 - RNA, 19 nt, Artificial Sequence
  Description of Artificial Sequence: Synthetic oligonucleotide
auuuaguaugaagcaauuu

SEQ ID NO: 2708574 - RNA, 19 nt, Artificial Sequence
  Description of Artificial Sequence: Synthetic oligonucleotide
gaaugacaguaacuggcaa

SEQ ID NO: 2708575 - RNA, 19 nt, Artificial Sequence
  Description of Artificial Sequence: Synthetic oligonucleotide
ccaaacaaagccucugcac

SEQ ID NO: 2708576 - RNA, 19 nt, Artificial Sequence
  Description of Artificial Sequence: Synthetic oligonucleotide
uucuucuuuuguugugauc

SEQ ID NO: 2708577 - RNA, 19 nt, Artificial Sequence
  Description of Artificial Sequence: Synthetic oligonucleotide
uuugcaucagugccaucuu

SEQ ID NO: 2708578 - RNA, 19 nt, Artificial Sequence
  Description of Artificial Sequence: Synthetic oligonucleotide
acacuuuaagaaaguauaa

SEQ ID NO: 2708579 - RNA, 19 nt, Artificial Sequence
  Description of Artificial Sequence: Synthetic oligonucleotide
uccuccugcugcuuuuaga

SEQ ID NO: 2708580 - RNA, 19 nt, Artificial Sequence
  Description of Artificial Sequence: Synthetic oligonucleotide
ggaugggaaaccaauguuc

SEQ ID NO: 2708581 - RNA, 19 nt, Artificial Sequence
  Description of Artificial Sequence: Synthetic oligonucleotide
auagguuaaacaagagaua

SEQ ID NO: 2708582 - RNA, 19 nt, Artificial Sequence
  Description of Artificial Sequence: Synthetic oligonucleotide
auguaccugaauauuguau

SEQ ID NO: 2708583 - RNA, 19 nt, Artificial Sequence
  Description of Artificial Sequence: Synthetic oligonucleotide
augccauucuucuuuuguu

SEQ ID NO: 2708584 - RNA, 19 nt, Artificial Sequence
  Description of Artificial Sequence: Synthetic oligonucleotide
cuauuuccucgacacugug

SEQ ID NO: 2708585 - RNA, 19 nt, Artificial Sequence
  Description of Artificial Sequence: Synthetic oligonucleotide
uguugugaucuugugcuuu

SEQ ID NO: 2708586 - RNA, 19 nt, Artificial Sequence
  Description of Artificial Sequence: Synthetic oligonucleotide
ucagagcaaaucaguucau

SEQ ID NO: 2708587 - RNA, 19 nt, Artificial Sequence
  Description of Artificial Sequence: Synthetic oligonucleotide
cacuuuaagaaaguauaaa

SEQ ID NO: 2708588 - RNA, 19 nt, Artificial Sequence
  Description of Artificial Sequence: Synthetic oligonucleotide
cuacacuuuaagaaaguau

SEQ ID NO: 2708589 - RNA, 19 nt, Artificial Sequence
  Description of Artificial Sequence: Synthetic oligonucleotide
cauaccugauuaucuggca

SEQ ID NO: 2708590 - RNA, 19 nt, Artificial Sequence
  Description of Artificial Sequence: Synthetic oligonucleotide
ucugcacagccagugucgc

SEQ ID NO: 2708591 - RNA, 19 nt, Artificial Sequence
  Description of Artificial Sequence: Synthetic oligonucleotide
gggaggacuacacgguucc

SEQ ID NO: 2708592 - RNA, 19 nt, Artificial Sequence
  Description of Artificial Sequence: Synthetic oligonucleotide
cagccagugucgcauuuag

SEQ ID NO: 2708593 - RNA, 19 nt, Artificial Sequence
  Description of Artificial Sequence: Synthetic oligonucleotide
guaccugaauauuguauua

SEQ ID NO: 2708594 - RNA, 19 nt, Artificial Sequence
  Description of Artificial Sequence: Synthetic oligonucleotide
auuugugaacagguaugca

SEQ ID NO: 2708595 - RNA, 19 nt, Artificial Sequence
  Description of Artificial Sequence: Synthetic oligonucleotide
uccucgacacugugauaag

SEQ ID NO: 2708596 - RNA, 19 nt, Artificial Sequence
  Description of Artificial Sequence: Synthetic oligonucleotide
auaagucuugggaugggaa

SEQ ID NO: 2708597 - RNA, 19 nt, Artificial Sequence
  Description of Artificial Sequence: Synthetic oligonucleotide
gauuaucuggcacucgcuu

SEQ ID NO: 2708598 - RNA, 19 nt, Artificial Sequence
  Description of Artificial Sequence: Synthetic oligonucleotide
cagguaugcaccuacacuu

SEQ ID NO: 2708599 - RNA, 19 nt, Artificial Sequence
  Description of Artificial Sequence: Synthetic oligonucleotide
cacauuugugaacagguau

SEQ ID NO: 2708600 - RNA, 19 nt, Artificial Sequence
  Description of Artificial Sequence: Synthetic oligonucleotide
agggaggacuacacgguuc

SEQ ID NO: 2708601 - RNA, 19 nt, Artificial Sequence
  Description of Artificial Sequence: Synthetic oligonucleotide
guagucgacugggaaguug

SEQ ID NO: 2708602 - RNA, 19 nt, Artificial Sequence
  Description of Artificial Sequence: Synthetic oligonucleotide
ggaugaauuuaugccauuc

SEQ ID NO: 2708603 - RNA, 19 nt, Artificial Sequence
  Description of Artificial Sequence: Synthetic oligonucleotide
gaggacuacacgguuccuc

SEQ ID NO: 2708604 - RNA, 19 nt, Artificial Sequence
  Description of Artificial Sequence: Synthetic oligonucleotide
uagggaggacuacacgguu

SEQ ID NO: 2708605 - RNA, 19 nt, Artificial Sequence
  Description of Artificial Sequence: Synthetic oligonucleotide
cuuuuacuucuggaaugac

SEQ ID NO: 2708606 - RNA, 19 nt, Artificial Sequence
  Description of Artificial Sequence: Synthetic oligonucleotide
cuugggaugggaaaccaau

SEQ ID NO: 2708607 - RNA, 19 nt, Artificial Sequence
  Description of Artificial Sequence: Synthetic oligonucleotide
gcaccuacacuuuaagaaa

SEQ ID NO: 2708608 - RNA, 19 nt, Artificial Sequence
  Description of Artificial Sequence: Synthetic oligonucleotide
caagaaaagauagguuaaa

SEQ ID NO: 2708609 - RNA, 19 nt, Artificial Sequence
  Description of Artificial Sequence: Synthetic oligonucleotide
gaucuauguuuugcaugug

SEQ ID NO: 2708610 - RNA, 19 nt, Artificial Sequence
  Description of Artificial Sequence: Synthetic oligonucleotide
ggaaaccaauguucuugag

SEQ ID NO: 2708611 - RNA, 19 nt, Artificial Sequence
  Description of Artificial Sequence: Synthetic oligonucleotide
uaggauccuuuugaauuaa

SEQ ID NO: 2708612 - RNA, 19 nt, Artificial Sequence
  Description of Artificial Sequence: Synthetic oligonucleotide
gauaagggucuuucuucua

SEQ ID NO: 2708613 - RNA, 19 nt, Artificial Sequence
  Description of Artificial Sequence: Synthetic oligonucleotide
gggaaaccaauguucuuga

SEQ ID NO: 2708614 - RNA, 19 nt, Artificial Sequence
  Description of Artificial Sequence: Synthetic oligonucleotide
ggaaugacaguaacuggca

SEQ ID NO: 2708615 - RNA, 19 nt, Artificial Sequence
  Description of Artificial Sequence: Synthetic oligonucleotide
ggcaggaugaacucaagau

SEQ ID NO: 2708616 - RNA, 19 nt, Artificial Sequence
  Description of Artificial Sequence: Synthetic oligonucleotide
gagaagcuggaugaauuua

SEQ ID NO: 2708617 - RNA, 19 nt, Artificial Sequence
  Description of Artificial Sequence: Synthetic oligonucleotide
acucgcuucuguagucgac

SEQ ID NO: 2708618 - RNA, 19 nt, Artificial Sequence
  Description of Artificial Sequence: Synthetic oligonucleotide
gucgcauuuagggaggacu

SEQ ID NO: 2708619 - RNA, 19 nt, Artificial Sequence
  Description of Artificial Sequence: Synthetic oligonucleotide
ccugaauauuguauuauua

SEQ ID NO: 2708620 - RNA, 19 nt, Artificial Sequence
  Description of Artificial Sequence: Synthetic oligonucleotide
uggaugaauuuaugccauu

SEQ ID NO: 2708621 - RNA, 19 nt, Artificial Sequence
  Description of Artificial Sequence: Synthetic oligonucleotide
gggucuuucuucuaaaauu

SEQ ID NO: 2708622 - RNA, 19 nt, Artificial Sequence
  Description of Artificial Sequence: Synthetic oligonucleotide
uuguugugaucuugugcuu

SEQ ID NO: 2708623 - RNA, 19 nt, Artificial Sequence
  Description of Artificial Sequence: Synthetic oligonucleotide
accuacacuuuaagaaagu

SEQ ID NO: 2708624 - RNA, 19 nt, Artificial Sequence
  Description of Artificial Sequence: Synthetic oligonucleotide
augggaaaccaauguucuu

SEQ ID NO: 2708625 - RNA, 19 nt, Artificial Sequence
  Description of Artificial Sequence: Synthetic oligonucleotide
cugcuuuuagaguuaaauu

SEQ ID NO: 2708626 - RNA, 19 nt, Artificial Sequence
  Description of Artificial Sequence: Synthetic oligonucleotide
gcaauggcaggaugaacuc

SEQ ID NO: 2708627 - RNA, 19 nt, Artificial Sequence
  Description of Artificial Sequence: Synthetic oligonucleotide
gcaaaucaguucauuucug

SEQ ID NO: 2708628 - RNA, 19 nt, Artificial Sequence
  Description of Artificial Sequence: Synthetic oligonucleotide
gcaauucugugagaagcug

SEQ ID NO: 2708629 - RNA, 19 nt, Artificial Sequence
  Description of Artificial Sequence: Synthetic oligonucleotide
gaacagguaugcaccuaca

SEQ ID NO: 2708630 - RNA, 19 nt, Artificial Sequence
  Description of Artificial Sequence: Synthetic oligonucleotide
cuggaugaauuuaugccau

SEQ ID NO: 2708631 - RNA, 19 nt, Artificial Sequence
  Description of Artificial Sequence: Synthetic oligonucleotide
ggauccuuuugaauuaaaa

SEQ ID NO: 2708632 - RNA, 19 nt, Artificial Sequence
  Description of Artificial Sequence: Synthetic oligonucleotide
caucagugccaucuucaga

SEQ ID NO: 2708633 - RNA, 19 nt, Artificial Sequence
  Description of Artificial Sequence: Synthetic oligonucleotide
uaacuggcaauggcaggau

SEQ ID NO: 2708634 - RNA, 19 nt, Artificial Sequence
  Description of Artificial Sequence: Synthetic oligonucleotide
guaugcaccuacacuuuaa

SEQ ID NO: 2708635 - RNA, 19 nt, Artificial Sequence
  Description of Artificial Sequence: Synthetic oligonucleotide
cuucuguagucgacuggga

SEQ ID NO: 2708636 - RNA, 19 nt, Artificial Sequence
  Description of Artificial Sequence: Synthetic oligonucleotide
agccagugucgcauuuagg

SEQ ID NO: 2708637 - RNA, 19 nt, Artificial Sequence
  Description of Artificial Sequence: Synthetic oligonucleotide
gcugcuuuuagaguuaaau

SEQ ID NO: 2708638 - RNA, 19 nt, Artificial Sequence
  Description of Artificial Sequence: Synthetic oligonucleotide
uuuccucgacacugugaua

SEQ ID NO: 2708639 - RNA, 19 nt, Artificial Sequence
  Description of Artificial Sequence: Synthetic oligonucleotide
ucaguucauuucugcuauu

SEQ ID NO: 2708640 - RNA, 19 nt, Artificial Sequence
  Description of Artificial Sequence: Synthetic oligonucleotide
gcauuuagggaggacuaca

SEQ ID NO: 2708641 - RNA, 19 nt, Artificial Sequence
  Description of Artificial Sequence: Synthetic oligonucleotide
cuguagucgacugggaagu

SEQ ID NO: 2708642 - RNA, 19 nt, Artificial Sequence
  Description of Artificial Sequence: Synthetic oligonucleotide
ggaaguuguaagcaucuuu

SEQ ID NO: 2708643 - RNA, 19 nt, Artificial Sequence
  Description of Artificial Sequence: Synthetic oligonucleotide
ugucgcauuuagggaggac

SEQ ID NO: 2708644 - RNA, 19 nt, Artificial Sequence
  Description of Artificial Sequence: Synthetic oligonucleotide
gcacucgcuucuguagucg

SEQ ID NO: 2708645 - RNA, 19 nt, Artificial Sequence
  Description of Artificial Sequence: Synthetic oligonucleotide
cgacacugugauaaggguc

SEQ ID NO: 2708646 - RNA, 19 nt, Artificial Sequence
  Description of Artificial Sequence: Synthetic oligonucleotide
cgacugggaaguuguaagc

SEQ ID NO: 2708647 - RNA, 19 nt, Artificial Sequence
  Description of Artificial Sequence: Synthetic oligonucleotide
gucgacugggaaguuguaa

SEQ ID NO: 2708648 - RNA, 19 nt, Artificial Sequence
  Description of Artificial Sequence: Synthetic oligonucleotide
guauaaaacuaggauccuu

SEQ ID NO: 2708649 - RNA, 19 nt, Artificial Sequence
  Description of Artificial Sequence: Synthetic oligonucleotide
caugugcaauucugugaga

SEQ ID NO: 2708650 - RNA, 19 nt, Artificial Sequence
  Description of Artificial Sequence: Synthetic oligonucleotide
ccucgacacugugauaagg

SEQ ID NO: 2708651 - RNA, 19 nt, Artificial Sequence
  Description of Artificial Sequence: Synthetic oligonucleotide
gucuugggaugggaaacca

SEQ ID NO: 2708652 - RNA, 19 nt, Artificial Sequence
  Description of Artificial Sequence: Synthetic oligonucleotide
gcaggaugaacucaagauu

SEQ ID NO: 2708653 - RNA, 19 nt, Artificial Sequence
  Description of Artificial Sequence: Synthetic oligonucleotide
gugagaagcuggaugaauu

SEQ ID NO: 2708654 - RNA, 19 nt, Artificial Sequence
  Description of Artificial Sequence: Synthetic oligonucleotide
cacucgcuucuguagucga

SEQ ID NO: 2708655 - RNA, 19 nt, Artificial Sequence
  Description of Artificial Sequence: Synthetic oligonucleotide
ccagugucgcauuuaggga

SEQ ID NO: 2708656 - RNA, 19 nt, Artificial Sequence
  Description of Artificial Sequence: Synthetic oligonucleotide
gguaugcaccuacacuuua

SEQ ID NO: 2708657 - RNA, 19 nt, Artificial Sequence
  Description of Artificial Sequence: Synthetic oligonucleotide
ccugauuaucuggcacucg

SEQ ID NO: 2708658 - RNA, 19 nt, Artificial Sequence
  Description of Artificial Sequence: Synthetic oligonucleotide
caauguucuugaguccaaa

SEQ ID NO: 2708659 - RNA, 19 nt, Artificial Sequence
  Description of Artificial Sequence: Synthetic oligonucleotide
agguaugcaccuacacuuu

SEQ ID NO: 2708660 - RNA, 19 nt, Artificial Sequence
  Description of Artificial Sequence: Synthetic oligonucleotide
ggcacucgcuucuguaguc

SEQ ID NO: 2708661 - RNA, 19 nt, Artificial Sequence
  Description of Artificial Sequence: Synthetic oligonucleotide
cugugauaagggucuuucu

SEQ ID NO: 2708662 - RNA, 19 nt, Artificial Sequence
  Description of Artificial Sequence: Synthetic oligonucleotide
uguagucgacugggaaguu

SEQ ID NO: 2708663 - RNA, 19 nt, Artificial Sequence
  Description of Artificial Sequence: Synthetic oligonucleotide
cuggcaauggcaggaugaa

SEQ ID NO: 2708664 - RNA, 19 nt, Artificial Sequence
  Description of Artificial Sequence: Synthetic oligonucleotide
aggauccuuuugaauuaaa

SEQ ID NO: 2708665 - RNA, 19 nt, Artificial Sequence
  Description of Artificial Sequence: Synthetic oligonucleotide
gggaugggaaaccaauguu

SEQ ID NO: 2708666 - RNA, 19 nt, Artificial Sequence
  Description of Artificial Sequence: Synthetic oligonucleotide
ccuacacuuuaagaaagua

SEQ ID NO: 2708667 - RNA, 19 nt, Artificial Sequence
  Description of Artificial Sequence: Synthetic oligonucleotide
gugaacagguaugcaccua

SEQ ID NO: 2708668 - RNA, 19 nt, Artificial Sequence
  Description of Artificial Sequence: Synthetic oligonucleotide
cacgguuccuccugcugcu

SEQ ID NO: 2708669 - RNA, 19 nt, Artificial Sequence
  Description of Artificial Sequence: Synthetic oligonucleotide
cugugagaagcuggaugaa

SEQ ID NO: 2708670 - RNA, 19 nt, Artificial Sequence
  Description of Artificial Sequence: Synthetic oligonucleotide
gcuauuuccucgacacugu

SEQ ID NO: 2708671 - RNA, 19 nt, Artificial Sequence
  Description of Artificial Sequence: Synthetic oligonucleotide
gugucgcauuuagggagga

SEQ ID NO: 2708672 - RNA, 19 nt, Artificial Sequence
  Description of Artificial Sequence: Synthetic oligonucleotide
cugcugcuuuuagaguuaa

SEQ ID NO: 2708673 - RNA, 19 nt, Artificial Sequence
  Description of Artificial Sequence: Synthetic oligonucleotide
cugcuauuuccucgacacu

SEQ ID NO: 2708674 - RNA, 19 nt, Artificial Sequence
  Description of Artificial Sequence: Synthetic oligonucleotide
cuacacgguuccuccugcu

SEQ ID NO: 2708675 - RNA, 19 nt, Artificial Sequence
  Description of Artificial Sequence: Synthetic oligonucleotide
ccaauguucuugaguccaa

SEQ ID NO: 2708676 - RNA, 19 nt, Artificial Sequence
  Description of Artificial Sequence: Synthetic oligonucleotide
agucgacugggaaguugua

SEQ ID NO: 2708677 - RNA, 19 nt, Artificial Sequence
  Description of Artificial Sequence: Synthetic oligonucleotide
cgcauuuagggaggacuac

SEQ ID NO: 2708678 - RNA, 19 nt, Artificial Sequence
  Description of Artificial Sequence: Synthetic oligonucleotide
cagagcaaaucaguucauu

SEQ ID NO: 2708679 - RNA, 19 nt, Artificial Sequence
  Description of Artificial Sequence: Synthetic oligonucleotide
ggacuacacgguuccuccu

SEQ ID NO: 2708680 - RNA, 19 nt, Artificial Sequence
  Description of Artificial Sequence: Synthetic oligonucleotide
gguuccuccugcugcuuuu

SEQ ID NO: 2708681 - RNA, 19 nt, Artificial Sequence
  Description of Artificial Sequence: Synthetic oligonucleotide
cacagccagugucgcauuu

SEQ ID NO: 2708682 - RNA, 19 nt, Artificial Sequence
  Description of Artificial Sequence: Synthetic oligonucleotide
gccucugcacagccagugu

SEQ ID NO: 2708683 - RNA, 19 nt, Artificial Sequence
  Description of Artificial Sequence: Synthetic oligonucleotide
cacugugauaagggucuuu

SEQ ID NO: 2708684 - RNA, 19 nt, Artificial Sequence
  Description of Artificial Sequence: Synthetic oligonucleotide
gggaaguuguaagcaucuu

SEQ ID NO: 2708685 - RNA, 19 nt, Artificial Sequence
  Description of Artificial Sequence: Synthetic oligonucleotide
ggaggacuacacgguuccu

SEQ ID NO: 2708686 - RNA, 19 nt, Artificial Sequence
  Description of Artificial Sequence: Synthetic oligonucleotide
gcacagccagugucgcauu

SEQ ID NO: 2708687 - RNA, 19 nt, Artificial Sequence
  Description of Artificial Sequence: Synthetic oligonucleotide
cgguuccuccugcugcuuu

SEQ ID NO: 2708688 - RNA, 19 nt, Artificial Sequence
  Description of Artificial Sequence: Synthetic oligonucleotide
uucagcaugauuaagauug

SEQ ID NO: 2708689 - RNA, 19 nt, Artificial Sequence
  Description of Artificial Sequence: Synthetic oligonucleotide
auuaagauuguccauggcc

SEQ ID NO: 2708690 - RNA, 19 nt, Artificial Sequence
  Description of Artificial Sequence: Synthetic oligonucleotide
uuugaauucagcaugauua

SEQ ID NO: 2708691 - RNA, 19 nt, Artificial Sequence
  Description of Artificial Sequence: Synthetic oligonucleotide
ucuuauauaaaguuagacc

SEQ ID NO: 2708692 - RNA, 19 nt, Artificial Sequence
  Description of Artificial Sequence: Synthetic oligonucleotide
ucaguuugaauucagcaug

SEQ ID NO: 2708693 - RNA, 19 nt, Artificial Sequence
  Description of Artificial Sequence: Synthetic oligonucleotide
aaagacuggauccaggcca

SEQ ID NO: 2708694 - RNA, 19 nt, Artificial Sequence
  Description of Artificial Sequence: Synthetic oligonucleotide
uuaagauuguccauggcca

SEQ ID NO: 2708695 - RNA, 19 nt, Artificial Sequence
  Description of Artificial Sequence: Synthetic oligonucleotide
gaaacgagaaggcaguggg

SEQ ID NO: 2708696 - RNA, 19 nt, Artificial Sequence
  Description of Artificial Sequence: Synthetic oligonucleotide
aaaagacuggauccaggcc

SEQ ID NO: 2708697 - RNA, 19 nt, Artificial Sequence
  Description of Artificial Sequence: Synthetic oligonucleotide
ugcaagauuguacuguagg

SEQ ID NO: 2708698 - RNA, 19 nt, Artificial Sequence
  Description of Artificial Sequence: Synthetic oligonucleotide
ugaacuguuucuuccaggg

SEQ ID NO: 2708699 - RNA, 19 nt, Artificial Sequence
  Description of Artificial Sequence: Synthetic oligonucleotide
cuugcuaacgucuuuacug

SEQ ID NO: 2708700 - RNA, 19 nt, Artificial Sequence
  Description of Artificial Sequence: Synthetic oligonucleotide
uauaaaguuagaccuguug

SEQ ID NO: 2708701 - RNA, 19 nt, Artificial Sequence
  Description of Artificial Sequence: Synthetic oligonucleotide
ugugcuagcagcaugcggc

SEQ ID NO: 2708702 - RNA, 19 nt, Artificial Sequence
  Description of Artificial Sequence: Synthetic oligonucleotide
agcaauagcgcuucaggcc

SEQ ID NO: 2708703 - RNA, 19 nt, Artificial Sequence
  Description of Artificial Sequence: Synthetic oligonucleotide
cuuauauaaaguuagaccu

SEQ ID NO: 2708704 - RNA, 19 nt, Artificial Sequence
  Description of Artificial Sequence: Synthetic oligonucleotide
auaaaguuagaccuguugu

SEQ ID NO: 2708705 - RNA, 19 nt, Artificial Sequence
  Description of Artificial Sequence: Synthetic oligonucleotide
aaugagugcaagauuguac

SEQ ID NO: 2708706 - RNA, 19 nt, Artificial Sequence
  Description of Artificial Sequence: Synthetic oligonucleotide
uuuucaaucagguccacgu

SEQ ID NO: 2708707 - RNA, 19 nt, Artificial Sequence
  Description of Artificial Sequence: Synthetic oligonucleotide
uugagggucuuauauaaag

SEQ ID NO: 2708708 - RNA, 19 nt, Artificial Sequence
  Description of Artificial Sequence: Synthetic oligonucleotide
uuauauaaaguuagaccug

SEQ ID NO: 2708709 - RNA, 19 nt, Artificial Sequence
  Description of Artificial Sequence: Synthetic oligonucleotide
ugauuaagauuguccaugg

SEQ ID NO: 2708710 - RNA, 19 nt, Artificial Sequence
  Description of Artificial Sequence: Synthetic oligonucleotide
agcaugauuaagauugucc

SEQ ID NO: 2708711 - RNA, 19 nt, Artificial Sequence
  Description of Artificial Sequence: Synthetic oligonucleotide
aaguuagaccuguuguuuc

SEQ ID NO: 2708712 - RNA, 19 nt, Artificial Sequence
  Description of Artificial Sequence: Synthetic oligonucleotide
aggcaaugcacccaccucc

SEQ ID NO: 2708713 - RNA, 19 nt, Artificial Sequence
  Description of Artificial Sequence: Synthetic oligonucleotide
uuaagcagcuuuucaauca

SEQ ID NO: 2708714 - RNA, 19 nt, Artificial Sequence
  Description of Artificial Sequence: Synthetic oligonucleotide
uguuguuucuugcuaacgu

SEQ ID NO: 2708715 - RNA, 19 nt, Artificial Sequence
  Description of Artificial Sequence: Synthetic oligonucleotide
gaucaaacagggcaaggcc

SEQ ID NO: 2708716 - RNA, 19 nt, Artificial Sequence
  Description of Artificial Sequence: Synthetic oligonucleotide
aagauuguacuguaggguu

SEQ ID NO: 2708717 - RNA, 19 nt, Artificial Sequence
  Description of Artificial Sequence: Synthetic oligonucleotide
uauauaaaguuagaccugu

SEQ ID NO: 2708718 - RNA, 19 nt, Artificial Sequence
  Description of Artificial Sequence: Synthetic oligonucleotide
cagagaaacgagaaggcag

SEQ ID NO: 2708719 - RNA, 19 nt, Artificial Sequence
  Description of Artificial Sequence: Synthetic oligonucleotide
uuacugaacuguuucuucc

SEQ ID NO: 2708720 - RNA, 19 nt, Artificial Sequence
  Description of Artificial Sequence: Synthetic oligonucleotide
uguugagggucuuauauaa

SEQ ID NO: 2708721 - RNA, 19 nt, Artificial Sequence
  Description of Artificial Sequence: Synthetic oligonucleotide
uaagacuggacucccaagu

SEQ ID NO: 2708722 - RNA, 19 nt, Artificial Sequence
  Description of Artificial Sequence: Synthetic oligonucleotide
augagugcaagauuguacu

SEQ ID NO: 2708723 - RNA, 19 nt, Artificial Sequence
  Description of Artificial Sequence: Synthetic oligonucleotide
uaggcuucccauuuguugc

SEQ ID NO: 2708724 - RNA, 19 nt, Artificial Sequence
  Description of Artificial Sequence: Synthetic oligonucleotide
uaagcagcuuuucaaucag

SEQ ID NO: 2708725 - RNA, 19 nt, Artificial Sequence
  Description of Artificial Sequence: Synthetic oligonucleotide
aaacuccagacuucacuuc

SEQ ID NO: 2708726 - RNA, 19 nt, Artificial Sequence
  Description of Artificial Sequence: Synthetic oligonucleotide
aacgucuuuacugaacugu

SEQ ID NO: 2708727 - RNA, 19 nt, Artificial Sequence
  Description of Artificial Sequence: Synthetic oligonucleotide
augauuaagauuguccaug

SEQ ID NO: 2708728 - RNA, 19 nt, Artificial Sequence
  Description of Artificial Sequence: Synthetic oligonucleotide
uccccaacaccucaguuug

SEQ ID NO: 2708729 - RNA, 19 nt, Artificial Sequence
  Description of Artificial Sequence: Synthetic oligonucleotide
auaguuaagcagcuuuuca

SEQ ID NO: 2708730 - RNA, 19 nt, Artificial Sequence
  Description of Artificial Sequence: Synthetic oligonucleotide
uuuacugaacuguuucuuc

SEQ ID NO: 2708731 - RNA, 19 nt, Artificial Sequence
  Description of Artificial Sequence: Synthetic oligonucleotide
uaguuaagcagcuuuucaa

SEQ ID NO: 2708732 - RNA, 19 nt, Artificial Sequence
  Description of Artificial Sequence: Synthetic oligonucleotide
ucaaucagguccacgugug

SEQ ID NO: 2708733 - RNA, 19 nt, Artificial Sequence
  Description of Artificial Sequence: Synthetic oligonucleotide
ugagggucuuauauaaagu

SEQ ID NO: 2708734 - RNA, 19 nt, Artificial Sequence
  Description of Artificial Sequence: Synthetic oligonucleotide
aacgagaaggcagugggcu

SEQ ID NO: 2708735 - RNA, 19 nt, Artificial Sequence
  Description of Artificial Sequence: Synthetic oligonucleotide
guacuguaggguuaccuag

SEQ ID NO: 2708736 - RNA, 19 nt, Artificial Sequence
  Description of Artificial Sequence: Synthetic oligonucleotide
accgggaugaucauggcgg

SEQ ID NO: 2708737 - RNA, 19 nt, Artificial Sequence
  Description of Artificial Sequence: Synthetic oligonucleotide
uaaaguuagaccuguuguu

SEQ ID NO: 2708738 - RNA, 19 nt, Artificial Sequence
  Description of Artificial Sequence: Synthetic oligonucleotide
gacagcauagacaugaugu

SEQ ID NO: 2708739 - RNA, 19 nt, Artificial Sequence
  Description of Artificial Sequence: Synthetic oligonucleotide
uaagauuguccauggccag

SEQ ID NO: 2708740 - RNA, 19 nt, Artificial Sequence
  Description of Artificial Sequence: Synthetic oligonucleotide
uuucaaucagguccacgug

SEQ ID NO: 2708741 - RNA, 19 nt, Artificial Sequence
  Description of Artificial Sequence: Synthetic oligonucleotide
uugcuaacgucuuuacuga

SEQ ID NO: 2708742 - RNA, 19 nt, Artificial Sequence
  Description of Artificial Sequence: Synthetic oligonucleotide
ucuuuacugaacuguuucu

SEQ ID NO: 2708743 - RNA, 19 nt, Artificial Sequence
  Description of Artificial Sequence: Synthetic oligonucleotide
guaggcuucccauuuguug

SEQ ID NO: 2708744 - RNA, 19 nt, Artificial Sequence
  Description of Artificial Sequence: Synthetic oligonucleotide
guugccgacgaucuucccg

SEQ ID NO: 2708745 - RNA, 19 nt, Artificial Sequence
  Description of Artificial Sequence: Synthetic oligonucleotide
uugaauucagcaugauuaa

SEQ ID NO: 2708746 - RNA, 19 nt, Artificial Sequence
  Description of Artificial Sequence: Synthetic oligonucleotide
aaccucaaagacagcauag

SEQ ID NO: 2708747 - RNA, 19 nt, Artificial Sequence
  Description of Artificial Sequence: Synthetic oligonucleotide
aaaguuagaccuguuguuu

SEQ ID NO: 2708748 - RNA, 19 nt, Artificial Sequence
  Description of Artificial Sequence: Synthetic oligonucleotide
agcauaguuaagcagcuuu

SEQ ID NO: 2708749 - RNA, 19 nt, Artificial Sequence
  Description of Artificial Sequence: Synthetic oligonucleotide
ccuaguggaucaaacaggg

SEQ ID NO: 2708750 - RNA, 19 nt, Artificial Sequence
  Description of Artificial Sequence: Synthetic oligonucleotide
aaacgagaaggcagugggc

SEQ ID NO: 2708751 - RNA, 19 nt, Artificial Sequence
  Description of Artificial Sequence: Synthetic oligonucleotide
gucuuauauaaaguuagac

SEQ ID NO: 2708752 - RNA, 19 nt, Artificial Sequence
  Description of Artificial Sequence: Synthetic oligonucleotide
ugaauucagcaugauuaag

SEQ ID NO: 2708753 - RNA, 19 nt, Artificial Sequence
  Description of Artificial Sequence: Synthetic oligonucleotide
uguacuguaggguuaccua

SEQ ID NO: 2708754 - RNA, 19 nt, Artificial Sequence
  Description of Artificial Sequence: Synthetic oligonucleotide
agcgcuucaggcccagagc

SEQ ID NO: 2708755 - RNA, 19 nt, Artificial Sequence
  Description of Artificial Sequence: Synthetic oligonucleotide
aggguuaccuaguggauca

SEQ ID NO: 2708756 - RNA, 19 nt, Artificial Sequence
  Description of Artificial Sequence: Synthetic oligonucleotide
auaagacuggacucccaag

SEQ ID NO: 2708757 - RNA, 19 nt, Artificial Sequence
  Description of Artificial Sequence: Synthetic oligonucleotide
cagacuucacuucuccagg

SEQ ID NO: 2708758 - RNA, 19 nt, Artificial Sequence
  Description of Artificial Sequence: Synthetic oligonucleotide
uuuguugccgacgaucuuc

SEQ ID NO: 2708759 - RNA, 19 nt, Artificial Sequence
  Description of Artificial Sequence: Synthetic oligonucleotide
uugccgacgaucuucccgc

SEQ ID NO: 2708760 - RNA, 19 nt, Artificial Sequence
  Description of Artificial Sequence: Synthetic oligonucleotide
gauguugagggucuuauau

SEQ ID NO: 2708761 - RNA, 19 nt, Artificial Sequence
  Description of Artificial Sequence: Synthetic oligonucleotide
uaaccucaaagacagcaua

SEQ ID NO: 2708762 - RNA, 19 nt, Artificial Sequence
  Description of Artificial Sequence: Synthetic oligonucleotide
acugaacuguuucuuccag

SEQ ID NO: 2708763 - RNA, 19 nt, Artificial Sequence
  Description of Artificial Sequence: Synthetic oligonucleotide
agacuucacuucuccaggg

SEQ ID NO: 2708764 - RNA, 19 nt, Artificial Sequence
  Description of Artificial Sequence: Synthetic oligonucleotide
gauuaagauuguccauggc

SEQ ID NO: 2708765 - RNA, 19 nt, Artificial Sequence
  Description of Artificial Sequence: Synthetic oligonucleotide
cagcaauagcgcuucaggc

SEQ ID NO: 2708766 - RNA, 19 nt, Artificial Sequence
  Description of Artificial Sequence: Synthetic oligonucleotide
gggucuuauauaaaguuag

SEQ ID NO: 2708767 - RNA, 19 nt, Artificial Sequence
  Description of Artificial Sequence: Synthetic oligonucleotide
ggcaaugagugcaagauug

SEQ ID NO: 2708768 - RNA, 19 nt, Artificial Sequence
  Description of Artificial Sequence: Synthetic oligonucleotide
gacuggacucccaagucgg

SEQ ID NO: 2708769 - RNA, 19 nt, Artificial Sequence
  Description of Artificial Sequence: Synthetic oligonucleotide
cuucacuucuccaggggag

SEQ ID NO: 2708770 - RNA, 19 nt, Artificial Sequence
  Description of Artificial Sequence: Synthetic oligonucleotide
agaaacgagaaggcagugg

SEQ ID NO: 2708771 - RNA, 19 nt, Artificial Sequence
  Description of Artificial Sequence: Synthetic oligonucleotide
acgaucuucccgcagguga

SEQ ID NO: 2708772 - RNA, 19 nt, Artificial Sequence
  Description of Artificial Sequence: Synthetic oligonucleotide
cugaacuguuucuuccagg

SEQ ID NO: 2708773 - RNA, 19 nt, Artificial Sequence
  Description of Artificial Sequence: Synthetic oligonucleotide
ucuugcuaacgucuuuacu

SEQ ID NO: 2708774 - RNA, 19 nt, Artificial Sequence
  Description of Artificial Sequence: Synthetic oligonucleotide
guuguuucuugcuaacguc

SEQ ID NO: 2708775 - RNA, 19 nt, Artificial Sequence
  Description of Artificial Sequence: Synthetic oligonucleotide
uagaccuguuguuucuugc

SEQ ID NO: 2708776 - RNA, 19 nt, Artificial Sequence
  Description of Artificial Sequence: Synthetic oligonucleotide
ucccauuuguugccgacga

SEQ ID NO: 2708777 - RNA, 19 nt, Artificial Sequence
  Description of Artificial Sequence: Synthetic oligonucleotide
aaucagguccacgugugcu

SEQ ID NO: 2708778 - RNA, 19 nt, Artificial Sequence
  Description of Artificial Sequence: Synthetic oligonucleotide
accuaguggaucaaacagg

SEQ ID NO: 2708779 - RNA, 19 nt, Artificial Sequence
  Description of Artificial Sequence: Synthetic oligonucleotide
uuagaccuguuguuucuug

SEQ ID NO: 2708780 - RNA, 19 nt, Artificial Sequence
  Description of Artificial Sequence: Synthetic oligonucleotide
aguuagaccuguuguuucu

SEQ ID NO: 2708781 - RNA, 19 nt, Artificial Sequence
  Description of Artificial Sequence: Synthetic oligonucleotide
uccaggggagcauaguuaa

SEQ ID NO: 2708782 - RNA, 19 nt, Artificial Sequence
  Description of Artificial Sequence: Synthetic oligonucleotide
uacugaacuguuucuucca

SEQ ID NO: 2708783 - RNA, 19 nt, Artificial Sequence
  Description of Artificial Sequence: Synthetic oligonucleotide
gcaugauuaagauugucca

SEQ ID NO: 2708784 - RNA, 19 nt, Artificial Sequence
  Description of Artificial Sequence: Synthetic oligonucleotide
aaugcacccaccuccccaa

SEQ ID NO: 2708785 - RNA, 19 nt, Artificial Sequence
  Description of Artificial Sequence: Synthetic oligonucleotide
ucgggugaggggaaggaga

SEQ ID NO: 2708786 - RNA, 19 nt, Artificial Sequence
  Description of Artificial Sequence: Synthetic oligonucleotide
ugagugcaagauuguacug

SEQ ID NO: 2708787 - RNA, 19 nt, Artificial Sequence
  Description of Artificial Sequence: Synthetic oligonucleotide
uagcgcuucaggcccagag

SEQ ID NO: 2708788 - RNA, 19 nt, Artificial Sequence
  Description of Artificial Sequence: Synthetic oligonucleotide
uuguugccgacgaucuucc

SEQ ID NO: 2708789 - RNA, 19 nt, Artificial Sequence
  Description of Artificial Sequence: Synthetic oligonucleotide
agcauagacaugauguuga

SEQ ID NO: 2708790 - RNA, 19 nt, Artificial Sequence
  Description of Artificial Sequence: Synthetic oligonucleotide
gcagcaauagcgcuucagg

SEQ ID NO: 2708791 - RNA, 19 nt, Artificial Sequence
  Description of Artificial Sequence: Synthetic oligonucleotide
ugaagcagcgcaccgggau

SEQ ID NO: 2708792 - RNA, 19 nt, Artificial Sequence
  Description of Artificial Sequence: Synthetic oligonucleotide
ggaaggagaacaguccugg

SEQ ID NO: 2708793 - RNA, 19 nt, Artificial Sequence
  Description of Artificial Sequence: Synthetic oligonucleotide
ucccauaagacuggacucc

SEQ ID NO: 2708794 - RNA, 19 nt, Artificial Sequence
  Description of Artificial Sequence: Synthetic oligonucleotide
uacuguaggguuaccuagu

SEQ ID NO: 2708795 - RNA, 19 nt, Artificial Sequence
  Description of Artificial Sequence: Synthetic oligonucleotide
acgugugcuagcagcaugc

SEQ ID NO: 2708796 - RNA, 19 nt, Artificial Sequence
  Description of Artificial Sequence: Synthetic oligonucleotide
gauuguacuguaggguuac

SEQ ID NO: 2708797 - RNA, 19 nt, Artificial Sequence
  Description of Artificial Sequence: Synthetic oligonucleotide
gcaauagcgcuucaggccc

SEQ ID NO: 2708798 - RNA, 19 nt, Artificial Sequence
  Description of Artificial Sequence: Synthetic oligonucleotide
agccaggcaaugcacccac

SEQ ID NO: 2708799 - RNA, 19 nt, Artificial Sequence
  Description of Artificial Sequence: Synthetic oligonucleotide
gggagcauaguuaagcagc

SEQ ID NO: 2708800 - RNA, 19 nt, Artificial Sequence
  Description of Artificial Sequence: Synthetic oligonucleotide
uggacucccaagucgggug

SEQ ID NO: 2708801 - RNA, 19 nt, Artificial Sequence
  Description of Artificial Sequence: Synthetic oligonucleotide
guuaccuaguggaucaaac

SEQ ID NO: 2708802 - RNA, 19 nt, Artificial Sequence
  Description of Artificial Sequence: Synthetic oligonucleotide
agacagcauagacaugaug

SEQ ID NO: 2708803 - RNA, 19 nt, Artificial Sequence
  Description of Artificial Sequence: Synthetic oligonucleotide
agagaaacgagaaggcagu

SEQ ID NO: 2708804 - RNA, 19 nt, Artificial Sequence
  Description of Artificial Sequence: Synthetic oligonucleotide
uucccauuuguugccgacg

SEQ ID NO: 2708805 - RNA, 19 nt, Artificial Sequence
  Description of Artificial Sequence: Synthetic oligonucleotide
agcagcaugcggcggcagc

SEQ ID NO: 2708806 - RNA, 19 nt, Artificial Sequence
  Description of Artificial Sequence: Synthetic oligonucleotide
ggugaagcagcgcaccggg

SEQ ID NO: 2708807 - RNA, 19 nt, Artificial Sequence
  Description of Artificial Sequence: Synthetic oligonucleotide
guuucuuccaggggugagg

SEQ ID NO: 2708808 - RNA, 19 nt, Artificial Sequence
  Description of Artificial Sequence: Synthetic oligonucleotide
cucccauaagacuggacuc

SEQ ID NO: 2708809 - RNA, 19 nt, Artificial Sequence
  Description of Artificial Sequence: Synthetic oligonucleotide
ucagcaugauuaagauugu

SEQ ID NO: 2708810 - RNA, 19 nt, Artificial Sequence
  Description of Artificial Sequence: Synthetic oligonucleotide
uaacgucuuuacugaacug

SEQ ID NO: 2708811 - RNA, 19 nt, Artificial Sequence
  Description of Artificial Sequence: Synthetic oligonucleotide
agaccuguuguuucuugcu

SEQ ID NO: 2708812 - RNA, 19 nt, Artificial Sequence
  Description of Artificial Sequence: Synthetic oligonucleotide
agugcaagauuguacugua

SEQ ID NO: 2708813 - RNA, 19 nt, Artificial Sequence
  Description of Artificial Sequence: Synthetic oligonucleotide
uuucuugcuaacgucuuua

SEQ ID NO: 2708814 - RNA, 19 nt, Artificial Sequence
  Description of Artificial Sequence: Synthetic oligonucleotide
gguaaccucaaagacagca

SEQ ID NO: 2708815 - RNA, 19 nt, Artificial Sequence
  Description of Artificial Sequence: Synthetic oligonucleotide
uguuucuugcuaacgucuu

SEQ ID NO: 2708816 - RNA, 19 nt, Artificial Sequence
  Description of Artificial Sequence: Synthetic oligonucleotide
cuuuucaaucagguccacg

SEQ ID NO: 2708817 - RNA, 19 nt, Artificial Sequence
  Description of Artificial Sequence: Synthetic oligonucleotide
ugaucauggcggcgucugg

SEQ ID NO: 2708818 - RNA, 19 nt, Artificial Sequence
  Description of Artificial Sequence: Synthetic oligonucleotide
agugggcucccauaagacu

SEQ ID NO: 2708819 - RNA, 19 nt, Artificial Sequence
  Description of Artificial Sequence: Synthetic oligonucleotide
uuguacuguaggguuaccu

SEQ ID NO: 2708820 - RNA, 19 nt, Artificial Sequence
  Description of Artificial Sequence: Synthetic oligonucleotide
aagacuggauccaggccag

SEQ ID NO: 2708821 - RNA, 19 nt, Artificial Sequence
  Description of Artificial Sequence: Synthetic oligonucleotide
gugggcucccauaagacug

SEQ ID NO: 2708822 - RNA, 19 nt, Artificial Sequence
  Description of Artificial Sequence: Synthetic oligonucleotide
aggggagcauaguuaagca

SEQ ID NO: 2708823 - RNA, 19 nt, Artificial Sequence
  Description of Artificial Sequence: Synthetic oligonucleotide
gaggguaaacuccagacuu

SEQ ID NO: 2708824 - RNA, 19 nt, Artificial Sequence
  Description of Artificial Sequence: Synthetic oligonucleotide
gaagcagcgcaccgggaug

SEQ ID NO: 2708825 - RNA, 19 nt, Artificial Sequence
  Description of Artificial Sequence: Synthetic oligonucleotide
uucuugcuaacgucuuuac

SEQ ID NO: 2708826 - RNA, 19 nt, Artificial Sequence
  Description of Artificial Sequence: Synthetic oligonucleotide
cuguuguuucuugcuaacg

SEQ ID NO: 2708827 - RNA, 19 nt, Artificial Sequence
  Description of Artificial Sequence: Synthetic oligonucleotide
cauaguuaagcagcuuuuc

SEQ ID NO: 2708828 - RNA, 19 nt, Artificial Sequence
  Description of Artificial Sequence: Synthetic oligonucleotide
cuccagacuucacuucucc

SEQ ID NO: 2708829 - RNA, 19 nt, Artificial Sequence
  Description of Artificial Sequence: Synthetic oligonucleotide
ucccaagucgggugagggg

SEQ ID NO: 2708830 - RNA, 19 nt, Artificial Sequence
  Description of Artificial Sequence: Synthetic oligonucleotide
uagggcaaugagugcaaga

SEQ ID NO: 2708831 - RNA, 19 nt, Artificial Sequence
  Description of Artificial Sequence: Synthetic oligonucleotide
uacucggccugcagcagcc

SEQ ID NO: 2708832 - RNA, 19 nt, Artificial Sequence
  Description of Artificial Sequence: Synthetic oligonucleotide
cuaguggaucaaacagggc

SEQ ID NO: 2708833 - RNA, 19 nt, Artificial Sequence
  Description of Artificial Sequence: Synthetic oligonucleotide
acgagaaggcagugggcuc

SEQ ID NO: 2708834 - RNA, 19 nt, Artificial Sequence
  Description of Artificial Sequence: Synthetic oligonucleotide
ucccgcaggugaagcagcg

SEQ ID NO: 2708835 - RNA, 19 nt, Artificial Sequence
  Description of Artificial Sequence: Synthetic oligonucleotide
aucuucccgcaggugaagc

SEQ ID NO: 2708836 - RNA, 19 nt, Artificial Sequence
  Description of Artificial Sequence: Synthetic oligonucleotide
cuaacgucuuuacugaacu

SEQ ID NO: 2708837 - RNA, 19 nt, Artificial Sequence
  Description of Artificial Sequence: Synthetic oligonucleotide
gugugcuagcagcaugcgg

SEQ ID NO: 2708838 - RNA, 19 nt, Artificial Sequence
  Description of Artificial Sequence: Synthetic oligonucleotide
gaucauggcggcgucuggc

SEQ ID NO: 2708839 - RNA, 19 nt, Artificial Sequence
  Description of Artificial Sequence: Synthetic oligonucleotide
ucagguccacgugugcuag

SEQ ID NO: 2708840 - RNA, 19 nt, Artificial Sequence
  Description of Artificial Sequence: Synthetic oligonucleotide
accuguuguuucuugcuaa

SEQ ID NO: 2708841 - RNA, 19 nt, Artificial Sequence
  Description of Artificial Sequence: Synthetic oligonucleotide
uccagacuucacuucucca

SEQ ID NO: 2708842 - RNA, 19 nt, Artificial Sequence
  Description of Artificial Sequence: Synthetic oligonucleotide
cauggcggcgucuggcgcg

SEQ ID NO: 2708843 - RNA, 19 nt, Artificial Sequence
  Description of Artificial Sequence: Synthetic oligonucleotide
aagucgggugaggggaagg

SEQ ID NO: 2708844 - RNA, 19 nt, Artificial Sequence
  Description of Artificial Sequence: Synthetic oligonucleotide
agauuguccauggccagca

SEQ ID NO: 2708845 - RNA, 19 nt, Artificial Sequence
  Description of Artificial Sequence: Synthetic oligonucleotide
cagcauagacaugauguug

SEQ ID NO: 2708846 - RNA, 19 nt, Artificial Sequence
  Description of Artificial Sequence: Synthetic oligonucleotide
gagggucuuauauaaaguu

SEQ ID NO: 2708847 - RNA, 19 nt, Artificial Sequence
  Description of Artificial Sequence: Synthetic oligonucleotide
caccgggaugaucauggcg

SEQ ID NO: 2708848 - RNA, 19 nt, Artificial Sequence
  Description of Artificial Sequence: Synthetic oligonucleotide
auguugagggucuuauaua

SEQ ID NO: 2708849 - RNA, 19 nt, Artificial Sequence
  Description of Artificial Sequence: Synthetic oligonucleotide
auucagcaugauuaagauu

SEQ ID NO: 2708850 - RNA, 19 nt, Artificial Sequence
  Description of Artificial Sequence: Synthetic oligonucleotide
gugcuagcagcaugcggcg

SEQ ID NO: 2708851 - RNA, 19 nt, Artificial Sequence
  Description of Artificial Sequence: Synthetic oligonucleotide
uaggguuaccuaguggauc

SEQ ID NO: 2708852 - RNA, 19 nt, Artificial Sequence
  Description of Artificial Sequence: Synthetic oligonucleotide
agguaggcuucccauuugu

SEQ ID NO: 2708853 - RNA, 19 nt, Artificial Sequence
  Description of Artificial Sequence: Synthetic oligonucleotide
gguguacucggccugcagc

SEQ ID NO: 2708854 - RNA, 19 nt, Artificial Sequence
  Description of Artificial Sequence: Synthetic oligonucleotide
auuguacuguaggguuacc

SEQ ID NO: 2708855 - RNA, 19 nt, Artificial Sequence
  Description of Artificial Sequence: Synthetic oligonucleotide
caguuugaauucagcauga

SEQ ID NO: 2708856 - RNA, 19 nt, Artificial Sequence
  Description of Artificial Sequence: Synthetic oligonucleotide
caugcggcggcagcaauag

SEQ ID NO: 2708857 - RNA, 19 nt, Artificial Sequence
  Description of Artificial Sequence: Synthetic oligonucleotide
augauguugagggucuuau

SEQ ID NO: 2708858 - RNA, 19 nt, Artificial Sequence
  Description of Artificial Sequence: Synthetic oligonucleotide
augaucauggcggcgucug

SEQ ID NO: 2708859 - RNA, 19 nt, Artificial Sequence
  Description of Artificial Sequence: Synthetic oligonucleotide
aggguaaacuccagacuuc

SEQ ID NO: 2708860 - RNA, 19 nt, Artificial Sequence
  Description of Artificial Sequence: Synthetic oligonucleotide
ggcccuagggcaaugagug

SEQ ID NO: 2708861 - RNA, 19 nt, Artificial Sequence
  Description of Artificial Sequence: Synthetic oligonucleotide
cuucccauuuguugccgac

SEQ ID NO: 2708862 - RNA, 19 nt, Artificial Sequence
  Description of Artificial Sequence: Synthetic oligonucleotide
cagugggcucccauaagac

SEQ ID NO: 2708863 - RNA, 19 nt, Artificial Sequence
  Description of Artificial Sequence: Synthetic oligonucleotide
cauaagacuggacucccaa

SEQ ID NO: 2708864 - RNA, 19 nt, Artificial Sequence
  Description of Artificial Sequence: Synthetic oligonucleotide
guguacucggccugcagca

SEQ ID NO: 2708865 - RNA, 19 nt, Artificial Sequence
  Description of Artificial Sequence: Synthetic oligonucleotide
gaggcccuagggcaaugag

SEQ ID NO: 2708866 - RNA, 19 nt, Artificial Sequence
  Description of Artificial Sequence: Synthetic oligonucleotide
cauuuguugccgacgaucu

SEQ ID NO: 2708867 - RNA, 19 nt, Artificial Sequence
  Description of Artificial Sequence: Synthetic oligonucleotide
aauagcgcuucaggcccag

SEQ ID NO: 2708868 - RNA, 19 nt, Artificial Sequence
  Description of Artificial Sequence: Synthetic oligonucleotide
caggugaagcagcgcaccg

SEQ ID NO: 2708869 - RNA, 19 nt, Artificial Sequence
  Description of Artificial Sequence: Synthetic oligonucleotide
cucaguuugaauucagcau

SEQ ID NO: 2708870 - RNA, 19 nt, Artificial Sequence
  Description of Artificial Sequence: Synthetic oligonucleotide
cuucccgcaggugaagcag

SEQ ID NO: 2708871 - RNA, 19 nt, Artificial Sequence
  Description of Artificial Sequence: Synthetic oligonucleotide
cucccaagucgggugaggg

SEQ ID NO: 2708872 - RNA, 19 nt, Artificial Sequence
  Description of Artificial Sequence: Synthetic oligonucleotide
cagcgcaccgggaugauca

SEQ ID NO: 2708873 - RNA, 19 nt, Artificial Sequence
  Description of Artificial Sequence: Synthetic oligonucleotide
aggggauguaggccacagg

SEQ ID NO: 2708874 - RNA, 19 nt, Artificial Sequence
  Description of Artificial Sequence: Synthetic oligonucleotide
caaucagguccacgugugc

SEQ ID NO: 2708875 - RNA, 19 nt, Artificial Sequence
  Description of Artificial Sequence: Synthetic oligonucleotide
agaacaguccuggggaaaa

SEQ ID NO: 2708876 - RNA, 19 nt, Artificial Sequence
  Description of Artificial Sequence: Synthetic oligonucleotide
uucuuccaggggugagggg

SEQ ID NO: 2708877 - RNA, 19 nt, Artificial Sequence
  Description of Artificial Sequence: Synthetic oligonucleotide
gaggggauguaggccacag

SEQ ID NO: 2708878 - RNA, 19 nt, Artificial Sequence
  Description of Artificial Sequence: Synthetic oligonucleotide
gagaaacgagaaggcagug

SEQ ID NO: 2708879 - RNA, 19 nt, Artificial Sequence
  Description of Artificial Sequence: Synthetic oligonucleotide
agggucuuauauaaaguua

SEQ ID NO: 2708880 - RNA, 19 nt, Artificial Sequence
  Description of Artificial Sequence: Synthetic oligonucleotide
ugcuaacgucuuuacugaa

SEQ ID NO: 2708881 - RNA, 19 nt, Artificial Sequence
  Description of Artificial Sequence: Synthetic oligonucleotide
cccagagaaacgagaaggc

SEQ ID NO: 2708882 - RNA, 19 nt, Artificial Sequence
  Description of Artificial Sequence: Synthetic oligonucleotide
caccucaguuugaauucag

SEQ ID NO: 2708883 - RNA, 19 nt, Artificial Sequence
  Description of Artificial Sequence: Synthetic oligonucleotide
uguacucggccugcagcag

SEQ ID NO: 2708884 - RNA, 19 nt, Artificial Sequence
  Description of Artificial Sequence: Synthetic oligonucleotide
aggaggaggguaaacucca

SEQ ID NO: 2708885 - RNA, 19 nt, Artificial Sequence
  Description of Artificial Sequence: Synthetic oligonucleotide
gagugcaagauuguacugu

SEQ ID NO: 2708886 - RNA, 19 nt, Artificial Sequence
  Description of Artificial Sequence: Synthetic oligonucleotide
cuucuccaggggagcauag

SEQ ID NO: 2708887 - RNA, 19 nt, Artificial Sequence
  Description of Artificial Sequence: Synthetic oligonucleotide
caacaccucaguuugaauu

SEQ ID NO: 2708888 - RNA, 19 nt, Artificial Sequence
  Description of Artificial Sequence: Synthetic oligonucleotide
cacgugugcuagcagcaug

SEQ ID NO: 2708889 - RNA, 19 nt, Artificial Sequence
  Description of Artificial Sequence: Synthetic oligonucleotide
gauguaggccacagggcca

SEQ ID NO: 2708890 - RNA, 19 nt, Artificial Sequence
  Description of Artificial Sequence: Synthetic oligonucleotide
ggccagguaaccucaaaga

SEQ ID NO: 2708891 - RNA, 19 nt, Artificial Sequence
  Description of Artificial Sequence: Synthetic oligonucleotide
ccucaguuugaauucagca

SEQ ID NO: 2708892 - RNA, 19 nt, Artificial Sequence
  Description of Artificial Sequence: Synthetic oligonucleotide
gcauagacaugauguugag

SEQ ID NO: 2708893 - RNA, 19 nt, Artificial Sequence
  Description of Artificial Sequence: Synthetic oligonucleotide
ccagguaaccucaaagaca

SEQ ID NO: 2708894 - RNA, 19 nt, Artificial Sequence
  Description of Artificial Sequence: Synthetic oligonucleotide
cuggauccaggccagguaa

SEQ ID NO: 2708895 - RNA, 19 nt, Artificial Sequence
  Description of Artificial Sequence: Synthetic oligonucleotide
aucagguccacgugugcua

SEQ ID NO: 2708896 - RNA, 19 nt, Artificial Sequence
  Description of Artificial Sequence: Synthetic oligonucleotide
cgcaccgggaugaucaugg

SEQ ID NO: 2708897 - RNA, 19 nt, Artificial Sequence
  Description of Artificial Sequence: Synthetic oligonucleotide
gaucuucccgcaggugaag

SEQ ID NO: 2708898 - RNA, 19 nt, Artificial Sequence
  Description of Artificial Sequence: Synthetic oligonucleotide
gaccuguuguuucuugcua

SEQ ID NO: 2708899 - RNA, 19 nt, Artificial Sequence
  Description of Artificial Sequence: Synthetic oligonucleotide
gcucccauaagacuggacu

SEQ ID NO: 2708900 - RNA, 19 nt, Artificial Sequence
  Description of Artificial Sequence: Synthetic oligonucleotide
guuugaauucagcaugauu

SEQ ID NO: 2708901 - RNA, 19 nt, Artificial Sequence
  Description of Artificial Sequence: Synthetic oligonucleotide
aggcagugggcucccauaa

SEQ ID NO: 2708902 - RNA, 19 nt, Artificial Sequence
  Description of Artificial Sequence: Synthetic oligonucleotide
caaugcacccaccucccca

SEQ ID NO: 2708903 - RNA, 19 nt, Artificial Sequence
  Description of Artificial Sequence: Synthetic oligonucleotide
gacaugauguugagggucu

SEQ ID NO: 2708904 - RNA, 19 nt, Artificial Sequence
  Description of Artificial Sequence: Synthetic oligonucleotide
gcuagcagcaugcggcggc

SEQ ID NO: 2708905 - RNA, 19 nt, Artificial Sequence
  Description of Artificial Sequence: Synthetic oligonucleotide
gccaaagccaggcaaugca

SEQ ID NO: 2708906 - RNA, 19 nt, Artificial Sequence
  Description of Artificial Sequence: Synthetic oligonucleotide
caugauuaagauuguccau

SEQ ID NO: 2708907 - RNA, 19 nt, Artificial Sequence
  Description of Artificial Sequence: Synthetic oligonucleotide
caggcaaugcacccaccuc

SEQ ID NO: 2708908 - RNA, 19 nt, Artificial Sequence
  Description of Artificial Sequence: Synthetic oligonucleotide
ccaaagccaggcaaugcac

SEQ ID NO: 2708909 - RNA, 19 nt, Artificial Sequence
  Description of Artificial Sequence: Synthetic oligonucleotide
gugcaagauuguacuguag

SEQ ID NO: 2708910 - RNA, 19 nt, Artificial Sequence
  Description of Artificial Sequence: Synthetic oligonucleotide
aagacagcauagacaugau

SEQ ID NO: 2708911 - RNA, 19 nt, Artificial Sequence
  Description of Artificial Sequence: Synthetic oligonucleotide
gcagugggcucccauaaga

SEQ ID NO: 2708912 - RNA, 19 nt, Artificial Sequence
  Description of Artificial Sequence: Synthetic oligonucleotide
ccgacgaucuucccgcagg

SEQ ID NO: 2708913 - RNA, 19 nt, Artificial Sequence
  Description of Artificial Sequence: Synthetic oligonucleotide
agauuguacuguaggguua

SEQ ID NO: 2708914 - RNA, 19 nt, Artificial Sequence
  Description of Artificial Sequence: Synthetic oligonucleotide
uguugccgacgaucuuccc

SEQ ID NO: 2708915 - RNA, 19 nt, Artificial Sequence
  Description of Artificial Sequence: Synthetic oligonucleotide
gcuaacgucuuuacugaac

SEQ ID NO: 2708916 - RNA, 19 nt, Artificial Sequence
  Description of Artificial Sequence: Synthetic oligonucleotide
cuagggcaaugagugcaag

SEQ ID NO: 2708917 - RNA, 19 nt, Artificial Sequence
  Description of Artificial Sequence: Synthetic oligonucleotide
auuuguugccgacgaucuu

SEQ ID NO: 2708918 - RNA, 19 nt, Artificial Sequence
  Description of Artificial Sequence: Synthetic oligonucleotide
guaggccacagggccaaag

SEQ ID NO: 2708919 - RNA, 19 nt, Artificial Sequence
  Description of Artificial Sequence: Synthetic oligonucleotide
acucccaagucgggugagg

SEQ ID NO: 2708920 - RNA, 19 nt, Artificial Sequence
  Description of Artificial Sequence: Synthetic oligonucleotide
augcggcggcagcaauagc

SEQ ID NO: 2708921 - RNA, 19 nt, Artificial Sequence
  Description of Artificial Sequence: Synthetic oligonucleotide
acuggacucccaagucggg

SEQ ID NO: 2708922 - RNA, 19 nt, Artificial Sequence
  Description of Artificial Sequence: Synthetic oligonucleotide
ccauuuguugccgacgauc

SEQ ID NO: 2708923 - RNA, 19 nt, Artificial Sequence
  Description of Artificial Sequence: Synthetic oligonucleotide
cagguaggcuucccauuug

SEQ ID NO: 2708924 - RNA, 19 nt, Artificial Sequence
  Description of Artificial Sequence: Synthetic oligonucleotide
uucuccaggggagcauagu

SEQ ID NO: 2708925 - RNA, 19 nt, Artificial Sequence
  Description of Artificial Sequence: Synthetic oligonucleotide
augcacccaccuccccaac

SEQ ID NO: 2708926 - RNA, 19 nt, Artificial Sequence
  Description of Artificial Sequence: Synthetic oligonucleotide
gacgaucuucccgcaggug

SEQ ID NO: 2708927 - RNA, 19 nt, Artificial Sequence
  Description of Artificial Sequence: Synthetic oligonucleotide
ggucuuauauaaaguuaga

SEQ ID NO: 2708928 - RNA, 19 nt, Artificial Sequence
  Description of Artificial Sequence: Synthetic oligonucleotide
cagcaugauuaagauuguc

SEQ ID NO: 2708929 - RNA, 19 nt, Artificial Sequence
  Description of Artificial Sequence: Synthetic oligonucleotide
agucgggugaggggaagga

SEQ ID NO: 2708930 - RNA, 19 nt, Artificial Sequence
  Description of Artificial Sequence: Synthetic oligonucleotide
auggcggcgucuggcgcgc

SEQ ID NO: 2708931 - RNA, 19 nt, Artificial Sequence
  Description of Artificial Sequence: Synthetic oligonucleotide
gucgggugaggggaaggag

SEQ ID NO: 2708932 - RNA, 19 nt, Artificial Sequence
  Description of Artificial Sequence: Synthetic oligonucleotide
aggcccuagggcaaugagu

SEQ ID NO: 2708933 - RNA, 19 nt, Artificial Sequence
  Description of Artificial Sequence: Synthetic oligonucleotide
acgucuuuacugaacuguu

SEQ ID NO: 2708934 - RNA, 19 nt, Artificial Sequence
  Description of Artificial Sequence: Synthetic oligonucleotide
gcgcuucaggcccagagca

SEQ ID NO: 2708935 - RNA, 19 nt, Artificial Sequence
  Description of Artificial Sequence: Synthetic oligonucleotide
cucgguguacucggccugc

SEQ ID NO: 2708936 - RNA, 19 nt, Artificial Sequence
  Description of Artificial Sequence: Synthetic oligonucleotide
gagaaggcagugggcuccc

SEQ ID NO: 2708937 - RNA, 19 nt, Artificial Sequence
  Description of Artificial Sequence: Synthetic oligonucleotide
cuccaggggagcauaguua

SEQ ID NO: 2708938 - RNA, 19 nt, Artificial Sequence
  Description of Artificial Sequence: Synthetic oligonucleotide
gagaacaguccuggggaaa

SEQ ID NO: 2708939 - RNA, 19 nt, Artificial Sequence
  Description of Artificial Sequence: Synthetic oligonucleotide
aggcccagagaaacgagaa

SEQ ID NO: 2708940 - RNA, 19 nt, Artificial Sequence
  Description of Artificial Sequence: Synthetic oligonucleotide
caccuccccaacaccucag

SEQ ID NO: 2708941 - RNA, 19 nt, Artificial Sequence
  Description of Artificial Sequence: Synthetic oligonucleotide
gacucccaagucgggugag

SEQ ID NO: 2708942 - RNA, 19 nt, Artificial Sequence
  Description of Artificial Sequence: Synthetic oligonucleotide
ggcagcaauagcgcuucag

SEQ ID NO: 2708943 - RNA, 19 nt, Artificial Sequence
  Description of Artificial Sequence: Synthetic oligonucleotide
accuccccaacaccucagu

SEQ ID NO: 2708944 - RNA, 19 nt, Artificial Sequence
  Description of Artificial Sequence: Synthetic oligonucleotide
caaacagggcaaggcccag

SEQ ID NO: 2708945 - RNA, 19 nt, Artificial Sequence
  Description of Artificial Sequence: Synthetic oligonucleotide
auauaaaguuagaccuguu

SEQ ID NO: 2708946 - RNA, 19 nt, Artificial Sequence
  Description of Artificial Sequence: Synthetic oligonucleotide
ucuggcgcgcaggccgccg

SEQ ID NO: 2708947 - RNA, 19 nt, Artificial Sequence
  Description of Artificial Sequence: Synthetic oligonucleotide
caaugagugcaagauugua

SEQ ID NO: 2708948 - RNA, 19 nt, Artificial Sequence
  Description of Artificial Sequence: Synthetic oligonucleotide
acagggcaaggcccagaga

SEQ ID NO: 2708949 - RNA, 19 nt, Artificial Sequence
  Description of Artificial Sequence: Synthetic oligonucleotide
guugagggucuuauauaaa

SEQ ID NO: 2708950 - RNA, 19 nt, Artificial Sequence
  Description of Artificial Sequence: Synthetic oligonucleotide
gggcaaggcccagagaaac

SEQ ID NO: 2708951 - RNA, 19 nt, Artificial Sequence
  Description of Artificial Sequence: Synthetic oligonucleotide
caagucgggugaggggaag

SEQ ID NO: 2708952 - RNA, 19 nt, Artificial Sequence
  Description of Artificial Sequence: Synthetic oligonucleotide
gcaaggcccagagaaacga

SEQ ID NO: 2708953 - RNA, 19 nt, Artificial Sequence
  Description of Artificial Sequence: Synthetic oligonucleotide
cuuuacugaacuguuucuu

SEQ ID NO: 2708954 - RNA, 19 nt, Artificial Sequence
  Description of Artificial Sequence: Synthetic oligonucleotide
ugaggggauguaggccaca

SEQ ID NO: 2708955 - RNA, 19 nt, Artificial Sequence
  Description of Artificial Sequence: Synthetic oligonucleotide
gcaggugaagcagcgcacc

SEQ ID NO: 2708956 - RNA, 19 nt, Artificial Sequence
  Description of Artificial Sequence: Synthetic oligonucleotide
guaaccucaaagacagcau

SEQ ID NO: 2708957 - RNA, 19 nt, Artificial Sequence
  Description of Artificial Sequence: Synthetic oligonucleotide
cagaggaggaggguaaacu

SEQ ID NO: 2708958 - RNA, 19 nt, Artificial Sequence
  Description of Artificial Sequence: Synthetic oligonucleotide
gauccaggccagguaaccu

SEQ ID NO: 2708959 - RNA, 19 nt, Artificial Sequence
  Description of Artificial Sequence: Synthetic oligonucleotide
cccauaagacuggacuccc

SEQ ID NO: 2708960 - RNA, 19 nt, Artificial Sequence
  Description of Artificial Sequence: Synthetic oligonucleotide
gggugaggggauguaggcc

SEQ ID NO: 2708961 - RNA, 19 nt, Artificial Sequence
  Description of Artificial Sequence: Synthetic oligonucleotide
cagguccacgugugcuagc

SEQ ID NO: 2708962 - RNA, 19 nt, Artificial Sequence
  Description of Artificial Sequence: Synthetic oligonucleotide
ggcuucccauuuguugccg

SEQ ID NO: 2708963 - RNA, 19 nt, Artificial Sequence
  Description of Artificial Sequence: Synthetic oligonucleotide
agcaugcggcggcagcaau

SEQ ID NO: 2708964 - RNA, 19 nt, Artificial Sequence
  Description of Artificial Sequence: Synthetic oligonucleotide
caauagcgcuucaggccca

SEQ ID NO: 2708965 - RNA, 19 nt, Artificial Sequence
  Description of Artificial Sequence: Synthetic oligonucleotide
gguaaacuccagacuucac

SEQ ID NO: 2708966 - RNA, 19 nt, Artificial Sequence
  Description of Artificial Sequence: Synthetic oligonucleotide
ggagaacaguccuggggaa

SEQ ID NO: 2708967 - RNA, 19 nt, Artificial Sequence
  Description of Artificial Sequence: Synthetic oligonucleotide
cuccccaacaccucaguuu

SEQ ID NO: 2708968 - RNA, 19 nt, Artificial Sequence
  Description of Artificial Sequence: Synthetic oligonucleotide
uuccaggggugaggggaug

SEQ ID NO: 2708969 - RNA, 19 nt, Artificial Sequence
  Description of Artificial Sequence: Synthetic oligonucleotide
ugccgacgaucuucccgca

SEQ ID NO: 2708970 - RNA, 19 nt, Artificial Sequence
  Description of Artificial Sequence: Synthetic oligonucleotide
gguccacgugugcuagcag

SEQ ID NO: 2708971 - RNA, 19 nt, Artificial Sequence
  Description of Artificial Sequence: Synthetic oligonucleotide
ggccaaagccaggcaaugc

SEQ ID NO: 2708972 - RNA, 19 nt, Artificial Sequence
  Description of Artificial Sequence: Synthetic oligonucleotide
gaugaucauggcggcgucu

SEQ ID NO: 2708973 - RNA, 19 nt, Artificial Sequence
  Description of Artificial Sequence: Synthetic oligonucleotide
ucgguguacucggccugca

SEQ ID NO: 2708974 - RNA, 19 nt, Artificial Sequence
  Description of Artificial Sequence: Synthetic oligonucleotide
guuucuugcuaacgucuuu

SEQ ID NO: 2708975 - RNA, 19 nt, Artificial Sequence
  Description of Artificial Sequence: Synthetic oligonucleotide
uagcagcaugcggcggcag

SEQ ID NO: 2708976 - RNA, 19 nt, Artificial Sequence
  Description of Artificial Sequence: Synthetic oligonucleotide
ggaggaggguaaacuccag

SEQ ID NO: 2708977 - RNA, 19 nt, Artificial Sequence
  Description of Artificial Sequence: Synthetic oligonucleotide
ccagagaaacgagaaggca

SEQ ID NO: 2708978 - RNA, 19 nt, Artificial Sequence
  Description of Artificial Sequence: Synthetic oligonucleotide
ggagcauaguuaagcagcu

SEQ ID NO: 2708979 - RNA, 19 nt, Artificial Sequence
  Description of Artificial Sequence: Synthetic oligonucleotide
uggcgcgcaggccgccggc

SEQ ID NO: 2708980 - RNA, 19 nt, Artificial Sequence
  Description of Artificial Sequence: Synthetic oligonucleotide
ccgggaugaucauggcggc

SEQ ID NO: 2708981 - RNA, 19 nt, Artificial Sequence
  Description of Artificial Sequence: Synthetic oligonucleotide
ggcccagagcauccagggc

SEQ ID NO: 2708982 - RNA, 19 nt, Artificial Sequence
  Description of Artificial Sequence: Synthetic oligonucleotide
cccaagucgggugagggga

SEQ ID NO: 2708983 - RNA, 19 nt, Artificial Sequence
  Description of Artificial Sequence: Synthetic oligonucleotide
agggcaaggcccagagaaa

SEQ ID NO: 2708984 - RNA, 19 nt, Artificial Sequence
  Description of Artificial Sequence: Synthetic oligonucleotide
gggaugaucauggcggcgu

SEQ ID NO: 2708985 - RNA, 19 nt, Artificial Sequence
  Description of Artificial Sequence: Synthetic oligonucleotide
cuagcagcaugcggcggca

SEQ ID NO: 2708986 - RNA, 19 nt, Artificial Sequence
  Description of Artificial Sequence: Synthetic oligonucleotide
cccuagggcaaugagugca

SEQ ID NO: 2708987 - RNA, 19 nt, Artificial Sequence
  Description of Artificial Sequence: Synthetic oligonucleotide
ccaggggagcauaguuaag

SEQ ID NO: 2708988 - RNA, 19 nt, Artificial Sequence
  Description of Artificial Sequence: Synthetic oligonucleotide
gguuaccuaguggaucaaa

SEQ ID NO: 2708989 - RNA, 19 nt, Artificial Sequence
  Description of Artificial Sequence: Synthetic oligonucleotide
guaggguuaccuaguggau

SEQ ID NO: 2708990 - RNA, 19 nt, Artificial Sequence
  Description of Artificial Sequence: Synthetic oligonucleotide
gccgacgaucuucccgcag

SEQ ID NO: 2708991 - RNA, 19 nt, Artificial Sequence
  Description of Artificial Sequence: Synthetic oligonucleotide
gcccuagggcaaugagugc

SEQ ID NO: 2708992 - RNA, 19 nt, Artificial Sequence
  Description of Artificial Sequence: Synthetic oligonucleotide
ccucgguguacucggccug

SEQ ID NO: 2708993 - RNA, 19 nt, Artificial Sequence
  Description of Artificial Sequence: Synthetic oligonucleotide
gcaccgggaugaucauggc

SEQ ID NO: 2708994 - RNA, 19 nt, Artificial Sequence
  Description of Artificial Sequence: Synthetic oligonucleotide
guuagaccuguuguuucuu

SEQ ID NO: 2708995 - RNA, 19 nt, Artificial Sequence
  Description of Artificial Sequence: Synthetic oligonucleotide
caggccagguaaccucaaa

SEQ ID NO: 2708996 - RNA, 19 nt, Artificial Sequence
  Description of Artificial Sequence: Synthetic oligonucleotide
ccauaagacuggacuccca

SEQ ID NO: 2708997 - RNA, 19 nt, Artificial Sequence
  Description of Artificial Sequence: Synthetic oligonucleotide
gugaagcagcgcaccggga

SEQ ID NO: 2708998 - RNA, 19 nt, Artificial Sequence
  Description of Artificial Sequence: Synthetic oligonucleotide
gcauaguuaagcagcuuuu

SEQ ID NO: 2708999 - RNA, 19 nt, Artificial Sequence
  Description of Artificial Sequence: Synthetic oligonucleotide
auagcgcuucaggcccaga

SEQ ID NO: 2709000 - RNA, 19 nt, Artificial Sequence
  Description of Artificial Sequence: Synthetic oligonucleotide
cuggacucccaagucgggu

SEQ ID NO: 2709001 - RNA, 19 nt, Artificial Sequence
  Description of Artificial Sequence: Synthetic oligonucleotide
agaaggcagugggcuccca

SEQ ID NO: 2709002 - RNA, 19 nt, Artificial Sequence
  Description of Artificial Sequence: Synthetic oligonucleotide
cgugugcuagcagcaugcg

SEQ ID NO: 2709003 - RNA, 19 nt, Artificial Sequence
  Description of Artificial Sequence: Synthetic oligonucleotide
gcggcgucuggcgcgcagg

SEQ ID NO: 2709004 - RNA, 19 nt, Artificial Sequence
  Description of Artificial Sequence: Synthetic oligonucleotide
ggcggcgucuggcgcgcag

SEQ ID NO: 2709005 - RNA, 19 nt, Artificial Sequence
  Description of Artificial Sequence: Synthetic oligonucleotide
ccagcagaggaggagggua

SEQ ID NO: 2709006 - RNA, 19 nt, Artificial Sequence
  Description of Artificial Sequence: Synthetic oligonucleotide
gagcauaguuaagcagcuu

SEQ ID NO: 2709007 - RNA, 19 nt, Artificial Sequence
  Description of Artificial Sequence: Synthetic oligonucleotide
gggcaaugagugcaagauu

SEQ ID NO: 2709008 - RNA, 19 nt, Artificial Sequence
  Description of Artificial Sequence: Synthetic oligonucleotide
cgaucuucccgcaggugaa

SEQ ID NO: 2709009 - RNA, 19 nt, Artificial Sequence
  Description of Artificial Sequence: Synthetic oligonucleotide
ggcgucuggcgcgcaggcc

SEQ ID NO: 2709010 - RNA, 19 nt, Artificial Sequence
  Description of Artificial Sequence: Synthetic oligonucleotide
cgggaugaucauggcggcg

SEQ ID NO: 2709011 - RNA, 19 nt, Artificial Sequence
  Description of Artificial Sequence: Synthetic oligonucleotide
ccagguaggcuucccauuu

SEQ ID NO: 2709012 - RNA, 19 nt, Artificial Sequence
  Description of Artificial Sequence: Synthetic oligonucleotide
gcgcgcaggccgccggcag

SEQ ID NO: 2709013 - RNA, 19 nt, Artificial Sequence
  Description of Artificial Sequence: Synthetic oligonucleotide
cagcaugcggcggcagcaa

SEQ ID NO: 2709014 - RNA, 19 nt, Artificial Sequence
  Description of Artificial Sequence: Synthetic oligonucleotide
cccgcaggugaagcagcgc

SEQ ID NO: 2709015 - RNA, 19 nt, Artificial Sequence
  Description of Artificial Sequence: Synthetic oligonucleotide
cgguguacucggccugcag

SEQ ID NO: 2709016 - RNA, 19 nt, Artificial Sequence
  Description of Artificial Sequence: Synthetic oligonucleotide
gcgcaccgggaugaucaug

SEQ ID NO: 2709017 - RNA, 19 nt, Artificial Sequence
  Description of Artificial Sequence: Synthetic oligonucleotide
gccaggcaaugcacccacc

SEQ ID NO: 2709018 - RNA, 19 nt, Artificial Sequence
  Description of Artificial Sequence: Synthetic oligonucleotide
gcaugcggcggcagcaaua

SEQ ID NO: 2709019 - RNA, 19 nt, Artificial Sequence
  Description of Artificial Sequence: Synthetic oligonucleotide
cccucgguguacucggccu

SEQ ID NO: 2709020 - RNA, 19 nt, Artificial Sequence
  Description of Artificial Sequence: Synthetic oligonucleotide
gcagcgcaccgggaugauc

SEQ ID NO: 2709021 - RNA, 19 nt, Artificial Sequence
  Description of Artificial Sequence: Synthetic oligonucleotide
ggguuaccuaguggaucaa

SEQ ID NO: 2709022 - RNA, 19 nt, Artificial Sequence
  Description of Artificial Sequence: Synthetic oligonucleotide
cggcgucuggcgcgcaggc

SEQ ID NO: 2709023 - RNA, 19 nt, Artificial Sequence
  Description of Artificial Sequence: Synthetic oligonucleotide
ggcggcagcaauagcgcuu

SEQ ID NO: 2709024 - RNA, 19 nt, Artificial Sequence
  Description of Artificial Sequence: Synthetic oligonucleotide
cccagagcauccagggcau

SEQ ID NO: 2709025 - RNA, 19 nt, Artificial Sequence
  Description of Artificial Sequence: Synthetic oligonucleotide
ccccaacaccucaguuuga

SEQ ID NO: 2709026 - RNA, 19 nt, Artificial Sequence
  Description of Artificial Sequence: Synthetic oligonucleotide
cgucuuuacugaacuguuu

SEQ ID NO: 2709027 - RNA, 19 nt, Artificial Sequence
  Description of Artificial Sequence: Synthetic oligonucleotide
uggcggcgucuggcgcgca

SEQ ID NO: 2709028 - RNA, 19 nt, Artificial Sequence
  Description of Artificial Sequence: Synthetic oligonucleotide
cccagguaggcuucccauu

SEQ ID NO: 2709029 - RNA, 19 nt, Artificial Sequence
  Description of Artificial Sequence: Synthetic oligonucleotide
ggcgcgcaggccgccggca

SEQ ID NO: 2709030 - RNA, 19 nt, Artificial Sequence
  Description of Artificial Sequence: Synthetic oligonucleotide
cgacgaucuucccgcaggu

SEQ ID NO: 2709031 - RNA, 19 nt, Artificial Sequence
  Description of Artificial Sequence: Synthetic oligonucleotide
ccuccccaacaccucaguu

SEQ ID NO: 2709032 - RNA, 19 nt, Artificial Sequence
  Description of Artificial Sequence: Synthetic oligonucleotide
cccauuuguugccgacgau

SEQ ID NO: 2709033 - RNA, 19 nt, Artificial Sequence
  Description of Artificial Sequence: Synthetic oligonucleotide
ccaggggugaggggaugua

SEQ ID NO: 2709034 - RNA, 19 nt, Artificial Sequence
  Description of Artificial Sequence: Synthetic oligonucleotide
ccacgugugcuagcagcau

SEQ ID NO: 2709035 - RNA, 19 nt, Artificial Sequence
  Description of Artificial Sequence: Synthetic oligonucleotide
cggcagcaauagcgcuuca

SEQ ID NO: 2709036 - RNA, 19 nt, Artificial Sequence
  Description of Artificial Sequence: Synthetic oligonucleotide
uuugauuucuugaacaugg

SEQ ID NO: 2709037 - RNA, 19 nt, Artificial Sequence
  Description of Artificial Sequence: Synthetic oligonucleotide
uaaucugccggucugacgg

SEQ ID NO: 2709038 - RNA, 19 nt, Artificial Sequence
  Description of Artificial Sequence: Synthetic oligonucleotide
ucuaggaagguaucaaacg

SEQ ID NO: 2709039 - RNA, 19 nt, Artificial Sequence
  Description of Artificial Sequence: Synthetic oligonucleotide
ugcaaacuuaggaaggugg

SEQ ID NO: 2709040 - RNA, 19 nt, Artificial Sequence
  Description of Artificial Sequence: Synthetic oligonucleotide
guaucaaacgcuuuggggc

SEQ ID NO: 2709041 - RNA, 19 nt, Artificial Sequence
  Description of Artificial Sequence: Synthetic oligonucleotide
caaaauuccuuccugguag

SEQ ID NO: 2709042 - RNA, 19 nt, Artificial Sequence
  Description of Artificial Sequence: Synthetic oligonucleotide
ugucaaaauuccuuccugg

SEQ ID NO: 2709043 - RNA, 19 nt, Artificial Sequence
  Description of Artificial Sequence: Synthetic oligonucleotide
agcauuguuuuccggaggc

SEQ ID NO: 2709044 - RNA, 19 nt, Artificial Sequence
  Description of Artificial Sequence: Synthetic oligonucleotide
uugugcaaacuuaggaagg

SEQ ID NO: 2709045 - RNA, 19 nt, Artificial Sequence
  Description of Artificial Sequence: Synthetic oligonucleotide
gaagguaucaaacgcuuug

SEQ ID NO: 2709046 - RNA, 19 nt, Artificial Sequence
  Description of Artificial Sequence: Synthetic oligonucleotide
uccagcuucucucuuaccc

SEQ ID NO: 2709047 - RNA, 19 nt, Artificial Sequence
  Description of Artificial Sequence: Synthetic oligonucleotide
uuuucugucaaaauuccuu

SEQ ID NO: 2709048 - RNA, 19 nt, Artificial Sequence
  Description of Artificial Sequence: Synthetic oligonucleotide
gaugguuggccuugcagcg

SEQ ID NO: 2709049 - RNA, 19 nt, Artificial Sequence
  Description of Artificial Sequence: Synthetic oligonucleotide
uugaacaugguuuucuguc

SEQ ID NO: 2709050 - RNA, 19 nt, Artificial Sequence
  Description of Artificial Sequence: Synthetic oligonucleotide
auuccuuccugguagaggu

SEQ ID NO: 2709051 - RNA, 19 nt, Artificial Sequence
  Description of Artificial Sequence: Synthetic oligonucleotide
uaucaaacgcuuuggggcc

SEQ ID NO: 2709052 - RNA, 19 nt, Artificial Sequence
  Description of Artificial Sequence: Synthetic oligonucleotide
uucucucuuacccagggaa

SEQ ID NO: 2709053 - RNA, 19 nt, Artificial Sequence
  Description of Artificial Sequence: Synthetic oligonucleotide
agagcuguugaggaugugc

SEQ ID NO: 2709054 - RNA, 19 nt, Artificial Sequence
  Description of Artificial Sequence: Synthetic oligonucleotide
uggagggaaucuaggaagg

SEQ ID NO: 2709055 - RNA, 19 nt, Artificial Sequence
  Description of Artificial Sequence: Synthetic oligonucleotide
cuggagggaaucuaggaag

SEQ ID NO: 2709056 - RNA, 19 nt, Artificial Sequence
  Description of Artificial Sequence: Synthetic oligonucleotide
uggccugcuucccauagcg

SEQ ID NO: 2709057 - RNA, 19 nt, Artificial Sequence
  Description of Artificial Sequence: Synthetic oligonucleotide
gguaucaaacgcuuugggg

SEQ ID NO: 2709058 - RNA, 19 nt, Artificial Sequence
  Description of Artificial Sequence: Synthetic oligonucleotide
aacgcuuuggggccccugg

SEQ ID NO: 2709059 - RNA, 19 nt, Artificial Sequence
  Description of Artificial Sequence: Synthetic oligonucleotide
ugugcgaagggauuccagc

SEQ ID NO: 2709060 - RNA, 19 nt, Artificial Sequence
  Description of Artificial Sequence: Synthetic oligonucleotide
cagggaaacuccuggaggg

SEQ ID NO: 2709061 - RNA, 19 nt, Artificial Sequence
  Description of Artificial Sequence: Synthetic oligonucleotide
aagaccuccgcacccagcu

SEQ ID NO: 2709062 - RNA, 19 nt, Artificial Sequence
  Description of Artificial Sequence: Synthetic oligonucleotide
aggcaggauauccaacagc

SEQ ID NO: 2709063 - RNA, 19 nt, Artificial Sequence
  Description of Artificial Sequence: Synthetic oligonucleotide
auuucuugaacaugguuuu

SEQ ID NO: 2709064 - RNA, 19 nt, Artificial Sequence
  Description of Artificial Sequence: Synthetic oligonucleotide
cacccagucaccuguaggg

SEQ ID NO: 2709065 - RNA, 19 nt, Artificial Sequence
  Description of Artificial Sequence: Synthetic oligonucleotide
ucaaaauuccuuccuggua

SEQ ID NO: 2709066 - RNA, 19 nt, Artificial Sequence
  Description of Artificial Sequence: Synthetic oligonucleotide
agucccuccaccaagaccu

SEQ ID NO: 2709067 - RNA, 19 nt, Artificial Sequence
  Description of Artificial Sequence: Synthetic oligonucleotide
cuucccauagcgcuggcgc

SEQ ID NO: 2709068 - RNA, 19 nt, Artificial Sequence
  Description of Artificial Sequence: Synthetic oligonucleotide
uuaaucugccggucugacg

SEQ ID NO: 2709069 - RNA, 19 nt, Artificial Sequence
  Description of Artificial Sequence: Synthetic oligonucleotide
uucugucaaaauuccuucc

SEQ ID NO: 2709070 - RNA, 19 nt, Artificial Sequence
  Description of Artificial Sequence: Synthetic oligonucleotide
agagacagcaccaugggcu

SEQ ID NO: 2709071 - RNA, 19 nt, Artificial Sequence
  Description of Artificial Sequence: Synthetic oligonucleotide
agguaucaaacgcuuuggg

SEQ ID NO: 2709072 - RNA, 19 nt, Artificial Sequence
  Description of Artificial Sequence: Synthetic oligonucleotide
ugugguuugggcuuugauu

SEQ ID NO: 2709073 - RNA, 19 nt, Artificial Sequence
  Description of Artificial Sequence: Synthetic oligonucleotide
uguugaggaugugcgaagg

SEQ ID NO: 2709074 - RNA, 19 nt, Artificial Sequence
  Description of Artificial Sequence: Synthetic oligonucleotide
aacuuaggaagguggccug

SEQ ID NO: 2709075 - RNA, 19 nt, Artificial Sequence
  Description of Artificial Sequence: Synthetic oligonucleotide
guaggaucacuccagcaug

SEQ ID NO: 2709076 - RNA, 19 nt, Artificial Sequence
  Description of Artificial Sequence: Synthetic oligonucleotide
ucugacggagagcuguuga

SEQ ID NO: 2709077 - RNA, 19 nt, Artificial Sequence
  Description of Artificial Sequence: Synthetic oligonucleotide
uccaccaagaccuccgcac

SEQ ID NO: 2709078 - RNA, 19 nt, Artificial Sequence
  Description of Artificial Sequence: Synthetic oligonucleotide
cugguagagguacugcagg

SEQ ID NO: 2709079 - RNA, 19 nt, Artificial Sequence
  Description of Artificial Sequence: Synthetic oligonucleotide
agcagcauuguuuuccgga

SEQ ID NO: 2709080 - RNA, 19 nt, Artificial Sequence
  Description of Artificial Sequence: Synthetic oligonucleotide
ucaucucuugccuucucca

SEQ ID NO: 2709081 - RNA, 19 nt, Artificial Sequence
  Description of Artificial Sequence: Synthetic oligonucleotide
ucuuacccagggaaacucc

SEQ ID NO: 2709082 - RNA, 19 nt, Artificial Sequence
  Description of Artificial Sequence: Synthetic oligonucleotide
agcgguagaugucagucug

SEQ ID NO: 2709083 - RNA, 19 nt, Artificial Sequence
  Description of Artificial Sequence: Synthetic oligonucleotide
cacguuguggggaugguug

SEQ ID NO: 2709084 - RNA, 19 nt, Artificial Sequence
  Description of Artificial Sequence: Synthetic oligonucleotide
ugguuaaucugccggucug

SEQ ID NO: 2709085 - RNA, 19 nt, Artificial Sequence
  Description of Artificial Sequence: Synthetic oligonucleotide
ugauuucuugaacaugguu

SEQ ID NO: 2709086 - RNA, 19 nt, Artificial Sequence
  Description of Artificial Sequence: Synthetic oligonucleotide
agagcggagcacuugcuug

SEQ ID NO: 2709087 - RNA, 19 nt, Artificial Sequence
  Description of Artificial Sequence: Synthetic oligonucleotide
ugacggagagcuguugagg

SEQ ID NO: 2709088 - RNA, 19 nt, Artificial Sequence
  Description of Artificial Sequence: Synthetic oligonucleotide
acuugcuugucucuggcau

SEQ ID NO: 2709089 - RNA, 19 nt, Artificial Sequence
  Description of Artificial Sequence: Synthetic oligonucleotide
auccauuucuccgucugcg

SEQ ID NO: 2709090 - RNA, 19 nt, Artificial Sequence
  Description of Artificial Sequence: Synthetic oligonucleotide
cagcugguuaaucugccgg

SEQ ID NO: 2709091 - RNA, 19 nt, Artificial Sequence
  Description of Artificial Sequence: Synthetic oligonucleotide
uccugguagagguacugca

SEQ ID NO: 2709092 - RNA, 19 nt, Artificial Sequence
  Description of Artificial Sequence: Synthetic oligonucleotide
guugaggaugugcgaaggg

SEQ ID NO: 2709093 - RNA, 19 nt, Artificial Sequence
  Description of Artificial Sequence: Synthetic oligonucleotide
ugcaggaccagucccucca

SEQ ID NO: 2709094 - RNA, 19 nt, Artificial Sequence
  Description of Artificial Sequence: Synthetic oligonucleotide
ggaugguuggccuugcagc

SEQ ID NO: 2709095 - RNA, 19 nt, Artificial Sequence
  Description of Artificial Sequence: Synthetic oligonucleotide
ugcgaagggauuccagcca

SEQ ID NO: 2709096 - RNA, 19 nt, Artificial Sequence
  Description of Artificial Sequence: Synthetic oligonucleotide
ucggguccuagcuucuggg

SEQ ID NO: 2709097 - RNA, 19 nt, Artificial Sequence
  Description of Artificial Sequence: Synthetic oligonucleotide
ugugcaaacuuaggaaggu

SEQ ID NO: 2709098 - RNA, 19 nt, Artificial Sequence
  Description of Artificial Sequence: Synthetic oligonucleotide
caaacuuaggaagguggcc

SEQ ID NO: 2709099 - RNA, 19 nt, Artificial Sequence
  Description of Artificial Sequence: Synthetic oligonucleotide
uugauuucuugaacauggu

SEQ ID NO: 2709100 - RNA, 19 nt, Artificial Sequence
  Description of Artificial Sequence: Synthetic oligonucleotide
cuuugauuucuugaacaug

SEQ ID NO: 2709101 - RNA, 19 nt, Artificial Sequence
  Description of Artificial Sequence: Synthetic oligonucleotide
aggauauccaacagcagca

SEQ ID NO: 2709102 - RNA, 19 nt, Artificial Sequence
  Description of Artificial Sequence: Synthetic oligonucleotide
gacggagagcuguugagga

SEQ ID NO: 2709103 - RNA, 19 nt, Artificial Sequence
  Description of Artificial Sequence: Synthetic oligonucleotide
cugucaaaauuccuuccug

SEQ ID NO: 2709104 - RNA, 19 nt, Artificial Sequence
  Description of Artificial Sequence: Synthetic oligonucleotide
uccuggagggaaucuagga

SEQ ID NO: 2709105 - RNA, 19 nt, Artificial Sequence
  Description of Artificial Sequence: Synthetic oligonucleotide
ucuccagcuucucucuuac

SEQ ID NO: 2709106 - RNA, 19 nt, Artificial Sequence
  Description of Artificial Sequence: Synthetic oligonucleotide
uggaaggcaggauauccaa

SEQ ID NO: 2709107 - RNA, 19 nt, Artificial Sequence
  Description of Artificial Sequence: Synthetic oligonucleotide
guagggagcucaguugugg

SEQ ID NO: 2709108 - RNA, 19 nt, Artificial Sequence
  Description of Artificial Sequence: Synthetic oligonucleotide
gcuccagacgcagagagcg

SEQ ID NO: 2709109 - RNA, 19 nt, Artificial Sequence
  Description of Artificial Sequence: Synthetic oligonucleotide
uuacccagggaaacuccug

SEQ ID NO: 2709110 - RNA, 19 nt, Artificial Sequence
  Description of Artificial Sequence: Synthetic oligonucleotide
aggaugugcgaagggauuc

SEQ ID NO: 2709111 - RNA, 19 nt, Artificial Sequence
  Description of Artificial Sequence: Synthetic oligonucleotide
uaggaagguggccugcuuc

SEQ ID NO: 2709112 - RNA, 19 nt, Artificial Sequence
  Description of Artificial Sequence: Synthetic oligonucleotide
gugacugcacguugugggg

SEQ ID NO: 2709113 - RNA, 19 nt, Artificial Sequence
  Description of Artificial Sequence: Synthetic oligonucleotide
agcggacaaaugcuuccac

SEQ ID NO: 2709114 - RNA, 19 nt, Artificial Sequence
  Description of Artificial Sequence: Synthetic oligonucleotide
gugcgaagggauuccagcc

SEQ ID NO: 2709115 - RNA, 19 nt, Artificial Sequence
  Description of Artificial Sequence: Synthetic oligonucleotide
ucucucuuacccagggaaa

SEQ ID NO: 2709116 - RNA, 19 nt, Artificial Sequence
  Description of Artificial Sequence: Synthetic oligonucleotide
caugugcuggagcagcgag

SEQ ID NO: 2709117 - RNA, 19 nt, Artificial Sequence
  Description of Artificial Sequence: Synthetic oligonucleotide
ugucagucugggacagucc

SEQ ID NO: 2709118 - RNA, 19 nt, Artificial Sequence
  Description of Artificial Sequence: Synthetic oligonucleotide
cagagagcggagcacuugc

SEQ ID NO: 2709119 - RNA, 19 nt, Artificial Sequence
  Description of Artificial Sequence: Synthetic oligonucleotide
acguuguggggaugguugg

SEQ ID NO: 2709120 - RNA, 19 nt, Artificial Sequence
  Description of Artificial Sequence: Synthetic oligonucleotide
cugggacagucccagagac

SEQ ID NO: 2709121 - RNA, 19 nt, Artificial Sequence
  Description of Artificial Sequence: Synthetic oligonucleotide
gaaucuaggaagguaucaa

SEQ ID NO: 2709122 - RNA, 19 nt, Artificial Sequence
  Description of Artificial Sequence: Synthetic oligonucleotide
agcaccaugggcucccacu

SEQ ID NO: 2709123 - RNA, 19 nt, Artificial Sequence
  Description of Artificial Sequence: Synthetic oligonucleotide
uguagggagcucaguugug

SEQ ID NO: 2709124 - RNA, 19 nt, Artificial Sequence
  Description of Artificial Sequence: Synthetic oligonucleotide
uugucucuggcauccauuu

SEQ ID NO: 2709125 - RNA, 19 nt, Artificial Sequence
  Description of Artificial Sequence: Synthetic oligonucleotide
ucaccuguagggagcucag

SEQ ID NO: 2709126 - RNA, 19 nt, Artificial Sequence
  Description of Artificial Sequence: Synthetic oligonucleotide
cagcuccagacgcagagag

SEQ ID NO: 2709127 - RNA, 19 nt, Artificial Sequence
  Description of Artificial Sequence: Synthetic oligonucleotide
uauccaacagcagcauugu

SEQ ID NO: 2709128 - RNA, 19 nt, Artificial Sequence
  Description of Artificial Sequence: Synthetic oligonucleotide
gguacugcaggaccagucc

SEQ ID NO: 2709129 - RNA, 19 nt, Artificial Sequence
  Description of Artificial Sequence: Synthetic oligonucleotide
ggcgccagcggacaaaugc

SEQ ID NO: 2709130 - RNA, 19 nt, Artificial Sequence
  Description of Artificial Sequence: Synthetic oligonucleotide
acaaaugcuuccaccaccu

SEQ ID NO: 2709131 - RNA, 19 nt, Artificial Sequence
  Description of Artificial Sequence: Synthetic oligonucleotide
caucucuugccuucuccag

SEQ ID NO: 2709132 - RNA, 19 nt, Artificial Sequence
  Description of Artificial Sequence: Synthetic oligonucleotide
cugacggagagcuguugag

SEQ ID NO: 2709133 - RNA, 19 nt, Artificial Sequence
  Description of Artificial Sequence: Synthetic oligonucleotide
gguuuucugucaaaauucc

SEQ ID NO: 2709134 - RNA, 19 nt, Artificial Sequence
  Description of Artificial Sequence: Synthetic oligonucleotide
augggcucccacucggguc

SEQ ID NO: 2709135 - RNA, 19 nt, Artificial Sequence
  Description of Artificial Sequence: Synthetic oligonucleotide
cuguugaggaugugcgaag

SEQ ID NO: 2709136 - RNA, 19 nt, Artificial Sequence
  Description of Artificial Sequence: Synthetic oligonucleotide
guacugcaggaccaguccc

SEQ ID NO: 2709137 - RNA, 19 nt, Artificial Sequence
  Description of Artificial Sequence: Synthetic oligonucleotide
agggaaucuaggaagguau

SEQ ID NO: 2709138 - RNA, 19 nt, Artificial Sequence
  Description of Artificial Sequence: Synthetic oligonucleotide
agcugguuaaucugccggu

SEQ ID NO: 2709139 - RNA, 19 nt, Artificial Sequence
  Description of Artificial Sequence: Synthetic oligonucleotide
aucaaacgcuuuggggccc

SEQ ID NO: 2709140 - RNA, 19 nt, Artificial Sequence
  Description of Artificial Sequence: Synthetic oligonucleotide
uuguggcuucaucucuugc

SEQ ID NO: 2709141 - RNA, 19 nt, Artificial Sequence
  Description of Artificial Sequence: Synthetic oligonucleotide
cuccuggagggaaucuagg

SEQ ID NO: 2709142 - RNA, 19 nt, Artificial Sequence
  Description of Artificial Sequence: Synthetic oligonucleotide
aucacuccagcaugugcug

SEQ ID NO: 2709143 - RNA, 19 nt, Artificial Sequence
  Description of Artificial Sequence: Synthetic oligonucleotide
gaucacuccagcaugugcu

SEQ ID NO: 2709144 - RNA, 19 nt, Artificial Sequence
  Description of Artificial Sequence: Synthetic oligonucleotide
aagggauuccagccaccca

SEQ ID NO: 2709145 - RNA, 19 nt, Artificial Sequence
  Description of Artificial Sequence: Synthetic oligonucleotide
uccauuucuccgucugcga

SEQ ID NO: 2709146 - RNA, 19 nt, Artificial Sequence
  Description of Artificial Sequence: Synthetic oligonucleotide
ucccacucggguccuagcu

SEQ ID NO: 2709147 - RNA, 19 nt, Artificial Sequence
  Description of Artificial Sequence: Synthetic oligonucleotide
uccgcacccagcuccagac

SEQ ID NO: 2709148 - RNA, 19 nt, Artificial Sequence
  Description of Artificial Sequence: Synthetic oligonucleotide
cagcauuguuuuccggagg

SEQ ID NO: 2709149 - RNA, 19 nt, Artificial Sequence
  Description of Artificial Sequence: Synthetic oligonucleotide
guuuuccggaggccugugg

SEQ ID NO: 2709150 - RNA, 19 nt, Artificial Sequence
  Description of Artificial Sequence: Synthetic oligonucleotide
cauagcgcuggcgccagcg

SEQ ID NO: 2709151 - RNA, 19 nt, Artificial Sequence
  Description of Artificial Sequence: Synthetic oligonucleotide
cucucuuacccagggaaac

SEQ ID NO: 2709152 - RNA, 19 nt, Artificial Sequence
  Description of Artificial Sequence: Synthetic oligonucleotide
gcuucucucuuacccaggg

SEQ ID NO: 2709153 - RNA, 19 nt, Artificial Sequence
  Description of Artificial Sequence: Synthetic oligonucleotide
cuugcagcgguagauguca

SEQ ID NO: 2709154 - RNA, 19 nt, Artificial Sequence
  Description of Artificial Sequence: Synthetic oligonucleotide
cauccauuucuccgucugc

SEQ ID NO: 2709155 - RNA, 19 nt, Artificial Sequence
  Description of Artificial Sequence: Synthetic oligonucleotide
aagguggccugcuucccau

SEQ ID NO: 2709156 - RNA, 19 nt, Artificial Sequence
  Description of Artificial Sequence: Synthetic oligonucleotide
agacgcagagagcggagca

SEQ ID NO: 2709157 - RNA, 19 nt, Artificial Sequence
  Description of Artificial Sequence: Synthetic oligonucleotide
aggggucugcuuccacagc

SEQ ID NO: 2709158 - RNA, 19 nt, Artificial Sequence
  Description of Artificial Sequence: Synthetic oligonucleotide
auagcgcuggcgccagcgg

SEQ ID NO: 2709159 - RNA, 19 nt, Artificial Sequence
  Description of Artificial Sequence: Synthetic oligonucleotide
ugguuggccuugcagcggu

SEQ ID NO: 2709160 - RNA, 19 nt, Artificial Sequence
  Description of Artificial Sequence: Synthetic oligonucleotide
guuguggggaugguuggcc

SEQ ID NO: 2709161 - RNA, 19 nt, Artificial Sequence
  Description of Artificial Sequence: Synthetic oligonucleotide
uccagacgcagagagcgga

SEQ ID NO: 2709162 - RNA, 19 nt, Artificial Sequence
  Description of Artificial Sequence: Synthetic oligonucleotide
ucucuuacccagggaaacu

SEQ ID NO: 2709163 - RNA, 19 nt, Artificial Sequence
  Description of Artificial Sequence: Synthetic oligonucleotide
agguacugcaggaccaguc

SEQ ID NO: 2709164 - RNA, 19 nt, Artificial Sequence
  Description of Artificial Sequence: Synthetic oligonucleotide
uuuggggccccuggaaggc

SEQ ID NO: 2709165 - RNA, 19 nt, Artificial Sequence
  Description of Artificial Sequence: Synthetic oligonucleotide
ccagggaaacuccuggagg

SEQ ID NO: 2709166 - RNA, 19 nt, Artificial Sequence
  Description of Artificial Sequence: Synthetic oligonucleotide
auuguuuuccggaggccug

SEQ ID NO: 2709167 - RNA, 19 nt, Artificial Sequence
  Description of Artificial Sequence: Synthetic oligonucleotide
cucggguccuagcuucugg

SEQ ID NO: 2709168 - RNA, 19 nt, Artificial Sequence
  Description of Artificial Sequence: Synthetic oligonucleotide
gucaaaauuccuuccuggu

SEQ ID NO: 2709169 - RNA, 19 nt, Artificial Sequence
  Description of Artificial Sequence: Synthetic oligonucleotide
aaucugccggucugacgga

SEQ ID NO: 2709170 - RNA, 19 nt, Artificial Sequence
  Description of Artificial Sequence: Synthetic oligonucleotide
ggaucacuccagcaugugc

SEQ ID NO: 2709171 - RNA, 19 nt, Artificial Sequence
  Description of Artificial Sequence: Synthetic oligonucleotide
agggagcucaguuguggcu

SEQ ID NO: 2709172 - RNA, 19 nt, Artificial Sequence
  Description of Artificial Sequence: Synthetic oligonucleotide
ugggacagucccagagaca

SEQ ID NO: 2709173 - RNA, 19 nt, Artificial Sequence
  Description of Artificial Sequence: Synthetic oligonucleotide
uuggccuugcagcgguaga

SEQ ID NO: 2709174 - RNA, 19 nt, Artificial Sequence
  Description of Artificial Sequence: Synthetic oligonucleotide
gggaugguuggccuugcag

SEQ ID NO: 2709175 - RNA, 19 nt, Artificial Sequence
  Description of Artificial Sequence: Synthetic oligonucleotide
cagucugggacagucccag

SEQ ID NO: 2709176 - RNA, 19 nt, Artificial Sequence
  Description of Artificial Sequence: Synthetic oligonucleotide
ugacugcacguugugggga

SEQ ID NO: 2709177 - RNA, 19 nt, Artificial Sequence
  Description of Artificial Sequence: Synthetic oligonucleotide
gcaaacuuaggaagguggc

SEQ ID NO: 2709178 - RNA, 19 nt, Artificial Sequence
  Description of Artificial Sequence: Synthetic oligonucleotide
guuaaucugccggucugac

SEQ ID NO: 2709179 - RNA, 19 nt, Artificial Sequence
  Description of Artificial Sequence: Synthetic oligonucleotide
agcuguugaggaugugcga

SEQ ID NO: 2709180 - RNA, 19 nt, Artificial Sequence
  Description of Artificial Sequence: Synthetic oligonucleotide
cugugacugcacguugugg

SEQ ID NO: 2709181 - RNA, 19 nt, Artificial Sequence
  Description of Artificial Sequence: Synthetic oligonucleotide
ggguccuagcuucugggcc

SEQ ID NO: 2709182 - RNA, 19 nt, Artificial Sequence
  Description of Artificial Sequence: Synthetic oligonucleotide
ugucucuggcauccauuuc

SEQ ID NO: 2709183 - RNA, 19 nt, Artificial Sequence
  Description of Artificial Sequence: Synthetic oligonucleotide
uugcagcgguagaugucag

SEQ ID NO: 2709184 - RNA, 19 nt, Artificial Sequence
  Description of Artificial Sequence: Synthetic oligonucleotide
gagcacuugcuugucucug

SEQ ID NO: 2709185 - RNA, 19 nt, Artificial Sequence
  Description of Artificial Sequence: Synthetic oligonucleotide
uagcgcuggcgccagcgga

SEQ ID NO: 2709186 - RNA, 19 nt, Artificial Sequence
  Description of Artificial Sequence: Synthetic oligonucleotide
aacuccuggagggaaucua

SEQ ID NO: 2709187 - RNA, 19 nt, Artificial Sequence
  Description of Artificial Sequence: Synthetic oligonucleotide
uuguuuuccggaggccugu

SEQ ID NO: 2709188 - RNA, 19 nt, Artificial Sequence
  Description of Artificial Sequence: Synthetic oligonucleotide
gucaccuguagggagcuca

SEQ ID NO: 2709189 - RNA, 19 nt, Artificial Sequence
  Description of Artificial Sequence: Synthetic oligonucleotide
ccuggaaggcaggauaucc

SEQ ID NO: 2709190 - RNA, 19 nt, Artificial Sequence
  Description of Artificial Sequence: Synthetic oligonucleotide
ucugccggucugacggaga

SEQ ID NO: 2709191 - RNA, 19 nt, Artificial Sequence
  Description of Artificial Sequence: Synthetic oligonucleotide
agcuccagacgcagagagc

SEQ ID NO: 2709192 - RNA, 19 nt, Artificial Sequence
  Description of Artificial Sequence: Synthetic oligonucleotide
uuaggaagguggccugcuu

SEQ ID NO: 2709193 - RNA, 19 nt, Artificial Sequence
  Description of Artificial Sequence: Synthetic oligonucleotide
cugccggucugacggagag

SEQ ID NO: 2709194 - RNA, 19 nt, Artificial Sequence
  Description of Artificial Sequence: Synthetic oligonucleotide
augugcuggagcagcgagg

SEQ ID NO: 2709195 - RNA, 19 nt, Artificial Sequence
  Description of Artificial Sequence: Synthetic oligonucleotide
ggacaaaugcuuccaccac

SEQ ID NO: 2709196 - RNA, 19 nt, Artificial Sequence
  Description of Artificial Sequence: Synthetic oligonucleotide
gcggacaaaugcuuccacc

SEQ ID NO: 2709197 - RNA, 19 nt, Artificial Sequence
  Description of Artificial Sequence: Synthetic oligonucleotide
aggaagguaucaaacgcuu

SEQ ID NO: 2709198 - RNA, 19 nt, Artificial Sequence
  Description of Artificial Sequence: Synthetic oligonucleotide
ccagagacagcaccauggg

SEQ ID NO: 2709199 - RNA, 19 nt, Artificial Sequence
  Description of Artificial Sequence: Synthetic oligonucleotide
agucccagagacagcacca

SEQ ID NO: 2709200 - RNA, 19 nt, Artificial Sequence
  Description of Artificial Sequence: Synthetic oligonucleotide
caagaccuccgcacccagc

SEQ ID NO: 2709201 - RNA, 19 nt, Artificial Sequence
  Description of Artificial Sequence: Synthetic oligonucleotide
gugcaaacuuaggaaggug

SEQ ID NO: 2709202 - RNA, 19 nt, Artificial Sequence
  Description of Artificial Sequence: Synthetic oligonucleotide
cuugaacaugguuuucugu

SEQ ID NO: 2709203 - RNA, 19 nt, Artificial Sequence
  Description of Artificial Sequence: Synthetic oligonucleotide
cuccagacgcagagagcgg

SEQ ID NO: 2709204 - RNA, 19 nt, Artificial Sequence
  Description of Artificial Sequence: Synthetic oligonucleotide
ccagcggacaaaugcuucc

SEQ ID NO: 2709205 - RNA, 19 nt, Artificial Sequence
  Description of Artificial Sequence: Synthetic oligonucleotide
guuggccuugcagcgguag

SEQ ID NO: 2709206 - RNA, 19 nt, Artificial Sequence
  Description of Artificial Sequence: Synthetic oligonucleotide
uuuccggaggccugugguu

SEQ ID NO: 2709207 - RNA, 19 nt, Artificial Sequence
  Description of Artificial Sequence: Synthetic oligonucleotide
gagggaaucuaggaaggua

SEQ ID NO: 2709208 - RNA, 19 nt, Artificial Sequence
  Description of Artificial Sequence: Synthetic oligonucleotide
ucaaacgcuuuggggcccc

SEQ ID NO: 2709209 - RNA, 19 nt, Artificial Sequence
  Description of Artificial Sequence: Synthetic oligonucleotide
caccaugggcucccacucg

SEQ ID NO: 2709210 - RNA, 19 nt, Artificial Sequence
  Description of Artificial Sequence: Synthetic oligonucleotide
ucccauagcgcuggcgcca

SEQ ID NO: 2709211 - RNA, 19 nt, Artificial Sequence
  Description of Artificial Sequence: Synthetic oligonucleotide
uggcauccauuucuccguc

SEQ ID NO: 2709212 - RNA, 19 nt, Artificial Sequence
  Description of Artificial Sequence: Synthetic oligonucleotide
gguaggaucacuccagcau

SEQ ID NO: 2709213 - RNA, 19 nt, Artificial Sequence
  Description of Artificial Sequence: Synthetic oligonucleotide
agaccuccgcacccagcuc

SEQ ID NO: 2709214 - RNA, 19 nt, Artificial Sequence
  Description of Artificial Sequence: Synthetic oligonucleotide
gguggccugcuucccauag

SEQ ID NO: 2709215 - RNA, 19 nt, Artificial Sequence
  Description of Artificial Sequence: Synthetic oligonucleotide
gaugugcgaagggauucca

SEQ ID NO: 2709216 - RNA, 19 nt, Artificial Sequence
  Description of Artificial Sequence: Synthetic oligonucleotide
gacgcagagagcggagcac

SEQ ID NO: 2709217 - RNA, 19 nt, Artificial Sequence
  Description of Artificial Sequence: Synthetic oligonucleotide
uccggaggccugugguuug

SEQ ID NO: 2709218 - RNA, 19 nt, Artificial Sequence
  Description of Artificial Sequence: Synthetic oligonucleotide
cuguagggagcucaguugu

SEQ ID NO: 2709219 - RNA, 19 nt, Artificial Sequence
  Description of Artificial Sequence: Synthetic oligonucleotide
gcagcgaggggucugcuuc

SEQ ID NO: 2709220 - RNA, 19 nt, Artificial Sequence
  Description of Artificial Sequence: Synthetic oligonucleotide
ggcccuugugcaaacuuag

SEQ ID NO: 2709221 - RNA, 19 nt, Artificial Sequence
  Description of Artificial Sequence: Synthetic oligonucleotide
uguggggaugguuggccuu

SEQ ID NO: 2709222 - RNA, 19 nt, Artificial Sequence
  Description of Artificial Sequence: Synthetic oligonucleotide
caaaugcuuccaccaccug

SEQ ID NO: 2709223 - RNA, 19 nt, Artificial Sequence
  Description of Artificial Sequence: Synthetic oligonucleotide
aaacgcuuuggggccccug

SEQ ID NO: 2709224 - RNA, 19 nt, Artificial Sequence
  Description of Artificial Sequence: Synthetic oligonucleotide
uguuuuccggaggccugug

SEQ ID NO: 2709225 - RNA, 19 nt, Artificial Sequence
  Description of Artificial Sequence: Synthetic oligonucleotide
agcuucucucuuacccagg

SEQ ID NO: 2709226 - RNA, 19 nt, Artificial Sequence
  Description of Artificial Sequence: Synthetic oligonucleotide
uggccuugcagcgguagau

SEQ ID NO: 2709227 - RNA, 19 nt, Artificial Sequence
  Description of Artificial Sequence: Synthetic oligonucleotide
cuuacccagggaaacuccu

SEQ ID NO: 2709228 - RNA, 19 nt, Artificial Sequence
  Description of Artificial Sequence: Synthetic oligonucleotide
augugcgaagggauuccag

SEQ ID NO: 2709229 - RNA, 19 nt, Artificial Sequence
  Description of Artificial Sequence: Synthetic oligonucleotide
acggagagcuguugaggau

SEQ ID NO: 2709230 - RNA, 19 nt, Artificial Sequence
  Description of Artificial Sequence: Synthetic oligonucleotide
cauuguuuuccggaggccu

SEQ ID NO: 2709231 - RNA, 19 nt, Artificial Sequence
  Description of Artificial Sequence: Synthetic oligonucleotide
cagcgaggggucugcuucc

SEQ ID NO: 2709232 - RNA, 19 nt, Artificial Sequence
  Description of Artificial Sequence: Synthetic oligonucleotide
ccagcugguuaaucugccg

SEQ ID NO: 2709233 - RNA, 19 nt, Artificial Sequence
  Description of Artificial Sequence: Synthetic oligonucleotide
cuggcauccauuucuccgu

SEQ ID NO: 2709234 - RNA, 19 nt, Artificial Sequence
  Description of Artificial Sequence: Synthetic oligonucleotide
cugcaggaccagucccucc

SEQ ID NO: 2709235 - RNA, 19 nt, Artificial Sequence
  Description of Artificial Sequence: Synthetic oligonucleotide
guggggaugguuggccuug

SEQ ID NO: 2709236 - RNA, 19 nt, Artificial Sequence
  Description of Artificial Sequence: Synthetic oligonucleotide
uuccggaggccugugguuu

SEQ ID NO: 2709237 - RNA, 19 nt, Artificial Sequence
  Description of Artificial Sequence: Synthetic oligonucleotide
aggaucacuccagcaugug

SEQ ID NO: 2709238 - RNA, 19 nt, Artificial Sequence
  Description of Artificial Sequence: Synthetic oligonucleotide
cccuugugcaaacuuagga

SEQ ID NO: 2709239 - RNA, 19 nt, Artificial Sequence
  Description of Artificial Sequence: Synthetic oligonucleotide
gcgaagggauuccagccac

SEQ ID NO: 2709240 - RNA, 19 nt, Artificial Sequence
  Description of Artificial Sequence: Synthetic oligonucleotide
gggguaggaucacuccagc

SEQ ID NO: 2709241 - RNA, 19 nt, Artificial Sequence
  Description of Artificial Sequence: Synthetic oligonucleotide
cacuccagcaugugcugga

SEQ ID NO: 2709242 - RNA, 19 nt, Artificial Sequence
  Description of Artificial Sequence: Synthetic oligonucleotide
ggaugugcgaagggauucc

SEQ ID NO: 2709243 - RNA, 19 nt, Artificial Sequence
  Description of Artificial Sequence: Synthetic oligonucleotide
cccagggaaacuccuggag

SEQ ID NO: 2709244 - RNA, 19 nt, Artificial Sequence
  Description of Artificial Sequence: Synthetic oligonucleotide
aguuguggcuucaucucuu

SEQ ID NO: 2709245 - RNA, 19 nt, Artificial Sequence
  Description of Artificial Sequence: Synthetic oligonucleotide
guuuucugucaaaauuccu

SEQ ID NO: 2709246 - RNA, 19 nt, Artificial Sequence
  Description of Artificial Sequence: Synthetic oligonucleotide
accugugacugcacguugu

SEQ ID NO: 2709247 - RNA, 19 nt, Artificial Sequence
  Description of Artificial Sequence: Synthetic oligonucleotide
ccacccagucaccuguagg

SEQ ID NO: 2709248 - RNA, 19 nt, Artificial Sequence
  Description of Artificial Sequence: Synthetic oligonucleotide
uggaggcccuugugcaaac

SEQ ID NO: 2709249 - RNA, 19 nt, Artificial Sequence
  Description of Artificial Sequence: Synthetic oligonucleotide
agggaaacuccuggaggga

SEQ ID NO: 2709250 - RNA, 19 nt, Artificial Sequence
  Description of Artificial Sequence: Synthetic oligonucleotide
agcggagcacuugcuuguc

SEQ ID NO: 2709251 - RNA, 19 nt, Artificial Sequence
  Description of Artificial Sequence: Synthetic oligonucleotide
aucugccggucugacggag

SEQ ID NO: 2709252 - RNA, 19 nt, Artificial Sequence
  Description of Artificial Sequence: Synthetic oligonucleotide
gcuguugaggaugugcgaa

SEQ ID NO: 2709253 - RNA, 19 nt, Artificial Sequence
  Description of Artificial Sequence: Synthetic oligonucleotide
acccagucaccuguaggga

SEQ ID NO: 2709254 - RNA, 19 nt, Artificial Sequence
  Description of Artificial Sequence: Synthetic oligonucleotide
accagucccuccaccaaga

SEQ ID NO: 2709255 - RNA, 19 nt, Artificial Sequence
  Description of Artificial Sequence: Synthetic oligonucleotide
gcuuugauuucuugaacau

SEQ ID NO: 2709256 - RNA, 19 nt, Artificial Sequence
  Description of Artificial Sequence: Synthetic oligonucleotide
acgcuuuggggccccugga

SEQ ID NO: 2709257 - RNA, 19 nt, Artificial Sequence
  Description of Artificial Sequence: Synthetic oligonucleotide
cacccagcuccagacgcag

SEQ ID NO: 2709258 - RNA, 19 nt, Artificial Sequence
  Description of Artificial Sequence: Synthetic oligonucleotide
cggacaaaugcuuccacca

SEQ ID NO: 2709259 - RNA, 19 nt, Artificial Sequence
  Description of Artificial Sequence: Synthetic oligonucleotide
ggguaggaucacuccagca

SEQ ID NO: 2709260 - RNA, 19 nt, Artificial Sequence
  Description of Artificial Sequence: Synthetic oligonucleotide
cugguuaaucugccggucu

SEQ ID NO: 2709261 - RNA, 19 nt, Artificial Sequence
  Description of Artificial Sequence: Synthetic oligonucleotide
agagagcggagcacuugcu

SEQ ID NO: 2709262 - RNA, 19 nt, Artificial Sequence
  Description of Artificial Sequence: Synthetic oligonucleotide
gcaccaugggcucccacuc

SEQ ID NO: 2709263 - RNA, 19 nt, Artificial Sequence
  Description of Artificial Sequence: Synthetic oligonucleotide
gguuaaucugccggucuga

SEQ ID NO: 2709264 - RNA, 19 nt, Artificial Sequence
  Description of Artificial Sequence: Synthetic oligonucleotide
gucugacggagagcuguug

SEQ ID NO: 2709265 - RNA, 19 nt, Artificial Sequence
  Description of Artificial Sequence: Synthetic oligonucleotide
ugcacguuguggggauggu

SEQ ID NO: 2709266 - RNA, 19 nt, Artificial Sequence
  Description of Artificial Sequence: Synthetic oligonucleotide
uggggaugguuggccuugc

SEQ ID NO: 2709267 - RNA, 19 nt, Artificial Sequence
  Description of Artificial Sequence: Synthetic oligonucleotide
cuugucucuggcauccauu

SEQ ID NO: 2709268 - RNA, 19 nt, Artificial Sequence
  Description of Artificial Sequence: Synthetic oligonucleotide
gagagcggagcacuugcuu

SEQ ID NO: 2709269 - RNA, 19 nt, Artificial Sequence
  Description of Artificial Sequence: Synthetic oligonucleotide
caguuguggcuucaucucu

SEQ ID NO: 2709270 - RNA, 19 nt, Artificial Sequence
  Description of Artificial Sequence: Synthetic oligonucleotide
cagccuggaggcccuugug

SEQ ID NO: 2709271 - RNA, 19 nt, Artificial Sequence
  Description of Artificial Sequence: Synthetic oligonucleotide
ccuggagggaaucuaggaa

SEQ ID NO: 2709272 - RNA, 19 nt, Artificial Sequence
  Description of Artificial Sequence: Synthetic oligonucleotide
agcagcgaggggucugcuu

SEQ ID NO: 2709273 - RNA, 19 nt, Artificial Sequence
  Description of Artificial Sequence: Synthetic oligonucleotide
guccuagcuucugggccag

SEQ ID NO: 2709274 - RNA, 19 nt, Artificial Sequence
  Description of Artificial Sequence: Synthetic oligonucleotide
aggcccuugugcaaacuua

SEQ ID NO: 2709275 - RNA, 19 nt, Artificial Sequence
  Description of Artificial Sequence: Synthetic oligonucleotide
gagagcuguugaggaugug

SEQ ID NO: 2709276 - RNA, 19 nt, Artificial Sequence
  Description of Artificial Sequence: Synthetic oligonucleotide
ccugugacugcacguugug

SEQ ID NO: 2709277 - RNA, 19 nt, Artificial Sequence
  Description of Artificial Sequence: Synthetic oligonucleotide
gacugcacguuguggggau

SEQ ID NO: 2709278 - RNA, 19 nt, Artificial Sequence
  Description of Artificial Sequence: Synthetic oligonucleotide
uggcgccagcggacaaaug

SEQ ID NO: 2709279 - RNA, 19 nt, Artificial Sequence
  Description of Artificial Sequence: Synthetic oligonucleotide
gcccuugugcaaacuuagg

SEQ ID NO: 2709280 - RNA, 19 nt, Artificial Sequence
  Description of Artificial Sequence: Synthetic oligonucleotide
agucaccuguagggagcuc

SEQ ID NO: 2709281 - RNA, 19 nt, Artificial Sequence
  Description of Artificial Sequence: Synthetic oligonucleotide
gaggcccuugugcaaacuu

SEQ ID NO: 2709282 - RNA, 19 nt, Artificial Sequence
  Description of Artificial Sequence: Synthetic oligonucleotide
ggauuccagccacccaguc

SEQ ID NO: 2709283 - RNA, 19 nt, Artificial Sequence
  Description of Artificial Sequence: Synthetic oligonucleotide
acugcacguuguggggaug

SEQ ID NO: 2709284 - RNA, 19 nt, Artificial Sequence
  Description of Artificial Sequence: Synthetic oligonucleotide
ccagacgcagagagcggag

SEQ ID NO: 2709285 - RNA, 19 nt, Artificial Sequence
  Description of Artificial Sequence: Synthetic oligonucleotide
acucggguccuagcuucug

SEQ ID NO: 2709286 - RNA, 19 nt, Artificial Sequence
  Description of Artificial Sequence: Synthetic oligonucleotide
ggagcagcgaggggucugc

SEQ ID NO: 2709287 - RNA, 19 nt, Artificial Sequence
  Description of Artificial Sequence: Synthetic oligonucleotide
ggagcucaguuguggcuuc

SEQ ID NO: 2709288 - RNA, 19 nt, Artificial Sequence
  Description of Artificial Sequence: Synthetic oligonucleotide
ugcuugucucuggcaucca

SEQ ID NO: 2709289 - RNA, 19 nt, Artificial Sequence
  Description of Artificial Sequence: Synthetic oligonucleotide
gcugguuaaucugccgguc

SEQ ID NO: 2709290 - RNA, 19 nt, Artificial Sequence
  Description of Artificial Sequence: Synthetic oligonucleotide
ggccuugcagcgguagaug

SEQ ID NO: 2709291 - RNA, 19 nt, Artificial Sequence
  Description of Artificial Sequence: Synthetic oligonucleotide
gccacccagucaccuguag

SEQ ID NO: 2709292 - RNA, 19 nt, Artificial Sequence
  Description of Artificial Sequence: Synthetic oligonucleotide
gaggaugugcgaagggauu

SEQ ID NO: 2709293 - RNA, 19 nt, Artificial Sequence
  Description of Artificial Sequence: Synthetic oligonucleotide
cggagagcuguugaggaug

SEQ ID NO: 2709294 - RNA, 19 nt, Artificial Sequence
  Description of Artificial Sequence: Synthetic oligonucleotide
cuggaggcccuugugcaaa

SEQ ID NO: 2709295 - RNA, 19 nt, Artificial Sequence
  Description of Artificial Sequence: Synthetic oligonucleotide
cuuaggaagguggccugcu

SEQ ID NO: 2709296 - RNA, 19 nt, Artificial Sequence
  Description of Artificial Sequence: Synthetic oligonucleotide
cggagcacuugcuugucuc

SEQ ID NO: 2709297 - RNA, 19 nt, Artificial Sequence
  Description of Artificial Sequence: Synthetic oligonucleotide
agcucaguuguggcuucau

SEQ ID NO: 2709298 - RNA, 19 nt, Artificial Sequence
  Description of Artificial Sequence: Synthetic oligonucleotide
ggagcacuugcuugucucu

SEQ ID NO: 2709299 - RNA, 19 nt, Artificial Sequence
  Description of Artificial Sequence: Synthetic oligonucleotide
cagcgguagaugucagucu

SEQ ID NO: 2709300 - RNA, 19 nt, Artificial Sequence
  Description of Artificial Sequence: Synthetic oligonucleotide
ccaagaccuccgcacccag

SEQ ID NO: 2709301 - RNA, 19 nt, Artificial Sequence
  Description of Artificial Sequence: Synthetic oligonucleotide
agcgaggggucugcuucca

SEQ ID NO: 2709302 - RNA, 19 nt, Artificial Sequence
  Description of Artificial Sequence: Synthetic oligonucleotide
cuccgcacccagcuccaga

SEQ ID NO: 2709303 - RNA, 19 nt, Artificial Sequence
  Description of Artificial Sequence: Synthetic oligonucleotide
caugggcucccacucgggu

SEQ ID NO: 2709304 - RNA, 19 nt, Artificial Sequence
  Description of Artificial Sequence: Synthetic oligonucleotide
cgaagggauuccagccacc

SEQ ID NO: 2709305 - RNA, 19 nt, Artificial Sequence
  Description of Artificial Sequence: Synthetic oligonucleotide
gccagcggacaaaugcuuc

SEQ ID NO: 2709306 - RNA, 19 nt, Artificial Sequence
  Description of Artificial Sequence: Synthetic oligonucleotide
cagcaccaugggcucccac

SEQ ID NO: 2709307 - RNA, 19 nt, Artificial Sequence
  Description of Artificial Sequence: Synthetic oligonucleotide
cggguccuagcuucugggc

SEQ ID NO: 2709308 - RNA, 19 nt, Artificial Sequence
  Description of Artificial Sequence: Synthetic oligonucleotide
gcucccacucggguccuag

SEQ ID NO: 2709309 - RNA, 19 nt, Artificial Sequence
  Description of Artificial Sequence: Synthetic oligonucleotide
uccuagcuucugggccagc

SEQ ID NO: 2709310 - RNA, 19 nt, Artificial Sequence
  Description of Artificial Sequence: Synthetic oligonucleotide
ggacagucccagagacagc

SEQ ID NO: 2709311 - RNA, 19 nt, Artificial Sequence
  Description of Artificial Sequence: Synthetic oligonucleotide
ccagucccuccaccaagac

SEQ ID NO: 2709312 - RNA, 19 nt, Artificial Sequence
  Description of Artificial Sequence: Synthetic oligonucleotide
cugugguuugggcuuugau

SEQ ID NO: 2709313 - RNA, 19 nt, Artificial Sequence
  Description of Artificial Sequence: Synthetic oligonucleotide
gaugucagucugggacagu

SEQ ID NO: 2709314 - RNA, 19 nt, Artificial Sequence
  Description of Artificial Sequence: Synthetic oligonucleotide
ggccugcuucccauagcgc

SEQ ID NO: 2709315 - RNA, 19 nt, Artificial Sequence
  Description of Artificial Sequence: Synthetic oligonucleotide
ggauauccaacagcagcau

SEQ ID NO: 2709316 - RNA, 19 nt, Artificial Sequence
  Description of Artificial Sequence: Synthetic oligonucleotide
cgaggggucugcuuccaca

SEQ ID NO: 2709317 - RNA, 19 nt, Artificial Sequence
  Description of Artificial Sequence: Synthetic oligonucleotide
ccgcacccagcuccagacg

SEQ ID NO: 2709318 - RNA, 19 nt, Artificial Sequence
  Description of Artificial Sequence: Synthetic oligonucleotide
ggagggaaucuaggaaggu

SEQ ID NO: 2709319 - RNA, 19 nt, Artificial Sequence
  Description of Artificial Sequence: Synthetic oligonucleotide
gcaugugcuggagcagcga

SEQ ID NO: 2709320 - RNA, 19 nt, Artificial Sequence
  Description of Artificial Sequence: Synthetic oligonucleotide
ggcauccauuucuccgucu

SEQ ID NO: 2709321 - RNA, 19 nt, Artificial Sequence
  Description of Artificial Sequence: Synthetic oligonucleotide
ggaaacuccuggagggaau

SEQ ID NO: 2709322 - RNA, 19 nt, Artificial Sequence
  Description of Artificial Sequence: Synthetic oligonucleotide
gggagcucaguuguggcuu

SEQ ID NO: 2709323 - RNA, 19 nt, Artificial Sequence
  Description of Artificial Sequence: Synthetic oligonucleotide
cagucaccuguagggagcu

SEQ ID NO: 2709324 - RNA, 19 nt, Artificial Sequence
  Description of Artificial Sequence: Synthetic oligonucleotide
ggggaugguuggccuugca

SEQ ID NO: 2709325 - RNA, 19 nt, Artificial Sequence
  Description of Artificial Sequence: Synthetic oligonucleotide
ggaagguaucaaacgcuuu

SEQ ID NO: 2709326 - RNA, 19 nt, Artificial Sequence
  Description of Artificial Sequence: Synthetic oligonucleotide
acccagcuccagacgcaga

SEQ ID NO: 2709327 - RNA, 19 nt, Artificial Sequence
  Description of Artificial Sequence: Synthetic oligonucleotide
gcuugucucuggcauccau

SEQ ID NO: 2709328 - RNA, 19 nt, Artificial Sequence
  Description of Artificial Sequence: Synthetic oligonucleotide
cacucggguccuagcuucu

SEQ ID NO: 2709329 - RNA, 19 nt, Artificial Sequence
  Description of Artificial Sequence: Synthetic oligonucleotide
cccauagcgcuggcgccag

SEQ ID NO: 2709330 - RNA, 19 nt, Artificial Sequence
  Description of Artificial Sequence: Synthetic oligonucleotide
ccggaggccugugguuugg

SEQ ID NO: 2709331 - RNA, 19 nt, Artificial Sequence
  Description of Artificial Sequence: Synthetic oligonucleotide
gcgaggggucugcuuccac

SEQ ID NO: 2709332 - RNA, 19 nt, Artificial Sequence
  Description of Artificial Sequence: Synthetic oligonucleotide
gcacccagcuccagacgca

SEQ ID NO: 2709333 - RNA, 19 nt, Artificial Sequence
  Description of Artificial Sequence: Synthetic oligonucleotide
gcgccagcggacaaaugcu

SEQ ID NO: 2709334 - RNA, 19 nt, Artificial Sequence
  Description of Artificial Sequence: Synthetic oligonucleotide
cuggcgccagcggacaaau

SEQ ID NO: 2709335 - RNA, 19 nt, Artificial Sequence
  Description of Artificial Sequence: Synthetic oligonucleotide
cccuggaaggcaggauauc

SEQ ID NO: 2709336 - RNA, 19 nt, Artificial Sequence
  Description of Artificial Sequence: Synthetic oligonucleotide
gggauuccagccacccagu

SEQ ID NO: 2709337 - RNA, 19 nt, Artificial Sequence
  Description of Artificial Sequence: Synthetic oligonucleotide
agccacccagucaccugua

SEQ ID NO: 2709338 - RNA, 19 nt, Artificial Sequence
  Description of Artificial Sequence: Synthetic oligonucleotide
gggucugcuuccacagccu

SEQ ID NO: 2709339 - RNA, 19 nt, Artificial Sequence
  Description of Artificial Sequence: Synthetic oligonucleotide
ccggucugacggagagcug

SEQ ID NO: 2709340 - RNA, 19 nt, Artificial Sequence
  Description of Artificial Sequence: Synthetic oligonucleotide
gcggagcacuugcuugucu

SEQ ID NO: 2709341 - RNA, 19 nt, Artificial Sequence
  Description of Artificial Sequence: Synthetic oligonucleotide
ccccuggaaggcaggauau

SEQ ID NO: 2709342 - RNA, 19 nt, Artificial Sequence
  Description of Artificial Sequence: Synthetic oligonucleotide
ccauagcgcuggcgccagc

SEQ ID NO: 2709343 - RNA, 19 nt, Artificial Sequence
  Description of Artificial Sequence: Synthetic oligonucleotide
gagcagcgaggggucugcu

SEQ ID NO: 2709344 - RNA, 19 nt, Artificial Sequence
  Description of Artificial Sequence: Synthetic oligonucleotide
gccugugguuugggcuuug

SEQ ID NO: 2709345 - RNA, 19 nt, Artificial Sequence
  Description of Artificial Sequence: Synthetic oligonucleotide
caccuguagggagcucagu

SEQ ID NO: 2709346 - RNA, 19 nt, Artificial Sequence
  Description of Artificial Sequence: Synthetic oligonucleotide
cggucugacggagagcugu

SEQ ID NO: 2709347 - RNA, 19 nt, Artificial Sequence
  Description of Artificial Sequence: Synthetic oligonucleotide
ccugugguuugggcuuuga

SEQ ID NO: 2709348 - RNA, 19 nt, Artificial Sequence
  Description of Artificial Sequence: Synthetic oligonucleotide
cgcuuuggggccccuggaa

SEQ ID NO: 2709349 - RNA, 19 nt, Artificial Sequence
  Description of Artificial Sequence: Synthetic oligonucleotide
ggaggcccuugugcaaacu

SEQ ID NO: 2709350 - RNA, 19 nt, Artificial Sequence
  Description of Artificial Sequence: Synthetic oligonucleotide
cucuugccuucuccagcuu

SEQ ID NO: 2709351 - RNA, 19 nt, Artificial Sequence
  Description of Artificial Sequence: Synthetic oligonucleotide
ggucugacggagagcuguu

SEQ ID NO: 2709352 - RNA, 19 nt, Artificial Sequence
  Description of Artificial Sequence: Synthetic oligonucleotide
gcacguuguggggaugguu

SEQ ID NO: 2709353 - RNA, 19 nt, Artificial Sequence
  Description of Artificial Sequence: Synthetic oligonucleotide
caaacgcuuuggggccccu

SEQ ID NO: 2709354 - RNA, 19 nt, Artificial Sequence
  Description of Artificial Sequence: Synthetic oligonucleotide
cgccagcggacaaaugcuu

SEQ ID NO: 2709355 - RNA, 19 nt, Artificial Sequence
  Description of Artificial Sequence: Synthetic oligonucleotide
cgcuggcgccagcggacaa

SEQ ID NO: 2709356 - RNA, 19 nt, Artificial Sequence
  Description of Artificial Sequence: Synthetic oligonucleotide
acuauaauaauacuuaugg

SEQ ID NO: 2709357 - RNA, 19 nt, Artificial Sequence
  Description of Artificial Sequence: Synthetic oligonucleotide
uauaauaauacuuaugggc

SEQ ID NO: 2709358 - RNA, 19 nt, Artificial Sequence
  Description of Artificial Sequence: Synthetic oligonucleotide
aauacuuaugggcagcagg

SEQ ID NO: 2709359 - RNA, 19 nt, Artificial Sequence
  Description of Artificial Sequence: Synthetic oligonucleotide
aaacgacuggauuuuauac

SEQ ID NO: 2709360 - RNA, 19 nt, Artificial Sequence
  Description of Artificial Sequence: Synthetic oligonucleotide
aaagauguugcagauaaag

SEQ ID NO: 2709361 - RNA, 19 nt, Artificial Sequence
  Description of Artificial Sequence: Synthetic oligonucleotide
uccacaaucacauuggcca

SEQ ID NO: 2709362 - RNA, 19 nt, Artificial Sequence
  Description of Artificial Sequence: Synthetic oligonucleotide
aauaauacuuaugggcagc

SEQ ID NO: 2709363 - RNA, 19 nt, Artificial Sequence
  Description of Artificial Sequence: Synthetic oligonucleotide
aacucgaucauuuccagca

SEQ ID NO: 2709364 - RNA, 19 nt, Artificial Sequence
  Description of Artificial Sequence: Synthetic oligonucleotide
uuaaccagggccagcaugg

SEQ ID NO: 2709365 - RNA, 19 nt, Artificial Sequence
  Description of Artificial Sequence: Synthetic oligonucleotide
gagacagucauagacaggg

SEQ ID NO: 2709366 - RNA, 19 nt, Artificial Sequence
  Description of Artificial Sequence: Synthetic oligonucleotide
aagagacagucauagacag

SEQ ID NO: 2709367 - RNA, 19 nt, Artificial Sequence
  Description of Artificial Sequence: Synthetic oligonucleotide
auauuguucacccucaggu

SEQ ID NO: 2709368 - RNA, 19 nt, Artificial Sequence
  Description of Artificial Sequence: Synthetic oligonucleotide
aaccucacuauaauaauac

SEQ ID NO: 2709369 - RNA, 19 nt, Artificial Sequence
  Description of Artificial Sequence: Synthetic oligonucleotide
cuauaauaauacuuauggg

SEQ ID NO: 2709370 - RNA, 19 nt, Artificial Sequence
  Description of Artificial Sequence: Synthetic oligonucleotide
augggcauauuguucaccc

SEQ ID NO: 2709371 - RNA, 19 nt, Artificial Sequence
  Description of Artificial Sequence: Synthetic oligonucleotide
auuuuauacucaucucuac

SEQ ID NO: 2709372 - RNA, 19 nt, Artificial Sequence
  Description of Artificial Sequence: Synthetic oligonucleotide
uguagcaccaggcagucca

SEQ ID NO: 2709373 - RNA, 19 nt, Artificial Sequence
  Description of Artificial Sequence: Synthetic oligonucleotide
auaauaauacuuaugggca

SEQ ID NO: 2709374 - RNA, 19 nt, Artificial Sequence
  Description of Artificial Sequence: Synthetic oligonucleotide
uuuuauacucaucucuacu

SEQ ID NO: 2709375 - RNA, 19 nt, Artificial Sequence
  Description of Artificial Sequence: Synthetic oligonucleotide
gacaggguuaaccagggcc

SEQ ID NO: 2709376 - RNA, 19 nt, Artificial Sequence
  Description of Artificial Sequence: Synthetic oligonucleotide
uaauaauacuuaugggcag

SEQ ID NO: 2709377 - RNA, 19 nt, Artificial Sequence
  Description of Artificial Sequence: Synthetic oligonucleotide
agauaaaggugacauagca

SEQ ID NO: 2709378 - RNA, 19 nt, Artificial Sequence
  Description of Artificial Sequence: Synthetic oligonucleotide
auuguucacccucagguag

SEQ ID NO: 2709379 - RNA, 19 nt, Artificial Sequence
  Description of Artificial Sequence: Synthetic oligonucleotide
acgacuggauuuuauacuc

SEQ ID NO: 2709380 - RNA, 19 nt, Artificial Sequence
  Description of Artificial Sequence: Synthetic oligonucleotide
uugagugcagucuucagca

SEQ ID NO: 2709381 - RNA, 19 nt, Artificial Sequence
  Description of Artificial Sequence: Synthetic oligonucleotide
aacgacuggauuuuauacu

SEQ ID NO: 2709382 - RNA, 19 nt, Artificial Sequence
  Description of Artificial Sequence: Synthetic oligonucleotide
ucauagacaggguuaacca

SEQ ID NO: 2709383 - RNA, 19 nt, Artificial Sequence
  Description of Artificial Sequence: Synthetic oligonucleotide
acuuucuccaaguccacgg

SEQ ID NO: 2709384 - RNA, 19 nt, Artificial Sequence
  Description of Artificial Sequence: Synthetic oligonucleotide
gaucauuuccagcagcagc

SEQ ID NO: 2709385 - RNA, 19 nt, Artificial Sequence
  Description of Artificial Sequence: Synthetic oligonucleotide
uugcugaacacacaguccu

SEQ ID NO: 2709386 - RNA, 19 nt, Artificial Sequence
  Description of Artificial Sequence: Synthetic oligonucleotide
aacgcggugcagcuguagc

SEQ ID NO: 2709387 - RNA, 19 nt, Artificial Sequence
  Description of Artificial Sequence: Synthetic oligonucleotide
gauaaaggugacauagcag

SEQ ID NO: 2709388 - RNA, 19 nt, Artificial Sequence
  Description of Artificial Sequence: Synthetic oligonucleotide
caaacucucaggcugggcc

SEQ ID NO: 2709389 - RNA, 19 nt, Artificial Sequence
  Description of Artificial Sequence: Synthetic oligonucleotide
cuuaugggcagcaggagug

SEQ ID NO: 2709390 - RNA, 19 nt, Artificial Sequence
  Description of Artificial Sequence: Synthetic oligonucleotide
agguagucaaagauguugc

SEQ ID NO: 2709391 - RNA, 19 nt, Artificial Sequence
  Description of Artificial Sequence: Synthetic oligonucleotide
uagacaggguuaaccaggg

SEQ ID NO: 2709392 - RNA, 19 nt, Artificial Sequence
  Description of Artificial Sequence: Synthetic oligonucleotide
auagacaggguuaaccagg

SEQ ID NO: 2709393 - RNA, 19 nt, Artificial Sequence
  Description of Artificial Sequence: Synthetic oligonucleotide
cacuauaauaauacuuaug

SEQ ID NO: 2709394 - RNA, 19 nt, Artificial Sequence
  Description of Artificial Sequence: Synthetic oligonucleotide
caggacaaagagcucaucc

SEQ ID NO: 2709395 - RNA, 19 nt, Artificial Sequence
  Description of Artificial Sequence: Synthetic oligonucleotide
agcaugggcauauuguuca

SEQ ID NO: 2709396 - RNA, 19 nt, Artificial Sequence
  Description of Artificial Sequence: Synthetic oligonucleotide
ucugcaucaaacgacugga

SEQ ID NO: 2709397 - RNA, 19 nt, Artificial Sequence
  Description of Artificial Sequence: Synthetic oligonucleotide
cucacuauaauaauacuua

SEQ ID NO: 2709398 - RNA, 19 nt, Artificial Sequence
  Description of Artificial Sequence: Synthetic oligonucleotide
ugggucucugcaucaaacg

SEQ ID NO: 2709399 - RNA, 19 nt, Artificial Sequence
  Description of Artificial Sequence: Synthetic oligonucleotide
acauagcagacccagcucu

SEQ ID NO: 2709400 - RNA, 19 nt, Artificial Sequence
  Description of Artificial Sequence: Synthetic oligonucleotide
ucgaucauuuccagcagca

SEQ ID NO: 2709401 - RNA, 19 nt, Artificial Sequence
  Description of Artificial Sequence: Synthetic oligonucleotide
cagggaaugguccacaauc

SEQ ID NO: 2709402 - RNA, 19 nt, Artificial Sequence
  Description of Artificial Sequence: Synthetic oligonucleotide
cauagacaggguuaaccag

SEQ ID NO: 2709403 - RNA, 19 nt, Artificial Sequence
  Description of Artificial Sequence: Synthetic oligonucleotide
ucagucggaaaccucacua

SEQ ID NO: 2709404 - RNA, 19 nt, Artificial Sequence
  Description of Artificial Sequence: Synthetic oligonucleotide
cauauuguucacccucagg

SEQ ID NO: 2709405 - RNA, 19 nt, Artificial Sequence
  Description of Artificial Sequence: Synthetic oligonucleotide
ucacuauaauaauacuuau

SEQ ID NO: 2709406 - RNA, 19 nt, Artificial Sequence
  Description of Artificial Sequence: Synthetic oligonucleotide
aggacaaagagcucaucca

SEQ ID NO: 2709407 - RNA, 19 nt, Artificial Sequence
  Description of Artificial Sequence: Synthetic oligonucleotide
ggagcugaggccuaacggg

SEQ ID NO: 2709408 - RNA, 19 nt, Artificial Sequence
  Description of Artificial Sequence: Synthetic oligonucleotide
cucugcaucaaacgacugg

SEQ ID NO: 2709409 - RNA, 19 nt, Artificial Sequence
  Description of Artificial Sequence: Synthetic oligonucleotide
uugcagauaaaggugacau

SEQ ID NO: 2709410 - RNA, 19 nt, Artificial Sequence
  Description of Artificial Sequence: Synthetic oligonucleotide
ugauacucccgcugcagcc

SEQ ID NO: 2709411 - RNA, 19 nt, Artificial Sequence
  Description of Artificial Sequence: Synthetic oligonucleotide
gaucaggacaaagagcuca

SEQ ID NO: 2709412 - RNA, 19 nt, Artificial Sequence
  Description of Artificial Sequence: Synthetic oligonucleotide
agcucauccaugcgcugcc

SEQ ID NO: 2709413 - RNA, 19 nt, Artificial Sequence
  Description of Artificial Sequence: Synthetic oligonucleotide
cagguagucaaagauguug

SEQ ID NO: 2709414 - RNA, 19 nt, Artificial Sequence
  Description of Artificial Sequence: Synthetic oligonucleotide
guuaaccagggccagcaug

SEQ ID NO: 2709415 - RNA, 19 nt, Artificial Sequence
  Description of Artificial Sequence: Synthetic oligonucleotide
gugccuggaucuuugagug

SEQ ID NO: 2709416 - RNA, 19 nt, Artificial Sequence
  Description of Artificial Sequence: Synthetic oligonucleotide
cuggauuuuauacucaucu

SEQ ID NO: 2709417 - RNA, 19 nt, Artificial Sequence
  Description of Artificial Sequence: Synthetic oligonucleotide
acuuaugggcagcaggagu

SEQ ID NO: 2709418 - RNA, 19 nt, Artificial Sequence
  Description of Artificial Sequence: Synthetic oligonucleotide
cagauaaaggugacauagc

SEQ ID NO: 2709419 - RNA, 19 nt, Artificial Sequence
  Description of Artificial Sequence: Synthetic oligonucleotide
aucauuuccagcagcagca

SEQ ID NO: 2709420 - RNA, 19 nt, Artificial Sequence
  Description of Artificial Sequence: Synthetic oligonucleotide
agcuggaagagacagucau

SEQ ID NO: 2709421 - RNA, 19 nt, Artificial Sequence
  Description of Artificial Sequence: Synthetic oligonucleotide
uggauuuuauacucaucuc

SEQ ID NO: 2709422 - RNA, 19 nt, Artificial Sequence
  Description of Artificial Sequence: Synthetic oligonucleotide
gauacucccgcugcagccg

SEQ ID NO: 2709423 - RNA, 19 nt, Artificial Sequence
  Description of Artificial Sequence: Synthetic oligonucleotide
ggcucaaacucucaggcug

SEQ ID NO: 2709424 - RNA, 19 nt, Artificial Sequence
  Description of Artificial Sequence: Synthetic oligonucleotide
ucaaacgacuggauuuuau

SEQ ID NO: 2709425 - RNA, 19 nt, Artificial Sequence
  Description of Artificial Sequence: Synthetic oligonucleotide
ggaguggucuuccagccgg

SEQ ID NO: 2709426 - RNA, 19 nt, Artificial Sequence
  Description of Artificial Sequence: Synthetic oligonucleotide
ugagcgggcucgcagcugc

SEQ ID NO: 2709427 - RNA, 19 nt, Artificial Sequence
  Description of Artificial Sequence: Synthetic oligonucleotide
aagagcucauccaugcgcu

SEQ ID NO: 2709428 - RNA, 19 nt, Artificial Sequence
  Description of Artificial Sequence: Synthetic oligonucleotide
uguugcagauaaaggugac

SEQ ID NO: 2709429 - RNA, 19 nt, Artificial Sequence
  Description of Artificial Sequence: Synthetic oligonucleotide
ucggaaaccucacuauaau

SEQ ID NO: 2709430 - RNA, 19 nt, Artificial Sequence
  Description of Artificial Sequence: Synthetic oligonucleotide
uccucuucccggcucaaac

SEQ ID NO: 2709431 - RNA, 19 nt, Artificial Sequence
  Description of Artificial Sequence: Synthetic oligonucleotide
gaacucgaucauuuccagc

SEQ ID NO: 2709432 - RNA, 19 nt, Artificial Sequence
  Description of Artificial Sequence: Synthetic oligonucleotide
auacuuaugggcagcagga

SEQ ID NO: 2709433 - RNA, 19 nt, Artificial Sequence
  Description of Artificial Sequence: Synthetic oligonucleotide
aaaccucacuauaauaaua

SEQ ID NO: 2709434 - RNA, 19 nt, Artificial Sequence
  Description of Artificial Sequence: Synthetic oligonucleotide
ggugacauagcagacccag

SEQ ID NO: 2709435 - RNA, 19 nt, Artificial Sequence
  Description of Artificial Sequence: Synthetic oligonucleotide
agggagcugaggccuaacg

SEQ ID NO: 2709436 - RNA, 19 nt, Artificial Sequence
  Description of Artificial Sequence: Synthetic oligonucleotide
caaagagcucauccaugcg

SEQ ID NO: 2709437 - RNA, 19 nt, Artificial Sequence
  Description of Artificial Sequence: Synthetic oligonucleotide
ggauuuuauacucaucucu

SEQ ID NO: 2709438 - RNA, 19 nt, Artificial Sequence
  Description of Artificial Sequence: Synthetic oligonucleotide
cucagguagucaaagaugu

SEQ ID NO: 2709439 - RNA, 19 nt, Artificial Sequence
  Description of Artificial Sequence: Synthetic oligonucleotide
cucgaucauuuccagcagc

SEQ ID NO: 2709440 - RNA, 19 nt, Artificial Sequence
  Description of Artificial Sequence: Synthetic oligonucleotide
ggaaaccucacuauaauaa

SEQ ID NO: 2709441 - RNA, 19 nt, Artificial Sequence
  Description of Artificial Sequence: Synthetic oligonucleotide
uuguucacccucagguagu

SEQ ID NO: 2709442 - RNA, 19 nt, Artificial Sequence
  Description of Artificial Sequence: Synthetic oligonucleotide
accucacuauaauaauacu

SEQ ID NO: 2709443 - RNA, 19 nt, Artificial Sequence
  Description of Artificial Sequence: Synthetic oligonucleotide
uaauacuuaugggcagcag

SEQ ID NO: 2709444 - RNA, 19 nt, Artificial Sequence
  Description of Artificial Sequence: Synthetic oligonucleotide
ccuaacgggagcaggaagc

SEQ ID NO: 2709445 - RNA, 19 nt, Artificial Sequence
  Description of Artificial Sequence: Synthetic oligonucleotide
aucacauuggccacuuucu

SEQ ID NO: 2709446 - RNA, 19 nt, Artificial Sequence
  Description of Artificial Sequence: Synthetic oligonucleotide
cuuugagugcagucuucag

SEQ ID NO: 2709447 - RNA, 19 nt, Artificial Sequence
  Description of Artificial Sequence: Synthetic oligonucleotide
acucgaucauuuccagcag

SEQ ID NO: 2709448 - RNA, 19 nt, Artificial Sequence
  Description of Artificial Sequence: Synthetic oligonucleotide
agcagacccagcucugcag

SEQ ID NO: 2709449 - RNA, 19 nt, Artificial Sequence
  Description of Artificial Sequence: Synthetic oligonucleotide
agacaggguuaaccagggc

SEQ ID NO: 2709450 - RNA, 19 nt, Artificial Sequence
  Description of Artificial Sequence: Synthetic oligonucleotide
gaaaccucacuauaauaau

SEQ ID NO: 2709451 - RNA, 19 nt, Artificial Sequence
  Description of Artificial Sequence: Synthetic oligonucleotide
gggagcugaggccuaacgg

SEQ ID NO: 2709452 - RNA, 19 nt, Artificial Sequence
  Description of Artificial Sequence: Synthetic oligonucleotide
gaaugguccacaaucacau

SEQ ID NO: 2709453 - RNA, 19 nt, Artificial Sequence
  Description of Artificial Sequence: Synthetic oligonucleotide
ugcugaacacacaguccug

SEQ ID NO: 2709454 - RNA, 19 nt, Artificial Sequence
  Description of Artificial Sequence: Synthetic oligonucleotide
ucucugcaucaaacgacug

SEQ ID NO: 2709455 - RNA, 19 nt, Artificial Sequence
  Description of Artificial Sequence: Synthetic oligonucleotide
aacgggagcaggaagccau

SEQ ID NO: 2709456 - RNA, 19 nt, Artificial Sequence
  Description of Artificial Sequence: Synthetic oligonucleotide
acuggauuuuauacucauc

SEQ ID NO: 2709457 - RNA, 19 nt, Artificial Sequence
  Description of Artificial Sequence: Synthetic oligonucleotide
cuaacgggagcaggaagcc

SEQ ID NO: 2709458 - RNA, 19 nt, Artificial Sequence
  Description of Artificial Sequence: Synthetic oligonucleotide
uacuuaugggcagcaggag

SEQ ID NO: 2709459 - RNA, 19 nt, Artificial Sequence
  Description of Artificial Sequence: Synthetic oligonucleotide
acaggguuaaccagggcca

SEQ ID NO: 2709460 - RNA, 19 nt, Artificial Sequence
  Description of Artificial Sequence: Synthetic oligonucleotide
ucuucccggcucaaacucu

SEQ ID NO: 2709461 - RNA, 19 nt, Artificial Sequence
  Description of Artificial Sequence: Synthetic oligonucleotide
ucccggcucaaacucucag

SEQ ID NO: 2709462 - RNA, 19 nt, Artificial Sequence
  Description of Artificial Sequence: Synthetic oligonucleotide
aggaguggucuuccagccg

SEQ ID NO: 2709463 - RNA, 19 nt, Artificial Sequence
  Description of Artificial Sequence: Synthetic oligonucleotide
caggaagccaucccggauc

SEQ ID NO: 2709464 - RNA, 19 nt, Artificial Sequence
  Description of Artificial Sequence: Synthetic oligonucleotide
cagcucugcagugagcggg

SEQ ID NO: 2709465 - RNA, 19 nt, Artificial Sequence
  Description of Artificial Sequence: Synthetic oligonucleotide
cugcagccggucaaggagc

SEQ ID NO: 2709466 - RNA, 19 nt, Artificial Sequence
  Description of Artificial Sequence: Synthetic oligonucleotide
gacccagcucugcagugag

SEQ ID NO: 2709467 - RNA, 19 nt, Artificial Sequence
  Description of Artificial Sequence: Synthetic oligonucleotide
gaggccuaacgggagcagg

SEQ ID NO: 2709468 - RNA, 19 nt, Artificial Sequence
  Description of Artificial Sequence: Synthetic oligonucleotide
aaguccacggugccuggau

SEQ ID NO: 2709469 - RNA, 19 nt, Artificial Sequence
  Description of Artificial Sequence: Synthetic oligonucleotide
agucggaaaccucacuaua

SEQ ID NO: 2709470 - RNA, 19 nt, Artificial Sequence
  Description of Artificial Sequence: Synthetic oligonucleotide
ggaacucgaucauuuccag

SEQ ID NO: 2709471 - RNA, 19 nt, Artificial Sequence
  Description of Artificial Sequence: Synthetic oligonucleotide
uccuugcugaacacacagu

SEQ ID NO: 2709472 - RNA, 19 nt, Artificial Sequence
  Description of Artificial Sequence: Synthetic oligonucleotide
ugcagccggucaaggagcc

SEQ ID NO: 2709473 - RNA, 19 nt, Artificial Sequence
  Description of Artificial Sequence: Synthetic oligonucleotide
ugcagauaaaggugacaua

SEQ ID NO: 2709474 - RNA, 19 nt, Artificial Sequence
  Description of Artificial Sequence: Synthetic oligonucleotide
agccaucccggaucaggac

SEQ ID NO: 2709475 - RNA, 19 nt, Artificial Sequence
  Description of Artificial Sequence: Synthetic oligonucleotide
caaacgacuggauuuuaua

SEQ ID NO: 2709476 - RNA, 19 nt, Artificial Sequence
  Description of Artificial Sequence: Synthetic oligonucleotide
acagucauagacaggguua

SEQ ID NO: 2709477 - RNA, 19 nt, Artificial Sequence
  Description of Artificial Sequence: Synthetic oligonucleotide
cuuccagccggcugcccgg

SEQ ID NO: 2709478 - RNA, 19 nt, Artificial Sequence
  Description of Artificial Sequence: Synthetic oligonucleotide
cagccggucaaggagcccg

SEQ ID NO: 2709479 - RNA, 19 nt, Artificial Sequence
  Description of Artificial Sequence: Synthetic oligonucleotide
cagcaugggcauauuguuc

SEQ ID NO: 2709480 - RNA, 19 nt, Artificial Sequence
  Description of Artificial Sequence: Synthetic oligonucleotide
caugggcauauuguucacc

SEQ ID NO: 2709481 - RNA, 19 nt, Artificial Sequence
  Description of Artificial Sequence: Synthetic oligonucleotide
guccacaaucacauuggcc

SEQ ID NO: 2709482 - RNA, 19 nt, Artificial Sequence
  Description of Artificial Sequence: Synthetic oligonucleotide
ccucagguagucaaagaug

SEQ ID NO: 2709483 - RNA, 19 nt, Artificial Sequence
  Description of Artificial Sequence: Synthetic oligonucleotide
cagugagcgggcucgcagc

SEQ ID NO: 2709484 - RNA, 19 nt, Artificial Sequence
  Description of Artificial Sequence: Synthetic oligonucleotide
augcgcugcccguucaucu

SEQ ID NO: 2709485 - RNA, 19 nt, Artificial Sequence
  Description of Artificial Sequence: Synthetic oligonucleotide
gggcauauuguucacccuc

SEQ ID NO: 2709486 - RNA, 19 nt, Artificial Sequence
  Description of Artificial Sequence: Synthetic oligonucleotide
agggaaugguccacaauca

SEQ ID NO: 2709487 - RNA, 19 nt, Artificial Sequence
  Description of Artificial Sequence: Synthetic oligonucleotide
cugcccguucaucuucucc

SEQ ID NO: 2709488 - RNA, 19 nt, Artificial Sequence
  Description of Artificial Sequence: Synthetic oligonucleotide
ccggcucaaacucucaggc

SEQ ID NO: 2709489 - RNA, 19 nt, Artificial Sequence
  Description of Artificial Sequence: Synthetic oligonucleotide
ugggcauauuguucacccu

SEQ ID NO: 2709490 - RNA, 19 nt, Artificial Sequence
  Description of Artificial Sequence: Synthetic oligonucleotide
aucuuugagugcagucuuc

SEQ ID NO: 2709491 - RNA, 19 nt, Artificial Sequence
  Description of Artificial Sequence: Synthetic oligonucleotide
cagcugcuccccaacgcgg

SEQ ID NO: 2709492 - RNA, 19 nt, Artificial Sequence
  Description of Artificial Sequence: Synthetic oligonucleotide
aggguuaaccagggccagc

SEQ ID NO: 2709493 - RNA, 19 nt, Artificial Sequence
  Description of Artificial Sequence: Synthetic oligonucleotide
agugagcgggcucgcagcu

SEQ ID NO: 2709494 - RNA, 19 nt, Artificial Sequence
  Description of Artificial Sequence: Synthetic oligonucleotide
cuucccggcucaaacucuc

SEQ ID NO: 2709495 - RNA, 19 nt, Artificial Sequence
  Description of Artificial Sequence: Synthetic oligonucleotide
ugcuuccuugcugaacaca

SEQ ID NO: 2709496 - RNA, 19 nt, Artificial Sequence
  Description of Artificial Sequence: Synthetic oligonucleotide
gaucuuugagugcagucuu

SEQ ID NO: 2709497 - RNA, 19 nt, Artificial Sequence
  Description of Artificial Sequence: Synthetic oligonucleotide
cugcucccgggccugauac

SEQ ID NO: 2709498 - RNA, 19 nt, Artificial Sequence
  Description of Artificial Sequence: Synthetic oligonucleotide
gucaaggagcccgcggcgg

SEQ ID NO: 2709499 - RNA, 19 nt, Artificial Sequence
  Description of Artificial Sequence: Synthetic oligonucleotide
cucgcagcugcucccgggc

SEQ ID NO: 2709500 - RNA, 19 nt, Artificial Sequence
  Description of Artificial Sequence: Synthetic oligonucleotide
ucuggccugcuuguccugc

SEQ ID NO: 2709501 - RNA, 19 nt, Artificial Sequence
  Description of Artificial Sequence: Synthetic oligonucleotide
cacggugccuggaucuuug

SEQ ID NO: 2709502 - RNA, 19 nt, Artificial Sequence
  Description of Artificial Sequence: Synthetic oligonucleotide
guugcagauaaaggugaca

SEQ ID NO: 2709503 - RNA, 19 nt, Artificial Sequence
  Description of Artificial Sequence: Synthetic oligonucleotide
ucccgggccugauacuccc

SEQ ID NO: 2709504 - RNA, 19 nt, Artificial Sequence
  Description of Artificial Sequence: Synthetic oligonucleotide
ggaaugguccacaaucaca

SEQ ID NO: 2709505 - RNA, 19 nt, Artificial Sequence
  Description of Artificial Sequence: Synthetic oligonucleotide
ggucucugcaucaaacgac

SEQ ID NO: 2709506 - RNA, 19 nt, Artificial Sequence
  Description of Artificial Sequence: Synthetic oligonucleotide
ccggaacucgaucauuucc

SEQ ID NO: 2709507 - RNA, 19 nt, Artificial Sequence
  Description of Artificial Sequence: Synthetic oligonucleotide
ugcagggaaugguccacaa

SEQ ID NO: 2709508 - RNA, 19 nt, Artificial Sequence
  Description of Artificial Sequence: Synthetic oligonucleotide
ugccuggaucuuugagugc

SEQ ID NO: 2709509 - RNA, 19 nt, Artificial Sequence
  Description of Artificial Sequence: Synthetic oligonucleotide
ggucaaggagcccgcggcg

SEQ ID NO: 2709510 - RNA, 19 nt, Artificial Sequence
  Description of Artificial Sequence: Synthetic oligonucleotide
gucggaaaccucacuauaa

SEQ ID NO: 2709511 - RNA, 19 nt, Artificial Sequence
  Description of Artificial Sequence: Synthetic oligonucleotide
cucaaacucucaggcuggg

SEQ ID NO: 2709512 - RNA, 19 nt, Artificial Sequence
  Description of Artificial Sequence: Synthetic oligonucleotide
gcugaacacacaguccugc

SEQ ID NO: 2709513 - RNA, 19 nt, Artificial Sequence
  Description of Artificial Sequence: Synthetic oligonucleotide
uccccaacgcggugcagcu

SEQ ID NO: 2709514 - RNA, 19 nt, Artificial Sequence
  Description of Artificial Sequence: Synthetic oligonucleotide
cuccccaacgcggugcagc

SEQ ID NO: 2709515 - RNA, 19 nt, Artificial Sequence
  Description of Artificial Sequence: Synthetic oligonucleotide
gggucucugcaucaaacga

SEQ ID NO: 2709516 - RNA, 19 nt, Artificial Sequence
  Description of Artificial Sequence: Synthetic oligonucleotide
ccggaucaggacaaagagc

SEQ ID NO: 2709517 - RNA, 19 nt, Artificial Sequence
  Description of Artificial Sequence: Synthetic oligonucleotide
gguccacaaucacauuggc

SEQ ID NO: 2709518 - RNA, 19 nt, Artificial Sequence
  Description of Artificial Sequence: Synthetic oligonucleotide
gagcugaggccuaacggga

SEQ ID NO: 2709519 - RNA, 19 nt, Artificial Sequence
  Description of Artificial Sequence: Synthetic oligonucleotide
acaguccugcagggaaugg

SEQ ID NO: 2709520 - RNA, 19 nt, Artificial Sequence
  Description of Artificial Sequence: Synthetic oligonucleotide
acccucagguagucaaaga

SEQ ID NO: 2709521 - RNA, 19 nt, Artificial Sequence
  Description of Artificial Sequence: Synthetic oligonucleotide
ugaggccuaacgggagcag

SEQ ID NO: 2709522 - RNA, 19 nt, Artificial Sequence
  Description of Artificial Sequence: Synthetic oligonucleotide
gggaaugguccacaaucac

SEQ ID NO: 2709523 - RNA, 19 nt, Artificial Sequence
  Description of Artificial Sequence: Synthetic oligonucleotide
cugaacacacaguccugca

SEQ ID NO: 2709524 - RNA, 19 nt, Artificial Sequence
  Description of Artificial Sequence: Synthetic oligonucleotide
ugcuccccaacgcggugca

SEQ ID NO: 2709525 - RNA, 19 nt, Artificial Sequence
  Description of Artificial Sequence: Synthetic oligonucleotide
ccugcuuccuugcugaaca

SEQ ID NO: 2709526 - RNA, 19 nt, Artificial Sequence
  Description of Artificial Sequence: Synthetic oligonucleotide
gacacucuggccugcuugu

SEQ ID NO: 2709527 - RNA, 19 nt, Artificial Sequence
  Description of Artificial Sequence: Synthetic oligonucleotide
gcauauuguucacccucag

SEQ ID NO: 2709528 - RNA, 19 nt, Artificial Sequence
  Description of Artificial Sequence: Synthetic oligonucleotide
gcaucaaacgacuggauuu

SEQ ID NO: 2709529 - RNA, 19 nt, Artificial Sequence
  Description of Artificial Sequence: Synthetic oligonucleotide
uaacgggagcaggaagcca

SEQ ID NO: 2709530 - RNA, 19 nt, Artificial Sequence
  Description of Artificial Sequence: Synthetic oligonucleotide
ggugccuggaucuuugagu

SEQ ID NO: 2709531 - RNA, 19 nt, Artificial Sequence
  Description of Artificial Sequence: Synthetic oligonucleotide
gcugcccggaacucgauca

SEQ ID NO: 2709532 - RNA, 19 nt, Artificial Sequence
  Description of Artificial Sequence: Synthetic oligonucleotide
acaaucacauuggccacuu

SEQ ID NO: 2709533 - RNA, 19 nt, Artificial Sequence
  Description of Artificial Sequence: Synthetic oligonucleotide
uguucacccucagguaguc

SEQ ID NO: 2709534 - RNA, 19 nt, Artificial Sequence
  Description of Artificial Sequence: Synthetic oligonucleotide
augggcagcaggagugguc

SEQ ID NO: 2709535 - RNA, 19 nt, Artificial Sequence
  Description of Artificial Sequence: Synthetic oligonucleotide
cagacccagcucugcagug

SEQ ID NO: 2709536 - RNA, 19 nt, Artificial Sequence
  Description of Artificial Sequence: Synthetic oligonucleotide
cacaguccugcagggaaug

SEQ ID NO: 2709537 - RNA, 19 nt, Artificial Sequence
  Description of Artificial Sequence: Synthetic oligonucleotide
ggccugauacucccgcugc

SEQ ID NO: 2709538 - RNA, 19 nt, Artificial Sequence
  Description of Artificial Sequence: Synthetic oligonucleotide
gugacauagcagacccagc

SEQ ID NO: 2709539 - RNA, 19 nt, Artificial Sequence
  Description of Artificial Sequence: Synthetic oligonucleotide
cggaucaggacaaagagcu

SEQ ID NO: 2709540 - RNA, 19 nt, Artificial Sequence
  Description of Artificial Sequence: Synthetic oligonucleotide
ggcucagucggaaaccuca

SEQ ID NO: 2709541 - RNA, 19 nt, Artificial Sequence
  Description of Artificial Sequence: Synthetic oligonucleotide
ggaucuuugagugcagucu

SEQ ID NO: 2709542 - RNA, 19 nt, Artificial Sequence
  Description of Artificial Sequence: Synthetic oligonucleotide
cucccgggccugauacucc

SEQ ID NO: 2709543 - RNA, 19 nt, Artificial Sequence
  Description of Artificial Sequence: Synthetic oligonucleotide
gccuaacgggagcaggaag

SEQ ID NO: 2709544 - RNA, 19 nt, Artificial Sequence
  Description of Artificial Sequence: Synthetic oligonucleotide
ggcugggccagcuggaaga

SEQ ID NO: 2709545 - RNA, 19 nt, Artificial Sequence
  Description of Artificial Sequence: Synthetic oligonucleotide
ucaggacaaagagcucauc

SEQ ID NO: 2709546 - RNA, 19 nt, Artificial Sequence
  Description of Artificial Sequence: Synthetic oligonucleotide
cccggcucaaacucucagg

SEQ ID NO: 2709547 - RNA, 19 nt, Artificial Sequence
  Description of Artificial Sequence: Synthetic oligonucleotide
agcugaggccuaacgggag

SEQ ID NO: 2709548 - RNA, 19 nt, Artificial Sequence
  Description of Artificial Sequence: Synthetic oligonucleotide
gucucugcaucaaacgacu

SEQ ID NO: 2709549 - RNA, 19 nt, Artificial Sequence
  Description of Artificial Sequence: Synthetic oligonucleotide
aucaggacaaagagcucau

SEQ ID NO: 2709550 - RNA, 19 nt, Artificial Sequence
  Description of Artificial Sequence: Synthetic oligonucleotide
gggagcaggaagccauccc

SEQ ID NO: 2709551 - RNA, 19 nt, Artificial Sequence
  Description of Artificial Sequence: Synthetic oligonucleotide
cagucauagacaggguuaa

SEQ ID NO: 2709552 - RNA, 19 nt, Artificial Sequence
  Description of Artificial Sequence: Synthetic oligonucleotide
ucccgcugcagccggucaa

SEQ ID NO: 2709553 - RNA, 19 nt, Artificial Sequence
  Description of Artificial Sequence: Synthetic oligonucleotide
caggguuaaccagggccag

SEQ ID NO: 2709554 - RNA, 19 nt, Artificial Sequence
  Description of Artificial Sequence: Synthetic oligonucleotide
agacccagcucugcaguga

SEQ ID NO: 2709555 - RNA, 19 nt, Artificial Sequence
  Description of Artificial Sequence: Synthetic oligonucleotide
ggcauauuguucacccuca

SEQ ID NO: 2709556 - RNA, 19 nt, Artificial Sequence
  Description of Artificial Sequence: Synthetic oligonucleotide
gcugaggccuaacgggagc

SEQ ID NO: 2709557 - RNA, 19 nt, Artificial Sequence
  Description of Artificial Sequence: Synthetic oligonucleotide
ggacaaagagcucauccau

SEQ ID NO: 2709558 - RNA, 19 nt, Artificial Sequence
  Description of Artificial Sequence: Synthetic oligonucleotide
aggccuaacgggagcagga

SEQ ID NO: 2709559 - RNA, 19 nt, Artificial Sequence
  Description of Artificial Sequence: Synthetic oligonucleotide
caaagauguugcagauaaa

SEQ ID NO: 2709560 - RNA, 19 nt, Artificial Sequence
  Description of Artificial Sequence: Synthetic oligonucleotide
acucucaggcugggccagc

SEQ ID NO: 2709561 - RNA, 19 nt, Artificial Sequence
  Description of Artificial Sequence: Synthetic oligonucleotide
ccacaaucacauuggccac

SEQ ID NO: 2709562 - RNA, 19 nt, Artificial Sequence
  Description of Artificial Sequence: Synthetic oligonucleotide
agggccagcaugggcauau

SEQ ID NO: 2709563 - RNA, 19 nt, Artificial Sequence
  Description of Artificial Sequence: Synthetic oligonucleotide
gggccugauacucccgcug

SEQ ID NO: 2709564 - RNA, 19 nt, Artificial Sequence
  Description of Artificial Sequence: Synthetic oligonucleotide
cugcuccccaacgcggugc

SEQ ID NO: 2709565 - RNA, 19 nt, Artificial Sequence
  Description of Artificial Sequence: Synthetic oligonucleotide
ggguuaaccagggccagca

SEQ ID NO: 2709566 - RNA, 19 nt, Artificial Sequence
  Description of Artificial Sequence: Synthetic oligonucleotide
ugcgcugcccguucaucuu

SEQ ID NO: 2709567 - RNA, 19 nt, Artificial Sequence
  Description of Artificial Sequence: Synthetic oligonucleotide
agccggucaaggagcccgc

SEQ ID NO: 2709568 - RNA, 19 nt, Artificial Sequence
  Description of Artificial Sequence: Synthetic oligonucleotide
cuuucuccaaguccacggu

SEQ ID NO: 2709569 - RNA, 19 nt, Artificial Sequence
  Description of Artificial Sequence: Synthetic oligonucleotide
ccucacuauaauaauacuu

SEQ ID NO: 2709570 - RNA, 19 nt, Artificial Sequence
  Description of Artificial Sequence: Synthetic oligonucleotide
agcccgcggcggaagacac

SEQ ID NO: 2709571 - RNA, 19 nt, Artificial Sequence
  Description of Artificial Sequence: Synthetic oligonucleotide
cucugcagugagcgggcuc

SEQ ID NO: 2709572 - RNA, 19 nt, Artificial Sequence
  Description of Artificial Sequence: Synthetic oligonucleotide
guccacggugccuggaucu

SEQ ID NO: 2709573 - RNA, 19 nt, Artificial Sequence
  Description of Artificial Sequence: Synthetic oligonucleotide
cggaacucgaucauuucca

SEQ ID NO: 2709574 - RNA, 19 nt, Artificial Sequence
  Description of Artificial Sequence: Synthetic oligonucleotide
aucaaacgacuggauuuua

SEQ ID NO: 2709575 - RNA, 19 nt, Artificial Sequence
  Description of Artificial Sequence: Synthetic oligonucleotide
gcccguucaucuucuccag

SEQ ID NO: 2709576 - RNA, 19 nt, Artificial Sequence
  Description of Artificial Sequence: Synthetic oligonucleotide
caugcgcugcccguucauc

SEQ ID NO: 2709577 - RNA, 19 nt, Artificial Sequence
  Description of Artificial Sequence: Synthetic oligonucleotide
ugcucccgggccugauacu

SEQ ID NO: 2709578 - RNA, 19 nt, Artificial Sequence
  Description of Artificial Sequence: Synthetic oligonucleotide
gcucgcagcugcucccggg

SEQ ID NO: 2709579 - RNA, 19 nt, Artificial Sequence
  Description of Artificial Sequence: Synthetic oligonucleotide
acgggagcaggaagccauc

SEQ ID NO: 2709580 - RNA, 19 nt, Artificial Sequence
  Description of Artificial Sequence: Synthetic oligonucleotide
cugaggccuaacgggagca

SEQ ID NO: 2709581 - RNA, 19 nt, Artificial Sequence
  Description of Artificial Sequence: Synthetic oligonucleotide
caacgcggugcagcuguag

SEQ ID NO: 2709582 - RNA, 19 nt, Artificial Sequence
  Description of Artificial Sequence: Synthetic oligonucleotide
acggugccuggaucuuuga

SEQ ID NO: 2709583 - RNA, 19 nt, Artificial Sequence
  Description of Artificial Sequence: Synthetic oligonucleotide
acacaguccugcagggaau

SEQ ID NO: 2709584 - RNA, 19 nt, Artificial Sequence
  Description of Artificial Sequence: Synthetic oligonucleotide
guagcaccaggcaguccac

SEQ ID NO: 2709585 - RNA, 19 nt, Artificial Sequence
  Description of Artificial Sequence: Synthetic oligonucleotide
agcgggcucgcagcugcuc

SEQ ID NO: 2709586 - RNA, 19 nt, Artificial Sequence
  Description of Artificial Sequence: Synthetic oligonucleotide
cagucggaaaccucacuau

SEQ ID NO: 2709587 - RNA, 19 nt, Artificial Sequence
  Description of Artificial Sequence: Synthetic oligonucleotide
gagcccgcggcggaagaca

SEQ ID NO: 2709588 - RNA, 19 nt, Artificial Sequence
  Description of Artificial Sequence: Synthetic oligonucleotide
caucaaacgacuggauuuu

SEQ ID NO: 2709589 - RNA, 19 nt, Artificial Sequence
  Description of Artificial Sequence: Synthetic oligonucleotide
aggagcccgcggcggaaga

SEQ ID NO: 2709590 - RNA, 19 nt, Artificial Sequence
  Description of Artificial Sequence: Synthetic oligonucleotide
agcugcuccccaacgcggu

SEQ ID NO: 2709591 - RNA, 19 nt, Artificial Sequence
  Description of Artificial Sequence: Synthetic oligonucleotide
gcaugggcauauuguucac

SEQ ID NO: 2709592 - RNA, 19 nt, Artificial Sequence
  Description of Artificial Sequence: Synthetic oligonucleotide
gcggcggaagacacucugg

SEQ ID NO: 2709593 - RNA, 19 nt, Artificial Sequence
  Description of Artificial Sequence: Synthetic oligonucleotide
cggcggaagacacucuggc

SEQ ID NO: 2709594 - RNA, 19 nt, Artificial Sequence
  Description of Artificial Sequence: Synthetic oligonucleotide
gcggugcagcuguagcacc

SEQ ID NO: 2709595 - RNA, 19 nt, Artificial Sequence
  Description of Artificial Sequence: Synthetic oligonucleotide
ccaaguccacggugccugg

SEQ ID NO: 2709596 - RNA, 19 nt, Artificial Sequence
  Description of Artificial Sequence: Synthetic oligonucleotide
ccggucaaggagcccgcgg

SEQ ID NO: 2709597 - RNA, 19 nt, Artificial Sequence
  Description of Artificial Sequence: Synthetic oligonucleotide
uccacggugccuggaucuu

SEQ ID NO: 2709598 - RNA, 19 nt, Artificial Sequence
  Description of Artificial Sequence: Synthetic oligonucleotide
agccgccccagggagcuga

SEQ ID NO: 2709599 - RNA, 19 nt, Artificial Sequence
  Description of Artificial Sequence: Synthetic oligonucleotide
cccguucaucuucuccagc

SEQ ID NO: 2709600 - RNA, 19 nt, Artificial Sequence
  Description of Artificial Sequence: Synthetic oligonucleotide
ccgggccugauacucccgc

SEQ ID NO: 2709601 - RNA, 19 nt, Artificial Sequence
  Description of Artificial Sequence: Synthetic oligonucleotide
cacaaucacauuggccacu

SEQ ID NO: 2709602 - RNA, 19 nt, Artificial Sequence
  Description of Artificial Sequence: Synthetic oligonucleotide
agccggcugcccggaacuc

SEQ ID NO: 2709603 - RNA, 19 nt, Artificial Sequence
  Description of Artificial Sequence: Synthetic oligonucleotide
ggaucaggacaaagagcuc

SEQ ID NO: 2709604 - RNA, 19 nt, Artificial Sequence
  Description of Artificial Sequence: Synthetic oligonucleotide
gcucagucggaaaccucac

SEQ ID NO: 2709605 - RNA, 19 nt, Artificial Sequence
  Description of Artificial Sequence: Synthetic oligonucleotide
cuuguccugcuuccuugcu

SEQ ID NO: 2709606 - RNA, 19 nt, Artificial Sequence
  Description of Artificial Sequence: Synthetic oligonucleotide
ggcucgcagcugcucccgg

SEQ ID NO: 2709607 - RNA, 19 nt, Artificial Sequence
  Description of Artificial Sequence: Synthetic oligonucleotide
cgaucauuuccagcagcag

SEQ ID NO: 2709608 - RNA, 19 nt, Artificial Sequence
  Description of Artificial Sequence: Synthetic oligonucleotide
cccggaacucgaucauuuc

SEQ ID NO: 2709609 - RNA, 19 nt, Artificial Sequence
  Description of Artificial Sequence: Synthetic oligonucleotide
gugagcgggcucgcagcug

SEQ ID NO: 2709610 - RNA, 19 nt, Artificial Sequence
  Description of Artificial Sequence: Synthetic oligonucleotide
cugcagugagcgggcucgc

SEQ ID NO: 2709611 - RNA, 19 nt, Artificial Sequence
  Description of Artificial Sequence: Synthetic oligonucleotide
ccaucccggaucaggacaa

SEQ ID NO: 2709612 - RNA, 19 nt, Artificial Sequence
  Description of Artificial Sequence: Synthetic oligonucleotide
cugcaucaaacgacuggau

SEQ ID NO: 2709613 - RNA, 19 nt, Artificial Sequence
  Description of Artificial Sequence: Synthetic oligonucleotide
gccugauacucccgcugca

SEQ ID NO: 2709614 - RNA, 19 nt, Artificial Sequence
  Description of Artificial Sequence: Synthetic oligonucleotide
cagggagcugaggccuaac

SEQ ID NO: 2709615 - RNA, 19 nt, Artificial Sequence
  Description of Artificial Sequence: Synthetic oligonucleotide
ggcugcccggaacucgauc

SEQ ID NO: 2709616 - RNA, 19 nt, Artificial Sequence
  Description of Artificial Sequence: Synthetic oligonucleotide
cccgcggcggaagacacuc

SEQ ID NO: 2709617 - RNA, 19 nt, Artificial Sequence
  Description of Artificial Sequence: Synthetic oligonucleotide
ccagcaugggcauauuguu

SEQ ID NO: 2709618 - RNA, 19 nt, Artificial Sequence
  Description of Artificial Sequence: Synthetic oligonucleotide
gcuggaagagacagucaua

SEQ ID NO: 2709619 - RNA, 19 nt, Artificial Sequence
  Description of Artificial Sequence: Synthetic oligonucleotide
ccagccggcugcccggaac

SEQ ID NO: 2709620 - RNA, 19 nt, Artificial Sequence
  Description of Artificial Sequence: Synthetic oligonucleotide
cggugccuggaucuuugag

SEQ ID NO: 2709621 - RNA, 19 nt, Artificial Sequence
  Description of Artificial Sequence: Synthetic oligonucleotide
gcgcugcccguucaucuuc

SEQ ID NO: 2709622 - RNA, 19 nt, Artificial Sequence
  Description of Artificial Sequence: Synthetic oligonucleotide
cagccggcugcccggaacu

SEQ ID NO: 2709623 - RNA, 19 nt, Artificial Sequence
  Description of Artificial Sequence: Synthetic oligonucleotide
cccaacgcggugcagcugu

SEQ ID NO: 2709624 - RNA, 19 nt, Artificial Sequence
  Description of Artificial Sequence: Synthetic oligonucleotide
gccggucaaggagcccgcg

SEQ ID NO: 2709625 - RNA, 19 nt, Artificial Sequence
  Description of Artificial Sequence: Synthetic oligonucleotide
ggccuaacgggagcaggaa

SEQ ID NO: 2709626 - RNA, 19 nt, Artificial Sequence
  Description of Artificial Sequence: Synthetic oligonucleotide
cugggccagcuggaagaga

SEQ ID NO: 2709627 - RNA, 19 nt, Artificial Sequence
  Description of Artificial Sequence: Synthetic oligonucleotide
gcagggaaugguccacaau

SEQ ID NO: 2709628 - RNA, 19 nt, Artificial Sequence
  Description of Artificial Sequence: Synthetic oligonucleotide
ccggcugcccggaacucga

SEQ ID NO: 2709629 - RNA, 19 nt, Artificial Sequence
  Description of Artificial Sequence: Synthetic oligonucleotide
cuccaaguccacggugccu

SEQ ID NO: 2709630 - RNA, 19 nt, Artificial Sequence
  Description of Artificial Sequence: Synthetic oligonucleotide
gcagccggucaaggagccc

SEQ ID NO: 2709631 - RNA, 19 nt, Artificial Sequence
  Description of Artificial Sequence: Synthetic oligonucleotide
cugcccggaacucgaucau

SEQ ID NO: 2709632 - RNA, 19 nt, Artificial Sequence
  Description of Artificial Sequence: Synthetic oligonucleotide
gggccagcuggaagagaca

SEQ ID NO: 2709633 - RNA, 19 nt, Artificial Sequence
  Description of Artificial Sequence: Synthetic oligonucleotide
caucccggaucaggacaaa

SEQ ID NO: 2709634 - RNA, 19 nt, Artificial Sequence
  Description of Artificial Sequence: Synthetic oligonucleotide
cauccaugcgcugcccguu

SEQ ID NO: 2709635 - RNA, 19 nt, Artificial Sequence
  Description of Artificial Sequence: Synthetic oligonucleotide
gcccggaacucgaucauuu

SEQ ID NO: 2709636 - RNA, 19 nt, Artificial Sequence
  Description of Artificial Sequence: Synthetic oligonucleotide
caaucacauuggccacuuu

SEQ ID NO: 2709637 - RNA, 19 nt, Artificial Sequence
  Description of Artificial Sequence: Synthetic oligonucleotide
gcuccccaacgcggugcag

SEQ ID NO: 2709638 - RNA, 19 nt, Artificial Sequence
  Description of Artificial Sequence: Synthetic oligonucleotide
gagcgggcucgcagcugcu

SEQ ID NO: 2709639 - RNA, 19 nt, Artificial Sequence
  Description of Artificial Sequence: Synthetic oligonucleotide
gccgccccagggagcugag

SEQ ID NO: 2709640 - RNA, 19 nt, Artificial Sequence
  Description of Artificial Sequence: Synthetic oligonucleotide
ccgccccagggagcugagg

SEQ ID NO: 2709641 - RNA, 19 nt, Artificial Sequence
  Description of Artificial Sequence: Synthetic oligonucleotide
ccccaacgcggugcagcug

SEQ ID NO: 2709642 - RNA, 19 nt, Artificial Sequence
  Description of Artificial Sequence: Synthetic oligonucleotide
cagggccagcaugggcaua

SEQ ID NO: 2709643 - RNA, 19 nt, Artificial Sequence
  Description of Artificial Sequence: Synthetic oligonucleotide
ccaacgcggugcagcugua

SEQ ID NO: 2709644 - RNA, 19 nt, Artificial Sequence
  Description of Artificial Sequence: Synthetic oligonucleotide
gcucugcagugagcgggcu

SEQ ID NO: 2709645 - RNA, 19 nt, Artificial Sequence
  Description of Artificial Sequence: Synthetic oligonucleotide
ccaugcgcugcccguucau

SEQ ID NO: 2709646 - RNA, 19 nt, Artificial Sequence
  Description of Artificial Sequence: Synthetic oligonucleotide
cgggccugauacucccgcu

SEQ ID NO: 2709647 - RNA, 19 nt, Artificial Sequence
  Description of Artificial Sequence: Synthetic oligonucleotide
ccgcggcggaagacacucu

SEQ ID NO: 2709648 - RNA, 19 nt, Artificial Sequence
  Description of Artificial Sequence: Synthetic oligonucleotide
gcccgcggcggaagacacu

SEQ ID NO: 2709649 - RNA, 19 nt, Artificial Sequence
  Description of Artificial Sequence: Synthetic oligonucleotide
cggcugcccggaacucgau

SEQ ID NO: 2709650 - RNA, 19 nt, Artificial Sequence
  Description of Artificial Sequence: Synthetic oligonucleotide
aaacuucuuauucacauac

SEQ ID NO: 2709651 - RNA, 19 nt, Artificial Sequence
  Description of Artificial Sequence: Synthetic oligonucleotide
ucaaccaucaccuccuugg

SEQ ID NO: 2709652 - RNA, 19 nt, Artificial Sequence
  Description of Artificial Sequence: Synthetic oligonucleotide
aaggaaaguucucaggauc

SEQ ID NO: 2709653 - RNA, 19 nt, Artificial Sequence
  Description of Artificial Sequence: Synthetic oligonucleotide
uuuaagggcauuccgagca

SEQ ID NO: 2709654 - RNA, 19 nt, Artificial Sequence
  Description of Artificial Sequence: Synthetic oligonucleotide
acuggaaccguucuugacc

SEQ ID NO: 2709655 - RNA, 19 nt, Artificial Sequence
  Description of Artificial Sequence: Synthetic oligonucleotide
uuggauaagaaacucgucu

SEQ ID NO: 2709656 - RNA, 19 nt, Artificial Sequence
  Description of Artificial Sequence: Synthetic oligonucleotide
uuuguauugguuacuaaac

SEQ ID NO: 2709657 - RNA, 19 nt, Artificial Sequence
  Description of Artificial Sequence: Synthetic oligonucleotide
aggaugaugaccuucagca

SEQ ID NO: 2709658 - RNA, 19 nt, Artificial Sequence
  Description of Artificial Sequence: Synthetic oligonucleotide
ucugcagaggccuugaccc

SEQ ID NO: 2709659 - RNA, 19 nt, Artificial Sequence
  Description of Artificial Sequence: Synthetic oligonucleotide
ucccaauacaacaaaagga

SEQ ID NO: 2709660 - RNA, 19 nt, Artificial Sequence
  Description of Artificial Sequence: Synthetic oligonucleotide
auaagaaacucgucucucc

SEQ ID NO: 2709661 - RNA, 19 nt, Artificial Sequence
  Description of Artificial Sequence: Synthetic oligonucleotide
aauacaacaaaaggaaagu

SEQ ID NO: 2709662 - RNA, 19 nt, Artificial Sequence
  Description of Artificial Sequence: Synthetic oligonucleotide
uucuuauucacauacuggu

SEQ ID NO: 2709663 - RNA, 19 nt, Artificial Sequence
  Description of Artificial Sequence: Synthetic oligonucleotide
uucuguuuccuguuuaagg

SEQ ID NO: 2709664 - RNA, 19 nt, Artificial Sequence
  Description of Artificial Sequence: Synthetic oligonucleotide
aacaccagaaucucccagg

SEQ ID NO: 2709665 - RNA, 19 nt, Artificial Sequence
  Description of Artificial Sequence: Synthetic oligonucleotide
guuacuaaacuucuuauuc

SEQ ID NO: 2709666 - RNA, 19 nt, Artificial Sequence
  Description of Artificial Sequence: Synthetic oligonucleotide
ucugucgucaaccaucacc

SEQ ID NO: 2709667 - RNA, 19 nt, Artificial Sequence
  Description of Artificial Sequence: Synthetic oligonucleotide
aacaccagaacacagcaau

SEQ ID NO: 2709668 - RNA, 19 nt, Artificial Sequence
  Description of Artificial Sequence: Synthetic oligonucleotide
ucuguagaaggccacacca

SEQ ID NO: 2709669 - RNA, 19 nt, Artificial Sequence
  Description of Artificial Sequence: Synthetic oligonucleotide
uguuuaagggcauuccgag

SEQ ID NO: 2709670 - RNA, 19 nt, Artificial Sequence
  Description of Artificial Sequence: Synthetic oligonucleotide
cuucuuauucacauacugg

SEQ ID NO: 2709671 - RNA, 19 nt, Artificial Sequence
  Description of Artificial Sequence: Synthetic oligonucleotide
uugucuguuuucaagguca

SEQ ID NO: 2709672 - RNA, 19 nt, Artificial Sequence
  Description of Artificial Sequence: Synthetic oligonucleotide
aaagucugcuccuauugug

SEQ ID NO: 2709673 - RNA, 19 nt, Artificial Sequence
  Description of Artificial Sequence: Synthetic oligonucleotide
aacaaaaggaaaguucuca

SEQ ID NO: 2709674 - RNA, 19 nt, Artificial Sequence
  Description of Artificial Sequence: Synthetic oligonucleotide
ucaaggucaaucuuguuuc

SEQ ID NO: 2709675 - RNA, 19 nt, Artificial Sequence
  Description of Artificial Sequence: Synthetic oligonucleotide
uggucagaaagucugcucc

SEQ ID NO: 2709676 - RNA, 19 nt, Artificial Sequence
  Description of Artificial Sequence: Synthetic oligonucleotide
agggaauucauuguauagc

SEQ ID NO: 2709677 - RNA, 19 nt, Artificial Sequence
  Description of Artificial Sequence: Synthetic oligonucleotide
uuacuaaacuucuuauuca

SEQ ID NO: 2709678 - RNA, 19 nt, Artificial Sequence
  Description of Artificial Sequence: Synthetic oligonucleotide
cugucaaggguuuugaaug

SEQ ID NO: 2709679 - RNA, 19 nt, Artificial Sequence
  Description of Artificial Sequence: Synthetic oligonucleotide
cuuauucacauacugguuc

SEQ ID NO: 2709680 - RNA, 19 nt, Artificial Sequence
  Description of Artificial Sequence: Synthetic oligonucleotide
gaugaugaccuucagcaac

SEQ ID NO: 2709681 - RNA, 19 nt, Artificial Sequence
  Description of Artificial Sequence: Synthetic oligonucleotide
uauugguuacuaaacuucu

SEQ ID NO: 2709682 - RNA, 19 nt, Artificial Sequence
  Description of Artificial Sequence: Synthetic oligonucleotide
uccuuggucagaaagucug

SEQ ID NO: 2709683 - RNA, 19 nt, Artificial Sequence
  Description of Artificial Sequence: Synthetic oligonucleotide
uucacauacugguucauga

SEQ ID NO: 2709684 - RNA, 19 nt, Artificial Sequence
  Description of Artificial Sequence: Synthetic oligonucleotide
ucucccaggaugaugaccu

SEQ ID NO: 2709685 - RNA, 19 nt, Artificial Sequence
  Description of Artificial Sequence: Synthetic oligonucleotide
uucaaggucaaucuuguuu

SEQ ID NO: 2709686 - RNA, 19 nt, Artificial Sequence
  Description of Artificial Sequence: Synthetic oligonucleotide
uuguauugguuacuaaacu

SEQ ID NO: 2709687 - RNA, 19 nt, Artificial Sequence
  Description of Artificial Sequence: Synthetic oligonucleotide
uguagcaccaagccugugc

SEQ ID NO: 2709688 - RNA, 19 nt, Artificial Sequence
  Description of Artificial Sequence: Synthetic oligonucleotide
agaaagucugcuccuauug

SEQ ID NO: 2709689 - RNA, 19 nt, Artificial Sequence
  Description of Artificial Sequence: Synthetic oligonucleotide
aagucugucgucaaccauc

SEQ ID NO: 2709690 - RNA, 19 nt, Artificial Sequence
  Description of Artificial Sequence: Synthetic oligonucleotide
uacuaaacuucuuauucac

SEQ ID NO: 2709691 - RNA, 19 nt, Artificial Sequence
  Description of Artificial Sequence: Synthetic oligonucleotide
cucaaaguagggaauguug

SEQ ID NO: 2709692 - RNA, 19 nt, Artificial Sequence
  Description of Artificial Sequence: Synthetic oligonucleotide
aaaguucucaggaucccgg

SEQ ID NO: 2709693 - RNA, 19 nt, Artificial Sequence
  Description of Artificial Sequence: Synthetic oligonucleotide
uuauucacauacugguuca

SEQ ID NO: 2709694 - RNA, 19 nt, Artificial Sequence
  Description of Artificial Sequence: Synthetic oligonucleotide
aggaaaguucucaggaucc

SEQ ID NO: 2709695 - RNA, 19 nt, Artificial Sequence
  Description of Artificial Sequence: Synthetic oligonucleotide
uaagaaacucgucucucca

SEQ ID NO: 2709696 - RNA, 19 nt, Artificial Sequence
  Description of Artificial Sequence: Synthetic oligonucleotide
guuaggggcagucacauca

SEQ ID NO: 2709697 - RNA, 19 nt, Artificial Sequence
  Description of Artificial Sequence: Synthetic oligonucleotide
aagaaacucgucucuccag

SEQ ID NO: 2709698 - RNA, 19 nt, Artificial Sequence
  Description of Artificial Sequence: Synthetic oligonucleotide
uguauugguuacuaaacuu

SEQ ID NO: 2709699 - RNA, 19 nt, Artificial Sequence
  Description of Artificial Sequence: Synthetic oligonucleotide
uugguuacuaaacuucuua

SEQ ID NO: 2709700 - RNA, 19 nt, Artificial Sequence
  Description of Artificial Sequence: Synthetic oligonucleotide
auagcuccacuucuguuuc

SEQ ID NO: 2709701 - RNA, 19 nt, Artificial Sequence
  Description of Artificial Sequence: Synthetic oligonucleotide
cacaccaagagacuggaac

SEQ ID NO: 2709702 - RNA, 19 nt, Artificial Sequence
  Description of Artificial Sequence: Synthetic oligonucleotide
cacauacugguucaugagg

SEQ ID NO: 2709703 - RNA, 19 nt, Artificial Sequence
  Description of Artificial Sequence: Synthetic oligonucleotide
agcaacacuuucuuccuag

SEQ ID NO: 2709704 - RNA, 19 nt, Artificial Sequence
  Description of Artificial Sequence: Synthetic oligonucleotide
uggauaagaaacucgucuc

SEQ ID NO: 2709705 - RNA, 19 nt, Artificial Sequence
  Description of Artificial Sequence: Synthetic oligonucleotide
uauuguggcuuuguauugg

SEQ ID NO: 2709706 - RNA, 19 nt, Artificial Sequence
  Description of Artificial Sequence: Synthetic oligonucleotide
aagucugcuccuauugugg

SEQ ID NO: 2709707 - RNA, 19 nt, Artificial Sequence
  Description of Artificial Sequence: Synthetic oligonucleotide
ucacauacugguucaugag

SEQ ID NO: 2709708 - RNA, 19 nt, Artificial Sequence
  Description of Artificial Sequence: Synthetic oligonucleotide
ucugcauggugacaagucu

SEQ ID NO: 2709709 - RNA, 19 nt, Artificial Sequence
  Description of Artificial Sequence: Synthetic oligonucleotide
gacccggucauucuugucc

SEQ ID NO: 2709710 - RNA, 19 nt, Artificial Sequence
  Description of Artificial Sequence: Synthetic oligonucleotide
agucugcuccuauuguggc

SEQ ID NO: 2709711 - RNA, 19 nt, Artificial Sequence
  Description of Artificial Sequence: Synthetic oligonucleotide
ucccagaucugcaugguga

SEQ ID NO: 2709712 - RNA, 19 nt, Artificial Sequence
  Description of Artificial Sequence: Synthetic oligonucleotide
aauugucuggaaggccugc

SEQ ID NO: 2709713 - RNA, 19 nt, Artificial Sequence
  Description of Artificial Sequence: Synthetic oligonucleotide
auggugacaagucugucgu

SEQ ID NO: 2709714 - RNA, 19 nt, Artificial Sequence
  Description of Artificial Sequence: Synthetic oligonucleotide
ugagggaugucuuuccaac

SEQ ID NO: 2709715 - RNA, 19 nt, Artificial Sequence
  Description of Artificial Sequence: Synthetic oligonucleotide
uucauuguauagcuccacu

SEQ ID NO: 2709716 - RNA, 19 nt, Artificial Sequence
  Description of Artificial Sequence: Synthetic oligonucleotide
aguuugauggguucaggga

SEQ ID NO: 2709717 - RNA, 19 nt, Artificial Sequence
  Description of Artificial Sequence: Synthetic oligonucleotide
ucaaucuuguuucccaaua

SEQ ID NO: 2709718 - RNA, 19 nt, Artificial Sequence
  Description of Artificial Sequence: Synthetic oligonucleotide
cuuuguauugguuacuaaa

SEQ ID NO: 2709719 - RNA, 19 nt, Artificial Sequence
  Description of Artificial Sequence: Synthetic oligonucleotide
aacucgucucuccagcugu

SEQ ID NO: 2709720 - RNA, 19 nt, Artificial Sequence
  Description of Artificial Sequence: Synthetic oligonucleotide
ucaaggguuuugaaugugu

SEQ ID NO: 2709721 - RNA, 19 nt, Artificial Sequence
  Description of Artificial Sequence: Synthetic oligonucleotide
cauuguauagcuccacuuc

SEQ ID NO: 2709722 - RNA, 19 nt, Artificial Sequence
  Description of Artificial Sequence: Synthetic oligonucleotide
aaguagggaauguuguuuu

SEQ ID NO: 2709723 - RNA, 19 nt, Artificial Sequence
  Description of Artificial Sequence: Synthetic oligonucleotide
gacaagucugucgucaacc

SEQ ID NO: 2709724 - RNA, 19 nt, Artificial Sequence
  Description of Artificial Sequence: Synthetic oligonucleotide
aaaguagggaauguuguuu

SEQ ID NO: 2709725 - RNA, 19 nt, Artificial Sequence
  Description of Artificial Sequence: Synthetic oligonucleotide
gaaucucccaggaugauga

SEQ ID NO: 2709726 - RNA, 19 nt, Artificial Sequence
  Description of Artificial Sequence: Synthetic oligonucleotide
uuuguggccacuugucugu

SEQ ID NO: 2709727 - RNA, 19 nt, Artificial Sequence
  Description of Artificial Sequence: Synthetic oligonucleotide
cagggaauucauuguauag

SEQ ID NO: 2709728 - RNA, 19 nt, Artificial Sequence
  Description of Artificial Sequence: Synthetic oligonucleotide
uacugguucaugagggaug

SEQ ID NO: 2709729 - RNA, 19 nt, Artificial Sequence
  Description of Artificial Sequence: Synthetic oligonucleotide
ucuuuguggccacuugucu

SEQ ID NO: 2709730 - RNA, 19 nt, Artificial Sequence
  Description of Artificial Sequence: Synthetic oligonucleotide
guauugguuacuaaacuuc

SEQ ID NO: 2709731 - RNA, 19 nt, Artificial Sequence
  Description of Artificial Sequence: Synthetic oligonucleotide
aaacucgucucuccagcug

SEQ ID NO: 2709732 - RNA, 19 nt, Artificial Sequence
  Description of Artificial Sequence: Synthetic oligonucleotide
agcaauugucuggaaggcc

SEQ ID NO: 2709733 - RNA, 19 nt, Artificial Sequence
  Description of Artificial Sequence: Synthetic oligonucleotide
augucuuuccaacaccaga

SEQ ID NO: 2709734 - RNA, 19 nt, Artificial Sequence
  Description of Artificial Sequence: Synthetic oligonucleotide
guagcaccaagccugugcc

SEQ ID NO: 2709735 - RNA, 19 nt, Artificial Sequence
  Description of Artificial Sequence: Synthetic oligonucleotide
gguuuugaauguguuaggg

SEQ ID NO: 2709736 - RNA, 19 nt, Artificial Sequence
  Description of Artificial Sequence: Synthetic oligonucleotide
ucgucaaccaucaccuccu

SEQ ID NO: 2709737 - RNA, 19 nt, Artificial Sequence
  Description of Artificial Sequence: Synthetic oligonucleotide
ugcauggugacaagucugu

SEQ ID NO: 2709738 - RNA, 19 nt, Artificial Sequence
  Description of Artificial Sequence: Synthetic oligonucleotide
gagacuggaaccguucuug

SEQ ID NO: 2709739 - RNA, 19 nt, Artificial Sequence
  Description of Artificial Sequence: Synthetic oligonucleotide
ugguucaugagggaugucu

SEQ ID NO: 2709740 - RNA, 19 nt, Artificial Sequence
  Description of Artificial Sequence: Synthetic oligonucleotide
gucgucaaccaucaccucc

SEQ ID NO: 2709741 - RNA, 19 nt, Artificial Sequence
  Description of Artificial Sequence: Synthetic oligonucleotide
ugguuacuaaacuucuuau

SEQ ID NO: 2709742 - RNA, 19 nt, Artificial Sequence
  Description of Artificial Sequence: Synthetic oligonucleotide
uugaauguguuaggggcag

SEQ ID NO: 2709743 - RNA, 19 nt, Artificial Sequence
  Description of Artificial Sequence: Synthetic oligonucleotide
cuauuguggcuuuguauug

SEQ ID NO: 2709744 - RNA, 19 nt, Artificial Sequence
  Description of Artificial Sequence: Synthetic oligonucleotide
aaucucccaggaugaugac

SEQ ID NO: 2709745 - RNA, 19 nt, Artificial Sequence
  Description of Artificial Sequence: Synthetic oligonucleotide
ucagcaacacuuucuuccu

SEQ ID NO: 2709746 - RNA, 19 nt, Artificial Sequence
  Description of Artificial Sequence: Synthetic oligonucleotide
guuugauggguucagggaa

SEQ ID NO: 2709747 - RNA, 19 nt, Artificial Sequence
  Description of Artificial Sequence: Synthetic oligonucleotide
augaccuucagcaacacuu

SEQ ID NO: 2709748 - RNA, 19 nt, Artificial Sequence
  Description of Artificial Sequence: Synthetic oligonucleotide
aaggguuuugaauguguua

SEQ ID NO: 2709749 - RNA, 19 nt, Artificial Sequence
  Description of Artificial Sequence: Synthetic oligonucleotide
ugucaaggguuuugaaugu

SEQ ID NO: 2709750 - RNA, 19 nt, Artificial Sequence
  Description of Artificial Sequence: Synthetic oligonucleotide
gauaagaaacucgucucuc

SEQ ID NO: 2709751 - RNA, 19 nt, Artificial Sequence
  Description of Artificial Sequence: Synthetic oligonucleotide
uuugauggguucagggaau

SEQ ID NO: 2709752 - RNA, 19 nt, Artificial Sequence
  Description of Artificial Sequence: Synthetic oligonucleotide
uucagggaauucauuguau

SEQ ID NO: 2709753 - RNA, 19 nt, Artificial Sequence
  Description of Artificial Sequence: Synthetic oligonucleotide
caaucuuguuucccaauac

SEQ ID NO: 2709754 - RNA, 19 nt, Artificial Sequence
  Description of Artificial Sequence: Synthetic oligonucleotide
auucauuguauagcuccac

SEQ ID NO: 2709755 - RNA, 19 nt, Artificial Sequence
  Description of Artificial Sequence: Synthetic oligonucleotide
ucacaucaaacaccagaac

SEQ ID NO: 2709756 - RNA, 19 nt, Artificial Sequence
  Description of Artificial Sequence: Synthetic oligonucleotide
uccuauuguggcuuuguau

SEQ ID NO: 2709757 - RNA, 19 nt, Artificial Sequence
  Description of Artificial Sequence: Synthetic oligonucleotide
cauuccgagcaauugucug

SEQ ID NO: 2709758 - RNA, 19 nt, Artificial Sequence
  Description of Artificial Sequence: Synthetic oligonucleotide
gauggguucagggaauuca

SEQ ID NO: 2709759 - RNA, 19 nt, Artificial Sequence
  Description of Artificial Sequence: Synthetic oligonucleotide
aggucaaucuuguuuccca

SEQ ID NO: 2709760 - RNA, 19 nt, Artificial Sequence
  Description of Artificial Sequence: Synthetic oligonucleotide
uguuuucaaggucaaucuu

SEQ ID NO: 2709761 - RNA, 19 nt, Artificial Sequence
  Description of Artificial Sequence: Synthetic oligonucleotide
ucagggaauucauuguaua

SEQ ID NO: 2709762 - RNA, 19 nt, Artificial Sequence
  Description of Artificial Sequence: Synthetic oligonucleotide
aauguguuaggggcaguca

SEQ ID NO: 2709763 - RNA, 19 nt, Artificial Sequence
  Description of Artificial Sequence: Synthetic oligonucleotide
gcaaucugcaccucuguag

SEQ ID NO: 2709764 - RNA, 19 nt, Artificial Sequence
  Description of Artificial Sequence: Synthetic oligonucleotide
cuaaacuucuuauucacau

SEQ ID NO: 2709765 - RNA, 19 nt, Artificial Sequence
  Description of Artificial Sequence: Synthetic oligonucleotide
cuuggauaagaaacucguc

SEQ ID NO: 2709766 - RNA, 19 nt, Artificial Sequence
  Description of Artificial Sequence: Synthetic oligonucleotide
ucaacaacugcagcucucu

SEQ ID NO: 2709767 - RNA, 19 nt, Artificial Sequence
  Description of Artificial Sequence: Synthetic oligonucleotide
cgagcaauugucuggaagg

SEQ ID NO: 2709768 - RNA, 19 nt, Artificial Sequence
  Description of Artificial Sequence: Synthetic oligonucleotide
cagaacacagcaaucugca

SEQ ID NO: 2709769 - RNA, 19 nt, Artificial Sequence
  Description of Artificial Sequence: Synthetic oligonucleotide
ugcaccucuguagaaggcc

SEQ ID NO: 2709770 - RNA, 19 nt, Artificial Sequence
  Description of Artificial Sequence: Synthetic oligonucleotide
caggaugaugaccuucagc

SEQ ID NO: 2709771 - RNA, 19 nt, Artificial Sequence
  Description of Artificial Sequence: Synthetic oligonucleotide
acaagucugucgucaacca

SEQ ID NO: 2709772 - RNA, 19 nt, Artificial Sequence
  Description of Artificial Sequence: Synthetic oligonucleotide
cugcauggugacaagucug

SEQ ID NO: 2709773 - RNA, 19 nt, Artificial Sequence
  Description of Artificial Sequence: Synthetic oligonucleotide
aucugcauggugacaaguc

SEQ ID NO: 2709774 - RNA, 19 nt, Artificial Sequence
  Description of Artificial Sequence: Synthetic oligonucleotide
cuguuuaagggcauuccga

SEQ ID NO: 2709775 - RNA, 19 nt, Artificial Sequence
  Description of Artificial Sequence: Synthetic oligonucleotide
uccuguuuaagggcauucc

SEQ ID NO: 2709776 - RNA, 19 nt, Artificial Sequence
  Description of Artificial Sequence: Synthetic oligonucleotide
caacaaaaggaaaguucuc

SEQ ID NO: 2709777 - RNA, 19 nt, Artificial Sequence
  Description of Artificial Sequence: Synthetic oligonucleotide
cuggucucaaaguagggaa

SEQ ID NO: 2709778 - RNA, 19 nt, Artificial Sequence
  Description of Artificial Sequence: Synthetic oligonucleotide
gagcaauugucuggaaggc

SEQ ID NO: 2709779 - RNA, 19 nt, Artificial Sequence
  Description of Artificial Sequence: Synthetic oligonucleotide
ccagaacacagcaaucugc

SEQ ID NO: 2709780 - RNA, 19 nt, Artificial Sequence
  Description of Artificial Sequence: Synthetic oligonucleotide
cucuguagaaggccacacc

SEQ ID NO: 2709781 - RNA, 19 nt, Artificial Sequence
  Description of Artificial Sequence: Synthetic oligonucleotide
cucuuuguggccacuuguc

SEQ ID NO: 2709782 - RNA, 19 nt, Artificial Sequence
  Description of Artificial Sequence: Synthetic oligonucleotide
cccaauacaacaaaaggaa

SEQ ID NO: 2709783 - RNA, 19 nt, Artificial Sequence
  Description of Artificial Sequence: Synthetic oligonucleotide
gucacaucaaacaccagaa

SEQ ID NO: 2709784 - RNA, 19 nt, Artificial Sequence
  Description of Artificial Sequence: Synthetic oligonucleotide
aacuucuuauucacauacu

SEQ ID NO: 2709785 - RNA, 19 nt, Artificial Sequence
  Description of Artificial Sequence: Synthetic oligonucleotide
caaucugcaccucuguaga

SEQ ID NO: 2709786 - RNA, 19 nt, Artificial Sequence
  Description of Artificial Sequence: Synthetic oligonucleotide
ugcagaggccuugacccgg

SEQ ID NO: 2709787 - RNA, 19 nt, Artificial Sequence
  Description of Artificial Sequence: Synthetic oligonucleotide
ccuguuuaagggcauuccg

SEQ ID NO: 2709788 - RNA, 19 nt, Artificial Sequence
  Description of Artificial Sequence: Synthetic oligonucleotide
aucuuguuucccaauacaa

SEQ ID NO: 2709789 - RNA, 19 nt, Artificial Sequence
  Description of Artificial Sequence: Synthetic oligonucleotide
ugacaagucugucgucaac

SEQ ID NO: 2709790 - RNA, 19 nt, Artificial Sequence
  Description of Artificial Sequence: Synthetic oligonucleotide
uggucucaaaguagggaau

SEQ ID NO: 2709791 - RNA, 19 nt, Artificial Sequence
  Description of Artificial Sequence: Synthetic oligonucleotide
ugaccuucagcaacacuuu

SEQ ID NO: 2709792 - RNA, 19 nt, Artificial Sequence
  Description of Artificial Sequence: Synthetic oligonucleotide
ucucuccagcugucaaggg

SEQ ID NO: 2709793 - RNA, 19 nt, Artificial Sequence
  Description of Artificial Sequence: Synthetic oligonucleotide
aggggcagucacaucaaac

SEQ ID NO: 2709794 - RNA, 19 nt, Artificial Sequence
  Description of Artificial Sequence: Synthetic oligonucleotide
gaauguguuaggggcaguc

SEQ ID NO: 2709795 - RNA, 19 nt, Artificial Sequence
  Description of Artificial Sequence: Synthetic oligonucleotide
ugucuguuuucaaggucaa

SEQ ID NO: 2709796 - RNA, 19 nt, Artificial Sequence
  Description of Artificial Sequence: Synthetic oligonucleotide
cuggaaccguucuugacca

SEQ ID NO: 2709797 - RNA, 19 nt, Artificial Sequence
  Description of Artificial Sequence: Synthetic oligonucleotide
caagccugugcccucuuug

SEQ ID NO: 2709798 - RNA, 19 nt, Artificial Sequence
  Description of Artificial Sequence: Synthetic oligonucleotide
uuaagggcauuccgagcaa

SEQ ID NO: 2709799 - RNA, 19 nt, Artificial Sequence
  Description of Artificial Sequence: Synthetic oligonucleotide
auacaacaaaaggaaaguu

SEQ ID NO: 2709800 - RNA, 19 nt, Artificial Sequence
  Description of Artificial Sequence: Synthetic oligonucleotide
acuaaacuucuuauucaca

SEQ ID NO: 2709801 - RNA, 19 nt, Artificial Sequence
  Description of Artificial Sequence: Synthetic oligonucleotide
ggggcagucacaucaaaca

SEQ ID NO: 2709802 - RNA, 19 nt, Artificial Sequence
  Description of Artificial Sequence: Synthetic oligonucleotide
uuccgagcaauugucugga

SEQ ID NO: 2709803 - RNA, 19 nt, Artificial Sequence
  Description of Artificial Sequence: Synthetic oligonucleotide
cugucgucaaccaucaccu

SEQ ID NO: 2709804 - RNA, 19 nt, Artificial Sequence
  Description of Artificial Sequence: Synthetic oligonucleotide
ggguuuugaauguguuagg

SEQ ID NO: 2709805 - RNA, 19 nt, Artificial Sequence
  Description of Artificial Sequence: Synthetic oligonucleotide
uuaggggcagucacaucaa

SEQ ID NO: 2709806 - RNA, 19 nt, Artificial Sequence
  Description of Artificial Sequence: Synthetic oligonucleotide
gacuggaaccguucuugac

SEQ ID NO: 2709807 - RNA, 19 nt, Artificial Sequence
  Description of Artificial Sequence: Synthetic oligonucleotide
cuguuuucaaggucaaucu

SEQ ID NO: 2709808 - RNA, 19 nt, Artificial Sequence
  Description of Artificial Sequence: Synthetic oligonucleotide
ggcuuggauaagaaacucg

SEQ ID NO: 2709809 - RNA, 19 nt, Artificial Sequence
  Description of Artificial Sequence: Synthetic oligonucleotide
gagggaugucuuuccaaca

SEQ ID NO: 2709810 - RNA, 19 nt, Artificial Sequence
  Description of Artificial Sequence: Synthetic oligonucleotide
ucugcuccuauuguggcuu

SEQ ID NO: 2709811 - RNA, 19 nt, Artificial Sequence
  Description of Artificial Sequence: Synthetic oligonucleotide
gggaauucauuguauagcu

SEQ ID NO: 2709812 - RNA, 19 nt, Artificial Sequence
  Description of Artificial Sequence: Synthetic oligonucleotide
guucagggaauucauugua

SEQ ID NO: 2709813 - RNA, 19 nt, Artificial Sequence
  Description of Artificial Sequence: Synthetic oligonucleotide
agacuggaaccguucuuga

SEQ ID NO: 2709814 - RNA, 19 nt, Artificial Sequence
  Description of Artificial Sequence: Synthetic oligonucleotide
gccugugcccucuuugugg

SEQ ID NO: 2709815 - RNA, 19 nt, Artificial Sequence
  Description of Artificial Sequence: Synthetic oligonucleotide
ggcagucacaucaaacacc

SEQ ID NO: 2709816 - RNA, 19 nt, Artificial Sequence
  Description of Artificial Sequence: Synthetic oligonucleotide
agggcauuccgagcaauug

SEQ ID NO: 2709817 - RNA, 19 nt, Artificial Sequence
  Description of Artificial Sequence: Synthetic oligonucleotide
uugacccggucauucuugu

SEQ ID NO: 2709818 - RNA, 19 nt, Artificial Sequence
  Description of Artificial Sequence: Synthetic oligonucleotide
agaggccuugacccgguca

SEQ ID NO: 2709819 - RNA, 19 nt, Artificial Sequence
  Description of Artificial Sequence: Synthetic oligonucleotide
uuccuguuuaagggcauuc

SEQ ID NO: 2709820 - RNA, 19 nt, Artificial Sequence
  Description of Artificial Sequence: Synthetic oligonucleotide
ccacuugucuguuuucaag

SEQ ID NO: 2709821 - RNA, 19 nt, Artificial Sequence
  Description of Artificial Sequence: Synthetic oligonucleotide
accuucagcaacacuuucu

SEQ ID NO: 2709822 - RNA, 19 nt, Artificial Sequence
  Description of Artificial Sequence: Synthetic oligonucleotide
acccggucauucuugucca

SEQ ID NO: 2709823 - RNA, 19 nt, Artificial Sequence
  Description of Artificial Sequence: Synthetic oligonucleotide
ucgucucuccagcugucaa

SEQ ID NO: 2709824 - RNA, 19 nt, Artificial Sequence
  Description of Artificial Sequence: Synthetic oligonucleotide
agucugucgucaaccauca

SEQ ID NO: 2709825 - RNA, 19 nt, Artificial Sequence
  Description of Artificial Sequence: Synthetic oligonucleotide
ggucucaaaguagggaaug

SEQ ID NO: 2709826 - RNA, 19 nt, Artificial Sequence
  Description of Artificial Sequence: Synthetic oligonucleotide
gaccuucagcaacacuuuc

SEQ ID NO: 2709827 - RNA, 19 nt, Artificial Sequence
  Description of Artificial Sequence: Synthetic oligonucleotide
cugcagaggccuugacccg

SEQ ID NO: 2709828 - RNA, 19 nt, Artificial Sequence
  Description of Artificial Sequence: Synthetic oligonucleotide
aaacaccagaacacagcaa

SEQ ID NO: 2709829 - RNA, 19 nt, Artificial Sequence
  Description of Artificial Sequence: Synthetic oligonucleotide
ggugacaagucugucguca

SEQ ID NO: 2709830 - RNA, 19 nt, Artificial Sequence
  Description of Artificial Sequence: Synthetic oligonucleotide
cagaucugcauggugacaa

SEQ ID NO: 2709831 - RNA, 19 nt, Artificial Sequence
  Description of Artificial Sequence: Synthetic oligonucleotide
guagaaggccacaccaaga

SEQ ID NO: 2709832 - RNA, 19 nt, Artificial Sequence
  Description of Artificial Sequence: Synthetic oligonucleotide
gggcagucacaucaaacac

SEQ ID NO: 2709833 - RNA, 19 nt, Artificial Sequence
  Description of Artificial Sequence: Synthetic oligonucleotide
gucaaggguuuugaaugug

SEQ ID NO: 2709834 - RNA, 19 nt, Artificial Sequence
  Description of Artificial Sequence: Synthetic oligonucleotide
cuggcuuggauaagaaacu

SEQ ID NO: 2709835 - RNA, 19 nt, Artificial Sequence
  Description of Artificial Sequence: Synthetic oligonucleotide
agccugugcccucuuugug

SEQ ID NO: 2709836 - RNA, 19 nt, Artificial Sequence
  Description of Artificial Sequence: Synthetic oligonucleotide
uggguucagggaauucauu

SEQ ID NO: 2709837 - RNA, 19 nt, Artificial Sequence
  Description of Artificial Sequence: Synthetic oligonucleotide
ggaugucuuuccaacacca

SEQ ID NO: 2709838 - RNA, 19 nt, Artificial Sequence
  Description of Artificial Sequence: Synthetic oligonucleotide
uauucacauacugguucau

SEQ ID NO: 2709839 - RNA, 19 nt, Artificial Sequence
  Description of Artificial Sequence: Synthetic oligonucleotide
uagcaccaagccugugccc

SEQ ID NO: 2709840 - RNA, 19 nt, Artificial Sequence
  Description of Artificial Sequence: Synthetic oligonucleotide
caugagggaugucuuucca

SEQ ID NO: 2709841 - RNA, 19 nt, Artificial Sequence
  Description of Artificial Sequence: Synthetic oligonucleotide
ggauaagaaacucgucucu

SEQ ID NO: 2709842 - RNA, 19 nt, Artificial Sequence
  Description of Artificial Sequence: Synthetic oligonucleotide
uaggggcagucacaucaaa

SEQ ID NO: 2709843 - RNA, 19 nt, Artificial Sequence
  Description of Artificial Sequence: Synthetic oligonucleotide
ggaaaguucucaggauccc

SEQ ID NO: 2709844 - RNA, 19 nt, Artificial Sequence
  Description of Artificial Sequence: Synthetic oligonucleotide
ccgagcaauugucuggaag

SEQ ID NO: 2709845 - RNA, 19 nt, Artificial Sequence
  Description of Artificial Sequence: Synthetic oligonucleotide
caacaacugcagcucucug

SEQ ID NO: 2709846 - RNA, 19 nt, Artificial Sequence
  Description of Artificial Sequence: Synthetic oligonucleotide
cuguagaaggccacaccaa

SEQ ID NO: 2709847 - RNA, 19 nt, Artificial Sequence
  Description of Artificial Sequence: Synthetic oligonucleotide
uguuaggggcagucacauc

SEQ ID NO: 2709848 - RNA, 19 nt, Artificial Sequence
  Description of Artificial Sequence: Synthetic oligonucleotide
uggcuuuguauugguuacu

SEQ ID NO: 2709849 - RNA, 19 nt, Artificial Sequence
  Description of Artificial Sequence: Synthetic oligonucleotide
ccugugcccucuuuguggc

SEQ ID NO: 2709850 - RNA, 19 nt, Artificial Sequence
  Description of Artificial Sequence: Synthetic oligonucleotide
auggguucagggaauucau

SEQ ID NO: 2709851 - RNA, 19 nt, Artificial Sequence
  Description of Artificial Sequence: Synthetic oligonucleotide
gaugaccuucagcaacacu

SEQ ID NO: 2709852 - RNA, 19 nt, Artificial Sequence
  Description of Artificial Sequence: Synthetic oligonucleotide
ggcauuccgagcaauuguc

SEQ ID NO: 2709853 - RNA, 19 nt, Artificial Sequence
  Description of Artificial Sequence: Synthetic oligonucleotide
ccuuggucagaaagucugc

SEQ ID NO: 2709854 - RNA, 19 nt, Artificial Sequence
  Description of Artificial Sequence: Synthetic oligonucleotide
uuuccuguuuaagggcauu

SEQ ID NO: 2709855 - RNA, 19 nt, Artificial Sequence
  Description of Artificial Sequence: Synthetic oligonucleotide
ugauggguucagggaauuc

SEQ ID NO: 2709856 - RNA, 19 nt, Artificial Sequence
  Description of Artificial Sequence: Synthetic oligonucleotide
gcuuggauaagaaacucgu

SEQ ID NO: 2709857 - RNA, 19 nt, Artificial Sequence
  Description of Artificial Sequence: Synthetic oligonucleotide
ugaauguguuaggggcagu

SEQ ID NO: 2709858 - RNA, 19 nt, Artificial Sequence
  Description of Artificial Sequence: Synthetic oligonucleotide
gaggccuugacccggucau

SEQ ID NO: 2709859 - RNA, 19 nt, Artificial Sequence
  Description of Artificial Sequence: Synthetic oligonucleotide
ugucgucaaccaucaccuc

SEQ ID NO: 2709860 - RNA, 19 nt, Artificial Sequence
  Description of Artificial Sequence: Synthetic oligonucleotide
ggaauucauuguauagcuc

SEQ ID NO: 2709861 - RNA, 19 nt, Artificial Sequence
  Description of Artificial Sequence: Synthetic oligonucleotide
ccuauuguggcuuuguauu

SEQ ID NO: 2709862 - RNA, 19 nt, Artificial Sequence
  Description of Artificial Sequence: Synthetic oligonucleotide
gguuacuaaacuucuuauu

SEQ ID NO: 2709863 - RNA, 19 nt, Artificial Sequence
  Description of Artificial Sequence: Synthetic oligonucleotide
ggccacaccaagagacugg

SEQ ID NO: 2709864 - RNA, 19 nt, Artificial Sequence
  Description of Artificial Sequence: Synthetic oligonucleotide
uggugacaagucugucguc

SEQ ID NO: 2709865 - RNA, 19 nt, Artificial Sequence
  Description of Artificial Sequence: Synthetic oligonucleotide
cagucacaucaaacaccag

SEQ ID NO: 2709866 - RNA, 19 nt, Artificial Sequence
  Description of Artificial Sequence: Synthetic oligonucleotide
gcugucaaggguuuugaau

SEQ ID NO: 2709867 - RNA, 19 nt, Artificial Sequence
  Description of Artificial Sequence: Synthetic oligonucleotide
ugcuccuauuguggcuuug

SEQ ID NO: 2709868 - RNA, 19 nt, Artificial Sequence
  Description of Artificial Sequence: Synthetic oligonucleotide
caaaguagggaauguuguu

SEQ ID NO: 2709869 - RNA, 19 nt, Artificial Sequence
  Description of Artificial Sequence: Synthetic oligonucleotide
acucgucucuccagcuguc

SEQ ID NO: 2709870 - RNA, 19 nt, Artificial Sequence
  Description of Artificial Sequence: Synthetic oligonucleotide
ugacccggucauucuuguc

SEQ ID NO: 2709871 - RNA, 19 nt, Artificial Sequence
  Description of Artificial Sequence: Synthetic oligonucleotide
cucuccagcugucaagggu

SEQ ID NO: 2709872 - RNA, 19 nt, Artificial Sequence
  Description of Artificial Sequence: Synthetic oligonucleotide
gucaaucuuguuucccaau

SEQ ID NO: 2709873 - RNA, 19 nt, Artificial Sequence
  Description of Artificial Sequence: Synthetic oligonucleotide
cugugcccucuuuguggcc

SEQ ID NO: 2709874 - RNA, 19 nt, Artificial Sequence
  Description of Artificial Sequence: Synthetic oligonucleotide
caaggguuuugaauguguu

SEQ ID NO: 2709875 - RNA, 19 nt, Artificial Sequence
  Description of Artificial Sequence: Synthetic oligonucleotide
uccgagcaauugucuggaa

SEQ ID NO: 2709876 - RNA, 19 nt, Artificial Sequence
  Description of Artificial Sequence: Synthetic oligonucleotide
uguggccacuugucuguuu

SEQ ID NO: 2709877 - RNA, 19 nt, Artificial Sequence
  Description of Artificial Sequence: Synthetic oligonucleotide
ccaguuugauggguucagg

SEQ ID NO: 2709878 - RNA, 19 nt, Artificial Sequence
  Description of Artificial Sequence: Synthetic oligonucleotide
gcuuuguauugguuacuaa

SEQ ID NO: 2709879 - RNA, 19 nt, Artificial Sequence
  Description of Artificial Sequence: Synthetic oligonucleotide
guauagcuccacuucuguu

SEQ ID NO: 2709880 - RNA, 19 nt, Artificial Sequence
  Description of Artificial Sequence: Synthetic oligonucleotide
guucaugagggaugucuuu

SEQ ID NO: 2709881 - RNA, 19 nt, Artificial Sequence
  Description of Artificial Sequence: Synthetic oligonucleotide
gucagaaagucugcuccua

SEQ ID NO: 2709882 - RNA, 19 nt, Artificial Sequence
  Description of Artificial Sequence: Synthetic oligonucleotide
ccagcugucaaggguuuug

SEQ ID NO: 2709883 - RNA, 19 nt, Artificial Sequence
  Description of Artificial Sequence: Synthetic oligonucleotide
ggucagaaagucugcuccu

SEQ ID NO: 2709884 - RNA, 19 nt, Artificial Sequence
  Description of Artificial Sequence: Synthetic oligonucleotide
cuccuauuguggcuuugua

SEQ ID NO: 2709885 - RNA, 19 nt, Artificial Sequence
  Description of Artificial Sequence: Synthetic oligonucleotide
cagcugucaaggguuuuga

SEQ ID NO: 2709886 - RNA, 19 nt, Artificial Sequence
  Description of Artificial Sequence: Synthetic oligonucleotide
ggcuuuguauugguuacua

SEQ ID NO: 2709887 - RNA, 19 nt, Artificial Sequence
  Description of Artificial Sequence: Synthetic oligonucleotide
gucugcuccuauuguggcu

SEQ ID NO: 2709888 - RNA, 19 nt, Artificial Sequence
  Description of Artificial Sequence: Synthetic oligonucleotide
gggcauuccgagcaauugu

SEQ ID NO: 2709889 - RNA, 19 nt, Artificial Sequence
  Description of Artificial Sequence: Synthetic oligonucleotide
guguuaggggcagucacau

SEQ ID NO: 2709890 - RNA, 19 nt, Artificial Sequence
  Description of Artificial Sequence: Synthetic oligonucleotide
ggggcuggcuuggauaaga

SEQ ID NO: 2709891 - RNA, 19 nt, Artificial Sequence
  Description of Artificial Sequence: Synthetic oligonucleotide
cagaaagucugcuccuauu

SEQ ID NO: 2709892 - RNA, 19 nt, Artificial Sequence
  Description of Artificial Sequence: Synthetic oligonucleotide
ggccuugacccggucauuc

SEQ ID NO: 2709893 - RNA, 19 nt, Artificial Sequence
  Description of Artificial Sequence: Synthetic oligonucleotide
cuuguccaguuugaugggu

SEQ ID NO: 2709894 - RNA, 19 nt, Artificial Sequence
  Description of Artificial Sequence: Synthetic oligonucleotide
gugcccucuuuguggccac

SEQ ID NO: 2709895 - RNA, 19 nt, Artificial Sequence
  Description of Artificial Sequence: Synthetic oligonucleotide
uccagcugucaaggguuuu

SEQ ID NO: 2709896 - RNA, 19 nt, Artificial Sequence
  Description of Artificial Sequence: Synthetic oligonucleotide
gccacuugucuguuuucaa

SEQ ID NO: 2709897 - RNA, 19 nt, Artificial Sequence
  Description of Artificial Sequence: Synthetic oligonucleotide
caagucugucgucaaccau

SEQ ID NO: 2709898 - RNA, 19 nt, Artificial Sequence
  Description of Artificial Sequence: Synthetic oligonucleotide
gucugucgucaaccaucac

SEQ ID NO: 2709899 - RNA, 19 nt, Artificial Sequence
  Description of Artificial Sequence: Synthetic oligonucleotide
cucgucucuccagcuguca

SEQ ID NO: 2709900 - RNA, 19 nt, Artificial Sequence
  Description of Artificial Sequence: Synthetic oligonucleotide
cccucuuuguggccacuug

SEQ ID NO: 2709901 - RNA, 19 nt, Artificial Sequence
  Description of Artificial Sequence: Synthetic oligonucleotide
uuguggccacuugucuguu

SEQ ID NO: 2709902 - RNA, 19 nt, Artificial Sequence
  Description of Artificial Sequence: Synthetic oligonucleotide
cuguagcaccaagccugug

SEQ ID NO: 2709903 - RNA, 19 nt, Artificial Sequence
  Description of Artificial Sequence: Synthetic oligonucleotide
guuuccuguuuaagggcau

SEQ ID NO: 2709904 - RNA, 19 nt, Artificial Sequence
  Description of Artificial Sequence: Synthetic oligonucleotide
gguucaugagggaugucuu

SEQ ID NO: 2709905 - RNA, 19 nt, Artificial Sequence
  Description of Artificial Sequence: Synthetic oligonucleotide
gcuccacauugauggcuuc

SEQ ID NO: 2709906 - RNA, 19 nt, Artificial Sequence
  Description of Artificial Sequence: Synthetic oligonucleotide
accaagccugugcccucuu

SEQ ID NO: 2709907 - RNA, 19 nt, Artificial Sequence
  Description of Artificial Sequence: Synthetic oligonucleotide
ccucuuuguggccacuugu

SEQ ID NO: 2709908 - RNA, 19 nt, Artificial Sequence
  Description of Artificial Sequence: Synthetic oligonucleotide
cugguucaugagggauguc

SEQ ID NO: 2709909 - RNA, 19 nt, Artificial Sequence
  Description of Artificial Sequence: Synthetic oligonucleotide
gcauuccgagcaauugucu

SEQ ID NO: 2709910 - RNA, 19 nt, Artificial Sequence
  Description of Artificial Sequence: Synthetic oligonucleotide
cccggucauucuuguccag

SEQ ID NO: 2709911 - RNA, 19 nt, Artificial Sequence
  Description of Artificial Sequence: Synthetic oligonucleotide
caccagaaucucccaggau

SEQ ID NO: 2709912 - RNA, 19 nt, Artificial Sequence
  Description of Artificial Sequence: Synthetic oligonucleotide
aggccuugacccggucauu

SEQ ID NO: 2709913 - RNA, 19 nt, Artificial Sequence
  Description of Artificial Sequence: Synthetic oligonucleotide
gccuugacccggucauucu

SEQ ID NO: 2709914 - RNA, 19 nt, Artificial Sequence
  Description of Artificial Sequence: Synthetic oligonucleotide
cagaaucucccaggaugau

SEQ ID NO: 2709915 - RNA, 19 nt, Artificial Sequence
  Description of Artificial Sequence: Synthetic oligonucleotide
cugcuccuauuguggcuuu

SEQ ID NO: 2709916 - RNA, 19 nt, Artificial Sequence
  Description of Artificial Sequence: Synthetic oligonucleotide
cucccaggaugaugaccuu

SEQ ID NO: 2709917 - RNA, 19 nt, Artificial Sequence
  Description of Artificial Sequence: Synthetic oligonucleotide
ccggucauucuuguccagu

SEQ ID NO: 2709918 - RNA, 19 nt, Artificial Sequence
  Description of Artificial Sequence: Synthetic oligonucleotide
cggucauucuuguccaguu

SEQ ID NO: 2709919 - RNA, 19 nt, Artificial Sequence
  Description of Artificial Sequence: Synthetic oligonucleotide
gcagaggccuugacccggu

SEQ ID NO: 2709920 - RNA, 19 nt, Artificial Sequence
  Description of Artificial Sequence: Synthetic oligonucleotide
gcccucuuuguggccacuu

SEQ ID NO: 2709921 - RNA, 19 nt, Artificial Sequence
  Description of Artificial Sequence: Synthetic oligonucleotide
cgucaaccaucaccuccuu

SEQ ID NO: 2709922 - RNA, 19 nt, Artificial Sequence
  Description of Artificial Sequence: Synthetic oligonucleotide
aaaauaaauguuuugacug

SEQ ID NO: 2709923 - RNA, 19 nt, Artificial Sequence
  Description of Artificial Sequence: Synthetic oligonucleotide
aaacauauagcacaauuac

SEQ ID NO: 2709924 - RNA, 19 nt, Artificial Sequence
  Description of Artificial Sequence: Synthetic oligonucleotide
acagaaugaaauuauauac

SEQ ID NO: 2709925 - RNA, 19 nt, Artificial Sequence
  Description of Artificial Sequence: Synthetic oligonucleotide
uguucaaagacaaacaugu

SEQ ID NO: 2709926 - RNA, 19 nt, Artificial Sequence
  Description of Artificial Sequence: Synthetic oligonucleotide
ugaaauuauauacacaaac

SEQ ID NO: 2709927 - RNA, 19 nt, Artificial Sequence
  Description of Artificial Sequence: Synthetic oligonucleotide
aaucaaauguaccauaugu

SEQ ID NO: 2709928 - RNA, 19 nt, Artificial Sequence
  Description of Artificial Sequence: Synthetic oligonucleotide
uuauauaucaauauacagu

SEQ ID NO: 2709929 - RNA, 19 nt, Artificial Sequence
  Description of Artificial Sequence: Synthetic oligonucleotide
uauauaucaauauacaguc

SEQ ID NO: 2709930 - RNA, 19 nt, Artificial Sequence
  Description of Artificial Sequence: Synthetic oligonucleotide
agaaugaaauuauauacac

SEQ ID NO: 2709931 - RNA, 19 nt, Artificial Sequence
  Description of Artificial Sequence: Synthetic oligonucleotide
aaaauuuguaucuguuuac

SEQ ID NO: 2709932 - RNA, 19 nt, Artificial Sequence
  Description of Artificial Sequence: Synthetic oligonucleotide
aaauaaaacgcaucaaaca

SEQ ID NO: 2709933 - RNA, 19 nt, Artificial Sequence
  Description of Artificial Sequence: Synthetic oligonucleotide
uaaauuugccagaacaagg

SEQ ID NO: 2709934 - RNA, 19 nt, Artificial Sequence
  Description of Artificial Sequence: Synthetic oligonucleotide
aagaaaacuacauauguaa

SEQ ID NO: 2709935 - RNA, 19 nt, Artificial Sequence
  Description of Artificial Sequence: Synthetic oligonucleotide
ugaauuauggucuucugag

SEQ ID NO: 2709936 - RNA, 19 nt, Artificial Sequence
  Description of Artificial Sequence: Synthetic oligonucleotide
uauacacaaacauauagca

SEQ ID NO: 2709937 - RNA, 19 nt, Artificial Sequence
  Description of Artificial Sequence: Synthetic oligonucleotide
uacacaaacauauagcaca

SEQ ID NO: 2709938 - RNA, 19 nt, Artificial Sequence
  Description of Artificial Sequence: Synthetic oligonucleotide
aaaucuucccaguacauca

SEQ ID NO: 2709939 - RNA, 19 nt, Artificial Sequence
  Description of Artificial Sequence: Synthetic oligonucleotide
aagcuuaauucccuguacc

SEQ ID NO: 2709940 - RNA, 19 nt, Artificial Sequence
  Description of Artificial Sequence: Synthetic oligonucleotide
aacaauacuggguagugug

SEQ ID NO: 2709941 - RNA, 19 nt, Artificial Sequence
  Description of Artificial Sequence: Synthetic oligonucleotide
uucaaagacaaacauguga

SEQ ID NO: 2709942 - RNA, 19 nt, Artificial Sequence
  Description of Artificial Sequence: Synthetic oligonucleotide
uauaucaauauacagucuc

SEQ ID NO: 2709943 - RNA, 19 nt, Artificial Sequence
  Description of Artificial Sequence: Synthetic oligonucleotide
aaagacaaacaugugacag

SEQ ID NO: 2709944 - RNA, 19 nt, Artificial Sequence
  Description of Artificial Sequence: Synthetic oligonucleotide
uuacaaauggguuaaauuu

SEQ ID NO: 2709945 - RNA, 19 nt, Artificial Sequence
  Description of Artificial Sequence: Synthetic oligonucleotide
augaaaaucaaauguacca

SEQ ID NO: 2709946 - RNA, 19 nt, Artificial Sequence
  Description of Artificial Sequence: Synthetic oligonucleotide
aaauaaaauuuguaucugu

SEQ ID NO: 2709947 - RNA, 19 nt, Artificial Sequence
  Description of Artificial Sequence: Synthetic oligonucleotide
auauacacaaacauauagc

SEQ ID NO: 2709948 - RNA, 19 nt, Artificial Sequence
  Description of Artificial Sequence: Synthetic oligonucleotide
gacagauacauacauacac

SEQ ID NO: 2709949 - RNA, 19 nt, Artificial Sequence
  Description of Artificial Sequence: Synthetic oligonucleotide
aaacgcaucaaacaauacu

SEQ ID NO: 2709950 - RNA, 19 nt, Artificial Sequence
  Description of Artificial Sequence: Synthetic oligonucleotide
auacacauggauuuuguag

SEQ ID NO: 2709951 - RNA, 19 nt, Artificial Sequence
  Description of Artificial Sequence: Synthetic oligonucleotide
aaugccaggaacaacauga

SEQ ID NO: 2709952 - RNA, 19 nt, Artificial Sequence
  Description of Artificial Sequence: Synthetic oligonucleotide
acuaucuccaaauggacag

SEQ ID NO: 2709953 - RNA, 19 nt, Artificial Sequence
  Description of Artificial Sequence: Synthetic oligonucleotide
uugacuaucuccaaaugga

SEQ ID NO: 2709954 - RNA, 19 nt, Artificial Sequence
  Description of Artificial Sequence: Synthetic oligonucleotide
cacaauuacaguuuccugc

SEQ ID NO: 2709955 - RNA, 19 nt, Artificial Sequence
  Description of Artificial Sequence: Synthetic oligonucleotide
uacacauggauuuuguagc

SEQ ID NO: 2709956 - RNA, 19 nt, Artificial Sequence
  Description of Artificial Sequence: Synthetic oligonucleotide
aaauaaauguuuugacugu

SEQ ID NO: 2709957 - RNA, 19 nt, Artificial Sequence
  Description of Artificial Sequence: Synthetic oligonucleotide
uccacaugaauuauggucu

SEQ ID NO: 2709958 - RNA, 19 nt, Artificial Sequence
  Description of Artificial Sequence: Synthetic oligonucleotide
uggacagauacauacauac

SEQ ID NO: 2709959 - RNA, 19 nt, Artificial Sequence
  Description of Artificial Sequence: Synthetic oligonucleotide
aagagggaaagccuuguuc

SEQ ID NO: 2709960 - RNA, 19 nt, Artificial Sequence
  Description of Artificial Sequence: Synthetic oligonucleotide
aacaugugacagaaaaugc

SEQ ID NO: 2709961 - RNA, 19 nt, Artificial Sequence
  Description of Artificial Sequence: Synthetic oligonucleotide
aaauggguuaaauuugcca

SEQ ID NO: 2709962 - RNA, 19 nt, Artificial Sequence
  Description of Artificial Sequence: Synthetic oligonucleotide
acauauagcacaauuacag

SEQ ID NO: 2709963 - RNA, 19 nt, Artificial Sequence
  Description of Artificial Sequence: Synthetic oligonucleotide
caaauaaaacgcaucaaac

SEQ ID NO: 2709964 - RNA, 19 nt, Artificial Sequence
  Description of Artificial Sequence: Synthetic oligonucleotide
aacgcaucaaacaauacug

SEQ ID NO: 2709965 - RNA, 19 nt, Artificial Sequence
  Description of Artificial Sequence: Synthetic oligonucleotide
uguuguauugcucuugacu

SEQ ID NO: 2709966 - RNA, 19 nt, Artificial Sequence
  Description of Artificial Sequence: Synthetic oligonucleotide
aauuauggucuucugagaa

SEQ ID NO: 2709967 - RNA, 19 nt, Artificial Sequence
  Description of Artificial Sequence: Synthetic oligonucleotide
uuuguaucuguuuacaaau

SEQ ID NO: 2709968 - RNA, 19 nt, Artificial Sequence
  Description of Artificial Sequence: Synthetic oligonucleotide
uuaaauuugccagaacaag

SEQ ID NO: 2709969 - RNA, 19 nt, Artificial Sequence
  Description of Artificial Sequence: Synthetic oligonucleotide
acaaacaugugacagaaaa

SEQ ID NO: 2709970 - RNA, 19 nt, Artificial Sequence
  Description of Artificial Sequence: Synthetic oligonucleotide
uaaaugauauaagaaauaa

SEQ ID NO: 2709971 - RNA, 19 nt, Artificial Sequence
  Description of Artificial Sequence: Synthetic oligonucleotide
cuugacuaucuccaaaugg

SEQ ID NO: 2709972 - RNA, 19 nt, Artificial Sequence
  Description of Artificial Sequence: Synthetic oligonucleotide
agaacggaagacaagaggg

SEQ ID NO: 2709973 - RNA, 19 nt, Artificial Sequence
  Description of Artificial Sequence: Synthetic oligonucleotide
agcuuaauucccuguaccc

SEQ ID NO: 2709974 - RNA, 19 nt, Artificial Sequence
  Description of Artificial Sequence: Synthetic oligonucleotide
aauggacagauacauacau

SEQ ID NO: 2709975 - RNA, 19 nt, Artificial Sequence
  Description of Artificial Sequence: Synthetic oligonucleotide
ugugaaggaagaaaacuac

SEQ ID NO: 2709976 - RNA, 19 nt, Artificial Sequence
  Description of Artificial Sequence: Synthetic oligonucleotide
uuuucaaauaaaacgcauc

SEQ ID NO: 2709977 - RNA, 19 nt, Artificial Sequence
  Description of Artificial Sequence: Synthetic oligonucleotide
gaaaaugccaggaacaaca

SEQ ID NO: 2709978 - RNA, 19 nt, Artificial Sequence
  Description of Artificial Sequence: Synthetic oligonucleotide
aaaucugcccugcagcuug

SEQ ID NO: 2709979 - RNA, 19 nt, Artificial Sequence
  Description of Artificial Sequence: Synthetic oligonucleotide
ugugcaaacccuaacccug

SEQ ID NO: 2709980 - RNA, 19 nt, Artificial Sequence
  Description of Artificial Sequence: Synthetic oligonucleotide
gagaacggaagacaagagg

SEQ ID NO: 2709981 - RNA, 19 nt, Artificial Sequence
  Description of Artificial Sequence: Synthetic oligonucleotide
acaugugacagaaaaugcc

SEQ ID NO: 2709982 - RNA, 19 nt, Artificial Sequence
  Description of Artificial Sequence: Synthetic oligonucleotide
aaaaucuucccaguacauc

SEQ ID NO: 2709983 - RNA, 19 nt, Artificial Sequence
  Description of Artificial Sequence: Synthetic oligonucleotide
uuuacaaauggguuaaauu

SEQ ID NO: 2709984 - RNA, 19 nt, Artificial Sequence
  Description of Artificial Sequence: Synthetic oligonucleotide
uacagaaugaaauuauaua

SEQ ID NO: 2709985 - RNA, 19 nt, Artificial Sequence
  Description of Artificial Sequence: Synthetic oligonucleotide
uaaaacgcaucaaacaaua

SEQ ID NO: 2709986 - RNA, 19 nt, Artificial Sequence
  Description of Artificial Sequence: Synthetic oligonucleotide
ugugacagaaaaugccagg

SEQ ID NO: 2709987 - RNA, 19 nt, Artificial Sequence
  Description of Artificial Sequence: Synthetic oligonucleotide
ucaauauacagucucugua

SEQ ID NO: 2709988 - RNA, 19 nt, Artificial Sequence
  Description of Artificial Sequence: Synthetic oligonucleotide
acaaauggguuaaauuugc

SEQ ID NO: 2709989 - RNA, 19 nt, Artificial Sequence
  Description of Artificial Sequence: Synthetic oligonucleotide
aaaauggccacgcgaaaga

SEQ ID NO: 2709990 - RNA, 19 nt, Artificial Sequence
  Description of Artificial Sequence: Synthetic oligonucleotide
gacagaaaaugccaggaac

SEQ ID NO: 2709991 - RNA, 19 nt, Artificial Sequence
  Description of Artificial Sequence: Synthetic oligonucleotide
gaaaacuacauauguaaaa

SEQ ID NO: 2709992 - RNA, 19 nt, Artificial Sequence
  Description of Artificial Sequence: Synthetic oligonucleotide
uaugcaugagaacggaaga

SEQ ID NO: 2709993 - RNA, 19 nt, Artificial Sequence
  Description of Artificial Sequence: Synthetic oligonucleotide
uacucugcaaaucugcccu

SEQ ID NO: 2709994 - RNA, 19 nt, Artificial Sequence
  Description of Artificial Sequence: Synthetic oligonucleotide
acacauggauuuuguagcc

SEQ ID NO: 2709995 - RNA, 19 nt, Artificial Sequence
  Description of Artificial Sequence: Synthetic oligonucleotide
caaaccaccuuauaaauga

SEQ ID NO: 2709996 - RNA, 19 nt, Artificial Sequence
  Description of Artificial Sequence: Synthetic oligonucleotide
ucaaaccaccuuauaaaug

SEQ ID NO: 2709997 - RNA, 19 nt, Artificial Sequence
  Description of Artificial Sequence: Synthetic oligonucleotide
aauauacagucucuguaau

SEQ ID NO: 2709998 - RNA, 19 nt, Artificial Sequence
  Description of Artificial Sequence: Synthetic oligonucleotide
gaauuaugcaugagaacgg

SEQ ID NO: 2709999 - RNA, 19 nt, Artificial Sequence
  Description of Artificial Sequence: Synthetic oligonucleotide
aaauuugccagaacaaggu

SEQ ID NO: 2710000 - RNA, 19 nt, Artificial Sequence
  Description of Artificial Sequence: Synthetic oligonucleotide
aguacaucaaaccaccuua

SEQ ID NO: 2710001 - RNA, 19 nt, Artificial Sequence
  Description of Artificial Sequence: Synthetic oligonucleotide
uauagcacaauuacaguuu

SEQ ID NO: 2710002 - RNA, 19 nt, Artificial Sequence
  Description of Artificial Sequence: Synthetic oligonucleotide
aagacaaacaugugacaga

SEQ ID NO: 2710003 - RNA, 19 nt, Artificial Sequence
  Description of Artificial Sequence: Synthetic oligonucleotide
aacccuaacccugaaaaug

SEQ ID NO: 2710004 - RNA, 19 nt, Artificial Sequence
  Description of Artificial Sequence: Synthetic oligonucleotide
aaauuuguaucuguuuaca

SEQ ID NO: 2710005 - RNA, 19 nt, Artificial Sequence
  Description of Artificial Sequence: Synthetic oligonucleotide
acaauuacaguuuccugca

SEQ ID NO: 2710006 - RNA, 19 nt, Artificial Sequence
  Description of Artificial Sequence: Synthetic oligonucleotide
auuacaguuuccugcacug

SEQ ID NO: 2710007 - RNA, 19 nt, Artificial Sequence
  Description of Artificial Sequence: Synthetic oligonucleotide
uuugccagaacaagguacu

SEQ ID NO: 2710008 - RNA, 19 nt, Artificial Sequence
  Description of Artificial Sequence: Synthetic oligonucleotide
gaaagccuuguucaaagac

SEQ ID NO: 2710009 - RNA, 19 nt, Artificial Sequence
  Description of Artificial Sequence: Synthetic oligonucleotide
auauagcacaauuacaguu

SEQ ID NO: 2710010 - RNA, 19 nt, Artificial Sequence
  Description of Artificial Sequence: Synthetic oligonucleotide
gguuaaauuugccagaaca

SEQ ID NO: 2710011 - RNA, 19 nt, Artificial Sequence
  Description of Artificial Sequence: Synthetic oligonucleotide
ugaaaaguucauuuauuau

SEQ ID NO: 2710012 - RNA, 19 nt, Artificial Sequence
  Description of Artificial Sequence: Synthetic oligonucleotide
uguguguagucuuuggcac

SEQ ID NO: 2710013 - RNA, 19 nt, Artificial Sequence
  Description of Artificial Sequence: Synthetic oligonucleotide
ccauaugucaacauucugg

SEQ ID NO: 2710014 - RNA, 19 nt, Artificial Sequence
  Description of Artificial Sequence: Synthetic oligonucleotide
uuuguagcccacaagcuua

SEQ ID NO: 2710015 - RNA, 19 nt, Artificial Sequence
  Description of Artificial Sequence: Synthetic oligonucleotide
uacagucucuguaauaaaa

SEQ ID NO: 2710016 - RNA, 19 nt, Artificial Sequence
  Description of Artificial Sequence: Synthetic oligonucleotide
agcccacaagcuuaauucc

SEQ ID NO: 2710017 - RNA, 19 nt, Artificial Sequence
  Description of Artificial Sequence: Synthetic oligonucleotide
uguaccauaugucaacauu

SEQ ID NO: 2710018 - RNA, 19 nt, Artificial Sequence
  Description of Artificial Sequence: Synthetic oligonucleotide
uagcccacaagcuuaauuc

SEQ ID NO: 2710019 - RNA, 19 nt, Artificial Sequence
  Description of Artificial Sequence: Synthetic oligonucleotide
guaucuguuuacaaauggg

SEQ ID NO: 2710020 - RNA, 19 nt, Artificial Sequence
  Description of Artificial Sequence: Synthetic oligonucleotide
uucauuuauuauauaucaa

SEQ ID NO: 2710021 - RNA, 19 nt, Artificial Sequence
  Description of Artificial Sequence: Synthetic oligonucleotide
augaauuauggucuucuga

SEQ ID NO: 2710022 - RNA, 19 nt, Artificial Sequence
  Description of Artificial Sequence: Synthetic oligonucleotide
cauucuggcaacuacagaa

SEQ ID NO: 2710023 - RNA, 19 nt, Artificial Sequence
  Description of Artificial Sequence: Synthetic oligonucleotide
aacauucuggcaacuacag

SEQ ID NO: 2710024 - RNA, 19 nt, Artificial Sequence
  Description of Artificial Sequence: Synthetic oligonucleotide
ucuggcaacuacagaauga

SEQ ID NO: 2710025 - RNA, 19 nt, Artificial Sequence
  Description of Artificial Sequence: Synthetic oligonucleotide
ugaaaaucaaauguaccau

SEQ ID NO: 2710026 - RNA, 19 nt, Artificial Sequence
  Description of Artificial Sequence: Synthetic oligonucleotide
aaagaauggugcugugugu

SEQ ID NO: 2710027 - RNA, 19 nt, Artificial Sequence
  Description of Artificial Sequence: Synthetic oligonucleotide
aacauauagcacaauuaca

SEQ ID NO: 2710028 - RNA, 19 nt, Artificial Sequence
  Description of Artificial Sequence: Synthetic oligonucleotide
uccaaauggacagauacau

SEQ ID NO: 2710029 - RNA, 19 nt, Artificial Sequence
  Description of Artificial Sequence: Synthetic oligonucleotide
aauacuggguagugugucu

SEQ ID NO: 2710030 - RNA, 19 nt, Artificial Sequence
  Description of Artificial Sequence: Synthetic oligonucleotide
ugagaacggaagacaagag

SEQ ID NO: 2710031 - RNA, 19 nt, Artificial Sequence
  Description of Artificial Sequence: Synthetic oligonucleotide
guuguauugcucuugacua

SEQ ID NO: 2710032 - RNA, 19 nt, Artificial Sequence
  Description of Artificial Sequence: Synthetic oligonucleotide
uuguaucuguuuacaaaug

SEQ ID NO: 2710033 - RNA, 19 nt, Artificial Sequence
  Description of Artificial Sequence: Synthetic oligonucleotide
aauuaugcaugagaacgga

SEQ ID NO: 2710034 - RNA, 19 nt, Artificial Sequence
  Description of Artificial Sequence: Synthetic oligonucleotide
uaucaauauacagucucug

SEQ ID NO: 2710035 - RNA, 19 nt, Artificial Sequence
  Description of Artificial Sequence: Synthetic oligonucleotide
aacaagguacucugcaaau

SEQ ID NO: 2710036 - RNA, 19 nt, Artificial Sequence
  Description of Artificial Sequence: Synthetic oligonucleotide
aaaacgcaucaaacaauac

SEQ ID NO: 2710037 - RNA, 19 nt, Artificial Sequence
  Description of Artificial Sequence: Synthetic oligonucleotide
uuuuguagcccacaagcuu

SEQ ID NO: 2710038 - RNA, 19 nt, Artificial Sequence
  Description of Artificial Sequence: Synthetic oligonucleotide
acugugaaggaagaaaacu

SEQ ID NO: 2710039 - RNA, 19 nt, Artificial Sequence
  Description of Artificial Sequence: Synthetic oligonucleotide
aucaauauacagucucugu

SEQ ID NO: 2710040 - RNA, 19 nt, Artificial Sequence
  Description of Artificial Sequence: Synthetic oligonucleotide
aaaugauauaagaaauaaa

SEQ ID NO: 2710041 - RNA, 19 nt, Artificial Sequence
  Description of Artificial Sequence: Synthetic oligonucleotide
gucuccacaugaauuaugg

SEQ ID NO: 2710042 - RNA, 19 nt, Artificial Sequence
  Description of Artificial Sequence: Synthetic oligonucleotide
ucuugacuaucuccaaaug

SEQ ID NO: 2710043 - RNA, 19 nt, Artificial Sequence
  Description of Artificial Sequence: Synthetic oligonucleotide
ucaaacaauacuggguagu

SEQ ID NO: 2710044 - RNA, 19 nt, Artificial Sequence
  Description of Artificial Sequence: Synthetic oligonucleotide
uaccauaugucaacauucu

SEQ ID NO: 2710045 - RNA, 19 nt, Artificial Sequence
  Description of Artificial Sequence: Synthetic oligonucleotide
ugacuaucuccaaauggac

SEQ ID NO: 2710046 - RNA, 19 nt, Artificial Sequence
  Description of Artificial Sequence: Synthetic oligonucleotide
gaaaaucaaauguaccaua

SEQ ID NO: 2710047 - RNA, 19 nt, Artificial Sequence
  Description of Artificial Sequence: Synthetic oligonucleotide
augagaacggaagacaaga

SEQ ID NO: 2710048 - RNA, 19 nt, Artificial Sequence
  Description of Artificial Sequence: Synthetic oligonucleotide
uucccuguacccaaccuga

SEQ ID NO: 2710049 - RNA, 19 nt, Artificial Sequence
  Description of Artificial Sequence: Synthetic oligonucleotide
aucaaacaauacuggguag

SEQ ID NO: 2710050 - RNA, 19 nt, Artificial Sequence
  Description of Artificial Sequence: Synthetic oligonucleotide
ucccaguacaucaaaccac

SEQ ID NO: 2710051 - RNA, 19 nt, Artificial Sequence
  Description of Artificial Sequence: Synthetic oligonucleotide
cuaacccugaaaauggcca

SEQ ID NO: 2710052 - RNA, 19 nt, Artificial Sequence
  Description of Artificial Sequence: Synthetic oligonucleotide
aacuacagaaugaaauuau

SEQ ID NO: 2710053 - RNA, 19 nt, Artificial Sequence
  Description of Artificial Sequence: Synthetic oligonucleotide
uggucuucugagaauuaug

SEQ ID NO: 2710054 - RNA, 19 nt, Artificial Sequence
  Description of Artificial Sequence: Synthetic oligonucleotide
agaaaaugccaggaacaac

SEQ ID NO: 2710055 - RNA, 19 nt, Artificial Sequence
  Description of Artificial Sequence: Synthetic oligonucleotide
agcacaauuacaguuuccu

SEQ ID NO: 2710056 - RNA, 19 nt, Artificial Sequence
  Description of Artificial Sequence: Synthetic oligonucleotide
uacaguuuccugcacugaa

SEQ ID NO: 2710057 - RNA, 19 nt, Artificial Sequence
  Description of Artificial Sequence: Synthetic oligonucleotide
acagaaaaugccaggaaca

SEQ ID NO: 2710058 - RNA, 19 nt, Artificial Sequence
  Description of Artificial Sequence: Synthetic oligonucleotide
ugcaugagaacggaagaca

SEQ ID NO: 2710059 - RNA, 19 nt, Artificial Sequence
  Description of Artificial Sequence: Synthetic oligonucleotide
aauuugccagaacaaggua

SEQ ID NO: 2710060 - RNA, 19 nt, Artificial Sequence
  Description of Artificial Sequence: Synthetic oligonucleotide
uugugcaaacccuaacccu

SEQ ID NO: 2710061 - RNA, 19 nt, Artificial Sequence
  Description of Artificial Sequence: Synthetic oligonucleotide
auucccuguacccaaccug

SEQ ID NO: 2710062 - RNA, 19 nt, Artificial Sequence
  Description of Artificial Sequence: Synthetic oligonucleotide
uucugagaauuaugcauga

SEQ ID NO: 2710063 - RNA, 19 nt, Artificial Sequence
  Description of Artificial Sequence: Synthetic oligonucleotide
caaauggguuaaauuugcc

SEQ ID NO: 2710064 - RNA, 19 nt, Artificial Sequence
  Description of Artificial Sequence: Synthetic oligonucleotide
aaacccuaacccugaaaau

SEQ ID NO: 2710065 - RNA, 19 nt, Artificial Sequence
  Description of Artificial Sequence: Synthetic oligonucleotide
caaacauauagcacaauua

SEQ ID NO: 2710066 - RNA, 19 nt, Artificial Sequence
  Description of Artificial Sequence: Synthetic oligonucleotide
ugcagcuugugcaaacccu

SEQ ID NO: 2710067 - RNA, 19 nt, Artificial Sequence
  Description of Artificial Sequence: Synthetic oligonucleotide
augcaugagaacggaagac

SEQ ID NO: 2710068 - RNA, 19 nt, Artificial Sequence
  Description of Artificial Sequence: Synthetic oligonucleotide
guaccauaugucaacauuc

SEQ ID NO: 2710069 - RNA, 19 nt, Artificial Sequence
  Description of Artificial Sequence: Synthetic oligonucleotide
aaauggacagauacauaca

SEQ ID NO: 2710070 - RNA, 19 nt, Artificial Sequence
  Description of Artificial Sequence: Synthetic oligonucleotide
ugucuccacaugaauuaug

SEQ ID NO: 2710071 - RNA, 19 nt, Artificial Sequence
  Description of Artificial Sequence: Synthetic oligonucleotide
uacauacacauggauuuug

SEQ ID NO: 2710072 - RNA, 19 nt, Artificial Sequence
  Description of Artificial Sequence: Synthetic oligonucleotide
acccuaacccugaaaaugg

SEQ ID NO: 2710073 - RNA, 19 nt, Artificial Sequence
  Description of Artificial Sequence: Synthetic oligonucleotide
acaugaauuauggucuucu

SEQ ID NO: 2710074 - RNA, 19 nt, Artificial Sequence
  Description of Artificial Sequence: Synthetic oligonucleotide
uaauucccuguacccaacc

SEQ ID NO: 2710075 - RNA, 19 nt, Artificial Sequence
  Description of Artificial Sequence: Synthetic oligonucleotide
caugagaacggaagacaag

SEQ ID NO: 2710076 - RNA, 19 nt, Artificial Sequence
  Description of Artificial Sequence: Synthetic oligonucleotide
ugcuguguguagucuuugg

SEQ ID NO: 2710077 - RNA, 19 nt, Artificial Sequence
  Description of Artificial Sequence: Synthetic oligonucleotide
gaauuauggucuucugaga

SEQ ID NO: 2710078 - RNA, 19 nt, Artificial Sequence
  Description of Artificial Sequence: Synthetic oligonucleotide
ccuuauaaaugauauaaga

SEQ ID NO: 2710079 - RNA, 19 nt, Artificial Sequence
  Description of Artificial Sequence: Synthetic oligonucleotide
agcuugugcaaacccuaac

SEQ ID NO: 2710080 - RNA, 19 nt, Artificial Sequence
  Description of Artificial Sequence: Synthetic oligonucleotide
auaaaugauauaagaaaua

SEQ ID NO: 2710081 - RNA, 19 nt, Artificial Sequence
  Description of Artificial Sequence: Synthetic oligonucleotide
agaauggugcuguguguag

SEQ ID NO: 2710082 - RNA, 19 nt, Artificial Sequence
  Description of Artificial Sequence: Synthetic oligonucleotide
ugacagaaaaugccaggaa

SEQ ID NO: 2710083 - RNA, 19 nt, Artificial Sequence
  Description of Artificial Sequence: Synthetic oligonucleotide
auggguuaaauuugccaga

SEQ ID NO: 2710084 - RNA, 19 nt, Artificial Sequence
  Description of Artificial Sequence: Synthetic oligonucleotide
guuaaauuugccagaacaa

SEQ ID NO: 2710085 - RNA, 19 nt, Artificial Sequence
  Description of Artificial Sequence: Synthetic oligonucleotide
acagauacauacauacaca

SEQ ID NO: 2710086 - RNA, 19 nt, Artificial Sequence
  Description of Artificial Sequence: Synthetic oligonucleotide
acaagguacucugcaaauc

SEQ ID NO: 2710087 - RNA, 19 nt, Artificial Sequence
  Description of Artificial Sequence: Synthetic oligonucleotide
aggaagaaaacuacauaug

SEQ ID NO: 2710088 - RNA, 19 nt, Artificial Sequence
  Description of Artificial Sequence: Synthetic oligonucleotide
ccaggaacaacaugaaaag

SEQ ID NO: 2710089 - RNA, 19 nt, Artificial Sequence
  Description of Artificial Sequence: Synthetic oligonucleotide
caagcuuaauucccuguac

SEQ ID NO: 2710090 - RNA, 19 nt, Artificial Sequence
  Description of Artificial Sequence: Synthetic oligonucleotide
ggucuucugagaauuaugc

SEQ ID NO: 2710091 - RNA, 19 nt, Artificial Sequence
  Description of Artificial Sequence: Synthetic oligonucleotide
guacucugcaaaucugccc

SEQ ID NO: 2710092 - RNA, 19 nt, Artificial Sequence
  Description of Artificial Sequence: Synthetic oligonucleotide
aacggaagacaagagggaa

SEQ ID NO: 2710093 - RNA, 19 nt, Artificial Sequence
  Description of Artificial Sequence: Synthetic oligonucleotide
uuaauucccuguacccaac

SEQ ID NO: 2710094 - RNA, 19 nt, Artificial Sequence
  Description of Artificial Sequence: Synthetic oligonucleotide
gcuugugcaaacccuaacc

SEQ ID NO: 2710095 - RNA, 19 nt, Artificial Sequence
  Description of Artificial Sequence: Synthetic oligonucleotide
uggguagugugucuccaca

SEQ ID NO: 2710096 - RNA, 19 nt, Artificial Sequence
  Description of Artificial Sequence: Synthetic oligonucleotide
accauaugucaacauucug

SEQ ID NO: 2710097 - RNA, 19 nt, Artificial Sequence
  Description of Artificial Sequence: Synthetic oligonucleotide
cugaaaauggccacgcgaa

SEQ ID NO: 2710098 - RNA, 19 nt, Artificial Sequence
  Description of Artificial Sequence: Synthetic oligonucleotide
auggccacgcgaaagaaug

SEQ ID NO: 2710099 - RNA, 19 nt, Artificial Sequence
  Description of Artificial Sequence: Synthetic oligonucleotide
agaacaagguacucugcaa

SEQ ID NO: 2710100 - RNA, 19 nt, Artificial Sequence
  Description of Artificial Sequence: Synthetic oligonucleotide
uaacccugaaaauggccac

SEQ ID NO: 2710101 - RNA, 19 nt, Artificial Sequence
  Description of Artificial Sequence: Synthetic oligonucleotide
caugaauuauggucuucug

SEQ ID NO: 2710102 - RNA, 19 nt, Artificial Sequence
  Description of Artificial Sequence: Synthetic oligonucleotide
ggaagaaaacuacauaugu

SEQ ID NO: 2710103 - RNA, 19 nt, Artificial Sequence
  Description of Artificial Sequence: Synthetic oligonucleotide
guagugugucuccacauga

SEQ ID NO: 2710104 - RNA, 19 nt, Artificial Sequence
  Description of Artificial Sequence: Synthetic oligonucleotide
auaucaauauacagucucu

SEQ ID NO: 2710105 - RNA, 19 nt, Artificial Sequence
  Description of Artificial Sequence: Synthetic oligonucleotide
gaagaaaacuacauaugua

SEQ ID NO: 2710106 - RNA, 19 nt, Artificial Sequence
  Description of Artificial Sequence: Synthetic oligonucleotide
acaagcuuaauucccugua

SEQ ID NO: 2710107 - RNA, 19 nt, Artificial Sequence
  Description of Artificial Sequence: Synthetic oligonucleotide
uguauugcucuugacuauc

SEQ ID NO: 2710108 - RNA, 19 nt, Artificial Sequence
  Description of Artificial Sequence: Synthetic oligonucleotide
gggaaagccuuguucaaag

SEQ ID NO: 2710109 - RNA, 19 nt, Artificial Sequence
  Description of Artificial Sequence: Synthetic oligonucleotide
cuguguguagucuuuggca

SEQ ID NO: 2710110 - RNA, 19 nt, Artificial Sequence
  Description of Artificial Sequence: Synthetic oligonucleotide
aagaauggugcugugugua

SEQ ID NO: 2710111 - RNA, 19 nt, Artificial Sequence
  Description of Artificial Sequence: Synthetic oligonucleotide
ucugagaauuaugcaugag

SEQ ID NO: 2710112 - RNA, 19 nt, Artificial Sequence
  Description of Artificial Sequence: Synthetic oligonucleotide
ugaaaauggccacgcgaaa

SEQ ID NO: 2710113 - RNA, 19 nt, Artificial Sequence
  Description of Artificial Sequence: Synthetic oligonucleotide
uagcacaauuacaguuucc

SEQ ID NO: 2710114 - RNA, 19 nt, Artificial Sequence
  Description of Artificial Sequence: Synthetic oligonucleotide
cugugaaggaagaaaacua

SEQ ID NO: 2710115 - RNA, 19 nt, Artificial Sequence
  Description of Artificial Sequence: Synthetic oligonucleotide
caacauucuggcaacuaca

SEQ ID NO: 2710116 - RNA, 19 nt, Artificial Sequence
  Description of Artificial Sequence: Synthetic oligonucleotide
auacuggguagugugucuc

SEQ ID NO: 2710117 - RNA, 19 nt, Artificial Sequence
  Description of Artificial Sequence: Synthetic oligonucleotide
uauugcucuugacuaucuc

SEQ ID NO: 2710118 - RNA, 19 nt, Artificial Sequence
  Description of Artificial Sequence: Synthetic oligonucleotide
acgcaucaaacaauacugg

SEQ ID NO: 2710119 - RNA, 19 nt, Artificial Sequence
  Description of Artificial Sequence: Synthetic oligonucleotide
auauacagucucuguaaua

SEQ ID NO: 2710120 - RNA, 19 nt, Artificial Sequence
  Description of Artificial Sequence: Synthetic oligonucleotide
agaaaacuacauauguaaa

SEQ ID NO: 2710121 - RNA, 19 nt, Artificial Sequence
  Description of Artificial Sequence: Synthetic oligonucleotide
uggguuaaauuugccagaa

SEQ ID NO: 2710122 - RNA, 19 nt, Artificial Sequence
  Description of Artificial Sequence: Synthetic oligonucleotide
uggccacgcgaaagaaugg

SEQ ID NO: 2710123 - RNA, 19 nt, Artificial Sequence
  Description of Artificial Sequence: Synthetic oligonucleotide
uuguauugcucuugacuau

SEQ ID NO: 2710124 - RNA, 19 nt, Artificial Sequence
  Description of Artificial Sequence: Synthetic oligonucleotide
gccagaacaagguacucug

SEQ ID NO: 2710125 - RNA, 19 nt, Artificial Sequence
  Description of Artificial Sequence: Synthetic oligonucleotide
augugacagaaaaugccag

SEQ ID NO: 2710126 - RNA, 19 nt, Artificial Sequence
  Description of Artificial Sequence: Synthetic oligonucleotide
uacaucaaaccaccuuaua

SEQ ID NO: 2710127 - RNA, 19 nt, Artificial Sequence
  Description of Artificial Sequence: Synthetic oligonucleotide
cccaguacaucaaaccacc

SEQ ID NO: 2710128 - RNA, 19 nt, Artificial Sequence
  Description of Artificial Sequence: Synthetic oligonucleotide
uagugugucuccacaugaa

SEQ ID NO: 2710129 - RNA, 19 nt, Artificial Sequence
  Description of Artificial Sequence: Synthetic oligonucleotide
cagaacaagguacucugca

SEQ ID NO: 2710130 - RNA, 19 nt, Artificial Sequence
  Description of Artificial Sequence: Synthetic oligonucleotide
aguuuccugcacugaaggu

SEQ ID NO: 2710131 - RNA, 19 nt, Artificial Sequence
  Description of Artificial Sequence: Synthetic oligonucleotide
uuggcacuguuguauugcu

SEQ ID NO: 2710132 - RNA, 19 nt, Artificial Sequence
  Description of Artificial Sequence: Synthetic oligonucleotide
gacaagagggaaagccuug

SEQ ID NO: 2710133 - RNA, 19 nt, Artificial Sequence
  Description of Artificial Sequence: Synthetic oligonucleotide
gacugugaaggaagaaaac

SEQ ID NO: 2710134 - RNA, 19 nt, Artificial Sequence
  Description of Artificial Sequence: Synthetic oligonucleotide
gugacagaaaaugccagga

SEQ ID NO: 2710135 - RNA, 19 nt, Artificial Sequence
  Description of Artificial Sequence: Synthetic oligonucleotide
cuacagaaugaaauuauau

SEQ ID NO: 2710136 - RNA, 19 nt, Artificial Sequence
  Description of Artificial Sequence: Synthetic oligonucleotide
cuuuggcacuguuguauug

SEQ ID NO: 2710137 - RNA, 19 nt, Artificial Sequence
  Description of Artificial Sequence: Synthetic oligonucleotide
uacuggguagugugucucc

SEQ ID NO: 2710138 - RNA, 19 nt, Artificial Sequence
  Description of Artificial Sequence: Synthetic oligonucleotide
uaucuccaaauggacagau

SEQ ID NO: 2710139 - RNA, 19 nt, Artificial Sequence
  Description of Artificial Sequence: Synthetic oligonucleotide
ugccagaacaagguacucu

SEQ ID NO: 2710140 - RNA, 19 nt, Artificial Sequence
  Description of Artificial Sequence: Synthetic oligonucleotide
uuugacugugaaggaagaa

SEQ ID NO: 2710141 - RNA, 19 nt, Artificial Sequence
  Description of Artificial Sequence: Synthetic oligonucleotide
auauaucaauauacagucu

SEQ ID NO: 2710142 - RNA, 19 nt, Artificial Sequence
  Description of Artificial Sequence: Synthetic oligonucleotide
cauggauuuuguagcccac

SEQ ID NO: 2710143 - RNA, 19 nt, Artificial Sequence
  Description of Artificial Sequence: Synthetic oligonucleotide
acauucuggcaacuacaga

SEQ ID NO: 2710144 - RNA, 19 nt, Artificial Sequence
  Description of Artificial Sequence: Synthetic oligonucleotide
gccuuguucaaagacaaac

SEQ ID NO: 2710145 - RNA, 19 nt, Artificial Sequence
  Description of Artificial Sequence: Synthetic oligonucleotide
gugaaggaagaaaacuaca

SEQ ID NO: 2710146 - RNA, 19 nt, Artificial Sequence
  Description of Artificial Sequence: Synthetic oligonucleotide
aaauggccacgcgaaagaa

SEQ ID NO: 2710147 - RNA, 19 nt, Artificial Sequence
  Description of Artificial Sequence: Synthetic oligonucleotide
aucuguuuacaaauggguu

SEQ ID NO: 2710148 - RNA, 19 nt, Artificial Sequence
  Description of Artificial Sequence: Synthetic oligonucleotide
ugccaggaacaacaugaaa

SEQ ID NO: 2710149 - RNA, 19 nt, Artificial Sequence
  Description of Artificial Sequence: Synthetic oligonucleotide
caauacuggguaguguguc

SEQ ID NO: 2710150 - RNA, 19 nt, Artificial Sequence
  Description of Artificial Sequence: Synthetic oligonucleotide
gguagugugucuccacaug

SEQ ID NO: 2710151 - RNA, 19 nt, Artificial Sequence
  Description of Artificial Sequence: Synthetic oligonucleotide
ccacgcgaaagaauggugc

SEQ ID NO: 2710152 - RNA, 19 nt, Artificial Sequence
  Description of Artificial Sequence: Synthetic oligonucleotide
caagguacucugcaaaucu

SEQ ID NO: 2710153 - RNA, 19 nt, Artificial Sequence
  Description of Artificial Sequence: Synthetic oligonucleotide
auacagucucuguaauaaa

SEQ ID NO: 2710154 - RNA, 19 nt, Artificial Sequence
  Description of Artificial Sequence: Synthetic oligonucleotide
gaacggaagacaagaggga

SEQ ID NO: 2710155 - RNA, 19 nt, Artificial Sequence
  Description of Artificial Sequence: Synthetic oligonucleotide
acauacacauggauuuugu

SEQ ID NO: 2710156 - RNA, 19 nt, Artificial Sequence
  Description of Artificial Sequence: Synthetic oligonucleotide
uuacaguuuccugcacuga

SEQ ID NO: 2710157 - RNA, 19 nt, Artificial Sequence
  Description of Artificial Sequence: Synthetic oligonucleotide
cacauggauuuuguagccc

SEQ ID NO: 2710158 - RNA, 19 nt, Artificial Sequence
  Description of Artificial Sequence: Synthetic oligonucleotide
uuguagcccacaagcuuaa

SEQ ID NO: 2710159 - RNA, 19 nt, Artificial Sequence
  Description of Artificial Sequence: Synthetic oligonucleotide
acuacagaaugaaauuaua

SEQ ID NO: 2710160 - RNA, 19 nt, Artificial Sequence
  Description of Artificial Sequence: Synthetic oligonucleotide
aaccaccuuauaaaugaua

SEQ ID NO: 2710161 - RNA, 19 nt, Artificial Sequence
  Description of Artificial Sequence: Synthetic oligonucleotide
cauauagcacaauuacagu

SEQ ID NO: 2710162 - RNA, 19 nt, Artificial Sequence
  Description of Artificial Sequence: Synthetic oligonucleotide
cuguuuacaaauggguuaa

SEQ ID NO: 2710163 - RNA, 19 nt, Artificial Sequence
  Description of Artificial Sequence: Synthetic oligonucleotide
aaucuucccaguacaucaa

SEQ ID NO: 2710164 - RNA, 19 nt, Artificial Sequence
  Description of Artificial Sequence: Synthetic oligonucleotide
aauggccacgcgaaagaau

SEQ ID NO: 2710165 - RNA, 19 nt, Artificial Sequence
  Description of Artificial Sequence: Synthetic oligonucleotide
uggcaacuacagaaugaaa

SEQ ID NO: 2710166 - RNA, 19 nt, Artificial Sequence
  Description of Artificial Sequence: Synthetic oligonucleotide
gguacucugcaaaucugcc

SEQ ID NO: 2710167 - RNA, 19 nt, Artificial Sequence
  Description of Artificial Sequence: Synthetic oligonucleotide
acacaaacauauagcacaa

SEQ ID NO: 2710168 - RNA, 19 nt, Artificial Sequence
  Description of Artificial Sequence: Synthetic oligonucleotide
caacuacagaaugaaauua

SEQ ID NO: 2710169 - RNA, 19 nt, Artificial Sequence
  Description of Artificial Sequence: Synthetic oligonucleotide
aaaccaccuuauaaaugau

SEQ ID NO: 2710170 - RNA, 19 nt, Artificial Sequence
  Description of Artificial Sequence: Synthetic oligonucleotide
ggcacuguuguauugcucu

SEQ ID NO: 2710171 - RNA, 19 nt, Artificial Sequence
  Description of Artificial Sequence: Synthetic oligonucleotide
gcacaauuacaguuuccug

SEQ ID NO: 2710172 - RNA, 19 nt, Artificial Sequence
  Description of Artificial Sequence: Synthetic oligonucleotide
auggauuuuguagcccaca

SEQ ID NO: 2710173 - RNA, 19 nt, Artificial Sequence
  Description of Artificial Sequence: Synthetic oligonucleotide
ccuuguucaaagacaaaca

SEQ ID NO: 2710174 - RNA, 19 nt, Artificial Sequence
  Description of Artificial Sequence: Synthetic oligonucleotide
auggucuucugagaauuau

SEQ ID NO: 2710175 - RNA, 19 nt, Artificial Sequence
  Description of Artificial Sequence: Synthetic oligonucleotide
cuggcaacuacagaaugaa

SEQ ID NO: 2710176 - RNA, 19 nt, Artificial Sequence
  Description of Artificial Sequence: Synthetic oligonucleotide
agacaagagggaaagccuu

SEQ ID NO: 2710177 - RNA, 19 nt, Artificial Sequence
  Description of Artificial Sequence: Synthetic oligonucleotide
auuaugcaugagaacggaa

SEQ ID NO: 2710178 - RNA, 19 nt, Artificial Sequence
  Description of Artificial Sequence: Synthetic oligonucleotide
uggcacuguuguauugcuc

SEQ ID NO: 2710179 - RNA, 19 nt, Artificial Sequence
  Description of Artificial Sequence: Synthetic oligonucleotide
ugcaaacccuaacccugaa

SEQ ID NO: 2710180 - RNA, 19 nt, Artificial Sequence
  Description of Artificial Sequence: Synthetic oligonucleotide
cucuugacuaucuccaaau

SEQ ID NO: 2710181 - RNA, 19 nt, Artificial Sequence
  Description of Artificial Sequence: Synthetic oligonucleotide
cuggguagugugucuccac

SEQ ID NO: 2710182 - RNA, 19 nt, Artificial Sequence
  Description of Artificial Sequence: Synthetic oligonucleotide
cauacacauggauuuugua

SEQ ID NO: 2710183 - RNA, 19 nt, Artificial Sequence
  Description of Artificial Sequence: Synthetic oligonucleotide
caaacaugugacagaaaau

SEQ ID NO: 2710184 - RNA, 19 nt, Artificial Sequence
  Description of Artificial Sequence: Synthetic oligonucleotide
acgcgaaagaauggugcug

SEQ ID NO: 2710185 - RNA, 19 nt, Artificial Sequence
  Description of Artificial Sequence: Synthetic oligonucleotide
uguuuacaaauggguuaaa

SEQ ID NO: 2710186 - RNA, 19 nt, Artificial Sequence
  Description of Artificial Sequence: Synthetic oligonucleotide
acuggguagugugucucca

SEQ ID NO: 2710187 - RNA, 19 nt, Artificial Sequence
  Description of Artificial Sequence: Synthetic oligonucleotide
gcuuaauucccuguaccca

SEQ ID NO: 2710188 - RNA, 19 nt, Artificial Sequence
  Description of Artificial Sequence: Synthetic oligonucleotide
agggaaagccuuguucaaa

SEQ ID NO: 2710189 - RNA, 19 nt, Artificial Sequence
  Description of Artificial Sequence: Synthetic oligonucleotide
gcaacuacagaaugaaauu

SEQ ID NO: 2710190 - RNA, 19 nt, Artificial Sequence
  Description of Artificial Sequence: Synthetic oligonucleotide
ccagaacaagguacucugc

SEQ ID NO: 2710191 - RNA, 19 nt, Artificial Sequence
  Description of Artificial Sequence: Synthetic oligonucleotide
gucuuuggcacuguuguau

SEQ ID NO: 2710192 - RNA, 19 nt, Artificial Sequence
  Description of Artificial Sequence: Synthetic oligonucleotide
acggaagacaagagggaaa

SEQ ID NO: 2710193 - RNA, 19 nt, Artificial Sequence
  Description of Artificial Sequence: Synthetic oligonucleotide
auggacagauacauacaua

SEQ ID NO: 2710194 - RNA, 19 nt, Artificial Sequence
  Description of Artificial Sequence: Synthetic oligonucleotide
gaauggugcuguguguagu

SEQ ID NO: 2710195 - RNA, 19 nt, Artificial Sequence
  Description of Artificial Sequence: Synthetic oligonucleotide
gcccacaagcuuaauuccc

SEQ ID NO: 2710196 - RNA, 19 nt, Artificial Sequence
  Description of Artificial Sequence: Synthetic oligonucleotide
cacaagcuuaauucccugu

SEQ ID NO: 2710197 - RNA, 19 nt, Artificial Sequence
  Description of Artificial Sequence: Synthetic oligonucleotide
uugccagaacaagguacuc

SEQ ID NO: 2710198 - RNA, 19 nt, Artificial Sequence
  Description of Artificial Sequence: Synthetic oligonucleotide
cuaucuccaaauggacaga

SEQ ID NO: 2710199 - RNA, 19 nt, Artificial Sequence
  Description of Artificial Sequence: Synthetic oligonucleotide
guagcccacaagcuuaauu

SEQ ID NO: 2710200 - RNA, 19 nt, Artificial Sequence
  Description of Artificial Sequence: Synthetic oligonucleotide
cacgcgaaagaauggugcu

SEQ ID NO: 2710201 - RNA, 19 nt, Artificial Sequence
  Description of Artificial Sequence: Synthetic oligonucleotide
gcaugagaacggaagacaa

SEQ ID NO: 2710202 - RNA, 19 nt, Artificial Sequence
  Description of Artificial Sequence: Synthetic oligonucleotide
cccuaacccugaaaauggc

SEQ ID NO: 2710203 - RNA, 19 nt, Artificial Sequence
  Description of Artificial Sequence: Synthetic oligonucleotide
ggacagauacauacauaca

SEQ ID NO: 2710204 - RNA, 19 nt, Artificial Sequence
  Description of Artificial Sequence: Synthetic oligonucleotide
ggguuaaauuugccagaac

SEQ ID NO: 2710205 - RNA, 19 nt, Artificial Sequence
  Description of Artificial Sequence: Synthetic oligonucleotide
guguguagucuuuggcacu

SEQ ID NO: 2710206 - RNA, 19 nt, Artificial Sequence
  Description of Artificial Sequence: Synthetic oligonucleotide
ccacaagcuuaauucccug

SEQ ID NO: 2710207 - RNA, 19 nt, Artificial Sequence
  Description of Artificial Sequence: Synthetic oligonucleotide
gcaaaucugcccugcagcu

SEQ ID NO: 2710208 - RNA, 19 nt, Artificial Sequence
  Description of Artificial Sequence: Synthetic oligonucleotide
gucaacauucuggcaacua

SEQ ID NO: 2710209 - RNA, 19 nt, Artificial Sequence
  Description of Artificial Sequence: Synthetic oligonucleotide
aaucugcccugcagcuugu

SEQ ID NO: 2710210 - RNA, 19 nt, Artificial Sequence
  Description of Artificial Sequence: Synthetic oligonucleotide
gugcaaacccuaacccuga

SEQ ID NO: 2710211 - RNA, 19 nt, Artificial Sequence
  Description of Artificial Sequence: Synthetic oligonucleotide
gcucuugacuaucuccaaa

SEQ ID NO: 2710212 - RNA, 19 nt, Artificial Sequence
  Description of Artificial Sequence: Synthetic oligonucleotide
caguacaucaaaccaccuu

SEQ ID NO: 2710213 - RNA, 19 nt, Artificial Sequence
  Description of Artificial Sequence: Synthetic oligonucleotide
guauugcucuugacuaucu

SEQ ID NO: 2710214 - RNA, 19 nt, Artificial Sequence
  Description of Artificial Sequence: Synthetic oligonucleotide
ccugcagcuugugcaaacc

SEQ ID NO: 2710215 - RNA, 19 nt, Artificial Sequence
  Description of Artificial Sequence: Synthetic oligonucleotide
cagcuugugcaaacccuaa

SEQ ID NO: 2710216 - RNA, 19 nt, Artificial Sequence
  Description of Artificial Sequence: Synthetic oligonucleotide
gcgaaagaauggugcugug

SEQ ID NO: 2710217 - RNA, 19 nt, Artificial Sequence
  Description of Artificial Sequence: Synthetic oligonucleotide
guacaucaaaccaccuuau

SEQ ID NO: 2710218 - RNA, 19 nt, Artificial Sequence
  Description of Artificial Sequence: Synthetic oligonucleotide
gccacgcgaaagaauggug

SEQ ID NO: 2710219 - RNA, 19 nt, Artificial Sequence
  Description of Artificial Sequence: Synthetic oligonucleotide
cccugaaaauggccacgcg

SEQ ID NO: 2710220 - RNA, 19 nt, Artificial Sequence
  Description of Artificial Sequence: Synthetic oligonucleotide
uguagcccacaagcuuaau

SEQ ID NO: 2710221 - RNA, 19 nt, Artificial Sequence
  Description of Artificial Sequence: Synthetic oligonucleotide
gcaaacccuaacccugaaa

SEQ ID NO: 2710222 - RNA, 19 nt, Artificial Sequence
  Description of Artificial Sequence: Synthetic oligonucleotide
aucuccaaauggacagaua

SEQ ID NO: 2710223 - RNA, 19 nt, Artificial Sequence
  Description of Artificial Sequence: Synthetic oligonucleotide
gcagcuugugcaaacccua

SEQ ID NO: 2710224 - RNA, 19 nt, Artificial Sequence
  Description of Artificial Sequence: Synthetic oligonucleotide
aucugcccugcagcuugug

SEQ ID NO: 2710225 - RNA, 19 nt, Artificial Sequence
  Description of Artificial Sequence: Synthetic oligonucleotide
cccacaagcuuaauucccu

SEQ ID NO: 2710226 - RNA, 19 nt, Artificial Sequence
  Description of Artificial Sequence: Synthetic oligonucleotide
gugucuccacaugaauuau

SEQ ID NO: 2710227 - RNA, 19 nt, Artificial Sequence
  Description of Artificial Sequence: Synthetic oligonucleotide
caagagggaaagccuuguu

SEQ ID NO: 2710228 - RNA, 19 nt, Artificial Sequence
  Description of Artificial Sequence: Synthetic oligonucleotide
ggccacgcgaaagaauggu

SEQ ID NO: 2710229 - RNA, 19 nt, Artificial Sequence
  Description of Artificial Sequence: Synthetic oligonucleotide
cacaaacauauagcacaau

SEQ ID NO: 2710230 - RNA, 19 nt, Artificial Sequence
  Description of Artificial Sequence: Synthetic oligonucleotide
cccuguacccaaccugaaa

SEQ ID NO: 2710231 - RNA, 19 nt, Artificial Sequence
  Description of Artificial Sequence: Synthetic oligonucleotide
ggugcuguguguagucuuu

SEQ ID NO: 2710232 - RNA, 19 nt, Artificial Sequence
  Description of Artificial Sequence: Synthetic oligonucleotide
ccaguacaucaaaccaccu

SEQ ID NO: 2710233 - RNA, 19 nt, Artificial Sequence
  Description of Artificial Sequence: Synthetic oligonucleotide
cgcgaaagaauggugcugu

SEQ ID NO: 2710234 - RNA, 19 nt, Artificial Sequence
  Description of Artificial Sequence: Synthetic oligonucleotide
ccacaugaauuauggucuu

SEQ ID NO: 2710235 - RNA, 19 nt, Artificial Sequence
  Description of Artificial Sequence: Synthetic oligonucleotide
gcccugcagcuugugcaaa

SEQ ID NO: 2710236 - RNA, 19 nt, Artificial Sequence
  Description of Artificial Sequence: Synthetic oligonucleotide
aaauuaacaacccugagcc

SEQ ID NO: 2710237 - RNA, 19 nt, Artificial Sequence
  Description of Artificial Sequence: Synthetic oligonucleotide
aaaauuauaaagcagagcu

SEQ ID NO: 2710238 - RNA, 19 nt, Artificial Sequence
  Description of Artificial Sequence: Synthetic oligonucleotide
aaaauuaacaacccugagc

SEQ ID NO: 2710239 - RNA, 19 nt, Artificial Sequence
  Description of Artificial Sequence: Synthetic oligonucleotide
aauauaagccacuuggagc

SEQ ID NO: 2710240 - RNA, 19 nt, Artificial Sequence
  Description of Artificial Sequence: Synthetic oligonucleotide
aaauuuguacaauauagac

SEQ ID NO: 2710241 - RNA, 19 nt, Artificial Sequence
  Description of Artificial Sequence: Synthetic oligonucleotide
agcuuauuaguuuagaacc

SEQ ID NO: 2710242 - RNA, 19 nt, Artificial Sequence
  Description of Artificial Sequence: Synthetic oligonucleotide
aaugcuagcccucaggacc

SEQ ID NO: 2710243 - RNA, 19 nt, Artificial Sequence
  Description of Artificial Sequence: Synthetic oligonucleotide
uauuacaaaauuauaaagc

SEQ ID NO: 2710244 - RNA, 19 nt, Artificial Sequence
  Description of Artificial Sequence: Synthetic oligonucleotide
cuuaauauaagccacuugg

SEQ ID NO: 2710245 - RNA, 19 nt, Artificial Sequence
  Description of Artificial Sequence: Synthetic oligonucleotide
ucuuuuaaaacuaaguaug

SEQ ID NO: 2710246 - RNA, 19 nt, Artificial Sequence
  Description of Artificial Sequence: Synthetic oligonucleotide
uuaaaacuaaguaugaacu

SEQ ID NO: 2710247 - RNA, 19 nt, Artificial Sequence
  Description of Artificial Sequence: Synthetic oligonucleotide
uacaaaauuauaaagcaga

SEQ ID NO: 2710248 - RNA, 19 nt, Artificial Sequence
  Description of Artificial Sequence: Synthetic oligonucleotide
uguauuuaaacuuuauuac

SEQ ID NO: 2710249 - RNA, 19 nt, Artificial Sequence
  Description of Artificial Sequence: Synthetic oligonucleotide
gacacuuugagcuaugucc

SEQ ID NO: 2710250 - RNA, 19 nt, Artificial Sequence
  Description of Artificial Sequence: Synthetic oligonucleotide
aauauagacuauuaauucu

SEQ ID NO: 2710251 - RNA, 19 nt, Artificial Sequence
  Description of Artificial Sequence: Synthetic oligonucleotide
uuuaaaacuaaguaugaac

SEQ ID NO: 2710252 - RNA, 19 nt, Artificial Sequence
  Description of Artificial Sequence: Synthetic oligonucleotide
aauuauaaagcagagcucu

SEQ ID NO: 2710253 - RNA, 19 nt, Artificial Sequence
  Description of Artificial Sequence: Synthetic oligonucleotide
uuguauuuaaacuuuauua

SEQ ID NO: 2710254 - RNA, 19 nt, Artificial Sequence
  Description of Artificial Sequence: Synthetic oligonucleotide
ugaacugaaaucuuggcga

SEQ ID NO: 2710255 - RNA, 19 nt, Artificial Sequence
  Description of Artificial Sequence: Synthetic oligonucleotide
uuaguuuagaaccagcuau

SEQ ID NO: 2710256 - RNA, 19 nt, Artificial Sequence
  Description of Artificial Sequence: Synthetic oligonucleotide
uaauauaagccacuuggag

SEQ ID NO: 2710257 - RNA, 19 nt, Artificial Sequence
  Description of Artificial Sequence: Synthetic oligonucleotide
aauuuuacacagguucucc

SEQ ID NO: 2710258 - RNA, 19 nt, Artificial Sequence
  Description of Artificial Sequence: Synthetic oligonucleotide
acaaauuuguacaauauag

SEQ ID NO: 2710259 - RNA, 19 nt, Artificial Sequence
  Description of Artificial Sequence: Synthetic oligonucleotide
uauuuaaacuuuauuacaa

SEQ ID NO: 2710260 - RNA, 19 nt, Artificial Sequence
  Description of Artificial Sequence: Synthetic oligonucleotide
aagauuuuaacaaauuugu

SEQ ID NO: 2710261 - RNA, 19 nt, Artificial Sequence
  Description of Artificial Sequence: Synthetic oligonucleotide
uuacaaaauuauaaagcag

SEQ ID NO: 2710262 - RNA, 19 nt, Artificial Sequence
  Description of Artificial Sequence: Synthetic oligonucleotide
ugagcuauguccuguaagg

SEQ ID NO: 2710263 - RNA, 19 nt, Artificial Sequence
  Description of Artificial Sequence: Synthetic oligonucleotide
gacuauuaauucuuuacag

SEQ ID NO: 2710264 - RNA, 19 nt, Artificial Sequence
  Description of Artificial Sequence: Synthetic oligonucleotide
aucgcuagacaccaggugc

SEQ ID NO: 2710265 - RNA, 19 nt, Artificial Sequence
  Description of Artificial Sequence: Synthetic oligonucleotide
auucuuuacagcuuauuag

SEQ ID NO: 2710266 - RNA, 19 nt, Artificial Sequence
  Description of Artificial Sequence: Synthetic oligonucleotide
cuaaguaugaacugaaauc

SEQ ID NO: 2710267 - RNA, 19 nt, Artificial Sequence
  Description of Artificial Sequence: Synthetic oligonucleotide
acauccaaaagauuuuaac

SEQ ID NO: 2710268 - RNA, 19 nt, Artificial Sequence
  Description of Artificial Sequence: Synthetic oligonucleotide
agaaccagcuauuccaacc

SEQ ID NO: 2710269 - RNA, 19 nt, Artificial Sequence
  Description of Artificial Sequence: Synthetic oligonucleotide
uaaguaugaacugaaaucu

SEQ ID NO: 2710270 - RNA, 19 nt, Artificial Sequence
  Description of Artificial Sequence: Synthetic oligonucleotide
uacaauauagacuauuaau

SEQ ID NO: 2710271 - RNA, 19 nt, Artificial Sequence
  Description of Artificial Sequence: Synthetic oligonucleotide
uguaaggcacugaagaagc

SEQ ID NO: 2710272 - RNA, 19 nt, Artificial Sequence
  Description of Artificial Sequence: Synthetic oligonucleotide
auauaagccacuuggagca

SEQ ID NO: 2710273 - RNA, 19 nt, Artificial Sequence
  Description of Artificial Sequence: Synthetic oligonucleotide
ugucuuuuaaaacuaagua

SEQ ID NO: 2710274 - RNA, 19 nt, Artificial Sequence
  Description of Artificial Sequence: Synthetic oligonucleotide
augaacugaaaucuuggcg

SEQ ID NO: 2710275 - RNA, 19 nt, Artificial Sequence
  Description of Artificial Sequence: Synthetic oligonucleotide
uauuccaaccgauaaacca

SEQ ID NO: 2710276 - RNA, 19 nt, Artificial Sequence
  Description of Artificial Sequence: Synthetic oligonucleotide
aaaacuaaguaugaacuga

SEQ ID NO: 2710277 - RNA, 19 nt, Artificial Sequence
  Description of Artificial Sequence: Synthetic oligonucleotide
uauuaguuuagaaccagcu

SEQ ID NO: 2710278 - RNA, 19 nt, Artificial Sequence
  Description of Artificial Sequence: Synthetic oligonucleotide
aauuaacaacccugagccc

SEQ ID NO: 2710279 - RNA, 19 nt, Artificial Sequence
  Description of Artificial Sequence: Synthetic oligonucleotide
aauucuuuacagcuuauua

SEQ ID NO: 2710280 - RNA, 19 nt, Artificial Sequence
  Description of Artificial Sequence: Synthetic oligonucleotide
uccuguaaggcacugaaga

SEQ ID NO: 2710281 - RNA, 19 nt, Artificial Sequence
  Description of Artificial Sequence: Synthetic oligonucleotide
aagaagccaaugcuagccc

SEQ ID NO: 2710282 - RNA, 19 nt, Artificial Sequence
  Description of Artificial Sequence: Synthetic oligonucleotide
uagacuauuaauucuuuac

SEQ ID NO: 2710283 - RNA, 19 nt, Artificial Sequence
  Description of Artificial Sequence: Synthetic oligonucleotide
uaaaacuaaguaugaacug

SEQ ID NO: 2710284 - RNA, 19 nt, Artificial Sequence
  Description of Artificial Sequence: Synthetic oligonucleotide
uucuuuacagcuuauuagu

SEQ ID NO: 2710285 - RNA, 19 nt, Artificial Sequence
  Description of Artificial Sequence: Synthetic oligonucleotide
caauauagacuauuaauuc

SEQ ID NO: 2710286 - RNA, 19 nt, Artificial Sequence
  Description of Artificial Sequence: Synthetic oligonucleotide
uaaagcagagcucuguaac

SEQ ID NO: 2710287 - RNA, 19 nt, Artificial Sequence
  Description of Artificial Sequence: Synthetic oligonucleotide
uuaauauaagccacuugga

SEQ ID NO: 2710288 - RNA, 19 nt, Artificial Sequence
  Description of Artificial Sequence: Synthetic oligonucleotide
auucguuugccacacuugg

SEQ ID NO: 2710289 - RNA, 19 nt, Artificial Sequence
  Description of Artificial Sequence: Synthetic oligonucleotide
aaauuauaaagcagagcuc

SEQ ID NO: 2710290 - RNA, 19 nt, Artificial Sequence
  Description of Artificial Sequence: Synthetic oligonucleotide
aaauuuuacacagguucuc

SEQ ID NO: 2710291 - RNA, 19 nt, Artificial Sequence
  Description of Artificial Sequence: Synthetic oligonucleotide
uucaucgcuagacaccagg

SEQ ID NO: 2710292 - RNA, 19 nt, Artificial Sequence
  Description of Artificial Sequence: Synthetic oligonucleotide
caaccgauaaaccagucag

SEQ ID NO: 2710293 - RNA, 19 nt, Artificial Sequence
  Description of Artificial Sequence: Synthetic oligonucleotide
ucugucuuuuaaaacuaag

SEQ ID NO: 2710294 - RNA, 19 nt, Artificial Sequence
  Description of Artificial Sequence: Synthetic oligonucleotide
uuuacacagguucuccucc

SEQ ID NO: 2710295 - RNA, 19 nt, Artificial Sequence
  Description of Artificial Sequence: Synthetic oligonucleotide
gagcaacacauucacaucc

SEQ ID NO: 2710296 - RNA, 19 nt, Artificial Sequence
  Description of Artificial Sequence: Synthetic oligonucleotide
aggacauucauucauucgu

SEQ ID NO: 2710297 - RNA, 19 nt, Artificial Sequence
  Description of Artificial Sequence: Synthetic oligonucleotide
uguacaauauagacuauua

SEQ ID NO: 2710298 - RNA, 19 nt, Artificial Sequence
  Description of Artificial Sequence: Synthetic oligonucleotide
uuuguauuuaaacuuuauu

SEQ ID NO: 2710299 - RNA, 19 nt, Artificial Sequence
  Description of Artificial Sequence: Synthetic oligonucleotide
acuaaguaugaacugaaau

SEQ ID NO: 2710300 - RNA, 19 nt, Artificial Sequence
  Description of Artificial Sequence: Synthetic oligonucleotide
uuuacagcuuauuaguuua

SEQ ID NO: 2710301 - RNA, 19 nt, Artificial Sequence
  Description of Artificial Sequence: Synthetic oligonucleotide
gcaaauuuuacacagguuc

SEQ ID NO: 2710302 - RNA, 19 nt, Artificial Sequence
  Description of Artificial Sequence: Synthetic oligonucleotide
agacuauuaauucuuuaca

SEQ ID NO: 2710303 - RNA, 19 nt, Artificial Sequence
  Description of Artificial Sequence: Synthetic oligonucleotide
uuauuaguuuagaaccagc

SEQ ID NO: 2710304 - RNA, 19 nt, Artificial Sequence
  Description of Artificial Sequence: Synthetic oligonucleotide
ugaaaucuuggcgaaauca

SEQ ID NO: 2710305 - RNA, 19 nt, Artificial Sequence
  Description of Artificial Sequence: Synthetic oligonucleotide
guauuuaaacuuuauuaca

SEQ ID NO: 2710306 - RNA, 19 nt, Artificial Sequence
  Description of Artificial Sequence: Synthetic oligonucleotide
cauucauucauucguuugc

SEQ ID NO: 2710307 - RNA, 19 nt, Artificial Sequence
  Description of Artificial Sequence: Synthetic oligonucleotide
auuaauucuuuacagcuua

SEQ ID NO: 2710308 - RNA, 19 nt, Artificial Sequence
  Description of Artificial Sequence: Synthetic oligonucleotide
agcccagacacuuugagcu

SEQ ID NO: 2710309 - RNA, 19 nt, Artificial Sequence
  Description of Artificial Sequence: Synthetic oligonucleotide
aacacagucaaugggugag

SEQ ID NO: 2710310 - RNA, 19 nt, Artificial Sequence
  Description of Artificial Sequence: Synthetic oligonucleotide
uaugaacugaaaucuuggc

SEQ ID NO: 2710311 - RNA, 19 nt, Artificial Sequence
  Description of Artificial Sequence: Synthetic oligonucleotide
gaagaagccaaugcuagcc

SEQ ID NO: 2710312 - RNA, 19 nt, Artificial Sequence
  Description of Artificial Sequence: Synthetic oligonucleotide
auaggacauucauucauuc

SEQ ID NO: 2710313 - RNA, 19 nt, Artificial Sequence
  Description of Artificial Sequence: Synthetic oligonucleotide
cauccaaaagauuuuaaca

SEQ ID NO: 2710314 - RNA, 19 nt, Artificial Sequence
  Description of Artificial Sequence: Synthetic oligonucleotide
uaacaaauuuguacaauau

SEQ ID NO: 2710315 - RNA, 19 nt, Artificial Sequence
  Description of Artificial Sequence: Synthetic oligonucleotide
agcagaacacagucaaugg

SEQ ID NO: 2710316 - RNA, 19 nt, Artificial Sequence
  Description of Artificial Sequence: Synthetic oligonucleotide
ucuuaauauaagccacuug

SEQ ID NO: 2710317 - RNA, 19 nt, Artificial Sequence
  Description of Artificial Sequence: Synthetic oligonucleotide
uugagcuauguccuguaag

SEQ ID NO: 2710318 - RNA, 19 nt, Artificial Sequence
  Description of Artificial Sequence: Synthetic oligonucleotide
aaagcagagcucuguaaca

SEQ ID NO: 2710319 - RNA, 19 nt, Artificial Sequence
  Description of Artificial Sequence: Synthetic oligonucleotide
acauacugccggcagauag

SEQ ID NO: 2710320 - RNA, 19 nt, Artificial Sequence
  Description of Artificial Sequence: Synthetic oligonucleotide
uaggacauucauucauucg

SEQ ID NO: 2710321 - RNA, 19 nt, Artificial Sequence
  Description of Artificial Sequence: Synthetic oligonucleotide
cuggaguccuuucugaucc

SEQ ID NO: 2710322 - RNA, 19 nt, Artificial Sequence
  Description of Artificial Sequence: Synthetic oligonucleotide
auucauucauucguuugcc

SEQ ID NO: 2710323 - RNA, 19 nt, Artificial Sequence
  Description of Artificial Sequence: Synthetic oligonucleotide
guccaugcaaauuuuacac

SEQ ID NO: 2710324 - RNA, 19 nt, Artificial Sequence
  Description of Artificial Sequence: Synthetic oligonucleotide
cagcuuauuaguuuagaac

SEQ ID NO: 2710325 - RNA, 19 nt, Artificial Sequence
  Description of Artificial Sequence: Synthetic oligonucleotide
augcaaauuuuacacaggu

SEQ ID NO: 2710326 - RNA, 19 nt, Artificial Sequence
  Description of Artificial Sequence: Synthetic oligonucleotide
aaaccagucagcugucugu

SEQ ID NO: 2710327 - RNA, 19 nt, Artificial Sequence
  Description of Artificial Sequence: Synthetic oligonucleotide
acaauauagacuauuaauu

SEQ ID NO: 2710328 - RNA, 19 nt, Artificial Sequence
  Description of Artificial Sequence: Synthetic oligonucleotide
guaugaacugaaaucuugg

SEQ ID NO: 2710329 - RNA, 19 nt, Artificial Sequence
  Description of Artificial Sequence: Synthetic oligonucleotide
auuaacaacccugagccca

SEQ ID NO: 2710330 - RNA, 19 nt, Artificial Sequence
  Description of Artificial Sequence: Synthetic oligonucleotide
gcagauaggacauucauuc

SEQ ID NO: 2710331 - RNA, 19 nt, Artificial Sequence
  Description of Artificial Sequence: Synthetic oligonucleotide
acaaaauuauaaagcagag

SEQ ID NO: 2710332 - RNA, 19 nt, Artificial Sequence
  Description of Artificial Sequence: Synthetic oligonucleotide
gaugacauacugccggcag

SEQ ID NO: 2710333 - RNA, 19 nt, Artificial Sequence
  Description of Artificial Sequence: Synthetic oligonucleotide
uccuuucugauccuuguac

SEQ ID NO: 2710334 - RNA, 19 nt, Artificial Sequence
  Description of Artificial Sequence: Synthetic oligonucleotide
agguucuccuccuagacca

SEQ ID NO: 2710335 - RNA, 19 nt, Artificial Sequence
  Description of Artificial Sequence: Synthetic oligonucleotide
uuuuguauuuaaacuuuau

SEQ ID NO: 2710336 - RNA, 19 nt, Artificial Sequence
  Description of Artificial Sequence: Synthetic oligonucleotide
caaaauuauaaagcagagc

SEQ ID NO: 2710337 - RNA, 19 nt, Artificial Sequence
  Description of Artificial Sequence: Synthetic oligonucleotide
acauucauucauucguuug

SEQ ID NO: 2710338 - RNA, 19 nt, Artificial Sequence
  Description of Artificial Sequence: Synthetic oligonucleotide
acagucaaugggugagucc

SEQ ID NO: 2710339 - RNA, 19 nt, Artificial Sequence
  Description of Artificial Sequence: Synthetic oligonucleotide
acagguucuccuccuagac

SEQ ID NO: 2710340 - RNA, 19 nt, Artificial Sequence
  Description of Artificial Sequence: Synthetic oligonucleotide
cuauuaauucuuuacagcu

SEQ ID NO: 2710341 - RNA, 19 nt, Artificial Sequence
  Description of Artificial Sequence: Synthetic oligonucleotide
uccuccuagaccagaaggc

SEQ ID NO: 2710342 - RNA, 19 nt, Artificial Sequence
  Description of Artificial Sequence: Synthetic oligonucleotide
auuuaaacuuuauuacaaa

SEQ ID NO: 2710343 - RNA, 19 nt, Artificial Sequence
  Description of Artificial Sequence: Synthetic oligonucleotide
aaauacacauuuggguuug

SEQ ID NO: 2710344 - RNA, 19 nt, Artificial Sequence
  Description of Artificial Sequence: Synthetic oligonucleotide
caaauuuguacaauauaga

SEQ ID NO: 2710345 - RNA, 19 nt, Artificial Sequence
  Description of Artificial Sequence: Synthetic oligonucleotide
caugcaaauuuuacacagg

SEQ ID NO: 2710346 - RNA, 19 nt, Artificial Sequence
  Description of Artificial Sequence: Synthetic oligonucleotide
aguccaugcaaauuuuaca

SEQ ID NO: 2710347 - RNA, 19 nt, Artificial Sequence
  Description of Artificial Sequence: Synthetic oligonucleotide
aaccgauaaaccagucagc

SEQ ID NO: 2710348 - RNA, 19 nt, Artificial Sequence
  Description of Artificial Sequence: Synthetic oligonucleotide
cuuucugauccuuguacag

SEQ ID NO: 2710349 - RNA, 19 nt, Artificial Sequence
  Description of Artificial Sequence: Synthetic oligonucleotide
uauuaauucuuuacagcuu

SEQ ID NO: 2710350 - RNA, 19 nt, Artificial Sequence
  Description of Artificial Sequence: Synthetic oligonucleotide
agauaggacauucauucau

SEQ ID NO: 2710351 - RNA, 19 nt, Artificial Sequence
  Description of Artificial Sequence: Synthetic oligonucleotide
uaaaccagucagcugucug

SEQ ID NO: 2710352 - RNA, 19 nt, Artificial Sequence
  Description of Artificial Sequence: Synthetic oligonucleotide
ucugauccuuguacagucg

SEQ ID NO: 2710353 - RNA, 19 nt, Artificial Sequence
  Description of Artificial Sequence: Synthetic oligonucleotide
guuuagaaccagcuauucc

SEQ ID NO: 2710354 - RNA, 19 nt, Artificial Sequence
  Description of Artificial Sequence: Synthetic oligonucleotide
auucacauccaaaagauuu

SEQ ID NO: 2710355 - RNA, 19 nt, Artificial Sequence
  Description of Artificial Sequence: Synthetic oligonucleotide
uuaacaacccugagcccag

SEQ ID NO: 2710356 - RNA, 19 nt, Artificial Sequence
  Description of Artificial Sequence: Synthetic oligonucleotide
auuccaaccgauaaaccag

SEQ ID NO: 2710357 - RNA, 19 nt, Artificial Sequence
  Description of Artificial Sequence: Synthetic oligonucleotide
uuuggucuuucaucgcuag

SEQ ID NO: 2710358 - RNA, 19 nt, Artificial Sequence
  Description of Artificial Sequence: Synthetic oligonucleotide
uagaccagaaggcacugcu

SEQ ID NO: 2710359 - RNA, 19 nt, Artificial Sequence
  Description of Artificial Sequence: Synthetic oligonucleotide
auccuuguacagucgaguc

SEQ ID NO: 2710360 - RNA, 19 nt, Artificial Sequence
  Description of Artificial Sequence: Synthetic oligonucleotide
cuuauuaguuuagaaccag

SEQ ID NO: 2710361 - RNA, 19 nt, Artificial Sequence
  Description of Artificial Sequence: Synthetic oligonucleotide
ucagcugucugucuuuuaa

SEQ ID NO: 2710362 - RNA, 19 nt, Artificial Sequence
  Description of Artificial Sequence: Synthetic oligonucleotide
uuaccauguggccacacuc

SEQ ID NO: 2710363 - RNA, 19 nt, Artificial Sequence
  Description of Artificial Sequence: Synthetic oligonucleotide
uauaaagcagagcucugua

SEQ ID NO: 2710364 - RNA, 19 nt, Artificial Sequence
  Description of Artificial Sequence: Synthetic oligonucleotide
uguccuguaaggcacugaa

SEQ ID NO: 2710365 - RNA, 19 nt, Artificial Sequence
  Description of Artificial Sequence: Synthetic oligonucleotide
aguaugaacugaaaucuug

SEQ ID NO: 2710366 - RNA, 19 nt, Artificial Sequence
  Description of Artificial Sequence: Synthetic oligonucleotide
aacaacccugagcccagac

SEQ ID NO: 2710367 - RNA, 19 nt, Artificial Sequence
  Description of Artificial Sequence: Synthetic oligonucleotide
aaucuuaauauaagccacu

SEQ ID NO: 2710368 - RNA, 19 nt, Artificial Sequence
  Description of Artificial Sequence: Synthetic oligonucleotide
ugagcccagacacuuugag

SEQ ID NO: 2710369 - RNA, 19 nt, Artificial Sequence
  Description of Artificial Sequence: Synthetic oligonucleotide
uuacagcuuauuaguuuag

SEQ ID NO: 2710370 - RNA, 19 nt, Artificial Sequence
  Description of Artificial Sequence: Synthetic oligonucleotide
auucauucguuugccacac

SEQ ID NO: 2710371 - RNA, 19 nt, Artificial Sequence
  Description of Artificial Sequence: Synthetic oligonucleotide
uucugauccuuguacaguc

SEQ ID NO: 2710372 - RNA, 19 nt, Artificial Sequence
  Description of Artificial Sequence: Synthetic oligonucleotide
uuuuacacagguucuccuc

SEQ ID NO: 2710373 - RNA, 19 nt, Artificial Sequence
  Description of Artificial Sequence: Synthetic oligonucleotide
uuauaaagcagagcucugu

SEQ ID NO: 2710374 - RNA, 19 nt, Artificial Sequence
  Description of Artificial Sequence: Synthetic oligonucleotide
uccaugcaaauuuuacaca

SEQ ID NO: 2710375 - RNA, 19 nt, Artificial Sequence
  Description of Artificial Sequence: Synthetic oligonucleotide
aaucuuggcgaaaucaaaa

SEQ ID NO: 2710376 - RNA, 19 nt, Artificial Sequence
  Description of Artificial Sequence: Synthetic oligonucleotide
auuaguuuagaaccagcua

SEQ ID NO: 2710377 - RNA, 19 nt, Artificial Sequence
  Description of Artificial Sequence: Synthetic oligonucleotide
uggucuuucaucgcuagac

SEQ ID NO: 2710378 - RNA, 19 nt, Artificial Sequence
  Description of Artificial Sequence: Synthetic oligonucleotide
uuagaaccagcuauuccaa

SEQ ID NO: 2710379 - RNA, 19 nt, Artificial Sequence
  Description of Artificial Sequence: Synthetic oligonucleotide
cacauucacauccaaaaga

SEQ ID NO: 2710380 - RNA, 19 nt, Artificial Sequence
  Description of Artificial Sequence: Synthetic oligonucleotide
ugucugucuuuuaaaacua

SEQ ID NO: 2710381 - RNA, 19 nt, Artificial Sequence
  Description of Artificial Sequence: Synthetic oligonucleotide
aguuuagaaccagcuauuc

SEQ ID NO: 2710382 - RNA, 19 nt, Artificial Sequence
  Description of Artificial Sequence: Synthetic oligonucleotide
gguacagguuaccaugugg

SEQ ID NO: 2710383 - RNA, 19 nt, Artificial Sequence
  Description of Artificial Sequence: Synthetic oligonucleotide
caacccugagcccagacac

SEQ ID NO: 2710384 - RNA, 19 nt, Artificial Sequence
  Description of Artificial Sequence: Synthetic oligonucleotide
auuuuacacagguucuccu

SEQ ID NO: 2710385 - RNA, 19 nt, Artificial Sequence
  Description of Artificial Sequence: Synthetic oligonucleotide
agcuauguccuguaaggca

SEQ ID NO: 2710386 - RNA, 19 nt, Artificial Sequence
  Description of Artificial Sequence: Synthetic oligonucleotide
acagcuuauuaguuuagaa

SEQ ID NO: 2710387 - RNA, 19 nt, Artificial Sequence
  Description of Artificial Sequence: Synthetic oligonucleotide
ugauccuuguacagucgag

SEQ ID NO: 2710388 - RNA, 19 nt, Artificial Sequence
  Description of Artificial Sequence: Synthetic oligonucleotide
guacagguuaccauguggc

SEQ ID NO: 2710389 - RNA, 19 nt, Artificial Sequence
  Description of Artificial Sequence: Synthetic oligonucleotide
gaagacgugcacugcucgg

SEQ ID NO: 2710390 - RNA, 19 nt, Artificial Sequence
  Description of Artificial Sequence: Synthetic oligonucleotide
cuauuccaaccgauaaacc

SEQ ID NO: 2710391 - RNA, 19 nt, Artificial Sequence
  Description of Artificial Sequence: Synthetic oligonucleotide
agacacuuugagcuauguc

SEQ ID NO: 2710392 - RNA, 19 nt, Artificial Sequence
  Description of Artificial Sequence: Synthetic oligonucleotide
ugaagaagccaaugcuagc

SEQ ID NO: 2710393 - RNA, 19 nt, Artificial Sequence
  Description of Artificial Sequence: Synthetic oligonucleotide
uccuagaccagaaggcacu

SEQ ID NO: 2710394 - RNA, 19 nt, Artificial Sequence
  Description of Artificial Sequence: Synthetic oligonucleotide
uccuuguacagucgaguca

SEQ ID NO: 2710395 - RNA, 19 nt, Artificial Sequence
  Description of Artificial Sequence: Synthetic oligonucleotide
uauagacuauuaauucuuu

SEQ ID NO: 2710396 - RNA, 19 nt, Artificial Sequence
  Description of Artificial Sequence: Synthetic oligonucleotide
aaacuaaguaugaacugaa

SEQ ID NO: 2710397 - RNA, 19 nt, Artificial Sequence
  Description of Artificial Sequence: Synthetic oligonucleotide
uucacauccaaaagauuuu

SEQ ID NO: 2710398 - RNA, 19 nt, Artificial Sequence
  Description of Artificial Sequence: Synthetic oligonucleotide
ucguuugccacacuuggua

SEQ ID NO: 2710399 - RNA, 19 nt, Artificial Sequence
  Description of Artificial Sequence: Synthetic oligonucleotide
cuguaaggcacugaagaag

SEQ ID NO: 2710400 - RNA, 19 nt, Artificial Sequence
  Description of Artificial Sequence: Synthetic oligonucleotide
gucuuuuaaaacuaaguau

SEQ ID NO: 2710401 - RNA, 19 nt, Artificial Sequence
  Description of Artificial Sequence: Synthetic oligonucleotide
uguacagucgagucacccu

SEQ ID NO: 2710402 - RNA, 19 nt, Artificial Sequence
  Description of Artificial Sequence: Synthetic oligonucleotide
ucuuuacagcuuauuaguu

SEQ ID NO: 2710403 - RNA, 19 nt, Artificial Sequence
  Description of Artificial Sequence: Synthetic oligonucleotide
ccaugcaaauuuuacacag

SEQ ID NO: 2710404 - RNA, 19 nt, Artificial Sequence
  Description of Artificial Sequence: Synthetic oligonucleotide
ucauucguuugccacacuu

SEQ ID NO: 2710405 - RNA, 19 nt, Artificial Sequence
  Description of Artificial Sequence: Synthetic oligonucleotide
aauacacauuuggguuugc

SEQ ID NO: 2710406 - RNA, 19 nt, Artificial Sequence
  Description of Artificial Sequence: Synthetic oligonucleotide
uacagguuaccauguggcc

SEQ ID NO: 2710407 - RNA, 19 nt, Artificial Sequence
  Description of Artificial Sequence: Synthetic oligonucleotide
aaccagucagcugucuguc

SEQ ID NO: 2710408 - RNA, 19 nt, Artificial Sequence
  Description of Artificial Sequence: Synthetic oligonucleotide
gcucggaugacauacugcc

SEQ ID NO: 2710409 - RNA, 19 nt, Artificial Sequence
  Description of Artificial Sequence: Synthetic oligonucleotide
acauucacauccaaaagau

SEQ ID NO: 2710410 - RNA, 19 nt, Artificial Sequence
  Description of Artificial Sequence: Synthetic oligonucleotide
auauagacuauuaauucuu

SEQ ID NO: 2710411 - RNA, 19 nt, Artificial Sequence
  Description of Artificial Sequence: Synthetic oligonucleotide
ugcucggaugacauacugc

SEQ ID NO: 2710412 - RNA, 19 nt, Artificial Sequence
  Description of Artificial Sequence: Synthetic oligonucleotide
uuccaaccgauaaaccagu

SEQ ID NO: 2710413 - RNA, 19 nt, Artificial Sequence
  Description of Artificial Sequence: Synthetic oligonucleotide
auaaagcagagcucuguaa

SEQ ID NO: 2710414 - RNA, 19 nt, Artificial Sequence
  Description of Artificial Sequence: Synthetic oligonucleotide
gucuuucaucgcuagacac

SEQ ID NO: 2710415 - RNA, 19 nt, Artificial Sequence
  Description of Artificial Sequence: Synthetic oligonucleotide
gcagaacacagucaauggg

SEQ ID NO: 2710416 - RNA, 19 nt, Artificial Sequence
  Description of Artificial Sequence: Synthetic oligonucleotide
accgauaaaccagucagcu

SEQ ID NO: 2710417 - RNA, 19 nt, Artificial Sequence
  Description of Artificial Sequence: Synthetic oligonucleotide
ucaucgcuagacaccaggu

SEQ ID NO: 2710418 - RNA, 19 nt, Artificial Sequence
  Description of Artificial Sequence: Synthetic oligonucleotide
cauucguuugccacacuug

SEQ ID NO: 2710419 - RNA, 19 nt, Artificial Sequence
  Description of Artificial Sequence: Synthetic oligonucleotide
ccguuuuggucuuucaucg

SEQ ID NO: 2710420 - RNA, 19 nt, Artificial Sequence
  Description of Artificial Sequence: Synthetic oligonucleotide
gaaaucuuggcgaaaucaa

SEQ ID NO: 2710421 - RNA, 19 nt, Artificial Sequence
  Description of Artificial Sequence: Synthetic oligonucleotide
uaguuuagaaccagcuauu

SEQ ID NO: 2710422 - RNA, 19 nt, Artificial Sequence
  Description of Artificial Sequence: Synthetic oligonucleotide
aaaucuuggcgaaaucaaa

SEQ ID NO: 2710423 - RNA, 19 nt, Artificial Sequence
  Description of Artificial Sequence: Synthetic oligonucleotide
ugcacugcucggaugacau

SEQ ID NO: 2710424 - RNA, 19 nt, Artificial Sequence
  Description of Artificial Sequence: Synthetic oligonucleotide
auagacuauuaauucuuua

SEQ ID NO: 2710425 - RNA, 19 nt, Artificial Sequence
  Description of Artificial Sequence: Synthetic oligonucleotide
uuaauucuuuacagcuuau

SEQ ID NO: 2710426 - RNA, 19 nt, Artificial Sequence
  Description of Artificial Sequence: Synthetic oligonucleotide
cagguuaccauguggccac

SEQ ID NO: 2710427 - RNA, 19 nt, Artificial Sequence
  Description of Artificial Sequence: Synthetic oligonucleotide
uacacauuuggguuugcuu

SEQ ID NO: 2710428 - RNA, 19 nt, Artificial Sequence
  Description of Artificial Sequence: Synthetic oligonucleotide
uuucugauccuuguacagu

SEQ ID NO: 2710429 - RNA, 19 nt, Artificial Sequence
  Description of Artificial Sequence: Synthetic oligonucleotide
guacaauauagacuauuaa

SEQ ID NO: 2710430 - RNA, 19 nt, Artificial Sequence
  Description of Artificial Sequence: Synthetic oligonucleotide
gaguccaugcaaauuuuac

SEQ ID NO: 2710431 - RNA, 19 nt, Artificial Sequence
  Description of Artificial Sequence: Synthetic oligonucleotide
uuuuggucuuucaucgcua

SEQ ID NO: 2710432 - RNA, 19 nt, Artificial Sequence
  Description of Artificial Sequence: Synthetic oligonucleotide
agaagccaaugcuagcccu

SEQ ID NO: 2710433 - RNA, 19 nt, Artificial Sequence
  Description of Artificial Sequence: Synthetic oligonucleotide
ugcaaauuuuacacagguu

SEQ ID NO: 2710434 - RNA, 19 nt, Artificial Sequence
  Description of Artificial Sequence: Synthetic oligonucleotide
cugucugucuuuuaaaacu

SEQ ID NO: 2710435 - RNA, 19 nt, Artificial Sequence
  Description of Artificial Sequence: Synthetic oligonucleotide
uuguacagucgagucaccc

SEQ ID NO: 2710436 - RNA, 19 nt, Artificial Sequence
  Description of Artificial Sequence: Synthetic oligonucleotide
acugaaaucuuggcgaaau

SEQ ID NO: 2710437 - RNA, 19 nt, Artificial Sequence
  Description of Artificial Sequence: Synthetic oligonucleotide
gaccggaagacgugcacug

SEQ ID NO: 2710438 - RNA, 19 nt, Artificial Sequence
  Description of Artificial Sequence: Synthetic oligonucleotide
gcuauuccaaccgauaaac

SEQ ID NO: 2710439 - RNA, 19 nt, Artificial Sequence
  Description of Artificial Sequence: Synthetic oligonucleotide
cauucauucguuugccaca

SEQ ID NO: 2710440 - RNA, 19 nt, Artificial Sequence
  Description of Artificial Sequence: Synthetic oligonucleotide
uuguacaauauagacuauu

SEQ ID NO: 2710441 - RNA, 19 nt, Artificial Sequence
  Description of Artificial Sequence: Synthetic oligonucleotide
ucgcuagacaccaggugcu

SEQ ID NO: 2710442 - RNA, 19 nt, Artificial Sequence
  Description of Artificial Sequence: Synthetic oligonucleotide
gagcccagacacuuugagc

SEQ ID NO: 2710443 - RNA, 19 nt, Artificial Sequence
  Description of Artificial Sequence: Synthetic oligonucleotide
guacagucgagucacccuc

SEQ ID NO: 2710444 - RNA, 19 nt, Artificial Sequence
  Description of Artificial Sequence: Synthetic oligonucleotide
acacagguucuccuccuag

SEQ ID NO: 2710445 - RNA, 19 nt, Artificial Sequence
  Description of Artificial Sequence: Synthetic oligonucleotide
uuugagcuauguccuguaa

SEQ ID NO: 2710446 - RNA, 19 nt, Artificial Sequence
  Description of Artificial Sequence: Synthetic oligonucleotide
cacacuugguacagguuac

SEQ ID NO: 2710447 - RNA, 19 nt, Artificial Sequence
  Description of Artificial Sequence: Synthetic oligonucleotide
acuugguacagguuaccau

SEQ ID NO: 2710448 - RNA, 19 nt, Artificial Sequence
  Description of Artificial Sequence: Synthetic oligonucleotide
agaacacagucaaugggug

SEQ ID NO: 2710449 - RNA, 19 nt, Artificial Sequence
  Description of Artificial Sequence: Synthetic oligonucleotide
acgugcacugcucggauga

SEQ ID NO: 2710450 - RNA, 19 nt, Artificial Sequence
  Description of Artificial Sequence: Synthetic oligonucleotide
uacagcuuauuaguuuaga

SEQ ID NO: 2710451 - RNA, 19 nt, Artificial Sequence
  Description of Artificial Sequence: Synthetic oligonucleotide
cacugcucggaugacauac

SEQ ID NO: 2710452 - RNA, 19 nt, Artificial Sequence
  Description of Artificial Sequence: Synthetic oligonucleotide
aggaccggaagacgugcac

SEQ ID NO: 2710453 - RNA, 19 nt, Artificial Sequence
  Description of Artificial Sequence: Synthetic oligonucleotide
acacuuugagcuauguccu

SEQ ID NO: 2710454 - RNA, 19 nt, Artificial Sequence
  Description of Artificial Sequence: Synthetic oligonucleotide
caaauuuuacacagguucu

SEQ ID NO: 2710455 - RNA, 19 nt, Artificial Sequence
  Description of Artificial Sequence: Synthetic oligonucleotide
aaccagcuauuccaaccga

SEQ ID NO: 2710456 - RNA, 19 nt, Artificial Sequence
  Description of Artificial Sequence: Synthetic oligonucleotide
auaagccacuuggagcaac

SEQ ID NO: 2710457 - RNA, 19 nt, Artificial Sequence
  Description of Artificial Sequence: Synthetic oligonucleotide
cucggaugacauacugccg

SEQ ID NO: 2710458 - RNA, 19 nt, Artificial Sequence
  Description of Artificial Sequence: Synthetic oligonucleotide
cuuucaucgcuagacacca

SEQ ID NO: 2710459 - RNA, 19 nt, Artificial Sequence
  Description of Artificial Sequence: Synthetic oligonucleotide
ugaguccaugcaaauuuua

SEQ ID NO: 2710460 - RNA, 19 nt, Artificial Sequence
  Description of Artificial Sequence: Synthetic oligonucleotide
ggaagacgugcacugcucg

SEQ ID NO: 2710461 - RNA, 19 nt, Artificial Sequence
  Description of Artificial Sequence: Synthetic oligonucleotide
agcuauuccaaccgauaaa

SEQ ID NO: 2710462 - RNA, 19 nt, Artificial Sequence
  Description of Artificial Sequence: Synthetic oligonucleotide
aaggcacugaagaagccaa

SEQ ID NO: 2710463 - RNA, 19 nt, Artificial Sequence
  Description of Artificial Sequence: Synthetic oligonucleotide
acacuugguacagguuacc

SEQ ID NO: 2710464 - RNA, 19 nt, Artificial Sequence
  Description of Artificial Sequence: Synthetic oligonucleotide
uucguuugccacacuuggu

SEQ ID NO: 2710465 - RNA, 19 nt, Artificial Sequence
  Description of Artificial Sequence: Synthetic oligonucleotide
uagcccucaggaccggaag

SEQ ID NO: 2710466 - RNA, 19 nt, Artificial Sequence
  Description of Artificial Sequence: Synthetic oligonucleotide
cugucuuuuaaaacuaagu

SEQ ID NO: 2710467 - RNA, 19 nt, Artificial Sequence
  Description of Artificial Sequence: Synthetic oligonucleotide
uuacacagguucuccuccu

SEQ ID NO: 2710468 - RNA, 19 nt, Artificial Sequence
  Description of Artificial Sequence: Synthetic oligonucleotide
aagacgugcacugcucgga

SEQ ID NO: 2710469 - RNA, 19 nt, Artificial Sequence
  Description of Artificial Sequence: Synthetic oligonucleotide
gaacacagucaauggguga

SEQ ID NO: 2710470 - RNA, 19 nt, Artificial Sequence
  Description of Artificial Sequence: Synthetic oligonucleotide
gaacugaaaucuuggcgaa

SEQ ID NO: 2710471 - RNA, 19 nt, Artificial Sequence
  Description of Artificial Sequence: Synthetic oligonucleotide
cuccuagaccagaaggcac

SEQ ID NO: 2710472 - RNA, 19 nt, Artificial Sequence
  Description of Artificial Sequence: Synthetic oligonucleotide
acaacccugagcccagaca

SEQ ID NO: 2710473 - RNA, 19 nt, Artificial Sequence
  Description of Artificial Sequence: Synthetic oligonucleotide
ucaggaccggaagacgugc

SEQ ID NO: 2710474 - RNA, 19 nt, Artificial Sequence
  Description of Artificial Sequence: Synthetic oligonucleotide
aagccacuuggagcaacac

SEQ ID NO: 2710475 - RNA, 19 nt, Artificial Sequence
  Description of Artificial Sequence: Synthetic oligonucleotide
acugaagaagccaaugcua

SEQ ID NO: 2710476 - RNA, 19 nt, Artificial Sequence
  Description of Artificial Sequence: Synthetic oligonucleotide
auuauaaagcagagcucug

SEQ ID NO: 2710477 - RNA, 19 nt, Artificial Sequence
  Description of Artificial Sequence: Synthetic oligonucleotide
gagcuauguccuguaaggc

SEQ ID NO: 2710478 - RNA, 19 nt, Artificial Sequence
  Description of Artificial Sequence: Synthetic oligonucleotide
ucacauccaaaagauuuua

SEQ ID NO: 2710479 - RNA, 19 nt, Artificial Sequence
  Description of Artificial Sequence: Synthetic oligonucleotide
augacauacugccggcaga

SEQ ID NO: 2710480 - RNA, 19 nt, Artificial Sequence
  Description of Artificial Sequence: Synthetic oligonucleotide
cagguucuccuccuagacc

SEQ ID NO: 2710481 - RNA, 19 nt, Artificial Sequence
  Description of Artificial Sequence: Synthetic oligonucleotide
cagucaaugggugagucca

SEQ ID NO: 2710482 - RNA, 19 nt, Artificial Sequence
  Description of Artificial Sequence: Synthetic oligonucleotide
ugguacagguuaccaugug

SEQ ID NO: 2710483 - RNA, 19 nt, Artificial Sequence
  Description of Artificial Sequence: Synthetic oligonucleotide
gcacugaagaagccaaugc

SEQ ID NO: 2710484 - RNA, 19 nt, Artificial Sequence
  Description of Artificial Sequence: Synthetic oligonucleotide
cagaacacagucaaugggu

SEQ ID NO: 2710485 - RNA, 19 nt, Artificial Sequence
  Description of Artificial Sequence: Synthetic oligonucleotide
aacuaaguaugaacugaaa

SEQ ID NO: 2710486 - RNA, 19 nt, Artificial Sequence
  Description of Artificial Sequence: Synthetic oligonucleotide
agccacuuggagcaacaca

SEQ ID NO: 2710487 - RNA, 19 nt, Artificial Sequence
  Description of Artificial Sequence: Synthetic oligonucleotide
caaugcuagcccucaggac

SEQ ID NO: 2710488 - RNA, 19 nt, Artificial Sequence
  Description of Artificial Sequence: Synthetic oligonucleotide
ugacauacugccggcagau

SEQ ID NO: 2710489 - RNA, 19 nt, Artificial Sequence
  Description of Artificial Sequence: Synthetic oligonucleotide
uaauucuuuacagcuuauu

SEQ ID NO: 2710490 - RNA, 19 nt, Artificial Sequence
  Description of Artificial Sequence: Synthetic oligonucleotide
caucgcuagacaccaggug

SEQ ID NO: 2710491 - RNA, 19 nt, Artificial Sequence
  Description of Artificial Sequence: Synthetic oligonucleotide
guuuuggucuuucaucgcu

SEQ ID NO: 2710492 - RNA, 19 nt, Artificial Sequence
  Description of Artificial Sequence: Synthetic oligonucleotide
uuggucuuucaucgcuaga

SEQ ID NO: 2710493 - RNA, 19 nt, Artificial Sequence
  Description of Artificial Sequence: Synthetic oligonucleotide
uuucaucgcuagacaccag

SEQ ID NO: 2710494 - RNA, 19 nt, Artificial Sequence
  Description of Artificial Sequence: Synthetic oligonucleotide
aucuuaauauaagccacuu

SEQ ID NO: 2710495 - RNA, 19 nt, Artificial Sequence
  Description of Artificial Sequence: Synthetic oligonucleotide
aaguaugaacugaaaucuu

SEQ ID NO: 2710496 - RNA, 19 nt, Artificial Sequence
  Description of Artificial Sequence: Synthetic oligonucleotide
agauuuuaacaaauuugua

SEQ ID NO: 2710497 - RNA, 19 nt, Artificial Sequence
  Description of Artificial Sequence: Synthetic oligonucleotide
augcuagcccucaggaccg

SEQ ID NO: 2710498 - RNA, 19 nt, Artificial Sequence
  Description of Artificial Sequence: Synthetic oligonucleotide
gcuauguccuguaaggcac

SEQ ID NO: 2710499 - RNA, 19 nt, Artificial Sequence
  Description of Artificial Sequence: Synthetic oligonucleotide
acaccaggugcuggagucc

SEQ ID NO: 2710500 - RNA, 19 nt, Artificial Sequence
  Description of Artificial Sequence: Synthetic oligonucleotide
cuagacaccaggugcugga

SEQ ID NO: 2710501 - RNA, 19 nt, Artificial Sequence
  Description of Artificial Sequence: Synthetic oligonucleotide
aagccaaugcuagcccuca

SEQ ID NO: 2710502 - RNA, 19 nt, Artificial Sequence
  Description of Artificial Sequence: Synthetic oligonucleotide
gauaaaccagucagcuguc

SEQ ID NO: 2710503 - RNA, 19 nt, Artificial Sequence
  Description of Artificial Sequence: Synthetic oligonucleotide
uauguccuguaaggcacug

SEQ ID NO: 2710504 - RNA, 19 nt, Artificial Sequence
  Description of Artificial Sequence: Synthetic oligonucleotide
gccaaugcuagcccucagg

SEQ ID NO: 2710505 - RNA, 19 nt, Artificial Sequence
  Description of Artificial Sequence: Synthetic oligonucleotide
cucaggaccggaagacgug

SEQ ID NO: 2710506 - RNA, 19 nt, Artificial Sequence
  Description of Artificial Sequence: Synthetic oligonucleotide
gaguccuuucugauccuug

SEQ ID NO: 2710507 - RNA, 19 nt, Artificial Sequence
  Description of Artificial Sequence: Synthetic oligonucleotide
uccaaccgauaaaccaguc

SEQ ID NO: 2710508 - RNA, 19 nt, Artificial Sequence
  Description of Artificial Sequence: Synthetic oligonucleotide
cugaaaucuuggcgaaauc

SEQ ID NO: 2710509 - RNA, 19 nt, Artificial Sequence
  Description of Artificial Sequence: Synthetic oligonucleotide
accggaagacgugcacugc

SEQ ID NO: 2710510 - RNA, 19 nt, Artificial Sequence
  Description of Artificial Sequence: Synthetic oligonucleotide
cuuguacagucgagucacc

SEQ ID NO: 2710511 - RNA, 19 nt, Artificial Sequence
  Description of Artificial Sequence: Synthetic oligonucleotide
auacugccggcagauagga

SEQ ID NO: 2710512 - RNA, 19 nt, Artificial Sequence
  Description of Artificial Sequence: Synthetic oligonucleotide
aggugcuggaguccuuucu

SEQ ID NO: 2710513 - RNA, 19 nt, Artificial Sequence
  Description of Artificial Sequence: Synthetic oligonucleotide
uuuuaacacccaggugaga

SEQ ID NO: 2710514 - RNA, 19 nt, Artificial Sequence
  Description of Artificial Sequence: Synthetic oligonucleotide
cugcucggaugacauacug

SEQ ID NO: 2710515 - RNA, 19 nt, Artificial Sequence
  Description of Artificial Sequence: Synthetic oligonucleotide
auacacauuuggguuugcu

SEQ ID NO: 2710516 - RNA, 19 nt, Artificial Sequence
  Description of Artificial Sequence: Synthetic oligonucleotide
agacaccaggugcuggagu

SEQ ID NO: 2710517 - RNA, 19 nt, Artificial Sequence
  Description of Artificial Sequence: Synthetic oligonucleotide
uagacaccaggugcuggag

SEQ ID NO: 2710518 - RNA, 19 nt, Artificial Sequence
  Description of Artificial Sequence: Synthetic oligonucleotide
gaagccaaugcuagcccuc

SEQ ID NO: 2710519 - RNA, 19 nt, Artificial Sequence
  Description of Artificial Sequence: Synthetic oligonucleotide
cugauccuuguacagucga

SEQ ID NO: 2710520 - RNA, 19 nt, Artificial Sequence
  Description of Artificial Sequence: Synthetic oligonucleotide
agaccagaaggcacugcuc

SEQ ID NO: 2710521 - RNA, 19 nt, Artificial Sequence
  Description of Artificial Sequence: Synthetic oligonucleotide
gauccuuguacagucgagu

SEQ ID NO: 2710522 - RNA, 19 nt, Artificial Sequence
  Description of Artificial Sequence: Synthetic oligonucleotide
agcagagcucuguaacaaa

SEQ ID NO: 2710523 - RNA, 19 nt, Artificial Sequence
  Description of Artificial Sequence: Synthetic oligonucleotide
gacgugcacugcucggaug

SEQ ID NO: 2710524 - RNA, 19 nt, Artificial Sequence
  Description of Artificial Sequence: Synthetic oligonucleotide
cuuuacagcuuauuaguuu

SEQ ID NO: 2710525 - RNA, 19 nt, Artificial Sequence
  Description of Artificial Sequence: Synthetic oligonucleotide
ggugaguccaugcaaauuu

SEQ ID NO: 2710526 - RNA, 19 nt, Artificial Sequence
  Description of Artificial Sequence: Synthetic oligonucleotide
aacugaaaucuuggcgaaa

SEQ ID NO: 2710527 - RNA, 19 nt, Artificial Sequence
  Description of Artificial Sequence: Synthetic oligonucleotide
cagcuauuccaaccgauaa

SEQ ID NO: 2710528 - RNA, 19 nt, Artificial Sequence
  Description of Artificial Sequence: Synthetic oligonucleotide
cacuuugagcuauguccug

SEQ ID NO: 2710529 - RNA, 19 nt, Artificial Sequence
  Description of Artificial Sequence: Synthetic oligonucleotide
cagauaggacauucauuca

SEQ ID NO: 2710530 - RNA, 19 nt, Artificial Sequence
  Description of Artificial Sequence: Synthetic oligonucleotide
guaaggcacugaagaagcc

SEQ ID NO: 2710531 - RNA, 19 nt, Artificial Sequence
  Description of Artificial Sequence: Synthetic oligonucleotide
gcuuauuaguuuagaacca

SEQ ID NO: 2710532 - RNA, 19 nt, Artificial Sequence
  Description of Artificial Sequence: Synthetic oligonucleotide
ugggugaguccaugcaaau

SEQ ID NO: 2710533 - RNA, 19 nt, Artificial Sequence
  Description of Artificial Sequence: Synthetic oligonucleotide
ggagcaacacauucacauc

SEQ ID NO: 2710534 - RNA, 19 nt, Artificial Sequence
  Description of Artificial Sequence: Synthetic oligonucleotide
auaaaccagucagcugucu

SEQ ID NO: 2710535 - RNA, 19 nt, Artificial Sequence
  Description of Artificial Sequence: Synthetic oligonucleotide
agcaacacauucacaucca

SEQ ID NO: 2710536 - RNA, 19 nt, Artificial Sequence
  Description of Artificial Sequence: Synthetic oligonucleotide
cccguuuuggucuuucauc

SEQ ID NO: 2710537 - RNA, 19 nt, Artificial Sequence
  Description of Artificial Sequence: Synthetic oligonucleotide
cacauccaaaagauuuuaa

SEQ ID NO: 2710538 - RNA, 19 nt, Artificial Sequence
  Description of Artificial Sequence: Synthetic oligonucleotide
gucaaugggugaguccaug

SEQ ID NO: 2710539 - RNA, 19 nt, Artificial Sequence
  Description of Artificial Sequence: Synthetic oligonucleotide
agcccucaggaccggaaga

SEQ ID NO: 2710540 - RNA, 19 nt, Artificial Sequence
  Description of Artificial Sequence: Synthetic oligonucleotide
ggcacugaagaagccaaug

SEQ ID NO: 2710541 - RNA, 19 nt, Artificial Sequence
  Description of Artificial Sequence: Synthetic oligonucleotide
uacacagguucuccuccua

SEQ ID NO: 2710542 - RNA, 19 nt, Artificial Sequence
  Description of Artificial Sequence: Synthetic oligonucleotide
cuagaccagaaggcacugc

SEQ ID NO: 2710543 - RNA, 19 nt, Artificial Sequence
  Description of Artificial Sequence: Synthetic oligonucleotide
ggucuuucaucgcuagaca

SEQ ID NO: 2710544 - RNA, 19 nt, Artificial Sequence
  Description of Artificial Sequence: Synthetic oligonucleotide
gauaggacauucauucauu

SEQ ID NO: 2710545 - RNA, 19 nt, Artificial Sequence
  Description of Artificial Sequence: Synthetic oligonucleotide
cacagucaaugggugaguc

SEQ ID NO: 2710546 - RNA, 19 nt, Artificial Sequence
  Description of Artificial Sequence: Synthetic oligonucleotide
augggugaguccaugcaaa

SEQ ID NO: 2710547 - RNA, 19 nt, Artificial Sequence
  Description of Artificial Sequence: Synthetic oligonucleotide
gacauucauucauucguuu

SEQ ID NO: 2710548 - RNA, 19 nt, Artificial Sequence
  Description of Artificial Sequence: Synthetic oligonucleotide
uucauucguuugccacacu

SEQ ID NO: 2710549 - RNA, 19 nt, Artificial Sequence
  Description of Artificial Sequence: Synthetic oligonucleotide
agacgugcacugcucggau

SEQ ID NO: 2710550 - RNA, 19 nt, Artificial Sequence
  Description of Artificial Sequence: Synthetic oligonucleotide
guccuguaaggcacugaag

SEQ ID NO: 2710551 - RNA, 19 nt, Artificial Sequence
  Description of Artificial Sequence: Synthetic oligonucleotide
cgauaaaccagucagcugu

SEQ ID NO: 2710552 - RNA, 19 nt, Artificial Sequence
  Description of Artificial Sequence: Synthetic oligonucleotide
accagucagcugucugucu

SEQ ID NO: 2710553 - RNA, 19 nt, Artificial Sequence
  Description of Artificial Sequence: Synthetic oligonucleotide
gugcuggaguccuuucuga

SEQ ID NO: 2710554 - RNA, 19 nt, Artificial Sequence
  Description of Artificial Sequence: Synthetic oligonucleotide
agccaaugcuagcccucag

SEQ ID NO: 2710555 - RNA, 19 nt, Artificial Sequence
  Description of Artificial Sequence: Synthetic oligonucleotide
uauaagccacuuggagcaa

SEQ ID NO: 2710556 - RNA, 19 nt, Artificial Sequence
  Description of Artificial Sequence: Synthetic oligonucleotide
ccuuucugauccuuguaca

SEQ ID NO: 2710557 - RNA, 19 nt, Artificial Sequence
  Description of Artificial Sequence: Synthetic oligonucleotide
guuaccauguggccacacu

SEQ ID NO: 2710558 - RNA, 19 nt, Artificial Sequence
  Description of Artificial Sequence: Synthetic oligonucleotide
cuuugagcuauguccugua

SEQ ID NO: 2710559 - RNA, 19 nt, Artificial Sequence
  Description of Artificial Sequence: Synthetic oligonucleotide
ccaaaagauuuuaacaaau

SEQ ID NO: 2710560 - RNA, 19 nt, Artificial Sequence
  Description of Artificial Sequence: Synthetic oligonucleotide
ccugagcccagacacuuug

SEQ ID NO: 2710561 - RNA, 19 nt, Artificial Sequence
  Description of Artificial Sequence: Synthetic oligonucleotide
uggaguccuuucugauccu

SEQ ID NO: 2710562 - RNA, 19 nt, Artificial Sequence
  Description of Artificial Sequence: Synthetic oligonucleotide
ccaaugcuagcccucagga

SEQ ID NO: 2710563 - RNA, 19 nt, Artificial Sequence
  Description of Artificial Sequence: Synthetic oligonucleotide
gcuagacaccaggugcugg

SEQ ID NO: 2710564 - RNA, 19 nt, Artificial Sequence
  Description of Artificial Sequence: Synthetic oligonucleotide
uggccacacuccagcagaa

SEQ ID NO: 2710565 - RNA, 19 nt, Artificial Sequence
  Description of Artificial Sequence: Synthetic oligonucleotide
aacccugagcccagacacu

SEQ ID NO: 2710566 - RNA, 19 nt, Artificial Sequence
  Description of Artificial Sequence: Synthetic oligonucleotide
accagcuauuccaaccgau

SEQ ID NO: 2710567 - RNA, 19 nt, Artificial Sequence
  Description of Artificial Sequence: Synthetic oligonucleotide
acacagucaaugggugagu

SEQ ID NO: 2710568 - RNA, 19 nt, Artificial Sequence
  Description of Artificial Sequence: Synthetic oligonucleotide
cacuugguacagguuacca

SEQ ID NO: 2710569 - RNA, 19 nt, Artificial Sequence
  Description of Artificial Sequence: Synthetic oligonucleotide
ccgauaaaccagucagcug

SEQ ID NO: 2710570 - RNA, 19 nt, Artificial Sequence
  Description of Artificial Sequence: Synthetic oligonucleotide
gucugucuuuuaaaacuaa

SEQ ID NO: 2710571 - RNA, 19 nt, Artificial Sequence
  Description of Artificial Sequence: Synthetic oligonucleotide
ccacacuugguacagguua

SEQ ID NO: 2710572 - RNA, 19 nt, Artificial Sequence
  Description of Artificial Sequence: Synthetic oligonucleotide
acugcucggaugacauacu

SEQ ID NO: 2710573 - RNA, 19 nt, Artificial Sequence
  Description of Artificial Sequence: Synthetic oligonucleotide
gccacuuggagcaacacau

SEQ ID NO: 2710574 - RNA, 19 nt, Artificial Sequence
  Description of Artificial Sequence: Synthetic oligonucleotide
cagcugucugucuuuuaaa

SEQ ID NO: 2710575 - RNA, 19 nt, Artificial Sequence
  Description of Artificial Sequence: Synthetic oligonucleotide
ccaaccgauaaaccaguca

SEQ ID NO: 2710576 - RNA, 19 nt, Artificial Sequence
  Description of Artificial Sequence: Synthetic oligonucleotide
cguuugccacacuugguac

SEQ ID NO: 2710577 - RNA, 19 nt, Artificial Sequence
  Description of Artificial Sequence: Synthetic oligonucleotide
ccagaaggcacugcucccc

SEQ ID NO: 2710578 - RNA, 19 nt, Artificial Sequence
  Description of Artificial Sequence: Synthetic oligonucleotide
cuagcccucaggaccggaa

SEQ ID NO: 2710579 - RNA, 19 nt, Artificial Sequence
  Description of Artificial Sequence: Synthetic oligonucleotide
auguccuguaaggcacuga

SEQ ID NO: 2710580 - RNA, 19 nt, Artificial Sequence
  Description of Artificial Sequence: Synthetic oligonucleotide
gcagagcucuguaacaaaa

SEQ ID NO: 2710581 - RNA, 19 nt, Artificial Sequence
  Description of Artificial Sequence: Synthetic oligonucleotide
cugagcccagacacuuuga

SEQ ID NO: 2710582 - RNA, 19 nt, Artificial Sequence
  Description of Artificial Sequence: Synthetic oligonucleotide
uaacaacccugagcccaga

SEQ ID NO: 2710583 - RNA, 19 nt, Artificial Sequence
  Description of Artificial Sequence: Synthetic oligonucleotide
caggugcuggaguccuuuc

SEQ ID NO: 2710584 - RNA, 19 nt, Artificial Sequence
  Description of Artificial Sequence: Synthetic oligonucleotide
ugcuagcccucaggaccgg

SEQ ID NO: 2710585 - RNA, 19 nt, Artificial Sequence
  Description of Artificial Sequence: Synthetic oligonucleotide
agucagcugucugucuuuu

SEQ ID NO: 2710586 - RNA, 19 nt, Artificial Sequence
  Description of Artificial Sequence: Synthetic oligonucleotide
cguuuuggucuuucaucgc

SEQ ID NO: 2710587 - RNA, 19 nt, Artificial Sequence
  Description of Artificial Sequence: Synthetic oligonucleotide
cauucacauccaaaagauu

SEQ ID NO: 2710588 - RNA, 19 nt, Artificial Sequence
  Description of Artificial Sequence: Synthetic oligonucleotide
cuauguccuguaaggcacu

SEQ ID NO: 2710589 - RNA, 19 nt, Artificial Sequence
  Description of Artificial Sequence: Synthetic oligonucleotide
caggaccggaagacgugca

SEQ ID NO: 2710590 - RNA, 19 nt, Artificial Sequence
  Description of Artificial Sequence: Synthetic oligonucleotide
agucaaugggugaguccau

SEQ ID NO: 2710591 - RNA, 19 nt, Artificial Sequence
  Description of Artificial Sequence: Synthetic oligonucleotide
gugcacugcucggaugaca

SEQ ID NO: 2710592 - RNA, 19 nt, Artificial Sequence
  Description of Artificial Sequence: Synthetic oligonucleotide
ggaugacauacugccggca

SEQ ID NO: 2710593 - RNA, 19 nt, Artificial Sequence
  Description of Artificial Sequence: Synthetic oligonucleotide
ccagacacuuugagcuaug

SEQ ID NO: 2710594 - RNA, 19 nt, Artificial Sequence
  Description of Artificial Sequence: Synthetic oligonucleotide
gguucuccuccuagaccag

SEQ ID NO: 2710595 - RNA, 19 nt, Artificial Sequence
  Description of Artificial Sequence: Synthetic oligonucleotide
ccagcuauuccaaccgaua

SEQ ID NO: 2710596 - RNA, 19 nt, Artificial Sequence
  Description of Artificial Sequence: Synthetic oligonucleotide
gccggcagauaggacauuc

SEQ ID NO: 2710597 - RNA, 19 nt, Artificial Sequence
  Description of Artificial Sequence: Synthetic oligonucleotide
ccuccuagaccagaaggca

SEQ ID NO: 2710598 - RNA, 19 nt, Artificial Sequence
  Description of Artificial Sequence: Synthetic oligonucleotide
cccucaggaccggaagacg

SEQ ID NO: 2710599 - RNA, 19 nt, Artificial Sequence
  Description of Artificial Sequence: Synthetic oligonucleotide
ccuagaccagaaggcacug

SEQ ID NO: 2710600 - RNA, 19 nt, Artificial Sequence
  Description of Artificial Sequence: Synthetic oligonucleotide
gcccucaggaccggaagac

SEQ ID NO: 2710601 - RNA, 19 nt, Artificial Sequence
  Description of Artificial Sequence: Synthetic oligonucleotide
gucagcugucugucuuuua

SEQ ID NO: 2710602 - RNA, 19 nt, Artificial Sequence
  Description of Artificial Sequence: Synthetic oligonucleotide
aggcacugaagaagccaau

SEQ ID NO: 2710603 - RNA, 19 nt, Artificial Sequence
  Description of Artificial Sequence: Synthetic oligonucleotide
gguuaccauguggccacac

SEQ ID NO: 2710604 - RNA, 19 nt, Artificial Sequence
  Description of Artificial Sequence: Synthetic oligonucleotide
gugaguccaugcaaauuuu

SEQ ID NO: 2710605 - RNA, 19 nt, Artificial Sequence
  Description of Artificial Sequence: Synthetic oligonucleotide
ccucaggaccggaagacgu

SEQ ID NO: 2710606 - RNA, 19 nt, Artificial Sequence
  Description of Artificial Sequence: Synthetic oligonucleotide
cggaagacgugcacugcuc

SEQ ID NO: 2710607 - RNA, 19 nt, Artificial Sequence
  Description of Artificial Sequence: Synthetic oligonucleotide
agguuaccauguggccaca

SEQ ID NO: 2710608 - RNA, 19 nt, Artificial Sequence
  Description of Artificial Sequence: Synthetic oligonucleotide
ggcagauaggacauucauu

SEQ ID NO: 2710609 - RNA, 19 nt, Artificial Sequence
  Description of Artificial Sequence: Synthetic oligonucleotide
ggacauucauucauucguu

SEQ ID NO: 2710610 - RNA, 19 nt, Artificial Sequence
  Description of Artificial Sequence: Synthetic oligonucleotide
cagacacuuugagcuaugu

SEQ ID NO: 2710611 - RNA, 19 nt, Artificial Sequence
  Description of Artificial Sequence: Synthetic oligonucleotide
ccggcagauaggacauuca

SEQ ID NO: 2710612 - RNA, 19 nt, Artificial Sequence
  Description of Artificial Sequence: Synthetic oligonucleotide
ggaccggaagacgugcacu

SEQ ID NO: 2710613 - RNA, 19 nt, Artificial Sequence
  Description of Artificial Sequence: Synthetic oligonucleotide
cagucagcugucugucuuu

SEQ ID NO: 2710614 - RNA, 19 nt, Artificial Sequence
  Description of Artificial Sequence: Synthetic oligonucleotide
ggccacacuccagcagaac

SEQ ID NO: 2710615 - RNA, 19 nt, Artificial Sequence
  Description of Artificial Sequence: Synthetic oligonucleotide
caccaggugcuggaguccu

SEQ ID NO: 2710616 - RNA, 19 nt, Artificial Sequence
  Description of Artificial Sequence: Synthetic oligonucleotide
gcccagacacuuugagcua

SEQ ID NO: 2710617 - RNA, 19 nt, Artificial Sequence
  Description of Artificial Sequence: Synthetic oligonucleotide
ugccggcagauaggacauu

SEQ ID NO: 2710618 - RNA, 19 nt, Artificial Sequence
  Description of Artificial Sequence: Synthetic oligonucleotide
ccggaagacgugcacugcu

SEQ ID NO: 2710619 - RNA, 19 nt, Artificial Sequence
  Description of Artificial Sequence: Synthetic oligonucleotide
gggugaguccaugcaaauu

SEQ ID NO: 2710620 - RNA, 19 nt, Artificial Sequence
  Description of Artificial Sequence: Synthetic oligonucleotide
cgcuagacaccaggugcug

SEQ ID NO: 2710621 - RNA, 19 nt, Artificial Sequence
  Description of Artificial Sequence: Synthetic oligonucleotide
gcacugcucggaugacaua

SEQ ID NO: 2710622 - RNA, 19 nt, Artificial Sequence
  Description of Artificial Sequence: Synthetic oligonucleotide
gcuagcccucaggaccgga

SEQ ID NO: 2710623 - RNA, 19 nt, Artificial Sequence
  Description of Artificial Sequence: Synthetic oligonucleotide
ggaguccuuucugauccuu

SEQ ID NO: 2710624 - RNA, 19 nt, Artificial Sequence
  Description of Artificial Sequence: Synthetic oligonucleotide
ccccguuuuggucuuucau

SEQ ID NO: 2710625 - RNA, 19 nt, Artificial Sequence
  Description of Artificial Sequence: Synthetic oligonucleotide
cggcagauaggacauucau

SEQ ID NO: 2710626 - RNA, 19 nt, Artificial Sequence
  Description of Artificial Sequence: Synthetic oligonucleotide
cgugcacugcucggaugac

SEQ ID NO: 2710627 - RNA, 19 nt, Artificial Sequence
  Description of Artificial Sequence: Synthetic oligonucleotide
cccagacacuuugagcuau

SEQ ID NO: 2710628 - RNA, 19 nt, Artificial Sequence
  Description of Artificial Sequence: Synthetic oligonucleotide
ccacuuggagcaacacauu

SEQ ID NO: 2710629 - RNA, 19 nt, Artificial Sequence
  Description of Artificial Sequence: Synthetic oligonucleotide
cccugagcccagacacuuu

SEQ ID NO: 2710630 - RNA, 19 nt, Artificial Sequence
  Description of Artificial Sequence: Synthetic oligonucleotide
aauucaguggagcauggcc

SEQ ID NO: 2710631 - RNA, 19 nt, Artificial Sequence
  Description of Artificial Sequence: Synthetic oligonucleotide
agagcuuccacgcagcccc

SEQ ID NO: 2710632 - RNA, 19 nt, Artificial Sequence
  Description of Artificial Sequence: Synthetic oligonucleotide
auagcgaucaaaguggcgc

SEQ ID NO: 2710633 - RNA, 19 nt, Artificial Sequence
  Description of Artificial Sequence: Synthetic oligonucleotide
aacacuccacaccauagcg

SEQ ID NO: 2710634 - RNA, 19 nt, Artificial Sequence
  Description of Artificial Sequence: Synthetic oligonucleotide
aaaguggcgcaauagcagg

SEQ ID NO: 2710635 - RNA, 19 nt, Artificial Sequence
  Description of Artificial Sequence: Synthetic oligonucleotide
aucaaaguggcgcaauagc

SEQ ID NO: 2710636 - RNA, 19 nt, Artificial Sequence
  Description of Artificial Sequence: Synthetic oligonucleotide
accaguaagccauaucccc

SEQ ID NO: 2710637 - RNA, 19 nt, Artificial Sequence
  Description of Artificial Sequence: Synthetic oligonucleotide
gaagaggcugcuuucagag

SEQ ID NO: 2710638 - RNA, 19 nt, Artificial Sequence
  Description of Artificial Sequence: Synthetic oligonucleotide
cuuucagagaaaccggugg

SEQ ID NO: 2710639 - RNA, 19 nt, Artificial Sequence
  Description of Artificial Sequence: Synthetic oligonucleotide
uaagccauauccccuaucu

SEQ ID NO: 2710640 - RNA, 19 nt, Artificial Sequence
  Description of Artificial Sequence: Synthetic oligonucleotide
ugacaguccaugaaguccc

SEQ ID NO: 2710641 - RNA, 19 nt, Artificial Sequence
  Description of Artificial Sequence: Synthetic oligonucleotide
cacaccauagcgaucaaag

SEQ ID NO: 2710642 - RNA, 19 nt, Artificial Sequence
  Description of Artificial Sequence: Synthetic oligonucleotide
uccaugaagucccucaaca

SEQ ID NO: 2710643 - RNA, 19 nt, Artificial Sequence
  Description of Artificial Sequence: Synthetic oligonucleotide
auagccagcaagcuggcag

SEQ ID NO: 2710644 - RNA, 19 nt, Artificial Sequence
  Description of Artificial Sequence: Synthetic oligonucleotide
cuagccaguaauucagugg

SEQ ID NO: 2710645 - RNA, 19 nt, Artificial Sequence
  Description of Artificial Sequence: Synthetic oligonucleotide
ucaacacuccacaccauag

SEQ ID NO: 2710646 - RNA, 19 nt, Artificial Sequence
  Description of Artificial Sequence: Synthetic oligonucleotide
acuaacuagccaguaauuc

SEQ ID NO: 2710647 - RNA, 19 nt, Artificial Sequence
  Description of Artificial Sequence: Synthetic oligonucleotide
gauggcaagaugcacugug

SEQ ID NO: 2710648 - RNA, 19 nt, Artificial Sequence
  Description of Artificial Sequence: Synthetic oligonucleotide
accauagcgaucaaagugg

SEQ ID NO: 2710649 - RNA, 19 nt, Artificial Sequence
  Description of Artificial Sequence: Synthetic oligonucleotide
cugacaagagcuuccacgc

SEQ ID NO: 2710650 - RNA, 19 nt, Artificial Sequence
  Description of Artificial Sequence: Synthetic oligonucleotide
ggaccaguaagccauaucc

SEQ ID NO: 2710651 - RNA, 19 nt, Artificial Sequence
  Description of Artificial Sequence: Synthetic oligonucleotide
gcugcuuucagagaaaccg

SEQ ID NO: 2710652 - RNA, 19 nt, Artificial Sequence
  Description of Artificial Sequence: Synthetic oligonucleotide
ugaggugugucuaccugcg

SEQ ID NO: 2710653 - RNA, 19 nt, Artificial Sequence
  Description of Artificial Sequence: Synthetic oligonucleotide
uggagcauggccucagagg

SEQ ID NO: 2710654 - RNA, 19 nt, Artificial Sequence
  Description of Artificial Sequence: Synthetic oligonucleotide
uugacaguccaugaagucc

SEQ ID NO: 2710655 - RNA, 19 nt, Artificial Sequence
  Description of Artificial Sequence: Synthetic oligonucleotide
ucagccccgcuguagaugg

SEQ ID NO: 2710656 - RNA, 19 nt, Artificial Sequence
  Description of Artificial Sequence: Synthetic oligonucleotide
aguaauucaguggagcaug

SEQ ID NO: 2710657 - RNA, 19 nt, Artificial Sequence
  Description of Artificial Sequence: Synthetic oligonucleotide
caccauagcgaucaaagug

SEQ ID NO: 2710658 - RNA, 19 nt, Artificial Sequence
  Description of Artificial Sequence: Synthetic oligonucleotide
uggcccaccacccacgaag

SEQ ID NO: 2710659 - RNA, 19 nt, Artificial Sequence
  Description of Artificial Sequence: Synthetic oligonucleotide
agccauauccccuaucuga

SEQ ID NO: 2710660 - RNA, 19 nt, Artificial Sequence
  Description of Artificial Sequence: Synthetic oligonucleotide
gcaaagugcaggucgaugg

SEQ ID NO: 2710661 - RNA, 19 nt, Artificial Sequence
  Description of Artificial Sequence: Synthetic oligonucleotide
caggccgauggcaagaugc

SEQ ID NO: 2710662 - RNA, 19 nt, Artificial Sequence
  Description of Artificial Sequence: Synthetic oligonucleotide
acacuaacuagccaguaau

SEQ ID NO: 2710663 - RNA, 19 nt, Artificial Sequence
  Description of Artificial Sequence: Synthetic oligonucleotide
ggugggacaguccagcugg

SEQ ID NO: 2710664 - RNA, 19 nt, Artificial Sequence
  Description of Artificial Sequence: Synthetic oligonucleotide
aaaccgguggccccuagga

SEQ ID NO: 2710665 - RNA, 19 nt, Artificial Sequence
  Description of Artificial Sequence: Synthetic oligonucleotide
aggucgauggggugggacc

SEQ ID NO: 2710666 - RNA, 19 nt, Artificial Sequence
  Description of Artificial Sequence: Synthetic oligonucleotide
cuaacuagccaguaauuca

SEQ ID NO: 2710667 - RNA, 19 nt, Artificial Sequence
  Description of Artificial Sequence: Synthetic oligonucleotide
ucugaggugugucuaccug

SEQ ID NO: 2710668 - RNA, 19 nt, Artificial Sequence
  Description of Artificial Sequence: Synthetic oligonucleotide
ugggcacauggcaaaagcc

SEQ ID NO: 2710669 - RNA, 19 nt, Artificial Sequence
  Description of Artificial Sequence: Synthetic oligonucleotide
ucagaggaguuccuggccu

SEQ ID NO: 2710670 - RNA, 19 nt, Artificial Sequence
  Description of Artificial Sequence: Synthetic oligonucleotide
gaucaaaguggcgcaauag

SEQ ID NO: 2710671 - RNA, 19 nt, Artificial Sequence
  Description of Artificial Sequence: Synthetic oligonucleotide
accuuggagaccuuuggug

SEQ ID NO: 2710672 - RNA, 19 nt, Artificial Sequence
  Description of Artificial Sequence: Synthetic oligonucleotide
agaggcugcuuucagagaa

SEQ ID NO: 2710673 - RNA, 19 nt, Artificial Sequence
  Description of Artificial Sequence: Synthetic oligonucleotide
acuagccaguaauucagug

SEQ ID NO: 2710674 - RNA, 19 nt, Artificial Sequence
  Description of Artificial Sequence: Synthetic oligonucleotide
uggcaagaugcacugugcc

SEQ ID NO: 2710675 - RNA, 19 nt, Artificial Sequence
  Description of Artificial Sequence: Synthetic oligonucleotide
uggggugggaccaguaagc

SEQ ID NO: 2710676 - RNA, 19 nt, Artificial Sequence
  Description of Artificial Sequence: Synthetic oligonucleotide
ccugacaagagcuuccacg

SEQ ID NO: 2710677 - RNA, 19 nt, Artificial Sequence
  Description of Artificial Sequence: Synthetic oligonucleotide
accuuugguggcaaagugc

SEQ ID NO: 2710678 - RNA, 19 nt, Artificial Sequence
  Description of Artificial Sequence: Synthetic oligonucleotide
accgguggccccuaggauc

SEQ ID NO: 2710679 - RNA, 19 nt, Artificial Sequence
  Description of Artificial Sequence: Synthetic oligonucleotide
ucccucaacacuccacacc

SEQ ID NO: 2710680 - RNA, 19 nt, Artificial Sequence
  Description of Artificial Sequence: Synthetic oligonucleotide
aucacgugcacuucagcca

SEQ ID NO: 2710681 - RNA, 19 nt, Artificial Sequence
  Description of Artificial Sequence: Synthetic oligonucleotide
gucgaggccaaccuuggag

SEQ ID NO: 2710682 - RNA, 19 nt, Artificial Sequence
  Description of Artificial Sequence: Synthetic oligonucleotide
aaguggcgcaauagcaggc

SEQ ID NO: 2710683 - RNA, 19 nt, Artificial Sequence
  Description of Artificial Sequence: Synthetic oligonucleotide
ucgaggccaaccuuggaga

SEQ ID NO: 2710684 - RNA, 19 nt, Artificial Sequence
  Description of Artificial Sequence: Synthetic oligonucleotide
ugugucuaccugcguuugg

SEQ ID NO: 2710685 - RNA, 19 nt, Artificial Sequence
  Description of Artificial Sequence: Synthetic oligonucleotide
gaucugcccgaucacgugc

SEQ ID NO: 2710686 - RNA, 19 nt, Artificial Sequence
  Description of Artificial Sequence: Synthetic oligonucleotide
gucccuggaacccacacac

SEQ ID NO: 2710687 - RNA, 19 nt, Artificial Sequence
  Description of Artificial Sequence: Synthetic oligonucleotide
auggggugggaccaguaag

SEQ ID NO: 2710688 - RNA, 19 nt, Artificial Sequence
  Description of Artificial Sequence: Synthetic oligonucleotide
ucuaccugcguuuggcccu

SEQ ID NO: 2710689 - RNA, 19 nt, Artificial Sequence
  Description of Artificial Sequence: Synthetic oligonucleotide
gaugcagucgaggccaacc

SEQ ID NO: 2710690 - RNA, 19 nt, Artificial Sequence
  Description of Artificial Sequence: Synthetic oligonucleotide
caaccuuggagaccuuugg

SEQ ID NO: 2710691 - RNA, 19 nt, Artificial Sequence
  Description of Artificial Sequence: Synthetic oligonucleotide
ugaagucccucaacacucc

SEQ ID NO: 2710692 - RNA, 19 nt, Artificial Sequence
  Description of Artificial Sequence: Synthetic oligonucleotide
cuuggagaccuuugguggc

SEQ ID NO: 2710693 - RNA, 19 nt, Artificial Sequence
  Description of Artificial Sequence: Synthetic oligonucleotide
gaccuuugguggcaaagug

SEQ ID NO: 2710694 - RNA, 19 nt, Artificial Sequence
  Description of Artificial Sequence: Synthetic oligonucleotide
uucagagaaaccgguggcc

SEQ ID NO: 2710695 - RNA, 19 nt, Artificial Sequence
  Description of Artificial Sequence: Synthetic oligonucleotide
aguggcgcaauagcaggcc

SEQ ID NO: 2710696 - RNA, 19 nt, Artificial Sequence
  Description of Artificial Sequence: Synthetic oligonucleotide
auagcggucagccccgcug

SEQ ID NO: 2710697 - RNA, 19 nt, Artificial Sequence
  Description of Artificial Sequence: Synthetic oligonucleotide
uaggaucugcccgaucacg

SEQ ID NO: 2710698 - RNA, 19 nt, Artificial Sequence
  Description of Artificial Sequence: Synthetic oligonucleotide
guguggaugccccacuugc

SEQ ID NO: 2710699 - RNA, 19 nt, Artificial Sequence
  Description of Artificial Sequence: Synthetic oligonucleotide
ugcacugugccgcccgcgg

SEQ ID NO: 2710700 - RNA, 19 nt, Artificial Sequence
  Description of Artificial Sequence: Synthetic oligonucleotide
aauagcaggccgauggcaa

SEQ ID NO: 2710701 - RNA, 19 nt, Artificial Sequence
  Description of Artificial Sequence: Synthetic oligonucleotide
guagauggugucugcgugc

SEQ ID NO: 2710702 - RNA, 19 nt, Artificial Sequence
  Description of Artificial Sequence: Synthetic oligonucleotide
agaugcacugugccgcccg

SEQ ID NO: 2710703 - RNA, 19 nt, Artificial Sequence
  Description of Artificial Sequence: Synthetic oligonucleotide
ccuuggagaccuuuggugg

SEQ ID NO: 2710704 - RNA, 19 nt, Artificial Sequence
  Description of Artificial Sequence: Synthetic oligonucleotide
cugggcacauggcaaaagc

SEQ ID NO: 2710705 - RNA, 19 nt, Artificial Sequence
  Description of Artificial Sequence: Synthetic oligonucleotide
cacauggcaaaagccauag

SEQ ID NO: 2710706 - RNA, 19 nt, Artificial Sequence
  Description of Artificial Sequence: Synthetic oligonucleotide
ccacacacuaacuagccag

SEQ ID NO: 2710707 - RNA, 19 nt, Artificial Sequence
  Description of Artificial Sequence: Synthetic oligonucleotide
ucugcgugcagcagcugug

SEQ ID NO: 2710708 - RNA, 19 nt, Artificial Sequence
  Description of Artificial Sequence: Synthetic oligonucleotide
ggcgauagcggucagcccc

SEQ ID NO: 2710709 - RNA, 19 nt, Artificial Sequence
  Description of Artificial Sequence: Synthetic oligonucleotide
aagucccucaacacuccac

SEQ ID NO: 2710710 - RNA, 19 nt, Artificial Sequence
  Description of Artificial Sequence: Synthetic oligonucleotide
cauagcgaucaaaguggcg

SEQ ID NO: 2710711 - RNA, 19 nt, Artificial Sequence
  Description of Artificial Sequence: Synthetic oligonucleotide
caacacuccacaccauagc

SEQ ID NO: 2710712 - RNA, 19 nt, Artificial Sequence
  Description of Artificial Sequence: Synthetic oligonucleotide
acaccugacaagagcuucc

SEQ ID NO: 2710713 - RNA, 19 nt, Artificial Sequence
  Description of Artificial Sequence: Synthetic oligonucleotide
gaaaccgguggccccuagg

SEQ ID NO: 2710714 - RNA, 19 nt, Artificial Sequence
  Description of Artificial Sequence: Synthetic oligonucleotide
gggacaguccagcuggugg

SEQ ID NO: 2710715 - RNA, 19 nt, Artificial Sequence
  Description of Artificial Sequence: Synthetic oligonucleotide
ucacgugcacuucagccau

SEQ ID NO: 2710716 - RNA, 19 nt, Artificial Sequence
  Description of Artificial Sequence: Synthetic oligonucleotide
caggcgauagcggucagcc

SEQ ID NO: 2710717 - RNA, 19 nt, Artificial Sequence
  Description of Artificial Sequence: Synthetic oligonucleotide
guaauucaguggagcaugg

SEQ ID NO: 2710718 - RNA, 19 nt, Artificial Sequence
  Description of Artificial Sequence: Synthetic oligonucleotide
acccacacacuaacuagcc

SEQ ID NO: 2710719 - RNA, 19 nt, Artificial Sequence
  Description of Artificial Sequence: Synthetic oligonucleotide
gaccaguaagccauauccc

SEQ ID NO: 2710720 - RNA, 19 nt, Artificial Sequence
  Description of Artificial Sequence: Synthetic oligonucleotide
cuggaacccacacacuaac

SEQ ID NO: 2710721 - RNA, 19 nt, Artificial Sequence
  Description of Artificial Sequence: Synthetic oligonucleotide
ggcaagaugcacugugccg

SEQ ID NO: 2710722 - RNA, 19 nt, Artificial Sequence
  Description of Artificial Sequence: Synthetic oligonucleotide
uguggaugccccacuugca

SEQ ID NO: 2710723 - RNA, 19 nt, Artificial Sequence
  Description of Artificial Sequence: Synthetic oligonucleotide
ggagcauggccucagagga

SEQ ID NO: 2710724 - RNA, 19 nt, Artificial Sequence
  Description of Artificial Sequence: Synthetic oligonucleotide
guggaugccccacuugcag

SEQ ID NO: 2710725 - RNA, 19 nt, Artificial Sequence
  Description of Artificial Sequence: Synthetic oligonucleotide
cuaucugaggugugucuac

SEQ ID NO: 2710726 - RNA, 19 nt, Artificial Sequence
  Description of Artificial Sequence: Synthetic oligonucleotide
acaccauagcgaucaaagu

SEQ ID NO: 2710727 - RNA, 19 nt, Artificial Sequence
  Description of Artificial Sequence: Synthetic oligonucleotide
uauccccuaucugaggugu

SEQ ID NO: 2710728 - RNA, 19 nt, Artificial Sequence
  Description of Artificial Sequence: Synthetic oligonucleotide
auagcaggccgauggcaag

SEQ ID NO: 2710729 - RNA, 19 nt, Artificial Sequence
  Description of Artificial Sequence: Synthetic oligonucleotide
gucuaccugcguuuggccc

SEQ ID NO: 2710730 - RNA, 19 nt, Artificial Sequence
  Description of Artificial Sequence: Synthetic oligonucleotide
acccacgaaggcccgugcc

SEQ ID NO: 2710731 - RNA, 19 nt, Artificial Sequence
  Description of Artificial Sequence: Synthetic oligonucleotide
aagaugcacugugccgccc

SEQ ID NO: 2710732 - RNA, 19 nt, Artificial Sequence
  Description of Artificial Sequence: Synthetic oligonucleotide
cacaccuggagaugcaguc

SEQ ID NO: 2710733 - RNA, 19 nt, Artificial Sequence
  Description of Artificial Sequence: Synthetic oligonucleotide
uaucugaggugugucuacc

SEQ ID NO: 2710734 - RNA, 19 nt, Artificial Sequence
  Description of Artificial Sequence: Synthetic oligonucleotide
ggacaguccagcugguggg

SEQ ID NO: 2710735 - RNA, 19 nt, Artificial Sequence
  Description of Artificial Sequence: Synthetic oligonucleotide
cucagaggaguuccuggcc

SEQ ID NO: 2710736 - RNA, 19 nt, Artificial Sequence
  Description of Artificial Sequence: Synthetic oligonucleotide
cgcaauagcaggccgaugg

SEQ ID NO: 2710737 - RNA, 19 nt, Artificial Sequence
  Description of Artificial Sequence: Synthetic oligonucleotide
aagaggcugcuuucagaga

SEQ ID NO: 2710738 - RNA, 19 nt, Artificial Sequence
  Description of Artificial Sequence: Synthetic oligonucleotide
uagcgaucaaaguggcgca

SEQ ID NO: 2710739 - RNA, 19 nt, Artificial Sequence
  Description of Artificial Sequence: Synthetic oligonucleotide
auauccccuaucugaggug

SEQ ID NO: 2710740 - RNA, 19 nt, Artificial Sequence
  Description of Artificial Sequence: Synthetic oligonucleotide
ugggaccacaccuggagau

SEQ ID NO: 2710741 - RNA, 19 nt, Artificial Sequence
  Description of Artificial Sequence: Synthetic oligonucleotide
ugccccacuugcagaagag

SEQ ID NO: 2710742 - RNA, 19 nt, Artificial Sequence
  Description of Artificial Sequence: Synthetic oligonucleotide
ugugcaggcgauagcgguc

SEQ ID NO: 2710743 - RNA, 19 nt, Artificial Sequence
  Description of Artificial Sequence: Synthetic oligonucleotide
gccuugacaguccaugaag

SEQ ID NO: 2710744 - RNA, 19 nt, Artificial Sequence
  Description of Artificial Sequence: Synthetic oligonucleotide
uggaacccacacacuaacu

SEQ ID NO: 2710745 - RNA, 19 nt, Artificial Sequence
  Description of Artificial Sequence: Synthetic oligonucleotide
gcaagaugcacugugccgc

SEQ ID NO: 2710746 - RNA, 19 nt, Artificial Sequence
  Description of Artificial Sequence: Synthetic oligonucleotide
cagagaaaccgguggcccc

SEQ ID NO: 2710747 - RNA, 19 nt, Artificial Sequence
  Description of Artificial Sequence: Synthetic oligonucleotide
caagaugcacugugccgcc

SEQ ID NO: 2710748 - RNA, 19 nt, Artificial Sequence
  Description of Artificial Sequence: Synthetic oligonucleotide
uaauucaguggagcauggc

SEQ ID NO: 2710749 - RNA, 19 nt, Artificial Sequence
  Description of Artificial Sequence: Synthetic oligonucleotide
uccacgcagccccugugug

SEQ ID NO: 2710750 - RNA, 19 nt, Artificial Sequence
  Description of Artificial Sequence: Synthetic oligonucleotide
acaccuggagaugcagucg

SEQ ID NO: 2710751 - RNA, 19 nt, Artificial Sequence
  Description of Artificial Sequence: Synthetic oligonucleotide
ucccgcacaccugacaaga

SEQ ID NO: 2710752 - RNA, 19 nt, Artificial Sequence
  Description of Artificial Sequence: Synthetic oligonucleotide
accugacaagagcuuccac

SEQ ID NO: 2710753 - RNA, 19 nt, Artificial Sequence
  Description of Artificial Sequence: Synthetic oligonucleotide
uggaugccccacuugcaga

SEQ ID NO: 2710754 - RNA, 19 nt, Artificial Sequence
  Description of Artificial Sequence: Synthetic oligonucleotide
uguucccgccaacugccca

SEQ ID NO: 2710755 - RNA, 19 nt, Artificial Sequence
  Description of Artificial Sequence: Synthetic oligonucleotide
aguccagcuggugggugcc

SEQ ID NO: 2710756 - RNA, 19 nt, Artificial Sequence
  Description of Artificial Sequence: Synthetic oligonucleotide
guggagcauggccucagag

SEQ ID NO: 2710757 - RNA, 19 nt, Artificial Sequence
  Description of Artificial Sequence: Synthetic oligonucleotide
ggugucugcgugcagcagc

SEQ ID NO: 2710758 - RNA, 19 nt, Artificial Sequence
  Description of Artificial Sequence: Synthetic oligonucleotide
cuggccuugacaguccaug

SEQ ID NO: 2710759 - RNA, 19 nt, Artificial Sequence
  Description of Artificial Sequence: Synthetic oligonucleotide
cagucgaggccaaccuugg

SEQ ID NO: 2710760 - RNA, 19 nt, Artificial Sequence
  Description of Artificial Sequence: Synthetic oligonucleotide
aggccaaccuuggagaccu

SEQ ID NO: 2710761 - RNA, 19 nt, Artificial Sequence
  Description of Artificial Sequence: Synthetic oligonucleotide
augcagucgaggccaaccu

SEQ ID NO: 2710762 - RNA, 19 nt, Artificial Sequence
  Description of Artificial Sequence: Synthetic oligonucleotide
aggugugucuaccugcguu

SEQ ID NO: 2710763 - RNA, 19 nt, Artificial Sequence
  Description of Artificial Sequence: Synthetic oligonucleotide
guggcgcaauagcaggccg

SEQ ID NO: 2710764 - RNA, 19 nt, Artificial Sequence
  Description of Artificial Sequence: Synthetic oligonucleotide
uuccacgcagccccugugu

SEQ ID NO: 2710765 - RNA, 19 nt, Artificial Sequence
  Description of Artificial Sequence: Synthetic oligonucleotide
uggccuugacaguccauga

SEQ ID NO: 2710766 - RNA, 19 nt, Artificial Sequence
  Description of Artificial Sequence: Synthetic oligonucleotide
ugcccgaucacgugcacuu

SEQ ID NO: 2710767 - RNA, 19 nt, Artificial Sequence
  Description of Artificial Sequence: Synthetic oligonucleotide
gugucuaccugcguuuggc

SEQ ID NO: 2710768 - RNA, 19 nt, Artificial Sequence
  Description of Artificial Sequence: Synthetic oligonucleotide
caagagcuuccacgcagcc

SEQ ID NO: 2710769 - RNA, 19 nt, Artificial Sequence
  Description of Artificial Sequence: Synthetic oligonucleotide
uggcgcaauagcaggccga

SEQ ID NO: 2710770 - RNA, 19 nt, Artificial Sequence
  Description of Artificial Sequence: Synthetic oligonucleotide
aggcgauagcggucagccc

SEQ ID NO: 2710771 - RNA, 19 nt, Artificial Sequence
  Description of Artificial Sequence: Synthetic oligonucleotide
caugaagucccucaacacu

SEQ ID NO: 2710772 - RNA, 19 nt, Artificial Sequence
  Description of Artificial Sequence: Synthetic oligonucleotide
agaccuuugguggcaaagu

SEQ ID NO: 2710773 - RNA, 19 nt, Artificial Sequence
  Description of Artificial Sequence: Synthetic oligonucleotide
acgugcacuucagccaugg

SEQ ID NO: 2710774 - RNA, 19 nt, Artificial Sequence
  Description of Artificial Sequence: Synthetic oligonucleotide
aacuagccaguaauucagu

SEQ ID NO: 2710775 - RNA, 19 nt, Artificial Sequence
  Description of Artificial Sequence: Synthetic oligonucleotide
aggugggacaguccagcug

SEQ ID NO: 2710776 - RNA, 19 nt, Artificial Sequence
  Description of Artificial Sequence: Synthetic oligonucleotide
ugcguuuggcccucccgca

SEQ ID NO: 2710777 - RNA, 19 nt, Artificial Sequence
  Description of Artificial Sequence: Synthetic oligonucleotide
ggagaugcagucgaggcca

SEQ ID NO: 2710778 - RNA, 19 nt, Artificial Sequence
  Description of Artificial Sequence: Synthetic oligonucleotide
guuccuggccuugacaguc

SEQ ID NO: 2710779 - RNA, 19 nt, Artificial Sequence
  Description of Artificial Sequence: Synthetic oligonucleotide
agcagcuguggcccaccac

SEQ ID NO: 2710780 - RNA, 19 nt, Artificial Sequence
  Description of Artificial Sequence: Synthetic oligonucleotide
cuaggaucugcccgaucac

SEQ ID NO: 2710781 - RNA, 19 nt, Artificial Sequence
  Description of Artificial Sequence: Synthetic oligonucleotide
ccccacuugcagaagaggc

SEQ ID NO: 2710782 - RNA, 19 nt, Artificial Sequence
  Description of Artificial Sequence: Synthetic oligonucleotide
ggccccuaggaucugcccg

SEQ ID NO: 2710783 - RNA, 19 nt, Artificial Sequence
  Description of Artificial Sequence: Synthetic oligonucleotide
uuccuggccuugacagucc

SEQ ID NO: 2710784 - RNA, 19 nt, Artificial Sequence
  Description of Artificial Sequence: Synthetic oligonucleotide
uuggagaccuuugguggca

SEQ ID NO: 2710785 - RNA, 19 nt, Artificial Sequence
  Description of Artificial Sequence: Synthetic oligonucleotide
gccaaagcuguccugggac

SEQ ID NO: 2710786 - RNA, 19 nt, Artificial Sequence
  Description of Artificial Sequence: Synthetic oligonucleotide
ccuuugguggcaaagugca

SEQ ID NO: 2710787 - RNA, 19 nt, Artificial Sequence
  Description of Artificial Sequence: Synthetic oligonucleotide
aguuccuggccuugacagu

SEQ ID NO: 2710788 - RNA, 19 nt, Artificial Sequence
  Description of Artificial Sequence: Synthetic oligonucleotide
uagcggucagccccgcugu

SEQ ID NO: 2710789 - RNA, 19 nt, Artificial Sequence
  Description of Artificial Sequence: Synthetic oligonucleotide
caguccagcuggugggugc

SEQ ID NO: 2710790 - RNA, 19 nt, Artificial Sequence
  Description of Artificial Sequence: Synthetic oligonucleotide
cauauccccuaucugaggu

SEQ ID NO: 2710791 - RNA, 19 nt, Artificial Sequence
  Description of Artificial Sequence: Synthetic oligonucleotide
uguggcccaccacccacga

SEQ ID NO: 2710792 - RNA, 19 nt, Artificial Sequence
  Description of Artificial Sequence: Synthetic oligonucleotide
gccaguaauucaguggagc

SEQ ID NO: 2710793 - RNA, 19 nt, Artificial Sequence
  Description of Artificial Sequence: Synthetic oligonucleotide
augccccacuugcagaaga

SEQ ID NO: 2710794 - RNA, 19 nt, Artificial Sequence
  Description of Artificial Sequence: Synthetic oligonucleotide
gcaaaagccauagccagca

SEQ ID NO: 2710795 - RNA, 19 nt, Artificial Sequence
  Description of Artificial Sequence: Synthetic oligonucleotide
agagaaaccgguggccccu

SEQ ID NO: 2710796 - RNA, 19 nt, Artificial Sequence
  Description of Artificial Sequence: Synthetic oligonucleotide
cacaccugacaagagcuuc

SEQ ID NO: 2710797 - RNA, 19 nt, Artificial Sequence
  Description of Artificial Sequence: Synthetic oligonucleotide
gaugcacugugccgcccgc

SEQ ID NO: 2710798 - RNA, 19 nt, Artificial Sequence
  Description of Artificial Sequence: Synthetic oligonucleotide
cuguggcccaccacccacg

SEQ ID NO: 2710799 - RNA, 19 nt, Artificial Sequence
  Description of Artificial Sequence: Synthetic oligonucleotide
aaccgguggccccuaggau

SEQ ID NO: 2710800 - RNA, 19 nt, Artificial Sequence
  Description of Artificial Sequence: Synthetic oligonucleotide
aguaagccauauccccuau

SEQ ID NO: 2710801 - RNA, 19 nt, Artificial Sequence
  Description of Artificial Sequence: Synthetic oligonucleotide
cugcccaggggccuccagg

SEQ ID NO: 2710802 - RNA, 19 nt, Artificial Sequence
  Description of Artificial Sequence: Synthetic oligonucleotide
ggaacccacacacuaacua

SEQ ID NO: 2710803 - RNA, 19 nt, Artificial Sequence
  Description of Artificial Sequence: Synthetic oligonucleotide
ccuaggaucugcccgauca

SEQ ID NO: 2710804 - RNA, 19 nt, Artificial Sequence
  Description of Artificial Sequence: Synthetic oligonucleotide
gaagucccucaacacucca

SEQ ID NO: 2710805 - RNA, 19 nt, Artificial Sequence
  Description of Artificial Sequence: Synthetic oligonucleotide
agccccuguguggaugccc

SEQ ID NO: 2710806 - RNA, 19 nt, Artificial Sequence
  Description of Artificial Sequence: Synthetic oligonucleotide
gccauauccccuaucugag

SEQ ID NO: 2710807 - RNA, 19 nt, Artificial Sequence
  Description of Artificial Sequence: Synthetic oligonucleotide
gaggccaaccuuggagacc

SEQ ID NO: 2710808 - RNA, 19 nt, Artificial Sequence
  Description of Artificial Sequence: Synthetic oligonucleotide
cacugugccgcccgcggcc

SEQ ID NO: 2710809 - RNA, 19 nt, Artificial Sequence
  Description of Artificial Sequence: Synthetic oligonucleotide
cagcuguggcccaccaccc

SEQ ID NO: 2710810 - RNA, 19 nt, Artificial Sequence
  Description of Artificial Sequence: Synthetic oligonucleotide
ugcagucgaggccaaccuu

SEQ ID NO: 2710811 - RNA, 19 nt, Artificial Sequence
  Description of Artificial Sequence: Synthetic oligonucleotide
accacaccuggagaugcag

SEQ ID NO: 2710812 - RNA, 19 nt, Artificial Sequence
  Description of Artificial Sequence: Synthetic oligonucleotide
accugcguuuggcccuccc

SEQ ID NO: 2710813 - RNA, 19 nt, Artificial Sequence
  Description of Artificial Sequence: Synthetic oligonucleotide
ccucagaggaguuccuggc

SEQ ID NO: 2710814 - RNA, 19 nt, Artificial Sequence
  Description of Artificial Sequence: Synthetic oligonucleotide
ccauagcgaucaaaguggc

SEQ ID NO: 2710815 - RNA, 19 nt, Artificial Sequence
  Description of Artificial Sequence: Synthetic oligonucleotide
guaagccauauccccuauc

SEQ ID NO: 2710816 - RNA, 19 nt, Artificial Sequence
  Description of Artificial Sequence: Synthetic oligonucleotide
uccccuaucugaggugugu

SEQ ID NO: 2710817 - RNA, 19 nt, Artificial Sequence
  Description of Artificial Sequence: Synthetic oligonucleotide
aggaucugcccgaucacgu

SEQ ID NO: 2710818 - RNA, 19 nt, Artificial Sequence
  Description of Artificial Sequence: Synthetic oligonucleotide
ccaguaauucaguggagca

SEQ ID NO: 2710819 - RNA, 19 nt, Artificial Sequence
  Description of Artificial Sequence: Synthetic oligonucleotide
cucaacacuccacaccaua

SEQ ID NO: 2710820 - RNA, 19 nt, Artificial Sequence
  Description of Artificial Sequence: Synthetic oligonucleotide
ccgugugcaggcgauagcg

SEQ ID NO: 2710821 - RNA, 19 nt, Artificial Sequence
  Description of Artificial Sequence: Synthetic oligonucleotide
gcaauagcaggccgauggc

SEQ ID NO: 2710822 - RNA, 19 nt, Artificial Sequence
  Description of Artificial Sequence: Synthetic oligonucleotide
gcagucgaggccaaccuug

SEQ ID NO: 2710823 - RNA, 19 nt, Artificial Sequence
  Description of Artificial Sequence: Synthetic oligonucleotide
caccuggagaugcagucga

SEQ ID NO: 2710824 - RNA, 19 nt, Artificial Sequence
  Description of Artificial Sequence: Synthetic oligonucleotide
cugcgugcagcagcugugg

SEQ ID NO: 2710825 - RNA, 19 nt, Artificial Sequence
  Description of Artificial Sequence: Synthetic oligonucleotide
ccgccaacugcccaggggc

SEQ ID NO: 2710826 - RNA, 19 nt, Artificial Sequence
  Description of Artificial Sequence: Synthetic oligonucleotide
agaaaccgguggccccuag

SEQ ID NO: 2710827 - RNA, 19 nt, Artificial Sequence
  Description of Artificial Sequence: Synthetic oligonucleotide
gaugccccacuugcagaag

SEQ ID NO: 2710828 - RNA, 19 nt, Artificial Sequence
  Description of Artificial Sequence: Synthetic oligonucleotide
ccaaccuuggagaccuuug

SEQ ID NO: 2710829 - RNA, 19 nt, Artificial Sequence
  Description of Artificial Sequence: Synthetic oligonucleotide
caauagcaggccgauggca

SEQ ID NO: 2710830 - RNA, 19 nt, Artificial Sequence
  Description of Artificial Sequence: Synthetic oligonucleotide
uucccgccaacugcccagg

SEQ ID NO: 2710831 - RNA, 19 nt, Artificial Sequence
  Description of Artificial Sequence: Synthetic oligonucleotide
cuggugggugccugggcug

SEQ ID NO: 2710832 - RNA, 19 nt, Artificial Sequence
  Description of Artificial Sequence: Synthetic oligonucleotide
gucccucaacacuccacac

SEQ ID NO: 2710833 - RNA, 19 nt, Artificial Sequence
  Description of Artificial Sequence: Synthetic oligonucleotide
ccauauccccuaucugagg

SEQ ID NO: 2710834 - RNA, 19 nt, Artificial Sequence
  Description of Artificial Sequence: Synthetic oligonucleotide
agaggaguuccuggccuug

SEQ ID NO: 2710835 - RNA, 19 nt, Artificial Sequence
  Description of Artificial Sequence: Synthetic oligonucleotide
aguggagcauggccucaga

SEQ ID NO: 2710836 - RNA, 19 nt, Artificial Sequence
  Description of Artificial Sequence: Synthetic oligonucleotide
agccagcaagcuggcagcg

SEQ ID NO: 2710837 - RNA, 19 nt, Artificial Sequence
  Description of Artificial Sequence: Synthetic oligonucleotide
ggaccacaccuggagaugc

SEQ ID NO: 2710838 - RNA, 19 nt, Artificial Sequence
  Description of Artificial Sequence: Synthetic oligonucleotide
uggccccuaggaucugccc

SEQ ID NO: 2710839 - RNA, 19 nt, Artificial Sequence
  Description of Artificial Sequence: Synthetic oligonucleotide
ccgauggcaagaugcacug

SEQ ID NO: 2710840 - RNA, 19 nt, Artificial Sequence
  Description of Artificial Sequence: Synthetic oligonucleotide
gugcacuucagccaugguu

SEQ ID NO: 2710841 - RNA, 19 nt, Artificial Sequence
  Description of Artificial Sequence: Synthetic oligonucleotide
cucccgcacaccugacaag

SEQ ID NO: 2710842 - RNA, 19 nt, Artificial Sequence
  Description of Artificial Sequence: Synthetic oligonucleotide
cccucaacacuccacacca

SEQ ID NO: 2710843 - RNA, 19 nt, Artificial Sequence
  Description of Artificial Sequence: Synthetic oligonucleotide
ucccgccaacugcccaggg

SEQ ID NO: 2710844 - RNA, 19 nt, Artificial Sequence
  Description of Artificial Sequence: Synthetic oligonucleotide
gcuuucagagaaaccggug

SEQ ID NO: 2710845 - RNA, 19 nt, Artificial Sequence
  Description of Artificial Sequence: Synthetic oligonucleotide
caguaagccauauccccua

SEQ ID NO: 2710846 - RNA, 19 nt, Artificial Sequence
  Description of Artificial Sequence: Synthetic oligonucleotide
cuuccacgcagccccugug

SEQ ID NO: 2710847 - RNA, 19 nt, Artificial Sequence
  Description of Artificial Sequence: Synthetic oligonucleotide
agaugcagucgaggccaac

SEQ ID NO: 2710848 - RNA, 19 nt, Artificial Sequence
  Description of Artificial Sequence: Synthetic oligonucleotide
guuuggcccucccgcacac

SEQ ID NO: 2710849 - RNA, 19 nt, Artificial Sequence
  Description of Artificial Sequence: Synthetic oligonucleotide
ggcaaaagccauagccagc

SEQ ID NO: 2710850 - RNA, 19 nt, Artificial Sequence
  Description of Artificial Sequence: Synthetic oligonucleotide
gugugucuaccugcguuug

SEQ ID NO: 2710851 - RNA, 19 nt, Artificial Sequence
  Description of Artificial Sequence: Synthetic oligonucleotide
uccagcuggugggugccug

SEQ ID NO: 2710852 - RNA, 19 nt, Artificial Sequence
  Description of Artificial Sequence: Synthetic oligonucleotide
caaagcuguccugggacca

SEQ ID NO: 2710853 - RNA, 19 nt, Artificial Sequence
  Description of Artificial Sequence: Synthetic oligonucleotide
cuguucccgccaacugccc

SEQ ID NO: 2710854 - RNA, 19 nt, Artificial Sequence
  Description of Artificial Sequence: Synthetic oligonucleotide
agucgaggccaaccuugga

SEQ ID NO: 2710855 - RNA, 19 nt, Artificial Sequence
  Description of Artificial Sequence: Synthetic oligonucleotide
ccacuugcagaagaggcug

SEQ ID NO: 2710856 - RNA, 19 nt, Artificial Sequence
  Description of Artificial Sequence: Synthetic oligonucleotide
ucugcccgaucacgugcac

SEQ ID NO: 2710857 - RNA, 19 nt, Artificial Sequence
  Description of Artificial Sequence: Synthetic oligonucleotide
agccaguaauucaguggag

SEQ ID NO: 2710858 - RNA, 19 nt, Artificial Sequence
  Description of Artificial Sequence: Synthetic oligonucleotide
ugggacaguccagcuggug

SEQ ID NO: 2710859 - RNA, 19 nt, Artificial Sequence
  Description of Artificial Sequence: Synthetic oligonucleotide
ccuggagaugcagucgagg

SEQ ID NO: 2710860 - RNA, 19 nt, Artificial Sequence
  Description of Artificial Sequence: Synthetic oligonucleotide
gucagccccgcuguagaug

SEQ ID NO: 2710861 - RNA, 19 nt, Artificial Sequence
  Description of Artificial Sequence: Synthetic oligonucleotide
gaaggcccgugccagcugu

SEQ ID NO: 2710862 - RNA, 19 nt, Artificial Sequence
  Description of Artificial Sequence: Synthetic oligonucleotide
cacgaaggcccgugccagc

SEQ ID NO: 2710863 - RNA, 19 nt, Artificial Sequence
  Description of Artificial Sequence: Synthetic oligonucleotide
agcuguccugggaccacac

SEQ ID NO: 2710864 - RNA, 19 nt, Artificial Sequence
  Description of Artificial Sequence: Synthetic oligonucleotide
ugcaggcgauagcggucag

SEQ ID NO: 2710865 - RNA, 19 nt, Artificial Sequence
  Description of Artificial Sequence: Synthetic oligonucleotide
acugugccgcccgcggccg

SEQ ID NO: 2710866 - RNA, 19 nt, Artificial Sequence
  Description of Artificial Sequence: Synthetic oligonucleotide
ggugggaccaguaagccau

SEQ ID NO: 2710867 - RNA, 19 nt, Artificial Sequence
  Description of Artificial Sequence: Synthetic oligonucleotide
acgaaggcccgugccagcu

SEQ ID NO: 2710868 - RNA, 19 nt, Artificial Sequence
  Description of Artificial Sequence: Synthetic oligonucleotide
cacacacuaacuagccagu

SEQ ID NO: 2710869 - RNA, 19 nt, Artificial Sequence
  Description of Artificial Sequence: Synthetic oligonucleotide
cgugcagcagcuguggccc

SEQ ID NO: 2710870 - RNA, 19 nt, Artificial Sequence
  Description of Artificial Sequence: Synthetic oligonucleotide
agcuguggcccaccaccca

SEQ ID NO: 2710871 - RNA, 19 nt, Artificial Sequence
  Description of Artificial Sequence: Synthetic oligonucleotide
cauggccucagaggaguuc

SEQ ID NO: 2710872 - RNA, 19 nt, Artificial Sequence
  Description of Artificial Sequence: Synthetic oligonucleotide
acaguccagcuggugggug

SEQ ID NO: 2710873 - RNA, 19 nt, Artificial Sequence
  Description of Artificial Sequence: Synthetic oligonucleotide
ccugcguuuggcccucccg

SEQ ID NO: 2710874 - RNA, 19 nt, Artificial Sequence
  Description of Artificial Sequence: Synthetic oligonucleotide
acuccacaccauagcgauc

SEQ ID NO: 2710875 - RNA, 19 nt, Artificial Sequence
  Description of Artificial Sequence: Synthetic oligonucleotide
augcacugugccgcccgcg

SEQ ID NO: 2710876 - RNA, 19 nt, Artificial Sequence
  Description of Artificial Sequence: Synthetic oligonucleotide
ggaugccccacuugcagaa

SEQ ID NO: 2710877 - RNA, 19 nt, Artificial Sequence
  Description of Artificial Sequence: Synthetic oligonucleotide
agccccgcuguagauggug

SEQ ID NO: 2710878 - RNA, 19 nt, Artificial Sequence
  Description of Artificial Sequence: Synthetic oligonucleotide
uggcccucccgcacaccug

SEQ ID NO: 2710879 - RNA, 19 nt, Artificial Sequence
  Description of Artificial Sequence: Synthetic oligonucleotide
gugcaggcgauagcgguca

SEQ ID NO: 2710880 - RNA, 19 nt, Artificial Sequence
  Description of Artificial Sequence: Synthetic oligonucleotide
caggucgauggggugggac

SEQ ID NO: 2710881 - RNA, 19 nt, Artificial Sequence
  Description of Artificial Sequence: Synthetic oligonucleotide
gcagcggccaaagcugucc

SEQ ID NO: 2710882 - RNA, 19 nt, Artificial Sequence
  Description of Artificial Sequence: Synthetic oligonucleotide
caguggagcauggccucag

SEQ ID NO: 2710883 - RNA, 19 nt, Artificial Sequence
  Description of Artificial Sequence: Synthetic oligonucleotide
ccgcacaccugacaagagc

SEQ ID NO: 2710884 - RNA, 19 nt, Artificial Sequence
  Description of Artificial Sequence: Synthetic oligonucleotide
gucugcgugcagcagcugu

SEQ ID NO: 2710885 - RNA, 19 nt, Artificial Sequence
  Description of Artificial Sequence: Synthetic oligonucleotide
ugccagcuguucccgccaa

SEQ ID NO: 2710886 - RNA, 19 nt, Artificial Sequence
  Description of Artificial Sequence: Synthetic oligonucleotide
gugccugggcugcugggca

SEQ ID NO: 2710887 - RNA, 19 nt, Artificial Sequence
  Description of Artificial Sequence: Synthetic oligonucleotide
ggggugggaccaguaagcc

SEQ ID NO: 2710888 - RNA, 19 nt, Artificial Sequence
  Description of Artificial Sequence: Synthetic oligonucleotide
gaggaguuccuggccuuga

SEQ ID NO: 2710889 - RNA, 19 nt, Artificial Sequence
  Description of Artificial Sequence: Synthetic oligonucleotide
ccgaucacgugcacuucag

SEQ ID NO: 2710890 - RNA, 19 nt, Artificial Sequence
  Description of Artificial Sequence: Synthetic oligonucleotide
agcgaucaaaguggcgcaa

SEQ ID NO: 2710891 - RNA, 19 nt, Artificial Sequence
  Description of Artificial Sequence: Synthetic oligonucleotide
uggagaccuuugguggcaa

SEQ ID NO: 2710892 - RNA, 19 nt, Artificial Sequence
  Description of Artificial Sequence: Synthetic oligonucleotide
aggcccgugccagcuguuc

SEQ ID NO: 2710893 - RNA, 19 nt, Artificial Sequence
  Description of Artificial Sequence: Synthetic oligonucleotide
cacgcagccccugugugga

SEQ ID NO: 2710894 - RNA, 19 nt, Artificial Sequence
  Description of Artificial Sequence: Synthetic oligonucleotide
cacccacgaaggcccgugc

SEQ ID NO: 2710895 - RNA, 19 nt, Artificial Sequence
  Description of Artificial Sequence: Synthetic oligonucleotide
uuuggcccucccgcacacc

SEQ ID NO: 2710896 - RNA, 19 nt, Artificial Sequence
  Description of Artificial Sequence: Synthetic oligonucleotide
gcgauagcggucagccccg

SEQ ID NO: 2710897 - RNA, 19 nt, Artificial Sequence
  Description of Artificial Sequence: Synthetic oligonucleotide
ugggaccaguaagccauau

SEQ ID NO: 2710898 - RNA, 19 nt, Artificial Sequence
  Description of Artificial Sequence: Synthetic oligonucleotide
ccacgcagccccugugugg

SEQ ID NO: 2710899 - RNA, 19 nt, Artificial Sequence
  Description of Artificial Sequence: Synthetic oligonucleotide
ggccgugugcaggcgauag

SEQ ID NO: 2710900 - RNA, 19 nt, Artificial Sequence
  Description of Artificial Sequence: Synthetic oligonucleotide
gggaccaguaagccauauc

SEQ ID NO: 2710901 - RNA, 19 nt, Artificial Sequence
  Description of Artificial Sequence: Synthetic oligonucleotide
accuggagaugcagucgag

SEQ ID NO: 2710902 - RNA, 19 nt, Artificial Sequence
  Description of Artificial Sequence: Synthetic oligonucleotide
cacuaacuagccaguaauu

SEQ ID NO: 2710903 - RNA, 19 nt, Artificial Sequence
  Description of Artificial Sequence: Synthetic oligonucleotide
ggcugcuuucagagaaacc

SEQ ID NO: 2710904 - RNA, 19 nt, Artificial Sequence
  Description of Artificial Sequence: Synthetic oligonucleotide
ugguggcaaagugcagguc

SEQ ID NO: 2710905 - RNA, 19 nt, Artificial Sequence
  Description of Artificial Sequence: Synthetic oligonucleotide
gccccacuugcagaagagg

SEQ ID NO: 2710906 - RNA, 19 nt, Artificial Sequence
  Description of Artificial Sequence: Synthetic oligonucleotide
ggcccgugccagcuguucc

SEQ ID NO: 2710907 - RNA, 19 nt, Artificial Sequence
  Description of Artificial Sequence: Synthetic oligonucleotide
gaggcugcuuucagagaaa

SEQ ID NO: 2710908 - RNA, 19 nt, Artificial Sequence
  Description of Artificial Sequence: Synthetic oligonucleotide
cacgugcacuucagccaug

SEQ ID NO: 2710909 - RNA, 19 nt, Artificial Sequence
  Description of Artificial Sequence: Synthetic oligonucleotide
gggugggaccaguaagcca

SEQ ID NO: 2710910 - RNA, 19 nt, Artificial Sequence
  Description of Artificial Sequence: Synthetic oligonucleotide
gcugggcacauggcaaaag

SEQ ID NO: 2710911 - RNA, 19 nt, Artificial Sequence
  Description of Artificial Sequence: Synthetic oligonucleotide
ggccuugacaguccaugaa

SEQ ID NO: 2710912 - RNA, 19 nt, Artificial Sequence
  Description of Artificial Sequence: Synthetic oligonucleotide
ugucugcgugcagcagcug

SEQ ID NO: 2710913 - RNA, 19 nt, Artificial Sequence
  Description of Artificial Sequence: Synthetic oligonucleotide
caguaauucaguggagcau

SEQ ID NO: 2710914 - RNA, 19 nt, Artificial Sequence
  Description of Artificial Sequence: Synthetic oligonucleotide
agcaggccgauggcaagau

SEQ ID NO: 2710915 - RNA, 19 nt, Artificial Sequence
  Description of Artificial Sequence: Synthetic oligonucleotide
cccgccaacugcccagggg

SEQ ID NO: 2710916 - RNA, 19 nt, Artificial Sequence
  Description of Artificial Sequence: Synthetic oligonucleotide
ggugugucuaccugcguuu

SEQ ID NO: 2710917 - RNA, 19 nt, Artificial Sequence
  Description of Artificial Sequence: Synthetic oligonucleotide
ggccaaagcuguccuggga

SEQ ID NO: 2710918 - RNA, 19 nt, Artificial Sequence
  Description of Artificial Sequence: Synthetic oligonucleotide
caaaagccauagccagcaa

SEQ ID NO: 2710919 - RNA, 19 nt, Artificial Sequence
  Description of Artificial Sequence: Synthetic oligonucleotide
ccacgaaggcccgugccag

SEQ ID NO: 2710920 - RNA, 19 nt, Artificial Sequence
  Description of Artificial Sequence: Synthetic oligonucleotide
ccaguaagccauauccccu

SEQ ID NO: 2710921 - RNA, 19 nt, Artificial Sequence
  Description of Artificial Sequence: Synthetic oligonucleotide
caacugcccaggggccucc

SEQ ID NO: 2710922 - RNA, 19 nt, Artificial Sequence
  Description of Artificial Sequence: Synthetic oligonucleotide
ggcccucccgcacaccuga

SEQ ID NO: 2710923 - RNA, 19 nt, Artificial Sequence
  Description of Artificial Sequence: Synthetic oligonucleotide
gccccuguguggaugcccc

SEQ ID NO: 2710924 - RNA, 19 nt, Artificial Sequence
  Description of Artificial Sequence: Synthetic oligonucleotide
gauagcggucagccccgcu

SEQ ID NO: 2710925 - RNA, 19 nt, Artificial Sequence
  Description of Artificial Sequence: Synthetic oligonucleotide
auccccuaucugaggugug

SEQ ID NO: 2710926 - RNA, 19 nt, Artificial Sequence
  Description of Artificial Sequence: Synthetic oligonucleotide
gaggugugucuaccugcgu

SEQ ID NO: 2710927 - RNA, 19 nt, Artificial Sequence
  Description of Artificial Sequence: Synthetic oligonucleotide
cgaggccaaccuuggagac

SEQ ID NO: 2710928 - RNA, 19 nt, Artificial Sequence
  Description of Artificial Sequence: Synthetic oligonucleotide
cgaucacgugcacuucagc

SEQ ID NO: 2710929 - RNA, 19 nt, Artificial Sequence
  Description of Artificial Sequence: Synthetic oligonucleotide
agcuuccacgcagccccug

SEQ ID NO: 2710930 - RNA, 19 nt, Artificial Sequence
  Description of Artificial Sequence: Synthetic oligonucleotide
gccagcaagcuggcagcgg

SEQ ID NO: 2710931 - RNA, 19 nt, Artificial Sequence
  Description of Artificial Sequence: Synthetic oligonucleotide
gccgauggcaagaugcacu

SEQ ID NO: 2710932 - RNA, 19 nt, Artificial Sequence
  Description of Artificial Sequence: Synthetic oligonucleotide
gccgugugcaggcgauagc

SEQ ID NO: 2710933 - RNA, 19 nt, Artificial Sequence
  Description of Artificial Sequence: Synthetic oligonucleotide
aacugcccaggggccucca

SEQ ID NO: 2710934 - RNA, 19 nt, Artificial Sequence
  Description of Artificial Sequence: Synthetic oligonucleotide
cccgcggccgugugcaggc

SEQ ID NO: 2710935 - RNA, 19 nt, Artificial Sequence
  Description of Artificial Sequence: Synthetic oligonucleotide
ggcacauggcaaaagccau

SEQ ID NO: 2710936 - RNA, 19 nt, Artificial Sequence
  Description of Artificial Sequence: Synthetic oligonucleotide
cccgcacaccugacaagag

SEQ ID NO: 2710937 - RNA, 19 nt, Artificial Sequence
  Description of Artificial Sequence: Synthetic oligonucleotide
ccucccgcacaccugacaa

SEQ ID NO: 2710938 - RNA, 19 nt, Artificial Sequence
  Description of Artificial Sequence: Synthetic oligonucleotide
gcguuuggcccucccgcac

SEQ ID NO: 2710939 - RNA, 19 nt, Artificial Sequence
  Description of Artificial Sequence: Synthetic oligonucleotide
gcacugugccgcccgcggc

SEQ ID NO: 2710940 - RNA, 19 nt, Artificial Sequence
  Description of Artificial Sequence: Synthetic oligonucleotide
ggccgauggcaagaugcac

SEQ ID NO: 2710941 - RNA, 19 nt, Artificial Sequence
  Description of Artificial Sequence: Synthetic oligonucleotide
cgcacaccugacaagagcu

SEQ ID NO: 2710942 - RNA, 19 nt, Artificial Sequence
  Description of Artificial Sequence: Synthetic oligonucleotide
ccgcuguagauggugucug

SEQ ID NO: 2710943 - RNA, 19 nt, Artificial Sequence
  Description of Artificial Sequence: Synthetic oligonucleotide
cccgaucacgugcacuuca

SEQ ID NO: 2710944 - RNA, 19 nt, Artificial Sequence
  Description of Artificial Sequence: Synthetic oligonucleotide
gagaugcagucgaggccaa

SEQ ID NO: 2710945 - RNA, 19 nt, Artificial Sequence
  Description of Artificial Sequence: Synthetic oligonucleotide
gcaggcgauagcggucagc

SEQ ID NO: 2710946 - RNA, 19 nt, Artificial Sequence
  Description of Artificial Sequence: Synthetic oligonucleotide
cccacacacuaacuagcca

SEQ ID NO: 2710947 - RNA, 19 nt, Artificial Sequence
  Description of Artificial Sequence: Synthetic oligonucleotide
cccacuugcagaagaggcu

SEQ ID NO: 2710948 - RNA, 19 nt, Artificial Sequence
  Description of Artificial Sequence: Synthetic oligonucleotide
cccacgaaggcccgugcca

SEQ ID NO: 2710949 - RNA, 19 nt, Artificial Sequence
  Description of Artificial Sequence: Synthetic oligonucleotide
gacaguccaugaagucccu

SEQ ID NO: 2710950 - RNA, 19 nt, Artificial Sequence
  Description of Artificial Sequence: Synthetic oligonucleotide
agcggucagccccgcugua

SEQ ID NO: 2710951 - RNA, 19 nt, Artificial Sequence
  Description of Artificial Sequence: Synthetic oligonucleotide
gagaaaccgguggccccua

SEQ ID NO: 2710952 - RNA, 19 nt, Artificial Sequence
  Description of Artificial Sequence: Synthetic oligonucleotide
cccuguguggaugccccac

SEQ ID NO: 2710953 - RNA, 19 nt, Artificial Sequence
  Description of Artificial Sequence: Synthetic oligonucleotide
ggagaccuuugguggcaaa

SEQ ID NO: 2710954 - RNA, 19 nt, Artificial Sequence
  Description of Artificial Sequence: Synthetic oligonucleotide
gcacuucagccaugguucu

SEQ ID NO: 2710955 - RNA, 19 nt, Artificial Sequence
  Description of Artificial Sequence: Synthetic oligonucleotide
aaggcccgugccagcuguu

SEQ ID NO: 2710956 - RNA, 19 nt, Artificial Sequence
  Description of Artificial Sequence: Synthetic oligonucleotide
cagaggaguuccuggccuu

SEQ ID NO: 2710957 - RNA, 19 nt, Artificial Sequence
  Description of Artificial Sequence: Synthetic oligonucleotide
ccccuaucugagguguguc

SEQ ID NO: 2710958 - RNA, 19 nt, Artificial Sequence
  Description of Artificial Sequence: Synthetic oligonucleotide
ccacccacgaaggcccgug

SEQ ID NO: 2710959 - RNA, 19 nt, Artificial Sequence
  Description of Artificial Sequence: Synthetic oligonucleotide
gccagcuguucccgccaac

SEQ ID NO: 2710960 - RNA, 19 nt, Artificial Sequence
  Description of Artificial Sequence: Synthetic oligonucleotide
cagcggccaaagcuguccu

SEQ ID NO: 2710961 - RNA, 19 nt, Artificial Sequence
  Description of Artificial Sequence: Synthetic oligonucleotide
cccuaucugaggugugucu

SEQ ID NO: 2710962 - RNA, 19 nt, Artificial Sequence
  Description of Artificial Sequence: Synthetic oligonucleotide
gcccgcggccgugugcagg

SEQ ID NO: 2710963 - RNA, 19 nt, Artificial Sequence
  Description of Artificial Sequence: Synthetic oligonucleotide
guggcccaccacccacgaa

SEQ ID NO: 2710964 - RNA, 19 nt, Artificial Sequence
  Description of Artificial Sequence: Synthetic oligonucleotide
acgcagccccuguguggau

SEQ ID NO: 2710965 - RNA, 19 nt, Artificial Sequence
  Description of Artificial Sequence: Synthetic oligonucleotide
ccaacugcccaggggccuc

SEQ ID NO: 2710966 - RNA, 19 nt, Artificial Sequence
  Description of Artificial Sequence: Synthetic oligonucleotide
ccgguggccccuaggaucu

SEQ ID NO: 2710967 - RNA, 19 nt, Artificial Sequence
  Description of Artificial Sequence: Synthetic oligonucleotide
cgaucaaaguggcgcaaua

SEQ ID NO: 2710968 - RNA, 19 nt, Artificial Sequence
  Description of Artificial Sequence: Synthetic oligonucleotide
ccgugccagcuguucccgc

SEQ ID NO: 2710969 - RNA, 19 nt, Artificial Sequence
  Description of Artificial Sequence: Synthetic oligonucleotide
gcgcaauagcaggccgaug

SEQ ID NO: 2710970 - RNA, 19 nt, Artificial Sequence
  Description of Artificial Sequence: Synthetic oligonucleotide
ggcgcaauagcaggccgau

SEQ ID NO: 2710971 - RNA, 19 nt, Artificial Sequence
  Description of Artificial Sequence: Synthetic oligonucleotide
cguuuggcccucccgcaca

SEQ ID NO: 2710972 - RNA, 19 nt, Artificial Sequence
  Description of Artificial Sequence: Synthetic oligonucleotide
ccacaccuggagaugcagu

SEQ ID NO: 2710973 - RNA, 19 nt, Artificial Sequence
  Description of Artificial Sequence: Synthetic oligonucleotide
gugggaccaguaagccaua

SEQ ID NO: 2710974 - RNA, 19 nt, Artificial Sequence
  Description of Artificial Sequence: Synthetic oligonucleotide
cugcccgaucacgugcacu

SEQ ID NO: 2710975 - RNA, 19 nt, Artificial Sequence
  Description of Artificial Sequence: Synthetic oligonucleotide
ccagcuguucccgccaacu

SEQ ID NO: 2710976 - RNA, 19 nt, Artificial Sequence
  Description of Artificial Sequence: Synthetic oligonucleotide
gccgcccgcggccgugugc

SEQ ID NO: 2710977 - RNA, 19 nt, Artificial Sequence
  Description of Artificial Sequence: Synthetic oligonucleotide
ggucagccccgcuguagau

SEQ ID NO: 2710978 - RNA, 19 nt, Artificial Sequence
  Description of Artificial Sequence: Synthetic oligonucleotide
ccacaccauagcgaucaaa

SEQ ID NO: 2710979 - RNA, 19 nt, Artificial Sequence
  Description of Artificial Sequence: Synthetic oligonucleotide
gcgaucaaaguggcgcaau

SEQ ID NO: 2710980 - RNA, 19 nt, Artificial Sequence
  Description of Artificial Sequence: Synthetic oligonucleotide
cggucagccccgcuguaga

SEQ ID NO: 2710981 - RNA, 19 nt, Artificial Sequence
  Description of Artificial Sequence: Synthetic oligonucleotide
cccucccgcacaccugaca

SEQ ID NO: 2710982 - RNA, 19 nt, Artificial Sequence
  Description of Artificial Sequence: Synthetic oligonucleotide
cgaaggcccgugccagcug

SEQ ID NO: 2710983 - RNA, 19 nt, Artificial Sequence
  Description of Artificial Sequence: Synthetic oligonucleotide
cccgcuguagauggugucu

SEQ ID NO: 2710984 - RNA, 19 nt, Artificial Sequence
  Description of Artificial Sequence: Synthetic oligonucleotide
gcccgaucacgugcacuuc

SEQ ID NO: 2710985 - RNA, 19 nt, Artificial Sequence
  Description of Artificial Sequence: Synthetic oligonucleotide
gcacaccugacaagagcuu

SEQ ID NO: 2710986 - RNA, 19 nt, Artificial Sequence
  Description of Artificial Sequence: Synthetic oligonucleotide
ccgcccgcggccgugugca

SEQ ID NO: 2710987 - RNA, 19 nt, Artificial Sequence
  Description of Artificial Sequence: Synthetic oligonucleotide
guccagcuggugggugccu

SEQ ID NO: 2710988 - RNA, 19 nt, Artificial Sequence
  Description of Artificial Sequence: Synthetic oligonucleotide
gccccgcuguagauggugu

SEQ ID NO: 2710989 - RNA, 19 nt, Artificial Sequence
  Description of Artificial Sequence: Synthetic oligonucleotide
cgauagcggucagccccgc

SEQ ID NO: 2710990 - RNA, 19 nt, Artificial Sequence
  Description of Artificial Sequence: Synthetic oligonucleotide
cgauggggugggaccagua

SEQ ID NO: 2710991 - RNA, 19 nt, Artificial Sequence
  Description of Artificial Sequence: Synthetic oligonucleotide
ccucaacacuccacaccau

SEQ ID NO: 2710992 - RNA, 19 nt, Artificial Sequence
  Description of Artificial Sequence: Synthetic oligonucleotide
caggggccuccagguggga

SEQ ID NO: 2710993 - RNA, 19 nt, Artificial Sequence
  Description of Artificial Sequence: Synthetic oligonucleotide
gcaggucgaugggguggga

SEQ ID NO: 2710994 - RNA, 19 nt, Artificial Sequence
  Description of Artificial Sequence: Synthetic oligonucleotide
cagccccgcuguagauggu

SEQ ID NO: 2710995 - RNA, 19 nt, Artificial Sequence
  Description of Artificial Sequence: Synthetic oligonucleotide
gcccucccgcacaccugac

SEQ ID NO: 2710996 - RNA, 19 nt, Artificial Sequence
  Description of Artificial Sequence: Synthetic oligonucleotide
ggugggugccugggcugcu

SEQ ID NO: 2710997 - RNA, 19 nt, Artificial Sequence
  Description of Artificial Sequence: Synthetic oligonucleotide
ccgcggccgugugcaggcg

SEQ ID NO: 2710998 - RNA, 19 nt, Artificial Sequence
  Description of Artificial Sequence: Synthetic oligonucleotide
cgcggccgugugcaggcga

SEQ ID NO: 2710999 - RNA, 19 nt, Artificial Sequence
  Description of Artificial Sequence: Synthetic oligonucleotide
gcggccgugugcaggcgau

SEQ ID NO: 2711000 - RNA, 19 nt, Artificial Sequence
  Description of Artificial Sequence: Synthetic oligonucleotide
cugugccgcccgcggccgu

SEQ ID NO: 2711001 - RNA, 19 nt, Artificial Sequence
  Description of Artificial Sequence: Synthetic oligonucleotide
gcauggccucagaggaguu

SEQ ID NO: 2711002 - RNA, 19 nt, Artificial Sequence
  Description of Artificial Sequence: Synthetic oligonucleotide
cgugcacuucagccauggu

SEQ ID NO: 2711003 - RNA, 19 nt, Artificial Sequence
  Description of Artificial Sequence: Synthetic oligonucleotide
cgauggcaagaugcacugu

SEQ ID NO: 2711004 - RNA, 19 nt, Artificial Sequence
  Description of Artificial Sequence: Synthetic oligonucleotide
cgcccgcggccgugugcag

SEQ ID NO: 2711005 - RNA, 19 nt, Artificial Sequence
  Description of Artificial Sequence: Synthetic oligonucleotide
cggccgugugcaggcgaua

SEQ ID NO: 2711006 - RNA, 19 nt, Artificial Sequence
  Description of Artificial Sequence: Synthetic oligonucleotide
uuuauuuguaauuucagag

SEQ ID NO: 2711007 - RNA, 19 nt, Artificial Sequence
  Description of Artificial Sequence: Synthetic oligonucleotide
uuauuuguaauuucagagg

SEQ ID NO: 2711008 - RNA, 19 nt, Artificial Sequence
  Description of Artificial Sequence: Synthetic oligonucleotide
uauuuguaauuucagagga

SEQ ID NO: 2711009 - RNA, 19 nt, Artificial Sequence
  Description of Artificial Sequence: Synthetic oligonucleotide
uuuguaauuucagaggaag

SEQ ID NO: 2711010 - RNA, 19 nt, Artificial Sequence
  Description of Artificial Sequence: Synthetic oligonucleotide
uuuuauuuguaauuucaga

SEQ ID NO: 2711011 - RNA, 19 nt, Artificial Sequence
  Description of Artificial Sequence: Synthetic oligonucleotide
uguuuuguccacaucagua

SEQ ID NO: 2711012 - RNA, 19 nt, Artificial Sequence
  Description of Artificial Sequence: Synthetic oligonucleotide
uuuuguccacaucaguacc

SEQ ID NO: 2711013 - RNA, 19 nt, Artificial Sequence
  Description of Artificial Sequence: Synthetic oligonucleotide
auuggguuugucuauggcu

SEQ ID NO: 2711014 - RNA, 19 nt, Artificial Sequence
  Description of Artificial Sequence: Synthetic oligonucleotide
uccacaucaguaccagggg

SEQ ID NO: 2711015 - RNA, 19 nt, Artificial Sequence
  Description of Artificial Sequence: Synthetic oligonucleotide
uguaauuucagaggaaguu

SEQ ID NO: 2711016 - RNA, 19 nt, Artificial Sequence
  Description of Artificial Sequence: Synthetic oligonucleotide
guuuuguccacaucaguac

SEQ ID NO: 2711017 - RNA, 19 nt, Artificial Sequence
  Description of Artificial Sequence: Synthetic oligonucleotide
uuggguuugucuauggcua

SEQ ID NO: 2711018 - RNA, 19 nt, Artificial Sequence
  Description of Artificial Sequence: Synthetic oligonucleotide
guccacaucaguaccaggg

SEQ ID NO: 2711019 - RNA, 19 nt, Artificial Sequence
  Description of Artificial Sequence: Synthetic oligonucleotide
uuguaauuucagaggaagu

SEQ ID NO: 2711020 - RNA, 19 nt, Artificial Sequence
  Description of Artificial Sequence: Synthetic oligonucleotide
ucauuggguuugucuaugg

SEQ ID NO: 2711021 - RNA, 19 nt, Artificial Sequence
  Description of Artificial Sequence: Synthetic oligonucleotide
guaauuucagaggaaguuc

SEQ ID NO: 2711022 - RNA, 19 nt, Artificial Sequence
  Description of Artificial Sequence: Synthetic oligonucleotide
uuucagaagaaagucuuuu

SEQ ID NO: 2711023 - RNA, 19 nt, Artificial Sequence
  Description of Artificial Sequence: Synthetic oligonucleotide
cauuggguuugucuauggc

SEQ ID NO: 2711024 - RNA, 19 nt, Artificial Sequence
  Description of Artificial Sequence: Synthetic oligonucleotide
uggguuugucuauggcuag

SEQ ID NO: 2711025 - RNA, 19 nt, Artificial Sequence
  Description of Artificial Sequence: Synthetic oligonucleotide
uguccacaucaguaccagg

SEQ ID NO: 2711026 - RNA, 19 nt, Artificial Sequence
  Description of Artificial Sequence: Synthetic oligonucleotide
guuggggccaguacccugg

SEQ ID NO: 2711027 - RNA, 19 nt, Artificial Sequence
  Description of Artificial Sequence: Synthetic oligonucleotide
aucauuggguuugucuaug

SEQ ID NO: 2711028 - RNA, 19 nt, Artificial Sequence
  Description of Artificial Sequence: Synthetic oligonucleotide
agccccaucauuggguuug

SEQ ID NO: 2711029 - RNA, 19 nt, Artificial Sequence
  Description of Artificial Sequence: Synthetic oligonucleotide
aauuucagaggaaguucua

SEQ ID NO: 2711030 - RNA, 19 nt, Artificial Sequence
  Description of Artificial Sequence: Synthetic oligonucleotide
auuuguaauuucagaggaa

SEQ ID NO: 2711031 - RNA, 19 nt, Artificial Sequence
  Description of Artificial Sequence: Synthetic oligonucleotide
uuggggccaguacccuggg

SEQ ID NO: 2711032 - RNA, 19 nt, Artificial Sequence
  Description of Artificial Sequence: Synthetic oligonucleotide
gcuguuuuguccacaucag

SEQ ID NO: 2711033 - RNA, 19 nt, Artificial Sequence
  Description of Artificial Sequence: Synthetic oligonucleotide
ccaucauuggguuugucua

SEQ ID NO: 2711034 - RNA, 19 nt, Artificial Sequence
  Description of Artificial Sequence: Synthetic oligonucleotide
gguuggggccaguacccug

SEQ ID NO: 2711035 - RNA, 19 nt, Artificial Sequence
  Description of Artificial Sequence: Synthetic oligonucleotide
caucauuggguuugucuau

SEQ ID NO: 2711036 - RNA, 19 nt, Artificial Sequence
  Description of Artificial Sequence: Synthetic oligonucleotide
cuguuuuguccacaucagu

SEQ ID NO: 2711037 - RNA, 19 nt, Artificial Sequence
  Description of Artificial Sequence: Synthetic oligonucleotide
uggggccaguacccugggu

SEQ ID NO: 2711038 - RNA, 19 nt, Artificial Sequence
  Description of Artificial Sequence: Synthetic oligonucleotide
cccaucauuggguuugucu

SEQ ID NO: 2711039 - RNA, 19 nt, Artificial Sequence
  Description of Artificial Sequence: Synthetic oligonucleotide
ggguuugucuauggcuaga

SEQ ID NO: 2711040 - RNA, 19 nt, Artificial Sequence
  Description of Artificial Sequence: Synthetic oligonucleotide
ggguuggggccaguacccu

SEQ ID NO: 2711041 - RNA, 19 nt, Artificial Sequence
  Description of Artificial Sequence: Synthetic oligonucleotide
ccccaucauuggguuuguc

SEQ ID NO: 2711042 - RNA, 19 nt, Artificial Sequence
  Description of Artificial Sequence: Synthetic oligonucleotide
gccccaucauuggguuugu

SEQ ID NO: 2711043 - RNA, 19 nt, Artificial Sequence
  Description of Artificial Sequence: Synthetic oligonucleotide
aacacugagaacuuuauac

SEQ ID NO: 2711044 - RNA, 19 nt, Artificial Sequence
  Description of Artificial Sequence: Synthetic oligonucleotide
ucugauuucaaccauacag

SEQ ID NO: 2711045 - RNA, 19 nt, Artificial Sequence
  Description of Artificial Sequence: Synthetic oligonucleotide
aacuuuauacgguagccgc

SEQ ID NO: 2711046 - RNA, 19 nt, Artificial Sequence
  Description of Artificial Sequence: Synthetic oligonucleotide
aauaccaguauuuauucug

SEQ ID NO: 2711047 - RNA, 19 nt, Artificial Sequence
  Description of Artificial Sequence: Synthetic oligonucleotide
uuucauuguaucaugaaug

SEQ ID NO: 2711048 - RNA, 19 nt, Artificial Sequence
  Description of Artificial Sequence: Synthetic oligonucleotide
uuuguuuuaaagcacaguc

SEQ ID NO: 2711049 - RNA, 19 nt, Artificial Sequence
  Description of Artificial Sequence: Synthetic oligonucleotide
uuugguuuuguuuuaaagc

SEQ ID NO: 2711050 - RNA, 19 nt, Artificial Sequence
  Description of Artificial Sequence: Synthetic oligonucleotide
uguuuuaaagcacagucca

SEQ ID NO: 2711051 - RNA, 19 nt, Artificial Sequence
  Description of Artificial Sequence: Synthetic oligonucleotide
aaauucuucugcugcaaac

SEQ ID NO: 2711052 - RNA, 19 nt, Artificial Sequence
  Description of Artificial Sequence: Synthetic oligonucleotide
uccaucauuaguaauaauc

SEQ ID NO: 2711053 - RNA, 19 nt, Artificial Sequence
  Description of Artificial Sequence: Synthetic oligonucleotide
ucugcugcaaacuuuaaca

SEQ ID NO: 2711054 - RNA, 19 nt, Artificial Sequence
  Description of Artificial Sequence: Synthetic oligonucleotide
uauuccaagaagcagacau

SEQ ID NO: 2711055 - RNA, 19 nt, Artificial Sequence
  Description of Artificial Sequence: Synthetic oligonucleotide
auuagcaacuuccaacucg

SEQ ID NO: 2711056 - RNA, 19 nt, Artificial Sequence
  Description of Artificial Sequence: Synthetic oligonucleotide
guaauaaucgcacuuguug

SEQ ID NO: 2711057 - RNA, 19 nt, Artificial Sequence
  Description of Artificial Sequence: Synthetic oligonucleotide
ugaaguagcagucaccuac

SEQ ID NO: 2711058 - RNA, 19 nt, Artificial Sequence
  Description of Artificial Sequence: Synthetic oligonucleotide
aaaggcauucuuucuuccc

SEQ ID NO: 2711059 - RNA, 19 nt, Artificial Sequence
  Description of Artificial Sequence: Synthetic oligonucleotide
ugaaugucugauuucaacc

SEQ ID NO: 2711060 - RNA, 19 nt, Artificial Sequence
  Description of Artificial Sequence: Synthetic oligonucleotide
uuagcaacuuccaacucgg

SEQ ID NO: 2711061 - RNA, 19 nt, Artificial Sequence
  Description of Artificial Sequence: Synthetic oligonucleotide
gucagcgugauuuuaaagg

SEQ ID NO: 2711062 - RNA, 19 nt, Artificial Sequence
  Description of Artificial Sequence: Synthetic oligonucleotide
aaggcguacuuucaggaac

SEQ ID NO: 2711063 - RNA, 19 nt, Artificial Sequence
  Description of Artificial Sequence: Synthetic oligonucleotide
gaacuuuaaauucuucugc

SEQ ID NO: 2711064 - RNA, 19 nt, Artificial Sequence
  Description of Artificial Sequence: Synthetic oligonucleotide
uaauaaucgcacuuguugc

SEQ ID NO: 2711065 - RNA, 19 nt, Artificial Sequence
  Description of Artificial Sequence: Synthetic oligonucleotide
aaagguucuguauuccaag

SEQ ID NO: 2711066 - RNA, 19 nt, Artificial Sequence
  Description of Artificial Sequence: Synthetic oligonucleotide
ucauuaguaauaaucgcac

SEQ ID NO: 2711067 - RNA, 19 nt, Artificial Sequence
  Description of Artificial Sequence: Synthetic oligonucleotide
aaugauucgcaguucugag

SEQ ID NO: 2711068 - RNA, 19 nt, Artificial Sequence
  Description of Artificial Sequence: Synthetic oligonucleotide
acaagaagggacaagaguc

SEQ ID NO: 2711069 - RNA, 19 nt, Artificial Sequence
  Description of Artificial Sequence: Synthetic oligonucleotide
gaacaaaaugaacaagaag

SEQ ID NO: 2711070 - RNA, 19 nt, Artificial Sequence
  Description of Artificial Sequence: Synthetic oligonucleotide
aacuuuaaauucuucugcu

SEQ ID NO: 2711071 - RNA, 19 nt, Artificial Sequence
  Description of Artificial Sequence: Synthetic oligonucleotide
uuguuuuaaagcacagucc

SEQ ID NO: 2711072 - RNA, 19 nt, Artificial Sequence
  Description of Artificial Sequence: Synthetic oligonucleotide
gacauuagcaacuuccaac

SEQ ID NO: 2711073 - RNA, 19 nt, Artificial Sequence
  Description of Artificial Sequence: Synthetic oligonucleotide
cugauuucaaccauacagc

SEQ ID NO: 2711074 - RNA, 19 nt, Artificial Sequence
  Description of Artificial Sequence: Synthetic oligonucleotide
gauuuuaaaggacaccuuc

SEQ ID NO: 2711075 - RNA, 19 nt, Artificial Sequence
  Description of Artificial Sequence: Synthetic oligonucleotide
uaaagcacaguccauuugu

SEQ ID NO: 2711076 - RNA, 19 nt, Artificial Sequence
  Description of Artificial Sequence: Synthetic oligonucleotide
uauuccaucauuaguaaua

SEQ ID NO: 2711077 - RNA, 19 nt, Artificial Sequence
  Description of Artificial Sequence: Synthetic oligonucleotide
cuucccaugaacaaaauga

SEQ ID NO: 2711078 - RNA, 19 nt, Artificial Sequence
  Description of Artificial Sequence: Synthetic oligonucleotide
acacugagaacuuuauacg

SEQ ID NO: 2711079 - RNA, 19 nt, Artificial Sequence
  Description of Artificial Sequence: Synthetic oligonucleotide
gacaccuucgacauggugg

SEQ ID NO: 2711080 - RNA, 19 nt, Artificial Sequence
  Description of Artificial Sequence: Synthetic oligonucleotide
agaacuuuauacgguagcc

SEQ ID NO: 2711081 - RNA, 19 nt, Artificial Sequence
  Description of Artificial Sequence: Synthetic oligonucleotide
guagcagucaccuacuaug

SEQ ID NO: 2711082 - RNA, 19 nt, Artificial Sequence
  Description of Artificial Sequence: Synthetic oligonucleotide
ucucauugauucuuggugc

SEQ ID NO: 2711083 - RNA, 19 nt, Artificial Sequence
  Description of Artificial Sequence: Synthetic oligonucleotide
agcaacaacaaauaccagu

SEQ ID NO: 2711084 - RNA, 19 nt, Artificial Sequence
  Description of Artificial Sequence: Synthetic oligonucleotide
ugaacaagaagggacaaga

SEQ ID NO: 2711085 - RNA, 19 nt, Artificial Sequence
  Description of Artificial Sequence: Synthetic oligonucleotide
auucuuggugcuuucauug

SEQ ID NO: 2711086 - RNA, 19 nt, Artificial Sequence
  Description of Artificial Sequence: Synthetic oligonucleotide
uuaguaauaaucgcacuug

SEQ ID NO: 2711087 - RNA, 19 nt, Artificial Sequence
  Description of Artificial Sequence: Synthetic oligonucleotide
ucagggauugaacuuaggu

SEQ ID NO: 2711088 - RNA, 19 nt, Artificial Sequence
  Description of Artificial Sequence: Synthetic oligonucleotide
aacaaauaccaguauuuau

SEQ ID NO: 2711089 - RNA, 19 nt, Artificial Sequence
  Description of Artificial Sequence: Synthetic oligonucleotide
ugagccauguuucaggaaa

SEQ ID NO: 2711090 - RNA, 19 nt, Artificial Sequence
  Description of Artificial Sequence: Synthetic oligonucleotide
ugaaaggcguacuuucagg

SEQ ID NO: 2711091 - RNA, 19 nt, Artificial Sequence
  Description of Artificial Sequence: Synthetic oligonucleotide
acauuagcaacuuccaacu

SEQ ID NO: 2711092 - RNA, 19 nt, Artificial Sequence
  Description of Artificial Sequence: Synthetic oligonucleotide
guacccuccacucaaaggc

SEQ ID NO: 2711093 - RNA, 19 nt, Artificial Sequence
  Description of Artificial Sequence: Synthetic oligonucleotide
uacuaugugaccuaugguu

SEQ ID NO: 2711094 - RNA, 19 nt, Artificial Sequence
  Description of Artificial Sequence: Synthetic oligonucleotide
ccaucauuaguaauaaucg

SEQ ID NO: 2711095 - RNA, 19 nt, Artificial Sequence
  Description of Artificial Sequence: Synthetic oligonucleotide
caguauuuauucugaaagg

SEQ ID NO: 2711096 - RNA, 19 nt, Artificial Sequence
  Description of Artificial Sequence: Synthetic oligonucleotide
uuccuugucucauugauuc

SEQ ID NO: 2711097 - RNA, 19 nt, Artificial Sequence
  Description of Artificial Sequence: Synthetic oligonucleotide
uucuuucuucccaugaaca

SEQ ID NO: 2711098 - RNA, 19 nt, Artificial Sequence
  Description of Artificial Sequence: Synthetic oligonucleotide
auuaguaauaaucgcacuu

SEQ ID NO: 2711099 - RNA, 19 nt, Artificial Sequence
  Description of Artificial Sequence: Synthetic oligonucleotide
agggauugaacuuagguuu

SEQ ID NO: 2711100 - RNA, 19 nt, Artificial Sequence
  Description of Artificial Sequence: Synthetic oligonucleotide
auacagcaacaacaaauac

SEQ ID NO: 2711101 - RNA, 19 nt, Artificial Sequence
  Description of Artificial Sequence: Synthetic oligonucleotide
ucagcgugauuuuaaagga

SEQ ID NO: 2711102 - RNA, 19 nt, Artificial Sequence
  Description of Artificial Sequence: Synthetic oligonucleotide
aguauuuauucugaaaggu

SEQ ID NO: 2711103 - RNA, 19 nt, Artificial Sequence
  Description of Artificial Sequence: Synthetic oligonucleotide
caucauuaguaauaaucgc

SEQ ID NO: 2711104 - RNA, 19 nt, Artificial Sequence
  Description of Artificial Sequence: Synthetic oligonucleotide
aaaugaacaagaagggaca

SEQ ID NO: 2711105 - RNA, 19 nt, Artificial Sequence
  Description of Artificial Sequence: Synthetic oligonucleotide
auuuuaaaggacaccuucg

SEQ ID NO: 2711106 - RNA, 19 nt, Artificial Sequence
  Description of Artificial Sequence: Synthetic oligonucleotide
augauucgcaguucugagc

SEQ ID NO: 2711107 - RNA, 19 nt, Artificial Sequence
  Description of Artificial Sequence: Synthetic oligonucleotide
uguauuccaagaagcagac

SEQ ID NO: 2711108 - RNA, 19 nt, Artificial Sequence
  Description of Artificial Sequence: Synthetic oligonucleotide
gucucauugauucuuggug

SEQ ID NO: 2711109 - RNA, 19 nt, Artificial Sequence
  Description of Artificial Sequence: Synthetic oligonucleotide
aaauaccaguauuuauucu

SEQ ID NO: 2711110 - RNA, 19 nt, Artificial Sequence
  Description of Artificial Sequence: Synthetic oligonucleotide
uuuaaaggacaccuucgac

SEQ ID NO: 2711111 - RNA, 19 nt, Artificial Sequence
  Description of Artificial Sequence: Synthetic oligonucleotide
ccaguauuuauucugaaag

SEQ ID NO: 2711112 - RNA, 19 nt, Artificial Sequence
  Description of Artificial Sequence: Synthetic oligonucleotide
ucaugaaugucugauuuca

SEQ ID NO: 2711113 - RNA, 19 nt, Artificial Sequence
  Description of Artificial Sequence: Synthetic oligonucleotide
guuuauuccuauuccauca

SEQ ID NO: 2711114 - RNA, 19 nt, Artificial Sequence
  Description of Artificial Sequence: Synthetic oligonucleotide
uguaucaugaaugucugau

SEQ ID NO: 2711115 - RNA, 19 nt, Artificial Sequence
  Description of Artificial Sequence: Synthetic oligonucleotide
ucaaccauacagcaacaac

SEQ ID NO: 2711116 - RNA, 19 nt, Artificial Sequence
  Description of Artificial Sequence: Synthetic oligonucleotide
uucuguauuccaagaagca

SEQ ID NO: 2711117 - RNA, 19 nt, Artificial Sequence
  Description of Artificial Sequence: Synthetic oligonucleotide
uauuccuauuccaucauua

SEQ ID NO: 2711118 - RNA, 19 nt, Artificial Sequence
  Description of Artificial Sequence: Synthetic oligonucleotide
ugagaacuuuauacgguag

SEQ ID NO: 2711119 - RNA, 19 nt, Artificial Sequence
  Description of Artificial Sequence: Synthetic oligonucleotide
acacaacgcgccuagucgc

SEQ ID NO: 2711120 - RNA, 19 nt, Artificial Sequence
  Description of Artificial Sequence: Synthetic oligonucleotide
aacuuuccuugucucauug

SEQ ID NO: 2711121 - RNA, 19 nt, Artificial Sequence
  Description of Artificial Sequence: Synthetic oligonucleotide
gaacuuuauacgguagccg

SEQ ID NO: 2711122 - RNA, 19 nt, Artificial Sequence
  Description of Artificial Sequence: Synthetic oligonucleotide
gagaacuuuauacgguagc

SEQ ID NO: 2711123 - RNA, 19 nt, Artificial Sequence
  Description of Artificial Sequence: Synthetic oligonucleotide
auuccuauuccaucauuag

SEQ ID NO: 2711124 - RNA, 19 nt, Artificial Sequence
  Description of Artificial Sequence: Synthetic oligonucleotide
uuaaagcacaguccauuug

SEQ ID NO: 2711125 - RNA, 19 nt, Artificial Sequence
  Description of Artificial Sequence: Synthetic oligonucleotide
aucauuaguaauaaucgca

SEQ ID NO: 2711126 - RNA, 19 nt, Artificial Sequence
  Description of Artificial Sequence: Synthetic oligonucleotide
cauuugucacagaaguacc

SEQ ID NO: 2711127 - RNA, 19 nt, Artificial Sequence
  Description of Artificial Sequence: Synthetic oligonucleotide
ugucugauuucaaccauac

SEQ ID NO: 2711128 - RNA, 19 nt, Artificial Sequence
  Description of Artificial Sequence: Synthetic oligonucleotide
agcaacuuccaacucgguc

SEQ ID NO: 2711129 - RNA, 19 nt, Artificial Sequence
  Description of Artificial Sequence: Synthetic oligonucleotide
aaacuuuaacacugcugug

SEQ ID NO: 2711130 - RNA, 19 nt, Artificial Sequence
  Description of Artificial Sequence: Synthetic oligonucleotide
ucugaaagguucuguauuc

SEQ ID NO: 2711131 - RNA, 19 nt, Artificial Sequence
  Description of Artificial Sequence: Synthetic oligonucleotide
aaugucugauuucaaccau

SEQ ID NO: 2711132 - RNA, 19 nt, Artificial Sequence
  Description of Artificial Sequence: Synthetic oligonucleotide
cauuguaucaugaaugucu

SEQ ID NO: 2711133 - RNA, 19 nt, Artificial Sequence
  Description of Artificial Sequence: Synthetic oligonucleotide
caagaagcagacauuagca

SEQ ID NO: 2711134 - RNA, 19 nt, Artificial Sequence
  Description of Artificial Sequence: Synthetic oligonucleotide
ucuaggaaugauucgcagu

SEQ ID NO: 2711135 - RNA, 19 nt, Artificial Sequence
  Description of Artificial Sequence: Synthetic oligonucleotide
uguuucaggaaaacauuuc

SEQ ID NO: 2711136 - RNA, 19 nt, Artificial Sequence
  Description of Artificial Sequence: Synthetic oligonucleotide
caaacuuuaacacugcugu

SEQ ID NO: 2711137 - RNA, 19 nt, Artificial Sequence
  Description of Artificial Sequence: Synthetic oligonucleotide
cacacaacgcgccuagucg

SEQ ID NO: 2711138 - RNA, 19 nt, Artificial Sequence
  Description of Artificial Sequence: Synthetic oligonucleotide
acaagagucaacuuuccuu

SEQ ID NO: 2711139 - RNA, 19 nt, Artificial Sequence
  Description of Artificial Sequence: Synthetic oligonucleotide
uaguaauaaucgcacuugu

SEQ ID NO: 2711140 - RNA, 19 nt, Artificial Sequence
  Description of Artificial Sequence: Synthetic oligonucleotide
aaaacauuuccagcagucu

SEQ ID NO: 2711141 - RNA, 19 nt, Artificial Sequence
  Description of Artificial Sequence: Synthetic oligonucleotide
aagguucuguauuccaaga

SEQ ID NO: 2711142 - RNA, 19 nt, Artificial Sequence
  Description of Artificial Sequence: Synthetic oligonucleotide
cuaugugaccuaugguugg

SEQ ID NO: 2711143 - RNA, 19 nt, Artificial Sequence
  Description of Artificial Sequence: Synthetic oligonucleotide
ugugaaaggcguacuuuca

SEQ ID NO: 2711144 - RNA, 19 nt, Artificial Sequence
  Description of Artificial Sequence: Synthetic oligonucleotide
aggaaaacauuuccagcag

SEQ ID NO: 2711145 - RNA, 19 nt, Artificial Sequence
  Description of Artificial Sequence: Synthetic oligonucleotide
guucuguauuccaagaagc

SEQ ID NO: 2711146 - RNA, 19 nt, Artificial Sequence
  Description of Artificial Sequence: Synthetic oligonucleotide
uucccaugaacaaaaugaa

SEQ ID NO: 2711147 - RNA, 19 nt, Artificial Sequence
  Description of Artificial Sequence: Synthetic oligonucleotide
uuccuauuccaucauuagu

SEQ ID NO: 2711148 - RNA, 19 nt, Artificial Sequence
  Description of Artificial Sequence: Synthetic oligonucleotide
gaaaggcguacuuucagga

SEQ ID NO: 2711149 - RNA, 19 nt, Artificial Sequence
  Description of Artificial Sequence: Synthetic oligonucleotide
ugaccuaugguugguaccc

SEQ ID NO: 2711150 - RNA, 19 nt, Artificial Sequence
  Description of Artificial Sequence: Synthetic oligonucleotide
agucaacuuuccuugucuc

SEQ ID NO: 2711151 - RNA, 19 nt, Artificial Sequence
  Description of Artificial Sequence: Synthetic oligonucleotide
uccaacucggucucuagga

SEQ ID NO: 2711152 - RNA, 19 nt, Artificial Sequence
  Description of Artificial Sequence: Synthetic oligonucleotide
uuccaacucggucucuagg

SEQ ID NO: 2711153 - RNA, 19 nt, Artificial Sequence
  Description of Artificial Sequence: Synthetic oligonucleotide
gguucuguauuccaagaag

SEQ ID NO: 2711154 - RNA, 19 nt, Artificial Sequence
  Description of Artificial Sequence: Synthetic oligonucleotide
ugucacagaaguacccucu

SEQ ID NO: 2711155 - RNA, 19 nt, Artificial Sequence
  Description of Artificial Sequence: Synthetic oligonucleotide
cuguauuccaagaagcaga

SEQ ID NO: 2711156 - RNA, 19 nt, Artificial Sequence
  Description of Artificial Sequence: Synthetic oligonucleotide
acugcugugaaaggcguac

SEQ ID NO: 2711157 - RNA, 19 nt, Artificial Sequence
  Description of Artificial Sequence: Synthetic oligonucleotide
ugguuuuguuuuaaagcac

SEQ ID NO: 2711158 - RNA, 19 nt, Artificial Sequence
  Description of Artificial Sequence: Synthetic oligonucleotide
uuuuaaagcacaguccauu

SEQ ID NO: 2711159 - RNA, 19 nt, Artificial Sequence
  Description of Artificial Sequence: Synthetic oligonucleotide
uuuaaagcacaguccauuu

SEQ ID NO: 2711160 - RNA, 19 nt, Artificial Sequence
  Description of Artificial Sequence: Synthetic oligonucleotide
ucucuaggaaugauucgca

SEQ ID NO: 2711161 - RNA, 19 nt, Artificial Sequence
  Description of Artificial Sequence: Synthetic oligonucleotide
ccuacuaugugaccuaugg

SEQ ID NO: 2711162 - RNA, 19 nt, Artificial Sequence
  Description of Artificial Sequence: Synthetic oligonucleotide
cuuuauacgguagccgcgg

SEQ ID NO: 2711163 - RNA, 19 nt, Artificial Sequence
  Description of Artificial Sequence: Synthetic oligonucleotide
acacacaacgcgccuaguc

SEQ ID NO: 2711164 - RNA, 19 nt, Artificial Sequence
  Description of Artificial Sequence: Synthetic oligonucleotide
agagucaacuuuccuuguc

SEQ ID NO: 2711165 - RNA, 19 nt, Artificial Sequence
  Description of Artificial Sequence: Synthetic oligonucleotide
ugcuuucauuguaucauga

SEQ ID NO: 2711166 - RNA, 19 nt, Artificial Sequence
  Description of Artificial Sequence: Synthetic oligonucleotide
aggaaugauucgcaguucu

SEQ ID NO: 2711167 - RNA, 19 nt, Artificial Sequence
  Description of Artificial Sequence: Synthetic oligonucleotide
uucgacaugguggaacugc

SEQ ID NO: 2711168 - RNA, 19 nt, Artificial Sequence
  Description of Artificial Sequence: Synthetic oligonucleotide
ucuuucuucccaugaacaa

SEQ ID NO: 2711169 - RNA, 19 nt, Artificial Sequence
  Description of Artificial Sequence: Synthetic oligonucleotide
uuuauacgguagccgcggg

SEQ ID NO: 2711170 - RNA, 19 nt, Artificial Sequence
  Description of Artificial Sequence: Synthetic oligonucleotide
gucucuaggaaugauucgc

SEQ ID NO: 2711171 - RNA, 19 nt, Artificial Sequence
  Description of Artificial Sequence: Synthetic oligonucleotide
uugucucauugauucuugg

SEQ ID NO: 2711172 - RNA, 19 nt, Artificial Sequence
  Description of Artificial Sequence: Synthetic oligonucleotide
auugauucuuggugcuuuc

SEQ ID NO: 2711173 - RNA, 19 nt, Artificial Sequence
  Description of Artificial Sequence: Synthetic oligonucleotide
acuaugugaccuaugguug

SEQ ID NO: 2711174 - RNA, 19 nt, Artificial Sequence
  Description of Artificial Sequence: Synthetic oligonucleotide
uccaagaagcagacauuag

SEQ ID NO: 2711175 - RNA, 19 nt, Artificial Sequence
  Description of Artificial Sequence: Synthetic oligonucleotide
uuuauuccuauuccaucau

SEQ ID NO: 2711176 - RNA, 19 nt, Artificial Sequence
  Description of Artificial Sequence: Synthetic oligonucleotide
aaagcacaguccauuuguc

SEQ ID NO: 2711177 - RNA, 19 nt, Artificial Sequence
  Description of Artificial Sequence: Synthetic oligonucleotide
ugcugcaaacuuuaacacu

SEQ ID NO: 2711178 - RNA, 19 nt, Artificial Sequence
  Description of Artificial Sequence: Synthetic oligonucleotide
aggguuuauuccuauucca

SEQ ID NO: 2711179 - RNA, 19 nt, Artificial Sequence
  Description of Artificial Sequence: Synthetic oligonucleotide
ucucagggauugaacuuag

SEQ ID NO: 2711180 - RNA, 19 nt, Artificial Sequence
  Description of Artificial Sequence: Synthetic oligonucleotide
aacucggucucuaggaaug

SEQ ID NO: 2711181 - RNA, 19 nt, Artificial Sequence
  Description of Artificial Sequence: Synthetic oligonucleotide
acaacaaauaccaguauuu

SEQ ID NO: 2711182 - RNA, 19 nt, Artificial Sequence
  Description of Artificial Sequence: Synthetic oligonucleotide
gaaugauucgcaguucuga

SEQ ID NO: 2711183 - RNA, 19 nt, Artificial Sequence
  Description of Artificial Sequence: Synthetic oligonucleotide
cugugaaaggcguacuuuc

SEQ ID NO: 2711184 - RNA, 19 nt, Artificial Sequence
  Description of Artificial Sequence: Synthetic oligonucleotide
ugucucauugauucuuggu

SEQ ID NO: 2711185 - RNA, 19 nt, Artificial Sequence
  Description of Artificial Sequence: Synthetic oligonucleotide
aaaggcguacuuucaggaa

SEQ ID NO: 2711186 - RNA, 19 nt, Artificial Sequence
  Description of Artificial Sequence: Synthetic oligonucleotide
ugugaccuaugguugguac

SEQ ID NO: 2711187 - RNA, 19 nt, Artificial Sequence
  Description of Artificial Sequence: Synthetic oligonucleotide
agggacaagagucaacuuu

SEQ ID NO: 2711188 - RNA, 19 nt, Artificial Sequence
  Description of Artificial Sequence: Synthetic oligonucleotide
cauacagcaacaacaaaua

SEQ ID NO: 2711189 - RNA, 19 nt, Artificial Sequence
  Description of Artificial Sequence: Synthetic oligonucleotide
cugcaggaacuuuaaauuc

SEQ ID NO: 2711190 - RNA, 19 nt, Artificial Sequence
  Description of Artificial Sequence: Synthetic oligonucleotide
gugaaaggcguacuuucag

SEQ ID NO: 2711191 - RNA, 19 nt, Artificial Sequence
  Description of Artificial Sequence: Synthetic oligonucleotide
gcagacauuagcaacuucc

SEQ ID NO: 2711192 - RNA, 19 nt, Artificial Sequence
  Description of Artificial Sequence: Synthetic oligonucleotide
uguugcugcaggaacuuua

SEQ ID NO: 2711193 - RNA, 19 nt, Artificial Sequence
  Description of Artificial Sequence: Synthetic oligonucleotide
aaccauacagcaacaacaa

SEQ ID NO: 2711194 - RNA, 19 nt, Artificial Sequence
  Description of Artificial Sequence: Synthetic oligonucleotide
uuauucugaaagguucugu

SEQ ID NO: 2711195 - RNA, 19 nt, Artificial Sequence
  Description of Artificial Sequence: Synthetic oligonucleotide
uuucaaccauacagcaaca

SEQ ID NO: 2711196 - RNA, 19 nt, Artificial Sequence
  Description of Artificial Sequence: Synthetic oligonucleotide
ucgacaugguggaacugcc

SEQ ID NO: 2711197 - RNA, 19 nt, Artificial Sequence
  Description of Artificial Sequence: Synthetic oligonucleotide
acaccuucgacauggugga

SEQ ID NO: 2711198 - RNA, 19 nt, Artificial Sequence
  Description of Artificial Sequence: Synthetic oligonucleotide
ugauucuuggugcuuucau

SEQ ID NO: 2711199 - RNA, 19 nt, Artificial Sequence
  Description of Artificial Sequence: Synthetic oligonucleotide
cugcugcaaacuuuaacac

SEQ ID NO: 2711200 - RNA, 19 nt, Artificial Sequence
  Description of Artificial Sequence: Synthetic oligonucleotide
aaugaacaagaagggacaa

SEQ ID NO: 2711201 - RNA, 19 nt, Artificial Sequence
  Description of Artificial Sequence: Synthetic oligonucleotide
caaaggcauucuuucuucc

SEQ ID NO: 2711202 - RNA, 19 nt, Artificial Sequence
  Description of Artificial Sequence: Synthetic oligonucleotide
uucuggugaaguagcaguc

SEQ ID NO: 2711203 - RNA, 19 nt, Artificial Sequence
  Description of Artificial Sequence: Synthetic oligonucleotide
uccgacgucagcgugauuu

SEQ ID NO: 2711204 - RNA, 19 nt, Artificial Sequence
  Description of Artificial Sequence: Synthetic oligonucleotide
auacgguagccgcgggucc

SEQ ID NO: 2711205 - RNA, 19 nt, Artificial Sequence
  Description of Artificial Sequence: Synthetic oligonucleotide
ugauuuuaaaggacaccuu

SEQ ID NO: 2711206 - RNA, 19 nt, Artificial Sequence
  Description of Artificial Sequence: Synthetic oligonucleotide
aagagucaacuuuccuugu

SEQ ID NO: 2711207 - RNA, 19 nt, Artificial Sequence
  Description of Artificial Sequence: Synthetic oligonucleotide
gugauuuuaaaggacaccu

SEQ ID NO: 2711208 - RNA, 19 nt, Artificial Sequence
  Description of Artificial Sequence: Synthetic oligonucleotide
uggugcuuucauuguauca

SEQ ID NO: 2711209 - RNA, 19 nt, Artificial Sequence
  Description of Artificial Sequence: Synthetic oligonucleotide
uagcagucaccuacuaugu

SEQ ID NO: 2711210 - RNA, 19 nt, Artificial Sequence
  Description of Artificial Sequence: Synthetic oligonucleotide
guccauuugucacagaagu

SEQ ID NO: 2711211 - RNA, 19 nt, Artificial Sequence
  Description of Artificial Sequence: Synthetic oligonucleotide
accaguauuuauucugaaa

SEQ ID NO: 2711212 - RNA, 19 nt, Artificial Sequence
  Description of Artificial Sequence: Synthetic oligonucleotide
acuuuauacgguagccgcg

SEQ ID NO: 2711213 - RNA, 19 nt, Artificial Sequence
  Description of Artificial Sequence: Synthetic oligonucleotide
augguugguacccuccacu

SEQ ID NO: 2711214 - RNA, 19 nt, Artificial Sequence
  Description of Artificial Sequence: Synthetic oligonucleotide
cucuaggaaugauucgcag

SEQ ID NO: 2711215 - RNA, 19 nt, Artificial Sequence
  Description of Artificial Sequence: Synthetic oligonucleotide
cagucaccuacuaugugac

SEQ ID NO: 2711216 - RNA, 19 nt, Artificial Sequence
  Description of Artificial Sequence: Synthetic oligonucleotide
caguucugagccauguuuc

SEQ ID NO: 2711217 - RNA, 19 nt, Artificial Sequence
  Description of Artificial Sequence: Synthetic oligonucleotide
guacccucucuucuucugg

SEQ ID NO: 2711218 - RNA, 19 nt, Artificial Sequence
  Description of Artificial Sequence: Synthetic oligonucleotide
aguucugagccauguuuca

SEQ ID NO: 2711219 - RNA, 19 nt, Artificial Sequence
  Description of Artificial Sequence: Synthetic oligonucleotide
gucugugcaggguuuauuc

SEQ ID NO: 2711220 - RNA, 19 nt, Artificial Sequence
  Description of Artificial Sequence: Synthetic oligonucleotide
ucacagaaguacccucucu

SEQ ID NO: 2711221 - RNA, 19 nt, Artificial Sequence
  Description of Artificial Sequence: Synthetic oligonucleotide
uauacgguagccgcggguc

SEQ ID NO: 2711222 - RNA, 19 nt, Artificial Sequence
  Description of Artificial Sequence: Synthetic oligonucleotide
agcgugauuuuaaaggaca

SEQ ID NO: 2711223 - RNA, 19 nt, Artificial Sequence
  Description of Artificial Sequence: Synthetic oligonucleotide
uuauacgguagccgcgggu

SEQ ID NO: 2711224 - RNA, 19 nt, Artificial Sequence
  Description of Artificial Sequence: Synthetic oligonucleotide
ugccgcacacacaacgcgc

SEQ ID NO: 2711225 - RNA, 19 nt, Artificial Sequence
  Description of Artificial Sequence: Synthetic oligonucleotide
aacgcgccuagucgcccgc

SEQ ID NO: 2711226 - RNA, 19 nt, Artificial Sequence
  Description of Artificial Sequence: Synthetic oligonucleotide
gguacccuccacucaaagg

SEQ ID NO: 2711227 - RNA, 19 nt, Artificial Sequence
  Description of Artificial Sequence: Synthetic oligonucleotide
uuauuccuauuccaucauu

SEQ ID NO: 2711228 - RNA, 19 nt, Artificial Sequence
  Description of Artificial Sequence: Synthetic oligonucleotide
auaaucgcacuuguugcug

SEQ ID NO: 2711229 - RNA, 19 nt, Artificial Sequence
  Description of Artificial Sequence: Synthetic oligonucleotide
gaagggacaagagucaacu

SEQ ID NO: 2711230 - RNA, 19 nt, Artificial Sequence
  Description of Artificial Sequence: Synthetic oligonucleotide
uaugguugguacccuccac

SEQ ID NO: 2711231 - RNA, 19 nt, Artificial Sequence
  Description of Artificial Sequence: Synthetic oligonucleotide
ggaacugccgcacacacaa

SEQ ID NO: 2711232 - RNA, 19 nt, Artificial Sequence
  Description of Artificial Sequence: Synthetic oligonucleotide
ccauuugucacagaaguac

SEQ ID NO: 2711233 - RNA, 19 nt, Artificial Sequence
  Description of Artificial Sequence: Synthetic oligonucleotide
gugaccuaugguugguacc

SEQ ID NO: 2711234 - RNA, 19 nt, Artificial Sequence
  Description of Artificial Sequence: Synthetic oligonucleotide
aguagcagucaccuacuau

SEQ ID NO: 2711235 - RNA, 19 nt, Artificial Sequence
  Description of Artificial Sequence: Synthetic oligonucleotide
uugucacagaaguacccuc

SEQ ID NO: 2711236 - RNA, 19 nt, Artificial Sequence
  Description of Artificial Sequence: Synthetic oligonucleotide
gguuuauuccuauuccauc

SEQ ID NO: 2711237 - RNA, 19 nt, Artificial Sequence
  Description of Artificial Sequence: Synthetic oligonucleotide
uccauuugucacagaagua

SEQ ID NO: 2711238 - RNA, 19 nt, Artificial Sequence
  Description of Artificial Sequence: Synthetic oligonucleotide
aaaggacaccuucgacaug

SEQ ID NO: 2711239 - RNA, 19 nt, Artificial Sequence
  Description of Artificial Sequence: Synthetic oligonucleotide
auaccaguauuuauucuga

SEQ ID NO: 2711240 - RNA, 19 nt, Artificial Sequence
  Description of Artificial Sequence: Synthetic oligonucleotide
cugcaaacuuuaacacugc

SEQ ID NO: 2711241 - RNA, 19 nt, Artificial Sequence
  Description of Artificial Sequence: Synthetic oligonucleotide
agacauuagcaacuuccaa

SEQ ID NO: 2711242 - RNA, 19 nt, Artificial Sequence
  Description of Artificial Sequence: Synthetic oligonucleotide
guugguacccuccacucaa

SEQ ID NO: 2711243 - RNA, 19 nt, Artificial Sequence
  Description of Artificial Sequence: Synthetic oligonucleotide
uacccuccacucaaaggca

SEQ ID NO: 2711244 - RNA, 19 nt, Artificial Sequence
  Description of Artificial Sequence: Synthetic oligonucleotide
augaacaagaagggacaag

SEQ ID NO: 2711245 - RNA, 19 nt, Artificial Sequence
  Description of Artificial Sequence: Synthetic oligonucleotide
gugcuuucauuguaucaug

SEQ ID NO: 2711246 - RNA, 19 nt, Artificial Sequence
  Description of Artificial Sequence: Synthetic oligonucleotide
agguucuguauuccaagaa

SEQ ID NO: 2711247 - RNA, 19 nt, Artificial Sequence
  Description of Artificial Sequence: Synthetic oligonucleotide
aguccauuugucacagaag

SEQ ID NO: 2711248 - RNA, 19 nt, Artificial Sequence
  Description of Artificial Sequence: Synthetic oligonucleotide
cagacauuagcaacuucca

SEQ ID NO: 2711249 - RNA, 19 nt, Artificial Sequence
  Description of Artificial Sequence: Synthetic oligonucleotide
uuguaucaugaaugucuga

SEQ ID NO: 2711250 - RNA, 19 nt, Artificial Sequence
  Description of Artificial Sequence: Synthetic oligonucleotide
ggucucuaggaaugauucg

SEQ ID NO: 2711251 - RNA, 19 nt, Artificial Sequence
  Description of Artificial Sequence: Synthetic oligonucleotide
ucauuguaucaugaauguc

SEQ ID NO: 2711252 - RNA, 19 nt, Artificial Sequence
  Description of Artificial Sequence: Synthetic oligonucleotide
cagcgugauuuuaaaggac

SEQ ID NO: 2711253 - RNA, 19 nt, Artificial Sequence
  Description of Artificial Sequence: Synthetic oligonucleotide
agccauguuucaggaaaac

SEQ ID NO: 2711254 - RNA, 19 nt, Artificial Sequence
  Description of Artificial Sequence: Synthetic oligonucleotide
ucggucucuaggaaugauu

SEQ ID NO: 2711255 - RNA, 19 nt, Artificial Sequence
  Description of Artificial Sequence: Synthetic oligonucleotide
ugguugguacccuccacuc

SEQ ID NO: 2711256 - RNA, 19 nt, Artificial Sequence
  Description of Artificial Sequence: Synthetic oligonucleotide
gcaacuuccaacucggucu

SEQ ID NO: 2711257 - RNA, 19 nt, Artificial Sequence
  Description of Artificial Sequence: Synthetic oligonucleotide
gagucaacuuuccuugucu

SEQ ID NO: 2711258 - RNA, 19 nt, Artificial Sequence
  Description of Artificial Sequence: Synthetic oligonucleotide
gcagucaccuacuauguga

SEQ ID NO: 2711259 - RNA, 19 nt, Artificial Sequence
  Description of Artificial Sequence: Synthetic oligonucleotide
cuuucauuguaucaugaau

SEQ ID NO: 2711260 - RNA, 19 nt, Artificial Sequence
  Description of Artificial Sequence: Synthetic oligonucleotide
caguccauuugucacagaa

SEQ ID NO: 2711261 - RNA, 19 nt, Artificial Sequence
  Description of Artificial Sequence: Synthetic oligonucleotide
gcaaacuuuaacacugcug

SEQ ID NO: 2711262 - RNA, 19 nt, Artificial Sequence
  Description of Artificial Sequence: Synthetic oligonucleotide
cuuccaacucggucucuag

SEQ ID NO: 2711263 - RNA, 19 nt, Artificial Sequence
  Description of Artificial Sequence: Synthetic oligonucleotide
gucaacuuuccuugucuca

SEQ ID NO: 2711264 - RNA, 19 nt, Artificial Sequence
  Description of Artificial Sequence: Synthetic oligonucleotide
uuggugcuuucauuguauc

SEQ ID NO: 2711265 - RNA, 19 nt, Artificial Sequence
  Description of Artificial Sequence: Synthetic oligonucleotide
gauuucaaccauacagcaa

SEQ ID NO: 2711266 - RNA, 19 nt, Artificial Sequence
  Description of Artificial Sequence: Synthetic oligonucleotide
acuuuccuugucucauuga

SEQ ID NO: 2711267 - RNA, 19 nt, Artificial Sequence
  Description of Artificial Sequence: Synthetic oligonucleotide
gcaggguuuauuccuauuc

SEQ ID NO: 2711268 - RNA, 19 nt, Artificial Sequence
  Description of Artificial Sequence: Synthetic oligonucleotide
agcagucaccuacuaugug

SEQ ID NO: 2711269 - RNA, 19 nt, Artificial Sequence
  Description of Artificial Sequence: Synthetic oligonucleotide
cugagaacuuuauacggua

SEQ ID NO: 2711270 - RNA, 19 nt, Artificial Sequence
  Description of Artificial Sequence: Synthetic oligonucleotide
cacaguccauuugucacag

SEQ ID NO: 2711271 - RNA, 19 nt, Artificial Sequence
  Description of Artificial Sequence: Synthetic oligonucleotide
uaccaguauuuauucugaa

SEQ ID NO: 2711272 - RNA, 19 nt, Artificial Sequence
  Description of Artificial Sequence: Synthetic oligonucleotide
uucaaccauacagcaacaa

SEQ ID NO: 2711273 - RNA, 19 nt, Artificial Sequence
  Description of Artificial Sequence: Synthetic oligonucleotide
uugauucuuggugcuuuca

SEQ ID NO: 2711274 - RNA, 19 nt, Artificial Sequence
  Description of Artificial Sequence: Synthetic oligonucleotide
uacccucucuucuucuggu

SEQ ID NO: 2711275 - RNA, 19 nt, Artificial Sequence
  Description of Artificial Sequence: Synthetic oligonucleotide
uaugugaccuaugguuggu

SEQ ID NO: 2711276 - RNA, 19 nt, Artificial Sequence
  Description of Artificial Sequence: Synthetic oligonucleotide
ucaccuacuaugugaccua

SEQ ID NO: 2711277 - RNA, 19 nt, Artificial Sequence
  Description of Artificial Sequence: Synthetic oligonucleotide
cucagggauugaacuuagg

SEQ ID NO: 2711278 - RNA, 19 nt, Artificial Sequence
  Description of Artificial Sequence: Synthetic oligonucleotide
uacgguagccgcggguccg

SEQ ID NO: 2711279 - RNA, 19 nt, Artificial Sequence
  Description of Artificial Sequence: Synthetic oligonucleotide
aagggacaagagucaacuu

SEQ ID NO: 2711280 - RNA, 19 nt, Artificial Sequence
  Description of Artificial Sequence: Synthetic oligonucleotide
uuccagcagucugugcagg

SEQ ID NO: 2711281 - RNA, 19 nt, Artificial Sequence
  Description of Artificial Sequence: Synthetic oligonucleotide
caggaacuuuaaauucuuc

SEQ ID NO: 2711282 - RNA, 19 nt, Artificial Sequence
  Description of Artificial Sequence: Synthetic oligonucleotide
gaacacugagaacuuuaua

SEQ ID NO: 2711283 - RNA, 19 nt, Artificial Sequence
  Description of Artificial Sequence: Synthetic oligonucleotide
caugguggaacugccgcac

SEQ ID NO: 2711284 - RNA, 19 nt, Artificial Sequence
  Description of Artificial Sequence: Synthetic oligonucleotide
acaacgcgccuagucgccc

SEQ ID NO: 2711285 - RNA, 19 nt, Artificial Sequence
  Description of Artificial Sequence: Synthetic oligonucleotide
cauuagcaacuuccaacuc

SEQ ID NO: 2711286 - RNA, 19 nt, Artificial Sequence
  Description of Artificial Sequence: Synthetic oligonucleotide
acauuuccagcagucugug

SEQ ID NO: 2711287 - RNA, 19 nt, Artificial Sequence
  Description of Artificial Sequence: Synthetic oligonucleotide
cacaacgcgccuagucgcc

SEQ ID NO: 2711288 - RNA, 19 nt, Artificial Sequence
  Description of Artificial Sequence: Synthetic oligonucleotide
aaguagcagucaccuacua

SEQ ID NO: 2711289 - RNA, 19 nt, Artificial Sequence
  Description of Artificial Sequence: Synthetic oligonucleotide
cauuuccagcagucugugc

SEQ ID NO: 2711290 - RNA, 19 nt, Artificial Sequence
  Description of Artificial Sequence: Synthetic oligonucleotide
uccuugucucauugauucu

SEQ ID NO: 2711291 - RNA, 19 nt, Artificial Sequence
  Description of Artificial Sequence: Synthetic oligonucleotide
caacuuccaacucggucuc

SEQ ID NO: 2711292 - RNA, 19 nt, Artificial Sequence
  Description of Artificial Sequence: Synthetic oligonucleotide
aguaauaaucgcacuuguu

SEQ ID NO: 2711293 - RNA, 19 nt, Artificial Sequence
  Description of Artificial Sequence: Synthetic oligonucleotide
augcaggucucagggauug

SEQ ID NO: 2711294 - RNA, 19 nt, Artificial Sequence
  Description of Artificial Sequence: Synthetic oligonucleotide
ccuaugguugguacccucc

SEQ ID NO: 2711295 - RNA, 19 nt, Artificial Sequence
  Description of Artificial Sequence: Synthetic oligonucleotide
gacaagagucaacuuuccu

SEQ ID NO: 2711296 - RNA, 19 nt, Artificial Sequence
  Description of Artificial Sequence: Synthetic oligonucleotide
gucaccuacuaugugaccu

SEQ ID NO: 2711297 - RNA, 19 nt, Artificial Sequence
  Description of Artificial Sequence: Synthetic oligonucleotide
cauuaguaauaaucgcacu

SEQ ID NO: 2711298 - RNA, 19 nt, Artificial Sequence
  Description of Artificial Sequence: Synthetic oligonucleotide
cauguuucaggaaaacauu

SEQ ID NO: 2711299 - RNA, 19 nt, Artificial Sequence
  Description of Artificial Sequence: Synthetic oligonucleotide
gucacagaaguacccucuc

SEQ ID NO: 2711300 - RNA, 19 nt, Artificial Sequence
  Description of Artificial Sequence: Synthetic oligonucleotide
uuccaucauuaguaauaau

SEQ ID NO: 2711301 - RNA, 19 nt, Artificial Sequence
  Description of Artificial Sequence: Synthetic oligonucleotide
aagcagacauuagcaacuu

SEQ ID NO: 2711302 - RNA, 19 nt, Artificial Sequence
  Description of Artificial Sequence: Synthetic oligonucleotide
acgucagcgugauuuuaaa

SEQ ID NO: 2711303 - RNA, 19 nt, Artificial Sequence
  Description of Artificial Sequence: Synthetic oligonucleotide
cuaugguugguacccucca

SEQ ID NO: 2711304 - RNA, 19 nt, Artificial Sequence
  Description of Artificial Sequence: Synthetic oligonucleotide
uaggaaugauucgcaguuc

SEQ ID NO: 2711305 - RNA, 19 nt, Artificial Sequence
  Description of Artificial Sequence: Synthetic oligonucleotide
caacaaauaccaguauuua

SEQ ID NO: 2711306 - RNA, 19 nt, Artificial Sequence
  Description of Artificial Sequence: Synthetic oligonucleotide
gauucgcaguucugagcca

SEQ ID NO: 2711307 - RNA, 19 nt, Artificial Sequence
  Description of Artificial Sequence: Synthetic oligonucleotide
caacgcgccuagucgcccg

SEQ ID NO: 2711308 - RNA, 19 nt, Artificial Sequence
  Description of Artificial Sequence: Synthetic oligonucleotide
ccauacagcaacaacaaau

SEQ ID NO: 2711309 - RNA, 19 nt, Artificial Sequence
  Description of Artificial Sequence: Synthetic oligonucleotide
ggugaaguagcagucaccu

SEQ ID NO: 2711310 - RNA, 19 nt, Artificial Sequence
  Description of Artificial Sequence: Synthetic oligonucleotide
ucgcaguucugagccaugu

SEQ ID NO: 2711311 - RNA, 19 nt, Artificial Sequence
  Description of Artificial Sequence: Synthetic oligonucleotide
gacgucagcgugauuuuaa

SEQ ID NO: 2711312 - RNA, 19 nt, Artificial Sequence
  Description of Artificial Sequence: Synthetic oligonucleotide
aggcguacuuucaggaaca

SEQ ID NO: 2711313 - RNA, 19 nt, Artificial Sequence
  Description of Artificial Sequence: Synthetic oligonucleotide
gucugauuucaaccauaca

SEQ ID NO: 2711314 - RNA, 19 nt, Artificial Sequence
  Description of Artificial Sequence: Synthetic oligonucleotide
gcacacacaacgcgccuag

SEQ ID NO: 2711315 - RNA, 19 nt, Artificial Sequence
  Description of Artificial Sequence: Synthetic oligonucleotide
uugguacccuccacucaaa

SEQ ID NO: 2711316 - RNA, 19 nt, Artificial Sequence
  Description of Artificial Sequence: Synthetic oligonucleotide
ucauugauucuuggugcuu

SEQ ID NO: 2711317 - RNA, 19 nt, Artificial Sequence
  Description of Artificial Sequence: Synthetic oligonucleotide
ugcaggguuuauuccuauu

SEQ ID NO: 2711318 - RNA, 19 nt, Artificial Sequence
  Description of Artificial Sequence: Synthetic oligonucleotide
cucauugauucuuggugcu

SEQ ID NO: 2711319 - RNA, 19 nt, Artificial Sequence
  Description of Artificial Sequence: Synthetic oligonucleotide
uagcaacuuccaacucggu

SEQ ID NO: 2711320 - RNA, 19 nt, Artificial Sequence
  Description of Artificial Sequence: Synthetic oligonucleotide
cuuggugcuuucauuguau

SEQ ID NO: 2711321 - RNA, 19 nt, Artificial Sequence
  Description of Artificial Sequence: Synthetic oligonucleotide
guugcugcaggaacuuuaa

SEQ ID NO: 2711322 - RNA, 19 nt, Artificial Sequence
  Description of Artificial Sequence: Synthetic oligonucleotide
gaaguagcagucaccuacu

SEQ ID NO: 2711323 - RNA, 19 nt, Artificial Sequence
  Description of Artificial Sequence: Synthetic oligonucleotide
cggucucuaggaaugauuc

SEQ ID NO: 2711324 - RNA, 19 nt, Artificial Sequence
  Description of Artificial Sequence: Synthetic oligonucleotide
ggcauucuuucuucccaug

SEQ ID NO: 2711325 - RNA, 19 nt, Artificial Sequence
  Description of Artificial Sequence: Synthetic oligonucleotide
cagaaguacccucucuucu

SEQ ID NO: 2711326 - RNA, 19 nt, Artificial Sequence
  Description of Artificial Sequence: Synthetic oligonucleotide
ggaaugauucgcaguucug

SEQ ID NO: 2711327 - RNA, 19 nt, Artificial Sequence
  Description of Artificial Sequence: Synthetic oligonucleotide
guaucaugaaugucugauu

SEQ ID NO: 2711328 - RNA, 19 nt, Artificial Sequence
  Description of Artificial Sequence: Synthetic oligonucleotide
augguggaacugccgcaca

SEQ ID NO: 2711329 - RNA, 19 nt, Artificial Sequence
  Description of Artificial Sequence: Synthetic oligonucleotide
ggugcuuucauuguaucau

SEQ ID NO: 2711330 - RNA, 19 nt, Artificial Sequence
  Description of Artificial Sequence: Synthetic oligonucleotide
guagccgcggguccgacgu

SEQ ID NO: 2711331 - RNA, 19 nt, Artificial Sequence
  Description of Artificial Sequence: Synthetic oligonucleotide
cgugauuuuaaaggacacc

SEQ ID NO: 2711332 - RNA, 19 nt, Artificial Sequence
  Description of Artificial Sequence: Synthetic oligonucleotide
ggaaaacauuuccagcagu

SEQ ID NO: 2711333 - RNA, 19 nt, Artificial Sequence
  Description of Artificial Sequence: Synthetic oligonucleotide
augucugauuucaaccaua

SEQ ID NO: 2711334 - RNA, 19 nt, Artificial Sequence
  Description of Artificial Sequence: Synthetic oligonucleotide
ccaccaugcaggucucagg

SEQ ID NO: 2711335 - RNA, 19 nt, Artificial Sequence
  Description of Artificial Sequence: Synthetic oligonucleotide
ccuauuccaucauuaguaa

SEQ ID NO: 2711336 - RNA, 19 nt, Artificial Sequence
  Description of Artificial Sequence: Synthetic oligonucleotide
cuacuaugugaccuauggu

SEQ ID NO: 2711337 - RNA, 19 nt, Artificial Sequence
  Description of Artificial Sequence: Synthetic oligonucleotide
gagccauguuucaggaaaa

SEQ ID NO: 2711338 - RNA, 19 nt, Artificial Sequence
  Description of Artificial Sequence: Synthetic oligonucleotide
ggacaccuucgacauggug

SEQ ID NO: 2711339 - RNA, 19 nt, Artificial Sequence
  Description of Artificial Sequence: Synthetic oligonucleotide
aacuuccaacucggucucu

SEQ ID NO: 2711340 - RNA, 19 nt, Artificial Sequence
  Description of Artificial Sequence: Synthetic oligonucleotide
gguugguacccuccacuca

SEQ ID NO: 2711341 - RNA, 19 nt, Artificial Sequence
  Description of Artificial Sequence: Synthetic oligonucleotide
gccauguuucaggaaaaca

SEQ ID NO: 2711342 - RNA, 19 nt, Artificial Sequence
  Description of Artificial Sequence: Synthetic oligonucleotide
gcgugauuuuaaaggacac

SEQ ID NO: 2711343 - RNA, 19 nt, Artificial Sequence
  Description of Artificial Sequence: Synthetic oligonucleotide
cuucgacaugguggaacug

SEQ ID NO: 2711344 - RNA, 19 nt, Artificial Sequence
  Description of Artificial Sequence: Synthetic oligonucleotide
cacagaaguacccucucuu

SEQ ID NO: 2711345 - RNA, 19 nt, Artificial Sequence
  Description of Artificial Sequence: Synthetic oligonucleotide
gguagccgcggguccgacg

SEQ ID NO: 2711346 - RNA, 19 nt, Artificial Sequence
  Description of Artificial Sequence: Synthetic oligonucleotide
cgucagcgugauuuuaaag

SEQ ID NO: 2711347 - RNA, 19 nt, Artificial Sequence
  Description of Artificial Sequence: Synthetic oligonucleotide
accuacuaugugaccuaug

SEQ ID NO: 2711348 - RNA, 19 nt, Artificial Sequence
  Description of Artificial Sequence: Synthetic oligonucleotide
acucggucucuaggaauga

SEQ ID NO: 2711349 - RNA, 19 nt, Artificial Sequence
  Description of Artificial Sequence: Synthetic oligonucleotide
agucugugcaggguuuauu

SEQ ID NO: 2711350 - RNA, 19 nt, Artificial Sequence
  Description of Artificial Sequence: Synthetic oligonucleotide
gcaguucugagccauguuu

SEQ ID NO: 2711351 - RNA, 19 nt, Artificial Sequence
  Description of Artificial Sequence: Synthetic oligonucleotide
acaguccauuugucacaga

SEQ ID NO: 2711352 - RNA, 19 nt, Artificial Sequence
  Description of Artificial Sequence: Synthetic oligonucleotide
gugaaguagcagucaccua

SEQ ID NO: 2711353 - RNA, 19 nt, Artificial Sequence
  Description of Artificial Sequence: Synthetic oligonucleotide
caacaacaaauaccaguau

SEQ ID NO: 2711354 - RNA, 19 nt, Artificial Sequence
  Description of Artificial Sequence: Synthetic oligonucleotide
caacucggucucuaggaau

SEQ ID NO: 2711355 - RNA, 19 nt, Artificial Sequence
  Description of Artificial Sequence: Synthetic oligonucleotide
cgacaugguggaacugccg

SEQ ID NO: 2711356 - RNA, 19 nt, Artificial Sequence
  Description of Artificial Sequence: Synthetic oligonucleotide
cauugauucuuggugcuuu

SEQ ID NO: 2711357 - RNA, 19 nt, Artificial Sequence
  Description of Artificial Sequence: Synthetic oligonucleotide
ugcaggucucagggauuga

SEQ ID NO: 2711358 - RNA, 19 nt, Artificial Sequence
  Description of Artificial Sequence: Synthetic oligonucleotide
gguggaacugccgcacaca

SEQ ID NO: 2711359 - RNA, 19 nt, Artificial Sequence
  Description of Artificial Sequence: Synthetic oligonucleotide
gccgcacacacaacgcgcc

SEQ ID NO: 2711360 - RNA, 19 nt, Artificial Sequence
  Description of Artificial Sequence: Synthetic oligonucleotide
acgcgccuagucgcccgcc

SEQ ID NO: 2711361 - RNA, 19 nt, Artificial Sequence
  Description of Artificial Sequence: Synthetic oligonucleotide
augugaccuaugguuggua

SEQ ID NO: 2711362 - RNA, 19 nt, Artificial Sequence
  Description of Artificial Sequence: Synthetic oligonucleotide
gaacugccgcacacacaac

SEQ ID NO: 2711363 - RNA, 19 nt, Artificial Sequence
  Description of Artificial Sequence: Synthetic oligonucleotide
acccuccacucaaaggcau

SEQ ID NO: 2711364 - RNA, 19 nt, Artificial Sequence
  Description of Artificial Sequence: Synthetic oligonucleotide
agccgcggguccgacguca

SEQ ID NO: 2711365 - RNA, 19 nt, Artificial Sequence
  Description of Artificial Sequence: Synthetic oligonucleotide
ccuccacucaaaggcauuc

SEQ ID NO: 2711366 - RNA, 19 nt, Artificial Sequence
  Description of Artificial Sequence: Synthetic oligonucleotide
ggguuuauuccuauuccau

SEQ ID NO: 2711367 - RNA, 19 nt, Artificial Sequence
  Description of Artificial Sequence: Synthetic oligonucleotide
cgcggguccgacgucagcg

SEQ ID NO: 2711368 - RNA, 19 nt, Artificial Sequence
  Description of Artificial Sequence: Synthetic oligonucleotide
ggucucagggauugaacuu

SEQ ID NO: 2711369 - RNA, 19 nt, Artificial Sequence
  Description of Artificial Sequence: Synthetic oligonucleotide
gcaggucucagggauugaa

SEQ ID NO: 2711370 - RNA, 19 nt, Artificial Sequence
  Description of Artificial Sequence: Synthetic oligonucleotide
cacugcugugaaaggcgua

SEQ ID NO: 2711371 - RNA, 19 nt, Artificial Sequence
  Description of Artificial Sequence: Synthetic oligonucleotide
ccuucgacaugguggaacu

SEQ ID NO: 2711372 - RNA, 19 nt, Artificial Sequence
  Description of Artificial Sequence: Synthetic oligonucleotide
ccaacucggucucuaggaa

SEQ ID NO: 2711373 - RNA, 19 nt, Artificial Sequence
  Description of Artificial Sequence: Synthetic oligonucleotide
ggcguacuuucaggaacac

SEQ ID NO: 2711374 - RNA, 19 nt, Artificial Sequence
  Description of Artificial Sequence: Synthetic oligonucleotide
gugcaggguuuauuccuau

SEQ ID NO: 2711375 - RNA, 19 nt, Artificial Sequence
  Description of Artificial Sequence: Synthetic oligonucleotide
aggacaccuucgacauggu

SEQ ID NO: 2711376 - RNA, 19 nt, Artificial Sequence
  Description of Artificial Sequence: Synthetic oligonucleotide
acgguagccgcggguccga

SEQ ID NO: 2711377 - RNA, 19 nt, Artificial Sequence
  Description of Artificial Sequence: Synthetic oligonucleotide
gcgccuagucgcccgccgc

SEQ ID NO: 2711378 - RNA, 19 nt, Artificial Sequence
  Description of Artificial Sequence: Synthetic oligonucleotide
uagccgcggguccgacguc

SEQ ID NO: 2711379 - RNA, 19 nt, Artificial Sequence
  Description of Artificial Sequence: Synthetic oligonucleotide
cagcagucugugcaggguu

SEQ ID NO: 2711380 - RNA, 19 nt, Artificial Sequence
  Description of Artificial Sequence: Synthetic oligonucleotide
gcugugaaaggcguacuuu

SEQ ID NO: 2711381 - RNA, 19 nt, Artificial Sequence
  Description of Artificial Sequence: Synthetic oligonucleotide
ggguccgacgucagcguga

SEQ ID NO: 2711382 - RNA, 19 nt, Artificial Sequence
  Description of Artificial Sequence: Synthetic oligonucleotide
gggauugaacuuagguuuu

SEQ ID NO: 2711383 - RNA, 19 nt, Artificial Sequence
  Description of Artificial Sequence: Synthetic oligonucleotide
caccuacuaugugaccuau

SEQ ID NO: 2711384 - RNA, 19 nt, Artificial Sequence
  Description of Artificial Sequence: Synthetic oligonucleotide
cucggucucuaggaaugau

SEQ ID NO: 2711385 - RNA, 19 nt, Artificial Sequence
  Description of Artificial Sequence: Synthetic oligonucleotide
cgcgccuagucgcccgccg

SEQ ID NO: 2711386 - RNA, 19 nt, Artificial Sequence
  Description of Artificial Sequence: Synthetic oligonucleotide
gcguacuuucaggaacacu

SEQ ID NO: 2711387 - RNA, 19 nt, Artificial Sequence
  Description of Artificial Sequence: Synthetic oligonucleotide
cggguccgacgucagcgug

SEQ ID NO: 2711388 - RNA, 19 nt, Artificial Sequence
  Description of Artificial Sequence: Synthetic oligonucleotide
gguccgacgucagcgugau

SEQ ID NO: 2711389 - RNA, 19 nt, Artificial Sequence
  Description of Artificial Sequence: Synthetic oligonucleotide
gccgcggguccgacgucag

SEQ ID NO: 2711390 - RNA, 19 nt, Artificial Sequence
  Description of Artificial Sequence: Synthetic oligonucleotide
gcggguccgacgucagcgu

SEQ ID NO: 2711391 - RNA, 19 nt, Artificial Sequence
  Description of Artificial Sequence: Synthetic oligonucleotide
cacacacaacgcgccuagu

SEQ ID NO: 2711392 - RNA, 19 nt, Artificial Sequence
  Description of Artificial Sequence: Synthetic oligonucleotide
ccgcggguccgacgucagc

SEQ ID NO: 2711393 - RNA, 19 nt, Artificial Sequence
  Description of Artificial Sequence: Synthetic oligonucleotide
ccgacgucagcgugauuuu

SEQ ID NO: 2711394 - RNA, 19 nt, Artificial Sequence
  Description of Artificial Sequence: Synthetic oligonucleotide
cgcacacacaacgcgccua

SEQ ID NO: 2711395 - RNA, 19 nt, Artificial Sequence
  Description of Artificial Sequence: Synthetic oligonucleotide
cccuccacucaaaggcauu

SEQ ID NO: 2711396 - RNA, 19 nt, Artificial Sequence
  Description of Artificial Sequence: Synthetic oligonucleotide
ccgcacacacaacgcgccu

SEQ ID NO: 2711397 - RNA, 19 nt, Artificial Sequence
  Description of Artificial Sequence: Synthetic oligonucleotide
cgacgucagcgugauuuua

SEQ ID NO: 2711398 - RNA, 19 nt, Artificial Sequence
  Description of Artificial Sequence: Synthetic oligonucleotide
cgcaguucugagccauguu

SEQ ID NO: 2711399 - RNA, 19 nt, Artificial Sequence
  Description of Artificial Sequence: Synthetic oligonucleotide
guccgacgucagcgugauu

SEQ ID NO: 2711400 - RNA, 19 nt, Artificial Sequence
  Description of Artificial Sequence: Synthetic oligonucleotide
cuuaacaaggacaacacag

SEQ ID NO: 2711401 - RNA, 19 nt, Artificial Sequence
  Description of Artificial Sequence: Synthetic oligonucleotide
uguacauuaagcuuccgag

SEQ ID NO: 2711402 - RNA, 19 nt, Artificial Sequence
  Description of Artificial Sequence: Synthetic oligonucleotide
cuuauguacauuaagcuuc

SEQ ID NO: 2711403 - RNA, 19 nt, Artificial Sequence
  Description of Artificial Sequence: Synthetic oligonucleotide
aacaguggaacccagguga

SEQ ID NO: 2711404 - RNA, 19 nt, Artificial Sequence
  Description of Artificial Sequence: Synthetic oligonucleotide
auuaaaggagugcaacacc

SEQ ID NO: 2711405 - RNA, 19 nt, Artificial Sequence
  Description of Artificial Sequence: Synthetic oligonucleotide
ucaucuaacuucuucagca

SEQ ID NO: 2711406 - RNA, 19 nt, Artificial Sequence
  Description of Artificial Sequence: Synthetic oligonucleotide
uaagcuuccgagaacagug

SEQ ID NO: 2711407 - RNA, 19 nt, Artificial Sequence
  Description of Artificial Sequence: Synthetic oligonucleotide
uuaugugcugucauguggg

SEQ ID NO: 2711408 - RNA, 19 nt, Artificial Sequence
  Description of Artificial Sequence: Synthetic oligonucleotide
uuaaaggagugcaacacca

SEQ ID NO: 2711409 - RNA, 19 nt, Artificial Sequence
  Description of Artificial Sequence: Synthetic oligonucleotide
uuaacaaggacaacacagc

SEQ ID NO: 2711410 - RNA, 19 nt, Artificial Sequence
  Description of Artificial Sequence: Synthetic oligonucleotide
aacaccacugcccagcgug

SEQ ID NO: 2711411 - RNA, 19 nt, Artificial Sequence
  Description of Artificial Sequence: Synthetic oligonucleotide
uggaagagcagccaggcca

SEQ ID NO: 2711412 - RNA, 19 nt, Artificial Sequence
  Description of Artificial Sequence: Synthetic oligonucleotide
gaaacagucagcaacucug

SEQ ID NO: 2711413 - RNA, 19 nt, Artificial Sequence
  Description of Artificial Sequence: Synthetic oligonucleotide
agcaccauagcucuucagg

SEQ ID NO: 2711414 - RNA, 19 nt, Artificial Sequence
  Description of Artificial Sequence: Synthetic oligonucleotide
ucuaacuucuucagcacug

SEQ ID NO: 2711415 - RNA, 19 nt, Artificial Sequence
  Description of Artificial Sequence: Synthetic oligonucleotide
uacauuaagcuuccgagaa

SEQ ID NO: 2711416 - RNA, 19 nt, Artificial Sequence
  Description of Artificial Sequence: Synthetic oligonucleotide
uaacaaggacaacacagcc

SEQ ID NO: 2711417 - RNA, 19 nt, Artificial Sequence
  Description of Artificial Sequence: Synthetic oligonucleotide
ucaaacacagccucggugu

SEQ ID NO: 2711418 - RNA, 19 nt, Artificial Sequence
  Description of Artificial Sequence: Synthetic oligonucleotide
agugcuggggauuaaagga

SEQ ID NO: 2711419 - RNA, 19 nt, Artificial Sequence
  Description of Artificial Sequence: Synthetic oligonucleotide
ugugcugucaugugggugc

SEQ ID NO: 2711420 - RNA, 19 nt, Artificial Sequence
  Description of Artificial Sequence: Synthetic oligonucleotide
uggacuuccuggaugaagc

SEQ ID NO: 2711421 - RNA, 19 nt, Artificial Sequence
  Description of Artificial Sequence: Synthetic oligonucleotide
uggaugaagcaccauagcu

SEQ ID NO: 2711422 - RNA, 19 nt, Artificial Sequence
  Description of Artificial Sequence: Synthetic oligonucleotide
acuucaucuaacuucuuca

SEQ ID NO: 2711423 - RNA, 19 nt, Artificial Sequence
  Description of Artificial Sequence: Synthetic oligonucleotide
uuauguacauuaagcuucc

SEQ ID NO: 2711424 - RNA, 19 nt, Artificial Sequence
  Description of Artificial Sequence: Synthetic oligonucleotide
aaaggagugcaacaccacu

SEQ ID NO: 2711425 - RNA, 19 nt, Artificial Sequence
  Description of Artificial Sequence: Synthetic oligonucleotide
ucagauuuccuggaacugg

SEQ ID NO: 2711426 - RNA, 19 nt, Artificial Sequence
  Description of Artificial Sequence: Synthetic oligonucleotide
aggagugcaacaccacugc

SEQ ID NO: 2711427 - RNA, 19 nt, Artificial Sequence
  Description of Artificial Sequence: Synthetic oligonucleotide
uucaaacacagccucggug

SEQ ID NO: 2711428 - RNA, 19 nt, Artificial Sequence
  Description of Artificial Sequence: Synthetic oligonucleotide
acuuccuggaugaagcacc

SEQ ID NO: 2711429 - RNA, 19 nt, Artificial Sequence
  Description of Artificial Sequence: Synthetic oligonucleotide
aaacagucagcaacucugc

SEQ ID NO: 2711430 - RNA, 19 nt, Artificial Sequence
  Description of Artificial Sequence: Synthetic oligonucleotide
ugucagauuuccuggaacu

SEQ ID NO: 2711431 - RNA, 19 nt, Artificial Sequence
  Description of Artificial Sequence: Synthetic oligonucleotide
gugacaguggcacagcacc

SEQ ID NO: 2711432 - RNA, 19 nt, Artificial Sequence
  Description of Artificial Sequence: Synthetic oligonucleotide
agaacaguggaacccaggu

SEQ ID NO: 2711433 - RNA, 19 nt, Artificial Sequence
  Description of Artificial Sequence: Synthetic oligonucleotide
accauggagcgcuuucucc

SEQ ID NO: 2711434 - RNA, 19 nt, Artificial Sequence
  Description of Artificial Sequence: Synthetic oligonucleotide
acuggacuggacuuccugg

SEQ ID NO: 2711435 - RNA, 19 nt, Artificial Sequence
  Description of Artificial Sequence: Synthetic oligonucleotide
uccuguagcaacucgcucu

SEQ ID NO: 2711436 - RNA, 19 nt, Artificial Sequence
  Description of Artificial Sequence: Synthetic oligonucleotide
ugggaaacagucagcaacu

SEQ ID NO: 2711437 - RNA, 19 nt, Artificial Sequence
  Description of Artificial Sequence: Synthetic oligonucleotide
uagcaacucgcucuuguag

SEQ ID NO: 2711438 - RNA, 19 nt, Artificial Sequence
  Description of Artificial Sequence: Synthetic oligonucleotide
ugccaggccacuuaacaag

SEQ ID NO: 2711439 - RNA, 19 nt, Artificial Sequence
  Description of Artificial Sequence: Synthetic oligonucleotide
cuucaucuaacuucuucag

SEQ ID NO: 2711440 - RNA, 19 nt, Artificial Sequence
  Description of Artificial Sequence: Synthetic oligonucleotide
accauagcucuucaggcag

SEQ ID NO: 2711441 - RNA, 19 nt, Artificial Sequence
  Description of Artificial Sequence: Synthetic oligonucleotide
acauuaagcuuccgagaac

SEQ ID NO: 2711442 - RNA, 19 nt, Artificial Sequence
  Description of Artificial Sequence: Synthetic oligonucleotide
ugcuaccccaccauggagc

SEQ ID NO: 2711443 - RNA, 19 nt, Artificial Sequence
  Description of Artificial Sequence: Synthetic oligonucleotide
uguagcaacucgcucuugu

SEQ ID NO: 2711444 - RNA, 19 nt, Artificial Sequence
  Description of Artificial Sequence: Synthetic oligonucleotide
cuuucucccucucaggcgc

SEQ ID NO: 2711445 - RNA, 19 nt, Artificial Sequence
  Description of Artificial Sequence: Synthetic oligonucleotide
cacuuaacaaggacaacac

SEQ ID NO: 2711446 - RNA, 19 nt, Artificial Sequence
  Description of Artificial Sequence: Synthetic oligonucleotide
aacacagccucgguguggg

SEQ ID NO: 2711447 - RNA, 19 nt, Artificial Sequence
  Description of Artificial Sequence: Synthetic oligonucleotide
acagccugagguccggccc

SEQ ID NO: 2711448 - RNA, 19 nt, Artificial Sequence
  Description of Artificial Sequence: Synthetic oligonucleotide
acucacccaguucugcccc

SEQ ID NO: 2711449 - RNA, 19 nt, Artificial Sequence
  Description of Artificial Sequence: Synthetic oligonucleotide
gaugaagcaccauagcucu

SEQ ID NO: 2711450 - RNA, 19 nt, Artificial Sequence
  Description of Artificial Sequence: Synthetic oligonucleotide
cagucagcaacucugcuac

SEQ ID NO: 2711451 - RNA, 19 nt, Artificial Sequence
  Description of Artificial Sequence: Synthetic oligonucleotide
auuuccuggaacuggaguu

SEQ ID NO: 2711452 - RNA, 19 nt, Artificial Sequence
  Description of Artificial Sequence: Synthetic oligonucleotide
aggcuucaaacacagccuc

SEQ ID NO: 2711453 - RNA, 19 nt, Artificial Sequence
  Description of Artificial Sequence: Synthetic oligonucleotide
auguacauuaagcuuccga

SEQ ID NO: 2711454 - RNA, 19 nt, Artificial Sequence
  Description of Artificial Sequence: Synthetic oligonucleotide
uggggauuaaaggagugca

SEQ ID NO: 2711455 - RNA, 19 nt, Artificial Sequence
  Description of Artificial Sequence: Synthetic oligonucleotide
aguggaacccaggugacag

SEQ ID NO: 2711456 - RNA, 19 nt, Artificial Sequence
  Description of Artificial Sequence: Synthetic oligonucleotide
acaguuaugugcugucaug

SEQ ID NO: 2711457 - RNA, 19 nt, Artificial Sequence
  Description of Artificial Sequence: Synthetic oligonucleotide
caguucugccccaacaggc

SEQ ID NO: 2711458 - RNA, 19 nt, Artificial Sequence
  Description of Artificial Sequence: Synthetic oligonucleotide
uucuucagcacuggacugg

SEQ ID NO: 2711459 - RNA, 19 nt, Artificial Sequence
  Description of Artificial Sequence: Synthetic oligonucleotide
agcgcuuucucccucucag

SEQ ID NO: 2711460 - RNA, 19 nt, Artificial Sequence
  Description of Artificial Sequence: Synthetic oligonucleotide
aaggagugcaacaccacug

SEQ ID NO: 2711461 - RNA, 19 nt, Artificial Sequence
  Description of Artificial Sequence: Synthetic oligonucleotide
gaacccaggugacaguggc

SEQ ID NO: 2711462 - RNA, 19 nt, Artificial Sequence
  Description of Artificial Sequence: Synthetic oligonucleotide
ucuguggaacaccucuggc

SEQ ID NO: 2711463 - RNA, 19 nt, Artificial Sequence
  Description of Artificial Sequence: Synthetic oligonucleotide
aacaaggacaacacagccu

SEQ ID NO: 2711464 - RNA, 19 nt, Artificial Sequence
  Description of Artificial Sequence: Synthetic oligonucleotide
uggcacagcaccacugugc

SEQ ID NO: 2711465 - RNA, 19 nt, Artificial Sequence
  Description of Artificial Sequence: Synthetic oligonucleotide
ucugcuaccccaccaugga

SEQ ID NO: 2711466 - RNA, 19 nt, Artificial Sequence
  Description of Artificial Sequence: Synthetic oligonucleotide
uccgagaacaguggaaccc

SEQ ID NO: 2711467 - RNA, 19 nt, Artificial Sequence
  Description of Artificial Sequence: Synthetic oligonucleotide
cucugcuaccccaccaugg

SEQ ID NO: 2711468 - RNA, 19 nt, Artificial Sequence
  Description of Artificial Sequence: Synthetic oligonucleotide
agcaacucgcucuuguaga

SEQ ID NO: 2711469 - RNA, 19 nt, Artificial Sequence
  Description of Artificial Sequence: Synthetic oligonucleotide
acuuaacaaggacaacaca

SEQ ID NO: 2711470 - RNA, 19 nt, Artificial Sequence
  Description of Artificial Sequence: Synthetic oligonucleotide
uguccuguagcaacucgcu

SEQ ID NO: 2711471 - RNA, 19 nt, Artificial Sequence
  Description of Artificial Sequence: Synthetic oligonucleotide
uaaaggagugcaacaccac

SEQ ID NO: 2711472 - RNA, 19 nt, Artificial Sequence
  Description of Artificial Sequence: Synthetic oligonucleotide
cacagcaccacugugccag

SEQ ID NO: 2711473 - RNA, 19 nt, Artificial Sequence
  Description of Artificial Sequence: Synthetic oligonucleotide
aggccuuauguacauuaag

SEQ ID NO: 2711474 - RNA, 19 nt, Artificial Sequence
  Description of Artificial Sequence: Synthetic oligonucleotide
gacaacacagccugagguc

SEQ ID NO: 2711475 - RNA, 19 nt, Artificial Sequence
  Description of Artificial Sequence: Synthetic oligonucleotide
aguuaugugcugucaugug

SEQ ID NO: 2711476 - RNA, 19 nt, Artificial Sequence
  Description of Artificial Sequence: Synthetic oligonucleotide
cuuccgagaacaguggaac

SEQ ID NO: 2711477 - RNA, 19 nt, Artificial Sequence
  Description of Artificial Sequence: Synthetic oligonucleotide
aacagucagcaacucugcu

SEQ ID NO: 2711478 - RNA, 19 nt, Artificial Sequence
  Description of Artificial Sequence: Synthetic oligonucleotide
aucuaacuucuucagcacu

SEQ ID NO: 2711479 - RNA, 19 nt, Artificial Sequence
  Description of Artificial Sequence: Synthetic oligonucleotide
gaacaguggaacccaggug

SEQ ID NO: 2711480 - RNA, 19 nt, Artificial Sequence
  Description of Artificial Sequence: Synthetic oligonucleotide
cuguccuguagcaacucgc

SEQ ID NO: 2711481 - RNA, 19 nt, Artificial Sequence
  Description of Artificial Sequence: Synthetic oligonucleotide
uuaagcuuccgagaacagu

SEQ ID NO: 2711482 - RNA, 19 nt, Artificial Sequence
  Description of Artificial Sequence: Synthetic oligonucleotide
acagcauccucacugggaa

SEQ ID NO: 2711483 - RNA, 19 nt, Artificial Sequence
  Description of Artificial Sequence: Synthetic oligonucleotide
aguucugccccaacaggcc

SEQ ID NO: 2711484 - RNA, 19 nt, Artificial Sequence
  Description of Artificial Sequence: Synthetic oligonucleotide
aaacacagccucggugugg

SEQ ID NO: 2711485 - RNA, 19 nt, Artificial Sequence
  Description of Artificial Sequence: Synthetic oligonucleotide
aggacaacacagccugagg

SEQ ID NO: 2711486 - RNA, 19 nt, Artificial Sequence
  Description of Artificial Sequence: Synthetic oligonucleotide
cauuaagcuuccgagaaca

SEQ ID NO: 2711487 - RNA, 19 nt, Artificial Sequence
  Description of Artificial Sequence: Synthetic oligonucleotide
ucuucaggcaggcuucaaa

SEQ ID NO: 2711488 - RNA, 19 nt, Artificial Sequence
  Description of Artificial Sequence: Synthetic oligonucleotide
ugcaacaccacugcccagc

SEQ ID NO: 2711489 - RNA, 19 nt, Artificial Sequence
  Description of Artificial Sequence: Synthetic oligonucleotide
guacauuaagcuuccgaga

SEQ ID NO: 2711490 - RNA, 19 nt, Artificial Sequence
  Description of Artificial Sequence: Synthetic oligonucleotide
uucaggcaggcuucaaaca

SEQ ID NO: 2711491 - RNA, 19 nt, Artificial Sequence
  Description of Artificial Sequence: Synthetic oligonucleotide
cuggcuguccuguagcaac

SEQ ID NO: 2711492 - RNA, 19 nt, Artificial Sequence
  Description of Artificial Sequence: Synthetic oligonucleotide
gagugcaacaccacugccc

SEQ ID NO: 2711493 - RNA, 19 nt, Artificial Sequence
  Description of Artificial Sequence: Synthetic oligonucleotide
aacaccucuggcuguccug

SEQ ID NO: 2711494 - RNA, 19 nt, Artificial Sequence
  Description of Artificial Sequence: Synthetic oligonucleotide
ucucuguggaacaccucug

SEQ ID NO: 2711495 - RNA, 19 nt, Artificial Sequence
  Description of Artificial Sequence: Synthetic oligonucleotide
cuacucacccaguucugcc

SEQ ID NO: 2711496 - RNA, 19 nt, Artificial Sequence
  Description of Artificial Sequence: Synthetic oligonucleotide
caucuaacuucuucagcac

SEQ ID NO: 2711497 - RNA, 19 nt, Artificial Sequence
  Description of Artificial Sequence: Synthetic oligonucleotide
agcacuggacuggacuucc

SEQ ID NO: 2711498 - RNA, 19 nt, Artificial Sequence
  Description of Artificial Sequence: Synthetic oligonucleotide
gacuggacuuccuggauga

SEQ ID NO: 2711499 - RNA, 19 nt, Artificial Sequence
  Description of Artificial Sequence: Synthetic oligonucleotide
uacucacccaguucugccc

SEQ ID NO: 2711500 - RNA, 19 nt, Artificial Sequence
  Description of Artificial Sequence: Synthetic oligonucleotide
aacucugcuaccccaccau

SEQ ID NO: 2711501 - RNA, 19 nt, Artificial Sequence
  Description of Artificial Sequence: Synthetic oligonucleotide
ugggugcugaggaaggccu

SEQ ID NO: 2711502 - RNA, 19 nt, Artificial Sequence
  Description of Artificial Sequence: Synthetic oligonucleotide
uagcucuucaggcaggcuu

SEQ ID NO: 2711503 - RNA, 19 nt, Artificial Sequence
  Description of Artificial Sequence: Synthetic oligonucleotide
acaggccuuauguacauua

SEQ ID NO: 2711504 - RNA, 19 nt, Artificial Sequence
  Description of Artificial Sequence: Synthetic oligonucleotide
cacuucaucuaacuucuuc

SEQ ID NO: 2711505 - RNA, 19 nt, Artificial Sequence
  Description of Artificial Sequence: Synthetic oligonucleotide
gugaaggugucagauuucc

SEQ ID NO: 2711506 - RNA, 19 nt, Artificial Sequence
  Description of Artificial Sequence: Synthetic oligonucleotide
ugcuggggauuaaaggagu

SEQ ID NO: 2711507 - RNA, 19 nt, Artificial Sequence
  Description of Artificial Sequence: Synthetic oligonucleotide
ucaggcgcacuucaucuaa

SEQ ID NO: 2711508 - RNA, 19 nt, Artificial Sequence
  Description of Artificial Sequence: Synthetic oligonucleotide
aagcuuccgagaacagugg

SEQ ID NO: 2711509 - RNA, 19 nt, Artificial Sequence
  Description of Artificial Sequence: Synthetic oligonucleotide
uuccgagaacaguggaacc

SEQ ID NO: 2711510 - RNA, 19 nt, Artificial Sequence
  Description of Artificial Sequence: Synthetic oligonucleotide
ggccuuauguacauuaagc

SEQ ID NO: 2711511 - RNA, 19 nt, Artificial Sequence
  Description of Artificial Sequence: Synthetic oligonucleotide
uggaacccaggugacagug

SEQ ID NO: 2711512 - RNA, 19 nt, Artificial Sequence
  Description of Artificial Sequence: Synthetic oligonucleotide
ucacugggaaacagucagc

SEQ ID NO: 2711513 - RNA, 19 nt, Artificial Sequence
  Description of Artificial Sequence: Synthetic oligonucleotide
uaacuucuucagcacugga

SEQ ID NO: 2711514 - RNA, 19 nt, Artificial Sequence
  Description of Artificial Sequence: Synthetic oligonucleotide
cuggaugaagcaccauagc

SEQ ID NO: 2711515 - RNA, 19 nt, Artificial Sequence
  Description of Artificial Sequence: Synthetic oligonucleotide
gagaacaguggaacccagg

SEQ ID NO: 2711516 - RNA, 19 nt, Artificial Sequence
  Description of Artificial Sequence: Synthetic oligonucleotide
ugugaaggugucagauuuc

SEQ ID NO: 2711517 - RNA, 19 nt, Artificial Sequence
  Description of Artificial Sequence: Synthetic oligonucleotide
aagcaccauagcucuucag

SEQ ID NO: 2711518 - RNA, 19 nt, Artificial Sequence
  Description of Artificial Sequence: Synthetic oligonucleotide
ccuggaugaagcaccauag

SEQ ID NO: 2711519 - RNA, 19 nt, Artificial Sequence
  Description of Artificial Sequence: Synthetic oligonucleotide
acugcccagcgugugaagg

SEQ ID NO: 2711520 - RNA, 19 nt, Artificial Sequence
  Description of Artificial Sequence: Synthetic oligonucleotide
ugacaguggcacagcacca

SEQ ID NO: 2711521 - RNA, 19 nt, Artificial Sequence
  Description of Artificial Sequence: Synthetic oligonucleotide
agucagcaacucugcuacc

SEQ ID NO: 2711522 - RNA, 19 nt, Artificial Sequence
  Description of Artificial Sequence: Synthetic oligonucleotide
gucagcaacucugcuaccc

SEQ ID NO: 2711523 - RNA, 19 nt, Artificial Sequence
  Description of Artificial Sequence: Synthetic oligonucleotide
gauuuccuggaacuggagu

SEQ ID NO: 2711524 - RNA, 19 nt, Artificial Sequence
  Description of Artificial Sequence: Synthetic oligonucleotide
uaccccaccauggagcgcu

SEQ ID NO: 2711525 - RNA, 19 nt, Artificial Sequence
  Description of Artificial Sequence: Synthetic oligonucleotide
acagacaguuaugugcugu

SEQ ID NO: 2711526 - RNA, 19 nt, Artificial Sequence
  Description of Artificial Sequence: Synthetic oligonucleotide
ugucaugugggugcuggga

SEQ ID NO: 2711527 - RNA, 19 nt, Artificial Sequence
  Description of Artificial Sequence: Synthetic oligonucleotide
uccggccccgcccacagca

SEQ ID NO: 2711528 - RNA, 19 nt, Artificial Sequence
  Description of Artificial Sequence: Synthetic oligonucleotide
aacacagccugagguccgg

SEQ ID NO: 2711529 - RNA, 19 nt, Artificial Sequence
  Description of Artificial Sequence: Synthetic oligonucleotide
uauguacauuaagcuuccg

SEQ ID NO: 2711530 - RNA, 19 nt, Artificial Sequence
  Description of Artificial Sequence: Synthetic oligonucleotide
gcuucaaacacagccucgg

SEQ ID NO: 2711531 - RNA, 19 nt, Artificial Sequence
  Description of Artificial Sequence: Synthetic oligonucleotide
gugcuggggauuaaaggag

SEQ ID NO: 2711532 - RNA, 19 nt, Artificial Sequence
  Description of Artificial Sequence: Synthetic oligonucleotide
caggccacuuaacaaggac

SEQ ID NO: 2711533 - RNA, 19 nt, Artificial Sequence
  Description of Artificial Sequence: Synthetic oligonucleotide
agcucuucaggcaggcuuc

SEQ ID NO: 2711534 - RNA, 19 nt, Artificial Sequence
  Description of Artificial Sequence: Synthetic oligonucleotide
caacacagccugagguccg

SEQ ID NO: 2711535 - RNA, 19 nt, Artificial Sequence
  Description of Artificial Sequence: Synthetic oligonucleotide
ggaugaagcaccauagcuc

SEQ ID NO: 2711536 - RNA, 19 nt, Artificial Sequence
  Description of Artificial Sequence: Synthetic oligonucleotide
uaugugcugucaugugggu

SEQ ID NO: 2711537 - RNA, 19 nt, Artificial Sequence
  Description of Artificial Sequence: Synthetic oligonucleotide
agcaacucugcuaccccac

SEQ ID NO: 2711538 - RNA, 19 nt, Artificial Sequence
  Description of Artificial Sequence: Synthetic oligonucleotide
agagcagccaggccagccu

SEQ ID NO: 2711539 - RNA, 19 nt, Artificial Sequence
  Description of Artificial Sequence: Synthetic oligonucleotide
cagauuuccuggaacugga

SEQ ID NO: 2711540 - RNA, 19 nt, Artificial Sequence
  Description of Artificial Sequence: Synthetic oligonucleotide
ucuucagcacuggacugga

SEQ ID NO: 2711541 - RNA, 19 nt, Artificial Sequence
  Description of Artificial Sequence: Synthetic oligonucleotide
cccaacaggccuuauguac

SEQ ID NO: 2711542 - RNA, 19 nt, Artificial Sequence
  Description of Artificial Sequence: Synthetic oligonucleotide
cagacaguuaugugcuguc

SEQ ID NO: 2711543 - RNA, 19 nt, Artificial Sequence
  Description of Artificial Sequence: Synthetic oligonucleotide
cauagcucuucaggcaggc

SEQ ID NO: 2711544 - RNA, 19 nt, Artificial Sequence
  Description of Artificial Sequence: Synthetic oligonucleotide
ugccccaacaggccuuaug

SEQ ID NO: 2711545 - RNA, 19 nt, Artificial Sequence
  Description of Artificial Sequence: Synthetic oligonucleotide
gucagauuuccuggaacug

SEQ ID NO: 2711546 - RNA, 19 nt, Artificial Sequence
  Description of Artificial Sequence: Synthetic oligonucleotide
gcuaccccaccauggagcg

SEQ ID NO: 2711547 - RNA, 19 nt, Artificial Sequence
  Description of Artificial Sequence: Synthetic oligonucleotide
cagccuggccuacucaccc

SEQ ID NO: 2711548 - RNA, 19 nt, Artificial Sequence
  Description of Artificial Sequence: Synthetic oligonucleotide
auuaagcuuccgagaacag

SEQ ID NO: 2711549 - RNA, 19 nt, Artificial Sequence
  Description of Artificial Sequence: Synthetic oligonucleotide
ugagguccggccccgccca

SEQ ID NO: 2711550 - RNA, 19 nt, Artificial Sequence
  Description of Artificial Sequence: Synthetic oligonucleotide
gcuuucucccucucaggcg

SEQ ID NO: 2711551 - RNA, 19 nt, Artificial Sequence
  Description of Artificial Sequence: Synthetic oligonucleotide
gacuuccuggaugaagcac

SEQ ID NO: 2711552 - RNA, 19 nt, Artificial Sequence
  Description of Artificial Sequence: Synthetic oligonucleotide
acucugcuaccccaccaug

SEQ ID NO: 2711553 - RNA, 19 nt, Artificial Sequence
  Description of Artificial Sequence: Synthetic oligonucleotide
acaguggaacccaggugac

SEQ ID NO: 2711554 - RNA, 19 nt, Artificial Sequence
  Description of Artificial Sequence: Synthetic oligonucleotide
aggccacuuaacaaggaca

SEQ ID NO: 2711555 - RNA, 19 nt, Artificial Sequence
  Description of Artificial Sequence: Synthetic oligonucleotide
gaagcaccauagcucuuca

SEQ ID NO: 2711556 - RNA, 19 nt, Artificial Sequence
  Description of Artificial Sequence: Synthetic oligonucleotide
gcccacagcauccucacug

SEQ ID NO: 2711557 - RNA, 19 nt, Artificial Sequence
  Description of Artificial Sequence: Synthetic oligonucleotide
agcuuccgagaacagugga

SEQ ID NO: 2711558 - RNA, 19 nt, Artificial Sequence
  Description of Artificial Sequence: Synthetic oligonucleotide
ccauggagcgcuuucuccc

SEQ ID NO: 2711559 - RNA, 19 nt, Artificial Sequence
  Description of Artificial Sequence: Synthetic oligonucleotide
gcgcacuucaucuaacuuc

SEQ ID NO: 2711560 - RNA, 19 nt, Artificial Sequence
  Description of Artificial Sequence: Synthetic oligonucleotide
acaguggcacagcaccacu

SEQ ID NO: 2711561 - RNA, 19 nt, Artificial Sequence
  Description of Artificial Sequence: Synthetic oligonucleotide
cagcgugugaaggugucag

SEQ ID NO: 2711562 - RNA, 19 nt, Artificial Sequence
  Description of Artificial Sequence: Synthetic oligonucleotide
gcugucaugugggugcugg

SEQ ID NO: 2711563 - RNA, 19 nt, Artificial Sequence
  Description of Artificial Sequence: Synthetic oligonucleotide
acccaguucugccccaaca

SEQ ID NO: 2711564 - RNA, 19 nt, Artificial Sequence
  Description of Artificial Sequence: Synthetic oligonucleotide
uggcuguccuguagcaacu

SEQ ID NO: 2711565 - RNA, 19 nt, Artificial Sequence
  Description of Artificial Sequence: Synthetic oligonucleotide
caaacacagccucggugug

SEQ ID NO: 2711566 - RNA, 19 nt, Artificial Sequence
  Description of Artificial Sequence: Synthetic oligonucleotide
uggacuggacuuccuggau

SEQ ID NO: 2711567 - RNA, 19 nt, Artificial Sequence
  Description of Artificial Sequence: Synthetic oligonucleotide
acugugccaggccacuuaa

SEQ ID NO: 2711568 - RNA, 19 nt, Artificial Sequence
  Description of Artificial Sequence: Synthetic oligonucleotide
aggcgcacuucaucuaacu

SEQ ID NO: 2711569 - RNA, 19 nt, Artificial Sequence
  Description of Artificial Sequence: Synthetic oligonucleotide
cacugggaaacagucagca

SEQ ID NO: 2711570 - RNA, 19 nt, Artificial Sequence
  Description of Artificial Sequence: Synthetic oligonucleotide
cacagccugagguccggcc

SEQ ID NO: 2711571 - RNA, 19 nt, Artificial Sequence
  Description of Artificial Sequence: Synthetic oligonucleotide
gacaguggcacagcaccac

SEQ ID NO: 2711572 - RNA, 19 nt, Artificial Sequence
  Description of Artificial Sequence: Synthetic oligonucleotide
cauccucacugggaaacag

SEQ ID NO: 2711573 - RNA, 19 nt, Artificial Sequence
  Description of Artificial Sequence: Synthetic oligonucleotide
gacaguuaugugcugucau

SEQ ID NO: 2711574 - RNA, 19 nt, Artificial Sequence
  Description of Artificial Sequence: Synthetic oligonucleotide
cacagcauccucacuggga

SEQ ID NO: 2711575 - RNA, 19 nt, Artificial Sequence
  Description of Artificial Sequence: Synthetic oligonucleotide
uggccuacucacccaguuc

SEQ ID NO: 2711576 - RNA, 19 nt, Artificial Sequence
  Description of Artificial Sequence: Synthetic oligonucleotide
gagcagccaggccagccug

SEQ ID NO: 2711577 - RNA, 19 nt, Artificial Sequence
  Description of Artificial Sequence: Synthetic oligonucleotide
agacaguuaugugcuguca

SEQ ID NO: 2711578 - RNA, 19 nt, Artificial Sequence
  Description of Artificial Sequence: Synthetic oligonucleotide
gcuguccuguagcaacucg

SEQ ID NO: 2711579 - RNA, 19 nt, Artificial Sequence
  Description of Artificial Sequence: Synthetic oligonucleotide
caccauagcucuucaggca

SEQ ID NO: 2711580 - RNA, 19 nt, Artificial Sequence
  Description of Artificial Sequence: Synthetic oligonucleotide
cacuggacuggacuuccug

SEQ ID NO: 2711581 - RNA, 19 nt, Artificial Sequence
  Description of Artificial Sequence: Synthetic oligonucleotide
ggacuggacuuccuggaug

SEQ ID NO: 2711582 - RNA, 19 nt, Artificial Sequence
  Description of Artificial Sequence: Synthetic oligonucleotide
gccuuauguacauuaagcu

SEQ ID NO: 2711583 - RNA, 19 nt, Artificial Sequence
  Description of Artificial Sequence: Synthetic oligonucleotide
cuggacuggacuuccugga

SEQ ID NO: 2711584 - RNA, 19 nt, Artificial Sequence
  Description of Artificial Sequence: Synthetic oligonucleotide
caguggcacagcaccacug

SEQ ID NO: 2711585 - RNA, 19 nt, Artificial Sequence
  Description of Artificial Sequence: Synthetic oligonucleotide
gucaugugggugcugggaa

SEQ ID NO: 2711586 - RNA, 19 nt, Artificial Sequence
  Description of Artificial Sequence: Synthetic oligonucleotide
ccacuuaacaaggacaaca

SEQ ID NO: 2711587 - RNA, 19 nt, Artificial Sequence
  Description of Artificial Sequence: Synthetic oligonucleotide
uuccuggaacuggaguuac

SEQ ID NO: 2711588 - RNA, 19 nt, Artificial Sequence
  Description of Artificial Sequence: Synthetic oligonucleotide
cuggaagagcagccaggcc

SEQ ID NO: 2711589 - RNA, 19 nt, Artificial Sequence
  Description of Artificial Sequence: Synthetic oligonucleotide
agauuuccuggaacuggag

SEQ ID NO: 2711590 - RNA, 19 nt, Artificial Sequence
  Description of Artificial Sequence: Synthetic oligonucleotide
ugcccagcgugugaaggug

SEQ ID NO: 2711591 - RNA, 19 nt, Artificial Sequence
  Description of Artificial Sequence: Synthetic oligonucleotide
cugcuaccccaccauggag

SEQ ID NO: 2711592 - RNA, 19 nt, Artificial Sequence
  Description of Artificial Sequence: Synthetic oligonucleotide
ggacaacacagccugaggu

SEQ ID NO: 2711593 - RNA, 19 nt, Artificial Sequence
  Description of Artificial Sequence: Synthetic oligonucleotide
augugcugucaugugggug

SEQ ID NO: 2711594 - RNA, 19 nt, Artificial Sequence
  Description of Artificial Sequence: Synthetic oligonucleotide
uuucucccucucaggcgca

SEQ ID NO: 2711595 - RNA, 19 nt, Artificial Sequence
  Description of Artificial Sequence: Synthetic oligonucleotide
guggcacagcaccacugug

SEQ ID NO: 2711596 - RNA, 19 nt, Artificial Sequence
  Description of Artificial Sequence: Synthetic oligonucleotide
caggcaggcuucaaacaca

SEQ ID NO: 2711597 - RNA, 19 nt, Artificial Sequence
  Description of Artificial Sequence: Synthetic oligonucleotide
aggccagccuggccuacuc

SEQ ID NO: 2711598 - RNA, 19 nt, Artificial Sequence
  Description of Artificial Sequence: Synthetic oligonucleotide
acaccucuggcuguccugu

SEQ ID NO: 2711599 - RNA, 19 nt, Artificial Sequence
  Description of Artificial Sequence: Synthetic oligonucleotide
guuucucuguggaacaccu

SEQ ID NO: 2711600 - RNA, 19 nt, Artificial Sequence
  Description of Artificial Sequence: Synthetic oligonucleotide
agcgugugaaggugucaga

SEQ ID NO: 2711601 - RNA, 19 nt, Artificial Sequence
  Description of Artificial Sequence: Synthetic oligonucleotide
gugggugcugaggaaggcc

SEQ ID NO: 2711602 - RNA, 19 nt, Artificial Sequence
  Description of Artificial Sequence: Synthetic oligonucleotide
gcaacaccacugcccagcg

SEQ ID NO: 2711603 - RNA, 19 nt, Artificial Sequence
  Description of Artificial Sequence: Synthetic oligonucleotide
gguuucucuguggaacacc

SEQ ID NO: 2711604 - RNA, 19 nt, Artificial Sequence
  Description of Artificial Sequence: Synthetic oligonucleotide
ggagugcaacaccacugcc

SEQ ID NO: 2711605 - RNA, 19 nt, Artificial Sequence
  Description of Artificial Sequence: Synthetic oligonucleotide
gcaacucgcucuuguagac

SEQ ID NO: 2711606 - RNA, 19 nt, Artificial Sequence
  Description of Artificial Sequence: Synthetic oligonucleotide
accacugcccagcguguga

SEQ ID NO: 2711607 - RNA, 19 nt, Artificial Sequence
  Description of Artificial Sequence: Synthetic oligonucleotide
caggcuucaaacacagccu

SEQ ID NO: 2711608 - RNA, 19 nt, Artificial Sequence
  Description of Artificial Sequence: Synthetic oligonucleotide
ucuggcuguccuguagcaa

SEQ ID NO: 2711609 - RNA, 19 nt, Artificial Sequence
  Description of Artificial Sequence: Synthetic oligonucleotide
cccaguucugccccaacag

SEQ ID NO: 2711610 - RNA, 19 nt, Artificial Sequence
  Description of Artificial Sequence: Synthetic oligonucleotide
ggcuucaaacacagccucg

SEQ ID NO: 2711611 - RNA, 19 nt, Artificial Sequence
  Description of Artificial Sequence: Synthetic oligonucleotide
gugccaggccacuuaacaa

SEQ ID NO: 2711612 - RNA, 19 nt, Artificial Sequence
  Description of Artificial Sequence: Synthetic oligonucleotide
gccaggccacuuaacaagg

SEQ ID NO: 2711613 - RNA, 19 nt, Artificial Sequence
  Description of Artificial Sequence: Synthetic oligonucleotide
cccacagcauccucacugg

SEQ ID NO: 2711614 - RNA, 19 nt, Artificial Sequence
  Description of Artificial Sequence: Synthetic oligonucleotide
uggaacaccucuggcuguc

SEQ ID NO: 2711615 - RNA, 19 nt, Artificial Sequence
  Description of Artificial Sequence: Synthetic oligonucleotide
guagcaacucgcucuugua

SEQ ID NO: 2711616 - RNA, 19 nt, Artificial Sequence
  Description of Artificial Sequence: Synthetic oligonucleotide
ccaacaggccuuauguaca

SEQ ID NO: 2711617 - RNA, 19 nt, Artificial Sequence
  Description of Artificial Sequence: Synthetic oligonucleotide
uucugccccaacaggccuu

SEQ ID NO: 2711618 - RNA, 19 nt, Artificial Sequence
  Description of Artificial Sequence: Synthetic oligonucleotide
caccauggagcgcuuucuc

SEQ ID NO: 2711619 - RNA, 19 nt, Artificial Sequence
  Description of Artificial Sequence: Synthetic oligonucleotide
caggcgcacuucaucuaac

SEQ ID NO: 2711620 - RNA, 19 nt, Artificial Sequence
  Description of Artificial Sequence: Synthetic oligonucleotide
caacucugcuaccccacca

SEQ ID NO: 2711621 - RNA, 19 nt, Artificial Sequence
  Description of Artificial Sequence: Synthetic oligonucleotide
guccuguagcaacucgcuc

SEQ ID NO: 2711622 - RNA, 19 nt, Artificial Sequence
  Description of Artificial Sequence: Synthetic oligonucleotide
acacagccugagguccggc

SEQ ID NO: 2711623 - RNA, 19 nt, Artificial Sequence
  Description of Artificial Sequence: Synthetic oligonucleotide
aacccaggugacaguggca

SEQ ID NO: 2711624 - RNA, 19 nt, Artificial Sequence
  Description of Artificial Sequence: Synthetic oligonucleotide
ggccacuuaacaaggacaa

SEQ ID NO: 2711625 - RNA, 19 nt, Artificial Sequence
  Description of Artificial Sequence: Synthetic oligonucleotide
auccucacugggaaacagu

SEQ ID NO: 2711626 - RNA, 19 nt, Artificial Sequence
  Description of Artificial Sequence: Synthetic oligonucleotide
ccauagcucuucaggcagg

SEQ ID NO: 2711627 - RNA, 19 nt, Artificial Sequence
  Description of Artificial Sequence: Synthetic oligonucleotide
caccacugugccaggccac

SEQ ID NO: 2711628 - RNA, 19 nt, Artificial Sequence
  Description of Artificial Sequence: Synthetic oligonucleotide
ggccuacucacccaguucu

SEQ ID NO: 2711629 - RNA, 19 nt, Artificial Sequence
  Description of Artificial Sequence: Synthetic oligonucleotide
caguuaugugcugucaugu

SEQ ID NO: 2711630 - RNA, 19 nt, Artificial Sequence
  Description of Artificial Sequence: Synthetic oligonucleotide
ggaaacagucagcaacucu

SEQ ID NO: 2711631 - RNA, 19 nt, Artificial Sequence
  Description of Artificial Sequence: Synthetic oligonucleotide
ggaacccaggugacagugg

SEQ ID NO: 2711632 - RNA, 19 nt, Artificial Sequence
  Description of Artificial Sequence: Synthetic oligonucleotide
ggggugggugcugaggaag

SEQ ID NO: 2711633 - RNA, 19 nt, Artificial Sequence
  Description of Artificial Sequence: Synthetic oligonucleotide
gcaacucugcuaccccacc

SEQ ID NO: 2711634 - RNA, 19 nt, Artificial Sequence
  Description of Artificial Sequence: Synthetic oligonucleotide
caggccuuauguacauuaa

SEQ ID NO: 2711635 - RNA, 19 nt, Artificial Sequence
  Description of Artificial Sequence: Synthetic oligonucleotide
cuucagcacuggacuggac

SEQ ID NO: 2711636 - RNA, 19 nt, Artificial Sequence
  Description of Artificial Sequence: Synthetic oligonucleotide
cugugccaggccacuuaac

SEQ ID NO: 2711637 - RNA, 19 nt, Artificial Sequence
  Description of Artificial Sequence: Synthetic oligonucleotide
caggugacaguggcacagc

SEQ ID NO: 2711638 - RNA, 19 nt, Artificial Sequence
  Description of Artificial Sequence: Synthetic oligonucleotide
gagcgcuuucucccucuca

SEQ ID NO: 2711639 - RNA, 19 nt, Artificial Sequence
  Description of Artificial Sequence: Synthetic oligonucleotide
ccuacucacccaguucugc

SEQ ID NO: 2711640 - RNA, 19 nt, Artificial Sequence
  Description of Artificial Sequence: Synthetic oligonucleotide
gaacaccucuggcuguccu

SEQ ID NO: 2711641 - RNA, 19 nt, Artificial Sequence
  Description of Artificial Sequence: Synthetic oligonucleotide
accacugugccaggccacu

SEQ ID NO: 2711642 - RNA, 19 nt, Artificial Sequence
  Description of Artificial Sequence: Synthetic oligonucleotide
gccagccuggccuacucac

SEQ ID NO: 2711643 - RNA, 19 nt, Artificial Sequence
  Description of Artificial Sequence: Synthetic oligonucleotide
gggugggugcugaggaagg

SEQ ID NO: 2711644 - RNA, 19 nt, Artificial Sequence
  Description of Artificial Sequence: Synthetic oligonucleotide
ggugacaguggcacagcac

SEQ ID NO: 2711645 - RNA, 19 nt, Artificial Sequence
  Description of Artificial Sequence: Synthetic oligonucleotide
gcgcuuucucccucucagg

SEQ ID NO: 2711646 - RNA, 19 nt, Artificial Sequence
  Description of Artificial Sequence: Synthetic oligonucleotide
agccuggccuacucaccca

SEQ ID NO: 2711647 - RNA, 19 nt, Artificial Sequence
  Description of Artificial Sequence: Synthetic oligonucleotide
gugcaacaccacugcccag

SEQ ID NO: 2711648 - RNA, 19 nt, Artificial Sequence
  Description of Artificial Sequence: Synthetic oligonucleotide
auagcucuucaggcaggcu

SEQ ID NO: 2711649 - RNA, 19 nt, Artificial Sequence
  Description of Artificial Sequence: Synthetic oligonucleotide
gccccaacaggccuuaugu

SEQ ID NO: 2711650 - RNA, 19 nt, Artificial Sequence
  Description of Artificial Sequence: Synthetic oligonucleotide
gaagagcagccaggccagc

SEQ ID NO: 2711651 - RNA, 19 nt, Artificial Sequence
  Description of Artificial Sequence: Synthetic oligonucleotide
gccuggccuacucacccag

SEQ ID NO: 2711652 - RNA, 19 nt, Artificial Sequence
  Description of Artificial Sequence: Synthetic oligonucleotide
ccuuauguacauuaagcuu

SEQ ID NO: 2711653 - RNA, 19 nt, Artificial Sequence
  Description of Artificial Sequence: Synthetic oligonucleotide
ggacuuccuggaugaagca

SEQ ID NO: 2711654 - RNA, 19 nt, Artificial Sequence
  Description of Artificial Sequence: Synthetic oligonucleotide
cacugcccagcgugugaag

SEQ ID NO: 2711655 - RNA, 19 nt, Artificial Sequence
  Description of Artificial Sequence: Synthetic oligonucleotide
gcaccacugugccaggcca

SEQ ID NO: 2711656 - RNA, 19 nt, Artificial Sequence
  Description of Artificial Sequence: Synthetic oligonucleotide
ucugccccaacaggccuua

SEQ ID NO: 2711657 - RNA, 19 nt, Artificial Sequence
  Description of Artificial Sequence: Synthetic oligonucleotide
ccagccuggccuacucacc

SEQ ID NO: 2711658 - RNA, 19 nt, Artificial Sequence
  Description of Artificial Sequence: Synthetic oligonucleotide
ccacagcauccucacuggg

SEQ ID NO: 2711659 - RNA, 19 nt, Artificial Sequence
  Description of Artificial Sequence: Synthetic oligonucleotide
ucucccucucaggcgcacu

SEQ ID NO: 2711660 - RNA, 19 nt, Artificial Sequence
  Description of Artificial Sequence: Synthetic oligonucleotide
cauggagcgcuuucucccu

SEQ ID NO: 2711661 - RNA, 19 nt, Artificial Sequence
  Description of Artificial Sequence: Synthetic oligonucleotide
uucucccucucaggcgcac

SEQ ID NO: 2711662 - RNA, 19 nt, Artificial Sequence
  Description of Artificial Sequence: Synthetic oligonucleotide
cuucaaacacagccucggu

SEQ ID NO: 2711663 - RNA, 19 nt, Artificial Sequence
  Description of Artificial Sequence: Synthetic oligonucleotide
ucacccaguucugccccaa

SEQ ID NO: 2711664 - RNA, 19 nt, Artificial Sequence
  Description of Artificial Sequence: Synthetic oligonucleotide
gguccggccccgcccacag

SEQ ID NO: 2711665 - RNA, 19 nt, Artificial Sequence
  Description of Artificial Sequence: Synthetic oligonucleotide
ucccucucaggcgcacuuc

SEQ ID NO: 2711666 - RNA, 19 nt, Artificial Sequence
  Description of Artificial Sequence: Synthetic oligonucleotide
cucaggcgcacuucaucua

SEQ ID NO: 2711667 - RNA, 19 nt, Artificial Sequence
  Description of Artificial Sequence: Synthetic oligonucleotide
cagcaccacugugccaggc

SEQ ID NO: 2711668 - RNA, 19 nt, Artificial Sequence
  Description of Artificial Sequence: Synthetic oligonucleotide
ggugcugaggaaggccuuc

SEQ ID NO: 2711669 - RNA, 19 nt, Artificial Sequence
  Description of Artificial Sequence: Synthetic oligonucleotide
ugcugucaugugggugcug

SEQ ID NO: 2711670 - RNA, 19 nt, Artificial Sequence
  Description of Artificial Sequence: Synthetic oligonucleotide
guggaacaccucuggcugu

SEQ ID NO: 2711671 - RNA, 19 nt, Artificial Sequence
  Description of Artificial Sequence: Synthetic oligonucleotide
caacaggccuuauguacau

SEQ ID NO: 2711672 - RNA, 19 nt, Artificial Sequence
  Description of Artificial Sequence: Synthetic oligonucleotide
cgagaacaguggaacccag

SEQ ID NO: 2711673 - RNA, 19 nt, Artificial Sequence
  Description of Artificial Sequence: Synthetic oligonucleotide
cacccaguucugccccaac

SEQ ID NO: 2711674 - RNA, 19 nt, Artificial Sequence
  Description of Artificial Sequence: Synthetic oligonucleotide
cacugugccaggccacuua

SEQ ID NO: 2711675 - RNA, 19 nt, Artificial Sequence
  Description of Artificial Sequence: Synthetic oligonucleotide
cgcacuucaucuaacuucu

SEQ ID NO: 2711676 - RNA, 19 nt, Artificial Sequence
  Description of Artificial Sequence: Synthetic oligonucleotide
cuguagcaacucgcucuug

SEQ ID NO: 2711677 - RNA, 19 nt, Artificial Sequence
  Description of Artificial Sequence: Synthetic oligonucleotide
ggguuucucuguggaacac

SEQ ID NO: 2711678 - RNA, 19 nt, Artificial Sequence
  Description of Artificial Sequence: Synthetic oligonucleotide
uuccuggaugaagcaccau

SEQ ID NO: 2711679 - RNA, 19 nt, Artificial Sequence
  Description of Artificial Sequence: Synthetic oligonucleotide
cucacccaguucugcccca

SEQ ID NO: 2711680 - RNA, 19 nt, Artificial Sequence
  Description of Artificial Sequence: Synthetic oligonucleotide
gggaaacagucagcaacuc

SEQ ID NO: 2711681 - RNA, 19 nt, Artificial Sequence
  Description of Artificial Sequence: Synthetic oligonucleotide
cuaccccaccauggagcgc

SEQ ID NO: 2711682 - RNA, 19 nt, Artificial Sequence
  Description of Artificial Sequence: Synthetic oligonucleotide
gcuuccgagaacaguggaa

SEQ ID NO: 2711683 - RNA, 19 nt, Artificial Sequence
  Description of Artificial Sequence: Synthetic oligonucleotide
cccaccauggagcgcuuuc

SEQ ID NO: 2711684 - RNA, 19 nt, Artificial Sequence
  Description of Artificial Sequence: Synthetic oligonucleotide
gccacuuaacaaggacaac

SEQ ID NO: 2711685 - RNA, 19 nt, Artificial Sequence
  Description of Artificial Sequence: Synthetic oligonucleotide
acuggacuuccuggaugaa

SEQ ID NO: 2711686 - RNA, 19 nt, Artificial Sequence
  Description of Artificial Sequence: Synthetic oligonucleotide
caguggaacccaggugaca

SEQ ID NO: 2711687 - RNA, 19 nt, Artificial Sequence
  Description of Artificial Sequence: Synthetic oligonucleotide
cccaggucuucuggaagag

SEQ ID NO: 2711688 - RNA, 19 nt, Artificial Sequence
  Description of Artificial Sequence: Synthetic oligonucleotide
guggaacccaggugacagu

SEQ ID NO: 2711689 - RNA, 19 nt, Artificial Sequence
  Description of Artificial Sequence: Synthetic oligonucleotide
ccugagguccggccccgcc

SEQ ID NO: 2711690 - RNA, 19 nt, Artificial Sequence
  Description of Artificial Sequence: Synthetic oligonucleotide
cccagcgugugaagguguc

SEQ ID NO: 2711691 - RNA, 19 nt, Artificial Sequence
  Description of Artificial Sequence: Synthetic oligonucleotide
cagcauccucacugggaaa

SEQ ID NO: 2711692 - RNA, 19 nt, Artificial Sequence
  Description of Artificial Sequence: Synthetic oligonucleotide
ccgcccacagcauccucac

SEQ ID NO: 2711693 - RNA, 19 nt, Artificial Sequence
  Description of Artificial Sequence: Synthetic oligonucleotide
ggccccgcccacagcaucc

SEQ ID NO: 2711694 - RNA, 19 nt, Artificial Sequence
  Description of Artificial Sequence: Synthetic oligonucleotide
gccuacucacccaguucug

SEQ ID NO: 2711695 - RNA, 19 nt, Artificial Sequence
  Description of Artificial Sequence: Synthetic oligonucleotide
cuggccuacucacccaguu

SEQ ID NO: 2711696 - RNA, 19 nt, Artificial Sequence
  Description of Artificial Sequence: Synthetic oligonucleotide
augaagcaccauagcucuu

SEQ ID NO: 2711697 - RNA, 19 nt, Artificial Sequence
  Description of Artificial Sequence: Synthetic oligonucleotide
cccgcccacagcauccuca

SEQ ID NO: 2711698 - RNA, 19 nt, Artificial Sequence
  Description of Artificial Sequence: Synthetic oligonucleotide
gagguccggccccgcccac

SEQ ID NO: 2711699 - RNA, 19 nt, Artificial Sequence
  Description of Artificial Sequence: Synthetic oligonucleotide
gcagccaggccagccuggc

SEQ ID NO: 2711700 - RNA, 19 nt, Artificial Sequence
  Description of Artificial Sequence: Synthetic oligonucleotide
ccaggccacuuaacaagga

SEQ ID NO: 2711701 - RNA, 19 nt, Artificial Sequence
  Description of Artificial Sequence: Synthetic oligonucleotide
cccucucaggcgcacuuca

SEQ ID NO: 2711702 - RNA, 19 nt, Artificial Sequence
  Description of Artificial Sequence: Synthetic oligonucleotide
ggcgcacuucaucuaacuu

SEQ ID NO: 2711703 - RNA, 19 nt, Artificial Sequence
  Description of Artificial Sequence: Synthetic oligonucleotide
gcgugugaaggugucagau

SEQ ID NO: 2711704 - RNA, 19 nt, Artificial Sequence
  Description of Artificial Sequence: Synthetic oligonucleotide
gugcugaggaaggccuucu

SEQ ID NO: 2711705 - RNA, 19 nt, Artificial Sequence
  Description of Artificial Sequence: Synthetic oligonucleotide
agguccggccccgcccaca

SEQ ID NO: 2711706 - RNA, 19 nt, Artificial Sequence
  Description of Artificial Sequence: Synthetic oligonucleotide
gcacagcaccacugugcca

SEQ ID NO: 2711707 - RNA, 19 nt, Artificial Sequence
  Description of Artificial Sequence: Synthetic oligonucleotide
cucuucaggcaggcuucaa

SEQ ID NO: 2711708 - RNA, 19 nt, Artificial Sequence
  Description of Artificial Sequence: Synthetic oligonucleotide
guccggccccgcccacagc

SEQ ID NO: 2711709 - RNA, 19 nt, Artificial Sequence
  Description of Artificial Sequence: Synthetic oligonucleotide
cucccucucaggcgcacuu

SEQ ID NO: 2711710 - RNA, 19 nt, Artificial Sequence
  Description of Artificial Sequence: Synthetic oligonucleotide
gugcugucaugugggugcu

SEQ ID NO: 2711711 - RNA, 19 nt, Artificial Sequence
  Description of Artificial Sequence: Synthetic oligonucleotide
caacaccacugcccagcgu

SEQ ID NO: 2711712 - RNA, 19 nt, Artificial Sequence
  Description of Artificial Sequence: Synthetic oligonucleotide
ccccaacaggccuuaugua

SEQ ID NO: 2711713 - RNA, 19 nt, Artificial Sequence
  Description of Artificial Sequence: Synthetic oligonucleotide
cccaggugacaguggcaca

SEQ ID NO: 2711714 - RNA, 19 nt, Artificial Sequence
  Description of Artificial Sequence: Synthetic oligonucleotide
ccuguagcaacucgcucuu

SEQ ID NO: 2711715 - RNA, 19 nt, Artificial Sequence
  Description of Artificial Sequence: Synthetic oligonucleotide
caccucuggcuguccugua

SEQ ID NO: 2711716 - RNA, 19 nt, Artificial Sequence
  Description of Artificial Sequence: Synthetic oligonucleotide
ccagcgugugaagguguca

SEQ ID NO: 2711717 - RNA, 19 nt, Artificial Sequence
  Description of Artificial Sequence: Synthetic oligonucleotide
ccacugcccagcgugugaa

SEQ ID NO: 2711718 - RNA, 19 nt, Artificial Sequence
  Description of Artificial Sequence: Synthetic oligonucleotide
ccaccauggagcgcuuucu

SEQ ID NO: 2711719 - RNA, 19 nt, Artificial Sequence
  Description of Artificial Sequence: Synthetic oligonucleotide
gcccagcgugugaaggugu

SEQ ID NO: 2711720 - RNA, 19 nt, Artificial Sequence
  Description of Artificial Sequence: Synthetic oligonucleotide
ccuggccuacucacccagu

SEQ ID NO: 2711721 - RNA, 19 nt, Artificial Sequence
  Description of Artificial Sequence: Synthetic oligonucleotide
ccucucaggcgcacuucau

SEQ ID NO: 2711722 - RNA, 19 nt, Artificial Sequence
  Description of Artificial Sequence: Synthetic oligonucleotide
accccaccauggagcgcuu

SEQ ID NO: 2711723 - RNA, 19 nt, Artificial Sequence
  Description of Artificial Sequence: Synthetic oligonucleotide
ccccgcccacagcauccuc

SEQ ID NO: 2711724 - RNA, 19 nt, Artificial Sequence
  Description of Artificial Sequence: Synthetic oligonucleotide
cggccccgcccacagcauc

SEQ ID NO: 2711725 - RNA, 19 nt, Artificial Sequence
  Description of Artificial Sequence: Synthetic oligonucleotide
gggugcugaggaaggccuu

SEQ ID NO: 2711726 - RNA, 19 nt, Artificial Sequence
  Description of Artificial Sequence: Synthetic oligonucleotide
gcacuucaucuaacuucuu

SEQ ID NO: 2711727 - RNA, 19 nt, Artificial Sequence
  Description of Artificial Sequence: Synthetic oligonucleotide
gccccgcccacagcauccu

SEQ ID NO: 2711728 - RNA, 19 nt, Artificial Sequence
  Description of Artificial Sequence: Synthetic oligonucleotide
cugccccaacaggccuuau

SEQ ID NO: 2711729 - RNA, 19 nt, Artificial Sequence
  Description of Artificial Sequence: Synthetic oligonucleotide
ccacugugccaggccacuu

SEQ ID NO: 2711730 - RNA, 19 nt, Artificial Sequence
  Description of Artificial Sequence: Synthetic oligonucleotide
ccggccccgcccacagcau

SEQ ID NO: 2711731 - RNA, 19 nt, Artificial Sequence
  Description of Artificial Sequence: Synthetic oligonucleotide
cgcccacagcauccucacu

SEQ ID NO: 2711732 - RNA, 19 nt, Artificial Sequence
  Description of Artificial Sequence: Synthetic oligonucleotide
ccccaccauggagcgcuuu

SEQ ID NO: 2711733 - RNA, 19 nt, Artificial Sequence
  Description of Artificial Sequence: Synthetic oligonucleotide
uuaacuuauauucaugggg

SEQ ID NO: 2711734 - RNA, 19 nt, Artificial Sequence
  Description of Artificial Sequence: Synthetic oligonucleotide
aaauuggucgaucuguucc

SEQ ID NO: 2711735 - RNA, 19 nt, Artificial Sequence
  Description of Artificial Sequence: Synthetic oligonucleotide
uauuaacuuauauucaugg

SEQ ID NO: 2711736 - RNA, 19 nt, Artificial Sequence
  Description of Artificial Sequence: Synthetic oligonucleotide
uccaauaggaggcaaaggg

SEQ ID NO: 2711737 - RNA, 19 nt, Artificial Sequence
  Description of Artificial Sequence: Synthetic oligonucleotide
uaguuauuaacuuauauuc

SEQ ID NO: 2711738 - RNA, 19 nt, Artificial Sequence
  Description of Artificial Sequence: Synthetic oligonucleotide
gaucuucacaaauuggucg

SEQ ID NO: 2711739 - RNA, 19 nt, Artificial Sequence
  Description of Artificial Sequence: Synthetic oligonucleotide
uguucauaggucucaaugg

SEQ ID NO: 2711740 - RNA, 19 nt, Artificial Sequence
  Description of Artificial Sequence: Synthetic oligonucleotide
uucuuauuaguuauuaacu

SEQ ID NO: 2711741 - RNA, 19 nt, Artificial Sequence
  Description of Artificial Sequence: Synthetic oligonucleotide
agaacuuaaguccacuuuc

SEQ ID NO: 2711742 - RNA, 19 nt, Artificial Sequence
  Description of Artificial Sequence: Synthetic oligonucleotide
acuucuguccaauaggagg

SEQ ID NO: 2711743 - RNA, 19 nt, Artificial Sequence
  Description of Artificial Sequence: Synthetic oligonucleotide
ugguagaacugaaagacag

SEQ ID NO: 2711744 - RNA, 19 nt, Artificial Sequence
  Description of Artificial Sequence: Synthetic oligonucleotide
uaacuuauauucauggggu

SEQ ID NO: 2711745 - RNA, 19 nt, Artificial Sequence
  Description of Artificial Sequence: Synthetic oligonucleotide
uauucauggggucucagcc

SEQ ID NO: 2711746 - RNA, 19 nt, Artificial Sequence
  Description of Artificial Sequence: Synthetic oligonucleotide
auuaacuuauauucauggg

SEQ ID NO: 2711747 - RNA, 19 nt, Artificial Sequence
  Description of Artificial Sequence: Synthetic oligonucleotide
aauuggucgaucuguuccg

SEQ ID NO: 2711748 - RNA, 19 nt, Artificial Sequence
  Description of Artificial Sequence: Synthetic oligonucleotide
agggauguggauucggugc

SEQ ID NO: 2711749 - RNA, 19 nt, Artificial Sequence
  Description of Artificial Sequence: Synthetic oligonucleotide
guucuuauuaguuauuaac

SEQ ID NO: 2711750 - RNA, 19 nt, Artificial Sequence
  Description of Artificial Sequence: Synthetic oligonucleotide
uuaguuauuaacuuauauu

SEQ ID NO: 2711751 - RNA, 19 nt, Artificial Sequence
  Description of Artificial Sequence: Synthetic oligonucleotide
uuauuaacuuauauucaug

SEQ ID NO: 2711752 - RNA, 19 nt, Artificial Sequence
  Description of Artificial Sequence: Synthetic oligonucleotide
uguaacgccaugcagugca

SEQ ID NO: 2711753 - RNA, 19 nt, Artificial Sequence
  Description of Artificial Sequence: Synthetic oligonucleotide
uuauuuuguucgcugguag

SEQ ID NO: 2711754 - RNA, 19 nt, Artificial Sequence
  Description of Artificial Sequence: Synthetic oligonucleotide
gaguuccuuauuuuguucg

SEQ ID NO: 2711755 - RNA, 19 nt, Artificial Sequence
  Description of Artificial Sequence: Synthetic oligonucleotide
ucucaauggaucccggccg

SEQ ID NO: 2711756 - RNA, 19 nt, Artificial Sequence
  Description of Artificial Sequence: Synthetic oligonucleotide
aaugaguucuuauuaguua

SEQ ID NO: 2711757 - RNA, 19 nt, Artificial Sequence
  Description of Artificial Sequence: Synthetic oligonucleotide
ggaaauacuacuucugucc

SEQ ID NO: 2711758 - RNA, 19 nt, Artificial Sequence
  Description of Artificial Sequence: Synthetic oligonucleotide
aacuuauauucaugggguc

SEQ ID NO: 2711759 - RNA, 19 nt, Artificial Sequence
  Description of Artificial Sequence: Synthetic oligonucleotide
auuaguuauuaacuuauau

SEQ ID NO: 2711760 - RNA, 19 nt, Artificial Sequence
  Description of Artificial Sequence: Synthetic oligonucleotide
auauucauggggucucagc

SEQ ID NO: 2711761 - RNA, 19 nt, Artificial Sequence
  Description of Artificial Sequence: Synthetic oligonucleotide
uacuacuucuguccaauag

SEQ ID NO: 2711762 - RNA, 19 nt, Artificial Sequence
  Description of Artificial Sequence: Synthetic oligonucleotide
aggcuguagaacuuaaguc

SEQ ID NO: 2711763 - RNA, 19 nt, Artificial Sequence
  Description of Artificial Sequence: Synthetic oligonucleotide
agaacugaaagacagcuuu

SEQ ID NO: 2711764 - RNA, 19 nt, Artificial Sequence
  Description of Artificial Sequence: Synthetic oligonucleotide
aauaggaggcaaagggagc

SEQ ID NO: 2711765 - RNA, 19 nt, Artificial Sequence
  Description of Artificial Sequence: Synthetic oligonucleotide
ugucaaucagguuauggcu

SEQ ID NO: 2711766 - RNA, 19 nt, Artificial Sequence
  Description of Artificial Sequence: Synthetic oligonucleotide
ucuuauuaguuauuaacuu

SEQ ID NO: 2711767 - RNA, 19 nt, Artificial Sequence
  Description of Artificial Sequence: Synthetic oligonucleotide
auucggugcagcgugaggc

SEQ ID NO: 2711768 - RNA, 19 nt, Artificial Sequence
  Description of Artificial Sequence: Synthetic oligonucleotide
uuaaguccacuuuccaucc

SEQ ID NO: 2711769 - RNA, 19 nt, Artificial Sequence
  Description of Artificial Sequence: Synthetic oligonucleotide
uucucuuguucauaggucu

SEQ ID NO: 2711770 - RNA, 19 nt, Artificial Sequence
  Description of Artificial Sequence: Synthetic oligonucleotide
aaguccacuuuccauccuc

SEQ ID NO: 2711771 - RNA, 19 nt, Artificial Sequence
  Description of Artificial Sequence: Synthetic oligonucleotide
uccuuauuuuguucgcugg

SEQ ID NO: 2711772 - RNA, 19 nt, Artificial Sequence
  Description of Artificial Sequence: Synthetic oligonucleotide
ggcuguagaacuuaagucc

SEQ ID NO: 2711773 - RNA, 19 nt, Artificial Sequence
  Description of Artificial Sequence: Synthetic oligonucleotide
uucacaaauuggucgaucu

SEQ ID NO: 2711774 - RNA, 19 nt, Artificial Sequence
  Description of Artificial Sequence: Synthetic oligonucleotide
aggcaaagggagcugaagg

SEQ ID NO: 2711775 - RNA, 19 nt, Artificial Sequence
  Description of Artificial Sequence: Synthetic oligonucleotide
uguguaacgccaugcagug

SEQ ID NO: 2711776 - RNA, 19 nt, Artificial Sequence
  Description of Artificial Sequence: Synthetic oligonucleotide
ugcagugcaaaugaguucu

SEQ ID NO: 2711777 - RNA, 19 nt, Artificial Sequence
  Description of Artificial Sequence: Synthetic oligonucleotide
ucauaggucucaauggauc

SEQ ID NO: 2711778 - RNA, 19 nt, Artificial Sequence
  Description of Artificial Sequence: Synthetic oligonucleotide
cauaggucucaauggaucc

SEQ ID NO: 2711779 - RNA, 19 nt, Artificial Sequence
  Description of Artificial Sequence: Synthetic oligonucleotide
uuuguucgcugguagaacu

SEQ ID NO: 2711780 - RNA, 19 nt, Artificial Sequence
  Description of Artificial Sequence: Synthetic oligonucleotide
ucguccacgaucuucacaa

SEQ ID NO: 2711781 - RNA, 19 nt, Artificial Sequence
  Description of Artificial Sequence: Synthetic oligonucleotide
augaguucuuauuaguuau

SEQ ID NO: 2711782 - RNA, 19 nt, Artificial Sequence
  Description of Artificial Sequence: Synthetic oligonucleotide
ugucgaguuccuuauuuug

SEQ ID NO: 2711783 - RNA, 19 nt, Artificial Sequence
  Description of Artificial Sequence: Synthetic oligonucleotide
aauacuacuucuguccaau

SEQ ID NO: 2711784 - RNA, 19 nt, Artificial Sequence
  Description of Artificial Sequence: Synthetic oligonucleotide
aauggaucccggccgcagg

SEQ ID NO: 2711785 - RNA, 19 nt, Artificial Sequence
  Description of Artificial Sequence: Synthetic oligonucleotide
ugcuccuucaccagguagc

SEQ ID NO: 2711786 - RNA, 19 nt, Artificial Sequence
  Description of Artificial Sequence: Synthetic oligonucleotide
gaaauacuacuucugucca

SEQ ID NO: 2711787 - RNA, 19 nt, Artificial Sequence
  Description of Artificial Sequence: Synthetic oligonucleotide
aacuuaaguccacuuucca

SEQ ID NO: 2711788 - RNA, 19 nt, Artificial Sequence
  Description of Artificial Sequence: Synthetic oligonucleotide
uucaccagguagcaggcca

SEQ ID NO: 2711789 - RNA, 19 nt, Artificial Sequence
  Description of Artificial Sequence: Synthetic oligonucleotide
acugaaagacagcuuucuc

SEQ ID NO: 2711790 - RNA, 19 nt, Artificial Sequence
  Description of Artificial Sequence: Synthetic oligonucleotide
uuccuuauuuuguucgcug

SEQ ID NO: 2711791 - RNA, 19 nt, Artificial Sequence
  Description of Artificial Sequence: Synthetic oligonucleotide
aagcccagggcacagugca

SEQ ID NO: 2711792 - RNA, 19 nt, Artificial Sequence
  Description of Artificial Sequence: Synthetic oligonucleotide
uauuuuguucgcugguaga

SEQ ID NO: 2711793 - RNA, 19 nt, Artificial Sequence
  Description of Artificial Sequence: Synthetic oligonucleotide
uguccaauaggaggcaaag

SEQ ID NO: 2711794 - RNA, 19 nt, Artificial Sequence
  Description of Artificial Sequence: Synthetic oligonucleotide
aguuauuaacuuauauuca

SEQ ID NO: 2711795 - RNA, 19 nt, Artificial Sequence
  Description of Artificial Sequence: Synthetic oligonucleotide
uccguuagggacaccaggu

SEQ ID NO: 2711796 - RNA, 19 nt, Artificial Sequence
  Description of Artificial Sequence: Synthetic oligonucleotide
acuccgacagccucuccgc

SEQ ID NO: 2711797 - RNA, 19 nt, Artificial Sequence
  Description of Artificial Sequence: Synthetic oligonucleotide
gcaaaagucagggaugugg

SEQ ID NO: 2711798 - RNA, 19 nt, Artificial Sequence
  Description of Artificial Sequence: Synthetic oligonucleotide
cacgaucuucacaaauugg

SEQ ID NO: 2711799 - RNA, 19 nt, Artificial Sequence
  Description of Artificial Sequence: Synthetic oligonucleotide
ucacaaauuggucgaucug

SEQ ID NO: 2711800 - RNA, 19 nt, Artificial Sequence
  Description of Artificial Sequence: Synthetic oligonucleotide
aaaugaguucuuauuaguu

SEQ ID NO: 2711801 - RNA, 19 nt, Artificial Sequence
  Description of Artificial Sequence: Synthetic oligonucleotide
gcaaaugaguucuuauuag

SEQ ID NO: 2711802 - RNA, 19 nt, Artificial Sequence
  Description of Artificial Sequence: Synthetic oligonucleotide
uagaacuuaaguccacuuu

SEQ ID NO: 2711803 - RNA, 19 nt, Artificial Sequence
  Description of Artificial Sequence: Synthetic oligonucleotide
gaacuuaaguccacuuucc

SEQ ID NO: 2711804 - RNA, 19 nt, Artificial Sequence
  Description of Artificial Sequence: Synthetic oligonucleotide
uaggucucaauggaucccg

SEQ ID NO: 2711805 - RNA, 19 nt, Artificial Sequence
  Description of Artificial Sequence: Synthetic oligonucleotide
agugcacuccgacagccuc

SEQ ID NO: 2711806 - RNA, 19 nt, Artificial Sequence
  Description of Artificial Sequence: Synthetic oligonucleotide
cauccugucaaucagguua

SEQ ID NO: 2711807 - RNA, 19 nt, Artificial Sequence
  Description of Artificial Sequence: Synthetic oligonucleotide
agugcaaaugaguucuuau

SEQ ID NO: 2711808 - RNA, 19 nt, Artificial Sequence
  Description of Artificial Sequence: Synthetic oligonucleotide
auaggucucaauggauccc

SEQ ID NO: 2711809 - RNA, 19 nt, Artificial Sequence
  Description of Artificial Sequence: Synthetic oligonucleotide
aucagguuauggcuucggg

SEQ ID NO: 2711810 - RNA, 19 nt, Artificial Sequence
  Description of Artificial Sequence: Synthetic oligonucleotide
cuuuccauccucccuggcc

SEQ ID NO: 2711811 - RNA, 19 nt, Artificial Sequence
  Description of Artificial Sequence: Synthetic oligonucleotide
acagugcacuccgacagcc

SEQ ID NO: 2711812 - RNA, 19 nt, Artificial Sequence
  Description of Artificial Sequence: Synthetic oligonucleotide
gucucaauggaucccggcc

SEQ ID NO: 2711813 - RNA, 19 nt, Artificial Sequence
  Description of Artificial Sequence: Synthetic oligonucleotide
aaauacuacuucuguccaa

SEQ ID NO: 2711814 - RNA, 19 nt, Artificial Sequence
  Description of Artificial Sequence: Synthetic oligonucleotide
acuuaaguccacuuuccau

SEQ ID NO: 2711815 - RNA, 19 nt, Artificial Sequence
  Description of Artificial Sequence: Synthetic oligonucleotide
ucggggaaauacuacuucu

SEQ ID NO: 2711816 - RNA, 19 nt, Artificial Sequence
  Description of Artificial Sequence: Synthetic oligonucleotide
aaucagguuauggcuucgg

SEQ ID NO: 2711817 - RNA, 19 nt, Artificial Sequence
  Description of Artificial Sequence: Synthetic oligonucleotide
acuuauauucauggggucu

SEQ ID NO: 2711818 - RNA, 19 nt, Artificial Sequence
  Description of Artificial Sequence: Synthetic oligonucleotide
acgaucuucacaaauuggu

SEQ ID NO: 2711819 - RNA, 19 nt, Artificial Sequence
  Description of Artificial Sequence: Synthetic oligonucleotide
guucauaggucucaaugga

SEQ ID NO: 2711820 - RNA, 19 nt, Artificial Sequence
  Description of Artificial Sequence: Synthetic oligonucleotide
uucggggaaauacuacuuc

SEQ ID NO: 2711821 - RNA, 19 nt, Artificial Sequence
  Description of Artificial Sequence: Synthetic oligonucleotide
augcagugcaaaugaguuc

SEQ ID NO: 2711822 - RNA, 19 nt, Artificial Sequence
  Description of Artificial Sequence: Synthetic oligonucleotide
uucauaggucucaauggau

SEQ ID NO: 2711823 - RNA, 19 nt, Artificial Sequence
  Description of Artificial Sequence: Synthetic oligonucleotide
gcugguagaacugaaagac

SEQ ID NO: 2711824 - RNA, 19 nt, Artificial Sequence
  Description of Artificial Sequence: Synthetic oligonucleotide
uggggucucagccauccug

SEQ ID NO: 2711825 - RNA, 19 nt, Artificial Sequence
  Description of Artificial Sequence: Synthetic oligonucleotide
auggaucccggccgcaggc

SEQ ID NO: 2711826 - RNA, 19 nt, Artificial Sequence
  Description of Artificial Sequence: Synthetic oligonucleotide
ucaaucagguuauggcuuc

SEQ ID NO: 2711827 - RNA, 19 nt, Artificial Sequence
  Description of Artificial Sequence: Synthetic oligonucleotide
uccacuuuccauccucccu

SEQ ID NO: 2711828 - RNA, 19 nt, Artificial Sequence
  Description of Artificial Sequence: Synthetic oligonucleotide
guggauucggugcagcgug

SEQ ID NO: 2711829 - RNA, 19 nt, Artificial Sequence
  Description of Artificial Sequence: Synthetic oligonucleotide
cagguuauggcuucgggga

SEQ ID NO: 2711830 - RNA, 19 nt, Artificial Sequence
  Description of Artificial Sequence: Synthetic oligonucleotide
cuacuucuguccaauagga

SEQ ID NO: 2711831 - RNA, 19 nt, Artificial Sequence
  Description of Artificial Sequence: Synthetic oligonucleotide
cuuauauucauggggucuc

SEQ ID NO: 2711832 - RNA, 19 nt, Artificial Sequence
  Description of Artificial Sequence: Synthetic oligonucleotide
ugcuguguaacgccaugca

SEQ ID NO: 2711833 - RNA, 19 nt, Artificial Sequence
  Description of Artificial Sequence: Synthetic oligonucleotide
auguggauucggugcagcg

SEQ ID NO: 2711834 - RNA, 19 nt, Artificial Sequence
  Description of Artificial Sequence: Synthetic oligonucleotide
agacagcuuucucuuguuc

SEQ ID NO: 2711835 - RNA, 19 nt, Artificial Sequence
  Description of Artificial Sequence: Synthetic oligonucleotide
caaagggagcugaaggcug

SEQ ID NO: 2711836 - RNA, 19 nt, Artificial Sequence
  Description of Artificial Sequence: Synthetic oligonucleotide
aacgccaugcagugcaaau

SEQ ID NO: 2711837 - RNA, 19 nt, Artificial Sequence
  Description of Artificial Sequence: Synthetic oligonucleotide
guuagggacaccaggugcc

SEQ ID NO: 2711838 - RNA, 19 nt, Artificial Sequence
  Description of Artificial Sequence: Synthetic oligonucleotide
ugccggugcggccaaagcc

SEQ ID NO: 2711839 - RNA, 19 nt, Artificial Sequence
  Description of Artificial Sequence: Synthetic oligonucleotide
uucauggggucucagccau

SEQ ID NO: 2711840 - RNA, 19 nt, Artificial Sequence
  Description of Artificial Sequence: Synthetic oligonucleotide
ucagggauguggauucggu

SEQ ID NO: 2711841 - RNA, 19 nt, Artificial Sequence
  Description of Artificial Sequence: Synthetic oligonucleotide
uuguucgcugguagaacug

SEQ ID NO: 2711842 - RNA, 19 nt, Artificial Sequence
  Description of Artificial Sequence: Synthetic oligonucleotide
gaacugguagugcggcggg

SEQ ID NO: 2711843 - RNA, 19 nt, Artificial Sequence
  Description of Artificial Sequence: Synthetic oligonucleotide
agcaauggcauccccugca

SEQ ID NO: 2711844 - RNA, 19 nt, Artificial Sequence
  Description of Artificial Sequence: Synthetic oligonucleotide
cacuccgacagccucuccg

SEQ ID NO: 2711845 - RNA, 19 nt, Artificial Sequence
  Description of Artificial Sequence: Synthetic oligonucleotide
ucuguuccggggccggcgg

SEQ ID NO: 2711846 - RNA, 19 nt, Artificial Sequence
  Description of Artificial Sequence: Synthetic oligonucleotide
cuccguuagggacaccagg

SEQ ID NO: 2711847 - RNA, 19 nt, Artificial Sequence
  Description of Artificial Sequence: Synthetic oligonucleotide
uccccugcauccaagcccu

SEQ ID NO: 2711848 - RNA, 19 nt, Artificial Sequence
  Description of Artificial Sequence: Synthetic oligonucleotide
ucaccagguagcaggccag

SEQ ID NO: 2711849 - RNA, 19 nt, Artificial Sequence
  Description of Artificial Sequence: Synthetic oligonucleotide
auaggaggcaaagggagcu

SEQ ID NO: 2711850 - RNA, 19 nt, Artificial Sequence
  Description of Artificial Sequence: Synthetic oligonucleotide
gauucggugcagcgugagg

SEQ ID NO: 2711851 - RNA, 19 nt, Artificial Sequence
  Description of Artificial Sequence: Synthetic oligonucleotide
auucauggggucucagcca

SEQ ID NO: 2711852 - RNA, 19 nt, Artificial Sequence
  Description of Artificial Sequence: Synthetic oligonucleotide
uauauucauggggucucag

SEQ ID NO: 2711853 - RNA, 19 nt, Artificial Sequence
  Description of Artificial Sequence: Synthetic oligonucleotide
auuuuguucgcugguagaa

SEQ ID NO: 2711854 - RNA, 19 nt, Artificial Sequence
  Description of Artificial Sequence: Synthetic oligonucleotide
ucccuggccacauuuucca

SEQ ID NO: 2711855 - RNA, 19 nt, Artificial Sequence
  Description of Artificial Sequence: Synthetic oligonucleotide
aguccacuuuccauccucc

SEQ ID NO: 2711856 - RNA, 19 nt, Artificial Sequence
  Description of Artificial Sequence: Synthetic oligonucleotide
uccgacagccucuccgcgg

SEQ ID NO: 2711857 - RNA, 19 nt, Artificial Sequence
  Description of Artificial Sequence: Synthetic oligonucleotide
uuagggacaccaggugccg

SEQ ID NO: 2711858 - RNA, 19 nt, Artificial Sequence
  Description of Artificial Sequence: Synthetic oligonucleotide
ggccacauuuuccacaagc

SEQ ID NO: 2711859 - RNA, 19 nt, Artificial Sequence
  Description of Artificial Sequence: Synthetic oligonucleotide
uuuuguucgcugguagaac

SEQ ID NO: 2711860 - RNA, 19 nt, Artificial Sequence
  Description of Artificial Sequence: Synthetic oligonucleotide
cugaaagacagcuuucucu

SEQ ID NO: 2711861 - RNA, 19 nt, Artificial Sequence
  Description of Artificial Sequence: Synthetic oligonucleotide
ucucuuguucauaggucuc

SEQ ID NO: 2711862 - RNA, 19 nt, Artificial Sequence
  Description of Artificial Sequence: Synthetic oligonucleotide
cagguagcaggccagcaug

SEQ ID NO: 2711863 - RNA, 19 nt, Artificial Sequence
  Description of Artificial Sequence: Synthetic oligonucleotide
ugaguucuuauuaguuauu

SEQ ID NO: 2711864 - RNA, 19 nt, Artificial Sequence
  Description of Artificial Sequence: Synthetic oligonucleotide
uucgcugguagaacugaaa

SEQ ID NO: 2711865 - RNA, 19 nt, Artificial Sequence
  Description of Artificial Sequence: Synthetic oligonucleotide
agugcuguguaacgccaug

SEQ ID NO: 2711866 - RNA, 19 nt, Artificial Sequence
  Description of Artificial Sequence: Synthetic oligonucleotide
gcacagugcacuccgacag

SEQ ID NO: 2711867 - RNA, 19 nt, Artificial Sequence
  Description of Artificial Sequence: Synthetic oligonucleotide
cagggcacagugcacuccg

SEQ ID NO: 2711868 - RNA, 19 nt, Artificial Sequence
  Description of Artificial Sequence: Synthetic oligonucleotide
caaauuggucgaucuguuc

SEQ ID NO: 2711869 - RNA, 19 nt, Artificial Sequence
  Description of Artificial Sequence: Synthetic oligonucleotide
uguucgcugguagaacuga

SEQ ID NO: 2711870 - RNA, 19 nt, Artificial Sequence
  Description of Artificial Sequence: Synthetic oligonucleotide
acuuuccauccucccuggc

SEQ ID NO: 2711871 - RNA, 19 nt, Artificial Sequence
  Description of Artificial Sequence: Synthetic oligonucleotide
cucccuggccacauuuucc

SEQ ID NO: 2711872 - RNA, 19 nt, Artificial Sequence
  Description of Artificial Sequence: Synthetic oligonucleotide
cucaauggaucccggccgc

SEQ ID NO: 2711873 - RNA, 19 nt, Artificial Sequence
  Description of Artificial Sequence: Synthetic oligonucleotide
uucggugcagcgugaggcc

SEQ ID NO: 2711874 - RNA, 19 nt, Artificial Sequence
  Description of Artificial Sequence: Synthetic oligonucleotide
uguggauucggugcagcgu

SEQ ID NO: 2711875 - RNA, 19 nt, Artificial Sequence
  Description of Artificial Sequence: Synthetic oligonucleotide
uuauauucauggggucuca

SEQ ID NO: 2711876 - RNA, 19 nt, Artificial Sequence
  Description of Artificial Sequence: Synthetic oligonucleotide
guagcaggccagcauggug

SEQ ID NO: 2711877 - RNA, 19 nt, Artificial Sequence
  Description of Artificial Sequence: Synthetic oligonucleotide
aagacagcuuucucuuguu

SEQ ID NO: 2711878 - RNA, 19 nt, Artificial Sequence
  Description of Artificial Sequence: Synthetic oligonucleotide
auccaagcccugcuccuuc

SEQ ID NO: 2711879 - RNA, 19 nt, Artificial Sequence
  Description of Artificial Sequence: Synthetic oligonucleotide
ggaacugguagugcggcgg

SEQ ID NO: 2711880 - RNA, 19 nt, Artificial Sequence
  Description of Artificial Sequence: Synthetic oligonucleotide
gauguggauucggugcagc

SEQ ID NO: 2711881 - RNA, 19 nt, Artificial Sequence
  Description of Artificial Sequence: Synthetic oligonucleotide
caaaugaguucuuauuagu

SEQ ID NO: 2711882 - RNA, 19 nt, Artificial Sequence
  Description of Artificial Sequence: Synthetic oligonucleotide
auuggucgaucuguuccgg

SEQ ID NO: 2711883 - RNA, 19 nt, Artificial Sequence
  Description of Artificial Sequence: Synthetic oligonucleotide
guccaauaggaggcaaagg

SEQ ID NO: 2711884 - RNA, 19 nt, Artificial Sequence
  Description of Artificial Sequence: Synthetic oligonucleotide
cacuuuccauccucccugg

SEQ ID NO: 2711885 - RNA, 19 nt, Artificial Sequence
  Description of Artificial Sequence: Synthetic oligonucleotide
gggaaauacuacuucuguc

SEQ ID NO: 2711886 - RNA, 19 nt, Artificial Sequence
  Description of Artificial Sequence: Synthetic oligonucleotide
cuguguaacgccaugcagu

SEQ ID NO: 2711887 - RNA, 19 nt, Artificial Sequence
  Description of Artificial Sequence: Synthetic oligonucleotide
gcuguguaacgccaugcag

SEQ ID NO: 2711888 - RNA, 19 nt, Artificial Sequence
  Description of Artificial Sequence: Synthetic oligonucleotide
ugcagcgugaggcccggac

SEQ ID NO: 2711889 - RNA, 19 nt, Artificial Sequence
  Description of Artificial Sequence: Synthetic oligonucleotide
gaacugaaagacagcuuuc

SEQ ID NO: 2711890 - RNA, 19 nt, Artificial Sequence
  Description of Artificial Sequence: Synthetic oligonucleotide
caggccagcauggugccgg

SEQ ID NO: 2711891 - RNA, 19 nt, Artificial Sequence
  Description of Artificial Sequence: Synthetic oligonucleotide
caugcagugcaaaugaguu

SEQ ID NO: 2711892 - RNA, 19 nt, Artificial Sequence
  Description of Artificial Sequence: Synthetic oligonucleotide
aacugguagugcggcgggg

SEQ ID NO: 2711893 - RNA, 19 nt, Artificial Sequence
  Description of Artificial Sequence: Synthetic oligonucleotide
cugguagaacugaaagaca

SEQ ID NO: 2711894 - RNA, 19 nt, Artificial Sequence
  Description of Artificial Sequence: Synthetic oligonucleotide
uggcuucggggaaauacua

SEQ ID NO: 2711895 - RNA, 19 nt, Artificial Sequence
  Description of Artificial Sequence: Synthetic oligonucleotide
cagcgugaggcccggacag

SEQ ID NO: 2711896 - RNA, 19 nt, Artificial Sequence
  Description of Artificial Sequence: Synthetic oligonucleotide
ucgaucuguuccggggccg

SEQ ID NO: 2711897 - RNA, 19 nt, Artificial Sequence
  Description of Artificial Sequence: Synthetic oligonucleotide
caagcccugcuccuucacc

SEQ ID NO: 2711898 - RNA, 19 nt, Artificial Sequence
  Description of Artificial Sequence: Synthetic oligonucleotide
cauccccugcauccaagcc

SEQ ID NO: 2711899 - RNA, 19 nt, Artificial Sequence
  Description of Artificial Sequence: Synthetic oligonucleotide
ucuuguucauaggucucaa

SEQ ID NO: 2711900 - RNA, 19 nt, Artificial Sequence
  Description of Artificial Sequence: Synthetic oligonucleotide
gugccgcacgcccaggucc

SEQ ID NO: 2711901 - RNA, 19 nt, Artificial Sequence
  Description of Artificial Sequence: Synthetic oligonucleotide
gacagccucuccgcgggcg

SEQ ID NO: 2711902 - RNA, 19 nt, Artificial Sequence
  Description of Artificial Sequence: Synthetic oligonucleotide
auggcuucggggaaauacu

SEQ ID NO: 2711903 - RNA, 19 nt, Artificial Sequence
  Description of Artificial Sequence: Synthetic oligonucleotide
gucagggauguggauucgg

SEQ ID NO: 2711904 - RNA, 19 nt, Artificial Sequence
  Description of Artificial Sequence: Synthetic oligonucleotide
aggcccggacagcugucgc

SEQ ID NO: 2711905 - RNA, 19 nt, Artificial Sequence
  Description of Artificial Sequence: Synthetic oligonucleotide
agugcggcggggugccgcg

SEQ ID NO: 2711906 - RNA, 19 nt, Artificial Sequence
  Description of Artificial Sequence: Synthetic oligonucleotide
cuucacaaauuggucgauc

SEQ ID NO: 2711907 - RNA, 19 nt, Artificial Sequence
  Description of Artificial Sequence: Synthetic oligonucleotide
ccugucaaucagguuaugg

SEQ ID NO: 2711908 - RNA, 19 nt, Artificial Sequence
  Description of Artificial Sequence: Synthetic oligonucleotide
agguagcaggccagcaugg

SEQ ID NO: 2711909 - RNA, 19 nt, Artificial Sequence
  Description of Artificial Sequence: Synthetic oligonucleotide
ccacgaucuucacaaauug

SEQ ID NO: 2711910 - RNA, 19 nt, Artificial Sequence
  Description of Artificial Sequence: Synthetic oligonucleotide
cacaaauuggucgaucugu

SEQ ID NO: 2711911 - RNA, 19 nt, Artificial Sequence
  Description of Artificial Sequence: Synthetic oligonucleotide
caaucagguuauggcuucg

SEQ ID NO: 2711912 - RNA, 19 nt, Artificial Sequence
  Description of Artificial Sequence: Synthetic oligonucleotide
ccgaaucucagcaauggca

SEQ ID NO: 2711913 - RNA, 19 nt, Artificial Sequence
  Description of Artificial Sequence: Synthetic oligonucleotide
uggauucggugcagcguga

SEQ ID NO: 2711914 - RNA, 19 nt, Artificial Sequence
  Description of Artificial Sequence: Synthetic oligonucleotide
aucuguuccggggccggcg

SEQ ID NO: 2711915 - RNA, 19 nt, Artificial Sequence
  Description of Artificial Sequence: Synthetic oligonucleotide
acgccaugcagugcaaaug

SEQ ID NO: 2711916 - RNA, 19 nt, Artificial Sequence
  Description of Artificial Sequence: Synthetic oligonucleotide
cuuauuuuguucgcuggua

SEQ ID NO: 2711917 - RNA, 19 nt, Artificial Sequence
  Description of Artificial Sequence: Synthetic oligonucleotide
gcuguagaacuuaagucca

SEQ ID NO: 2711918 - RNA, 19 nt, Artificial Sequence
  Description of Artificial Sequence: Synthetic oligonucleotide
cacagugcacuccgacagc

SEQ ID NO: 2711919 - RNA, 19 nt, Artificial Sequence
  Description of Artificial Sequence: Synthetic oligonucleotide
ugguagugcggcggggugc

SEQ ID NO: 2711920 - RNA, 19 nt, Artificial Sequence
  Description of Artificial Sequence: Synthetic oligonucleotide
ccacuuuccauccucccug

SEQ ID NO: 2711921 - RNA, 19 nt, Artificial Sequence
  Description of Artificial Sequence: Synthetic oligonucleotide
acaaauuggucgaucuguu

SEQ ID NO: 2711922 - RNA, 19 nt, Artificial Sequence
  Description of Artificial Sequence: Synthetic oligonucleotide
ucuguccaauaggaggcaa

SEQ ID NO: 2711923 - RNA, 19 nt, Artificial Sequence
  Description of Artificial Sequence: Synthetic oligonucleotide
ucuucacaaauuggucgau

SEQ ID NO: 2711924 - RNA, 19 nt, Artificial Sequence
  Description of Artificial Sequence: Synthetic oligonucleotide
uccaagcccugcuccuuca

SEQ ID NO: 2711925 - RNA, 19 nt, Artificial Sequence
  Description of Artificial Sequence: Synthetic oligonucleotide
gugcuguguaacgccaugc

SEQ ID NO: 2711926 - RNA, 19 nt, Artificial Sequence
  Description of Artificial Sequence: Synthetic oligonucleotide
gcggccaaagcccagggca

SEQ ID NO: 2711927 - RNA, 19 nt, Artificial Sequence
  Description of Artificial Sequence: Synthetic oligonucleotide
ccaauaggaggcaaaggga

SEQ ID NO: 2711928 - RNA, 19 nt, Artificial Sequence
  Description of Artificial Sequence: Synthetic oligonucleotide
caggcgccgaaucucagca

SEQ ID NO: 2711929 - RNA, 19 nt, Artificial Sequence
  Description of Artificial Sequence: Synthetic oligonucleotide
agguuauggcuucggggaa

SEQ ID NO: 2711930 - RNA, 19 nt, Artificial Sequence
  Description of Artificial Sequence: Synthetic oligonucleotide
ucuccgcgggcguuggccu

SEQ ID NO: 2711931 - RNA, 19 nt, Artificial Sequence
  Description of Artificial Sequence: Synthetic oligonucleotide
gaggcccggacagcugucg

SEQ ID NO: 2711932 - RNA, 19 nt, Artificial Sequence
  Description of Artificial Sequence: Synthetic oligonucleotide
cguuagggacaccaggugc

SEQ ID NO: 2711933 - RNA, 19 nt, Artificial Sequence
  Description of Artificial Sequence: Synthetic oligonucleotide
ggucucaauggaucccggc

SEQ ID NO: 2711934 - RNA, 19 nt, Artificial Sequence
  Description of Artificial Sequence: Synthetic oligonucleotide
acugguagugcggcggggu

SEQ ID NO: 2711935 - RNA, 19 nt, Artificial Sequence
  Description of Artificial Sequence: Synthetic oligonucleotide
ugccgcacgcccaggucca

SEQ ID NO: 2711936 - RNA, 19 nt, Artificial Sequence
  Description of Artificial Sequence: Synthetic oligonucleotide
cagcaauggcauccccugc

SEQ ID NO: 2711937 - RNA, 19 nt, Artificial Sequence
  Description of Artificial Sequence: Synthetic oligonucleotide
agucagggauguggauucg

SEQ ID NO: 2711938 - RNA, 19 nt, Artificial Sequence
  Description of Artificial Sequence: Synthetic oligonucleotide
cauuuuccacaagcagcag

SEQ ID NO: 2711939 - RNA, 19 nt, Artificial Sequence
  Description of Artificial Sequence: Synthetic oligonucleotide
ggagcugucgaguuccuua

SEQ ID NO: 2711940 - RNA, 19 nt, Artificial Sequence
  Description of Artificial Sequence: Synthetic oligonucleotide
ucggugcagcgugaggccc

SEQ ID NO: 2711941 - RNA, 19 nt, Artificial Sequence
  Description of Artificial Sequence: Synthetic oligonucleotide
caauggaucccggccgcag

SEQ ID NO: 2711942 - RNA, 19 nt, Artificial Sequence
  Description of Artificial Sequence: Synthetic oligonucleotide
auacuacuucuguccaaua

SEQ ID NO: 2711943 - RNA, 19 nt, Artificial Sequence
  Description of Artificial Sequence: Synthetic oligonucleotide
cuccgacagccucuccgcg

SEQ ID NO: 2711944 - RNA, 19 nt, Artificial Sequence
  Description of Artificial Sequence: Synthetic oligonucleotide
guagaacuuaaguccacuu

SEQ ID NO: 2711945 - RNA, 19 nt, Artificial Sequence
  Description of Artificial Sequence: Synthetic oligonucleotide
auccugucaaucagguuau

SEQ ID NO: 2711946 - RNA, 19 nt, Artificial Sequence
  Description of Artificial Sequence: Synthetic oligonucleotide
agcgugaggcccggacagc

SEQ ID NO: 2711947 - RNA, 19 nt, Artificial Sequence
  Description of Artificial Sequence: Synthetic oligonucleotide
gugcggccaaagcccaggg

SEQ ID NO: 2711948 - RNA, 19 nt, Artificial Sequence
  Description of Artificial Sequence: Synthetic oligonucleotide
ucaauggaucccggccgca

SEQ ID NO: 2711949 - RNA, 19 nt, Artificial Sequence
  Description of Artificial Sequence: Synthetic oligonucleotide
gggauguggauucggugca

SEQ ID NO: 2711950 - RNA, 19 nt, Artificial Sequence
  Description of Artificial Sequence: Synthetic oligonucleotide
ggggaaauacuacuucugu

SEQ ID NO: 2711951 - RNA, 19 nt, Artificial Sequence
  Description of Artificial Sequence: Synthetic oligonucleotide
agggagcugaaggcuguag

SEQ ID NO: 2711952 - RNA, 19 nt, Artificial Sequence
  Description of Artificial Sequence: Synthetic oligonucleotide
cugguagugcggcggggug

SEQ ID NO: 2711953 - RNA, 19 nt, Artificial Sequence
  Description of Artificial Sequence: Synthetic oligonucleotide
uuccauccucccuggccac

SEQ ID NO: 2711954 - RNA, 19 nt, Artificial Sequence
  Description of Artificial Sequence: Synthetic oligonucleotide
ggacagcugucgcugugag

SEQ ID NO: 2711955 - RNA, 19 nt, Artificial Sequence
  Description of Artificial Sequence: Synthetic oligonucleotide
uccgcgggcguuggccucg

SEQ ID NO: 2711956 - RNA, 19 nt, Artificial Sequence
  Description of Artificial Sequence: Synthetic oligonucleotide
ggugcggccaaagcccagg

SEQ ID NO: 2711957 - RNA, 19 nt, Artificial Sequence
  Description of Artificial Sequence: Synthetic oligonucleotide
cuguccaauaggaggcaaa

SEQ ID NO: 2711958 - RNA, 19 nt, Artificial Sequence
  Description of Artificial Sequence: Synthetic oligonucleotide
gccgaaucucagcaauggc

SEQ ID NO: 2711959 - RNA, 19 nt, Artificial Sequence
  Description of Artificial Sequence: Synthetic oligonucleotide
ggcacagugcacuccgaca

SEQ ID NO: 2711960 - RNA, 19 nt, Artificial Sequence
  Description of Artificial Sequence: Synthetic oligonucleotide
cuucaccagguagcaggcc

SEQ ID NO: 2711961 - RNA, 19 nt, Artificial Sequence
  Description of Artificial Sequence: Synthetic oligonucleotide
aggucucaauggaucccgg

SEQ ID NO: 2711962 - RNA, 19 nt, Artificial Sequence
  Description of Artificial Sequence: Synthetic oligonucleotide
ugcacuccgacagccucuc

SEQ ID NO: 2711963 - RNA, 19 nt, Artificial Sequence
  Description of Artificial Sequence: Synthetic oligonucleotide
cugcauccaagcccugcuc

SEQ ID NO: 2711964 - RNA, 19 nt, Artificial Sequence
  Description of Artificial Sequence: Synthetic oligonucleotide
gcuucggggaaauacuacu

SEQ ID NO: 2711965 - RNA, 19 nt, Artificial Sequence
  Description of Artificial Sequence: Synthetic oligonucleotide
cucagccauccugucaauc

SEQ ID NO: 2711966 - RNA, 19 nt, Artificial Sequence
  Description of Artificial Sequence: Synthetic oligonucleotide
acagccucuccgcgggcgu

SEQ ID NO: 2711967 - RNA, 19 nt, Artificial Sequence
  Description of Artificial Sequence: Synthetic oligonucleotide
uaacgccaugcagugcaaa

SEQ ID NO: 2711968 - RNA, 19 nt, Artificial Sequence
  Description of Artificial Sequence: Synthetic oligonucleotide
cauggugccggugcggcca

SEQ ID NO: 2711969 - RNA, 19 nt, Artificial Sequence
  Description of Artificial Sequence: Synthetic oligonucleotide
gcauccccugcauccaagc

SEQ ID NO: 2711970 - RNA, 19 nt, Artificial Sequence
  Description of Artificial Sequence: Synthetic oligonucleotide
cucguccacgaucuucaca

SEQ ID NO: 2711971 - RNA, 19 nt, Artificial Sequence
  Description of Artificial Sequence: Synthetic oligonucleotide
uagggacaccaggugccgc

SEQ ID NO: 2711972 - RNA, 19 nt, Artificial Sequence
  Description of Artificial Sequence: Synthetic oligonucleotide
uagugcggcggggugccgc

SEQ ID NO: 2711973 - RNA, 19 nt, Artificial Sequence
  Description of Artificial Sequence: Synthetic oligonucleotide
gagcugucgaguuccuuau

SEQ ID NO: 2711974 - RNA, 19 nt, Artificial Sequence
  Description of Artificial Sequence: Synthetic oligonucleotide
gucaaucagguuauggcuu

SEQ ID NO: 2711975 - RNA, 19 nt, Artificial Sequence
  Description of Artificial Sequence: Synthetic oligonucleotide
gguagugcggcggggugcc

SEQ ID NO: 2711976 - RNA, 19 nt, Artificial Sequence
  Description of Artificial Sequence: Synthetic oligonucleotide
ucauggggucucagccauc

SEQ ID NO: 2711977 - RNA, 19 nt, Artificial Sequence
  Description of Artificial Sequence: Synthetic oligonucleotide
gaucuguuccggggccggc

SEQ ID NO: 2711978 - RNA, 19 nt, Artificial Sequence
  Description of Artificial Sequence: Synthetic oligonucleotide
gcgggcaaaagucagggau

SEQ ID NO: 2711979 - RNA, 19 nt, Artificial Sequence
  Description of Artificial Sequence: Synthetic oligonucleotide
gugccggugcggccaaagc

SEQ ID NO: 2711980 - RNA, 19 nt, Artificial Sequence
  Description of Artificial Sequence: Synthetic oligonucleotide
ggcguuggccucguccacg

SEQ ID NO: 2711981 - RNA, 19 nt, Artificial Sequence
  Description of Artificial Sequence: Synthetic oligonucleotide
accagguagcaggccagca

SEQ ID NO: 2711982 - RNA, 19 nt, Artificial Sequence
  Description of Artificial Sequence: Synthetic oligonucleotide
ucucagccauccugucaau

SEQ ID NO: 2711983 - RNA, 19 nt, Artificial Sequence
  Description of Artificial Sequence: Synthetic oligonucleotide
cggggaaauacuacuucug

SEQ ID NO: 2711984 - RNA, 19 nt, Artificial Sequence
  Description of Artificial Sequence: Synthetic oligonucleotide
gcgggcguuggccucgucc

SEQ ID NO: 2711985 - RNA, 19 nt, Artificial Sequence
  Description of Artificial Sequence: Synthetic oligonucleotide
ggacaccaggugccgcacg

SEQ ID NO: 2711986 - RNA, 19 nt, Artificial Sequence
  Description of Artificial Sequence: Synthetic oligonucleotide
cugaaggcuguagaacuua

SEQ ID NO: 2711987 - RNA, 19 nt, Artificial Sequence
  Description of Artificial Sequence: Synthetic oligonucleotide
uccugucaaucagguuaug

SEQ ID NO: 2711988 - RNA, 19 nt, Artificial Sequence
  Description of Artificial Sequence: Synthetic oligonucleotide
cuucggggaaauacuacuu

SEQ ID NO: 2711989 - RNA, 19 nt, Artificial Sequence
  Description of Artificial Sequence: Synthetic oligonucleotide
guguaacgccaugcagugc

SEQ ID NO: 2711990 - RNA, 19 nt, Artificial Sequence
  Description of Artificial Sequence: Synthetic oligonucleotide
gccgcgcuccguuagggac

SEQ ID NO: 2711991 - RNA, 19 nt, Artificial Sequence
  Description of Artificial Sequence: Synthetic oligonucleotide
cagcauggugccggugcgg

SEQ ID NO: 2711992 - RNA, 19 nt, Artificial Sequence
  Description of Artificial Sequence: Synthetic oligonucleotide
cuguuccggggccggcggg

SEQ ID NO: 2711993 - RNA, 19 nt, Artificial Sequence
  Description of Artificial Sequence: Synthetic oligonucleotide
ggauucggugcagcgugag

SEQ ID NO: 2711994 - RNA, 19 nt, Artificial Sequence
  Description of Artificial Sequence: Synthetic oligonucleotide
caccagguagcaggccagc

SEQ ID NO: 2711995 - RNA, 19 nt, Artificial Sequence
  Description of Artificial Sequence: Synthetic oligonucleotide
ggagugcuguguaacgcca

SEQ ID NO: 2711996 - RNA, 19 nt, Artificial Sequence
  Description of Artificial Sequence: Synthetic oligonucleotide
gugaggcccggacagcugu

SEQ ID NO: 2711997 - RNA, 19 nt, Artificial Sequence
  Description of Artificial Sequence: Synthetic oligonucleotide
ggaucccggccgcaggcgc

SEQ ID NO: 2711998 - RNA, 19 nt, Artificial Sequence
  Description of Artificial Sequence: Synthetic oligonucleotide
ggcuucggggaaauacuac

SEQ ID NO: 2711999 - RNA, 19 nt, Artificial Sequence
  Description of Artificial Sequence: Synthetic oligonucleotide
gggcacagugcacuccgac

SEQ ID NO: 2712000 - RNA, 19 nt, Artificial Sequence
  Description of Artificial Sequence: Synthetic oligonucleotide
aucccggccgcaggcgccg

SEQ ID NO: 2712001 - RNA, 19 nt, Artificial Sequence
  Description of Artificial Sequence: Synthetic oligonucleotide
ggauguggauucggugcag

SEQ ID NO: 2712002 - RNA, 19 nt, Artificial Sequence
  Description of Artificial Sequence: Synthetic oligonucleotide
agcccagggcacagugcac

SEQ ID NO: 2712003 - RNA, 19 nt, Artificial Sequence
  Description of Artificial Sequence: Synthetic oligonucleotide
cgccgaaucucagcaaugg

SEQ ID NO: 2712004 - RNA, 19 nt, Artificial Sequence
  Description of Artificial Sequence: Synthetic oligonucleotide
aagggagcugaaggcugua

SEQ ID NO: 2712005 - RNA, 19 nt, Artificial Sequence
  Description of Artificial Sequence: Synthetic oligonucleotide
agcugucgaguuccuuauu

SEQ ID NO: 2712006 - RNA, 19 nt, Artificial Sequence
  Description of Artificial Sequence: Synthetic oligonucleotide
ccguuagggacaccaggug

SEQ ID NO: 2712007 - RNA, 19 nt, Artificial Sequence
  Description of Artificial Sequence: Synthetic oligonucleotide
gcagcgugaggcccggaca

SEQ ID NO: 2712008 - RNA, 19 nt, Artificial Sequence
  Description of Artificial Sequence: Synthetic oligonucleotide
gcugucgaguuccuuauuu

SEQ ID NO: 2712009 - RNA, 19 nt, Artificial Sequence
  Description of Artificial Sequence: Synthetic oligonucleotide
guucgcugguagaacugaa

SEQ ID NO: 2712010 - RNA, 19 nt, Artificial Sequence
  Description of Artificial Sequence: Synthetic oligonucleotide
ccggcgggcaaaagucagg

SEQ ID NO: 2712011 - RNA, 19 nt, Artificial Sequence
  Description of Artificial Sequence: Synthetic oligonucleotide
cugucgaguuccuuauuuu

SEQ ID NO: 2712012 - RNA, 19 nt, Artificial Sequence
  Description of Artificial Sequence: Synthetic oligonucleotide
uuauggcuucggggaaaua

SEQ ID NO: 2712013 - RNA, 19 nt, Artificial Sequence
  Description of Artificial Sequence: Synthetic oligonucleotide
ggugccggugcggccaaag

SEQ ID NO: 2712014 - RNA, 19 nt, Artificial Sequence
  Description of Artificial Sequence: Synthetic oligonucleotide
aggcgccgaaucucagcaa

SEQ ID NO: 2712015 - RNA, 19 nt, Artificial Sequence
  Description of Artificial Sequence: Synthetic oligonucleotide
gguuauggcuucggggaaa

SEQ ID NO: 2712016 - RNA, 19 nt, Artificial Sequence
  Description of Artificial Sequence: Synthetic oligonucleotide
ggugcagcgugaggcccgg

SEQ ID NO: 2712017 - RNA, 19 nt, Artificial Sequence
  Description of Artificial Sequence: Synthetic oligonucleotide
gggccggcgggcaaaaguc

SEQ ID NO: 2712018 - RNA, 19 nt, Artificial Sequence
  Description of Artificial Sequence: Synthetic oligonucleotide
cagugcaaaugaguucuua

SEQ ID NO: 2712019 - RNA, 19 nt, Artificial Sequence
  Description of Artificial Sequence: Synthetic oligonucleotide
cgccaugcagugcaaauga

SEQ ID NO: 2712020 - RNA, 19 nt, Artificial Sequence
  Description of Artificial Sequence: Synthetic oligonucleotide
gccggcgggcaaaagucag

SEQ ID NO: 2712021 - RNA, 19 nt, Artificial Sequence
  Description of Artificial Sequence: Synthetic oligonucleotide
gcuccguuagggacaccag

SEQ ID NO: 2712022 - RNA, 19 nt, Artificial Sequence
  Description of Artificial Sequence: Synthetic oligonucleotide
cggcgggcaaaagucaggg

SEQ ID NO: 2712023 - RNA, 19 nt, Artificial Sequence
  Description of Artificial Sequence: Synthetic oligonucleotide
ggggccgcgcuccguuagg

SEQ ID NO: 2712024 - RNA, 19 nt, Artificial Sequence
  Description of Artificial Sequence: Synthetic oligonucleotide
ggugccgcacgcccagguc

SEQ ID NO: 2712025 - RNA, 19 nt, Artificial Sequence
  Description of Artificial Sequence: Synthetic oligonucleotide
ggcgccgaaucucagcaau

SEQ ID NO: 2712026 - RNA, 19 nt, Artificial Sequence
  Description of Artificial Sequence: Synthetic oligonucleotide
guaacgccaugcagugcaa

SEQ ID NO: 2712027 - RNA, 19 nt, Artificial Sequence
  Description of Artificial Sequence: Synthetic oligonucleotide
auggugccggugcggccaa

SEQ ID NO: 2712028 - RNA, 19 nt, Artificial Sequence
  Description of Artificial Sequence: Synthetic oligonucleotide
ggcgggcaaaagucaggga

SEQ ID NO: 2712029 - RNA, 19 nt, Artificial Sequence
  Description of Artificial Sequence: Synthetic oligonucleotide
cuccgcgggcguuggccuc

SEQ ID NO: 2712030 - RNA, 19 nt, Artificial Sequence
  Description of Artificial Sequence: Synthetic oligonucleotide
gcguuggccucguccacga

SEQ ID NO: 2712031 - RNA, 19 nt, Artificial Sequence
  Description of Artificial Sequence: Synthetic oligonucleotide
guagugcggcggggugccg

SEQ ID NO: 2712032 - RNA, 19 nt, Artificial Sequence
  Description of Artificial Sequence: Synthetic oligonucleotide
gcauccaagcccugcuccu

SEQ ID NO: 2712033 - RNA, 19 nt, Artificial Sequence
  Description of Artificial Sequence: Synthetic oligonucleotide
gcgccgaaucucagcaaug

SEQ ID NO: 2712034 - RNA, 19 nt, Artificial Sequence
  Description of Artificial Sequence: Synthetic oligonucleotide
ccagguccagcaggaacug

SEQ ID NO: 2712035 - RNA, 19 nt, Artificial Sequence
  Description of Artificial Sequence: Synthetic oligonucleotide
cggccaaagcccagggcac

SEQ ID NO: 2712036 - RNA, 19 nt, Artificial Sequence
  Description of Artificial Sequence: Synthetic oligonucleotide
gcacgcccagguccagcag

SEQ ID NO: 2712037 - RNA, 19 nt, Artificial Sequence
  Description of Artificial Sequence: Synthetic oligonucleotide
ggggccggcgggcaaaagu

SEQ ID NO: 2712038 - RNA, 19 nt, Artificial Sequence
  Description of Artificial Sequence: Synthetic oligonucleotide
ccaagcccugcuccuucac

SEQ ID NO: 2712039 - RNA, 19 nt, Artificial Sequence
  Description of Artificial Sequence: Synthetic oligonucleotide
caggugccgcacgcccagg

SEQ ID NO: 2712040 - RNA, 19 nt, Artificial Sequence
  Description of Artificial Sequence: Synthetic oligonucleotide
cgaucuguuccggggccgg

SEQ ID NO: 2712041 - RNA, 19 nt, Artificial Sequence
  Description of Artificial Sequence: Synthetic oligonucleotide
cagugcacuccgacagccu

SEQ ID NO: 2712042 - RNA, 19 nt, Artificial Sequence
  Description of Artificial Sequence: Synthetic oligonucleotide
ggccaaagcccagggcaca

SEQ ID NO: 2712043 - RNA, 19 nt, Artificial Sequence
  Description of Artificial Sequence: Synthetic oligonucleotide
gggacaccaggugccgcac

SEQ ID NO: 2712044 - RNA, 19 nt, Artificial Sequence
  Description of Artificial Sequence: Synthetic oligonucleotide
ccggacagcugucgcugug

SEQ ID NO: 2712045 - RNA, 19 nt, Artificial Sequence
  Description of Artificial Sequence: Synthetic oligonucleotide
gggcguuggccucguccac

SEQ ID NO: 2712046 - RNA, 19 nt, Artificial Sequence
  Description of Artificial Sequence: Synthetic oligonucleotide
cgggcguuggccucgucca

SEQ ID NO: 2712047 - RNA, 19 nt, Artificial Sequence
  Description of Artificial Sequence: Synthetic oligonucleotide
cgcuccguuagggacacca

SEQ ID NO: 2712048 - RNA, 19 nt, Artificial Sequence
  Description of Artificial Sequence: Synthetic oligonucleotide
ggccggcgggcaaaaguca

SEQ ID NO: 2712049 - RNA, 19 nt, Artificial Sequence
  Description of Artificial Sequence: Synthetic oligonucleotide
gguagcaggccagcauggu

SEQ ID NO: 2712050 - RNA, 19 nt, Artificial Sequence
  Description of Artificial Sequence: Synthetic oligonucleotide
ggccgcgcuccguuaggga

SEQ ID NO: 2712051 - RNA, 19 nt, Artificial Sequence
  Description of Artificial Sequence: Synthetic oligonucleotide
gccucuccgcgggcguugg

SEQ ID NO: 2712052 - RNA, 19 nt, Artificial Sequence
  Description of Artificial Sequence: Synthetic oligonucleotide
ccgcgcuccguuagggaca

SEQ ID NO: 2712053 - RNA, 19 nt, Artificial Sequence
  Description of Artificial Sequence: Synthetic oligonucleotide
gugcggcggggugccgcgg

SEQ ID NO: 2712054 - RNA, 19 nt, Artificial Sequence
  Description of Artificial Sequence: Synthetic oligonucleotide
ggcccggacagcugucgcu

SEQ ID NO: 2712055 - RNA, 19 nt, Artificial Sequence
  Description of Artificial Sequence: Synthetic oligonucleotide
gcugaaggcuguagaacuu

SEQ ID NO: 2712056 - RNA, 19 nt, Artificial Sequence
  Description of Artificial Sequence: Synthetic oligonucleotide
ccagguagcaggccagcau

SEQ ID NO: 2712057 - RNA, 19 nt, Artificial Sequence
  Description of Artificial Sequence: Synthetic oligonucleotide
ggccagcauggugccggug

SEQ ID NO: 2712058 - RNA, 19 nt, Artificial Sequence
  Description of Artificial Sequence: Synthetic oligonucleotide
cgcgcuccguuagggacac

SEQ ID NO: 2712059 - RNA, 19 nt, Artificial Sequence
  Description of Artificial Sequence: Synthetic oligonucleotide
uggugccggugcggccaaa

SEQ ID NO: 2712060 - RNA, 19 nt, Artificial Sequence
  Description of Artificial Sequence: Synthetic oligonucleotide
ccgcacgcccagguccagc

SEQ ID NO: 2712061 - RNA, 19 nt, Artificial Sequence
  Description of Artificial Sequence: Synthetic oligonucleotide
ccucuccgcgggcguuggc

SEQ ID NO: 2712062 - RNA, 19 nt, Artificial Sequence
  Description of Artificial Sequence: Synthetic oligonucleotide
cggugcggccaaagcccag

SEQ ID NO: 2712063 - RNA, 19 nt, Artificial Sequence
  Description of Artificial Sequence: Synthetic oligonucleotide
cgacagccucuccgcgggc

SEQ ID NO: 2712064 - RNA, 19 nt, Artificial Sequence
  Description of Artificial Sequence: Synthetic oligonucleotide
gcggcggggugccgcggca

SEQ ID NO: 2712065 - RNA, 19 nt, Artificial Sequence
  Description of Artificial Sequence: Synthetic oligonucleotide
gccgcacgcccagguccag

SEQ ID NO: 2712066 - RNA, 19 nt, Artificial Sequence
  Description of Artificial Sequence: Synthetic oligonucleotide
ccauccugucaaucagguu

SEQ ID NO: 2712067 - RNA, 19 nt, Artificial Sequence
  Description of Artificial Sequence: Synthetic oligonucleotide
cggccgcaggcgccgaauc

SEQ ID NO: 2712068 - RNA, 19 nt, Artificial Sequence
  Description of Artificial Sequence: Synthetic oligonucleotide
gugcagcgugaggcccgga

SEQ ID NO: 2712069 - RNA, 19 nt, Artificial Sequence
  Description of Artificial Sequence: Synthetic oligonucleotide
ccaaagcccagggcacagu

SEQ ID NO: 2712070 - RNA, 19 nt, Artificial Sequence
  Description of Artificial Sequence: Synthetic oligonucleotide
cccggacagcugucgcugu

SEQ ID NO: 2712071 - RNA, 19 nt, Artificial Sequence
  Description of Artificial Sequence: Synthetic oligonucleotide
cagccucuccgcgggcguu

SEQ ID NO: 2712072 - RNA, 19 nt, Artificial Sequence
  Description of Artificial Sequence: Synthetic oligonucleotide
gcgcuccguuagggacacc

SEQ ID NO: 2712073 - RNA, 19 nt, Artificial Sequence
  Description of Artificial Sequence: Synthetic oligonucleotide
cggggccggcgggcaaaag

SEQ ID NO: 2712074 - RNA, 19 nt, Artificial Sequence
  Description of Artificial Sequence: Synthetic oligonucleotide
cccggccgcaggcgccgaa

SEQ ID NO: 2712075 - RNA, 19 nt, Artificial Sequence
  Description of Artificial Sequence: Synthetic oligonucleotide
ccggggccggcgggcaaaa

SEQ ID NO: 2712076 - RNA, 19 nt, Artificial Sequence
  Description of Artificial Sequence: Synthetic oligonucleotide
ccggccgcaggcgccgaau

SEQ ID NO: 2712077 - RNA, 19 nt, Artificial Sequence
  Description of Artificial Sequence: Synthetic oligonucleotide
cgcgggcguuggccucguc

SEQ ID NO: 2712078 - RNA, 19 nt, Artificial Sequence
  Description of Artificial Sequence: Synthetic oligonucleotide
ccgcgggcguuggccucgu

SEQ ID NO: 2712079 - RNA, 19 nt, Artificial Sequence
  Description of Artificial Sequence: Synthetic oligonucleotide
acaaagaugcgccugaccc

SEQ ID NO: 2712080 - RNA, 19 nt, Artificial Sequence
  Description of Artificial Sequence: Synthetic oligonucleotide
ucauacauaggccaggaag

SEQ ID NO: 2712081 - RNA, 19 nt, Artificial Sequence
  Description of Artificial Sequence: Synthetic oligonucleotide
cauacauaggccaggaagg

SEQ ID NO: 2712082 - RNA, 19 nt, Artificial Sequence
  Description of Artificial Sequence: Synthetic oligonucleotide
uuucuccgggcucagaugg

SEQ ID NO: 2712083 - RNA, 19 nt, Artificial Sequence
  Description of Artificial Sequence: Synthetic oligonucleotide
aagacaucuucauagccug

SEQ ID NO: 2712084 - RNA, 19 nt, Artificial Sequence
  Description of Artificial Sequence: Synthetic oligonucleotide
aaggaguuaggucucagcu

SEQ ID NO: 2712085 - RNA, 19 nt, Artificial Sequence
  Description of Artificial Sequence: Synthetic oligonucleotide
ucuugcauuagccucguga

SEQ ID NO: 2712086 - RNA, 19 nt, Artificial Sequence
  Description of Artificial Sequence: Synthetic oligonucleotide
ugaaugggaucccaaagug

SEQ ID NO: 2712087 - RNA, 19 nt, Artificial Sequence
  Description of Artificial Sequence: Synthetic oligonucleotide
gagaaagagguacuggggc

SEQ ID NO: 2712088 - RNA, 19 nt, Artificial Sequence
  Description of Artificial Sequence: Synthetic oligonucleotide
aaagaugcgccugacccac

SEQ ID NO: 2712089 - RNA, 19 nt, Artificial Sequence
  Description of Artificial Sequence: Synthetic oligonucleotide
gaacacgcugcccacaggg

SEQ ID NO: 2712090 - RNA, 19 nt, Artificial Sequence
  Description of Artificial Sequence: Synthetic oligonucleotide
aagagaaagacaucuucau

SEQ ID NO: 2712091 - RNA, 19 nt, Artificial Sequence
  Description of Artificial Sequence: Synthetic oligonucleotide
aaagacaucuucauagccu

SEQ ID NO: 2712092 - RNA, 19 nt, Artificial Sequence
  Description of Artificial Sequence: Synthetic oligonucleotide
agucaucauacauaggcca

SEQ ID NO: 2712093 - RNA, 19 nt, Artificial Sequence
  Description of Artificial Sequence: Synthetic oligonucleotide
aagucaucuggggagaaag

SEQ ID NO: 2712094 - RNA, 19 nt, Artificial Sequence
  Description of Artificial Sequence: Synthetic oligonucleotide
ugacacaguguccugccgg

SEQ ID NO: 2712095 - RNA, 19 nt, Artificial Sequence
  Description of Artificial Sequence: Synthetic oligonucleotide
ugcauuagccucgugaaug

SEQ ID NO: 2712096 - RNA, 19 nt, Artificial Sequence
  Description of Artificial Sequence: Synthetic oligonucleotide
uccugccggacaaagaugc

SEQ ID NO: 2712097 - RNA, 19 nt, Artificial Sequence
  Description of Artificial Sequence: Synthetic oligonucleotide
uugugcuucuucuggaugc

SEQ ID NO: 2712098 - RNA, 19 nt, Artificial Sequence
  Description of Artificial Sequence: Synthetic oligonucleotide
ucuggaugcccugagguag

SEQ ID NO: 2712099 - RNA, 19 nt, Artificial Sequence
  Description of Artificial Sequence: Synthetic oligonucleotide
ggaaggaugacacaguguc

SEQ ID NO: 2712100 - RNA, 19 nt, Artificial Sequence
  Description of Artificial Sequence: Synthetic oligonucleotide
gaugcccugagguagggac

SEQ ID NO: 2712101 - RNA, 19 nt, Artificial Sequence
  Description of Artificial Sequence: Synthetic oligonucleotide
agcggggucauccuugagg

SEQ ID NO: 2712102 - RNA, 19 nt, Artificial Sequence
  Description of Artificial Sequence: Synthetic oligonucleotide
agccucgugaaugggaucc

SEQ ID NO: 2712103 - RNA, 19 nt, Artificial Sequence
  Description of Artificial Sequence: Synthetic oligonucleotide
gaaugggaucccaaagugg

SEQ ID NO: 2712104 - RNA, 19 nt, Artificial Sequence
  Description of Artificial Sequence: Synthetic oligonucleotide
uguccugccggacaaagau

SEQ ID NO: 2712105 - RNA, 19 nt, Artificial Sequence
  Description of Artificial Sequence: Synthetic oligonucleotide
gggagaaagagguacuggg

SEQ ID NO: 2712106 - RNA, 19 nt, Artificial Sequence
  Description of Artificial Sequence: Synthetic oligonucleotide
gaugacacaguguccugcc

SEQ ID NO: 2712107 - RNA, 19 nt, Artificial Sequence
  Description of Artificial Sequence: Synthetic oligonucleotide
auagccugucacugggagc

SEQ ID NO: 2712108 - RNA, 19 nt, Artificial Sequence
  Description of Artificial Sequence: Synthetic oligonucleotide
gagguagggacccugcccc

SEQ ID NO: 2712109 - RNA, 19 nt, Artificial Sequence
  Description of Artificial Sequence: Synthetic oligonucleotide
ucaucauacauaggccagg

SEQ ID NO: 2712110 - RNA, 19 nt, Artificial Sequence
  Description of Artificial Sequence: Synthetic oligonucleotide
ugagguagggacccugccc

SEQ ID NO: 2712111 - RNA, 19 nt, Artificial Sequence
  Description of Artificial Sequence: Synthetic oligonucleotide
caagagaaagacaucuuca

SEQ ID NO: 2712112 - RNA, 19 nt, Artificial Sequence
  Description of Artificial Sequence: Synthetic oligonucleotide
uagccugucacugggagcc

SEQ ID NO: 2712113 - RNA, 19 nt, Artificial Sequence
  Description of Artificial Sequence: Synthetic oligonucleotide
cugaggucuugcauuagcc

SEQ ID NO: 2712114 - RNA, 19 nt, Artificial Sequence
  Description of Artificial Sequence: Synthetic oligonucleotide
cagucaucauacauaggcc

SEQ ID NO: 2712115 - RNA, 19 nt, Artificial Sequence
  Description of Artificial Sequence: Synthetic oligonucleotide
ucaggagccaggugauugg

SEQ ID NO: 2712116 - RNA, 19 nt, Artificial Sequence
  Description of Artificial Sequence: Synthetic oligonucleotide
gaggcggcagcuuucuccg

SEQ ID NO: 2712117 - RNA, 19 nt, Artificial Sequence
  Description of Artificial Sequence: Synthetic oligonucleotide
agaaagagguacuggggcu

SEQ ID NO: 2712118 - RNA, 19 nt, Artificial Sequence
  Description of Artificial Sequence: Synthetic oligonucleotide
ugccggacaaagaugcgcc

SEQ ID NO: 2712119 - RNA, 19 nt, Artificial Sequence
  Description of Artificial Sequence: Synthetic oligonucleotide
gauuggaggucggaggcgg

SEQ ID NO: 2712120 - RNA, 19 nt, Artificial Sequence
  Description of Artificial Sequence: Synthetic oligonucleotide
cagcaggccagucagggcg

SEQ ID NO: 2712121 - RNA, 19 nt, Artificial Sequence
  Description of Artificial Sequence: Synthetic oligonucleotide
gaggucuugcauuagccuc

SEQ ID NO: 2712122 - RNA, 19 nt, Artificial Sequence
  Description of Artificial Sequence: Synthetic oligonucleotide
uuagccucgugaaugggau

SEQ ID NO: 2712123 - RNA, 19 nt, Artificial Sequence
  Description of Artificial Sequence: Synthetic oligonucleotide
cucagaugggcugagggcc

SEQ ID NO: 2712124 - RNA, 19 nt, Artificial Sequence
  Description of Artificial Sequence: Synthetic oligonucleotide
cuugccaaggaguuagguc

SEQ ID NO: 2712125 - RNA, 19 nt, Artificial Sequence
  Description of Artificial Sequence: Synthetic oligonucleotide
cagacgaggacaugauggg

SEQ ID NO: 2712126 - RNA, 19 nt, Artificial Sequence
  Description of Artificial Sequence: Synthetic oligonucleotide
aguuaggucucagcucucc

SEQ ID NO: 2712127 - RNA, 19 nt, Artificial Sequence
  Description of Artificial Sequence: Synthetic oligonucleotide
gugauuggaggucggaggc

SEQ ID NO: 2712128 - RNA, 19 nt, Artificial Sequence
  Description of Artificial Sequence: Synthetic oligonucleotide
cuucauagccugucacugg

SEQ ID NO: 2712129 - RNA, 19 nt, Artificial Sequence
  Description of Artificial Sequence: Synthetic oligonucleotide
uagcagaggguccaagaga

SEQ ID NO: 2712130 - RNA, 19 nt, Artificial Sequence
  Description of Artificial Sequence: Synthetic oligonucleotide
  modified_base (2)..(2): a, c, u, g, unknown or other
anagggcuugccaaggagu

SEQ ID NO: 2712131 - RNA, 19 nt, Artificial Sequence
  Description of Artificial Sequence: Synthetic oligonucleotide
acagguacaggggaacacg

SEQ ID NO: 2712132 - RNA, 19 nt, Artificial Sequence
  Description of Artificial Sequence: Synthetic oligonucleotide
gguacuggggcuuccacag

SEQ ID NO: 2712133 - RNA, 19 nt, Artificial Sequence
  Description of Artificial Sequence: Synthetic oligonucleotide
  modified_base (7)..(7): a, c, u, g, unknown or other
aggucanagggcuugccaa

SEQ ID NO: 2712134 - RNA, 19 nt, Artificial Sequence
  Description of Artificial Sequence: Synthetic oligonucleotide
agcccuguauccuuggaca

SEQ ID NO: 2712135 - RNA, 19 nt, Artificial Sequence
  Description of Artificial Sequence: Synthetic oligonucleotide
agggcgaucaucucugccu

SEQ ID NO: 2712136 - RNA, 19 nt, Artificial Sequence
  Description of Artificial Sequence: Synthetic oligonucleotide
uuaggucucagcucucccu

SEQ ID NO: 2712137 - RNA, 19 nt, Artificial Sequence
  Description of Artificial Sequence: Synthetic oligonucleotide
aggaggggcgcacagacga

SEQ ID NO: 2712138 - RNA, 19 nt, Artificial Sequence
  Description of Artificial Sequence: Synthetic oligonucleotide
  modified_base (4)..(4): a, c, u, g, unknown or other
ucanagggcuugccaagga

SEQ ID NO: 2712139 - RNA, 19 nt, Artificial Sequence
  Description of Artificial Sequence: Synthetic oligonucleotide
cauagccugucacugggag

SEQ ID NO: 2712140 - RNA, 19 nt, Artificial Sequence
  Description of Artificial Sequence: Synthetic oligonucleotide
gaugaggaggggcgcacag

SEQ ID NO: 2712141 - RNA, 19 nt, Artificial Sequence
  Description of Artificial Sequence: Synthetic oligonucleotide
caaggaguuaggucucagc

SEQ ID NO: 2712142 - RNA, 19 nt, Artificial Sequence
  Description of Artificial Sequence: Synthetic oligonucleotide
cuugcauuagccucgugaa

SEQ ID NO: 2712143 - RNA, 19 nt, Artificial Sequence
  Description of Artificial Sequence: Synthetic oligonucleotide
  modified_base (3)..(3): a, c, u, g, unknown or other
canagggcuugccaaggag

SEQ ID NO: 2712144 - RNA, 19 nt, Artificial Sequence
  Description of Artificial Sequence: Synthetic oligonucleotide
gccucacugagccaggugg

SEQ ID NO: 2712145 - RNA, 19 nt, Artificial Sequence
  Description of Artificial Sequence: Synthetic oligonucleotide
agagaaagacaucuucaua

SEQ ID NO: 2712146 - RNA, 19 nt, Artificial Sequence
  Description of Artificial Sequence: Synthetic oligonucleotide
  modified_base (11)..(11): a, c, u, g, unknown or other
guagaggucanagggcuug

SEQ ID NO: 2712147 - RNA, 19 nt, Artificial Sequence
  Description of Artificial Sequence: Synthetic oligonucleotide
ucccaaaguggcagcgggg

SEQ ID NO: 2712148 - RNA, 19 nt, Artificial Sequence
  Description of Artificial Sequence: Synthetic oligonucleotide
caggaaggaugacacagug

SEQ ID NO: 2712149 - RNA, 19 nt, Artificial Sequence
  Description of Artificial Sequence: Synthetic oligonucleotide
gucaucauacauaggccag

SEQ ID NO: 2712150 - RNA, 19 nt, Artificial Sequence
  Description of Artificial Sequence: Synthetic oligonucleotide
augcgccugacccacagcu

SEQ ID NO: 2712151 - RNA, 19 nt, Artificial Sequence
  Description of Artificial Sequence: Synthetic oligonucleotide
uacaggggaacacgcugcc

SEQ ID NO: 2712152 - RNA, 19 nt, Artificial Sequence
  Description of Artificial Sequence: Synthetic oligonucleotide
aggucuugcauuagccucg

SEQ ID NO: 2712153 - RNA, 19 nt, Artificial Sequence
  Description of Artificial Sequence: Synthetic oligonucleotide
gaggguccaagagaaagac

SEQ ID NO: 2712154 - RNA, 19 nt, Artificial Sequence
  Description of Artificial Sequence: Synthetic oligonucleotide
cagguacaggggaacacgc

SEQ ID NO: 2712155 - RNA, 19 nt, Artificial Sequence
  Description of Artificial Sequence: Synthetic oligonucleotide
uuccacaguccgcucagga

SEQ ID NO: 2712156 - RNA, 19 nt, Artificial Sequence
  Description of Artificial Sequence: Synthetic oligonucleotide
gguacaggggaacacgcug

SEQ ID NO: 2712157 - RNA, 19 nt, Artificial Sequence
  Description of Artificial Sequence: Synthetic oligonucleotide
  modified_base (5)..(5): a, c, u, g, unknown or other
gucanagggcuugccaagg

SEQ ID NO: 2712158 - RNA, 19 nt, Artificial Sequence
  Description of Artificial Sequence: Synthetic oligonucleotide
cuugugcuucuucuggaug

SEQ ID NO: 2712159 - RNA, 19 nt, Artificial Sequence
  Description of Artificial Sequence: Synthetic oligonucleotide
ggcucagaugggcugaggg

SEQ ID NO: 2712160 - RNA, 19 nt, Artificial Sequence
  Description of Artificial Sequence: Synthetic oligonucleotide
uccgagugcccacugccug

SEQ ID NO: 2712161 - RNA, 19 nt, Artificial Sequence
  Description of Artificial Sequence: Synthetic oligonucleotide
ggagaaagagguacugggg

SEQ ID NO: 2712162 - RNA, 19 nt, Artificial Sequence
  Description of Artificial Sequence: Synthetic oligonucleotide
  modified_base (8)..(8): a, c, u, g, unknown or other
gaggucanagggcuugcca

SEQ ID NO: 2712163 - RNA, 19 nt, Artificial Sequence
  Description of Artificial Sequence: Synthetic oligonucleotide
ucugccucacugagccagg

SEQ ID NO: 2712164 - RNA, 19 nt, Artificial Sequence
  Description of Artificial Sequence: Synthetic oligonucleotide
gcggggucauccuugaggg

SEQ ID NO: 2712165 - RNA, 19 nt, Artificial Sequence
  Description of Artificial Sequence: Synthetic oligonucleotide
uuggacagguacaggggaa

SEQ ID NO: 2712166 - RNA, 19 nt, Artificial Sequence
  Description of Artificial Sequence: Synthetic oligonucleotide
gcauuagccucgugaaugg

SEQ ID NO: 2712167 - RNA, 19 nt, Artificial Sequence
  Description of Artificial Sequence: Synthetic oligonucleotide
agaugcgccugacccacag

SEQ ID NO: 2712168 - RNA, 19 nt, Artificial Sequence
  Description of Artificial Sequence: Synthetic oligonucleotide
gaucccaaaguggcagcgg

SEQ ID NO: 2712169 - RNA, 19 nt, Artificial Sequence
  Description of Artificial Sequence: Synthetic oligonucleotide
  modified_base (9)..(9): a, c, u, g, unknown or other
agaggucanagggcuugcc

SEQ ID NO: 2712170 - RNA, 19 nt, Artificial Sequence
  Description of Artificial Sequence: Synthetic oligonucleotide
ugccccagucaucauacau

SEQ ID NO: 2712171 - RNA, 19 nt, Artificial Sequence
  Description of Artificial Sequence: Synthetic oligonucleotide
cugacccacagcugggccc

SEQ ID NO: 2712172 - RNA, 19 nt, Artificial Sequence
  Description of Artificial Sequence: Synthetic oligonucleotide
ucgugaaugggaucccaaa

SEQ ID NO: 2712173 - RNA, 19 nt, Artificial Sequence
  Description of Artificial Sequence: Synthetic oligonucleotide
ucucccuggcucaucugca

SEQ ID NO: 2712174 - RNA, 19 nt, Artificial Sequence
  Description of Artificial Sequence: Synthetic oligonucleotide
gacaucuucauagccuguc

SEQ ID NO: 2712175 - RNA, 19 nt, Artificial Sequence
  Description of Artificial Sequence: Synthetic oligonucleotide
agacgaggacaugaugggg

SEQ ID NO: 2712176 - RNA, 19 nt, Artificial Sequence
  Description of Artificial Sequence: Synthetic oligonucleotide
cacugggagcccuguaucc

SEQ ID NO: 2712177 - RNA, 19 nt, Artificial Sequence
  Description of Artificial Sequence: Synthetic oligonucleotide
guuaggucucagcucuccc

SEQ ID NO: 2712178 - RNA, 19 nt, Artificial Sequence
  Description of Artificial Sequence: Synthetic oligonucleotide
caucuggggagaaagaggu

SEQ ID NO: 2712179 - RNA, 19 nt, Artificial Sequence
  Description of Artificial Sequence: Synthetic oligonucleotide
agcagaggguccaagagaa

SEQ ID NO: 2712180 - RNA, 19 nt, Artificial Sequence
  Description of Artificial Sequence: Synthetic oligonucleotide
ucagaugggcugagggccu

SEQ ID NO: 2712181 - RNA, 19 nt, Artificial Sequence
  Description of Artificial Sequence: Synthetic oligonucleotide
gagcccuguauccuuggac

SEQ ID NO: 2712182 - RNA, 19 nt, Artificial Sequence
  Description of Artificial Sequence: Synthetic oligonucleotide
  modified_base (6)..(6): a, c, u, g, unknown or other
ggucanagggcuugccaag

SEQ ID NO: 2712183 - RNA, 19 nt, Artificial Sequence
  Description of Artificial Sequence: Synthetic oligonucleotide
cacaggguagcagaggguc

SEQ ID NO: 2712184 - RNA, 19 nt, Artificial Sequence
  Description of Artificial Sequence: Synthetic oligonucleotide
cuuucuccgggcucagaug

SEQ ID NO: 2712185 - RNA, 19 nt, Artificial Sequence
  Description of Artificial Sequence: Synthetic oligonucleotide
acaggguagcagagggucc

SEQ ID NO: 2712186 - RNA, 19 nt, Artificial Sequence
  Description of Artificial Sequence: Synthetic oligonucleotide
ugugcuucuucuggaugcc

SEQ ID NO: 2712187 - RNA, 19 nt, Artificial Sequence
  Description of Artificial Sequence: Synthetic oligonucleotide
aggggaacacgcugcccac

SEQ ID NO: 2712188 - RNA, 19 nt, Artificial Sequence
  Description of Artificial Sequence: Synthetic oligonucleotide
aguguccugccggacaaag

SEQ ID NO: 2712189 - RNA, 19 nt, Artificial Sequence
  Description of Artificial Sequence: Synthetic oligonucleotide
gccaggaaggaugacacag

SEQ ID NO: 2712190 - RNA, 19 nt, Artificial Sequence
  Description of Artificial Sequence: Synthetic oligonucleotide
agguacuggggcuuccaca

SEQ ID NO: 2712191 - RNA, 19 nt, Artificial Sequence
  Description of Artificial Sequence: Synthetic oligonucleotide
auuagccucgugaauggga

SEQ ID NO: 2712192 - RNA, 19 nt, Artificial Sequence
  Description of Artificial Sequence: Synthetic oligonucleotide
ucauagccugucacuggga

SEQ ID NO: 2712193 - RNA, 19 nt, Artificial Sequence
  Description of Artificial Sequence: Synthetic oligonucleotide
uucuccgggcucagauggg

SEQ ID NO: 2712194 - RNA, 19 nt, Artificial Sequence
  Description of Artificial Sequence: Synthetic oligonucleotide
gacacaguguccugccgga

SEQ ID NO: 2712195 - RNA, 19 nt, Artificial Sequence
  Description of Artificial Sequence: Synthetic oligonucleotide
guacaggggaacacgcugc

SEQ ID NO: 2712196 - RNA, 19 nt, Artificial Sequence
  Description of Artificial Sequence: Synthetic oligonucleotide
  modified_base (10)..(10): a, c, u, g, unknown or other
uagaggucanagggcuugc

SEQ ID NO: 2712197 - RNA, 19 nt, Artificial Sequence
  Description of Artificial Sequence: Synthetic oligonucleotide
ggccugggaagucaucugg

SEQ ID NO: 2712198 - RNA, 19 nt, Artificial Sequence
  Description of Artificial Sequence: Synthetic oligonucleotide
ucccuggcucaucugcagc

SEQ ID NO: 2712199 - RNA, 19 nt, Artificial Sequence
  Description of Artificial Sequence: Synthetic oligonucleotide
cauaggccaggaaggauga

SEQ ID NO: 2712200 - RNA, 19 nt, Artificial Sequence
  Description of Artificial Sequence: Synthetic oligonucleotide
uugcauuagccucgugaau

SEQ ID NO: 2712201 - RNA, 19 nt, Artificial Sequence
  Description of Artificial Sequence: Synthetic oligonucleotide
guccaagagaaagacaucu

SEQ ID NO: 2712202 - RNA, 19 nt, Artificial Sequence
  Description of Artificial Sequence: Synthetic oligonucleotide
ugcccugagguagggaccc

SEQ ID NO: 2712203 - RNA, 19 nt, Artificial Sequence
  Description of Artificial Sequence: Synthetic oligonucleotide
caucucugccucacugagc

SEQ ID NO: 2712204 - RNA, 19 nt, Artificial Sequence
  Description of Artificial Sequence: Synthetic oligonucleotide
aggucucagcucucccugg

SEQ ID NO: 2712205 - RNA, 19 nt, Artificial Sequence
  Description of Artificial Sequence: Synthetic oligonucleotide
agugcccacugccugcuga

SEQ ID NO: 2712206 - RNA, 19 nt, Artificial Sequence
  Description of Artificial Sequence: Synthetic oligonucleotide
gacagguacaggggaacac

SEQ ID NO: 2712207 - RNA, 19 nt, Artificial Sequence
  Description of Artificial Sequence: Synthetic oligonucleotide
ugggagcccuguauccuug

SEQ ID NO: 2712208 - RNA, 19 nt, Artificial Sequence
  Description of Artificial Sequence: Synthetic oligonucleotide
agcucucccuggcucaucu

SEQ ID NO: 2712209 - RNA, 19 nt, Artificial Sequence
  Description of Artificial Sequence: Synthetic oligonucleotide
uccuuggacacuugugcuu

SEQ ID NO: 2712210 - RNA, 19 nt, Artificial Sequence
  Description of Artificial Sequence: Synthetic oligonucleotide
aggccugggaugaggaggg

SEQ ID NO: 2712211 - RNA, 19 nt, Artificial Sequence
  Description of Artificial Sequence: Synthetic oligonucleotide
cuggcucaucugcagcagg

SEQ ID NO: 2712212 - RNA, 19 nt, Artificial Sequence
  Description of Artificial Sequence: Synthetic oligonucleotide
uuccgagugcccacugccu

SEQ ID NO: 2712213 - RNA, 19 nt, Artificial Sequence
  Description of Artificial Sequence: Synthetic oligonucleotide
cacugagccagguggaaga

SEQ ID NO: 2712214 - RNA, 19 nt, Artificial Sequence
  Description of Artificial Sequence: Synthetic oligonucleotide
cugagguagggacccugcc

SEQ ID NO: 2712215 - RNA, 19 nt, Artificial Sequence
  Description of Artificial Sequence: Synthetic oligonucleotide
accagcugaggucuugcau

SEQ ID NO: 2712216 - RNA, 19 nt, Artificial Sequence
  Description of Artificial Sequence: Synthetic oligonucleotide
acaggggaacacgcugccc

SEQ ID NO: 2712217 - RNA, 19 nt, Artificial Sequence
  Description of Artificial Sequence: Synthetic oligonucleotide
aggaugacacaguguccug

SEQ ID NO: 2712218 - RNA, 19 nt, Artificial Sequence
  Description of Artificial Sequence: Synthetic oligonucleotide
cauuagccucgugaauggg

SEQ ID NO: 2712219 - RNA, 19 nt, Artificial Sequence
  Description of Artificial Sequence: Synthetic oligonucleotide
ugccaaggaguuaggucuc

SEQ ID NO: 2712220 - RNA, 19 nt, Artificial Sequence
  Description of Artificial Sequence: Synthetic oligonucleotide
gcugaggucuugcauuagc

SEQ ID NO: 2712221 - RNA, 19 nt, Artificial Sequence
  Description of Artificial Sequence: Synthetic oligonucleotide
ucuccgggcucagaugggc

SEQ ID NO: 2712222 - RNA, 19 nt, Artificial Sequence
  Description of Artificial Sequence: Synthetic oligonucleotide
caaaguggcagcgggguca

SEQ ID NO: 2712223 - RNA, 19 nt, Artificial Sequence
  Description of Artificial Sequence: Synthetic oligonucleotide
ugcgccugacccacagcug

SEQ ID NO: 2712224 - RNA, 19 nt, Artificial Sequence
  Description of Artificial Sequence: Synthetic oligonucleotide
gcgccugacccacagcugg

SEQ ID NO: 2712225 - RNA, 19 nt, Artificial Sequence
  Description of Artificial Sequence: Synthetic oligonucleotide
gguagcagaggguccaaga

SEQ ID NO: 2712226 - RNA, 19 nt, Artificial Sequence
  Description of Artificial Sequence: Synthetic oligonucleotide
uacauaggccaggaaggau

SEQ ID NO: 2712227 - RNA, 19 nt, Artificial Sequence
  Description of Artificial Sequence: Synthetic oligonucleotide
gggcuugccaaggaguuag

SEQ ID NO: 2712228 - RNA, 19 nt, Artificial Sequence
  Description of Artificial Sequence: Synthetic oligonucleotide
gcucagaugggcugagggc

SEQ ID NO: 2712229 - RNA, 19 nt, Artificial Sequence
  Description of Artificial Sequence: Synthetic oligonucleotide
gaugggcugagggccuggg

SEQ ID NO: 2712230 - RNA, 19 nt, Artificial Sequence
  Description of Artificial Sequence: Synthetic oligonucleotide
gaugcgccugacccacagc

SEQ ID NO: 2712231 - RNA, 19 nt, Artificial Sequence
  Description of Artificial Sequence: Synthetic oligonucleotide
aucauacauaggccaggaa

SEQ ID NO: 2712232 - RNA, 19 nt, Artificial Sequence
  Description of Artificial Sequence: Synthetic oligonucleotide
ggaucccaaaguggcagcg

SEQ ID NO: 2712233 - RNA, 19 nt, Artificial Sequence
  Description of Artificial Sequence: Synthetic oligonucleotide
cugcccacaggguagcaga

SEQ ID NO: 2712234 - RNA, 19 nt, Artificial Sequence
  Description of Artificial Sequence: Synthetic oligonucleotide
gggaacacgcugcccacag

SEQ ID NO: 2712235 - RNA, 19 nt, Artificial Sequence
  Description of Artificial Sequence: Synthetic oligonucleotide
auuggaggucggaggcggc

SEQ ID NO: 2712236 - RNA, 19 nt, Artificial Sequence
  Description of Artificial Sequence: Synthetic oligonucleotide
ucagggcgaucaucucugc

SEQ ID NO: 2712237 - RNA, 19 nt, Artificial Sequence
  Description of Artificial Sequence: Synthetic oligonucleotide
uggaugcccugagguaggg

SEQ ID NO: 2712238 - RNA, 19 nt, Artificial Sequence
  Description of Artificial Sequence: Synthetic oligonucleotide
uggaggucggaggcggcag

SEQ ID NO: 2712239 - RNA, 19 nt, Artificial Sequence
  Description of Artificial Sequence: Synthetic oligonucleotide
caucauacauaggccagga

SEQ ID NO: 2712240 - RNA, 19 nt, Artificial Sequence
  Description of Artificial Sequence: Synthetic oligonucleotide
acacgcugcccacagggua

SEQ ID NO: 2712241 - RNA, 19 nt, Artificial Sequence
  Description of Artificial Sequence: Synthetic oligonucleotide
cagggcgaucaucucugcc

SEQ ID NO: 2712242 - RNA, 19 nt, Artificial Sequence
  Description of Artificial Sequence: Synthetic oligonucleotide
cgugaaugggaucccaaag

SEQ ID NO: 2712243 - RNA, 19 nt, Artificial Sequence
  Description of Artificial Sequence: Synthetic oligonucleotide
ggaugacacaguguccugc

SEQ ID NO: 2712244 - RNA, 19 nt, Artificial Sequence
  Description of Artificial Sequence: Synthetic oligonucleotide
uccgcucaggagccaggug

SEQ ID NO: 2712245 - RNA, 19 nt, Artificial Sequence
  Description of Artificial Sequence: Synthetic oligonucleotide
aaaguggcagcggggucau

SEQ ID NO: 2712246 - RNA, 19 nt, Artificial Sequence
  Description of Artificial Sequence: Synthetic oligonucleotide
gaggaggggcgcacagacg

SEQ ID NO: 2712247 - RNA, 19 nt, Artificial Sequence
  Description of Artificial Sequence: Synthetic oligonucleotide
aggaaggaugacacagugu

SEQ ID NO: 2712248 - RNA, 19 nt, Artificial Sequence
  Description of Artificial Sequence: Synthetic oligonucleotide
aacacgcugcccacagggu

SEQ ID NO: 2712249 - RNA, 19 nt, Artificial Sequence
  Description of Artificial Sequence: Synthetic oligonucleotide
gugcccacugccugcugag

SEQ ID NO: 2712250 - RNA, 19 nt, Artificial Sequence
  Description of Artificial Sequence: Synthetic oligonucleotide
ggguccaagagaaagacau

SEQ ID NO: 2712251 - RNA, 19 nt, Artificial Sequence
  Description of Artificial Sequence: Synthetic oligonucleotide
gccaggugauuggaggucg

SEQ ID NO: 2712252 - RNA, 19 nt, Artificial Sequence
  Description of Artificial Sequence: Synthetic oligonucleotide
acacaguguccugccggac

SEQ ID NO: 2712253 - RNA, 19 nt, Artificial Sequence
  Description of Artificial Sequence: Synthetic oligonucleotide
auaggccaggaaggaugac

SEQ ID NO: 2712254 - RNA, 19 nt, Artificial Sequence
  Description of Artificial Sequence: Synthetic oligonucleotide
ugggaugaggaggggcgca

SEQ ID NO: 2712255 - RNA, 19 nt, Artificial Sequence
  Description of Artificial Sequence: Synthetic oligonucleotide
agucaucuggggagaaaga

SEQ ID NO: 2712256 - RNA, 19 nt, Artificial Sequence
  Description of Artificial Sequence: Synthetic oligonucleotide
cucagcucucccuggcuca

SEQ ID NO: 2712257 - RNA, 19 nt, Artificial Sequence
  Description of Artificial Sequence: Synthetic oligonucleotide
uagggacccugccccaguc

SEQ ID NO: 2712258 - RNA, 19 nt, Artificial Sequence
  Description of Artificial Sequence: Synthetic oligonucleotide
ugucacugggagcccugua

SEQ ID NO: 2712259 - RNA, 19 nt, Artificial Sequence
  Description of Artificial Sequence: Synthetic oligonucleotide
agagguacuggggcuucca

SEQ ID NO: 2712260 - RNA, 19 nt, Artificial Sequence
  Description of Artificial Sequence: Synthetic oligonucleotide
ggucucagcucucccuggc

SEQ ID NO: 2712261 - RNA, 19 nt, Artificial Sequence
  Description of Artificial Sequence: Synthetic oligonucleotide
cugggccccaccagcugag

SEQ ID NO: 2712262 - RNA, 19 nt, Artificial Sequence
  Description of Artificial Sequence: Synthetic oligonucleotide
ggaacacgcugcccacagg

SEQ ID NO: 2712263 - RNA, 19 nt, Artificial Sequence
  Description of Artificial Sequence: Synthetic oligonucleotide
agcuuccgagugcccacug

SEQ ID NO: 2712264 - RNA, 19 nt, Artificial Sequence
  Description of Artificial Sequence: Synthetic oligonucleotide
cucgugaaugggaucccaa

SEQ ID NO: 2712265 - RNA, 19 nt, Artificial Sequence
  Description of Artificial Sequence: Synthetic oligonucleotide
ccugagguagggacccugc

SEQ ID NO: 2712266 - RNA, 19 nt, Artificial Sequence
  Description of Artificial Sequence: Synthetic oligonucleotide
gggaucccaaaguggcagc

SEQ ID NO: 2712267 - RNA, 19 nt, Artificial Sequence
  Description of Artificial Sequence: Synthetic oligonucleotide
gucacugggagcccuguau

SEQ ID NO: 2712268 - RNA, 19 nt, Artificial Sequence
  Description of Artificial Sequence: Synthetic oligonucleotide
uagccucgugaaugggauc

SEQ ID NO: 2712269 - RNA, 19 nt, Artificial Sequence
  Description of Artificial Sequence: Synthetic oligonucleotide
guccugccggacaaagaug

SEQ ID NO: 2712270 - RNA, 19 nt, Artificial Sequence
  Description of Artificial Sequence: Synthetic oligonucleotide
ucggaggcggcagcuuucu

SEQ ID NO: 2712271 - RNA, 19 nt, Artificial Sequence
  Description of Artificial Sequence: Synthetic oligonucleotide
ccugcugaggggcuuggac

SEQ ID NO: 2712272 - RNA, 19 nt, Artificial Sequence
  Description of Artificial Sequence: Synthetic oligonucleotide
gccugggaagucaucuggg

SEQ ID NO: 2712273 - RNA, 19 nt, Artificial Sequence
  Description of Artificial Sequence: Synthetic oligonucleotide
aggguccaagagaaagaca

SEQ ID NO: 2712274 - RNA, 19 nt, Artificial Sequence
  Description of Artificial Sequence: Synthetic oligonucleotide
agggacccugccccaguca

SEQ ID NO: 2712275 - RNA, 19 nt, Artificial Sequence
  Description of Artificial Sequence: Synthetic oligonucleotide
caggguagcagagggucca

SEQ ID NO: 2712276 - RNA, 19 nt, Artificial Sequence
  Description of Artificial Sequence: Synthetic oligonucleotide
ugccugcugaggggcuugg

SEQ ID NO: 2712277 - RNA, 19 nt, Artificial Sequence
  Description of Artificial Sequence: Synthetic oligonucleotide
augaggaggggcgcacaga

SEQ ID NO: 2712278 - RNA, 19 nt, Artificial Sequence
  Description of Artificial Sequence: Synthetic oligonucleotide
agccugucacugggagccc

SEQ ID NO: 2712279 - RNA, 19 nt, Artificial Sequence
  Description of Artificial Sequence: Synthetic oligonucleotide
cagcugaggucuugcauua

SEQ ID NO: 2712280 - RNA, 19 nt, Artificial Sequence
  Description of Artificial Sequence: Synthetic oligonucleotide
caguccgcucaggagccag

SEQ ID NO: 2712281 - RNA, 19 nt, Artificial Sequence
  Description of Artificial Sequence: Synthetic oligonucleotide
cagucagggcgaucaucuc

SEQ ID NO: 2712282 - RNA, 19 nt, Artificial Sequence
  Description of Artificial Sequence: Synthetic oligonucleotide
gcagcuuccgagugcccac

SEQ ID NO: 2712283 - RNA, 19 nt, Artificial Sequence
  Description of Artificial Sequence: Synthetic oligonucleotide
gcagcuuucuccgggcuca

SEQ ID NO: 2712284 - RNA, 19 nt, Artificial Sequence
  Description of Artificial Sequence: Synthetic oligonucleotide
aggcggcagcuuucuccgg

SEQ ID NO: 2712285 - RNA, 19 nt, Artificial Sequence
  Description of Artificial Sequence: Synthetic oligonucleotide
ggcagcggggucauccuug

SEQ ID NO: 2712286 - RNA, 19 nt, Artificial Sequence
  Description of Artificial Sequence: Synthetic oligonucleotide
ccgcucaggagccagguga

SEQ ID NO: 2712287 - RNA, 19 nt, Artificial Sequence
  Description of Artificial Sequence: Synthetic oligonucleotide
ccugccggacaaagaugcg

SEQ ID NO: 2712288 - RNA, 19 nt, Artificial Sequence
  Description of Artificial Sequence: Synthetic oligonucleotide
gggcgcacagacgaggaca

SEQ ID NO: 2712289 - RNA, 19 nt, Artificial Sequence
  Description of Artificial Sequence: Synthetic oligonucleotide
ggccccaccagcugagguc

SEQ ID NO: 2712290 - RNA, 19 nt, Artificial Sequence
  Description of Artificial Sequence: Synthetic oligonucleotide
ggcagcuuucuccgggcuc

SEQ ID NO: 2712291 - RNA, 19 nt, Artificial Sequence
  Description of Artificial Sequence: Synthetic oligonucleotide
ggaggucggaggcggcagc

SEQ ID NO: 2712292 - RNA, 19 nt, Artificial Sequence
  Description of Artificial Sequence: Synthetic oligonucleotide
ccgagugcccacugccugc

SEQ ID NO: 2712293 - RNA, 19 nt, Artificial Sequence
  Description of Artificial Sequence: Synthetic oligonucleotide
aggggcgcacagacgagga

SEQ ID NO: 2712294 - RNA, 19 nt, Artificial Sequence
  Description of Artificial Sequence: Synthetic oligonucleotide
gcgaucaucucugccucac

SEQ ID NO: 2712295 - RNA, 19 nt, Artificial Sequence
  Description of Artificial Sequence: Synthetic oligonucleotide
aagaugcgccugacccaca

SEQ ID NO: 2712296 - RNA, 19 nt, Artificial Sequence
  Description of Artificial Sequence: Synthetic oligonucleotide
gcuuucuccgggcucagau

SEQ ID NO: 2712297 - RNA, 19 nt, Artificial Sequence
  Description of Artificial Sequence: Synthetic oligonucleotide
agcaggccagucagggcga

SEQ ID NO: 2712298 - RNA, 19 nt, Artificial Sequence
  Description of Artificial Sequence: Synthetic oligonucleotide
gcggcagcuuucuccgggc

SEQ ID NO: 2712299 - RNA, 19 nt, Artificial Sequence
  Description of Artificial Sequence: Synthetic oligonucleotide
guguccugccggacaaaga

SEQ ID NO: 2712300 - RNA, 19 nt, Artificial Sequence
  Description of Artificial Sequence: Synthetic oligonucleotide
gucuugcauuagccucgug

SEQ ID NO: 2712301 - RNA, 19 nt, Artificial Sequence
  Description of Artificial Sequence: Synthetic oligonucleotide
ccggacaaagaugcgccug

SEQ ID NO: 2712302 - RNA, 19 nt, Artificial Sequence
  Description of Artificial Sequence: Synthetic oligonucleotide
cucacugagccagguggaa

SEQ ID NO: 2712303 - RNA, 19 nt, Artificial Sequence
  Description of Artificial Sequence: Synthetic oligonucleotide
cagaugggcugagggccug

SEQ ID NO: 2712304 - RNA, 19 nt, Artificial Sequence
  Description of Artificial Sequence: Synthetic oligonucleotide
ccaaggaguuaggucucag

SEQ ID NO: 2712305 - RNA, 19 nt, Artificial Sequence
  Description of Artificial Sequence: Synthetic oligonucleotide
cugccugcugaggggcuug

SEQ ID NO: 2712306 - RNA, 19 nt, Artificial Sequence
  Description of Artificial Sequence: Synthetic oligonucleotide
caggugauuggaggucgga

SEQ ID NO: 2712307 - RNA, 19 nt, Artificial Sequence
  Description of Artificial Sequence: Synthetic oligonucleotide
ggcuugccaaggaguuagg

SEQ ID NO: 2712308 - RNA, 19 nt, Artificial Sequence
  Description of Artificial Sequence: Synthetic oligonucleotide
gucggaggcggcagcuuuc

SEQ ID NO: 2712309 - RNA, 19 nt, Artificial Sequence
  Description of Artificial Sequence: Synthetic oligonucleotide
ccaaaguggcagcgggguc

SEQ ID NO: 2712310 - RNA, 19 nt, Artificial Sequence
  Description of Artificial Sequence: Synthetic oligonucleotide
ccugucacugggagcccug

SEQ ID NO: 2712311 - RNA, 19 nt, Artificial Sequence
  Description of Artificial Sequence: Synthetic oligonucleotide
cgcacagacgaggacauga

SEQ ID NO: 2712312 - RNA, 19 nt, Artificial Sequence
  Description of Artificial Sequence: Synthetic oligonucleotide
gcugaggggcuuggacagg

SEQ ID NO: 2712313 - RNA, 19 nt, Artificial Sequence
  Description of Artificial Sequence: Synthetic oligonucleotide
cagcggggucauccuugag

SEQ ID NO: 2712314 - RNA, 19 nt, Artificial Sequence
  Description of Artificial Sequence: Synthetic oligonucleotide
ccucacugagccaggugga

SEQ ID NO: 2712315 - RNA, 19 nt, Artificial Sequence
  Description of Artificial Sequence: Synthetic oligonucleotide
ccuggcucaucugcagcag

SEQ ID NO: 2712316 - RNA, 19 nt, Artificial Sequence
  Description of Artificial Sequence: Synthetic oligonucleotide
cuuggacacuugugcuucu

SEQ ID NO: 2712317 - RNA, 19 nt, Artificial Sequence
  Description of Artificial Sequence: Synthetic oligonucleotide
guagggacccugccccagu

SEQ ID NO: 2712318 - RNA, 19 nt, Artificial Sequence
  Description of Artificial Sequence: Synthetic oligonucleotide
gcagcggggucauccuuga

SEQ ID NO: 2712319 - RNA, 19 nt, Artificial Sequence
  Description of Artificial Sequence: Synthetic oligonucleotide
ggcgaucaucucugccuca

SEQ ID NO: 2712320 - RNA, 19 nt, Artificial Sequence
  Description of Artificial Sequence: Synthetic oligonucleotide
gggaugaggaggggcgcac

SEQ ID NO: 2712321 - RNA, 19 nt, Artificial Sequence
  Description of Artificial Sequence: Synthetic oligonucleotide
aucuggggagaaagaggua

SEQ ID NO: 2712322 - RNA, 19 nt, Artificial Sequence
  Description of Artificial Sequence: Synthetic oligonucleotide
ggaggggcgcacagacgag

SEQ ID NO: 2712323 - RNA, 19 nt, Artificial Sequence
  Description of Artificial Sequence: Synthetic oligonucleotide
caucugcagcaggccaguc

SEQ ID NO: 2712324 - RNA, 19 nt, Artificial Sequence
  Description of Artificial Sequence: Synthetic oligonucleotide
gaggucggaggcggcagcu

SEQ ID NO: 2712325 - RNA, 19 nt, Artificial Sequence
  Description of Artificial Sequence: Synthetic oligonucleotide
guggcagcggggucauccu

SEQ ID NO: 2712326 - RNA, 19 nt, Artificial Sequence
  Description of Artificial Sequence: Synthetic oligonucleotide
ggggcgcacagacgaggac

SEQ ID NO: 2712327 - RNA, 19 nt, Artificial Sequence
  Description of Artificial Sequence: Synthetic oligonucleotide
aggguagcagaggguccaa

SEQ ID NO: 2712328 - RNA, 19 nt, Artificial Sequence
  Description of Artificial Sequence: Synthetic oligonucleotide
cugccccagucaucauaca

SEQ ID NO: 2712329 - RNA, 19 nt, Artificial Sequence
  Description of Artificial Sequence: Synthetic oligonucleotide
cggacaaagaugcgccuga

SEQ ID NO: 2712330 - RNA, 19 nt, Artificial Sequence
  Description of Artificial Sequence: Synthetic oligonucleotide
gcucucccuggcucaucug

SEQ ID NO: 2712331 - RNA, 19 nt, Artificial Sequence
  Description of Artificial Sequence: Synthetic oligonucleotide
ggaugaggaggggcgcaca

SEQ ID NO: 2712332 - RNA, 19 nt, Artificial Sequence
  Description of Artificial Sequence: Synthetic oligonucleotide
gccucgugaaugggauccc

SEQ ID NO: 2712333 - RNA, 19 nt, Artificial Sequence
  Description of Artificial Sequence: Synthetic oligonucleotide
cugggagcccuguauccuu

SEQ ID NO: 2712334 - RNA, 19 nt, Artificial Sequence
  Description of Artificial Sequence: Synthetic oligonucleotide
cuccgggcucagaugggcu

SEQ ID NO: 2712335 - RNA, 19 nt, Artificial Sequence
  Description of Artificial Sequence: Synthetic oligonucleotide
gggacccugccccagucau

SEQ ID NO: 2712336 - RNA, 19 nt, Artificial Sequence
  Description of Artificial Sequence: Synthetic oligonucleotide
gcuugccaaggaguuaggu

SEQ ID NO: 2712337 - RNA, 19 nt, Artificial Sequence
  Description of Artificial Sequence: Synthetic oligonucleotide
gccaaggaguuaggucuca

SEQ ID NO: 2712338 - RNA, 19 nt, Artificial Sequence
  Description of Artificial Sequence: Synthetic oligonucleotide
cggggucauccuugagggg

SEQ ID NO: 2712339 - RNA, 19 nt, Artificial Sequence
  Description of Artificial Sequence: Synthetic oligonucleotide
guccgcucaggagccaggu

SEQ ID NO: 2712340 - RNA, 19 nt, Artificial Sequence
  Description of Artificial Sequence: Synthetic oligonucleotide
aggucggaggcggcagcuu

SEQ ID NO: 2712341 - RNA, 19 nt, Artificial Sequence
  Description of Artificial Sequence: Synthetic oligonucleotide
caggccagucagggcgauc

SEQ ID NO: 2712342 - RNA, 19 nt, Artificial Sequence
  Description of Artificial Sequence: Synthetic oligonucleotide
acccugccccagucaucau

SEQ ID NO: 2712343 - RNA, 19 nt, Artificial Sequence
  Description of Artificial Sequence: Synthetic oligonucleotide
ggucggaggcggcagcuuu

SEQ ID NO: 2712344 - RNA, 19 nt, Artificial Sequence
  Description of Artificial Sequence: Synthetic oligonucleotide
cagcucucccuggcucauc

SEQ ID NO: 2712345 - RNA, 19 nt, Artificial Sequence
  Description of Artificial Sequence: Synthetic oligonucleotide
gccccaccagcugaggucu

SEQ ID NO: 2712346 - RNA, 19 nt, Artificial Sequence
  Description of Artificial Sequence: Synthetic oligonucleotide
ggcgcacagacgaggacau

SEQ ID NO: 2712347 - RNA, 19 nt, Artificial Sequence
  Description of Artificial Sequence: Synthetic oligonucleotide
ccuguauccuuggacacuu

SEQ ID NO: 2712348 - RNA, 19 nt, Artificial Sequence
  Description of Artificial Sequence: Synthetic oligonucleotide
gccggacaaagaugcgccu

SEQ ID NO: 2712349 - RNA, 19 nt, Artificial Sequence
  Description of Artificial Sequence: Synthetic oligonucleotide
  modified_base (12)..(12): a, c, u, g, unknown or other
gguagaggucanagggcuu

SEQ ID NO: 2712350 - RNA, 19 nt, Artificial Sequence
  Description of Artificial Sequence: Synthetic oligonucleotide
ccucgugaaugggauccca

SEQ ID NO: 2712351 - RNA, 19 nt, Artificial Sequence
  Description of Artificial Sequence: Synthetic oligonucleotide
gggcuuccacaguccgcuc

SEQ ID NO: 2712352 - RNA, 19 nt, Artificial Sequence
  Description of Artificial Sequence: Synthetic oligonucleotide
ggucuugcauuagccucgu

SEQ ID NO: 2712353 - RNA, 19 nt, Artificial Sequence
  Description of Artificial Sequence: Synthetic oligonucleotide
cugccucacugagccaggu

SEQ ID NO: 2712354 - RNA, 19 nt, Artificial Sequence
  Description of Artificial Sequence: Synthetic oligonucleotide
cagcuuccgagugcccacu

SEQ ID NO: 2712355 - RNA, 19 nt, Artificial Sequence
  Description of Artificial Sequence: Synthetic oligonucleotide
ccgggcucagaugggcuga

SEQ ID NO: 2712356 - RNA, 19 nt, Artificial Sequence
  Description of Artificial Sequence: Synthetic oligonucleotide
cccuguauccuuggacacu

SEQ ID NO: 2712357 - RNA, 19 nt, Artificial Sequence
  Description of Artificial Sequence: Synthetic oligonucleotide
cgggcucagaugggcugag

SEQ ID NO: 2712358 - RNA, 19 nt, Artificial Sequence
  Description of Artificial Sequence: Synthetic oligonucleotide
gccugucacugggagcccu

SEQ ID NO: 2712359 - RNA, 19 nt, Artificial Sequence
  Description of Artificial Sequence: Synthetic oligonucleotide
gccugcugaggggcuugga

SEQ ID NO: 2712360 - RNA, 19 nt, Artificial Sequence
  Description of Artificial Sequence: Synthetic oligonucleotide
ggccagucagggcgaucau

SEQ ID NO: 2712361 - RNA, 19 nt, Artificial Sequence
  Description of Artificial Sequence: Synthetic oligonucleotide
cgcucaggagccaggugau

SEQ ID NO: 2712362 - RNA, 19 nt, Artificial Sequence
  Description of Artificial Sequence: Synthetic oligonucleotide
cggaggcggcagcuuucuc

SEQ ID NO: 2712363 - RNA, 19 nt, Artificial Sequence
  Description of Artificial Sequence: Synthetic oligonucleotide
ggggugggagcagcagcuu

SEQ ID NO: 2712364 - RNA, 19 nt, Artificial Sequence
  Description of Artificial Sequence: Synthetic oligonucleotide
gcucaggagccaggugauu

SEQ ID NO: 2712365 - RNA, 19 nt, Artificial Sequence
  Description of Artificial Sequence: Synthetic oligonucleotide
cgagugcccacugccugcu

SEQ ID NO: 2712366 - RNA, 19 nt, Artificial Sequence
  Description of Artificial Sequence: Synthetic oligonucleotide
  modified_base (1)..(1): a, c, u, g, unknown or other
nagggcuugccaaggaguu

SEQ ID NO: 2712367 - RNA, 19 nt, Artificial Sequence
  Description of Artificial Sequence: Synthetic oligonucleotide
ucuagaagaagaaaguuca

SEQ ID NO: 2712368 - RNA, 19 nt, Artificial Sequence
  Description of Artificial Sequence: Synthetic oligonucleotide
uucuaaaacacucauauua

SEQ ID NO: 2712369 - RNA, 19 nt, Artificial Sequence
  Description of Artificial Sequence: Synthetic oligonucleotide
aaguaguuuucuuaacagc

SEQ ID NO: 2712370 - RNA, 19 nt, Artificial Sequence
  Description of Artificial Sequence: Synthetic oligonucleotide
uauuaauacucugagaucc

SEQ ID NO: 2712371 - RNA, 19 nt, Artificial Sequence
  Description of Artificial Sequence: Synthetic oligonucleotide
aacaaagggacuuccacuc

SEQ ID NO: 2712372 - RNA, 19 nt, Artificial Sequence
  Description of Artificial Sequence: Synthetic oligonucleotide
acaucuuugaguuugguug

SEQ ID NO: 2712373 - RNA, 19 nt, Artificial Sequence
  Description of Artificial Sequence: Synthetic oligonucleotide
aaacuaguaagguaguuca

SEQ ID NO: 2712374 - RNA, 19 nt, Artificial Sequence
  Description of Artificial Sequence: Synthetic oligonucleotide
guugaagggaaacaaaggg

SEQ ID NO: 2712375 - RNA, 19 nt, Artificial Sequence
  Description of Artificial Sequence: Synthetic oligonucleotide
ucauccauaauacaauggc

SEQ ID NO: 2712376 - RNA, 19 nt, Artificial Sequence
  Description of Artificial Sequence: Synthetic oligonucleotide
uuugaagagcaccuaauag

SEQ ID NO: 2712377 - RNA, 19 nt, Artificial Sequence
  Description of Artificial Sequence: Synthetic oligonucleotide
aaaacuaguaagguaguuc

SEQ ID NO: 2712378 - RNA, 19 nt, Artificial Sequence
  Description of Artificial Sequence: Synthetic oligonucleotide
acaguugacaucucugucc

SEQ ID NO: 2712379 - RNA, 19 nt, Artificial Sequence
  Description of Artificial Sequence: Synthetic oligonucleotide
agaguuauugauucgacug

SEQ ID NO: 2712380 - RNA, 19 nt, Artificial Sequence
  Description of Artificial Sequence: Synthetic oligonucleotide
aagaacaagaguuauugau

SEQ ID NO: 2712381 - RNA, 19 nt, Artificial Sequence
  Description of Artificial Sequence: Synthetic oligonucleotide
gaaaaggaguuucugaccc

SEQ ID NO: 2712382 - RNA, 19 nt, Artificial Sequence
  Description of Artificial Sequence: Synthetic oligonucleotide
uuguugaagggaaacaaag

SEQ ID NO: 2712383 - RNA, 19 nt, Artificial Sequence
  Description of Artificial Sequence: Synthetic oligonucleotide
ucaagaacaagaguuauug

SEQ ID NO: 2712384 - RNA, 19 nt, Artificial Sequence
  Description of Artificial Sequence: Synthetic oligonucleotide
uucagaaucuugaagucag

SEQ ID NO: 2712385 - RNA, 19 nt, Artificial Sequence
  Description of Artificial Sequence: Synthetic oligonucleotide
aagagcaccuaauaguuug

SEQ ID NO: 2712386 - RNA, 19 nt, Artificial Sequence
  Description of Artificial Sequence: Synthetic oligonucleotide
gaaguaguuuucuuaacag

SEQ ID NO: 2712387 - RNA, 19 nt, Artificial Sequence
  Description of Artificial Sequence: Synthetic oligonucleotide
uguugaagggaaacaaagg

SEQ ID NO: 2712388 - RNA, 19 nt, Artificial Sequence
  Description of Artificial Sequence: Synthetic oligonucleotide
uuaagaaucuucuuuguaa

SEQ ID NO: 2712389 - RNA, 19 nt, Artificial Sequence
  Description of Artificial Sequence: Synthetic oligonucleotide
aacacucauauuaauacuc

SEQ ID NO: 2712390 - RNA, 19 nt, Artificial Sequence
  Description of Artificial Sequence: Synthetic oligonucleotide
uaguucagaaucuugaagu

SEQ ID NO: 2712391 - RNA, 19 nt, Artificial Sequence
  Description of Artificial Sequence: Synthetic oligonucleotide
ugauaaauggcccagcaua

SEQ ID NO: 2712392 - RNA, 19 nt, Artificial Sequence
  Description of Artificial Sequence: Synthetic oligonucleotide
uuauugauucgacugggcc

SEQ ID NO: 2712393 - RNA, 19 nt, Artificial Sequence
  Description of Artificial Sequence: Synthetic oligonucleotide
uuagguaaguuucaagaac

SEQ ID NO: 2712394 - RNA, 19 nt, Artificial Sequence
  Description of Artificial Sequence: Synthetic oligonucleotide
uagguaaguuucaagaaca

SEQ ID NO: 2712395 - RNA, 19 nt, Artificial Sequence
  Description of Artificial Sequence: Synthetic oligonucleotide
cuugaagucagguuugacc

SEQ ID NO: 2712396 - RNA, 19 nt, Artificial Sequence
  Description of Artificial Sequence: Synthetic oligonucleotide
ucuagcuugcucaagcacc

SEQ ID NO: 2712397 - RNA, 19 nt, Artificial Sequence
  Description of Artificial Sequence: Synthetic oligonucleotide
uugaagagcaccuaauagu

SEQ ID NO: 2712398 - RNA, 19 nt, Artificial Sequence
  Description of Artificial Sequence: Synthetic oligonucleotide
auauuaauacucugagauc

SEQ ID NO: 2712399 - RNA, 19 nt, Artificial Sequence
  Description of Artificial Sequence: Synthetic oligonucleotide
cucauauuaauacucugag

SEQ ID NO: 2712400 - RNA, 19 nt, Artificial Sequence
  Description of Artificial Sequence: Synthetic oligonucleotide
aauacucugagauccgagu

SEQ ID NO: 2712401 - RNA, 19 nt, Artificial Sequence
  Description of Artificial Sequence: Synthetic oligonucleotide
aaacaaagggacuuccacu

SEQ ID NO: 2712402 - RNA, 19 nt, Artificial Sequence
  Description of Artificial Sequence: Synthetic oligonucleotide
ucaucuauaucccggguca

SEQ ID NO: 2712403 - RNA, 19 nt, Artificial Sequence
  Description of Artificial Sequence: Synthetic oligonucleotide
uauugauucgacugggccc

SEQ ID NO: 2712404 - RNA, 19 nt, Artificial Sequence
  Description of Artificial Sequence: Synthetic oligonucleotide
uccauuuucgucuucauuu

SEQ ID NO: 2712405 - RNA, 19 nt, Artificial Sequence
  Description of Artificial Sequence: Synthetic oligonucleotide
uaacacagcaucaggagga

SEQ ID NO: 2712406 - RNA, 19 nt, Artificial Sequence
  Description of Artificial Sequence: Synthetic oligonucleotide
gaguuauugauucgacugg

SEQ ID NO: 2712407 - RNA, 19 nt, Artificial Sequence
  Description of Artificial Sequence: Synthetic oligonucleotide
uuugauaaauggcccagca

SEQ ID NO: 2712408 - RNA, 19 nt, Artificial Sequence
  Description of Artificial Sequence: Synthetic oligonucleotide
guaaguuucaagaacaaga

SEQ ID NO: 2712409 - RNA, 19 nt, Artificial Sequence
  Description of Artificial Sequence: Synthetic oligonucleotide
ugucacuggguuaagaauc

SEQ ID NO: 2712410 - RNA, 19 nt, Artificial Sequence
  Description of Artificial Sequence: Synthetic oligonucleotide
acuaacacagcaucaggag

SEQ ID NO: 2712411 - RNA, 19 nt, Artificial Sequence
  Description of Artificial Sequence: Synthetic oligonucleotide
cuuuuauuugaagagcacc

SEQ ID NO: 2712412 - RNA, 19 nt, Artificial Sequence
  Description of Artificial Sequence: Synthetic oligonucleotide
uuuagguaaguuucaagaa

SEQ ID NO: 2712413 - RNA, 19 nt, Artificial Sequence
  Description of Artificial Sequence: Synthetic oligonucleotide
aauaguuugacaguuucua

SEQ ID NO: 2712414 - RNA, 19 nt, Artificial Sequence
  Description of Artificial Sequence: Synthetic oligonucleotide
gaaacaaagggacuuccac

SEQ ID NO: 2712415 - RNA, 19 nt, Artificial Sequence
  Description of Artificial Sequence: Synthetic oligonucleotide
uugaguuugguugucacug

SEQ ID NO: 2712416 - RNA, 19 nt, Artificial Sequence
  Description of Artificial Sequence: Synthetic oligonucleotide
gcaccuaauaguuugacag

SEQ ID NO: 2712417 - RNA, 19 nt, Artificial Sequence
  Description of Artificial Sequence: Synthetic oligonucleotide
aaaggaguuucugacccac

SEQ ID NO: 2712418 - RNA, 19 nt, Artificial Sequence
  Description of Artificial Sequence: Synthetic oligonucleotide
aagaguuauugauucgacu

SEQ ID NO: 2712419 - RNA, 19 nt, Artificial Sequence
  Description of Artificial Sequence: Synthetic oligonucleotide
ucuucagcaaggauaggug

SEQ ID NO: 2712420 - RNA, 19 nt, Artificial Sequence
  Description of Artificial Sequence: Synthetic oligonucleotide
cauauuaauacucugagau

SEQ ID NO: 2712421 - RNA, 19 nt, Artificial Sequence
  Description of Artificial Sequence: Synthetic oligonucleotide
aaguucaucuauaucccgg

SEQ ID NO: 2712422 - RNA, 19 nt, Artificial Sequence
  Description of Artificial Sequence: Synthetic oligonucleotide
aguaguuuucuuaacagcu

SEQ ID NO: 2712423 - RNA, 19 nt, Artificial Sequence
  Description of Artificial Sequence: Synthetic oligonucleotide
cauccauaauacaauggcc

SEQ ID NO: 2712424 - RNA, 19 nt, Artificial Sequence
  Description of Artificial Sequence: Synthetic oligonucleotide
uaaauggcccagcauagac

SEQ ID NO: 2712425 - RNA, 19 nt, Artificial Sequence
  Description of Artificial Sequence: Synthetic oligonucleotide
cuaacacagcaucaggagg

SEQ ID NO: 2712426 - RNA, 19 nt, Artificial Sequence
  Description of Artificial Sequence: Synthetic oligonucleotide
gauaaauggcccagcauag

SEQ ID NO: 2712427 - RNA, 19 nt, Artificial Sequence
  Description of Artificial Sequence: Synthetic oligonucleotide
uucuuaacagcuucuguac

SEQ ID NO: 2712428 - RNA, 19 nt, Artificial Sequence
  Description of Artificial Sequence: Synthetic oligonucleotide
auacucugagauccgaguc

SEQ ID NO: 2712429 - RNA, 19 nt, Artificial Sequence
  Description of Artificial Sequence: Synthetic oligonucleotide
uagggaauggcccacuaac

SEQ ID NO: 2712430 - RNA, 19 nt, Artificial Sequence
  Description of Artificial Sequence: Synthetic oligonucleotide
cuaauaguuugacaguuuc

SEQ ID NO: 2712431 - RNA, 19 nt, Artificial Sequence
  Description of Artificial Sequence: Synthetic oligonucleotide
gaauggcccacuaacacag

SEQ ID NO: 2712432 - RNA, 19 nt, Artificial Sequence
  Description of Artificial Sequence: Synthetic oligonucleotide
uaauacucugagauccgag

SEQ ID NO: 2712433 - RNA, 19 nt, Artificial Sequence
  Description of Artificial Sequence: Synthetic oligonucleotide
uucuuuguaauuccugaaa

SEQ ID NO: 2712434 - RNA, 19 nt, Artificial Sequence
  Description of Artificial Sequence: Synthetic oligonucleotide
auaguuugacaguuucuag

SEQ ID NO: 2712435 - RNA, 19 nt, Artificial Sequence
  Description of Artificial Sequence: Synthetic oligonucleotide
uagacaguugacaucucug

SEQ ID NO: 2712436 - RNA, 19 nt, Artificial Sequence
  Description of Artificial Sequence: Synthetic oligonucleotide
caagcuguuaaacaucuuc

SEQ ID NO: 2712437 - RNA, 19 nt, Artificial Sequence
  Description of Artificial Sequence: Synthetic oligonucleotide
aaguuucaagaacaagagu

SEQ ID NO: 2712438 - RNA, 19 nt, Artificial Sequence
  Description of Artificial Sequence: Synthetic oligonucleotide
uguuaaacaucuucuucac

SEQ ID NO: 2712439 - RNA, 19 nt, Artificial Sequence
  Description of Artificial Sequence: Synthetic oligonucleotide
uggguuaagaaucuucuuu

SEQ ID NO: 2712440 - RNA, 19 nt, Artificial Sequence
  Description of Artificial Sequence: Synthetic oligonucleotide
aaaagagaacugcacggau

SEQ ID NO: 2712441 - RNA, 19 nt, Artificial Sequence
  Description of Artificial Sequence: Synthetic oligonucleotide
ugagauccgagucuaggga

SEQ ID NO: 2712442 - RNA, 19 nt, Artificial Sequence
  Description of Artificial Sequence: Synthetic oligonucleotide
uguacaucuuugaguuugg

SEQ ID NO: 2712443 - RNA, 19 nt, Artificial Sequence
  Description of Artificial Sequence: Synthetic oligonucleotide
uaauacaauggccuccuuc

SEQ ID NO: 2712444 - RNA, 19 nt, Artificial Sequence
  Description of Artificial Sequence: Synthetic oligonucleotide
cuguuaaacaucuucuuca

SEQ ID NO: 2712445 - RNA, 19 nt, Artificial Sequence
  Description of Artificial Sequence: Synthetic oligonucleotide
aguuugacaguuucuagaa

SEQ ID NO: 2712446 - RNA, 19 nt, Artificial Sequence
  Description of Artificial Sequence: Synthetic oligonucleotide
aguuauugauucgacuggg

SEQ ID NO: 2712447 - RNA, 19 nt, Artificial Sequence
  Description of Artificial Sequence: Synthetic oligonucleotide
guuucugacccacugaguc

SEQ ID NO: 2712448 - RNA, 19 nt, Artificial Sequence
  Description of Artificial Sequence: Synthetic oligonucleotide
uaauaguuugacaguuucu

SEQ ID NO: 2712449 - RNA, 19 nt, Artificial Sequence
  Description of Artificial Sequence: Synthetic oligonucleotide
guuuuagguaaguuucaag

SEQ ID NO: 2712450 - RNA, 19 nt, Artificial Sequence
  Description of Artificial Sequence: Synthetic oligonucleotide
aagggacuuccacucuagc

SEQ ID NO: 2712451 - RNA, 19 nt, Artificial Sequence
  Description of Artificial Sequence: Synthetic oligonucleotide
agcauagacaguugacauc

SEQ ID NO: 2712452 - RNA, 19 nt, Artificial Sequence
  Description of Artificial Sequence: Synthetic oligonucleotide
uuccacucuagcuugcuca

SEQ ID NO: 2712453 - RNA, 19 nt, Artificial Sequence
  Description of Artificial Sequence: Synthetic oligonucleotide
uauaucccgggucaggaaa

SEQ ID NO: 2712454 - RNA, 19 nt, Artificial Sequence
  Description of Artificial Sequence: Synthetic oligonucleotide
ucugagauccgagucuagg

SEQ ID NO: 2712455 - RNA, 19 nt, Artificial Sequence
  Description of Artificial Sequence: Synthetic oligonucleotide
ucuuaacagcuucuguaca

SEQ ID NO: 2712456 - RNA, 19 nt, Artificial Sequence
  Description of Artificial Sequence: Synthetic oligonucleotide
cugagauccgagucuaggg

SEQ ID NO: 2712457 - RNA, 19 nt, Artificial Sequence
  Description of Artificial Sequence: Synthetic oligonucleotide
caggcauucuaaaacacuc

SEQ ID NO: 2712458 - RNA, 19 nt, Artificial Sequence
  Description of Artificial Sequence: Synthetic oligonucleotide
cauucuaaaacacucauau

SEQ ID NO: 2712459 - RNA, 19 nt, Artificial Sequence
  Description of Artificial Sequence: Synthetic oligonucleotide
aggaaguaguuuucuuaac

SEQ ID NO: 2712460 - RNA, 19 nt, Artificial Sequence
  Description of Artificial Sequence: Synthetic oligonucleotide
uucgacugggcccaagcug

SEQ ID NO: 2712461 - RNA, 19 nt, Artificial Sequence
  Description of Artificial Sequence: Synthetic oligonucleotide
cucuuuuauuugaagagca

SEQ ID NO: 2712462 - RNA, 19 nt, Artificial Sequence
  Description of Artificial Sequence: Synthetic oligonucleotide
gaaucuugaagucagguuu

SEQ ID NO: 2712463 - RNA, 19 nt, Artificial Sequence
  Description of Artificial Sequence: Synthetic oligonucleotide
aucucuucagcaaggauag

SEQ ID NO: 2712464 - RNA, 19 nt, Artificial Sequence
  Description of Artificial Sequence: Synthetic oligonucleotide
ucagaaucuugaagucagg

SEQ ID NO: 2712465 - RNA, 19 nt, Artificial Sequence
  Description of Artificial Sequence: Synthetic oligonucleotide
accagcucauccauaauac

SEQ ID NO: 2712466 - RNA, 19 nt, Artificial Sequence
  Description of Artificial Sequence: Synthetic oligonucleotide
aaucuugaagucagguuug

SEQ ID NO: 2712467 - RNA, 19 nt, Artificial Sequence
  Description of Artificial Sequence: Synthetic oligonucleotide
aucaggaggaaguaguuuu

SEQ ID NO: 2712468 - RNA, 19 nt, Artificial Sequence
  Description of Artificial Sequence: Synthetic oligonucleotide
uacucugagauccgagucu

SEQ ID NO: 2712469 - RNA, 19 nt, Artificial Sequence
  Description of Artificial Sequence: Synthetic oligonucleotide
gaguuugguugucacuggg

SEQ ID NO: 2712470 - RNA, 19 nt, Artificial Sequence
  Description of Artificial Sequence: Synthetic oligonucleotide
auagacaguugacaucucu

SEQ ID NO: 2712471 - RNA, 19 nt, Artificial Sequence
  Description of Artificial Sequence: Synthetic oligonucleotide
acaagaguuauugauucga

SEQ ID NO: 2712472 - RNA, 19 nt, Artificial Sequence
  Description of Artificial Sequence: Synthetic oligonucleotide
agacaguugacaucucugu

SEQ ID NO: 2712473 - RNA, 19 nt, Artificial Sequence
  Description of Artificial Sequence: Synthetic oligonucleotide
gaggaaguaguuuucuuaa

SEQ ID NO: 2712474 - RNA, 19 nt, Artificial Sequence
  Description of Artificial Sequence: Synthetic oligonucleotide
uuucugacccacugagucc

SEQ ID NO: 2712475 - RNA, 19 nt, Artificial Sequence
  Description of Artificial Sequence: Synthetic oligonucleotide
uuugaguuugguugucacu

SEQ ID NO: 2712476 - RNA, 19 nt, Artificial Sequence
  Description of Artificial Sequence: Synthetic oligonucleotide
agcaaggauaggugaaaag

SEQ ID NO: 2712477 - RNA, 19 nt, Artificial Sequence
  Description of Artificial Sequence: Synthetic oligonucleotide
uagaagaagaaaguucauc

SEQ ID NO: 2712478 - RNA, 19 nt, Artificial Sequence
  Description of Artificial Sequence: Synthetic oligonucleotide
aaaaggaguuucugaccca

SEQ ID NO: 2712479 - RNA, 19 nt, Artificial Sequence
  Description of Artificial Sequence: Synthetic oligonucleotide
ugcacggauuguugaaggg

SEQ ID NO: 2712480 - RNA, 19 nt, Artificial Sequence
  Description of Artificial Sequence: Synthetic oligonucleotide
ucccgggucaggaaaagga

SEQ ID NO: 2712481 - RNA, 19 nt, Artificial Sequence
  Description of Artificial Sequence: Synthetic oligonucleotide
aagcaccucuuuuauuuga

SEQ ID NO: 2712482 - RNA, 19 nt, Artificial Sequence
  Description of Artificial Sequence: Synthetic oligonucleotide
auuugaagagcaccuaaua

SEQ ID NO: 2712483 - RNA, 19 nt, Artificial Sequence
  Description of Artificial Sequence: Synthetic oligonucleotide
uucagcaaggauaggugaa

SEQ ID NO: 2712484 - RNA, 19 nt, Artificial Sequence
  Description of Artificial Sequence: Synthetic oligonucleotide
ggguuaagaaucuucuuug

SEQ ID NO: 2712485 - RNA, 19 nt, Artificial Sequence
  Description of Artificial Sequence: Synthetic oligonucleotide
gauucgacugggcccaagc

SEQ ID NO: 2712486 - RNA, 19 nt, Artificial Sequence
  Description of Artificial Sequence: Synthetic oligonucleotide
cacucuagcuugcucaagc

SEQ ID NO: 2712487 - RNA, 19 nt, Artificial Sequence
  Description of Artificial Sequence: Synthetic oligonucleotide
gauuguugaagggaaacaa

SEQ ID NO: 2712488 - RNA, 19 nt, Artificial Sequence
  Description of Artificial Sequence: Synthetic oligonucleotide
auuaauacucugagauccg

SEQ ID NO: 2712489 - RNA, 19 nt, Artificial Sequence
  Description of Artificial Sequence: Synthetic oligonucleotide
aagaaucuucuuuguaauu

SEQ ID NO: 2712490 - RNA, 19 nt, Artificial Sequence
  Description of Artificial Sequence: Synthetic oligonucleotide
aagggaaacaaagggacuu

SEQ ID NO: 2712491 - RNA, 19 nt, Artificial Sequence
  Description of Artificial Sequence: Synthetic oligonucleotide
uuuaaguuuuagguaaguu

SEQ ID NO: 2712492 - RNA, 19 nt, Artificial Sequence
  Description of Artificial Sequence: Synthetic oligonucleotide
auugauucgacugggccca

SEQ ID NO: 2712493 - RNA, 19 nt, Artificial Sequence
  Description of Artificial Sequence: Synthetic oligonucleotide
acuaguaagguaguucaga

SEQ ID NO: 2712494 - RNA, 19 nt, Artificial Sequence
  Description of Artificial Sequence: Synthetic oligonucleotide
caagaguuauugauucgac

SEQ ID NO: 2712495 - RNA, 19 nt, Artificial Sequence
  Description of Artificial Sequence: Synthetic oligonucleotide
uuuuaaguuuuagguaagu

SEQ ID NO: 2712496 - RNA, 19 nt, Artificial Sequence
  Description of Artificial Sequence: Synthetic oligonucleotide
gucagguuugaccagcuca

SEQ ID NO: 2712497 - RNA, 19 nt, Artificial Sequence
  Description of Artificial Sequence: Synthetic oligonucleotide
agaaucuugaagucagguu

SEQ ID NO: 2712498 - RNA, 19 nt, Artificial Sequence
  Description of Artificial Sequence: Synthetic oligonucleotide
uuuugauaaauggcccagc

SEQ ID NO: 2712499 - RNA, 19 nt, Artificial Sequence
  Description of Artificial Sequence: Synthetic oligonucleotide
uugauaaauggcccagcau

SEQ ID NO: 2712500 - RNA, 19 nt, Artificial Sequence
  Description of Artificial Sequence: Synthetic oligonucleotide
caucucuucagcaaggaua

SEQ ID NO: 2712501 - RNA, 19 nt, Artificial Sequence
  Description of Artificial Sequence: Synthetic oligonucleotide
ggaaguaguuuucuuaaca

SEQ ID NO: 2712502 - RNA, 19 nt, Artificial Sequence
  Description of Artificial Sequence: Synthetic oligonucleotide
uuucaagaacaagaguuau

SEQ ID NO: 2712503 - RNA, 19 nt, Artificial Sequence
  Description of Artificial Sequence: Synthetic oligonucleotide
uuaauacucugagauccga

SEQ ID NO: 2712504 - RNA, 19 nt, Artificial Sequence
  Description of Artificial Sequence: Synthetic oligonucleotide
cugcacggauuguugaagg

SEQ ID NO: 2712505 - RNA, 19 nt, Artificial Sequence
  Description of Artificial Sequence: Synthetic oligonucleotide
uccaggcauucuaaaacac

SEQ ID NO: 2712506 - RNA, 19 nt, Artificial Sequence
  Description of Artificial Sequence: Synthetic oligonucleotide
uucaagaacaagaguuauu

SEQ ID NO: 2712507 - RNA, 19 nt, Artificial Sequence
  Description of Artificial Sequence: Synthetic oligonucleotide
ggaaaaggaguuucugacc

SEQ ID NO: 2712508 - RNA, 19 nt, Artificial Sequence
  Description of Artificial Sequence: Synthetic oligonucleotide
acuggguuaagaaucuucu

SEQ ID NO: 2712509 - RNA, 19 nt, Artificial Sequence
  Description of Artificial Sequence: Synthetic oligonucleotide
cacucauauuaauacucug

SEQ ID NO: 2712510 - RNA, 19 nt, Artificial Sequence
  Description of Artificial Sequence: Synthetic oligonucleotide
aggugaaaagggcuuaaaa

SEQ ID NO: 2712511 - RNA, 19 nt, Artificial Sequence
  Description of Artificial Sequence: Synthetic oligonucleotide
aaagggacuuccacucuag

SEQ ID NO: 2712512 - RNA, 19 nt, Artificial Sequence
  Description of Artificial Sequence: Synthetic oligonucleotide
uugguugucacuggguuaa

SEQ ID NO: 2712513 - RNA, 19 nt, Artificial Sequence
  Description of Artificial Sequence: Synthetic oligonucleotide
uugucacuggguuaagaau

SEQ ID NO: 2712514 - RNA, 19 nt, Artificial Sequence
  Description of Artificial Sequence: Synthetic oligonucleotide
ugcucaagcaccucuuuua

SEQ ID NO: 2712515 - RNA, 19 nt, Artificial Sequence
  Description of Artificial Sequence: Synthetic oligonucleotide
agggacuuccacucuagcu

SEQ ID NO: 2712516 - RNA, 19 nt, Artificial Sequence
  Description of Artificial Sequence: Synthetic oligonucleotide
aaguuuuagguaaguuuca

SEQ ID NO: 2712517 - RNA, 19 nt, Artificial Sequence
  Description of Artificial Sequence: Synthetic oligonucleotide
uucugacccacugagucca

SEQ ID NO: 2712518 - RNA, 19 nt, Artificial Sequence
  Description of Artificial Sequence: Synthetic oligonucleotide
uacaucuuugaguuugguu

SEQ ID NO: 2712519 - RNA, 19 nt, Artificial Sequence
  Description of Artificial Sequence: Synthetic oligonucleotide
ugacccacugaguccaggc

SEQ ID NO: 2712520 - RNA, 19 nt, Artificial Sequence
  Description of Artificial Sequence: Synthetic oligonucleotide
cuaguaagguaguucagaa

SEQ ID NO: 2712521 - RNA, 19 nt, Artificial Sequence
  Description of Artificial Sequence: Synthetic oligonucleotide
aaucuucuuuguaauuccu

SEQ ID NO: 2712522 - RNA, 19 nt, Artificial Sequence
  Description of Artificial Sequence: Synthetic oligonucleotide
uuuauuugaagagcaccua

SEQ ID NO: 2712523 - RNA, 19 nt, Artificial Sequence
  Description of Artificial Sequence: Synthetic oligonucleotide
aacuaguaagguaguucag

SEQ ID NO: 2712524 - RNA, 19 nt, Artificial Sequence
  Description of Artificial Sequence: Synthetic oligonucleotide
cacuaacacagcaucagga

SEQ ID NO: 2712525 - RNA, 19 nt, Artificial Sequence
  Description of Artificial Sequence: Synthetic oligonucleotide
agcaccuaauaguuugaca

SEQ ID NO: 2712526 - RNA, 19 nt, Artificial Sequence
  Description of Artificial Sequence: Synthetic oligonucleotide
aacugcacggauuguugaa

SEQ ID NO: 2712527 - RNA, 19 nt, Artificial Sequence
  Description of Artificial Sequence: Synthetic oligonucleotide
aaauggcccagcauagaca

SEQ ID NO: 2712528 - RNA, 19 nt, Artificial Sequence
  Description of Artificial Sequence: Synthetic oligonucleotide
agaacaagaguuauugauu

SEQ ID NO: 2712529 - RNA, 19 nt, Artificial Sequence
  Description of Artificial Sequence: Synthetic oligonucleotide
gacaguugacaucucuguc

SEQ ID NO: 2712530 - RNA, 19 nt, Artificial Sequence
  Description of Artificial Sequence: Synthetic oligonucleotide
caccucuuuuauuugaaga

SEQ ID NO: 2712531 - RNA, 19 nt, Artificial Sequence
  Description of Artificial Sequence: Synthetic oligonucleotide
uuugguugucacuggguua

SEQ ID NO: 2712532 - RNA, 19 nt, Artificial Sequence
  Description of Artificial Sequence: Synthetic oligonucleotide
agcaucaggaggaaguagu

SEQ ID NO: 2712533 - RNA, 19 nt, Artificial Sequence
  Description of Artificial Sequence: Synthetic oligonucleotide
uuaacagcuucuguacauc

SEQ ID NO: 2712534 - RNA, 19 nt, Artificial Sequence
  Description of Artificial Sequence: Synthetic oligonucleotide
cacuggguuaagaaucuuc

SEQ ID NO: 2712535 - RNA, 19 nt, Artificial Sequence
  Description of Artificial Sequence: Synthetic oligonucleotide
guuaagaaucuucuuugua

SEQ ID NO: 2712536 - RNA, 19 nt, Artificial Sequence
  Description of Artificial Sequence: Synthetic oligonucleotide
gagucuagggaauggccca

SEQ ID NO: 2712537 - RNA, 19 nt, Artificial Sequence
  Description of Artificial Sequence: Synthetic oligonucleotide
caggaaaaggaguuucuga

SEQ ID NO: 2712538 - RNA, 19 nt, Artificial Sequence
  Description of Artificial Sequence: Synthetic oligonucleotide
cuucagcaaggauagguga

SEQ ID NO: 2712539 - RNA, 19 nt, Artificial Sequence
  Description of Artificial Sequence: Synthetic oligonucleotide
aggauaggugaaaagggcu

SEQ ID NO: 2712540 - RNA, 19 nt, Artificial Sequence
  Description of Artificial Sequence: Synthetic oligonucleotide
gaccagcucauccauaaua

SEQ ID NO: 2712541 - RNA, 19 nt, Artificial Sequence
  Description of Artificial Sequence: Synthetic oligonucleotide
gguaaguuucaagaacaag

SEQ ID NO: 2712542 - RNA, 19 nt, Artificial Sequence
  Description of Artificial Sequence: Synthetic oligonucleotide
auucuaaaacacucauauu

SEQ ID NO: 2712543 - RNA, 19 nt, Artificial Sequence
  Description of Artificial Sequence: Synthetic oligonucleotide
gaacugcacggauuguuga

SEQ ID NO: 2712544 - RNA, 19 nt, Artificial Sequence
  Description of Artificial Sequence: Synthetic oligonucleotide
cagcucauccauaauacaa

SEQ ID NO: 2712545 - RNA, 19 nt, Artificial Sequence
  Description of Artificial Sequence: Synthetic oligonucleotide
aucuauaucccgggucagg

SEQ ID NO: 2712546 - RNA, 19 nt, Artificial Sequence
  Description of Artificial Sequence: Synthetic oligonucleotide
agaacugcacggauuguug

SEQ ID NO: 2712547 - RNA, 19 nt, Artificial Sequence
  Description of Artificial Sequence: Synthetic oligonucleotide
acugcacggauuguugaag

SEQ ID NO: 2712548 - RNA, 19 nt, Artificial Sequence
  Description of Artificial Sequence: Synthetic oligonucleotide
gcuguuaaacaucuucuuc

SEQ ID NO: 2712549 - RNA, 19 nt, Artificial Sequence
  Description of Artificial Sequence: Synthetic oligonucleotide
agggaaacaaagggacuuc

SEQ ID NO: 2712550 - RNA, 19 nt, Artificial Sequence
  Description of Artificial Sequence: Synthetic oligonucleotide
acacucauauuaauacucu

SEQ ID NO: 2712551 - RNA, 19 nt, Artificial Sequence
  Description of Artificial Sequence: Synthetic oligonucleotide
acucuagcuugcucaagca

SEQ ID NO: 2712552 - RNA, 19 nt, Artificial Sequence
  Description of Artificial Sequence: Synthetic oligonucleotide
agcuguuaaacaucuucuu

SEQ ID NO: 2712553 - RNA, 19 nt, Artificial Sequence
  Description of Artificial Sequence: Synthetic oligonucleotide
guuauugauucgacugggc

SEQ ID NO: 2712554 - RNA, 19 nt, Artificial Sequence
  Description of Artificial Sequence: Synthetic oligonucleotide
aauggcccacuaacacagc

SEQ ID NO: 2712555 - RNA, 19 nt, Artificial Sequence
  Description of Artificial Sequence: Synthetic oligonucleotide
gagauccgagucuagggaa

SEQ ID NO: 2712556 - RNA, 19 nt, Artificial Sequence
  Description of Artificial Sequence: Synthetic oligonucleotide
cucuagcuugcucaagcac

SEQ ID NO: 2712557 - RNA, 19 nt, Artificial Sequence
  Description of Artificial Sequence: Synthetic oligonucleotide
caagcaccucuuuuauuug

SEQ ID NO: 2712558 - RNA, 19 nt, Artificial Sequence
  Description of Artificial Sequence: Synthetic oligonucleotide
acaguuucuagaagaagaa

SEQ ID NO: 2712559 - RNA, 19 nt, Artificial Sequence
  Description of Artificial Sequence: Synthetic oligonucleotide
auggcccacuaacacagca

SEQ ID NO: 2712560 - RNA, 19 nt, Artificial Sequence
  Description of Artificial Sequence: Synthetic oligonucleotide
auucgacugggcccaagcu

SEQ ID NO: 2712561 - RNA, 19 nt, Artificial Sequence
  Description of Artificial Sequence: Synthetic oligonucleotide
gcucauccauaauacaaug

SEQ ID NO: 2712562 - RNA, 19 nt, Artificial Sequence
  Description of Artificial Sequence: Synthetic oligonucleotide
accuaauaguuugacaguu

SEQ ID NO: 2712563 - RNA, 19 nt, Artificial Sequence
  Description of Artificial Sequence: Synthetic oligonucleotide
guucagaaucuugaaguca

SEQ ID NO: 2712564 - RNA, 19 nt, Artificial Sequence
  Description of Artificial Sequence: Synthetic oligonucleotide
auuguugaagggaaacaaa

SEQ ID NO: 2712565 - RNA, 19 nt, Artificial Sequence
  Description of Artificial Sequence: Synthetic oligonucleotide
ugaguccaggcauucuaaa

SEQ ID NO: 2712566 - RNA, 19 nt, Artificial Sequence
  Description of Artificial Sequence: Synthetic oligonucleotide
acaaagggacuuccacucu

SEQ ID NO: 2712567 - RNA, 19 nt, Artificial Sequence
  Description of Artificial Sequence: Synthetic oligonucleotide
uccgagucuagggaauggc

SEQ ID NO: 2712568 - RNA, 19 nt, Artificial Sequence
  Description of Artificial Sequence: Synthetic oligonucleotide
caagaacaagaguuauuga

SEQ ID NO: 2712569 - RNA, 19 nt, Artificial Sequence
  Description of Artificial Sequence: Synthetic oligonucleotide
uuucgucuucauuucuuuu

SEQ ID NO: 2712570 - RNA, 19 nt, Artificial Sequence
  Description of Artificial Sequence: Synthetic oligonucleotide
uaagguaguucagaaucuu

SEQ ID NO: 2712571 - RNA, 19 nt, Artificial Sequence
  Description of Artificial Sequence: Synthetic oligonucleotide
gggaauggcccacuaacac

SEQ ID NO: 2712572 - RNA, 19 nt, Artificial Sequence
  Description of Artificial Sequence: Synthetic oligonucleotide
caguugacaucucugucca

SEQ ID NO: 2712573 - RNA, 19 nt, Artificial Sequence
  Description of Artificial Sequence: Synthetic oligonucleotide
agucuagggaauggcccac

SEQ ID NO: 2712574 - RNA, 19 nt, Artificial Sequence
  Description of Artificial Sequence: Synthetic oligonucleotide
uccacucuagcuugcucaa

SEQ ID NO: 2712575 - RNA, 19 nt, Artificial Sequence
  Description of Artificial Sequence: Synthetic oligonucleotide
agcucauccauaauacaau

SEQ ID NO: 2712576 - RNA, 19 nt, Artificial Sequence
  Description of Artificial Sequence: Synthetic oligonucleotide
uugcucaagcaccucuuuu

SEQ ID NO: 2712577 - RNA, 19 nt, Artificial Sequence
  Description of Artificial Sequence: Synthetic oligonucleotide
cacggauuguugaagggaa

SEQ ID NO: 2712578 - RNA, 19 nt, Artificial Sequence
  Description of Artificial Sequence: Synthetic oligonucleotide
ccucuuuuauuugaagagc

SEQ ID NO: 2712579 - RNA, 19 nt, Artificial Sequence
  Description of Artificial Sequence: Synthetic oligonucleotide
gauccgagucuagggaaug

SEQ ID NO: 2712580 - RNA, 19 nt, Artificial Sequence
  Description of Artificial Sequence: Synthetic oligonucleotide
ucuagggaauggcccacua

SEQ ID NO: 2712581 - RNA, 19 nt, Artificial Sequence
  Description of Artificial Sequence: Synthetic oligonucleotide
ggaauggcccacuaacaca

SEQ ID NO: 2712582 - RNA, 19 nt, Artificial Sequence
  Description of Artificial Sequence: Synthetic oligonucleotide
cagcuucuguacaucuuug

SEQ ID NO: 2712583 - RNA, 19 nt, Artificial Sequence
  Description of Artificial Sequence: Synthetic oligonucleotide
ucuugaagucagguuugac

SEQ ID NO: 2712584 - RNA, 19 nt, Artificial Sequence
  Description of Artificial Sequence: Synthetic oligonucleotide
auaaauggcccagcauaga

SEQ ID NO: 2712585 - RNA, 19 nt, Artificial Sequence
  Description of Artificial Sequence: Synthetic oligonucleotide
gauaggugaaaagggcuua

SEQ ID NO: 2712586 - RNA, 19 nt, Artificial Sequence
  Description of Artificial Sequence: Synthetic oligonucleotide
uggcccacuaacacagcau

SEQ ID NO: 2712587 - RNA, 19 nt, Artificial Sequence
  Description of Artificial Sequence: Synthetic oligonucleotide
auccgagucuagggaaugg

SEQ ID NO: 2712588 - RNA, 19 nt, Artificial Sequence
  Description of Artificial Sequence: Synthetic oligonucleotide
gguaguucagaaucuugaa

SEQ ID NO: 2712589 - RNA, 19 nt, Artificial Sequence
  Description of Artificial Sequence: Synthetic oligonucleotide
cuuaacagcuucuguacau

SEQ ID NO: 2712590 - RNA, 19 nt, Artificial Sequence
  Description of Artificial Sequence: Synthetic oligonucleotide
ugggcccaagcuguuaaac

SEQ ID NO: 2712591 - RNA, 19 nt, Artificial Sequence
  Description of Artificial Sequence: Synthetic oligonucleotide
uaucccgggucaggaaaag

SEQ ID NO: 2712592 - RNA, 19 nt, Artificial Sequence
  Description of Artificial Sequence: Synthetic oligonucleotide
aguuugguugucacugggu

SEQ ID NO: 2712593 - RNA, 19 nt, Artificial Sequence
  Description of Artificial Sequence: Synthetic oligonucleotide
cuaaaacacucauauuaau

SEQ ID NO: 2712594 - RNA, 19 nt, Artificial Sequence
  Description of Artificial Sequence: Synthetic oligonucleotide
cgagucuagggaauggccc

SEQ ID NO: 2712595 - RNA, 19 nt, Artificial Sequence
  Description of Artificial Sequence: Synthetic oligonucleotide
aggaggaaguaguuuucuu

SEQ ID NO: 2712596 - RNA, 19 nt, Artificial Sequence
  Description of Artificial Sequence: Synthetic oligonucleotide
gagcaccuaauaguuugac

SEQ ID NO: 2712597 - RNA, 19 nt, Artificial Sequence
  Description of Artificial Sequence: Synthetic oligonucleotide
gcauagacaguugacaucu

SEQ ID NO: 2712598 - RNA, 19 nt, Artificial Sequence
  Description of Artificial Sequence: Synthetic oligonucleotide
aggcauucuaaaacacuca

SEQ ID NO: 2712599 - RNA, 19 nt, Artificial Sequence
  Description of Artificial Sequence: Synthetic oligonucleotide
ccacuaacacagcaucagg

SEQ ID NO: 2712600 - RNA, 19 nt, Artificial Sequence
  Description of Artificial Sequence: Synthetic oligonucleotide
gggaaacaaagggacuucc

SEQ ID NO: 2712601 - RNA, 19 nt, Artificial Sequence
  Description of Artificial Sequence: Synthetic oligonucleotide
aacagcuucuguacaucuu

SEQ ID NO: 2712602 - RNA, 19 nt, Artificial Sequence
  Description of Artificial Sequence: Synthetic oligonucleotide
caucuuugaguuugguugu

SEQ ID NO: 2712603 - RNA, 19 nt, Artificial Sequence
  Description of Artificial Sequence: Synthetic oligonucleotide
uaggugaaaagggcuuaaa

SEQ ID NO: 2712604 - RNA, 19 nt, Artificial Sequence
  Description of Artificial Sequence: Synthetic oligonucleotide
gcaccucuuuuauuugaag

SEQ ID NO: 2712605 - RNA, 19 nt, Artificial Sequence
  Description of Artificial Sequence: Synthetic oligonucleotide
auaggugaaaagggcuuaa

SEQ ID NO: 2712606 - RNA, 19 nt, Artificial Sequence
  Description of Artificial Sequence: Synthetic oligonucleotide
ggucaggaaaaggaguuuc

SEQ ID NO: 2712607 - RNA, 19 nt, Artificial Sequence
  Description of Artificial Sequence: Synthetic oligonucleotide
agggaauggcccacuaaca

SEQ ID NO: 2712608 - RNA, 19 nt, Artificial Sequence
  Description of Artificial Sequence: Synthetic oligonucleotide
ucuguacaucuuugaguuu

SEQ ID NO: 2712609 - RNA, 19 nt, Artificial Sequence
  Description of Artificial Sequence: Synthetic oligonucleotide
ccauuuucgucuucauuuc

SEQ ID NO: 2712610 - RNA, 19 nt, Artificial Sequence
  Description of Artificial Sequence: Synthetic oligonucleotide
caucuauaucccgggucag

SEQ ID NO: 2712611 - RNA, 19 nt, Artificial Sequence
  Description of Artificial Sequence: Synthetic oligonucleotide
cuuccacucuagcuugcuc

SEQ ID NO: 2712612 - RNA, 19 nt, Artificial Sequence
  Description of Artificial Sequence: Synthetic oligonucleotide
guaagguaguucagaaucu

SEQ ID NO: 2712613 - RNA, 19 nt, Artificial Sequence
  Description of Artificial Sequence: Synthetic oligonucleotide
ggauuguugaagggaaaca

SEQ ID NO: 2712614 - RNA, 19 nt, Artificial Sequence
  Description of Artificial Sequence: Synthetic oligonucleotide
cacagccucaauguuacaa

SEQ ID NO: 2712615 - RNA, 19 nt, Artificial Sequence
  Description of Artificial Sequence: Synthetic oligonucleotide
cucuucagcaaggauaggu

SEQ ID NO: 2712616 - RNA, 19 nt, Artificial Sequence
  Description of Artificial Sequence: Synthetic oligonucleotide
aucccgggucaggaaaagg

SEQ ID NO: 2712617 - RNA, 19 nt, Artificial Sequence
  Description of Artificial Sequence: Synthetic oligonucleotide
ggcccacuaacacagcauc

SEQ ID NO: 2712618 - RNA, 19 nt, Artificial Sequence
  Description of Artificial Sequence: Synthetic oligonucleotide
ggaguuucugacccacuga

SEQ ID NO: 2712619 - RNA, 19 nt, Artificial Sequence
  Description of Artificial Sequence: Synthetic oligonucleotide
ccgagucuagggaauggcc

SEQ ID NO: 2712620 - RNA, 19 nt, Artificial Sequence
  Description of Artificial Sequence: Synthetic oligonucleotide
cucugagauccgagucuag

SEQ ID NO: 2712621 - RNA, 19 nt, Artificial Sequence
  Description of Artificial Sequence: Synthetic oligonucleotide
agagcaccuaauaguuuga

SEQ ID NO: 2712622 - RNA, 19 nt, Artificial Sequence
  Description of Artificial Sequence: Synthetic oligonucleotide
cccacuaacacagcaucag

SEQ ID NO: 2712623 - RNA, 19 nt, Artificial Sequence
  Description of Artificial Sequence: Synthetic oligonucleotide
cauagacaguugacaucuc

SEQ ID NO: 2712624 - RNA, 19 nt, Artificial Sequence
  Description of Artificial Sequence: Synthetic oligonucleotide
aucuugaagucagguuuga

SEQ ID NO: 2712625 - RNA, 19 nt, Artificial Sequence
  Description of Artificial Sequence: Synthetic oligonucleotide
agguaaguuucaagaacaa

SEQ ID NO: 2712626 - RNA, 19 nt, Artificial Sequence
  Description of Artificial Sequence: Synthetic oligonucleotide
gguuaagaaucuucuuugu

SEQ ID NO: 2712627 - RNA, 19 nt, Artificial Sequence
  Description of Artificial Sequence: Synthetic oligonucleotide
caaagggacuuccacucua

SEQ ID NO: 2712628 - RNA, 19 nt, Artificial Sequence
  Description of Artificial Sequence: Synthetic oligonucleotide
ugauucgacugggcccaag

SEQ ID NO: 2712629 - RNA, 19 nt, Artificial Sequence
  Description of Artificial Sequence: Synthetic oligonucleotide
gacuuccacucuagcuugc

SEQ ID NO: 2712630 - RNA, 19 nt, Artificial Sequence
  Description of Artificial Sequence: Synthetic oligonucleotide
agccucaauguuacaauuu

SEQ ID NO: 2712631 - RNA, 19 nt, Artificial Sequence
  Description of Artificial Sequence: Synthetic oligonucleotide
cccagcauagacaguugac

SEQ ID NO: 2712632 - RNA, 19 nt, Artificial Sequence
  Description of Artificial Sequence: Synthetic oligonucleotide
ggcauucuaaaacacucau

SEQ ID NO: 2712633 - RNA, 19 nt, Artificial Sequence
  Description of Artificial Sequence: Synthetic oligonucleotide
auaauacaauggccuccuu

SEQ ID NO: 2712634 - RNA, 19 nt, Artificial Sequence
  Description of Artificial Sequence: Synthetic oligonucleotide
acuuccacucuagcuugcu

SEQ ID NO: 2712635 - RNA, 19 nt, Artificial Sequence
  Description of Artificial Sequence: Synthetic oligonucleotide
ggaaacaaagggacuucca

SEQ ID NO: 2712636 - RNA, 19 nt, Artificial Sequence
  Description of Artificial Sequence: Synthetic oligonucleotide
agauccgagucuagggaau

SEQ ID NO: 2712637 - RNA, 19 nt, Artificial Sequence
  Description of Artificial Sequence: Synthetic oligonucleotide
caccuaauaguuugacagu

SEQ ID NO: 2712638 - RNA, 19 nt, Artificial Sequence
  Description of Artificial Sequence: Synthetic oligonucleotide
gggacuuccacucuagcuu

SEQ ID NO: 2712639 - RNA, 19 nt, Artificial Sequence
  Description of Artificial Sequence: Synthetic oligonucleotide
cuauaucccgggucaggaa

SEQ ID NO: 2712640 - RNA, 19 nt, Artificial Sequence
  Description of Artificial Sequence: Synthetic oligonucleotide
auaucccgggucaggaaaa

SEQ ID NO: 2712641 - RNA, 19 nt, Artificial Sequence
  Description of Artificial Sequence: Synthetic oligonucleotide
cagaaucuugaagucaggu

SEQ ID NO: 2712642 - RNA, 19 nt, Artificial Sequence
  Description of Artificial Sequence: Synthetic oligonucleotide
cauuuucgucuucauuucu

SEQ ID NO: 2712643 - RNA, 19 nt, Artificial Sequence
  Description of Artificial Sequence: Synthetic oligonucleotide
gucacuggguuaagaaucu

SEQ ID NO: 2712644 - RNA, 19 nt, Artificial Sequence
  Description of Artificial Sequence: Synthetic oligonucleotide
aguugacaucucuguccau

SEQ ID NO: 2712645 - RNA, 19 nt, Artificial Sequence
  Description of Artificial Sequence: Synthetic oligonucleotide
gcacggauuguugaaggga

SEQ ID NO: 2712646 - RNA, 19 nt, Artificial Sequence
  Description of Artificial Sequence: Synthetic oligonucleotide
gucaggaaaaggaguuucu

SEQ ID NO: 2712647 - RNA, 19 nt, Artificial Sequence
  Description of Artificial Sequence: Synthetic oligonucleotide
ggcccaagcuguuaaacau

SEQ ID NO: 2712648 - RNA, 19 nt, Artificial Sequence
  Description of Artificial Sequence: Synthetic oligonucleotide
cggauuguugaagggaaac

SEQ ID NO: 2712649 - RNA, 19 nt, Artificial Sequence
  Description of Artificial Sequence: Synthetic oligonucleotide
ucacuggguuaagaaucuu

SEQ ID NO: 2712650 - RNA, 19 nt, Artificial Sequence
  Description of Artificial Sequence: Synthetic oligonucleotide
gaagagcaccuaauaguuu

SEQ ID NO: 2712651 - RNA, 19 nt, Artificial Sequence
  Description of Artificial Sequence: Synthetic oligonucleotide
acggauuguugaagggaaa

SEQ ID NO: 2712652 - RNA, 19 nt, Artificial Sequence
  Description of Artificial Sequence: Synthetic oligonucleotide
cagcaaggauaggugaaaa

SEQ ID NO: 2712653 - RNA, 19 nt, Artificial Sequence
  Description of Artificial Sequence: Synthetic oligonucleotide
cagguuugaccagcucauc

SEQ ID NO: 2712654 - RNA, 19 nt, Artificial Sequence
  Description of Artificial Sequence: Synthetic oligonucleotide
gcccagcauagacaguuga

SEQ ID NO: 2712655 - RNA, 19 nt, Artificial Sequence
  Description of Artificial Sequence: Synthetic oligonucleotide
guccauuuucgucuucauu

SEQ ID NO: 2712656 - RNA, 19 nt, Artificial Sequence
  Description of Artificial Sequence: Synthetic oligonucleotide
cagccucaauguuacaauu

SEQ ID NO: 2712657 - RNA, 19 nt, Artificial Sequence
  Description of Artificial Sequence: Synthetic oligonucleotide
cuggguuaagaaucuucuu

SEQ ID NO: 2712658 - RNA, 19 nt, Artificial Sequence
  Description of Artificial Sequence: Synthetic oligonucleotide
gcccaagcuguuaaacauc

SEQ ID NO: 2712659 - RNA, 19 nt, Artificial Sequence
  Description of Artificial Sequence: Synthetic oligonucleotide
ccaggcauucuaaaacacu

SEQ ID NO: 2712660 - RNA, 19 nt, Artificial Sequence
  Description of Artificial Sequence: Synthetic oligonucleotide
ggauaggugaaaagggcuu

SEQ ID NO: 2712661 - RNA, 19 nt, Artificial Sequence
  Description of Artificial Sequence: Synthetic oligonucleotide
guacaucuuugaguuuggu

SEQ ID NO: 2712662 - RNA, 19 nt, Artificial Sequence
  Description of Artificial Sequence: Synthetic oligonucleotide
gcucaagcaccucuuuuau

SEQ ID NO: 2712663 - RNA, 19 nt, Artificial Sequence
  Description of Artificial Sequence: Synthetic oligonucleotide
cuugcucaagcaccucuuu

SEQ ID NO: 2712664 - RNA, 19 nt, Artificial Sequence
  Description of Artificial Sequence: Synthetic oligonucleotide
cucaagcaccucuuuuauu

SEQ ID NO: 2712665 - RNA, 19 nt, Artificial Sequence
  Description of Artificial Sequence: Synthetic oligonucleotide
cugggcccaagcuguuaaa

SEQ ID NO: 2712666 - RNA, 19 nt, Artificial Sequence
  Description of Artificial Sequence: Synthetic oligonucleotide
uugauucgacugggcccaa

SEQ ID NO: 2712667 - RNA, 19 nt, Artificial Sequence
  Description of Artificial Sequence: Synthetic oligonucleotide
gcccacuaacacagcauca

SEQ ID NO: 2712668 - RNA, 19 nt, Artificial Sequence
  Description of Artificial Sequence: Synthetic oligonucleotide
caucaggaggaaguaguuu

SEQ ID NO: 2712669 - RNA, 19 nt, Artificial Sequence
  Description of Artificial Sequence: Synthetic oligonucleotide
ccuaauaguuugacaguuu

SEQ ID NO: 2712670 - RNA, 19 nt, Artificial Sequence
  Description of Artificial Sequence: Synthetic oligonucleotide
ccacucuagcuugcucaag

SEQ ID NO: 2712671 - RNA, 19 nt, Artificial Sequence
  Description of Artificial Sequence: Synthetic oligonucleotide
ccgggucaggaaaaggagu

SEQ ID NO: 2712672 - RNA, 19 nt, Artificial Sequence
  Description of Artificial Sequence: Synthetic oligonucleotide
gucuagggaauggcccacu

SEQ ID NO: 2712673 - RNA, 19 nt, Artificial Sequence
  Description of Artificial Sequence: Synthetic oligonucleotide
cacugaguccaggcauucu

SEQ ID NO: 2712674 - RNA, 19 nt, Artificial Sequence
  Description of Artificial Sequence: Synthetic oligonucleotide
gcaucaggaggaaguaguu

SEQ ID NO: 2712675 - RNA, 19 nt, Artificial Sequence
  Description of Artificial Sequence: Synthetic oligonucleotide
aacagcaucggcuaguucc

SEQ ID NO: 2712676 - RNA, 19 nt, Artificial Sequence
  Description of Artificial Sequence: Synthetic oligonucleotide
acaaacuugucauagaccc

SEQ ID NO: 2712677 - RNA, 19 nt, Artificial Sequence
  Description of Artificial Sequence: Synthetic oligonucleotide
ucuacaaucuuauccaggg

SEQ ID NO: 2712678 - RNA, 19 nt, Artificial Sequence
  Description of Artificial Sequence: Synthetic oligonucleotide
uacaaucuuauccagggag

SEQ ID NO: 2712679 - RNA, 19 nt, Artificial Sequence
  Description of Artificial Sequence: Synthetic oligonucleotide
uaucaacuggcacagauuc

SEQ ID NO: 2712680 - RNA, 19 nt, Artificial Sequence
  Description of Artificial Sequence: Synthetic oligonucleotide
agaaaaguguccacgaugg

SEQ ID NO: 2712681 - RNA, 19 nt, Artificial Sequence
  Description of Artificial Sequence: Synthetic oligonucleotide
ucaacuggcacagauuccg

SEQ ID NO: 2712682 - RNA, 19 nt, Artificial Sequence
  Description of Artificial Sequence: Synthetic oligonucleotide
gagaugaacccucaggccc

SEQ ID NO: 2712683 - RNA, 19 nt, Artificial Sequence
  Description of Artificial Sequence: Synthetic oligonucleotide
uccagggaguucaagacag

SEQ ID NO: 2712684 - RNA, 19 nt, Artificial Sequence
  Description of Artificial Sequence: Synthetic oligonucleotide
acuuugucaccucaggauc

SEQ ID NO: 2712685 - RNA, 19 nt, Artificial Sequence
  Description of Artificial Sequence: Synthetic oligonucleotide
uucaagacagcuucuaggu

SEQ ID NO: 2712686 - RNA, 19 nt, Artificial Sequence
  Description of Artificial Sequence: Synthetic oligonucleotide
uuugugaagagccugccau

SEQ ID NO: 2712687 - RNA, 19 nt, Artificial Sequence
  Description of Artificial Sequence: Synthetic oligonucleotide
uuuauuucugagaucuccu

SEQ ID NO: 2712688 - RNA, 19 nt, Artificial Sequence
  Description of Artificial Sequence: Synthetic oligonucleotide
uguaacugagccacaaacu

SEQ ID NO: 2712689 - RNA, 19 nt, Artificial Sequence
  Description of Artificial Sequence: Synthetic oligonucleotide
uuauccagggaguucaaga

SEQ ID NO: 2712690 - RNA, 19 nt, Artificial Sequence
  Description of Artificial Sequence: Synthetic oligonucleotide
aaguagggugccaugacac

SEQ ID NO: 2712691 - RNA, 19 nt, Artificial Sequence
  Description of Artificial Sequence: Synthetic oligonucleotide
uaguuucuggagaaaagug

SEQ ID NO: 2712692 - RNA, 19 nt, Artificial Sequence
  Description of Artificial Sequence: Synthetic oligonucleotide
aaaguguccacgauggugu

SEQ ID NO: 2712693 - RNA, 19 nt, Artificial Sequence
  Description of Artificial Sequence: Synthetic oligonucleotide
gagaucuccucccggaugg

SEQ ID NO: 2712694 - RNA, 19 nt, Artificial Sequence
  Description of Artificial Sequence: Synthetic oligonucleotide
cauagacccacuuugucac

SEQ ID NO: 2712695 - RNA, 19 nt, Artificial Sequence
  Description of Artificial Sequence: Synthetic oligonucleotide
uguuuguaacaguugguga

SEQ ID NO: 2712696 - RNA, 19 nt, Artificial Sequence
  Description of Artificial Sequence: Synthetic oligonucleotide
caagacagcuucuagguuc

SEQ ID NO: 2712697 - RNA, 19 nt, Artificial Sequence
  Description of Artificial Sequence: Synthetic oligonucleotide
gugucgaggaguuucaccc

SEQ ID NO: 2712698 - RNA, 19 nt, Artificial Sequence
  Description of Artificial Sequence: Synthetic oligonucleotide
aguuucacccuggagacgg

SEQ ID NO: 2712699 - RNA, 19 nt, Artificial Sequence
  Description of Artificial Sequence: Synthetic oligonucleotide
uaacaguuggugaaucucu

SEQ ID NO: 2712700 - RNA, 19 nt, Artificial Sequence
  Description of Artificial Sequence: Synthetic oligonucleotide
acagauuccggagaugaac

SEQ ID NO: 2712701 - RNA, 19 nt, Artificial Sequence
  Description of Artificial Sequence: Synthetic oligonucleotide
aagacagcuucuagguucc

SEQ ID NO: 2712702 - RNA, 19 nt, Artificial Sequence
  Description of Artificial Sequence: Synthetic oligonucleotide
uccucuuuuauuucugaga

SEQ ID NO: 2712703 - RNA, 19 nt, Artificial Sequence
  Description of Artificial Sequence: Synthetic oligonucleotide
cugcucuuugugaagagcc

SEQ ID NO: 2712704 - RNA, 19 nt, Artificial Sequence
  Description of Artificial Sequence: Synthetic oligonucleotide
uaacugagccacaaacuug

SEQ ID NO: 2712705 - RNA, 19 nt, Artificial Sequence
  Description of Artificial Sequence: Synthetic oligonucleotide
agauuccggagaugaaccc

SEQ ID NO: 2712706 - RNA, 19 nt, Artificial Sequence
  Description of Artificial Sequence: Synthetic oligonucleotide
ucucucguagcuccuggcg

SEQ ID NO: 2712707 - RNA, 19 nt, Artificial Sequence
  Description of Artificial Sequence: Synthetic oligonucleotide
cagauuccggagaugaacc

SEQ ID NO: 2712708 - RNA, 19 nt, Artificial Sequence
  Description of Artificial Sequence: Synthetic oligonucleotide
ucaggauccaacuggugga

SEQ ID NO: 2712709 - RNA, 19 nt, Artificial Sequence
  Description of Artificial Sequence: Synthetic oligonucleotide
acugacagcaguuccgucu

SEQ ID NO: 2712710 - RNA, 19 nt, Artificial Sequence
  Description of Artificial Sequence: Synthetic oligonucleotide
aaucuuauccagggaguuc

SEQ ID NO: 2712711 - RNA, 19 nt, Artificial Sequence
  Description of Artificial Sequence: Synthetic oligonucleotide
aacugagccacaaacuugu

SEQ ID NO: 2712712 - RNA, 19 nt, Artificial Sequence
  Description of Artificial Sequence: Synthetic oligonucleotide
agcuucuagguucccuucc

SEQ ID NO: 2712713 - RNA, 19 nt, Artificial Sequence
  Description of Artificial Sequence: Synthetic oligonucleotide
aguucaagacagcuucuag

SEQ ID NO: 2712714 - RNA, 19 nt, Artificial Sequence
  Description of Artificial Sequence: Synthetic oligonucleotide
gagacggucguaucaacug

SEQ ID NO: 2712715 - RNA, 19 nt, Artificial Sequence
  Description of Artificial Sequence: Synthetic oligonucleotide
cacaaacuugucauagacc

SEQ ID NO: 2712716 - RNA, 19 nt, Artificial Sequence
  Description of Artificial Sequence: Synthetic oligonucleotide
cuuugucaccucaggaucc

SEQ ID NO: 2712717 - RNA, 19 nt, Artificial Sequence
  Description of Artificial Sequence: Synthetic oligonucleotide
uggugaaucucucguagcu

SEQ ID NO: 2712718 - RNA, 19 nt, Artificial Sequence
  Description of Artificial Sequence: Synthetic oligonucleotide
uucacccuggagacggucg

SEQ ID NO: 2712719 - RNA, 19 nt, Artificial Sequence
  Description of Artificial Sequence: Synthetic oligonucleotide
aucggcuaguuccugguuc

SEQ ID NO: 2712720 - RNA, 19 nt, Artificial Sequence
  Description of Artificial Sequence: Synthetic oligonucleotide
acaguuggugaaucucucg

SEQ ID NO: 2712721 - RNA, 19 nt, Artificial Sequence
  Description of Artificial Sequence: Synthetic oligonucleotide
guuuguaacaguuggugaa

SEQ ID NO: 2712722 - RNA, 19 nt, Artificial Sequence
  Description of Artificial Sequence: Synthetic oligonucleotide
uguaacaguuggugaaucu

SEQ ID NO: 2712723 - RNA, 19 nt, Artificial Sequence
  Description of Artificial Sequence: Synthetic oligonucleotide
aggucuuucucugggauuc

SEQ ID NO: 2712724 - RNA, 19 nt, Artificial Sequence
  Description of Artificial Sequence: Synthetic oligonucleotide
agacggucguaucaacugg

SEQ ID NO: 2712725 - RNA, 19 nt, Artificial Sequence
  Description of Artificial Sequence: Synthetic oligonucleotide
caccucaggauccaacugg

SEQ ID NO: 2712726 - RNA, 19 nt, Artificial Sequence
  Description of Artificial Sequence: Synthetic oligonucleotide
aacaguuggugaaucucuc

SEQ ID NO: 2712727 - RNA, 19 nt, Artificial Sequence
  Description of Artificial Sequence: Synthetic oligonucleotide
ugucauagacccacuuugu

SEQ ID NO: 2712728 - RNA, 19 nt, Artificial Sequence
  Description of Artificial Sequence: Synthetic oligonucleotide
ugugaagagccugccaugc

SEQ ID NO: 2712729 - RNA, 19 nt, Artificial Sequence
  Description of Artificial Sequence: Synthetic oligonucleotide
cugcauuuccuccaccugc

SEQ ID NO: 2712730 - RNA, 19 nt, Artificial Sequence
  Description of Artificial Sequence: Synthetic oligonucleotide
aguuccugguucuuggccu

SEQ ID NO: 2712731 - RNA, 19 nt, Artificial Sequence
  Description of Artificial Sequence: Synthetic oligonucleotide
uaguuccugguucuuggcc

SEQ ID NO: 2712732 - RNA, 19 nt, Artificial Sequence
  Description of Artificial Sequence: Synthetic oligonucleotide
ugagaucuccucccggaug

SEQ ID NO: 2712733 - RNA, 19 nt, Artificial Sequence
  Description of Artificial Sequence: Synthetic oligonucleotide
guguuuguaacaguuggug

SEQ ID NO: 2712734 - RNA, 19 nt, Artificial Sequence
  Description of Artificial Sequence: Synthetic oligonucleotide
guugcugcaggaaguaggg

SEQ ID NO: 2712735 - RNA, 19 nt, Artificial Sequence
  Description of Artificial Sequence: Synthetic oligonucleotide
uucuggagaaaagugucca

SEQ ID NO: 2712736 - RNA, 19 nt, Artificial Sequence
  Description of Artificial Sequence: Synthetic oligonucleotide
gauggugucgaggaguuuc

SEQ ID NO: 2712737 - RNA, 19 nt, Artificial Sequence
  Description of Artificial Sequence: Synthetic oligonucleotide
cacacgguggcacagggug

SEQ ID NO: 2712738 - RNA, 19 nt, Artificial Sequence
  Description of Artificial Sequence: Synthetic oligonucleotide
ugcacacgguggcacaggg

SEQ ID NO: 2712739 - RNA, 19 nt, Artificial Sequence
  Description of Artificial Sequence: Synthetic oligonucleotide
aguuucuggagaaaagugu

SEQ ID NO: 2712740 - RNA, 19 nt, Artificial Sequence
  Description of Artificial Sequence: Synthetic oligonucleotide
aucuuauccagggaguuca

SEQ ID NO: 2712741 - RNA, 19 nt, Artificial Sequence
  Description of Artificial Sequence: Synthetic oligonucleotide
guuccguugcugcaggaag

SEQ ID NO: 2712742 - RNA, 19 nt, Artificial Sequence
  Description of Artificial Sequence: Synthetic oligonucleotide
ggugccaugacacugcaca

SEQ ID NO: 2712743 - RNA, 19 nt, Artificial Sequence
  Description of Artificial Sequence: Synthetic oligonucleotide
auagacccacuuugucacc

SEQ ID NO: 2712744 - RNA, 19 nt, Artificial Sequence
  Description of Artificial Sequence: Synthetic oligonucleotide
agaugaacccucaggcccc

SEQ ID NO: 2712745 - RNA, 19 nt, Artificial Sequence
  Description of Artificial Sequence: Synthetic oligonucleotide
auggaugucuguaacugag

SEQ ID NO: 2712746 - RNA, 19 nt, Artificial Sequence
  Description of Artificial Sequence: Synthetic oligonucleotide
aggcugguucuccaugggc

SEQ ID NO: 2712747 - RNA, 19 nt, Artificial Sequence
  Description of Artificial Sequence: Synthetic oligonucleotide
gagggccugaaccugcugc

SEQ ID NO: 2712748 - RNA, 19 nt, Artificial Sequence
  Description of Artificial Sequence: Synthetic oligonucleotide
ugcuucugcacacgguggc

SEQ ID NO: 2712749 - RNA, 19 nt, Artificial Sequence
  Description of Artificial Sequence: Synthetic oligonucleotide
aucucucguagcuccuggc

SEQ ID NO: 2712750 - RNA, 19 nt, Artificial Sequence
  Description of Artificial Sequence: Synthetic oligonucleotide
uggaugucuguaacugagc

SEQ ID NO: 2712751 - RNA, 19 nt, Artificial Sequence
  Description of Artificial Sequence: Synthetic oligonucleotide
acuaguuucuggagaaaag

SEQ ID NO: 2712752 - RNA, 19 nt, Artificial Sequence
  Description of Artificial Sequence: Synthetic oligonucleotide
guuucuggagaaaaguguc

SEQ ID NO: 2712753 - RNA, 19 nt, Artificial Sequence
  Description of Artificial Sequence: Synthetic oligonucleotide
aacuggcacagauuccgga

SEQ ID NO: 2712754 - RNA, 19 nt, Artificial Sequence
  Description of Artificial Sequence: Synthetic oligonucleotide
gaaguagggugccaugaca

SEQ ID NO: 2712755 - RNA, 19 nt, Artificial Sequence
  Description of Artificial Sequence: Synthetic oligonucleotide
uagggugccaugacacugc

SEQ ID NO: 2712756 - RNA, 19 nt, Artificial Sequence
  Description of Artificial Sequence: Synthetic oligonucleotide
agccacaaacuugucauag

SEQ ID NO: 2712757 - RNA, 19 nt, Artificial Sequence
  Description of Artificial Sequence: Synthetic oligonucleotide
cucucguagcuccuggcgg

SEQ ID NO: 2712758 - RNA, 19 nt, Artificial Sequence
  Description of Artificial Sequence: Synthetic oligonucleotide
acucaggugcccucagcac

SEQ ID NO: 2712759 - RNA, 19 nt, Artificial Sequence
  Description of Artificial Sequence: Synthetic oligonucleotide
gucguaucaacuggcacag

SEQ ID NO: 2712760 - RNA, 19 nt, Artificial Sequence
  Description of Artificial Sequence: Synthetic oligonucleotide
ucgaggaguuucacccugg

SEQ ID NO: 2712761 - RNA, 19 nt, Artificial Sequence
  Description of Artificial Sequence: Synthetic oligonucleotide
cucauuaccauggcucacc

SEQ ID NO: 2712762 - RNA, 19 nt, Artificial Sequence
  Description of Artificial Sequence: Synthetic oligonucleotide
ucauuaccauggcucaccu

SEQ ID NO: 2712763 - RNA, 19 nt, Artificial Sequence
  Description of Artificial Sequence: Synthetic oligonucleotide
gggaguucaagacagcuuc

SEQ ID NO: 2712764 - RNA, 19 nt, Artificial Sequence
  Description of Artificial Sequence: Synthetic oligonucleotide
ucucguagcuccuggcggc

SEQ ID NO: 2712765 - RNA, 19 nt, Artificial Sequence
  Description of Artificial Sequence: Synthetic oligonucleotide
ugggauuccacugggucgc

SEQ ID NO: 2712766 - RNA, 19 nt, Artificial Sequence
  Description of Artificial Sequence: Synthetic oligonucleotide
agcaucggcuaguuccugg

SEQ ID NO: 2712767 - RNA, 19 nt, Artificial Sequence
  Description of Artificial Sequence: Synthetic oligonucleotide
gcuaguuccugguucuugg

SEQ ID NO: 2712768 - RNA, 19 nt, Artificial Sequence
  Description of Artificial Sequence: Synthetic oligonucleotide
ucuuucucugggauuccac

SEQ ID NO: 2712769 - RNA, 19 nt, Artificial Sequence
  Description of Artificial Sequence: Synthetic oligonucleotide
gauggaugucuguaacuga

SEQ ID NO: 2712770 - RNA, 19 nt, Artificial Sequence
  Description of Artificial Sequence: Synthetic oligonucleotide
aacugguggaaguguuugu

SEQ ID NO: 2712771 - RNA, 19 nt, Artificial Sequence
  Description of Artificial Sequence: Synthetic oligonucleotide
ugccaugacacugcacagg

SEQ ID NO: 2712772 - RNA, 19 nt, Artificial Sequence
  Description of Artificial Sequence: Synthetic oligonucleotide
aaguguccacgaugguguc

SEQ ID NO: 2712773 - RNA, 19 nt, Artificial Sequence
  Description of Artificial Sequence: Synthetic oligonucleotide
uugugaagagccugccaug

SEQ ID NO: 2712774 - RNA, 19 nt, Artificial Sequence
  Description of Artificial Sequence: Synthetic oligonucleotide
uuaccauggcucaccucag

SEQ ID NO: 2712775 - RNA, 19 nt, Artificial Sequence
  Description of Artificial Sequence: Synthetic oligonucleotide
ggaguuucacccuggagac

SEQ ID NO: 2712776 - RNA, 19 nt, Artificial Sequence
  Description of Artificial Sequence: Synthetic oligonucleotide
gcucaccucagccaugucg

SEQ ID NO: 2712777 - RNA, 19 nt, Artificial Sequence
  Description of Artificial Sequence: Synthetic oligonucleotide
caggguguuccguugcugc

SEQ ID NO: 2712778 - RNA, 19 nt, Artificial Sequence
  Description of Artificial Sequence: Synthetic oligonucleotide
ucuccucccggauggaugu

SEQ ID NO: 2712779 - RNA, 19 nt, Artificial Sequence
  Description of Artificial Sequence: Synthetic oligonucleotide
ugcucuuugugaagagccu

SEQ ID NO: 2712780 - RNA, 19 nt, Artificial Sequence
  Description of Artificial Sequence: Synthetic oligonucleotide
ucuguaacugagccacaaa

SEQ ID NO: 2712781 - RNA, 19 nt, Artificial Sequence
  Description of Artificial Sequence: Synthetic oligonucleotide
caugacacugcacaggucu

SEQ ID NO: 2712782 - RNA, 19 nt, Artificial Sequence
  Description of Artificial Sequence: Synthetic oligonucleotide
ggucguaucaacuggcaca

SEQ ID NO: 2712783 - RNA, 19 nt, Artificial Sequence
  Description of Artificial Sequence: Synthetic oligonucleotide
ugucaccucaggauccaac

SEQ ID NO: 2712784 - RNA, 19 nt, Artificial Sequence
  Description of Artificial Sequence: Synthetic oligonucleotide
guaacaguuggugaaucuc

SEQ ID NO: 2712785 - RNA, 19 nt, Artificial Sequence
  Description of Artificial Sequence: Synthetic oligonucleotide
aucaacuggcacagauucc

SEQ ID NO: 2712786 - RNA, 19 nt, Artificial Sequence
  Description of Artificial Sequence: Synthetic oligonucleotide
cugccggagggccugaacc

SEQ ID NO: 2712787 - RNA, 19 nt, Artificial Sequence
  Description of Artificial Sequence: Synthetic oligonucleotide
auuccggagaugaacccuc

SEQ ID NO: 2712788 - RNA, 19 nt, Artificial Sequence
  Description of Artificial Sequence: Synthetic oligonucleotide
cucaccucagccaugucga

SEQ ID NO: 2712789 - RNA, 19 nt, Artificial Sequence
  Description of Artificial Sequence: Synthetic oligonucleotide
ucuuugugaagagccugcc

SEQ ID NO: 2712790 - RNA, 19 nt, Artificial Sequence
  Description of Artificial Sequence: Synthetic oligonucleotide
uuccguugcugcaggaagu

SEQ ID NO: 2712791 - RNA, 19 nt, Artificial Sequence
  Description of Artificial Sequence: Synthetic oligonucleotide
ugggucgccaggcugguuc

SEQ ID NO: 2712792 - RNA, 19 nt, Artificial Sequence
  Description of Artificial Sequence: Synthetic oligonucleotide
cacugggucgccaggcugg

SEQ ID NO: 2712793 - RNA, 19 nt, Artificial Sequence
  Description of Artificial Sequence: Synthetic oligonucleotide
uccgucugcucuuugugaa

SEQ ID NO: 2712794 - RNA, 19 nt, Artificial Sequence
  Description of Artificial Sequence: Synthetic oligonucleotide
auccagggaguucaagaca

SEQ ID NO: 2712795 - RNA, 19 nt, Artificial Sequence
  Description of Artificial Sequence: Synthetic oligonucleotide
aguuccgucugcucuuugu

SEQ ID NO: 2712796 - RNA, 19 nt, Artificial Sequence
  Description of Artificial Sequence: Synthetic oligonucleotide
ggauggaugucuguaacug

SEQ ID NO: 2712797 - RNA, 19 nt, Artificial Sequence
  Description of Artificial Sequence: Synthetic oligonucleotide
ucggcuaguuccugguucu

SEQ ID NO: 2712798 - RNA, 19 nt, Artificial Sequence
  Description of Artificial Sequence: Synthetic oligonucleotide
guuccgucugcucuuugug

SEQ ID NO: 2712799 - RNA, 19 nt, Artificial Sequence
  Description of Artificial Sequence: Synthetic oligonucleotide
uuccgucugcucuuuguga

SEQ ID NO: 2712800 - RNA, 19 nt, Artificial Sequence
  Description of Artificial Sequence: Synthetic oligonucleotide
acaaucuuauccagggagu

SEQ ID NO: 2712801 - RNA, 19 nt, Artificial Sequence
  Description of Artificial Sequence: Synthetic oligonucleotide
acaggucuuucucugggau

SEQ ID NO: 2712802 - RNA, 19 nt, Artificial Sequence
  Description of Artificial Sequence: Synthetic oligonucleotide
ugaaccugcugcugcauuu

SEQ ID NO: 2712803 - RNA, 19 nt, Artificial Sequence
  Description of Artificial Sequence: Synthetic oligonucleotide
ugaaucucucguagcuccu

SEQ ID NO: 2712804 - RNA, 19 nt, Artificial Sequence
  Description of Artificial Sequence: Synthetic oligonucleotide
ggagaugaacccucaggcc

SEQ ID NO: 2712805 - RNA, 19 nt, Artificial Sequence
  Description of Artificial Sequence: Synthetic oligonucleotide
ucaagacagcuucuagguu

SEQ ID NO: 2712806 - RNA, 19 nt, Artificial Sequence
  Description of Artificial Sequence: Synthetic oligonucleotide
guaacugagccacaaacuu

SEQ ID NO: 2712807 - RNA, 19 nt, Artificial Sequence
  Description of Artificial Sequence: Synthetic oligonucleotide
gucauagacccacuuuguc

SEQ ID NO: 2712808 - RNA, 19 nt, Artificial Sequence
  Description of Artificial Sequence: Synthetic oligonucleotide
caacugguggaaguguuug

SEQ ID NO: 2712809 - RNA, 19 nt, Artificial Sequence
  Description of Artificial Sequence: Synthetic oligonucleotide
aguagggugccaugacacu

SEQ ID NO: 2712810 - RNA, 19 nt, Artificial Sequence
  Description of Artificial Sequence: Synthetic oligonucleotide
gacggucguaucaacuggc

SEQ ID NO: 2712811 - RNA, 19 nt, Artificial Sequence
  Description of Artificial Sequence: Synthetic oligonucleotide
uccaacugguggaaguguu

SEQ ID NO: 2712812 - RNA, 19 nt, Artificial Sequence
  Description of Artificial Sequence: Synthetic oligonucleotide
uccggagaugaacccucag

SEQ ID NO: 2712813 - RNA, 19 nt, Artificial Sequence
  Description of Artificial Sequence: Synthetic oligonucleotide
gucgaggaguuucacccug

SEQ ID NO: 2712814 - RNA, 19 nt, Artificial Sequence
  Description of Artificial Sequence: Synthetic oligonucleotide
aggaaguagggugccauga

SEQ ID NO: 2712815 - RNA, 19 nt, Artificial Sequence
  Description of Artificial Sequence: Synthetic oligonucleotide
caacuggcacagauuccgg

SEQ ID NO: 2712816 - RNA, 19 nt, Artificial Sequence
  Description of Artificial Sequence: Synthetic oligonucleotide
cagcacugacagcaguucc

SEQ ID NO: 2712817 - RNA, 19 nt, Artificial Sequence
  Description of Artificial Sequence: Synthetic oligonucleotide
uuguaacaguuggugaauc

SEQ ID NO: 2712818 - RNA, 19 nt, Artificial Sequence
  Description of Artificial Sequence: Synthetic oligonucleotide
ugucgaggaguuucacccu

SEQ ID NO: 2712819 - RNA, 19 nt, Artificial Sequence
  Description of Artificial Sequence: Synthetic oligonucleotide
cuuucccacagccucauua

SEQ ID NO: 2712820 - RNA, 19 nt, Artificial Sequence
  Description of Artificial Sequence: Synthetic oligonucleotide
uggcacagauuccggagau

SEQ ID NO: 2712821 - RNA, 19 nt, Artificial Sequence
  Description of Artificial Sequence: Synthetic oligonucleotide
uaccauggcucaccucagc

SEQ ID NO: 2712822 - RNA, 19 nt, Artificial Sequence
  Description of Artificial Sequence: Synthetic oligonucleotide
ucagcacugacagcaguuc

SEQ ID NO: 2712823 - RNA, 19 nt, Artificial Sequence
  Description of Artificial Sequence: Synthetic oligonucleotide
ggugucgaggaguuucacc

SEQ ID NO: 2712824 - RNA, 19 nt, Artificial Sequence
  Description of Artificial Sequence: Synthetic oligonucleotide
cuuauccagggaguucaag

SEQ ID NO: 2712825 - RNA, 19 nt, Artificial Sequence
  Description of Artificial Sequence: Synthetic oligonucleotide
ucacccuggagacggucgu

SEQ ID NO: 2712826 - RNA, 19 nt, Artificial Sequence
  Description of Artificial Sequence: Synthetic oligonucleotide
ucacucaggugcccucagc

SEQ ID NO: 2712827 - RNA, 19 nt, Artificial Sequence
  Description of Artificial Sequence: Synthetic oligonucleotide
acuugucauagacccacuu

SEQ ID NO: 2712828 - RNA, 19 nt, Artificial Sequence
  Description of Artificial Sequence: Synthetic oligonucleotide
agagccugccaugccugcc

SEQ ID NO: 2712829 - RNA, 19 nt, Artificial Sequence
  Description of Artificial Sequence: Synthetic oligonucleotide
gaaucucucguagcuccug

SEQ ID NO: 2712830 - RNA, 19 nt, Artificial Sequence
  Description of Artificial Sequence: Synthetic oligonucleotide
cggagaugaacccucaggc

SEQ ID NO: 2712831 - RNA, 19 nt, Artificial Sequence
  Description of Artificial Sequence: Synthetic oligonucleotide
gugccaugacacugcacag

SEQ ID NO: 2712832 - RNA, 19 nt, Artificial Sequence
  Description of Artificial Sequence: Synthetic oligonucleotide
agacccacuuugucaccuc

SEQ ID NO: 2712833 - RNA, 19 nt, Artificial Sequence
  Description of Artificial Sequence: Synthetic oligonucleotide
cugagccacaaacuuguca

SEQ ID NO: 2712834 - RNA, 19 nt, Artificial Sequence
  Description of Artificial Sequence: Synthetic oligonucleotide
cguugcugcaggaaguagg

SEQ ID NO: 2712835 - RNA, 19 nt, Artificial Sequence
  Description of Artificial Sequence: Synthetic oligonucleotide
ugccggagggccugaaccu

SEQ ID NO: 2712836 - RNA, 19 nt, Artificial Sequence
  Description of Artificial Sequence: Synthetic oligonucleotide
cacucaggugcccucagca

SEQ ID NO: 2712837 - RNA, 19 nt, Artificial Sequence
  Description of Artificial Sequence: Synthetic oligonucleotide
gaguuucacccuggagacg

SEQ ID NO: 2712838 - RNA, 19 nt, Artificial Sequence
  Description of Artificial Sequence: Synthetic oligonucleotide
ucuuauccagggaguucaa

SEQ ID NO: 2712839 - RNA, 19 nt, Artificial Sequence
  Description of Artificial Sequence: Synthetic oligonucleotide
uguuccguugcugcaggaa

SEQ ID NO: 2712840 - RNA, 19 nt, Artificial Sequence
  Description of Artificial Sequence: Synthetic oligonucleotide
uuccggagaugaacccuca

SEQ ID NO: 2712841 - RNA, 19 nt, Artificial Sequence
  Description of Artificial Sequence: Synthetic oligonucleotide
ugaacccucaggccccuuu

SEQ ID NO: 2712842 - RNA, 19 nt, Artificial Sequence
  Description of Artificial Sequence: Synthetic oligonucleotide
cuuugugaagagccugcca

SEQ ID NO: 2712843 - RNA, 19 nt, Artificial Sequence
  Description of Artificial Sequence: Synthetic oligonucleotide
gaacccucaggccccuuuc

SEQ ID NO: 2712844 - RNA, 19 nt, Artificial Sequence
  Description of Artificial Sequence: Synthetic oligonucleotide
uagguucccuuccucuuuu

SEQ ID NO: 2712845 - RNA, 19 nt, Artificial Sequence
  Description of Artificial Sequence: Synthetic oligonucleotide
ccggagaugaacccucagg

SEQ ID NO: 2712846 - RNA, 19 nt, Artificial Sequence
  Description of Artificial Sequence: Synthetic oligonucleotide
gguggcacaggguguuccg

SEQ ID NO: 2712847 - RNA, 19 nt, Artificial Sequence
  Description of Artificial Sequence: Synthetic oligonucleotide
uggagacggucguaucaac

SEQ ID NO: 2712848 - RNA, 19 nt, Artificial Sequence
  Description of Artificial Sequence: Synthetic oligonucleotide
caggaaguagggugccaug

SEQ ID NO: 2712849 - RNA, 19 nt, Artificial Sequence
  Description of Artificial Sequence: Synthetic oligonucleotide
agcaguuccgucugcucuu

SEQ ID NO: 2712850 - RNA, 19 nt, Artificial Sequence
  Description of Artificial Sequence: Synthetic oligonucleotide
aggguguuccguugcugca

SEQ ID NO: 2712851 - RNA, 19 nt, Artificial Sequence
  Description of Artificial Sequence: Synthetic oligonucleotide
cuuucucugggauuccacu

SEQ ID NO: 2712852 - RNA, 19 nt, Artificial Sequence
  Description of Artificial Sequence: Synthetic oligonucleotide
cuacaaucuuauccaggga

SEQ ID NO: 2712853 - RNA, 19 nt, Artificial Sequence
  Description of Artificial Sequence: Synthetic oligonucleotide
cagccagaacagcaucggc

SEQ ID NO: 2712854 - RNA, 19 nt, Artificial Sequence
  Description of Artificial Sequence: Synthetic oligonucleotide
ggaaguagggugccaugac

SEQ ID NO: 2712855 - RNA, 19 nt, Artificial Sequence
  Description of Artificial Sequence: Synthetic oligonucleotide
ggcgacuaguuucuggaga

SEQ ID NO: 2712856 - RNA, 19 nt, Artificial Sequence
  Description of Artificial Sequence: Synthetic oligonucleotide
acagcaucggcuaguuccu

SEQ ID NO: 2712857 - RNA, 19 nt, Artificial Sequence
  Description of Artificial Sequence: Synthetic oligonucleotide
aacuugucauagacccacu

SEQ ID NO: 2712858 - RNA, 19 nt, Artificial Sequence
  Description of Artificial Sequence: Synthetic oligonucleotide
uggcucaccucagccaugu

SEQ ID NO: 2712859 - RNA, 19 nt, Artificial Sequence
  Description of Artificial Sequence: Synthetic oligonucleotide
cccacuuugucaccucagg

SEQ ID NO: 2712860 - RNA, 19 nt, Artificial Sequence
  Description of Artificial Sequence: Synthetic oligonucleotide
cugguggaaguguuuguaa

SEQ ID NO: 2712861 - RNA, 19 nt, Artificial Sequence
  Description of Artificial Sequence: Synthetic oligonucleotide
ggcggcgacuaguuucugg

SEQ ID NO: 2712862 - RNA, 19 nt, Artificial Sequence
  Description of Artificial Sequence: Synthetic oligonucleotide
gauuccggagaugaacccu

SEQ ID NO: 2712863 - RNA, 19 nt, Artificial Sequence
  Description of Artificial Sequence: Synthetic oligonucleotide
ccuggcggcgacuaguuuc

SEQ ID NO: 2712864 - RNA, 19 nt, Artificial Sequence
  Description of Artificial Sequence: Synthetic oligonucleotide
cuggcacagauuccggaga

SEQ ID NO: 2712865 - RNA, 19 nt, Artificial Sequence
  Description of Artificial Sequence: Synthetic oligonucleotide
guuccugguucuuggccuc

SEQ ID NO: 2712866 - RNA, 19 nt, Artificial Sequence
  Description of Artificial Sequence: Synthetic oligonucleotide
cauuaccauggcucaccuc

SEQ ID NO: 2712867 - RNA, 19 nt, Artificial Sequence
  Description of Artificial Sequence: Synthetic oligonucleotide
aggauccaacugguggaag

SEQ ID NO: 2712868 - RNA, 19 nt, Artificial Sequence
  Description of Artificial Sequence: Synthetic oligonucleotide
cugccaugccugccggagg

SEQ ID NO: 2712869 - RNA, 19 nt, Artificial Sequence
  Description of Artificial Sequence: Synthetic oligonucleotide
gaguucaagacagcuucua

SEQ ID NO: 2712870 - RNA, 19 nt, Artificial Sequence
  Description of Artificial Sequence: Synthetic oligonucleotide
uccucccggauggaugucu

SEQ ID NO: 2712871 - RNA, 19 nt, Artificial Sequence
  Description of Artificial Sequence: Synthetic oligonucleotide
uuucacccuggagacgguc

SEQ ID NO: 2712872 - RNA, 19 nt, Artificial Sequence
  Description of Artificial Sequence: Synthetic oligonucleotide
gcugcauuuccuccaccug

SEQ ID NO: 2712873 - RNA, 19 nt, Artificial Sequence
  Description of Artificial Sequence: Synthetic oligonucleotide
aggugcccucagcacugac

SEQ ID NO: 2712874 - RNA, 19 nt, Artificial Sequence
  Description of Artificial Sequence: Synthetic oligonucleotide
acaggguguuccguugcug

SEQ ID NO: 2712875 - RNA, 19 nt, Artificial Sequence
  Description of Artificial Sequence: Synthetic oligonucleotide
ucccggauggaugucugua

SEQ ID NO: 2712876 - RNA, 19 nt, Artificial Sequence
  Description of Artificial Sequence: Synthetic oligonucleotide
gcgacuaguuucuggagaa

SEQ ID NO: 2712877 - RNA, 19 nt, Artificial Sequence
  Description of Artificial Sequence: Synthetic oligonucleotide
ggcacaggguguuccguug

SEQ ID NO: 2712878 - RNA, 19 nt, Artificial Sequence
  Description of Artificial Sequence: Synthetic oligonucleotide
gaaaaguguccacgauggu

SEQ ID NO: 2712879 - RNA, 19 nt, Artificial Sequence
  Description of Artificial Sequence: Synthetic oligonucleotide
uccguugcugcaggaagua

SEQ ID NO: 2712880 - RNA, 19 nt, Artificial Sequence
  Description of Artificial Sequence: Synthetic oligonucleotide
gaacagcaucggcuaguuc

SEQ ID NO: 2712881 - RNA, 19 nt, Artificial Sequence
  Description of Artificial Sequence: Synthetic oligonucleotide
agggugccaugacacugca

SEQ ID NO: 2712882 - RNA, 19 nt, Artificial Sequence
  Description of Artificial Sequence: Synthetic oligonucleotide
uggcacaggguguuccguu

SEQ ID NO: 2712883 - RNA, 19 nt, Artificial Sequence
  Description of Artificial Sequence: Synthetic oligonucleotide
agacagcuucuagguuccc

SEQ ID NO: 2712884 - RNA, 19 nt, Artificial Sequence
  Description of Artificial Sequence: Synthetic oligonucleotide
gccucauuaccauggcuca

SEQ ID NO: 2712885 - RNA, 19 nt, Artificial Sequence
  Description of Artificial Sequence: Synthetic oligonucleotide
gcggcgacuaguuucugga

SEQ ID NO: 2712886 - RNA, 19 nt, Artificial Sequence
  Description of Artificial Sequence: Synthetic oligonucleotide
cuugucauagacccacuuu

SEQ ID NO: 2712887 - RNA, 19 nt, Artificial Sequence
  Description of Artificial Sequence: Synthetic oligonucleotide
cucguagcuccuggcggcg

SEQ ID NO: 2712888 - RNA, 19 nt, Artificial Sequence
  Description of Artificial Sequence: Synthetic oligonucleotide
uccaugggcuuugccuucu

SEQ ID NO: 2712889 - RNA, 19 nt, Artificial Sequence
  Description of Artificial Sequence: Synthetic oligonucleotide
cuccaugggcuuugccuuc

SEQ ID NO: 2712890 - RNA, 19 nt, Artificial Sequence
  Description of Artificial Sequence: Synthetic oligonucleotide
cacaggucuuucucuggga

SEQ ID NO: 2712891 - RNA, 19 nt, Artificial Sequence
  Description of Artificial Sequence: Synthetic oligonucleotide
auggugucgaggaguuuca

SEQ ID NO: 2712892 - RNA, 19 nt, Artificial Sequence
  Description of Artificial Sequence: Synthetic oligonucleotide
cugcaggaaguagggugcc

SEQ ID NO: 2712893 - RNA, 19 nt, Artificial Sequence
  Description of Artificial Sequence: Synthetic oligonucleotide
gggcuuugccuucuucuac

SEQ ID NO: 2712894 - RNA, 19 nt, Artificial Sequence
  Description of Artificial Sequence: Synthetic oligonucleotide
ggugaaucucucguagcuc

SEQ ID NO: 2712895 - RNA, 19 nt, Artificial Sequence
  Description of Artificial Sequence: Synthetic oligonucleotide
ucaccucagccaugucgaa

SEQ ID NO: 2712896 - RNA, 19 nt, Artificial Sequence
  Description of Artificial Sequence: Synthetic oligonucleotide
gucgccaggcugguucucc

SEQ ID NO: 2712897 - RNA, 19 nt, Artificial Sequence
  Description of Artificial Sequence: Synthetic oligonucleotide
gagccacaaacuugucaua

SEQ ID NO: 2712898 - RNA, 19 nt, Artificial Sequence
  Description of Artificial Sequence: Synthetic oligonucleotide
agggaguucaagacagcuu

SEQ ID NO: 2712899 - RNA, 19 nt, Artificial Sequence
  Description of Artificial Sequence: Synthetic oligonucleotide
ggauccaacugguggaagu

SEQ ID NO: 2712900 - RNA, 19 nt, Artificial Sequence
  Description of Artificial Sequence: Synthetic oligonucleotide
cauggcucaccucagccau

SEQ ID NO: 2712901 - RNA, 19 nt, Artificial Sequence
  Description of Artificial Sequence: Synthetic oligonucleotide
acggucguaucaacuggca

SEQ ID NO: 2712902 - RNA, 19 nt, Artificial Sequence
  Description of Artificial Sequence: Synthetic oligonucleotide
ccggauggaugucuguaac

SEQ ID NO: 2712903 - RNA, 19 nt, Artificial Sequence
  Description of Artificial Sequence: Synthetic oligonucleotide
uggugucgaggaguuucac

SEQ ID NO: 2712904 - RNA, 19 nt, Artificial Sequence
  Description of Artificial Sequence: Synthetic oligonucleotide
gccacaaacuugucauaga

SEQ ID NO: 2712905 - RNA, 19 nt, Artificial Sequence
  Description of Artificial Sequence: Synthetic oligonucleotide
cacugacagcaguuccguc

SEQ ID NO: 2712906 - RNA, 19 nt, Artificial Sequence
  Description of Artificial Sequence: Synthetic oligonucleotide
gcacaggguguuccguugc

SEQ ID NO: 2712907 - RNA, 19 nt, Artificial Sequence
  Description of Artificial Sequence: Synthetic oligonucleotide
ggcuaguuccugguucuug

SEQ ID NO: 2712908 - RNA, 19 nt, Artificial Sequence
  Description of Artificial Sequence: Synthetic oligonucleotide
cuggagacggucguaucaa

SEQ ID NO: 2712909 - RNA, 19 nt, Artificial Sequence
  Description of Artificial Sequence: Synthetic oligonucleotide
agcuccuggcggcgacuag

SEQ ID NO: 2712910 - RNA, 19 nt, Artificial Sequence
  Description of Artificial Sequence: Synthetic oligonucleotide
ccuggagacggucguauca

SEQ ID NO: 2712911 - RNA, 19 nt, Artificial Sequence
  Description of Artificial Sequence: Synthetic oligonucleotide
cacagauuccggagaugaa

SEQ ID NO: 2712912 - RNA, 19 nt, Artificial Sequence
  Description of Artificial Sequence: Synthetic oligonucleotide
acccuggagacggucguau

SEQ ID NO: 2712913 - RNA, 19 nt, Artificial Sequence
  Description of Artificial Sequence: Synthetic oligonucleotide
ccagaacagcaucggcuag

SEQ ID NO: 2712914 - RNA, 19 nt, Artificial Sequence
  Description of Artificial Sequence: Synthetic oligonucleotide
cacgauggugucgaggagu

SEQ ID NO: 2712915 - RNA, 19 nt, Artificial Sequence
  Description of Artificial Sequence: Synthetic oligonucleotide
ccucaggccccuuucccac

SEQ ID NO: 2712916 - RNA, 19 nt, Artificial Sequence
  Description of Artificial Sequence: Synthetic oligonucleotide
cucagcacugacagcaguu

SEQ ID NO: 2712917 - RNA, 19 nt, Artificial Sequence
  Description of Artificial Sequence: Synthetic oligonucleotide
cuggcggcgacuaguuucu

SEQ ID NO: 2712918 - RNA, 19 nt, Artificial Sequence
  Description of Artificial Sequence: Synthetic oligonucleotide
cagggaguucaagacagcu

SEQ ID NO: 2712919 - RNA, 19 nt, Artificial Sequence
  Description of Artificial Sequence: Synthetic oligonucleotide
ccacuuugucaccucagga

SEQ ID NO: 2712920 - RNA, 19 nt, Artificial Sequence
  Description of Artificial Sequence: Synthetic oligonucleotide
ucguaucaacuggcacaga

SEQ ID NO: 2712921 - RNA, 19 nt, Artificial Sequence
  Description of Artificial Sequence: Synthetic oligonucleotide
ccagggaguucaagacagc

SEQ ID NO: 2712922 - RNA, 19 nt, Artificial Sequence
  Description of Artificial Sequence: Synthetic oligonucleotide
uccuggcggcgacuaguuu

SEQ ID NO: 2712923 - RNA, 19 nt, Artificial Sequence
  Description of Artificial Sequence: Synthetic oligonucleotide
ucguagcuccuggcggcga

SEQ ID NO: 2712924 - RNA, 19 nt, Artificial Sequence
  Description of Artificial Sequence: Synthetic oligonucleotide
ccgucugcucuuugugaag

SEQ ID NO: 2712925 - RNA, 19 nt, Artificial Sequence
  Description of Artificial Sequence: Synthetic oligonucleotide
acgguggcacaggguguuc

SEQ ID NO: 2712926 - RNA, 19 nt, Artificial Sequence
  Description of Artificial Sequence: Synthetic oligonucleotide
caaucuuauccagggaguu

SEQ ID NO: 2712927 - RNA, 19 nt, Artificial Sequence
  Description of Artificial Sequence: Synthetic oligonucleotide
guguuccguugcugcagga

SEQ ID NO: 2712928 - RNA, 19 nt, Artificial Sequence
  Description of Artificial Sequence: Synthetic oligonucleotide
ccauggcucaccucagcca

SEQ ID NO: 2712929 - RNA, 19 nt, Artificial Sequence
  Description of Artificial Sequence: Synthetic oligonucleotide
caguuccgucugcucuuug

SEQ ID NO: 2712930 - RNA, 19 nt, Artificial Sequence
  Description of Artificial Sequence: Synthetic oligonucleotide
ggucuuucucugggauucc

SEQ ID NO: 2712931 - RNA, 19 nt, Artificial Sequence
  Description of Artificial Sequence: Synthetic oligonucleotide
auggcucaccucagccaug

SEQ ID NO: 2712932 - RNA, 19 nt, Artificial Sequence
  Description of Artificial Sequence: Synthetic oligonucleotide
ggcacagauuccggagaug

SEQ ID NO: 2712933 - RNA, 19 nt, Artificial Sequence
  Description of Artificial Sequence: Synthetic oligonucleotide
acugggucgccaggcuggu

SEQ ID NO: 2712934 - RNA, 19 nt, Artificial Sequence
  Description of Artificial Sequence: Synthetic oligonucleotide
cucaggccccuuucccaca

SEQ ID NO: 2712935 - RNA, 19 nt, Artificial Sequence
  Description of Artificial Sequence: Synthetic oligonucleotide
accugccugcgcccagcca

SEQ ID NO: 2712936 - RNA, 19 nt, Artificial Sequence
  Description of Artificial Sequence: Synthetic oligonucleotide
ccucaggauccaacuggug

SEQ ID NO: 2712937 - RNA, 19 nt, Artificial Sequence
  Description of Artificial Sequence: Synthetic oligonucleotide
ggagacggucguaucaacu

SEQ ID NO: 2712938 - RNA, 19 nt, Artificial Sequence
  Description of Artificial Sequence: Synthetic oligonucleotide
cagaacagcaucggcuagu

SEQ ID NO: 2712939 - RNA, 19 nt, Artificial Sequence
  Description of Artificial Sequence: Synthetic oligonucleotide
ccaugccugccggagggcc

SEQ ID NO: 2712940 - RNA, 19 nt, Artificial Sequence
  Description of Artificial Sequence: Synthetic oligonucleotide
ccacugggucgccaggcug

SEQ ID NO: 2712941 - RNA, 19 nt, Artificial Sequence
  Description of Artificial Sequence: Synthetic oligonucleotide
ccucccggauggaugucug

SEQ ID NO: 2712942 - RNA, 19 nt, Artificial Sequence
  Description of Artificial Sequence: Synthetic oligonucleotide
caccucagccaugucgaaa

SEQ ID NO: 2712943 - RNA, 19 nt, Artificial Sequence
  Description of Artificial Sequence: Synthetic oligonucleotide
cggucguaucaacuggcac

SEQ ID NO: 2712944 - RNA, 19 nt, Artificial Sequence
  Description of Artificial Sequence: Synthetic oligonucleotide
ccuccugcuucugcacacg

SEQ ID NO: 2712945 - RNA, 19 nt, Artificial Sequence
  Description of Artificial Sequence: Synthetic oligonucleotide
gguucuccaugggcuuugc

SEQ ID NO: 2712946 - RNA, 19 nt, Artificial Sequence
  Description of Artificial Sequence: Synthetic oligonucleotide
cagcaucggcuaguuccug

SEQ ID NO: 2712947 - RNA, 19 nt, Artificial Sequence
  Description of Artificial Sequence: Synthetic oligonucleotide
cugccugcgcccagccaga

SEQ ID NO: 2712948 - RNA, 19 nt, Artificial Sequence
  Description of Artificial Sequence: Synthetic oligonucleotide
ccucauuaccauggcucac

SEQ ID NO: 2712949 - RNA, 19 nt, Artificial Sequence
  Description of Artificial Sequence: Synthetic oligonucleotide
gcaucggcuaguuccuggu

SEQ ID NO: 2712950 - RNA, 19 nt, Artificial Sequence
  Description of Artificial Sequence: Synthetic oligonucleotide
ccacgauggugucgaggag

SEQ ID NO: 2712951 - RNA, 19 nt, Artificial Sequence
  Description of Artificial Sequence: Synthetic oligonucleotide
gaugaacccucaggccccu

SEQ ID NO: 2712952 - RNA, 19 nt, Artificial Sequence
  Description of Artificial Sequence: Synthetic oligonucleotide
cugagaucuccucccggau

SEQ ID NO: 2712953 - RNA, 19 nt, Artificial Sequence
  Description of Artificial Sequence: Synthetic oligonucleotide
ccaugacacugcacagguc

SEQ ID NO: 2712954 - RNA, 19 nt, Artificial Sequence
  Description of Artificial Sequence: Synthetic oligonucleotide
gguucccuuccucuuuuau

SEQ ID NO: 2712955 - RNA, 19 nt, Artificial Sequence
  Description of Artificial Sequence: Synthetic oligonucleotide
cagccucauuaccauggcu

SEQ ID NO: 2712956 - RNA, 19 nt, Artificial Sequence
  Description of Artificial Sequence: Synthetic oligonucleotide
caggucuuucucugggauu

SEQ ID NO: 2712957 - RNA, 19 nt, Artificial Sequence
  Description of Artificial Sequence: Synthetic oligonucleotide
cacaggguguuccguugcu

SEQ ID NO: 2712958 - RNA, 19 nt, Artificial Sequence
  Description of Artificial Sequence: Synthetic oligonucleotide
uggcggcgacuaguuucug

SEQ ID NO: 2712959 - RNA, 19 nt, Artificial Sequence
  Description of Artificial Sequence: Synthetic oligonucleotide
ggaguucaagacagcuucu

SEQ ID NO: 2712960 - RNA, 19 nt, Artificial Sequence
  Description of Artificial Sequence: Synthetic oligonucleotide
gccggagggccugaaccug

SEQ ID NO: 2712961 - RNA, 19 nt, Artificial Sequence
  Description of Artificial Sequence: Synthetic oligonucleotide
cccggauggaugucuguaa

SEQ ID NO: 2712962 - RNA, 19 nt, Artificial Sequence
  Description of Artificial Sequence: Synthetic oligonucleotide
cggcgacuaguuucuggag

SEQ ID NO: 2712963 - RNA, 19 nt, Artificial Sequence
  Description of Artificial Sequence: Synthetic oligonucleotide
ccguugcugcaggaaguag

SEQ ID NO: 2712964 - RNA, 19 nt, Artificial Sequence
  Description of Artificial Sequence: Synthetic oligonucleotide
ugccugcgcccagccagaa

SEQ ID NO: 2712965 - RNA, 19 nt, Artificial Sequence
  Description of Artificial Sequence: Synthetic oligonucleotide
cugaaccugcugcugcauu

SEQ ID NO: 2712966 - RNA, 19 nt, Artificial Sequence
  Description of Artificial Sequence: Synthetic oligonucleotide
gcacugacagcaguuccgu

SEQ ID NO: 2712967 - RNA, 19 nt, Artificial Sequence
  Description of Artificial Sequence: Synthetic oligonucleotide
ccugccggagggccugaac

SEQ ID NO: 2712968 - RNA, 19 nt, Artificial Sequence
  Description of Artificial Sequence: Synthetic oligonucleotide
cgucugcucuuugugaaga

SEQ ID NO: 2712969 - RNA, 19 nt, Artificial Sequence
  Description of Artificial Sequence: Synthetic oligonucleotide
cccuggagacggucguauc

SEQ ID NO: 2712970 - RNA, 19 nt, Artificial Sequence
  Description of Artificial Sequence: Synthetic oligonucleotide
guggcacaggguguuccgu

SEQ ID NO: 2712971 - RNA, 19 nt, Artificial Sequence
  Description of Artificial Sequence: Synthetic oligonucleotide
cguagcuccuggcggcgac

SEQ ID NO: 2712972 - RNA, 19 nt, Artificial Sequence
  Description of Artificial Sequence: Synthetic oligonucleotide
cucccggauggaugucugu

SEQ ID NO: 2712973 - RNA, 19 nt, Artificial Sequence
  Description of Artificial Sequence: Synthetic oligonucleotide
gggauuccacugggucgcc

SEQ ID NO: 2712974 - RNA, 19 nt, Artificial Sequence
  Description of Artificial Sequence: Synthetic oligonucleotide
ccccuuucccacagccuca

SEQ ID NO: 2712975 - RNA, 19 nt, Artificial Sequence
  Description of Artificial Sequence: Synthetic oligonucleotide
cuccuggcggcgacuaguu

SEQ ID NO: 2712976 - RNA, 19 nt, Artificial Sequence
  Description of Artificial Sequence: Synthetic oligonucleotide
cuccucccggauggauguc

SEQ ID NO: 2712977 - RNA, 19 nt, Artificial Sequence
  Description of Artificial Sequence: Synthetic oligonucleotide
guagcuccuggcggcgacu

SEQ ID NO: 2712978 - RNA, 19 nt, Artificial Sequence
  Description of Artificial Sequence: Synthetic oligonucleotide
caucggcuaguuccugguu

SEQ ID NO: 2712979 - RNA, 19 nt, Artificial Sequence
  Description of Artificial Sequence: Synthetic oligonucleotide
ccaccugccugcgcccagc

SEQ ID NO: 2712980 - RNA, 19 nt, Artificial Sequence
  Description of Artificial Sequence: Synthetic oligonucleotide
gcuccuggcggcgacuagu

SEQ ID NO: 2712981 - RNA, 19 nt, Artificial Sequence
  Description of Artificial Sequence: Synthetic oligonucleotide
guuucacccuggagacggu

SEQ ID NO: 2712982 - RNA, 19 nt, Artificial Sequence
  Description of Artificial Sequence: Synthetic oligonucleotide
gccugcgcccagccagaac

SEQ ID NO: 2712983 - RNA, 19 nt, Artificial Sequence
  Description of Artificial Sequence: Synthetic oligonucleotide
cggauggaugucuguaacu

SEQ ID NO: 2712984 - RNA, 19 nt, Artificial Sequence
  Description of Artificial Sequence: Synthetic oligonucleotide
gggucgccaggcugguucu

SEQ ID NO: 2712985 - RNA, 19 nt, Artificial Sequence
  Description of Artificial Sequence: Synthetic oligonucleotide
cacgguggcacaggguguu

SEQ ID NO: 2712986 - RNA, 19 nt, Artificial Sequence
  Description of Artificial Sequence: Synthetic oligonucleotide
gccaugccugccggagggc

SEQ ID NO: 2712987 - RNA, 19 nt, Artificial Sequence
  Description of Artificial Sequence: Synthetic oligonucleotide
cugguucuccaugggcuuu

SEQ ID NO: 2712988 - RNA, 19 nt, Artificial Sequence
  Description of Artificial Sequence: Synthetic oligonucleotide
ggcucaccucagccauguc

SEQ ID NO: 2712989 - RNA, 19 nt, Artificial Sequence
  Description of Artificial Sequence: Synthetic oligonucleotide
augaacccucaggccccuu

SEQ ID NO: 2712990 - RNA, 19 nt, Artificial Sequence
  Description of Artificial Sequence: Synthetic oligonucleotide
cacccuggagacggucgua

SEQ ID NO: 2712991 - RNA, 19 nt, Artificial Sequence
  Description of Artificial Sequence: Synthetic oligonucleotide
gccugccaugccugccgga

SEQ ID NO: 2712992 - RNA, 19 nt, Artificial Sequence
  Description of Artificial Sequence: Synthetic oligonucleotide
ggucgccaggcugguucuc

SEQ ID NO: 2712993 - RNA, 19 nt, Artificial Sequence
  Description of Artificial Sequence: Synthetic oligonucleotide
gcacacgguggcacagggu

SEQ ID NO: 2712994 - RNA, 19 nt, Artificial Sequence
  Description of Artificial Sequence: Synthetic oligonucleotide
cgacuaguuucuggagaaa

SEQ ID NO: 2712995 - RNA, 19 nt, Artificial Sequence
  Description of Artificial Sequence: Synthetic oligonucleotide
gcaguuccgucugcucuuu

SEQ ID NO: 2712996 - RNA, 19 nt, Artificial Sequence
  Description of Artificial Sequence: Synthetic oligonucleotide
ccucagccaugucgaaauu

SEQ ID NO: 2712997 - RNA, 19 nt, Artificial Sequence
  Description of Artificial Sequence: Synthetic oligonucleotide
gccugccggagggccugaa

SEQ ID NO: 2712998 - RNA, 19 nt, Artificial Sequence
  Description of Artificial Sequence: Synthetic oligonucleotide
cugggucgccaggcugguu

SEQ ID NO: 2712999 - RNA, 19 nt, Artificial Sequence
  Description of Artificial Sequence: Synthetic oligonucleotide
cggcuaguuccugguucuu

SEQ ID NO: 2713000 - RNA, 19 nt, Artificial Sequence
  Description of Artificial Sequence: Synthetic oligonucleotide
aaaugcauaacugugacag

SEQ ID NO: 2713001 - RNA, 19 nt, Artificial Sequence
  Description of Artificial Sequence: Synthetic oligonucleotide
uuuucguuuucuaagaaag

SEQ ID NO: 2713002 - RNA, 19 nt, Artificial Sequence
  Description of Artificial Sequence: Synthetic oligonucleotide
uucuaaaucaacuaauuug

SEQ ID NO: 2713003 - RNA, 19 nt, Artificial Sequence
  Description of Artificial Sequence: Synthetic oligonucleotide
acuaauuugucuuugaacu

SEQ ID NO: 2713004 - RNA, 19 nt, Artificial Sequence
  Description of Artificial Sequence: Synthetic oligonucleotide
aacuaauuugucuuugaac

SEQ ID NO: 2713005 - RNA, 19 nt, Artificial Sequence
  Description of Artificial Sequence: Synthetic oligonucleotide
auuauuuucguuuucuaag

SEQ ID NO: 2713006 - RNA, 19 nt, Artificial Sequence
  Description of Artificial Sequence: Synthetic oligonucleotide
auaacugugacaguuuucc

SEQ ID NO: 2713007 - RNA, 19 nt, Artificial Sequence
  Description of Artificial Sequence: Synthetic oligonucleotide
uucuccauaauauaucucc

SEQ ID NO: 2713008 - RNA, 19 nt, Artificial Sequence
  Description of Artificial Sequence: Synthetic oligonucleotide
uuguaaauucauaaguuca

SEQ ID NO: 2713009 - RNA, 19 nt, Artificial Sequence
  Description of Artificial Sequence: Synthetic oligonucleotide
aaaucaacuaauuugucuu

SEQ ID NO: 2713010 - RNA, 19 nt, Artificial Sequence
  Description of Artificial Sequence: Synthetic oligonucleotide
auucauaucuucaaucugc

SEQ ID NO: 2713011 - RNA, 19 nt, Artificial Sequence
  Description of Artificial Sequence: Synthetic oligonucleotide
auuucuaugaccugcucuc

SEQ ID NO: 2713012 - RNA, 19 nt, Artificial Sequence
  Description of Artificial Sequence: Synthetic oligonucleotide
uaaucgaaaagcuuguugu

SEQ ID NO: 2713013 - RNA, 19 nt, Artificial Sequence
  Description of Artificial Sequence: Synthetic oligonucleotide
ucagccauaaucgaaaagc

SEQ ID NO: 2713014 - RNA, 19 nt, Artificial Sequence
  Description of Artificial Sequence: Synthetic oligonucleotide
agaaaugcauaacugugac

SEQ ID NO: 2713015 - RNA, 19 nt, Artificial Sequence
  Description of Artificial Sequence: Synthetic oligonucleotide
aaagcuuuacaagugucac

SEQ ID NO: 2713016 - RNA, 19 nt, Artificial Sequence
  Description of Artificial Sequence: Synthetic oligonucleotide
uugucuuugaacuugaguu

SEQ ID NO: 2713017 - RNA, 19 nt, Artificial Sequence
  Description of Artificial Sequence: Synthetic oligonucleotide
ucuauaaucuucuccauaa

SEQ ID NO: 2713018 - RNA, 19 nt, Artificial Sequence
  Description of Artificial Sequence: Synthetic oligonucleotide
uucauaaguucaaacuucc

SEQ ID NO: 2713019 - RNA, 19 nt, Artificial Sequence
  Description of Artificial Sequence: Synthetic oligonucleotide
aaacacuccucuugcuucc

SEQ ID NO: 2713020 - RNA, 19 nt, Artificial Sequence
  Description of Artificial Sequence: Synthetic oligonucleotide
aaagaacaaacacuccucu

SEQ ID NO: 2713021 - RNA, 19 nt, Artificial Sequence
  Description of Artificial Sequence: Synthetic oligonucleotide
ucugcuauucauaucuuca

SEQ ID NO: 2713022 - RNA, 19 nt, Artificial Sequence
  Description of Artificial Sequence: Synthetic oligonucleotide
ucucuauucacucugcuau

SEQ ID NO: 2713023 - RNA, 19 nt, Artificial Sequence
  Description of Artificial Sequence: Synthetic oligonucleotide
cucucuaccaguaucuucc

SEQ ID NO: 2713024 - RNA, 19 nt, Artificial Sequence
  Description of Artificial Sequence: Synthetic oligonucleotide
uccagacacauuauuuucg

SEQ ID NO: 2713025 - RNA, 19 nt, Artificial Sequence
  Description of Artificial Sequence: Synthetic oligonucleotide
uguuuaaggccucucucgg

SEQ ID NO: 2713026 - RNA, 19 nt, Artificial Sequence
  Description of Artificial Sequence: Synthetic oligonucleotide
aauggugggacuucuaaau

SEQ ID NO: 2713027 - RNA, 19 nt, Artificial Sequence
  Description of Artificial Sequence: Synthetic oligonucleotide
cuuguuagccucuauaauc

SEQ ID NO: 2713028 - RNA, 19 nt, Artificial Sequence
  Description of Artificial Sequence: Synthetic oligonucleotide
uaucguuuucuucacagcu

SEQ ID NO: 2713029 - RNA, 19 nt, Artificial Sequence
  Description of Artificial Sequence: Synthetic oligonucleotide
uggcucuugauucuguagg

SEQ ID NO: 2713030 - RNA, 19 nt, Artificial Sequence
  Description of Artificial Sequence: Synthetic oligonucleotide
uugaacuugaguuuucgcu

SEQ ID NO: 2713031 - RNA, 19 nt, Artificial Sequence
  Description of Artificial Sequence: Synthetic oligonucleotide
uuauuuucguuuucuaaga

SEQ ID NO: 2713032 - RNA, 19 nt, Artificial Sequence
  Description of Artificial Sequence: Synthetic oligonucleotide
uguaaauucauaaguucaa

SEQ ID NO: 2713033 - RNA, 19 nt, Artificial Sequence
  Description of Artificial Sequence: Synthetic oligonucleotide
ucgaaaagcuuguuguggg

SEQ ID NO: 2713034 - RNA, 19 nt, Artificial Sequence
  Description of Artificial Sequence: Synthetic oligonucleotide
auaaucgaaaagcuuguug

SEQ ID NO: 2713035 - RNA, 19 nt, Artificial Sequence
  Description of Artificial Sequence: Synthetic oligonucleotide
auguuuaaggccucucucg

SEQ ID NO: 2713036 - RNA, 19 nt, Artificial Sequence
  Description of Artificial Sequence: Synthetic oligonucleotide
cucaaugucuuguaaauuc

SEQ ID NO: 2713037 - RNA, 19 nt, Artificial Sequence
  Description of Artificial Sequence: Synthetic oligonucleotide
cuuguaaauucauaaguuc

SEQ ID NO: 2713038 - RNA, 19 nt, Artificial Sequence
  Description of Artificial Sequence: Synthetic oligonucleotide
ucuuguaaauucauaaguu

SEQ ID NO: 2713039 - RNA, 19 nt, Artificial Sequence
  Description of Artificial Sequence: Synthetic oligonucleotide
uuuacaagugucacugucu

SEQ ID NO: 2713040 - RNA, 19 nt, Artificial Sequence
  Description of Artificial Sequence: Synthetic oligonucleotide
uuucuaagaaagcuuuaca

SEQ ID NO: 2713041 - RNA, 19 nt, Artificial Sequence
  Description of Artificial Sequence: Synthetic oligonucleotide
uuguuagccucuauaaucu

SEQ ID NO: 2713042 - RNA, 19 nt, Artificial Sequence
  Description of Artificial Sequence: Synthetic oligonucleotide
aaucgaaaagcuuguugug

SEQ ID NO: 2713043 - RNA, 19 nt, Artificial Sequence
  Description of Artificial Sequence: Synthetic oligonucleotide
aagaaagcuuuacaagugu

SEQ ID NO: 2713044 - RNA, 19 nt, Artificial Sequence
  Description of Artificial Sequence: Synthetic oligonucleotide
uauaaucuucuccauaaua

SEQ ID NO: 2713045 - RNA, 19 nt, Artificial Sequence
  Description of Artificial Sequence: Synthetic oligonucleotide
ucuugauucuguaggagcu

SEQ ID NO: 2713046 - RNA, 19 nt, Artificial Sequence
  Description of Artificial Sequence: Synthetic oligonucleotide
ucuucuccauaauauaucu

SEQ ID NO: 2713047 - RNA, 19 nt, Artificial Sequence
  Description of Artificial Sequence: Synthetic oligonucleotide
uuagccucuauaaucuucu

SEQ ID NO: 2713048 - RNA, 19 nt, Artificial Sequence
  Description of Artificial Sequence: Synthetic oligonucleotide
agccucuauaaucuucucc

SEQ ID NO: 2713049 - RNA, 19 nt, Artificial Sequence
  Description of Artificial Sequence: Synthetic oligonucleotide
aaaagcuuguugugggucu

SEQ ID NO: 2713050 - RNA, 19 nt, Artificial Sequence
  Description of Artificial Sequence: Synthetic oligonucleotide
auucauaaguucaaacuuc

SEQ ID NO: 2713051 - RNA, 19 nt, Artificial Sequence
  Description of Artificial Sequence: Synthetic oligonucleotide
cucgguuccucucagaaag

SEQ ID NO: 2713052 - RNA, 19 nt, Artificial Sequence
  Description of Artificial Sequence: Synthetic oligonucleotide
ugaacuugaguuuucgcuc

SEQ ID NO: 2713053 - RNA, 19 nt, Artificial Sequence
  Description of Artificial Sequence: Synthetic oligonucleotide
ucguuuucuucacagcugc

SEQ ID NO: 2713054 - RNA, 19 nt, Artificial Sequence
  Description of Artificial Sequence: Synthetic oligonucleotide
ucuucaaucugcuuugcuc

SEQ ID NO: 2713055 - RNA, 19 nt, Artificial Sequence
  Description of Artificial Sequence: Synthetic oligonucleotide
uucguuuucuaagaaagcu

SEQ ID NO: 2713056 - RNA, 19 nt, Artificial Sequence
  Description of Artificial Sequence: Synthetic oligonucleotide
uuuuccagacacauuauuu

SEQ ID NO: 2713057 - RNA, 19 nt, Artificial Sequence
  Description of Artificial Sequence: Synthetic oligonucleotide
uucaucuaggucuuucuga

SEQ ID NO: 2713058 - RNA, 19 nt, Artificial Sequence
  Description of Artificial Sequence: Synthetic oligonucleotide
uuucguuuucuaagaaagc

SEQ ID NO: 2713059 - RNA, 19 nt, Artificial Sequence
  Description of Artificial Sequence: Synthetic oligonucleotide
ucuaccaguaucuuccuau

SEQ ID NO: 2713060 - RNA, 19 nt, Artificial Sequence
  Description of Artificial Sequence: Synthetic oligonucleotide
ugggacuucuaaaucaacu

SEQ ID NO: 2713061 - RNA, 19 nt, Artificial Sequence
  Description of Artificial Sequence: Synthetic oligonucleotide
cuuccuaucguuuucuuca

SEQ ID NO: 2713062 - RNA, 19 nt, Artificial Sequence
  Description of Artificial Sequence: Synthetic oligonucleotide
agacacauuauuuucguuu

SEQ ID NO: 2713063 - RNA, 19 nt, Artificial Sequence
  Description of Artificial Sequence: Synthetic oligonucleotide
aacuugaguuuucgcuccc

SEQ ID NO: 2713064 - RNA, 19 nt, Artificial Sequence
  Description of Artificial Sequence: Synthetic oligonucleotide
cucuugauucuguaggagc

SEQ ID NO: 2713065 - RNA, 19 nt, Artificial Sequence
  Description of Artificial Sequence: Synthetic oligonucleotide
cauaaguucaaacuuccca

SEQ ID NO: 2713066 - RNA, 19 nt, Artificial Sequence
  Description of Artificial Sequence: Synthetic oligonucleotide
aucgaaaagcuuguugugg

SEQ ID NO: 2713067 - RNA, 19 nt, Artificial Sequence
  Description of Artificial Sequence: Synthetic oligonucleotide
aucucucucuaccaguauc

SEQ ID NO: 2713068 - RNA, 19 nt, Artificial Sequence
  Description of Artificial Sequence: Synthetic oligonucleotide
uucauaucuucaaucugcu

SEQ ID NO: 2713069 - RNA, 19 nt, Artificial Sequence
  Description of Artificial Sequence: Synthetic oligonucleotide
aaucuucuccauaauauau

SEQ ID NO: 2713070 - RNA, 19 nt, Artificial Sequence
  Description of Artificial Sequence: Synthetic oligonucleotide
uuugaacuugaguuuucgc

SEQ ID NO: 2713071 - RNA, 19 nt, Artificial Sequence
  Description of Artificial Sequence: Synthetic oligonucleotide
uuuucgcucccuuuuguca

SEQ ID NO: 2713072 - RNA, 19 nt, Artificial Sequence
  Description of Artificial Sequence: Synthetic oligonucleotide
uuuccagacacauuauuuu

SEQ ID NO: 2713073 - RNA, 19 nt, Artificial Sequence
  Description of Artificial Sequence: Synthetic oligonucleotide
uguugugggucucuauuca

SEQ ID NO: 2713074 - RNA, 19 nt, Artificial Sequence
  Description of Artificial Sequence: Synthetic oligonucleotide
uggugggacuucuaaauca

SEQ ID NO: 2713075 - RNA, 19 nt, Artificial Sequence
  Description of Artificial Sequence: Synthetic oligonucleotide
acugugacaguuuuccaga

SEQ ID NO: 2713076 - RNA, 19 nt, Artificial Sequence
  Description of Artificial Sequence: Synthetic oligonucleotide
ucaacuaauuugucuuuga

SEQ ID NO: 2713077 - RNA, 19 nt, Artificial Sequence
  Description of Artificial Sequence: Synthetic oligonucleotide
ugggucucuauucacucug

SEQ ID NO: 2713078 - RNA, 19 nt, Artificial Sequence
  Description of Artificial Sequence: Synthetic oligonucleotide
uauaucuccuuacuuccuc

SEQ ID NO: 2713079 - RNA, 19 nt, Artificial Sequence
  Description of Artificial Sequence: Synthetic oligonucleotide
ucauaaguucaaacuuccc

SEQ ID NO: 2713080 - RNA, 19 nt, Artificial Sequence
  Description of Artificial Sequence: Synthetic oligonucleotide
aucuaggucuuucugauuu

SEQ ID NO: 2713081 - RNA, 19 nt, Artificial Sequence
  Description of Artificial Sequence: Synthetic oligonucleotide
gaccacauucucuugcccc

SEQ ID NO: 2713082 - RNA, 19 nt, Artificial Sequence
  Description of Artificial Sequence: Synthetic oligonucleotide
aaucaacuaauuugucuuu

SEQ ID NO: 2713083 - RNA, 19 nt, Artificial Sequence
  Description of Artificial Sequence: Synthetic oligonucleotide
uucagccauaaucgaaaag

SEQ ID NO: 2713084 - RNA, 19 nt, Artificial Sequence
  Description of Artificial Sequence: Synthetic oligonucleotide
uauuuucguuuucuaagaa

SEQ ID NO: 2713085 - RNA, 19 nt, Artificial Sequence
  Description of Artificial Sequence: Synthetic oligonucleotide
guuccucucagaaagaaca

SEQ ID NO: 2713086 - RNA, 19 nt, Artificial Sequence
  Description of Artificial Sequence: Synthetic oligonucleotide
ucucucaaugucuuguaaa

SEQ ID NO: 2713087 - RNA, 19 nt, Artificial Sequence
  Description of Artificial Sequence: Synthetic oligonucleotide
gaaagaacaaacacuccuc

SEQ ID NO: 2713088 - RNA, 19 nt, Artificial Sequence
  Description of Artificial Sequence: Synthetic oligonucleotide
ccuuuugucauucacuggc

SEQ ID NO: 2713089 - RNA, 19 nt, Artificial Sequence
  Description of Artificial Sequence: Synthetic oligonucleotide
cuuuacaagugucacuguc

SEQ ID NO: 2713090 - RNA, 19 nt, Artificial Sequence
  Description of Artificial Sequence: Synthetic oligonucleotide
uaaucuucuccauaauaua

SEQ ID NO: 2713091 - RNA, 19 nt, Artificial Sequence
  Description of Artificial Sequence: Synthetic oligonucleotide
accaguaucuuccuaucgu

SEQ ID NO: 2713092 - RNA, 19 nt, Artificial Sequence
  Description of Artificial Sequence: Synthetic oligonucleotide
ugaguuuucgcucccuuuu

SEQ ID NO: 2713093 - RNA, 19 nt, Artificial Sequence
  Description of Artificial Sequence: Synthetic oligonucleotide
aagcuuuacaagugucacu

SEQ ID NO: 2713094 - RNA, 19 nt, Artificial Sequence
  Description of Artificial Sequence: Synthetic oligonucleotide
aacucuccgcauuucuaug

SEQ ID NO: 2713095 - RNA, 19 nt, Artificial Sequence
  Description of Artificial Sequence: Synthetic oligonucleotide
agaccacauucucuugccc

SEQ ID NO: 2713096 - RNA, 19 nt, Artificial Sequence
  Description of Artificial Sequence: Synthetic oligonucleotide
aaugcauaacugugacagu

SEQ ID NO: 2713097 - RNA, 19 nt, Artificial Sequence
  Description of Artificial Sequence: Synthetic oligonucleotide
uuacaagugucacugucuu

SEQ ID NO: 2713098 - RNA, 19 nt, Artificial Sequence
  Description of Artificial Sequence: Synthetic oligonucleotide
agcuuguuagccucuauaa

SEQ ID NO: 2713099 - RNA, 19 nt, Artificial Sequence
  Description of Artificial Sequence: Synthetic oligonucleotide
aacaaacacuccucuugcu

SEQ ID NO: 2713100 - RNA, 19 nt, Artificial Sequence
  Description of Artificial Sequence: Synthetic oligonucleotide
gccauaaucgaaaagcuug

SEQ ID NO: 2713101 - RNA, 19 nt, Artificial Sequence
  Description of Artificial Sequence: Synthetic oligonucleotide
cuaaaucaacuaauuuguc

SEQ ID NO: 2713102 - RNA, 19 nt, Artificial Sequence
  Description of Artificial Sequence: Synthetic oligonucleotide
gucuuguaaauucauaagu

SEQ ID NO: 2713103 - RNA, 19 nt, Artificial Sequence
  Description of Artificial Sequence: Synthetic oligonucleotide
cuaucguuuucuucacagc

SEQ ID NO: 2713104 - RNA, 19 nt, Artificial Sequence
  Description of Artificial Sequence: Synthetic oligonucleotide
ucguuuucuaagaaagcuu

SEQ ID NO: 2713105 - RNA, 19 nt, Artificial Sequence
  Description of Artificial Sequence: Synthetic oligonucleotide
ugcuauucauaucuucaau

SEQ ID NO: 2713106 - RNA, 19 nt, Artificial Sequence
  Description of Artificial Sequence: Synthetic oligonucleotide
uuucuucagccauaaucga

SEQ ID NO: 2713107 - RNA, 19 nt, Artificial Sequence
  Description of Artificial Sequence: Synthetic oligonucleotide
cauguuuaaggccucucuc

SEQ ID NO: 2713108 - RNA, 19 nt, Artificial Sequence
  Description of Artificial Sequence: Synthetic oligonucleotide
ugugacaguuuuccagaca

SEQ ID NO: 2713109 - RNA, 19 nt, Artificial Sequence
  Description of Artificial Sequence: Synthetic oligonucleotide
caccagaaaugcauaacug

SEQ ID NO: 2713110 - RNA, 19 nt, Artificial Sequence
  Description of Artificial Sequence: Synthetic oligonucleotide
aguaucuuccuaucguuuu

SEQ ID NO: 2713111 - RNA, 19 nt, Artificial Sequence
  Description of Artificial Sequence: Synthetic oligonucleotide
cuauucauaucuucaaucu

SEQ ID NO: 2713112 - RNA, 19 nt, Artificial Sequence
  Description of Artificial Sequence: Synthetic oligonucleotide
acacauuauuuucguuuuc

SEQ ID NO: 2713113 - RNA, 19 nt, Artificial Sequence
  Description of Artificial Sequence: Synthetic oligonucleotide
cagaaagaacaaacacucc

SEQ ID NO: 2713114 - RNA, 19 nt, Artificial Sequence
  Description of Artificial Sequence: Synthetic oligonucleotide
cucagaaagaacaaacacu

SEQ ID NO: 2713115 - RNA, 19 nt, Artificial Sequence
  Description of Artificial Sequence: Synthetic oligonucleotide
aagaacaaacacuccucuu

SEQ ID NO: 2713116 - RNA, 19 nt, Artificial Sequence
  Description of Artificial Sequence: Synthetic oligonucleotide
aaagcuuguugugggucuc

SEQ ID NO: 2713117 - RNA, 19 nt, Artificial Sequence
  Description of Artificial Sequence: Synthetic oligonucleotide
uugugggucucuauucacu

SEQ ID NO: 2713118 - RNA, 19 nt, Artificial Sequence
  Description of Artificial Sequence: Synthetic oligonucleotide
ugugggucucuauucacuc

SEQ ID NO: 2713119 - RNA, 19 nt, Artificial Sequence
  Description of Artificial Sequence: Synthetic oligonucleotide
agugucacugucuuccaau

SEQ ID NO: 2713120 - RNA, 19 nt, Artificial Sequence
  Description of Artificial Sequence: Synthetic oligonucleotide
uuguugugggucucuauuc

SEQ ID NO: 2713121 - RNA, 19 nt, Artificial Sequence
  Description of Artificial Sequence: Synthetic oligonucleotide
acugacaagaccacauucu

SEQ ID NO: 2713122 - RNA, 19 nt, Artificial Sequence
  Description of Artificial Sequence: Synthetic oligonucleotide
ccagaaaugcauaacugug

SEQ ID NO: 2713123 - RNA, 19 nt, Artificial Sequence
  Description of Artificial Sequence: Synthetic oligonucleotide
uugcucgcugaacucuccg

SEQ ID NO: 2713124 - RNA, 19 nt, Artificial Sequence
  Description of Artificial Sequence: Synthetic oligonucleotide
aucaacuaauuugucuuug

SEQ ID NO: 2713125 - RNA, 19 nt, Artificial Sequence
  Description of Artificial Sequence: Synthetic oligonucleotide
auaucuccuuacuuccuca

SEQ ID NO: 2713126 - RNA, 19 nt, Artificial Sequence
  Description of Artificial Sequence: Synthetic oligonucleotide
gaaaagcuuguuguggguc

SEQ ID NO: 2713127 - RNA, 19 nt, Artificial Sequence
  Description of Artificial Sequence: Synthetic oligonucleotide
gaaaugcauaacugugaca

SEQ ID NO: 2713128 - RNA, 19 nt, Artificial Sequence
  Description of Artificial Sequence: Synthetic oligonucleotide
ccuaucguuuucuucacag

SEQ ID NO: 2713129 - RNA, 19 nt, Artificial Sequence
  Description of Artificial Sequence: Synthetic oligonucleotide
aucuccuuacuuccucauc

SEQ ID NO: 2713130 - RNA, 19 nt, Artificial Sequence
  Description of Artificial Sequence: Synthetic oligonucleotide
ucaucugcucuucaugcuu

SEQ ID NO: 2713131 - RNA, 19 nt, Artificial Sequence
  Description of Artificial Sequence: Synthetic oligonucleotide
ucccaucucucucuaccag

SEQ ID NO: 2713132 - RNA, 19 nt, Artificial Sequence
  Description of Artificial Sequence: Synthetic oligonucleotide
gccucuauaaucuucucca

SEQ ID NO: 2713133 - RNA, 19 nt, Artificial Sequence
  Description of Artificial Sequence: Synthetic oligonucleotide
ugaacucuccgcauuucua

SEQ ID NO: 2713134 - RNA, 19 nt, Artificial Sequence
  Description of Artificial Sequence: Synthetic oligonucleotide
uuucgcucccuuuugucau

SEQ ID NO: 2713135 - RNA, 19 nt, Artificial Sequence
  Description of Artificial Sequence: Synthetic oligonucleotide
gaguuuucgcucccuuuug

SEQ ID NO: 2713136 - RNA, 19 nt, Artificial Sequence
  Description of Artificial Sequence: Synthetic oligonucleotide
aaucugcuuugcucgcuga

SEQ ID NO: 2713137 - RNA, 19 nt, Artificial Sequence
  Description of Artificial Sequence: Synthetic oligonucleotide
cacucugcuauucauaucu

SEQ ID NO: 2713138 - RNA, 19 nt, Artificial Sequence
  Description of Artificial Sequence: Synthetic oligonucleotide
ucucucuaccaguaucuuc

SEQ ID NO: 2713139 - RNA, 19 nt, Artificial Sequence
  Description of Artificial Sequence: Synthetic oligonucleotide
ucuaugaccugcucucuuu

SEQ ID NO: 2713140 - RNA, 19 nt, Artificial Sequence
  Description of Artificial Sequence: Synthetic oligonucleotide
ccucucagaaagaacaaac

SEQ ID NO: 2713141 - RNA, 19 nt, Artificial Sequence
  Description of Artificial Sequence: Synthetic oligonucleotide
acucuccgcauuucuauga

SEQ ID NO: 2713142 - RNA, 19 nt, Artificial Sequence
  Description of Artificial Sequence: Synthetic oligonucleotide
gacaagaccacauucucuu

SEQ ID NO: 2713143 - RNA, 19 nt, Artificial Sequence
  Description of Artificial Sequence: Synthetic oligonucleotide
ucuucugagccauguuuaa

SEQ ID NO: 2713144 - RNA, 19 nt, Artificial Sequence
  Description of Artificial Sequence: Synthetic oligonucleotide
aguuuucgcucccuuuugu

SEQ ID NO: 2713145 - RNA, 19 nt, Artificial Sequence
  Description of Artificial Sequence: Synthetic oligonucleotide
guuuaaggccucucucggc

SEQ ID NO: 2713146 - RNA, 19 nt, Artificial Sequence
  Description of Artificial Sequence: Synthetic oligonucleotide
ucuccgcauuucuaugacc

SEQ ID NO: 2713147 - RNA, 19 nt, Artificial Sequence
  Description of Artificial Sequence: Synthetic oligonucleotide
ugcauaacugugacaguuu

SEQ ID NO: 2713148 - RNA, 19 nt, Artificial Sequence
  Description of Artificial Sequence: Synthetic oligonucleotide
cucugcuauucauaucuuc

SEQ ID NO: 2713149 - RNA, 19 nt, Artificial Sequence
  Description of Artificial Sequence: Synthetic oligonucleotide
uuaaggccucucucggccc

SEQ ID NO: 2713150 - RNA, 19 nt, Artificial Sequence
  Description of Artificial Sequence: Synthetic oligonucleotide
uuccucucagaaagaacaa

SEQ ID NO: 2713151 - RNA, 19 nt, Artificial Sequence
  Description of Artificial Sequence: Synthetic oligonucleotide
ugucuuccaauggugggac

SEQ ID NO: 2713152 - RNA, 19 nt, Artificial Sequence
  Description of Artificial Sequence: Synthetic oligonucleotide
ucauucacuggcucuugau

SEQ ID NO: 2713153 - RNA, 19 nt, Artificial Sequence
  Description of Artificial Sequence: Synthetic oligonucleotide
ccauaauauaucuccuuac

SEQ ID NO: 2713154 - RNA, 19 nt, Artificial Sequence
  Description of Artificial Sequence: Synthetic oligonucleotide
augcauaacugugacaguu

SEQ ID NO: 2713155 - RNA, 19 nt, Artificial Sequence
  Description of Artificial Sequence: Synthetic oligonucleotide
ucugcuuugcucgcugaac

SEQ ID NO: 2713156 - RNA, 19 nt, Artificial Sequence
  Description of Artificial Sequence: Synthetic oligonucleotide
guaucuuccuaucguuuuc

SEQ ID NO: 2713157 - RNA, 19 nt, Artificial Sequence
  Description of Artificial Sequence: Synthetic oligonucleotide
uccucugucuuccuuucuu

SEQ ID NO: 2713158 - RNA, 19 nt, Artificial Sequence
  Description of Artificial Sequence: Synthetic oligonucleotide
guugugggucucuauucac

SEQ ID NO: 2713159 - RNA, 19 nt, Artificial Sequence
  Description of Artificial Sequence: Synthetic oligonucleotide
uuccugagcuccucugucu

SEQ ID NO: 2713160 - RNA, 19 nt, Artificial Sequence
  Description of Artificial Sequence: Synthetic oligonucleotide
uuccuaucguuuucuucac

SEQ ID NO: 2713161 - RNA, 19 nt, Artificial Sequence
  Description of Artificial Sequence: Synthetic oligonucleotide
uccuaucguuuucuucaca

SEQ ID NO: 2713162 - RNA, 19 nt, Artificial Sequence
  Description of Artificial Sequence: Synthetic oligonucleotide
ucucucggcccucgguucc

SEQ ID NO: 2713163 - RNA, 19 nt, Artificial Sequence
  Description of Artificial Sequence: Synthetic oligonucleotide
aucguuuucuucacagcug

SEQ ID NO: 2713164 - RNA, 19 nt, Artificial Sequence
  Description of Artificial Sequence: Synthetic oligonucleotide
guuagccucuauaaucuuc

SEQ ID NO: 2713165 - RNA, 19 nt, Artificial Sequence
  Description of Artificial Sequence: Synthetic oligonucleotide
uccuuacuuccucauccuc

SEQ ID NO: 2713166 - RNA, 19 nt, Artificial Sequence
  Description of Artificial Sequence: Synthetic oligonucleotide
uaugaccugcucucuuuuc

SEQ ID NO: 2713167 - RNA, 19 nt, Artificial Sequence
  Description of Artificial Sequence: Synthetic oligonucleotide
caucaggaacugacaagac

SEQ ID NO: 2713168 - RNA, 19 nt, Artificial Sequence
  Description of Artificial Sequence: Synthetic oligonucleotide
cuuugcucgcugaacucuc

SEQ ID NO: 2713169 - RNA, 19 nt, Artificial Sequence
  Description of Artificial Sequence: Synthetic oligonucleotide
guuuucgcucccuuuuguc

SEQ ID NO: 2713170 - RNA, 19 nt, Artificial Sequence
  Description of Artificial Sequence: Synthetic oligonucleotide
ucuuccaauggugggacuu

SEQ ID NO: 2713171 - RNA, 19 nt, Artificial Sequence
  Description of Artificial Sequence: Synthetic oligonucleotide
uugaguuuucgcucccuuu

SEQ ID NO: 2713172 - RNA, 19 nt, Artificial Sequence
  Description of Artificial Sequence: Synthetic oligonucleotide
cauucucuugccccaguuc

SEQ ID NO: 2713173 - RNA, 19 nt, Artificial Sequence
  Description of Artificial Sequence: Synthetic oligonucleotide
caaucugcuuugcucgcug

SEQ ID NO: 2713174 - RNA, 19 nt, Artificial Sequence
  Description of Artificial Sequence: Synthetic oligonucleotide
uaucuccuuacuuccucau

SEQ ID NO: 2713175 - RNA, 19 nt, Artificial Sequence
  Description of Artificial Sequence: Synthetic oligonucleotide
uucuaugaccugcucucuu

SEQ ID NO: 2713176 - RNA, 19 nt, Artificial Sequence
  Description of Artificial Sequence: Synthetic oligonucleotide
ggacuucuaaaucaacuaa

SEQ ID NO: 2713177 - RNA, 19 nt, Artificial Sequence
  Description of Artificial Sequence: Synthetic oligonucleotide
uaucuucaaucugcuuugc

SEQ ID NO: 2713178 - RNA, 19 nt, Artificial Sequence
  Description of Artificial Sequence: Synthetic oligonucleotide
ucucaaugucuuguaaauu

SEQ ID NO: 2713179 - RNA, 19 nt, Artificial Sequence
  Description of Artificial Sequence: Synthetic oligonucleotide
uuucuaugaccugcucucu

SEQ ID NO: 2713180 - RNA, 19 nt, Artificial Sequence
  Description of Artificial Sequence: Synthetic oligonucleotide
caggaacugacaagaccac

SEQ ID NO: 2713181 - RNA, 19 nt, Artificial Sequence
  Description of Artificial Sequence: Synthetic oligonucleotide
guucaccagaaaugcauaa

SEQ ID NO: 2713182 - RNA, 19 nt, Artificial Sequence
  Description of Artificial Sequence: Synthetic oligonucleotide
gagcuuguuagccucuaua

SEQ ID NO: 2713183 - RNA, 19 nt, Artificial Sequence
  Description of Artificial Sequence: Synthetic oligonucleotide
caacuaauuugucuuugaa

SEQ ID NO: 2713184 - RNA, 19 nt, Artificial Sequence
  Description of Artificial Sequence: Synthetic oligonucleotide
cauuucuaugaccugcucu

SEQ ID NO: 2713185 - RNA, 19 nt, Artificial Sequence
  Description of Artificial Sequence: Synthetic oligonucleotide
cuaggucuuucugauuuuc

SEQ ID NO: 2713186 - RNA, 19 nt, Artificial Sequence
  Description of Artificial Sequence: Synthetic oligonucleotide
cccaguucaccagaaaugc

SEQ ID NO: 2713187 - RNA, 19 nt, Artificial Sequence
  Description of Artificial Sequence: Synthetic oligonucleotide
gacuucuaaaucaacuaau

SEQ ID NO: 2713188 - RNA, 19 nt, Artificial Sequence
  Description of Artificial Sequence: Synthetic oligonucleotide
uaaggccucucucggcccu

SEQ ID NO: 2713189 - RNA, 19 nt, Artificial Sequence
  Description of Artificial Sequence: Synthetic oligonucleotide
cucuccgcauuucuaugac

SEQ ID NO: 2713190 - RNA, 19 nt, Artificial Sequence
  Description of Artificial Sequence: Synthetic oligonucleotide
gaacucuccgcauuucuau

SEQ ID NO: 2713191 - RNA, 19 nt, Artificial Sequence
  Description of Artificial Sequence: Synthetic oligonucleotide
cuccgcauuucuaugaccu

SEQ ID NO: 2713192 - RNA, 19 nt, Artificial Sequence
  Description of Artificial Sequence: Synthetic oligonucleotide
ucauaucuucaaucugcuu

SEQ ID NO: 2713193 - RNA, 19 nt, Artificial Sequence
  Description of Artificial Sequence: Synthetic oligonucleotide
auauaucuccuuacuuccu

SEQ ID NO: 2713194 - RNA, 19 nt, Artificial Sequence
  Description of Artificial Sequence: Synthetic oligonucleotide
ucuaggucuuucugauuuu

SEQ ID NO: 2713195 - RNA, 19 nt, Artificial Sequence
  Description of Artificial Sequence: Synthetic oligonucleotide
cugcuauucauaucuucaa

SEQ ID NO: 2713196 - RNA, 19 nt, Artificial Sequence
  Description of Artificial Sequence: Synthetic oligonucleotide
gggacuucuaaaucaacua

SEQ ID NO: 2713197 - RNA, 19 nt, Artificial Sequence
  Description of Artificial Sequence: Synthetic oligonucleotide
ucgguuccucucagaaaga

SEQ ID NO: 2713198 - RNA, 19 nt, Artificial Sequence
  Description of Artificial Sequence: Synthetic oligonucleotide
aacuucccaucucucucua

SEQ ID NO: 2713199 - RNA, 19 nt, Artificial Sequence
  Description of Artificial Sequence: Synthetic oligonucleotide
uguuagccucuauaaucuu

SEQ ID NO: 2713200 - RNA, 19 nt, Artificial Sequence
  Description of Artificial Sequence: Synthetic oligonucleotide
ucacucugcuauucauauc

SEQ ID NO: 2713201 - RNA, 19 nt, Artificial Sequence
  Description of Artificial Sequence: Synthetic oligonucleotide
cucucaaugucuuguaaau

SEQ ID NO: 2713202 - RNA, 19 nt, Artificial Sequence
  Description of Artificial Sequence: Synthetic oligonucleotide
ugaccugcucucuuuucuu

SEQ ID NO: 2713203 - RNA, 19 nt, Artificial Sequence
  Description of Artificial Sequence: Synthetic oligonucleotide
caguucaccagaaaugcau

SEQ ID NO: 2713204 - RNA, 19 nt, Artificial Sequence
  Description of Artificial Sequence: Synthetic oligonucleotide
gucucuauucacucugcua

SEQ ID NO: 2713205 - RNA, 19 nt, Artificial Sequence
  Description of Artificial Sequence: Synthetic oligonucleotide
aggaacugacaagaccaca

SEQ ID NO: 2713206 - RNA, 19 nt, Artificial Sequence
  Description of Artificial Sequence: Synthetic oligonucleotide
caauggugggacuucuaaa

SEQ ID NO: 2713207 - RNA, 19 nt, Artificial Sequence
  Description of Artificial Sequence: Synthetic oligonucleotide
uuccaauggugggacuucu

SEQ ID NO: 2713208 - RNA, 19 nt, Artificial Sequence
  Description of Artificial Sequence: Synthetic oligonucleotide
cacauuauuuucguuuucu

SEQ ID NO: 2713209 - RNA, 19 nt, Artificial Sequence
  Description of Artificial Sequence: Synthetic oligonucleotide
ccccaguucaccagaaaug

SEQ ID NO: 2713210 - RNA, 19 nt, Artificial Sequence
  Description of Artificial Sequence: Synthetic oligonucleotide
acuggcucuugauucugua

SEQ ID NO: 2713211 - RNA, 19 nt, Artificial Sequence
  Description of Artificial Sequence: Synthetic oligonucleotide
auucacucugcuauucaua

SEQ ID NO: 2713212 - RNA, 19 nt, Artificial Sequence
  Description of Artificial Sequence: Synthetic oligonucleotide
aucugcuuugcucgcugaa

SEQ ID NO: 2713213 - RNA, 19 nt, Artificial Sequence
  Description of Artificial Sequence: Synthetic oligonucleotide
cuuccaauggugggacuuc

SEQ ID NO: 2713214 - RNA, 19 nt, Artificial Sequence
  Description of Artificial Sequence: Synthetic oligonucleotide
cagccauaaucgaaaagcu

SEQ ID NO: 2713215 - RNA, 19 nt, Artificial Sequence
  Description of Artificial Sequence: Synthetic oligonucleotide
cuucagccauaaucgaaaa

SEQ ID NO: 2713216 - RNA, 19 nt, Artificial Sequence
  Description of Artificial Sequence: Synthetic oligonucleotide
uccaauggugggacuucua

SEQ ID NO: 2713217 - RNA, 19 nt, Artificial Sequence
  Description of Artificial Sequence: Synthetic oligonucleotide
ccaucaggaacugacaaga

SEQ ID NO: 2713218 - RNA, 19 nt, Artificial Sequence
  Description of Artificial Sequence: Synthetic oligonucleotide
gucauucacuggcucuuga

SEQ ID NO: 2713219 - RNA, 19 nt, Artificial Sequence
  Description of Artificial Sequence: Synthetic oligonucleotide
cuaauuugucuuugaacuu

SEQ ID NO: 2713220 - RNA, 19 nt, Artificial Sequence
  Description of Artificial Sequence: Synthetic oligonucleotide
guuuucuucugagccaugu

SEQ ID NO: 2713221 - RNA, 19 nt, Artificial Sequence
  Description of Artificial Sequence: Synthetic oligonucleotide
cugucuuccaaugguggga

SEQ ID NO: 2713222 - RNA, 19 nt, Artificial Sequence
  Description of Artificial Sequence: Synthetic oligonucleotide
ggcucuugauucuguagga

SEQ ID NO: 2713223 - RNA, 19 nt, Artificial Sequence
  Description of Artificial Sequence: Synthetic oligonucleotide
cucucucggcccucgguuc

SEQ ID NO: 2713224 - RNA, 19 nt, Artificial Sequence
  Description of Artificial Sequence: Synthetic oligonucleotide
acacuccucuugcuuccug

SEQ ID NO: 2713225 - RNA, 19 nt, Artificial Sequence
  Description of Artificial Sequence: Synthetic oligonucleotide
guuuuccagacacauuauu

SEQ ID NO: 2713226 - RNA, 19 nt, Artificial Sequence
  Description of Artificial Sequence: Synthetic oligonucleotide
uagccucuauaaucuucuc

SEQ ID NO: 2713227 - RNA, 19 nt, Artificial Sequence
  Description of Artificial Sequence: Synthetic oligonucleotide
agccauaaucgaaaagcuu

SEQ ID NO: 2713228 - RNA, 19 nt, Artificial Sequence
  Description of Artificial Sequence: Synthetic oligonucleotide
gcucuugauucuguaggag

SEQ ID NO: 2713229 - RNA, 19 nt, Artificial Sequence
  Description of Artificial Sequence: Synthetic oligonucleotide
cccuuuugucauucacugg

SEQ ID NO: 2713230 - RNA, 19 nt, Artificial Sequence
  Description of Artificial Sequence: Synthetic oligonucleotide
acuugaguuuucgcucccu

SEQ ID NO: 2713231 - RNA, 19 nt, Artificial Sequence
  Description of Artificial Sequence: Synthetic oligonucleotide
cucucucaaugucuuguaa

SEQ ID NO: 2713232 - RNA, 19 nt, Artificial Sequence
  Description of Artificial Sequence: Synthetic oligonucleotide
ccgcauuucuaugaccugc

SEQ ID NO: 2713233 - RNA, 19 nt, Artificial Sequence
  Description of Artificial Sequence: Synthetic oligonucleotide
caagugucacugucuucca

SEQ ID NO: 2713234 - RNA, 19 nt, Artificial Sequence
  Description of Artificial Sequence: Synthetic oligonucleotide
cugcuuugcucgcugaacu

SEQ ID NO: 2713235 - RNA, 19 nt, Artificial Sequence
  Description of Artificial Sequence: Synthetic oligonucleotide
cucuugccccaguucacca

SEQ ID NO: 2713236 - RNA, 19 nt, Artificial Sequence
  Description of Artificial Sequence: Synthetic oligonucleotide
gguuccucucagaaagaac

SEQ ID NO: 2713237 - RNA, 19 nt, Artificial Sequence
  Description of Artificial Sequence: Synthetic oligonucleotide
ugccccaguucaccagaaa

SEQ ID NO: 2713238 - RNA, 19 nt, Artificial Sequence
  Description of Artificial Sequence: Synthetic oligonucleotide
gcucgcugaacucuccgca

SEQ ID NO: 2713239 - RNA, 19 nt, Artificial Sequence
  Description of Artificial Sequence: Synthetic oligonucleotide
acaguuuuccagacacauu

SEQ ID NO: 2713240 - RNA, 19 nt, Artificial Sequence
  Description of Artificial Sequence: Synthetic oligonucleotide
cugaacucuccgcauuucu

SEQ ID NO: 2713241 - RNA, 19 nt, Artificial Sequence
  Description of Artificial Sequence: Synthetic oligonucleotide
gucuuugaacuugaguuuu

SEQ ID NO: 2713242 - RNA, 19 nt, Artificial Sequence
  Description of Artificial Sequence: Synthetic oligonucleotide
ggugggacuucuaaaucaa

SEQ ID NO: 2713243 - RNA, 19 nt, Artificial Sequence
  Description of Artificial Sequence: Synthetic oligonucleotide
uucgcucccuuuugucauu

SEQ ID NO: 2713244 - RNA, 19 nt, Artificial Sequence
  Description of Artificial Sequence: Synthetic oligonucleotide
ggaacugacaagaccacau

SEQ ID NO: 2713245 - RNA, 19 nt, Artificial Sequence
  Description of Artificial Sequence: Synthetic oligonucleotide
cuccauaauauaucuccuu

SEQ ID NO: 2713246 - RNA, 19 nt, Artificial Sequence
  Description of Artificial Sequence: Synthetic oligonucleotide
gauucuguaggagcuuguu

SEQ ID NO: 2713247 - RNA, 19 nt, Artificial Sequence
  Description of Artificial Sequence: Synthetic oligonucleotide
ucggcccucgguuccucuc

SEQ ID NO: 2713248 - RNA, 19 nt, Artificial Sequence
  Description of Artificial Sequence: Synthetic oligonucleotide
agccauguuuaaggccucu

SEQ ID NO: 2713249 - RNA, 19 nt, Artificial Sequence
  Description of Artificial Sequence: Synthetic oligonucleotide
ucgcucccuuuugucauuc

SEQ ID NO: 2713250 - RNA, 19 nt, Artificial Sequence
  Description of Artificial Sequence: Synthetic oligonucleotide
cugucuuccuuucuuucau

SEQ ID NO: 2713251 - RNA, 19 nt, Artificial Sequence
  Description of Artificial Sequence: Synthetic oligonucleotide
ccaauggugggacuucuaa

SEQ ID NO: 2713252 - RNA, 19 nt, Artificial Sequence
  Description of Artificial Sequence: Synthetic oligonucleotide
cuccuuacuuccucauccu

SEQ ID NO: 2713253 - RNA, 19 nt, Artificial Sequence
  Description of Artificial Sequence: Synthetic oligonucleotide
gcauuucuaugaccugcuc

SEQ ID NO: 2713254 - RNA, 19 nt, Artificial Sequence
  Description of Artificial Sequence: Synthetic oligonucleotide
ccauaaucgaaaagcuugu

SEQ ID NO: 2713255 - RNA, 19 nt, Artificial Sequence
  Description of Artificial Sequence: Synthetic oligonucleotide
gugggucucuauucacucu

SEQ ID NO: 2713256 - RNA, 19 nt, Artificial Sequence
  Description of Artificial Sequence: Synthetic oligonucleotide
gggucucuauucacucugc

SEQ ID NO: 2713257 - RNA, 19 nt, Artificial Sequence
  Description of Artificial Sequence: Synthetic oligonucleotide
gcuuguuagccucuauaau

SEQ ID NO: 2713258 - RNA, 19 nt, Artificial Sequence
  Description of Artificial Sequence: Synthetic oligonucleotide
caguaucuuccuaucguuu

SEQ ID NO: 2713259 - RNA, 19 nt, Artificial Sequence
  Description of Artificial Sequence: Synthetic oligonucleotide
gagccauguuuaaggccuc

SEQ ID NO: 2713260 - RNA, 19 nt, Artificial Sequence
  Description of Artificial Sequence: Synthetic oligonucleotide
gcauaacugugacaguuuu

SEQ ID NO: 2713261 - RNA, 19 nt, Artificial Sequence
  Description of Artificial Sequence: Synthetic oligonucleotide
acucugcuauucauaucuu

SEQ ID NO: 2713262 - RNA, 19 nt, Artificial Sequence
  Description of Artificial Sequence: Synthetic oligonucleotide
caucugcucuucaugcuuu

SEQ ID NO: 2713263 - RNA, 19 nt, Artificial Sequence
  Description of Artificial Sequence: Synthetic oligonucleotide
ccagacacauuauuuucgu

SEQ ID NO: 2713264 - RNA, 19 nt, Artificial Sequence
  Description of Artificial Sequence: Synthetic oligonucleotide
cuugaguuuucgcucccuu

SEQ ID NO: 2713265 - RNA, 19 nt, Artificial Sequence
  Description of Artificial Sequence: Synthetic oligonucleotide
ccaguucaccagaaaugca

SEQ ID NO: 2713266 - RNA, 19 nt, Artificial Sequence
  Description of Artificial Sequence: Synthetic oligonucleotide
ggucucuauucacucugcu

SEQ ID NO: 2713267 - RNA, 19 nt, Artificial Sequence
  Description of Artificial Sequence: Synthetic oligonucleotide
gccccaguucaccagaaau

SEQ ID NO: 2713268 - RNA, 19 nt, Artificial Sequence
  Description of Artificial Sequence: Synthetic oligonucleotide
cuaugaccugcucucuuuu

SEQ ID NO: 2713269 - RNA, 19 nt, Artificial Sequence
  Description of Artificial Sequence: Synthetic oligonucleotide
aggagcuuguuagccucua

SEQ ID NO: 2713270 - RNA, 19 nt, Artificial Sequence
  Description of Artificial Sequence: Synthetic oligonucleotide
cauaaucgaaaagcuuguu

SEQ ID NO: 2713271 - RNA, 19 nt, Artificial Sequence
  Description of Artificial Sequence: Synthetic oligonucleotide
cucgcugaacucuccgcau

SEQ ID NO: 2713272 - RNA, 19 nt, Artificial Sequence
  Description of Artificial Sequence: Synthetic oligonucleotide
gcuuugcucgcugaacucu

SEQ ID NO: 2713273 - RNA, 19 nt, Artificial Sequence
  Description of Artificial Sequence: Synthetic oligonucleotide
ggcccucgguuccucucag

SEQ ID NO: 2713274 - RNA, 19 nt, Artificial Sequence
  Description of Artificial Sequence: Synthetic oligonucleotide
cagacacauuauuuucguu

SEQ ID NO: 2713275 - RNA, 19 nt, Artificial Sequence
  Description of Artificial Sequence: Synthetic oligonucleotide
gcugaacucuccgcauuuc

SEQ ID NO: 2713276 - RNA, 19 nt, Artificial Sequence
  Description of Artificial Sequence: Synthetic oligonucleotide
agcugccaucaggaacuga

SEQ ID NO: 2713277 - RNA, 19 nt, Artificial Sequence
  Description of Artificial Sequence: Synthetic oligonucleotide
gccauguuuaaggccucuc

SEQ ID NO: 2713278 - RNA, 19 nt, Artificial Sequence
  Description of Artificial Sequence: Synthetic oligonucleotide
cuugauucuguaggagcuu

SEQ ID NO: 2713279 - RNA, 19 nt, Artificial Sequence
  Description of Artificial Sequence: Synthetic oligonucleotide
cccucgguuccucucagaa

SEQ ID NO: 2713280 - RNA, 19 nt, Artificial Sequence
  Description of Artificial Sequence: Synthetic oligonucleotide
gcuuuacaagugucacugu

SEQ ID NO: 2713281 - RNA, 19 nt, Artificial Sequence
  Description of Artificial Sequence: Synthetic oligonucleotide
gucuuccaauggugggacu

SEQ ID NO: 2713282 - RNA, 19 nt, Artificial Sequence
  Description of Artificial Sequence: Synthetic oligonucleotide
ccaguaucuuccuaucguu

SEQ ID NO: 2713283 - RNA, 19 nt, Artificial Sequence
  Description of Artificial Sequence: Synthetic oligonucleotide
caucucucucuaccaguau

SEQ ID NO: 2713284 - RNA, 19 nt, Artificial Sequence
  Description of Artificial Sequence: Synthetic oligonucleotide
ucucggcccucgguuccuc

SEQ ID NO: 2713285 - RNA, 19 nt, Artificial Sequence
  Description of Artificial Sequence: Synthetic oligonucleotide
cccaucucucucuaccagu

SEQ ID NO: 2713286 - RNA, 19 nt, Artificial Sequence
  Description of Artificial Sequence: Synthetic oligonucleotide
ggagcuuguuagccucuau

SEQ ID NO: 2713287 - RNA, 19 nt, Artificial Sequence
  Description of Artificial Sequence: Synthetic oligonucleotide
cgcauuucuaugaccugcu

SEQ ID NO: 2713288 - RNA, 19 nt, Artificial Sequence
  Description of Artificial Sequence: Synthetic oligonucleotide
cgaaaagcuuguugugggu

SEQ ID NO: 2713289 - RNA, 19 nt, Artificial Sequence
  Description of Artificial Sequence: Synthetic oligonucleotide
cucggcccucgguuccucu

SEQ ID NO: 2713290 - RNA, 19 nt, Artificial Sequence
  Description of Artificial Sequence: Synthetic oligonucleotide
gcccucgguuccucucaga

SEQ ID NO: 2713291 - RNA, 19 nt, Artificial Sequence
  Description of Artificial Sequence: Synthetic oligonucleotide
cucucggcccucgguuccu

SEQ ID NO: 2713292 - RNA, 19 nt, Artificial Sequence
  Description of Artificial Sequence: Synthetic oligonucleotide
cgcugaacucuccgcauuu

SEQ ID NO: 2713293 - RNA, 19 nt, Artificial Sequence
  Description of Artificial Sequence: Synthetic oligonucleotide
accaugaucacacaggugg

SEQ ID NO: 2713294 - RNA, 19 nt, Artificial Sequence
  Description of Artificial Sequence: Synthetic oligonucleotide
aagaacagcuguuagaacu

SEQ ID NO: 2713295 - RNA, 19 nt, Artificial Sequence
  Description of Artificial Sequence: Synthetic oligonucleotide
aaaaccaugauuccuuucu

SEQ ID NO: 2713296 - RNA, 19 nt, Artificial Sequence
  Description of Artificial Sequence: Synthetic oligonucleotide
aaagaugcuggcuuuaccu

SEQ ID NO: 2713297 - RNA, 19 nt, Artificial Sequence
  Description of Artificial Sequence: Synthetic oligonucleotide
aggugggacgcuuagagcc

SEQ ID NO: 2713298 - RNA, 19 nt, Artificial Sequence
  Description of Artificial Sequence: Synthetic oligonucleotide
uguagcugcacccaagucc

SEQ ID NO: 2713299 - RNA, 19 nt, Artificial Sequence
  Description of Artificial Sequence: Synthetic oligonucleotide
auagggcaaauucuggucc

SEQ ID NO: 2713300 - RNA, 19 nt, Artificial Sequence
  Description of Artificial Sequence: Synthetic oligonucleotide
uggggcuucaccaugauca

SEQ ID NO: 2713301 - RNA, 19 nt, Artificial Sequence
  Description of Artificial Sequence: Synthetic oligonucleotide
ucaagucucucacagaggu

SEQ ID NO: 2713302 - RNA, 19 nt, Artificial Sequence
  Description of Artificial Sequence: Synthetic oligonucleotide
ucccaugucaggaaauugg

SEQ ID NO: 2713303 - RNA, 19 nt, Artificial Sequence
  Description of Artificial Sequence: Synthetic oligonucleotide
accaugauuccuuucucgc

SEQ ID NO: 2713304 - RNA, 19 nt, Artificial Sequence
  Description of Artificial Sequence: Synthetic oligonucleotide
uuagagggaauguagacau

SEQ ID NO: 2713305 - RNA, 19 nt, Artificial Sequence
  Description of Artificial Sequence: Synthetic oligonucleotide
uguuagaacugccugggga

SEQ ID NO: 2713306 - RNA, 19 nt, Artificial Sequence
  Description of Artificial Sequence: Synthetic oligonucleotide
auuggggagauguuguuag

SEQ ID NO: 2713307 - RNA, 19 nt, Artificial Sequence
  Description of Artificial Sequence: Synthetic oligonucleotide
uagacauagggcaaauucu

SEQ ID NO: 2713308 - RNA, 19 nt, Artificial Sequence
  Description of Artificial Sequence: Synthetic oligonucleotide
acggacuuuauuuugguca

SEQ ID NO: 2713309 - RNA, 19 nt, Artificial Sequence
  Description of Artificial Sequence: Synthetic oligonucleotide
gcacauaacugguagaugg

SEQ ID NO: 2713310 - RNA, 19 nt, Artificial Sequence
  Description of Artificial Sequence: Synthetic oligonucleotide
gacgcuuagagccuguagc

SEQ ID NO: 2713311 - RNA, 19 nt, Artificial Sequence
  Description of Artificial Sequence: Synthetic oligonucleotide
aucugcuucugcuucacgg

SEQ ID NO: 2713312 - RNA, 19 nt, Artificial Sequence
  Description of Artificial Sequence: Synthetic oligonucleotide
aaaccaugauuccuuucuc

SEQ ID NO: 2713313 - RNA, 19 nt, Artificial Sequence
  Description of Artificial Sequence: Synthetic oligonucleotide
guagacauagggcaaauuc

SEQ ID NO: 2713314 - RNA, 19 nt, Artificial Sequence
  Description of Artificial Sequence: Synthetic oligonucleotide
cacuuguagagcuugcgcg

SEQ ID NO: 2713315 - RNA, 19 nt, Artificial Sequence
  Description of Artificial Sequence: Synthetic oligonucleotide
agagccuguagcugcaccc

SEQ ID NO: 2713316 - RNA, 19 nt, Artificial Sequence
  Description of Artificial Sequence: Synthetic oligonucleotide
auaggcugcagcucaaguc

SEQ ID NO: 2713317 - RNA, 19 nt, Artificial Sequence
  Description of Artificial Sequence: Synthetic oligonucleotide
guuagaacugccuggggag

SEQ ID NO: 2713318 - RNA, 19 nt, Artificial Sequence
  Description of Artificial Sequence: Synthetic oligonucleotide
uuggcaaugugucuccugc

SEQ ID NO: 2713319 - RNA, 19 nt, Artificial Sequence
  Description of Artificial Sequence: Synthetic oligonucleotide
uucuugaugcacuuguaga

SEQ ID NO: 2713320 - RNA, 19 nt, Artificial Sequence
  Description of Artificial Sequence: Synthetic oligonucleotide
uggaauaggcugcagcuca

SEQ ID NO: 2713321 - RNA, 19 nt, Artificial Sequence
  Description of Artificial Sequence: Synthetic oligonucleotide
ggcaguauaccucaauugg

SEQ ID NO: 2713322 - RNA, 19 nt, Artificial Sequence
  Description of Artificial Sequence: Synthetic oligonucleotide
cuccugauauuccucaugg

SEQ ID NO: 2713323 - RNA, 19 nt, Artificial Sequence
  Description of Artificial Sequence: Synthetic oligonucleotide
uauaccucaauuggcaaug

SEQ ID NO: 2713324 - RNA, 19 nt, Artificial Sequence
  Description of Artificial Sequence: Synthetic oligonucleotide
aacggacuuuauuuugguc

SEQ ID NO: 2713325 - RNA, 19 nt, Artificial Sequence
  Description of Artificial Sequence: Synthetic oligonucleotide
acaggugggacgcuuagag

SEQ ID NO: 2713326 - RNA, 19 nt, Artificial Sequence
  Description of Artificial Sequence: Synthetic oligonucleotide
uuucugaaccuccuucacc

SEQ ID NO: 2713327 - RNA, 19 nt, Artificial Sequence
  Description of Artificial Sequence: Synthetic oligonucleotide
auuucugaaccuccuucac

SEQ ID NO: 2713328 - RNA, 19 nt, Artificial Sequence
  Description of Artificial Sequence: Synthetic oligonucleotide
ucuuagagggaauguagac

SEQ ID NO: 2713329 - RNA, 19 nt, Artificial Sequence
  Description of Artificial Sequence: Synthetic oligonucleotide
uagauggcaguauaccuca

SEQ ID NO: 2713330 - RNA, 19 nt, Artificial Sequence
  Description of Artificial Sequence: Synthetic oligonucleotide
uugacaaauuucugaaccu

SEQ ID NO: 2713331 - RNA, 19 nt, Artificial Sequence
  Description of Artificial Sequence: Synthetic oligonucleotide
ugauauuccucauggggcu

SEQ ID NO: 2713332 - RNA, 19 nt, Artificial Sequence
  Description of Artificial Sequence: Synthetic oligonucleotide
caugucaggaaauugggga

SEQ ID NO: 2713333 - RNA, 19 nt, Artificial Sequence
  Description of Artificial Sequence: Synthetic oligonucleotide
aaauucugguccucgcaca

SEQ ID NO: 2713334 - RNA, 19 nt, Artificial Sequence
  Description of Artificial Sequence: Synthetic oligonucleotide
aauaggcugcagcucaagu

SEQ ID NO: 2713335 - RNA, 19 nt, Artificial Sequence
  Description of Artificial Sequence: Synthetic oligonucleotide
ucaauuggcaaugugucuc

SEQ ID NO: 2713336 - RNA, 19 nt, Artificial Sequence
  Description of Artificial Sequence: Synthetic oligonucleotide
gacaaauuucugaaccucc

SEQ ID NO: 2713337 - RNA, 19 nt, Artificial Sequence
  Description of Artificial Sequence: Synthetic oligonucleotide
ugaucacacaggugggacg

SEQ ID NO: 2713338 - RNA, 19 nt, Artificial Sequence
  Description of Artificial Sequence: Synthetic oligonucleotide
guagcugcacccaaguccg

SEQ ID NO: 2713339 - RNA, 19 nt, Artificial Sequence
  Description of Artificial Sequence: Synthetic oligonucleotide
ucucucacagagguguugg

SEQ ID NO: 2713340 - RNA, 19 nt, Artificial Sequence
  Description of Artificial Sequence: Synthetic oligonucleotide
uccaagaacagcuguuaga

SEQ ID NO: 2713341 - RNA, 19 nt, Artificial Sequence
  Description of Artificial Sequence: Synthetic oligonucleotide
uccggaacggacuuuauuu

SEQ ID NO: 2713342 - RNA, 19 nt, Artificial Sequence
  Description of Artificial Sequence: Synthetic oligonucleotide
aacagcuguuagaacugcc

SEQ ID NO: 2713343 - RNA, 19 nt, Artificial Sequence
  Description of Artificial Sequence: Synthetic oligonucleotide
ucugcuucugcuucacggc

SEQ ID NO: 2713344 - RNA, 19 nt, Artificial Sequence
  Description of Artificial Sequence: Synthetic oligonucleotide
ccugauauuccucaugggg

SEQ ID NO: 2713345 - RNA, 19 nt, Artificial Sequence
  Description of Artificial Sequence: Synthetic oligonucleotide
guucagguugaccagcagc

SEQ ID NO: 2713346 - RNA, 19 nt, Artificial Sequence
  Description of Artificial Sequence: Synthetic oligonucleotide
agagcuugcgcgucaggcg

SEQ ID NO: 2713347 - RNA, 19 nt, Artificial Sequence
  Description of Artificial Sequence: Synthetic oligonucleotide
acauagggcaaauucuggu

SEQ ID NO: 2713348 - RNA, 19 nt, Artificial Sequence
  Description of Artificial Sequence: Synthetic oligonucleotide
gauguuguuagggugggca

SEQ ID NO: 2713349 - RNA, 19 nt, Artificial Sequence
  Description of Artificial Sequence: Synthetic oligonucleotide
acccaaguccgucuuagag

SEQ ID NO: 2713350 - RNA, 19 nt, Artificial Sequence
  Description of Artificial Sequence: Synthetic oligonucleotide
ugcagcucaagucucucac

SEQ ID NO: 2713351 - RNA, 19 nt, Artificial Sequence
  Description of Artificial Sequence: Synthetic oligonucleotide
gagcuugcgcgucaggcgg

SEQ ID NO: 2713352 - RNA, 19 nt, Artificial Sequence
  Description of Artificial Sequence: Synthetic oligonucleotide
uggggagauguuguuaggg

SEQ ID NO: 2713353 - RNA, 19 nt, Artificial Sequence
  Description of Artificial Sequence: Synthetic oligonucleotide
gacauagggcaaauucugg

SEQ ID NO: 2713354 - RNA, 19 nt, Artificial Sequence
  Description of Artificial Sequence: Synthetic oligonucleotide
ugguccucgcacauaacug

SEQ ID NO: 2713355 - RNA, 19 nt, Artificial Sequence
  Description of Artificial Sequence: Synthetic oligonucleotide
ucuccugauauuccucaug

SEQ ID NO: 2713356 - RNA, 19 nt, Artificial Sequence
  Description of Artificial Sequence: Synthetic oligonucleotide
ccaaguccgucuuagaggg

SEQ ID NO: 2713357 - RNA, 19 nt, Artificial Sequence
  Description of Artificial Sequence: Synthetic oligonucleotide
caaauucugguccucgcac

SEQ ID NO: 2713358 - RNA, 19 nt, Artificial Sequence
  Description of Artificial Sequence: Synthetic oligonucleotide
ugcgcgaugggguucaggu

SEQ ID NO: 2713359 - RNA, 19 nt, Artificial Sequence
  Description of Artificial Sequence: Synthetic oligonucleotide
gaugcacuuguagagcuug

SEQ ID NO: 2713360 - RNA, 19 nt, Artificial Sequence
  Description of Artificial Sequence: Synthetic oligonucleotide
cauagggcaaauucugguc

SEQ ID NO: 2713361 - RNA, 19 nt, Artificial Sequence
  Description of Artificial Sequence: Synthetic oligonucleotide
augaucacacaggugggac

SEQ ID NO: 2713362 - RNA, 19 nt, Artificial Sequence
  Description of Artificial Sequence: Synthetic oligonucleotide
gaucacacaggugggacgc

SEQ ID NO: 2713363 - RNA, 19 nt, Artificial Sequence
  Description of Artificial Sequence: Synthetic oligonucleotide
uucugguccucgcacauaa

SEQ ID NO: 2713364 - RNA, 19 nt, Artificial Sequence
  Description of Artificial Sequence: Synthetic oligonucleotide
cuucaccaugaucacacag

SEQ ID NO: 2713365 - RNA, 19 nt, Artificial Sequence
  Description of Artificial Sequence: Synthetic oligonucleotide
cuugaugcacuuguagagc

SEQ ID NO: 2713366 - RNA, 19 nt, Artificial Sequence
  Description of Artificial Sequence: Synthetic oligonucleotide
cacauaacugguagauggc

SEQ ID NO: 2713367 - RNA, 19 nt, Artificial Sequence
  Description of Artificial Sequence: Synthetic oligonucleotide
acuuguagagcuugcgcgu

SEQ ID NO: 2713368 - RNA, 19 nt, Artificial Sequence
  Description of Artificial Sequence: Synthetic oligonucleotide
uccugauauuccucauggg

SEQ ID NO: 2713369 - RNA, 19 nt, Artificial Sequence
  Description of Artificial Sequence: Synthetic oligonucleotide
agacauagggcaaauucug

SEQ ID NO: 2713370 - RNA, 19 nt, Artificial Sequence
  Description of Artificial Sequence: Synthetic oligonucleotide
caauuggcaaugugucucc

SEQ ID NO: 2713371 - RNA, 19 nt, Artificial Sequence
  Description of Artificial Sequence: Synthetic oligonucleotide
uuaccuccaagaacagcug

SEQ ID NO: 2713372 - RNA, 19 nt, Artificial Sequence
  Description of Artificial Sequence: Synthetic oligonucleotide
ggagauguuguuagggugg

SEQ ID NO: 2713373 - RNA, 19 nt, Artificial Sequence
  Description of Artificial Sequence: Synthetic oligonucleotide
ucagacuccuccggaacgg

SEQ ID NO: 2713374 - RNA, 19 nt, Artificial Sequence
  Description of Artificial Sequence: Synthetic oligonucleotide
ugacaaauuucugaaccuc

SEQ ID NO: 2713375 - RNA, 19 nt, Artificial Sequence
  Description of Artificial Sequence: Synthetic oligonucleotide
gguccucgcacauaacugg

SEQ ID NO: 2713376 - RNA, 19 nt, Artificial Sequence
  Description of Artificial Sequence: Synthetic oligonucleotide
auguuguuagggugggcag

SEQ ID NO: 2713377 - RNA, 19 nt, Artificial Sequence
  Description of Artificial Sequence: Synthetic oligonucleotide
uagagcuugcgcgucaggc

SEQ ID NO: 2713378 - RNA, 19 nt, Artificial Sequence
  Description of Artificial Sequence: Synthetic oligonucleotide
cucagacuccuccggaacg

SEQ ID NO: 2713379 - RNA, 19 nt, Artificial Sequence
  Description of Artificial Sequence: Synthetic oligonucleotide
cagcucaagucucucacag

SEQ ID NO: 2713380 - RNA, 19 nt, Artificial Sequence
  Description of Artificial Sequence: Synthetic oligonucleotide
gagguguuggcagagccug

SEQ ID NO: 2713381 - RNA, 19 nt, Artificial Sequence
  Description of Artificial Sequence: Synthetic oligonucleotide
ggcuuuaccuccaagaaca

SEQ ID NO: 2713382 - RNA, 19 nt, Artificial Sequence
  Description of Artificial Sequence: Synthetic oligonucleotide
gagauguuguuaggguggg

SEQ ID NO: 2713383 - RNA, 19 nt, Artificial Sequence
  Description of Artificial Sequence: Synthetic oligonucleotide
ggaaauuggggagauguug

SEQ ID NO: 2713384 - RNA, 19 nt, Artificial Sequence
  Description of Artificial Sequence: Synthetic oligonucleotide
ugcgccucagacuccuccg

SEQ ID NO: 2713385 - RNA, 19 nt, Artificial Sequence
  Description of Artificial Sequence: Synthetic oligonucleotide
aaauuggggagauguuguu

SEQ ID NO: 2713386 - RNA, 19 nt, Artificial Sequence
  Description of Artificial Sequence: Synthetic oligonucleotide
gauggaaagaugcuggcuu

SEQ ID NO: 2713387 - RNA, 19 nt, Artificial Sequence
  Description of Artificial Sequence: Synthetic oligonucleotide
uguuguuagggugggcagc

SEQ ID NO: 2713388 - RNA, 19 nt, Artificial Sequence
  Description of Artificial Sequence: Synthetic oligonucleotide
acgcuuagagccuguagcu

SEQ ID NO: 2713389 - RNA, 19 nt, Artificial Sequence
  Description of Artificial Sequence: Synthetic oligonucleotide
ucucacagagguguuggca

SEQ ID NO: 2713390 - RNA, 19 nt, Artificial Sequence
  Description of Artificial Sequence: Synthetic oligonucleotide
uuggggagauguuguuagg

SEQ ID NO: 2713391 - RNA, 19 nt, Artificial Sequence
  Description of Artificial Sequence: Synthetic oligonucleotide
aaguccgucuuagagggaa

SEQ ID NO: 2713392 - RNA, 19 nt, Artificial Sequence
  Description of Artificial Sequence: Synthetic oligonucleotide
cugguagauggcaguauac

SEQ ID NO: 2713393 - RNA, 19 nt, Artificial Sequence
  Description of Artificial Sequence: Synthetic oligonucleotide
ggaacggacuuuauuuugg

SEQ ID NO: 2713394 - RNA, 19 nt, Artificial Sequence
  Description of Artificial Sequence: Synthetic oligonucleotide
ucauagaucuccugauauu

SEQ ID NO: 2713395 - RNA, 19 nt, Artificial Sequence
  Description of Artificial Sequence: Synthetic oligonucleotide
ugaaccuccuucaccccac

SEQ ID NO: 2713396 - RNA, 19 nt, Artificial Sequence
  Description of Artificial Sequence: Synthetic oligonucleotide
cuuagagggaauguagaca

SEQ ID NO: 2713397 - RNA, 19 nt, Artificial Sequence
  Description of Artificial Sequence: Synthetic oligonucleotide
auuggcaaugugucuccug

SEQ ID NO: 2713398 - RNA, 19 nt, Artificial Sequence
  Description of Artificial Sequence: Synthetic oligonucleotide
acauaacugguagauggca

SEQ ID NO: 2713399 - RNA, 19 nt, Artificial Sequence
  Description of Artificial Sequence: Synthetic oligonucleotide
gagaagucccaugucagga

SEQ ID NO: 2713400 - RNA, 19 nt, Artificial Sequence
  Description of Artificial Sequence: Synthetic oligonucleotide
gcuuagagccuguagcugc

SEQ ID NO: 2713401 - RNA, 19 nt, Artificial Sequence
  Description of Artificial Sequence: Synthetic oligonucleotide
ugucaggaaauuggggaga

SEQ ID NO: 2713402 - RNA, 19 nt, Artificial Sequence
  Description of Artificial Sequence: Synthetic oligonucleotide
uaccuccaagaacagcugu

SEQ ID NO: 2713403 - RNA, 19 nt, Artificial Sequence
  Description of Artificial Sequence: Synthetic oligonucleotide
cugccaaaaccaugauucc

SEQ ID NO: 2713404 - RNA, 19 nt, Artificial Sequence
  Description of Artificial Sequence: Synthetic oligonucleotide
cucgcugcagcccuccgcc

SEQ ID NO: 2713405 - RNA, 19 nt, Artificial Sequence
  Description of Artificial Sequence: Synthetic oligonucleotide
uagagccuguagcugcacc

SEQ ID NO: 2713406 - RNA, 19 nt, Artificial Sequence
  Description of Artificial Sequence: Synthetic oligonucleotide
aauuggggagauguuguua

SEQ ID NO: 2713407 - RNA, 19 nt, Artificial Sequence
  Description of Artificial Sequence: Synthetic oligonucleotide
guuguuagggugggcagcc

SEQ ID NO: 2713408 - RNA, 19 nt, Artificial Sequence
  Description of Artificial Sequence: Synthetic oligonucleotide
acaaauuucugaaccuccu

SEQ ID NO: 2713409 - RNA, 19 nt, Artificial Sequence
  Description of Artificial Sequence: Synthetic oligonucleotide
aaugugucuccugccaaaa

SEQ ID NO: 2713410 - RNA, 19 nt, Artificial Sequence
  Description of Artificial Sequence: Synthetic oligonucleotide
acugguagauggcaguaua

SEQ ID NO: 2713411 - RNA, 19 nt, Artificial Sequence
  Description of Artificial Sequence: Synthetic oligonucleotide
ucgcacauaacugguagau

SEQ ID NO: 2713412 - RNA, 19 nt, Artificial Sequence
  Description of Artificial Sequence: Synthetic oligonucleotide
cugccuggggagaaguccc

SEQ ID NO: 2713413 - RNA, 19 nt, Artificial Sequence
  Description of Artificial Sequence: Synthetic oligonucleotide
ggagaagucccaugucagg

SEQ ID NO: 2713414 - RNA, 19 nt, Artificial Sequence
  Description of Artificial Sequence: Synthetic oligonucleotide
acgccgaaucugcuucugc

SEQ ID NO: 2713415 - RNA, 19 nt, Artificial Sequence
  Description of Artificial Sequence: Synthetic oligonucleotide
gcacuugucauagaucucc

SEQ ID NO: 2713416 - RNA, 19 nt, Artificial Sequence
  Description of Artificial Sequence: Synthetic oligonucleotide
gaaauuggggagauguugu

SEQ ID NO: 2713417 - RNA, 19 nt, Artificial Sequence
  Description of Artificial Sequence: Synthetic oligonucleotide
gacuuuauuuuggucaucu

SEQ ID NO: 2713418 - RNA, 19 nt, Artificial Sequence
  Description of Artificial Sequence: Synthetic oligonucleotide
gcuguuagaacugccuggg

SEQ ID NO: 2713419 - RNA, 19 nt, Artificial Sequence
  Description of Artificial Sequence: Synthetic oligonucleotide
cccaaguccgucuuagagg

SEQ ID NO: 2713420 - RNA, 19 nt, Artificial Sequence
  Description of Artificial Sequence: Synthetic oligonucleotide
uagggcaaauucugguccu

SEQ ID NO: 2713421 - RNA, 19 nt, Artificial Sequence
  Description of Artificial Sequence: Synthetic oligonucleotide
caagaacagcuguuagaac

SEQ ID NO: 2713422 - RNA, 19 nt, Artificial Sequence
  Description of Artificial Sequence: Synthetic oligonucleotide
auauuccucauggggcuuc

SEQ ID NO: 2713423 - RNA, 19 nt, Artificial Sequence
  Description of Artificial Sequence: Synthetic oligonucleotide
guugaccagcagcuccucg

SEQ ID NO: 2713424 - RNA, 19 nt, Artificial Sequence
  Description of Artificial Sequence: Synthetic oligonucleotide
cagcuguuagaacugccug

SEQ ID NO: 2713425 - RNA, 19 nt, Artificial Sequence
  Description of Artificial Sequence: Synthetic oligonucleotide
uugcgcgucaggcggcggg

SEQ ID NO: 2713426 - RNA, 19 nt, Artificial Sequence
  Description of Artificial Sequence: Synthetic oligonucleotide
ucacagagguguuggcaga

SEQ ID NO: 2713427 - RNA, 19 nt, Artificial Sequence
  Description of Artificial Sequence: Synthetic oligonucleotide
uuguagagcuugcgcguca

SEQ ID NO: 2713428 - RNA, 19 nt, Artificial Sequence
  Description of Artificial Sequence: Synthetic oligonucleotide
uguagagcuugcgcgucag

SEQ ID NO: 2713429 - RNA, 19 nt, Artificial Sequence
  Description of Artificial Sequence: Synthetic oligonucleotide
gaagucccaugucaggaaa

SEQ ID NO: 2713430 - RNA, 19 nt, Artificial Sequence
  Description of Artificial Sequence: Synthetic oligonucleotide
cccaugucaggaaauuggg

SEQ ID NO: 2713431 - RNA, 19 nt, Artificial Sequence
  Description of Artificial Sequence: Synthetic oligonucleotide
gaacagcuguuagaacugc

SEQ ID NO: 2713432 - RNA, 19 nt, Artificial Sequence
  Description of Artificial Sequence: Synthetic oligonucleotide
uccugccaaaaccaugauu

SEQ ID NO: 2713433 - RNA, 19 nt, Artificial Sequence
  Description of Artificial Sequence: Synthetic oligonucleotide
uggcaaugugucuccugcc

SEQ ID NO: 2713434 - RNA, 19 nt, Artificial Sequence
  Description of Artificial Sequence: Synthetic oligonucleotide
gaauaggcugcagcucaag

SEQ ID NO: 2713435 - RNA, 19 nt, Artificial Sequence
  Description of Artificial Sequence: Synthetic oligonucleotide
cuucacggccuucuugaug

SEQ ID NO: 2713436 - RNA, 19 nt, Artificial Sequence
  Description of Artificial Sequence: Synthetic oligonucleotide
gcuggcuuuaccuccaaga

SEQ ID NO: 2713437 - RNA, 19 nt, Artificial Sequence
  Description of Artificial Sequence: Synthetic oligonucleotide
caccccacgccgaaucugc

SEQ ID NO: 2713438 - RNA, 19 nt, Artificial Sequence
  Description of Artificial Sequence: Synthetic oligonucleotide
gaugggguucagguugacc

SEQ ID NO: 2713439 - RNA, 19 nt, Artificial Sequence
  Description of Artificial Sequence: Synthetic oligonucleotide
uucucgccuuuguugacaa

SEQ ID NO: 2713440 - RNA, 19 nt, Artificial Sequence
  Description of Artificial Sequence: Synthetic oligonucleotide
agauguuguuagggugggc

SEQ ID NO: 2713441 - RNA, 19 nt, Artificial Sequence
  Description of Artificial Sequence: Synthetic oligonucleotide
aauuggcaaugugucuccu

SEQ ID NO: 2713442 - RNA, 19 nt, Artificial Sequence
  Description of Artificial Sequence: Synthetic oligonucleotide
uucaccccacgccgaaucu

SEQ ID NO: 2713443 - RNA, 19 nt, Artificial Sequence
  Description of Artificial Sequence: Synthetic oligonucleotide
gcaguauaccucaauuggc

SEQ ID NO: 2713444 - RNA, 19 nt, Artificial Sequence
  Description of Artificial Sequence: Synthetic oligonucleotide
gaaccuccuucaccccacg

SEQ ID NO: 2713445 - RNA, 19 nt, Artificial Sequence
  Description of Artificial Sequence: Synthetic oligonucleotide
ccaugucaggaaauugggg

SEQ ID NO: 2713446 - RNA, 19 nt, Artificial Sequence
  Description of Artificial Sequence: Synthetic oligonucleotide
gucuuagagggaauguaga

SEQ ID NO: 2713447 - RNA, 19 nt, Artificial Sequence
  Description of Artificial Sequence: Synthetic oligonucleotide
uccgucuuagagggaaugu

SEQ ID NO: 2713448 - RNA, 19 nt, Artificial Sequence
  Description of Artificial Sequence: Synthetic oligonucleotide
caggugggacgcuuagagc

SEQ ID NO: 2713449 - RNA, 19 nt, Artificial Sequence
  Description of Artificial Sequence: Synthetic oligonucleotide
guacgugcgcuccucgcug

SEQ ID NO: 2713450 - RNA, 19 nt, Artificial Sequence
  Description of Artificial Sequence: Synthetic oligonucleotide
caggcacuugucauagauc

SEQ ID NO: 2713451 - RNA, 19 nt, Artificial Sequence
  Description of Artificial Sequence: Synthetic oligonucleotide
aacugguagauggcaguau

SEQ ID NO: 2713452 - RNA, 19 nt, Artificial Sequence
  Description of Artificial Sequence: Synthetic oligonucleotide
uaacugguagauggcagua

SEQ ID NO: 2713453 - RNA, 19 nt, Artificial Sequence
  Description of Artificial Sequence: Synthetic oligonucleotide
aacugccuggggagaaguc

SEQ ID NO: 2713454 - RNA, 19 nt, Artificial Sequence
  Description of Artificial Sequence: Synthetic oligonucleotide
gcacuuguagagcuugcgc

SEQ ID NO: 2713455 - RNA, 19 nt, Artificial Sequence
  Description of Artificial Sequence: Synthetic oligonucleotide
ucgccuuuguugacaaauu

SEQ ID NO: 2713456 - RNA, 19 nt, Artificial Sequence
  Description of Artificial Sequence: Synthetic oligonucleotide
ucguacgugcgcuccucgc

SEQ ID NO: 2713457 - RNA, 19 nt, Artificial Sequence
  Description of Artificial Sequence: Synthetic oligonucleotide
cgucuuagagggaauguag

SEQ ID NO: 2713458 - RNA, 19 nt, Artificial Sequence
  Description of Artificial Sequence: Synthetic oligonucleotide
ccaugauuccuuucucgcc

SEQ ID NO: 2713459 - RNA, 19 nt, Artificial Sequence
  Description of Artificial Sequence: Synthetic oligonucleotide
gugucuccugccaaaacca

SEQ ID NO: 2713460 - RNA, 19 nt, Artificial Sequence
  Description of Artificial Sequence: Synthetic oligonucleotide
ccuccuucaccccacgccg

SEQ ID NO: 2713461 - RNA, 19 nt, Artificial Sequence
  Description of Artificial Sequence: Synthetic oligonucleotide
gguagauggcaguauaccu

SEQ ID NO: 2713462 - RNA, 19 nt, Artificial Sequence
  Description of Artificial Sequence: Synthetic oligonucleotide
cuuagagccuguagcugca

SEQ ID NO: 2713463 - RNA, 19 nt, Artificial Sequence
  Description of Artificial Sequence: Synthetic oligonucleotide
cuuucucgccuuuguugac

SEQ ID NO: 2713464 - RNA, 19 nt, Artificial Sequence
  Description of Artificial Sequence: Synthetic oligonucleotide
cugcgccucagacuccucc

SEQ ID NO: 2713465 - RNA, 19 nt, Artificial Sequence
  Description of Artificial Sequence: Synthetic oligonucleotide
ggcaaauucugguccucgc

SEQ ID NO: 2713466 - RNA, 19 nt, Artificial Sequence
  Description of Artificial Sequence: Synthetic oligonucleotide
ugaugcacuuguagagcuu

SEQ ID NO: 2713467 - RNA, 19 nt, Artificial Sequence
  Description of Artificial Sequence: Synthetic oligonucleotide
ccucgcacauaacugguag

SEQ ID NO: 2713468 - RNA, 19 nt, Artificial Sequence
  Description of Artificial Sequence: Synthetic oligonucleotide
gaugcuggcuuuaccucca

SEQ ID NO: 2713469 - RNA, 19 nt, Artificial Sequence
  Description of Artificial Sequence: Synthetic oligonucleotide
guagagcuugcgcgucagg

SEQ ID NO: 2713470 - RNA, 19 nt, Artificial Sequence
  Description of Artificial Sequence: Synthetic oligonucleotide
gaacggacuuuauuuuggu

SEQ ID NO: 2713471 - RNA, 19 nt, Artificial Sequence
  Description of Artificial Sequence: Synthetic oligonucleotide
cucguacgugcgcuccucg

SEQ ID NO: 2713472 - RNA, 19 nt, Artificial Sequence
  Description of Artificial Sequence: Synthetic oligonucleotide
uacgugcgcuccucgcugc

SEQ ID NO: 2713473 - RNA, 19 nt, Artificial Sequence
  Description of Artificial Sequence: Synthetic oligonucleotide
agcugcacccaaguccguc

SEQ ID NO: 2713474 - RNA, 19 nt, Artificial Sequence
  Description of Artificial Sequence: Synthetic oligonucleotide
ggcaaugugucuccugcca

SEQ ID NO: 2713475 - RNA, 19 nt, Artificial Sequence
  Description of Artificial Sequence: Synthetic oligonucleotide
uguagacauagggcaaauu

SEQ ID NO: 2713476 - RNA, 19 nt, Artificial Sequence
  Description of Artificial Sequence: Synthetic oligonucleotide
uagaacugccuggggagaa

SEQ ID NO: 2713477 - RNA, 19 nt, Artificial Sequence
  Description of Artificial Sequence: Synthetic oligonucleotide
uccucgcacauaacuggua

SEQ ID NO: 2713478 - RNA, 19 nt, Artificial Sequence
  Description of Artificial Sequence: Synthetic oligonucleotide
uuguuagggugggcagccg

SEQ ID NO: 2713479 - RNA, 19 nt, Artificial Sequence
  Description of Artificial Sequence: Synthetic oligonucleotide
agacuccuccggaacggac

SEQ ID NO: 2713480 - RNA, 19 nt, Artificial Sequence
  Description of Artificial Sequence: Synthetic oligonucleotide
gucuccugccaaaaccaug

SEQ ID NO: 2713481 - RNA, 19 nt, Artificial Sequence
  Description of Artificial Sequence: Synthetic oligonucleotide
cuggaauaggcugcagcuc

SEQ ID NO: 2713482 - RNA, 19 nt, Artificial Sequence
  Description of Artificial Sequence: Synthetic oligonucleotide
gcaaauucugguccucgca

SEQ ID NO: 2713483 - RNA, 19 nt, Artificial Sequence
  Description of Artificial Sequence: Synthetic oligonucleotide
cugaaccuccuucacccca

SEQ ID NO: 2713484 - RNA, 19 nt, Artificial Sequence
  Description of Artificial Sequence: Synthetic oligonucleotide
ggacgcuuagagccuguag

SEQ ID NO: 2713485 - RNA, 19 nt, Artificial Sequence
  Description of Artificial Sequence: Synthetic oligonucleotide
aucuccugauauuccucau

SEQ ID NO: 2713486 - RNA, 19 nt, Artificial Sequence
  Description of Artificial Sequence: Synthetic oligonucleotide
caaugugucuccugccaaa

SEQ ID NO: 2713487 - RNA, 19 nt, Artificial Sequence
  Description of Artificial Sequence: Synthetic oligonucleotide
ccuuucucgccuuuguuga

SEQ ID NO: 2713488 - RNA, 19 nt, Artificial Sequence
  Description of Artificial Sequence: Synthetic oligonucleotide
agagguguuggcagagccu

SEQ ID NO: 2713489 - RNA, 19 nt, Artificial Sequence
  Description of Artificial Sequence: Synthetic oligonucleotide
ccaagaacagcuguuagaa

SEQ ID NO: 2713490 - RNA, 19 nt, Artificial Sequence
  Description of Artificial Sequence: Synthetic oligonucleotide
gccuuuguugacaaauuuc

SEQ ID NO: 2713491 - RNA, 19 nt, Artificial Sequence
  Description of Artificial Sequence: Synthetic oligonucleotide
cucgcacauaacugguaga

SEQ ID NO: 2713492 - RNA, 19 nt, Artificial Sequence
  Description of Artificial Sequence: Synthetic oligonucleotide
uggaaagaugcuggcuuua

SEQ ID NO: 2713493 - RNA, 19 nt, Artificial Sequence
  Description of Artificial Sequence: Synthetic oligonucleotide
acuccuccggaacggacuu

SEQ ID NO: 2713494 - RNA, 19 nt, Artificial Sequence
  Description of Artificial Sequence: Synthetic oligonucleotide
cucaauuggcaaugugucu

SEQ ID NO: 2713495 - RNA, 19 nt, Artificial Sequence
  Description of Artificial Sequence: Synthetic oligonucleotide
guccgucuuagagggaaug

SEQ ID NO: 2713496 - RNA, 19 nt, Artificial Sequence
  Description of Artificial Sequence: Synthetic oligonucleotide
cuguagcugcacccaaguc

SEQ ID NO: 2713497 - RNA, 19 nt, Artificial Sequence
  Description of Artificial Sequence: Synthetic oligonucleotide
agcuccucguacgugcgcu

SEQ ID NO: 2713498 - RNA, 19 nt, Artificial Sequence
  Description of Artificial Sequence: Synthetic oligonucleotide
gacgccagcggcugcgcga

SEQ ID NO: 2713499 - RNA, 19 nt, Artificial Sequence
  Description of Artificial Sequence: Synthetic oligonucleotide
uccucgcugcagcccuccg

SEQ ID NO: 2713500 - RNA, 19 nt, Artificial Sequence
  Description of Artificial Sequence: Synthetic oligonucleotide
uccuccggaacggacuuua

SEQ ID NO: 2713501 - RNA, 19 nt, Artificial Sequence
  Description of Artificial Sequence: Synthetic oligonucleotide
agguugaccagcagcuccu

SEQ ID NO: 2713502 - RNA, 19 nt, Artificial Sequence
  Description of Artificial Sequence: Synthetic oligonucleotide
caugaucacacagguggga

SEQ ID NO: 2713503 - RNA, 19 nt, Artificial Sequence
  Description of Artificial Sequence: Synthetic oligonucleotide
cugguccucgcacauaacu

SEQ ID NO: 2713504 - RNA, 19 nt, Artificial Sequence
  Description of Artificial Sequence: Synthetic oligonucleotide
auaccucaauuggcaaugu

SEQ ID NO: 2713505 - RNA, 19 nt, Artificial Sequence
  Description of Artificial Sequence: Synthetic oligonucleotide
cgcgaugggguucagguug

SEQ ID NO: 2713506 - RNA, 19 nt, Artificial Sequence
  Description of Artificial Sequence: Synthetic oligonucleotide
uuagagccuguagcugcac

SEQ ID NO: 2713507 - RNA, 19 nt, Artificial Sequence
  Description of Artificial Sequence: Synthetic oligonucleotide
cuggggagaagucccaugu

SEQ ID NO: 2713508 - RNA, 19 nt, Artificial Sequence
  Description of Artificial Sequence: Synthetic oligonucleotide
auguagacauagggcaaau

SEQ ID NO: 2713509 - RNA, 19 nt, Artificial Sequence
  Description of Artificial Sequence: Synthetic oligonucleotide
ccgaaucugcuucugcuuc

SEQ ID NO: 2713510 - RNA, 19 nt, Artificial Sequence
  Description of Artificial Sequence: Synthetic oligonucleotide
agcuugcgcgucaggcggc

SEQ ID NO: 2713511 - RNA, 19 nt, Artificial Sequence
  Description of Artificial Sequence: Synthetic oligonucleotide
ugcacccaaguccgucuua

SEQ ID NO: 2713512 - RNA, 19 nt, Artificial Sequence
  Description of Artificial Sequence: Synthetic oligonucleotide
gagccuguagcugcaccca

SEQ ID NO: 2713513 - RNA, 19 nt, Artificial Sequence
  Description of Artificial Sequence: Synthetic oligonucleotide
auuccucauggggcuucac

SEQ ID NO: 2713514 - RNA, 19 nt, Artificial Sequence
  Description of Artificial Sequence: Synthetic oligonucleotide
gcacccaaguccgucuuag

SEQ ID NO: 2713515 - RNA, 19 nt, Artificial Sequence
  Description of Artificial Sequence: Synthetic oligonucleotide
cuccgccugcgccucagac

SEQ ID NO: 2713516 - RNA, 19 nt, Artificial Sequence
  Description of Artificial Sequence: Synthetic oligonucleotide
agcggcugcgcgauggggu

SEQ ID NO: 2713517 - RNA, 19 nt, Artificial Sequence
  Description of Artificial Sequence: Synthetic oligonucleotide
ugggacgcuuagagccugu

SEQ ID NO: 2713518 - RNA, 19 nt, Artificial Sequence
  Description of Artificial Sequence: Synthetic oligonucleotide
cucgccuuuguugacaaau

SEQ ID NO: 2713519 - RNA, 19 nt, Artificial Sequence
  Description of Artificial Sequence: Synthetic oligonucleotide
cggaacggacuuuauuuug

SEQ ID NO: 2713520 - RNA, 19 nt, Artificial Sequence
  Description of Artificial Sequence: Synthetic oligonucleotide
cugcagcucaagucucuca

SEQ ID NO: 2713521 - RNA, 19 nt, Artificial Sequence
  Description of Artificial Sequence: Synthetic oligonucleotide
gccgccugcagccagccca

SEQ ID NO: 2713522 - RNA, 19 nt, Artificial Sequence
  Description of Artificial Sequence: Synthetic oligonucleotide
gccuucuugaugcacuugu

SEQ ID NO: 2713523 - RNA, 19 nt, Artificial Sequence
  Description of Artificial Sequence: Synthetic oligonucleotide
agccuguagcugcacccaa

SEQ ID NO: 2713524 - RNA, 19 nt, Artificial Sequence
  Description of Artificial Sequence: Synthetic oligonucleotide
accuccaagaacagcuguu

SEQ ID NO: 2713525 - RNA, 19 nt, Artificial Sequence
  Description of Artificial Sequence: Synthetic oligonucleotide
ccuggaauaggcugcagcu

SEQ ID NO: 2713526 - RNA, 19 nt, Artificial Sequence
  Description of Artificial Sequence: Synthetic oligonucleotide
gacuccuccggaacggacu

SEQ ID NO: 2713527 - RNA, 19 nt, Artificial Sequence
  Description of Artificial Sequence: Synthetic oligonucleotide
gggguucagguugaccagc

SEQ ID NO: 2713528 - RNA, 19 nt, Artificial Sequence
  Description of Artificial Sequence: Synthetic oligonucleotide
cccacgccgaaucugcuuc

SEQ ID NO: 2713529 - RNA, 19 nt, Artificial Sequence
  Description of Artificial Sequence: Synthetic oligonucleotide
gcaaugugucuccugccaa

SEQ ID NO: 2713530 - RNA, 19 nt, Artificial Sequence
  Description of Artificial Sequence: Synthetic oligonucleotide
gcuuuaccuccaagaacag

SEQ ID NO: 2713531 - RNA, 19 nt, Artificial Sequence
  Description of Artificial Sequence: Synthetic oligonucleotide
gugggacgcuuagagccug

SEQ ID NO: 2713532 - RNA, 19 nt, Artificial Sequence
  Description of Artificial Sequence: Synthetic oligonucleotide
ucucgccuuuguugacaaa

SEQ ID NO: 2713533 - RNA, 19 nt, Artificial Sequence
  Description of Artificial Sequence: Synthetic oligonucleotide
ugcgcgucaggcggcggga

SEQ ID NO: 2713534 - RNA, 19 nt, Artificial Sequence
  Description of Artificial Sequence: Synthetic oligonucleotide
cacggccuucuugaugcac

SEQ ID NO: 2713535 - RNA, 19 nt, Artificial Sequence
  Description of Artificial Sequence: Synthetic oligonucleotide
gccagcggcugcgcgaugg

SEQ ID NO: 2713536 - RNA, 19 nt, Artificial Sequence
  Description of Artificial Sequence: Synthetic oligonucleotide
gcagcucaagucucucaca

SEQ ID NO: 2713537 - RNA, 19 nt, Artificial Sequence
  Description of Artificial Sequence: Synthetic oligonucleotide
gcgccucagacuccuccgg

SEQ ID NO: 2713538 - RNA, 19 nt, Artificial Sequence
  Description of Artificial Sequence: Synthetic oligonucleotide
cuccucgcugcagcccucc

SEQ ID NO: 2713539 - RNA, 19 nt, Artificial Sequence
  Description of Artificial Sequence: Synthetic oligonucleotide
uagcugcacccaaguccgu

SEQ ID NO: 2713540 - RNA, 19 nt, Artificial Sequence
  Description of Artificial Sequence: Synthetic oligonucleotide
ggcggcgggacgccagcgg

SEQ ID NO: 2713541 - RNA, 19 nt, Artificial Sequence
  Description of Artificial Sequence: Synthetic oligonucleotide
cacgccgaaucugcuucug

SEQ ID NO: 2713542 - RNA, 19 nt, Artificial Sequence
  Description of Artificial Sequence: Synthetic oligonucleotide
cagcggcugcgcgaugggg

SEQ ID NO: 2713543 - RNA, 19 nt, Artificial Sequence
  Description of Artificial Sequence: Synthetic oligonucleotide
aucacacaggugggacgcu

SEQ ID NO: 2713544 - RNA, 19 nt, Artificial Sequence
  Description of Artificial Sequence: Synthetic oligonucleotide
acgugcgcuccucgcugca

SEQ ID NO: 2713545 - RNA, 19 nt, Artificial Sequence
  Description of Artificial Sequence: Synthetic oligonucleotide
ucgcugcagcccuccgccu

SEQ ID NO: 2713546 - RNA, 19 nt, Artificial Sequence
  Description of Artificial Sequence: Synthetic oligonucleotide
ggcagccgccugcagccag

SEQ ID NO: 2713547 - RNA, 19 nt, Artificial Sequence
  Description of Artificial Sequence: Synthetic oligonucleotide
cuugcgcgucaggcggcgg

SEQ ID NO: 2713548 - RNA, 19 nt, Artificial Sequence
  Description of Artificial Sequence: Synthetic oligonucleotide
cacccaaguccgucuuaga

SEQ ID NO: 2713549 - RNA, 19 nt, Artificial Sequence
  Description of Artificial Sequence: Synthetic oligonucleotide
cuccuggaauaggcugcag

SEQ ID NO: 2713550 - RNA, 19 nt, Artificial Sequence
  Description of Artificial Sequence: Synthetic oligonucleotide
caaguccgucuuagaggga

SEQ ID NO: 2713551 - RNA, 19 nt, Artificial Sequence
  Description of Artificial Sequence: Synthetic oligonucleotide
gccaaaaccaugauuccuu

SEQ ID NO: 2713552 - RNA, 19 nt, Artificial Sequence
  Description of Artificial Sequence: Synthetic oligonucleotide
aguccgucuuagagggaau

SEQ ID NO: 2713553 - RNA, 19 nt, Artificial Sequence
  Description of Artificial Sequence: Synthetic oligonucleotide
ccucgcugcagcccuccgc

SEQ ID NO: 2713554 - RNA, 19 nt, Artificial Sequence
  Description of Artificial Sequence: Synthetic oligonucleotide
gcuugcgcgucaggcggcg

SEQ ID NO: 2713555 - RNA, 19 nt, Artificial Sequence
  Description of Artificial Sequence: Synthetic oligonucleotide
ggacuuuauuuuggucauc

SEQ ID NO: 2713556 - RNA, 19 nt, Artificial Sequence
  Description of Artificial Sequence: Synthetic oligonucleotide
cacaggugggacgcuuaga

SEQ ID NO: 2713557 - RNA, 19 nt, Artificial Sequence
  Description of Artificial Sequence: Synthetic oligonucleotide
agucucucacagagguguu

SEQ ID NO: 2713558 - RNA, 19 nt, Artificial Sequence
  Description of Artificial Sequence: Synthetic oligonucleotide
guccucgcacauaacuggu

SEQ ID NO: 2713559 - RNA, 19 nt, Artificial Sequence
  Description of Artificial Sequence: Synthetic oligonucleotide
gcgucaggcggcgggacgc

SEQ ID NO: 2713560 - RNA, 19 nt, Artificial Sequence
  Description of Artificial Sequence: Synthetic oligonucleotide
cagccgccugcagccagcc

SEQ ID NO: 2713561 - RNA, 19 nt, Artificial Sequence
  Description of Artificial Sequence: Synthetic oligonucleotide
gcugcacccaaguccgucu

SEQ ID NO: 2713562 - RNA, 19 nt, Artificial Sequence
  Description of Artificial Sequence: Synthetic oligonucleotide
agauggcaguauaccucaa

SEQ ID NO: 2713563 - RNA, 19 nt, Artificial Sequence
  Description of Artificial Sequence: Synthetic oligonucleotide
gccucagacuccuccggaa

SEQ ID NO: 2713564 - RNA, 19 nt, Artificial Sequence
  Description of Artificial Sequence: Synthetic oligonucleotide
acgccagcggcugcgcgau

SEQ ID NO: 2713565 - RNA, 19 nt, Artificial Sequence
  Description of Artificial Sequence: Synthetic oligonucleotide
ccaggcacuugucauagau

SEQ ID NO: 2713566 - RNA, 19 nt, Artificial Sequence
  Description of Artificial Sequence: Synthetic oligonucleotide
cugcagcccuccgccugcg

SEQ ID NO: 2713567 - RNA, 19 nt, Artificial Sequence
  Description of Artificial Sequence: Synthetic oligonucleotide
ggaauaggcugcagcucaa

SEQ ID NO: 2713568 - RNA, 19 nt, Artificial Sequence
  Description of Artificial Sequence: Synthetic oligonucleotide
cgcacauaacugguagaug

SEQ ID NO: 2713569 - RNA, 19 nt, Artificial Sequence
  Description of Artificial Sequence: Synthetic oligonucleotide
ggcgggacgccagcggcug

SEQ ID NO: 2713570 - RNA, 19 nt, Artificial Sequence
  Description of Artificial Sequence: Synthetic oligonucleotide
gcuccuggaauaggcugca

SEQ ID NO: 2713571 - RNA, 19 nt, Artificial Sequence
  Description of Artificial Sequence: Synthetic oligonucleotide
ccagcggcugcgcgauggg

SEQ ID NO: 2713572 - RNA, 19 nt, Artificial Sequence
  Description of Artificial Sequence: Synthetic oligonucleotide
cuccggaacggacuuuauu

SEQ ID NO: 2713573 - RNA, 19 nt, Artificial Sequence
  Description of Artificial Sequence: Synthetic oligonucleotide
ccuguagcugcacccaagu

SEQ ID NO: 2713574 - RNA, 19 nt, Artificial Sequence
  Description of Artificial Sequence: Synthetic oligonucleotide
cgcuuagagccuguagcug

SEQ ID NO: 2713575 - RNA, 19 nt, Artificial Sequence
  Description of Artificial Sequence: Synthetic oligonucleotide
gguugaccagcagcuccuc

SEQ ID NO: 2713576 - RNA, 19 nt, Artificial Sequence
  Description of Artificial Sequence: Synthetic oligonucleotide
gcuccucguacgugcgcuc

SEQ ID NO: 2713577 - RNA, 19 nt, Artificial Sequence
  Description of Artificial Sequence: Synthetic oligonucleotide
accccacgccgaaucugcu

SEQ ID NO: 2713578 - RNA, 19 nt, Artificial Sequence
  Description of Artificial Sequence: Synthetic oligonucleotide
gccgaaucugcuucugcuu

SEQ ID NO: 2713579 - RNA, 19 nt, Artificial Sequence
  Description of Artificial Sequence: Synthetic oligonucleotide
ggugggacgcuuagagccu

SEQ ID NO: 2713580 - RNA, 19 nt, Artificial Sequence
  Description of Artificial Sequence: Synthetic oligonucleotide
ggcugcgcgaugggguuca

SEQ ID NO: 2713581 - RNA, 19 nt, Artificial Sequence
  Description of Artificial Sequence: Synthetic oligonucleotide
ccgucuuagagggaaugua

SEQ ID NO: 2713582 - RNA, 19 nt, Artificial Sequence
  Description of Artificial Sequence: Synthetic oligonucleotide
cagcccuccgccugcgccu

SEQ ID NO: 2713583 - RNA, 19 nt, Artificial Sequence
  Description of Artificial Sequence: Synthetic oligonucleotide
gcagccgccugcagccagc

SEQ ID NO: 2713584 - RNA, 19 nt, Artificial Sequence
  Description of Artificial Sequence: Synthetic oligonucleotide
cggacuuuauuuuggucau

SEQ ID NO: 2713585 - RNA, 19 nt, Artificial Sequence
  Description of Artificial Sequence: Synthetic oligonucleotide
gucaggcggcgggacgcca

SEQ ID NO: 2713586 - RNA, 19 nt, Artificial Sequence
  Description of Artificial Sequence: Synthetic oligonucleotide
cgcgucaggcggcgggacg

SEQ ID NO: 2713587 - RNA, 19 nt, Artificial Sequence
  Description of Artificial Sequence: Synthetic oligonucleotide
ccucguacgugcgcuccuc

SEQ ID NO: 2713588 - RNA, 19 nt, Artificial Sequence
  Description of Artificial Sequence: Synthetic oligonucleotide
ccggaacggacuuuauuuu

SEQ ID NO: 2713589 - RNA, 19 nt, Artificial Sequence
  Description of Artificial Sequence: Synthetic oligonucleotide
cgggacgccagcggcugcg

SEQ ID NO: 2713590 - RNA, 19 nt, Artificial Sequence
  Description of Artificial Sequence: Synthetic oligonucleotide
gggacgccagcggcugcgc

SEQ ID NO: 2713591 - RNA, 19 nt, Artificial Sequence
  Description of Artificial Sequence: Synthetic oligonucleotide
cgccgaaucugcuucugcu

SEQ ID NO: 2713592 - RNA, 19 nt, Artificial Sequence
  Description of Artificial Sequence: Synthetic oligonucleotide
gcuucacggccuucuugau

SEQ ID NO: 2713593 - RNA, 19 nt, Artificial Sequence
  Description of Artificial Sequence: Synthetic oligonucleotide
gcgggacgccagcggcugc

SEQ ID NO: 2713594 - RNA, 19 nt, Artificial Sequence
  Description of Artificial Sequence: Synthetic oligonucleotide
cguacgugcgcuccucgcu

SEQ ID NO: 2713595 - RNA, 19 nt, Artificial Sequence
  Description of Artificial Sequence: Synthetic oligonucleotide
gggacgcuuagagccugua

SEQ ID NO: 2713596 - RNA, 19 nt, Artificial Sequence
  Description of Artificial Sequence: Synthetic oligonucleotide
cgccucagacuccuccgga

SEQ ID NO: 2713597 - RNA, 19 nt, Artificial Sequence
  Description of Artificial Sequence: Synthetic oligonucleotide
cgccuuuguugacaaauuu

SEQ ID NO: 2713598 - RNA, 19 nt, Artificial Sequence
  Description of Artificial Sequence: Synthetic oligonucleotide
gcggcugcgcgaugggguu

SEQ ID NO: 2713599 - RNA, 19 nt, Artificial Sequence
  Description of Artificial Sequence: Synthetic oligonucleotide
gcugcgcgaugggguucag

SEQ ID NO: 2713600 - RNA, 19 nt, Artificial Sequence
  Description of Artificial Sequence: Synthetic oligonucleotide
gcgcgucaggcggcgggac

SEQ ID NO: 2713601 - RNA, 19 nt, Artificial Sequence
  Description of Artificial Sequence: Synthetic oligonucleotide
gcgcgaugggguucagguu

SEQ ID NO: 2713602 - RNA, 19 nt, Artificial Sequence
  Description of Artificial Sequence: Synthetic oligonucleotide
ccacgccgaaucugcuucu

SEQ ID NO: 2713603 - RNA, 19 nt, Artificial Sequence
  Description of Artificial Sequence: Synthetic oligonucleotide
cgccugcgccucagacucc

SEQ ID NO: 2713604 - RNA, 19 nt, Artificial Sequence
  Description of Artificial Sequence: Synthetic oligonucleotide
cgaugggguucagguugac

SEQ ID NO: 2713605 - RNA, 19 nt, Artificial Sequence
  Description of Artificial Sequence: Synthetic oligonucleotide
ccuccggaacggacuuuau

SEQ ID NO: 2713606 - RNA, 19 nt, Artificial Sequence
  Description of Artificial Sequence: Synthetic oligonucleotide
cuccuccggaacggacuuu

SEQ ID NO: 2713607 - RNA, 19 nt, Artificial Sequence
  Description of Artificial Sequence: Synthetic oligonucleotide
ccccacgccgaaucugcuu

SEQ ID NO: 2713608 - RNA, 19 nt, Artificial Sequence
  Description of Artificial Sequence: Synthetic oligonucleotide
ccuccgccugcgccucaga

SEQ ID NO: 2713609 - RNA, 19 nt, Artificial Sequence
  Description of Artificial Sequence: Synthetic oligonucleotide
cggcugcgcgaugggguuc

SEQ ID NO: 2713610 - RNA, 19 nt, Artificial Sequence
  Description of Artificial Sequence: Synthetic oligonucleotide
cgccagcggcugcgcgaug

SEQ ID NO: 2713611 - RNA, 19 nt, Artificial Sequence
  Description of Artificial Sequence: Synthetic oligonucleotide
uugauaaccaacaaacugg

SEQ ID NO: 2713612 - RNA, 19 nt, Artificial Sequence
  Description of Artificial Sequence: Synthetic oligonucleotide
aagaucauuuuccacagcg

SEQ ID NO: 2713613 - RNA, 19 nt, Artificial Sequence
  Description of Artificial Sequence: Synthetic oligonucleotide
uagagcacaacgaagauca

SEQ ID NO: 2713614 - RNA, 19 nt, Artificial Sequence
  Description of Artificial Sequence: Synthetic oligonucleotide
aaacacuugauccagaauu

SEQ ID NO: 2713615 - RNA, 19 nt, Artificial Sequence
  Description of Artificial Sequence: Synthetic oligonucleotide
agaauuguguaacuggcac

SEQ ID NO: 2713616 - RNA, 19 nt, Artificial Sequence
  Description of Artificial Sequence: Synthetic oligonucleotide
uuagacuugauaaccaaca

SEQ ID NO: 2713617 - RNA, 19 nt, Artificial Sequence
  Description of Artificial Sequence: Synthetic oligonucleotide
acaacgaagaucauuuucc

SEQ ID NO: 2713618 - RNA, 19 nt, Artificial Sequence
  Description of Artificial Sequence: Synthetic oligonucleotide
gauauguuguuggaaaugg

SEQ ID NO: 2713619 - RNA, 19 nt, Artificial Sequence
  Description of Artificial Sequence: Synthetic oligonucleotide
agaucagaaauucucgggg

SEQ ID NO: 2713620 - RNA, 19 nt, Artificial Sequence
  Description of Artificial Sequence: Synthetic oligonucleotide
uuucacaaagauauguugu

SEQ ID NO: 2713621 - RNA, 19 nt, Artificial Sequence
  Description of Artificial Sequence: Synthetic oligonucleotide
uccagaauuguguaacugg

SEQ ID NO: 2713622 - RNA, 19 nt, Artificial Sequence
  Description of Artificial Sequence: Synthetic oligonucleotide
cuugauaaccaacaaacug

SEQ ID NO: 2713623 - RNA, 19 nt, Artificial Sequence
  Description of Artificial Sequence: Synthetic oligonucleotide
uuuucacaaagauauguug

SEQ ID NO: 2713624 - RNA, 19 nt, Artificial Sequence
  Description of Artificial Sequence: Synthetic oligonucleotide
gacuugauaaccaacaaac

SEQ ID NO: 2713625 - RNA, 19 nt, Artificial Sequence
  Description of Artificial Sequence: Synthetic oligonucleotide
uguuguuggaaaugggagg

SEQ ID NO: 2713626 - RNA, 19 nt, Artificial Sequence
  Description of Artificial Sequence: Synthetic oligonucleotide
uauguuguuggaaauggga

SEQ ID NO: 2713627 - RNA, 19 nt, Artificial Sequence
  Description of Artificial Sequence: Synthetic oligonucleotide
auaaccaacaaacuggaaa

SEQ ID NO: 2713628 - RNA, 19 nt, Artificial Sequence
  Description of Artificial Sequence: Synthetic oligonucleotide
ucuuugcuagagcacaacg

SEQ ID NO: 2713629 - RNA, 19 nt, Artificial Sequence
  Description of Artificial Sequence: Synthetic oligonucleotide
cacaaagauauguuguugg

SEQ ID NO: 2713630 - RNA, 19 nt, Artificial Sequence
  Description of Artificial Sequence: Synthetic oligonucleotide
gaucauuuuccacagcgag

SEQ ID NO: 2713631 - RNA, 19 nt, Artificial Sequence
  Description of Artificial Sequence: Synthetic oligonucleotide
aacgaagaucauuuuccac

SEQ ID NO: 2713632 - RNA, 19 nt, Artificial Sequence
  Description of Artificial Sequence: Synthetic oligonucleotide
uguauuuagacuugauaac

SEQ ID NO: 2713633 - RNA, 19 nt, Artificial Sequence
  Description of Artificial Sequence: Synthetic oligonucleotide
aauuguguaacuggcacug

SEQ ID NO: 2713634 - RNA, 19 nt, Artificial Sequence
  Description of Artificial Sequence: Synthetic oligonucleotide
ucucagacagaacagggug

SEQ ID NO: 2713635 - RNA, 19 nt, Artificial Sequence
  Description of Artificial Sequence: Synthetic oligonucleotide
uagaucagaaauucucggg

SEQ ID NO: 2713636 - RNA, 19 nt, Artificial Sequence
  Description of Artificial Sequence: Synthetic oligonucleotide
uauuuagacuugauaacca

SEQ ID NO: 2713637 - RNA, 19 nt, Artificial Sequence
  Description of Artificial Sequence: Synthetic oligonucleotide
ugugacugcaaacacuuga

SEQ ID NO: 2713638 - RNA, 19 nt, Artificial Sequence
  Description of Artificial Sequence: Synthetic oligonucleotide
uaaccaacaaacuggaaaa

SEQ ID NO: 2713639 - RNA, 19 nt, Artificial Sequence
  Description of Artificial Sequence: Synthetic oligonucleotide
ugaagguugagacugcuuc

SEQ ID NO: 2713640 - RNA, 19 nt, Artificial Sequence
  Description of Artificial Sequence: Synthetic oligonucleotide
ucuacgucuguauuuagac

SEQ ID NO: 2713641 - RNA, 19 nt, Artificial Sequence
  Description of Artificial Sequence: Synthetic oligonucleotide
acgaagaucauuuuccaca

SEQ ID NO: 2713642 - RNA, 19 nt, Artificial Sequence
  Description of Artificial Sequence: Synthetic oligonucleotide
uuugcuagagcacaacgaa

SEQ ID NO: 2713643 - RNA, 19 nt, Artificial Sequence
  Description of Artificial Sequence: Synthetic oligonucleotide
ugaaaccucgcaaagccug

SEQ ID NO: 2713644 - RNA, 19 nt, Artificial Sequence
  Description of Artificial Sequence: Synthetic oligonucleotide
ugcuagagcacaacgaaga

SEQ ID NO: 2713645 - RNA, 19 nt, Artificial Sequence
  Description of Artificial Sequence: Synthetic oligonucleotide
cuagaucagaaauucucgg

SEQ ID NO: 2713646 - RNA, 19 nt, Artificial Sequence
  Description of Artificial Sequence: Synthetic oligonucleotide
aaaugggaggaggaggcgc

SEQ ID NO: 2713647 - RNA, 19 nt, Artificial Sequence
  Description of Artificial Sequence: Synthetic oligonucleotide
cuguauuuagacuugauaa

SEQ ID NO: 2713648 - RNA, 19 nt, Artificial Sequence
  Description of Artificial Sequence: Synthetic oligonucleotide
acuggcacugcacugucgc

SEQ ID NO: 2713649 - RNA, 19 nt, Artificial Sequence
  Description of Artificial Sequence: Synthetic oligonucleotide
ugauaaccaacaaacugga

SEQ ID NO: 2713650 - RNA, 19 nt, Artificial Sequence
  Description of Artificial Sequence: Synthetic oligonucleotide
agugugaagguugagacug

SEQ ID NO: 2713651 - RNA, 19 nt, Artificial Sequence
  Description of Artificial Sequence: Synthetic oligonucleotide
guauuuagacuugauaacc

SEQ ID NO: 2713652 - RNA, 19 nt, Artificial Sequence
  Description of Artificial Sequence: Synthetic oligonucleotide
ucauugaaaccucgcaaag

SEQ ID NO: 2713653 - RNA, 19 nt, Artificial Sequence
  Description of Artificial Sequence: Synthetic oligonucleotide
uuuagacuugauaaccaac

SEQ ID NO: 2713654 - RNA, 19 nt, Artificial Sequence
  Description of Artificial Sequence: Synthetic oligonucleotide
uucucacuagaucagaaau

SEQ ID NO: 2713655 - RNA, 19 nt, Artificial Sequence
  Description of Artificial Sequence: Synthetic oligonucleotide
accaacaaacuggaaaacc

SEQ ID NO: 2713656 - RNA, 19 nt, Artificial Sequence
  Description of Artificial Sequence: Synthetic oligonucleotide
ucuguauuuagacuugaua

SEQ ID NO: 2713657 - RNA, 19 nt, Artificial Sequence
  Description of Artificial Sequence: Synthetic oligonucleotide
acuagaucagaaauucucg

SEQ ID NO: 2713658 - RNA, 19 nt, Artificial Sequence
  Description of Artificial Sequence: Synthetic oligonucleotide
cuucuuucucacuagauca

SEQ ID NO: 2713659 - RNA, 19 nt, Artificial Sequence
  Description of Artificial Sequence: Synthetic oligonucleotide
uacgucuguauuuagacuu

SEQ ID NO: 2713660 - RNA, 19 nt, Artificial Sequence
  Description of Artificial Sequence: Synthetic oligonucleotide
cacuagaucagaaauucuc

SEQ ID NO: 2713661 - RNA, 19 nt, Artificial Sequence
  Description of Artificial Sequence: Synthetic oligonucleotide
ucauuuuccacagcgaguc

SEQ ID NO: 2713662 - RNA, 19 nt, Artificial Sequence
  Description of Artificial Sequence: Synthetic oligonucleotide
uucuuucucacuagaucag

SEQ ID NO: 2713663 - RNA, 19 nt, Artificial Sequence
  Description of Artificial Sequence: Synthetic oligonucleotide
aacacagucucagacagaa

SEQ ID NO: 2713664 - RNA, 19 nt, Artificial Sequence
  Description of Artificial Sequence: Synthetic oligonucleotide
uggaaaugggaggaggagg

SEQ ID NO: 2713665 - RNA, 19 nt, Artificial Sequence
  Description of Artificial Sequence: Synthetic oligonucleotide
aagauauguuguuggaaau

SEQ ID NO: 2713666 - RNA, 19 nt, Artificial Sequence
  Description of Artificial Sequence: Synthetic oligonucleotide
uguuggaaaugggaggagg

SEQ ID NO: 2713667 - RNA, 19 nt, Artificial Sequence
  Description of Artificial Sequence: Synthetic oligonucleotide
ugauccagaauuguguaac

SEQ ID NO: 2713668 - RNA, 19 nt, Artificial Sequence
  Description of Artificial Sequence: Synthetic oligonucleotide
aaccaacaaacuggaaaac

SEQ ID NO: 2713669 - RNA, 19 nt, Artificial Sequence
  Description of Artificial Sequence: Synthetic oligonucleotide
aacacuugauccagaauug

SEQ ID NO: 2713670 - RNA, 19 nt, Artificial Sequence
  Description of Artificial Sequence: Synthetic oligonucleotide
ucagaaauucucgggguag

SEQ ID NO: 2713671 - RNA, 19 nt, Artificial Sequence
  Description of Artificial Sequence: Synthetic oligonucleotide
uugcuagagcacaacgaag

SEQ ID NO: 2713672 - RNA, 19 nt, Artificial Sequence
  Description of Artificial Sequence: Synthetic oligonucleotide
uguaacuggcacugcacug

SEQ ID NO: 2713673 - RNA, 19 nt, Artificial Sequence
  Description of Artificial Sequence: Synthetic oligonucleotide
cucacuagaucagaaauuc

SEQ ID NO: 2713674 - RNA, 19 nt, Artificial Sequence
  Description of Artificial Sequence: Synthetic oligonucleotide
cacagucucagacagaaca

SEQ ID NO: 2713675 - RNA, 19 nt, Artificial Sequence
  Description of Artificial Sequence: Synthetic oligonucleotide
agacagaacagggugugac

SEQ ID NO: 2713676 - RNA, 19 nt, Artificial Sequence
  Description of Artificial Sequence: Synthetic oligonucleotide
ccaacaaacuggaaaaccc

SEQ ID NO: 2713677 - RNA, 19 nt, Artificial Sequence
  Description of Artificial Sequence: Synthetic oligonucleotide
acaaagauauguuguugga

SEQ ID NO: 2713678 - RNA, 19 nt, Artificial Sequence
  Description of Artificial Sequence: Synthetic oligonucleotide
uuguguaacuggcacugca

SEQ ID NO: 2713679 - RNA, 19 nt, Artificial Sequence
  Description of Artificial Sequence: Synthetic oligonucleotide
uguguaacuggcacugcac

SEQ ID NO: 2713680 - RNA, 19 nt, Artificial Sequence
  Description of Artificial Sequence: Synthetic oligonucleotide
ucgggguagucuuugcuag

SEQ ID NO: 2713681 - RNA, 19 nt, Artificial Sequence
  Description of Artificial Sequence: Synthetic oligonucleotide
aaccucgcaaagccugacg

SEQ ID NO: 2713682 - RNA, 19 nt, Artificial Sequence
  Description of Artificial Sequence: Synthetic oligonucleotide
auuuagacuugauaaccaa

SEQ ID NO: 2713683 - RNA, 19 nt, Artificial Sequence
  Description of Artificial Sequence: Synthetic oligonucleotide
ucacaaagauauguuguug

SEQ ID NO: 2713684 - RNA, 19 nt, Artificial Sequence
  Description of Artificial Sequence: Synthetic oligonucleotide
auguuguuggaaaugggag

SEQ ID NO: 2713685 - RNA, 19 nt, Artificial Sequence
  Description of Artificial Sequence: Synthetic oligonucleotide
uucacaaagauauguuguu

SEQ ID NO: 2713686 - RNA, 19 nt, Artificial Sequence
  Description of Artificial Sequence: Synthetic oligonucleotide
uagucuuugcuagagcaca

SEQ ID NO: 2713687 - RNA, 19 nt, Artificial Sequence
  Description of Artificial Sequence: Synthetic oligonucleotide
agggugugacugcaaacac

SEQ ID NO: 2713688 - RNA, 19 nt, Artificial Sequence
  Description of Artificial Sequence: Synthetic oligonucleotide
uuuuccacagcgagucuac

SEQ ID NO: 2713689 - RNA, 19 nt, Artificial Sequence
  Description of Artificial Sequence: Synthetic oligonucleotide
acagggugugacugcaaac

SEQ ID NO: 2713690 - RNA, 19 nt, Artificial Sequence
  Description of Artificial Sequence: Synthetic oligonucleotide
uagacuugauaaccaacaa

SEQ ID NO: 2713691 - RNA, 19 nt, Artificial Sequence
  Description of Artificial Sequence: Synthetic oligonucleotide
acugcuucuuucucacuag

SEQ ID NO: 2713692 - RNA, 19 nt, Artificial Sequence
  Description of Artificial Sequence: Synthetic oligonucleotide
uccacagcgagucuacguc

SEQ ID NO: 2713693 - RNA, 19 nt, Artificial Sequence
  Description of Artificial Sequence: Synthetic oligonucleotide
ucucacuagaucagaaauu

SEQ ID NO: 2713694 - RNA, 19 nt, Artificial Sequence
  Description of Artificial Sequence: Synthetic oligonucleotide
uuucucacuagaucagaaa

SEQ ID NO: 2713695 - RNA, 19 nt, Artificial Sequence
  Description of Artificial Sequence: Synthetic oligonucleotide
acuugauccagaauugugu

SEQ ID NO: 2713696 - RNA, 19 nt, Artificial Sequence
  Description of Artificial Sequence: Synthetic oligonucleotide
agauauguuguuggaaaug

SEQ ID NO: 2713697 - RNA, 19 nt, Artificial Sequence
  Description of Artificial Sequence: Synthetic oligonucleotide
cacaacgaagaucauuuuc

SEQ ID NO: 2713698 - RNA, 19 nt, Artificial Sequence
  Description of Artificial Sequence: Synthetic oligonucleotide
aacagggugugacugcaaa

SEQ ID NO: 2713699 - RNA, 19 nt, Artificial Sequence
  Description of Artificial Sequence: Synthetic oligonucleotide
gagacugcuucuuucucac

SEQ ID NO: 2713700 - RNA, 19 nt, Artificial Sequence
  Description of Artificial Sequence: Synthetic oligonucleotide
gguagucuuugcuagagca

SEQ ID NO: 2713701 - RNA, 19 nt, Artificial Sequence
  Description of Artificial Sequence: Synthetic oligonucleotide
ucagacagaacagggugug

SEQ ID NO: 2713702 - RNA, 19 nt, Artificial Sequence
  Description of Artificial Sequence: Synthetic oligonucleotide
uuggaaaugggaggaggag

SEQ ID NO: 2713703 - RNA, 19 nt, Artificial Sequence
  Description of Artificial Sequence: Synthetic oligonucleotide
cuuugcuagagcacaacga

SEQ ID NO: 2713704 - RNA, 19 nt, Artificial Sequence
  Description of Artificial Sequence: Synthetic oligonucleotide
cacuugauccagaauugug

SEQ ID NO: 2713705 - RNA, 19 nt, Artificial Sequence
  Description of Artificial Sequence: Synthetic oligonucleotide
agcacaacgaagaucauuu

SEQ ID NO: 2713706 - RNA, 19 nt, Artificial Sequence
  Description of Artificial Sequence: Synthetic oligonucleotide
ucacuagaucagaaauucu

SEQ ID NO: 2713707 - RNA, 19 nt, Artificial Sequence
  Description of Artificial Sequence: Synthetic oligonucleotide
uugaaaccucgcaaagccu

SEQ ID NO: 2713708 - RNA, 19 nt, Artificial Sequence
  Description of Artificial Sequence: Synthetic oligonucleotide
accucauugaaaccucgca

SEQ ID NO: 2713709 - RNA, 19 nt, Artificial Sequence
  Description of Artificial Sequence: Synthetic oligonucleotide
acagaacagggugugacug

SEQ ID NO: 2713710 - RNA, 19 nt, Artificial Sequence
  Description of Artificial Sequence: Synthetic oligonucleotide
guuguuggaaaugggagga

SEQ ID NO: 2713711 - RNA, 19 nt, Artificial Sequence
  Description of Artificial Sequence: Synthetic oligonucleotide
ccagaauuguguaacuggc

SEQ ID NO: 2713712 - RNA, 19 nt, Artificial Sequence
  Description of Artificial Sequence: Synthetic oligonucleotide
cucauugaaaccucgcaaa

SEQ ID NO: 2713713 - RNA, 19 nt, Artificial Sequence
  Description of Artificial Sequence: Synthetic oligonucleotide
auauguuguuggaaauggg

SEQ ID NO: 2713714 - RNA, 19 nt, Artificial Sequence
  Description of Artificial Sequence: Synthetic oligonucleotide
aaaccucgcaaagccugac

SEQ ID NO: 2713715 - RNA, 19 nt, Artificial Sequence
  Description of Artificial Sequence: Synthetic oligonucleotide
ugacugcaaacacuugauc

SEQ ID NO: 2713716 - RNA, 19 nt, Artificial Sequence
  Description of Artificial Sequence: Synthetic oligonucleotide
uugauccagaauuguguaa

SEQ ID NO: 2713717 - RNA, 19 nt, Artificial Sequence
  Description of Artificial Sequence: Synthetic oligonucleotide
ucuuucucacuagaucaga

SEQ ID NO: 2713718 - RNA, 19 nt, Artificial Sequence
  Description of Artificial Sequence: Synthetic oligonucleotide
auuguguaacuggcacugc

SEQ ID NO: 2713719 - RNA, 19 nt, Artificial Sequence
  Description of Artificial Sequence: Synthetic oligonucleotide
gaagaucauuuuccacagc

SEQ ID NO: 2713720 - RNA, 19 nt, Artificial Sequence
  Description of Artificial Sequence: Synthetic oligonucleotide
gaggaggcgcaacacaguc

SEQ ID NO: 2713721 - RNA, 19 nt, Artificial Sequence
  Description of Artificial Sequence: Synthetic oligonucleotide
aacaaacuggaaaacccuu

SEQ ID NO: 2713722 - RNA, 19 nt, Artificial Sequence
  Description of Artificial Sequence: Synthetic oligonucleotide
ugcuucuuucucacuagau

SEQ ID NO: 2713723 - RNA, 19 nt, Artificial Sequence
  Description of Artificial Sequence: Synthetic oligonucleotide
gaaaugggaggaggaggcg

SEQ ID NO: 2713724 - RNA, 19 nt, Artificial Sequence
  Description of Artificial Sequence: Synthetic oligonucleotide
ggaaaugggaggaggaggc

SEQ ID NO: 2713725 - RNA, 19 nt, Artificial Sequence
  Description of Artificial Sequence: Synthetic oligonucleotide
acagucucagacagaacag

SEQ ID NO: 2713726 - RNA, 19 nt, Artificial Sequence
  Description of Artificial Sequence: Synthetic oligonucleotide
acuugauaaccaacaaacu

SEQ ID NO: 2713727 - RNA, 19 nt, Artificial Sequence
  Description of Artificial Sequence: Synthetic oligonucleotide
gacugcuucuuucucacua

SEQ ID NO: 2713728 - RNA, 19 nt, Artificial Sequence
  Description of Artificial Sequence: Synthetic oligonucleotide
uuccacagcgagucuacgu

SEQ ID NO: 2713729 - RNA, 19 nt, Artificial Sequence
  Description of Artificial Sequence: Synthetic oligonucleotide
ucucgggguagucuuugcu

SEQ ID NO: 2713730 - RNA, 19 nt, Artificial Sequence
  Description of Artificial Sequence: Synthetic oligonucleotide
aaugggaggaggaggcgca

SEQ ID NO: 2713731 - RNA, 19 nt, Artificial Sequence
  Description of Artificial Sequence: Synthetic oligonucleotide
gaucagaaauucucggggu

SEQ ID NO: 2713732 - RNA, 19 nt, Artificial Sequence
  Description of Artificial Sequence: Synthetic oligonucleotide
uugagacugcuucuuucuc

SEQ ID NO: 2713733 - RNA, 19 nt, Artificial Sequence
  Description of Artificial Sequence: Synthetic oligonucleotide
aucagaaauucucggggua

SEQ ID NO: 2713734 - RNA, 19 nt, Artificial Sequence
  Description of Artificial Sequence: Synthetic oligonucleotide
cagaacagggugugacugc

SEQ ID NO: 2713735 - RNA, 19 nt, Artificial Sequence
  Description of Artificial Sequence: Synthetic oligonucleotide
cuagagcacaacgaagauc

SEQ ID NO: 2713736 - RNA, 19 nt, Artificial Sequence
  Description of Artificial Sequence: Synthetic oligonucleotide
auccagaauuguguaacug

SEQ ID NO: 2713737 - RNA, 19 nt, Artificial Sequence
  Description of Artificial Sequence: Synthetic oligonucleotide
gaauuguguaacuggcacu

SEQ ID NO: 2713738 - RNA, 19 nt, Artificial Sequence
  Description of Artificial Sequence: Synthetic oligonucleotide
cuugauccagaauugugua

SEQ ID NO: 2713739 - RNA, 19 nt, Artificial Sequence
  Description of Artificial Sequence: Synthetic oligonucleotide
gcuucuuucucacuagauc

SEQ ID NO: 2713740 - RNA, 19 nt, Artificial Sequence
  Description of Artificial Sequence: Synthetic oligonucleotide
agucuacgucuguauuuag

SEQ ID NO: 2713741 - RNA, 19 nt, Artificial Sequence
  Description of Artificial Sequence: Synthetic oligonucleotide
caccucauugaaaccucgc

SEQ ID NO: 2713742 - RNA, 19 nt, Artificial Sequence
  Description of Artificial Sequence: Synthetic oligonucleotide
caacgaagaucauuuucca

SEQ ID NO: 2713743 - RNA, 19 nt, Artificial Sequence
  Description of Artificial Sequence: Synthetic oligonucleotide
uuuccacagcgagucuacg

SEQ ID NO: 2713744 - RNA, 19 nt, Artificial Sequence
  Description of Artificial Sequence: Synthetic oligonucleotide
guuggaaaugggaggagga

SEQ ID NO: 2713745 - RNA, 19 nt, Artificial Sequence
  Description of Artificial Sequence: Synthetic oligonucleotide
cuuucucacuagaucagaa

SEQ ID NO: 2713746 - RNA, 19 nt, Artificial Sequence
  Description of Artificial Sequence: Synthetic oligonucleotide
aucauuuuccacagcgagu

SEQ ID NO: 2713747 - RNA, 19 nt, Artificial Sequence
  Description of Artificial Sequence: Synthetic oligonucleotide
agaacagggugugacugca

SEQ ID NO: 2713748 - RNA, 19 nt, Artificial Sequence
  Description of Artificial Sequence: Synthetic oligonucleotide
guugagacugcuucuuucu

SEQ ID NO: 2713749 - RNA, 19 nt, Artificial Sequence
  Description of Artificial Sequence: Synthetic oligonucleotide
aagguugagacugcuucuu

SEQ ID NO: 2713750 - RNA, 19 nt, Artificial Sequence
  Description of Artificial Sequence: Synthetic oligonucleotide
cagaauuguguaacuggca

SEQ ID NO: 2713751 - RNA, 19 nt, Artificial Sequence
  Description of Artificial Sequence: Synthetic oligonucleotide
uuguuggaaaugggaggag

SEQ ID NO: 2713752 - RNA, 19 nt, Artificial Sequence
  Description of Artificial Sequence: Synthetic oligonucleotide
ggaggcgcaacacagucuc

SEQ ID NO: 2713753 - RNA, 19 nt, Artificial Sequence
  Description of Artificial Sequence: Synthetic oligonucleotide
gaagguugagacugcuucu

SEQ ID NO: 2713754 - RNA, 19 nt, Artificial Sequence
  Description of Artificial Sequence: Synthetic oligonucleotide
guagucuuugcuagagcac

SEQ ID NO: 2713755 - RNA, 19 nt, Artificial Sequence
  Description of Artificial Sequence: Synthetic oligonucleotide
gaggaggaggcgcaacaca

SEQ ID NO: 2713756 - RNA, 19 nt, Artificial Sequence
  Description of Artificial Sequence: Synthetic oligonucleotide
uaacuggcacugcacuguc

SEQ ID NO: 2713757 - RNA, 19 nt, Artificial Sequence
  Description of Artificial Sequence: Synthetic oligonucleotide
agcgagucuacgucuguau

SEQ ID NO: 2713758 - RNA, 19 nt, Artificial Sequence
  Description of Artificial Sequence: Synthetic oligonucleotide
agaucauuuuccacagcga

SEQ ID NO: 2713759 - RNA, 19 nt, Artificial Sequence
  Description of Artificial Sequence: Synthetic oligonucleotide
auuuuccacagcgagucua

SEQ ID NO: 2713760 - RNA, 19 nt, Artificial Sequence
  Description of Artificial Sequence: Synthetic oligonucleotide
aggcgcaacacagucucag

SEQ ID NO: 2713761 - RNA, 19 nt, Artificial Sequence
  Description of Artificial Sequence: Synthetic oligonucleotide
acaccucauugaaaccucg

SEQ ID NO: 2713762 - RNA, 19 nt, Artificial Sequence
  Description of Artificial Sequence: Synthetic oligonucleotide
cacagcgagucuacgucug

SEQ ID NO: 2713763 - RNA, 19 nt, Artificial Sequence
  Description of Artificial Sequence: Synthetic oligonucleotide
cgaagaucauuuuccacag

SEQ ID NO: 2713764 - RNA, 19 nt, Artificial Sequence
  Description of Artificial Sequence: Synthetic oligonucleotide
aacuggcacugcacugucg

SEQ ID NO: 2713765 - RNA, 19 nt, Artificial Sequence
  Description of Artificial Sequence: Synthetic oligonucleotide
caacaaacuggaaaacccu

SEQ ID NO: 2713766 - RNA, 19 nt, Artificial Sequence
  Description of Artificial Sequence: Synthetic oligonucleotide
acacuugauccagaauugu

SEQ ID NO: 2713767 - RNA, 19 nt, Artificial Sequence
  Description of Artificial Sequence: Synthetic oligonucleotide
cagggugugacugcaaaca

SEQ ID NO: 2713768 - RNA, 19 nt, Artificial Sequence
  Description of Artificial Sequence: Synthetic oligonucleotide
gguugagacugcuucuuuc

SEQ ID NO: 2713769 - RNA, 19 nt, Artificial Sequence
  Description of Artificial Sequence: Synthetic oligonucleotide
gagucuacgucuguauuua

SEQ ID NO: 2713770 - RNA, 19 nt, Artificial Sequence
  Description of Artificial Sequence: Synthetic oligonucleotide
auucucgggguagucuuug

SEQ ID NO: 2713771 - RNA, 19 nt, Artificial Sequence
  Description of Artificial Sequence: Synthetic oligonucleotide
gauccagaauuguguaacu

SEQ ID NO: 2713772 - RNA, 19 nt, Artificial Sequence
  Description of Artificial Sequence: Synthetic oligonucleotide
uucucgggguagucuuugc

SEQ ID NO: 2713773 - RNA, 19 nt, Artificial Sequence
  Description of Artificial Sequence: Synthetic oligonucleotide
acaaacuggaaaacccuuu

SEQ ID NO: 2713774 - RNA, 19 nt, Artificial Sequence
  Description of Artificial Sequence: Synthetic oligonucleotide
gacagaacagggugugacu

SEQ ID NO: 2713775 - RNA, 19 nt, Artificial Sequence
  Description of Artificial Sequence: Synthetic oligonucleotide
gaaaccucgcaaagccuga

SEQ ID NO: 2713776 - RNA, 19 nt, Artificial Sequence
  Description of Artificial Sequence: Synthetic oligonucleotide
uggcacugcacugucgcaa

SEQ ID NO: 2713777 - RNA, 19 nt, Artificial Sequence
  Description of Artificial Sequence: Synthetic oligonucleotide
gucuacgucuguauuuaga

SEQ ID NO: 2713778 - RNA, 19 nt, Artificial Sequence
  Description of Artificial Sequence: Synthetic oligonucleotide
acgucuguauuuagacuug

SEQ ID NO: 2713779 - RNA, 19 nt, Artificial Sequence
  Description of Artificial Sequence: Synthetic oligonucleotide
guguaacuggcacugcacu

SEQ ID NO: 2713780 - RNA, 19 nt, Artificial Sequence
  Description of Artificial Sequence: Synthetic oligonucleotide
gggguagucuuugcuagag

SEQ ID NO: 2713781 - RNA, 19 nt, Artificial Sequence
  Description of Artificial Sequence: Synthetic oligonucleotide
gauaaccaacaaacuggaa

SEQ ID NO: 2713782 - RNA, 19 nt, Artificial Sequence
  Description of Artificial Sequence: Synthetic oligonucleotide
acagcgagucuacgucugu

SEQ ID NO: 2713783 - RNA, 19 nt, Artificial Sequence
  Description of Artificial Sequence: Synthetic oligonucleotide
cacugcacugucgcaacac

SEQ ID NO: 2713784 - RNA, 19 nt, Artificial Sequence
  Description of Artificial Sequence: Synthetic oligonucleotide
guaacuggcacugcacugu

SEQ ID NO: 2713785 - RNA, 19 nt, Artificial Sequence
  Description of Artificial Sequence: Synthetic oligonucleotide
gcgcaacacagucucagac

SEQ ID NO: 2713786 - RNA, 19 nt, Artificial Sequence
  Description of Artificial Sequence: Synthetic oligonucleotide
aauucucgggguagucuuu

SEQ ID NO: 2713787 - RNA, 19 nt, Artificial Sequence
  Description of Artificial Sequence: Synthetic oligonucleotide
cucgggguagucuuugcua

SEQ ID NO: 2713788 - RNA, 19 nt, Artificial Sequence
  Description of Artificial Sequence: Synthetic oligonucleotide
acacagucucagacagaac

SEQ ID NO: 2713789 - RNA, 19 nt, Artificial Sequence
  Description of Artificial Sequence: Synthetic oligonucleotide
agguugagacugcuucuuu

SEQ ID NO: 2713790 - RNA, 19 nt, Artificial Sequence
  Description of Artificial Sequence: Synthetic oligonucleotide
gucuuugcuagagcacaac

SEQ ID NO: 2713791 - RNA, 19 nt, Artificial Sequence
  Description of Artificial Sequence: Synthetic oligonucleotide
cucagacagaacagggugu

SEQ ID NO: 2713792 - RNA, 19 nt, Artificial Sequence
  Description of Artificial Sequence: Synthetic oligonucleotide
cuacgucuguauuuagacu

SEQ ID NO: 2713793 - RNA, 19 nt, Artificial Sequence
  Description of Artificial Sequence: Synthetic oligonucleotide
agacugcuucuuucucacu

SEQ ID NO: 2713794 - RNA, 19 nt, Artificial Sequence
  Description of Artificial Sequence: Synthetic oligonucleotide
ggguagucuuugcuagagc

SEQ ID NO: 2713795 - RNA, 19 nt, Artificial Sequence
  Description of Artificial Sequence: Synthetic oligonucleotide
cugcuucuuucucacuaga

SEQ ID NO: 2713796 - RNA, 19 nt, Artificial Sequence
  Description of Artificial Sequence: Synthetic oligonucleotide
caaacuggaaaacccuuuu

SEQ ID NO: 2713797 - RNA, 19 nt, Artificial Sequence
  Description of Artificial Sequence: Synthetic oligonucleotide
gugugaagguugagacugc

SEQ ID NO: 2713798 - RNA, 19 nt, Artificial Sequence
  Description of Artificial Sequence: Synthetic oligonucleotide
agucuuugcuagagcacaa

SEQ ID NO: 2713799 - RNA, 19 nt, Artificial Sequence
  Description of Artificial Sequence: Synthetic oligonucleotide
ccucauugaaaccucgcaa

SEQ ID NO: 2713800 - RNA, 19 nt, Artificial Sequence
  Description of Artificial Sequence: Synthetic oligonucleotide
ggcacugcacugucgcaac

SEQ ID NO: 2713801 - RNA, 19 nt, Artificial Sequence
  Description of Artificial Sequence: Synthetic oligonucleotide
ggugugacugcaaacacuu

SEQ ID NO: 2713802 - RNA, 19 nt, Artificial Sequence
  Description of Artificial Sequence: Synthetic oligonucleotide
caacacagucucagacaga

SEQ ID NO: 2713803 - RNA, 19 nt, Artificial Sequence
  Description of Artificial Sequence: Synthetic oligonucleotide
gugacugcaaacacuugau

SEQ ID NO: 2713804 - RNA, 19 nt, Artificial Sequence
  Description of Artificial Sequence: Synthetic oligonucleotide
aggaggcgcaacacagucu

SEQ ID NO: 2713805 - RNA, 19 nt, Artificial Sequence
  Description of Artificial Sequence: Synthetic oligonucleotide
ugggaggaggaggcgcaac

SEQ ID NO: 2713806 - RNA, 19 nt, Artificial Sequence
  Description of Artificial Sequence: Synthetic oligonucleotide
gugugacugcaaacacuug

SEQ ID NO: 2713807 - RNA, 19 nt, Artificial Sequence
  Description of Artificial Sequence: Synthetic oligonucleotide
gucucagacagaacagggu

SEQ ID NO: 2713808 - RNA, 19 nt, Artificial Sequence
  Description of Artificial Sequence: Synthetic oligonucleotide
cagugugaagguugagacu

SEQ ID NO: 2713809 - RNA, 19 nt, Artificial Sequence
  Description of Artificial Sequence: Synthetic oligonucleotide
caaacacuugauccagaau

SEQ ID NO: 2713810 - RNA, 19 nt, Artificial Sequence
  Description of Artificial Sequence: Synthetic oligonucleotide
gagcacaacgaagaucauu

SEQ ID NO: 2713811 - RNA, 19 nt, Artificial Sequence
  Description of Artificial Sequence: Synthetic oligonucleotide
ggcgcaacacagucucaga

SEQ ID NO: 2713812 - RNA, 19 nt, Artificial Sequence
  Description of Artificial Sequence: Synthetic oligonucleotide
cuggcacugcacugucgca

SEQ ID NO: 2713813 - RNA, 19 nt, Artificial Sequence
  Description of Artificial Sequence: Synthetic oligonucleotide
cgcaacacagucucagaca

SEQ ID NO: 2713814 - RNA, 19 nt, Artificial Sequence
  Description of Artificial Sequence: Synthetic oligonucleotide
gaacagggugugacugcaa

SEQ ID NO: 2713815 - RNA, 19 nt, Artificial Sequence
  Description of Artificial Sequence: Synthetic oligonucleotide
cagaaauucucgggguagu

SEQ ID NO: 2713816 - RNA, 19 nt, Artificial Sequence
  Description of Artificial Sequence: Synthetic oligonucleotide
cagacagaacaggguguga

SEQ ID NO: 2713817 - RNA, 19 nt, Artificial Sequence
  Description of Artificial Sequence: Synthetic oligonucleotide
gcuagagcacaacgaagau

SEQ ID NO: 2713818 - RNA, 19 nt, Artificial Sequence
  Description of Artificial Sequence: Synthetic oligonucleotide
gaggcgcaacacagucuca

SEQ ID NO: 2713819 - RNA, 19 nt, Artificial Sequence
  Description of Artificial Sequence: Synthetic oligonucleotide
cauuuuccacagcgagucu

SEQ ID NO: 2713820 - RNA, 19 nt, Artificial Sequence
  Description of Artificial Sequence: Synthetic oligonucleotide
gucuguauuuagacuugau

SEQ ID NO: 2713821 - RNA, 19 nt, Artificial Sequence
  Description of Artificial Sequence: Synthetic oligonucleotide
agagcacaacgaagaucau

SEQ ID NO: 2713822 - RNA, 19 nt, Artificial Sequence
  Description of Artificial Sequence: Synthetic oligonucleotide
augggaggaggaggcgcaa

SEQ ID NO: 2713823 - RNA, 19 nt, Artificial Sequence
  Description of Artificial Sequence: Synthetic oligonucleotide
gggugugacugcaaacacu

SEQ ID NO: 2713824 - RNA, 19 nt, Artificial Sequence
  Description of Artificial Sequence: Synthetic oligonucleotide
gcacugcacugucgcaaca

SEQ ID NO: 2713825 - RNA, 19 nt, Artificial Sequence
  Description of Artificial Sequence: Synthetic oligonucleotide
cagcgagucuacgucugua

SEQ ID NO: 2713826 - RNA, 19 nt, Artificial Sequence
  Description of Artificial Sequence: Synthetic oligonucleotide
gugaagguugagacugcuu

SEQ ID NO: 2713827 - RNA, 19 nt, Artificial Sequence
  Description of Artificial Sequence: Synthetic oligonucleotide
ccacagcgagucuacgucu

SEQ ID NO: 2713828 - RNA, 19 nt, Artificial Sequence
  Description of Artificial Sequence: Synthetic oligonucleotide
gcgagucuacgucuguauu

SEQ ID NO: 2713829 - RNA, 19 nt, Artificial Sequence
  Description of Artificial Sequence: Synthetic oligonucleotide
ggaggaggcgcaacacagu

SEQ ID NO: 2713830 - RNA, 19 nt, Artificial Sequence
  Description of Artificial Sequence: Synthetic oligonucleotide
cgagucuacgucuguauuu

SEQ ID NO: 2713831 - RNA, 19 nt, Artificial Sequence
  Description of Artificial Sequence: Synthetic oligonucleotide
cgucuguauuuagacuuga

SEQ ID NO: 2713832 - RNA, 19 nt, Artificial Sequence
  Description of Artificial Sequence: Synthetic oligonucleotide
gcacaacgaagaucauuuu

SEQ ID NO: 2713833 - RNA, 19 nt, Artificial Sequence
  Description of Artificial Sequence: Synthetic oligonucleotide
cgggguagucuuugcuaga

SEQ ID NO: 2713834 - RNA, 19 nt, Artificial Sequence
  Description of Artificial Sequence: Synthetic oligonucleotide
uuuauauuauccuuggcag

SEQ ID NO: 2713835 - RNA, 19 nt, Artificial Sequence
  Description of Artificial Sequence: Synthetic oligonucleotide
acauuuguuagcuaggagg

SEQ ID NO: 2713836 - RNA, 19 nt, Artificial Sequence
  Description of Artificial Sequence: Synthetic oligonucleotide
gaagccauggucuuuacag

SEQ ID NO: 2713837 - RNA, 19 nt, Artificial Sequence
  Description of Artificial Sequence: Synthetic oligonucleotide
gauguuuuccacuaggaac

SEQ ID NO: 2713838 - RNA, 19 nt, Artificial Sequence
  Description of Artificial Sequence: Synthetic oligonucleotide
acagaauugguccaucugg

SEQ ID NO: 2713839 - RNA, 19 nt, Artificial Sequence
  Description of Artificial Sequence: Synthetic oligonucleotide
ugagagaucaaagacaaca

SEQ ID NO: 2713840 - RNA, 19 nt, Artificial Sequence
  Description of Artificial Sequence: Synthetic oligonucleotide
gaucaaagacaacaaaugc

SEQ ID NO: 2713841 - RNA, 19 nt, Artificial Sequence
  Description of Artificial Sequence: Synthetic oligonucleotide
uuuuccacuaggaaccggg

SEQ ID NO: 2713842 - RNA, 19 nt, Artificial Sequence
  Description of Artificial Sequence: Synthetic oligonucleotide
aauugguccaucugggaag

SEQ ID NO: 2713843 - RNA, 19 nt, Artificial Sequence
  Description of Artificial Sequence: Synthetic oligonucleotide
uuuaagacugccucaaaug

SEQ ID NO: 2713844 - RNA, 19 nt, Artificial Sequence
  Description of Artificial Sequence: Synthetic oligonucleotide
caguugaggaccuugaggg

SEQ ID NO: 2713845 - RNA, 19 nt, Artificial Sequence
  Description of Artificial Sequence: Synthetic oligonucleotide
gaccuuacuauccagauca

SEQ ID NO: 2713846 - RNA, 19 nt, Artificial Sequence
  Description of Artificial Sequence: Synthetic oligonucleotide
aaggauguuuuccacuagg

SEQ ID NO: 2713847 - RNA, 19 nt, Artificial Sequence
  Description of Artificial Sequence: Synthetic oligonucleotide
uccacuaggaaccgggugg

SEQ ID NO: 2713848 - RNA, 19 nt, Artificial Sequence
  Description of Artificial Sequence: Synthetic oligonucleotide
auguuuuccacuaggaacc

SEQ ID NO: 2713849 - RNA, 19 nt, Artificial Sequence
  Description of Artificial Sequence: Synthetic oligonucleotide
uuucaaaccauccaaugaa

SEQ ID NO: 2713850 - RNA, 19 nt, Artificial Sequence
  Description of Artificial Sequence: Synthetic oligonucleotide
guuuauauuauccuuggca

SEQ ID NO: 2713851 - RNA, 19 nt, Artificial Sequence
  Description of Artificial Sequence: Synthetic oligonucleotide
aaauguggaaccucuugag

SEQ ID NO: 2713852 - RNA, 19 nt, Artificial Sequence
  Description of Artificial Sequence: Synthetic oligonucleotide
uauauuauccuuggcagag

SEQ ID NO: 2713853 - RNA, 19 nt, Artificial Sequence
  Description of Artificial Sequence: Synthetic oligonucleotide
uuaagacugccucaaaugu

SEQ ID NO: 2713854 - RNA, 19 nt, Artificial Sequence
  Description of Artificial Sequence: Synthetic oligonucleotide
ucacuuuuccauuuuaaga

SEQ ID NO: 2713855 - RNA, 19 nt, Artificial Sequence
  Description of Artificial Sequence: Synthetic oligonucleotide
aaggagaaagugcagccag

SEQ ID NO: 2713856 - RNA, 19 nt, Artificial Sequence
  Description of Artificial Sequence: Synthetic oligonucleotide
gauguuuauauuauccuug

SEQ ID NO: 2713857 - RNA, 19 nt, Artificial Sequence
  Description of Artificial Sequence: Synthetic oligonucleotide
uccauuuuaagacugccuc

SEQ ID NO: 2713858 - RNA, 19 nt, Artificial Sequence
  Description of Artificial Sequence: Synthetic oligonucleotide
aagacugccucaaaugugg

SEQ ID NO: 2713859 - RNA, 19 nt, Artificial Sequence
  Description of Artificial Sequence: Synthetic oligonucleotide
ugcacauagcgcuugauga

SEQ ID NO: 2713860 - RNA, 19 nt, Artificial Sequence
  Description of Artificial Sequence: Synthetic oligonucleotide
auguuuauauuauccuugg

SEQ ID NO: 2713861 - RNA, 19 nt, Artificial Sequence
  Description of Artificial Sequence: Synthetic oligonucleotide
gucaguuuaauuuugucca

SEQ ID NO: 2713862 - RNA, 19 nt, Artificial Sequence
  Description of Artificial Sequence: Synthetic oligonucleotide
acaucagcagcacugggac

SEQ ID NO: 2713863 - RNA, 19 nt, Artificial Sequence
  Description of Artificial Sequence: Synthetic oligonucleotide
uuccuuguaguacacucgg

SEQ ID NO: 2713864 - RNA, 19 nt, Artificial Sequence
  Description of Artificial Sequence: Synthetic oligonucleotide
ugucguuuucuucacuggg

SEQ ID NO: 2713865 - RNA, 19 nt, Artificial Sequence
  Description of Artificial Sequence: Synthetic oligonucleotide
ucaaauguggaaccucuug

SEQ ID NO: 2713866 - RNA, 19 nt, Artificial Sequence
  Description of Artificial Sequence: Synthetic oligonucleotide
auguggaaccucuugagag

SEQ ID NO: 2713867 - RNA, 19 nt, Artificial Sequence
  Description of Artificial Sequence: Synthetic oligonucleotide
caaaccauccaaugaagcc

SEQ ID NO: 2713868 - RNA, 19 nt, Artificial Sequence
  Description of Artificial Sequence: Synthetic oligonucleotide
uucaaaccauccaaugaag

SEQ ID NO: 2713869 - RNA, 19 nt, Artificial Sequence
  Description of Artificial Sequence: Synthetic oligonucleotide
aagagcuuccuuguaguac

SEQ ID NO: 2713870 - RNA, 19 nt, Artificial Sequence
  Description of Artificial Sequence: Synthetic oligonucleotide
uuagcuaggaggacagcag

SEQ ID NO: 2713871 - RNA, 19 nt, Artificial Sequence
  Description of Artificial Sequence: Synthetic oligonucleotide
uagcgcuugaugaugcugg

SEQ ID NO: 2713872 - RNA, 19 nt, Artificial Sequence
  Description of Artificial Sequence: Synthetic oligonucleotide
aaaccauccaaugaagcca

SEQ ID NO: 2713873 - RNA, 19 nt, Artificial Sequence
  Description of Artificial Sequence: Synthetic oligonucleotide
uuguaguacacucggguca

SEQ ID NO: 2713874 - RNA, 19 nt, Artificial Sequence
  Description of Artificial Sequence: Synthetic oligonucleotide
acugccucaaauguggaac

SEQ ID NO: 2713875 - RNA, 19 nt, Artificial Sequence
  Description of Artificial Sequence: Synthetic oligonucleotide
ucuucacugggaaaguucu

SEQ ID NO: 2713876 - RNA, 19 nt, Artificial Sequence
  Description of Artificial Sequence: Synthetic oligonucleotide
aauguggaaccucuugaga

SEQ ID NO: 2713877 - RNA, 19 nt, Artificial Sequence
  Description of Artificial Sequence: Synthetic oligonucleotide
acuagcguccugcuguccc

SEQ ID NO: 2713878 - RNA, 19 nt, Artificial Sequence
  Description of Artificial Sequence: Synthetic oligonucleotide
aaaugcuccaagagcuucc

SEQ ID NO: 2713879 - RNA, 19 nt, Artificial Sequence
  Description of Artificial Sequence: Synthetic oligonucleotide
aggacuuugggcgccaucc

SEQ ID NO: 2713880 - RNA, 19 nt, Artificial Sequence
  Description of Artificial Sequence: Synthetic oligonucleotide
uucuggucacauuuguuag

SEQ ID NO: 2713881 - RNA, 19 nt, Artificial Sequence
  Description of Artificial Sequence: Synthetic oligonucleotide
ucgauguuuauauuauccu

SEQ ID NO: 2713882 - RNA, 19 nt, Artificial Sequence
  Description of Artificial Sequence: Synthetic oligonucleotide
uuuuccauuuuaagacugc

SEQ ID NO: 2713883 - RNA, 19 nt, Artificial Sequence
  Description of Artificial Sequence: Synthetic oligonucleotide
uuauauuauccuuggcaga

SEQ ID NO: 2713884 - RNA, 19 nt, Artificial Sequence
  Description of Artificial Sequence: Synthetic oligonucleotide
cucuugagagaucaaagac

SEQ ID NO: 2713885 - RNA, 19 nt, Artificial Sequence
  Description of Artificial Sequence: Synthetic oligonucleotide
uuuguuagcuaggaggaca

SEQ ID NO: 2713886 - RNA, 19 nt, Artificial Sequence
  Description of Artificial Sequence: Synthetic oligonucleotide
uaggaggacagcaggaaug

SEQ ID NO: 2713887 - RNA, 19 nt, Artificial Sequence
  Description of Artificial Sequence: Synthetic oligonucleotide
uuguuagcuaggaggacag

SEQ ID NO: 2713888 - RNA, 19 nt, Artificial Sequence
  Description of Artificial Sequence: Synthetic oligonucleotide
uaagacugccucaaaugug

SEQ ID NO: 2713889 - RNA, 19 nt, Artificial Sequence
  Description of Artificial Sequence: Synthetic oligonucleotide
auggucuuuacagaauugg

SEQ ID NO: 2713890 - RNA, 19 nt, Artificial Sequence
  Description of Artificial Sequence: Synthetic oligonucleotide
uuggcagagguuucaaacc

SEQ ID NO: 2713891 - RNA, 19 nt, Artificial Sequence
  Description of Artificial Sequence: Synthetic oligonucleotide
aggaccaaggagaaagugc

SEQ ID NO: 2713892 - RNA, 19 nt, Artificial Sequence
  Description of Artificial Sequence: Synthetic oligonucleotide
uacacucgggucauguucc

SEQ ID NO: 2713893 - RNA, 19 nt, Artificial Sequence
  Description of Artificial Sequence: Synthetic oligonucleotide
gucgauguuuauauuaucc

SEQ ID NO: 2713894 - RNA, 19 nt, Artificial Sequence
  Description of Artificial Sequence: Synthetic oligonucleotide
cagaauugguccaucuggg

SEQ ID NO: 2713895 - RNA, 19 nt, Artificial Sequence
  Description of Artificial Sequence: Synthetic oligonucleotide
cuuccuuguaguacacucg

SEQ ID NO: 2713896 - RNA, 19 nt, Artificial Sequence
  Description of Artificial Sequence: Synthetic oligonucleotide
uagcuaggaggacagcagg

SEQ ID NO: 2713897 - RNA, 19 nt, Artificial Sequence
  Description of Artificial Sequence: Synthetic oligonucleotide
uguuuauauuauccuuggc

SEQ ID NO: 2713898 - RNA, 19 nt, Artificial Sequence
  Description of Artificial Sequence: Synthetic oligonucleotide
aucaaagacaacaaaugcu

SEQ ID NO: 2713899 - RNA, 19 nt, Artificial Sequence
  Description of Artificial Sequence: Synthetic oligonucleotide
agagcuuccuuguaguaca

SEQ ID NO: 2713900 - RNA, 19 nt, Artificial Sequence
  Description of Artificial Sequence: Synthetic oligonucleotide
uacagaauugguccaucug

SEQ ID NO: 2713901 - RNA, 19 nt, Artificial Sequence
  Description of Artificial Sequence: Synthetic oligonucleotide
gaggacagcaggaaugggg

SEQ ID NO: 2713902 - RNA, 19 nt, Artificial Sequence
  Description of Artificial Sequence: Synthetic oligonucleotide
cauuuguuagcuaggagga

SEQ ID NO: 2713903 - RNA, 19 nt, Artificial Sequence
  Description of Artificial Sequence: Synthetic oligonucleotide
cuauccagaucacuuuucc

SEQ ID NO: 2713904 - RNA, 19 nt, Artificial Sequence
  Description of Artificial Sequence: Synthetic oligonucleotide
guuucaaaccauccaauga

SEQ ID NO: 2713905 - RNA, 19 nt, Artificial Sequence
  Description of Artificial Sequence: Synthetic oligonucleotide
agagguuucaaaccaucca

SEQ ID NO: 2713906 - RNA, 19 nt, Artificial Sequence
  Description of Artificial Sequence: Synthetic oligonucleotide
auccagaucacuuuuccau

SEQ ID NO: 2713907 - RNA, 19 nt, Artificial Sequence
  Description of Artificial Sequence: Synthetic oligonucleotide
uucacugggaaaguucugc

SEQ ID NO: 2713908 - RNA, 19 nt, Artificial Sequence
  Description of Artificial Sequence: Synthetic oligonucleotide
aguugaggaccuugagggc

SEQ ID NO: 2713909 - RNA, 19 nt, Artificial Sequence
  Description of Artificial Sequence: Synthetic oligonucleotide
uguugggaggggcucauca

SEQ ID NO: 2713910 - RNA, 19 nt, Artificial Sequence
  Description of Artificial Sequence: Synthetic oligonucleotide
uggcagagguuucaaacca

SEQ ID NO: 2713911 - RNA, 19 nt, Artificial Sequence
  Description of Artificial Sequence: Synthetic oligonucleotide
gcgaaguccaccccgaucg

SEQ ID NO: 2713912 - RNA, 19 nt, Artificial Sequence
  Description of Artificial Sequence: Synthetic oligonucleotide
uuuccauuuuaagacugcc

SEQ ID NO: 2713913 - RNA, 19 nt, Artificial Sequence
  Description of Artificial Sequence: Synthetic oligonucleotide
uuccauuuuaagacugccu

SEQ ID NO: 2713914 - RNA, 19 nt, Artificial Sequence
  Description of Artificial Sequence: Synthetic oligonucleotide
ugcugguuugcaaggaugu

SEQ ID NO: 2713915 - RNA, 19 nt, Artificial Sequence
  Description of Artificial Sequence: Synthetic oligonucleotide
ucagucaguuuaauuuugu

SEQ ID NO: 2713916 - RNA, 19 nt, Artificial Sequence
  Description of Artificial Sequence: Synthetic oligonucleotide
gagguuucaaaccauccaa

SEQ ID NO: 2713917 - RNA, 19 nt, Artificial Sequence
  Description of Artificial Sequence: Synthetic oligonucleotide
cauguucccaaaccgcucc

SEQ ID NO: 2713918 - RNA, 19 nt, Artificial Sequence
  Description of Artificial Sequence: Synthetic oligonucleotide
augucguuuucuucacugg

SEQ ID NO: 2713919 - RNA, 19 nt, Artificial Sequence
  Description of Artificial Sequence: Synthetic oligonucleotide
uugagggcgaaguccaccc

SEQ ID NO: 2713920 - RNA, 19 nt, Artificial Sequence
  Description of Artificial Sequence: Synthetic oligonucleotide
cuuguaguacacucggguc

SEQ ID NO: 2713921 - RNA, 19 nt, Artificial Sequence
  Description of Artificial Sequence: Synthetic oligonucleotide
guuugcaaggauguuuucc

SEQ ID NO: 2713922 - RNA, 19 nt, Artificial Sequence
  Description of Artificial Sequence: Synthetic oligonucleotide
gaauggggcugccauuggg

SEQ ID NO: 2713923 - RNA, 19 nt, Artificial Sequence
  Description of Artificial Sequence: Synthetic oligonucleotide
cagugcagaacacaucagc

SEQ ID NO: 2713924 - RNA, 19 nt, Artificial Sequence
  Description of Artificial Sequence: Synthetic oligonucleotide
ugggagaagagcuggugca

SEQ ID NO: 2713925 - RNA, 19 nt, Artificial Sequence
  Description of Artificial Sequence: Synthetic oligonucleotide
cagagguuucaaaccaucc

SEQ ID NO: 2713926 - RNA, 19 nt, Artificial Sequence
  Description of Artificial Sequence: Synthetic oligonucleotide
ucuggucacauuuguuagc

SEQ ID NO: 2713927 - RNA, 19 nt, Artificial Sequence
  Description of Artificial Sequence: Synthetic oligonucleotide
uuacagaauugguccaucu

SEQ ID NO: 2713928 - RNA, 19 nt, Artificial Sequence
  Description of Artificial Sequence: Synthetic oligonucleotide
ucguuuucuucacugggaa

SEQ ID NO: 2713929 - RNA, 19 nt, Artificial Sequence
  Description of Artificial Sequence: Synthetic oligonucleotide
gaauugguccaucugggaa

SEQ ID NO: 2713930 - RNA, 19 nt, Artificial Sequence
  Description of Artificial Sequence: Synthetic oligonucleotide
uucuucuggucacauuugu

SEQ ID NO: 2713931 - RNA, 19 nt, Artificial Sequence
  Description of Artificial Sequence: Synthetic oligonucleotide
aagacaacaaaugcuccaa

SEQ ID NO: 2713932 - RNA, 19 nt, Artificial Sequence
  Description of Artificial Sequence: Synthetic oligonucleotide
ucgucgauguuuauauuau

SEQ ID NO: 2713933 - RNA, 19 nt, Artificial Sequence
  Description of Artificial Sequence: Synthetic oligonucleotide
aaugaagccauggucuuua

SEQ ID NO: 2713934 - RNA, 19 nt, Artificial Sequence
  Description of Artificial Sequence: Synthetic oligonucleotide
ugguuugcaaggauguuuu

SEQ ID NO: 2713935 - RNA, 19 nt, Artificial Sequence
  Description of Artificial Sequence: Synthetic oligonucleotide
aagccauggucuuuacaga

SEQ ID NO: 2713936 - RNA, 19 nt, Artificial Sequence
  Description of Artificial Sequence: Synthetic oligonucleotide
gagauggaccuuacuaucc

SEQ ID NO: 2713937 - RNA, 19 nt, Artificial Sequence
  Description of Artificial Sequence: Synthetic oligonucleotide
ucccaaaccgcuccugccc

SEQ ID NO: 2713938 - RNA, 19 nt, Artificial Sequence
  Description of Artificial Sequence: Synthetic oligonucleotide
uccuuguaguacacucggg

SEQ ID NO: 2713939 - RNA, 19 nt, Artificial Sequence
  Description of Artificial Sequence: Synthetic oligonucleotide
ucacauuuguuagcuagga

SEQ ID NO: 2713940 - RNA, 19 nt, Artificial Sequence
  Description of Artificial Sequence: Synthetic oligonucleotide
gcugccauuggggagaugg

SEQ ID NO: 2713941 - RNA, 19 nt, Artificial Sequence
  Description of Artificial Sequence: Synthetic oligonucleotide
caaauguggaaccucuuga

SEQ ID NO: 2713942 - RNA, 19 nt, Artificial Sequence
  Description of Artificial Sequence: Synthetic oligonucleotide
agacaacaaaugcuccaag

SEQ ID NO: 2713943 - RNA, 19 nt, Artificial Sequence
  Description of Artificial Sequence: Synthetic oligonucleotide
uugaugaugcuggucuugc

SEQ ID NO: 2713944 - RNA, 19 nt, Artificial Sequence
  Description of Artificial Sequence: Synthetic oligonucleotide
uuacuauccagaucacuuu

SEQ ID NO: 2713945 - RNA, 19 nt, Artificial Sequence
  Description of Artificial Sequence: Synthetic oligonucleotide
ugggaccuggccuuuguug

SEQ ID NO: 2713946 - RNA, 19 nt, Artificial Sequence
  Description of Artificial Sequence: Synthetic oligonucleotide
cugggagaagagcuggugc

SEQ ID NO: 2713947 - RNA, 19 nt, Artificial Sequence
  Description of Artificial Sequence: Synthetic oligonucleotide
gaaccggguggccucgucg

SEQ ID NO: 2713948 - RNA, 19 nt, Artificial Sequence
  Description of Artificial Sequence: Synthetic oligonucleotide
ugucccacaguugcaggcg

SEQ ID NO: 2713949 - RNA, 19 nt, Artificial Sequence
  Description of Artificial Sequence: Synthetic oligonucleotide
agugcagaacacaucagca

SEQ ID NO: 2713950 - RNA, 19 nt, Artificial Sequence
  Description of Artificial Sequence: Synthetic oligonucleotide
uacuauccagaucacuuuu

SEQ ID NO: 2713951 - RNA, 19 nt, Artificial Sequence
  Description of Artificial Sequence: Synthetic oligonucleotide
agauggaccuuacuaucca

SEQ ID NO: 2713952 - RNA, 19 nt, Artificial Sequence
  Description of Artificial Sequence: Synthetic oligonucleotide
auuuguuagcuaggaggac

SEQ ID NO: 2713953 - RNA, 19 nt, Artificial Sequence
  Description of Artificial Sequence: Synthetic oligonucleotide
uguuuuccacuaggaaccg

SEQ ID NO: 2713954 - RNA, 19 nt, Artificial Sequence
  Description of Artificial Sequence: Synthetic oligonucleotide
auugguccaucugggaagg

SEQ ID NO: 2713955 - RNA, 19 nt, Artificial Sequence
  Description of Artificial Sequence: Synthetic oligonucleotide
gagaucaaagacaacaaau

SEQ ID NO: 2713956 - RNA, 19 nt, Artificial Sequence
  Description of Artificial Sequence: Synthetic oligonucleotide
uugggaggggcucaucagu

SEQ ID NO: 2713957 - RNA, 19 nt, Artificial Sequence
  Description of Artificial Sequence: Synthetic oligonucleotide
cugccucaaauguggaacc

SEQ ID NO: 2713958 - RNA, 19 nt, Artificial Sequence
  Description of Artificial Sequence: Synthetic oligonucleotide
guacacucgggucauguuc

SEQ ID NO: 2713959 - RNA, 19 nt, Artificial Sequence
  Description of Artificial Sequence: Synthetic oligonucleotide
ggaaaguucugcugguuug

SEQ ID NO: 2713960 - RNA, 19 nt, Artificial Sequence
  Description of Artificial Sequence: Synthetic oligonucleotide
acagcaggaauggggcugc

SEQ ID NO: 2713961 - RNA, 19 nt, Artificial Sequence
  Description of Artificial Sequence: Synthetic oligonucleotide
aagagcuggugcacauagc

SEQ ID NO: 2713962 - RNA, 19 nt, Artificial Sequence
  Description of Artificial Sequence: Synthetic oligonucleotide
guuagcuaggaggacagca

SEQ ID NO: 2713963 - RNA, 19 nt, Artificial Sequence
  Description of Artificial Sequence: Synthetic oligonucleotide
aaccucuugagagaucaaa

SEQ ID NO: 2713964 - RNA, 19 nt, Artificial Sequence
  Description of Artificial Sequence: Synthetic oligonucleotide
uugggcgccauccuucuuc

SEQ ID NO: 2713965 - RNA, 19 nt, Artificial Sequence
  Description of Artificial Sequence: Synthetic oligonucleotide
gggaccuggccuuuguugg

SEQ ID NO: 2713966 - RNA, 19 nt, Artificial Sequence
  Description of Artificial Sequence: Synthetic oligonucleotide
cacauuuguuagcuaggag

SEQ ID NO: 2713967 - RNA, 19 nt, Artificial Sequence
  Description of Artificial Sequence: Synthetic oligonucleotide
cuuacuauccagaucacuu

SEQ ID NO: 2713968 - RNA, 19 nt, Artificial Sequence
  Description of Artificial Sequence: Synthetic oligonucleotide
acacgcaggaccaaggaga

SEQ ID NO: 2713969 - RNA, 19 nt, Artificial Sequence
  Description of Artificial Sequence: Synthetic oligonucleotide
auauuauccuuggcagagg

SEQ ID NO: 2713970 - RNA, 19 nt, Artificial Sequence
  Description of Artificial Sequence: Synthetic oligonucleotide
ucacugggaaaguucugcu

SEQ ID NO: 2713971 - RNA, 19 nt, Artificial Sequence
  Description of Artificial Sequence: Synthetic oligonucleotide
gugcacauagcgcuugaug

SEQ ID NO: 2713972 - RNA, 19 nt, Artificial Sequence
  Description of Artificial Sequence: Synthetic oligonucleotide
acuauccagaucacuuuuc

SEQ ID NO: 2713973 - RNA, 19 nt, Artificial Sequence
  Description of Artificial Sequence: Synthetic oligonucleotide
agaacacaucagcagcacu

SEQ ID NO: 2713974 - RNA, 19 nt, Artificial Sequence
  Description of Artificial Sequence: Synthetic oligonucleotide
aguugcaggcgcacuagcg

SEQ ID NO: 2713975 - RNA, 19 nt, Artificial Sequence
  Description of Artificial Sequence: Synthetic oligonucleotide
cuggccuuuguugggaggg

SEQ ID NO: 2713976 - RNA, 19 nt, Artificial Sequence
  Description of Artificial Sequence: Synthetic oligonucleotide
cuucuucuggucacauuug

SEQ ID NO: 2713977 - RNA, 19 nt, Artificial Sequence
  Description of Artificial Sequence: Synthetic oligonucleotide
ggcgccauccuucuucugg

SEQ ID NO: 2713978 - RNA, 19 nt, Artificial Sequence
  Description of Artificial Sequence: Synthetic oligonucleotide
agccauggucuuuacagaa

SEQ ID NO: 2713979 - RNA, 19 nt, Artificial Sequence
  Description of Artificial Sequence: Synthetic oligonucleotide
aggaauggggcugccauug

SEQ ID NO: 2713980 - RNA, 19 nt, Artificial Sequence
  Description of Artificial Sequence: Synthetic oligonucleotide
acuuugggcgccauccuuc

SEQ ID NO: 2713981 - RNA, 19 nt, Artificial Sequence
  Description of Artificial Sequence: Synthetic oligonucleotide
uuuacagaauugguccauc

SEQ ID NO: 2713982 - RNA, 19 nt, Artificial Sequence
  Description of Artificial Sequence: Synthetic oligonucleotide
aaccggguggccucgucga

SEQ ID NO: 2713983 - RNA, 19 nt, Artificial Sequence
  Description of Artificial Sequence: Synthetic oligonucleotide
ucugcugguuugcaaggau

SEQ ID NO: 2713984 - RNA, 19 nt, Artificial Sequence
  Description of Artificial Sequence: Synthetic oligonucleotide
cucgucgauguuuauauua

SEQ ID NO: 2713985 - RNA, 19 nt, Artificial Sequence
  Description of Artificial Sequence: Synthetic oligonucleotide
ugggaaggacuuugggcgc

SEQ ID NO: 2713986 - RNA, 19 nt, Artificial Sequence
  Description of Artificial Sequence: Synthetic oligonucleotide
guugggaggggcucaucag

SEQ ID NO: 2713987 - RNA, 19 nt, Artificial Sequence
  Description of Artificial Sequence: Synthetic oligonucleotide
ugaugaugcuggucuugcc

SEQ ID NO: 2713988 - RNA, 19 nt, Artificial Sequence
  Description of Artificial Sequence: Synthetic oligonucleotide
ccaaggagaaagugcagcc

SEQ ID NO: 2713989 - RNA, 19 nt, Artificial Sequence
  Description of Artificial Sequence: Synthetic oligonucleotide
cugcugguuugcaaggaug

SEQ ID NO: 2713990 - RNA, 19 nt, Artificial Sequence
  Description of Artificial Sequence: Synthetic oligonucleotide
cagucaguuuaauuuuguc

SEQ ID NO: 2713991 - RNA, 19 nt, Artificial Sequence
  Description of Artificial Sequence: Synthetic oligonucleotide
uccagaucacuuuuccauu

SEQ ID NO: 2713992 - RNA, 19 nt, Artificial Sequence
  Description of Artificial Sequence: Synthetic oligonucleotide
gaaguccaccccgaucggg

SEQ ID NO: 2713993 - RNA, 19 nt, Artificial Sequence
  Description of Artificial Sequence: Synthetic oligonucleotide
ccaguugaggaccuugagg

SEQ ID NO: 2713994 - RNA, 19 nt, Artificial Sequence
  Description of Artificial Sequence: Synthetic oligonucleotide
uccaugucguuuucuucac

SEQ ID NO: 2713995 - RNA, 19 nt, Artificial Sequence
  Description of Artificial Sequence: Synthetic oligonucleotide
aggcgcacuagcguccugc

SEQ ID NO: 2713996 - RNA, 19 nt, Artificial Sequence
  Description of Artificial Sequence: Synthetic oligonucleotide
gccagugcagaacacauca

SEQ ID NO: 2713997 - RNA, 19 nt, Artificial Sequence
  Description of Artificial Sequence: Synthetic oligonucleotide
acacucgggucauguuccc

SEQ ID NO: 2713998 - RNA, 19 nt, Artificial Sequence
  Description of Artificial Sequence: Synthetic oligonucleotide
aaccauccaaugaagccau

SEQ ID NO: 2713999 - RNA, 19 nt, Artificial Sequence
  Description of Artificial Sequence: Synthetic oligonucleotide
uguaguacacucgggucau

SEQ ID NO: 2714000 - RNA, 19 nt, Artificial Sequence
  Description of Artificial Sequence: Synthetic oligonucleotide
gcuuccuuguaguacacuc

SEQ ID NO: 2714001 - RNA, 19 nt, Artificial Sequence
  Description of Artificial Sequence: Synthetic oligonucleotide
agaucacuuuuccauuuua

SEQ ID NO: 2714002 - RNA, 19 nt, Artificial Sequence
  Description of Artificial Sequence: Synthetic oligonucleotide
uaguacacucgggucaugu

SEQ ID NO: 2714003 - RNA, 19 nt, Artificial Sequence
  Description of Artificial Sequence: Synthetic oligonucleotide
cacauagcgcuugaugaug

SEQ ID NO: 2714004 - RNA, 19 nt, Artificial Sequence
  Description of Artificial Sequence: Synthetic oligonucleotide
cuugagggcgaaguccacc

SEQ ID NO: 2714005 - RNA, 19 nt, Artificial Sequence
  Description of Artificial Sequence: Synthetic oligonucleotide
auagcgcuugaugaugcug

SEQ ID NO: 2714006 - RNA, 19 nt, Artificial Sequence
  Description of Artificial Sequence: Synthetic oligonucleotide
caaaugcuccaagagcuuc

SEQ ID NO: 2714007 - RNA, 19 nt, Artificial Sequence
  Description of Artificial Sequence: Synthetic oligonucleotide
ggagauggaccuuacuauc

SEQ ID NO: 2714008 - RNA, 19 nt, Artificial Sequence
  Description of Artificial Sequence: Synthetic oligonucleotide
caaggauguuuuccacuag

SEQ ID NO: 2714009 - RNA, 19 nt, Artificial Sequence
  Description of Artificial Sequence: Synthetic oligonucleotide
cacaucagcagcacuggga

SEQ ID NO: 2714010 - RNA, 19 nt, Artificial Sequence
  Description of Artificial Sequence: Synthetic oligonucleotide
cuugaugaugcuggucuug

SEQ ID NO: 2714011 - RNA, 19 nt, Artificial Sequence
  Description of Artificial Sequence: Synthetic oligonucleotide
uugagagaucaaagacaac

SEQ ID NO: 2714012 - RNA, 19 nt, Artificial Sequence
  Description of Artificial Sequence: Synthetic oligonucleotide
cauuuuaagacugccucaa

SEQ ID NO: 2714013 - RNA, 19 nt, Artificial Sequence
  Description of Artificial Sequence: Synthetic oligonucleotide
ggaaccucuugagagauca

SEQ ID NO: 2714014 - RNA, 19 nt, Artificial Sequence
  Description of Artificial Sequence: Synthetic oligonucleotide
uugcaggcgcacuagcguc

SEQ ID NO: 2714015 - RNA, 19 nt, Artificial Sequence
  Description of Artificial Sequence: Synthetic oligonucleotide
cuaggaaccggguggccuc

SEQ ID NO: 2714016 - RNA, 19 nt, Artificial Sequence
  Description of Artificial Sequence: Synthetic oligonucleotide
ggaccaaggagaaagugca

SEQ ID NO: 2714017 - RNA, 19 nt, Artificial Sequence
  Description of Artificial Sequence: Synthetic oligonucleotide
accccgaucggguggcccg

SEQ ID NO: 2714018 - RNA, 19 nt, Artificial Sequence
  Description of Artificial Sequence: Synthetic oligonucleotide
ucgggucauguucccaaac

SEQ ID NO: 2714019 - RNA, 19 nt, Artificial Sequence
  Description of Artificial Sequence: Synthetic oligonucleotide
acucgggucauguucccaa

SEQ ID NO: 2714020 - RNA, 19 nt, Artificial Sequence
  Description of Artificial Sequence: Synthetic oligonucleotide
aaguccaccccgaucgggu

SEQ ID NO: 2714021 - RNA, 19 nt, Artificial Sequence
  Description of Artificial Sequence: Synthetic oligonucleotide
ugccauuggggagauggac

SEQ ID NO: 2714022 - RNA, 19 nt, Artificial Sequence
  Description of Artificial Sequence: Synthetic oligonucleotide
acaguugcaggcgcacuag

SEQ ID NO: 2714023 - RNA, 19 nt, Artificial Sequence
  Description of Artificial Sequence: Synthetic oligonucleotide
ugagggcgaaguccacccc

SEQ ID NO: 2714024 - RNA, 19 nt, Artificial Sequence
  Description of Artificial Sequence: Synthetic oligonucleotide
cuucacugggaaaguucug

SEQ ID NO: 2714025 - RNA, 19 nt, Artificial Sequence
  Description of Artificial Sequence: Synthetic oligonucleotide
ggucauguucccaaaccgc

SEQ ID NO: 2714026 - RNA, 19 nt, Artificial Sequence
  Description of Artificial Sequence: Synthetic oligonucleotide
uccugccccgcgauguccc

SEQ ID NO: 2714027 - RNA, 19 nt, Artificial Sequence
  Description of Artificial Sequence: Synthetic oligonucleotide
ggagaaagugcagccagug

SEQ ID NO: 2714028 - RNA, 19 nt, Artificial Sequence
  Description of Artificial Sequence: Synthetic oligonucleotide
gagcuggugcacauagcgc

SEQ ID NO: 2714029 - RNA, 19 nt, Artificial Sequence
  Description of Artificial Sequence: Synthetic oligonucleotide
ggaggggcucaucagucag

SEQ ID NO: 2714030 - RNA, 19 nt, Artificial Sequence
  Description of Artificial Sequence: Synthetic oligonucleotide
cugcugucccaguugagga

SEQ ID NO: 2714031 - RNA, 19 nt, Artificial Sequence
  Description of Artificial Sequence: Synthetic oligonucleotide
gaccaaggagaaagugcag

SEQ ID NO: 2714032 - RNA, 19 nt, Artificial Sequence
  Description of Artificial Sequence: Synthetic oligonucleotide
ggggagauggaccuuacua

SEQ ID NO: 2714033 - RNA, 19 nt, Artificial Sequence
  Description of Artificial Sequence: Synthetic oligonucleotide
ggauguuuuccacuaggaa

SEQ ID NO: 2714034 - RNA, 19 nt, Artificial Sequence
  Description of Artificial Sequence: Synthetic oligonucleotide
ccauccaaugaagccaugg

SEQ ID NO: 2714035 - RNA, 19 nt, Artificial Sequence
  Description of Artificial Sequence: Synthetic oligonucleotide
gucguuuucuucacuggga

SEQ ID NO: 2714036 - RNA, 19 nt, Artificial Sequence
  Description of Artificial Sequence: Synthetic oligonucleotide
auuggggagauggaccuua

SEQ ID NO: 2714037 - RNA, 19 nt, Artificial Sequence
  Description of Artificial Sequence: Synthetic oligonucleotide
aguacacucgggucauguu

SEQ ID NO: 2714038 - RNA, 19 nt, Artificial Sequence
  Description of Artificial Sequence: Synthetic oligonucleotide
uguuagcuaggaggacagc

SEQ ID NO: 2714039 - RNA, 19 nt, Artificial Sequence
  Description of Artificial Sequence: Synthetic oligonucleotide
uuggggagauggaccuuac

SEQ ID NO: 2714040 - RNA, 19 nt, Artificial Sequence
  Description of Artificial Sequence: Synthetic oligonucleotide
cgcaggaccaaggagaaag

SEQ ID NO: 2714041 - RNA, 19 nt, Artificial Sequence
  Description of Artificial Sequence: Synthetic oligonucleotide
cgcgaugucccacaguugc

SEQ ID NO: 2714042 - RNA, 19 nt, Artificial Sequence
  Description of Artificial Sequence: Synthetic oligonucleotide
uccugcugucccaguugag

SEQ ID NO: 2714043 - RNA, 19 nt, Artificial Sequence
  Description of Artificial Sequence: Synthetic oligonucleotide
uaggaaccggguggccucg

SEQ ID NO: 2714044 - RNA, 19 nt, Artificial Sequence
  Description of Artificial Sequence: Synthetic oligonucleotide
uggccuuuguugggagggg

SEQ ID NO: 2714045 - RNA, 19 nt, Artificial Sequence
  Description of Artificial Sequence: Synthetic oligonucleotide
gacugccucaaauguggaa

SEQ ID NO: 2714046 - RNA, 19 nt, Artificial Sequence
  Description of Artificial Sequence: Synthetic oligonucleotide
ugccucaaauguggaaccu

SEQ ID NO: 2714047 - RNA, 19 nt, Artificial Sequence
  Description of Artificial Sequence: Synthetic oligonucleotide
ccugcugucccaguugagg

SEQ ID NO: 2714048 - RNA, 19 nt, Artificial Sequence
  Description of Artificial Sequence: Synthetic oligonucleotide
guugcaggcgcacuagcgu

SEQ ID NO: 2714049 - RNA, 19 nt, Artificial Sequence
  Description of Artificial Sequence: Synthetic oligonucleotide
caguugcaggcgcacuagc

SEQ ID NO: 2714050 - RNA, 19 nt, Artificial Sequence
  Description of Artificial Sequence: Synthetic oligonucleotide
agcgcuugaugaugcuggu

SEQ ID NO: 2714051 - RNA, 19 nt, Artificial Sequence
  Description of Artificial Sequence: Synthetic oligonucleotide
gccauuggggagauggacc

SEQ ID NO: 2714052 - RNA, 19 nt, Artificial Sequence
  Description of Artificial Sequence: Synthetic oligonucleotide
accuuacuauccagaucac

SEQ ID NO: 2714053 - RNA, 19 nt, Artificial Sequence
  Description of Artificial Sequence: Synthetic oligonucleotide
uggcccgguaguucuggga

SEQ ID NO: 2714054 - RNA, 19 nt, Artificial Sequence
  Description of Artificial Sequence: Synthetic oligonucleotide
auguucccaaaccgcuccu

SEQ ID NO: 2714055 - RNA, 19 nt, Artificial Sequence
  Description of Artificial Sequence: Synthetic oligonucleotide
agcuaggaggacagcagga

SEQ ID NO: 2714056 - RNA, 19 nt, Artificial Sequence
  Description of Artificial Sequence: Synthetic oligonucleotide
guccugcugucccaguuga

SEQ ID NO: 2714057 - RNA, 19 nt, Artificial Sequence
  Description of Artificial Sequence: Synthetic oligonucleotide
ggaccuggccuuuguuggg

SEQ ID NO: 2714058 - RNA, 19 nt, Artificial Sequence
  Description of Artificial Sequence: Synthetic oligonucleotide
agccagugcagaacacauc

SEQ ID NO: 2714059 - RNA, 19 nt, Artificial Sequence
  Description of Artificial Sequence: Synthetic oligonucleotide
uuuguugggaggggcucau

SEQ ID NO: 2714060 - RNA, 19 nt, Artificial Sequence
  Description of Artificial Sequence: Synthetic oligonucleotide
ggaauggggcugccauugg

SEQ ID NO: 2714061 - RNA, 19 nt, Artificial Sequence
  Description of Artificial Sequence: Synthetic oligonucleotide
cauccaaugaagccauggu

SEQ ID NO: 2714062 - RNA, 19 nt, Artificial Sequence
  Description of Artificial Sequence: Synthetic oligonucleotide
uggaaccucuugagagauc

SEQ ID NO: 2714063 - RNA, 19 nt, Artificial Sequence
  Description of Artificial Sequence: Synthetic oligonucleotide
gucccaguugaggaccuug

SEQ ID NO: 2714064 - RNA, 19 nt, Artificial Sequence
  Description of Artificial Sequence: Synthetic oligonucleotide
uccaccccgaucggguggc

SEQ ID NO: 2714065 - RNA, 19 nt, Artificial Sequence
  Description of Artificial Sequence: Synthetic oligonucleotide
gcugucccaguugaggacc

SEQ ID NO: 2714066 - RNA, 19 nt, Artificial Sequence
  Description of Artificial Sequence: Synthetic oligonucleotide
ccauuuuaagacugccuca

SEQ ID NO: 2714067 - RNA, 19 nt, Artificial Sequence
  Description of Artificial Sequence: Synthetic oligonucleotide
ugccccgcgaugucccaca

SEQ ID NO: 2714068 - RNA, 19 nt, Artificial Sequence
  Description of Artificial Sequence: Synthetic oligonucleotide
cacgcaggaccaaggagaa

SEQ ID NO: 2714069 - RNA, 19 nt, Artificial Sequence
  Description of Artificial Sequence: Synthetic oligonucleotide
uagcguccugcugucccag

SEQ ID NO: 2714070 - RNA, 19 nt, Artificial Sequence
  Description of Artificial Sequence: Synthetic oligonucleotide
gggagauggaccuuacuau

SEQ ID NO: 2714071 - RNA, 19 nt, Artificial Sequence
  Description of Artificial Sequence: Synthetic oligonucleotide
cuggugcacauagcgcuug

SEQ ID NO: 2714072 - RNA, 19 nt, Artificial Sequence
  Description of Artificial Sequence: Synthetic oligonucleotide
uccuucuucuggucacauu

SEQ ID NO: 2714073 - RNA, 19 nt, Artificial Sequence
  Description of Artificial Sequence: Synthetic oligonucleotide
guggcccgguaguucuggg

SEQ ID NO: 2714074 - RNA, 19 nt, Artificial Sequence
  Description of Artificial Sequence: Synthetic oligonucleotide
cuagcguccugcuguccca

SEQ ID NO: 2714075 - RNA, 19 nt, Artificial Sequence
  Description of Artificial Sequence: Synthetic oligonucleotide
cuuuguugggaggggcuca

SEQ ID NO: 2714076 - RNA, 19 nt, Artificial Sequence
  Description of Artificial Sequence: Synthetic oligonucleotide
caagagcuuccuuguagua

SEQ ID NO: 2714077 - RNA, 19 nt, Artificial Sequence
  Description of Artificial Sequence: Synthetic oligonucleotide
cacaguugcaggcgcacua

SEQ ID NO: 2714078 - RNA, 19 nt, Artificial Sequence
  Description of Artificial Sequence: Synthetic oligonucleotide
acaaaugcuccaagagcuu

SEQ ID NO: 2714079 - RNA, 19 nt, Artificial Sequence
  Description of Artificial Sequence: Synthetic oligonucleotide
gaucggguggcccgguagu

SEQ ID NO: 2714080 - RNA, 19 nt, Artificial Sequence
  Description of Artificial Sequence: Synthetic oligonucleotide
ugggaaaguucugcugguu

SEQ ID NO: 2714081 - RNA, 19 nt, Artificial Sequence
  Description of Artificial Sequence: Synthetic oligonucleotide
cgggucauguucccaaacc

SEQ ID NO: 2714082 - RNA, 19 nt, Artificial Sequence
  Description of Artificial Sequence: Synthetic oligonucleotide
gcagagguuucaaaccauc

SEQ ID NO: 2714083 - RNA, 19 nt, Artificial Sequence
  Description of Artificial Sequence: Synthetic oligonucleotide
gccucgucgauguuuauau

SEQ ID NO: 2714084 - RNA, 19 nt, Artificial Sequence
  Description of Artificial Sequence: Synthetic oligonucleotide
cccaaaccgcuccugcccc

SEQ ID NO: 2714085 - RNA, 19 nt, Artificial Sequence
  Description of Artificial Sequence: Synthetic oligonucleotide
gguuugcaaggauguuuuc

SEQ ID NO: 2714086 - RNA, 19 nt, Artificial Sequence
  Description of Artificial Sequence: Synthetic oligonucleotide
agcaggaauggggcugcca

SEQ ID NO: 2714087 - RNA, 19 nt, Artificial Sequence
  Description of Artificial Sequence: Synthetic oligonucleotide
ccuuguaguacacucgggu

SEQ ID NO: 2714088 - RNA, 19 nt, Artificial Sequence
  Description of Artificial Sequence: Synthetic oligonucleotide
ccuggccuuuguugggagg

SEQ ID NO: 2714089 - RNA, 19 nt, Artificial Sequence
  Description of Artificial Sequence: Synthetic oligonucleotide
cuaggaggacagcaggaau

SEQ ID NO: 2714090 - RNA, 19 nt, Artificial Sequence
  Description of Artificial Sequence: Synthetic oligonucleotide
ucggguggcccgguaguuc

SEQ ID NO: 2714091 - RNA, 19 nt, Artificial Sequence
  Description of Artificial Sequence: Synthetic oligonucleotide
uuugggcgccauccuucuu

SEQ ID NO: 2714092 - RNA, 19 nt, Artificial Sequence
  Description of Artificial Sequence: Synthetic oligonucleotide
cuccugccccgcgaugucc

SEQ ID NO: 2714093 - RNA, 19 nt, Artificial Sequence
  Description of Artificial Sequence: Synthetic oligonucleotide
uccaucugggaaggacuuu

SEQ ID NO: 2714094 - RNA, 19 nt, Artificial Sequence
  Description of Artificial Sequence: Synthetic oligonucleotide
cugccauuggggagaugga

SEQ ID NO: 2714095 - RNA, 19 nt, Artificial Sequence
  Description of Artificial Sequence: Synthetic oligonucleotide
gacuuugggcgccauccuu

SEQ ID NO: 2714096 - RNA, 19 nt, Artificial Sequence
  Description of Artificial Sequence: Synthetic oligonucleotide
ccucaaauguggaaccucu

SEQ ID NO: 2714097 - RNA, 19 nt, Artificial Sequence
  Description of Artificial Sequence: Synthetic oligonucleotide
gggaaggacuuugggcgcc

SEQ ID NO: 2714098 - RNA, 19 nt, Artificial Sequence
  Description of Artificial Sequence: Synthetic oligonucleotide
cugguuugcaaggauguuu

SEQ ID NO: 2714099 - RNA, 19 nt, Artificial Sequence
  Description of Artificial Sequence: Synthetic oligonucleotide
cuuugggcgccauccuucu

SEQ ID NO: 2714100 - RNA, 19 nt, Artificial Sequence
  Description of Artificial Sequence: Synthetic oligonucleotide
agggcgaaguccaccccga

SEQ ID NO: 2714101 - RNA, 19 nt, Artificial Sequence
  Description of Artificial Sequence: Synthetic oligonucleotide
cugggaaaguucugcuggu

SEQ ID NO: 2714102 - RNA, 19 nt, Artificial Sequence
  Description of Artificial Sequence: Synthetic oligonucleotide
ggccuuuguugggaggggc

SEQ ID NO: 2714103 - RNA, 19 nt, Artificial Sequence
  Description of Artificial Sequence: Synthetic oligonucleotide
gcuaggaggacagcaggaa

SEQ ID NO: 2714104 - RNA, 19 nt, Artificial Sequence
  Description of Artificial Sequence: Synthetic oligonucleotide
ccacuaggaaccggguggc

SEQ ID NO: 2714105 - RNA, 19 nt, Artificial Sequence
  Description of Artificial Sequence: Synthetic oligonucleotide
cauccuucuucuggucaca

SEQ ID NO: 2714106 - RNA, 19 nt, Artificial Sequence
  Description of Artificial Sequence: Synthetic oligonucleotide
gcaggaauggggcugccau

SEQ ID NO: 2714107 - RNA, 19 nt, Artificial Sequence
  Description of Artificial Sequence: Synthetic oligonucleotide
guggccucgucgauguuua

SEQ ID NO: 2714108 - RNA, 19 nt, Artificial Sequence
  Description of Artificial Sequence: Synthetic oligonucleotide
cgaugucccacaguugcag

SEQ ID NO: 2714109 - RNA, 19 nt, Artificial Sequence
  Description of Artificial Sequence: Synthetic oligonucleotide
guaguacacucgggucaug

SEQ ID NO: 2714110 - RNA, 19 nt, Artificial Sequence
  Description of Artificial Sequence: Synthetic oligonucleotide
gggaaaguucugcugguuu

SEQ ID NO: 2714111 - RNA, 19 nt, Artificial Sequence
  Description of Artificial Sequence: Synthetic oligonucleotide
cgucgauguuuauauuauc

SEQ ID NO: 2714112 - RNA, 19 nt, Artificial Sequence
  Description of Artificial Sequence: Synthetic oligonucleotide
cucgggucauguucccaaa

SEQ ID NO: 2714113 - RNA, 19 nt, Artificial Sequence
  Description of Artificial Sequence: Synthetic oligonucleotide
cacuagcguccugcugucc

SEQ ID NO: 2714114 - RNA, 19 nt, Artificial Sequence
  Description of Artificial Sequence: Synthetic oligonucleotide
gccucaaauguggaaccuc

SEQ ID NO: 2714115 - RNA, 19 nt, Artificial Sequence
  Description of Artificial Sequence: Synthetic oligonucleotide
gaaccucuugagagaucaa

SEQ ID NO: 2714116 - RNA, 19 nt, Artificial Sequence
  Description of Artificial Sequence: Synthetic oligonucleotide
augcuccaagagcuuccuu

SEQ ID NO: 2714117 - RNA, 19 nt, Artificial Sequence
  Description of Artificial Sequence: Synthetic oligonucleotide
caccccgaucggguggccc

SEQ ID NO: 2714118 - RNA, 19 nt, Artificial Sequence
  Description of Artificial Sequence: Synthetic oligonucleotide
ccuuuguugggaggggcuc

SEQ ID NO: 2714119 - RNA, 19 nt, Artificial Sequence
  Description of Artificial Sequence: Synthetic oligonucleotide
cgcuugaugaugcuggucu

SEQ ID NO: 2714120 - RNA, 19 nt, Artificial Sequence
  Description of Artificial Sequence: Synthetic oligonucleotide
ccauuggggagauggaccu

SEQ ID NO: 2714121 - RNA, 19 nt, Artificial Sequence
  Description of Artificial Sequence: Synthetic oligonucleotide
gcacauagcgcuugaugau

SEQ ID NO: 2714122 - RNA, 19 nt, Artificial Sequence
  Description of Artificial Sequence: Synthetic oligonucleotide
ggcucaucagucaguuuaa

SEQ ID NO: 2714123 - RNA, 19 nt, Artificial Sequence
  Description of Artificial Sequence: Synthetic oligonucleotide
cuccaagagcuuccuugua

SEQ ID NO: 2714124 - RNA, 19 nt, Artificial Sequence
  Description of Artificial Sequence: Synthetic oligonucleotide
gcacuagcguccugcuguc

SEQ ID NO: 2714125 - RNA, 19 nt, Artificial Sequence
  Description of Artificial Sequence: Synthetic oligonucleotide
aucggguggcccgguaguu

SEQ ID NO: 2714126 - RNA, 19 nt, Artificial Sequence
  Description of Artificial Sequence: Synthetic oligonucleotide
cgauguuuauauuauccuu

SEQ ID NO: 2714127 - RNA, 19 nt, Artificial Sequence
  Description of Artificial Sequence: Synthetic oligonucleotide
cgaucggguggcccgguag

SEQ ID NO: 2714128 - RNA, 19 nt, Artificial Sequence
  Description of Artificial Sequence: Synthetic oligonucleotide
cgcacuagcguccugcugu

SEQ ID NO: 2714129 - RNA, 19 nt, Artificial Sequence
  Description of Artificial Sequence: Synthetic oligonucleotide
uggccucgucgauguuuau

SEQ ID NO: 2714130 - RNA, 19 nt, Artificial Sequence
  Description of Artificial Sequence: Synthetic oligonucleotide
ccauggucuuuacagaauu

SEQ ID NO: 2714131 - RNA, 19 nt, Artificial Sequence
  Description of Artificial Sequence: Synthetic oligonucleotide
ccuugagggcgaaguccac

SEQ ID NO: 2714132 - RNA, 19 nt, Artificial Sequence
  Description of Artificial Sequence: Synthetic oligonucleotide
gcgcacuagcguccugcug

SEQ ID NO: 2714133 - RNA, 19 nt, Artificial Sequence
  Description of Artificial Sequence: Synthetic oligonucleotide
cacucgggucauguuccca

SEQ ID NO: 2714134 - RNA, 19 nt, Artificial Sequence
  Description of Artificial Sequence: Synthetic oligonucleotide
cugucccaguugaggaccu

SEQ ID NO: 2714135 - RNA, 19 nt, Artificial Sequence
  Description of Artificial Sequence: Synthetic oligonucleotide
guccaucugggaaggacuu

SEQ ID NO: 2714136 - RNA, 19 nt, Artificial Sequence
  Description of Artificial Sequence: Synthetic oligonucleotide
ggaaccggguggccucguc

SEQ ID NO: 2714137 - RNA, 19 nt, Artificial Sequence
  Description of Artificial Sequence: Synthetic oligonucleotide
ggacuuugggcgccauccu

SEQ ID NO: 2714138 - RNA, 19 nt, Artificial Sequence
  Description of Artificial Sequence: Synthetic oligonucleotide
cccgcgaugucccacaguu

SEQ ID NO: 2714139 - RNA, 19 nt, Artificial Sequence
  Description of Artificial Sequence: Synthetic oligonucleotide
ccgcgaugucccacaguug

SEQ ID NO: 2714140 - RNA, 19 nt, Artificial Sequence
  Description of Artificial Sequence: Synthetic oligonucleotide
cguuuucuucacugggaaa

SEQ ID NO: 2714141 - RNA, 19 nt, Artificial Sequence
  Description of Artificial Sequence: Synthetic oligonucleotide
ggccucgucgauguuuaua

SEQ ID NO: 2714142 - RNA, 19 nt, Artificial Sequence
  Description of Artificial Sequence: Synthetic oligonucleotide
gcgaugucccacaguugca

SEQ ID NO: 2714143 - RNA, 19 nt, Artificial Sequence
  Description of Artificial Sequence: Synthetic oligonucleotide
caggcgcacuagcguccug

SEQ ID NO: 2714144 - RNA, 19 nt, Artificial Sequence
  Description of Artificial Sequence: Synthetic oligonucleotide
ccaaugaagccauggucuu

SEQ ID NO: 2714145 - RNA, 19 nt, Artificial Sequence
  Description of Artificial Sequence: Synthetic oligonucleotide
caggaauggggcugccauu

SEQ ID NO: 2714146 - RNA, 19 nt, Artificial Sequence
  Description of Artificial Sequence: Synthetic oligonucleotide
caaugaagccauggucuuu

SEQ ID NO: 2714147 - RNA, 19 nt, Artificial Sequence
  Description of Artificial Sequence: Synthetic oligonucleotide
aggaaccggguggccucgu

SEQ ID NO: 2714148 - RNA, 19 nt, Artificial Sequence
  Description of Artificial Sequence: Synthetic oligonucleotide
acgcaggaccaaggagaaa

SEQ ID NO: 2714149 - RNA, 19 nt, Artificial Sequence
  Description of Artificial Sequence: Synthetic oligonucleotide
ccuuacuauccagaucacu

SEQ ID NO: 2714150 - RNA, 19 nt, Artificial Sequence
  Description of Artificial Sequence: Synthetic oligonucleotide
gcuugaugaugcuggucuu

SEQ ID NO: 2714151 - RNA, 19 nt, Artificial Sequence
  Description of Artificial Sequence: Synthetic oligonucleotide
gguggccucgucgauguuu

SEQ ID NO: 2714152 - RNA, 19 nt, Artificial Sequence
  Description of Artificial Sequence: Synthetic oligonucleotide
gcgcuugaugaugcugguc

SEQ ID NO: 2714153 - RNA, 19 nt, Artificial Sequence
  Description of Artificial Sequence: Synthetic oligonucleotide
gccccgcgaugucccacag

SEQ ID NO: 2714154 - RNA, 19 nt, Artificial Sequence
  Description of Artificial Sequence: Synthetic oligonucleotide
gcuccugccccgcgauguc

SEQ ID NO: 2714155 - RNA, 19 nt, Artificial Sequence
  Description of Artificial Sequence: Synthetic oligonucleotide
ggcagagguuucaaaccau

SEQ ID NO: 2714156 - RNA, 19 nt, Artificial Sequence
  Description of Artificial Sequence: Synthetic oligonucleotide
ggcgcacuagcguccugcu

SEQ ID NO: 2714157 - RNA, 19 nt, Artificial Sequence
  Description of Artificial Sequence: Synthetic oligonucleotide
cccgguaguucugggagaa

SEQ ID NO: 2714158 - RNA, 19 nt, Artificial Sequence
  Description of Artificial Sequence: Synthetic oligonucleotide
ccggguggccucgucgaug

SEQ ID NO: 2714159 - RNA, 19 nt, Artificial Sequence
  Description of Artificial Sequence: Synthetic oligonucleotide
gccuuuguugggaggggcu

SEQ ID NO: 2714160 - RNA, 19 nt, Artificial Sequence
  Description of Artificial Sequence: Synthetic oligonucleotide
ccccgaucggguggcccgg

SEQ ID NO: 2714161 - RNA, 19 nt, Artificial Sequence
  Description of Artificial Sequence: Synthetic oligonucleotide
gcugguuugcaaggauguu

SEQ ID NO: 2714162 - RNA, 19 nt, Artificial Sequence
  Description of Artificial Sequence: Synthetic oligonucleotide
cauuggggagauggaccuu

SEQ ID NO: 2714163 - RNA, 19 nt, Artificial Sequence
  Description of Artificial Sequence: Synthetic oligonucleotide
gcuggugcacauagcgcuu

SEQ ID NO: 2714164 - RNA, 19 nt, Artificial Sequence
  Description of Artificial Sequence: Synthetic oligonucleotide
gcaggcgcacuagcguccu

SEQ ID NO: 2714165 - RNA, 19 nt, Artificial Sequence
  Description of Artificial Sequence: Synthetic oligonucleotide
ccucgucgauguuuauauu

SEQ ID NO: 2714166 - RNA, 19 nt, Artificial Sequence
  Description of Artificial Sequence: Synthetic oligonucleotide
ggcugccauuggggagaug

SEQ ID NO: 2714167 - RNA, 19 nt, Artificial Sequence
  Description of Artificial Sequence: Synthetic oligonucleotide
ccaccccgaucggguggcc

SEQ ID NO: 2714168 - RNA, 19 nt, Artificial Sequence
  Description of Artificial Sequence: Synthetic oligonucleotide
ccgaucggguggcccggua

SEQ ID NO: 2714169 - RNA, 19 nt, Artificial Sequence
  Description of Artificial Sequence: Synthetic oligonucleotide
ccccgcgaugucccacagu

SEQ ID NO: 2714170 - RNA, 19 nt, Artificial Sequence
  Description of Artificial Sequence: Synthetic oligonucleotide
gcacugggaccuggccuuu

SEQ ID NO: 2714171 - RNA, 19 nt, Artificial Sequence
  Description of Artificial Sequence: Synthetic oligonucleotide
ggguggccucgucgauguu

SEQ ID NO: 2714172 - RNA, 19 nt, Artificial Sequence
  Description of Artificial Sequence: Synthetic oligonucleotide
cccgaucggguggcccggu

SEQ ID NO: 2714173 - RNA, 19 nt, Artificial Sequence
  Description of Artificial Sequence: Synthetic oligonucleotide
agaaucuacaucuagaccc

SEQ ID NO: 2714174 - RNA, 19 nt, Artificial Sequence
  Description of Artificial Sequence: Synthetic oligonucleotide
auaugcauacccuugaugg

SEQ ID NO: 2714175 - RNA, 19 nt, Artificial Sequence
  Description of Artificial Sequence: Synthetic oligonucleotide
ucauguauggguuaauccg

SEQ ID NO: 2714176 - RNA, 19 nt, Artificial Sequence
  Description of Artificial Sequence: Synthetic oligonucleotide
acuugcaugauuuuguagg

SEQ ID NO: 2714177 - RNA, 19 nt, Artificial Sequence
  Description of Artificial Sequence: Synthetic oligonucleotide
aucugcauuuauuuuaugc

SEQ ID NO: 2714178 - RNA, 19 nt, Artificial Sequence
  Description of Artificial Sequence: Synthetic oligonucleotide
acaucuuucagguauuugg

SEQ ID NO: 2714179 - RNA, 19 nt, Artificial Sequence
  Description of Artificial Sequence: Synthetic oligonucleotide
uacaucuagacccuuaagc

SEQ ID NO: 2714180 - RNA, 19 nt, Artificial Sequence
  Description of Artificial Sequence: Synthetic oligonucleotide
uauucuuaaagugaacccg

SEQ ID NO: 2714181 - RNA, 19 nt, Artificial Sequence
  Description of Artificial Sequence: Synthetic oligonucleotide
ucuuucagguauuuggugg

SEQ ID NO: 2714182 - RNA, 19 nt, Artificial Sequence
  Description of Artificial Sequence: Synthetic oligonucleotide
uuuaugcugaauuuauucc

SEQ ID NO: 2714183 - RNA, 19 nt, Artificial Sequence
  Description of Artificial Sequence: Synthetic oligonucleotide
cuuuggaacaaucuguucc

SEQ ID NO: 2714184 - RNA, 19 nt, Artificial Sequence
  Description of Artificial Sequence: Synthetic oligonucleotide
uuuucggauaugcauaccc

SEQ ID NO: 2714185 - RNA, 19 nt, Artificial Sequence
  Description of Artificial Sequence: Synthetic oligonucleotide
auuuuguaggguuuucugg

SEQ ID NO: 2714186 - RNA, 19 nt, Artificial Sequence
  Description of Artificial Sequence: Synthetic oligonucleotide
uuaugcugaauuuauuccc

SEQ ID NO: 2714187 - RNA, 19 nt, Artificial Sequence
  Description of Artificial Sequence: Synthetic oligonucleotide
ugugacaucuuucagguau

SEQ ID NO: 2714188 - RNA, 19 nt, Artificial Sequence
  Description of Artificial Sequence: Synthetic oligonucleotide
uuuaucugcauuuauuuua

SEQ ID NO: 2714189 - RNA, 19 nt, Artificial Sequence
  Description of Artificial Sequence: Synthetic oligonucleotide
agaguagcgaaccaucuuc

SEQ ID NO: 2714190 - RNA, 19 nt, Artificial Sequence
  Description of Artificial Sequence: Synthetic oligonucleotide
uagcgaaccaucuucacag

SEQ ID NO: 2714191 - RNA, 19 nt, Artificial Sequence
  Description of Artificial Sequence: Synthetic oligonucleotide
uucacggguauucuuaaag

SEQ ID NO: 2714192 - RNA, 19 nt, Artificial Sequence
  Description of Artificial Sequence: Synthetic oligonucleotide
caaugugacaucuuucagg

SEQ ID NO: 2714193 - RNA, 19 nt, Artificial Sequence
  Description of Artificial Sequence: Synthetic oligonucleotide
uuaaagugaacccggagau

SEQ ID NO: 2714194 - RNA, 19 nt, Artificial Sequence
  Description of Artificial Sequence: Synthetic oligonucleotide
gaucauuucgauguggcag

SEQ ID NO: 2714195 - RNA, 19 nt, Artificial Sequence
  Description of Artificial Sequence: Synthetic oligonucleotide
cacagguuaucucaggucg

SEQ ID NO: 2714196 - RNA, 19 nt, Artificial Sequence
  Description of Artificial Sequence: Synthetic oligonucleotide
agcucuguaaguucggcgg

SEQ ID NO: 2714197 - RNA, 19 nt, Artificial Sequence
  Description of Artificial Sequence: Synthetic oligonucleotide
cucagcauuacucucugcg

SEQ ID NO: 2714198 - RNA, 19 nt, Artificial Sequence
  Description of Artificial Sequence: Synthetic oligonucleotide
uuccgugaggaucauuucg

SEQ ID NO: 2714199 - RNA, 19 nt, Artificial Sequence
  Description of Artificial Sequence: Synthetic oligonucleotide
acaucuagacccuuaagcu

SEQ ID NO: 2714200 - RNA, 19 nt, Artificial Sequence
  Description of Artificial Sequence: Synthetic oligonucleotide
aucauuucgauguggcagg

SEQ ID NO: 2714201 - RNA, 19 nt, Artificial Sequence
  Description of Artificial Sequence: Synthetic oligonucleotide
gaacccggagauuugagcc

SEQ ID NO: 2714202 - RNA, 19 nt, Artificial Sequence
  Description of Artificial Sequence: Synthetic oligonucleotide
guauucuuaaagugaaccc

SEQ ID NO: 2714203 - RNA, 19 nt, Artificial Sequence
  Description of Artificial Sequence: Synthetic oligonucleotide
gauuuuguaggguuuucug

SEQ ID NO: 2714204 - RNA, 19 nt, Artificial Sequence
  Description of Artificial Sequence: Synthetic oligonucleotide
uuaagcucagcauuacucu

SEQ ID NO: 2714205 - RNA, 19 nt, Artificial Sequence
  Description of Artificial Sequence: Synthetic oligonucleotide
uguucaaugaccagagaau

SEQ ID NO: 2714206 - RNA, 19 nt, Artificial Sequence
  Description of Artificial Sequence: Synthetic oligonucleotide
uguaggguuuucugggucg

SEQ ID NO: 2714207 - RNA, 19 nt, Artificial Sequence
  Description of Artificial Sequence: Synthetic oligonucleotide
uauuugguggcuuuucgga

SEQ ID NO: 2714208 - RNA, 19 nt, Artificial Sequence
  Description of Artificial Sequence: Synthetic oligonucleotide
cauuguaucgccggaaugg

SEQ ID NO: 2714209 - RNA, 19 nt, Artificial Sequence
  Description of Artificial Sequence: Synthetic oligonucleotide
uugacuugcaugauuuugu

SEQ ID NO: 2714210 - RNA, 19 nt, Artificial Sequence
  Description of Artificial Sequence: Synthetic oligonucleotide
uuuuccgugaggaucauuu

SEQ ID NO: 2714211 - RNA, 19 nt, Artificial Sequence
  Description of Artificial Sequence: Synthetic oligonucleotide
cucauguauggguuaaucc

SEQ ID NO: 2714212 - RNA, 19 nt, Artificial Sequence
  Description of Artificial Sequence: Synthetic oligonucleotide
cuugcaugauuuuguaggg

SEQ ID NO: 2714213 - RNA, 19 nt, Artificial Sequence
  Description of Artificial Sequence: Synthetic oligonucleotide
ucuuaaagugaacccggag

SEQ ID NO: 2714214 - RNA, 19 nt, Artificial Sequence
  Description of Artificial Sequence: Synthetic oligonucleotide
uuuggaacaaucuguuccu

SEQ ID NO: 2714215 - RNA, 19 nt, Artificial Sequence
  Description of Artificial Sequence: Synthetic oligonucleotide
ucaaugugacaucuuucag

SEQ ID NO: 2714216 - RNA, 19 nt, Artificial Sequence
  Description of Artificial Sequence: Synthetic oligonucleotide
uguaucgccggaauggcac

SEQ ID NO: 2714217 - RNA, 19 nt, Artificial Sequence
  Description of Artificial Sequence: Synthetic oligonucleotide
acuuuaucugcauuuauuu

SEQ ID NO: 2714218 - RNA, 19 nt, Artificial Sequence
  Description of Artificial Sequence: Synthetic oligonucleotide
gauaugcauacccuugaug

SEQ ID NO: 2714219 - RNA, 19 nt, Artificial Sequence
  Description of Artificial Sequence: Synthetic oligonucleotide
acacauugcuucuucaaug

SEQ ID NO: 2714220 - RNA, 19 nt, Artificial Sequence
  Description of Artificial Sequence: Synthetic oligonucleotide
guauggguuaauccggccg

SEQ ID NO: 2714221 - RNA, 19 nt, Artificial Sequence
  Description of Artificial Sequence: Synthetic oligonucleotide
uuucuucugugcaaccucc

SEQ ID NO: 2714222 - RNA, 19 nt, Artificial Sequence
  Description of Artificial Sequence: Synthetic oligonucleotide
uggauguguucaaugacca

SEQ ID NO: 2714223 - RNA, 19 nt, Artificial Sequence
  Description of Artificial Sequence: Synthetic oligonucleotide
guuuucugggucgagagag

SEQ ID NO: 2714224 - RNA, 19 nt, Artificial Sequence
  Description of Artificial Sequence: Synthetic oligonucleotide
ucuucaaugugacaucuuu

SEQ ID NO: 2714225 - RNA, 19 nt, Artificial Sequence
  Description of Artificial Sequence: Synthetic oligonucleotide
gagaaucuacaucuagacc

SEQ ID NO: 2714226 - RNA, 19 nt, Artificial Sequence
  Description of Artificial Sequence: Synthetic oligonucleotide
augcauacccuugauggcc

SEQ ID NO: 2714227 - RNA, 19 nt, Artificial Sequence
  Description of Artificial Sequence: Synthetic oligonucleotide
cugaauuuauucccgugcc

SEQ ID NO: 2714228 - RNA, 19 nt, Artificial Sequence
  Description of Artificial Sequence: Synthetic oligonucleotide
auucuuaaagugaacccgg

SEQ ID NO: 2714229 - RNA, 19 nt, Artificial Sequence
  Description of Artificial Sequence: Synthetic oligonucleotide
cuuaaagugaacccggaga

SEQ ID NO: 2714230 - RNA, 19 nt, Artificial Sequence
  Description of Artificial Sequence: Synthetic oligonucleotide
uccuuuuccgugaggauca

SEQ ID NO: 2714231 - RNA, 19 nt, Artificial Sequence
  Description of Artificial Sequence: Synthetic oligonucleotide
ugcuuuguucaccuggaug

SEQ ID NO: 2714232 - RNA, 19 nt, Artificial Sequence
  Description of Artificial Sequence: Synthetic oligonucleotide
cugcauuuauuuuaugcug

SEQ ID NO: 2714233 - RNA, 19 nt, Artificial Sequence
  Description of Artificial Sequence: Synthetic oligonucleotide
gguauucuuaaagugaacc

SEQ ID NO: 2714234 - RNA, 19 nt, Artificial Sequence
  Description of Artificial Sequence: Synthetic oligonucleotide
ucuucacagguuaucucag

SEQ ID NO: 2714235 - RNA, 19 nt, Artificial Sequence
  Description of Artificial Sequence: Synthetic oligonucleotide
cuuucagguauuugguggc

SEQ ID NO: 2714236 - RNA, 19 nt, Artificial Sequence
  Description of Artificial Sequence: Synthetic oligonucleotide
uuucacuuuaucugcauuu

SEQ ID NO: 2714237 - RNA, 19 nt, Artificial Sequence
  Description of Artificial Sequence: Synthetic oligonucleotide
aggugcuuuguucaccugg

SEQ ID NO: 2714238 - RNA, 19 nt, Artificial Sequence
  Description of Artificial Sequence: Synthetic oligonucleotide
uauggguuaauccggccgu

SEQ ID NO: 2714239 - RNA, 19 nt, Artificial Sequence
  Description of Artificial Sequence: Synthetic oligonucleotide
uucaaugaccagagaaucu

SEQ ID NO: 2714240 - RNA, 19 nt, Artificial Sequence
  Description of Artificial Sequence: Synthetic oligonucleotide
uccuccauuguaucgccgg

SEQ ID NO: 2714241 - RNA, 19 nt, Artificial Sequence
  Description of Artificial Sequence: Synthetic oligonucleotide
uucacagguuaucucaggu

SEQ ID NO: 2714242 - RNA, 19 nt, Artificial Sequence
  Description of Artificial Sequence: Synthetic oligonucleotide
ucggauaugcauacccuug

SEQ ID NO: 2714243 - RNA, 19 nt, Artificial Sequence
  Description of Artificial Sequence: Synthetic oligonucleotide
gauguguucaaugaccaga

SEQ ID NO: 2714244 - RNA, 19 nt, Artificial Sequence
  Description of Artificial Sequence: Synthetic oligonucleotide
auuguaucgccggaauggc

SEQ ID NO: 2714245 - RNA, 19 nt, Artificial Sequence
  Description of Artificial Sequence: Synthetic oligonucleotide
ugaauuuauucccgugcca

SEQ ID NO: 2714246 - RNA, 19 nt, Artificial Sequence
  Description of Artificial Sequence: Synthetic oligonucleotide
gaccagagaaucuacaucu

SEQ ID NO: 2714247 - RNA, 19 nt, Artificial Sequence
  Description of Artificial Sequence: Synthetic oligonucleotide
ucuacaucuagacccuuaa

SEQ ID NO: 2714248 - RNA, 19 nt, Artificial Sequence
  Description of Artificial Sequence: Synthetic oligonucleotide
aggaucauuucgauguggc

SEQ ID NO: 2714249 - RNA, 19 nt, Artificial Sequence
  Description of Artificial Sequence: Synthetic oligonucleotide
aucuuaggugcuuuguuca

SEQ ID NO: 2714250 - RNA, 19 nt, Artificial Sequence
  Description of Artificial Sequence: Synthetic oligonucleotide
uagacccuuaagcucagca

SEQ ID NO: 2714251 - RNA, 19 nt, Artificial Sequence
  Description of Artificial Sequence: Synthetic oligonucleotide
uaugcauacccuugauggc

SEQ ID NO: 2714252 - RNA, 19 nt, Artificial Sequence
  Description of Artificial Sequence: Synthetic oligonucleotide
uuucggauaugcauacccu

SEQ ID NO: 2714253 - RNA, 19 nt, Artificial Sequence
  Description of Artificial Sequence: Synthetic oligonucleotide
agauuugagccucuugacu

SEQ ID NO: 2714254 - RNA, 19 nt, Artificial Sequence
  Description of Artificial Sequence: Synthetic oligonucleotide
uuaggugcuuuguucaccu

SEQ ID NO: 2714255 - RNA, 19 nt, Artificial Sequence
  Description of Artificial Sequence: Synthetic oligonucleotide
gaauggcacacauugcuuc

SEQ ID NO: 2714256 - RNA, 19 nt, Artificial Sequence
  Description of Artificial Sequence: Synthetic oligonucleotide
uccgugaggaucauuucga

SEQ ID NO: 2714257 - RNA, 19 nt, Artificial Sequence
  Description of Artificial Sequence: Synthetic oligonucleotide
ucugggucgagagaguagc

SEQ ID NO: 2714258 - RNA, 19 nt, Artificial Sequence
  Description of Artificial Sequence: Synthetic oligonucleotide
ugaacccggagauuugagc

SEQ ID NO: 2714259 - RNA, 19 nt, Artificial Sequence
  Description of Artificial Sequence: Synthetic oligonucleotide
uuauucccgugccauaagu

SEQ ID NO: 2714260 - RNA, 19 nt, Artificial Sequence
  Description of Artificial Sequence: Synthetic oligonucleotide
uuuauucccgugccauaag

SEQ ID NO: 2714261 - RNA, 19 nt, Artificial Sequence
  Description of Artificial Sequence: Synthetic oligonucleotide
ugugcaaccuccucuucug

SEQ ID NO: 2714262 - RNA, 19 nt, Artificial Sequence
  Description of Artificial Sequence: Synthetic oligonucleotide
uguccagccccacuguuug

SEQ ID NO: 2714263 - RNA, 19 nt, Artificial Sequence
  Description of Artificial Sequence: Synthetic oligonucleotide
aguagcgaaccaucuucac

SEQ ID NO: 2714264 - RNA, 19 nt, Artificial Sequence
  Description of Artificial Sequence: Synthetic oligonucleotide
ucacggguauucuuaaagu

SEQ ID NO: 2714265 - RNA, 19 nt, Artificial Sequence
  Description of Artificial Sequence: Synthetic oligonucleotide
acuccuccauuguaucgcc

SEQ ID NO: 2714266 - RNA, 19 nt, Artificial Sequence
  Description of Artificial Sequence: Synthetic oligonucleotide
uuuucggccaccgacccug

SEQ ID NO: 2714267 - RNA, 19 nt, Artificial Sequence
  Description of Artificial Sequence: Synthetic oligonucleotide
gagcucuguaaguucggcg

SEQ ID NO: 2714268 - RNA, 19 nt, Artificial Sequence
  Description of Artificial Sequence: Synthetic oligonucleotide
guguucaaugaccagagaa

SEQ ID NO: 2714269 - RNA, 19 nt, Artificial Sequence
  Description of Artificial Sequence: Synthetic oligonucleotide
gagauuugagccucuugac

SEQ ID NO: 2714270 - RNA, 19 nt, Artificial Sequence
  Description of Artificial Sequence: Synthetic oligonucleotide
cacggguauucuuaaagug

SEQ ID NO: 2714271 - RNA, 19 nt, Artificial Sequence
  Description of Artificial Sequence: Synthetic oligonucleotide
cuggcuuuggaacaaucug

SEQ ID NO: 2714272 - RNA, 19 nt, Artificial Sequence
  Description of Artificial Sequence: Synthetic oligonucleotide
ucaaugaccagagaaucua

SEQ ID NO: 2714273 - RNA, 19 nt, Artificial Sequence
  Description of Artificial Sequence: Synthetic oligonucleotide
caucuuaggugcuuuguuc

SEQ ID NO: 2714274 - RNA, 19 nt, Artificial Sequence
  Description of Artificial Sequence: Synthetic oligonucleotide
aucuuucagguauuuggug

SEQ ID NO: 2714275 - RNA, 19 nt, Artificial Sequence
  Description of Artificial Sequence: Synthetic oligonucleotide
cacuguuuggccugggcgc

SEQ ID NO: 2714276 - RNA, 19 nt, Artificial Sequence
  Description of Artificial Sequence: Synthetic oligonucleotide
cuugacuugcaugauuuug

SEQ ID NO: 2714277 - RNA, 19 nt, Artificial Sequence
  Description of Artificial Sequence: Synthetic oligonucleotide
ggagauuugagccucuuga

SEQ ID NO: 2714278 - RNA, 19 nt, Artificial Sequence
  Description of Artificial Sequence: Synthetic oligonucleotide
ucagcauuacucucugcgu

SEQ ID NO: 2714279 - RNA, 19 nt, Artificial Sequence
  Description of Artificial Sequence: Synthetic oligonucleotide
gcugaauuuauucccgugc

SEQ ID NO: 2714280 - RNA, 19 nt, Artificial Sequence
  Description of Artificial Sequence: Synthetic oligonucleotide
uucuuaaagugaacccgga

SEQ ID NO: 2714281 - RNA, 19 nt, Artificial Sequence
  Description of Artificial Sequence: Synthetic oligonucleotide
gccggaauggcacacauug

SEQ ID NO: 2714282 - RNA, 19 nt, Artificial Sequence
  Description of Artificial Sequence: Synthetic oligonucleotide
uggcuuuucggauaugcau

SEQ ID NO: 2714283 - RNA, 19 nt, Artificial Sequence
  Description of Artificial Sequence: Synthetic oligonucleotide
caucuagacccuuaagcuc

SEQ ID NO: 2714284 - RNA, 19 nt, Artificial Sequence
  Description of Artificial Sequence: Synthetic oligonucleotide
aauuuauucccgugccaua

SEQ ID NO: 2714285 - RNA, 19 nt, Artificial Sequence
  Description of Artificial Sequence: Synthetic oligonucleotide
auuugagccucuugacuug

SEQ ID NO: 2714286 - RNA, 19 nt, Artificial Sequence
  Description of Artificial Sequence: Synthetic oligonucleotide
ugcugaauuuauucccgug

SEQ ID NO: 2714287 - RNA, 19 nt, Artificial Sequence
  Description of Artificial Sequence: Synthetic oligonucleotide
ugauuuuguaggguuuucu

SEQ ID NO: 2714288 - RNA, 19 nt, Artificial Sequence
  Description of Artificial Sequence: Synthetic oligonucleotide
auguauggguuaauccggc

SEQ ID NO: 2714289 - RNA, 19 nt, Artificial Sequence
  Description of Artificial Sequence: Synthetic oligonucleotide
auguguucaaugaccagag

SEQ ID NO: 2714290 - RNA, 19 nt, Artificial Sequence
  Description of Artificial Sequence: Synthetic oligonucleotide
uguauggguuaauccggcc

SEQ ID NO: 2714291 - RNA, 19 nt, Artificial Sequence
  Description of Artificial Sequence: Synthetic oligonucleotide
guucaaugaccagagaauc

SEQ ID NO: 2714292 - RNA, 19 nt, Artificial Sequence
  Description of Artificial Sequence: Synthetic oligonucleotide
cuucacagguuaucucagg

SEQ ID NO: 2714293 - RNA, 19 nt, Artificial Sequence
  Description of Artificial Sequence: Synthetic oligonucleotide
gaggaucauuucgaugugg

SEQ ID NO: 2714294 - RNA, 19 nt, Artificial Sequence
  Description of Artificial Sequence: Synthetic oligonucleotide
gacuccuccauuguaucgc

SEQ ID NO: 2714295 - RNA, 19 nt, Artificial Sequence
  Description of Artificial Sequence: Synthetic oligonucleotide
aacccggagauuugagccu

SEQ ID NO: 2714296 - RNA, 19 nt, Artificial Sequence
  Description of Artificial Sequence: Synthetic oligonucleotide
gauuugagccucuugacuu

SEQ ID NO: 2714297 - RNA, 19 nt, Artificial Sequence
  Description of Artificial Sequence: Synthetic oligonucleotide
cagagaaucuacaucuaga

SEQ ID NO: 2714298 - RNA, 19 nt, Artificial Sequence
  Description of Artificial Sequence: Synthetic oligonucleotide
uucugggucgagagaguag

SEQ ID NO: 2714299 - RNA, 19 nt, Artificial Sequence
  Description of Artificial Sequence: Synthetic oligonucleotide
uuccuuuuccgugaggauc

SEQ ID NO: 2714300 - RNA, 19 nt, Artificial Sequence
  Description of Artificial Sequence: Synthetic oligonucleotide
gaaccaucuucacagguua

SEQ ID NO: 2714301 - RNA, 19 nt, Artificial Sequence
  Description of Artificial Sequence: Synthetic oligonucleotide
ucacagguuaucucagguc

SEQ ID NO: 2714302 - RNA, 19 nt, Artificial Sequence
  Description of Artificial Sequence: Synthetic oligonucleotide
ugcaaccuccucuucuggc

SEQ ID NO: 2714303 - RNA, 19 nt, Artificial Sequence
  Description of Artificial Sequence: Synthetic oligonucleotide
ucacuuuaucugcauuuau

SEQ ID NO: 2714304 - RNA, 19 nt, Artificial Sequence
  Description of Artificial Sequence: Synthetic oligonucleotide
uuugguggcuuuucggaua

SEQ ID NO: 2714305 - RNA, 19 nt, Artificial Sequence
  Description of Artificial Sequence: Synthetic oligonucleotide
gagccucuugacuugcaug

SEQ ID NO: 2714306 - RNA, 19 nt, Artificial Sequence
  Description of Artificial Sequence: Synthetic oligonucleotide
uccauuguaucgccggaau

SEQ ID NO: 2714307 - RNA, 19 nt, Artificial Sequence
  Description of Artificial Sequence: Synthetic oligonucleotide
guuaucucaggucgcuuac

SEQ ID NO: 2714308 - RNA, 19 nt, Artificial Sequence
  Description of Artificial Sequence: Synthetic oligonucleotide
auuuauucccgugccauaa

SEQ ID NO: 2714309 - RNA, 19 nt, Artificial Sequence
  Description of Artificial Sequence: Synthetic oligonucleotide
auucccgugccauaaguuu

SEQ ID NO: 2714310 - RNA, 19 nt, Artificial Sequence
  Description of Artificial Sequence: Synthetic oligonucleotide
ucuuaggugcuuuguucac

SEQ ID NO: 2714311 - RNA, 19 nt, Artificial Sequence
  Description of Artificial Sequence: Synthetic oligonucleotide
caaugaccagagaaucuac

SEQ ID NO: 2714312 - RNA, 19 nt, Artificial Sequence
  Description of Artificial Sequence: Synthetic oligonucleotide
acagguuaucucaggucgc

SEQ ID NO: 2714313 - RNA, 19 nt, Artificial Sequence
  Description of Artificial Sequence: Synthetic oligonucleotide
ugcauacccuugauggccu

SEQ ID NO: 2714314 - RNA, 19 nt, Artificial Sequence
  Description of Artificial Sequence: Synthetic oligonucleotide
uucggauaugcauacccuu

SEQ ID NO: 2714315 - RNA, 19 nt, Artificial Sequence
  Description of Artificial Sequence: Synthetic oligonucleotide
auuugguggcuuuucggau

SEQ ID NO: 2714316 - RNA, 19 nt, Artificial Sequence
  Description of Artificial Sequence: Synthetic oligonucleotide
cuuaggugcuuuguucacc

SEQ ID NO: 2714317 - RNA, 19 nt, Artificial Sequence
  Description of Artificial Sequence: Synthetic oligonucleotide
guagcgaaccaucuucaca

SEQ ID NO: 2714318 - RNA, 19 nt, Artificial Sequence
  Description of Artificial Sequence: Synthetic oligonucleotide
acggguauucuuaaaguga

SEQ ID NO: 2714319 - RNA, 19 nt, Artificial Sequence
  Description of Artificial Sequence: Synthetic oligonucleotide
uauucccgugccauaaguu

SEQ ID NO: 2714320 - RNA, 19 nt, Artificial Sequence
  Description of Artificial Sequence: Synthetic oligonucleotide
ucuagacccuuaagcucag

SEQ ID NO: 2714321 - RNA, 19 nt, Artificial Sequence
  Description of Artificial Sequence: Synthetic oligonucleotide
gucgagagaguagcgaacc

SEQ ID NO: 2714322 - RNA, 19 nt, Artificial Sequence
  Description of Artificial Sequence: Synthetic oligonucleotide
agacccuuaagcucagcau

SEQ ID NO: 2714323 - RNA, 19 nt, Artificial Sequence
  Description of Artificial Sequence: Synthetic oligonucleotide
uuuucugggucgagagagu

SEQ ID NO: 2714324 - RNA, 19 nt, Artificial Sequence
  Description of Artificial Sequence: Synthetic oligonucleotide
ucauuucgauguggcaggg

SEQ ID NO: 2714325 - RNA, 19 nt, Artificial Sequence
  Description of Artificial Sequence: Synthetic oligonucleotide
gagagaguagcgaaccauc

SEQ ID NO: 2714326 - RNA, 19 nt, Artificial Sequence
  Description of Artificial Sequence: Synthetic oligonucleotide
ggccugggcaguuucacgg

SEQ ID NO: 2714327 - RNA, 19 nt, Artificial Sequence
  Description of Artificial Sequence: Synthetic oligonucleotide
uuguaucgccggaauggca

SEQ ID NO: 2714328 - RNA, 19 nt, Artificial Sequence
  Description of Artificial Sequence: Synthetic oligonucleotide
cuacaucuagacccuuaag

SEQ ID NO: 2714329 - RNA, 19 nt, Artificial Sequence
  Description of Artificial Sequence: Synthetic oligonucleotide
uucacuuuaucugcauuua

SEQ ID NO: 2714330 - RNA, 19 nt, Artificial Sequence
  Description of Artificial Sequence: Synthetic oligonucleotide
ucggcggcgcaucuuaggu

SEQ ID NO: 2714331 - RNA, 19 nt, Artificial Sequence
  Description of Artificial Sequence: Synthetic oligonucleotide
uucggcggcgcaucuuagg

SEQ ID NO: 2714332 - RNA, 19 nt, Artificial Sequence
  Description of Artificial Sequence: Synthetic oligonucleotide
uaauccggccgugagcucu

SEQ ID NO: 2714333 - RNA, 19 nt, Artificial Sequence
  Description of Artificial Sequence: Synthetic oligonucleotide
uuugagccucuugacuugc

SEQ ID NO: 2714334 - RNA, 19 nt, Artificial Sequence
  Description of Artificial Sequence: Synthetic oligonucleotide
uaucugcauuuauuuuaug

SEQ ID NO: 2714335 - RNA, 19 nt, Artificial Sequence
  Description of Artificial Sequence: Synthetic oligonucleotide
uugguggcuuuucggauau

SEQ ID NO: 2714336 - RNA, 19 nt, Artificial Sequence
  Description of Artificial Sequence: Synthetic oligonucleotide
ucgagagaguagcgaacca

SEQ ID NO: 2714337 - RNA, 19 nt, Artificial Sequence
  Description of Artificial Sequence: Synthetic oligonucleotide
agcgaaccaucuucacagg

SEQ ID NO: 2714338 - RNA, 19 nt, Artificial Sequence
  Description of Artificial Sequence: Synthetic oligonucleotide
accgacccuguguccagcc

SEQ ID NO: 2714339 - RNA, 19 nt, Artificial Sequence
  Description of Artificial Sequence: Synthetic oligonucleotide
ugagcucuguaaguucggc

SEQ ID NO: 2714340 - RNA, 19 nt, Artificial Sequence
  Description of Artificial Sequence: Synthetic oligonucleotide
guuaauccggccgugagcu

SEQ ID NO: 2714341 - RNA, 19 nt, Artificial Sequence
  Description of Artificial Sequence: Synthetic oligonucleotide
ggguuuucugggucgagag

SEQ ID NO: 2714342 - RNA, 19 nt, Artificial Sequence
  Description of Artificial Sequence: Synthetic oligonucleotide
caucuucacagguuaucuc

SEQ ID NO: 2714343 - RNA, 19 nt, Artificial Sequence
  Description of Artificial Sequence: Synthetic oligonucleotide
auacccuugauggccuggg

SEQ ID NO: 2714344 - RNA, 19 nt, Artificial Sequence
  Description of Artificial Sequence: Synthetic oligonucleotide
ucggccaccgacccugugu

SEQ ID NO: 2714345 - RNA, 19 nt, Artificial Sequence
  Description of Artificial Sequence: Synthetic oligonucleotide
ucuguaaguucggcggcgc

SEQ ID NO: 2714346 - RNA, 19 nt, Artificial Sequence
  Description of Artificial Sequence: Synthetic oligonucleotide
ugagccucuugacuugcau

SEQ ID NO: 2714347 - RNA, 19 nt, Artificial Sequence
  Description of Artificial Sequence: Synthetic oligonucleotide
uuuuaagcaugugcagcaa

SEQ ID NO: 2714348 - RNA, 19 nt, Artificial Sequence
  Description of Artificial Sequence: Synthetic oligonucleotide
uuuccgugaggaucauuuc

SEQ ID NO: 2714349 - RNA, 19 nt, Artificial Sequence
  Description of Artificial Sequence: Synthetic oligonucleotide
uucuucugugcaaccuccu

SEQ ID NO: 2714350 - RNA, 19 nt, Artificial Sequence
  Description of Artificial Sequence: Synthetic oligonucleotide
augcugaauuuauucccgu

SEQ ID NO: 2714351 - RNA, 19 nt, Artificial Sequence
  Description of Artificial Sequence: Synthetic oligonucleotide
agcauuacucucugcguuu

SEQ ID NO: 2714352 - RNA, 19 nt, Artificial Sequence
  Description of Artificial Sequence: Synthetic oligonucleotide
ggcggcgcaucuuaggugc

SEQ ID NO: 2714353 - RNA, 19 nt, Artificial Sequence
  Description of Artificial Sequence: Synthetic oligonucleotide
agagaguagcgaaccaucu

SEQ ID NO: 2714354 - RNA, 19 nt, Artificial Sequence
  Description of Artificial Sequence: Synthetic oligonucleotide
aguuucacggguauucuua

SEQ ID NO: 2714355 - RNA, 19 nt, Artificial Sequence
  Description of Artificial Sequence: Synthetic oligonucleotide
gguggcuuuucggauaugc

SEQ ID NO: 2714356 - RNA, 19 nt, Artificial Sequence
  Description of Artificial Sequence: Synthetic oligonucleotide
gguuaauccggccgugagc

SEQ ID NO: 2714357 - RNA, 19 nt, Artificial Sequence
  Description of Artificial Sequence: Synthetic oligonucleotide
uguaaguucggcggcgcau

SEQ ID NO: 2714358 - RNA, 19 nt, Artificial Sequence
  Description of Artificial Sequence: Synthetic oligonucleotide
agugaacccggagauuuga

SEQ ID NO: 2714359 - RNA, 19 nt, Artificial Sequence
  Description of Artificial Sequence: Synthetic oligonucleotide
gcuuuucggauaugcauac

SEQ ID NO: 2714360 - RNA, 19 nt, Artificial Sequence
  Description of Artificial Sequence: Synthetic oligonucleotide
uugcaugauuuuguagggu

SEQ ID NO: 2714361 - RNA, 19 nt, Artificial Sequence
  Description of Artificial Sequence: Synthetic oligonucleotide
ugggucgagagaguagcga

SEQ ID NO: 2714362 - RNA, 19 nt, Artificial Sequence
  Description of Artificial Sequence: Synthetic oligonucleotide
uuaucucaggucgcuuaca

SEQ ID NO: 2714363 - RNA, 19 nt, Artificial Sequence
  Description of Artificial Sequence: Synthetic oligonucleotide
cgugagcucuguaaguucg

SEQ ID NO: 2714364 - RNA, 19 nt, Artificial Sequence
  Description of Artificial Sequence: Synthetic oligonucleotide
uccagccccacuguuuggc

SEQ ID NO: 2714365 - RNA, 19 nt, Artificial Sequence
  Description of Artificial Sequence: Synthetic oligonucleotide
ccagagaaucuacaucuag

SEQ ID NO: 2714366 - RNA, 19 nt, Artificial Sequence
  Description of Artificial Sequence: Synthetic oligonucleotide
uaaguucggcggcgcaucu

SEQ ID NO: 2714367 - RNA, 19 nt, Artificial Sequence
  Description of Artificial Sequence: Synthetic oligonucleotide
uuucagguauuugguggcu

SEQ ID NO: 2714368 - RNA, 19 nt, Artificial Sequence
  Description of Artificial Sequence: Synthetic oligonucleotide
uuucacggguauucuuaaa

SEQ ID NO: 2714369 - RNA, 19 nt, Artificial Sequence
  Description of Artificial Sequence: Synthetic oligonucleotide
cugggucgagagaguagcg

SEQ ID NO: 2714370 - RNA, 19 nt, Artificial Sequence
  Description of Artificial Sequence: Synthetic oligonucleotide
uuucugggucgagagagua

SEQ ID NO: 2714371 - RNA, 19 nt, Artificial Sequence
  Description of Artificial Sequence: Synthetic oligonucleotide
aguucggcggcgcaucuua

SEQ ID NO: 2714372 - RNA, 19 nt, Artificial Sequence
  Description of Artificial Sequence: Synthetic oligonucleotide
gaguagcgaaccaucuuca

SEQ ID NO: 2714373 - RNA, 19 nt, Artificial Sequence
  Description of Artificial Sequence: Synthetic oligonucleotide
guuucacggguauucuuaa

SEQ ID NO: 2714374 - RNA, 19 nt, Artificial Sequence
  Description of Artificial Sequence: Synthetic oligonucleotide
gacccuuaagcucagcauu

SEQ ID NO: 2714375 - RNA, 19 nt, Artificial Sequence
  Description of Artificial Sequence: Synthetic oligonucleotide
uguucaccuggauguguuc

SEQ ID NO: 2714376 - RNA, 19 nt, Artificial Sequence
  Description of Artificial Sequence: Synthetic oligonucleotide
gugcaaccuccucuucugg

SEQ ID NO: 2714377 - RNA, 19 nt, Artificial Sequence
  Description of Artificial Sequence: Synthetic oligonucleotide
aagugaacccggagauuug

SEQ ID NO: 2714378 - RNA, 19 nt, Artificial Sequence
  Description of Artificial Sequence: Synthetic oligonucleotide
uucuucaaugugacaucuu

SEQ ID NO: 2714379 - RNA, 19 nt, Artificial Sequence
  Description of Artificial Sequence: Synthetic oligonucleotide
cauacccuugauggccugg

SEQ ID NO: 2714380 - RNA, 19 nt, Artificial Sequence
  Description of Artificial Sequence: Synthetic oligonucleotide
cacauugcuucuucaaugu

SEQ ID NO: 2714381 - RNA, 19 nt, Artificial Sequence
  Description of Artificial Sequence: Synthetic oligonucleotide
cuuuucggauaugcauacc

SEQ ID NO: 2714382 - RNA, 19 nt, Artificial Sequence
  Description of Artificial Sequence: Synthetic oligonucleotide
cuuuguucaccuggaugug

SEQ ID NO: 2714383 - RNA, 19 nt, Artificial Sequence
  Description of Artificial Sequence: Synthetic oligonucleotide
agccccacuguuuggccug

SEQ ID NO: 2714384 - RNA, 19 nt, Artificial Sequence
  Description of Artificial Sequence: Synthetic oligonucleotide
ucuugacuugcaugauuuu

SEQ ID NO: 2714385 - RNA, 19 nt, Artificial Sequence
  Description of Artificial Sequence: Synthetic oligonucleotide
uacccuugauggccugggc

SEQ ID NO: 2714386 - RNA, 19 nt, Artificial Sequence
  Description of Artificial Sequence: Synthetic oligonucleotide
acccggagauuugagccuc

SEQ ID NO: 2714387 - RNA, 19 nt, Artificial Sequence
  Description of Artificial Sequence: Synthetic oligonucleotide
ggauguguucaaugaccag

SEQ ID NO: 2714388 - RNA, 19 nt, Artificial Sequence
  Description of Artificial Sequence: Synthetic oligonucleotide
cuccuccauuguaucgccg

SEQ ID NO: 2714389 - RNA, 19 nt, Artificial Sequence
  Description of Artificial Sequence: Synthetic oligonucleotide
ucugugcaaccuccucuuc

SEQ ID NO: 2714390 - RNA, 19 nt, Artificial Sequence
  Description of Artificial Sequence: Synthetic oligonucleotide
cauuucgauguggcagggg

SEQ ID NO: 2714391 - RNA, 19 nt, Artificial Sequence
  Description of Artificial Sequence: Synthetic oligonucleotide
uugagccucuugacuugca

SEQ ID NO: 2714392 - RNA, 19 nt, Artificial Sequence
  Description of Artificial Sequence: Synthetic oligonucleotide
ggguuaauccggccgugag

SEQ ID NO: 2714393 - RNA, 19 nt, Artificial Sequence
  Description of Artificial Sequence: Synthetic oligonucleotide
gugagcucuguaaguucgg

SEQ ID NO: 2714394 - RNA, 19 nt, Artificial Sequence
  Description of Artificial Sequence: Synthetic oligonucleotide
guaaguucggcggcgcauc

SEQ ID NO: 2714395 - RNA, 19 nt, Artificial Sequence
  Description of Artificial Sequence: Synthetic oligonucleotide
ucgccggaauggcacacau

SEQ ID NO: 2714396 - RNA, 19 nt, Artificial Sequence
  Description of Artificial Sequence: Synthetic oligonucleotide
gcuucuucaaugugacauc

SEQ ID NO: 2714397 - RNA, 19 nt, Artificial Sequence
  Description of Artificial Sequence: Synthetic oligonucleotide
uggguuaauccggccguga

SEQ ID NO: 2714398 - RNA, 19 nt, Artificial Sequence
  Description of Artificial Sequence: Synthetic oligonucleotide
acuguuuggccugggcgca

SEQ ID NO: 2714399 - RNA, 19 nt, Artificial Sequence
  Description of Artificial Sequence: Synthetic oligonucleotide
gguuaucucaggucgcuua

SEQ ID NO: 2714400 - RNA, 19 nt, Artificial Sequence
  Description of Artificial Sequence: Synthetic oligonucleotide
gugaacccggagauuugag

SEQ ID NO: 2714401 - RNA, 19 nt, Artificial Sequence
  Description of Artificial Sequence: Synthetic oligonucleotide
uguuuggccugggcgcacc

SEQ ID NO: 2714402 - RNA, 19 nt, Artificial Sequence
  Description of Artificial Sequence: Synthetic oligonucleotide
ggaucauuucgauguggca

SEQ ID NO: 2714403 - RNA, 19 nt, Artificial Sequence
  Description of Artificial Sequence: Synthetic oligonucleotide
uucagguauuugguggcuu

SEQ ID NO: 2714404 - RNA, 19 nt, Artificial Sequence
  Description of Artificial Sequence: Synthetic oligonucleotide
ccugccgacuccuccauug

SEQ ID NO: 2714405 - RNA, 19 nt, Artificial Sequence
  Description of Artificial Sequence: Synthetic oligonucleotide
gcucuguaaguucggcggc

SEQ ID NO: 2714406 - RNA, 19 nt, Artificial Sequence
  Description of Artificial Sequence: Synthetic oligonucleotide
uaucgccggaauggcacac

SEQ ID NO: 2714407 - RNA, 19 nt, Artificial Sequence
  Description of Artificial Sequence: Synthetic oligonucleotide
guaucgccggaauggcaca

SEQ ID NO: 2714408 - RNA, 19 nt, Artificial Sequence
  Description of Artificial Sequence: Synthetic oligonucleotide
aauccggccgugagcucug

SEQ ID NO: 2714409 - RNA, 19 nt, Artificial Sequence
  Description of Artificial Sequence: Synthetic oligonucleotide
ucaccuggauguguucaau

SEQ ID NO: 2714410 - RNA, 19 nt, Artificial Sequence
  Description of Artificial Sequence: Synthetic oligonucleotide
uuaauccggccgugagcuc

SEQ ID NO: 2714411 - RNA, 19 nt, Artificial Sequence
  Description of Artificial Sequence: Synthetic oligonucleotide
gcuuuggaacaaucuguuc

SEQ ID NO: 2714412 - RNA, 19 nt, Artificial Sequence
  Description of Artificial Sequence: Synthetic oligonucleotide
auggguuaauccggccgug

SEQ ID NO: 2714413 - RNA, 19 nt, Artificial Sequence
  Description of Artificial Sequence: Synthetic oligonucleotide
gggucgagagaguagcgaa

SEQ ID NO: 2714414 - RNA, 19 nt, Artificial Sequence
  Description of Artificial Sequence: Synthetic oligonucleotide
cacacauugcuucuucaau

SEQ ID NO: 2714415 - RNA, 19 nt, Artificial Sequence
  Description of Artificial Sequence: Synthetic oligonucleotide
uuggaacaaucuguuccuu

SEQ ID NO: 2714416 - RNA, 19 nt, Artificial Sequence
  Description of Artificial Sequence: Synthetic oligonucleotide
guccagccccacuguuugg

SEQ ID NO: 2714417 - RNA, 19 nt, Artificial Sequence
  Description of Artificial Sequence: Synthetic oligonucleotide
ggugcuuuguucaccugga

SEQ ID NO: 2714418 - RNA, 19 nt, Artificial Sequence
  Description of Artificial Sequence: Synthetic oligonucleotide
acccuuaagcucagcauua

SEQ ID NO: 2714419 - RNA, 19 nt, Artificial Sequence
  Description of Artificial Sequence: Synthetic oligonucleotide
ggcuuuucggauaugcaua

SEQ ID NO: 2714420 - RNA, 19 nt, Artificial Sequence
  Description of Artificial Sequence: Synthetic oligonucleotide
gcucauguauggguuaauc

SEQ ID NO: 2714421 - RNA, 19 nt, Artificial Sequence
  Description of Artificial Sequence: Synthetic oligonucleotide
gagaguagcgaaccaucuu

SEQ ID NO: 2714422 - RNA, 19 nt, Artificial Sequence
  Description of Artificial Sequence: Synthetic oligonucleotide
ccauuguaucgccggaaug

SEQ ID NO: 2714423 - RNA, 19 nt, Artificial Sequence
  Description of Artificial Sequence: Synthetic oligonucleotide
aucuacaucuagacccuua

SEQ ID NO: 2714424 - RNA, 19 nt, Artificial Sequence
  Description of Artificial Sequence: Synthetic oligonucleotide
guaggguuuucugggucga

SEQ ID NO: 2714425 - RNA, 19 nt, Artificial Sequence
  Description of Artificial Sequence: Synthetic oligonucleotide
cgugaggaucauuucgaug

SEQ ID NO: 2714426 - RNA, 19 nt, Artificial Sequence
  Description of Artificial Sequence: Synthetic oligonucleotide
ggcacacauugcuucuuca

SEQ ID NO: 2714427 - RNA, 19 nt, Artificial Sequence
  Description of Artificial Sequence: Synthetic oligonucleotide
cgacuccuccauuguaucg

SEQ ID NO: 2714428 - RNA, 19 nt, Artificial Sequence
  Description of Artificial Sequence: Synthetic oligonucleotide
uuucggccaccgacccugu

SEQ ID NO: 2714429 - RNA, 19 nt, Artificial Sequence
  Description of Artificial Sequence: Synthetic oligonucleotide
uucggccaccgacccugug

SEQ ID NO: 2714430 - RNA, 19 nt, Artificial Sequence
  Description of Artificial Sequence: Synthetic oligonucleotide
ggucgagagaguagcgaac

SEQ ID NO: 2714431 - RNA, 19 nt, Artificial Sequence
  Description of Artificial Sequence: Synthetic oligonucleotide
ugggcgcaccugccgacuc

SEQ ID NO: 2714432 - RNA, 19 nt, Artificial Sequence
  Description of Artificial Sequence: Synthetic oligonucleotide
cugugcaaccuccucuucu

SEQ ID NO: 2714433 - RNA, 19 nt, Artificial Sequence
  Description of Artificial Sequence: Synthetic oligonucleotide
ccggaauggcacacauugc

SEQ ID NO: 2714434 - RNA, 19 nt, Artificial Sequence
  Description of Artificial Sequence: Synthetic oligonucleotide
cuuucacuuuaucugcauu

SEQ ID NO: 2714435 - RNA, 19 nt, Artificial Sequence
  Description of Artificial Sequence: Synthetic oligonucleotide
cuagacccuuaagcucagc

SEQ ID NO: 2714436 - RNA, 19 nt, Artificial Sequence
  Description of Artificial Sequence: Synthetic oligonucleotide
gacccuguguccagcccca

SEQ ID NO: 2714437 - RNA, 19 nt, Artificial Sequence
  Description of Artificial Sequence: Synthetic oligonucleotide
ggguauucuuaaagugaac

SEQ ID NO: 2714438 - RNA, 19 nt, Artificial Sequence
  Description of Artificial Sequence: Synthetic oligonucleotide
cuguaaguucggcggcgca

SEQ ID NO: 2714439 - RNA, 19 nt, Artificial Sequence
  Description of Artificial Sequence: Synthetic oligonucleotide
ggagcucauguauggguua

SEQ ID NO: 2714440 - RNA, 19 nt, Artificial Sequence
  Description of Artificial Sequence: Synthetic oligonucleotide
ggggagcucauguaugggu

SEQ ID NO: 2714441 - RNA, 19 nt, Artificial Sequence
  Description of Artificial Sequence: Synthetic oligonucleotide
guucggcggcgcaucuuag

SEQ ID NO: 2714442 - RNA, 19 nt, Artificial Sequence
  Description of Artificial Sequence: Synthetic oligonucleotide
cggguauucuuaaagugaa

SEQ ID NO: 2714443 - RNA, 19 nt, Artificial Sequence
  Description of Artificial Sequence: Synthetic oligonucleotide
accagagaaucuacaucua

SEQ ID NO: 2714444 - RNA, 19 nt, Artificial Sequence
  Description of Artificial Sequence: Synthetic oligonucleotide
cauuuauuuuaugcugaau

SEQ ID NO: 2714445 - RNA, 19 nt, Artificial Sequence
  Description of Artificial Sequence: Synthetic oligonucleotide
cagcauuacucucugcguu

SEQ ID NO: 2714446 - RNA, 19 nt, Artificial Sequence
  Description of Artificial Sequence: Synthetic oligonucleotide
aucgccggaauggcacaca

SEQ ID NO: 2714447 - RNA, 19 nt, Artificial Sequence
  Description of Artificial Sequence: Synthetic oligonucleotide
guuucuucugggauaucuu

SEQ ID NO: 2714448 - RNA, 19 nt, Artificial Sequence
  Description of Artificial Sequence: Synthetic oligonucleotide
ccgacuccuccauuguauc

SEQ ID NO: 2714449 - RNA, 19 nt, Artificial Sequence
  Description of Artificial Sequence: Synthetic oligonucleotide
auggcacacauugcuucuu

SEQ ID NO: 2714450 - RNA, 19 nt, Artificial Sequence
  Description of Artificial Sequence: Synthetic oligonucleotide
ggccugggcgcaccugccg

SEQ ID NO: 2714451 - RNA, 19 nt, Artificial Sequence
  Description of Artificial Sequence: Synthetic oligonucleotide
cuccauuguaucgccggaa

SEQ ID NO: 2714452 - RNA, 19 nt, Artificial Sequence
  Description of Artificial Sequence: Synthetic oligonucleotide
agcucauguauggguuaau

SEQ ID NO: 2714453 - RNA, 19 nt, Artificial Sequence
  Description of Artificial Sequence: Synthetic oligonucleotide
agguuaucucaggucgcuu

SEQ ID NO: 2714454 - RNA, 19 nt, Artificial Sequence
  Description of Artificial Sequence: Synthetic oligonucleotide
gcucagcauuacucucugc

SEQ ID NO: 2714455 - RNA, 19 nt, Artificial Sequence
  Description of Artificial Sequence: Synthetic oligonucleotide
ccgugagcucuguaaguuc

SEQ ID NO: 2714456 - RNA, 19 nt, Artificial Sequence
  Description of Artificial Sequence: Synthetic oligonucleotide
gcgcaucuuaggugcuuug

SEQ ID NO: 2714457 - RNA, 19 nt, Artificial Sequence
  Description of Artificial Sequence: Synthetic oligonucleotide
ggauaugcauacccuugau

SEQ ID NO: 2714458 - RNA, 19 nt, Artificial Sequence
  Description of Artificial Sequence: Synthetic oligonucleotide
cagguuaucucaggucgcu

SEQ ID NO: 2714459 - RNA, 19 nt, Artificial Sequence
  Description of Artificial Sequence: Synthetic oligonucleotide
gcauacccuugauggccug

SEQ ID NO: 2714460 - RNA, 19 nt, Artificial Sequence
  Description of Artificial Sequence: Synthetic oligonucleotide
caccgacccuguguccagc

SEQ ID NO: 2714461 - RNA, 19 nt, Artificial Sequence
  Description of Artificial Sequence: Synthetic oligonucleotide
gcgaaccaucuucacaggu

SEQ ID NO: 2714462 - RNA, 19 nt, Artificial Sequence
  Description of Artificial Sequence: Synthetic oligonucleotide
acccuguguccagccccac

SEQ ID NO: 2714463 - RNA, 19 nt, Artificial Sequence
  Description of Artificial Sequence: Synthetic oligonucleotide
ugguggcuuuucggauaug

SEQ ID NO: 2714464 - RNA, 19 nt, Artificial Sequence
  Description of Artificial Sequence: Synthetic oligonucleotide
gcaucuuaggugcuuuguu

SEQ ID NO: 2714465 - RNA, 19 nt, Artificial Sequence
  Description of Artificial Sequence: Synthetic oligonucleotide
cuguuuggccugggcgcac

SEQ ID NO: 2714466 - RNA, 19 nt, Artificial Sequence
  Description of Artificial Sequence: Synthetic oligonucleotide
cccuuaagcucagcauuac

SEQ ID NO: 2714467 - RNA, 19 nt, Artificial Sequence
  Description of Artificial Sequence: Synthetic oligonucleotide
cggauaugcauacccuuga

SEQ ID NO: 2714468 - RNA, 19 nt, Artificial Sequence
  Description of Artificial Sequence: Synthetic oligonucleotide
uccggccgugagcucugua

SEQ ID NO: 2714469 - RNA, 19 nt, Artificial Sequence
  Description of Artificial Sequence: Synthetic oligonucleotide
cggccgugagcucuguaag

SEQ ID NO: 2714470 - RNA, 19 nt, Artificial Sequence
  Description of Artificial Sequence: Synthetic oligonucleotide
cgcaccugccgacuccucc

SEQ ID NO: 2714471 - RNA, 19 nt, Artificial Sequence
  Description of Artificial Sequence: Synthetic oligonucleotide
cggagauuugagccucuug

SEQ ID NO: 2714472 - RNA, 19 nt, Artificial Sequence
  Description of Artificial Sequence: Synthetic oligonucleotide
ccaucuucacagguuaucu

SEQ ID NO: 2714473 - RNA, 19 nt, Artificial Sequence
  Description of Artificial Sequence: Synthetic oligonucleotide
caguuucacggguauucuu

SEQ ID NO: 2714474 - RNA, 19 nt, Artificial Sequence
  Description of Artificial Sequence: Synthetic oligonucleotide
gggcgcaccugccgacucc

SEQ ID NO: 2714475 - RNA, 19 nt, Artificial Sequence
  Description of Artificial Sequence: Synthetic oligonucleotide
ccaccgacccuguguccag

SEQ ID NO: 2714476 - RNA, 19 nt, Artificial Sequence
  Description of Artificial Sequence: Synthetic oligonucleotide
ccggccgugagcucuguaa

SEQ ID NO: 2714477 - RNA, 19 nt, Artificial Sequence
  Description of Artificial Sequence: Synthetic oligonucleotide
accugccgacuccuccauu

SEQ ID NO: 2714478 - RNA, 19 nt, Artificial Sequence
  Description of Artificial Sequence: Synthetic oligonucleotide
ggaauggcacacauugcuu

SEQ ID NO: 2714479 - RNA, 19 nt, Artificial Sequence
  Description of Artificial Sequence: Synthetic oligonucleotide
ggccaccgacccugugucc

SEQ ID NO: 2714480 - RNA, 19 nt, Artificial Sequence
  Description of Artificial Sequence: Synthetic oligonucleotide
ccgacccuguguccagccc

SEQ ID NO: 2714481 - RNA, 19 nt, Artificial Sequence
  Description of Artificial Sequence: Synthetic oligonucleotide
gugcuuuguucaccuggau

SEQ ID NO: 2714482 - RNA, 19 nt, Artificial Sequence
  Description of Artificial Sequence: Synthetic oligonucleotide
gcaguuucacggguauucu

SEQ ID NO: 2714483 - RNA, 19 nt, Artificial Sequence
  Description of Artificial Sequence: Synthetic oligonucleotide
ccugggcgcaccugccgac

SEQ ID NO: 2714484 - RNA, 19 nt, Artificial Sequence
  Description of Artificial Sequence: Synthetic oligonucleotide
ggccgugagcucuguaagu

SEQ ID NO: 2714485 - RNA, 19 nt, Artificial Sequence
  Description of Artificial Sequence: Synthetic oligonucleotide
gccugggcgcaccugccga

SEQ ID NO: 2714486 - RNA, 19 nt, Artificial Sequence
  Description of Artificial Sequence: Synthetic oligonucleotide
ccuuaagcucagcauuacu

SEQ ID NO: 2714487 - RNA, 19 nt, Artificial Sequence
  Description of Artificial Sequence: Synthetic oligonucleotide
caaccuccucuucuggcuu

SEQ ID NO: 2714488 - RNA, 19 nt, Artificial Sequence
  Description of Artificial Sequence: Synthetic oligonucleotide
gggagcucauguauggguu

SEQ ID NO: 2714489 - RNA, 19 nt, Artificial Sequence
  Description of Artificial Sequence: Synthetic oligonucleotide
gcaugauuuuguaggguuu

SEQ ID NO: 2714490 - RNA, 19 nt, Artificial Sequence
  Description of Artificial Sequence: Synthetic oligonucleotide
gccgacuccuccauuguau

SEQ ID NO: 2714491 - RNA, 19 nt, Artificial Sequence
  Description of Artificial Sequence: Synthetic oligonucleotide
cuugauggccugggcaguu

SEQ ID NO: 2714492 - RNA, 19 nt, Artificial Sequence
  Description of Artificial Sequence: Synthetic oligonucleotide
gccccacuguuuggccugg

SEQ ID NO: 2714493 - RNA, 19 nt, Artificial Sequence
  Description of Artificial Sequence: Synthetic oligonucleotide
cggccaccgacccuguguc

SEQ ID NO: 2714494 - RNA, 19 nt, Artificial Sequence
  Description of Artificial Sequence: Synthetic oligonucleotide
gccgugagcucuguaaguu

SEQ ID NO: 2714495 - RNA, 19 nt, Artificial Sequence
  Description of Artificial Sequence: Synthetic oligonucleotide
cagguauuugguggcuuuu

SEQ ID NO: 2714496 - RNA, 19 nt, Artificial Sequence
  Description of Artificial Sequence: Synthetic oligonucleotide
cggcggcgcaucuuaggug

SEQ ID NO: 2714497 - RNA, 19 nt, Artificial Sequence
  Description of Artificial Sequence: Synthetic oligonucleotide
cuucuggcuuuggaacaau

SEQ ID NO: 2714498 - RNA, 19 nt, Artificial Sequence
  Description of Artificial Sequence: Synthetic oligonucleotide
auccggccgugagcucugu

SEQ ID NO: 2714499 - RNA, 19 nt, Artificial Sequence
  Description of Artificial Sequence: Synthetic oligonucleotide
cuuuuccgugaggaucauu

SEQ ID NO: 2714500 - RNA, 19 nt, Artificial Sequence
  Description of Artificial Sequence: Synthetic oligonucleotide
ggcgcaucuuaggugcuuu

SEQ ID NO: 2714501 - RNA, 19 nt, Artificial Sequence
  Description of Artificial Sequence: Synthetic oligonucleotide
caccugccgacuccuccau

SEQ ID NO: 2714502 - RNA, 19 nt, Artificial Sequence
  Description of Artificial Sequence: Synthetic oligonucleotide
ggcgcaccugccgacuccu

SEQ ID NO: 2714503 - RNA, 19 nt, Artificial Sequence
  Description of Artificial Sequence: Synthetic oligonucleotide
ccgugaggaucauuucgau

SEQ ID NO: 2714504 - RNA, 19 nt, Artificial Sequence
  Description of Artificial Sequence: Synthetic oligonucleotide
cugggcgcaccugccgacu

SEQ ID NO: 2714505 - RNA, 19 nt, Artificial Sequence
  Description of Artificial Sequence: Synthetic oligonucleotide
ccccacuguuuggccuggg

SEQ ID NO: 2714506 - RNA, 19 nt, Artificial Sequence
  Description of Artificial Sequence: Synthetic oligonucleotide
cgcaucuuaggugcuuugu

SEQ ID NO: 2714507 - RNA, 19 nt, Artificial Sequence
  Description of Artificial Sequence: Synthetic oligonucleotide
cccuguguccagccccacu

SEQ ID NO: 2714508 - RNA, 19 nt, Artificial Sequence
  Description of Artificial Sequence: Synthetic oligonucleotide
cccggagauuugagccucu

SEQ ID NO: 2714509 - RNA, 19 nt, Artificial Sequence
  Description of Artificial Sequence: Synthetic oligonucleotide
gggcaguuucacggguauu

SEQ ID NO: 2714510 - RNA, 19 nt, Artificial Sequence
  Description of Artificial Sequence: Synthetic oligonucleotide
gcgcaccugccgacuccuc

SEQ ID NO: 2714511 - RNA, 19 nt, Artificial Sequence
  Description of Artificial Sequence: Synthetic oligonucleotide
gcggcgcaucuuaggugcu

SEQ ID NO: 2714512 - RNA, 19 nt, Artificial Sequence
  Description of Artificial Sequence: Synthetic oligonucleotide
ccuuuuccgugaggaucau

SEQ ID NO: 2714513 - RNA, 19 nt, Artificial Sequence
  Description of Artificial Sequence: Synthetic oligonucleotide
ccggagauuugagccucuu

SEQ ID NO: 2714514 - RNA, 19 nt, Artificial Sequence
  Description of Artificial Sequence: Synthetic oligonucleotide
cggcgcaucuuaggugcuu

SEQ ID NO: 2714515 - RNA, 19 nt, Artificial Sequence
  Description of Artificial Sequence: Synthetic oligonucleotide
uuccauaacacccagaagg

SEQ ID NO: 2714516 - RNA, 19 nt, Artificial Sequence
  Description of Artificial Sequence: Synthetic oligonucleotide
aauucuuuccaguggagcc

SEQ ID NO: 2714517 - RNA, 19 nt, Artificial Sequence
  Description of Artificial Sequence: Synthetic oligonucleotide
uguugaaacagcaaaauac

SEQ ID NO: 2714518 - RNA, 19 nt, Artificial Sequence
  Description of Artificial Sequence: Synthetic oligonucleotide
aguuaaacagcacaacacc

SEQ ID NO: 2714519 - RNA, 19 nt, Artificial Sequence
  Description of Artificial Sequence: Synthetic oligonucleotide
acuaaccaaaacuaaagac

SEQ ID NO: 2714520 - RNA, 19 nt, Artificial Sequence
  Description of Artificial Sequence: Synthetic oligonucleotide
ugaacuucuucuaaguccg

SEQ ID NO: 2714521 - RNA, 19 nt, Artificial Sequence
  Description of Artificial Sequence: Synthetic oligonucleotide
aauccguucacaaaugagc

SEQ ID NO: 2714522 - RNA, 19 nt, Artificial Sequence
  Description of Artificial Sequence: Synthetic oligonucleotide
auaaucuucaucuaugaca

SEQ ID NO: 2714523 - RNA, 19 nt, Artificial Sequence
  Description of Artificial Sequence: Synthetic oligonucleotide
uuuuaauucuuuccagugg

SEQ ID NO: 2714524 - RNA, 19 nt, Artificial Sequence
  Description of Artificial Sequence: Synthetic oligonucleotide
aaacgguaaaagcagagug

SEQ ID NO: 2714525 - RNA, 19 nt, Artificial Sequence
  Description of Artificial Sequence: Synthetic oligonucleotide
uaaucuucaucuaugacac

SEQ ID NO: 2714526 - RNA, 19 nt, Artificial Sequence
  Description of Artificial Sequence: Synthetic oligonucleotide
aagacuucucuuuacagug

SEQ ID NO: 2714527 - RNA, 19 nt, Artificial Sequence
  Description of Artificial Sequence: Synthetic oligonucleotide
agcaguuuuaauucuuucc

SEQ ID NO: 2714528 - RNA, 19 nt, Artificial Sequence
  Description of Artificial Sequence: Synthetic oligonucleotide
uagaauacaaaacacuaac

SEQ ID NO: 2714529 - RNA, 19 nt, Artificial Sequence
  Description of Artificial Sequence: Synthetic oligonucleotide
uuuaauucuuuccagugga

SEQ ID NO: 2714530 - RNA, 19 nt, Artificial Sequence
  Description of Artificial Sequence: Synthetic oligonucleotide
uuuuacuucaaacuucucu

SEQ ID NO: 2714531 - RNA, 19 nt, Artificial Sequence
  Description of Artificial Sequence: Synthetic oligonucleotide
uuuuccaaaguuaaacagc

SEQ ID NO: 2714532 - RNA, 19 nt, Artificial Sequence
  Description of Artificial Sequence: Synthetic oligonucleotide
ucuauaaucuucaucuaug

SEQ ID NO: 2714533 - RNA, 19 nt, Artificial Sequence
  Description of Artificial Sequence: Synthetic oligonucleotide
agaaacgccauccucggcc

SEQ ID NO: 2714534 - RNA, 19 nt, Artificial Sequence
  Description of Artificial Sequence: Synthetic oligonucleotide
uuuccaaaguuaaacagca

SEQ ID NO: 2714535 - RNA, 19 nt, Artificial Sequence
  Description of Artificial Sequence: Synthetic oligonucleotide
uuacugccaagccagagcg

SEQ ID NO: 2714536 - RNA, 19 nt, Artificial Sequence
  Description of Artificial Sequence: Synthetic oligonucleotide
aaguuaaacagcacaacac

SEQ ID NO: 2714537 - RNA, 19 nt, Artificial Sequence
  Description of Artificial Sequence: Synthetic oligonucleotide
auuguguauucauaggcac

SEQ ID NO: 2714538 - RNA, 19 nt, Artificial Sequence
  Description of Artificial Sequence: Synthetic oligonucleotide
uccaaaguuaaacagcaca

SEQ ID NO: 2714539 - RNA, 19 nt, Artificial Sequence
  Description of Artificial Sequence: Synthetic oligonucleotide
auaggcacuguacaggucg

SEQ ID NO: 2714540 - RNA, 19 nt, Artificial Sequence
  Description of Artificial Sequence: Synthetic oligonucleotide
ucuaugaagugcuuuacug

SEQ ID NO: 2714541 - RNA, 19 nt, Artificial Sequence
  Description of Artificial Sequence: Synthetic oligonucleotide
aaaugagcugugcaauucg

SEQ ID NO: 2714542 - RNA, 19 nt, Artificial Sequence
  Description of Artificial Sequence: Synthetic oligonucleotide
agcaaaauacuucaagcag

SEQ ID NO: 2714543 - RNA, 19 nt, Artificial Sequence
  Description of Artificial Sequence: Synthetic oligonucleotide
uauucauaggcacuguaca

SEQ ID NO: 2714544 - RNA, 19 nt, Artificial Sequence
  Description of Artificial Sequence: Synthetic oligonucleotide
ugcuuuacugccaagccag

SEQ ID NO: 2714545 - RNA, 19 nt, Artificial Sequence
  Description of Artificial Sequence: Synthetic oligonucleotide
uuuacaguguugaaacagc

SEQ ID NO: 2714546 - RNA, 19 nt, Artificial Sequence
  Description of Artificial Sequence: Synthetic oligonucleotide
agaaggaacagcuaucuga

SEQ ID NO: 2714547 - RNA, 19 nt, Artificial Sequence
  Description of Artificial Sequence: Synthetic oligonucleotide
agugcuuuacugccaagcc

SEQ ID NO: 2714548 - RNA, 19 nt, Artificial Sequence
  Description of Artificial Sequence: Synthetic oligonucleotide
ugguauuguguauucauag

SEQ ID NO: 2714549 - RNA, 19 nt, Artificial Sequence
  Description of Artificial Sequence: Synthetic oligonucleotide
guauuguguauucauaggc

SEQ ID NO: 2714550 - RNA, 19 nt, Artificial Sequence
  Description of Artificial Sequence: Synthetic oligonucleotide
aagugcuuuacugccaagc

SEQ ID NO: 2714551 - RNA, 19 nt, Artificial Sequence
  Description of Artificial Sequence: Synthetic oligonucleotide
cucuuuacaguguugaaac

SEQ ID NO: 2714552 - RNA, 19 nt, Artificial Sequence
  Description of Artificial Sequence: Synthetic oligonucleotide
ucaucuaugacaccggcuc

SEQ ID NO: 2714553 - RNA, 19 nt, Artificial Sequence
  Description of Artificial Sequence: Synthetic oligonucleotide
uauuguguauucauaggca

SEQ ID NO: 2714554 - RNA, 19 nt, Artificial Sequence
  Description of Artificial Sequence: Synthetic oligonucleotide
agccgaaaccuccugagcc

SEQ ID NO: 2714555 - RNA, 19 nt, Artificial Sequence
  Description of Artificial Sequence: Synthetic oligonucleotide
ucuuccauaacacccagaa

SEQ ID NO: 2714556 - RNA, 19 nt, Artificial Sequence
  Description of Artificial Sequence: Synthetic oligonucleotide
aaaacacuaaccaaaacua

SEQ ID NO: 2714557 - RNA, 19 nt, Artificial Sequence
  Description of Artificial Sequence: Synthetic oligonucleotide
ucuuuuccaaaguuaaaca

SEQ ID NO: 2714558 - RNA, 19 nt, Artificial Sequence
  Description of Artificial Sequence: Synthetic oligonucleotide
cuacucuuccauaacaccc

SEQ ID NO: 2714559 - RNA, 19 nt, Artificial Sequence
  Description of Artificial Sequence: Synthetic oligonucleotide
acuaaagacuucucuuuac

SEQ ID NO: 2714560 - RNA, 19 nt, Artificial Sequence
  Description of Artificial Sequence: Synthetic oligonucleotide
uguuugaacuucuucuaag

SEQ ID NO: 2714561 - RNA, 19 nt, Artificial Sequence
  Description of Artificial Sequence: Synthetic oligonucleotide
uaaccaaaacuaaagacuu

SEQ ID NO: 2714562 - RNA, 19 nt, Artificial Sequence
  Description of Artificial Sequence: Synthetic oligonucleotide
guuuuaauucuuuccagug

SEQ ID NO: 2714563 - RNA, 19 nt, Artificial Sequence
  Description of Artificial Sequence: Synthetic oligonucleotide
cagagaaacgccauccucg

SEQ ID NO: 2714564 - RNA, 19 nt, Artificial Sequence
  Description of Artificial Sequence: Synthetic oligonucleotide
aaacuaaagacuucucuuu

SEQ ID NO: 2714565 - RNA, 19 nt, Artificial Sequence
  Description of Artificial Sequence: Synthetic oligonucleotide
cuaugaagugcuuuacugc

SEQ ID NO: 2714566 - RNA, 19 nt, Artificial Sequence
  Description of Artificial Sequence: Synthetic oligonucleotide
uucacaaaugagcugugca

SEQ ID NO: 2714567 - RNA, 19 nt, Artificial Sequence
  Description of Artificial Sequence: Synthetic oligonucleotide
aggaacagcuaucugaaug

SEQ ID NO: 2714568 - RNA, 19 nt, Artificial Sequence
  Description of Artificial Sequence: Synthetic oligonucleotide
aaaauccguucacaaauga

SEQ ID NO: 2714569 - RNA, 19 nt, Artificial Sequence
  Description of Artificial Sequence: Synthetic oligonucleotide
aacagcacaacaccaacau

SEQ ID NO: 2714570 - RNA, 19 nt, Artificial Sequence
  Description of Artificial Sequence: Synthetic oligonucleotide
cauaacacccagaaggaac

SEQ ID NO: 2714571 - RNA, 19 nt, Artificial Sequence
  Description of Artificial Sequence: Synthetic oligonucleotide
uggcuuucuccauaggugg

SEQ ID NO: 2714572 - RNA, 19 nt, Artificial Sequence
  Description of Artificial Sequence: Synthetic oligonucleotide
uuuccugcauccuagaaua

SEQ ID NO: 2714573 - RNA, 19 nt, Artificial Sequence
  Description of Artificial Sequence: Synthetic oligonucleotide
uggcaaacgguaaaagcag

SEQ ID NO: 2714574 - RNA, 19 nt, Artificial Sequence
  Description of Artificial Sequence: Synthetic oligonucleotide
cagcacaacaccaacauuc

SEQ ID NO: 2714575 - RNA, 19 nt, Artificial Sequence
  Description of Artificial Sequence: Synthetic oligonucleotide
aguuuuaauucuuuccagu

SEQ ID NO: 2714576 - RNA, 19 nt, Artificial Sequence
  Description of Artificial Sequence: Synthetic oligonucleotide
uucauaggcacuguacagg

SEQ ID NO: 2714577 - RNA, 19 nt, Artificial Sequence
  Description of Artificial Sequence: Synthetic oligonucleotide
uauaaucuucaucuaugac

SEQ ID NO: 2714578 - RNA, 19 nt, Artificial Sequence
  Description of Artificial Sequence: Synthetic oligonucleotide
ucuucaucuaugacaccgg

SEQ ID NO: 2714579 - RNA, 19 nt, Artificial Sequence
  Description of Artificial Sequence: Synthetic oligonucleotide
cauccuagaauacaaaaca

SEQ ID NO: 2714580 - RNA, 19 nt, Artificial Sequence
  Description of Artificial Sequence: Synthetic oligonucleotide
uguguauucauaggcacug

SEQ ID NO: 2714581 - RNA, 19 nt, Artificial Sequence
  Description of Artificial Sequence: Synthetic oligonucleotide
auucauaggcacuguacag

SEQ ID NO: 2714582 - RNA, 19 nt, Artificial Sequence
  Description of Artificial Sequence: Synthetic oligonucleotide
acaguguugaaacagcaaa

SEQ ID NO: 2714583 - RNA, 19 nt, Artificial Sequence
  Description of Artificial Sequence: Synthetic oligonucleotide
uuacaguguugaaacagca

SEQ ID NO: 2714584 - RNA, 19 nt, Artificial Sequence
  Description of Artificial Sequence: Synthetic oligonucleotide
uuaauucuuuccaguggag

SEQ ID NO: 2714585 - RNA, 19 nt, Artificial Sequence
  Description of Artificial Sequence: Synthetic oligonucleotide
uccauaacacccagaagga

SEQ ID NO: 2714586 - RNA, 19 nt, Artificial Sequence
  Description of Artificial Sequence: Synthetic oligonucleotide
uccuacaucuaugaagugc

SEQ ID NO: 2714587 - RNA, 19 nt, Artificial Sequence
  Description of Artificial Sequence: Synthetic oligonucleotide
uugcugauggacccggcgg

SEQ ID NO: 2714588 - RNA, 19 nt, Artificial Sequence
  Description of Artificial Sequence: Synthetic oligonucleotide
agagaaacgccauccucgg

SEQ ID NO: 2714589 - RNA, 19 nt, Artificial Sequence
  Description of Artificial Sequence: Synthetic oligonucleotide
uuuccaguggagccgaaac

SEQ ID NO: 2714590 - RNA, 19 nt, Artificial Sequence
  Description of Artificial Sequence: Synthetic oligonucleotide
aaauccguucacaaaugag

SEQ ID NO: 2714591 - RNA, 19 nt, Artificial Sequence
  Description of Artificial Sequence: Synthetic oligonucleotide
uucuucuaaguccggauaa

SEQ ID NO: 2714592 - RNA, 19 nt, Artificial Sequence
  Description of Artificial Sequence: Synthetic oligonucleotide
guaaaagcagagugcaaug

SEQ ID NO: 2714593 - RNA, 19 nt, Artificial Sequence
  Description of Artificial Sequence: Synthetic oligonucleotide
ugcauccuagaauacaaaa

SEQ ID NO: 2714594 - RNA, 19 nt, Artificial Sequence
  Description of Artificial Sequence: Synthetic oligonucleotide
uacucuuccauaacaccca

SEQ ID NO: 2714595 - RNA, 19 nt, Artificial Sequence
  Description of Artificial Sequence: Synthetic oligonucleotide
aacuaaagacuucucuuua

SEQ ID NO: 2714596 - RNA, 19 nt, Artificial Sequence
  Description of Artificial Sequence: Synthetic oligonucleotide
uaauucuuuccaguggagc

SEQ ID NO: 2714597 - RNA, 19 nt, Artificial Sequence
  Description of Artificial Sequence: Synthetic oligonucleotide
gguauuguguauucauagg

SEQ ID NO: 2714598 - RNA, 19 nt, Artificial Sequence
  Description of Artificial Sequence: Synthetic oligonucleotide
ucacaaaugagcugugcaa

SEQ ID NO: 2714599 - RNA, 19 nt, Artificial Sequence
  Description of Artificial Sequence: Synthetic oligonucleotide
accaaaacuaaagacuucu

SEQ ID NO: 2714600 - RNA, 19 nt, Artificial Sequence
  Description of Artificial Sequence: Synthetic oligonucleotide
aacacuaaccaaaacuaaa

SEQ ID NO: 2714601 - RNA, 19 nt, Artificial Sequence
  Description of Artificial Sequence: Synthetic oligonucleotide
ucauaggcacuguacaggu

SEQ ID NO: 2714602 - RNA, 19 nt, Artificial Sequence
  Description of Artificial Sequence: Synthetic oligonucleotide
aaccuccugagccccuugc

SEQ ID NO: 2714603 - RNA, 19 nt, Artificial Sequence
  Description of Artificial Sequence: Synthetic oligonucleotide
auccuagaauacaaaacac

SEQ ID NO: 2714604 - RNA, 19 nt, Artificial Sequence
  Description of Artificial Sequence: Synthetic oligonucleotide
uaugacaccggcuccuaca

SEQ ID NO: 2714605 - RNA, 19 nt, Artificial Sequence
  Description of Artificial Sequence: Synthetic oligonucleotide
aacuucucuuuuccaaagu

SEQ ID NO: 2714606 - RNA, 19 nt, Artificial Sequence
  Description of Artificial Sequence: Synthetic oligonucleotide
uccauaggugguauugugu

SEQ ID NO: 2714607 - RNA, 19 nt, Artificial Sequence
  Description of Artificial Sequence: Synthetic oligonucleotide
ugcaauucgaucaccuuuu

SEQ ID NO: 2714608 - RNA, 19 nt, Artificial Sequence
  Description of Artificial Sequence: Synthetic oligonucleotide
ugagcugugcaauucgauc

SEQ ID NO: 2714609 - RNA, 19 nt, Artificial Sequence
  Description of Artificial Sequence: Synthetic oligonucleotide
agcacaacaccaacauucc

SEQ ID NO: 2714610 - RNA, 19 nt, Artificial Sequence
  Description of Artificial Sequence: Synthetic oligonucleotide
acagcuaucugaaugucug

SEQ ID NO: 2714611 - RNA, 19 nt, Artificial Sequence
  Description of Artificial Sequence: Synthetic oligonucleotide
uucuccauaggugguauug

SEQ ID NO: 2714612 - RNA, 19 nt, Artificial Sequence
  Description of Artificial Sequence: Synthetic oligonucleotide
acgaagcgcagagaaacgc

SEQ ID NO: 2714613 - RNA, 19 nt, Artificial Sequence
  Description of Artificial Sequence: Synthetic oligonucleotide
uugaaacagcaaaauacuu

SEQ ID NO: 2714614 - RNA, 19 nt, Artificial Sequence
  Description of Artificial Sequence: Synthetic oligonucleotide
cuauaaucuucaucuauga

SEQ ID NO: 2714615 - RNA, 19 nt, Artificial Sequence
  Description of Artificial Sequence: Synthetic oligonucleotide
accaacauucccucuauaa

SEQ ID NO: 2714616 - RNA, 19 nt, Artificial Sequence
  Description of Artificial Sequence: Synthetic oligonucleotide
auucuuuccaguggagccg

SEQ ID NO: 2714617 - RNA, 19 nt, Artificial Sequence
  Description of Artificial Sequence: Synthetic oligonucleotide
ggcuccuacaucuaugaag

SEQ ID NO: 2714618 - RNA, 19 nt, Artificial Sequence
  Description of Artificial Sequence: Synthetic oligonucleotide
agcguggagcuacucuucc

SEQ ID NO: 2714619 - RNA, 19 nt, Artificial Sequence
  Description of Artificial Sequence: Synthetic oligonucleotide
guggcaaacgguaaaagca

SEQ ID NO: 2714620 - RNA, 19 nt, Artificial Sequence
  Description of Artificial Sequence: Synthetic oligonucleotide
uccgagagccgcacgaagc

SEQ ID NO: 2714621 - RNA, 19 nt, Artificial Sequence
  Description of Artificial Sequence: Synthetic oligonucleotide
uguauucauaggcacugua

SEQ ID NO: 2714622 - RNA, 19 nt, Artificial Sequence
  Description of Artificial Sequence: Synthetic oligonucleotide
agggcaugguggcaaacgg

SEQ ID NO: 2714623 - RNA, 19 nt, Artificial Sequence
  Description of Artificial Sequence: Synthetic oligonucleotide
uucaucuaugacaccggcu

SEQ ID NO: 2714624 - RNA, 19 nt, Artificial Sequence
  Description of Artificial Sequence: Synthetic oligonucleotide
acaucuaugaagugcuuua

SEQ ID NO: 2714625 - RNA, 19 nt, Artificial Sequence
  Description of Artificial Sequence: Synthetic oligonucleotide
aaccaaaacuaaagacuuc

SEQ ID NO: 2714626 - RNA, 19 nt, Artificial Sequence
  Description of Artificial Sequence: Synthetic oligonucleotide
agcuacucuuccauaacac

SEQ ID NO: 2714627 - RNA, 19 nt, Artificial Sequence
  Description of Artificial Sequence: Synthetic oligonucleotide
aguguuugaacuucuucua

SEQ ID NO: 2714628 - RNA, 19 nt, Artificial Sequence
  Description of Artificial Sequence: Synthetic oligonucleotide
acuguacaggucguagccc

SEQ ID NO: 2714629 - RNA, 19 nt, Artificial Sequence
  Description of Artificial Sequence: Synthetic oligonucleotide
ucuuuacaguguugaaaca

SEQ ID NO: 2714630 - RNA, 19 nt, Artificial Sequence
  Description of Artificial Sequence: Synthetic oligonucleotide
aucuaugaagugcuuuacu

SEQ ID NO: 2714631 - RNA, 19 nt, Artificial Sequence
  Description of Artificial Sequence: Synthetic oligonucleotide
uccaguggagccgaaaccu

SEQ ID NO: 2714632 - RNA, 19 nt, Artificial Sequence
  Description of Artificial Sequence: Synthetic oligonucleotide
cuagaauacaaaacacuaa

SEQ ID NO: 2714633 - RNA, 19 nt, Artificial Sequence
  Description of Artificial Sequence: Synthetic oligonucleotide
gcaguuuuaauucuuucca

SEQ ID NO: 2714634 - RNA, 19 nt, Artificial Sequence
  Description of Artificial Sequence: Synthetic oligonucleotide
uacaguguugaaacagcaa

SEQ ID NO: 2714635 - RNA, 19 nt, Artificial Sequence
  Description of Artificial Sequence: Synthetic oligonucleotide
gguggcaaacgguaaaagc

SEQ ID NO: 2714636 - RNA, 19 nt, Artificial Sequence
  Description of Artificial Sequence: Synthetic oligonucleotide
cuaaagacuucucuuuaca

SEQ ID NO: 2714637 - RNA, 19 nt, Artificial Sequence
  Description of Artificial Sequence: Synthetic oligonucleotide
aaacacuaaccaaaacuaa

SEQ ID NO: 2714638 - RNA, 19 nt, Artificial Sequence
  Description of Artificial Sequence: Synthetic oligonucleotide
uggagcuacucuuccauaa

SEQ ID NO: 2714639 - RNA, 19 nt, Artificial Sequence
  Description of Artificial Sequence: Synthetic oligonucleotide
cuucaucuaugacaccggc

SEQ ID NO: 2714640 - RNA, 19 nt, Artificial Sequence
  Description of Artificial Sequence: Synthetic oligonucleotide
acgguaaaagcagagugca

SEQ ID NO: 2714641 - RNA, 19 nt, Artificial Sequence
  Description of Artificial Sequence: Synthetic oligonucleotide
auaacacccagaaggaaca

SEQ ID NO: 2714642 - RNA, 19 nt, Artificial Sequence
  Description of Artificial Sequence: Synthetic oligonucleotide
cuugcugauggacccggcg

SEQ ID NO: 2714643 - RNA, 19 nt, Artificial Sequence
  Description of Artificial Sequence: Synthetic oligonucleotide
gaaacgccauccucggccc

SEQ ID NO: 2714644 - RNA, 19 nt, Artificial Sequence
  Description of Artificial Sequence: Synthetic oligonucleotide
guauucauaggcacuguac

SEQ ID NO: 2714645 - RNA, 19 nt, Artificial Sequence
  Description of Artificial Sequence: Synthetic oligonucleotide
acaggucguagcccgcagc

SEQ ID NO: 2714646 - RNA, 19 nt, Artificial Sequence
  Description of Artificial Sequence: Synthetic oligonucleotide
gaaggaacagcuaucugaa

SEQ ID NO: 2714647 - RNA, 19 nt, Artificial Sequence
  Description of Artificial Sequence: Synthetic oligonucleotide
ugcugauggacccggcggc

SEQ ID NO: 2714648 - RNA, 19 nt, Artificial Sequence
  Description of Artificial Sequence: Synthetic oligonucleotide
ucugaaugucuguuuucac

SEQ ID NO: 2714649 - RNA, 19 nt, Artificial Sequence
  Description of Artificial Sequence: Synthetic oligonucleotide
aacagcuaucugaaugucu

SEQ ID NO: 2714650 - RNA, 19 nt, Artificial Sequence
  Description of Artificial Sequence: Synthetic oligonucleotide
auggcuuucuccauaggug

SEQ ID NO: 2714651 - RNA, 19 nt, Artificial Sequence
  Description of Artificial Sequence: Synthetic oligonucleotide
aacuucuucuaaguccgga

SEQ ID NO: 2714652 - RNA, 19 nt, Artificial Sequence
  Description of Artificial Sequence: Synthetic oligonucleotide
aaugagcugugcaauucga

SEQ ID NO: 2714653 - RNA, 19 nt, Artificial Sequence
  Description of Artificial Sequence: Synthetic oligonucleotide
agguccucuuuccugcauc

SEQ ID NO: 2714654 - RNA, 19 nt, Artificial Sequence
  Description of Artificial Sequence: Synthetic oligonucleotide
uuacuucaaacuucucuuu

SEQ ID NO: 2714655 - RNA, 19 nt, Artificial Sequence
  Description of Artificial Sequence: Synthetic oligonucleotide
caaaacuaaagacuucucu

SEQ ID NO: 2714656 - RNA, 19 nt, Artificial Sequence
  Description of Artificial Sequence: Synthetic oligonucleotide
caggucguagcccgcagcg

SEQ ID NO: 2714657 - RNA, 19 nt, Artificial Sequence
  Description of Artificial Sequence: Synthetic oligonucleotide
agugucauccaguguuuga

SEQ ID NO: 2714658 - RNA, 19 nt, Artificial Sequence
  Description of Artificial Sequence: Synthetic oligonucleotide
ucccucuauaaucuucauc

SEQ ID NO: 2714659 - RNA, 19 nt, Artificial Sequence
  Description of Artificial Sequence: Synthetic oligonucleotide
gacaccggcuccuacaucu

SEQ ID NO: 2714660 - RNA, 19 nt, Artificial Sequence
  Description of Artificial Sequence: Synthetic oligonucleotide
cacuaaccaaaacuaaaga

SEQ ID NO: 2714661 - RNA, 19 nt, Artificial Sequence
  Description of Artificial Sequence: Synthetic oligonucleotide
uccguucacaaaugagcug

SEQ ID NO: 2714662 - RNA, 19 nt, Artificial Sequence
  Description of Artificial Sequence: Synthetic oligonucleotide
ucuuuccugcauccuagaa

SEQ ID NO: 2714663 - RNA, 19 nt, Artificial Sequence
  Description of Artificial Sequence: Synthetic oligonucleotide
acugccaagccagagcgug

SEQ ID NO: 2714664 - RNA, 19 nt, Artificial Sequence
  Description of Artificial Sequence: Synthetic oligonucleotide
agcgcagagaaacgccauc

SEQ ID NO: 2714665 - RNA, 19 nt, Artificial Sequence
  Description of Artificial Sequence: Synthetic oligonucleotide
agagcguggagcuacucuu

SEQ ID NO: 2714666 - RNA, 19 nt, Artificial Sequence
  Description of Artificial Sequence: Synthetic oligonucleotide
cacgaagcgcagagaaacg

SEQ ID NO: 2714667 - RNA, 19 nt, Artificial Sequence
  Description of Artificial Sequence: Synthetic oligonucleotide
cuuccauaacacccagaag

SEQ ID NO: 2714668 - RNA, 19 nt, Artificial Sequence
  Description of Artificial Sequence: Synthetic oligonucleotide
caguggagccgaaaccucc

SEQ ID NO: 2714669 - RNA, 19 nt, Artificial Sequence
  Description of Artificial Sequence: Synthetic oligonucleotide
ugcuccgagagccgcacga

SEQ ID NO: 2714670 - RNA, 19 nt, Artificial Sequence
  Description of Artificial Sequence: Synthetic oligonucleotide
cuccauaggugguauugug

SEQ ID NO: 2714671 - RNA, 19 nt, Artificial Sequence
  Description of Artificial Sequence: Synthetic oligonucleotide
uuccaaaguuaaacagcac

SEQ ID NO: 2714672 - RNA, 19 nt, Artificial Sequence
  Description of Artificial Sequence: Synthetic oligonucleotide
auucccucuauaaucuuca

SEQ ID NO: 2714673 - RNA, 19 nt, Artificial Sequence
  Description of Artificial Sequence: Synthetic oligonucleotide
caaaugagcugugcaauuc

SEQ ID NO: 2714674 - RNA, 19 nt, Artificial Sequence
  Description of Artificial Sequence: Synthetic oligonucleotide
gcuacucuuccauaacacc

SEQ ID NO: 2714675 - RNA, 19 nt, Artificial Sequence
  Description of Artificial Sequence: Synthetic oligonucleotide
agccagagcguggagcuac

SEQ ID NO: 2714676 - RNA, 19 nt, Artificial Sequence
  Description of Artificial Sequence: Synthetic oligonucleotide
caucuaugacaccggcucc

SEQ ID NO: 2714677 - RNA, 19 nt, Artificial Sequence
  Description of Artificial Sequence: Synthetic oligonucleotide
uggagccgaaaccuccuga

SEQ ID NO: 2714678 - RNA, 19 nt, Artificial Sequence
  Description of Artificial Sequence: Synthetic oligonucleotide
ggucguagcccgcagcgcg

SEQ ID NO: 2714679 - RNA, 19 nt, Artificial Sequence
  Description of Artificial Sequence: Synthetic oligonucleotide
cacaacaccaacauucccu

SEQ ID NO: 2714680 - RNA, 19 nt, Artificial Sequence
  Description of Artificial Sequence: Synthetic oligonucleotide
agcgucuucggagcagggc

SEQ ID NO: 2714681 - RNA, 19 nt, Artificial Sequence
  Description of Artificial Sequence: Synthetic oligonucleotide
cccucuauaaucuucaucu

SEQ ID NO: 2714682 - RNA, 19 nt, Artificial Sequence
  Description of Artificial Sequence: Synthetic oligonucleotide
ugguggcaaacgguaaaag

SEQ ID NO: 2714683 - RNA, 19 nt, Artificial Sequence
  Description of Artificial Sequence: Synthetic oligonucleotide
uaggugguauuguguauuc

SEQ ID NO: 2714684 - RNA, 19 nt, Artificial Sequence
  Description of Artificial Sequence: Synthetic oligonucleotide
aaacgccauccucggcccg

SEQ ID NO: 2714685 - RNA, 19 nt, Artificial Sequence
  Description of Artificial Sequence: Synthetic oligonucleotide
ucuucggagcagggcaugg

SEQ ID NO: 2714686 - RNA, 19 nt, Artificial Sequence
  Description of Artificial Sequence: Synthetic oligonucleotide
guggcgugcuccgagagcc

SEQ ID NO: 2714687 - RNA, 19 nt, Artificial Sequence
  Description of Artificial Sequence: Synthetic oligonucleotide
uucucuuuacaguguugaa

SEQ ID NO: 2714688 - RNA, 19 nt, Artificial Sequence
  Description of Artificial Sequence: Synthetic oligonucleotide
ccuagaauacaaaacacua

SEQ ID NO: 2714689 - RNA, 19 nt, Artificial Sequence
  Description of Artificial Sequence: Synthetic oligonucleotide
ugugcaauucgaucaccuu

SEQ ID NO: 2714690 - RNA, 19 nt, Artificial Sequence
  Description of Artificial Sequence: Synthetic oligonucleotide
gaagcgcagagaaacgcca

SEQ ID NO: 2714691 - RNA, 19 nt, Artificial Sequence
  Description of Artificial Sequence: Synthetic oligonucleotide
agcccucuugcugauggac

SEQ ID NO: 2714692 - RNA, 19 nt, Artificial Sequence
  Description of Artificial Sequence: Synthetic oligonucleotide
ggagccgaaaccuccugag

SEQ ID NO: 2714693 - RNA, 19 nt, Artificial Sequence
  Description of Artificial Sequence: Synthetic oligonucleotide
auaggugguauuguguauu

SEQ ID NO: 2714694 - RNA, 19 nt, Artificial Sequence
  Description of Artificial Sequence: Synthetic oligonucleotide
ucuccauaggugguauugu

SEQ ID NO: 2714695 - RNA, 19 nt, Artificial Sequence
  Description of Artificial Sequence: Synthetic oligonucleotide
caucuaugaagugcuuuac

SEQ ID NO: 2714696 - RNA, 19 nt, Artificial Sequence
  Description of Artificial Sequence: Synthetic oligonucleotide
gauggacccggcggcagcg

SEQ ID NO: 2714697 - RNA, 19 nt, Artificial Sequence
  Description of Artificial Sequence: Synthetic oligonucleotide
ucuucuaaguccggauaaa

SEQ ID NO: 2714698 - RNA, 19 nt, Artificial Sequence
  Description of Artificial Sequence: Synthetic oligonucleotide
aaggaacagcuaucugaau

SEQ ID NO: 2714699 - RNA, 19 nt, Artificial Sequence
  Description of Artificial Sequence: Synthetic oligonucleotide
gagccgaaaccuccugagc

SEQ ID NO: 2714700 - RNA, 19 nt, Artificial Sequence
  Description of Artificial Sequence: Synthetic oligonucleotide
cagggcaugguggcaaacg

SEQ ID NO: 2714701 - RNA, 19 nt, Artificial Sequence
  Description of Artificial Sequence: Synthetic oligonucleotide
guguugaaacagcaaaaua

SEQ ID NO: 2714702 - RNA, 19 nt, Artificial Sequence
  Description of Artificial Sequence: Synthetic oligonucleotide
uucuuuccaguggagccga

SEQ ID NO: 2714703 - RNA, 19 nt, Artificial Sequence
  Description of Artificial Sequence: Synthetic oligonucleotide
ugauggacccggcggcagc

SEQ ID NO: 2714704 - RNA, 19 nt, Artificial Sequence
  Description of Artificial Sequence: Synthetic oligonucleotide
gugcuuuacugccaagcca

SEQ ID NO: 2714705 - RNA, 19 nt, Artificial Sequence
  Description of Artificial Sequence: Synthetic oligonucleotide
caguguugaaacagcaaaa

SEQ ID NO: 2714706 - RNA, 19 nt, Artificial Sequence
  Description of Artificial Sequence: Synthetic oligonucleotide
gcauccuagaauacaaaac

SEQ ID NO: 2714707 - RNA, 19 nt, Artificial Sequence
  Description of Artificial Sequence: Synthetic oligonucleotide
guucacaaaugagcugugc

SEQ ID NO: 2714708 - RNA, 19 nt, Artificial Sequence
  Description of Artificial Sequence: Synthetic oligonucleotide
augacaccggcuccuacau

SEQ ID NO: 2714709 - RNA, 19 nt, Artificial Sequence
  Description of Artificial Sequence: Synthetic oligonucleotide
ggaacagcuaucugaaugu

SEQ ID NO: 2714710 - RNA, 19 nt, Artificial Sequence
  Description of Artificial Sequence: Synthetic oligonucleotide
aucuaugacaccggcuccu

SEQ ID NO: 2714711 - RNA, 19 nt, Artificial Sequence
  Description of Artificial Sequence: Synthetic oligonucleotide
guguuugaacuucuucuaa

SEQ ID NO: 2714712 - RNA, 19 nt, Artificial Sequence
  Description of Artificial Sequence: Synthetic oligonucleotide
gcaaacgguaaaagcagag

SEQ ID NO: 2714713 - RNA, 19 nt, Artificial Sequence
  Description of Artificial Sequence: Synthetic oligonucleotide
gcacgaagcgcagagaaac

SEQ ID NO: 2714714 - RNA, 19 nt, Artificial Sequence
  Description of Artificial Sequence: Synthetic oligonucleotide
ucuugcugauggacccggc

SEQ ID NO: 2714715 - RNA, 19 nt, Artificial Sequence
  Description of Artificial Sequence: Synthetic oligonucleotide
gaacuucuucuaaguccgg

SEQ ID NO: 2714716 - RNA, 19 nt, Artificial Sequence
  Description of Artificial Sequence: Synthetic oligonucleotide
gagaaacgccauccucggc

SEQ ID NO: 2714717 - RNA, 19 nt, Artificial Sequence
  Description of Artificial Sequence: Synthetic oligonucleotide
caauggcuuucuccauagg

SEQ ID NO: 2714718 - RNA, 19 nt, Artificial Sequence
  Description of Artificial Sequence: Synthetic oligonucleotide
cagaaggaacagcuaucug

SEQ ID NO: 2714719 - RNA, 19 nt, Artificial Sequence
  Description of Artificial Sequence: Synthetic oligonucleotide
ggcggcagcgucuucggag

SEQ ID NO: 2714720 - RNA, 19 nt, Artificial Sequence
  Description of Artificial Sequence: Synthetic oligonucleotide
gaacagcuaucugaauguc

SEQ ID NO: 2714721 - RNA, 19 nt, Artificial Sequence
  Description of Artificial Sequence: Synthetic oligonucleotide
uuccugcauccuagaauac

SEQ ID NO: 2714722 - RNA, 19 nt, Artificial Sequence
  Description of Artificial Sequence: Synthetic oligonucleotide
cuucuucuaaguccggaua

SEQ ID NO: 2714723 - RNA, 19 nt, Artificial Sequence
  Description of Artificial Sequence: Synthetic oligonucleotide
agcuaucugaaugucuguu

SEQ ID NO: 2714724 - RNA, 19 nt, Artificial Sequence
  Description of Artificial Sequence: Synthetic oligonucleotide
gccccuugcagugucaucc

SEQ ID NO: 2714725 - RNA, 19 nt, Artificial Sequence
  Description of Artificial Sequence: Synthetic oligonucleotide
auacuucaagcaguuuuaa

SEQ ID NO: 2714726 - RNA, 19 nt, Artificial Sequence
  Description of Artificial Sequence: Synthetic oligonucleotide
acagcacaacaccaacauu

SEQ ID NO: 2714727 - RNA, 19 nt, Artificial Sequence
  Description of Artificial Sequence: Synthetic oligonucleotide
aggucguagcccgcagcgc

SEQ ID NO: 2714728 - RNA, 19 nt, Artificial Sequence
  Description of Artificial Sequence: Synthetic oligonucleotide
caugguggcaaacgguaaa

SEQ ID NO: 2714729 - RNA, 19 nt, Artificial Sequence
  Description of Artificial Sequence: Synthetic oligonucleotide
ggcacuguacaggucguag

SEQ ID NO: 2714730 - RNA, 19 nt, Artificial Sequence
  Description of Artificial Sequence: Synthetic oligonucleotide
gagagccgcacgaagcgca

SEQ ID NO: 2714731 - RNA, 19 nt, Artificial Sequence
  Description of Artificial Sequence: Synthetic oligonucleotide
ggagcuacucuuccauaac

SEQ ID NO: 2714732 - RNA, 19 nt, Artificial Sequence
  Description of Artificial Sequence: Synthetic oligonucleotide
cuuuccugcauccuagaau

SEQ ID NO: 2714733 - RNA, 19 nt, Artificial Sequence
  Description of Artificial Sequence: Synthetic oligonucleotide
gcaaaauacuucaagcagu

SEQ ID NO: 2714734 - RNA, 19 nt, Artificial Sequence
  Description of Artificial Sequence: Synthetic oligonucleotide
cuccgagagccgcacgaag

SEQ ID NO: 2714735 - RNA, 19 nt, Artificial Sequence
  Description of Artificial Sequence: Synthetic oligonucleotide
gcacuguacaggucguagc

SEQ ID NO: 2714736 - RNA, 19 nt, Artificial Sequence
  Description of Artificial Sequence: Synthetic oligonucleotide
cuucuaaguccggauaaaa

SEQ ID NO: 2714737 - RNA, 19 nt, Artificial Sequence
  Description of Artificial Sequence: Synthetic oligonucleotide
guagcccgcagcgcgggcg

SEQ ID NO: 2714738 - RNA, 19 nt, Artificial Sequence
  Description of Artificial Sequence: Synthetic oligonucleotide
cuaugacaccggcuccuac

SEQ ID NO: 2714739 - RNA, 19 nt, Artificial Sequence
  Description of Artificial Sequence: Synthetic oligonucleotide
ccuacaucuaugaagugcu

SEQ ID NO: 2714740 - RNA, 19 nt, Artificial Sequence
  Description of Artificial Sequence: Synthetic oligonucleotide
ggugguauuguguauucau

SEQ ID NO: 2714741 - RNA, 19 nt, Artificial Sequence
  Description of Artificial Sequence: Synthetic oligonucleotide
gcagagaaacgccauccuc

SEQ ID NO: 2714742 - RNA, 19 nt, Artificial Sequence
  Description of Artificial Sequence: Synthetic oligonucleotide
cuaucugaaugucuguuuu

SEQ ID NO: 2714743 - RNA, 19 nt, Artificial Sequence
  Description of Artificial Sequence: Synthetic oligonucleotide
gccgaaaccuccugagccc

SEQ ID NO: 2714744 - RNA, 19 nt, Artificial Sequence
  Description of Artificial Sequence: Synthetic oligonucleotide
gugcaauucgaucaccuuu

SEQ ID NO: 2714745 - RNA, 19 nt, Artificial Sequence
  Description of Artificial Sequence: Synthetic oligonucleotide
agccguggcgugcuccgag

SEQ ID NO: 2714746 - RNA, 19 nt, Artificial Sequence
  Description of Artificial Sequence: Synthetic oligonucleotide
uggcgugcuccgagagccg

SEQ ID NO: 2714747 - RNA, 19 nt, Artificial Sequence
  Description of Artificial Sequence: Synthetic oligonucleotide
ccaaaacuaaagacuucuc

SEQ ID NO: 2714748 - RNA, 19 nt, Artificial Sequence
  Description of Artificial Sequence: Synthetic oligonucleotide
ccaguguuugaacuucuuc

SEQ ID NO: 2714749 - RNA, 19 nt, Artificial Sequence
  Description of Artificial Sequence: Synthetic oligonucleotide
cuccuacaucuaugaagug

SEQ ID NO: 2714750 - RNA, 19 nt, Artificial Sequence
  Description of Artificial Sequence: Synthetic oligonucleotide
agccccuugcagugucauc

SEQ ID NO: 2714751 - RNA, 19 nt, Artificial Sequence
  Description of Artificial Sequence: Synthetic oligonucleotide
guuuucacaauggcuuucu

SEQ ID NO: 2714752 - RNA, 19 nt, Artificial Sequence
  Description of Artificial Sequence: Synthetic oligonucleotide
uucccucuauaaucuucau

SEQ ID NO: 2714753 - RNA, 19 nt, Artificial Sequence
  Description of Artificial Sequence: Synthetic oligonucleotide
gcgucuucggagcagggca

SEQ ID NO: 2714754 - RNA, 19 nt, Artificial Sequence
  Description of Artificial Sequence: Synthetic oligonucleotide
gccauccucggcccgagcc

SEQ ID NO: 2714755 - RNA, 19 nt, Artificial Sequence
  Description of Artificial Sequence: Synthetic oligonucleotide
aguggagccgaaaccuccu

SEQ ID NO: 2714756 - RNA, 19 nt, Artificial Sequence
  Description of Artificial Sequence: Synthetic oligonucleotide
ucguagcccgcagcgcggg

SEQ ID NO: 2714757 - RNA, 19 nt, Artificial Sequence
  Description of Artificial Sequence: Synthetic oligonucleotide
ccgagagccgcacgaagcg

SEQ ID NO: 2714758 - RNA, 19 nt, Artificial Sequence
  Description of Artificial Sequence: Synthetic oligonucleotide
ccugcauccuagaauacaa

SEQ ID NO: 2714759 - RNA, 19 nt, Artificial Sequence
  Description of Artificial Sequence: Synthetic oligonucleotide
cacaauggcuuucuccaua

SEQ ID NO: 2714760 - RNA, 19 nt, Artificial Sequence
  Description of Artificial Sequence: Synthetic oligonucleotide
ucuaugacaccggcuccua

SEQ ID NO: 2714761 - RNA, 19 nt, Artificial Sequence
  Description of Artificial Sequence: Synthetic oligonucleotide
gugguauuguguauucaua

SEQ ID NO: 2714762 - RNA, 19 nt, Artificial Sequence
  Description of Artificial Sequence: Synthetic oligonucleotide
cugugcaauucgaucaccu

SEQ ID NO: 2714763 - RNA, 19 nt, Artificial Sequence
  Description of Artificial Sequence: Synthetic oligonucleotide
cgaagcgcagagaaacgcc

SEQ ID NO: 2714764 - RNA, 19 nt, Artificial Sequence
  Description of Artificial Sequence: Synthetic oligonucleotide
cgagcccucuugcugaugg

SEQ ID NO: 2714765 - RNA, 19 nt, Artificial Sequence
  Description of Artificial Sequence: Synthetic oligonucleotide
aggugguauuguguauuca

SEQ ID NO: 2714766 - RNA, 19 nt, Artificial Sequence
  Description of Artificial Sequence: Synthetic oligonucleotide
augagcugugcaauucgau

SEQ ID NO: 2714767 - RNA, 19 nt, Artificial Sequence
  Description of Artificial Sequence: Synthetic oligonucleotide
gcgcagagaaacgccaucc

SEQ ID NO: 2714768 - RNA, 19 nt, Artificial Sequence
  Description of Artificial Sequence: Synthetic oligonucleotide
guggagccgaaaccuccug

SEQ ID NO: 2714769 - RNA, 19 nt, Artificial Sequence
  Description of Artificial Sequence: Synthetic oligonucleotide
caaacgguaaaagcagagu

SEQ ID NO: 2714770 - RNA, 19 nt, Artificial Sequence
  Description of Artificial Sequence: Synthetic oligonucleotide
ugacaccggcuccuacauc

SEQ ID NO: 2714771 - RNA, 19 nt, Artificial Sequence
  Description of Artificial Sequence: Synthetic oligonucleotide
gucguagcccgcagcgcgg

SEQ ID NO: 2714772 - RNA, 19 nt, Artificial Sequence
  Description of Artificial Sequence: Synthetic oligonucleotide
accggcuccuacaucuaug

SEQ ID NO: 2714773 - RNA, 19 nt, Artificial Sequence
  Description of Artificial Sequence: Synthetic oligonucleotide
cagugucauccaguguuug

SEQ ID NO: 2714774 - RNA, 19 nt, Artificial Sequence
  Description of Artificial Sequence: Synthetic oligonucleotide
cugagccccuugcaguguc

SEQ ID NO: 2714775 - RNA, 19 nt, Artificial Sequence
  Description of Artificial Sequence: Synthetic oligonucleotide
cugcauccuagaauacaaa

SEQ ID NO: 2714776 - RNA, 19 nt, Artificial Sequence
  Description of Artificial Sequence: Synthetic oligonucleotide
ccaagccagagcguggagc

SEQ ID NO: 2714777 - RNA, 19 nt, Artificial Sequence
  Description of Artificial Sequence: Synthetic oligonucleotide
cagcgucuucggagcaggg

SEQ ID NO: 2714778 - RNA, 19 nt, Artificial Sequence
  Description of Artificial Sequence: Synthetic oligonucleotide
ccauaggugguauugugua

SEQ ID NO: 2714779 - RNA, 19 nt, Artificial Sequence
  Description of Artificial Sequence: Synthetic oligonucleotide
cugauggacccggcggcag

SEQ ID NO: 2714780 - RNA, 19 nt, Artificial Sequence
  Description of Artificial Sequence: Synthetic oligonucleotide
gcggcagcgucuucggagc

SEQ ID NO: 2714781 - RNA, 19 nt, Artificial Sequence
  Description of Artificial Sequence: Synthetic oligonucleotide
gagcguggagcuacucuuc

SEQ ID NO: 2714782 - RNA, 19 nt, Artificial Sequence
  Description of Artificial Sequence: Synthetic oligonucleotide
cacaaaugagcugugcaau

SEQ ID NO: 2714783 - RNA, 19 nt, Artificial Sequence
  Description of Artificial Sequence: Synthetic oligonucleotide
uggacccggcggcagcguc

SEQ ID NO: 2714784 - RNA, 19 nt, Artificial Sequence
  Description of Artificial Sequence: Synthetic oligonucleotide
ggcaugguggcaaacggua

SEQ ID NO: 2714785 - RNA, 19 nt, Artificial Sequence
  Description of Artificial Sequence: Synthetic oligonucleotide
cauaggugguauuguguau

SEQ ID NO: 2714786 - RNA, 19 nt, Artificial Sequence
  Description of Artificial Sequence: Synthetic oligonucleotide
ggcaaacgguaaaagcaga

SEQ ID NO: 2714787 - RNA, 19 nt, Artificial Sequence
  Description of Artificial Sequence: Synthetic oligonucleotide
guacaggucguagcccgca

SEQ ID NO: 2714788 - RNA, 19 nt, Artificial Sequence
  Description of Artificial Sequence: Synthetic oligonucleotide
ggcccgagcccucuugcug

SEQ ID NO: 2714789 - RNA, 19 nt, Artificial Sequence
  Description of Artificial Sequence: Synthetic oligonucleotide
gucuucggagcagggcaug

SEQ ID NO: 2714790 - RNA, 19 nt, Artificial Sequence
  Description of Artificial Sequence: Synthetic oligonucleotide
cucggcccgagcccucuug

SEQ ID NO: 2714791 - RNA, 19 nt, Artificial Sequence
  Description of Artificial Sequence: Synthetic oligonucleotide
guggagcuacucuuccaua

SEQ ID NO: 2714792 - RNA, 19 nt, Artificial Sequence
  Description of Artificial Sequence: Synthetic oligonucleotide
ccauccucggcccgagccc

SEQ ID NO: 2714793 - RNA, 19 nt, Artificial Sequence
  Description of Artificial Sequence: Synthetic oligonucleotide
gcugugcaauucgaucacc

SEQ ID NO: 2714794 - RNA, 19 nt, Artificial Sequence
  Description of Artificial Sequence: Synthetic oligonucleotide
gugcuccgagagccgcacg

SEQ ID NO: 2714795 - RNA, 19 nt, Artificial Sequence
  Description of Artificial Sequence: Synthetic oligonucleotide
cagagcguggagcuacucu

SEQ ID NO: 2714796 - RNA, 19 nt, Artificial Sequence
  Description of Artificial Sequence: Synthetic oligonucleotide
gagcccucuugcugaugga

SEQ ID NO: 2714797 - RNA, 19 nt, Artificial Sequence
  Description of Artificial Sequence: Synthetic oligonucleotide
ccaguggagccgaaaccuc

SEQ ID NO: 2714798 - RNA, 19 nt, Artificial Sequence
  Description of Artificial Sequence: Synthetic oligonucleotide
cuuuccaguggagccgaaa

SEQ ID NO: 2714799 - RNA, 19 nt, Artificial Sequence
  Description of Artificial Sequence: Synthetic oligonucleotide
gcuaucugaaugucuguuu

SEQ ID NO: 2714800 - RNA, 19 nt, Artificial Sequence
  Description of Artificial Sequence: Synthetic oligonucleotide
gcgcgugggagccguggcg

SEQ ID NO: 2714801 - RNA, 19 nt, Artificial Sequence
  Description of Artificial Sequence: Synthetic oligonucleotide
ccggcuccuacaucuauga

SEQ ID NO: 2714802 - RNA, 19 nt, Artificial Sequence
  Description of Artificial Sequence: Synthetic oligonucleotide
ccguucacaaaugagcugu

SEQ ID NO: 2714803 - RNA, 19 nt, Artificial Sequence
  Description of Artificial Sequence: Synthetic oligonucleotide
cacccagaaggaacagcua

SEQ ID NO: 2714804 - RNA, 19 nt, Artificial Sequence
  Description of Artificial Sequence: Synthetic oligonucleotide
ggcagcgucuucggagcag

SEQ ID NO: 2714805 - RNA, 19 nt, Artificial Sequence
  Description of Artificial Sequence: Synthetic oligonucleotide
ggacccgcgcgugggagcc

SEQ ID NO: 2714806 - RNA, 19 nt, Artificial Sequence
  Description of Artificial Sequence: Synthetic oligonucleotide
uccucggcccgagcccucu

SEQ ID NO: 2714807 - RNA, 19 nt, Artificial Sequence
  Description of Artificial Sequence: Synthetic oligonucleotide
cguucacaaaugagcugug

SEQ ID NO: 2714808 - RNA, 19 nt, Artificial Sequence
  Description of Artificial Sequence: Synthetic oligonucleotide
cccggcggcagcgucuucg

SEQ ID NO: 2714809 - RNA, 19 nt, Artificial Sequence
  Description of Artificial Sequence: Synthetic oligonucleotide
ccagaaggaacagcuaucu

SEQ ID NO: 2714810 - RNA, 19 nt, Artificial Sequence
  Description of Artificial Sequence: Synthetic oligonucleotide
ggcgugcuccgagagccgc

SEQ ID NO: 2714811 - RNA, 19 nt, Artificial Sequence
  Description of Artificial Sequence: Synthetic oligonucleotide
guguauucauaggcacugu

SEQ ID NO: 2714812 - RNA, 19 nt, Artificial Sequence
  Description of Artificial Sequence: Synthetic oligonucleotide
ccgcacgaagcgcagagaa

SEQ ID NO: 2714813 - RNA, 19 nt, Artificial Sequence
  Description of Artificial Sequence: Synthetic oligonucleotide
gcuuucuccauagguggua

SEQ ID NO: 2714814 - RNA, 19 nt, Artificial Sequence
  Description of Artificial Sequence: Synthetic oligonucleotide
gcguggagcuacucuucca

SEQ ID NO: 2714815 - RNA, 19 nt, Artificial Sequence
  Description of Artificial Sequence: Synthetic oligonucleotide
ccggcggcagcgucuucgg

SEQ ID NO: 2714816 - RNA, 19 nt, Artificial Sequence
  Description of Artificial Sequence: Synthetic oligonucleotide
gggagccguggcgugcucc

SEQ ID NO: 2714817 - RNA, 19 nt, Artificial Sequence
  Description of Artificial Sequence: Synthetic oligonucleotide
cuacaucuaugaagugcuu

SEQ ID NO: 2714818 - RNA, 19 nt, Artificial Sequence
  Description of Artificial Sequence: Synthetic oligonucleotide
gcgcgggcggacccgcgcg

SEQ ID NO: 2714819 - RNA, 19 nt, Artificial Sequence
  Description of Artificial Sequence: Synthetic oligonucleotide
gaaaccuccugagccccuu

SEQ ID NO: 2714820 - RNA, 19 nt, Artificial Sequence
  Description of Artificial Sequence: Synthetic oligonucleotide
caccaacauucccucuaua

SEQ ID NO: 2714821 - RNA, 19 nt, Artificial Sequence
  Description of Artificial Sequence: Synthetic oligonucleotide
ccguggcgugcuccgagag

SEQ ID NO: 2714822 - RNA, 19 nt, Artificial Sequence
  Description of Artificial Sequence: Synthetic oligonucleotide
gcaugguggcaaacgguaa

SEQ ID NO: 2714823 - RNA, 19 nt, Artificial Sequence
  Description of Artificial Sequence: Synthetic oligonucleotide
cagcgcgggcggacccgcg

SEQ ID NO: 2714824 - RNA, 19 nt, Artificial Sequence
  Description of Artificial Sequence: Synthetic oligonucleotide
gacccgcgcgugggagccg

SEQ ID NO: 2714825 - RNA, 19 nt, Artificial Sequence
  Description of Artificial Sequence: Synthetic oligonucleotide
aggcacuguacaggucgua

SEQ ID NO: 2714826 - RNA, 19 nt, Artificial Sequence
  Description of Artificial Sequence: Synthetic oligonucleotide
cguggcgugcuccgagagc

SEQ ID NO: 2714827 - RNA, 19 nt, Artificial Sequence
  Description of Artificial Sequence: Synthetic oligonucleotide
gggcggacccgcgcguggg

SEQ ID NO: 2714828 - RNA, 19 nt, Artificial Sequence
  Description of Artificial Sequence: Synthetic oligonucleotide
ggagcagggcaugguggca

SEQ ID NO: 2714829 - RNA, 19 nt, Artificial Sequence
  Description of Artificial Sequence: Synthetic oligonucleotide
auggacccggcggcagcgu

SEQ ID NO: 2714830 - RNA, 19 nt, Artificial Sequence
  Description of Artificial Sequence: Synthetic oligonucleotide
auccucggcccgagcccuc

SEQ ID NO: 2714831 - RNA, 19 nt, Artificial Sequence
  Description of Artificial Sequence: Synthetic oligonucleotide
ccauaacacccagaaggaa

SEQ ID NO: 2714832 - RNA, 19 nt, Artificial Sequence
  Description of Artificial Sequence: Synthetic oligonucleotide
acccgcgcgugggagccgu

SEQ ID NO: 2714833 - RNA, 19 nt, Artificial Sequence
  Description of Artificial Sequence: Synthetic oligonucleotide
cauccucggcccgagcccu

SEQ ID NO: 2714834 - RNA, 19 nt, Artificial Sequence
  Description of Artificial Sequence: Synthetic oligonucleotide
gcggacccgcgcgugggag

SEQ ID NO: 2714835 - RNA, 19 nt, Artificial Sequence
  Description of Artificial Sequence: Synthetic oligonucleotide
gccguggcgugcuccgaga

SEQ ID NO: 2714836 - RNA, 19 nt, Artificial Sequence
  Description of Artificial Sequence: Synthetic oligonucleotide
gagccguggcgugcuccga

SEQ ID NO: 2714837 - RNA, 19 nt, Artificial Sequence
  Description of Artificial Sequence: Synthetic oligonucleotide
ggcuuucuccauagguggu

SEQ ID NO: 2714838 - RNA, 19 nt, Artificial Sequence
  Description of Artificial Sequence: Synthetic oligonucleotide
gggcaugguggcaaacggu

SEQ ID NO: 2714839 - RNA, 19 nt, Artificial Sequence
  Description of Artificial Sequence: Synthetic oligonucleotide
ccccuugcagugucaucca

SEQ ID NO: 2714840 - RNA, 19 nt, Artificial Sequence
  Description of Artificial Sequence: Synthetic oligonucleotide
cgugcuccgagagccgcac

SEQ ID NO: 2714841 - RNA, 19 nt, Artificial Sequence
  Description of Artificial Sequence: Synthetic oligonucleotide
cguggagcuacucuuccau

SEQ ID NO: 2714842 - RNA, 19 nt, Artificial Sequence
  Description of Artificial Sequence: Synthetic oligonucleotide
caccggcuccuacaucuau

SEQ ID NO: 2714843 - RNA, 19 nt, Artificial Sequence
  Description of Artificial Sequence: Synthetic oligonucleotide
cgcgcgugggagccguggc

SEQ ID NO: 2714844 - RNA, 19 nt, Artificial Sequence
  Description of Artificial Sequence: Synthetic oligonucleotide
gcuccgagagccgcacgaa

SEQ ID NO: 2714845 - RNA, 19 nt, Artificial Sequence
  Description of Artificial Sequence: Synthetic oligonucleotide
cgguaaaagcagagugcaa

SEQ ID NO: 2714846 - RNA, 19 nt, Artificial Sequence
  Description of Artificial Sequence: Synthetic oligonucleotide
cggacccgcgcgugggagc

SEQ ID NO: 2714847 - RNA, 19 nt, Artificial Sequence
  Description of Artificial Sequence: Synthetic oligonucleotide
ccagagcguggagcuacuc

SEQ ID NO: 2714848 - RNA, 19 nt, Artificial Sequence
  Description of Artificial Sequence: Synthetic oligonucleotide
cgcacgaagcgcagagaaa

SEQ ID NO: 2714849 - RNA, 19 nt, Artificial Sequence
  Description of Artificial Sequence: Synthetic oligonucleotide
gcagugucauccaguguuu

SEQ ID NO: 2714850 - RNA, 19 nt, Artificial Sequence
  Description of Artificial Sequence: Synthetic oligonucleotide
gccgcacgaagcgcagaga

SEQ ID NO: 2714851 - RNA, 19 nt, Artificial Sequence
  Description of Artificial Sequence: Synthetic oligonucleotide
ggcggacccgcgcguggga

SEQ ID NO: 2714852 - RNA, 19 nt, Artificial Sequence
  Description of Artificial Sequence: Synthetic oligonucleotide
ccgcagcgcgggcggaccc

SEQ ID NO: 2714853 - RNA, 19 nt, Artificial Sequence
  Description of Artificial Sequence: Synthetic oligonucleotide
agcccgcagcgcgggcgga

SEQ ID NO: 2714854 - RNA, 19 nt, Artificial Sequence
  Description of Artificial Sequence: Synthetic oligonucleotide
cgcagagaaacgccauccu

SEQ ID NO: 2714855 - RNA, 19 nt, Artificial Sequence
  Description of Artificial Sequence: Synthetic oligonucleotide
gcgugcuccgagagccgca

SEQ ID NO: 2714856 - RNA, 19 nt, Artificial Sequence
  Description of Artificial Sequence: Synthetic oligonucleotide
cguagcccgcagcgcgggc

SEQ ID NO: 2714857 - RNA, 19 nt, Artificial Sequence
  Description of Artificial Sequence: Synthetic oligonucleotide
ggacccggcggcagcgucu

SEQ ID NO: 2714858 - RNA, 19 nt, Artificial Sequence
  Description of Artificial Sequence: Synthetic oligonucleotide
gcgggcggacccgcgcgug

SEQ ID NO: 2714859 - RNA, 19 nt, Artificial Sequence
  Description of Artificial Sequence: Synthetic oligonucleotide
ccgagcccucuugcugaug

SEQ ID NO: 2714860 - RNA, 19 nt, Artificial Sequence
  Description of Artificial Sequence: Synthetic oligonucleotide
cgucuucggagcagggcau

SEQ ID NO: 2714861 - RNA, 19 nt, Artificial Sequence
  Description of Artificial Sequence: Synthetic oligonucleotide
gcccgcagcgcgggcggac

SEQ ID NO: 2714862 - RNA, 19 nt, Artificial Sequence
  Description of Artificial Sequence: Synthetic oligonucleotide
ccugagccccuugcagugu

SEQ ID NO: 2714863 - RNA, 19 nt, Artificial Sequence
  Description of Artificial Sequence: Synthetic oligonucleotide
cccgcgcgugggagccgug

SEQ ID NO: 2714864 - RNA, 19 nt, Artificial Sequence
  Description of Artificial Sequence: Synthetic oligonucleotide
cgcgugggagccguggcgu

SEQ ID NO: 2714865 - RNA, 19 nt, Artificial Sequence
  Description of Artificial Sequence: Synthetic oligonucleotide
cccgagcccucuugcugau

SEQ ID NO: 2714866 - RNA, 19 nt, Artificial Sequence
  Description of Artificial Sequence: Synthetic oligonucleotide
cggcggcagcgucuucgga

SEQ ID NO: 2714867 - RNA, 19 nt, Artificial Sequence
  Description of Artificial Sequence: Synthetic oligonucleotide
cggcccgagcccucuugcu

SEQ ID NO: 2714868 - RNA, 19 nt, Artificial Sequence
  Description of Artificial Sequence: Synthetic oligonucleotide
cgcgggcggacccgcgcgu

SEQ ID NO: 2714869 - RNA, 19 nt, Artificial Sequence
  Description of Artificial Sequence: Synthetic oligonucleotide
ccucggcccgagcccucuu

SEQ ID NO: 2714870 - RNA, 19 nt, Artificial Sequence
  Description of Artificial Sequence: Synthetic oligonucleotide
aacuauguaacuuugcuug

SEQ ID NO: 2714871 - RNA, 19 nt, Artificial Sequence
  Description of Artificial Sequence: Synthetic oligonucleotide
ucagccaagaaauagauug

SEQ ID NO: 2714872 - RNA, 19 nt, Artificial Sequence
  Description of Artificial Sequence: Synthetic oligonucleotide
ucuuugaacaccuuguagg

SEQ ID NO: 2714873 - RNA, 19 nt, Artificial Sequence
  Description of Artificial Sequence: Synthetic oligonucleotide
aucacgaagauacuguucc

SEQ ID NO: 2714874 - RNA, 19 nt, Artificial Sequence
  Description of Artificial Sequence: Synthetic oligonucleotide
aaacaugaaggguaauugc

SEQ ID NO: 2714875 - RNA, 19 nt, Artificial Sequence
  Description of Artificial Sequence: Synthetic oligonucleotide
aaggguaauugccagaagg

SEQ ID NO: 2714876 - RNA, 19 nt, Artificial Sequence
  Description of Artificial Sequence: Synthetic oligonucleotide
  modified_base (7)..(7): a, c, u, g, unknown or other
uuaugcnccuucaagagca

SEQ ID NO: 2714877 - RNA, 19 nt, Artificial Sequence
  Description of Artificial Sequence: Synthetic oligonucleotide
aacaugaaggguaauugcc

SEQ ID NO: 2714878 - RNA, 19 nt, Artificial Sequence
  Description of Artificial Sequence: Synthetic oligonucleotide
  modified_base (10)..(10): a, c, u, g, unknown or other
ucauuaugcnccuucaaga

SEQ ID NO: 2714879 - RNA, 19 nt, Artificial Sequence
  Description of Artificial Sequence: Synthetic oligonucleotide
aacggaagcacuuagccca

SEQ ID NO: 2714880 - RNA, 19 nt, Artificial Sequence
  Description of Artificial Sequence: Synthetic oligonucleotide
agaaauagauuguuccagc

SEQ ID NO: 2714881 - RNA, 19 nt, Artificial Sequence
  Description of Artificial Sequence: Synthetic oligonucleotide
uggaugagcauguagauga

SEQ ID NO: 2714882 - RNA, 19 nt, Artificial Sequence
  Description of Artificial Sequence: Synthetic oligonucleotide
uuugugggaacuaacaggu

SEQ ID NO: 2714883 - RNA, 19 nt, Artificial Sequence
  Description of Artificial Sequence: Synthetic oligonucleotide
ucaaaugcagggaaccugg

SEQ ID NO: 2714884 - RNA, 19 nt, Artificial Sequence
  Description of Artificial Sequence: Synthetic oligonucleotide
  modified_base (11)..(11): a, c, u, g, unknown or other
uucauuaugcnccuucaag

SEQ ID NO: 2714885 - RNA, 19 nt, Artificial Sequence
  Description of Artificial Sequence: Synthetic oligonucleotide
uaaucuaagcaccauucag

SEQ ID NO: 2714886 - RNA, 19 nt, Artificial Sequence
  Description of Artificial Sequence: Synthetic oligonucleotide
aauagauuguuccagccau

SEQ ID NO: 2714887 - RNA, 19 nt, Artificial Sequence
  Description of Artificial Sequence: Synthetic oligonucleotide
cauggcacaacccauagcc

SEQ ID NO: 2714888 - RNA, 19 nt, Artificial Sequence
  Description of Artificial Sequence: Synthetic oligonucleotide
cauucagcaaacuugcagg

SEQ ID NO: 2714889 - RNA, 19 nt, Artificial Sequence
  Description of Artificial Sequence: Synthetic oligonucleotide
aaaugcagggaaccuggcc

SEQ ID NO: 2714890 - RNA, 19 nt, Artificial Sequence
  Description of Artificial Sequence: Synthetic oligonucleotide
aagaaauagauuguuccag

SEQ ID NO: 2714891 - RNA, 19 nt, Artificial Sequence
  Description of Artificial Sequence: Synthetic oligonucleotide
  modified_base (4)..(4): a, c, u, g, unknown or other
ugcnccuucaagagcaacg

SEQ ID NO: 2714892 - RNA, 19 nt, Artificial Sequence
  Description of Artificial Sequence: Synthetic oligonucleotide
cuuugugggaacuaacagg

SEQ ID NO: 2714893 - RNA, 19 nt, Artificial Sequence
  Description of Artificial Sequence: Synthetic oligonucleotide
  modified_base (8)..(8): a, c, u, g, unknown or other
auuaugcnccuucaagagc

SEQ ID NO: 2714894 - RNA, 19 nt, Artificial Sequence
  Description of Artificial Sequence: Synthetic oligonucleotide
uacuguuccucuuugaaca

SEQ ID NO: 2714895 - RNA, 19 nt, Artificial Sequence
  Description of Artificial Sequence: Synthetic oligonucleotide
uguagaugaccccaggggc

SEQ ID NO: 2714896 - RNA, 19 nt, Artificial Sequence
  Description of Artificial Sequence: Synthetic oligonucleotide
gagucauccaaacaugaag

SEQ ID NO: 2714897 - RNA, 19 nt, Artificial Sequence
  Description of Artificial Sequence: Synthetic oligonucleotide
guaggcaucacgaagauac

SEQ ID NO: 2714898 - RNA, 19 nt, Artificial Sequence
  Description of Artificial Sequence: Synthetic oligonucleotide
ugugggaacuaacagguca

SEQ ID NO: 2714899 - RNA, 19 nt, Artificial Sequence
  Description of Artificial Sequence: Synthetic oligonucleotide
aaauagauuguuccagcca

SEQ ID NO: 2714900 - RNA, 19 nt, Artificial Sequence
  Description of Artificial Sequence: Synthetic oligonucleotide
ugugugagguuguagagug

SEQ ID NO: 2714901 - RNA, 19 nt, Artificial Sequence
  Description of Artificial Sequence: Synthetic oligonucleotide
aagcacuuagcccaggcug

SEQ ID NO: 2714902 - RNA, 19 nt, Artificial Sequence
  Description of Artificial Sequence: Synthetic oligonucleotide
auucagcaaacuugcaggc

SEQ ID NO: 2714903 - RNA, 19 nt, Artificial Sequence
  Description of Artificial Sequence: Synthetic oligonucleotide
uuguagagugccaggaagg

SEQ ID NO: 2714904 - RNA, 19 nt, Artificial Sequence
  Description of Artificial Sequence: Synthetic oligonucleotide
ucaucuggcagacaaaguc

SEQ ID NO: 2714905 - RNA, 19 nt, Artificial Sequence
  Description of Artificial Sequence: Synthetic oligonucleotide
uuucagagcucaaaugcag

SEQ ID NO: 2714906 - RNA, 19 nt, Artificial Sequence
  Description of Artificial Sequence: Synthetic oligonucleotide
augagcauguagaugaccc

SEQ ID NO: 2714907 - RNA, 19 nt, Artificial Sequence
  Description of Artificial Sequence: Synthetic oligonucleotide
acaaagucuacacugggcu

SEQ ID NO: 2714908 - RNA, 19 nt, Artificial Sequence
  Description of Artificial Sequence: Synthetic oligonucleotide
uguaacuuugcuuggcuca

SEQ ID NO: 2714909 - RNA, 19 nt, Artificial Sequence
  Description of Artificial Sequence: Synthetic oligonucleotide
aaagucuacacugggcuuc

SEQ ID NO: 2714910 - RNA, 19 nt, Artificial Sequence
  Description of Artificial Sequence: Synthetic oligonucleotide
ucuugugugagguuguaga

SEQ ID NO: 2714911 - RNA, 19 nt, Artificial Sequence
  Description of Artificial Sequence: Synthetic oligonucleotide
auacuguuccucuuugaac

SEQ ID NO: 2714912 - RNA, 19 nt, Artificial Sequence
  Description of Artificial Sequence: Synthetic oligonucleotide
agucauccaaacaugaagg

SEQ ID NO: 2714913 - RNA, 19 nt, Artificial Sequence
  Description of Artificial Sequence: Synthetic oligonucleotide
  modified_base (9)..(9): a, c, u, g, unknown or other
cauuaugcnccuucaagag

SEQ ID NO: 2714914 - RNA, 19 nt, Artificial Sequence
  Description of Artificial Sequence: Synthetic oligonucleotide
cuuugaacaccuuguaggc

SEQ ID NO: 2714915 - RNA, 19 nt, Artificial Sequence
  Description of Artificial Sequence: Synthetic oligonucleotide
uucaaagagggagaagggg

SEQ ID NO: 2714916 - RNA, 19 nt, Artificial Sequence
  Description of Artificial Sequence: Synthetic oligonucleotide
agggucaugcugcaggggc

SEQ ID NO: 2714917 - RNA, 19 nt, Artificial Sequence
  Description of Artificial Sequence: Synthetic oligonucleotide
aaggcauaggcauucccug

SEQ ID NO: 2714918 - RNA, 19 nt, Artificial Sequence
  Description of Artificial Sequence: Synthetic oligonucleotide
aaacuauguaacuuugcuu

SEQ ID NO: 2714919 - RNA, 19 nt, Artificial Sequence
  Description of Artificial Sequence: Synthetic oligonucleotide
aacaggucagccaagaaau

SEQ ID NO: 2714920 - RNA, 19 nt, Artificial Sequence
  Description of Artificial Sequence: Synthetic oligonucleotide
acuauguaacuuugcuugg

SEQ ID NO: 2714921 - RNA, 19 nt, Artificial Sequence
  Description of Artificial Sequence: Synthetic oligonucleotide
uggacaagcaggucucugg

SEQ ID NO: 2714922 - RNA, 19 nt, Artificial Sequence
  Description of Artificial Sequence: Synthetic oligonucleotide
uauguaacuuugcuuggcu

SEQ ID NO: 2714923 - RNA, 19 nt, Artificial Sequence
  Description of Artificial Sequence: Synthetic oligonucleotide
agcucaaaugcagggaacc

SEQ ID NO: 2714924 - RNA, 19 nt, Artificial Sequence
  Description of Artificial Sequence: Synthetic oligonucleotide
uccucuuugaacaccuugu

SEQ ID NO: 2714925 - RNA, 19 nt, Artificial Sequence
  Description of Artificial Sequence: Synthetic oligonucleotide
guaauugccagaaggaaac

SEQ ID NO: 2714926 - RNA, 19 nt, Artificial Sequence
  Description of Artificial Sequence: Synthetic oligonucleotide
agacaaagucuacacuggg

SEQ ID NO: 2714927 - RNA, 19 nt, Artificial Sequence
  Description of Artificial Sequence: Synthetic oligonucleotide
caccauucagcaaacuugc

SEQ ID NO: 2714928 - RNA, 19 nt, Artificial Sequence
  Description of Artificial Sequence: Synthetic oligonucleotide
cuucaaagagggagaaggg

SEQ ID NO: 2714929 - RNA, 19 nt, Artificial Sequence
  Description of Artificial Sequence: Synthetic oligonucleotide
cagacaaagucuacacugg

SEQ ID NO: 2714930 - RNA, 19 nt, Artificial Sequence
  Description of Artificial Sequence: Synthetic oligonucleotide
gcagacaaagucuacacug

SEQ ID NO: 2714931 - RNA, 19 nt, Artificial Sequence
  Description of Artificial Sequence: Synthetic oligonucleotide
aaguacacaguuucauuau

SEQ ID NO: 2714932 - RNA, 19 nt, Artificial Sequence
  Description of Artificial Sequence: Synthetic oligonucleotide
auugccagaaggaaacuuc

SEQ ID NO: 2714933 - RNA, 19 nt, Artificial Sequence
  Description of Artificial Sequence: Synthetic oligonucleotide
gucauccaaacaugaaggg

SEQ ID NO: 2714934 - RNA, 19 nt, Artificial Sequence
  Description of Artificial Sequence: Synthetic oligonucleotide
cauguagaugaccccaggg

SEQ ID NO: 2714935 - RNA, 19 nt, Artificial Sequence
  Description of Artificial Sequence: Synthetic oligonucleotide
guacuucacaucuugugug

SEQ ID NO: 2714936 - RNA, 19 nt, Artificial Sequence
  Description of Artificial Sequence: Synthetic oligonucleotide
gaaggaaacuucaucuggc

SEQ ID NO: 2714937 - RNA, 19 nt, Artificial Sequence
  Description of Artificial Sequence: Synthetic oligonucleotide
uucaccaaacuauguaacu

SEQ ID NO: 2714938 - RNA, 19 nt, Artificial Sequence
  Description of Artificial Sequence: Synthetic oligonucleotide
acuuagcccaggcugggac

SEQ ID NO: 2714939 - RNA, 19 nt, Artificial Sequence
  Description of Artificial Sequence: Synthetic oligonucleotide
caugaaggguaauugccag

SEQ ID NO: 2714940 - RNA, 19 nt, Artificial Sequence
  Description of Artificial Sequence: Synthetic oligonucleotide
uggagucauccaaacauga

SEQ ID NO: 2714941 - RNA, 19 nt, Artificial Sequence
  Description of Artificial Sequence: Synthetic oligonucleotide
cuucaccaaacuauguaac

SEQ ID NO: 2714942 - RNA, 19 nt, Artificial Sequence
  Description of Artificial Sequence: Synthetic oligonucleotide
uucaagagcaacggaagca

SEQ ID NO: 2714943 - RNA, 19 nt, Artificial Sequence
  Description of Artificial Sequence: Synthetic oligonucleotide
accacaucagcacagcggu

SEQ ID NO: 2714944 - RNA, 19 nt, Artificial Sequence
  Description of Artificial Sequence: Synthetic oligonucleotide
auguaacuuugcuuggcuc

SEQ ID NO: 2714945 - RNA, 19 nt, Artificial Sequence
  Description of Artificial Sequence: Synthetic oligonucleotide
uucagcaguccauacugcc

SEQ ID NO: 2714946 - RNA, 19 nt, Artificial Sequence
  Description of Artificial Sequence: Synthetic oligonucleotide
cuugugugagguuguagag

SEQ ID NO: 2714947 - RNA, 19 nt, Artificial Sequence
  Description of Artificial Sequence: Synthetic oligonucleotide
uuguaggccuggaugagca

SEQ ID NO: 2714948 - RNA, 19 nt, Artificial Sequence
  Description of Artificial Sequence: Synthetic oligonucleotide
gaacuaacaggucagccaa

SEQ ID NO: 2714949 - RNA, 19 nt, Artificial Sequence
  Description of Artificial Sequence: Synthetic oligonucleotide
uucacaucuugugugaggu

SEQ ID NO: 2714950 - RNA, 19 nt, Artificial Sequence
  Description of Artificial Sequence: Synthetic oligonucleotide
ccuucaaagagggagaagg

SEQ ID NO: 2714951 - RNA, 19 nt, Artificial Sequence
  Description of Artificial Sequence: Synthetic oligonucleotide
aguacacaguuucauuaug

SEQ ID NO: 2714952 - RNA, 19 nt, Artificial Sequence
  Description of Artificial Sequence: Synthetic oligonucleotide
ugggcuucaccaaacuaug

SEQ ID NO: 2714953 - RNA, 19 nt, Artificial Sequence
  Description of Artificial Sequence: Synthetic oligonucleotide
agguacuucacaucuugug

SEQ ID NO: 2714954 - RNA, 19 nt, Artificial Sequence
  Description of Artificial Sequence: Synthetic oligonucleotide
agauuguuccagccauccc

SEQ ID NO: 2714955 - RNA, 19 nt, Artificial Sequence
  Description of Artificial Sequence: Synthetic oligonucleotide
ugagguuguagagugccag

SEQ ID NO: 2714956 - RNA, 19 nt, Artificial Sequence
  Description of Artificial Sequence: Synthetic oligonucleotide
gauacuguuccucuuugaa

SEQ ID NO: 2714957 - RNA, 19 nt, Artificial Sequence
  Description of Artificial Sequence: Synthetic oligonucleotide
uugccagaaggaaacuuca

SEQ ID NO: 2714958 - RNA, 19 nt, Artificial Sequence
  Description of Artificial Sequence: Synthetic oligonucleotide
aggcauaggcauucccugc

SEQ ID NO: 2714959 - RNA, 19 nt, Artificial Sequence
  Description of Artificial Sequence: Synthetic oligonucleotide
gaaacuucaucuggcagac

SEQ ID NO: 2714960 - RNA, 19 nt, Artificial Sequence
  Description of Artificial Sequence: Synthetic oligonucleotide
uagauuguuccagccaucc

SEQ ID NO: 2714961 - RNA, 19 nt, Artificial Sequence
  Description of Artificial Sequence: Synthetic oligonucleotide
agcgguaggcaucacgaag

SEQ ID NO: 2714962 - RNA, 19 nt, Artificial Sequence
  Description of Artificial Sequence: Synthetic oligonucleotide
auaggcauucccugcagca

SEQ ID NO: 2714963 - RNA, 19 nt, Artificial Sequence
  Description of Artificial Sequence: Synthetic oligonucleotide
gauuguuccagccaucccu

SEQ ID NO: 2714964 - RNA, 19 nt, Artificial Sequence
  Description of Artificial Sequence: Synthetic oligonucleotide
ugaaggguaauugccagaa

SEQ ID NO: 2714965 - RNA, 19 nt, Artificial Sequence
  Description of Artificial Sequence: Synthetic oligonucleotide
ucagcaguccauacugcca

SEQ ID NO: 2714966 - RNA, 19 nt, Artificial Sequence
  Description of Artificial Sequence: Synthetic oligonucleotide
cuucaagagcaacggaagc

SEQ ID NO: 2714967 - RNA, 19 nt, Artificial Sequence
  Description of Artificial Sequence: Synthetic oligonucleotide
acgaagauacuguuccucu

SEQ ID NO: 2714968 - RNA, 19 nt, Artificial Sequence
  Description of Artificial Sequence: Synthetic oligonucleotide
  modified_base (12)..(12): a, c, u, g, unknown or other
uuucauuaugcnccuucaa

SEQ ID NO: 2714969 - RNA, 19 nt, Artificial Sequence
  Description of Artificial Sequence: Synthetic oligonucleotide
agagcucaaaugcagggaa

SEQ ID NO: 2714970 - RNA, 19 nt, Artificial Sequence
  Description of Artificial Sequence: Synthetic oligonucleotide
aacuugcaggcccuguaca

SEQ ID NO: 2714971 - RNA, 19 nt, Artificial Sequence
  Description of Artificial Sequence: Synthetic oligonucleotide
auucccugcagcaccaugg

SEQ ID NO: 2714972 - RNA, 19 nt, Artificial Sequence
  Description of Artificial Sequence: Synthetic oligonucleotide
guacacaguuucauuaugc

SEQ ID NO: 2714973 - RNA, 19 nt, Artificial Sequence
  Description of Artificial Sequence: Synthetic oligonucleotide
uacuucacaucuuguguga

SEQ ID NO: 2714974 - RNA, 19 nt, Artificial Sequence
  Description of Artificial Sequence: Synthetic oligonucleotide
cauccaaacaugaagggua

SEQ ID NO: 2714975 - RNA, 19 nt, Artificial Sequence
  Description of Artificial Sequence: Synthetic oligonucleotide
gacaaagucuacacugggc

SEQ ID NO: 2714976 - RNA, 19 nt, Artificial Sequence
  Description of Artificial Sequence: Synthetic oligonucleotide
caacggaagcacuuagccc

SEQ ID NO: 2714977 - RNA, 19 nt, Artificial Sequence
  Description of Artificial Sequence: Synthetic oligonucleotide
uuugaacaccuuguaggcc

SEQ ID NO: 2714978 - RNA, 19 nt, Artificial Sequence
  Description of Artificial Sequence: Synthetic oligonucleotide
cagaaggaaacuucaucug

SEQ ID NO: 2714979 - RNA, 19 nt, Artificial Sequence
  Description of Artificial Sequence: Synthetic oligonucleotide
cacaucuugugugagguug

SEQ ID NO: 2714980 - RNA, 19 nt, Artificial Sequence
  Description of Artificial Sequence: Synthetic oligonucleotide
uggcagacaaagucuacac

SEQ ID NO: 2714981 - RNA, 19 nt, Artificial Sequence
  Description of Artificial Sequence: Synthetic oligonucleotide
uggcacaacccauagcccu

SEQ ID NO: 2714982 - RNA, 19 nt, Artificial Sequence
  Description of Artificial Sequence: Synthetic oligonucleotide
cuuugcuuggcucaccuga

SEQ ID NO: 2714983 - RNA, 19 nt, Artificial Sequence
  Description of Artificial Sequence: Synthetic oligonucleotide
gcaacggaagcacuuagcc

SEQ ID NO: 2714984 - RNA, 19 nt, Artificial Sequence
  Description of Artificial Sequence: Synthetic oligonucleotide
uguuccagccaucccuuca

SEQ ID NO: 2714985 - RNA, 19 nt, Artificial Sequence
  Description of Artificial Sequence: Synthetic oligonucleotide
caacccauagcccuucuuc

SEQ ID NO: 2714986 - RNA, 19 nt, Artificial Sequence
  Description of Artificial Sequence: Synthetic oligonucleotide
uacacugggcuucaccaaa

SEQ ID NO: 2714987 - RNA, 19 nt, Artificial Sequence
  Description of Artificial Sequence: Synthetic oligonucleotide
cuggagucauccaaacaug

SEQ ID NO: 2714988 - RNA, 19 nt, Artificial Sequence
  Description of Artificial Sequence: Synthetic oligonucleotide
cauacugccagaccacauc

SEQ ID NO: 2714989 - RNA, 19 nt, Artificial Sequence
  Description of Artificial Sequence: Synthetic oligonucleotide
cuauguaacuuugcuuggc

SEQ ID NO: 2714990 - RNA, 19 nt, Artificial Sequence
  Description of Artificial Sequence: Synthetic oligonucleotide
auggucuccauaaucuaag

SEQ ID NO: 2714991 - RNA, 19 nt, Artificial Sequence
  Description of Artificial Sequence: Synthetic oligonucleotide
uaagcaccauucagcaaac

SEQ ID NO: 2714992 - RNA, 19 nt, Artificial Sequence
  Description of Artificial Sequence: Synthetic oligonucleotide
ugccagaccacaucagcac

SEQ ID NO: 2714993 - RNA, 19 nt, Artificial Sequence
  Description of Artificial Sequence: Synthetic oligonucleotide
caccuuguaggccuggaug

SEQ ID NO: 2714994 - RNA, 19 nt, Artificial Sequence
  Description of Artificial Sequence: Synthetic oligonucleotide
cagcaguccauacugccag

SEQ ID NO: 2714995 - RNA, 19 nt, Artificial Sequence
  Description of Artificial Sequence: Synthetic oligonucleotide
gugccaggaaggcauaggc

SEQ ID NO: 2714996 - RNA, 19 nt, Artificial Sequence
  Description of Artificial Sequence: Synthetic oligonucleotide
gaugagcauguagaugacc

SEQ ID NO: 2714997 - RNA, 19 nt, Artificial Sequence
  Description of Artificial Sequence: Synthetic oligonucleotide
agcaacggaagcacuuagc

SEQ ID NO: 2714998 - RNA, 19 nt, Artificial Sequence
  Description of Artificial Sequence: Synthetic oligonucleotide
agcaccauucagcaaacuu

SEQ ID NO: 2714999 - RNA, 19 nt, Artificial Sequence
  Description of Artificial Sequence: Synthetic oligonucleotide
aauugccagaaggaaacuu

SEQ ID NO: 2715000 - RNA, 19 nt, Artificial Sequence
  Description of Artificial Sequence: Synthetic oligonucleotide
ggaacuaacaggucagcca

SEQ ID NO: 2715001 - RNA, 19 nt, Artificial Sequence
  Description of Artificial Sequence: Synthetic oligonucleotide
uuugcuuggcucaccugaa

SEQ ID NO: 2715002 - RNA, 19 nt, Artificial Sequence
  Description of Artificial Sequence: Synthetic oligonucleotide
caaacuauguaacuuugcu

SEQ ID NO: 2715003 - RNA, 19 nt, Artificial Sequence
  Description of Artificial Sequence: Synthetic oligonucleotide
ucaccaaacuauguaacuu

SEQ ID NO: 2715004 - RNA, 19 nt, Artificial Sequence
  Description of Artificial Sequence: Synthetic oligonucleotide
gagcaacggaagcacuuag

SEQ ID NO: 2715005 - RNA, 19 nt, Artificial Sequence
  Description of Artificial Sequence: Synthetic oligonucleotide
agcacuuagcccaggcugg

SEQ ID NO: 2715006 - RNA, 19 nt, Artificial Sequence
  Description of Artificial Sequence: Synthetic oligonucleotide
gaaggguaauugccagaag

SEQ ID NO: 2715007 - RNA, 19 nt, Artificial Sequence
  Description of Artificial Sequence: Synthetic oligonucleotide
caccugaaggcuaggcugc

SEQ ID NO: 2715008 - RNA, 19 nt, Artificial Sequence
  Description of Artificial Sequence: Synthetic oligonucleotide
gacacacggagggucaugc

SEQ ID NO: 2715009 - RNA, 19 nt, Artificial Sequence
  Description of Artificial Sequence: Synthetic oligonucleotide
cuucagcaguccauacugc

SEQ ID NO: 2715010 - RNA, 19 nt, Artificial Sequence
  Description of Artificial Sequence: Synthetic oligonucleotide
acaugaaggguaauugcca

SEQ ID NO: 2715011 - RNA, 19 nt, Artificial Sequence
  Description of Artificial Sequence: Synthetic oligonucleotide
acaucagcacagcgguagg

SEQ ID NO: 2715012 - RNA, 19 nt, Artificial Sequence
  Description of Artificial Sequence: Synthetic oligonucleotide
cucaaaugcagggaaccug

SEQ ID NO: 2715013 - RNA, 19 nt, Artificial Sequence
  Description of Artificial Sequence: Synthetic oligonucleotide
caucacgaagauacuguuc

SEQ ID NO: 2715014 - RNA, 19 nt, Artificial Sequence
  Description of Artificial Sequence: Synthetic oligonucleotide
guguccugcauccaugguc

SEQ ID NO: 2715015 - RNA, 19 nt, Artificial Sequence
  Description of Artificial Sequence: Synthetic oligonucleotide
cacacggagggucaugcug

SEQ ID NO: 2715016 - RNA, 19 nt, Artificial Sequence
  Description of Artificial Sequence: Synthetic oligonucleotide
cauaggcauucccugcagc

SEQ ID NO: 2715017 - RNA, 19 nt, Artificial Sequence
  Description of Artificial Sequence: Synthetic oligonucleotide
agauacuguuccucuuuga

SEQ ID NO: 2715018 - RNA, 19 nt, Artificial Sequence
  Description of Artificial Sequence: Synthetic oligonucleotide
augcugcccuuucagagcu

SEQ ID NO: 2715019 - RNA, 19 nt, Artificial Sequence
  Description of Artificial Sequence: Synthetic oligonucleotide
cacagcgguaggcaucacg

SEQ ID NO: 2715020 - RNA, 19 nt, Artificial Sequence
  Description of Artificial Sequence: Synthetic oligonucleotide
auggcacaacccauagccc

SEQ ID NO: 2715021 - RNA, 19 nt, Artificial Sequence
  Description of Artificial Sequence: Synthetic oligonucleotide
ugaacaccuuguaggccug

SEQ ID NO: 2715022 - RNA, 19 nt, Artificial Sequence
  Description of Artificial Sequence: Synthetic oligonucleotide
ggcugggacacacggaggg

SEQ ID NO: 2715023 - RNA, 19 nt, Artificial Sequence
  Description of Artificial Sequence: Synthetic oligonucleotide
ccauucagcaaacuugcag

SEQ ID NO: 2715024 - RNA, 19 nt, Artificial Sequence
  Description of Artificial Sequence: Synthetic oligonucleotide
acagcgguaggcaucacga

SEQ ID NO: 2715025 - RNA, 19 nt, Artificial Sequence
  Description of Artificial Sequence: Synthetic oligonucleotide
gcaccauucagcaaacuug

SEQ ID NO: 2715026 - RNA, 19 nt, Artificial Sequence
  Description of Artificial Sequence: Synthetic oligonucleotide
gugggaacuaacaggucag

SEQ ID NO: 2715027 - RNA, 19 nt, Artificial Sequence
  Description of Artificial Sequence: Synthetic oligonucleotide
ccuucaagagcaacggaag

SEQ ID NO: 2715028 - RNA, 19 nt, Artificial Sequence
  Description of Artificial Sequence: Synthetic oligonucleotide
augaaggguaauugccaga

SEQ ID NO: 2715029 - RNA, 19 nt, Artificial Sequence
  Description of Artificial Sequence: Synthetic oligonucleotide
aggguaauugccagaagga

SEQ ID NO: 2715030 - RNA, 19 nt, Artificial Sequence
  Description of Artificial Sequence: Synthetic oligonucleotide
gcaccaguggacaagcagg

SEQ ID NO: 2715031 - RNA, 19 nt, Artificial Sequence
  Description of Artificial Sequence: Synthetic oligonucleotide
gucuacacugggcuucacc

SEQ ID NO: 2715032 - RNA, 19 nt, Artificial Sequence
  Description of Artificial Sequence: Synthetic oligonucleotide
  modified_base (13)..(13): a, c, u, g, unknown or other
guuucauuaugcnccuuca

SEQ ID NO: 2715033 - RNA, 19 nt, Artificial Sequence
  Description of Artificial Sequence: Synthetic oligonucleotide
ugggacacacggaggguca

SEQ ID NO: 2715034 - RNA, 19 nt, Artificial Sequence
  Description of Artificial Sequence: Synthetic oligonucleotide
gagcauguagaugacccca

SEQ ID NO: 2715035 - RNA, 19 nt, Artificial Sequence
  Description of Artificial Sequence: Synthetic oligonucleotide
ucuaagcaccauucagcaa

SEQ ID NO: 2715036 - RNA, 19 nt, Artificial Sequence
  Description of Artificial Sequence: Synthetic oligonucleotide
auagauuguuccagccauc

SEQ ID NO: 2715037 - RNA, 19 nt, Artificial Sequence
  Description of Artificial Sequence: Synthetic oligonucleotide
cuuguaggccuggaugagc

SEQ ID NO: 2715038 - RNA, 19 nt, Artificial Sequence
  Description of Artificial Sequence: Synthetic oligonucleotide
caugcugcaggggccaugc

SEQ ID NO: 2715039 - RNA, 19 nt, Artificial Sequence
  Description of Artificial Sequence: Synthetic oligonucleotide
caaaugcagggaaccuggc

SEQ ID NO: 2715040 - RNA, 19 nt, Artificial Sequence
  Description of Artificial Sequence: Synthetic oligonucleotide
ucacgaagauacuguuccu

SEQ ID NO: 2715041 - RNA, 19 nt, Artificial Sequence
  Description of Artificial Sequence: Synthetic oligonucleotide
aagagcaacggaagcacuu

SEQ ID NO: 2715042 - RNA, 19 nt, Artificial Sequence
  Description of Artificial Sequence: Synthetic oligonucleotide
  modified_base (3)..(3): a, c, u, g, unknown or other
gcnccuucaagagcaacgg

SEQ ID NO: 2715043 - RNA, 19 nt, Artificial Sequence
  Description of Artificial Sequence: Synthetic oligonucleotide
ggcaccaguggacaagcag

SEQ ID NO: 2715044 - RNA, 19 nt, Artificial Sequence
  Description of Artificial Sequence: Synthetic oligonucleotide
caguggacaagcaggucuc

SEQ ID NO: 2715045 - RNA, 19 nt, Artificial Sequence
  Description of Artificial Sequence: Synthetic oligonucleotide
aacuaacaggucagccaag

SEQ ID NO: 2715046 - RNA, 19 nt, Artificial Sequence
  Description of Artificial Sequence: Synthetic oligonucleotide
aggcaucacgaagauacug

SEQ ID NO: 2715047 - RNA, 19 nt, Artificial Sequence
  Description of Artificial Sequence: Synthetic oligonucleotide
ucagcacagcgguaggcau

SEQ ID NO: 2715048 - RNA, 19 nt, Artificial Sequence
  Description of Artificial Sequence: Synthetic oligonucleotide
guaacuuugcuuggcucac

SEQ ID NO: 2715049 - RNA, 19 nt, Artificial Sequence
  Description of Artificial Sequence: Synthetic oligonucleotide
uaggcaucacgaagauacu

SEQ ID NO: 2715050 - RNA, 19 nt, Artificial Sequence
  Description of Artificial Sequence: Synthetic oligonucleotide
aucagcacagcgguaggca

SEQ ID NO: 2715051 - RNA, 19 nt, Artificial Sequence
  Description of Artificial Sequence: Synthetic oligonucleotide
cacgaagauacuguuccuc

SEQ ID NO: 2715052 - RNA, 19 nt, Artificial Sequence
  Description of Artificial Sequence: Synthetic oligonucleotide
ggcaccguggcaccagugg

SEQ ID NO: 2715053 - RNA, 19 nt, Artificial Sequence
  Description of Artificial Sequence: Synthetic oligonucleotide
uccauaaucuaagcaccau

SEQ ID NO: 2715054 - RNA, 19 nt, Artificial Sequence
  Description of Artificial Sequence: Synthetic oligonucleotide
aggaaggcauaggcauucc

SEQ ID NO: 2715055 - RNA, 19 nt, Artificial Sequence
  Description of Artificial Sequence: Synthetic oligonucleotide
cuccauaaucuaagcacca

SEQ ID NO: 2715056 - RNA, 19 nt, Artificial Sequence
  Description of Artificial Sequence: Synthetic oligonucleotide
cuggaugagcauguagaug

SEQ ID NO: 2715057 - RNA, 19 nt, Artificial Sequence
  Description of Artificial Sequence: Synthetic oligonucleotide
gguacuucacaucuugugu

SEQ ID NO: 2715058 - RNA, 19 nt, Artificial Sequence
  Description of Artificial Sequence: Synthetic oligonucleotide
uuagcccaggcugggacac

SEQ ID NO: 2715059 - RNA, 19 nt, Artificial Sequence
  Description of Artificial Sequence: Synthetic oligonucleotide
aggucagccaagaaauaga

SEQ ID NO: 2715060 - RNA, 19 nt, Artificial Sequence
  Description of Artificial Sequence: Synthetic oligonucleotide
caguccauacugccagacc

SEQ ID NO: 2715061 - RNA, 19 nt, Artificial Sequence
  Description of Artificial Sequence: Synthetic oligonucleotide
aucuugugugagguuguag

SEQ ID NO: 2715062 - RNA, 19 nt, Artificial Sequence
  Description of Artificial Sequence: Synthetic oligonucleotide
aagucuacacugggcuuca

SEQ ID NO: 2715063 - RNA, 19 nt, Artificial Sequence
  Description of Artificial Sequence: Synthetic oligonucleotide
uaauugccagaaggaaacu

SEQ ID NO: 2715064 - RNA, 19 nt, Artificial Sequence
  Description of Artificial Sequence: Synthetic oligonucleotide
uccgguguccugcauccau

SEQ ID NO: 2715065 - RNA, 19 nt, Artificial Sequence
  Description of Artificial Sequence: Synthetic oligonucleotide
cugccagaccacaucagca

SEQ ID NO: 2715066 - RNA, 19 nt, Artificial Sequence
  Description of Artificial Sequence: Synthetic oligonucleotide
ugccagaaggaaacuucau

SEQ ID NO: 2715067 - RNA, 19 nt, Artificial Sequence
  Description of Artificial Sequence: Synthetic oligonucleotide
  modified_base (5)..(5): a, c, u, g, unknown or other
augcnccuucaagagcaac

SEQ ID NO: 2715068 - RNA, 19 nt, Artificial Sequence
  Description of Artificial Sequence: Synthetic oligonucleotide
guagaugaccccaggggca

SEQ ID NO: 2715069 - RNA, 19 nt, Artificial Sequence
  Description of Artificial Sequence: Synthetic oligonucleotide
uagaugaccccaggggcac

SEQ ID NO: 2715070 - RNA, 19 nt, Artificial Sequence
  Description of Artificial Sequence: Synthetic oligonucleotide
ugggaacuaacaggucagc

SEQ ID NO: 2715071 - RNA, 19 nt, Artificial Sequence
  Description of Artificial Sequence: Synthetic oligonucleotide
gguccgguguccugcaucc

SEQ ID NO: 2715072 - RNA, 19 nt, Artificial Sequence
  Description of Artificial Sequence: Synthetic oligonucleotide
agcauguagaugaccccag

SEQ ID NO: 2715073 - RNA, 19 nt, Artificial Sequence
  Description of Artificial Sequence: Synthetic oligonucleotide
ggaagcacuuagcccaggc

SEQ ID NO: 2715074 - RNA, 19 nt, Artificial Sequence
  Description of Artificial Sequence: Synthetic oligonucleotide
  modified_base (6)..(6): a, c, u, g, unknown or other
uaugcnccuucaagagcaa

SEQ ID NO: 2715075 - RNA, 19 nt, Artificial Sequence
  Description of Artificial Sequence: Synthetic oligonucleotide
acacugggcuucaccaaac

SEQ ID NO: 2715076 - RNA, 19 nt, Artificial Sequence
  Description of Artificial Sequence: Synthetic oligonucleotide
gccagaaggaaacuucauc

SEQ ID NO: 2715077 - RNA, 19 nt, Artificial Sequence
  Description of Artificial Sequence: Synthetic oligonucleotide
ugguccgguguccugcauc

SEQ ID NO: 2715078 - RNA, 19 nt, Artificial Sequence
  Description of Artificial Sequence: Synthetic oligonucleotide
gaaccuggccuuuguggga

SEQ ID NO: 2715079 - RNA, 19 nt, Artificial Sequence
  Description of Artificial Sequence: Synthetic oligonucleotide
ccagaaggaaacuucaucu

SEQ ID NO: 2715080 - RNA, 19 nt, Artificial Sequence
  Description of Artificial Sequence: Synthetic oligonucleotide
uugugggaacuaacagguc

SEQ ID NO: 2715081 - RNA, 19 nt, Artificial Sequence
  Description of Artificial Sequence: Synthetic oligonucleotide
agggaaccuggccuuugug

SEQ ID NO: 2715082 - RNA, 19 nt, Artificial Sequence
  Description of Artificial Sequence: Synthetic oligonucleotide
gcauguagaugaccccagg

SEQ ID NO: 2715083 - RNA, 19 nt, Artificial Sequence
  Description of Artificial Sequence: Synthetic oligonucleotide
ggaaggcauaggcauuccc

SEQ ID NO: 2715084 - RNA, 19 nt, Artificial Sequence
  Description of Artificial Sequence: Synthetic oligonucleotide
agccaagaaauagauuguu

SEQ ID NO: 2715085 - RNA, 19 nt, Artificial Sequence
  Description of Artificial Sequence: Synthetic oligonucleotide
ugcagcaccauggcacaac

SEQ ID NO: 2715086 - RNA, 19 nt, Artificial Sequence
  Description of Artificial Sequence: Synthetic oligonucleotide
gaagcacuuagcccaggcu

SEQ ID NO: 2715087 - RNA, 19 nt, Artificial Sequence
  Description of Artificial Sequence: Synthetic oligonucleotide
gggaacuaacaggucagcc

SEQ ID NO: 2715088 - RNA, 19 nt, Artificial Sequence
  Description of Artificial Sequence: Synthetic oligonucleotide
ucccugcagcaccauggca

SEQ ID NO: 2715089 - RNA, 19 nt, Artificial Sequence
  Description of Artificial Sequence: Synthetic oligonucleotide
caccguggcaccaguggac

SEQ ID NO: 2715090 - RNA, 19 nt, Artificial Sequence
  Description of Artificial Sequence: Synthetic oligonucleotide
cauucccugcagcaccaug

SEQ ID NO: 2715091 - RNA, 19 nt, Artificial Sequence
  Description of Artificial Sequence: Synthetic oligonucleotide
ugcccuuucagagcucaaa

SEQ ID NO: 2715092 - RNA, 19 nt, Artificial Sequence
  Description of Artificial Sequence: Synthetic oligonucleotide
ucccuucaaagagggagaa

SEQ ID NO: 2715093 - RNA, 19 nt, Artificial Sequence
  Description of Artificial Sequence: Synthetic oligonucleotide
gagcucaaaugcagggaac

SEQ ID NO: 2715094 - RNA, 19 nt, Artificial Sequence
  Description of Artificial Sequence: Synthetic oligonucleotide
gagggucaugcugcagggg

SEQ ID NO: 2715095 - RNA, 19 nt, Artificial Sequence
  Description of Artificial Sequence: Synthetic oligonucleotide
guggcaccaguggacaagc

SEQ ID NO: 2715096 - RNA, 19 nt, Artificial Sequence
  Description of Artificial Sequence: Synthetic oligonucleotide
cuggcagacaaagucuaca

SEQ ID NO: 2715097 - RNA, 19 nt, Artificial Sequence
  Description of Artificial Sequence: Synthetic oligonucleotide
ugcauccauggucuccaua

SEQ ID NO: 2715098 - RNA, 19 nt, Artificial Sequence
  Description of Artificial Sequence: Synthetic oligonucleotide
cuuagcccaggcugggaca

SEQ ID NO: 2715099 - RNA, 19 nt, Artificial Sequence
  Description of Artificial Sequence: Synthetic oligonucleotide
guuccagccaucccuucaa

SEQ ID NO: 2715100 - RNA, 19 nt, Artificial Sequence
  Description of Artificial Sequence: Synthetic oligonucleotide
acaucuugugugagguugu

SEQ ID NO: 2715101 - RNA, 19 nt, Artificial Sequence
  Description of Artificial Sequence: Synthetic oligonucleotide
auccaaacaugaaggguaa

SEQ ID NO: 2715102 - RNA, 19 nt, Artificial Sequence
  Description of Artificial Sequence: Synthetic oligonucleotide
cugggacacacggaggguc

SEQ ID NO: 2715103 - RNA, 19 nt, Artificial Sequence
  Description of Artificial Sequence: Synthetic oligonucleotide
gcagcaccauggcacaacc

SEQ ID NO: 2715104 - RNA, 19 nt, Artificial Sequence
  Description of Artificial Sequence: Synthetic oligonucleotide
uggccuuugugggaacuaa

SEQ ID NO: 2715105 - RNA, 19 nt, Artificial Sequence
  Description of Artificial Sequence: Synthetic oligonucleotide
agagcaacggaagcacuua

SEQ ID NO: 2715106 - RNA, 19 nt, Artificial Sequence
  Description of Artificial Sequence: Synthetic oligonucleotide
auuguuccagccaucccuu

SEQ ID NO: 2715107 - RNA, 19 nt, Artificial Sequence
  Description of Artificial Sequence: Synthetic oligonucleotide
cccuuucagagcucaaaug

SEQ ID NO: 2715108 - RNA, 19 nt, Artificial Sequence
  Description of Artificial Sequence: Synthetic oligonucleotide
gccuggaugagcauguaga

SEQ ID NO: 2715109 - RNA, 19 nt, Artificial Sequence
  Description of Artificial Sequence: Synthetic oligonucleotide
guagagugccaggaaggca

SEQ ID NO: 2715110 - RNA, 19 nt, Artificial Sequence
  Description of Artificial Sequence: Synthetic oligonucleotide
ggacaagcaggucucugga

SEQ ID NO: 2715111 - RNA, 19 nt, Artificial Sequence
  Description of Artificial Sequence: Synthetic oligonucleotide
ggcauaggcauucccugca

SEQ ID NO: 2715112 - RNA, 19 nt, Artificial Sequence
  Description of Artificial Sequence: Synthetic oligonucleotide
cagcacagcgguaggcauc

SEQ ID NO: 2715113 - RNA, 19 nt, Artificial Sequence
  Description of Artificial Sequence: Synthetic oligonucleotide
aucuggcagacaaagucua

SEQ ID NO: 2715114 - RNA, 19 nt, Artificial Sequence
  Description of Artificial Sequence: Synthetic oligonucleotide
ggccuggaugagcauguag

SEQ ID NO: 2715115 - RNA, 19 nt, Artificial Sequence
  Description of Artificial Sequence: Synthetic oligonucleotide
agcaguccauacugccaga

SEQ ID NO: 2715116 - RNA, 19 nt, Artificial Sequence
  Description of Artificial Sequence: Synthetic oligonucleotide
cccauagcccuucuucagc

SEQ ID NO: 2715117 - RNA, 19 nt, Artificial Sequence
  Description of Artificial Sequence: Synthetic oligonucleotide
caccaaacuauguaacuuu

SEQ ID NO: 2715118 - RNA, 19 nt, Artificial Sequence
  Description of Artificial Sequence: Synthetic oligonucleotide
cuaacaggucagccaagaa

SEQ ID NO: 2715119 - RNA, 19 nt, Artificial Sequence
  Description of Artificial Sequence: Synthetic oligonucleotide
ucacaucuugugugagguu

SEQ ID NO: 2715120 - RNA, 19 nt, Artificial Sequence
  Description of Artificial Sequence: Synthetic oligonucleotide
gcauaggcauucccugcag

SEQ ID NO: 2715121 - RNA, 19 nt, Artificial Sequence
  Description of Artificial Sequence: Synthetic oligonucleotide
aagcaccauucagcaaacu

SEQ ID NO: 2715122 - RNA, 19 nt, Artificial Sequence
  Description of Artificial Sequence: Synthetic oligonucleotide
accguggcaccaguggaca

SEQ ID NO: 2715123 - RNA, 19 nt, Artificial Sequence
  Description of Artificial Sequence: Synthetic oligonucleotide
guggacaagcaggucucug

SEQ ID NO: 2715124 - RNA, 19 nt, Artificial Sequence
  Description of Artificial Sequence: Synthetic oligonucleotide
cggagggucaugcugcagg

SEQ ID NO: 2715125 - RNA, 19 nt, Artificial Sequence
  Description of Artificial Sequence: Synthetic oligonucleotide
acaacccauagcccuucuu

SEQ ID NO: 2715126 - RNA, 19 nt, Artificial Sequence
  Description of Artificial Sequence: Synthetic oligonucleotide
cagagcucaaaugcaggga

SEQ ID NO: 2715127 - RNA, 19 nt, Artificial Sequence
  Description of Artificial Sequence: Synthetic oligonucleotide
cuacacugggcuucaccaa

SEQ ID NO: 2715128 - RNA, 19 nt, Artificial Sequence
  Description of Artificial Sequence: Synthetic oligonucleotide
cucaccugaaggcuaggcu

SEQ ID NO: 2715129 - RNA, 19 nt, Artificial Sequence
  Description of Artificial Sequence: Synthetic oligonucleotide
gucucuggagucauccaaa

SEQ ID NO: 2715130 - RNA, 19 nt, Artificial Sequence
  Description of Artificial Sequence: Synthetic oligonucleotide
uccaaacaugaaggguaau

SEQ ID NO: 2715131 - RNA, 19 nt, Artificial Sequence
  Description of Artificial Sequence: Synthetic oligonucleotide
cagccaagaaauagauugu

SEQ ID NO: 2715132 - RNA, 19 nt, Artificial Sequence
  Description of Artificial Sequence: Synthetic oligonucleotide
cccuguacagguacuucac

SEQ ID NO: 2715133 - RNA, 19 nt, Artificial Sequence
  Description of Artificial Sequence: Synthetic oligonucleotide
gcaggcccuguacagguac

SEQ ID NO: 2715134 - RNA, 19 nt, Artificial Sequence
  Description of Artificial Sequence: Synthetic oligonucleotide
gguuguagagugccaggaa

SEQ ID NO: 2715135 - RNA, 19 nt, Artificial Sequence
  Description of Artificial Sequence: Synthetic oligonucleotide
ggguaauugccagaaggaa

SEQ ID NO: 2715136 - RNA, 19 nt, Artificial Sequence
  Description of Artificial Sequence: Synthetic oligonucleotide
ugcaggggccaugcugccc

SEQ ID NO: 2715137 - RNA, 19 nt, Artificial Sequence
  Description of Artificial Sequence: Synthetic oligonucleotide
gcgguaggcaucacgaaga

SEQ ID NO: 2715138 - RNA, 19 nt, Artificial Sequence
  Description of Artificial Sequence: Synthetic oligonucleotide
  modified_base (2)..(2): a, c, u, g, unknown or other
cnccuucaagagcaacgga

SEQ ID NO: 2715139 - RNA, 19 nt, Artificial Sequence
  Description of Artificial Sequence: Synthetic oligonucleotide
ggcaucacgaagauacugu

SEQ ID NO: 2715140 - RNA, 19 nt, Artificial Sequence
  Description of Artificial Sequence: Synthetic oligonucleotide
agucuacacugggcuucac

SEQ ID NO: 2715141 - RNA, 19 nt, Artificial Sequence
  Description of Artificial Sequence: Synthetic oligonucleotide
accauucagcaaacuugca

SEQ ID NO: 2715142 - RNA, 19 nt, Artificial Sequence
  Description of Artificial Sequence: Synthetic oligonucleotide
gccagaccacaucagcaca

SEQ ID NO: 2715143 - RNA, 19 nt, Artificial Sequence
  Description of Artificial Sequence: Synthetic oligonucleotide
caccauggcacaacccaua

SEQ ID NO: 2715144 - RNA, 19 nt, Artificial Sequence
  Description of Artificial Sequence: Synthetic oligonucleotide
caagagcaacggaagcacu

SEQ ID NO: 2715145 - RNA, 19 nt, Artificial Sequence
  Description of Artificial Sequence: Synthetic oligonucleotide
ggagucauccaaacaugaa

SEQ ID NO: 2715146 - RNA, 19 nt, Artificial Sequence
  Description of Artificial Sequence: Synthetic oligonucleotide
gcucaccugaaggcuaggc

SEQ ID NO: 2715147 - RNA, 19 nt, Artificial Sequence
  Description of Artificial Sequence: Synthetic oligonucleotide
caaagucuacacugggcuu

SEQ ID NO: 2715148 - RNA, 19 nt, Artificial Sequence
  Description of Artificial Sequence: Synthetic oligonucleotide
gcaguccauacugccagac

SEQ ID NO: 2715149 - RNA, 19 nt, Artificial Sequence
  Description of Artificial Sequence: Synthetic oligonucleotide
gggucaugcugcaggggcc

SEQ ID NO: 2715150 - RNA, 19 nt, Artificial Sequence
  Description of Artificial Sequence: Synthetic oligonucleotide
aggggcaccguggcaccag

SEQ ID NO: 2715151 - RNA, 19 nt, Artificial Sequence
  Description of Artificial Sequence: Synthetic oligonucleotide
gggugguccgguguccugc

SEQ ID NO: 2715152 - RNA, 19 nt, Artificial Sequence
  Description of Artificial Sequence: Synthetic oligonucleotide
acggagggucaugcugcag

SEQ ID NO: 2715153 - RNA, 19 nt, Artificial Sequence
  Description of Artificial Sequence: Synthetic oligonucleotide
cacggagggucaugcugca

SEQ ID NO: 2715154 - RNA, 19 nt, Artificial Sequence
  Description of Artificial Sequence: Synthetic oligonucleotide
ugcugcccuuucagagcuc

SEQ ID NO: 2715155 - RNA, 19 nt, Artificial Sequence
  Description of Artificial Sequence: Synthetic oligonucleotide
ccgguguccugcauccaug

SEQ ID NO: 2715156 - RNA, 19 nt, Artificial Sequence
  Description of Artificial Sequence: Synthetic oligonucleotide
aggcccuguacagguacuu

SEQ ID NO: 2715157 - RNA, 19 nt, Artificial Sequence
  Description of Artificial Sequence: Synthetic oligonucleotide
cagcgguaggcaucacgaa

SEQ ID NO: 2715158 - RNA, 19 nt, Artificial Sequence
  Description of Artificial Sequence: Synthetic oligonucleotide
ggugguccgguguccugca

SEQ ID NO: 2715159 - RNA, 19 nt, Artificial Sequence
  Description of Artificial Sequence: Synthetic oligonucleotide
gcaucacgaagauacuguu

SEQ ID NO: 2715160 - RNA, 19 nt, Artificial Sequence
  Description of Artificial Sequence: Synthetic oligonucleotide
ggcauucccugcagcacca

SEQ ID NO: 2715161 - RNA, 19 nt, Artificial Sequence
  Description of Artificial Sequence: Synthetic oligonucleotide
gcccuuucagagcucaaau

SEQ ID NO: 2715162 - RNA, 19 nt, Artificial Sequence
  Description of Artificial Sequence: Synthetic oligonucleotide
ggacacacggagggucaug

SEQ ID NO: 2715163 - RNA, 19 nt, Artificial Sequence
  Description of Artificial Sequence: Synthetic oligonucleotide
ccaggggcaccguggcacc

SEQ ID NO: 2715164 - RNA, 19 nt, Artificial Sequence
  Description of Artificial Sequence: Synthetic oligonucleotide
cacugggcuucaccaaacu

SEQ ID NO: 2715165 - RNA, 19 nt, Artificial Sequence
  Description of Artificial Sequence: Synthetic oligonucleotide
uagcccaggcugggacaca

SEQ ID NO: 2715166 - RNA, 19 nt, Artificial Sequence
  Description of Artificial Sequence: Synthetic oligonucleotide
caucuugugugagguugua

SEQ ID NO: 2715167 - RNA, 19 nt, Artificial Sequence
  Description of Artificial Sequence: Synthetic oligonucleotide
ccuggaugagcauguagau

SEQ ID NO: 2715168 - RNA, 19 nt, Artificial Sequence
  Description of Artificial Sequence: Synthetic oligonucleotide
ccaaacaugaaggguaauu

SEQ ID NO: 2715169 - RNA, 19 nt, Artificial Sequence
  Description of Artificial Sequence: Synthetic oligonucleotide
gucagccaagaaauagauu

SEQ ID NO: 2715170 - RNA, 19 nt, Artificial Sequence
  Description of Artificial Sequence: Synthetic oligonucleotide
ggcucaccugaaggcuagg

SEQ ID NO: 2715171 - RNA, 19 nt, Artificial Sequence
  Description of Artificial Sequence: Synthetic oligonucleotide
ggggugguccgguguccug

SEQ ID NO: 2715172 - RNA, 19 nt, Artificial Sequence
  Description of Artificial Sequence: Synthetic oligonucleotide
gguaggcaucacgaagaua

SEQ ID NO: 2715173 - RNA, 19 nt, Artificial Sequence
  Description of Artificial Sequence: Synthetic oligonucleotide
ccaggcugggacacacgga

SEQ ID NO: 2715174 - RNA, 19 nt, Artificial Sequence
  Description of Artificial Sequence: Synthetic oligonucleotide
cugcccuuucagagcucaa

SEQ ID NO: 2715175 - RNA, 19 nt, Artificial Sequence
  Description of Artificial Sequence: Synthetic oligonucleotide
gcccaggcugggacacacg

SEQ ID NO: 2715176 - RNA, 19 nt, Artificial Sequence
  Description of Artificial Sequence: Synthetic oligonucleotide
gggcaccguggcaccagug

SEQ ID NO: 2715177 - RNA, 19 nt, Artificial Sequence
  Description of Artificial Sequence: Synthetic oligonucleotide
gggcuucaccaaacuaugu

SEQ ID NO: 2715178 - RNA, 19 nt, Artificial Sequence
  Description of Artificial Sequence: Synthetic oligonucleotide
guccgguguccugcaucca

SEQ ID NO: 2715179 - RNA, 19 nt, Artificial Sequence
  Description of Artificial Sequence: Synthetic oligonucleotide
cugcagcaccauggcacaa

SEQ ID NO: 2715180 - RNA, 19 nt, Artificial Sequence
  Description of Artificial Sequence: Synthetic oligonucleotide
aggggccaugcugcccuuu

SEQ ID NO: 2715181 - RNA, 19 nt, Artificial Sequence
  Description of Artificial Sequence: Synthetic oligonucleotide
ccauacugccagaccacau

SEQ ID NO: 2715182 - RNA, 19 nt, Artificial Sequence
  Description of Artificial Sequence: Synthetic oligonucleotide
ggcacaacccauagcccuu

SEQ ID NO: 2715183 - RNA, 19 nt, Artificial Sequence
  Description of Artificial Sequence: Synthetic oligonucleotide
cgaagauacuguuccucuu

SEQ ID NO: 2715184 - RNA, 19 nt, Artificial Sequence
  Description of Artificial Sequence: Synthetic oligonucleotide
ccacaucagcacagcggua

SEQ ID NO: 2715185 - RNA, 19 nt, Artificial Sequence
  Description of Artificial Sequence: Synthetic oligonucleotide
cugcauccauggucuccau

SEQ ID NO: 2715186 - RNA, 19 nt, Artificial Sequence
  Description of Artificial Sequence: Synthetic oligonucleotide
ggggcaccguggcaccagu

SEQ ID NO: 2715187 - RNA, 19 nt, Artificial Sequence
  Description of Artificial Sequence: Synthetic oligonucleotide
gucaugcugcaggggccau

SEQ ID NO: 2715188 - RNA, 19 nt, Artificial Sequence
  Description of Artificial Sequence: Synthetic oligonucleotide
ccguggcaccaguggacaa

SEQ ID NO: 2715189 - RNA, 19 nt, Artificial Sequence
  Description of Artificial Sequence: Synthetic oligonucleotide
gggacacacggagggucau

SEQ ID NO: 2715190 - RNA, 19 nt, Artificial Sequence
  Description of Artificial Sequence: Synthetic oligonucleotide
gcacagcgguaggcaucac

SEQ ID NO: 2715191 - RNA, 19 nt, Artificial Sequence
  Description of Artificial Sequence: Synthetic oligonucleotide
cgguaggcaucacgaagau

SEQ ID NO: 2715192 - RNA, 19 nt, Artificial Sequence
  Description of Artificial Sequence: Synthetic oligonucleotide
gcauucccugcagcaccau

SEQ ID NO: 2715193 - RNA, 19 nt, Artificial Sequence
  Description of Artificial Sequence: Synthetic oligonucleotide
  modified_base (1)..(1): a, c, u, g, unknown or other
nccuucaagagcaacggaa

SEQ ID NO: 2715194 - RNA, 19 nt, Artificial Sequence
  Description of Artificial Sequence: Synthetic oligonucleotide
uccaagauaaaagagaucc

SEQ ID NO: 2715195 - RNA, 19 nt, Artificial Sequence
  Description of Artificial Sequence: Synthetic oligonucleotide
cauauuucaggaaagauug

SEQ ID NO: 2715196 - RNA, 19 nt, Artificial Sequence
  Description of Artificial Sequence: Synthetic oligonucleotide
aauaaauggagucuugggu

SEQ ID NO: 2715197 - RNA, 19 nt, Artificial Sequence
  Description of Artificial Sequence: Synthetic oligonucleotide
aucucaauuaacuuugaac

SEQ ID NO: 2715198 - RNA, 19 nt, Artificial Sequence
  Description of Artificial Sequence: Synthetic oligonucleotide
auaaauggagucuuggguc

SEQ ID NO: 2715199 - RNA, 19 nt, Artificial Sequence
  Description of Artificial Sequence: Synthetic oligonucleotide
ucgaagacuuaauaaaugg

SEQ ID NO: 2715200 - RNA, 19 nt, Artificial Sequence
  Description of Artificial Sequence: Synthetic oligonucleotide
uuuguggguaccuugagag

SEQ ID NO: 2715201 - RNA, 19 nt, Artificial Sequence
  Description of Artificial Sequence: Synthetic oligonucleotide
agacuuaauaaauggaguc

SEQ ID NO: 2715202 - RNA, 19 nt, Artificial Sequence
  Description of Artificial Sequence: Synthetic oligonucleotide
aagaugauagccuuucuga

SEQ ID NO: 2715203 - RNA, 19 nt, Artificial Sequence
  Description of Artificial Sequence: Synthetic oligonucleotide
gaagacuuaauaaauggag

SEQ ID NO: 2715204 - RNA, 19 nt, Artificial Sequence
  Description of Artificial Sequence: Synthetic oligonucleotide
uaaaagagauccuaggacu

SEQ ID NO: 2715205 - RNA, 19 nt, Artificial Sequence
  Description of Artificial Sequence: Synthetic oligonucleotide
uuagacucaacauucugag

SEQ ID NO: 2715206 - RNA, 19 nt, Artificial Sequence
  Description of Artificial Sequence: Synthetic oligonucleotide
augauagccuuucugaccg

SEQ ID NO: 2715207 - RNA, 19 nt, Artificial Sequence
  Description of Artificial Sequence: Synthetic oligonucleotide
aacauucugaguauacagc

SEQ ID NO: 2715208 - RNA, 19 nt, Artificial Sequence
  Description of Artificial Sequence: Synthetic oligonucleotide
agcauugagccucucaagc

SEQ ID NO: 2715209 - RNA, 19 nt, Artificial Sequence
  Description of Artificial Sequence: Synthetic oligonucleotide
uaauaaauggagucuuggg

SEQ ID NO: 2715210 - RNA, 19 nt, Artificial Sequence
  Description of Artificial Sequence: Synthetic oligonucleotide
agauaaaagagauccuagg

SEQ ID NO: 2715211 - RNA, 19 nt, Artificial Sequence
  Description of Artificial Sequence: Synthetic oligonucleotide
uccgacauaucuauggucc

SEQ ID NO: 2715212 - RNA, 19 nt, Artificial Sequence
  Description of Artificial Sequence: Synthetic oligonucleotide
uaacuuugaacucacgaca

SEQ ID NO: 2715213 - RNA, 19 nt, Artificial Sequence
  Description of Artificial Sequence: Synthetic oligonucleotide
uuaauaaauggagucuugg

SEQ ID NO: 2715214 - RNA, 19 nt, Artificial Sequence
  Description of Artificial Sequence: Synthetic oligonucleotide
uuaacuuugaacucacgac

SEQ ID NO: 2715215 - RNA, 19 nt, Artificial Sequence
  Description of Artificial Sequence: Synthetic oligonucleotide
ugaguauacagcacugggg

SEQ ID NO: 2715216 - RNA, 19 nt, Artificial Sequence
  Description of Artificial Sequence: Synthetic oligonucleotide
uguuugggagaucugagcc

SEQ ID NO: 2715217 - RNA, 19 nt, Artificial Sequence
  Description of Artificial Sequence: Synthetic oligonucleotide
auuaacuuugaacucacga

SEQ ID NO: 2715218 - RNA, 19 nt, Artificial Sequence
  Description of Artificial Sequence: Synthetic oligonucleotide
uucgaagauacuuugggga

SEQ ID NO: 2715219 - RNA, 19 nt, Artificial Sequence
  Description of Artificial Sequence: Synthetic oligonucleotide
gacacuacaggucuugaag

SEQ ID NO: 2715220 - RNA, 19 nt, Artificial Sequence
  Description of Artificial Sequence: Synthetic oligonucleotide
gauaaaagagauccuagga

SEQ ID NO: 2715221 - RNA, 19 nt, Artificial Sequence
  Description of Artificial Sequence: Synthetic oligonucleotide
ucuucgaagacuuaauaaa

SEQ ID NO: 2715222 - RNA, 19 nt, Artificial Sequence
  Description of Artificial Sequence: Synthetic oligonucleotide
guugaggcagcauugagcc

SEQ ID NO: 2715223 - RNA, 19 nt, Artificial Sequence
  Description of Artificial Sequence: Synthetic oligonucleotide
caagccgacuguaugaucg

SEQ ID NO: 2715224 - RNA, 19 nt, Artificial Sequence
  Description of Artificial Sequence: Synthetic oligonucleotide
cuucaagucccucaaagcc

SEQ ID NO: 2715225 - RNA, 19 nt, Artificial Sequence
  Description of Artificial Sequence: Synthetic oligonucleotide
ucuucggccauauuucagg

SEQ ID NO: 2715226 - RNA, 19 nt, Artificial Sequence
  Description of Artificial Sequence: Synthetic oligonucleotide
agaguuagacucaacauuc

SEQ ID NO: 2715227 - RNA, 19 nt, Artificial Sequence
  Description of Artificial Sequence: Synthetic oligonucleotide
uucgaagacuuaauaaaug

SEQ ID NO: 2715228 - RNA, 19 nt, Artificial Sequence
  Description of Artificial Sequence: Synthetic oligonucleotide
gagucuuggguccaggccg

SEQ ID NO: 2715229 - RNA, 19 nt, Artificial Sequence
  Description of Artificial Sequence: Synthetic oligonucleotide
gaaucaagggcuucgaaga

SEQ ID NO: 2715230 - RNA, 19 nt, Artificial Sequence
  Description of Artificial Sequence: Synthetic oligonucleotide
aucugagccagauuuccgc

SEQ ID NO: 2715231 - RNA, 19 nt, Artificial Sequence
  Description of Artificial Sequence: Synthetic oligonucleotide
aagauaaaagagauccuag

SEQ ID NO: 2715232 - RNA, 19 nt, Artificial Sequence
  Description of Artificial Sequence: Synthetic oligonucleotide
agaugauagccuuucugac

SEQ ID NO: 2715233 - RNA, 19 nt, Artificial Sequence
  Description of Artificial Sequence: Synthetic oligonucleotide
uucaggaaagauuguuugg

SEQ ID NO: 2715234 - RNA, 19 nt, Artificial Sequence
  Description of Artificial Sequence: Synthetic oligonucleotide
gaaguguguggacagcugg

SEQ ID NO: 2715235 - RNA, 19 nt, Artificial Sequence
  Description of Artificial Sequence: Synthetic oligonucleotide
auuuccaagucucuggugu

SEQ ID NO: 2715236 - RNA, 19 nt, Artificial Sequence
  Description of Artificial Sequence: Synthetic oligonucleotide
gaugauagccuuucugacc

SEQ ID NO: 2715237 - RNA, 19 nt, Artificial Sequence
  Description of Artificial Sequence: Synthetic oligonucleotide
aagauuguuugggagaucu

SEQ ID NO: 2715238 - RNA, 19 nt, Artificial Sequence
  Description of Artificial Sequence: Synthetic oligonucleotide
caacauucugaguauacag

SEQ ID NO: 2715239 - RNA, 19 nt, Artificial Sequence
  Description of Artificial Sequence: Synthetic oligonucleotide
uccgcugggaccuucuucg

SEQ ID NO: 2715240 - RNA, 19 nt, Artificial Sequence
  Description of Artificial Sequence: Synthetic oligonucleotide
acauucugaguauacagca

SEQ ID NO: 2715241 - RNA, 19 nt, Artificial Sequence
  Description of Artificial Sequence: Synthetic oligonucleotide
uaaauggagucuugggucc

SEQ ID NO: 2715242 - RNA, 19 nt, Artificial Sequence
  Description of Artificial Sequence: Synthetic oligonucleotide
agacucaacauucugagua

SEQ ID NO: 2715243 - RNA, 19 nt, Artificial Sequence
  Description of Artificial Sequence: Synthetic oligonucleotide
auaucuaugguccggcuca

SEQ ID NO: 2715244 - RNA, 19 nt, Artificial Sequence
  Description of Artificial Sequence: Synthetic oligonucleotide
ucaagggcuucgaagauac

SEQ ID NO: 2715245 - RNA, 19 nt, Artificial Sequence
  Description of Artificial Sequence: Synthetic oligonucleotide
uucuucaagaugauagccu

SEQ ID NO: 2715246 - RNA, 19 nt, Artificial Sequence
  Description of Artificial Sequence: Synthetic oligonucleotide
aagacuuaauaaauggagu

SEQ ID NO: 2715247 - RNA, 19 nt, Artificial Sequence
  Description of Artificial Sequence: Synthetic oligonucleotide
uucaagucccucaaagcca

SEQ ID NO: 2715248 - RNA, 19 nt, Artificial Sequence
  Description of Artificial Sequence: Synthetic oligonucleotide
auucugaguauacagcacu

SEQ ID NO: 2715249 - RNA, 19 nt, Artificial Sequence
  Description of Artificial Sequence: Synthetic oligonucleotide
cuucgaagauacuuugggg

SEQ ID NO: 2715250 - RNA, 19 nt, Artificial Sequence
  Description of Artificial Sequence: Synthetic oligonucleotide
agaucugagccagauuucc

SEQ ID NO: 2715251 - RNA, 19 nt, Artificial Sequence
  Description of Artificial Sequence: Synthetic oligonucleotide
uucuucgaagacuuaauaa

SEQ ID NO: 2715252 - RNA, 19 nt, Artificial Sequence
  Description of Artificial Sequence: Synthetic oligonucleotide
ugagacuuggggcaagucu

SEQ ID NO: 2715253 - RNA, 19 nt, Artificial Sequence
  Description of Artificial Sequence: Synthetic oligonucleotide
ugagccagauuuccgcugg

SEQ ID NO: 2715254 - RNA, 19 nt, Artificial Sequence
  Description of Artificial Sequence: Synthetic oligonucleotide
uacugcaugagccacgauc

SEQ ID NO: 2715255 - RNA, 19 nt, Artificial Sequence
  Description of Artificial Sequence: Synthetic oligonucleotide
uuugaacucacgacaggug

SEQ ID NO: 2715256 - RNA, 19 nt, Artificial Sequence
  Description of Artificial Sequence: Synthetic oligonucleotide
gaucgccugacuuucuggg

SEQ ID NO: 2715257 - RNA, 19 nt, Artificial Sequence
  Description of Artificial Sequence: Synthetic oligonucleotide
agccuuucugaccggagcc

SEQ ID NO: 2715258 - RNA, 19 nt, Artificial Sequence
  Description of Artificial Sequence: Synthetic oligonucleotide
cugaguauacagcacuggg

SEQ ID NO: 2715259 - RNA, 19 nt, Artificial Sequence
  Description of Artificial Sequence: Synthetic oligonucleotide
gacaggugagacuuggggc

SEQ ID NO: 2715260 - RNA, 19 nt, Artificial Sequence
  Description of Artificial Sequence: Synthetic oligonucleotide
ucucuuuccucagaguuag

SEQ ID NO: 2715261 - RNA, 19 nt, Artificial Sequence
  Description of Artificial Sequence: Synthetic oligonucleotide
cauugagccucucaagccg

SEQ ID NO: 2715262 - RNA, 19 nt, Artificial Sequence
  Description of Artificial Sequence: Synthetic oligonucleotide
agauccuaggacuccuucg

SEQ ID NO: 2715263 - RNA, 19 nt, Artificial Sequence
  Description of Artificial Sequence: Synthetic oligonucleotide
uguguggacagcugggacc

SEQ ID NO: 2715264 - RNA, 19 nt, Artificial Sequence
  Description of Artificial Sequence: Synthetic oligonucleotide
gucuucaagucccucaaag

SEQ ID NO: 2715265 - RNA, 19 nt, Artificial Sequence
  Description of Artificial Sequence: Synthetic oligonucleotide
ucagaguuagacucaacau

SEQ ID NO: 2715266 - RNA, 19 nt, Artificial Sequence
  Description of Artificial Sequence: Synthetic oligonucleotide
ugaacucacgacaggugag

SEQ ID NO: 2715267 - RNA, 19 nt, Artificial Sequence
  Description of Artificial Sequence: Synthetic oligonucleotide
acuccuucgaagugugugg

SEQ ID NO: 2715268 - RNA, 19 nt, Artificial Sequence
  Description of Artificial Sequence: Synthetic oligonucleotide
uuugggagaucugagccag

SEQ ID NO: 2715269 - RNA, 19 nt, Artificial Sequence
  Description of Artificial Sequence: Synthetic oligonucleotide
acgaucuucuucaagauga

SEQ ID NO: 2715270 - RNA, 19 nt, Artificial Sequence
  Description of Artificial Sequence: Synthetic oligonucleotide
uguggguaccuugagagga

SEQ ID NO: 2715271 - RNA, 19 nt, Artificial Sequence
  Description of Artificial Sequence: Synthetic oligonucleotide
aguuagacucaacauucug

SEQ ID NO: 2715272 - RNA, 19 nt, Artificial Sequence
  Description of Artificial Sequence: Synthetic oligonucleotide
ucugaguauacagcacugg

SEQ ID NO: 2715273 - RNA, 19 nt, Artificial Sequence
  Description of Artificial Sequence: Synthetic oligonucleotide
aagccgacuguaugaucgc

SEQ ID NO: 2715274 - RNA, 19 nt, Artificial Sequence
  Description of Artificial Sequence: Synthetic oligonucleotide
ucucaagccgacuguauga

SEQ ID NO: 2715275 - RNA, 19 nt, Artificial Sequence
  Description of Artificial Sequence: Synthetic oligonucleotide
ggaaucaagggcuucgaag

SEQ ID NO: 2715276 - RNA, 19 nt, Artificial Sequence
  Description of Artificial Sequence: Synthetic oligonucleotide
acaggugagacuuggggca

SEQ ID NO: 2715277 - RNA, 19 nt, Artificial Sequence
  Description of Artificial Sequence: Synthetic oligonucleotide
cuucuucaagaugauagcc

SEQ ID NO: 2715278 - RNA, 19 nt, Artificial Sequence
  Description of Artificial Sequence: Synthetic oligonucleotide
uucugaguauacagcacug

SEQ ID NO: 2715279 - RNA, 19 nt, Artificial Sequence
  Description of Artificial Sequence: Synthetic oligonucleotide
caagaugauagccuuucug

SEQ ID NO: 2715280 - RNA, 19 nt, Artificial Sequence
  Description of Artificial Sequence: Synthetic oligonucleotide
uucugggacauuuccaagu

SEQ ID NO: 2715281 - RNA, 19 nt, Artificial Sequence
  Description of Artificial Sequence: Synthetic oligonucleotide
gcuucgaagauacuuuggg

SEQ ID NO: 2715282 - RNA, 19 nt, Artificial Sequence
  Description of Artificial Sequence: Synthetic oligonucleotide
uuguuugggagaucugagc

SEQ ID NO: 2715283 - RNA, 19 nt, Artificial Sequence
  Description of Artificial Sequence: Synthetic oligonucleotide
caauuaacuuugaacucac

SEQ ID NO: 2715284 - RNA, 19 nt, Artificial Sequence
  Description of Artificial Sequence: Synthetic oligonucleotide
ucaacauucugaguauaca

SEQ ID NO: 2715285 - RNA, 19 nt, Artificial Sequence
  Description of Artificial Sequence: Synthetic oligonucleotide
acacuacaggucuugaaga

SEQ ID NO: 2715286 - RNA, 19 nt, Artificial Sequence
  Description of Artificial Sequence: Synthetic oligonucleotide
gauuguuugggagaucuga

SEQ ID NO: 2715287 - RNA, 19 nt, Artificial Sequence
  Description of Artificial Sequence: Synthetic oligonucleotide
uguaugaucgccugacuuu

SEQ ID NO: 2715288 - RNA, 19 nt, Artificial Sequence
  Description of Artificial Sequence: Synthetic oligonucleotide
ugaucgccugacuuucugg

SEQ ID NO: 2715289 - RNA, 19 nt, Artificial Sequence
  Description of Artificial Sequence: Synthetic oligonucleotide
aagucuucaagucccucaa

SEQ ID NO: 2715290 - RNA, 19 nt, Artificial Sequence
  Description of Artificial Sequence: Synthetic oligonucleotide
ucuuuccucagaguuagac

SEQ ID NO: 2715291 - RNA, 19 nt, Artificial Sequence
  Description of Artificial Sequence: Synthetic oligonucleotide
guauacagcacuggggugc

SEQ ID NO: 2715292 - RNA, 19 nt, Artificial Sequence
  Description of Artificial Sequence: Synthetic oligonucleotide
uccuaggacuccuucgaag

SEQ ID NO: 2715293 - RNA, 19 nt, Artificial Sequence
  Description of Artificial Sequence: Synthetic oligonucleotide
ucaagucccucaaagccaa

SEQ ID NO: 2715294 - RNA, 19 nt, Artificial Sequence
  Description of Artificial Sequence: Synthetic oligonucleotide
aauuaacuuugaacucacg

SEQ ID NO: 2715295 - RNA, 19 nt, Artificial Sequence
  Description of Artificial Sequence: Synthetic oligonucleotide
cucagaguuagacucaaca

SEQ ID NO: 2715296 - RNA, 19 nt, Artificial Sequence
  Description of Artificial Sequence: Synthetic oligonucleotide
cucaacauucugaguauac

SEQ ID NO: 2715297 - RNA, 19 nt, Artificial Sequence
  Description of Artificial Sequence: Synthetic oligonucleotide
uuuggggaucucaauuaac

SEQ ID NO: 2715298 - RNA, 19 nt, Artificial Sequence
  Description of Artificial Sequence: Synthetic oligonucleotide
uugaagagguccuccuuug

SEQ ID NO: 2715299 - RNA, 19 nt, Artificial Sequence
  Description of Artificial Sequence: Synthetic oligonucleotide
uucaagaugauagccuuuc

SEQ ID NO: 2715300 - RNA, 19 nt, Artificial Sequence
  Description of Artificial Sequence: Synthetic oligonucleotide
cuuggggcaagucuucaag

SEQ ID NO: 2715301 - RNA, 19 nt, Artificial Sequence
  Description of Artificial Sequence: Synthetic oligonucleotide
aacucacgacaggugagac

SEQ ID NO: 2715302 - RNA, 19 nt, Artificial Sequence
  Description of Artificial Sequence: Synthetic oligonucleotide
acuacaggucuugaagagg

SEQ ID NO: 2715303 - RNA, 19 nt, Artificial Sequence
  Description of Artificial Sequence: Synthetic oligonucleotide
uccuuuguggguaccuuga

SEQ ID NO: 2715304 - RNA, 19 nt, Artificial Sequence
  Description of Artificial Sequence: Synthetic oligonucleotide
ucgaagauacuuuggggau

SEQ ID NO: 2715305 - RNA, 19 nt, Artificial Sequence
  Description of Artificial Sequence: Synthetic oligonucleotide
gaccucuacugcaugagcc

SEQ ID NO: 2715306 - RNA, 19 nt, Artificial Sequence
  Description of Artificial Sequence: Synthetic oligonucleotide
cuucgaaguguguggacag

SEQ ID NO: 2715307 - RNA, 19 nt, Artificial Sequence
  Description of Artificial Sequence: Synthetic oligonucleotide
acauuuccaagucucuggu

SEQ ID NO: 2715308 - RNA, 19 nt, Artificial Sequence
  Description of Artificial Sequence: Synthetic oligonucleotide
uaccuugagaggaggguug

SEQ ID NO: 2715309 - RNA, 19 nt, Artificial Sequence
  Description of Artificial Sequence: Synthetic oligonucleotide
gauccuaggacuccuucga

SEQ ID NO: 2715310 - RNA, 19 nt, Artificial Sequence
  Description of Artificial Sequence: Synthetic oligonucleotide
uacagcacuggggugcugg

SEQ ID NO: 2715311 - RNA, 19 nt, Artificial Sequence
  Description of Artificial Sequence: Synthetic oligonucleotide
aagucccucaaagccaaag

SEQ ID NO: 2715312 - RNA, 19 nt, Artificial Sequence
  Description of Artificial Sequence: Synthetic oligonucleotide
uuguggguaccuugagagg

SEQ ID NO: 2715313 - RNA, 19 nt, Artificial Sequence
  Description of Artificial Sequence: Synthetic oligonucleotide
uagccuuucugaccggagc

SEQ ID NO: 2715314 - RNA, 19 nt, Artificial Sequence
  Description of Artificial Sequence: Synthetic oligonucleotide
guuagacucaacauucuga

SEQ ID NO: 2715315 - RNA, 19 nt, Artificial Sequence
  Description of Artificial Sequence: Synthetic oligonucleotide
aaguguguggacagcuggg

SEQ ID NO: 2715316 - RNA, 19 nt, Artificial Sequence
  Description of Artificial Sequence: Synthetic oligonucleotide
acugcaugagccacgaucu

SEQ ID NO: 2715317 - RNA, 19 nt, Artificial Sequence
  Description of Artificial Sequence: Synthetic oligonucleotide
uggagguugaggcagcauu

SEQ ID NO: 2715318 - RNA, 19 nt, Artificial Sequence
  Description of Artificial Sequence: Synthetic oligonucleotide
auuguuugggagaucugag

SEQ ID NO: 2715319 - RNA, 19 nt, Artificial Sequence
  Description of Artificial Sequence: Synthetic oligonucleotide
acuuuggggaucucaauua

SEQ ID NO: 2715320 - RNA, 19 nt, Artificial Sequence
  Description of Artificial Sequence: Synthetic oligonucleotide
augagccacgaucuucuuc

SEQ ID NO: 2715321 - RNA, 19 nt, Artificial Sequence
  Description of Artificial Sequence: Synthetic oligonucleotide
gaaggaucggcggccaggg

SEQ ID NO: 2715322 - RNA, 19 nt, Artificial Sequence
  Description of Artificial Sequence: Synthetic oligonucleotide
aagggcuucgaagauacuu

SEQ ID NO: 2715323 - RNA, 19 nt, Artificial Sequence
  Description of Artificial Sequence: Synthetic oligonucleotide
caaagaaggaucggcggcc

SEQ ID NO: 2715324 - RNA, 19 nt, Artificial Sequence
  Description of Artificial Sequence: Synthetic oligonucleotide
gauacuuuggggaucucaa

SEQ ID NO: 2715325 - RNA, 19 nt, Artificial Sequence
  Description of Artificial Sequence: Synthetic oligonucleotide
agccaaagaaggaucggcg

SEQ ID NO: 2715326 - RNA, 19 nt, Artificial Sequence
  Description of Artificial Sequence: Synthetic oligonucleotide
aaagauuguuugggagauc

SEQ ID NO: 2715327 - RNA, 19 nt, Artificial Sequence
  Description of Artificial Sequence: Synthetic oligonucleotide
gacuguaugaucgccugac

SEQ ID NO: 2715328 - RNA, 19 nt, Artificial Sequence
  Description of Artificial Sequence: Synthetic oligonucleotide
uaccagggacacuacaggu

SEQ ID NO: 2715329 - RNA, 19 nt, Artificial Sequence
  Description of Artificial Sequence: Synthetic oligonucleotide
ugucuucggccauauuuca

SEQ ID NO: 2715330 - RNA, 19 nt, Artificial Sequence
  Description of Artificial Sequence: Synthetic oligonucleotide
ucgccugacuuucugggac

SEQ ID NO: 2715331 - RNA, 19 nt, Artificial Sequence
  Description of Artificial Sequence: Synthetic oligonucleotide
cuuucugggacauuuccaa

SEQ ID NO: 2715332 - RNA, 19 nt, Artificial Sequence
  Description of Artificial Sequence: Synthetic oligonucleotide
ucaagaugauagccuuucu

SEQ ID NO: 2715333 - RNA, 19 nt, Artificial Sequence
  Description of Artificial Sequence: Synthetic oligonucleotide
caguucucuuuccucagag

SEQ ID NO: 2715334 - RNA, 19 nt, Artificial Sequence
  Description of Artificial Sequence: Synthetic oligonucleotide
cauaucuaugguccggcuc

SEQ ID NO: 2715335 - RNA, 19 nt, Artificial Sequence
  Description of Artificial Sequence: Synthetic oligonucleotide
ucuacugcaugagccacga

SEQ ID NO: 2715336 - RNA, 19 nt, Artificial Sequence
  Description of Artificial Sequence: Synthetic oligonucleotide
gagccucucaagccgacug

SEQ ID NO: 2715337 - RNA, 19 nt, Artificial Sequence
  Description of Artificial Sequence: Synthetic oligonucleotide
ugaccggagccgcuugagg

SEQ ID NO: 2715338 - RNA, 19 nt, Artificial Sequence
  Description of Artificial Sequence: Synthetic oligonucleotide
uuccaagauaaaagagauc

SEQ ID NO: 2715339 - RNA, 19 nt, Artificial Sequence
  Description of Artificial Sequence: Synthetic oligonucleotide
uuggggcaagucuucaagu

SEQ ID NO: 2715340 - RNA, 19 nt, Artificial Sequence
  Description of Artificial Sequence: Synthetic oligonucleotide
cuugaggugucuucggcca

SEQ ID NO: 2715341 - RNA, 19 nt, Artificial Sequence
  Description of Artificial Sequence: Synthetic oligonucleotide
cucucaagccgacuguaug

SEQ ID NO: 2715342 - RNA, 19 nt, Artificial Sequence
  Description of Artificial Sequence: Synthetic oligonucleotide
cucuacugcaugagccacg

SEQ ID NO: 2715343 - RNA, 19 nt, Artificial Sequence
  Description of Artificial Sequence: Synthetic oligonucleotide
gacuuaauaaauggagucu

SEQ ID NO: 2715344 - RNA, 19 nt, Artificial Sequence
  Description of Artificial Sequence: Synthetic oligonucleotide
uggggcaagucuucaaguc

SEQ ID NO: 2715345 - RNA, 19 nt, Artificial Sequence
  Description of Artificial Sequence: Synthetic oligonucleotide
agaaggaucggcggccagg

SEQ ID NO: 2715346 - RNA, 19 nt, Artificial Sequence
  Description of Artificial Sequence: Synthetic oligonucleotide
agauacuuuggggaucuca

SEQ ID NO: 2715347 - RNA, 19 nt, Artificial Sequence
  Description of Artificial Sequence: Synthetic oligonucleotide
uguccaguucucuuuccuc

SEQ ID NO: 2715348 - RNA, 19 nt, Artificial Sequence
  Description of Artificial Sequence: Synthetic oligonucleotide
agguugaggcagcauugag

SEQ ID NO: 2715349 - RNA, 19 nt, Artificial Sequence
  Description of Artificial Sequence: Synthetic oligonucleotide
accucuacugcaugagcca

SEQ ID NO: 2715350 - RNA, 19 nt, Artificial Sequence
  Description of Artificial Sequence: Synthetic oligonucleotide
gguaccagggacacuacag

SEQ ID NO: 2715351 - RNA, 19 nt, Artificial Sequence
  Description of Artificial Sequence: Synthetic oligonucleotide
uggagucuuggguccaggc

SEQ ID NO: 2715352 - RNA, 19 nt, Artificial Sequence
  Description of Artificial Sequence: Synthetic oligonucleotide
uugagaggaggguuguuuu

SEQ ID NO: 2715353 - RNA, 19 nt, Artificial Sequence
  Description of Artificial Sequence: Synthetic oligonucleotide
aagaaggaucggcggccag

SEQ ID NO: 2715354 - RNA, 19 nt, Artificial Sequence
  Description of Artificial Sequence: Synthetic oligonucleotide
ucguucgccgcuccgacau

SEQ ID NO: 2715355 - RNA, 19 nt, Artificial Sequence
  Description of Artificial Sequence: Synthetic oligonucleotide
augaucgccugacuuucug

SEQ ID NO: 2715356 - RNA, 19 nt, Artificial Sequence
  Description of Artificial Sequence: Synthetic oligonucleotide
uuuccaagucucugguguc

SEQ ID NO: 2715357 - RNA, 19 nt, Artificial Sequence
  Description of Artificial Sequence: Synthetic oligonucleotide
aaagaaggaucggcggcca

SEQ ID NO: 2715358 - RNA, 19 nt, Artificial Sequence
  Description of Artificial Sequence: Synthetic oligonucleotide
uagacucaacauucugagu

SEQ ID NO: 2715359 - RNA, 19 nt, Artificial Sequence
  Description of Artificial Sequence: Synthetic oligonucleotide
cacgaucuucuucaagaug

SEQ ID NO: 2715360 - RNA, 19 nt, Artificial Sequence
  Description of Artificial Sequence: Synthetic oligonucleotide
auuucaggaaagauuguuu

SEQ ID NO: 2715361 - RNA, 19 nt, Artificial Sequence
  Description of Artificial Sequence: Synthetic oligonucleotide
aauggagucuuggguccag

SEQ ID NO: 2715362 - RNA, 19 nt, Artificial Sequence
  Description of Artificial Sequence: Synthetic oligonucleotide
gagauccuaggacuccuuc

SEQ ID NO: 2715363 - RNA, 19 nt, Artificial Sequence
  Description of Artificial Sequence: Synthetic oligonucleotide
cauuuccaagucucuggug

SEQ ID NO: 2715364 - RNA, 19 nt, Artificial Sequence
  Description of Artificial Sequence: Synthetic oligonucleotide
cacgacaggugagacuugg

SEQ ID NO: 2715365 - RNA, 19 nt, Artificial Sequence
  Description of Artificial Sequence: Synthetic oligonucleotide
ccagauuuccgcugggacc

SEQ ID NO: 2715366 - RNA, 19 nt, Artificial Sequence
  Description of Artificial Sequence: Synthetic oligonucleotide
cagcauugagccucucaag

SEQ ID NO: 2715367 - RNA, 19 nt, Artificial Sequence
  Description of Artificial Sequence: Synthetic oligonucleotide
uggguaccuugagaggagg

SEQ ID NO: 2715368 - RNA, 19 nt, Artificial Sequence
  Description of Artificial Sequence: Synthetic oligonucleotide
aggaggguuguuuucuuuu

SEQ ID NO: 2715369 - RNA, 19 nt, Artificial Sequence
  Description of Artificial Sequence: Synthetic oligonucleotide
ugggaccucuacugcauga

SEQ ID NO: 2715370 - RNA, 19 nt, Artificial Sequence
  Description of Artificial Sequence: Synthetic oligonucleotide
ucugguguccaguucucuu

SEQ ID NO: 2715371 - RNA, 19 nt, Artificial Sequence
  Description of Artificial Sequence: Synthetic oligonucleotide
gcugggaccuucuucgaag

SEQ ID NO: 2715372 - RNA, 19 nt, Artificial Sequence
  Description of Artificial Sequence: Synthetic oligonucleotide
cuccuuuguggguaccuug

SEQ ID NO: 2715373 - RNA, 19 nt, Artificial Sequence
  Description of Artificial Sequence: Synthetic oligonucleotide
cuacaggucuugaagaggu

SEQ ID NO: 2715374 - RNA, 19 nt, Artificial Sequence
  Description of Artificial Sequence: Synthetic oligonucleotide
cuccggaccucguucgccg

SEQ ID NO: 2715375 - RNA, 19 nt, Artificial Sequence
  Description of Artificial Sequence: Synthetic oligonucleotide
gaaagauuguuugggagau

SEQ ID NO: 2715376 - RNA, 19 nt, Artificial Sequence
  Description of Artificial Sequence: Synthetic oligonucleotide
uaugaucgccugacuuucu

SEQ ID NO: 2715377 - RNA, 19 nt, Artificial Sequence
  Description of Artificial Sequence: Synthetic oligonucleotide
gcauugagccucucaagcc

SEQ ID NO: 2715378 - RNA, 19 nt, Artificial Sequence
  Description of Artificial Sequence: Synthetic oligonucleotide
ugguguccaguucucuuuc

SEQ ID NO: 2715379 - RNA, 19 nt, Artificial Sequence
  Description of Artificial Sequence: Synthetic oligonucleotide
cuaggacuccuucgaagug

SEQ ID NO: 2715380 - RNA, 19 nt, Artificial Sequence
  Description of Artificial Sequence: Synthetic oligonucleotide
ugauagccuuucugaccgg

SEQ ID NO: 2715381 - RNA, 19 nt, Artificial Sequence
  Description of Artificial Sequence: Synthetic oligonucleotide
ucgccgcuccgacauaucu

SEQ ID NO: 2715382 - RNA, 19 nt, Artificial Sequence
  Description of Artificial Sequence: Synthetic oligonucleotide
ugacuuucugggacauuuc

SEQ ID NO: 2715383 - RNA, 19 nt, Artificial Sequence
  Description of Artificial Sequence: Synthetic oligonucleotide
ugcaugagccacgaucuuc

SEQ ID NO: 2715384 - RNA, 19 nt, Artificial Sequence
  Description of Artificial Sequence: Synthetic oligonucleotide
acauaucuaugguccggcu

SEQ ID NO: 2715385 - RNA, 19 nt, Artificial Sequence
  Description of Artificial Sequence: Synthetic oligonucleotide
gaagauacuuuggggaucu

SEQ ID NO: 2715386 - RNA, 19 nt, Artificial Sequence
  Description of Artificial Sequence: Synthetic oligonucleotide
cuucgaagacuuaauaaau

SEQ ID NO: 2715387 - RNA, 19 nt, Artificial Sequence
  Description of Artificial Sequence: Synthetic oligonucleotide
guaugaucgccugacuuuc

SEQ ID NO: 2715388 - RNA, 19 nt, Artificial Sequence
  Description of Artificial Sequence: Synthetic oligonucleotide
gugucuucggccauauuuc

SEQ ID NO: 2715389 - RNA, 19 nt, Artificial Sequence
  Description of Artificial Sequence: Synthetic oligonucleotide
agucuuggguccaggccgc

SEQ ID NO: 2715390 - RNA, 19 nt, Artificial Sequence
  Description of Artificial Sequence: Synthetic oligonucleotide
auacuuuggggaucucaau

SEQ ID NO: 2715391 - RNA, 19 nt, Artificial Sequence
  Description of Artificial Sequence: Synthetic oligonucleotide
guucucuuuccucagaguu

SEQ ID NO: 2715392 - RNA, 19 nt, Artificial Sequence
  Description of Artificial Sequence: Synthetic oligonucleotide
aaggaucggcggccagggg

SEQ ID NO: 2715393 - RNA, 19 nt, Artificial Sequence
  Description of Artificial Sequence: Synthetic oligonucleotide
acucacgacaggugagacu

SEQ ID NO: 2715394 - RNA, 19 nt, Artificial Sequence
  Description of Artificial Sequence: Synthetic oligonucleotide
agccgacuguaugaucgcc

SEQ ID NO: 2715395 - RNA, 19 nt, Artificial Sequence
  Description of Artificial Sequence: Synthetic oligonucleotide
ggagucuuggguccaggcc

SEQ ID NO: 2715396 - RNA, 19 nt, Artificial Sequence
  Description of Artificial Sequence: Synthetic oligonucleotide
ucugaccggagccgcuuga

SEQ ID NO: 2715397 - RNA, 19 nt, Artificial Sequence
  Description of Artificial Sequence: Synthetic oligonucleotide
accuucuucgaagacuuaa

SEQ ID NO: 2715398 - RNA, 19 nt, Artificial Sequence
  Description of Artificial Sequence: Synthetic oligonucleotide
agccacgaucuucuucaag

SEQ ID NO: 2715399 - RNA, 19 nt, Artificial Sequence
  Description of Artificial Sequence: Synthetic oligonucleotide
gaacucacgacaggugaga

SEQ ID NO: 2715400 - RNA, 19 nt, Artificial Sequence
  Description of Artificial Sequence: Synthetic oligonucleotide
uucgaaguguguggacagc

SEQ ID NO: 2715401 - RNA, 19 nt, Artificial Sequence
  Description of Artificial Sequence: Synthetic oligonucleotide
uucugaccggagccgcuug

SEQ ID NO: 2715402 - RNA, 19 nt, Artificial Sequence
  Description of Artificial Sequence: Synthetic oligonucleotide
uuccgcugggaccuucuuc

SEQ ID NO: 2715403 - RNA, 19 nt, Artificial Sequence
  Description of Artificial Sequence: Synthetic oligonucleotide
cuucuucgaagacuuaaua

SEQ ID NO: 2715404 - RNA, 19 nt, Artificial Sequence
  Description of Artificial Sequence: Synthetic oligonucleotide
accggagccgcuugaggug

SEQ ID NO: 2715405 - RNA, 19 nt, Artificial Sequence
  Description of Artificial Sequence: Synthetic oligonucleotide
ucaagccgacuguaugauc

SEQ ID NO: 2715406 - RNA, 19 nt, Artificial Sequence
  Description of Artificial Sequence: Synthetic oligonucleotide
aguguguggacagcuggga

SEQ ID NO: 2715407 - RNA, 19 nt, Artificial Sequence
  Description of Artificial Sequence: Synthetic oligonucleotide
gauagccuuucugaccgga

SEQ ID NO: 2715408 - RNA, 19 nt, Artificial Sequence
  Description of Artificial Sequence: Synthetic oligonucleotide
uaucuaugguccggcucag

SEQ ID NO: 2715409 - RNA, 19 nt, Artificial Sequence
  Description of Artificial Sequence: Synthetic oligonucleotide
cuuuccucagaguuagacu

SEQ ID NO: 2715410 - RNA, 19 nt, Artificial Sequence
  Description of Artificial Sequence: Synthetic oligonucleotide
aggucuugaagagguccuc

SEQ ID NO: 2715411 - RNA, 19 nt, Artificial Sequence
  Description of Artificial Sequence: Synthetic oligonucleotide
uucggccauauuucaggaa

SEQ ID NO: 2715412 - RNA, 19 nt, Artificial Sequence
  Description of Artificial Sequence: Synthetic oligonucleotide
aucgccugacuuucuggga

SEQ ID NO: 2715413 - RNA, 19 nt, Artificial Sequence
  Description of Artificial Sequence: Synthetic oligonucleotide
cgcuccgacauaucuaugg

SEQ ID NO: 2715414 - RNA, 19 nt, Artificial Sequence
  Description of Artificial Sequence: Synthetic oligonucleotide
ugggagaucugagccagau

SEQ ID NO: 2715415 - RNA, 19 nt, Artificial Sequence
  Description of Artificial Sequence: Synthetic oligonucleotide
cuuugaacucacgacaggu

SEQ ID NO: 2715416 - RNA, 19 nt, Artificial Sequence
  Description of Artificial Sequence: Synthetic oligonucleotide
cuuuggggaucucaauuaa

SEQ ID NO: 2715417 - RNA, 19 nt, Artificial Sequence
  Description of Artificial Sequence: Synthetic oligonucleotide
ggugucuucggccauauuu

SEQ ID NO: 2715418 - RNA, 19 nt, Artificial Sequence
  Description of Artificial Sequence: Synthetic oligonucleotide
uccuucgaaguguguggac

SEQ ID NO: 2715419 - RNA, 19 nt, Artificial Sequence
  Description of Artificial Sequence: Synthetic oligonucleotide
auauuucaggaaagauugu

SEQ ID NO: 2715420 - RNA, 19 nt, Artificial Sequence
  Description of Artificial Sequence: Synthetic oligonucleotide
gcagcauugagccucucaa

SEQ ID NO: 2715421 - RNA, 19 nt, Artificial Sequence
  Description of Artificial Sequence: Synthetic oligonucleotide
auagccuuucugaccggag

SEQ ID NO: 2715422 - RNA, 19 nt, Artificial Sequence
  Description of Artificial Sequence: Synthetic oligonucleotide
cagaguuagacucaacauu

SEQ ID NO: 2715423 - RNA, 19 nt, Artificial Sequence
  Description of Artificial Sequence: Synthetic oligonucleotide
gaccggagccgcuugaggu

SEQ ID NO: 2715424 - RNA, 19 nt, Artificial Sequence
  Description of Artificial Sequence: Synthetic oligonucleotide
gacucaacauucugaguau

SEQ ID NO: 2715425 - RNA, 19 nt, Artificial Sequence
  Description of Artificial Sequence: Synthetic oligonucleotide
aagauacuuuggggaucuc

SEQ ID NO: 2715426 - RNA, 19 nt, Artificial Sequence
  Description of Artificial Sequence: Synthetic oligonucleotide
uccucagaguuagacucaa

SEQ ID NO: 2715427 - RNA, 19 nt, Artificial Sequence
  Description of Artificial Sequence: Synthetic oligonucleotide
gucuucggccauauuucag

SEQ ID NO: 2715428 - RNA, 19 nt, Artificial Sequence
  Description of Artificial Sequence: Synthetic oligonucleotide
uugagccucucaagccgac

SEQ ID NO: 2715429 - RNA, 19 nt, Artificial Sequence
  Description of Artificial Sequence: Synthetic oligonucleotide
agccucucaagccgacugu

SEQ ID NO: 2715430 - RNA, 19 nt, Artificial Sequence
  Description of Artificial Sequence: Synthetic oligonucleotide
acuuggggcaagucuucaa

SEQ ID NO: 2715431 - RNA, 19 nt, Artificial Sequence
  Description of Artificial Sequence: Synthetic oligonucleotide
ucacgacaggugagacuug

SEQ ID NO: 2715432 - RNA, 19 nt, Artificial Sequence
  Description of Artificial Sequence: Synthetic oligonucleotide
gacagcugggaccucuacu

SEQ ID NO: 2715433 - RNA, 19 nt, Artificial Sequence
  Description of Artificial Sequence: Synthetic oligonucleotide
aggacuccuucgaagugug

SEQ ID NO: 2715434 - RNA, 19 nt, Artificial Sequence
  Description of Artificial Sequence: Synthetic oligonucleotide
ccgacauaucuaugguccg

SEQ ID NO: 2715435 - RNA, 19 nt, Artificial Sequence
  Description of Artificial Sequence: Synthetic oligonucleotide
ggaccucuacugcaugagc

SEQ ID NO: 2715436 - RNA, 19 nt, Artificial Sequence
  Description of Artificial Sequence: Synthetic oligonucleotide
ggucuugaagagguccucc

SEQ ID NO: 2715437 - RNA, 19 nt, Artificial Sequence
  Description of Artificial Sequence: Synthetic oligonucleotide
gagaggaggguuguuuucu

SEQ ID NO: 2715438 - RNA, 19 nt, Artificial Sequence
  Description of Artificial Sequence: Synthetic oligonucleotide
uugaggugucuucggccau

SEQ ID NO: 2715439 - RNA, 19 nt, Artificial Sequence
  Description of Artificial Sequence: Synthetic oligonucleotide
gaccucguucgccgcuccg

SEQ ID NO: 2715440 - RNA, 19 nt, Artificial Sequence
  Description of Artificial Sequence: Synthetic oligonucleotide
agaggaggguuguuuucuu

SEQ ID NO: 2715441 - RNA, 19 nt, Artificial Sequence
  Description of Artificial Sequence: Synthetic oligonucleotide
gccgcuugaggugucuucg

SEQ ID NO: 2715442 - RNA, 19 nt, Artificial Sequence
  Description of Artificial Sequence: Synthetic oligonucleotide
ggguccaggccgcugcgcg

SEQ ID NO: 2715443 - RNA, 19 nt, Artificial Sequence
  Description of Artificial Sequence: Synthetic oligonucleotide
auccuaggacuccuucgaa

SEQ ID NO: 2715444 - RNA, 19 nt, Artificial Sequence
  Description of Artificial Sequence: Synthetic oligonucleotide
cucacgacaggugagacuu

SEQ ID NO: 2715445 - RNA, 19 nt, Artificial Sequence
  Description of Artificial Sequence: Synthetic oligonucleotide
aucaagggcuucgaagaua

SEQ ID NO: 2715446 - RNA, 19 nt, Artificial Sequence
  Description of Artificial Sequence: Synthetic oligonucleotide
cgaagacuuaauaaaugga

SEQ ID NO: 2715447 - RNA, 19 nt, Artificial Sequence
  Description of Artificial Sequence: Synthetic oligonucleotide
cagauuuccgcugggaccu

SEQ ID NO: 2715448 - RNA, 19 nt, Artificial Sequence
  Description of Artificial Sequence: Synthetic oligonucleotide
gguguccaguucucuuucc

SEQ ID NO: 2715449 - RNA, 19 nt, Artificial Sequence
  Description of Artificial Sequence: Synthetic oligonucleotide
cuugaagagguccuccuuu

SEQ ID NO: 2715450 - RNA, 19 nt, Artificial Sequence
  Description of Artificial Sequence: Synthetic oligonucleotide
uugggagaucugagccaga

SEQ ID NO: 2715451 - RNA, 19 nt, Artificial Sequence
  Description of Artificial Sequence: Synthetic oligonucleotide
acgacaggugagacuuggg

SEQ ID NO: 2715452 - RNA, 19 nt, Artificial Sequence
  Description of Artificial Sequence: Synthetic oligonucleotide
uuucugaccggagccgcuu

SEQ ID NO: 2715453 - RNA, 19 nt, Artificial Sequence
  Description of Artificial Sequence: Synthetic oligonucleotide
ugagccucucaagccgacu

SEQ ID NO: 2715454 - RNA, 19 nt, Artificial Sequence
  Description of Artificial Sequence: Synthetic oligonucleotide
gucuugaagagguccuccu

SEQ ID NO: 2715455 - RNA, 19 nt, Artificial Sequence
  Description of Artificial Sequence: Synthetic oligonucleotide
acucaacauucugaguaua

SEQ ID NO: 2715456 - RNA, 19 nt, Artificial Sequence
  Description of Artificial Sequence: Synthetic oligonucleotide
accuugagaggaggguugu

SEQ ID NO: 2715457 - RNA, 19 nt, Artificial Sequence
  Description of Artificial Sequence: Synthetic oligonucleotide
gggaccucuacugcaugag

SEQ ID NO: 2715458 - RNA, 19 nt, Artificial Sequence
  Description of Artificial Sequence: Synthetic oligonucleotide
ccgacuguaugaucgccug

SEQ ID NO: 2715459 - RNA, 19 nt, Artificial Sequence
  Description of Artificial Sequence: Synthetic oligonucleotide
ccauauuucaggaaagauu

SEQ ID NO: 2715460 - RNA, 19 nt, Artificial Sequence
  Description of Artificial Sequence: Synthetic oligonucleotide
uccggaccucguucgccgc

SEQ ID NO: 2715461 - RNA, 19 nt, Artificial Sequence
  Description of Artificial Sequence: Synthetic oligonucleotide
ggguaccuugagaggaggg

SEQ ID NO: 2715462 - RNA, 19 nt, Artificial Sequence
  Description of Artificial Sequence: Synthetic oligonucleotide
gacuuggggcaagucuuca

SEQ ID NO: 2715463 - RNA, 19 nt, Artificial Sequence
  Description of Artificial Sequence: Synthetic oligonucleotide
agguccuccuuugugggua

SEQ ID NO: 2715464 - RNA, 19 nt, Artificial Sequence
  Description of Artificial Sequence: Synthetic oligonucleotide
ugaggugucuucggccaua

SEQ ID NO: 2715465 - RNA, 19 nt, Artificial Sequence
  Description of Artificial Sequence: Synthetic oligonucleotide
gaguuagacucaacauucu

SEQ ID NO: 2715466 - RNA, 19 nt, Artificial Sequence
  Description of Artificial Sequence: Synthetic oligonucleotide
uuuccgcugggaccuucuu

SEQ ID NO: 2715467 - RNA, 19 nt, Artificial Sequence
  Description of Artificial Sequence: Synthetic oligonucleotide
cuguaugaucgccugacuu

SEQ ID NO: 2715468 - RNA, 19 nt, Artificial Sequence
  Description of Artificial Sequence: Synthetic oligonucleotide
cugaccggagccgcuugag

SEQ ID NO: 2715469 - RNA, 19 nt, Artificial Sequence
  Description of Artificial Sequence: Synthetic oligonucleotide
auuuccgcugggaccuucu

SEQ ID NO: 2715470 - RNA, 19 nt, Artificial Sequence
  Description of Artificial Sequence: Synthetic oligonucleotide
gccuuucugaccggagccg

SEQ ID NO: 2715471 - RNA, 19 nt, Artificial Sequence
  Description of Artificial Sequence: Synthetic oligonucleotide
gauuuccgcugggaccuuc

SEQ ID NO: 2715472 - RNA, 19 nt, Artificial Sequence
  Description of Artificial Sequence: Synthetic oligonucleotide
cuccuucgaagugugugga

SEQ ID NO: 2715473 - RNA, 19 nt, Artificial Sequence
  Description of Artificial Sequence: Synthetic oligonucleotide
gaucggcggccaggggugg

SEQ ID NO: 2715474 - RNA, 19 nt, Artificial Sequence
  Description of Artificial Sequence: Synthetic oligonucleotide
ccuuuguggguaccuugag

SEQ ID NO: 2715475 - RNA, 19 nt, Artificial Sequence
  Description of Artificial Sequence: Synthetic oligonucleotide
uucgccgcuccgacauauc

SEQ ID NO: 2715476 - RNA, 19 nt, Artificial Sequence
  Description of Artificial Sequence: Synthetic oligonucleotide
ucggcggccagggguggag

SEQ ID NO: 2715477 - RNA, 19 nt, Artificial Sequence
  Description of Artificial Sequence: Synthetic oligonucleotide
ggccauauuucaggaaaga

SEQ ID NO: 2715478 - RNA, 19 nt, Artificial Sequence
  Description of Artificial Sequence: Synthetic oligonucleotide
gguccaggccgcugcgcgg

SEQ ID NO: 2715479 - RNA, 19 nt, Artificial Sequence
  Description of Artificial Sequence: Synthetic oligonucleotide
guguggacagcugggaccu

SEQ ID NO: 2715480 - RNA, 19 nt, Artificial Sequence
  Description of Artificial Sequence: Synthetic oligonucleotide
accucguucgccgcuccga

SEQ ID NO: 2715481 - RNA, 19 nt, Artificial Sequence
  Description of Artificial Sequence: Synthetic oligonucleotide
ggacacuacaggucuugaa

SEQ ID NO: 2715482 - RNA, 19 nt, Artificial Sequence
  Description of Artificial Sequence: Synthetic oligonucleotide
ggaucggcggccaggggug

SEQ ID NO: 2715483 - RNA, 19 nt, Artificial Sequence
  Description of Artificial Sequence: Synthetic oligonucleotide
aggugagacuuggggcaag

SEQ ID NO: 2715484 - RNA, 19 nt, Artificial Sequence
  Description of Artificial Sequence: Synthetic oligonucleotide
ccuaggacuccuucgaagu

SEQ ID NO: 2715485 - RNA, 19 nt, Artificial Sequence
  Description of Artificial Sequence: Synthetic oligonucleotide
cuugagaggaggguuguuu

SEQ ID NO: 2715486 - RNA, 19 nt, Artificial Sequence
  Description of Artificial Sequence: Synthetic oligonucleotide
cgacauaucuaugguccgg

SEQ ID NO: 2715487 - RNA, 19 nt, Artificial Sequence
  Description of Artificial Sequence: Synthetic oligonucleotide
ccuuucugaccggagccgc

SEQ ID NO: 2715488 - RNA, 19 nt, Artificial Sequence
  Description of Artificial Sequence: Synthetic oligonucleotide
ccuucgaaguguguggaca

SEQ ID NO: 2715489 - RNA, 19 nt, Artificial Sequence
  Description of Artificial Sequence: Synthetic oligonucleotide
cacuggggugcuggugggg

SEQ ID NO: 2715490 - RNA, 19 nt, Artificial Sequence
  Description of Artificial Sequence: Synthetic oligonucleotide
gaggaggguuguuuucuuu

SEQ ID NO: 2715491 - RNA, 19 nt, Artificial Sequence
  Description of Artificial Sequence: Synthetic oligonucleotide
guaccuugagaggaggguu

SEQ ID NO: 2715492 - RNA, 19 nt, Artificial Sequence
  Description of Artificial Sequence: Synthetic oligonucleotide
uccaggccgcugcgcggcc

SEQ ID NO: 2715493 - RNA, 19 nt, Artificial Sequence
  Description of Artificial Sequence: Synthetic oligonucleotide
gugagacuuggggcaaguc

SEQ ID NO: 2715494 - RNA, 19 nt, Artificial Sequence
  Description of Artificial Sequence: Synthetic oligonucleotide
gguaccuugagaggagggu

SEQ ID NO: 2715495 - RNA, 19 nt, Artificial Sequence
  Description of Artificial Sequence: Synthetic oligonucleotide
cuucaagaugauagccuuu

SEQ ID NO: 2715496 - RNA, 19 nt, Artificial Sequence
  Description of Artificial Sequence: Synthetic oligonucleotide
ccccuccggaccucguucg

SEQ ID NO: 2715497 - RNA, 19 nt, Artificial Sequence
  Description of Artificial Sequence: Synthetic oligonucleotide
ggaucucaauuaacuuuga

SEQ ID NO: 2715498 - RNA, 19 nt, Artificial Sequence
  Description of Artificial Sequence: Synthetic oligonucleotide
gggaccuucuucgaagacu

SEQ ID NO: 2715499 - RNA, 19 nt, Artificial Sequence
  Description of Artificial Sequence: Synthetic oligonucleotide
gguccuccuuuguggguac

SEQ ID NO: 2715500 - RNA, 19 nt, Artificial Sequence
  Description of Artificial Sequence: Synthetic oligonucleotide
ccucuacugcaugagccac

SEQ ID NO: 2715501 - RNA, 19 nt, Artificial Sequence
  Description of Artificial Sequence: Synthetic oligonucleotide
ccaagucucugguguccag

SEQ ID NO: 2715502 - RNA, 19 nt, Artificial Sequence
  Description of Artificial Sequence: Synthetic oligonucleotide
ccgcuugaggugucuucgg

SEQ ID NO: 2715503 - RNA, 19 nt, Artificial Sequence
  Description of Artificial Sequence: Synthetic oligonucleotide
ggacagcugggaccucuac

SEQ ID NO: 2715504 - RNA, 19 nt, Artificial Sequence
  Description of Artificial Sequence: Synthetic oligonucleotide
cucguucgccgcuccgaca

SEQ ID NO: 2715505 - RNA, 19 nt, Artificial Sequence
  Description of Artificial Sequence: Synthetic oligonucleotide
agagauccuaggacuccuu

SEQ ID NO: 2715506 - RNA, 19 nt, Artificial Sequence
  Description of Artificial Sequence: Synthetic oligonucleotide
gcuccgacauaucuauggu

SEQ ID NO: 2715507 - RNA, 19 nt, Artificial Sequence
  Description of Artificial Sequence: Synthetic oligonucleotide
ccaagauaaaagagauccu

SEQ ID NO: 2715508 - RNA, 19 nt, Artificial Sequence
  Description of Artificial Sequence: Synthetic oligonucleotide
ggaccuucuucgaagacuu

SEQ ID NO: 2715509 - RNA, 19 nt, Artificial Sequence
  Description of Artificial Sequence: Synthetic oligonucleotide
cgcuugaggugucuucggc

SEQ ID NO: 2715510 - RNA, 19 nt, Artificial Sequence
  Description of Artificial Sequence: Synthetic oligonucleotide
cugcgcggccccuccggac

SEQ ID NO: 2715511 - RNA, 19 nt, Artificial Sequence
  Description of Artificial Sequence: Synthetic oligonucleotide
caagucucugguguccagu

SEQ ID NO: 2715512 - RNA, 19 nt, Artificial Sequence
  Description of Artificial Sequence: Synthetic oligonucleotide
gccauauuucaggaaagau

SEQ ID NO: 2715513 - RNA, 19 nt, Artificial Sequence
  Description of Artificial Sequence: Synthetic oligonucleotide
gccgcuccgacauaucuau

SEQ ID NO: 2715514 - RNA, 19 nt, Artificial Sequence
  Description of Artificial Sequence: Synthetic oligonucleotide
cgaagauacuuuggggauc

SEQ ID NO: 2715515 - RNA, 19 nt, Artificial Sequence
  Description of Artificial Sequence: Synthetic oligonucleotide
cucaagccgacuguaugau

SEQ ID NO: 2715516 - RNA, 19 nt, Artificial Sequence
  Description of Artificial Sequence: Synthetic oligonucleotide
ggaccucguucgccgcucc

SEQ ID NO: 2715517 - RNA, 19 nt, Artificial Sequence
  Description of Artificial Sequence: Synthetic oligonucleotide
cucuuuccucagaguuaga

SEQ ID NO: 2715518 - RNA, 19 nt, Artificial Sequence
  Description of Artificial Sequence: Synthetic oligonucleotide
auacagcacuggggugcug

SEQ ID NO: 2715519 - RNA, 19 nt, Artificial Sequence
  Description of Artificial Sequence: Synthetic oligonucleotide
gaggugucuucggccauau

SEQ ID NO: 2715520 - RNA, 19 nt, Artificial Sequence
  Description of Artificial Sequence: Synthetic oligonucleotide
ccuucuucgaagacuuaau

SEQ ID NO: 2715521 - RNA, 19 nt, Artificial Sequence
  Description of Artificial Sequence: Synthetic oligonucleotide
gccccuccggaccucguuc

SEQ ID NO: 2715522 - RNA, 19 nt, Artificial Sequence
  Description of Artificial Sequence: Synthetic oligonucleotide
gguggagguugaggcagca

SEQ ID NO: 2715523 - RNA, 19 nt, Artificial Sequence
  Description of Artificial Sequence: Synthetic oligonucleotide
ccuccggaccucguucgcc

SEQ ID NO: 2715524 - RNA, 19 nt, Artificial Sequence
  Description of Artificial Sequence: Synthetic oligonucleotide
gaccuucuucgaagacuua

SEQ ID NO: 2715525 - RNA, 19 nt, Artificial Sequence
  Description of Artificial Sequence: Synthetic oligonucleotide
aucggcggccaggggugga

SEQ ID NO: 2715526 - RNA, 19 nt, Artificial Sequence
  Description of Artificial Sequence: Synthetic oligonucleotide
ggugagacuuggggcaagu

SEQ ID NO: 2715527 - RNA, 19 nt, Artificial Sequence
  Description of Artificial Sequence: Synthetic oligonucleotide
gccgacuguaugaucgccu

SEQ ID NO: 2715528 - RNA, 19 nt, Artificial Sequence
  Description of Artificial Sequence: Synthetic oligonucleotide
agauuuccgcugggaccuu

SEQ ID NO: 2715529 - RNA, 19 nt, Artificial Sequence
  Description of Artificial Sequence: Synthetic oligonucleotide
caagggcuucgaagauacu

SEQ ID NO: 2715530 - RNA, 19 nt, Artificial Sequence
  Description of Artificial Sequence: Synthetic oligonucleotide
gccucucaagccgacugua

SEQ ID NO: 2715531 - RNA, 19 nt, Artificial Sequence
  Description of Artificial Sequence: Synthetic oligonucleotide
gggguaccagggacacuac

SEQ ID NO: 2715532 - RNA, 19 nt, Artificial Sequence
  Description of Artificial Sequence: Synthetic oligonucleotide
ccgcuccgacauaucuaug

SEQ ID NO: 2715533 - RNA, 19 nt, Artificial Sequence
  Description of Artificial Sequence: Synthetic oligonucleotide
gcugcgcggccccuccgga

SEQ ID NO: 2715534 - RNA, 19 nt, Artificial Sequence
  Description of Artificial Sequence: Synthetic oligonucleotide
gcggccccuccggaccucg

SEQ ID NO: 2715535 - RNA, 19 nt, Artificial Sequence
  Description of Artificial Sequence: Synthetic oligonucleotide
gccagggguggagguugag

SEQ ID NO: 2715536 - RNA, 19 nt, Artificial Sequence
  Description of Artificial Sequence: Synthetic oligonucleotide
cgccugacuuucugggaca

SEQ ID NO: 2715537 - RNA, 19 nt, Artificial Sequence
  Description of Artificial Sequence: Synthetic oligonucleotide
cugcaugagccacgaucuu

SEQ ID NO: 2715538 - RNA, 19 nt, Artificial Sequence
  Description of Artificial Sequence: Synthetic oligonucleotide
ggcggccagggguggaggu

SEQ ID NO: 2715539 - RNA, 19 nt, Artificial Sequence
  Description of Artificial Sequence: Synthetic oligonucleotide
ccucucaagccgacuguau

SEQ ID NO: 2715540 - RNA, 19 nt, Artificial Sequence
  Description of Artificial Sequence: Synthetic oligonucleotide
gagccgcuugaggugucuu

SEQ ID NO: 2715541 - RNA, 19 nt, Artificial Sequence
  Description of Artificial Sequence: Synthetic oligonucleotide
cuacugcaugagccacgau

SEQ ID NO: 2715542 - RNA, 19 nt, Artificial Sequence
  Description of Artificial Sequence: Synthetic oligonucleotide
ggagccgcuugaggugucu

SEQ ID NO: 2715543 - RNA, 19 nt, Artificial Sequence
  Description of Artificial Sequence: Synthetic oligonucleotide
ccgcugggaccuucuucga

SEQ ID NO: 2715544 - RNA, 19 nt, Artificial Sequence
  Description of Artificial Sequence: Synthetic oligonucleotide
aggccgcugcgcggccccu

SEQ ID NO: 2715545 - RNA, 19 nt, Artificial Sequence
  Description of Artificial Sequence: Synthetic oligonucleotide
cgccgcuccgacauaucua

SEQ ID NO: 2715546 - RNA, 19 nt, Artificial Sequence
  Description of Artificial Sequence: Synthetic oligonucleotide
ggacuccuucgaagugugu

SEQ ID NO: 2715547 - RNA, 19 nt, Artificial Sequence
  Description of Artificial Sequence: Synthetic oligonucleotide
cggaccucguucgccgcuc

SEQ ID NO: 2715548 - RNA, 19 nt, Artificial Sequence
  Description of Artificial Sequence: Synthetic oligonucleotide
ccggagccgcuugaggugu

SEQ ID NO: 2715549 - RNA, 19 nt, Artificial Sequence
  Description of Artificial Sequence: Synthetic oligonucleotide
ggccccuccggaccucguu

SEQ ID NO: 2715550 - RNA, 19 nt, Artificial Sequence
  Description of Artificial Sequence: Synthetic oligonucleotide
ccuccuuuguggguaccuu

SEQ ID NO: 2715551 - RNA, 19 nt, Artificial Sequence
  Description of Artificial Sequence: Synthetic oligonucleotide
ggccgcugcgcggccccuc

SEQ ID NO: 2715552 - RNA, 19 nt, Artificial Sequence
  Description of Artificial Sequence: Synthetic oligonucleotide
ccggaccucguucgccgcu

SEQ ID NO: 2715553 - RNA, 19 nt, Artificial Sequence
  Description of Artificial Sequence: Synthetic oligonucleotide
gcgcggccccuccggaccu

SEQ ID NO: 2715554 - RNA, 19 nt, Artificial Sequence
  Description of Artificial Sequence: Synthetic oligonucleotide
ccuugagaggaggguuguu

SEQ ID NO: 2715555 - RNA, 19 nt, Artificial Sequence
  Description of Artificial Sequence: Synthetic oligonucleotide
ccugacuuucugggacauu

SEQ ID NO: 2715556 - RNA, 19 nt, Artificial Sequence
  Description of Artificial Sequence: Synthetic oligonucleotide
cgcggccccuccggaccuc

SEQ ID NO: 2715557 - RNA, 19 nt, Artificial Sequence
  Description of Artificial Sequence: Synthetic oligonucleotide
cggccccuccggaccucgu

SEQ ID NO: 2715558 - RNA, 19 nt, Artificial Sequence
  Description of Artificial Sequence: Synthetic oligonucleotide
aaagagacggauuagagcc

SEQ ID NO: 2715559 - RNA, 19 nt, Artificial Sequence
  Description of Artificial Sequence: Synthetic oligonucleotide
aaaaucugcaucuuggcgg

SEQ ID NO: 2715560 - RNA, 19 nt, Artificial Sequence
  Description of Artificial Sequence: Synthetic oligonucleotide
uauuuauucauacacaacu

SEQ ID NO: 2715561 - RNA, 19 nt, Artificial Sequence
  Description of Artificial Sequence: Synthetic oligonucleotide
aaaagagacggauuagagc

SEQ ID NO: 2715562 - RNA, 19 nt, Artificial Sequence
  Description of Artificial Sequence: Synthetic oligonucleotide
uguagucagacaaaguacg

SEQ ID NO: 2715563 - RNA, 19 nt, Artificial Sequence
  Description of Artificial Sequence: Synthetic oligonucleotide
uguugaagcaguaagucag

SEQ ID NO: 2715564 - RNA, 19 nt, Artificial Sequence
  Description of Artificial Sequence: Synthetic oligonucleotide
aguaaugucugucaaaaug

SEQ ID NO: 2715565 - RNA, 19 nt, Artificial Sequence
  Description of Artificial Sequence: Synthetic oligonucleotide
aaaucugcaucuuggcggc

SEQ ID NO: 2715566 - RNA, 19 nt, Artificial Sequence
  Description of Artificial Sequence: Synthetic oligonucleotide
ucaaccucgagcgugaucg

SEQ ID NO: 2715567 - RNA, 19 nt, Artificial Sequence
  Description of Artificial Sequence: Synthetic oligonucleotide
uuuauuuauucauacacaa

SEQ ID NO: 2715568 - RNA, 19 nt, Artificial Sequence
  Description of Artificial Sequence: Synthetic oligonucleotide
uuuacauuuucuauagugu

SEQ ID NO: 2715569 - RNA, 19 nt, Artificial Sequence
  Description of Artificial Sequence: Synthetic oligonucleotide
ucucaacacaagaugaagg

SEQ ID NO: 2715570 - RNA, 19 nt, Artificial Sequence
  Description of Artificial Sequence: Synthetic oligonucleotide
gaggguucaaccucgagcg

SEQ ID NO: 2715571 - RNA, 19 nt, Artificial Sequence
  Description of Artificial Sequence: Synthetic oligonucleotide
uuuucuauaguguccgagg

SEQ ID NO: 2715572 - RNA, 19 nt, Artificial Sequence
  Description of Artificial Sequence: Synthetic oligonucleotide
cuuuacauuuucuauagug

SEQ ID NO: 2715573 - RNA, 19 nt, Artificial Sequence
  Description of Artificial Sequence: Synthetic oligonucleotide
acacucaucagauggacac

SEQ ID NO: 2715574 - RNA, 19 nt, Artificial Sequence
  Description of Artificial Sequence: Synthetic oligonucleotide
gaagcaguaagucagacaa

SEQ ID NO: 2715575 - RNA, 19 nt, Artificial Sequence
  Description of Artificial Sequence: Synthetic oligonucleotide
uuuauucauacacaacuac

SEQ ID NO: 2715576 - RNA, 19 nt, Artificial Sequence
  Description of Artificial Sequence: Synthetic oligonucleotide
gaaaaucugcaucuuggcg

SEQ ID NO: 2715577 - RNA, 19 nt, Artificial Sequence
  Description of Artificial Sequence: Synthetic oligonucleotide
ucuucuuagcaccaccacg

SEQ ID NO: 2715578 - RNA, 19 nt, Artificial Sequence
  Description of Artificial Sequence: Synthetic oligonucleotide
uacauucgaaaagagacgg

SEQ ID NO: 2715579 - RNA, 19 nt, Artificial Sequence
  Description of Artificial Sequence: Synthetic oligonucleotide
aauggcuagccaugaaaac

SEQ ID NO: 2715580 - RNA, 19 nt, Artificial Sequence
  Description of Artificial Sequence: Synthetic oligonucleotide
uuuuggauguuguagucag

SEQ ID NO: 2715581 - RNA, 19 nt, Artificial Sequence
  Description of Artificial Sequence: Synthetic oligonucleotide
uuuucauccaccuuauagu

SEQ ID NO: 2715582 - RNA, 19 nt, Artificial Sequence
  Description of Artificial Sequence: Synthetic oligonucleotide
caaaguacggccaucuucc

SEQ ID NO: 2715583 - RNA, 19 nt, Artificial Sequence
  Description of Artificial Sequence: Synthetic oligonucleotide
uuaccagcaaagaucagcc

SEQ ID NO: 2715584 - RNA, 19 nt, Artificial Sequence
  Description of Artificial Sequence: Synthetic oligonucleotide
uuauucauacacaacuacu

SEQ ID NO: 2715585 - RNA, 19 nt, Artificial Sequence
  Description of Artificial Sequence: Synthetic oligonucleotide
gaagucucaacacaagaug

SEQ ID NO: 2715586 - RNA, 19 nt, Artificial Sequence
  Description of Artificial Sequence: Synthetic oligonucleotide
acaacuacuugucuucugg

SEQ ID NO: 2715587 - RNA, 19 nt, Artificial Sequence
  Description of Artificial Sequence: Synthetic oligonucleotide
aacuuaaccuucuuucucu

SEQ ID NO: 2715588 - RNA, 19 nt, Artificial Sequence
  Description of Artificial Sequence: Synthetic oligonucleotide
auaguacuucagcacagcc

SEQ ID NO: 2715589 - RNA, 19 nt, Artificial Sequence
  Description of Artificial Sequence: Synthetic oligonucleotide
uacauuuucuauagugucc

SEQ ID NO: 2715590 - RNA, 19 nt, Artificial Sequence
  Description of Artificial Sequence: Synthetic oligonucleotide
acaaaguacggccaucuuc

SEQ ID NO: 2715591 - RNA, 19 nt, Artificial Sequence
  Description of Artificial Sequence: Synthetic oligonucleotide
aauuccuuccuuauccugg

SEQ ID NO: 2715592 - RNA, 19 nt, Artificial Sequence
  Description of Artificial Sequence: Synthetic oligonucleotide
aaggcgacuaauuuugcca

SEQ ID NO: 2715593 - RNA, 19 nt, Artificial Sequence
  Description of Artificial Sequence: Synthetic oligonucleotide
aaaauggcuagccaugaaa

SEQ ID NO: 2715594 - RNA, 19 nt, Artificial Sequence
  Description of Artificial Sequence: Synthetic oligonucleotide
ugcuuaccagcaaagauca

SEQ ID NO: 2715595 - RNA, 19 nt, Artificial Sequence
  Description of Artificial Sequence: Synthetic oligonucleotide
uuauaguacuucagcacag

SEQ ID NO: 2715596 - RNA, 19 nt, Artificial Sequence
  Description of Artificial Sequence: Synthetic oligonucleotide
agcacagccaacuuaaccu

SEQ ID NO: 2715597 - RNA, 19 nt, Artificial Sequence
  Description of Artificial Sequence: Synthetic oligonucleotide
uauucauacacaacuacuu

SEQ ID NO: 2715598 - RNA, 19 nt, Artificial Sequence
  Description of Artificial Sequence: Synthetic oligonucleotide
ccuacauucgaaaagagac

SEQ ID NO: 2715599 - RNA, 19 nt, Artificial Sequence
  Description of Artificial Sequence: Synthetic oligonucleotide
acauuuucuauaguguccg

SEQ ID NO: 2715600 - RNA, 19 nt, Artificial Sequence
  Description of Artificial Sequence: Synthetic oligonucleotide
uuacauuuucuauaguguc

SEQ ID NO: 2715601 - RNA, 19 nt, Artificial Sequence
  Description of Artificial Sequence: Synthetic oligonucleotide
uaagucagacaacacuugc

SEQ ID NO: 2715602 - RNA, 19 nt, Artificial Sequence
  Description of Artificial Sequence: Synthetic oligonucleotide
uucauacacaacuacuugu

SEQ ID NO: 2715603 - RNA, 19 nt, Artificial Sequence
  Description of Artificial Sequence: Synthetic oligonucleotide
caacacaagaugaagggug

SEQ ID NO: 2715604 - RNA, 19 nt, Artificial Sequence
  Description of Artificial Sequence: Synthetic oligonucleotide
uuguagucagacaaaguac

SEQ ID NO: 2715605 - RNA, 19 nt, Artificial Sequence
  Description of Artificial Sequence: Synthetic oligonucleotide
agcgugaucguuuuccccg

SEQ ID NO: 2715606 - RNA, 19 nt, Artificial Sequence
  Description of Artificial Sequence: Synthetic oligonucleotide
aagucagacaacacuugcc

SEQ ID NO: 2715607 - RNA, 19 nt, Artificial Sequence
  Description of Artificial Sequence: Synthetic oligonucleotide
cuacauucgaaaagagacg

SEQ ID NO: 2715608 - RNA, 19 nt, Artificial Sequence
  Description of Artificial Sequence: Synthetic oligonucleotide
agugguguaggacuucuuc

SEQ ID NO: 2715609 - RNA, 19 nt, Artificial Sequence
  Description of Artificial Sequence: Synthetic oligonucleotide
uugcuuaccagcaaagauc

SEQ ID NO: 2715610 - RNA, 19 nt, Artificial Sequence
  Description of Artificial Sequence: Synthetic oligonucleotide
aguacuucagcacagccaa

SEQ ID NO: 2715611 - RNA, 19 nt, Artificial Sequence
  Description of Artificial Sequence: Synthetic oligonucleotide
ucucuuaugcuuauucuuc

SEQ ID NO: 2715612 - RNA, 19 nt, Artificial Sequence
  Description of Artificial Sequence: Synthetic oligonucleotide
uuaaccuucuuucucuuau

SEQ ID NO: 2715613 - RNA, 19 nt, Artificial Sequence
  Description of Artificial Sequence: Synthetic oligonucleotide
gaaaagagacggauuagag

SEQ ID NO: 2715614 - RNA, 19 nt, Artificial Sequence
  Description of Artificial Sequence: Synthetic oligonucleotide
ucugguuuguugaagcagu

SEQ ID NO: 2715615 - RNA, 19 nt, Artificial Sequence
  Description of Artificial Sequence: Synthetic oligonucleotide
aagaugaaggguggacucc

SEQ ID NO: 2715616 - RNA, 19 nt, Artificial Sequence
  Description of Artificial Sequence: Synthetic oligonucleotide
aaacuccagcaccacacuc

SEQ ID NO: 2715617 - RNA, 19 nt, Artificial Sequence
  Description of Artificial Sequence: Synthetic oligonucleotide
caccacacucaucagaugg

SEQ ID NO: 2715618 - RNA, 19 nt, Artificial Sequence
  Description of Artificial Sequence: Synthetic oligonucleotide
aucguuuuccccguaaggg

SEQ ID NO: 2715619 - RNA, 19 nt, Artificial Sequence
  Description of Artificial Sequence: Synthetic oligonucleotide
ucauacacaacuacuuguc

SEQ ID NO: 2715620 - RNA, 19 nt, Artificial Sequence
  Description of Artificial Sequence: Synthetic oligonucleotide
aacacaagaugaagggugg

SEQ ID NO: 2715621 - RNA, 19 nt, Artificial Sequence
  Description of Artificial Sequence: Synthetic oligonucleotide
ugucugucaaaauggcuag

SEQ ID NO: 2715622 - RNA, 19 nt, Artificial Sequence
  Description of Artificial Sequence: Synthetic oligonucleotide
gaucguuuuccccguaagg

SEQ ID NO: 2715623 - RNA, 19 nt, Artificial Sequence
  Description of Artificial Sequence: Synthetic oligonucleotide
uuuguugaagcaguaaguc

SEQ ID NO: 2715624 - RNA, 19 nt, Artificial Sequence
  Description of Artificial Sequence: Synthetic oligonucleotide
guuguagucagacaaagua

SEQ ID NO: 2715625 - RNA, 19 nt, Artificial Sequence
  Description of Artificial Sequence: Synthetic oligonucleotide
cuagccaugaaaacuccag

SEQ ID NO: 2715626 - RNA, 19 nt, Artificial Sequence
  Description of Artificial Sequence: Synthetic oligonucleotide
agucagacaacacuugcca

SEQ ID NO: 2715627 - RNA, 19 nt, Artificial Sequence
  Description of Artificial Sequence: Synthetic oligonucleotide
ugucaaaauggcuagccau

SEQ ID NO: 2715628 - RNA, 19 nt, Artificial Sequence
  Description of Artificial Sequence: Synthetic oligonucleotide
cuuauaguacuucagcaca

SEQ ID NO: 2715629 - RNA, 19 nt, Artificial Sequence
  Description of Artificial Sequence: Synthetic oligonucleotide
gguuuguugaagcaguaag

SEQ ID NO: 2715630 - RNA, 19 nt, Artificial Sequence
  Description of Artificial Sequence: Synthetic oligonucleotide
acgaaaaucugcaucuugg

SEQ ID NO: 2715631 - RNA, 19 nt, Artificial Sequence
  Description of Artificial Sequence: Synthetic oligonucleotide
ucugucaaaauggcuagcc

SEQ ID NO: 2715632 - RNA, 19 nt, Artificial Sequence
  Description of Artificial Sequence: Synthetic oligonucleotide
uuucucuuaugcuuauucu

SEQ ID NO: 2715633 - RNA, 19 nt, Artificial Sequence
  Description of Artificial Sequence: Synthetic oligonucleotide
accuuauaguacuucagca

SEQ ID NO: 2715634 - RNA, 19 nt, Artificial Sequence
  Description of Artificial Sequence: Synthetic oligonucleotide
aguguccgaggguucaacc

SEQ ID NO: 2715635 - RNA, 19 nt, Artificial Sequence
  Description of Artificial Sequence: Synthetic oligonucleotide
uaguacuucagcacagcca

SEQ ID NO: 2715636 - RNA, 19 nt, Artificial Sequence
  Description of Artificial Sequence: Synthetic oligonucleotide
uuguugaagcaguaaguca

SEQ ID NO: 2715637 - RNA, 19 nt, Artificial Sequence
  Description of Artificial Sequence: Synthetic oligonucleotide
uggacacucucgacgaagg

SEQ ID NO: 2715638 - RNA, 19 nt, Artificial Sequence
  Description of Artificial Sequence: Synthetic oligonucleotide
aagucucaacacaagauga

SEQ ID NO: 2715639 - RNA, 19 nt, Artificial Sequence
  Description of Artificial Sequence: Synthetic oligonucleotide
uacacaacuacuugucuuc

SEQ ID NO: 2715640 - RNA, 19 nt, Artificial Sequence
  Description of Artificial Sequence: Synthetic oligonucleotide
gacacucucgacgaaggcg

SEQ ID NO: 2715641 - RNA, 19 nt, Artificial Sequence
  Description of Artificial Sequence: Synthetic oligonucleotide
gaagccccaagccggagcg

SEQ ID NO: 2715642 - RNA, 19 nt, Artificial Sequence
  Description of Artificial Sequence: Synthetic oligonucleotide
auuagagccgccgaccagg

SEQ ID NO: 2715643 - RNA, 19 nt, Artificial Sequence
  Description of Artificial Sequence: Synthetic oligonucleotide
aguacggccaucuuccagu

SEQ ID NO: 2715644 - RNA, 19 nt, Artificial Sequence
  Description of Artificial Sequence: Synthetic oligonucleotide
agcaccaccacgaagucuc

SEQ ID NO: 2715645 - RNA, 19 nt, Artificial Sequence
  Description of Artificial Sequence: Synthetic oligonucleotide
caccuuauaguacuucagc

SEQ ID NO: 2715646 - RNA, 19 nt, Artificial Sequence
  Description of Artificial Sequence: Synthetic oligonucleotide
ucuuagcaccaccacgaag

SEQ ID NO: 2715647 - RNA, 19 nt, Artificial Sequence
  Description of Artificial Sequence: Synthetic oligonucleotide
gaaggcgacuaauuuugcc

SEQ ID NO: 2715648 - RNA, 19 nt, Artificial Sequence
  Description of Artificial Sequence: Synthetic oligonucleotide
accaccacgaagucucaac

SEQ ID NO: 2715649 - RNA, 19 nt, Artificial Sequence
  Description of Artificial Sequence: Synthetic oligonucleotide
uagccaugaaaacuccagc

SEQ ID NO: 2715650 - RNA, 19 nt, Artificial Sequence
  Description of Artificial Sequence: Synthetic oligonucleotide
cuucuuagcaccaccacga

SEQ ID NO: 2715651 - RNA, 19 nt, Artificial Sequence
  Description of Artificial Sequence: Synthetic oligonucleotide
ucuuccaguugcuuaccag

SEQ ID NO: 2715652 - RNA, 19 nt, Artificial Sequence
  Description of Artificial Sequence: Synthetic oligonucleotide
agauggacacucucgacga

SEQ ID NO: 2715653 - RNA, 19 nt, Artificial Sequence
  Description of Artificial Sequence: Synthetic oligonucleotide
uucucuuaugcuuauucuu

SEQ ID NO: 2715654 - RNA, 19 nt, Artificial Sequence
  Description of Artificial Sequence: Synthetic oligonucleotide
aucagauggacacucucga

SEQ ID NO: 2715655 - RNA, 19 nt, Artificial Sequence
  Description of Artificial Sequence: Synthetic oligonucleotide
uggcuagccaugaaaacuc

SEQ ID NO: 2715656 - RNA, 19 nt, Artificial Sequence
  Description of Artificial Sequence: Synthetic oligonucleotide
ucuauaguguccgaggguu

SEQ ID NO: 2715657 - RNA, 19 nt, Artificial Sequence
  Description of Artificial Sequence: Synthetic oligonucleotide
acaguaaugucugucaaaa

SEQ ID NO: 2715658 - RNA, 19 nt, Artificial Sequence
  Description of Artificial Sequence: Synthetic oligonucleotide
agagccgccgaccagggug

SEQ ID NO: 2715659 - RNA, 19 nt, Artificial Sequence
  Description of Artificial Sequence: Synthetic oligonucleotide
acacuugccacaguaaugu

SEQ ID NO: 2715660 - RNA, 19 nt, Artificial Sequence
  Description of Artificial Sequence: Synthetic oligonucleotide
ggcgguuccaccuacauuc

SEQ ID NO: 2715661 - RNA, 19 nt, Artificial Sequence
  Description of Artificial Sequence: Synthetic oligonucleotide
gaauuccuuccuuauccug

SEQ ID NO: 2715662 - RNA, 19 nt, Artificial Sequence
  Description of Artificial Sequence: Synthetic oligonucleotide
cuuagcaccaccacgaagu

SEQ ID NO: 2715663 - RNA, 19 nt, Artificial Sequence
  Description of Artificial Sequence: Synthetic oligonucleotide
agagacggauuagagccgc

SEQ ID NO: 2715664 - RNA, 19 nt, Artificial Sequence
  Description of Artificial Sequence: Synthetic oligonucleotide
uguuguagucagacaaagu

SEQ ID NO: 2715665 - RNA, 19 nt, Artificial Sequence
  Description of Artificial Sequence: Synthetic oligonucleotide
acuacuugucuucugguuu

SEQ ID NO: 2715666 - RNA, 19 nt, Artificial Sequence
  Description of Artificial Sequence: Synthetic oligonucleotide
aguaagucagacaacacuu

SEQ ID NO: 2715667 - RNA, 19 nt, Artificial Sequence
  Description of Artificial Sequence: Synthetic oligonucleotide
caugaaaacuccagcacca

SEQ ID NO: 2715668 - RNA, 19 nt, Artificial Sequence
  Description of Artificial Sequence: Synthetic oligonucleotide
acggauuagagccgccgac

SEQ ID NO: 2715669 - RNA, 19 nt, Artificial Sequence
  Description of Artificial Sequence: Synthetic oligonucleotide
gaaggguggacuccuuuug

SEQ ID NO: 2715670 - RNA, 19 nt, Artificial Sequence
  Description of Artificial Sequence: Synthetic oligonucleotide
acgaagucucaacacaaga

SEQ ID NO: 2715671 - RNA, 19 nt, Artificial Sequence
  Description of Artificial Sequence: Synthetic oligonucleotide
ucaaaauggcuagccauga

SEQ ID NO: 2715672 - RNA, 19 nt, Artificial Sequence
  Description of Artificial Sequence: Synthetic oligonucleotide
caagaugaaggguggacuc

SEQ ID NO: 2715673 - RNA, 19 nt, Artificial Sequence
  Description of Artificial Sequence: Synthetic oligonucleotide
augcuuauucuucuuggga

SEQ ID NO: 2715674 - RNA, 19 nt, Artificial Sequence
  Description of Artificial Sequence: Synthetic oligonucleotide
accacgaagucucaacaca

SEQ ID NO: 2715675 - RNA, 19 nt, Artificial Sequence
  Description of Artificial Sequence: Synthetic oligonucleotide
aacuacuugucuucugguu

SEQ ID NO: 2715676 - RNA, 19 nt, Artificial Sequence
  Description of Artificial Sequence: Synthetic oligonucleotide
ucgagcgugaucguuuucc

SEQ ID NO: 2715677 - RNA, 19 nt, Artificial Sequence
  Description of Artificial Sequence: Synthetic oligonucleotide
uagucagacaaaguacggc

SEQ ID NO: 2715678 - RNA, 19 nt, Artificial Sequence
  Description of Artificial Sequence: Synthetic oligonucleotide
uuauucuucuugggagugg

SEQ ID NO: 2715679 - RNA, 19 nt, Artificial Sequence
  Description of Artificial Sequence: Synthetic oligonucleotide
uuggccuuuacauuuucua

SEQ ID NO: 2715680 - RNA, 19 nt, Artificial Sequence
  Description of Artificial Sequence: Synthetic oligonucleotide
auacacaacuacuugucuu

SEQ ID NO: 2715681 - RNA, 19 nt, Artificial Sequence
  Description of Artificial Sequence: Synthetic oligonucleotide
ucaucagauggacacucuc

SEQ ID NO: 2715682 - RNA, 19 nt, Artificial Sequence
  Description of Artificial Sequence: Synthetic oligonucleotide
uucuauaguguccgagggu

SEQ ID NO: 2715683 - RNA, 19 nt, Artificial Sequence
  Description of Artificial Sequence: Synthetic oligonucleotide
gccuuuacauuuucuauag

SEQ ID NO: 2715684 - RNA, 19 nt, Artificial Sequence
  Description of Artificial Sequence: Synthetic oligonucleotide
acgaaggcgacuaauuuug

SEQ ID NO: 2715685 - RNA, 19 nt, Artificial Sequence
  Description of Artificial Sequence: Synthetic oligonucleotide
ucaacacaagaugaagggu

SEQ ID NO: 2715686 - RNA, 19 nt, Artificial Sequence
  Description of Artificial Sequence: Synthetic oligonucleotide
uguaggacuucuucuuccu

SEQ ID NO: 2715687 - RNA, 19 nt, Artificial Sequence
  Description of Artificial Sequence: Synthetic oligonucleotide
auggcuagccaugaaaacu

SEQ ID NO: 2715688 - RNA, 19 nt, Artificial Sequence
  Description of Artificial Sequence: Synthetic oligonucleotide
gacaacacuugccacagua

SEQ ID NO: 2715689 - RNA, 19 nt, Artificial Sequence
  Description of Artificial Sequence: Synthetic oligonucleotide
uccucuucuuagcaccacc

SEQ ID NO: 2715690 - RNA, 19 nt, Artificial Sequence
  Description of Artificial Sequence: Synthetic oligonucleotide
ucguuuuccccguaagggu

SEQ ID NO: 2715691 - RNA, 19 nt, Artificial Sequence
  Description of Artificial Sequence: Synthetic oligonucleotide
ucaggaggaauuccuuccu

SEQ ID NO: 2715692 - RNA, 19 nt, Artificial Sequence
  Description of Artificial Sequence: Synthetic oligonucleotide
uuagagccgccgaccaggg

SEQ ID NO: 2715693 - RNA, 19 nt, Artificial Sequence
  Description of Artificial Sequence: Synthetic oligonucleotide
ucagacaaaguacggccau

SEQ ID NO: 2715694 - RNA, 19 nt, Artificial Sequence
  Description of Artificial Sequence: Synthetic oligonucleotide
uauaguguccgaggguuca

SEQ ID NO: 2715695 - RNA, 19 nt, Artificial Sequence
  Description of Artificial Sequence: Synthetic oligonucleotide
guagucagacaaaguacgg

SEQ ID NO: 2715696 - RNA, 19 nt, Artificial Sequence
  Description of Artificial Sequence: Synthetic oligonucleotide
ucgaaaagagacggauuag

SEQ ID NO: 2715697 - RNA, 19 nt, Artificial Sequence
  Description of Artificial Sequence: Synthetic oligonucleotide
acaagaugaaggguggacu

SEQ ID NO: 2715698 - RNA, 19 nt, Artificial Sequence
  Description of Artificial Sequence: Synthetic oligonucleotide
aagagacggauuagagccg

SEQ ID NO: 2715699 - RNA, 19 nt, Artificial Sequence
  Description of Artificial Sequence: Synthetic oligonucleotide
guguaggacuucuucuucc

SEQ ID NO: 2715700 - RNA, 19 nt, Artificial Sequence
  Description of Artificial Sequence: Synthetic oligonucleotide
uguccgaggguucaaccuc

SEQ ID NO: 2715701 - RNA, 19 nt, Artificial Sequence
  Description of Artificial Sequence: Synthetic oligonucleotide
gucucaacacaagaugaag

SEQ ID NO: 2715702 - RNA, 19 nt, Artificial Sequence
  Description of Artificial Sequence: Synthetic oligonucleotide
gccaacuuaaccuucuuuc

SEQ ID NO: 2715703 - RNA, 19 nt, Artificial Sequence
  Description of Artificial Sequence: Synthetic oligonucleotide
cagcacagccaacuuaacc

SEQ ID NO: 2715704 - RNA, 19 nt, Artificial Sequence
  Description of Artificial Sequence: Synthetic oligonucleotide
uggccuuuacauuuucuau

SEQ ID NO: 2715705 - RNA, 19 nt, Artificial Sequence
  Description of Artificial Sequence: Synthetic oligonucleotide
agagcgacgcgggaagccc

SEQ ID NO: 2715706 - RNA, 19 nt, Artificial Sequence
  Description of Artificial Sequence: Synthetic oligonucleotide
augucugucaaaauggcua

SEQ ID NO: 2715707 - RNA, 19 nt, Artificial Sequence
  Description of Artificial Sequence: Synthetic oligonucleotide
cuuauucuucuugggagug

SEQ ID NO: 2715708 - RNA, 19 nt, Artificial Sequence
  Description of Artificial Sequence: Synthetic oligonucleotide
cacgaaaaucugcaucuug

SEQ ID NO: 2715709 - RNA, 19 nt, Artificial Sequence
  Description of Artificial Sequence: Synthetic oligonucleotide
gauuagagccgccgaccag

SEQ ID NO: 2715710 - RNA, 19 nt, Artificial Sequence
  Description of Artificial Sequence: Synthetic oligonucleotide
ccaugaaaacuccagcacc

SEQ ID NO: 2715711 - RNA, 19 nt, Artificial Sequence
  Description of Artificial Sequence: Synthetic oligonucleotide
aagcaguaagucagacaac

SEQ ID NO: 2715712 - RNA, 19 nt, Artificial Sequence
  Description of Artificial Sequence: Synthetic oligonucleotide
uucuugggagugguguagg

SEQ ID NO: 2715713 - RNA, 19 nt, Artificial Sequence
  Description of Artificial Sequence: Synthetic oligonucleotide
augaaaacuccagcaccac

SEQ ID NO: 2715714 - RNA, 19 nt, Artificial Sequence
  Description of Artificial Sequence: Synthetic oligonucleotide
auuuauucauacacaacua

SEQ ID NO: 2715715 - RNA, 19 nt, Artificial Sequence
  Description of Artificial Sequence: Synthetic oligonucleotide
guaagucagacaacacuug

SEQ ID NO: 2715716 - RNA, 19 nt, Artificial Sequence
  Description of Artificial Sequence: Synthetic oligonucleotide
caguugcuuaccagcaaag

SEQ ID NO: 2715717 - RNA, 19 nt, Artificial Sequence
  Description of Artificial Sequence: Synthetic oligonucleotide
accuucuuucucuuaugcu

SEQ ID NO: 2715718 - RNA, 19 nt, Artificial Sequence
  Description of Artificial Sequence: Synthetic oligonucleotide
uuuggauguuguagucaga

SEQ ID NO: 2715719 - RNA, 19 nt, Artificial Sequence
  Description of Artificial Sequence: Synthetic oligonucleotide
cacgaagucucaacacaag

SEQ ID NO: 2715720 - RNA, 19 nt, Artificial Sequence
  Description of Artificial Sequence: Synthetic oligonucleotide
aaaguacggccaucuucca

SEQ ID NO: 2715721 - RNA, 19 nt, Artificial Sequence
  Description of Artificial Sequence: Synthetic oligonucleotide
agacaaaguacggccaucu

SEQ ID NO: 2715722 - RNA, 19 nt, Artificial Sequence
  Description of Artificial Sequence: Synthetic oligonucleotide
cagacaacacuugccacag

SEQ ID NO: 2715723 - RNA, 19 nt, Artificial Sequence
  Description of Artificial Sequence: Synthetic oligonucleotide
ucgacgaaggcgacuaauu

SEQ ID NO: 2715724 - RNA, 19 nt, Artificial Sequence
  Description of Artificial Sequence: Synthetic oligonucleotide
agacggauuagagccgccg

SEQ ID NO: 2715725 - RNA, 19 nt, Artificial Sequence
  Description of Artificial Sequence: Synthetic oligonucleotide
ugguguaggacuucuucuu

SEQ ID NO: 2715726 - RNA, 19 nt, Artificial Sequence
  Description of Artificial Sequence: Synthetic oligonucleotide
cuaauuuugccauuuucau

SEQ ID NO: 2715727 - RNA, 19 nt, Artificial Sequence
  Description of Artificial Sequence: Synthetic oligonucleotide
ugaaggguggacuccuuuu

SEQ ID NO: 2715728 - RNA, 19 nt, Artificial Sequence
  Description of Artificial Sequence: Synthetic oligonucleotide
uuccaccuacauucgaaaa

SEQ ID NO: 2715729 - RNA, 19 nt, Artificial Sequence
  Description of Artificial Sequence: Synthetic oligonucleotide
uugaagcaguaagucagac

SEQ ID NO: 2715730 - RNA, 19 nt, Artificial Sequence
  Description of Artificial Sequence: Synthetic oligonucleotide
acacucucgacgaaggcga

SEQ ID NO: 2715731 - RNA, 19 nt, Artificial Sequence
  Description of Artificial Sequence: Synthetic oligonucleotide
caccuacauucgaaaagag

SEQ ID NO: 2715732 - RNA, 19 nt, Artificial Sequence
  Description of Artificial Sequence: Synthetic oligonucleotide
aggcgacuaauuuugccau

SEQ ID NO: 2715733 - RNA, 19 nt, Artificial Sequence
  Description of Artificial Sequence: Synthetic oligonucleotide
ucuucuugggaguggugua

SEQ ID NO: 2715734 - RNA, 19 nt, Artificial Sequence
  Description of Artificial Sequence: Synthetic oligonucleotide
gagcgugaucguuuucccc

SEQ ID NO: 2715735 - RNA, 19 nt, Artificial Sequence
  Description of Artificial Sequence: Synthetic oligonucleotide
caccacgaagucucaacac

SEQ ID NO: 2715736 - RNA, 19 nt, Artificial Sequence
  Description of Artificial Sequence: Synthetic oligonucleotide
gucagacaacacuugccac

SEQ ID NO: 2715737 - RNA, 19 nt, Artificial Sequence
  Description of Artificial Sequence: Synthetic oligonucleotide
cuucuugggagugguguag

SEQ ID NO: 2715738 - RNA, 19 nt, Artificial Sequence
  Description of Artificial Sequence: Synthetic oligonucleotide
cucuucuuagcaccaccac

SEQ ID NO: 2715739 - RNA, 19 nt, Artificial Sequence
  Description of Artificial Sequence: Synthetic oligonucleotide
agcaccacacucaucagau

SEQ ID NO: 2715740 - RNA, 19 nt, Artificial Sequence
  Description of Artificial Sequence: Synthetic oligonucleotide
accuacauucgaaaagaga

SEQ ID NO: 2715741 - RNA, 19 nt, Artificial Sequence
  Description of Artificial Sequence: Synthetic oligonucleotide
uccaguugcuuaccagcaa

SEQ ID NO: 2715742 - RNA, 19 nt, Artificial Sequence
  Description of Artificial Sequence: Synthetic oligonucleotide
aucugcaucuuggcggcgg

SEQ ID NO: 2715743 - RNA, 19 nt, Artificial Sequence
  Description of Artificial Sequence: Synthetic oligonucleotide
agaugaaggguggacuccu

SEQ ID NO: 2715744 - RNA, 19 nt, Artificial Sequence
  Description of Artificial Sequence: Synthetic oligonucleotide
auccaccuuauaguacuuc

SEQ ID NO: 2715745 - RNA, 19 nt, Artificial Sequence
  Description of Artificial Sequence: Synthetic oligonucleotide
gccaugaaaacuccagcac

SEQ ID NO: 2715746 - RNA, 19 nt, Artificial Sequence
  Description of Artificial Sequence: Synthetic oligonucleotide
cuugggagugguguaggac

SEQ ID NO: 2715747 - RNA, 19 nt, Artificial Sequence
  Description of Artificial Sequence: Synthetic oligonucleotide
gacggauuagagccgccga

SEQ ID NO: 2715748 - RNA, 19 nt, Artificial Sequence
  Description of Artificial Sequence: Synthetic oligonucleotide
uucuuagcaccaccacgaa

SEQ ID NO: 2715749 - RNA, 19 nt, Artificial Sequence
  Description of Artificial Sequence: Synthetic oligonucleotide
cacaacuacuugucuucug

SEQ ID NO: 2715750 - RNA, 19 nt, Artificial Sequence
  Description of Artificial Sequence: Synthetic oligonucleotide
uuccccguaagggucuuca

SEQ ID NO: 2715751 - RNA, 19 nt, Artificial Sequence
  Description of Artificial Sequence: Synthetic oligonucleotide
cuauaguguccgaggguuc

SEQ ID NO: 2715752 - RNA, 19 nt, Artificial Sequence
  Description of Artificial Sequence: Synthetic oligonucleotide
ucagcacagccaacuuaac

SEQ ID NO: 2715753 - RNA, 19 nt, Artificial Sequence
  Description of Artificial Sequence: Synthetic oligonucleotide
acuuaaccuucuuucucuu

SEQ ID NO: 2715754 - RNA, 19 nt, Artificial Sequence
  Description of Artificial Sequence: Synthetic oligonucleotide
guuccaccuacauucgaaa

SEQ ID NO: 2715755 - RNA, 19 nt, Artificial Sequence
  Description of Artificial Sequence: Synthetic oligonucleotide
ugguuuguugaagcaguaa

SEQ ID NO: 2715756 - RNA, 19 nt, Artificial Sequence
  Description of Artificial Sequence: Synthetic oligonucleotide
uaccagcaaagaucagccu

SEQ ID NO: 2715757 - RNA, 19 nt, Artificial Sequence
  Description of Artificial Sequence: Synthetic oligonucleotide
cacagccaacuuaaccuuc

SEQ ID NO: 2715758 - RNA, 19 nt, Artificial Sequence
  Description of Artificial Sequence: Synthetic oligonucleotide
guccgaggguucaaccucg

SEQ ID NO: 2715759 - RNA, 19 nt, Artificial Sequence
  Description of Artificial Sequence: Synthetic oligonucleotide
gacgaaggcgacuaauuuu

SEQ ID NO: 2715760 - RNA, 19 nt, Artificial Sequence
  Description of Artificial Sequence: Synthetic oligonucleotide
ugccacaguaaugucuguc

SEQ ID NO: 2715761 - RNA, 19 nt, Artificial Sequence
  Description of Artificial Sequence: Synthetic oligonucleotide
cugucaaaauggcuagcca

SEQ ID NO: 2715762 - RNA, 19 nt, Artificial Sequence
  Description of Artificial Sequence: Synthetic oligonucleotide
uucaaccucgagcgugauc

SEQ ID NO: 2715763 - RNA, 19 nt, Artificial Sequence
  Description of Artificial Sequence: Synthetic oligonucleotide
aucuuggcggcgguuccac

SEQ ID NO: 2715764 - RNA, 19 nt, Artificial Sequence
  Description of Artificial Sequence: Synthetic oligonucleotide
agcggcagcccgcagcaca

SEQ ID NO: 2715765 - RNA, 19 nt, Artificial Sequence
  Description of Artificial Sequence: Synthetic oligonucleotide
gccacaguaaugucuguca

SEQ ID NO: 2715766 - RNA, 19 nt, Artificial Sequence
  Description of Artificial Sequence: Synthetic oligonucleotide
uggucaggaggaauuccuu

SEQ ID NO: 2715767 - RNA, 19 nt, Artificial Sequence
  Description of Artificial Sequence: Synthetic oligonucleotide
cagcccgcagcacacacuc

SEQ ID NO: 2715768 - RNA, 19 nt, Artificial Sequence
  Description of Artificial Sequence: Synthetic oligonucleotide
cgaggguucaaccucgagc

SEQ ID NO: 2715769 - RNA, 19 nt, Artificial Sequence
  Description of Artificial Sequence: Synthetic oligonucleotide
agucucaacacaagaugaa

SEQ ID NO: 2715770 - RNA, 19 nt, Artificial Sequence
  Description of Artificial Sequence: Synthetic oligonucleotide
cacaguaaugucugucaaa

SEQ ID NO: 2715771 - RNA, 19 nt, Artificial Sequence
  Description of Artificial Sequence: Synthetic oligonucleotide
gucagacaaaguacggcca

SEQ ID NO: 2715772 - RNA, 19 nt, Artificial Sequence
  Description of Artificial Sequence: Synthetic oligonucleotide
gagagcgacgcgggaagcc

SEQ ID NO: 2715773 - RNA, 19 nt, Artificial Sequence
  Description of Artificial Sequence: Synthetic oligonucleotide
acuucagcacagccaacuu

SEQ ID NO: 2715774 - RNA, 19 nt, Artificial Sequence
  Description of Artificial Sequence: Synthetic oligonucleotide
gugguguaggacuucuucu

SEQ ID NO: 2715775 - RNA, 19 nt, Artificial Sequence
  Description of Artificial Sequence: Synthetic oligonucleotide
acacaacuacuugucuucu

SEQ ID NO: 2715776 - RNA, 19 nt, Artificial Sequence
  Description of Artificial Sequence: Synthetic oligonucleotide
gguguaggacuucuucuuc

SEQ ID NO: 2715777 - RNA, 19 nt, Artificial Sequence
  Description of Artificial Sequence: Synthetic oligonucleotide
ggucaggaggaauuccuuc

SEQ ID NO: 2715778 - RNA, 19 nt, Artificial Sequence
  Description of Artificial Sequence: Synthetic oligonucleotide
guugaagcaguaagucaga

SEQ ID NO: 2715779 - RNA, 19 nt, Artificial Sequence
  Description of Artificial Sequence: Synthetic oligonucleotide
ggccuuuacauuuucuaua

SEQ ID NO: 2715780 - RNA, 19 nt, Artificial Sequence
  Description of Artificial Sequence: Synthetic oligonucleotide
guaggacuucuucuuccuc

SEQ ID NO: 2715781 - RNA, 19 nt, Artificial Sequence
  Description of Artificial Sequence: Synthetic oligonucleotide
cacacucaucagauggaca

SEQ ID NO: 2715782 - RNA, 19 nt, Artificial Sequence
  Description of Artificial Sequence: Synthetic oligonucleotide
cuuccucuucuuagcacca

SEQ ID NO: 2715783 - RNA, 19 nt, Artificial Sequence
  Description of Artificial Sequence: Synthetic oligonucleotide
gccgaccagggugagagcg

SEQ ID NO: 2715784 - RNA, 19 nt, Artificial Sequence
  Description of Artificial Sequence: Synthetic oligonucleotide
ggauuagagccgccgacca

SEQ ID NO: 2715785 - RNA, 19 nt, Artificial Sequence
  Description of Artificial Sequence: Synthetic oligonucleotide
acaacacuugccacaguaa

SEQ ID NO: 2715786 - RNA, 19 nt, Artificial Sequence
  Description of Artificial Sequence: Synthetic oligonucleotide
cauacacaacuacuugucu

SEQ ID NO: 2715787 - RNA, 19 nt, Artificial Sequence
  Description of Artificial Sequence: Synthetic oligonucleotide
ccccguaagggucuucacg

SEQ ID NO: 2715788 - RNA, 19 nt, Artificial Sequence
  Description of Artificial Sequence: Synthetic oligonucleotide
uacggccaucuuccaguug

SEQ ID NO: 2715789 - RNA, 19 nt, Artificial Sequence
  Description of Artificial Sequence: Synthetic oligonucleotide
ugagagcgacgcgggaagc

SEQ ID NO: 2715790 - RNA, 19 nt, Artificial Sequence
  Description of Artificial Sequence: Synthetic oligonucleotide
cuucagcacagccaacuua

SEQ ID NO: 2715791 - RNA, 19 nt, Artificial Sequence
  Description of Artificial Sequence: Synthetic oligonucleotide
gcgggaagccccaagccgg

SEQ ID NO: 2715792 - RNA, 19 nt, Artificial Sequence
  Description of Artificial Sequence: Synthetic oligonucleotide
ugcuggucaggaggaauuc

SEQ ID NO: 2715793 - RNA, 19 nt, Artificial Sequence
  Description of Artificial Sequence: Synthetic oligonucleotide
ggguucaaccucgagcgug

SEQ ID NO: 2715794 - RNA, 19 nt, Artificial Sequence
  Description of Artificial Sequence: Synthetic oligonucleotide
accacacucaucagaugga

SEQ ID NO: 2715795 - RNA, 19 nt, Artificial Sequence
  Description of Artificial Sequence: Synthetic oligonucleotide
cccguaagggucuucacga

SEQ ID NO: 2715796 - RNA, 19 nt, Artificial Sequence
  Description of Artificial Sequence: Synthetic oligonucleotide
ucuuggcggcgguuccacc

SEQ ID NO: 2715797 - RNA, 19 nt, Artificial Sequence
  Description of Artificial Sequence: Synthetic oligonucleotide
ggaagccccaagccggagc

SEQ ID NO: 2715798 - RNA, 19 nt, Artificial Sequence
  Description of Artificial Sequence: Synthetic oligonucleotide
cuuaaccuucuuucucuua

SEQ ID NO: 2715799 - RNA, 19 nt, Artificial Sequence
  Description of Artificial Sequence: Synthetic oligonucleotide
cauuuucuauaguguccga

SEQ ID NO: 2715800 - RNA, 19 nt, Artificial Sequence
  Description of Artificial Sequence: Synthetic oligonucleotide
gucugucaaaauggcuagc

SEQ ID NO: 2715801 - RNA, 19 nt, Artificial Sequence
  Description of Artificial Sequence: Synthetic oligonucleotide
uccgaggguucaaccucga

SEQ ID NO: 2715802 - RNA, 19 nt, Artificial Sequence
  Description of Artificial Sequence: Synthetic oligonucleotide
uaguguccgaggguucaac

SEQ ID NO: 2715803 - RNA, 19 nt, Artificial Sequence
  Description of Artificial Sequence: Synthetic oligonucleotide
acacaagaugaagggugga

SEQ ID NO: 2715804 - RNA, 19 nt, Artificial Sequence
  Description of Artificial Sequence: Synthetic oligonucleotide
uagcaccaccacgaagucu

SEQ ID NO: 2715805 - RNA, 19 nt, Artificial Sequence
  Description of Artificial Sequence: Synthetic oligonucleotide
cagcaccacacucaucaga

SEQ ID NO: 2715806 - RNA, 19 nt, Artificial Sequence
  Description of Artificial Sequence: Synthetic oligonucleotide
gugaucguuuuccccguaa

SEQ ID NO: 2715807 - RNA, 19 nt, Artificial Sequence
  Description of Artificial Sequence: Synthetic oligonucleotide
cacuugccacaguaauguc

SEQ ID NO: 2715808 - RNA, 19 nt, Artificial Sequence
  Description of Artificial Sequence: Synthetic oligonucleotide
aagccccaagccggagcgg

SEQ ID NO: 2715809 - RNA, 19 nt, Artificial Sequence
  Description of Artificial Sequence: Synthetic oligonucleotide
uuccucuucuuagcaccac

SEQ ID NO: 2715810 - RNA, 19 nt, Artificial Sequence
  Description of Artificial Sequence: Synthetic oligonucleotide
uuggcggcgguuccaccua

SEQ ID NO: 2715811 - RNA, 19 nt, Artificial Sequence
  Description of Artificial Sequence: Synthetic oligonucleotide
uuccuuccuuauccuggau

SEQ ID NO: 2715812 - RNA, 19 nt, Artificial Sequence
  Description of Artificial Sequence: Synthetic oligonucleotide
caaaauggcuagccaugaa

SEQ ID NO: 2715813 - RNA, 19 nt, Artificial Sequence
  Description of Artificial Sequence: Synthetic oligonucleotide
cagacaaaguacggccauc

SEQ ID NO: 2715814 - RNA, 19 nt, Artificial Sequence
  Description of Artificial Sequence: Synthetic oligonucleotide
uugccacaguaaugucugu

SEQ ID NO: 2715815 - RNA, 19 nt, Artificial Sequence
  Description of Artificial Sequence: Synthetic oligonucleotide
aggguucaaccucgagcgu

SEQ ID NO: 2715816 - RNA, 19 nt, Artificial Sequence
  Description of Artificial Sequence: Synthetic oligonucleotide
ggacacucucgacgaaggc

SEQ ID NO: 2715817 - RNA, 19 nt, Artificial Sequence
  Description of Artificial Sequence: Synthetic oligonucleotide
guguccgaggguucaaccu

SEQ ID NO: 2715818 - RNA, 19 nt, Artificial Sequence
  Description of Artificial Sequence: Synthetic oligonucleotide
uccccguaagggucuucac

SEQ ID NO: 2715819 - RNA, 19 nt, Artificial Sequence
  Description of Artificial Sequence: Synthetic oligonucleotide
ucucgacgaaggcgacuaa

SEQ ID NO: 2715820 - RNA, 19 nt, Artificial Sequence
  Description of Artificial Sequence: Synthetic oligonucleotide
aaccucgagcgugaucguu

SEQ ID NO: 2715821 - RNA, 19 nt, Artificial Sequence
  Description of Artificial Sequence: Synthetic oligonucleotide
ccaccuacauucgaaaaga

SEQ ID NO: 2715822 - RNA, 19 nt, Artificial Sequence
  Description of Artificial Sequence: Synthetic oligonucleotide
gaccagggugagagcgacg

SEQ ID NO: 2715823 - RNA, 19 nt, Artificial Sequence
  Description of Artificial Sequence: Synthetic oligonucleotide
cguuuuccccguaaggguc

SEQ ID NO: 2715824 - RNA, 19 nt, Artificial Sequence
  Description of Artificial Sequence: Synthetic oligonucleotide
gagacggauuagagccgcc

SEQ ID NO: 2715825 - RNA, 19 nt, Artificial Sequence
  Description of Artificial Sequence: Synthetic oligonucleotide
gguuccaccuacauucgaa

SEQ ID NO: 2715826 - RNA, 19 nt, Artificial Sequence
  Description of Artificial Sequence: Synthetic oligonucleotide
cucucgacgaaggcgacua

SEQ ID NO: 2715827 - RNA, 19 nt, Artificial Sequence
  Description of Artificial Sequence: Synthetic oligonucleotide
agacaacacuugccacagu

SEQ ID NO: 2715828 - RNA, 19 nt, Artificial Sequence
  Description of Artificial Sequence: Synthetic oligonucleotide
caacuacuugucuucuggu

SEQ ID NO: 2715829 - RNA, 19 nt, Artificial Sequence
  Description of Artificial Sequence: Synthetic oligonucleotide
cuuggcggcgguuccaccu

SEQ ID NO: 2715830 - RNA, 19 nt, Artificial Sequence
  Description of Artificial Sequence: Synthetic oligonucleotide
gagcgacgcgggaagcccc

SEQ ID NO: 2715831 - RNA, 19 nt, Artificial Sequence
  Description of Artificial Sequence: Synthetic oligonucleotide
gcaucuuggcggcgguucc

SEQ ID NO: 2715832 - RNA, 19 nt, Artificial Sequence
  Description of Artificial Sequence: Synthetic oligonucleotide
cugguuuguugaagcagua

SEQ ID NO: 2715833 - RNA, 19 nt, Artificial Sequence
  Description of Artificial Sequence: Synthetic oligonucleotide
cacucucgacgaaggcgac

SEQ ID NO: 2715834 - RNA, 19 nt, Artificial Sequence
  Description of Artificial Sequence: Synthetic oligonucleotide
ccucuucuuagcaccacca

SEQ ID NO: 2715835 - RNA, 19 nt, Artificial Sequence
  Description of Artificial Sequence: Synthetic oligonucleotide
gguucaaccucgagcguga

SEQ ID NO: 2715836 - RNA, 19 nt, Artificial Sequence
  Description of Artificial Sequence: Synthetic oligonucleotide
ggcuagccaugaaaacucc

SEQ ID NO: 2715837 - RNA, 19 nt, Artificial Sequence
  Description of Artificial Sequence: Synthetic oligonucleotide
acucucgacgaaggcgacu

SEQ ID NO: 2715838 - RNA, 19 nt, Artificial Sequence
  Description of Artificial Sequence: Synthetic oligonucleotide
cagcaaagaucagccucug

SEQ ID NO: 2715839 - RNA, 19 nt, Artificial Sequence
  Description of Artificial Sequence: Synthetic oligonucleotide
accucgagcgugaucguuu

SEQ ID NO: 2715840 - RNA, 19 nt, Artificial Sequence
  Description of Artificial Sequence: Synthetic oligonucleotide
ccgccgaccagggugagag

SEQ ID NO: 2715841 - RNA, 19 nt, Artificial Sequence
  Description of Artificial Sequence: Synthetic oligonucleotide
agccggagcggcagcccgc

SEQ ID NO: 2715842 - RNA, 19 nt, Artificial Sequence
  Description of Artificial Sequence: Synthetic oligonucleotide
uagagccgccgaccagggu

SEQ ID NO: 2715843 - RNA, 19 nt, Artificial Sequence
  Description of Artificial Sequence: Synthetic oligonucleotide
ccacgaagucucaacacaa

SEQ ID NO: 2715844 - RNA, 19 nt, Artificial Sequence
  Description of Artificial Sequence: Synthetic oligonucleotide
auaguguccgaggguucaa

SEQ ID NO: 2715845 - RNA, 19 nt, Artificial Sequence
  Description of Artificial Sequence: Synthetic oligonucleotide
cgaaaagagacggauuaga

SEQ ID NO: 2715846 - RNA, 19 nt, Artificial Sequence
  Description of Artificial Sequence: Synthetic oligonucleotide
ccacacucaucagauggac

SEQ ID NO: 2715847 - RNA, 19 nt, Artificial Sequence
  Description of Artificial Sequence: Synthetic oligonucleotide
ccaccacgaagucucaaca

SEQ ID NO: 2715848 - RNA, 19 nt, Artificial Sequence
  Description of Artificial Sequence: Synthetic oligonucleotide
ccaguugcuuaccagcaaa

SEQ ID NO: 2715849 - RNA, 19 nt, Artificial Sequence
  Description of Artificial Sequence: Synthetic oligonucleotide
cgagcgugaucguuuuccc

SEQ ID NO: 2715850 - RNA, 19 nt, Artificial Sequence
  Description of Artificial Sequence: Synthetic oligonucleotide
ccagcaaagaucagccucu

SEQ ID NO: 2715851 - RNA, 19 nt, Artificial Sequence
  Description of Artificial Sequence: Synthetic oligonucleotide
gagccgccgaccaggguga

SEQ ID NO: 2715852 - RNA, 19 nt, Artificial Sequence
  Description of Artificial Sequence: Synthetic oligonucleotide
guuuuccccguaagggucu

SEQ ID NO: 2715853 - RNA, 19 nt, Artificial Sequence
  Description of Artificial Sequence: Synthetic oligonucleotide
gacaaaguacggccaucuu

SEQ ID NO: 2715854 - RNA, 19 nt, Artificial Sequence
  Description of Artificial Sequence: Synthetic oligonucleotide
gcaccacacucaucagaug

SEQ ID NO: 2715855 - RNA, 19 nt, Artificial Sequence
  Description of Artificial Sequence: Synthetic oligonucleotide
gcgguuccaccuacauucg

SEQ ID NO: 2715856 - RNA, 19 nt, Artificial Sequence
  Description of Artificial Sequence: Synthetic oligonucleotide
gcuagccaugaaaacucca

SEQ ID NO: 2715857 - RNA, 19 nt, Artificial Sequence
  Description of Artificial Sequence: Synthetic oligonucleotide
cgaaggcgacuaauuuugc

SEQ ID NO: 2715858 - RNA, 19 nt, Artificial Sequence
  Description of Artificial Sequence: Synthetic oligonucleotide
guacuucagcacagccaac

SEQ ID NO: 2715859 - RNA, 19 nt, Artificial Sequence
  Description of Artificial Sequence: Synthetic oligonucleotide
cucgagcgugaucguuuuc

SEQ ID NO: 2715860 - RNA, 19 nt, Artificial Sequence
  Description of Artificial Sequence: Synthetic oligonucleotide
cggauuagagccgccgacc

SEQ ID NO: 2715861 - RNA, 19 nt, Artificial Sequence
  Description of Artificial Sequence: Synthetic oligonucleotide
uuuuccccguaagggucuu

SEQ ID NO: 2715862 - RNA, 19 nt, Artificial Sequence
  Description of Artificial Sequence: Synthetic oligonucleotide
cauuuucauccaccuuaua

SEQ ID NO: 2715863 - RNA, 19 nt, Artificial Sequence
  Description of Artificial Sequence: Synthetic oligonucleotide
cccgcagcacacacucacc

SEQ ID NO: 2715864 - RNA, 19 nt, Artificial Sequence
  Description of Artificial Sequence: Synthetic oligonucleotide
caguaaugucugucaaaau

SEQ ID NO: 2715865 - RNA, 19 nt, Artificial Sequence
  Description of Artificial Sequence: Synthetic oligonucleotide
ccagcaccacacucaucag

SEQ ID NO: 2715866 - RNA, 19 nt, Artificial Sequence
  Description of Artificial Sequence: Synthetic oligonucleotide
uuuccccguaagggucuuc

SEQ ID NO: 2715867 - RNA, 19 nt, Artificial Sequence
  Description of Artificial Sequence: Synthetic oligonucleotide
ccacaguaaugucugucaa

SEQ ID NO: 2715868 - RNA, 19 nt, Artificial Sequence
  Description of Artificial Sequence: Synthetic oligonucleotide
cgaagucucaacacaagau

SEQ ID NO: 2715869 - RNA, 19 nt, Artificial Sequence
  Description of Artificial Sequence: Synthetic oligonucleotide
caucuuggcggcgguucca

SEQ ID NO: 2715870 - RNA, 19 nt, Artificial Sequence
  Description of Artificial Sequence: Synthetic oligonucleotide
agcgacgcgggaagcccca

SEQ ID NO: 2715871 - RNA, 19 nt, Artificial Sequence
  Description of Artificial Sequence: Synthetic oligonucleotide
gcuuaccagcaaagaucag

SEQ ID NO: 2715872 - RNA, 19 nt, Artificial Sequence
  Description of Artificial Sequence: Synthetic oligonucleotide
ggagugguguaggacuucu

SEQ ID NO: 2715873 - RNA, 19 nt, Artificial Sequence
  Description of Artificial Sequence: Synthetic oligonucleotide
ccaagccggagcggcagcc

SEQ ID NO: 2715874 - RNA, 19 nt, Artificial Sequence
  Description of Artificial Sequence: Synthetic oligonucleotide
cucgacgaaggcgacuaau

SEQ ID NO: 2715875 - RNA, 19 nt, Artificial Sequence
  Description of Artificial Sequence: Synthetic oligonucleotide
cacucaucagauggacacu

SEQ ID NO: 2715876 - RNA, 19 nt, Artificial Sequence
  Description of Artificial Sequence: Synthetic oligonucleotide
ccgaggguucaaccucgag

SEQ ID NO: 2715877 - RNA, 19 nt, Artificial Sequence
  Description of Artificial Sequence: Synthetic oligonucleotide
ccauuuucauccaccuuau

SEQ ID NO: 2715878 - RNA, 19 nt, Artificial Sequence
  Description of Artificial Sequence: Synthetic oligonucleotide
guacggccaucuuccaguu

SEQ ID NO: 2715879 - RNA, 19 nt, Artificial Sequence
  Description of Artificial Sequence: Synthetic oligonucleotide
gcgacuaauuuugccauuu

SEQ ID NO: 2715880 - RNA, 19 nt, Artificial Sequence
  Description of Artificial Sequence: Synthetic oligonucleotide
gaugaaggguggacuccuu

SEQ ID NO: 2715881 - RNA, 19 nt, Artificial Sequence
  Description of Artificial Sequence: Synthetic oligonucleotide
cauccaccuuauaguacuu

SEQ ID NO: 2715882 - RNA, 19 nt, Artificial Sequence
  Description of Artificial Sequence: Synthetic oligonucleotide
gggaagccccaagccggag

SEQ ID NO: 2715883 - RNA, 19 nt, Artificial Sequence
  Description of Artificial Sequence: Synthetic oligonucleotide
gggagugguguaggacuuc

SEQ ID NO: 2715884 - RNA, 19 nt, Artificial Sequence
  Description of Artificial Sequence: Synthetic oligonucleotide
gggugagagcgacgcggga

SEQ ID NO: 2715885 - RNA, 19 nt, Artificial Sequence
  Description of Artificial Sequence: Synthetic oligonucleotide
ccccaagccggagcggcag

SEQ ID NO: 2715886 - RNA, 19 nt, Artificial Sequence
  Description of Artificial Sequence: Synthetic oligonucleotide
cccaagccggagcggcagc

SEQ ID NO: 2715887 - RNA, 19 nt, Artificial Sequence
  Description of Artificial Sequence: Synthetic oligonucleotide
cgaccagggugagagcgac

SEQ ID NO: 2715888 - RNA, 19 nt, Artificial Sequence
  Description of Artificial Sequence: Synthetic oligonucleotide
caccaccacgaagucucaa

SEQ ID NO: 2715889 - RNA, 19 nt, Artificial Sequence
  Description of Artificial Sequence: Synthetic oligonucleotide
ccgaccagggugagagcga

SEQ ID NO: 2715890 - RNA, 19 nt, Artificial Sequence
  Description of Artificial Sequence: Synthetic oligonucleotide
caaccucgagcgugaucgu

SEQ ID NO: 2715891 - RNA, 19 nt, Artificial Sequence
  Description of Artificial Sequence: Synthetic oligonucleotide
gcgugaucguuuuccccgu

SEQ ID NO: 2715892 - RNA, 19 nt, Artificial Sequence
  Description of Artificial Sequence: Synthetic oligonucleotide
ccguaagggucuucacgaa

SEQ ID NO: 2715893 - RNA, 19 nt, Artificial Sequence
  Description of Artificial Sequence: Synthetic oligonucleotide
ggcgacuaauuuugccauu

SEQ ID NO: 2715894 - RNA, 19 nt, Artificial Sequence
  Description of Artificial Sequence: Synthetic oligonucleotide
gagugguguaggacuucuu

SEQ ID NO: 2715895 - RNA, 19 nt, Artificial Sequence
  Description of Artificial Sequence: Synthetic oligonucleotide
cagccaacuuaaccuucuu

SEQ ID NO: 2715896 - RNA, 19 nt, Artificial Sequence
  Description of Artificial Sequence: Synthetic oligonucleotide
cgacgcgggaagccccaag

SEQ ID NO: 2715897 - RNA, 19 nt, Artificial Sequence
  Description of Artificial Sequence: Synthetic oligonucleotide
guucaaccucgagcgugau

SEQ ID NO: 2715898 - RNA, 19 nt, Artificial Sequence
  Description of Artificial Sequence: Synthetic oligonucleotide
gcggcgguuccaccuacau

SEQ ID NO: 2715899 - RNA, 19 nt, Artificial Sequence
  Description of Artificial Sequence: Synthetic oligonucleotide
cgacgaaggcgacuaauuu

SEQ ID NO: 2715900 - RNA, 19 nt, Artificial Sequence
  Description of Artificial Sequence: Synthetic oligonucleotide
gccggagcggcagcccgca

SEQ ID NO: 2715901 - RNA, 19 nt, Artificial Sequence
  Description of Artificial Sequence: Synthetic oligonucleotide
ggcggcgguuccaccuaca

SEQ ID NO: 2715902 - RNA, 19 nt, Artificial Sequence
  Description of Artificial Sequence: Synthetic oligonucleotide
cgguuccaccuacauucga

SEQ ID NO: 2715903 - RNA, 19 nt, Artificial Sequence
  Description of Artificial Sequence: Synthetic oligonucleotide
gcagcccgcagcacacacu

SEQ ID NO: 2715904 - RNA, 19 nt, Artificial Sequence
  Description of Artificial Sequence: Synthetic oligonucleotide
ccucgagcgugaucguuuu

SEQ ID NO: 2715905 - RNA, 19 nt, Artificial Sequence
  Description of Artificial Sequence: Synthetic oligonucleotide
cgccgaccagggugagagc

SEQ ID NO: 2715906 - RNA, 19 nt, Artificial Sequence
  Description of Artificial Sequence: Synthetic oligonucleotide
gccccaagccggagcggca

SEQ ID NO: 2715907 - RNA, 19 nt, Artificial Sequence
  Description of Artificial Sequence: Synthetic oligonucleotide
ccggagcggcagcccgcag

SEQ ID NO: 2715908 - RNA, 19 nt, Artificial Sequence
  Description of Artificial Sequence: Synthetic oligonucleotide
cgacuaauuuugccauuuu

SEQ ID NO: 2715909 - RNA, 19 nt, Artificial Sequence
  Description of Artificial Sequence: Synthetic oligonucleotide
gccgccgaccagggugaga

SEQ ID NO: 2715910 - RNA, 19 nt, Artificial Sequence
  Description of Artificial Sequence: Synthetic oligonucleotide
cgugaucguuuuccccgua

SEQ ID NO: 2715911 - RNA, 19 nt, Artificial Sequence
  Description of Artificial Sequence: Synthetic oligonucleotide
gcgacgcgggaagccccaa

SEQ ID NO: 2715912 - RNA, 19 nt, Artificial Sequence
  Description of Artificial Sequence: Synthetic oligonucleotide
cggcgguuccaccuacauu

SEQ ID NO: 2715913 - RNA, 19 nt, Artificial Sequence
  Description of Artificial Sequence: Synthetic oligonucleotide
auuagaacuacauuggagg

SEQ ID NO: 2715914 - RNA, 19 nt, Artificial Sequence
  Description of Artificial Sequence: Synthetic oligonucleotide
auugaagccacacaguggc

SEQ ID NO: 2715915 - RNA, 19 nt, Artificial Sequence
  Description of Artificial Sequence: Synthetic oligonucleotide
aaccucuuuucuuacagcc

SEQ ID NO: 2715916 - RNA, 19 nt, Artificial Sequence
  Description of Artificial Sequence: Synthetic oligonucleotide
agacauuauauacaaacac

SEQ ID NO: 2715917 - RNA, 19 nt, Artificial Sequence
  Description of Artificial Sequence: Synthetic oligonucleotide
auaauugggaccuggacac

SEQ ID NO: 2715918 - RNA, 19 nt, Artificial Sequence
  Description of Artificial Sequence: Synthetic oligonucleotide
uuacauugaagccacacag

SEQ ID NO: 2715919 - RNA, 19 nt, Artificial Sequence
  Description of Artificial Sequence: Synthetic oligonucleotide
aaaauuacauugaagccac

SEQ ID NO: 2715920 - RNA, 19 nt, Artificial Sequence
  Description of Artificial Sequence: Synthetic oligonucleotide
cucaacauauacuucaugg

SEQ ID NO: 2715921 - RNA, 19 nt, Artificial Sequence
  Description of Artificial Sequence: Synthetic oligonucleotide
acacauuagaacuacauug

SEQ ID NO: 2715922 - RNA, 19 nt, Artificial Sequence
  Description of Artificial Sequence: Synthetic oligonucleotide
auugcacuccucuagaugg

SEQ ID NO: 2715923 - RNA, 19 nt, Artificial Sequence
  Description of Artificial Sequence: Synthetic oligonucleotide
aacgaagauggacagcagc

SEQ ID NO: 2715924 - RNA, 19 nt, Artificial Sequence
  Description of Artificial Sequence: Synthetic oligonucleotide
uuuucuuacagccaaccca

SEQ ID NO: 2715925 - RNA, 19 nt, Artificial Sequence
  Description of Artificial Sequence: Synthetic oligonucleotide
uuuuauugcacuccucuag

SEQ ID NO: 2715926 - RNA, 19 nt, Artificial Sequence
  Description of Artificial Sequence: Synthetic oligonucleotide
aauuacauugaagccacac

SEQ ID NO: 2715927 - RNA, 19 nt, Artificial Sequence
  Description of Artificial Sequence: Synthetic oligonucleotide
gaacucaaugcauaauugg

SEQ ID NO: 2715928 - RNA, 19 nt, Artificial Sequence
  Description of Artificial Sequence: Synthetic oligonucleotide
ucuuuagacauuauauaca

SEQ ID NO: 2715929 - RNA, 19 nt, Artificial Sequence
  Description of Artificial Sequence: Synthetic oligonucleotide
uauauacaaacacauuaga

SEQ ID NO: 2715930 - RNA, 19 nt, Artificial Sequence
  Description of Artificial Sequence: Synthetic oligonucleotide
gauuccaucagccuaacga

SEQ ID NO: 2715931 - RNA, 19 nt, Artificial Sequence
  Description of Artificial Sequence: Synthetic oligonucleotide
agauggauggucuggaagg

SEQ ID NO: 2715932 - RNA, 19 nt, Artificial Sequence
  Description of Artificial Sequence: Synthetic oligonucleotide
aacucaaugcauaauuggg

SEQ ID NO: 2715933 - RNA, 19 nt, Artificial Sequence
  Description of Artificial Sequence: Synthetic oligonucleotide
auagaggcucaacauauac

SEQ ID NO: 2715934 - RNA, 19 nt, Artificial Sequence
  Description of Artificial Sequence: Synthetic oligonucleotide
cacauuagaacuacauugg

SEQ ID NO: 2715935 - RNA, 19 nt, Artificial Sequence
  Description of Artificial Sequence: Synthetic oligonucleotide
agcagcgucaauauaaccc

SEQ ID NO: 2715936 - RNA, 19 nt, Artificial Sequence
  Description of Artificial Sequence: Synthetic oligonucleotide
aagaacucaaugcauaauu

SEQ ID NO: 2715937 - RNA, 19 nt, Artificial Sequence
  Description of Artificial Sequence: Synthetic oligonucleotide
uuucuuacagccaacccac

SEQ ID NO: 2715938 - RNA, 19 nt, Artificial Sequence
  Description of Artificial Sequence: Synthetic oligonucleotide
ucaacauauacuucauggc

SEQ ID NO: 2715939 - RNA, 19 nt, Artificial Sequence
  Description of Artificial Sequence: Synthetic oligonucleotide
uagacauuauauacaaaca

SEQ ID NO: 2715940 - RNA, 19 nt, Artificial Sequence
  Description of Artificial Sequence: Synthetic oligonucleotide
cuaacugcuauccaacagc

SEQ ID NO: 2715941 - RNA, 19 nt, Artificial Sequence
  Description of Artificial Sequence: Synthetic oligonucleotide
ucuggaaggccuuugggag

SEQ ID NO: 2715942 - RNA, 19 nt, Artificial Sequence
  Description of Artificial Sequence: Synthetic oligonucleotide
acagccaacccacaauccc

SEQ ID NO: 2715943 - RNA, 19 nt, Artificial Sequence
  Description of Artificial Sequence: Synthetic oligonucleotide
cauuagaacuacauuggag

SEQ ID NO: 2715944 - RNA, 19 nt, Artificial Sequence
  Description of Artificial Sequence: Synthetic oligonucleotide
aauggguuuuccagcaagc

SEQ ID NO: 2715945 - RNA, 19 nt, Artificial Sequence
  Description of Artificial Sequence: Synthetic oligonucleotide
acauugaagccacacagug

SEQ ID NO: 2715946 - RNA, 19 nt, Artificial Sequence
  Description of Artificial Sequence: Synthetic oligonucleotide
uuuauugcacuccucuaga

SEQ ID NO: 2715947 - RNA, 19 nt, Artificial Sequence
  Description of Artificial Sequence: Synthetic oligonucleotide
aacauauacuucauggcug

SEQ ID NO: 2715948 - RNA, 19 nt, Artificial Sequence
  Description of Artificial Sequence: Synthetic oligonucleotide
acuacauuggaggaagaac

SEQ ID NO: 2715949 - RNA, 19 nt, Artificial Sequence
  Description of Artificial Sequence: Synthetic oligonucleotide
aggagggagguuuuauugc

SEQ ID NO: 2715950 - RNA, 19 nt, Artificial Sequence
  Description of Artificial Sequence: Synthetic oligonucleotide
uccagugauuccaucagcc

SEQ ID NO: 2715951 - RNA, 19 nt, Artificial Sequence
  Description of Artificial Sequence: Synthetic oligonucleotide
acaaacacauuagaacuac

SEQ ID NO: 2715952 - RNA, 19 nt, Artificial Sequence
  Description of Artificial Sequence: Synthetic oligonucleotide
aucucucacacccugagca

SEQ ID NO: 2715953 - RNA, 19 nt, Artificial Sequence
  Description of Artificial Sequence: Synthetic oligonucleotide
uuagaacuacauuggagga

SEQ ID NO: 2715954 - RNA, 19 nt, Artificial Sequence
  Description of Artificial Sequence: Synthetic oligonucleotide
uuggaggaagaacucaaug

SEQ ID NO: 2715955 - RNA, 19 nt, Artificial Sequence
  Description of Artificial Sequence: Synthetic oligonucleotide
uauacuucauggcugcagu

SEQ ID NO: 2715956 - RNA, 19 nt, Artificial Sequence
  Description of Artificial Sequence: Synthetic oligonucleotide
cucaaugcauaauugggac

SEQ ID NO: 2715957 - RNA, 19 nt, Artificial Sequence
  Description of Artificial Sequence: Synthetic oligonucleotide
gucuuaucaucccacagcc

SEQ ID NO: 2715958 - RNA, 19 nt, Artificial Sequence
  Description of Artificial Sequence: Synthetic oligonucleotide
agaacuacauuggaggaag

SEQ ID NO: 2715959 - RNA, 19 nt, Artificial Sequence
  Description of Artificial Sequence: Synthetic oligonucleotide
gacauuauauacaaacaca

SEQ ID NO: 2715960 - RNA, 19 nt, Artificial Sequence
  Description of Artificial Sequence: Synthetic oligonucleotide
auuacauugaagccacaca

SEQ ID NO: 2715961 - RNA, 19 nt, Artificial Sequence
  Description of Artificial Sequence: Synthetic oligonucleotide
uuugguucugagauccuca

SEQ ID NO: 2715962 - RNA, 19 nt, Artificial Sequence
  Description of Artificial Sequence: Synthetic oligonucleotide
agaggcucaacauauacuu

SEQ ID NO: 2715963 - RNA, 19 nt, Artificial Sequence
  Description of Artificial Sequence: Synthetic oligonucleotide
acccacaaucccuaacugc

SEQ ID NO: 2715964 - RNA, 19 nt, Artificial Sequence
  Description of Artificial Sequence: Synthetic oligonucleotide
ucacauuuauugcauuaga

SEQ ID NO: 2715965 - RNA, 19 nt, Artificial Sequence
  Description of Artificial Sequence: Synthetic oligonucleotide
gauauuccaaccucuuuuc

SEQ ID NO: 2715966 - RNA, 19 nt, Artificial Sequence
  Description of Artificial Sequence: Synthetic oligonucleotide
gaggagggagguuuuauug

SEQ ID NO: 2715967 - RNA, 19 nt, Artificial Sequence
  Description of Artificial Sequence: Synthetic oligonucleotide
uuacagccaacccacaauc

SEQ ID NO: 2715968 - RNA, 19 nt, Artificial Sequence
  Description of Artificial Sequence: Synthetic oligonucleotide
agcagauagaggcucaaca

SEQ ID NO: 2715969 - RNA, 19 nt, Artificial Sequence
  Description of Artificial Sequence: Synthetic oligonucleotide
ucaaugcauaauugggacc

SEQ ID NO: 2715970 - RNA, 19 nt, Artificial Sequence
  Description of Artificial Sequence: Synthetic oligonucleotide
uucgcagggaagcaguucu

SEQ ID NO: 2715971 - RNA, 19 nt, Artificial Sequence
  Description of Artificial Sequence: Synthetic oligonucleotide
cauaauugggaccuggaca

SEQ ID NO: 2715972 - RNA, 19 nt, Artificial Sequence
  Description of Artificial Sequence: Synthetic oligonucleotide
uaacugcuauccaacagcu

SEQ ID NO: 2715973 - RNA, 19 nt, Artificial Sequence
  Description of Artificial Sequence: Synthetic oligonucleotide
uggguuuuccagcaagccc

SEQ ID NO: 2715974 - RNA, 19 nt, Artificial Sequence
  Description of Artificial Sequence: Synthetic oligonucleotide
aggcucaacauauacuuca

SEQ ID NO: 2715975 - RNA, 19 nt, Artificial Sequence
  Description of Artificial Sequence: Synthetic oligonucleotide
cauugaagccacacagugg

SEQ ID NO: 2715976 - RNA, 19 nt, Artificial Sequence
  Description of Artificial Sequence: Synthetic oligonucleotide
aaacacauuagaacuacau

SEQ ID NO: 2715977 - RNA, 19 nt, Artificial Sequence
  Description of Artificial Sequence: Synthetic oligonucleotide
uccaucagccuaacgaaga

SEQ ID NO: 2715978 - RNA, 19 nt, Artificial Sequence
  Description of Artificial Sequence: Synthetic oligonucleotide
agagucgggagacggcugc

SEQ ID NO: 2715979 - RNA, 19 nt, Artificial Sequence
  Description of Artificial Sequence: Synthetic oligonucleotide
ucuuaucaucccacagccg

SEQ ID NO: 2715980 - RNA, 19 nt, Artificial Sequence
  Description of Artificial Sequence: Synthetic oligonucleotide
acgaagauggacagcagcg

SEQ ID NO: 2715981 - RNA, 19 nt, Artificial Sequence
  Description of Artificial Sequence: Synthetic oligonucleotide
cuaacgaagauggacagca

SEQ ID NO: 2715982 - RNA, 19 nt, Artificial Sequence
  Description of Artificial Sequence: Synthetic oligonucleotide
uacaaacacauuagaacua

SEQ ID NO: 2715983 - RNA, 19 nt, Artificial Sequence
  Description of Artificial Sequence: Synthetic oligonucleotide
cuuuucuuacagccaaccc

SEQ ID NO: 2715984 - RNA, 19 nt, Artificial Sequence
  Description of Artificial Sequence: Synthetic oligonucleotide
auuccaucagccuaacgaa

SEQ ID NO: 2715985 - RNA, 19 nt, Artificial Sequence
  Description of Artificial Sequence: Synthetic oligonucleotide
uuccaucagccuaacgaag

SEQ ID NO: 2715986 - RNA, 19 nt, Artificial Sequence
  Description of Artificial Sequence: Synthetic oligonucleotide
uacauugaagccacacagu

SEQ ID NO: 2715987 - RNA, 19 nt, Artificial Sequence
  Description of Artificial Sequence: Synthetic oligonucleotide
cuauccaacagcucccaug

SEQ ID NO: 2715988 - RNA, 19 nt, Artificial Sequence
  Description of Artificial Sequence: Synthetic oligonucleotide
auauacaaacacauuagaa

SEQ ID NO: 2715989 - RNA, 19 nt, Artificial Sequence
  Description of Artificial Sequence: Synthetic oligonucleotide
agcuccuucgcagggaagc

SEQ ID NO: 2715990 - RNA, 19 nt, Artificial Sequence
  Description of Artificial Sequence: Synthetic oligonucleotide
aacccacaaucccuaacug

SEQ ID NO: 2715991 - RNA, 19 nt, Artificial Sequence
  Description of Artificial Sequence: Synthetic oligonucleotide
auggguuuuccagcaagcc

SEQ ID NO: 2715992 - RNA, 19 nt, Artificial Sequence
  Description of Artificial Sequence: Synthetic oligonucleotide
acauuagaacuacauugga

SEQ ID NO: 2715993 - RNA, 19 nt, Artificial Sequence
  Description of Artificial Sequence: Synthetic oligonucleotide
aauugggaccuggacacug

SEQ ID NO: 2715994 - RNA, 19 nt, Artificial Sequence
  Description of Artificial Sequence: Synthetic oligonucleotide
agaacucaaugcauaauug

SEQ ID NO: 2715995 - RNA, 19 nt, Artificial Sequence
  Description of Artificial Sequence: Synthetic oligonucleotide
ucuguguuggcuagcugac

SEQ ID NO: 2715996 - RNA, 19 nt, Artificial Sequence
  Description of Artificial Sequence: Synthetic oligonucleotide
auuccaaccucuuuucuua

SEQ ID NO: 2715997 - RNA, 19 nt, Artificial Sequence
  Description of Artificial Sequence: Synthetic oligonucleotide
gacagcagcgucaauauaa

SEQ ID NO: 2715998 - RNA, 19 nt, Artificial Sequence
  Description of Artificial Sequence: Synthetic oligonucleotide
cuacauuggaggaagaacu

SEQ ID NO: 2715999 - RNA, 19 nt, Artificial Sequence
  Description of Artificial Sequence: Synthetic oligonucleotide
caaucccuaacugcuaucc

SEQ ID NO: 2716000 - RNA, 19 nt, Artificial Sequence
  Description of Artificial Sequence: Synthetic oligonucleotide
uacauuggaggaagaacuc

SEQ ID NO: 2716001 - RNA, 19 nt, Artificial Sequence
  Description of Artificial Sequence: Synthetic oligonucleotide
ugcauaauugggaccugga

SEQ ID NO: 2716002 - RNA, 19 nt, Artificial Sequence
  Description of Artificial Sequence: Synthetic oligonucleotide
ucuuacagccaacccacaa

SEQ ID NO: 2716003 - RNA, 19 nt, Artificial Sequence
  Description of Artificial Sequence: Synthetic oligonucleotide
gaagcaguucugccuuugg

SEQ ID NO: 2716004 - RNA, 19 nt, Artificial Sequence
  Description of Artificial Sequence: Synthetic oligonucleotide
caauggguuuuccagcaag

SEQ ID NO: 2716005 - RNA, 19 nt, Artificial Sequence
  Description of Artificial Sequence: Synthetic oligonucleotide
uauuccaaccucuuuucuu

SEQ ID NO: 2716006 - RNA, 19 nt, Artificial Sequence
  Description of Artificial Sequence: Synthetic oligonucleotide
accucugacgauccagggg

SEQ ID NO: 2716007 - RNA, 19 nt, Artificial Sequence
  Description of Artificial Sequence: Synthetic oligonucleotide
ucccuaacugcuauccaac

SEQ ID NO: 2716008 - RNA, 19 nt, Artificial Sequence
  Description of Artificial Sequence: Synthetic oligonucleotide
aggucuuaucaucccacag

SEQ ID NO: 2716009 - RNA, 19 nt, Artificial Sequence
  Description of Artificial Sequence: Synthetic oligonucleotide
aaucccuaacugcuaucca

SEQ ID NO: 2716010 - RNA, 19 nt, Artificial Sequence
  Description of Artificial Sequence: Synthetic oligonucleotide
gaagauggacagcagcguc

SEQ ID NO: 2716011 - RNA, 19 nt, Artificial Sequence
  Description of Artificial Sequence: Synthetic oligonucleotide
uacagccaacccacaaucc

SEQ ID NO: 2716012 - RNA, 19 nt, Artificial Sequence
  Description of Artificial Sequence: Synthetic oligonucleotide
ucuagauggauggucugga

SEQ ID NO: 2716013 - RNA, 19 nt, Artificial Sequence
  Description of Artificial Sequence: Synthetic oligonucleotide
aggaagagucgggagacgg

SEQ ID NO: 2716014 - RNA, 19 nt, Artificial Sequence
  Description of Artificial Sequence: Synthetic oligonucleotide
aacagcucccauggaagag

SEQ ID NO: 2716015 - RNA, 19 nt, Artificial Sequence
  Description of Artificial Sequence: Synthetic oligonucleotide
agauagaggcucaacauau

SEQ ID NO: 2716016 - RNA, 19 nt, Artificial Sequence
  Description of Artificial Sequence: Synthetic oligonucleotide
ucgugcgggcgucaggagg

SEQ ID NO: 2716017 - RNA, 19 nt, Artificial Sequence
  Description of Artificial Sequence: Synthetic oligonucleotide
cucgcugucagcggggucg

SEQ ID NO: 2716018 - RNA, 19 nt, Artificial Sequence
  Description of Artificial Sequence: Synthetic oligonucleotide
ugauuccaucagccuaacg

SEQ ID NO: 2716019 - RNA, 19 nt, Artificial Sequence
  Description of Artificial Sequence: Synthetic oligonucleotide
gcagcgucaauauaacccc

SEQ ID NO: 2716020 - RNA, 19 nt, Artificial Sequence
  Description of Artificial Sequence: Synthetic oligonucleotide
acacuggauauuccaaccu

SEQ ID NO: 2716021 - RNA, 19 nt, Artificial Sequence
  Description of Artificial Sequence: Synthetic oligonucleotide
acaaucccuaacugcuauc

SEQ ID NO: 2716022 - RNA, 19 nt, Artificial Sequence
  Description of Artificial Sequence: Synthetic oligonucleotide
acucaaugcauaauuggga

SEQ ID NO: 2716023 - RNA, 19 nt, Artificial Sequence
  Description of Artificial Sequence: Synthetic oligonucleotide
acagcucccauggaagagg

SEQ ID NO: 2716024 - RNA, 19 nt, Artificial Sequence
  Description of Artificial Sequence: Synthetic oligonucleotide
uggacacuggauauuccaa

SEQ ID NO: 2716025 - RNA, 19 nt, Artificial Sequence
  Description of Artificial Sequence: Synthetic oligonucleotide
uaacgaagauggacagcag

SEQ ID NO: 2716026 - RNA, 19 nt, Artificial Sequence
  Description of Artificial Sequence: Synthetic oligonucleotide
aagauggacagcagcguca

SEQ ID NO: 2716027 - RNA, 19 nt, Artificial Sequence
  Description of Artificial Sequence: Synthetic oligonucleotide
cugagcaggucuuaucauc

SEQ ID NO: 2716028 - RNA, 19 nt, Artificial Sequence
  Description of Artificial Sequence: Synthetic oligonucleotide
auauuccaaccucuuuucu

SEQ ID NO: 2716029 - RNA, 19 nt, Artificial Sequence
  Description of Artificial Sequence: Synthetic oligonucleotide
cuuaucaucccacagccgu

SEQ ID NO: 2716030 - RNA, 19 nt, Artificial Sequence
  Description of Artificial Sequence: Synthetic oligonucleotide
acagcagcgucaauauaac

SEQ ID NO: 2716031 - RNA, 19 nt, Artificial Sequence
  Description of Artificial Sequence: Synthetic oligonucleotide
gaccucugacgauccaggg

SEQ ID NO: 2716032 - RNA, 19 nt, Artificial Sequence
  Description of Artificial Sequence: Synthetic oligonucleotide
aucccuaacugcuauccaa

SEQ ID NO: 2716033 - RNA, 19 nt, Artificial Sequence
  Description of Artificial Sequence: Synthetic oligonucleotide
agcaguucugccuuugguu

SEQ ID NO: 2716034 - RNA, 19 nt, Artificial Sequence
  Description of Artificial Sequence: Synthetic oligonucleotide
ccucugacgauccaggggc

SEQ ID NO: 2716035 - RNA, 19 nt, Artificial Sequence
  Description of Artificial Sequence: Synthetic oligonucleotide
gauggauggucuggaaggc

SEQ ID NO: 2716036 - RNA, 19 nt, Artificial Sequence
  Description of Artificial Sequence: Synthetic oligonucleotide
accuggacacuggauauuc

SEQ ID NO: 2716037 - RNA, 19 nt, Artificial Sequence
  Description of Artificial Sequence: Synthetic oligonucleotide
caacauauacuucauggcu

SEQ ID NO: 2716038 - RNA, 19 nt, Artificial Sequence
  Description of Artificial Sequence: Synthetic oligonucleotide
uuggcuagcugaccucuga

SEQ ID NO: 2716039 - RNA, 19 nt, Artificial Sequence
  Description of Artificial Sequence: Synthetic oligonucleotide
uuaucaucccacagccguc

SEQ ID NO: 2716040 - RNA, 19 nt, Artificial Sequence
  Description of Artificial Sequence: Synthetic oligonucleotide
augcauaauugggaccugg

SEQ ID NO: 2716041 - RNA, 19 nt, Artificial Sequence
  Description of Artificial Sequence: Synthetic oligonucleotide
ucaggaggaagagucggga

SEQ ID NO: 2716042 - RNA, 19 nt, Artificial Sequence
  Description of Artificial Sequence: Synthetic oligonucleotide
gaggcucuguguuggcuag

SEQ ID NO: 2716043 - RNA, 19 nt, Artificial Sequence
  Description of Artificial Sequence: Synthetic oligonucleotide
agccuaacgaagauggaca

SEQ ID NO: 2716044 - RNA, 19 nt, Artificial Sequence
  Description of Artificial Sequence: Synthetic oligonucleotide
gaucucucacacccugagc

SEQ ID NO: 2716045 - RNA, 19 nt, Artificial Sequence
  Description of Artificial Sequence: Synthetic oligonucleotide
uagaacuacauuggaggaa

SEQ ID NO: 2716046 - RNA, 19 nt, Artificial Sequence
  Description of Artificial Sequence: Synthetic oligonucleotide
gcucccauggaagaggagg

SEQ ID NO: 2716047 - RNA, 19 nt, Artificial Sequence
  Description of Artificial Sequence: Synthetic oligonucleotide
ucucacacccugagcaggu

SEQ ID NO: 2716048 - RNA, 19 nt, Artificial Sequence
  Description of Artificial Sequence: Synthetic oligonucleotide
agcguggaagcuccuccac

SEQ ID NO: 2716049 - RNA, 19 nt, Artificial Sequence
  Description of Artificial Sequence: Synthetic oligonucleotide
ucacacccugagcaggucu

SEQ ID NO: 2716050 - RNA, 19 nt, Artificial Sequence
  Description of Artificial Sequence: Synthetic oligonucleotide
acuggauauuccaaccucu

SEQ ID NO: 2716051 - RNA, 19 nt, Artificial Sequence
  Description of Artificial Sequence: Synthetic oligonucleotide
agguccgcggagucgcagc

SEQ ID NO: 2716052 - RNA, 19 nt, Artificial Sequence
  Description of Artificial Sequence: Synthetic oligonucleotide
uguuggcuagcugaccucu

SEQ ID NO: 2716053 - RNA, 19 nt, Artificial Sequence
  Description of Artificial Sequence: Synthetic oligonucleotide
uucauggcugcagugccca

SEQ ID NO: 2716054 - RNA, 19 nt, Artificial Sequence
  Description of Artificial Sequence: Synthetic oligonucleotide
cacuggauauuccaaccuc

SEQ ID NO: 2716055 - RNA, 19 nt, Artificial Sequence
  Description of Artificial Sequence: Synthetic oligonucleotide
agcaggucuuaucauccca

SEQ ID NO: 2716056 - RNA, 19 nt, Artificial Sequence
  Description of Artificial Sequence: Synthetic oligonucleotide
acauuggaggaagaacuca

SEQ ID NO: 2716057 - RNA, 19 nt, Artificial Sequence
  Description of Artificial Sequence: Synthetic oligonucleotide
aaugcauaauugggaccug

SEQ ID NO: 2716058 - RNA, 19 nt, Artificial Sequence
  Description of Artificial Sequence: Synthetic oligonucleotide
agugauuccaucagccuaa

SEQ ID NO: 2716059 - RNA, 19 nt, Artificial Sequence
  Description of Artificial Sequence: Synthetic oligonucleotide
cagccuaacgaagauggac

SEQ ID NO: 2716060 - RNA, 19 nt, Artificial Sequence
  Description of Artificial Sequence: Synthetic oligonucleotide
cuggacacuggauauucca

SEQ ID NO: 2716061 - RNA, 19 nt, Artificial Sequence
  Description of Artificial Sequence: Synthetic oligonucleotide
uaucaucccacagccgucu

SEQ ID NO: 2716062 - RNA, 19 nt, Artificial Sequence
  Description of Artificial Sequence: Synthetic oligonucleotide
cugucagcggggucgugcg

SEQ ID NO: 2716063 - RNA, 19 nt, Artificial Sequence
  Description of Artificial Sequence: Synthetic oligonucleotide
gucgggagacggcugcucg

SEQ ID NO: 2716064 - RNA, 19 nt, Artificial Sequence
  Description of Artificial Sequence: Synthetic oligonucleotide
uccgcggagucgcagcgug

SEQ ID NO: 2716065 - RNA, 19 nt, Artificial Sequence
  Description of Artificial Sequence: Synthetic oligonucleotide
ucagccuaacgaagaugga

SEQ ID NO: 2716066 - RNA, 19 nt, Artificial Sequence
  Description of Artificial Sequence: Synthetic oligonucleotide
aacugcuauccaacagcuc

SEQ ID NO: 2716067 - RNA, 19 nt, Artificial Sequence
  Description of Artificial Sequence: Synthetic oligonucleotide
auggcugcagugcccagcu

SEQ ID NO: 2716068 - RNA, 19 nt, Artificial Sequence
  Description of Artificial Sequence: Synthetic oligonucleotide
ggaucucucacacccugag

SEQ ID NO: 2716069 - RNA, 19 nt, Artificial Sequence
  Description of Artificial Sequence: Synthetic oligonucleotide
auggacagcagcgucaaua

SEQ ID NO: 2716070 - RNA, 19 nt, Artificial Sequence
  Description of Artificial Sequence: Synthetic oligonucleotide
ggcuagcugaccucugacg

SEQ ID NO: 2716071 - RNA, 19 nt, Artificial Sequence
  Description of Artificial Sequence: Synthetic oligonucleotide
uggaucucucacacccuga

SEQ ID NO: 2716072 - RNA, 19 nt, Artificial Sequence
  Description of Artificial Sequence: Synthetic oligonucleotide
cuggaucucucacacccug

SEQ ID NO: 2716073 - RNA, 19 nt, Artificial Sequence
  Description of Artificial Sequence: Synthetic oligonucleotide
ccaacagcucccauggaag

SEQ ID NO: 2716074 - RNA, 19 nt, Artificial Sequence
  Description of Artificial Sequence: Synthetic oligonucleotide
cccacagccgucuuuagac

SEQ ID NO: 2716075 - RNA, 19 nt, Artificial Sequence
  Description of Artificial Sequence: Synthetic oligonucleotide
ucccacagccgucuuuaga

SEQ ID NO: 2716076 - RNA, 19 nt, Artificial Sequence
  Description of Artificial Sequence: Synthetic oligonucleotide
gagguuuuauugcacuccu

SEQ ID NO: 2716077 - RNA, 19 nt, Artificial Sequence
  Description of Artificial Sequence: Synthetic oligonucleotide
aagaggagggagguuuuau

SEQ ID NO: 2716078 - RNA, 19 nt, Artificial Sequence
  Description of Artificial Sequence: Synthetic oligonucleotide
acccugagcaggucuuauc

SEQ ID NO: 2716079 - RNA, 19 nt, Artificial Sequence
  Description of Artificial Sequence: Synthetic oligonucleotide
ggucuggaaggccuuuggg

SEQ ID NO: 2716080 - RNA, 19 nt, Artificial Sequence
  Description of Artificial Sequence: Synthetic oligonucleotide
cugaccucugacgauccag

SEQ ID NO: 2716081 - RNA, 19 nt, Artificial Sequence
  Description of Artificial Sequence: Synthetic oligonucleotide
gcuagcugaccucugacga

SEQ ID NO: 2716082 - RNA, 19 nt, Artificial Sequence
  Description of Artificial Sequence: Synthetic oligonucleotide
uggcuagcugaccucugac

SEQ ID NO: 2716083 - RNA, 19 nt, Artificial Sequence
  Description of Artificial Sequence: Synthetic oligonucleotide
gccuuugguucugagaucc

SEQ ID NO: 2716084 - RNA, 19 nt, Artificial Sequence
  Description of Artificial Sequence: Synthetic oligonucleotide
cagcagcgucaauauaacc

SEQ ID NO: 2716085 - RNA, 19 nt, Artificial Sequence
  Description of Artificial Sequence: Synthetic oligonucleotide
agucgcagcguggaagcuc

SEQ ID NO: 2716086 - RNA, 19 nt, Artificial Sequence
  Description of Artificial Sequence: Synthetic oligonucleotide
cuuugguucugagauccuc

SEQ ID NO: 2716087 - RNA, 19 nt, Artificial Sequence
  Description of Artificial Sequence: Synthetic oligonucleotide
cucuuuucuuacagccaac

SEQ ID NO: 2716088 - RNA, 19 nt, Artificial Sequence
  Description of Artificial Sequence: Synthetic oligonucleotide
acggcugcucgcugucagc

SEQ ID NO: 2716089 - RNA, 19 nt, Artificial Sequence
  Description of Artificial Sequence: Synthetic oligonucleotide
uugcacuccucuagaugga

SEQ ID NO: 2716090 - RNA, 19 nt, Artificial Sequence
  Description of Artificial Sequence: Synthetic oligonucleotide
auugggaccuggacacugg

SEQ ID NO: 2716091 - RNA, 19 nt, Artificial Sequence
  Description of Artificial Sequence: Synthetic oligonucleotide
ggaagaacucaaugcauaa

SEQ ID NO: 2716092 - RNA, 19 nt, Artificial Sequence
  Description of Artificial Sequence: Synthetic oligonucleotide
uucuuacagccaacccaca

SEQ ID NO: 2716093 - RNA, 19 nt, Artificial Sequence
  Description of Artificial Sequence: Synthetic oligonucleotide
ccauggaagaggagggagg

SEQ ID NO: 2716094 - RNA, 19 nt, Artificial Sequence
  Description of Artificial Sequence: Synthetic oligonucleotide
aggaagaacucaaugcaua

SEQ ID NO: 2716095 - RNA, 19 nt, Artificial Sequence
  Description of Artificial Sequence: Synthetic oligonucleotide
ccuaacugcuauccaacag

SEQ ID NO: 2716096 - RNA, 19 nt, Artificial Sequence
  Description of Artificial Sequence: Synthetic oligonucleotide
acaguggcuggaucucuca

SEQ ID NO: 2716097 - RNA, 19 nt, Artificial Sequence
  Description of Artificial Sequence: Synthetic oligonucleotide
gcauaauugggaccuggac

SEQ ID NO: 2716098 - RNA, 19 nt, Artificial Sequence
  Description of Artificial Sequence: Synthetic oligonucleotide
caaacacauuagaacuaca

SEQ ID NO: 2716099 - RNA, 19 nt, Artificial Sequence
  Description of Artificial Sequence: Synthetic oligonucleotide
ggagggagguuuuauugca

SEQ ID NO: 2716100 - RNA, 19 nt, Artificial Sequence
  Description of Artificial Sequence: Synthetic oligonucleotide
ggaagcuccuccacguagg

SEQ ID NO: 2716101 - RNA, 19 nt, Artificial Sequence
  Description of Artificial Sequence: Synthetic oligonucleotide
gccuaacgaagauggacag

SEQ ID NO: 2716102 - RNA, 19 nt, Artificial Sequence
  Description of Artificial Sequence: Synthetic oligonucleotide
gucgcagcguggaagcucc

SEQ ID NO: 2716103 - RNA, 19 nt, Artificial Sequence
  Description of Artificial Sequence: Synthetic oligonucleotide
ugucagcggggucgugcgg

SEQ ID NO: 2716104 - RNA, 19 nt, Artificial Sequence
  Description of Artificial Sequence: Synthetic oligonucleotide
uugaagccacacaguggcu

SEQ ID NO: 2716105 - RNA, 19 nt, Artificial Sequence
  Description of Artificial Sequence: Synthetic oligonucleotide
ggcaauggguuuuccagca

SEQ ID NO: 2716106 - RNA, 19 nt, Artificial Sequence
  Description of Artificial Sequence: Synthetic oligonucleotide
gucagcggggucgugcggg

SEQ ID NO: 2716107 - RNA, 19 nt, Artificial Sequence
  Description of Artificial Sequence: Synthetic oligonucleotide
cagauagaggcucaacaua

SEQ ID NO: 2716108 - RNA, 19 nt, Artificial Sequence
  Description of Artificial Sequence: Synthetic oligonucleotide
caucagccuaacgaagaug

SEQ ID NO: 2716109 - RNA, 19 nt, Artificial Sequence
  Description of Artificial Sequence: Synthetic oligonucleotide
acgauccaggggcugccag

SEQ ID NO: 2716110 - RNA, 19 nt, Artificial Sequence
  Description of Artificial Sequence: Synthetic oligonucleotide
ugcuauccaacagcuccca

SEQ ID NO: 2716111 - RNA, 19 nt, Artificial Sequence
  Description of Artificial Sequence: Synthetic oligonucleotide
caacccacaaucccuaacu

SEQ ID NO: 2716112 - RNA, 19 nt, Artificial Sequence
  Description of Artificial Sequence: Synthetic oligonucleotide
ggauauuccaaccucuuuu

SEQ ID NO: 2716113 - RNA, 19 nt, Artificial Sequence
  Description of Artificial Sequence: Synthetic oligonucleotide
cugacgauccaggggcugc

SEQ ID NO: 2716114 - RNA, 19 nt, Artificial Sequence
  Description of Artificial Sequence: Synthetic oligonucleotide
ucugacgauccaggggcug

SEQ ID NO: 2716115 - RNA, 19 nt, Artificial Sequence
  Description of Artificial Sequence: Synthetic oligonucleotide
cagugauuccaucagccua

SEQ ID NO: 2716116 - RNA, 19 nt, Artificial Sequence
  Description of Artificial Sequence: Synthetic oligonucleotide
ucgggagacggcugcucgc

SEQ ID NO: 2716117 - RNA, 19 nt, Artificial Sequence
  Description of Artificial Sequence: Synthetic oligonucleotide
aagagucgggagacggcug

SEQ ID NO: 2716118 - RNA, 19 nt, Artificial Sequence
  Description of Artificial Sequence: Synthetic oligonucleotide
agguuuuauugcacuccuc

SEQ ID NO: 2716119 - RNA, 19 nt, Artificial Sequence
  Description of Artificial Sequence: Synthetic oligonucleotide
gcagcguggaagcuccucc

SEQ ID NO: 2716120 - RNA, 19 nt, Artificial Sequence
  Description of Artificial Sequence: Synthetic oligonucleotide
cauggcugcagugcccagc

SEQ ID NO: 2716121 - RNA, 19 nt, Artificial Sequence
  Description of Artificial Sequence: Synthetic oligonucleotide
gaggcucaacauauacuuc

SEQ ID NO: 2716122 - RNA, 19 nt, Artificial Sequence
  Description of Artificial Sequence: Synthetic oligonucleotide
aaauuacauugaagccaca

SEQ ID NO: 2716123 - RNA, 19 nt, Artificial Sequence
  Description of Artificial Sequence: Synthetic oligonucleotide
gcucaacauauacuucaug

SEQ ID NO: 2716124 - RNA, 19 nt, Artificial Sequence
  Description of Artificial Sequence: Synthetic oligonucleotide
auuggaggaagaacucaau

SEQ ID NO: 2716125 - RNA, 19 nt, Artificial Sequence
  Description of Artificial Sequence: Synthetic oligonucleotide
ugacgauccaggggcugcc

SEQ ID NO: 2716126 - RNA, 19 nt, Artificial Sequence
  Description of Artificial Sequence: Synthetic oligonucleotide
accucuuuucuuacagcca

SEQ ID NO: 2716127 - RNA, 19 nt, Artificial Sequence
  Description of Artificial Sequence: Synthetic oligonucleotide
cuccacguaggcacugcuc

SEQ ID NO: 2716128 - RNA, 19 nt, Artificial Sequence
  Description of Artificial Sequence: Synthetic oligonucleotide
ugggaccuggacacuggau

SEQ ID NO: 2716129 - RNA, 19 nt, Artificial Sequence
  Description of Artificial Sequence: Synthetic oligonucleotide
ccuccagugauuccaucag

SEQ ID NO: 2716130 - RNA, 19 nt, Artificial Sequence
  Description of Artificial Sequence: Synthetic oligonucleotide
gcguggaagcuccuccacg

SEQ ID NO: 2716131 - RNA, 19 nt, Artificial Sequence
  Description of Artificial Sequence: Synthetic oligonucleotide
cugcucgcugucagcgggg

SEQ ID NO: 2716132 - RNA, 19 nt, Artificial Sequence
  Description of Artificial Sequence: Synthetic oligonucleotide
cuuacagccaacccacaau

SEQ ID NO: 2716133 - RNA, 19 nt, Artificial Sequence
  Description of Artificial Sequence: Synthetic oligonucleotide
caguggcuggaucucucac

SEQ ID NO: 2716134 - RNA, 19 nt, Artificial Sequence
  Description of Artificial Sequence: Synthetic oligonucleotide
gggagguuuuauugcacuc

SEQ ID NO: 2716135 - RNA, 19 nt, Artificial Sequence
  Description of Artificial Sequence: Synthetic oligonucleotide
agucgggagacggcugcuc

SEQ ID NO: 2716136 - RNA, 19 nt, Artificial Sequence
  Description of Artificial Sequence: Synthetic oligonucleotide
gggaccuggacacuggaua

SEQ ID NO: 2716137 - RNA, 19 nt, Artificial Sequence
  Description of Artificial Sequence: Synthetic oligonucleotide
gauagaggcucaacauaua

SEQ ID NO: 2716138 - RNA, 19 nt, Artificial Sequence
  Description of Artificial Sequence: Synthetic oligonucleotide
uaauugggaccuggacacu

SEQ ID NO: 2716139 - RNA, 19 nt, Artificial Sequence
  Description of Artificial Sequence: Synthetic oligonucleotide
ggguuuuccagcaagcccu

SEQ ID NO: 2716140 - RNA, 19 nt, Artificial Sequence
  Description of Artificial Sequence: Synthetic oligonucleotide
gagacggcugcucgcuguc

SEQ ID NO: 2716141 - RNA, 19 nt, Artificial Sequence
  Description of Artificial Sequence: Synthetic oligonucleotide
uggcuggaucucucacacc

SEQ ID NO: 2716142 - RNA, 19 nt, Artificial Sequence
  Description of Artificial Sequence: Synthetic oligonucleotide
gaagaacucaaugcauaau

SEQ ID NO: 2716143 - RNA, 19 nt, Artificial Sequence
  Description of Artificial Sequence: Synthetic oligonucleotide
cuguguuggcuagcugacc

SEQ ID NO: 2716144 - RNA, 19 nt, Artificial Sequence
  Description of Artificial Sequence: Synthetic oligonucleotide
cacacaguggcuggaucuc

SEQ ID NO: 2716145 - RNA, 19 nt, Artificial Sequence
  Description of Artificial Sequence: Synthetic oligonucleotide
gguccgcggagucgcagcg

SEQ ID NO: 2716146 - RNA, 19 nt, Artificial Sequence
  Description of Artificial Sequence: Synthetic oligonucleotide
cuagauggauggucuggaa

SEQ ID NO: 2716147 - RNA, 19 nt, Artificial Sequence
  Description of Artificial Sequence: Synthetic oligonucleotide
aucccacagccgucuuuag

SEQ ID NO: 2716148 - RNA, 19 nt, Artificial Sequence
  Description of Artificial Sequence: Synthetic oligonucleotide
gaggcagguccgcggaguc

SEQ ID NO: 2716149 - RNA, 19 nt, Artificial Sequence
  Description of Artificial Sequence: Synthetic oligonucleotide
cuccuucgcagggaagcag

SEQ ID NO: 2716150 - RNA, 19 nt, Artificial Sequence
  Description of Artificial Sequence: Synthetic oligonucleotide
aggaggcagguccgcggag

SEQ ID NO: 2716151 - RNA, 19 nt, Artificial Sequence
  Description of Artificial Sequence: Synthetic oligonucleotide
gcagauagaggcucaacau

SEQ ID NO: 2716152 - RNA, 19 nt, Artificial Sequence
  Description of Artificial Sequence: Synthetic oligonucleotide
cuucgcagggaagcaguuc

SEQ ID NO: 2716153 - RNA, 19 nt, Artificial Sequence
  Description of Artificial Sequence: Synthetic oligonucleotide
guguuggcuagcugaccuc

SEQ ID NO: 2716154 - RNA, 19 nt, Artificial Sequence
  Description of Artificial Sequence: Synthetic oligonucleotide
ccucuuuucuuacagccaa

SEQ ID NO: 2716155 - RNA, 19 nt, Artificial Sequence
  Description of Artificial Sequence: Synthetic oligonucleotide
aagccacacaguggcugga

SEQ ID NO: 2716156 - RNA, 19 nt, Artificial Sequence
  Description of Artificial Sequence: Synthetic oligonucleotide
acacaguggcuggaucucu

SEQ ID NO: 2716157 - RNA, 19 nt, Artificial Sequence
  Description of Artificial Sequence: Synthetic oligonucleotide
ccgucuuuagacauuauau

SEQ ID NO: 2716158 - RNA, 19 nt, Artificial Sequence
  Description of Artificial Sequence: Synthetic oligonucleotide
gcaggucuuaucaucccac

SEQ ID NO: 2716159 - RNA, 19 nt, Artificial Sequence
  Description of Artificial Sequence: Synthetic oligonucleotide
ugggaggcucuguguuggc

SEQ ID NO: 2716160 - RNA, 19 nt, Artificial Sequence
  Description of Artificial Sequence: Synthetic oligonucleotide
agcggggucgugcgggcgu

SEQ ID NO: 2716161 - RNA, 19 nt, Artificial Sequence
  Description of Artificial Sequence: Synthetic oligonucleotide
ggaagagucgggagacggc

SEQ ID NO: 2716162 - RNA, 19 nt, Artificial Sequence
  Description of Artificial Sequence: Synthetic oligonucleotide
cauggaagaggagggaggu

SEQ ID NO: 2716163 - RNA, 19 nt, Artificial Sequence
  Description of Artificial Sequence: Synthetic oligonucleotide
cccacaaucccuaacugcu

SEQ ID NO: 2716164 - RNA, 19 nt, Artificial Sequence
  Description of Artificial Sequence: Synthetic oligonucleotide
cagcucccauggaagagga

SEQ ID NO: 2716165 - RNA, 19 nt, Artificial Sequence
  Description of Artificial Sequence: Synthetic oligonucleotide
cccauggaagaggagggag

SEQ ID NO: 2716166 - RNA, 19 nt, Artificial Sequence
  Description of Artificial Sequence: Synthetic oligonucleotide
cccugagcaggucuuauca

SEQ ID NO: 2716167 - RNA, 19 nt, Artificial Sequence
  Description of Artificial Sequence: Synthetic oligonucleotide
aggcagguccgcggagucg

SEQ ID NO: 2716168 - RNA, 19 nt, Artificial Sequence
  Description of Artificial Sequence: Synthetic oligonucleotide
gccgucuuuagacauuaua

SEQ ID NO: 2716169 - RNA, 19 nt, Artificial Sequence
  Description of Artificial Sequence: Synthetic oligonucleotide
cagccaacccacaaucccu

SEQ ID NO: 2716170 - RNA, 19 nt, Artificial Sequence
  Description of Artificial Sequence: Synthetic oligonucleotide
gcugucagcggggucgugc

SEQ ID NO: 2716171 - RNA, 19 nt, Artificial Sequence
  Description of Artificial Sequence: Synthetic oligonucleotide
guuggcuagcugaccucug

SEQ ID NO: 2716172 - RNA, 19 nt, Artificial Sequence
  Description of Artificial Sequence: Synthetic oligonucleotide
cagcagauagaggcucaac

SEQ ID NO: 2716173 - RNA, 19 nt, Artificial Sequence
  Description of Artificial Sequence: Synthetic oligonucleotide
ggaagcaguucugccuuug

SEQ ID NO: 2716174 - RNA, 19 nt, Artificial Sequence
  Description of Artificial Sequence: Synthetic oligonucleotide
ccuaacgaagauggacagc

SEQ ID NO: 2716175 - RNA, 19 nt, Artificial Sequence
  Description of Artificial Sequence: Synthetic oligonucleotide
caucccacagccgucuuua

SEQ ID NO: 2716176 - RNA, 19 nt, Artificial Sequence
  Description of Artificial Sequence: Synthetic oligonucleotide
cgugcgggcgucaggaggc

SEQ ID NO: 2716177 - RNA, 19 nt, Artificial Sequence
  Description of Artificial Sequence: Synthetic oligonucleotide
cacaaucccuaacugcuau

SEQ ID NO: 2716178 - RNA, 19 nt, Artificial Sequence
  Description of Artificial Sequence: Synthetic oligonucleotide
ccaacccacaaucccuaac

SEQ ID NO: 2716179 - RNA, 19 nt, Artificial Sequence
  Description of Artificial Sequence: Synthetic oligonucleotide
cagcguggaagcuccucca

SEQ ID NO: 2716180 - RNA, 19 nt, Artificial Sequence
  Description of Artificial Sequence: Synthetic oligonucleotide
gaagaggagggagguuuua

SEQ ID NO: 2716181 - RNA, 19 nt, Artificial Sequence
  Description of Artificial Sequence: Synthetic oligonucleotide
cgucuuuagacauuauaua

SEQ ID NO: 2716182 - RNA, 19 nt, Artificial Sequence
  Description of Artificial Sequence: Synthetic oligonucleotide
gucgugcgggcgucaggag

SEQ ID NO: 2716183 - RNA, 19 nt, Artificial Sequence
  Description of Artificial Sequence: Synthetic oligonucleotide
ggucgugcgggcgucagga

SEQ ID NO: 2716184 - RNA, 19 nt, Artificial Sequence
  Description of Artificial Sequence: Synthetic oligonucleotide
ggcugcucgcugucagcgg

SEQ ID NO: 2716185 - RNA, 19 nt, Artificial Sequence
  Description of Artificial Sequence: Synthetic oligonucleotide
ccucuagauggauggucug

SEQ ID NO: 2716186 - RNA, 19 nt, Artificial Sequence
  Description of Artificial Sequence: Synthetic oligonucleotide
cagcuccuucgcagggaag

SEQ ID NO: 2716187 - RNA, 19 nt, Artificial Sequence
  Description of Artificial Sequence: Synthetic oligonucleotide
ugcucgcugucagcggggu

SEQ ID NO: 2716188 - RNA, 19 nt, Artificial Sequence
  Description of Artificial Sequence: Synthetic oligonucleotide
cacagccgucuuuagacau

SEQ ID NO: 2716189 - RNA, 19 nt, Artificial Sequence
  Description of Artificial Sequence: Synthetic oligonucleotide
ugcgggcgucaggaggcag

SEQ ID NO: 2716190 - RNA, 19 nt, Artificial Sequence
  Description of Artificial Sequence: Synthetic oligonucleotide
gcaagcccuccagugauuc

SEQ ID NO: 2716191 - RNA, 19 nt, Artificial Sequence
  Description of Artificial Sequence: Synthetic oligonucleotide
agccaacccacaaucccua

SEQ ID NO: 2716192 - RNA, 19 nt, Artificial Sequence
  Description of Artificial Sequence: Synthetic oligonucleotide
gcgucaggaggcagguccg

SEQ ID NO: 2716193 - RNA, 19 nt, Artificial Sequence
  Description of Artificial Sequence: Synthetic oligonucleotide
cuagcugaccucugacgau

SEQ ID NO: 2716194 - RNA, 19 nt, Artificial Sequence
  Description of Artificial Sequence: Synthetic oligonucleotide
aucaucccacagccgucuu

SEQ ID NO: 2716195 - RNA, 19 nt, Artificial Sequence
  Description of Artificial Sequence: Synthetic oligonucleotide
acagccgucuuuagacauu

SEQ ID NO: 2716196 - RNA, 19 nt, Artificial Sequence
  Description of Artificial Sequence: Synthetic oligonucleotide
ccagcaagcccuccaguga

SEQ ID NO: 2716197 - RNA, 19 nt, Artificial Sequence
  Description of Artificial Sequence: Synthetic oligonucleotide
gcacuccucuagauggaug

SEQ ID NO: 2716198 - RNA, 19 nt, Artificial Sequence
  Description of Artificial Sequence: Synthetic oligonucleotide
gacgauccaggggcugcca

SEQ ID NO: 2716199 - RNA, 19 nt, Artificial Sequence
  Description of Artificial Sequence: Synthetic oligonucleotide
cagguccgcggagucgcag

SEQ ID NO: 2716200 - RNA, 19 nt, Artificial Sequence
  Description of Artificial Sequence: Synthetic oligonucleotide
agcucccauggaagaggag

SEQ ID NO: 2716201 - RNA, 19 nt, Artificial Sequence
  Description of Artificial Sequence: Synthetic oligonucleotide
cagccgucuuuagacauua

SEQ ID NO: 2716202 - RNA, 19 nt, Artificial Sequence
  Description of Artificial Sequence: Synthetic oligonucleotide
gcgggcgucaggaggcagg

SEQ ID NO: 2716203 - RNA, 19 nt, Artificial Sequence
  Description of Artificial Sequence: Synthetic oligonucleotide
guggaagcuccuccacgua

SEQ ID NO: 2716204 - RNA, 19 nt, Artificial Sequence
  Description of Artificial Sequence: Synthetic oligonucleotide
cccuaacugcuauccaaca

SEQ ID NO: 2716205 - RNA, 19 nt, Artificial Sequence
  Description of Artificial Sequence: Synthetic oligonucleotide
agccacacaguggcuggau

SEQ ID NO: 2716206 - RNA, 19 nt, Artificial Sequence
  Description of Artificial Sequence: Synthetic oligonucleotide
ucgcugucagcggggucgu

SEQ ID NO: 2716207 - RNA, 19 nt, Artificial Sequence
  Description of Artificial Sequence: Synthetic oligonucleotide
cucacacccugagcagguc

SEQ ID NO: 2716208 - RNA, 19 nt, Artificial Sequence
  Description of Artificial Sequence: Synthetic oligonucleotide
cagcaagcccuccagugau

SEQ ID NO: 2716209 - RNA, 19 nt, Artificial Sequence
  Description of Artificial Sequence: Synthetic oligonucleotide
gccacacaguggcuggauc

SEQ ID NO: 2716210 - RNA, 19 nt, Artificial Sequence
  Description of Artificial Sequence: Synthetic oligonucleotide
cuccuccacguaggcacug

SEQ ID NO: 2716211 - RNA, 19 nt, Artificial Sequence
  Description of Artificial Sequence: Synthetic oligonucleotide
gggucgugcgggcgucagg

SEQ ID NO: 2716212 - RNA, 19 nt, Artificial Sequence
  Description of Artificial Sequence: Synthetic oligonucleotide
agacggcugcucgcuguca

SEQ ID NO: 2716213 - RNA, 19 nt, Artificial Sequence
  Description of Artificial Sequence: Synthetic oligonucleotide
ccacacaguggcuggaucu

SEQ ID NO: 2716214 - RNA, 19 nt, Artificial Sequence
  Description of Artificial Sequence: Synthetic oligonucleotide
gggagacggcugcucgcug

SEQ ID NO: 2716215 - RNA, 19 nt, Artificial Sequence
  Description of Artificial Sequence: Synthetic oligonucleotide
acacccugagcaggucuua

SEQ ID NO: 2716216 - RNA, 19 nt, Artificial Sequence
  Description of Artificial Sequence: Synthetic oligonucleotide
ccacagccgucuuuagaca

SEQ ID NO: 2716217 - RNA, 19 nt, Artificial Sequence
  Description of Artificial Sequence: Synthetic oligonucleotide
cggcugcucgcugucagcg

SEQ ID NO: 2716218 - RNA, 19 nt, Artificial Sequence
  Description of Artificial Sequence: Synthetic oligonucleotide
cagcggggucgugcgggcg

SEQ ID NO: 2716219 - RNA, 19 nt, Artificial Sequence
  Description of Artificial Sequence: Synthetic oligonucleotide
ccagugauuccaucagccu

SEQ ID NO: 2716220 - RNA, 19 nt, Artificial Sequence
  Description of Artificial Sequence: Synthetic oligonucleotide
cacacccugagcaggucuu

SEQ ID NO: 2716221 - RNA, 19 nt, Artificial Sequence
  Description of Artificial Sequence: Synthetic oligonucleotide
cucugacgauccaggggcu

SEQ ID NO: 2716222 - RNA, 19 nt, Artificial Sequence
  Description of Artificial Sequence: Synthetic oligonucleotide
ccccagcagauagaggcuc

SEQ ID NO: 2716223 - RNA, 19 nt, Artificial Sequence
  Description of Artificial Sequence: Synthetic oligonucleotide
agcaagcccuccagugauu

SEQ ID NO: 2716224 - RNA, 19 nt, Artificial Sequence
  Description of Artificial Sequence: Synthetic oligonucleotide
gcuccuucgcagggaagca

SEQ ID NO: 2716225 - RNA, 19 nt, Artificial Sequence
  Description of Artificial Sequence: Synthetic oligonucleotide
gcugccaggcaauggguuu

SEQ ID NO: 2716226 - RNA, 19 nt, Artificial Sequence
  Description of Artificial Sequence: Synthetic oligonucleotide
cguggaagcuccuccacgu

SEQ ID NO: 2716227 - RNA, 19 nt, Artificial Sequence
  Description of Artificial Sequence: Synthetic oligonucleotide
ggcucuguguuggcuagcu

SEQ ID NO: 2716228 - RNA, 19 nt, Artificial Sequence
  Description of Artificial Sequence: Synthetic oligonucleotide
gaccuggacacuggauauu

SEQ ID NO: 2716229 - RNA, 19 nt, Artificial Sequence
  Description of Artificial Sequence: Synthetic oligonucleotide
ggcucaacauauacuucau

SEQ ID NO: 2716230 - RNA, 19 nt, Artificial Sequence
  Description of Artificial Sequence: Synthetic oligonucleotide
ccacaaucccuaacugcua

SEQ ID NO: 2716231 - RNA, 19 nt, Artificial Sequence
  Description of Artificial Sequence: Synthetic oligonucleotide
gagucgcagcguggaagcu

SEQ ID NO: 2716232 - RNA, 19 nt, Artificial Sequence
  Description of Artificial Sequence: Synthetic oligonucleotide
ggggucgugcgggcgucag

SEQ ID NO: 2716233 - RNA, 19 nt, Artificial Sequence
  Description of Artificial Sequence: Synthetic oligonucleotide
ccgcggagucgcagcgugg

SEQ ID NO: 2716234 - RNA, 19 nt, Artificial Sequence
  Description of Artificial Sequence: Synthetic oligonucleotide
gagucgggagacggcugcu

SEQ ID NO: 2716235 - RNA, 19 nt, Artificial Sequence
  Description of Artificial Sequence: Synthetic oligonucleotide
agccgucuuuagacauuau

SEQ ID NO: 2716236 - RNA, 19 nt, Artificial Sequence
  Description of Artificial Sequence: Synthetic oligonucleotide
ccugagcaggucuuaucau

SEQ ID NO: 2716237 - RNA, 19 nt, Artificial Sequence
  Description of Artificial Sequence: Synthetic oligonucleotide
gcuauccaacagcucccau

SEQ ID NO: 2716238 - RNA, 19 nt, Artificial Sequence
  Description of Artificial Sequence: Synthetic oligonucleotide
gcucgcugucagcgggguc

SEQ ID NO: 2716239 - RNA, 19 nt, Artificial Sequence
  Description of Artificial Sequence: Synthetic oligonucleotide
gugcgggcgucaggaggca

SEQ ID NO: 2716240 - RNA, 19 nt, Artificial Sequence
  Description of Artificial Sequence: Synthetic oligonucleotide
cgucaggaggcagguccgc

SEQ ID NO: 2716241 - RNA, 19 nt, Artificial Sequence
  Description of Artificial Sequence: Synthetic oligonucleotide
ccagcagauagaggcucaa

SEQ ID NO: 2716242 - RNA, 19 nt, Artificial Sequence
  Description of Artificial Sequence: Synthetic oligonucleotide
cacccugagcaggucuuau

SEQ ID NO: 2716243 - RNA, 19 nt, Artificial Sequence
  Description of Artificial Sequence: Synthetic oligonucleotide
ggcugccaggcaauggguu

SEQ ID NO: 2716244 - RNA, 19 nt, Artificial Sequence
  Description of Artificial Sequence: Synthetic oligonucleotide
ccuuugguucugagauccu

SEQ ID NO: 2716245 - RNA, 19 nt, Artificial Sequence
  Description of Artificial Sequence: Synthetic oligonucleotide
gggaagcaguucugccuuu

SEQ ID NO: 2716246 - RNA, 19 nt, Artificial Sequence
  Description of Artificial Sequence: Synthetic oligonucleotide
ggauggucuggaaggccuu

SEQ ID NO: 2716247 - RNA, 19 nt, Artificial Sequence
  Description of Artificial Sequence: Synthetic oligonucleotide
cgcagcguggaagcuccuc

SEQ ID NO: 2716248 - RNA, 19 nt, Artificial Sequence
  Description of Artificial Sequence: Synthetic oligonucleotide
cgcggagucgcagcgugga

SEQ ID NO: 2716249 - RNA, 19 nt, Artificial Sequence
  Description of Artificial Sequence: Synthetic oligonucleotide
guccgcggagucgcagcgu

SEQ ID NO: 2716250 - RNA, 19 nt, Artificial Sequence
  Description of Artificial Sequence: Synthetic oligonucleotide
ccuucgcagggaagcaguu

SEQ ID NO: 2716251 - RNA, 19 nt, Artificial Sequence
  Description of Artificial Sequence: Synthetic oligonucleotide
ccaggggcugccaggcaau

SEQ ID NO: 2716252 - RNA, 19 nt, Artificial Sequence
  Description of Artificial Sequence: Synthetic oligonucleotide
gcagguccgcggagucgca

SEQ ID NO: 2716253 - RNA, 19 nt, Artificial Sequence
  Description of Artificial Sequence: Synthetic oligonucleotide
gcggggucgugcgggcguc

SEQ ID NO: 2716254 - RNA, 19 nt, Artificial Sequence
  Description of Artificial Sequence: Synthetic oligonucleotide
cugcagugcccagcuccuu

SEQ ID NO: 2716255 - RNA, 19 nt, Artificial Sequence
  Description of Artificial Sequence: Synthetic oligonucleotide
cgggagacggcugcucgcu

SEQ ID NO: 2716256 - RNA, 19 nt, Artificial Sequence
  Description of Artificial Sequence: Synthetic oligonucleotide
cggggucgugcgggcguca

SEQ ID NO: 2716257 - RNA, 19 nt, Artificial Sequence
  Description of Artificial Sequence: Synthetic oligonucleotide
auuaacuugacauacaugg

SEQ ID NO: 2716258 - RNA, 19 nt, Artificial Sequence
  Description of Artificial Sequence: Synthetic oligonucleotide
uuuuacaauaaauucaugg

SEQ ID NO: 2716259 - RNA, 19 nt, Artificial Sequence
  Description of Artificial Sequence: Synthetic oligonucleotide
uuuuauuuaacaaucuagg

SEQ ID NO: 2716260 - RNA, 19 nt, Artificial Sequence
  Description of Artificial Sequence: Synthetic oligonucleotide
uauuuaacaaucuaggaag

SEQ ID NO: 2716261 - RNA, 19 nt, Artificial Sequence
  Description of Artificial Sequence: Synthetic oligonucleotide
ucagcaaugaacuuuaggg

SEQ ID NO: 2716262 - RNA, 19 nt, Artificial Sequence
  Description of Artificial Sequence: Synthetic oligonucleotide
aagauuauuaacuugacau

SEQ ID NO: 2716263 - RNA, 19 nt, Artificial Sequence
  Description of Artificial Sequence: Synthetic oligonucleotide
aacuacagguauuaaauac

SEQ ID NO: 2716264 - RNA, 19 nt, Artificial Sequence
  Description of Artificial Sequence: Synthetic oligonucleotide
aaaauuaacaguuuauuau

SEQ ID NO: 2716265 - RNA, 19 nt, Artificial Sequence
  Description of Artificial Sequence: Synthetic oligonucleotide
aacuuuaguaguuucuagc

SEQ ID NO: 2716266 - RNA, 19 nt, Artificial Sequence
  Description of Artificial Sequence: Synthetic oligonucleotide
aauuucaacucuguuaugc

SEQ ID NO: 2716267 - RNA, 19 nt, Artificial Sequence
  Description of Artificial Sequence: Synthetic oligonucleotide
ucuguuaugcaaaugacag

SEQ ID NO: 2716268 - RNA, 19 nt, Artificial Sequence
  Description of Artificial Sequence: Synthetic oligonucleotide
uuucauacaggcaacaugc

SEQ ID NO: 2716269 - RNA, 19 nt, Artificial Sequence
  Description of Artificial Sequence: Synthetic oligonucleotide
uuaugcaaaugacagaagg

SEQ ID NO: 2716270 - RNA, 19 nt, Artificial Sequence
  Description of Artificial Sequence: Synthetic oligonucleotide
aauucaggaaucucggugg

SEQ ID NO: 2716271 - RNA, 19 nt, Artificial Sequence
  Description of Artificial Sequence: Synthetic oligonucleotide
uuacaauaaauucauggcc

SEQ ID NO: 2716272 - RNA, 19 nt, Artificial Sequence
  Description of Artificial Sequence: Synthetic oligonucleotide
uucaauuucauacaggcaa

SEQ ID NO: 2716273 - RNA, 19 nt, Artificial Sequence
  Description of Artificial Sequence: Synthetic oligonucleotide
aacuuuaggguucaauuuc

SEQ ID NO: 2716274 - RNA, 19 nt, Artificial Sequence
  Description of Artificial Sequence: Synthetic oligonucleotide
uaacaaucuaggaaguucg

SEQ ID NO: 2716275 - RNA, 19 nt, Artificial Sequence
  Description of Artificial Sequence: Synthetic oligonucleotide
uuauuuaacaaucuaggaa

SEQ ID NO: 2716276 - RNA, 19 nt, Artificial Sequence
  Description of Artificial Sequence: Synthetic oligonucleotide
uuaggguucaauuucauac

SEQ ID NO: 2716277 - RNA, 19 nt, Artificial Sequence
  Description of Artificial Sequence: Synthetic oligonucleotide
aaauuacuaacugaacuac

SEQ ID NO: 2716278 - RNA, 19 nt, Artificial Sequence
  Description of Artificial Sequence: Synthetic oligonucleotide
aaucuaggaaguucgcagc

SEQ ID NO: 2716279 - RNA, 19 nt, Artificial Sequence
  Description of Artificial Sequence: Synthetic oligonucleotide
aauuuauuuuauuuaacaa

SEQ ID NO: 2716280 - RNA, 19 nt, Artificial Sequence
  Description of Artificial Sequence: Synthetic oligonucleotide
uuuaguaguuucuagccag

SEQ ID NO: 2716281 - RNA, 19 nt, Artificial Sequence
  Description of Artificial Sequence: Synthetic oligonucleotide
aacucuguuaugcaaauga

SEQ ID NO: 2716282 - RNA, 19 nt, Artificial Sequence
  Description of Artificial Sequence: Synthetic oligonucleotide
aaaauuacuaacugaacua

SEQ ID NO: 2716283 - RNA, 19 nt, Artificial Sequence
  Description of Artificial Sequence: Synthetic oligonucleotide
uacaauaaauucauggcca

SEQ ID NO: 2716284 - RNA, 19 nt, Artificial Sequence
  Description of Artificial Sequence: Synthetic oligonucleotide
ugggaauucaggaaucucg

SEQ ID NO: 2716285 - RNA, 19 nt, Artificial Sequence
  Description of Artificial Sequence: Synthetic oligonucleotide
aauaaauucauggccauca

SEQ ID NO: 2716286 - RNA, 19 nt, Artificial Sequence
  Description of Artificial Sequence: Synthetic oligonucleotide
ugaacuacagguauuaaau

SEQ ID NO: 2716287 - RNA, 19 nt, Artificial Sequence
  Description of Artificial Sequence: Synthetic oligonucleotide
uguucuuacaaaauccuac

SEQ ID NO: 2716288 - RNA, 19 nt, Artificial Sequence
  Description of Artificial Sequence: Synthetic oligonucleotide
aauacaugcagacuuucga

SEQ ID NO: 2716289 - RNA, 19 nt, Artificial Sequence
  Description of Artificial Sequence: Synthetic oligonucleotide
uuuauuuaacaaucuagga

SEQ ID NO: 2716290 - RNA, 19 nt, Artificial Sequence
  Description of Artificial Sequence: Synthetic oligonucleotide
uccuacuugauccuacagg

SEQ ID NO: 2716291 - RNA, 19 nt, Artificial Sequence
  Description of Artificial Sequence: Synthetic oligonucleotide
uuacuaacugaacuacagg

SEQ ID NO: 2716292 - RNA, 19 nt, Artificial Sequence
  Description of Artificial Sequence: Synthetic oligonucleotide
gauuauuaacuugacauac

SEQ ID NO: 2716293 - RNA, 19 nt, Artificial Sequence
  Description of Artificial Sequence: Synthetic oligonucleotide
aguaguuucuagccagucc

SEQ ID NO: 2716294 - RNA, 19 nt, Artificial Sequence
  Description of Artificial Sequence: Synthetic oligonucleotide
ucuccauccauuauguucu

SEQ ID NO: 2716295 - RNA, 19 nt, Artificial Sequence
  Description of Artificial Sequence: Synthetic oligonucleotide
uacuaacugaacuacaggu

SEQ ID NO: 2716296 - RNA, 19 nt, Artificial Sequence
  Description of Artificial Sequence: Synthetic oligonucleotide
uuaacaguuuauuauaauu

SEQ ID NO: 2716297 - RNA, 19 nt, Artificial Sequence
  Description of Artificial Sequence: Synthetic oligonucleotide
agguauuaaauacugaaaa

SEQ ID NO: 2716298 - RNA, 19 nt, Artificial Sequence
  Description of Artificial Sequence: Synthetic oligonucleotide
uguuaugcaaaugacagaa

SEQ ID NO: 2716299 - RNA, 19 nt, Artificial Sequence
  Description of Artificial Sequence: Synthetic oligonucleotide
uauguucuuacaaaauccu

SEQ ID NO: 2716300 - RNA, 19 nt, Artificial Sequence
  Description of Artificial Sequence: Synthetic oligonucleotide
ugcaauugggaauucagga

SEQ ID NO: 2716301 - RNA, 19 nt, Artificial Sequence
  Description of Artificial Sequence: Synthetic oligonucleotide
gaauucaggaaucucggug

SEQ ID NO: 2716302 - RNA, 19 nt, Artificial Sequence
  Description of Artificial Sequence: Synthetic oligonucleotide
guaguuucuagccaguccc

SEQ ID NO: 2716303 - RNA, 19 nt, Artificial Sequence
  Description of Artificial Sequence: Synthetic oligonucleotide
aggugaaauacaugcagac

SEQ ID NO: 2716304 - RNA, 19 nt, Artificial Sequence
  Description of Artificial Sequence: Synthetic oligonucleotide
aaauucauggccaucagaa

SEQ ID NO: 2716305 - RNA, 19 nt, Artificial Sequence
  Description of Artificial Sequence: Synthetic oligonucleotide
uaugcaaaugacagaagga

SEQ ID NO: 2716306 - RNA, 19 nt, Artificial Sequence
  Description of Artificial Sequence: Synthetic oligonucleotide
aguuuauuauaauuuauuu

SEQ ID NO: 2716307 - RNA, 19 nt, Artificial Sequence
  Description of Artificial Sequence: Synthetic oligonucleotide
guagcaaacaaauuucaac

SEQ ID NO: 2716308 - RNA, 19 nt, Artificial Sequence
  Description of Artificial Sequence: Synthetic oligonucleotide
gguucaauuucauacaggc

SEQ ID NO: 2716309 - RNA, 19 nt, Artificial Sequence
  Description of Artificial Sequence: Synthetic oligonucleotide
acagguauuaaauacugaa

SEQ ID NO: 2716310 - RNA, 19 nt, Artificial Sequence
  Description of Artificial Sequence: Synthetic oligonucleotide
acaaauuucaacucuguua

SEQ ID NO: 2716311 - RNA, 19 nt, Artificial Sequence
  Description of Artificial Sequence: Synthetic oligonucleotide
ugacauacauggcaucagg

SEQ ID NO: 2716312 - RNA, 19 nt, Artificial Sequence
  Description of Artificial Sequence: Synthetic oligonucleotide
auuucauacaggcaacaug

SEQ ID NO: 2716313 - RNA, 19 nt, Artificial Sequence
  Description of Artificial Sequence: Synthetic oligonucleotide
gacagaaggaaucugcuca

SEQ ID NO: 2716314 - RNA, 19 nt, Artificial Sequence
  Description of Artificial Sequence: Synthetic oligonucleotide
aauuugaccucguugguuu

SEQ ID NO: 2716315 - RNA, 19 nt, Artificial Sequence
  Description of Artificial Sequence: Synthetic oligonucleotide
caaucuaggaaguucgcag

SEQ ID NO: 2716316 - RNA, 19 nt, Artificial Sequence
  Description of Artificial Sequence: Synthetic oligonucleotide
ucagaagauuauuaacuug

SEQ ID NO: 2716317 - RNA, 19 nt, Artificial Sequence
  Description of Artificial Sequence: Synthetic oligonucleotide
uuaacuugacauacauggc

SEQ ID NO: 2716318 - RNA, 19 nt, Artificial Sequence
  Description of Artificial Sequence: Synthetic oligonucleotide
uuguuccugauguuaaugc

SEQ ID NO: 2716319 - RNA, 19 nt, Artificial Sequence
  Description of Artificial Sequence: Synthetic oligonucleotide
aaggaaucugcucagcaau

SEQ ID NO: 2716320 - RNA, 19 nt, Artificial Sequence
  Description of Artificial Sequence: Synthetic oligonucleotide
auuacuaacugaacuacag

SEQ ID NO: 2716321 - RNA, 19 nt, Artificial Sequence
  Description of Artificial Sequence: Synthetic oligonucleotide
uuaacaaucuaggaaguuc

SEQ ID NO: 2716322 - RNA, 19 nt, Artificial Sequence
  Description of Artificial Sequence: Synthetic oligonucleotide
cagaagauuauuaacuuga

SEQ ID NO: 2716323 - RNA, 19 nt, Artificial Sequence
  Description of Artificial Sequence: Synthetic oligonucleotide
uuccagugcaauuucaggu

SEQ ID NO: 2716324 - RNA, 19 nt, Artificial Sequence
  Description of Artificial Sequence: Synthetic oligonucleotide
cuacagguauuaaauacug

SEQ ID NO: 2716325 - RNA, 19 nt, Artificial Sequence
  Description of Artificial Sequence: Synthetic oligonucleotide
aaaauuugaccucguuggu

SEQ ID NO: 2716326 - RNA, 19 nt, Artificial Sequence
  Description of Artificial Sequence: Synthetic oligonucleotide
uuauuguuccugauguuaa

SEQ ID NO: 2716327 - RNA, 19 nt, Artificial Sequence
  Description of Artificial Sequence: Synthetic oligonucleotide
uucgauagcacgugcgaag

SEQ ID NO: 2716328 - RNA, 19 nt, Artificial Sequence
  Description of Artificial Sequence: Synthetic oligonucleotide
aaauccuacuugauccuac

SEQ ID NO: 2716329 - RNA, 19 nt, Artificial Sequence
  Description of Artificial Sequence: Synthetic oligonucleotide
uaaauucauggccaucaga

SEQ ID NO: 2716330 - RNA, 19 nt, Artificial Sequence
  Description of Artificial Sequence: Synthetic oligonucleotide
aauugggaauucaggaauc

SEQ ID NO: 2716331 - RNA, 19 nt, Artificial Sequence
  Description of Artificial Sequence: Synthetic oligonucleotide
uguugauguagcaaacaaa

SEQ ID NO: 2716332 - RNA, 19 nt, Artificial Sequence
  Description of Artificial Sequence: Synthetic oligonucleotide
uucaacucuguuaugcaaa

SEQ ID NO: 2716333 - RNA, 19 nt, Artificial Sequence
  Description of Artificial Sequence: Synthetic oligonucleotide
uuccugauguuaaugcaug

SEQ ID NO: 2716334 - RNA, 19 nt, Artificial Sequence
  Description of Artificial Sequence: Synthetic oligonucleotide
gaagauuauuaacuugaca

SEQ ID NO: 2716335 - RNA, 19 nt, Artificial Sequence
  Description of Artificial Sequence: Synthetic oligonucleotide
cugauguuaaugcauguuc

SEQ ID NO: 2716336 - RNA, 19 nt, Artificial Sequence
  Description of Artificial Sequence: Synthetic oligonucleotide
uccagugcaauuucaggug

SEQ ID NO: 2716337 - RNA, 19 nt, Artificial Sequence
  Description of Artificial Sequence: Synthetic oligonucleotide
aacaaucuaggaaguucgc

SEQ ID NO: 2716338 - RNA, 19 nt, Artificial Sequence
  Description of Artificial Sequence: Synthetic oligonucleotide
uguagcaaacaaauuucaa

SEQ ID NO: 2716339 - RNA, 19 nt, Artificial Sequence
  Description of Artificial Sequence: Synthetic oligonucleotide
cucuccauccauuauguuc

SEQ ID NO: 2716340 - RNA, 19 nt, Artificial Sequence
  Description of Artificial Sequence: Synthetic oligonucleotide
gaaguucgcagccaucagc

SEQ ID NO: 2716341 - RNA, 19 nt, Artificial Sequence
  Description of Artificial Sequence: Synthetic oligonucleotide
gacauacauggcaucaggg

SEQ ID NO: 2716342 - RNA, 19 nt, Artificial Sequence
  Description of Artificial Sequence: Synthetic oligonucleotide
uguuaaugcauguucuuuu

SEQ ID NO: 2716343 - RNA, 19 nt, Artificial Sequence
  Description of Artificial Sequence: Synthetic oligonucleotide
uguuccugauguuaaugca

SEQ ID NO: 2716344 - RNA, 19 nt, Artificial Sequence
  Description of Artificial Sequence: Synthetic oligonucleotide
aggguucaauuucauacag

SEQ ID NO: 2716345 - RNA, 19 nt, Artificial Sequence
  Description of Artificial Sequence: Synthetic oligonucleotide
uaggguucaauuucauaca

SEQ ID NO: 2716346 - RNA, 19 nt, Artificial Sequence
  Description of Artificial Sequence: Synthetic oligonucleotide
gaccuuguaggugaaauac

SEQ ID NO: 2716347 - RNA, 19 nt, Artificial Sequence
  Description of Artificial Sequence: Synthetic oligonucleotide
ugauccuacaggaacuuua

SEQ ID NO: 2716348 - RNA, 19 nt, Artificial Sequence
  Description of Artificial Sequence: Synthetic oligonucleotide
uuucaggugcaauugggaa

SEQ ID NO: 2716349 - RNA, 19 nt, Artificial Sequence
  Description of Artificial Sequence: Synthetic oligonucleotide
aauccuacuugauccuaca

SEQ ID NO: 2716350 - RNA, 19 nt, Artificial Sequence
  Description of Artificial Sequence: Synthetic oligonucleotide
auuaacaguuuauuauaau

SEQ ID NO: 2716351 - RNA, 19 nt, Artificial Sequence
  Description of Artificial Sequence: Synthetic oligonucleotide
auaaauucauggccaucag

SEQ ID NO: 2716352 - RNA, 19 nt, Artificial Sequence
  Description of Artificial Sequence: Synthetic oligonucleotide
agauuauuaacuugacaua

SEQ ID NO: 2716353 - RNA, 19 nt, Artificial Sequence
  Description of Artificial Sequence: Synthetic oligonucleotide
ccuacaggaacuuuaguag

SEQ ID NO: 2716354 - RNA, 19 nt, Artificial Sequence
  Description of Artificial Sequence: Synthetic oligonucleotide
aucagaagauuauuaacuu

SEQ ID NO: 2716355 - RNA, 19 nt, Artificial Sequence
  Description of Artificial Sequence: Synthetic oligonucleotide
ugcaaaugacagaaggaau

SEQ ID NO: 2716356 - RNA, 19 nt, Artificial Sequence
  Description of Artificial Sequence: Synthetic oligonucleotide
auuucaacucuguuaugca

SEQ ID NO: 2716357 - RNA, 19 nt, Artificial Sequence
  Description of Artificial Sequence: Synthetic oligonucleotide
aauuacuaacugaacuaca

SEQ ID NO: 2716358 - RNA, 19 nt, Artificial Sequence
  Description of Artificial Sequence: Synthetic oligonucleotide
caauuucaggugcaauugg

SEQ ID NO: 2716359 - RNA, 19 nt, Artificial Sequence
  Description of Artificial Sequence: Synthetic oligonucleotide
aaauuucaacucuguuaug

SEQ ID NO: 2716360 - RNA, 19 nt, Artificial Sequence
  Description of Artificial Sequence: Synthetic oligonucleotide
acaggcaacaugcuauaug

SEQ ID NO: 2716361 - RNA, 19 nt, Artificial Sequence
  Description of Artificial Sequence: Synthetic oligonucleotide
aacauggccuuuuauuguu

SEQ ID NO: 2716362 - RNA, 19 nt, Artificial Sequence
  Description of Artificial Sequence: Synthetic oligonucleotide
agaagauuauuaacuugac

SEQ ID NO: 2716363 - RNA, 19 nt, Artificial Sequence
  Description of Artificial Sequence: Synthetic oligonucleotide
agaaggaaucugcucagca

SEQ ID NO: 2716364 - RNA, 19 nt, Artificial Sequence
  Description of Artificial Sequence: Synthetic oligonucleotide
uaguuucuagccagucccg

SEQ ID NO: 2716365 - RNA, 19 nt, Artificial Sequence
  Description of Artificial Sequence: Synthetic oligonucleotide
uuucaacucuguuaugcaa

SEQ ID NO: 2716366 - RNA, 19 nt, Artificial Sequence
  Description of Artificial Sequence: Synthetic oligonucleotide
uacagguauuaaauacuga

SEQ ID NO: 2716367 - RNA, 19 nt, Artificial Sequence
  Description of Artificial Sequence: Synthetic oligonucleotide
acagaaggaaucugcucag

SEQ ID NO: 2716368 - RNA, 19 nt, Artificial Sequence
  Description of Artificial Sequence: Synthetic oligonucleotide
gauccuacaggaacuuuag

SEQ ID NO: 2716369 - RNA, 19 nt, Artificial Sequence
  Description of Artificial Sequence: Synthetic oligonucleotide
ugguccacucaacauggcc

SEQ ID NO: 2716370 - RNA, 19 nt, Artificial Sequence
  Description of Artificial Sequence: Synthetic oligonucleotide
aaguucgcagccaucagca

SEQ ID NO: 2716371 - RNA, 19 nt, Artificial Sequence
  Description of Artificial Sequence: Synthetic oligonucleotide
aaaugacagaaggaaucug

SEQ ID NO: 2716372 - RNA, 19 nt, Artificial Sequence
  Description of Artificial Sequence: Synthetic oligonucleotide
ucgauagcacgugcgaagg

SEQ ID NO: 2716373 - RNA, 19 nt, Artificial Sequence
  Description of Artificial Sequence: Synthetic oligonucleotide
caaauuucaacucuguuau

SEQ ID NO: 2716374 - RNA, 19 nt, Artificial Sequence
  Description of Artificial Sequence: Synthetic oligonucleotide
acuacagguauuaaauacu

SEQ ID NO: 2716375 - RNA, 19 nt, Artificial Sequence
  Description of Artificial Sequence: Synthetic oligonucleotide
guuaguguagcggaccuug

SEQ ID NO: 2716376 - RNA, 19 nt, Artificial Sequence
  Description of Artificial Sequence: Synthetic oligonucleotide
acuugacauacauggcauc

SEQ ID NO: 2716377 - RNA, 19 nt, Artificial Sequence
  Description of Artificial Sequence: Synthetic oligonucleotide
cauagguuuucuccucucc

SEQ ID NO: 2716378 - RNA, 19 nt, Artificial Sequence
  Description of Artificial Sequence: Synthetic oligonucleotide
gcagacuuucgauagcacg

SEQ ID NO: 2716379 - RNA, 19 nt, Artificial Sequence
  Description of Artificial Sequence: Synthetic oligonucleotide
caucagggccuucacagcc

SEQ ID NO: 2716380 - RNA, 19 nt, Artificial Sequence
  Description of Artificial Sequence: Synthetic oligonucleotide
auacaugcagacuuucgau

SEQ ID NO: 2716381 - RNA, 19 nt, Artificial Sequence
  Description of Artificial Sequence: Synthetic oligonucleotide
cuuguaggugaaauacaug

SEQ ID NO: 2716382 - RNA, 19 nt, Artificial Sequence
  Description of Artificial Sequence: Synthetic oligonucleotide
augcaaaugacagaaggaa

SEQ ID NO: 2716383 - RNA, 19 nt, Artificial Sequence
  Description of Artificial Sequence: Synthetic oligonucleotide
gaccucguugguuucauuc

SEQ ID NO: 2716384 - RNA, 19 nt, Artificial Sequence
  Description of Artificial Sequence: Synthetic oligonucleotide
aguuucuagccagucccgc

SEQ ID NO: 2716385 - RNA, 19 nt, Artificial Sequence
  Description of Artificial Sequence: Synthetic oligonucleotide
acucuguuaugcaaaugac

SEQ ID NO: 2716386 - RNA, 19 nt, Artificial Sequence
  Description of Artificial Sequence: Synthetic oligonucleotide
acaauaaauucauggccau

SEQ ID NO: 2716387 - RNA, 19 nt, Artificial Sequence
  Description of Artificial Sequence: Synthetic oligonucleotide
uuaguaguuucuagccagu

SEQ ID NO: 2716388 - RNA, 19 nt, Artificial Sequence
  Description of Artificial Sequence: Synthetic oligonucleotide
ugcucagcaaugaacuuua

SEQ ID NO: 2716389 - RNA, 19 nt, Artificial Sequence
  Description of Artificial Sequence: Synthetic oligonucleotide
auuguuccugauguuaaug

SEQ ID NO: 2716390 - RNA, 19 nt, Artificial Sequence
  Description of Artificial Sequence: Synthetic oligonucleotide
uucaggugcaauugggaau

SEQ ID NO: 2716391 - RNA, 19 nt, Artificial Sequence
  Description of Artificial Sequence: Synthetic oligonucleotide
aacugaacuacagguauua

SEQ ID NO: 2716392 - RNA, 19 nt, Artificial Sequence
  Description of Artificial Sequence: Synthetic oligonucleotide
uuuaggguucaauuucaua

SEQ ID NO: 2716393 - RNA, 19 nt, Artificial Sequence
  Description of Artificial Sequence: Synthetic oligonucleotide
uacaugcagacuuucgaua

SEQ ID NO: 2716394 - RNA, 19 nt, Artificial Sequence
  Description of Artificial Sequence: Synthetic oligonucleotide
acuuucgauagcacgugcg

SEQ ID NO: 2716395 - RNA, 19 nt, Artificial Sequence
  Description of Artificial Sequence: Synthetic oligonucleotide
ucguugguuucauucucag

SEQ ID NO: 2716396 - RNA, 19 nt, Artificial Sequence
  Description of Artificial Sequence: Synthetic oligonucleotide
cucuguuaugcaaaugaca

SEQ ID NO: 2716397 - RNA, 19 nt, Artificial Sequence
  Description of Artificial Sequence: Synthetic oligonucleotide
uagcggaccuuguagguga

SEQ ID NO: 2716398 - RNA, 19 nt, Artificial Sequence
  Description of Artificial Sequence: Synthetic oligonucleotide
ucaacucuguuaugcaaau

SEQ ID NO: 2716399 - RNA, 19 nt, Artificial Sequence
  Description of Artificial Sequence: Synthetic oligonucleotide
ggagcuguuaguguagcgg

SEQ ID NO: 2716400 - RNA, 19 nt, Artificial Sequence
  Description of Artificial Sequence: Synthetic oligonucleotide
ggcaacaugcuauauguga

SEQ ID NO: 2716401 - RNA, 19 nt, Artificial Sequence
  Description of Artificial Sequence: Synthetic oligonucleotide
gugcaauugggaauucagg

SEQ ID NO: 2716402 - RNA, 19 nt, Artificial Sequence
  Description of Artificial Sequence: Synthetic oligonucleotide
auuauuaacuugacauaca

SEQ ID NO: 2716403 - RNA, 19 nt, Artificial Sequence
  Description of Artificial Sequence: Synthetic oligonucleotide
gaaggaaucugcucagcaa

SEQ ID NO: 2716404 - RNA, 19 nt, Artificial Sequence
  Description of Artificial Sequence: Synthetic oligonucleotide
uucgcagccaucagcaguu

SEQ ID NO: 2716405 - RNA, 19 nt, Artificial Sequence
  Description of Artificial Sequence: Synthetic oligonucleotide
uggccuuuuauuguuccug

SEQ ID NO: 2716406 - RNA, 19 nt, Artificial Sequence
  Description of Artificial Sequence: Synthetic oligonucleotide
cuuuaguaguuucuagcca

SEQ ID NO: 2716407 - RNA, 19 nt, Artificial Sequence
  Description of Artificial Sequence: Synthetic oligonucleotide
uggagcuguuaguguagcg

SEQ ID NO: 2716408 - RNA, 19 nt, Artificial Sequence
  Description of Artificial Sequence: Synthetic oligonucleotide
ugacagaaggaaucugcuc

SEQ ID NO: 2716409 - RNA, 19 nt, Artificial Sequence
  Description of Artificial Sequence: Synthetic oligonucleotide
uucauacaggcaacaugcu

SEQ ID NO: 2716410 - RNA, 19 nt, Artificial Sequence
  Description of Artificial Sequence: Synthetic oligonucleotide
auuuaacaaucuaggaagu

SEQ ID NO: 2716411 - RNA, 19 nt, Artificial Sequence
  Description of Artificial Sequence: Synthetic oligonucleotide
gauagcacgugcgaaggga

SEQ ID NO: 2716412 - RNA, 19 nt, Artificial Sequence
  Description of Artificial Sequence: Synthetic oligonucleotide
aaacugcccugguccacuc

SEQ ID NO: 2716413 - RNA, 19 nt, Artificial Sequence
  Description of Artificial Sequence: Synthetic oligonucleotide
ucuagccagucccgcagcc

SEQ ID NO: 2716414 - RNA, 19 nt, Artificial Sequence
  Description of Artificial Sequence: Synthetic oligonucleotide
auccuacuugauccuacag

SEQ ID NO: 2716415 - RNA, 19 nt, Artificial Sequence
  Description of Artificial Sequence: Synthetic oligonucleotide
gaacuacagguauuaaaua

SEQ ID NO: 2716416 - RNA, 19 nt, Artificial Sequence
  Description of Artificial Sequence: Synthetic oligonucleotide
ugguuucauucucagcaaa

SEQ ID NO: 2716417 - RNA, 19 nt, Artificial Sequence
  Description of Artificial Sequence: Synthetic oligonucleotide
cugaacuacagguauuaaa

SEQ ID NO: 2716418 - RNA, 19 nt, Artificial Sequence
  Description of Artificial Sequence: Synthetic oligonucleotide
gacuuucgauagcacgugc

SEQ ID NO: 2716419 - RNA, 19 nt, Artificial Sequence
  Description of Artificial Sequence: Synthetic oligonucleotide
accucguugguuucauucu

SEQ ID NO: 2716420 - RNA, 19 nt, Artificial Sequence
  Description of Artificial Sequence: Synthetic oligonucleotide
acaaucuaggaaguucgca

SEQ ID NO: 2716421 - RNA, 19 nt, Artificial Sequence
  Description of Artificial Sequence: Synthetic oligonucleotide
ggugcaauugggaauucag

SEQ ID NO: 2716422 - RNA, 19 nt, Artificial Sequence
  Description of Artificial Sequence: Synthetic oligonucleotide
ugcgaagggaucucucuaa

SEQ ID NO: 2716423 - RNA, 19 nt, Artificial Sequence
  Description of Artificial Sequence: Synthetic oligonucleotide
acuugauccuacaggaacu

SEQ ID NO: 2716424 - RNA, 19 nt, Artificial Sequence
  Description of Artificial Sequence: Synthetic oligonucleotide
gcaaaugacagaaggaauc

SEQ ID NO: 2716425 - RNA, 19 nt, Artificial Sequence
  Description of Artificial Sequence: Synthetic oligonucleotide
ccuacuugauccuacagga

SEQ ID NO: 2716426 - RNA, 19 nt, Artificial Sequence
  Description of Artificial Sequence: Synthetic oligonucleotide
cauucucagcaaacugccc

SEQ ID NO: 2716427 - RNA, 19 nt, Artificial Sequence
  Description of Artificial Sequence: Synthetic oligonucleotide
acuuuaggguucaauuuca

SEQ ID NO: 2716428 - RNA, 19 nt, Artificial Sequence
  Description of Artificial Sequence: Synthetic oligonucleotide
auguagcaaacaaauuuca

SEQ ID NO: 2716429 - RNA, 19 nt, Artificial Sequence
  Description of Artificial Sequence: Synthetic oligonucleotide
aaaauccuacuugauccua

SEQ ID NO: 2716430 - RNA, 19 nt, Artificial Sequence
  Description of Artificial Sequence: Synthetic oligonucleotide
ccugguccacucaacaugg

SEQ ID NO: 2716431 - RNA, 19 nt, Artificial Sequence
  Description of Artificial Sequence: Synthetic oligonucleotide
ugcccugguccacucaaca

SEQ ID NO: 2716432 - RNA, 19 nt, Artificial Sequence
  Description of Artificial Sequence: Synthetic oligonucleotide
accauagguuuucuccucu

SEQ ID NO: 2716433 - RNA, 19 nt, Artificial Sequence
  Description of Artificial Sequence: Synthetic oligonucleotide
guuaugcaaaugacagaag

SEQ ID NO: 2716434 - RNA, 19 nt, Artificial Sequence
  Description of Artificial Sequence: Synthetic oligonucleotide
caugcagacuuucgauagc

SEQ ID NO: 2716435 - RNA, 19 nt, Artificial Sequence
  Description of Artificial Sequence: Synthetic oligonucleotide
caggcaacaugcuauaugu

SEQ ID NO: 2716436 - RNA, 19 nt, Artificial Sequence
  Description of Artificial Sequence: Synthetic oligonucleotide
gaacuuuaggguucaauuu

SEQ ID NO: 2716437 - RNA, 19 nt, Artificial Sequence
  Description of Artificial Sequence: Synthetic oligonucleotide
auuucaggugcaauuggga

SEQ ID NO: 2716438 - RNA, 19 nt, Artificial Sequence
  Description of Artificial Sequence: Synthetic oligonucleotide
cuaacugaacuacagguau

SEQ ID NO: 2716439 - RNA, 19 nt, Artificial Sequence
  Description of Artificial Sequence: Synthetic oligonucleotide
uaacugaacuacagguauu

SEQ ID NO: 2716440 - RNA, 19 nt, Artificial Sequence
  Description of Artificial Sequence: Synthetic oligonucleotide
uuaguguagcggaccuugu

SEQ ID NO: 2716441 - RNA, 19 nt, Artificial Sequence
  Description of Artificial Sequence: Synthetic oligonucleotide
auugggaauucaggaaucu

SEQ ID NO: 2716442 - RNA, 19 nt, Artificial Sequence
  Description of Artificial Sequence: Synthetic oligonucleotide
auacauggcaucagggccu

SEQ ID NO: 2716443 - RNA, 19 nt, Artificial Sequence
  Description of Artificial Sequence: Synthetic oligonucleotide
cucgguggagcuguuagug

SEQ ID NO: 2716444 - RNA, 19 nt, Artificial Sequence
  Description of Artificial Sequence: Synthetic oligonucleotide
cuuucgauagcacgugcga

SEQ ID NO: 2716445 - RNA, 19 nt, Artificial Sequence
  Description of Artificial Sequence: Synthetic oligonucleotide
uuucgauagcacgugcgaa

SEQ ID NO: 2716446 - RNA, 19 nt, Artificial Sequence
  Description of Artificial Sequence: Synthetic oligonucleotide
auucaggaaucucggugga

SEQ ID NO: 2716447 - RNA, 19 nt, Artificial Sequence
  Description of Artificial Sequence: Synthetic oligonucleotide
augcagacuuucgauagca

SEQ ID NO: 2716448 - RNA, 19 nt, Artificial Sequence
  Description of Artificial Sequence: Synthetic oligonucleotide
agcaguuccagugcaauuu

SEQ ID NO: 2716449 - RNA, 19 nt, Artificial Sequence
  Description of Artificial Sequence: Synthetic oligonucleotide
aggaacuuuaguaguuucu

SEQ ID NO: 2716450 - RNA, 19 nt, Artificial Sequence
  Description of Artificial Sequence: Synthetic oligonucleotide
ugcagacuuucgauagcac

SEQ ID NO: 2716451 - RNA, 19 nt, Artificial Sequence
  Description of Artificial Sequence: Synthetic oligonucleotide
augacagaaggaaucugcu

SEQ ID NO: 2716452 - RNA, 19 nt, Artificial Sequence
  Description of Artificial Sequence: Synthetic oligonucleotide
ccuuuuauuguuccugaug

SEQ ID NO: 2716453 - RNA, 19 nt, Artificial Sequence
  Description of Artificial Sequence: Synthetic oligonucleotide
uucuccucuccauccauua

SEQ ID NO: 2716454 - RNA, 19 nt, Artificial Sequence
  Description of Artificial Sequence: Synthetic oligonucleotide
acuaacugaacuacaggua

SEQ ID NO: 2716455 - RNA, 19 nt, Artificial Sequence
  Description of Artificial Sequence: Synthetic oligonucleotide
uuugaccucguugguuuca

SEQ ID NO: 2716456 - RNA, 19 nt, Artificial Sequence
  Description of Artificial Sequence: Synthetic oligonucleotide
agacuuucgauagcacgug

SEQ ID NO: 2716457 - RNA, 19 nt, Artificial Sequence
  Description of Artificial Sequence: Synthetic oligonucleotide
auguuaaugcauguucuuu

SEQ ID NO: 2716458 - RNA, 19 nt, Artificial Sequence
  Description of Artificial Sequence: Synthetic oligonucleotide
agcaaacugcccuggucca

SEQ ID NO: 2716459 - RNA, 19 nt, Artificial Sequence
  Description of Artificial Sequence: Synthetic oligonucleotide
cagacuuucgauagcacgu

SEQ ID NO: 2716460 - RNA, 19 nt, Artificial Sequence
  Description of Artificial Sequence: Synthetic oligonucleotide
ucagcaguuccagugcaau

SEQ ID NO: 2716461 - RNA, 19 nt, Artificial Sequence
  Description of Artificial Sequence: Synthetic oligonucleotide
uucaggaaucucgguggag

SEQ ID NO: 2716462 - RNA, 19 nt, Artificial Sequence
  Description of Artificial Sequence: Synthetic oligonucleotide
ucagggccuucacagccac

SEQ ID NO: 2716463 - RNA, 19 nt, Artificial Sequence
  Description of Artificial Sequence: Synthetic oligonucleotide
gcaaacaaauuucaacucu

SEQ ID NO: 2716464 - RNA, 19 nt, Artificial Sequence
  Description of Artificial Sequence: Synthetic oligonucleotide
uaguguagcggaccuugua

SEQ ID NO: 2716465 - RNA, 19 nt, Artificial Sequence
  Description of Artificial Sequence: Synthetic oligonucleotide
aguucgcagccaucagcag

SEQ ID NO: 2716466 - RNA, 19 nt, Artificial Sequence
  Description of Artificial Sequence: Synthetic oligonucleotide
augaacuuuaggguucaau

SEQ ID NO: 2716467 - RNA, 19 nt, Artificial Sequence
  Description of Artificial Sequence: Synthetic oligonucleotide
agccguguccccacguagc

SEQ ID NO: 2716468 - RNA, 19 nt, Artificial Sequence
  Description of Artificial Sequence: Synthetic oligonucleotide
agcacgugcgaagggaucu

SEQ ID NO: 2716469 - RNA, 19 nt, Artificial Sequence
  Description of Artificial Sequence: Synthetic oligonucleotide
caauugggaauucaggaau

SEQ ID NO: 2716470 - RNA, 19 nt, Artificial Sequence
  Description of Artificial Sequence: Synthetic oligonucleotide
agccaccgcagccgugucc

SEQ ID NO: 2716471 - RNA, 19 nt, Artificial Sequence
  Description of Artificial Sequence: Synthetic oligonucleotide
guuucuagccagucccgca

SEQ ID NO: 2716472 - RNA, 19 nt, Artificial Sequence
  Description of Artificial Sequence: Synthetic oligonucleotide
gauguuaaugcauguucuu

SEQ ID NO: 2716473 - RNA, 19 nt, Artificial Sequence
  Description of Artificial Sequence: Synthetic oligonucleotide
ucgguggagcuguuagugu

SEQ ID NO: 2716474 - RNA, 19 nt, Artificial Sequence
  Description of Artificial Sequence: Synthetic oligonucleotide
auacaggcaacaugcuaua

SEQ ID NO: 2716475 - RNA, 19 nt, Artificial Sequence
  Description of Artificial Sequence: Synthetic oligonucleotide
caauaaauucauggccauc

SEQ ID NO: 2716476 - RNA, 19 nt, Artificial Sequence
  Description of Artificial Sequence: Synthetic oligonucleotide
uugggaauucaggaaucuc

SEQ ID NO: 2716477 - RNA, 19 nt, Artificial Sequence
  Description of Artificial Sequence: Synthetic oligonucleotide
accgcagccguguccccac

SEQ ID NO: 2716478 - RNA, 19 nt, Artificial Sequence
  Description of Artificial Sequence: Synthetic oligonucleotide
ucucgguggagcuguuagu

SEQ ID NO: 2716479 - RNA, 19 nt, Artificial Sequence
  Description of Artificial Sequence: Synthetic oligonucleotide
uaguaguuucuagccaguc

SEQ ID NO: 2716480 - RNA, 19 nt, Artificial Sequence
  Description of Artificial Sequence: Synthetic oligonucleotide
gcaauugggaauucaggaa

SEQ ID NO: 2716481 - RNA, 19 nt, Artificial Sequence
  Description of Artificial Sequence: Synthetic oligonucleotide
ucugcucagcaaugaacuu

SEQ ID NO: 2716482 - RNA, 19 nt, Artificial Sequence
  Description of Artificial Sequence: Synthetic oligonucleotide
cagcaaugaacuuuagggu

SEQ ID NO: 2716483 - RNA, 19 nt, Artificial Sequence
  Description of Artificial Sequence: Synthetic oligonucleotide
guuucauucucagcaaacu

SEQ ID NO: 2716484 - RNA, 19 nt, Artificial Sequence
  Description of Artificial Sequence: Synthetic oligonucleotide
ggguucaauuucauacagg

SEQ ID NO: 2716485 - RNA, 19 nt, Artificial Sequence
  Description of Artificial Sequence: Synthetic oligonucleotide
gccaucagaagauuauuaa

SEQ ID NO: 2716486 - RNA, 19 nt, Artificial Sequence
  Description of Artificial Sequence: Synthetic oligonucleotide
cucguugguuucauucuca

SEQ ID NO: 2716487 - RNA, 19 nt, Artificial Sequence
  Description of Artificial Sequence: Synthetic oligonucleotide
auccuacaggaacuuuagu

SEQ ID NO: 2716488 - RNA, 19 nt, Artificial Sequence
  Description of Artificial Sequence: Synthetic oligonucleotide
acucaacauggccuuuuau

SEQ ID NO: 2716489 - RNA, 19 nt, Artificial Sequence
  Description of Artificial Sequence: Synthetic oligonucleotide
aggaaucugcucagcaaug

SEQ ID NO: 2716490 - RNA, 19 nt, Artificial Sequence
  Description of Artificial Sequence: Synthetic oligonucleotide
guagcggaccuuguaggug

SEQ ID NO: 2716491 - RNA, 19 nt, Artificial Sequence
  Description of Artificial Sequence: Synthetic oligonucleotide
gguuucauucucagcaaac

SEQ ID NO: 2716492 - RNA, 19 nt, Artificial Sequence
  Description of Artificial Sequence: Synthetic oligonucleotide
caccauagguuuucuccuc

SEQ ID NO: 2716493 - RNA, 19 nt, Artificial Sequence
  Description of Artificial Sequence: Synthetic oligonucleotide
ccagugcaauuucaggugc

SEQ ID NO: 2716494 - RNA, 19 nt, Artificial Sequence
  Description of Artificial Sequence: Synthetic oligonucleotide
uaggaaguucgcagccauc

SEQ ID NO: 2716495 - RNA, 19 nt, Artificial Sequence
  Description of Artificial Sequence: Synthetic oligonucleotide
auggccaucagaagauuau

SEQ ID NO: 2716496 - RNA, 19 nt, Artificial Sequence
  Description of Artificial Sequence: Synthetic oligonucleotide
acaggaacuuuaguaguuu

SEQ ID NO: 2716497 - RNA, 19 nt, Artificial Sequence
  Description of Artificial Sequence: Synthetic oligonucleotide
accuuguaggugaaauaca

SEQ ID NO: 2716498 - RNA, 19 nt, Artificial Sequence
  Description of Artificial Sequence: Synthetic oligonucleotide
caaaauccuacuugauccu

SEQ ID NO: 2716499 - RNA, 19 nt, Artificial Sequence
  Description of Artificial Sequence: Synthetic oligonucleotide
gcuguuaguguagcggacc

SEQ ID NO: 2716500 - RNA, 19 nt, Artificial Sequence
  Description of Artificial Sequence: Synthetic oligonucleotide
gcaaugaacuuuaggguuc

SEQ ID NO: 2716501 - RNA, 19 nt, Artificial Sequence
  Description of Artificial Sequence: Synthetic oligonucleotide
uagcacgugcgaagggauc

SEQ ID NO: 2716502 - RNA, 19 nt, Artificial Sequence
  Description of Artificial Sequence: Synthetic oligonucleotide
ggaaguucgcagccaucag

SEQ ID NO: 2716503 - RNA, 19 nt, Artificial Sequence
  Description of Artificial Sequence: Synthetic oligonucleotide
auguucuuacaaaauccua

SEQ ID NO: 2716504 - RNA, 19 nt, Artificial Sequence
  Description of Artificial Sequence: Synthetic oligonucleotide
cagaaggaaucugcucagc

SEQ ID NO: 2716505 - RNA, 19 nt, Artificial Sequence
  Description of Artificial Sequence: Synthetic oligonucleotide
cagccguguccccacguag

SEQ ID NO: 2716506 - RNA, 19 nt, Artificial Sequence
  Description of Artificial Sequence: Synthetic oligonucleotide
aggaaucucgguggagcug

SEQ ID NO: 2716507 - RNA, 19 nt, Artificial Sequence
  Description of Artificial Sequence: Synthetic oligonucleotide
gguggagcuguuaguguag

SEQ ID NO: 2716508 - RNA, 19 nt, Artificial Sequence
  Description of Artificial Sequence: Synthetic oligonucleotide
auagcacgugcgaagggau

SEQ ID NO: 2716509 - RNA, 19 nt, Artificial Sequence
  Description of Artificial Sequence: Synthetic oligonucleotide
caaugaacuuuaggguuca

SEQ ID NO: 2716510 - RNA, 19 nt, Artificial Sequence
  Description of Artificial Sequence: Synthetic oligonucleotide
caacucuguuaugcaaaug

SEQ ID NO: 2716511 - RNA, 19 nt, Artificial Sequence
  Description of Artificial Sequence: Synthetic oligonucleotide
cuacuugauccuacaggaa

SEQ ID NO: 2716512 - RNA, 19 nt, Artificial Sequence
  Description of Artificial Sequence: Synthetic oligonucleotide
guggagcuguuaguguagc

SEQ ID NO: 2716513 - RNA, 19 nt, Artificial Sequence
  Description of Artificial Sequence: Synthetic oligonucleotide
uggccaucagaagauuauu

SEQ ID NO: 2716514 - RNA, 19 nt, Artificial Sequence
  Description of Artificial Sequence: Synthetic oligonucleotide
cugguccacucaacauggc

SEQ ID NO: 2716515 - RNA, 19 nt, Artificial Sequence
  Description of Artificial Sequence: Synthetic oligonucleotide
acugaacuacagguauuaa

SEQ ID NO: 2716516 - RNA, 19 nt, Artificial Sequence
  Description of Artificial Sequence: Synthetic oligonucleotide
uacaggcaacaugcuauau

SEQ ID NO: 2716517 - RNA, 19 nt, Artificial Sequence
  Description of Artificial Sequence: Synthetic oligonucleotide
aaugaacuuuaggguucaa

SEQ ID NO: 2716518 - RNA, 19 nt, Artificial Sequence
  Description of Artificial Sequence: Synthetic oligonucleotide
caguuccagugcaauuuca

SEQ ID NO: 2716519 - RNA, 19 nt, Artificial Sequence
  Description of Artificial Sequence: Synthetic oligonucleotide
aggugcaauugggaauuca

SEQ ID NO: 2716520 - RNA, 19 nt, Artificial Sequence
  Description of Artificial Sequence: Synthetic oligonucleotide
cagugcaauuucaggugca

SEQ ID NO: 2716521 - RNA, 19 nt, Artificial Sequence
  Description of Artificial Sequence: Synthetic oligonucleotide
uugaccucguugguuucau

SEQ ID NO: 2716522 - RNA, 19 nt, Artificial Sequence
  Description of Artificial Sequence: Synthetic oligonucleotide
guuccugauguuaaugcau

SEQ ID NO: 2716523 - RNA, 19 nt, Artificial Sequence
  Description of Artificial Sequence: Synthetic oligonucleotide
ggaaucugcucagcaauga

SEQ ID NO: 2716524 - RNA, 19 nt, Artificial Sequence
  Description of Artificial Sequence: Synthetic oligonucleotide
agucccgcagccaccgcag

SEQ ID NO: 2716525 - RNA, 19 nt, Artificial Sequence
  Description of Artificial Sequence: Synthetic oligonucleotide
aggcaacaugcuauaugug

SEQ ID NO: 2716526 - RNA, 19 nt, Artificial Sequence
  Description of Artificial Sequence: Synthetic oligonucleotide
uugauccuacaggaacuuu

SEQ ID NO: 2716527 - RNA, 19 nt, Artificial Sequence
  Description of Artificial Sequence: Synthetic oligonucleotide
uguuaguguagcggaccuu

SEQ ID NO: 2716528 - RNA, 19 nt, Artificial Sequence
  Description of Artificial Sequence: Synthetic oligonucleotide
acgugcgaagggaucucuc

SEQ ID NO: 2716529 - RNA, 19 nt, Artificial Sequence
  Description of Artificial Sequence: Synthetic oligonucleotide
aaucucgguggagcuguua

SEQ ID NO: 2716530 - RNA, 19 nt, Artificial Sequence
  Description of Artificial Sequence: Synthetic oligonucleotide
ggugaaauacaugcagacu

SEQ ID NO: 2716531 - RNA, 19 nt, Artificial Sequence
  Description of Artificial Sequence: Synthetic oligonucleotide
gugcgaagggaucucucua

SEQ ID NO: 2716532 - RNA, 19 nt, Artificial Sequence
  Description of Artificial Sequence: Synthetic oligonucleotide
uccauccauuauguucuua

SEQ ID NO: 2716533 - RNA, 19 nt, Artificial Sequence
  Description of Artificial Sequence: Synthetic oligonucleotide
cuguuaguguagcggaccu

SEQ ID NO: 2716534 - RNA, 19 nt, Artificial Sequence
  Description of Artificial Sequence: Synthetic oligonucleotide
gguccacucaacauggccu

SEQ ID NO: 2716535 - RNA, 19 nt, Artificial Sequence
  Description of Artificial Sequence: Synthetic oligonucleotide
ccuuguaggugaaauacau

SEQ ID NO: 2716536 - RNA, 19 nt, Artificial Sequence
  Description of Artificial Sequence: Synthetic oligonucleotide
ggaaucucgguggagcugu

SEQ ID NO: 2716537 - RNA, 19 nt, Artificial Sequence
  Description of Artificial Sequence: Synthetic oligonucleotide
cugcccugguccacucaac

SEQ ID NO: 2716538 - RNA, 19 nt, Artificial Sequence
  Description of Artificial Sequence: Synthetic oligonucleotide
cguugguuucauucucagc

SEQ ID NO: 2716539 - RNA, 19 nt, Artificial Sequence
  Description of Artificial Sequence: Synthetic oligonucleotide
gccaccgcagccguguccc

SEQ ID NO: 2716540 - RNA, 19 nt, Artificial Sequence
  Description of Artificial Sequence: Synthetic oligonucleotide
ggaauucaggaaucucggu

SEQ ID NO: 2716541 - RNA, 19 nt, Artificial Sequence
  Description of Artificial Sequence: Synthetic oligonucleotide
caggaaucucgguggagcu

SEQ ID NO: 2716542 - RNA, 19 nt, Artificial Sequence
  Description of Artificial Sequence: Synthetic oligonucleotide
ggccaucagaagauuauua

SEQ ID NO: 2716543 - RNA, 19 nt, Artificial Sequence
  Description of Artificial Sequence: Synthetic oligonucleotide
ccauagguuuucuccucuc

SEQ ID NO: 2716544 - RNA, 19 nt, Artificial Sequence
  Description of Artificial Sequence: Synthetic oligonucleotide
ugaccucguugguuucauu

SEQ ID NO: 2716545 - RNA, 19 nt, Artificial Sequence
  Description of Artificial Sequence: Synthetic oligonucleotide
cuagccagucccgcagcca

SEQ ID NO: 2716546 - RNA, 19 nt, Artificial Sequence
  Description of Artificial Sequence: Synthetic oligonucleotide
uccacucaacauggccuuu

SEQ ID NO: 2716547 - RNA, 19 nt, Artificial Sequence
  Description of Artificial Sequence: Synthetic oligonucleotide
cgauagcacgugcgaaggg

SEQ ID NO: 2716548 - RNA, 19 nt, Artificial Sequence
  Description of Artificial Sequence: Synthetic oligonucleotide
caaacugcccugguccacu

SEQ ID NO: 2716549 - RNA, 19 nt, Artificial Sequence
  Description of Artificial Sequence: Synthetic oligonucleotide
gcgaagggaucucucuaaa

SEQ ID NO: 2716550 - RNA, 19 nt, Artificial Sequence
  Description of Artificial Sequence: Synthetic oligonucleotide
cuugauccuacaggaacuu

SEQ ID NO: 2716551 - RNA, 19 nt, Artificial Sequence
  Description of Artificial Sequence: Synthetic oligonucleotide
caggugcaauugggaauuc

SEQ ID NO: 2716552 - RNA, 19 nt, Artificial Sequence
  Description of Artificial Sequence: Synthetic oligonucleotide
gcaaacugcccugguccac

SEQ ID NO: 2716553 - RNA, 19 nt, Artificial Sequence
  Description of Artificial Sequence: Synthetic oligonucleotide
cgcagccaucagcaguucc

SEQ ID NO: 2716554 - RNA, 19 nt, Artificial Sequence
  Description of Artificial Sequence: Synthetic oligonucleotide
cgaagggaucucucuaaaa

SEQ ID NO: 2716555 - RNA, 19 nt, Artificial Sequence
  Description of Artificial Sequence: Synthetic oligonucleotide
cagcaguuccagugcaauu

SEQ ID NO: 2716556 - RNA, 19 nt, Artificial Sequence
  Description of Artificial Sequence: Synthetic oligonucleotide
gccuuuuauuguuccugau

SEQ ID NO: 2716557 - RNA, 19 nt, Artificial Sequence
  Description of Artificial Sequence: Synthetic oligonucleotide
caccgcagccgugucccca

SEQ ID NO: 2716558 - RNA, 19 nt, Artificial Sequence
  Description of Artificial Sequence: Synthetic oligonucleotide
cagccaccgcagccguguc

SEQ ID NO: 2716559 - RNA, 19 nt, Artificial Sequence
  Description of Artificial Sequence: Synthetic oligonucleotide
agcggaccuuguaggugaa

SEQ ID NO: 2716560 - RNA, 19 nt, Artificial Sequence
  Description of Artificial Sequence: Synthetic oligonucleotide
gcagccguguccccacgua

SEQ ID NO: 2716561 - RNA, 19 nt, Artificial Sequence
  Description of Artificial Sequence: Synthetic oligonucleotide
cacgugcgaagggaucucu

SEQ ID NO: 2716562 - RNA, 19 nt, Artificial Sequence
  Description of Artificial Sequence: Synthetic oligonucleotide
ccguguccccacguagcgc

SEQ ID NO: 2716563 - RNA, 19 nt, Artificial Sequence
  Description of Artificial Sequence: Synthetic oligonucleotide
cgugcgaagggaucucucu

SEQ ID NO: 2716564 - RNA, 19 nt, Artificial Sequence
  Description of Artificial Sequence: Synthetic oligonucleotide
cacagccaccauagguuuu

SEQ ID NO: 2716565 - RNA, 19 nt, Artificial Sequence
  Description of Artificial Sequence: Synthetic oligonucleotide
ccugauguuaaugcauguu

SEQ ID NO: 2716566 - RNA, 19 nt, Artificial Sequence
  Description of Artificial Sequence: Synthetic oligonucleotide
gcacgugcgaagggaucuc

SEQ ID NO: 2716567 - RNA, 19 nt, Artificial Sequence
  Description of Artificial Sequence: Synthetic oligonucleotide
cuccauccauuauguucuu

SEQ ID NO: 2716568 - RNA, 19 nt, Artificial Sequence
  Description of Artificial Sequence: Synthetic oligonucleotide
gaaucucgguggagcuguu

SEQ ID NO: 2716569 - RNA, 19 nt, Artificial Sequence
  Description of Artificial Sequence: Synthetic oligonucleotide
ccaccgcagccgugucccc

SEQ ID NO: 2716570 - RNA, 19 nt, Artificial Sequence
  Description of Artificial Sequence: Synthetic oligonucleotide
ccgcagccguguccccacg

SEQ ID NO: 2716571 - RNA, 19 nt, Artificial Sequence
  Description of Artificial Sequence: Synthetic oligonucleotide
cggaccuuguaggugaaau

SEQ ID NO: 2716572 - RNA, 19 nt, Artificial Sequence
  Description of Artificial Sequence: Synthetic oligonucleotide
gcggaccuuguaggugaaa

SEQ ID NO: 2716573 - RNA, 19 nt, Artificial Sequence
  Description of Artificial Sequence: Synthetic oligonucleotide
ccacucaacauggccuuuu

SEQ ID NO: 2716574 - RNA, 19 nt, Artificial Sequence
  Description of Artificial Sequence: Synthetic oligonucleotide
ccucuccauccauuauguu

SEQ ID NO: 2716575 - RNA, 19 nt, Artificial Sequence
  Description of Artificial Sequence: Synthetic oligonucleotide
cgcagccguguccccacgu

SEQ ID NO: 2716576 - RNA, 19 nt, Artificial Sequence
  Description of Artificial Sequence: Synthetic oligonucleotide
aaagaaaacacacacacac

SEQ ID NO: 2716577 - RNA, 19 nt, Artificial Sequence
  Description of Artificial Sequence: Synthetic oligonucleotide
aauacggccaucuagauuc

SEQ ID NO: 2716578 - RNA, 19 nt, Artificial Sequence
  Description of Artificial Sequence: Synthetic oligonucleotide
uuacauaucauaaauaaga

SEQ ID NO: 2716579 - RNA, 19 nt, Artificial Sequence
  Description of Artificial Sequence: Synthetic oligonucleotide
aaaacacacacacacacac

SEQ ID NO: 2716580 - RNA, 19 nt, Artificial Sequence
  Description of Artificial Sequence: Synthetic oligonucleotide
aaauaacaaagauucaaac

SEQ ID NO: 2716581 - RNA, 19 nt, Artificial Sequence
  Description of Artificial Sequence: Synthetic oligonucleotide
ugcaauauuauucaugagc

SEQ ID NO: 2716582 - RNA, 19 nt, Artificial Sequence
  Description of Artificial Sequence: Synthetic oligonucleotide
auaaauaagacaucgguug

SEQ ID NO: 2716583 - RNA, 19 nt, Artificial Sequence
  Description of Artificial Sequence: Synthetic oligonucleotide
aauaacaaagauucaaaca

SEQ ID NO: 2716584 - RNA, 19 nt, Artificial Sequence
  Description of Artificial Sequence: Synthetic oligonucleotide
aacacacacacacacacac

SEQ ID NO: 2716585 - RNA, 19 nt, Artificial Sequence
  Description of Artificial Sequence: Synthetic oligonucleotide
agaaaacacacacacacac

SEQ ID NO: 2716586 - RNA, 19 nt, Artificial Sequence
  Description of Artificial Sequence: Synthetic oligonucleotide
uuuauuaagagaaauggua

SEQ ID NO: 2716587 - RNA, 19 nt, Artificial Sequence
  Description of Artificial Sequence: Synthetic oligonucleotide
uaugaauugagaaugacua

SEQ ID NO: 2716588 - RNA, 19 nt, Artificial Sequence
  Description of Artificial Sequence: Synthetic oligonucleotide
acuuuauuaagagaaaugg

SEQ ID NO: 2716589 - RNA, 19 nt, Artificial Sequence
  Description of Artificial Sequence: Synthetic oligonucleotide
uuuaauguacacaagugac

SEQ ID NO: 2716590 - RNA, 19 nt, Artificial Sequence
  Description of Artificial Sequence: Synthetic oligonucleotide
uaucauaaauaagacaucg

SEQ ID NO: 2716591 - RNA, 19 nt, Artificial Sequence
  Description of Artificial Sequence: Synthetic oligonucleotide
aaaauacugaacuuuauua

SEQ ID NO: 2716592 - RNA, 19 nt, Artificial Sequence
  Description of Artificial Sequence: Synthetic oligonucleotide
uucuguaucagaauaagcu

SEQ ID NO: 2716593 - RNA, 19 nt, Artificial Sequence
  Description of Artificial Sequence: Synthetic oligonucleotide
acaaucuuuccacaggugc

SEQ ID NO: 2716594 - RNA, 19 nt, Artificial Sequence
  Description of Artificial Sequence: Synthetic oligonucleotide
uauacuuuacauaguaaag

SEQ ID NO: 2716595 - RNA, 19 nt, Artificial Sequence
  Description of Artificial Sequence: Synthetic oligonucleotide
ucuagauucauaugaauug

SEQ ID NO: 2716596 - RNA, 19 nt, Artificial Sequence
  Description of Artificial Sequence: Synthetic oligonucleotide
uaagacaucgguugaagcg

SEQ ID NO: 2716597 - RNA, 19 nt, Artificial Sequence
  Description of Artificial Sequence: Synthetic oligonucleotide
ucauaaauaagacaucggu

SEQ ID NO: 2716598 - RNA, 19 nt, Artificial Sequence
  Description of Artificial Sequence: Synthetic oligonucleotide
aagauucaaacauuugcuc

SEQ ID NO: 2716599 - RNA, 19 nt, Artificial Sequence
  Description of Artificial Sequence: Synthetic oligonucleotide
uuauuaagagaaaugguac

SEQ ID NO: 2716600 - RNA, 19 nt, Artificial Sequence
  Description of Artificial Sequence: Synthetic oligonucleotide
auuaaauggccaucuauac

SEQ ID NO: 2716601 - RNA, 19 nt, Artificial Sequence
  Description of Artificial Sequence: Synthetic oligonucleotide
uggcuaaacuauuaaaugg

SEQ ID NO: 2716602 - RNA, 19 nt, Artificial Sequence
  Description of Artificial Sequence: Synthetic oligonucleotide
aaaacaguauaccacacau

SEQ ID NO: 2716603 - RNA, 19 nt, Artificial Sequence
  Description of Artificial Sequence: Synthetic oligonucleotide
auacuuuacauaguaaagc

SEQ ID NO: 2716604 - RNA, 19 nt, Artificial Sequence
  Description of Artificial Sequence: Synthetic oligonucleotide
uucauaugaauugagaaug

SEQ ID NO: 2716605 - RNA, 19 nt, Artificial Sequence
  Description of Artificial Sequence: Synthetic oligonucleotide
uuauucaugagcuaauuaa

SEQ ID NO: 2716606 - RNA, 19 nt, Artificial Sequence
  Description of Artificial Sequence: Synthetic oligonucleotide
acuagcacauauaaaaccc

SEQ ID NO: 2716607 - RNA, 19 nt, Artificial Sequence
  Description of Artificial Sequence: Synthetic oligonucleotide
uuuuauaaggggaucuuug

SEQ ID NO: 2716608 - RNA, 19 nt, Artificial Sequence
  Description of Artificial Sequence: Synthetic oligonucleotide
aauauuauucaugagcuaa

SEQ ID NO: 2716609 - RNA, 19 nt, Artificial Sequence
  Description of Artificial Sequence: Synthetic oligonucleotide
augacuagcacauauaaaa

SEQ ID NO: 2716610 - RNA, 19 nt, Artificial Sequence
  Description of Artificial Sequence: Synthetic oligonucleotide
aucagaauaagcuguuuac

SEQ ID NO: 2716611 - RNA, 19 nt, Artificial Sequence
  Description of Artificial Sequence: Synthetic oligonucleotide
aaauacugaacuuuauuaa

SEQ ID NO: 2716612 - RNA, 19 nt, Artificial Sequence
  Description of Artificial Sequence: Synthetic oligonucleotide
aauugagaaugacuagcac

SEQ ID NO: 2716613 - RNA, 19 nt, Artificial Sequence
  Description of Artificial Sequence: Synthetic oligonucleotide
uauaaaacccuagaaaaca

SEQ ID NO: 2716614 - RNA, 19 nt, Artificial Sequence
  Description of Artificial Sequence: Synthetic oligonucleotide
uaaagcuucagcuugugcu

SEQ ID NO: 2716615 - RNA, 19 nt, Artificial Sequence
  Description of Artificial Sequence: Synthetic oligonucleotide
uuaccagccaaccauaugu

SEQ ID NO: 2716616 - RNA, 19 nt, Artificial Sequence
  Description of Artificial Sequence: Synthetic oligonucleotide
acuuacauaucauaaauaa

SEQ ID NO: 2716617 - RNA, 19 nt, Artificial Sequence
  Description of Artificial Sequence: Synthetic oligonucleotide
acugcaauauuauucauga

SEQ ID NO: 2716618 - RNA, 19 nt, Artificial Sequence
  Description of Artificial Sequence: Synthetic oligonucleotide
ucaugagcuaauuaauuag

SEQ ID NO: 2716619 - RNA, 19 nt, Artificial Sequence
  Description of Artificial Sequence: Synthetic oligonucleotide
aaagcuucagcuugugcuc

SEQ ID NO: 2716620 - RNA, 19 nt, Artificial Sequence
  Description of Artificial Sequence: Synthetic oligonucleotide
gagcuaauuaauuagaaaa

SEQ ID NO: 2716621 - RNA, 19 nt, Artificial Sequence
  Description of Artificial Sequence: Synthetic oligonucleotide
uguagaaggcacuaaagcu

SEQ ID NO: 2716622 - RNA, 19 nt, Artificial Sequence
  Description of Artificial Sequence: Synthetic oligonucleotide
uuguagaaggcacuaaagc

SEQ ID NO: 2716623 - RNA, 19 nt, Artificial Sequence
  Description of Artificial Sequence: Synthetic oligonucleotide
cuuuacauaguaaagcauc

SEQ ID NO: 2716624 - RNA, 19 nt, Artificial Sequence
  Description of Artificial Sequence: Synthetic oligonucleotide
cuagaaaacaguauaccac

SEQ ID NO: 2716625 - RNA, 19 nt, Artificial Sequence
  Description of Artificial Sequence: Synthetic oligonucleotide
uagaaaacaguauaccaca

SEQ ID NO: 2716626 - RNA, 19 nt, Artificial Sequence
  Description of Artificial Sequence: Synthetic oligonucleotide
cauauaaaacccuagaaaa

SEQ ID NO: 2716627 - RNA, 19 nt, Artificial Sequence
  Description of Artificial Sequence: Synthetic oligonucleotide
aaagauucaaacauuugcu

SEQ ID NO: 2716628 - RNA, 19 nt, Artificial Sequence
  Description of Artificial Sequence: Synthetic oligonucleotide
uacauaucauaaauaagac

SEQ ID NO: 2716629 - RNA, 19 nt, Artificial Sequence
  Description of Artificial Sequence: Synthetic oligonucleotide
auugagaaugacuagcaca

SEQ ID NO: 2716630 - RNA, 19 nt, Artificial Sequence
  Description of Artificial Sequence: Synthetic oligonucleotide
ucuguaucagaauaagcug

SEQ ID NO: 2716631 - RNA, 19 nt, Artificial Sequence
  Description of Artificial Sequence: Synthetic oligonucleotide
uauuaaauggccaucuaua

SEQ ID NO: 2716632 - RNA, 19 nt, Artificial Sequence
  Description of Artificial Sequence: Synthetic oligonucleotide
uuuacauaguaaagcaucu

SEQ ID NO: 2716633 - RNA, 19 nt, Artificial Sequence
  Description of Artificial Sequence: Synthetic oligonucleotide
aguaaagcaucuuccaaag

SEQ ID NO: 2716634 - RNA, 19 nt, Artificial Sequence
  Description of Artificial Sequence: Synthetic oligonucleotide
uucacaaucuuuccacagg

SEQ ID NO: 2716635 - RNA, 19 nt, Artificial Sequence
  Description of Artificial Sequence: Synthetic oligonucleotide
uguggcuaaacuauuaaau

SEQ ID NO: 2716636 - RNA, 19 nt, Artificial Sequence
  Description of Artificial Sequence: Synthetic oligonucleotide
uaaauggccaucuauacuu

SEQ ID NO: 2716637 - RNA, 19 nt, Artificial Sequence
  Description of Artificial Sequence: Synthetic oligonucleotide
uaaagcaucuuccaaaguu

SEQ ID NO: 2716638 - RNA, 19 nt, Artificial Sequence
  Description of Artificial Sequence: Synthetic oligonucleotide
acauauaaaacccuagaaa

SEQ ID NO: 2716639 - RNA, 19 nt, Artificial Sequence
  Description of Artificial Sequence: Synthetic oligonucleotide
auaagacaucgguugaagc

SEQ ID NO: 2716640 - RNA, 19 nt, Artificial Sequence
  Description of Artificial Sequence: Synthetic oligonucleotide
aaucuuuccacaggugccc

SEQ ID NO: 2716641 - RNA, 19 nt, Artificial Sequence
  Description of Artificial Sequence: Synthetic oligonucleotide
uaaacuauuaaauggccau

SEQ ID NO: 2716642 - RNA, 19 nt, Artificial Sequence
  Description of Artificial Sequence: Synthetic oligonucleotide
ugaauugagaaugacuagc

SEQ ID NO: 2716643 - RNA, 19 nt, Artificial Sequence
  Description of Artificial Sequence: Synthetic oligonucleotide
uauaaggggaucuuugcca

SEQ ID NO: 2716644 - RNA, 19 nt, Artificial Sequence
  Description of Artificial Sequence: Synthetic oligonucleotide
aacauuugcucuauucuac

SEQ ID NO: 2716645 - RNA, 19 nt, Artificial Sequence
  Description of Artificial Sequence: Synthetic oligonucleotide
gacuagcacauauaaaacc

SEQ ID NO: 2716646 - RNA, 19 nt, Artificial Sequence
  Description of Artificial Sequence: Synthetic oligonucleotide
ucagcuugugcucccaugg

SEQ ID NO: 2716647 - RNA, 19 nt, Artificial Sequence
  Description of Artificial Sequence: Synthetic oligonucleotide
uuaauguacacaagugaca

SEQ ID NO: 2716648 - RNA, 19 nt, Artificial Sequence
  Description of Artificial Sequence: Synthetic oligonucleotide
uuuauaaggggaucuuugc

SEQ ID NO: 2716649 - RNA, 19 nt, Artificial Sequence
  Description of Artificial Sequence: Synthetic oligonucleotide
uugugaacagaauacggcc

SEQ ID NO: 2716650 - RNA, 19 nt, Artificial Sequence
  Description of Artificial Sequence: Synthetic oligonucleotide
acauaguaaagcaucuucc

SEQ ID NO: 2716651 - RNA, 19 nt, Artificial Sequence
  Description of Artificial Sequence: Synthetic oligonucleotide
uacugaacuuuauuaagag

SEQ ID NO: 2716652 - RNA, 19 nt, Artificial Sequence
  Description of Artificial Sequence: Synthetic oligonucleotide
cuuacauaucauaaauaag

SEQ ID NO: 2716653 - RNA, 19 nt, Artificial Sequence
  Description of Artificial Sequence: Synthetic oligonucleotide
uugagaaugacuagcacau

SEQ ID NO: 2716654 - RNA, 19 nt, Artificial Sequence
  Description of Artificial Sequence: Synthetic oligonucleotide
uuauaaggggaucuuugcc

SEQ ID NO: 2716655 - RNA, 19 nt, Artificial Sequence
  Description of Artificial Sequence: Synthetic oligonucleotide
cugaacuuuauuaagagaa

SEQ ID NO: 2716656 - RNA, 19 nt, Artificial Sequence
  Description of Artificial Sequence: Synthetic oligonucleotide
aaccauauguggcuaaacu

SEQ ID NO: 2716657 - RNA, 19 nt, Artificial Sequence
  Description of Artificial Sequence: Synthetic oligonucleotide
caaaguuuaauguacacaa

SEQ ID NO: 2716658 - RNA, 19 nt, Artificial Sequence
  Description of Artificial Sequence: Synthetic oligonucleotide
uucuacuuacauaucauaa

SEQ ID NO: 2716659 - RNA, 19 nt, Artificial Sequence
  Description of Artificial Sequence: Synthetic oligonucleotide
aucgguugaagcgagacac

SEQ ID NO: 2716660 - RNA, 19 nt, Artificial Sequence
  Description of Artificial Sequence: Synthetic oligonucleotide
uacauaguaaagcaucuuc

SEQ ID NO: 2716661 - RNA, 19 nt, Artificial Sequence
  Description of Artificial Sequence: Synthetic oligonucleotide
agaauaagcuguuuaccag

SEQ ID NO: 2716662 - RNA, 19 nt, Artificial Sequence
  Description of Artificial Sequence: Synthetic oligonucleotide
acagaauacggccaucuag

SEQ ID NO: 2716663 - RNA, 19 nt, Artificial Sequence
  Description of Artificial Sequence: Synthetic oligonucleotide
uauuaagagaaaugguacu

SEQ ID NO: 2716664 - RNA, 19 nt, Artificial Sequence
  Description of Artificial Sequence: Synthetic oligonucleotide
aauaagacaucgguugaag

SEQ ID NO: 2716665 - RNA, 19 nt, Artificial Sequence
  Description of Artificial Sequence: Synthetic oligonucleotide
uaaauaagacaucgguuga

SEQ ID NO: 2716666 - RNA, 19 nt, Artificial Sequence
  Description of Artificial Sequence: Synthetic oligonucleotide
auaaggggaucuuugccac

SEQ ID NO: 2716667 - RNA, 19 nt, Artificial Sequence
  Description of Artificial Sequence: Synthetic oligonucleotide
agauucaaacauuugcucu

SEQ ID NO: 2716668 - RNA, 19 nt, Artificial Sequence
  Description of Artificial Sequence: Synthetic oligonucleotide
ccaucuauacuuuacauag

SEQ ID NO: 2716669 - RNA, 19 nt, Artificial Sequence
  Description of Artificial Sequence: Synthetic oligonucleotide
aacuuuauuaagagaaaug

SEQ ID NO: 2716670 - RNA, 19 nt, Artificial Sequence
  Description of Artificial Sequence: Synthetic oligonucleotide
cuuccaaaguuuaauguac

SEQ ID NO: 2716671 - RNA, 19 nt, Artificial Sequence
  Description of Artificial Sequence: Synthetic oligonucleotide
uaaaauacugaacuuuauu

SEQ ID NO: 2716672 - RNA, 19 nt, Artificial Sequence
  Description of Artificial Sequence: Synthetic oligonucleotide
uuuugaaaacucaguuucc

SEQ ID NO: 2716673 - RNA, 19 nt, Artificial Sequence
  Description of Artificial Sequence: Synthetic oligonucleotide
aagcgagacacacuccuuc

SEQ ID NO: 2716674 - RNA, 19 nt, Artificial Sequence
  Description of Artificial Sequence: Synthetic oligonucleotide
auucauaugaauugagaau

SEQ ID NO: 2716675 - RNA, 19 nt, Artificial Sequence
  Description of Artificial Sequence: Synthetic oligonucleotide
uuaaauggccaucuauacu

SEQ ID NO: 2716676 - RNA, 19 nt, Artificial Sequence
  Description of Artificial Sequence: Synthetic oligonucleotide
aaacauuugcucuauucua

SEQ ID NO: 2716677 - RNA, 19 nt, Artificial Sequence
  Description of Artificial Sequence: Synthetic oligonucleotide
uauucaugagcuaauuaau

SEQ ID NO: 2716678 - RNA, 19 nt, Artificial Sequence
  Description of Artificial Sequence: Synthetic oligonucleotide
ucuacuuacauaucauaaa

SEQ ID NO: 2716679 - RNA, 19 nt, Artificial Sequence
  Description of Artificial Sequence: Synthetic oligonucleotide
uuucuguaucagaauaagc

SEQ ID NO: 2716680 - RNA, 19 nt, Artificial Sequence
  Description of Artificial Sequence: Synthetic oligonucleotide
aaucauuucuguaucagaa

SEQ ID NO: 2716681 - RNA, 19 nt, Artificial Sequence
  Description of Artificial Sequence: Synthetic oligonucleotide
aacccuagaaaacaguaua

SEQ ID NO: 2716682 - RNA, 19 nt, Artificial Sequence
  Description of Artificial Sequence: Synthetic oligonucleotide
uagauucauaugaauugag

SEQ ID NO: 2716683 - RNA, 19 nt, Artificial Sequence
  Description of Artificial Sequence: Synthetic oligonucleotide
guuuaauguacacaaguga

SEQ ID NO: 2716684 - RNA, 19 nt, Artificial Sequence
  Description of Artificial Sequence: Synthetic oligonucleotide
aaacuauuaaauggccauc

SEQ ID NO: 2716685 - RNA, 19 nt, Artificial Sequence
  Description of Artificial Sequence: Synthetic oligonucleotide
acauaucauaaauaagaca

SEQ ID NO: 2716686 - RNA, 19 nt, Artificial Sequence
  Description of Artificial Sequence: Synthetic oligonucleotide
aacuauuaaauggccaucu

SEQ ID NO: 2716687 - RNA, 19 nt, Artificial Sequence
  Description of Artificial Sequence: Synthetic oligonucleotide
guugaagcgagacacacuc

SEQ ID NO: 2716688 - RNA, 19 nt, Artificial Sequence
  Description of Artificial Sequence: Synthetic oligonucleotide
guggcuaaacuauuaaaug

SEQ ID NO: 2716689 - RNA, 19 nt, Artificial Sequence
  Description of Artificial Sequence: Synthetic oligonucleotide
uuugcucuauucuacuuac

SEQ ID NO: 2716690 - RNA, 19 nt, Artificial Sequence
  Description of Artificial Sequence: Synthetic oligonucleotide
ugugaacagaauacggcca

SEQ ID NO: 2716691 - RNA, 19 nt, Artificial Sequence
  Description of Artificial Sequence: Synthetic oligonucleotide
acacacugcaauauuauuc

SEQ ID NO: 2716692 - RNA, 19 nt, Artificial Sequence
  Description of Artificial Sequence: Synthetic oligonucleotide
uauaccacacauuguagaa

SEQ ID NO: 2716693 - RNA, 19 nt, Artificial Sequence
  Description of Artificial Sequence: Synthetic oligonucleotide
uaagcuguuuaccagccaa

SEQ ID NO: 2716694 - RNA, 19 nt, Artificial Sequence
  Description of Artificial Sequence: Synthetic oligonucleotide
ucuuccaaaguuuaaugua

SEQ ID NO: 2716695 - RNA, 19 nt, Artificial Sequence
  Description of Artificial Sequence: Synthetic oligonucleotide
uaauguacacaagugacaa

SEQ ID NO: 2716696 - RNA, 19 nt, Artificial Sequence
  Description of Artificial Sequence: Synthetic oligonucleotide
uucaugagcuaauuaauua

SEQ ID NO: 2716697 - RNA, 19 nt, Artificial Sequence
  Description of Artificial Sequence: Synthetic oligonucleotide
acuccuucacaaucuuucc

SEQ ID NO: 2716698 - RNA, 19 nt, Artificial Sequence
  Description of Artificial Sequence: Synthetic oligonucleotide
ugacuagcacauauaaaac

SEQ ID NO: 2716699 - RNA, 19 nt, Artificial Sequence
  Description of Artificial Sequence: Synthetic oligonucleotide
uaucagaauaagcuguuua

SEQ ID NO: 2716700 - RNA, 19 nt, Artificial Sequence
  Description of Artificial Sequence: Synthetic oligonucleotide
ugaaaacucaguuuccuuu

SEQ ID NO: 2716701 - RNA, 19 nt, Artificial Sequence
  Description of Artificial Sequence: Synthetic oligonucleotide
ucauaugaauugagaauga

SEQ ID NO: 2716702 - RNA, 19 nt, Artificial Sequence
  Description of Artificial Sequence: Synthetic oligonucleotide
ugagcuaauuaauuagaaa

SEQ ID NO: 2716703 - RNA, 19 nt, Artificial Sequence
  Description of Artificial Sequence: Synthetic oligonucleotide
uauucuacuuacauaucau

SEQ ID NO: 2716704 - RNA, 19 nt, Artificial Sequence
  Description of Artificial Sequence: Synthetic oligonucleotide
ugacaagacacacugcaau

SEQ ID NO: 2716705 - RNA, 19 nt, Artificial Sequence
  Description of Artificial Sequence: Synthetic oligonucleotide
agcuugugcucccauggcc

SEQ ID NO: 2716706 - RNA, 19 nt, Artificial Sequence
  Description of Artificial Sequence: Synthetic oligonucleotide
uaaaacccuagaaaacagu

SEQ ID NO: 2716707 - RNA, 19 nt, Artificial Sequence
  Description of Artificial Sequence: Synthetic oligonucleotide
gaaugacuagcacauauaa

SEQ ID NO: 2716708 - RNA, 19 nt, Artificial Sequence
  Description of Artificial Sequence: Synthetic oligonucleotide
auuucuguaucagaauaag

SEQ ID NO: 2716709 - RNA, 19 nt, Artificial Sequence
  Description of Artificial Sequence: Synthetic oligonucleotide
ugcucuauucuacuuacau

SEQ ID NO: 2716710 - RNA, 19 nt, Artificial Sequence
  Description of Artificial Sequence: Synthetic oligonucleotide
augaauugagaaugacuag

SEQ ID NO: 2716711 - RNA, 19 nt, Artificial Sequence
  Description of Artificial Sequence: Synthetic oligonucleotide
cacacauuguagaaggcac

SEQ ID NO: 2716712 - RNA, 19 nt, Artificial Sequence
  Description of Artificial Sequence: Synthetic oligonucleotide
uauguggcuaaacuauuaa

SEQ ID NO: 2716713 - RNA, 19 nt, Artificial Sequence
  Description of Artificial Sequence: Synthetic oligonucleotide
ugaacuuuauuaagagaaa

SEQ ID NO: 2716714 - RNA, 19 nt, Artificial Sequence
  Description of Artificial Sequence: Synthetic oligonucleotide
caaucuuuccacaggugcc

SEQ ID NO: 2716715 - RNA, 19 nt, Artificial Sequence
  Description of Artificial Sequence: Synthetic oligonucleotide
ucuauacuuuacauaguaa

SEQ ID NO: 2716716 - RNA, 19 nt, Artificial Sequence
  Description of Artificial Sequence: Synthetic oligonucleotide
acacacacacaccaacuuc

SEQ ID NO: 2716717 - RNA, 19 nt, Artificial Sequence
  Description of Artificial Sequence: Synthetic oligonucleotide
aucuauacuuuacauagua

SEQ ID NO: 2716718 - RNA, 19 nt, Artificial Sequence
  Description of Artificial Sequence: Synthetic oligonucleotide
uuugaaaacucaguuuccu

SEQ ID NO: 2716719 - RNA, 19 nt, Artificial Sequence
  Description of Artificial Sequence: Synthetic oligonucleotide
aguuuaauguacacaagug

SEQ ID NO: 2716720 - RNA, 19 nt, Artificial Sequence
  Description of Artificial Sequence: Synthetic oligonucleotide
aacaaagauucaaacauuu

SEQ ID NO: 2716721 - RNA, 19 nt, Artificial Sequence
  Description of Artificial Sequence: Synthetic oligonucleotide
aaaguuuaauguacacaag

SEQ ID NO: 2716722 - RNA, 19 nt, Artificial Sequence
  Description of Artificial Sequence: Synthetic oligonucleotide
guugugaacagaauacggc

SEQ ID NO: 2716723 - RNA, 19 nt, Artificial Sequence
  Description of Artificial Sequence: Synthetic oligonucleotide
aagacaucgguugaagcga

SEQ ID NO: 2716724 - RNA, 19 nt, Artificial Sequence
  Description of Artificial Sequence: Synthetic oligonucleotide
cuauucuacuuacauauca

SEQ ID NO: 2716725 - RNA, 19 nt, Artificial Sequence
  Description of Artificial Sequence: Synthetic oligonucleotide
ugguugugaacagaauacg

SEQ ID NO: 2716726 - RNA, 19 nt, Artificial Sequence
  Description of Artificial Sequence: Synthetic oligonucleotide
cacacacacacacacacac

SEQ ID NO: 2716727 - RNA, 19 nt, Artificial Sequence
  Description of Artificial Sequence: Synthetic oligonucleotide
aggcacuaaagcuucagcu

SEQ ID NO: 2716728 - RNA, 19 nt, Artificial Sequence
  Description of Artificial Sequence: Synthetic oligonucleotide
uuccaaaguuuaauguaca

SEQ ID NO: 2716729 - RNA, 19 nt, Artificial Sequence
  Description of Artificial Sequence: Synthetic oligonucleotide
caucuuccaaaguuuaaug

SEQ ID NO: 2716730 - RNA, 19 nt, Artificial Sequence
  Description of Artificial Sequence: Synthetic oligonucleotide
uagaaggcacuaaagcuuc

SEQ ID NO: 2716731 - RNA, 19 nt, Artificial Sequence
  Description of Artificial Sequence: Synthetic oligonucleotide
aaaacccuagaaaacagua

SEQ ID NO: 2716732 - RNA, 19 nt, Artificial Sequence
  Description of Artificial Sequence: Synthetic oligonucleotide
cuucacaaucuuuccacag

SEQ ID NO: 2716733 - RNA, 19 nt, Artificial Sequence
  Description of Artificial Sequence: Synthetic oligonucleotide
uaagagaaaugguacuaaa

SEQ ID NO: 2716734 - RNA, 19 nt, Artificial Sequence
  Description of Artificial Sequence: Synthetic oligonucleotide
gaaaacaguauaccacaca

SEQ ID NO: 2716735 - RNA, 19 nt, Artificial Sequence
  Description of Artificial Sequence: Synthetic oligonucleotide
auaaaacccuagaaaacag

SEQ ID NO: 2716736 - RNA, 19 nt, Artificial Sequence
  Description of Artificial Sequence: Synthetic oligonucleotide
uuuaccagccaaccauaug

SEQ ID NO: 2716737 - RNA, 19 nt, Artificial Sequence
  Description of Artificial Sequence: Synthetic oligonucleotide
acugaacuuuauuaagaga

SEQ ID NO: 2716738 - RNA, 19 nt, Artificial Sequence
  Description of Artificial Sequence: Synthetic oligonucleotide
cagaauaagcuguuuacca

SEQ ID NO: 2716739 - RNA, 19 nt, Artificial Sequence
  Description of Artificial Sequence: Synthetic oligonucleotide
auaucauaaauaagacauc

SEQ ID NO: 2716740 - RNA, 19 nt, Artificial Sequence
  Description of Artificial Sequence: Synthetic oligonucleotide
uccaaaguuuaauguacac

SEQ ID NO: 2716741 - RNA, 19 nt, Artificial Sequence
  Description of Artificial Sequence: Synthetic oligonucleotide
agcuguuuaccagccaacc

SEQ ID NO: 2716742 - RNA, 19 nt, Artificial Sequence
  Description of Artificial Sequence: Synthetic oligonucleotide
cacuccuucacaaucuuuc

SEQ ID NO: 2716743 - RNA, 19 nt, Artificial Sequence
  Description of Artificial Sequence: Synthetic oligonucleotide
cacacugcaauauuauuca

SEQ ID NO: 2716744 - RNA, 19 nt, Artificial Sequence
  Description of Artificial Sequence: Synthetic oligonucleotide
gacacacuccuucacaauc

SEQ ID NO: 2716745 - RNA, 19 nt, Artificial Sequence
  Description of Artificial Sequence: Synthetic oligonucleotide
auguacacaagugacaaaa

SEQ ID NO: 2716746 - RNA, 19 nt, Artificial Sequence
  Description of Artificial Sequence: Synthetic oligonucleotide
ugcccaaucauuucuguau

SEQ ID NO: 2716747 - RNA, 19 nt, Artificial Sequence
  Description of Artificial Sequence: Synthetic oligonucleotide
aucauaaauaagacaucgg

SEQ ID NO: 2716748 - RNA, 19 nt, Artificial Sequence
  Description of Artificial Sequence: Synthetic oligonucleotide
gauucaaacauuugcucua

SEQ ID NO: 2716749 - RNA, 19 nt, Artificial Sequence
  Description of Artificial Sequence: Synthetic oligonucleotide
uaacaaagauucaaacauu

SEQ ID NO: 2716750 - RNA, 19 nt, Artificial Sequence
  Description of Artificial Sequence: Synthetic oligonucleotide
cucuauucuacuuacauau

SEQ ID NO: 2716751 - RNA, 19 nt, Artificial Sequence
  Description of Artificial Sequence: Synthetic oligonucleotide
uuaagagaaaugguacuaa

SEQ ID NO: 2716752 - RNA, 19 nt, Artificial Sequence
  Description of Artificial Sequence: Synthetic oligonucleotide
auuauucaugagcuaauua

SEQ ID NO: 2716753 - RNA, 19 nt, Artificial Sequence
  Description of Artificial Sequence: Synthetic oligonucleotide
agaaaacaguauaccacac

SEQ ID NO: 2716754 - RNA, 19 nt, Artificial Sequence
  Description of Artificial Sequence: Synthetic oligonucleotide
cagcugacaagacacacug

SEQ ID NO: 2716755 - RNA, 19 nt, Artificial Sequence
  Description of Artificial Sequence: Synthetic oligonucleotide
gaauugagaaugacuagca

SEQ ID NO: 2716756 - RNA, 19 nt, Artificial Sequence
  Description of Artificial Sequence: Synthetic oligonucleotide
ccuacagcugacaagacac

SEQ ID NO: 2716757 - RNA, 19 nt, Artificial Sequence
  Description of Artificial Sequence: Synthetic oligonucleotide
guauaccacacauuguaga

SEQ ID NO: 2716758 - RNA, 19 nt, Artificial Sequence
  Description of Artificial Sequence: Synthetic oligonucleotide
caugagcuaauuaauuaga

SEQ ID NO: 2716759 - RNA, 19 nt, Artificial Sequence
  Description of Artificial Sequence: Synthetic oligonucleotide
acaucgguugaagcgagac

SEQ ID NO: 2716760 - RNA, 19 nt, Artificial Sequence
  Description of Artificial Sequence: Synthetic oligonucleotide
uguaucagaauaagcuguu

SEQ ID NO: 2716761 - RNA, 19 nt, Artificial Sequence
  Description of Artificial Sequence: Synthetic oligonucleotide
aagagaaaugguacuaaaa

SEQ ID NO: 2716762 - RNA, 19 nt, Artificial Sequence
  Description of Artificial Sequence: Synthetic oligonucleotide
aaagcaucuuccaaaguuu

SEQ ID NO: 2716763 - RNA, 19 nt, Artificial Sequence
  Description of Artificial Sequence: Synthetic oligonucleotide
accauauguggcuaaacua

SEQ ID NO: 2716764 - RNA, 19 nt, Artificial Sequence
  Description of Artificial Sequence: Synthetic oligonucleotide
accagccaaccauaugugg

SEQ ID NO: 2716765 - RNA, 19 nt, Artificial Sequence
  Description of Artificial Sequence: Synthetic oligonucleotide
auacugaacuuuauuaaga

SEQ ID NO: 2716766 - RNA, 19 nt, Artificial Sequence
  Description of Artificial Sequence: Synthetic oligonucleotide
cagaauacggccaucuaga

SEQ ID NO: 2716767 - RNA, 19 nt, Artificial Sequence
  Description of Artificial Sequence: Synthetic oligonucleotide
gccaucuagauucauauga

SEQ ID NO: 2716768 - RNA, 19 nt, Artificial Sequence
  Description of Artificial Sequence: Synthetic oligonucleotide
auuaagagaaaugguacua

SEQ ID NO: 2716769 - RNA, 19 nt, Artificial Sequence
  Description of Artificial Sequence: Synthetic oligonucleotide
ggcuaaacuauuaaauggc

SEQ ID NO: 2716770 - RNA, 19 nt, Artificial Sequence
  Description of Artificial Sequence: Synthetic oligonucleotide
acccuagaaaacaguauac

SEQ ID NO: 2716771 - RNA, 19 nt, Artificial Sequence
  Description of Artificial Sequence: Synthetic oligonucleotide
uggccaucuauacuuuaca

SEQ ID NO: 2716772 - RNA, 19 nt, Artificial Sequence
  Description of Artificial Sequence: Synthetic oligonucleotide
aaauaagacaucgguugaa

SEQ ID NO: 2716773 - RNA, 19 nt, Artificial Sequence
  Description of Artificial Sequence: Synthetic oligonucleotide
aagaaaacacacacacaca

SEQ ID NO: 2716774 - RNA, 19 nt, Artificial Sequence
  Description of Artificial Sequence: Synthetic oligonucleotide
ucuauucuacuuacauauc

SEQ ID NO: 2716775 - RNA, 19 nt, Artificial Sequence
  Description of Artificial Sequence: Synthetic oligonucleotide
auucuacuuacauaucaua

SEQ ID NO: 2716776 - RNA, 19 nt, Artificial Sequence
  Description of Artificial Sequence: Synthetic oligonucleotide
aauguacacaagugacaaa

SEQ ID NO: 2716777 - RNA, 19 nt, Artificial Sequence
  Description of Artificial Sequence: Synthetic oligonucleotide
gguugugaacagaauacgg

SEQ ID NO: 2716778 - RNA, 19 nt, Artificial Sequence
  Description of Artificial Sequence: Synthetic oligonucleotide
ggaucuuugccaccuacag

SEQ ID NO: 2716779 - RNA, 19 nt, Artificial Sequence
  Description of Artificial Sequence: Synthetic oligonucleotide
aagcuguuuaccagccaac

SEQ ID NO: 2716780 - RNA, 19 nt, Artificial Sequence
  Description of Artificial Sequence: Synthetic oligonucleotide
acauuugcucuauucuacu

SEQ ID NO: 2716781 - RNA, 19 nt, Artificial Sequence
  Description of Artificial Sequence: Synthetic oligonucleotide
uguuuaccagccaaccaua

SEQ ID NO: 2716782 - RNA, 19 nt, Artificial Sequence
  Description of Artificial Sequence: Synthetic oligonucleotide
acaggugcccaaucauuuc

SEQ ID NO: 2716783 - RNA, 19 nt, Artificial Sequence
  Description of Artificial Sequence: Synthetic oligonucleotide
aaugacuagcacauauaaa

SEQ ID NO: 2716784 - RNA, 19 nt, Artificial Sequence
  Description of Artificial Sequence: Synthetic oligonucleotide
cacauauaaaacccuagaa

SEQ ID NO: 2716785 - RNA, 19 nt, Artificial Sequence
  Description of Artificial Sequence: Synthetic oligonucleotide
cacacacacacacacacca

SEQ ID NO: 2716786 - RNA, 19 nt, Artificial Sequence
  Description of Artificial Sequence: Synthetic oligonucleotide
aguauaccacacauuguag

SEQ ID NO: 2716787 - RNA, 19 nt, Artificial Sequence
  Description of Artificial Sequence: Synthetic oligonucleotide
uagcacauauaaaacccua

SEQ ID NO: 2716788 - RNA, 19 nt, Artificial Sequence
  Description of Artificial Sequence: Synthetic oligonucleotide
cauaugaauugagaaugac

SEQ ID NO: 2716789 - RNA, 19 nt, Artificial Sequence
  Description of Artificial Sequence: Synthetic oligonucleotide
agauucauaugaauugaga

SEQ ID NO: 2716790 - RNA, 19 nt, Artificial Sequence
  Description of Artificial Sequence: Synthetic oligonucleotide
aucauuucuguaucagaau

SEQ ID NO: 2716791 - RNA, 19 nt, Artificial Sequence
  Description of Artificial Sequence: Synthetic oligonucleotide
aucuagauucauaugaauu

SEQ ID NO: 2716792 - RNA, 19 nt, Artificial Sequence
  Description of Artificial Sequence: Synthetic oligonucleotide
cacacacacacacaccaac

SEQ ID NO: 2716793 - RNA, 19 nt, Artificial Sequence
  Description of Artificial Sequence: Synthetic oligonucleotide
uuccacaggugcccaauca

SEQ ID NO: 2716794 - RNA, 19 nt, Artificial Sequence
  Description of Artificial Sequence: Synthetic oligonucleotide
accaacuucccaugguugu

SEQ ID NO: 2716795 - RNA, 19 nt, Artificial Sequence
  Description of Artificial Sequence: Synthetic oligonucleotide
cuaaagcuucagcuugugc

SEQ ID NO: 2716796 - RNA, 19 nt, Artificial Sequence
  Description of Artificial Sequence: Synthetic oligonucleotide
cuuuauuaagagaaauggu

SEQ ID NO: 2716797 - RNA, 19 nt, Artificial Sequence
  Description of Artificial Sequence: Synthetic oligonucleotide
uggcccauuuugaaaacuc

SEQ ID NO: 2716798 - RNA, 19 nt, Artificial Sequence
  Description of Artificial Sequence: Synthetic oligonucleotide
agcacauauaaaacccuag

SEQ ID NO: 2716799 - RNA, 19 nt, Artificial Sequence
  Description of Artificial Sequence: Synthetic oligonucleotide
uaccagccaaccauaugug

SEQ ID NO: 2716800 - RNA, 19 nt, Artificial Sequence
  Description of Artificial Sequence: Synthetic oligonucleotide
caugguugugaacagaaua

SEQ ID NO: 2716801 - RNA, 19 nt, Artificial Sequence
  Description of Artificial Sequence: Synthetic oligonucleotide
auaccacacauuguagaag

SEQ ID NO: 2716802 - RNA, 19 nt, Artificial Sequence
  Description of Artificial Sequence: Synthetic oligonucleotide
auggccaucuauacuuuac

SEQ ID NO: 2716803 - RNA, 19 nt, Artificial Sequence
  Description of Artificial Sequence: Synthetic oligonucleotide
cuagauucauaugaauuga

SEQ ID NO: 2716804 - RNA, 19 nt, Artificial Sequence
  Description of Artificial Sequence: Synthetic oligonucleotide
caguauaccacacauugua

SEQ ID NO: 2716805 - RNA, 19 nt, Artificial Sequence
  Description of Artificial Sequence: Synthetic oligonucleotide
aaggggaucuuugccaccu

SEQ ID NO: 2716806 - RNA, 19 nt, Artificial Sequence
  Description of Artificial Sequence: Synthetic oligonucleotide
aagacacacugcaauauua

SEQ ID NO: 2716807 - RNA, 19 nt, Artificial Sequence
  Description of Artificial Sequence: Synthetic oligonucleotide
gagaaugacuagcacauau

SEQ ID NO: 2716808 - RNA, 19 nt, Artificial Sequence
  Description of Artificial Sequence: Synthetic oligonucleotide
aaacccuagaaaacaguau

SEQ ID NO: 2716809 - RNA, 19 nt, Artificial Sequence
  Description of Artificial Sequence: Synthetic oligonucleotide
acacaccaacuucccaugg

SEQ ID NO: 2716810 - RNA, 19 nt, Artificial Sequence
  Description of Artificial Sequence: Synthetic oligonucleotide
gcacuaaagcuucagcuug

SEQ ID NO: 2716811 - RNA, 19 nt, Artificial Sequence
  Description of Artificial Sequence: Synthetic oligonucleotide
caaacauuugcucuauucu

SEQ ID NO: 2716812 - RNA, 19 nt, Artificial Sequence
  Description of Artificial Sequence: Synthetic oligonucleotide
auguggcuaaacuauuaaa

SEQ ID NO: 2716813 - RNA, 19 nt, Artificial Sequence
  Description of Artificial Sequence: Synthetic oligonucleotide
accuacagcugacaagaca

SEQ ID NO: 2716814 - RNA, 19 nt, Artificial Sequence
  Description of Artificial Sequence: Synthetic oligonucleotide
uauuauucaugagcuaauu

SEQ ID NO: 2716815 - RNA, 19 nt, Artificial Sequence
  Description of Artificial Sequence: Synthetic oligonucleotide
uucagcuugugcucccaug

SEQ ID NO: 2716816 - RNA, 19 nt, Artificial Sequence
  Description of Artificial Sequence: Synthetic oligonucleotide
uacagcugacaagacacac

SEQ ID NO: 2716817 - RNA, 19 nt, Artificial Sequence
  Description of Artificial Sequence: Synthetic oligonucleotide
uugaaaacucaguuuccuu

SEQ ID NO: 2716818 - RNA, 19 nt, Artificial Sequence
  Description of Artificial Sequence: Synthetic oligonucleotide
gaaaacacacacacacaca

SEQ ID NO: 2716819 - RNA, 19 nt, Artificial Sequence
  Description of Artificial Sequence: Synthetic oligonucleotide
caaucauuucuguaucaga

SEQ ID NO: 2716820 - RNA, 19 nt, Artificial Sequence
  Description of Artificial Sequence: Synthetic oligonucleotide
aauggccaucuauacuuua

SEQ ID NO: 2716821 - RNA, 19 nt, Artificial Sequence
  Description of Artificial Sequence: Synthetic oligonucleotide
cauuguagaaggcacuaaa

SEQ ID NO: 2716822 - RNA, 19 nt, Artificial Sequence
  Description of Artificial Sequence: Synthetic oligonucleotide
gacaagacacacugcaaua

SEQ ID NO: 2716823 - RNA, 19 nt, Artificial Sequence
  Description of Artificial Sequence: Synthetic oligonucleotide
gcuaaacuauuaaauggcc

SEQ ID NO: 2716824 - RNA, 19 nt, Artificial Sequence
  Description of Artificial Sequence: Synthetic oligonucleotide
uccacaggugcccaaucau

SEQ ID NO: 2716825 - RNA, 19 nt, Artificial Sequence
  Description of Artificial Sequence: Synthetic oligonucleotide
ccuagaaaacaguauacca

SEQ ID NO: 2716826 - RNA, 19 nt, Artificial Sequence
  Description of Artificial Sequence: Synthetic oligonucleotide
cuguaucagaauaagcugu

SEQ ID NO: 2716827 - RNA, 19 nt, Artificial Sequence
  Description of Artificial Sequence: Synthetic oligonucleotide
aacagaauacggccaucua

SEQ ID NO: 2716828 - RNA, 19 nt, Artificial Sequence
  Description of Artificial Sequence: Synthetic oligonucleotide
cuacuuacauaucauaaau

SEQ ID NO: 2716829 - RNA, 19 nt, Artificial Sequence
  Description of Artificial Sequence: Synthetic oligonucleotide
acacacacacacacacacc

SEQ ID NO: 2716830 - RNA, 19 nt, Artificial Sequence
  Description of Artificial Sequence: Synthetic oligonucleotide
cauaaauaagacaucgguu

SEQ ID NO: 2716831 - RNA, 19 nt, Artificial Sequence
  Description of Artificial Sequence: Synthetic oligonucleotide
acaagacacacugcaauau

SEQ ID NO: 2716832 - RNA, 19 nt, Artificial Sequence
  Description of Artificial Sequence: Synthetic oligonucleotide
uucccaugguugugaacag

SEQ ID NO: 2716833 - RNA, 19 nt, Artificial Sequence
  Description of Artificial Sequence: Synthetic oligonucleotide
aaacacacacacacacaca

SEQ ID NO: 2716834 - RNA, 19 nt, Artificial Sequence
  Description of Artificial Sequence: Synthetic oligonucleotide
gcucccauggcccauuuug

SEQ ID NO: 2716835 - RNA, 19 nt, Artificial Sequence
  Description of Artificial Sequence: Synthetic oligonucleotide
gcaauauuauucaugagcu

SEQ ID NO: 2716836 - RNA, 19 nt, Artificial Sequence
  Description of Artificial Sequence: Synthetic oligonucleotide
cugcaauauuauucaugag

SEQ ID NO: 2716837 - RNA, 19 nt, Artificial Sequence
  Description of Artificial Sequence: Synthetic oligonucleotide
cacacaccaacuucccaug

SEQ ID NO: 2716838 - RNA, 19 nt, Artificial Sequence
  Description of Artificial Sequence: Synthetic oligonucleotide
ccagccaaccauauguggc

SEQ ID NO: 2716839 - RNA, 19 nt, Artificial Sequence
  Description of Artificial Sequence: Synthetic oligonucleotide
acaccaacuucccaugguu

SEQ ID NO: 2716840 - RNA, 19 nt, Artificial Sequence
  Description of Artificial Sequence: Synthetic oligonucleotide
auucaugagcuaauuaauu

SEQ ID NO: 2716841 - RNA, 19 nt, Artificial Sequence
  Description of Artificial Sequence: Synthetic oligonucleotide
acuauuaaauggccaucua

SEQ ID NO: 2716842 - RNA, 19 nt, Artificial Sequence
  Description of Artificial Sequence: Synthetic oligonucleotide
agaauacggccaucuagau

SEQ ID NO: 2716843 - RNA, 19 nt, Artificial Sequence
  Description of Artificial Sequence: Synthetic oligonucleotide
caccaacuucccaugguug

SEQ ID NO: 2716844 - RNA, 19 nt, Artificial Sequence
  Description of Artificial Sequence: Synthetic oligonucleotide
augagcuaauuaauuagaa

SEQ ID NO: 2716845 - RNA, 19 nt, Artificial Sequence
  Description of Artificial Sequence: Synthetic oligonucleotide
ucuuugccaccuacagcug

SEQ ID NO: 2716846 - RNA, 19 nt, Artificial Sequence
  Description of Artificial Sequence: Synthetic oligonucleotide
agcgagacacacuccuuca

SEQ ID NO: 2716847 - RNA, 19 nt, Artificial Sequence
  Description of Artificial Sequence: Synthetic oligonucleotide
acuuuacauaguaaagcau

SEQ ID NO: 2716848 - RNA, 19 nt, Artificial Sequence
  Description of Artificial Sequence: Synthetic oligonucleotide
auauuauucaugagcuaau

SEQ ID NO: 2716849 - RNA, 19 nt, Artificial Sequence
  Description of Artificial Sequence: Synthetic oligonucleotide
auaagcuguuuaccagcca

SEQ ID NO: 2716850 - RNA, 19 nt, Artificial Sequence
  Description of Artificial Sequence: Synthetic oligonucleotide
uaaggggaucuuugccacc

SEQ ID NO: 2716851 - RNA, 19 nt, Artificial Sequence
  Description of Artificial Sequence: Synthetic oligonucleotide
gaaaacucaguuuccuuuu

SEQ ID NO: 2716852 - RNA, 19 nt, Artificial Sequence
  Description of Artificial Sequence: Synthetic oligonucleotide
accacacauuguagaaggc

SEQ ID NO: 2716853 - RNA, 19 nt, Artificial Sequence
  Description of Artificial Sequence: Synthetic oligonucleotide
aaacaguauaccacacauu

SEQ ID NO: 2716854 - RNA, 19 nt, Artificial Sequence
  Description of Artificial Sequence: Synthetic oligonucleotide
gcacauauaaaacccuaga

SEQ ID NO: 2716855 - RNA, 19 nt, Artificial Sequence
  Description of Artificial Sequence: Synthetic oligonucleotide
uugcucuauucuacuuaca

SEQ ID NO: 2716856 - RNA, 19 nt, Artificial Sequence
  Description of Artificial Sequence: Synthetic oligonucleotide
ucgguugaagcgagacaca

SEQ ID NO: 2716857 - RNA, 19 nt, Artificial Sequence
  Description of Artificial Sequence: Synthetic oligonucleotide
aacuucccaugguugugaa

SEQ ID NO: 2716858 - RNA, 19 nt, Artificial Sequence
  Description of Artificial Sequence: Synthetic oligonucleotide
cuauuaaauggccaucuau

SEQ ID NO: 2716859 - RNA, 19 nt, Artificial Sequence
  Description of Artificial Sequence: Synthetic oligonucleotide
uuacauaguaaagcaucuu

SEQ ID NO: 2716860 - RNA, 19 nt, Artificial Sequence
  Description of Artificial Sequence: Synthetic oligonucleotide
uuuccacaggugcccaauc

SEQ ID NO: 2716861 - RNA, 19 nt, Artificial Sequence
  Description of Artificial Sequence: Synthetic oligonucleotide
aagcaucuuccaaaguuua

SEQ ID NO: 2716862 - RNA, 19 nt, Artificial Sequence
  Description of Artificial Sequence: Synthetic oligonucleotide
ugccaccuacagcugacaa

SEQ ID NO: 2716863 - RNA, 19 nt, Artificial Sequence
  Description of Artificial Sequence: Synthetic oligonucleotide
auucaaacauuugcucuau

SEQ ID NO: 2716864 - RNA, 19 nt, Artificial Sequence
  Description of Artificial Sequence: Synthetic oligonucleotide
acuaaagcuucagcuugug

SEQ ID NO: 2716865 - RNA, 19 nt, Artificial Sequence
  Description of Artificial Sequence: Synthetic oligonucleotide
agcugacaagacacacugc

SEQ ID NO: 2716866 - RNA, 19 nt, Artificial Sequence
  Description of Artificial Sequence: Synthetic oligonucleotide
ucccauggcccauuuugaa

SEQ ID NO: 2716867 - RNA, 19 nt, Artificial Sequence
  Description of Artificial Sequence: Synthetic oligonucleotide
agacacacugcaauauuau

SEQ ID NO: 2716868 - RNA, 19 nt, Artificial Sequence
  Description of Artificial Sequence: Synthetic oligonucleotide
gaacagaauacggccaucu

SEQ ID NO: 2716869 - RNA, 19 nt, Artificial Sequence
  Description of Artificial Sequence: Synthetic oligonucleotide
acacacuccuucacaaucu

SEQ ID NO: 2716870 - RNA, 19 nt, Artificial Sequence
  Description of Artificial Sequence: Synthetic oligonucleotide
acacacacacacaccaacu

SEQ ID NO: 2716871 - RNA, 19 nt, Artificial Sequence
  Description of Artificial Sequence: Synthetic oligonucleotide
acaguauaccacacauugu

SEQ ID NO: 2716872 - RNA, 19 nt, Artificial Sequence
  Description of Artificial Sequence: Synthetic oligonucleotide
agaaugacuagcacauaua

SEQ ID NO: 2716873 - RNA, 19 nt, Artificial Sequence
  Description of Artificial Sequence: Synthetic oligonucleotide
cccuagaaaacaguauacc

SEQ ID NO: 2716874 - RNA, 19 nt, Artificial Sequence
  Description of Artificial Sequence: Synthetic oligonucleotide
cuagcacauauaaaacccu

SEQ ID NO: 2716875 - RNA, 19 nt, Artificial Sequence
  Description of Artificial Sequence: Synthetic oligonucleotide
acagcugacaagacacacu

SEQ ID NO: 2716876 - RNA, 19 nt, Artificial Sequence
  Description of Artificial Sequence: Synthetic oligonucleotide
cuguuuaccagccaaccau

SEQ ID NO: 2716877 - RNA, 19 nt, Artificial Sequence
  Description of Artificial Sequence: Synthetic oligonucleotide
agacacacuccuucacaau

SEQ ID NO: 2716878 - RNA, 19 nt, Artificial Sequence
  Description of Artificial Sequence: Synthetic oligonucleotide
ccaaucauuucuguaucag

SEQ ID NO: 2716879 - RNA, 19 nt, Artificial Sequence
  Description of Artificial Sequence: Synthetic oligonucleotide
acacugcaauauuauucau

SEQ ID NO: 2716880 - RNA, 19 nt, Artificial Sequence
  Description of Artificial Sequence: Synthetic oligonucleotide
guagaaggcacuaaagcuu

SEQ ID NO: 2716881 - RNA, 19 nt, Artificial Sequence
  Description of Artificial Sequence: Synthetic oligonucleotide
gcccauuuugaaaacucag

SEQ ID NO: 2716882 - RNA, 19 nt, Artificial Sequence
  Description of Artificial Sequence: Synthetic oligonucleotide
caauauuauucaugagcua

SEQ ID NO: 2716883 - RNA, 19 nt, Artificial Sequence
  Description of Artificial Sequence: Synthetic oligonucleotide
caaccauauguggcuaaac

SEQ ID NO: 2716884 - RNA, 19 nt, Artificial Sequence
  Description of Artificial Sequence: Synthetic oligonucleotide
agacaucgguugaagcgag

SEQ ID NO: 2716885 - RNA, 19 nt, Artificial Sequence
  Description of Artificial Sequence: Synthetic oligonucleotide
ugaacagaauacggccauc

SEQ ID NO: 2716886 - RNA, 19 nt, Artificial Sequence
  Description of Artificial Sequence: Synthetic oligonucleotide
gccaccuacagcugacaag

SEQ ID NO: 2716887 - RNA, 19 nt, Artificial Sequence
  Description of Artificial Sequence: Synthetic oligonucleotide
cugacaagacacacugcaa

SEQ ID NO: 2716888 - RNA, 19 nt, Artificial Sequence
  Description of Artificial Sequence: Synthetic oligonucleotide
cagcuugugcucccauggc

SEQ ID NO: 2716889 - RNA, 19 nt, Artificial Sequence
  Description of Artificial Sequence: Synthetic oligonucleotide
auggcccauuuugaaaacu

SEQ ID NO: 2716890 - RNA, 19 nt, Artificial Sequence
  Description of Artificial Sequence: Synthetic oligonucleotide
gcuugugcucccauggccc

SEQ ID NO: 2716891 - RNA, 19 nt, Artificial Sequence
  Description of Artificial Sequence: Synthetic oligonucleotide
cuacagcugacaagacaca

SEQ ID NO: 2716892 - RNA, 19 nt, Artificial Sequence
  Description of Artificial Sequence: Synthetic oligonucleotide
ucuuuccacaggugcccaa

SEQ ID NO: 2716893 - RNA, 19 nt, Artificial Sequence
  Description of Artificial Sequence: Synthetic oligonucleotide
gacacacugcaauauuauu

SEQ ID NO: 2716894 - RNA, 19 nt, Artificial Sequence
  Description of Artificial Sequence: Synthetic oligonucleotide
gccaucuauacuuuacaua

SEQ ID NO: 2716895 - RNA, 19 nt, Artificial Sequence
  Description of Artificial Sequence: Synthetic oligonucleotide
cucccauggcccauuuuga

SEQ ID NO: 2716896 - RNA, 19 nt, Artificial Sequence
  Description of Artificial Sequence: Synthetic oligonucleotide
gcuguuuaccagccaacca

SEQ ID NO: 2716897 - RNA, 19 nt, Artificial Sequence
  Description of Artificial Sequence: Synthetic oligonucleotide
caucgguugaagcgagaca

SEQ ID NO: 2716898 - RNA, 19 nt, Artificial Sequence
  Description of Artificial Sequence: Synthetic oligonucleotide
ccaccuacagcugacaaga

SEQ ID NO: 2716899 - RNA, 19 nt, Artificial Sequence
  Description of Artificial Sequence: Synthetic oligonucleotide
caucuagauucauaugaau

SEQ ID NO: 2716900 - RNA, 19 nt, Artificial Sequence
  Description of Artificial Sequence: Synthetic oligonucleotide
gugaacagaauacggccau

SEQ ID NO: 2716901 - RNA, 19 nt, Artificial Sequence
  Description of Artificial Sequence: Synthetic oligonucleotide
gaauacggccaucuagauu

SEQ ID NO: 2716902 - RNA, 19 nt, Artificial Sequence
  Description of Artificial Sequence: Synthetic oligonucleotide
ugagaaugacuagcacaua

SEQ ID NO: 2716903 - RNA, 19 nt, Artificial Sequence
  Description of Artificial Sequence: Synthetic oligonucleotide
ggccaucuagauucauaug

SEQ ID NO: 2716904 - RNA, 19 nt, Artificial Sequence
  Description of Artificial Sequence: Synthetic oligonucleotide
guaaagcaucuuccaaagu

SEQ ID NO: 2716905 - RNA, 19 nt, Artificial Sequence
  Description of Artificial Sequence: Synthetic oligonucleotide
cuugugcucccauggccca

SEQ ID NO: 2716906 - RNA, 19 nt, Artificial Sequence
  Description of Artificial Sequence: Synthetic oligonucleotide
aggugcccaaucauuucug

SEQ ID NO: 2716907 - RNA, 19 nt, Artificial Sequence
  Description of Artificial Sequence: Synthetic oligonucleotide
cacauuguagaaggcacua

SEQ ID NO: 2716908 - RNA, 19 nt, Artificial Sequence
  Description of Artificial Sequence: Synthetic oligonucleotide
ccauauguggcuaaacuau

SEQ ID NO: 2716909 - RNA, 19 nt, Artificial Sequence
  Description of Artificial Sequence: Synthetic oligonucleotide
gcucuauucuacuuacaua

SEQ ID NO: 2716910 - RNA, 19 nt, Artificial Sequence
  Description of Artificial Sequence: Synthetic oligonucleotide
acacacacacacacacaca

SEQ ID NO: 2716911 - RNA, 19 nt, Artificial Sequence
  Description of Artificial Sequence: Synthetic oligonucleotide
agcaucuuccaaaguuuaa

SEQ ID NO: 2716912 - RNA, 19 nt, Artificial Sequence
  Description of Artificial Sequence: Synthetic oligonucleotide
caacuucccaugguuguga

SEQ ID NO: 2716913 - RNA, 19 nt, Artificial Sequence
  Description of Artificial Sequence: Synthetic oligonucleotide
caucuauacuuuacauagu

SEQ ID NO: 2716914 - RNA, 19 nt, Artificial Sequence
  Description of Artificial Sequence: Synthetic oligonucleotide
ggggaucuuugccaccuac

SEQ ID NO: 2716915 - RNA, 19 nt, Artificial Sequence
  Description of Artificial Sequence: Synthetic oligonucleotide
cauauguggcuaaacuauu

SEQ ID NO: 2716916 - RNA, 19 nt, Artificial Sequence
  Description of Artificial Sequence: Synthetic oligonucleotide
caccuacagcugacaagac

SEQ ID NO: 2716917 - RNA, 19 nt, Artificial Sequence
  Description of Artificial Sequence: Synthetic oligonucleotide
ccaucuagauucauaugaa

SEQ ID NO: 2716918 - RNA, 19 nt, Artificial Sequence
  Description of Artificial Sequence: Synthetic oligonucleotide
cagccaaccauauguggcu

SEQ ID NO: 2716919 - RNA, 19 nt, Artificial Sequence
  Description of Artificial Sequence: Synthetic oligonucleotide
gugcccaaucauuucugua

SEQ ID NO: 2716920 - RNA, 19 nt, Artificial Sequence
  Description of Artificial Sequence: Synthetic oligonucleotide
ggcacuaaagcuucagcuu

SEQ ID NO: 2716921 - RNA, 19 nt, Artificial Sequence
  Description of Artificial Sequence: Synthetic oligonucleotide
caggugcccaaucauuucu

SEQ ID NO: 2716922 - RNA, 19 nt, Artificial Sequence
  Description of Artificial Sequence: Synthetic oligonucleotide
cccaugguugugaacagaa

SEQ ID NO: 2716923 - RNA, 19 nt, Artificial Sequence
  Description of Artificial Sequence: Synthetic oligonucleotide
cacuaaagcuucagcuugu

SEQ ID NO: 2716924 - RNA, 19 nt, Artificial Sequence
  Description of Artificial Sequence: Synthetic oligonucleotide
cacaggugcccaaucauuu

SEQ ID NO: 2716925 - RNA, 19 nt, Artificial Sequence
  Description of Artificial Sequence: Synthetic oligonucleotide
agaaggcacuaaagcuuca

SEQ ID NO: 2716926 - RNA, 19 nt, Artificial Sequence
  Description of Artificial Sequence: Synthetic oligonucleotide
cauuugcucuauucuacuu

SEQ ID NO: 2716927 - RNA, 19 nt, Artificial Sequence
  Description of Artificial Sequence: Synthetic oligonucleotide
cccauuuugaaaacucagu

SEQ ID NO: 2716928 - RNA, 19 nt, Artificial Sequence
  Description of Artificial Sequence: Synthetic oligonucleotide
ccacacauuguagaaggca

SEQ ID NO: 2716929 - RNA, 19 nt, Artificial Sequence
  Description of Artificial Sequence: Synthetic oligonucleotide
acacacacacacacaccaa

SEQ ID NO: 2716930 - RNA, 19 nt, Artificial Sequence
  Description of Artificial Sequence: Synthetic oligonucleotide
gcgagacacacuccuucac

SEQ ID NO: 2716931 - RNA, 19 nt, Artificial Sequence
  Description of Artificial Sequence: Synthetic oligonucleotide
caagacacacugcaauauu

SEQ ID NO: 2716932 - RNA, 19 nt, Artificial Sequence
  Description of Artificial Sequence: Synthetic oligonucleotide
acggccaucuagauucaua

SEQ ID NO: 2716933 - RNA, 19 nt, Artificial Sequence
  Description of Artificial Sequence: Synthetic oligonucleotide
gggaucuuugccaccuaca

SEQ ID NO: 2716934 - RNA, 19 nt, Artificial Sequence
  Description of Artificial Sequence: Synthetic oligonucleotide
ugugcucccauggcccauu

SEQ ID NO: 2716935 - RNA, 19 nt, Artificial Sequence
  Description of Artificial Sequence: Synthetic oligonucleotide
cccaaucauuucuguauca

SEQ ID NO: 2716936 - RNA, 19 nt, Artificial Sequence
  Description of Artificial Sequence: Synthetic oligonucleotide
gacaucgguugaagcgaga

SEQ ID NO: 2716937 - RNA, 19 nt, Artificial Sequence
  Description of Artificial Sequence: Synthetic oligonucleotide
cacacacacacaccaacuu

SEQ ID NO: 2716938 - RNA, 19 nt, Artificial Sequence
  Description of Artificial Sequence: Synthetic oligonucleotide
ggccaucuauacuuuacau

SEQ ID NO: 2716939 - RNA, 19 nt, Artificial Sequence
  Description of Artificial Sequence: Synthetic oligonucleotide
gcaucuuccaaaguuuaau

SEQ ID NO: 2716940 - RNA, 19 nt, Artificial Sequence
  Description of Artificial Sequence: Synthetic oligonucleotide
cacaccaacuucccauggu

SEQ ID NO: 2716941 - RNA, 19 nt, Artificial Sequence
  Description of Artificial Sequence: Synthetic oligonucleotide
ugcucccauggcccauuuu

SEQ ID NO: 2716942 - RNA, 19 nt, Artificial Sequence
  Description of Artificial Sequence: Synthetic oligonucleotide
agccaaccauauguggcua

SEQ ID NO: 2716943 - RNA, 19 nt, Artificial Sequence
  Description of Artificial Sequence: Synthetic oligonucleotide
acacuccuucacaaucuuu

SEQ ID NO: 2716944 - RNA, 19 nt, Artificial Sequence
  Description of Artificial Sequence: Synthetic oligonucleotide
ccaacuucccaugguugug

SEQ ID NO: 2716945 - RNA, 19 nt, Artificial Sequence
  Description of Artificial Sequence: Synthetic oligonucleotide
guuuaccagccaaccauau

SEQ ID NO: 2716946 - RNA, 19 nt, Artificial Sequence
  Description of Artificial Sequence: Synthetic oligonucleotide
ggugcccaaucauuucugu

SEQ ID NO: 2716947 - RNA, 19 nt, Artificial Sequence
  Description of Artificial Sequence: Synthetic oligonucleotide
uacggccaucuagauucau

SEQ ID NO: 2716948 - RNA, 19 nt, Artificial Sequence
  Description of Artificial Sequence: Synthetic oligonucleotide
auacggccaucuagauuca

SEQ ID NO: 2716949 - RNA, 19 nt, Artificial Sequence
  Description of Artificial Sequence: Synthetic oligonucleotide
cgguugaagcgagacacac

SEQ ID NO: 2716950 - RNA, 19 nt, Artificial Sequence
  Description of Artificial Sequence: Synthetic oligonucleotide
uugugcucccauggcccau

SEQ ID NO: 2716951 - RNA, 19 nt, Artificial Sequence
  Description of Artificial Sequence: Synthetic oligonucleotide
cgagacacacuccuucaca

SEQ ID NO: 2716952 - RNA, 19 nt, Artificial Sequence
  Description of Artificial Sequence: Synthetic oligonucleotide
guaucagaauaagcuguuu

SEQ ID NO: 2716953 - RNA, 19 nt, Artificial Sequence
  Description of Artificial Sequence: Synthetic oligonucleotide
cccauggcccauuuugaaa

SEQ ID NO: 2716954 - RNA, 19 nt, Artificial Sequence
  Description of Artificial Sequence: Synthetic oligonucleotide
aggggaucuuugccaccua

SEQ ID NO: 2716955 - RNA, 19 nt, Artificial Sequence
  Description of Artificial Sequence: Synthetic oligonucleotide
gccaaccauauguggcuaa

SEQ ID NO: 2716956 - RNA, 19 nt, Artificial Sequence
  Description of Artificial Sequence: Synthetic oligonucleotide
cuuuccacaggugcccaau

SEQ ID NO: 2716957 - RNA, 19 nt, Artificial Sequence
  Description of Artificial Sequence: Synthetic oligonucleotide
gguugaagcgagacacacu

SEQ ID NO: 2716958 - RNA, 19 nt, Artificial Sequence
  Description of Artificial Sequence: Synthetic oligonucleotide
cacacuccuucacaaucuu

SEQ ID NO: 2716959 - RNA, 19 nt, Artificial Sequence
  Description of Artificial Sequence: Synthetic oligonucleotide
ccaaccauauguggcuaaa

SEQ ID NO: 2716960 - RNA, 19 nt, Artificial Sequence
  Description of Artificial Sequence: Synthetic oligonucleotide
cggccaucuagauucauau

SEQ ID NO: 2716961 - RNA, 19 nt, Artificial Sequence
  Description of Artificial Sequence: Synthetic oligonucleotide
ccacaggugcccaaucauu

SEQ ID NO: 2716962 - RNA, 19 nt, Artificial Sequence
  Description of Artificial Sequence: Synthetic oligonucleotide
ccaugguugugaacagaau

SEQ ID NO: 2716963 - RNA, 19 nt, Artificial Sequence
  Description of Artificial Sequence: Synthetic oligonucleotide
gugcucccauggcccauuu

SEQ ID NO: 2716964 - RNA, 19 nt, Artificial Sequence
  Description of Artificial Sequence: Synthetic oligonucleotide
aaacauuauaucuaguucg

SEQ ID NO: 2716965 - RNA, 19 nt, Artificial Sequence
  Description of Artificial Sequence: Synthetic oligonucleotide
ucaagaaucagcaaagggg

SEQ ID NO: 2716966 - RNA, 19 nt, Artificial Sequence
  Description of Artificial Sequence: Synthetic oligonucleotide
aauuaaacauuauaucuag

SEQ ID NO: 2716967 - RNA, 19 nt, Artificial Sequence
  Description of Artificial Sequence: Synthetic oligonucleotide
auuauaucuaguucgacuc

SEQ ID NO: 2716968 - RNA, 19 nt, Artificial Sequence
  Description of Artificial Sequence: Synthetic oligonucleotide
uuauauucaaugaacgagc

SEQ ID NO: 2716969 - RNA, 19 nt, Artificial Sequence
  Description of Artificial Sequence: Synthetic oligonucleotide
aaaauccuuauauucaaug

SEQ ID NO: 2716970 - RNA, 19 nt, Artificial Sequence
  Description of Artificial Sequence: Synthetic oligonucleotide
uguaugaauucauaaacag

SEQ ID NO: 2716971 - RNA, 19 nt, Artificial Sequence
  Description of Artificial Sequence: Synthetic oligonucleotide
auagaugaguuuaaaaucc

SEQ ID NO: 2716972 - RNA, 19 nt, Artificial Sequence
  Description of Artificial Sequence: Synthetic oligonucleotide
uguguaugaauucauaaac

SEQ ID NO: 2716973 - RNA, 19 nt, Artificial Sequence
  Description of Artificial Sequence: Synthetic oligonucleotide
aagagagcugcauauugcc

SEQ ID NO: 2716974 - RNA, 19 nt, Artificial Sequence
  Description of Artificial Sequence: Synthetic oligonucleotide
auuaacuccgacuacaaug

SEQ ID NO: 2716975 - RNA, 19 nt, Artificial Sequence
  Description of Artificial Sequence: Synthetic oligonucleotide
auaaacagccaucucauuc

SEQ ID NO: 2716976 - RNA, 19 nt, Artificial Sequence
  Description of Artificial Sequence: Synthetic oligonucleotide
uccuuauauucaaugaacg

SEQ ID NO: 2716977 - RNA, 19 nt, Artificial Sequence
  Description of Artificial Sequence: Synthetic oligonucleotide
aaugaacgagcacuguucg

SEQ ID NO: 2716978 - RNA, 19 nt, Artificial Sequence
  Description of Artificial Sequence: Synthetic oligonucleotide
uuaguuuccacgaugcagc

SEQ ID NO: 2716979 - RNA, 19 nt, Artificial Sequence
  Description of Artificial Sequence: Synthetic oligonucleotide
ucuaguucgacucacucug

SEQ ID NO: 2716980 - RNA, 19 nt, Artificial Sequence
  Description of Artificial Sequence: Synthetic oligonucleotide
gauagaugaguuuaaaauc

SEQ ID NO: 2716981 - RNA, 19 nt, Artificial Sequence
  Description of Artificial Sequence: Synthetic oligonucleotide
acuuuauccaauuaaacau

SEQ ID NO: 2716982 - RNA, 19 nt, Artificial Sequence
  Description of Artificial Sequence: Synthetic oligonucleotide
aaauccuuauauucaauga

SEQ ID NO: 2716983 - RNA, 19 nt, Artificial Sequence
  Description of Artificial Sequence: Synthetic oligonucleotide
caagaaucagcaaaggggc

SEQ ID NO: 2716984 - RNA, 19 nt, Artificial Sequence
  Description of Artificial Sequence: Synthetic oligonucleotide
cuuauauucaaugaacgag

SEQ ID NO: 2716985 - RNA, 19 nt, Artificial Sequence
  Description of Artificial Sequence: Synthetic oligonucleotide
uaaacauuauaucuaguuc

SEQ ID NO: 2716986 - RNA, 19 nt, Artificial Sequence
  Description of Artificial Sequence: Synthetic oligonucleotide
aaugaagagagcugcauau

SEQ ID NO: 2716987 - RNA, 19 nt, Artificial Sequence
  Description of Artificial Sequence: Synthetic oligonucleotide
uuaacuccgacuacaauga

SEQ ID NO: 2716988 - RNA, 19 nt, Artificial Sequence
  Description of Artificial Sequence: Synthetic oligonucleotide
aauucauaaacagccaucu

SEQ ID NO: 2716989 - RNA, 19 nt, Artificial Sequence
  Description of Artificial Sequence: Synthetic oligonucleotide
gacuuuauccaauuaaaca

SEQ ID NO: 2716990 - RNA, 19 nt, Artificial Sequence
  Description of Artificial Sequence: Synthetic oligonucleotide
uugucaagaaucagcaaag

SEQ ID NO: 2716991 - RNA, 19 nt, Artificial Sequence
  Description of Artificial Sequence: Synthetic oligonucleotide
ugcucuguuaguuuccacg

SEQ ID NO: 2716992 - RNA, 19 nt, Artificial Sequence
  Description of Artificial Sequence: Synthetic oligonucleotide
ucauccaaaaugaugugga

SEQ ID NO: 2716993 - RNA, 19 nt, Artificial Sequence
  Description of Artificial Sequence: Synthetic oligonucleotide
uuuagcauggcgucugcgg

SEQ ID NO: 2716994 - RNA, 19 nt, Artificial Sequence
  Description of Artificial Sequence: Synthetic oligonucleotide
uccaauuaaacauuauauc

SEQ ID NO: 2716995 - RNA, 19 nt, Artificial Sequence
  Description of Artificial Sequence: Synthetic oligonucleotide
uuuggcuuuuagcauggcg

SEQ ID NO: 2716996 - RNA, 19 nt, Artificial Sequence
  Description of Artificial Sequence: Synthetic oligonucleotide
uuuaaagcaucucauccaa

SEQ ID NO: 2716997 - RNA, 19 nt, Artificial Sequence
  Description of Artificial Sequence: Synthetic oligonucleotide
uuagcauggcgucugcggg

SEQ ID NO: 2716998 - RNA, 19 nt, Artificial Sequence
  Description of Artificial Sequence: Synthetic oligonucleotide
agccauuuuggcuuuuagc

SEQ ID NO: 2716999 - RNA, 19 nt, Artificial Sequence
  Description of Artificial Sequence: Synthetic oligonucleotide
auuuaaagcaucucaucca

SEQ ID NO: 2717000 - RNA, 19 nt, Artificial Sequence
  Description of Artificial Sequence: Synthetic oligonucleotide
ucuguuaguuuccacgaug

SEQ ID NO: 2717001 - RNA, 19 nt, Artificial Sequence
  Description of Artificial Sequence: Synthetic oligonucleotide
uaaacagccaucucauucu

SEQ ID NO: 2717002 - RNA, 19 nt, Artificial Sequence
  Description of Artificial Sequence: Synthetic oligonucleotide
gucaagaaucagcaaaggg

SEQ ID NO: 2717003 - RNA, 19 nt, Artificial Sequence
  Description of Artificial Sequence: Synthetic oligonucleotide
ugacaucuugucaagaauc

SEQ ID NO: 2717004 - RNA, 19 nt, Artificial Sequence
  Description of Artificial Sequence: Synthetic oligonucleotide
uaaagcaucucauccaaaa

SEQ ID NO: 2717005 - RNA, 19 nt, Artificial Sequence
  Description of Artificial Sequence: Synthetic oligonucleotide
auuguguaugaauucauaa

SEQ ID NO: 2717006 - RNA, 19 nt, Artificial Sequence
  Description of Artificial Sequence: Synthetic oligonucleotide
uccaaaaugauguggacuu

SEQ ID NO: 2717007 - RNA, 19 nt, Artificial Sequence
  Description of Artificial Sequence: Synthetic oligonucleotide
uuuauccaauuaaacauua

SEQ ID NO: 2717008 - RNA, 19 nt, Artificial Sequence
  Description of Artificial Sequence: Synthetic oligonucleotide
uggacuuuauccaauuaaa

SEQ ID NO: 2717009 - RNA, 19 nt, Artificial Sequence
  Description of Artificial Sequence: Synthetic oligonucleotide
agcacuguucgcuggagcg

SEQ ID NO: 2717010 - RNA, 19 nt, Artificial Sequence
  Description of Artificial Sequence: Synthetic oligonucleotide
cauuuuggcuuuuagcaug

SEQ ID NO: 2717011 - RNA, 19 nt, Artificial Sequence
  Description of Artificial Sequence: Synthetic oligonucleotide
ccgacuacaaugaagagag

SEQ ID NO: 2717012 - RNA, 19 nt, Artificial Sequence
  Description of Artificial Sequence: Synthetic oligonucleotide
agugucauuaacuccgacu

SEQ ID NO: 2717013 - RNA, 19 nt, Artificial Sequence
  Description of Artificial Sequence: Synthetic oligonucleotide
gaguuuaaaauccuuauau

SEQ ID NO: 2717014 - RNA, 19 nt, Artificial Sequence
  Description of Artificial Sequence: Synthetic oligonucleotide
ugaaguacuucaucuaaaa

SEQ ID NO: 2717015 - RNA, 19 nt, Artificial Sequence
  Description of Artificial Sequence: Synthetic oligonucleotide
cuguuaguuuccacgaugc

SEQ ID NO: 2717016 - RNA, 19 nt, Artificial Sequence
  Description of Artificial Sequence: Synthetic oligonucleotide
ugcauauugccgauagaug

SEQ ID NO: 2717017 - RNA, 19 nt, Artificial Sequence
  Description of Artificial Sequence: Synthetic oligonucleotide
guuaguuuccacgaugcag

SEQ ID NO: 2717018 - RNA, 19 nt, Artificial Sequence
  Description of Artificial Sequence: Synthetic oligonucleotide
cuacaaugaagagagcugc

SEQ ID NO: 2717019 - RNA, 19 nt, Artificial Sequence
  Description of Artificial Sequence: Synthetic oligonucleotide
aaacagccaucucauucuc

SEQ ID NO: 2717020 - RNA, 19 nt, Artificial Sequence
  Description of Artificial Sequence: Synthetic oligonucleotide
uuauaucuaguucgacuca

SEQ ID NO: 2717021 - RNA, 19 nt, Artificial Sequence
  Description of Artificial Sequence: Synthetic oligonucleotide
uuccacaaaauuguguaug

SEQ ID NO: 2717022 - RNA, 19 nt, Artificial Sequence
  Description of Artificial Sequence: Synthetic oligonucleotide
augaguuuaaaauccuuau

SEQ ID NO: 2717023 - RNA, 19 nt, Artificial Sequence
  Description of Artificial Sequence: Synthetic oligonucleotide
uccacaaaauuguguauga

SEQ ID NO: 2717024 - RNA, 19 nt, Artificial Sequence
  Description of Artificial Sequence: Synthetic oligonucleotide
cauauugccgauagaugag

SEQ ID NO: 2717025 - RNA, 19 nt, Artificial Sequence
  Description of Artificial Sequence: Synthetic oligonucleotide
acaaaauuguguaugaauu

SEQ ID NO: 2717026 - RNA, 19 nt, Artificial Sequence
  Description of Artificial Sequence: Synthetic oligonucleotide
guaugaauucauaaacagc

SEQ ID NO: 2717027 - RNA, 19 nt, Artificial Sequence
  Description of Artificial Sequence: Synthetic oligonucleotide
cuuucugacaucuugucaa

SEQ ID NO: 2717028 - RNA, 19 nt, Artificial Sequence
  Description of Artificial Sequence: Synthetic oligonucleotide
aacauuauaucuaguucga

SEQ ID NO: 2717029 - RNA, 19 nt, Artificial Sequence
  Description of Artificial Sequence: Synthetic oligonucleotide
ugaacgagcacuguucgcu

SEQ ID NO: 2717030 - RNA, 19 nt, Artificial Sequence
  Description of Artificial Sequence: Synthetic oligonucleotide
caaugaacgagcacuguuc

SEQ ID NO: 2717031 - RNA, 19 nt, Artificial Sequence
  Description of Artificial Sequence: Synthetic oligonucleotide
uagaugaguuuaaaauccu

SEQ ID NO: 2717032 - RNA, 19 nt, Artificial Sequence
  Description of Artificial Sequence: Synthetic oligonucleotide
ucugcugaaguacuucauc

SEQ ID NO: 2717033 - RNA, 19 nt, Artificial Sequence
  Description of Artificial Sequence: Synthetic oligonucleotide
uccgguggcgccuacuggg

SEQ ID NO: 2717034 - RNA, 19 nt, Artificial Sequence
  Description of Artificial Sequence: Synthetic oligonucleotide
ucaaugaacgagcacuguu

SEQ ID NO: 2717035 - RNA, 19 nt, Artificial Sequence
  Description of Artificial Sequence: Synthetic oligonucleotide
ugucaagaaucagcaaagg

SEQ ID NO: 2717036 - RNA, 19 nt, Artificial Sequence
  Description of Artificial Sequence: Synthetic oligonucleotide
uaucuaguucgacucacuc

SEQ ID NO: 2717037 - RNA, 19 nt, Artificial Sequence
  Description of Artificial Sequence: Synthetic oligonucleotide
ucuggcgugggcccgcugg

SEQ ID NO: 2717038 - RNA, 19 nt, Artificial Sequence
  Description of Artificial Sequence: Synthetic oligonucleotide
gucgucaucagcuuucuga

SEQ ID NO: 2717039 - RNA, 19 nt, Artificial Sequence
  Description of Artificial Sequence: Synthetic oligonucleotide
uuucugacaucuugucaag

SEQ ID NO: 2717040 - RNA, 19 nt, Artificial Sequence
  Description of Artificial Sequence: Synthetic oligonucleotide
agcuuucugacaucuuguc

SEQ ID NO: 2717041 - RNA, 19 nt, Artificial Sequence
  Description of Artificial Sequence: Synthetic oligonucleotide
gccauuuuggcuuuuagca

SEQ ID NO: 2717042 - RNA, 19 nt, Artificial Sequence
  Description of Artificial Sequence: Synthetic oligonucleotide
uccgacuacaaugaagaga

SEQ ID NO: 2717043 - RNA, 19 nt, Artificial Sequence
  Description of Artificial Sequence: Synthetic oligonucleotide
acuccgacuacaaugaaga

SEQ ID NO: 2717044 - RNA, 19 nt, Artificial Sequence
  Description of Artificial Sequence: Synthetic oligonucleotide
gaagagagcugcauauugc

SEQ ID NO: 2717045 - RNA, 19 nt, Artificial Sequence
  Description of Artificial Sequence: Synthetic oligonucleotide
uccucuugaggucgaggcg

SEQ ID NO: 2717046 - RNA, 19 nt, Artificial Sequence
  Description of Artificial Sequence: Synthetic oligonucleotide
ucgucaucagcuuucugac

SEQ ID NO: 2717047 - RNA, 19 nt, Artificial Sequence
  Description of Artificial Sequence: Synthetic oligonucleotide
uauaucuaguucgacucac

SEQ ID NO: 2717048 - RNA, 19 nt, Artificial Sequence
  Description of Artificial Sequence: Synthetic oligonucleotide
aacuccgacuacaaugaag

SEQ ID NO: 2717049 - RNA, 19 nt, Artificial Sequence
  Description of Artificial Sequence: Synthetic oligonucleotide
uaaaauccuuauauucaau

SEQ ID NO: 2717050 - RNA, 19 nt, Artificial Sequence
  Description of Artificial Sequence: Synthetic oligonucleotide
uguuugucguccucuugag

SEQ ID NO: 2717051 - RNA, 19 nt, Artificial Sequence
  Description of Artificial Sequence: Synthetic oligonucleotide
augaacgagcacuguucgc

SEQ ID NO: 2717052 - RNA, 19 nt, Artificial Sequence
  Description of Artificial Sequence: Synthetic oligonucleotide
ucauuaacuccgacuacaa

SEQ ID NO: 2717053 - RNA, 19 nt, Artificial Sequence
  Description of Artificial Sequence: Synthetic oligonucleotide
gcauauugccgauagauga

SEQ ID NO: 2717054 - RNA, 19 nt, Artificial Sequence
  Description of Artificial Sequence: Synthetic oligonucleotide
agcaaaggggcaaggauuc

SEQ ID NO: 2717055 - RNA, 19 nt, Artificial Sequence
  Description of Artificial Sequence: Synthetic oligonucleotide
aucuaguucgacucacucu

SEQ ID NO: 2717056 - RNA, 19 nt, Artificial Sequence
  Description of Artificial Sequence: Synthetic oligonucleotide
acaggcagcgcgcugcggg

SEQ ID NO: 2717057 - RNA, 19 nt, Artificial Sequence
  Description of Artificial Sequence: Synthetic oligonucleotide
cugaguuggcgcuuguuug

SEQ ID NO: 2717058 - RNA, 19 nt, Artificial Sequence
  Description of Artificial Sequence: Synthetic oligonucleotide
gugucauuaacuccgacua

SEQ ID NO: 2717059 - RNA, 19 nt, Artificial Sequence
  Description of Artificial Sequence: Synthetic oligonucleotide
aaaggggcaaggauucuug

SEQ ID NO: 2717060 - RNA, 19 nt, Artificial Sequence
  Description of Artificial Sequence: Synthetic oligonucleotide
gaugaguuuaaaauccuua

SEQ ID NO: 2717061 - RNA, 19 nt, Artificial Sequence
  Description of Artificial Sequence: Synthetic oligonucleotide
guccucuugaggucgaggc

SEQ ID NO: 2717062 - RNA, 19 nt, Artificial Sequence
  Description of Artificial Sequence: Synthetic oligonucleotide
acauuauaucuaguucgac

SEQ ID NO: 2717063 - RNA, 19 nt, Artificial Sequence
  Description of Artificial Sequence: Synthetic oligonucleotide
acgaugcagccauuuaaag

SEQ ID NO: 2717064 - RNA, 19 nt, Artificial Sequence
  Description of Artificial Sequence: Synthetic oligonucleotide
uuauccaauuaaacauuau

SEQ ID NO: 2717065 - RNA, 19 nt, Artificial Sequence
  Description of Artificial Sequence: Synthetic oligonucleotide
ugagcgagagucuggcgug

SEQ ID NO: 2717066 - RNA, 19 nt, Artificial Sequence
  Description of Artificial Sequence: Synthetic oligonucleotide
aaauuguguaugaauucau

SEQ ID NO: 2717067 - RNA, 19 nt, Artificial Sequence
  Description of Artificial Sequence: Synthetic oligonucleotide
uguuaguuuccacgaugca

SEQ ID NO: 2717068 - RNA, 19 nt, Artificial Sequence
  Description of Artificial Sequence: Synthetic oligonucleotide
ugucauuaacuccgacuac

SEQ ID NO: 2717069 - RNA, 19 nt, Artificial Sequence
  Description of Artificial Sequence: Synthetic oligonucleotide
ugucguccucuugaggucg

SEQ ID NO: 2717070 - RNA, 19 nt, Artificial Sequence
  Description of Artificial Sequence: Synthetic oligonucleotide
ucucauccaaaaugaugug

SEQ ID NO: 2717071 - RNA, 19 nt, Artificial Sequence
  Description of Artificial Sequence: Synthetic oligonucleotide
cucggggcagccauuuugg

SEQ ID NO: 2717072 - RNA, 19 nt, Artificial Sequence
  Description of Artificial Sequence: Synthetic oligonucleotide
cauuauaucuaguucgacu

SEQ ID NO: 2717073 - RNA, 19 nt, Artificial Sequence
  Description of Artificial Sequence: Synthetic oligonucleotide
auccaaaaugauguggacu

SEQ ID NO: 2717074 - RNA, 19 nt, Artificial Sequence
  Description of Artificial Sequence: Synthetic oligonucleotide
guggacuuuauccaauuaa

SEQ ID NO: 2717075 - RNA, 19 nt, Artificial Sequence
  Description of Artificial Sequence: Synthetic oligonucleotide
aauuguguaugaauucaua

SEQ ID NO: 2717076 - RNA, 19 nt, Artificial Sequence
  Description of Artificial Sequence: Synthetic oligonucleotide
aaaaugauguggacuuuau

SEQ ID NO: 2717077 - RNA, 19 nt, Artificial Sequence
  Description of Artificial Sequence: Synthetic oligonucleotide
aaacuuccacaaaauugug

SEQ ID NO: 2717078 - RNA, 19 nt, Artificial Sequence
  Description of Artificial Sequence: Synthetic oligonucleotide
cuugaggucgaggcgacgc

SEQ ID NO: 2717079 - RNA, 19 nt, Artificial Sequence
  Description of Artificial Sequence: Synthetic oligonucleotide
guguaugaauucauaaaca

SEQ ID NO: 2717080 - RNA, 19 nt, Artificial Sequence
  Description of Artificial Sequence: Synthetic oligonucleotide
guuugucguccucuugagg

SEQ ID NO: 2717081 - RNA, 19 nt, Artificial Sequence
  Description of Artificial Sequence: Synthetic oligonucleotide
cugggcacugaguuggcgc

SEQ ID NO: 2717082 - RNA, 19 nt, Artificial Sequence
  Description of Artificial Sequence: Synthetic oligonucleotide
uugccgauagaugaguuua

SEQ ID NO: 2717083 - RNA, 19 nt, Artificial Sequence
  Description of Artificial Sequence: Synthetic oligonucleotide
auucaaugaacgagcacug

SEQ ID NO: 2717084 - RNA, 19 nt, Artificial Sequence
  Description of Artificial Sequence: Synthetic oligonucleotide
gucauuaacuccgacuaca

SEQ ID NO: 2717085 - RNA, 19 nt, Artificial Sequence
  Description of Artificial Sequence: Synthetic oligonucleotide
uagcauggcgucugcgggg

SEQ ID NO: 2717086 - RNA, 19 nt, Artificial Sequence
  Description of Artificial Sequence: Synthetic oligonucleotide
cauccaaaaugauguggac

SEQ ID NO: 2717087 - RNA, 19 nt, Artificial Sequence
  Description of Artificial Sequence: Synthetic oligonucleotide
cauucucagugucauuaac

SEQ ID NO: 2717088 - RNA, 19 nt, Artificial Sequence
  Description of Artificial Sequence: Synthetic oligonucleotide
agagagcugcauauugccg

SEQ ID NO: 2717089 - RNA, 19 nt, Artificial Sequence
  Description of Artificial Sequence: Synthetic oligonucleotide
uguggacuuuauccaauua

SEQ ID NO: 2717090 - RNA, 19 nt, Artificial Sequence
  Description of Artificial Sequence: Synthetic oligonucleotide
uaguuuccacgaugcagcc

SEQ ID NO: 2717091 - RNA, 19 nt, Artificial Sequence
  Description of Artificial Sequence: Synthetic oligonucleotide
uggcuuuuagcauggcguc

SEQ ID NO: 2717092 - RNA, 19 nt, Artificial Sequence
  Description of Artificial Sequence: Synthetic oligonucleotide
ucauucucagugucauuaa

SEQ ID NO: 2717093 - RNA, 19 nt, Artificial Sequence
  Description of Artificial Sequence: Synthetic oligonucleotide
acaucuugucaagaaucag

SEQ ID NO: 2717094 - RNA, 19 nt, Artificial Sequence
  Description of Artificial Sequence: Synthetic oligonucleotide
uguucgcuggagcggccgg

SEQ ID NO: 2717095 - RNA, 19 nt, Artificial Sequence
  Description of Artificial Sequence: Synthetic oligonucleotide
gaacgagcacuguucgcug

SEQ ID NO: 2717096 - RNA, 19 nt, Artificial Sequence
  Description of Artificial Sequence: Synthetic oligonucleotide
auuaaacauuauaucuagu

SEQ ID NO: 2717097 - RNA, 19 nt, Artificial Sequence
  Description of Artificial Sequence: Synthetic oligonucleotide
ugaggucgaggcgacgcgg

SEQ ID NO: 2717098 - RNA, 19 nt, Artificial Sequence
  Description of Artificial Sequence: Synthetic oligonucleotide
ugcugaaguacuucaucua

SEQ ID NO: 2717099 - RNA, 19 nt, Artificial Sequence
  Description of Artificial Sequence: Synthetic oligonucleotide
auauugccgauagaugagu

SEQ ID NO: 2717100 - RNA, 19 nt, Artificial Sequence
  Description of Artificial Sequence: Synthetic oligonucleotide
ucuugucaagaaucagcaa

SEQ ID NO: 2717101 - RNA, 19 nt, Artificial Sequence
  Description of Artificial Sequence: Synthetic oligonucleotide
agaaucagcaaaggggcaa

SEQ ID NO: 2717102 - RNA, 19 nt, Artificial Sequence
  Description of Artificial Sequence: Synthetic oligonucleotide
uauugccgauagaugaguu

SEQ ID NO: 2717103 - RNA, 19 nt, Artificial Sequence
  Description of Artificial Sequence: Synthetic oligonucleotide
agcauggcgucugcggggc

SEQ ID NO: 2717104 - RNA, 19 nt, Artificial Sequence
  Description of Artificial Sequence: Synthetic oligonucleotide
aagaaucagcaaaggggca

SEQ ID NO: 2717105 - RNA, 19 nt, Artificial Sequence
  Description of Artificial Sequence: Synthetic oligonucleotide
auugccgauagaugaguuu

SEQ ID NO: 2717106 - RNA, 19 nt, Artificial Sequence
  Description of Artificial Sequence: Synthetic oligonucleotide
augaauucauaaacagcca

SEQ ID NO: 2717107 - RNA, 19 nt, Artificial Sequence
  Description of Artificial Sequence: Synthetic oligonucleotide
cuaguucgacucacucugc

SEQ ID NO: 2717108 - RNA, 19 nt, Artificial Sequence
  Description of Artificial Sequence: Synthetic oligonucleotide
gaugcggcguccugucccc

SEQ ID NO: 2717109 - RNA, 19 nt, Artificial Sequence
  Description of Artificial Sequence: Synthetic oligonucleotide
aggggcaaggauucuugcu

SEQ ID NO: 2717110 - RNA, 19 nt, Artificial Sequence
  Description of Artificial Sequence: Synthetic oligonucleotide
guuuccacgaugcagccau

SEQ ID NO: 2717111 - RNA, 19 nt, Artificial Sequence
  Description of Artificial Sequence: Synthetic oligonucleotide
cuuuuagcauggcgucugc

SEQ ID NO: 2717112 - RNA, 19 nt, Artificial Sequence
  Description of Artificial Sequence: Synthetic oligonucleotide
gcugcgggcauccucgggg

SEQ ID NO: 2717113 - RNA, 19 nt, Artificial Sequence
  Description of Artificial Sequence: Synthetic oligonucleotide
uucaaugaacgagcacugu

SEQ ID NO: 2717114 - RNA, 19 nt, Artificial Sequence
  Description of Artificial Sequence: Synthetic oligonucleotide
ucccuccucacaggcagcg

SEQ ID NO: 2717115 - RNA, 19 nt, Artificial Sequence
  Description of Artificial Sequence: Synthetic oligonucleotide
ggacuuuauccaauuaaac

SEQ ID NO: 2717116 - RNA, 19 nt, Artificial Sequence
  Description of Artificial Sequence: Synthetic oligonucleotide
gagcacuguucgcuggagc

SEQ ID NO: 2717117 - RNA, 19 nt, Artificial Sequence
  Description of Artificial Sequence: Synthetic oligonucleotide
cuuuauccaauuaaacauu

SEQ ID NO: 2717118 - RNA, 19 nt, Artificial Sequence
  Description of Artificial Sequence: Synthetic oligonucleotide
cugugagcgagagucuggc

SEQ ID NO: 2717119 - RNA, 19 nt, Artificial Sequence
  Description of Artificial Sequence: Synthetic oligonucleotide
uucugacaucuugucaaga

SEQ ID NO: 2717120 - RNA, 19 nt, Artificial Sequence
  Description of Artificial Sequence: Synthetic oligonucleotide
ccauuuaaagcaucucauc

SEQ ID NO: 2717121 - RNA, 19 nt, Artificial Sequence
  Description of Artificial Sequence: Synthetic oligonucleotide
cacgaugcagccauuuaaa

SEQ ID NO: 2717122 - RNA, 19 nt, Artificial Sequence
  Description of Artificial Sequence: Synthetic oligonucleotide
uggcgcuuguuugucgucc

SEQ ID NO: 2717123 - RNA, 19 nt, Artificial Sequence
  Description of Artificial Sequence: Synthetic oligonucleotide
ugccgauagaugaguuuaa

SEQ ID NO: 2717124 - RNA, 19 nt, Artificial Sequence
  Description of Artificial Sequence: Synthetic oligonucleotide
ccuuauauucaaugaacga

SEQ ID NO: 2717125 - RNA, 19 nt, Artificial Sequence
  Description of Artificial Sequence: Synthetic oligonucleotide
agagcugcauauugccgau

SEQ ID NO: 2717126 - RNA, 19 nt, Artificial Sequence
  Description of Artificial Sequence: Synthetic oligonucleotide
uugucguccucuugagguc

SEQ ID NO: 2717127 - RNA, 19 nt, Artificial Sequence
  Description of Artificial Sequence: Synthetic oligonucleotide
uccacgaugcagccauuua

SEQ ID NO: 2717128 - RNA, 19 nt, Artificial Sequence
  Description of Artificial Sequence: Synthetic oligonucleotide
gcugaaguacuucaucuaa

SEQ ID NO: 2717129 - RNA, 19 nt, Artificial Sequence
  Description of Artificial Sequence: Synthetic oligonucleotide
caucucauucucaguguca

SEQ ID NO: 2717130 - RNA, 19 nt, Artificial Sequence
  Description of Artificial Sequence: Synthetic oligonucleotide
cuccgacuacaaugaagag

SEQ ID NO: 2717131 - RNA, 19 nt, Artificial Sequence
  Description of Artificial Sequence: Synthetic oligonucleotide
aucagcaaaggggcaagga

SEQ ID NO: 2717132 - RNA, 19 nt, Artificial Sequence
  Description of Artificial Sequence: Synthetic oligonucleotide
gcucccuccucacaggcag

SEQ ID NO: 2717133 - RNA, 19 nt, Artificial Sequence
  Description of Artificial Sequence: Synthetic oligonucleotide
cagccauuuuggcuuuuag

SEQ ID NO: 2717134 - RNA, 19 nt, Artificial Sequence
  Description of Artificial Sequence: Synthetic oligonucleotide
ucugcggggcuccuccggu

SEQ ID NO: 2717135 - RNA, 19 nt, Artificial Sequence
  Description of Artificial Sequence: Synthetic oligonucleotide
cugcugaaguacuucaucu

SEQ ID NO: 2717136 - RNA, 19 nt, Artificial Sequence
  Description of Artificial Sequence: Synthetic oligonucleotide
uccgggcuugggcccagcg

SEQ ID NO: 2717137 - RNA, 19 nt, Artificial Sequence
  Description of Artificial Sequence: Synthetic oligonucleotide
cacuguucgcuggagcggc

SEQ ID NO: 2717138 - RNA, 19 nt, Artificial Sequence
  Description of Artificial Sequence: Synthetic oligonucleotide
uaacuccgacuacaaugaa

SEQ ID NO: 2717139 - RNA, 19 nt, Artificial Sequence
  Description of Artificial Sequence: Synthetic oligonucleotide
ucgacucacucugcugaag

SEQ ID NO: 2717140 - RNA, 19 nt, Artificial Sequence
  Description of Artificial Sequence: Synthetic oligonucleotide
caaugaagagagcugcaua

SEQ ID NO: 2717141 - RNA, 19 nt, Artificial Sequence
  Description of Artificial Sequence: Synthetic oligonucleotide
gcucuguuaguuuccacga

SEQ ID NO: 2717142 - RNA, 19 nt, Artificial Sequence
  Description of Artificial Sequence: Synthetic oligonucleotide
uucgacucacucugcugaa

SEQ ID NO: 2717143 - RNA, 19 nt, Artificial Sequence
  Description of Artificial Sequence: Synthetic oligonucleotide
gugagcgagagucuggcgu

SEQ ID NO: 2717144 - RNA, 19 nt, Artificial Sequence
  Description of Artificial Sequence: Synthetic oligonucleotide
auggcgucugcggggcucc

SEQ ID NO: 2717145 - RNA, 19 nt, Artificial Sequence
  Description of Artificial Sequence: Synthetic oligonucleotide
aggcgacgcggagagggcc

SEQ ID NO: 2717146 - RNA, 19 nt, Artificial Sequence
  Description of Artificial Sequence: Synthetic oligonucleotide
ucuugaggucgaggcgacg

SEQ ID NO: 2717147 - RNA, 19 nt, Artificial Sequence
  Description of Artificial Sequence: Synthetic oligonucleotide
auaucuaguucgacucacu

SEQ ID NO: 2717148 - RNA, 19 nt, Artificial Sequence
  Description of Artificial Sequence: Synthetic oligonucleotide
caaaaugauguggacuuua

SEQ ID NO: 2717149 - RNA, 19 nt, Artificial Sequence
  Description of Artificial Sequence: Synthetic oligonucleotide
gcuuuuagcauggcgucug

SEQ ID NO: 2717150 - RNA, 19 nt, Artificial Sequence
  Description of Artificial Sequence: Synthetic oligonucleotide
gcuuucugacaucuuguca

SEQ ID NO: 2717151 - RNA, 19 nt, Artificial Sequence
  Description of Artificial Sequence: Synthetic oligonucleotide
ucacucugcugaaguacuu

SEQ ID NO: 2717152 - RNA, 19 nt, Artificial Sequence
  Description of Artificial Sequence: Synthetic oligonucleotide
cucuugaggucgaggcgac

SEQ ID NO: 2717153 - RNA, 19 nt, Artificial Sequence
  Description of Artificial Sequence: Synthetic oligonucleotide
acgagcacuguucgcugga

SEQ ID NO: 2717154 - RNA, 19 nt, Artificial Sequence
  Description of Artificial Sequence: Synthetic oligonucleotide
uccgaugcggcguccuguc

SEQ ID NO: 2717155 - RNA, 19 nt, Artificial Sequence
  Description of Artificial Sequence: Synthetic oligonucleotide
cugcauauugccgauagau

SEQ ID NO: 2717156 - RNA, 19 nt, Artificial Sequence
  Description of Artificial Sequence: Synthetic oligonucleotide
agagucuggcgugggcccg

SEQ ID NO: 2717157 - RNA, 19 nt, Artificial Sequence
  Description of Artificial Sequence: Synthetic oligonucleotide
ucggggcagccauuuuggc

SEQ ID NO: 2717158 - RNA, 19 nt, Artificial Sequence
  Description of Artificial Sequence: Synthetic oligonucleotide
uuuuggcuuuuagcauggc

SEQ ID NO: 2717159 - RNA, 19 nt, Artificial Sequence
  Description of Artificial Sequence: Synthetic oligonucleotide
cacucugcugaaguacuuc

SEQ ID NO: 2717160 - RNA, 19 nt, Artificial Sequence
  Description of Artificial Sequence: Synthetic oligonucleotide
gagcgagagucuggcgugg

SEQ ID NO: 2717161 - RNA, 19 nt, Artificial Sequence
  Description of Artificial Sequence: Synthetic oligonucleotide
gacucacucugcugaagua

SEQ ID NO: 2717162 - RNA, 19 nt, Artificial Sequence
  Description of Artificial Sequence: Synthetic oligonucleotide
cgauagaugaguuuaaaau

SEQ ID NO: 2717163 - RNA, 19 nt, Artificial Sequence
  Description of Artificial Sequence: Synthetic oligonucleotide
gcgccugugagcgagaguc

SEQ ID NO: 2717164 - RNA, 19 nt, Artificial Sequence
  Description of Artificial Sequence: Synthetic oligonucleotide
cugcgggcauccucggggc

SEQ ID NO: 2717165 - RNA, 19 nt, Artificial Sequence
  Description of Artificial Sequence: Synthetic oligonucleotide
gucugcggggcuccuccgg

SEQ ID NO: 2717166 - RNA, 19 nt, Artificial Sequence
  Description of Artificial Sequence: Synthetic oligonucleotide
uuccgaugcggcguccugu

SEQ ID NO: 2717167 - RNA, 19 nt, Artificial Sequence
  Description of Artificial Sequence: Synthetic oligonucleotide
cuguucgcuggagcggccg

SEQ ID NO: 2717168 - RNA, 19 nt, Artificial Sequence
  Description of Artificial Sequence: Synthetic oligonucleotide
aggucgaggcgacgcggag

SEQ ID NO: 2717169 - RNA, 19 nt, Artificial Sequence
  Description of Artificial Sequence: Synthetic oligonucleotide
acuguucgcuggagcggcc

SEQ ID NO: 2717170 - RNA, 19 nt, Artificial Sequence
  Description of Artificial Sequence: Synthetic oligonucleotide
ccugugagcgagagucugg

SEQ ID NO: 2717171 - RNA, 19 nt, Artificial Sequence
  Description of Artificial Sequence: Synthetic oligonucleotide
agggcccgggcugaguguc

SEQ ID NO: 2717172 - RNA, 19 nt, Artificial Sequence
  Description of Artificial Sequence: Synthetic oligonucleotide
guuggcgcuuguuugucgu

SEQ ID NO: 2717173 - RNA, 19 nt, Artificial Sequence
  Description of Artificial Sequence: Synthetic oligonucleotide
gacgcggagagggcccggg

SEQ ID NO: 2717174 - RNA, 19 nt, Artificial Sequence
  Description of Artificial Sequence: Synthetic oligonucleotide
cagugucauuaacuccgac

SEQ ID NO: 2717175 - RNA, 19 nt, Artificial Sequence
  Description of Artificial Sequence: Synthetic oligonucleotide
cuggcgugggcccgcuggg

SEQ ID NO: 2717176 - RNA, 19 nt, Artificial Sequence
  Description of Artificial Sequence: Synthetic oligonucleotide
aguuuccacgaugcagcca

SEQ ID NO: 2717177 - RNA, 19 nt, Artificial Sequence
  Description of Artificial Sequence: Synthetic oligonucleotide
caggcagcgcgcugcgggc

SEQ ID NO: 2717178 - RNA, 19 nt, Artificial Sequence
  Description of Artificial Sequence: Synthetic oligonucleotide
uuggcgcuuguuugucguc

SEQ ID NO: 2717179 - RNA, 19 nt, Artificial Sequence
  Description of Artificial Sequence: Synthetic oligonucleotide
agcgagagucuggcguggg

SEQ ID NO: 2717180 - RNA, 19 nt, Artificial Sequence
  Description of Artificial Sequence: Synthetic oligonucleotide
cagccauuuaaagcaucuc

SEQ ID NO: 2717181 - RNA, 19 nt, Artificial Sequence
  Description of Artificial Sequence: Synthetic oligonucleotide
uacugggccuccgggcuug

SEQ ID NO: 2717182 - RNA, 19 nt, Artificial Sequence
  Description of Artificial Sequence: Synthetic oligonucleotide
uuccacgaugcagccauuu

SEQ ID NO: 2717183 - RNA, 19 nt, Artificial Sequence
  Description of Artificial Sequence: Synthetic oligonucleotide
cugacaucuugucaagaau

SEQ ID NO: 2717184 - RNA, 19 nt, Artificial Sequence
  Description of Artificial Sequence: Synthetic oligonucleotide
cuuccgaugcggcguccug

SEQ ID NO: 2717185 - RNA, 19 nt, Artificial Sequence
  Description of Artificial Sequence: Synthetic oligonucleotide
ggcaaggauucuugcucug

SEQ ID NO: 2717186 - RNA, 19 nt, Artificial Sequence
  Description of Artificial Sequence: Synthetic oligonucleotide
uucgcuggagcggccggcu

SEQ ID NO: 2717187 - RNA, 19 nt, Artificial Sequence
  Description of Artificial Sequence: Synthetic oligonucleotide
cuuccacaaaauuguguau

SEQ ID NO: 2717188 - RNA, 19 nt, Artificial Sequence
  Description of Artificial Sequence: Synthetic oligonucleotide
gcacuguucgcuggagcgg

SEQ ID NO: 2717189 - RNA, 19 nt, Artificial Sequence
  Description of Artificial Sequence: Synthetic oligonucleotide
ccgauagaugaguuuaaaa

SEQ ID NO: 2717190 - RNA, 19 nt, Artificial Sequence
  Description of Artificial Sequence: Synthetic oligonucleotide
ugcgggcauccucggggca

SEQ ID NO: 2717191 - RNA, 19 nt, Artificial Sequence
  Description of Artificial Sequence: Synthetic oligonucleotide
cucccuccucacaggcagc

SEQ ID NO: 2717192 - RNA, 19 nt, Artificial Sequence
  Description of Artificial Sequence: Synthetic oligonucleotide
caucagcuuucugacaucu

SEQ ID NO: 2717193 - RNA, 19 nt, Artificial Sequence
  Description of Artificial Sequence: Synthetic oligonucleotide
ccucggggcagccauuuug

SEQ ID NO: 2717194 - RNA, 19 nt, Artificial Sequence
  Description of Artificial Sequence: Synthetic oligonucleotide
cgcgcugcgggcauccucg

SEQ ID NO: 2717195 - RNA, 19 nt, Artificial Sequence
  Description of Artificial Sequence: Synthetic oligonucleotide
gccuacugggccuccgggc

SEQ ID NO: 2717196 - RNA, 19 nt, Artificial Sequence
  Description of Artificial Sequence: Synthetic oligonucleotide
gaggcgacgcggagagggc

SEQ ID NO: 2717197 - RNA, 19 nt, Artificial Sequence
  Description of Artificial Sequence: Synthetic oligonucleotide
ugcggcguccuguccccac

SEQ ID NO: 2717198 - RNA, 19 nt, Artificial Sequence
  Description of Artificial Sequence: Synthetic oligonucleotide
gaggucgaggcgacgcgga

SEQ ID NO: 2717199 - RNA, 19 nt, Artificial Sequence
  Description of Artificial Sequence: Synthetic oligonucleotide
cauggcgucugcggggcuc

SEQ ID NO: 2717200 - RNA, 19 nt, Artificial Sequence
  Description of Artificial Sequence: Synthetic oligonucleotide
ucguccucuugaggucgag

SEQ ID NO: 2717201 - RNA, 19 nt, Artificial Sequence
  Description of Artificial Sequence: Synthetic oligonucleotide
guucgcuggagcggccggc

SEQ ID NO: 2717202 - RNA, 19 nt, Artificial Sequence
  Description of Artificial Sequence: Synthetic oligonucleotide
gccauuuaaagcaucucau

SEQ ID NO: 2717203 - RNA, 19 nt, Artificial Sequence
  Description of Artificial Sequence: Synthetic oligonucleotide
agcgccugugagcgagagu

SEQ ID NO: 2717204 - RNA, 19 nt, Artificial Sequence
  Description of Artificial Sequence: Synthetic oligonucleotide
uggagcggccggcucccuc

SEQ ID NO: 2717205 - RNA, 19 nt, Artificial Sequence
  Description of Artificial Sequence: Synthetic oligonucleotide
cauuaacuccgacuacaau

SEQ ID NO: 2717206 - RNA, 19 nt, Artificial Sequence
  Description of Artificial Sequence: Synthetic oligonucleotide
cgagagucuggcgugggcc

SEQ ID NO: 2717207 - RNA, 19 nt, Artificial Sequence
  Description of Artificial Sequence: Synthetic oligonucleotide
cgaugcggcguccuguccc

SEQ ID NO: 2717208 - RNA, 19 nt, Artificial Sequence
  Description of Artificial Sequence: Synthetic oligonucleotide
gagucuggcgugggcccgc

SEQ ID NO: 2717209 - RNA, 19 nt, Artificial Sequence
  Description of Artificial Sequence: Synthetic oligonucleotide
gcggagagggcccgggcug

SEQ ID NO: 2717210 - RNA, 19 nt, Artificial Sequence
  Description of Artificial Sequence: Synthetic oligonucleotide
ggcacugaguuggcgcuug

SEQ ID NO: 2717211 - RNA, 19 nt, Artificial Sequence
  Description of Artificial Sequence: Synthetic oligonucleotide
gccugugagcgagagucug

SEQ ID NO: 2717212 - RNA, 19 nt, Artificial Sequence
  Description of Artificial Sequence: Synthetic oligonucleotide
gggcaaggauucuugcucu

SEQ ID NO: 2717213 - RNA, 19 nt, Artificial Sequence
  Description of Artificial Sequence: Synthetic oligonucleotide
ggcugagugucuggccucc

SEQ ID NO: 2717214 - RNA, 19 nt, Artificial Sequence
  Description of Artificial Sequence: Synthetic oligonucleotide
gcugcauauugccgauaga

SEQ ID NO: 2717215 - RNA, 19 nt, Artificial Sequence
  Description of Artificial Sequence: Synthetic oligonucleotide
cagcgccugugagcgagag

SEQ ID NO: 2717216 - RNA, 19 nt, Artificial Sequence
  Description of Artificial Sequence: Synthetic oligonucleotide
ucgcuggagcggccggcuc

SEQ ID NO: 2717217 - RNA, 19 nt, Artificial Sequence
  Description of Artificial Sequence: Synthetic oligonucleotide
gcgagagucuggcgugggc

SEQ ID NO: 2717218 - RNA, 19 nt, Artificial Sequence
  Description of Artificial Sequence: Synthetic oligonucleotide
uggcgugggcccgcugggc

SEQ ID NO: 2717219 - RNA, 19 nt, Artificial Sequence
  Description of Artificial Sequence: Synthetic oligonucleotide
gcgccuacugggccuccgg

SEQ ID NO: 2717220 - RNA, 19 nt, Artificial Sequence
  Description of Artificial Sequence: Synthetic oligonucleotide
cccagcgccugugagcgag

SEQ ID NO: 2717221 - RNA, 19 nt, Artificial Sequence
  Description of Artificial Sequence: Synthetic oligonucleotide
cacaggcagcgcgcugcgg

SEQ ID NO: 2717222 - RNA, 19 nt, Artificial Sequence
  Description of Artificial Sequence: Synthetic oligonucleotide
cucuguuaguuuccacgau

SEQ ID NO: 2717223 - RNA, 19 nt, Artificial Sequence
  Description of Artificial Sequence: Synthetic oligonucleotide
agcggccggcucccuccuc

SEQ ID NO: 2717224 - RNA, 19 nt, Artificial Sequence
  Description of Artificial Sequence: Synthetic oligonucleotide
cagcgcgcugcgggcaucc

SEQ ID NO: 2717225 - RNA, 19 nt, Artificial Sequence
  Description of Artificial Sequence: Synthetic oligonucleotide
uccuccgguggcgccuacu

SEQ ID NO: 2717226 - RNA, 19 nt, Artificial Sequence
  Description of Artificial Sequence: Synthetic oligonucleotide
gccgauagaugaguuuaaa

SEQ ID NO: 2717227 - RNA, 19 nt, Artificial Sequence
  Description of Artificial Sequence: Synthetic oligonucleotide
ggcgacgcggagagggccc

SEQ ID NO: 2717228 - RNA, 19 nt, Artificial Sequence
  Description of Artificial Sequence: Synthetic oligonucleotide
gcgggcauccucggggcag

SEQ ID NO: 2717229 - RNA, 19 nt, Artificial Sequence
  Description of Artificial Sequence: Synthetic oligonucleotide
gggcugagugucuggccuc

SEQ ID NO: 2717230 - RNA, 19 nt, Artificial Sequence
  Description of Artificial Sequence: Synthetic oligonucleotide
ccgguggcgccuacugggc

SEQ ID NO: 2717231 - RNA, 19 nt, Artificial Sequence
  Description of Artificial Sequence: Synthetic oligonucleotide
ggcgugggcccgcugggca

SEQ ID NO: 2717232 - RNA, 19 nt, Artificial Sequence
  Description of Artificial Sequence: Synthetic oligonucleotide
ggcguccuguccccacccc

SEQ ID NO: 2717233 - RNA, 19 nt, Artificial Sequence
  Description of Artificial Sequence: Synthetic oligonucleotide
cccgcugggcacugaguug

SEQ ID NO: 2717234 - RNA, 19 nt, Artificial Sequence
  Description of Artificial Sequence: Synthetic oligonucleotide
ccgggcugagugucuggcc

SEQ ID NO: 2717235 - RNA, 19 nt, Artificial Sequence
  Description of Artificial Sequence: Synthetic oligonucleotide
ccgggcuugggcccagcgc

SEQ ID NO: 2717236 - RNA, 19 nt, Artificial Sequence
  Description of Artificial Sequence: Synthetic oligonucleotide
ggccuccgggcuugggccc

SEQ ID NO: 2717237 - RNA, 19 nt, Artificial Sequence
  Description of Artificial Sequence: Synthetic oligonucleotide
gguggcgccuacugggccu

SEQ ID NO: 2717238 - RNA, 19 nt, Artificial Sequence
  Description of Artificial Sequence: Synthetic oligonucleotide
gcggcguccuguccccacc

SEQ ID NO: 2717239 - RNA, 19 nt, Artificial Sequence
  Description of Artificial Sequence: Synthetic oligonucleotide
ggucgaggcgacgcggaga

SEQ ID NO: 2717240 - RNA, 19 nt, Artificial Sequence
  Description of Artificial Sequence: Synthetic oligonucleotide
cgacuacaaugaagagagc

SEQ ID NO: 2717241 - RNA, 19 nt, Artificial Sequence
  Description of Artificial Sequence: Synthetic oligonucleotide
cguccucuugaggucgagg

SEQ ID NO: 2717242 - RNA, 19 nt, Artificial Sequence
  Description of Artificial Sequence: Synthetic oligonucleotide
gucguccucuugaggucga

SEQ ID NO: 2717243 - RNA, 19 nt, Artificial Sequence
  Description of Artificial Sequence: Synthetic oligonucleotide
guggcgccuacugggccuc

SEQ ID NO: 2717244 - RNA, 19 nt, Artificial Sequence
  Description of Artificial Sequence: Synthetic oligonucleotide
ggcgccuacugggccuccg

SEQ ID NO: 2717245 - RNA, 19 nt, Artificial Sequence
  Description of Artificial Sequence: Synthetic oligonucleotide
cgccuacugggccuccggg

SEQ ID NO: 2717246 - RNA, 19 nt, Artificial Sequence
  Description of Artificial Sequence: Synthetic oligonucleotide
cgcuggagcggccggcucc

SEQ ID NO: 2717247 - RNA, 19 nt, Artificial Sequence
  Description of Artificial Sequence: Synthetic oligonucleotide
agucuggcgugggcccgcu

SEQ ID NO: 2717248 - RNA, 19 nt, Artificial Sequence
  Description of Artificial Sequence: Synthetic oligonucleotide
ggcuuuuagcauggcgucu

SEQ ID NO: 2717249 - RNA, 19 nt, Artificial Sequence
  Description of Artificial Sequence: Synthetic oligonucleotide
ccuacugggccuccgggcu

SEQ ID NO: 2717250 - RNA, 19 nt, Artificial Sequence
  Description of Artificial Sequence: Synthetic oligonucleotide
gcgacgcggagagggcccg

SEQ ID NO: 2717251 - RNA, 19 nt, Artificial Sequence
  Description of Artificial Sequence: Synthetic oligonucleotide
gcggccggcucccuccuca

SEQ ID NO: 2717252 - RNA, 19 nt, Artificial Sequence
  Description of Artificial Sequence: Synthetic oligonucleotide
ggcgcuuguuugucguccu

SEQ ID NO: 2717253 - RNA, 19 nt, Artificial Sequence
  Description of Artificial Sequence: Synthetic oligonucleotide
gucuggcgugggcccgcug

SEQ ID NO: 2717254 - RNA, 19 nt, Artificial Sequence
  Description of Artificial Sequence: Synthetic oligonucleotide
cggcucccuccucacaggc

SEQ ID NO: 2717255 - RNA, 19 nt, Artificial Sequence
  Description of Artificial Sequence: Synthetic oligonucleotide
ccgaugcggcguccugucc

SEQ ID NO: 2717256 - RNA, 19 nt, Artificial Sequence
  Description of Artificial Sequence: Synthetic oligonucleotide
gcgcugcgggcauccucgg

SEQ ID NO: 2717257 - RNA, 19 nt, Artificial Sequence
  Description of Artificial Sequence: Synthetic oligonucleotide
gcgugggcccgcugggcac

SEQ ID NO: 2717258 - RNA, 19 nt, Artificial Sequence
  Description of Artificial Sequence: Synthetic oligonucleotide
gcgcuuguuugucguccuc

SEQ ID NO: 2717259 - RNA, 19 nt, Artificial Sequence
  Description of Artificial Sequence: Synthetic oligonucleotide
ccucacaggcagcgcgcug

SEQ ID NO: 2717260 - RNA, 19 nt, Artificial Sequence
  Description of Artificial Sequence: Synthetic oligonucleotide
uggcgccuacugggccucc

SEQ ID NO: 2717261 - RNA, 19 nt, Artificial Sequence
  Description of Artificial Sequence: Synthetic oligonucleotide
ggcccgggcugagugucug

SEQ ID NO: 2717262 - RNA, 19 nt, Artificial Sequence
  Description of Artificial Sequence: Synthetic oligonucleotide
cgagcacuguucgcuggag

SEQ ID NO: 2717263 - RNA, 19 nt, Artificial Sequence
  Description of Artificial Sequence: Synthetic oligonucleotide
gcccgcugggcacugaguu

SEQ ID NO: 2717264 - RNA, 19 nt, Artificial Sequence
  Description of Artificial Sequence: Synthetic oligonucleotide
ggcucccuccucacaggca

SEQ ID NO: 2717265 - RNA, 19 nt, Artificial Sequence
  Description of Artificial Sequence: Synthetic oligonucleotide
cgacucacucugcugaagu

SEQ ID NO: 2717266 - RNA, 19 nt, Artificial Sequence
  Description of Artificial Sequence: Synthetic oligonucleotide
augcggcguccugucccca

SEQ ID NO: 2717267 - RNA, 19 nt, Artificial Sequence
  Description of Artificial Sequence: Synthetic oligonucleotide
ugggcccgcugggcacuga

SEQ ID NO: 2717268 - RNA, 19 nt, Artificial Sequence
  Description of Artificial Sequence: Synthetic oligonucleotide
gcgcgcugcgggcauccuc

SEQ ID NO: 2717269 - RNA, 19 nt, Artificial Sequence
  Description of Artificial Sequence: Synthetic oligonucleotide
cuccuccgguggcgccuac

SEQ ID NO: 2717270 - RNA, 19 nt, Artificial Sequence
  Description of Artificial Sequence: Synthetic oligonucleotide
uggcgucugcggggcuccu

SEQ ID NO: 2717271 - RNA, 19 nt, Artificial Sequence
  Description of Artificial Sequence: Synthetic oligonucleotide
cuccgggcuugggcccagc

SEQ ID NO: 2717272 - RNA, 19 nt, Artificial Sequence
  Description of Artificial Sequence: Synthetic oligonucleotide
agcgcgcugcgggcauccu

SEQ ID NO: 2717273 - RNA, 19 nt, Artificial Sequence
  Description of Artificial Sequence: Synthetic oligonucleotide
cggcguccuguccccaccc

SEQ ID NO: 2717274 - RNA, 19 nt, Artificial Sequence
  Description of Artificial Sequence: Synthetic oligonucleotide
ccccuuccgaugcggcguc

SEQ ID NO: 2717275 - RNA, 19 nt, Artificial Sequence
  Description of Artificial Sequence: Synthetic oligonucleotide
ggccggcucccuccucaca

SEQ ID NO: 2717276 - RNA, 19 nt, Artificial Sequence
  Description of Artificial Sequence: Synthetic oligonucleotide
cgggcugagugucuggccu

SEQ ID NO: 2717277 - RNA, 19 nt, Artificial Sequence
  Description of Artificial Sequence: Synthetic oligonucleotide
cacugaguuggcgcuuguu

SEQ ID NO: 2717278 - RNA, 19 nt, Artificial Sequence
  Description of Artificial Sequence: Synthetic oligonucleotide
cauccucggggcagccauu

SEQ ID NO: 2717279 - RNA, 19 nt, Artificial Sequence
  Description of Artificial Sequence: Synthetic oligonucleotide
cgggcauccucggggcagc

SEQ ID NO: 2717280 - RNA, 19 nt, Artificial Sequence
  Description of Artificial Sequence: Synthetic oligonucleotide
ggcgucugcggggcuccuc

SEQ ID NO: 2717281 - RNA, 19 nt, Artificial Sequence
  Description of Artificial Sequence: Synthetic oligonucleotide
cgcuuguuugucguccucu

SEQ ID NO: 2717282 - RNA, 19 nt, Artificial Sequence
  Description of Artificial Sequence: Synthetic oligonucleotide
cccuuccgaugcggcgucc

SEQ ID NO: 2717283 - RNA, 19 nt, Artificial Sequence
  Description of Artificial Sequence: Synthetic oligonucleotide
ccagcgccugugagcgaga

SEQ ID NO: 2717284 - RNA, 19 nt, Artificial Sequence
  Description of Artificial Sequence: Synthetic oligonucleotide
gccuccgggcuugggccca

SEQ ID NO: 2717285 - RNA, 19 nt, Artificial Sequence
  Description of Artificial Sequence: Synthetic oligonucleotide
ggcagcgcgcugcgggcau

SEQ ID NO: 2717286 - RNA, 19 nt, Artificial Sequence
  Description of Artificial Sequence: Synthetic oligonucleotide
gcagcgcgcugcgggcauc

SEQ ID NO: 2717287 - RNA, 19 nt, Artificial Sequence
  Description of Artificial Sequence: Synthetic oligonucleotide
ccuuccgaugcggcguccu

SEQ ID NO: 2717288 - RNA, 19 nt, Artificial Sequence
  Description of Artificial Sequence: Synthetic oligonucleotide
ccuccgggcuugggcccag

SEQ ID NO: 2717289 - RNA, 19 nt, Artificial Sequence
  Description of Artificial Sequence: Synthetic oligonucleotide
gcuccuccgguggcgccua

SEQ ID NO: 2717290 - RNA, 19 nt, Artificial Sequence
  Description of Artificial Sequence: Synthetic oligonucleotide
gcccagcgccugugagcga

SEQ ID NO: 2717291 - RNA, 19 nt, Artificial Sequence
  Description of Artificial Sequence: Synthetic oligonucleotide
cgacgcggagagggcccgg

SEQ ID NO: 2717292 - RNA, 19 nt, Artificial Sequence
  Description of Artificial Sequence: Synthetic oligonucleotide
gcauggcgucugcggggcu

SEQ ID NO: 2717293 - RNA, 19 nt, Artificial Sequence
  Description of Artificial Sequence: Synthetic oligonucleotide
cggagagggcccgggcuga

SEQ ID NO: 2717294 - RNA, 19 nt, Artificial Sequence
  Description of Artificial Sequence: Synthetic oligonucleotide
gggcacugaguuggcgcuu

SEQ ID NO: 2717295 - RNA, 19 nt, Artificial Sequence
  Description of Artificial Sequence: Synthetic oligonucleotide
cuggagcggccggcucccu

SEQ ID NO: 2717296 - RNA, 19 nt, Artificial Sequence
  Description of Artificial Sequence: Synthetic oligonucleotide
gggcccgggcugagugucu

SEQ ID NO: 2717297 - RNA, 19 nt, Artificial Sequence
  Description of Artificial Sequence: Synthetic oligonucleotide
aaauuaaacauuuacucuc

SEQ ID NO: 2717298 - RNA, 19 nt, Artificial Sequence
  Description of Artificial Sequence: Synthetic oligonucleotide
acaagugaaagucaggucc

SEQ ID NO: 2717299 - RNA, 19 nt, Artificial Sequence
  Description of Artificial Sequence: Synthetic oligonucleotide
uuuugaauugaauagacga

SEQ ID NO: 2717300 - RNA, 19 nt, Artificial Sequence
  Description of Artificial Sequence: Synthetic oligonucleotide
uacuaaaugaaacaugggc

SEQ ID NO: 2717301 - RNA, 19 nt, Artificial Sequence
  Description of Artificial Sequence: Synthetic oligonucleotide
auaaucuucucuuguaacc

SEQ ID NO: 2717302 - RNA, 19 nt, Artificial Sequence
  Description of Artificial Sequence: Synthetic oligonucleotide
acaauguauucucagaaac

SEQ ID NO: 2717303 - RNA, 19 nt, Artificial Sequence
  Description of Artificial Sequence: Synthetic oligonucleotide
aauugaauagacgauagcu

SEQ ID NO: 2717304 - RNA, 19 nt, Artificial Sequence
  Description of Artificial Sequence: Synthetic oligonucleotide
ucagauaucaauuuuccac

SEQ ID NO: 2717305 - RNA, 19 nt, Artificial Sequence
  Description of Artificial Sequence: Synthetic oligonucleotide
aauguauucucagaaacag

SEQ ID NO: 2717306 - RNA, 19 nt, Artificial Sequence
  Description of Artificial Sequence: Synthetic oligonucleotide
aaaucaagcuucccaagac

SEQ ID NO: 2717307 - RNA, 19 nt, Artificial Sequence
  Description of Artificial Sequence: Synthetic oligonucleotide
aacuuugaaaucaagcuuc

SEQ ID NO: 2717308 - RNA, 19 nt, Artificial Sequence
  Description of Artificial Sequence: Synthetic oligonucleotide
uagguuuugaauugaauag

SEQ ID NO: 2717309 - RNA, 19 nt, Artificial Sequence
  Description of Artificial Sequence: Synthetic oligonucleotide
caaauuuacucuuucacag

SEQ ID NO: 2717310 - RNA, 19 nt, Artificial Sequence
  Description of Artificial Sequence: Synthetic oligonucleotide
ucuaacuacuaaaugaaac

SEQ ID NO: 2717311 - RNA, 19 nt, Artificial Sequence
  Description of Artificial Sequence: Synthetic oligonucleotide
acuacuaaaugaaacaugg

SEQ ID NO: 2717312 - RNA, 19 nt, Artificial Sequence
  Description of Artificial Sequence: Synthetic oligonucleotide
ugucagaaggguuaaagag

SEQ ID NO: 2717313 - RNA, 19 nt, Artificial Sequence
  Description of Artificial Sequence: Synthetic oligonucleotide
acuaugacaagugaaaguc

SEQ ID NO: 2717314 - RNA, 19 nt, Artificial Sequence
  Description of Artificial Sequence: Synthetic oligonucleotide
uagucuaacuacuaaauga

SEQ ID NO: 2717315 - RNA, 19 nt, Artificial Sequence
  Description of Artificial Sequence: Synthetic oligonucleotide
uaugacaagugaaagucag

SEQ ID NO: 2717316 - RNA, 19 nt, Artificial Sequence
  Description of Artificial Sequence: Synthetic oligonucleotide
ugaauugaauagacgauag

SEQ ID NO: 2717317 - RNA, 19 nt, Artificial Sequence
  Description of Artificial Sequence: Synthetic oligonucleotide
uuaacuaugacaagugaaa

SEQ ID NO: 2717318 - RNA, 19 nt, Artificial Sequence
  Description of Artificial Sequence: Synthetic oligonucleotide
ugaaacaugggcuuaauua

SEQ ID NO: 2717319 - RNA, 19 nt, Artificial Sequence
  Description of Artificial Sequence: Synthetic oligonucleotide
uucacagacacuaugucca

SEQ ID NO: 2717320 - RNA, 19 nt, Artificial Sequence
  Description of Artificial Sequence: Synthetic oligonucleotide
uuucagauaucaauuuucc

SEQ ID NO: 2717321 - RNA, 19 nt, Artificial Sequence
  Description of Artificial Sequence: Synthetic oligonucleotide
aaagucagguccuuaaccu

SEQ ID NO: 2717322 - RNA, 19 nt, Artificial Sequence
  Description of Artificial Sequence: Synthetic oligonucleotide
uuucucaugacagacaaug

SEQ ID NO: 2717323 - RNA, 19 nt, Artificial Sequence
  Description of Artificial Sequence: Synthetic oligonucleotide
uacacuagacaguaaaacc

SEQ ID NO: 2717324 - RNA, 19 nt, Artificial Sequence
  Description of Artificial Sequence: Synthetic oligonucleotide
ucaaauuuacucuuucaca

SEQ ID NO: 2717325 - RNA, 19 nt, Artificial Sequence
  Description of Artificial Sequence: Synthetic oligonucleotide
acacuagacaguaaaaccc

SEQ ID NO: 2717326 - RNA, 19 nt, Artificial Sequence
  Description of Artificial Sequence: Synthetic oligonucleotide
gaaacaugggcuuaauuac

SEQ ID NO: 2717327 - RNA, 19 nt, Artificial Sequence
  Description of Artificial Sequence: Synthetic oligonucleotide
uaaaacccacguuagaagc

SEQ ID NO: 2717328 - RNA, 19 nt, Artificial Sequence
  Description of Artificial Sequence: Synthetic oligonucleotide
gaauuccaaugucagaagg

SEQ ID NO: 2717329 - RNA, 19 nt, Artificial Sequence
  Description of Artificial Sequence: Synthetic oligonucleotide
ucucacuuucucaugacag

SEQ ID NO: 2717330 - RNA, 19 nt, Artificial Sequence
  Description of Artificial Sequence: Synthetic oligonucleotide
aagaaucuguuccccagac

SEQ ID NO: 2717331 - RNA, 19 nt, Artificial Sequence
  Description of Artificial Sequence: Synthetic oligonucleotide
uuuauguuaguugugagau

SEQ ID NO: 2717332 - RNA, 19 nt, Artificial Sequence
  Description of Artificial Sequence: Synthetic oligonucleotide
cuucccaagacuuucauuc

SEQ ID NO: 2717333 - RNA, 19 nt, Artificial Sequence
  Description of Artificial Sequence: Synthetic oligonucleotide
gcuuaauuacacuagacag

SEQ ID NO: 2717334 - RNA, 19 nt, Artificial Sequence
  Description of Artificial Sequence: Synthetic oligonucleotide
acuauguccauuuucuucu

SEQ ID NO: 2717335 - RNA, 19 nt, Artificial Sequence
  Description of Artificial Sequence: Synthetic oligonucleotide
guaaguauugguauaguag

SEQ ID NO: 2717336 - RNA, 19 nt, Artificial Sequence
  Description of Artificial Sequence: Synthetic oligonucleotide
cagauaucaauuuuccacc

SEQ ID NO: 2717337 - RNA, 19 nt, Artificial Sequence
  Description of Artificial Sequence: Synthetic oligonucleotide
gaaacuuugaaaucaagcu

SEQ ID NO: 2717338 - RNA, 19 nt, Artificial Sequence
  Description of Artificial Sequence: Synthetic oligonucleotide
ucaauuuuccaccuuccca

SEQ ID NO: 2717339 - RNA, 19 nt, Artificial Sequence
  Description of Artificial Sequence: Synthetic oligonucleotide
aaacuuugaaaucaagcuu

SEQ ID NO: 2717340 - RNA, 19 nt, Artificial Sequence
  Description of Artificial Sequence: Synthetic oligonucleotide
ucuggaacagcaaaccucu

SEQ ID NO: 2717341 - RNA, 19 nt, Artificial Sequence
  Description of Artificial Sequence: Synthetic oligonucleotide
auacuucccgcucagcacc

SEQ ID NO: 2717342 - RNA, 19 nt, Artificial Sequence
  Description of Artificial Sequence: Synthetic oligonucleotide
aacuaugacaagugaaagu

SEQ ID NO: 2717343 - RNA, 19 nt, Artificial Sequence
  Description of Artificial Sequence: Synthetic oligonucleotide
uuauacuucccgcucagca

SEQ ID NO: 2717344 - RNA, 19 nt, Artificial Sequence
  Description of Artificial Sequence: Synthetic oligonucleotide
aauuccaaugucagaaggg

SEQ ID NO: 2717345 - RNA, 19 nt, Artificial Sequence
  Description of Artificial Sequence: Synthetic oligonucleotide
gaaagucagguccuuaacc

SEQ ID NO: 2717346 - RNA, 19 nt, Artificial Sequence
  Description of Artificial Sequence: Synthetic oligonucleotide
auugguauaguagucuaac

SEQ ID NO: 2717347 - RNA, 19 nt, Artificial Sequence
  Description of Artificial Sequence: Synthetic oligonucleotide
uucuuaacuaugacaagug

SEQ ID NO: 2717348 - RNA, 19 nt, Artificial Sequence
  Description of Artificial Sequence: Synthetic oligonucleotide
uggaacagcaaaccucucg

SEQ ID NO: 2717349 - RNA, 19 nt, Artificial Sequence
  Description of Artificial Sequence: Synthetic oligonucleotide
auagacgauagcuuccggg

SEQ ID NO: 2717350 - RNA, 19 nt, Artificial Sequence
  Description of Artificial Sequence: Synthetic oligonucleotide
aucaauuuuccaccuuccc

SEQ ID NO: 2717351 - RNA, 19 nt, Artificial Sequence
  Description of Artificial Sequence: Synthetic oligonucleotide
uugaauagacgauagcuuc

SEQ ID NO: 2717352 - RNA, 19 nt, Artificial Sequence
  Description of Artificial Sequence: Synthetic oligonucleotide
uuucuuaacuaugacaagu

SEQ ID NO: 2717353 - RNA, 19 nt, Artificial Sequence
  Description of Artificial Sequence: Synthetic oligonucleotide
aaaacccacguuagaagcc

SEQ ID NO: 2717354 - RNA, 19 nt, Artificial Sequence
  Description of Artificial Sequence: Synthetic oligonucleotide
ucucuuguaaccaccauau

SEQ ID NO: 2717355 - RNA, 19 nt, Artificial Sequence
  Description of Artificial Sequence: Synthetic oligonucleotide
uuaauuacacuagacagua

SEQ ID NO: 2717356 - RNA, 19 nt, Artificial Sequence
  Description of Artificial Sequence: Synthetic oligonucleotide
gaaacaguguaaguauugg

SEQ ID NO: 2717357 - RNA, 19 nt, Artificial Sequence
  Description of Artificial Sequence: Synthetic oligonucleotide
agacuauuuauguuaguug

SEQ ID NO: 2717358 - RNA, 19 nt, Artificial Sequence
  Description of Artificial Sequence: Synthetic oligonucleotide
cuaacuacuaaaugaaaca

SEQ ID NO: 2717359 - RNA, 19 nt, Artificial Sequence
  Description of Artificial Sequence: Synthetic oligonucleotide
agacuuucauuccaaaaug

SEQ ID NO: 2717360 - RNA, 19 nt, Artificial Sequence
  Description of Artificial Sequence: Synthetic oligonucleotide
uauaaucuucucuuguaac

SEQ ID NO: 2717361 - RNA, 19 nt, Artificial Sequence
  Description of Artificial Sequence: Synthetic oligonucleotide
acuaaaugaaacaugggcu

SEQ ID NO: 2717362 - RNA, 19 nt, Artificial Sequence
  Description of Artificial Sequence: Synthetic oligonucleotide
ugaauagacgauagcuucc

SEQ ID NO: 2717363 - RNA, 19 nt, Artificial Sequence
  Description of Artificial Sequence: Synthetic oligonucleotide
aaauuuacucuuucacaga

SEQ ID NO: 2717364 - RNA, 19 nt, Artificial Sequence
  Description of Artificial Sequence: Synthetic oligonucleotide
ucagaaacaguguaaguau

SEQ ID NO: 2717365 - RNA, 19 nt, Artificial Sequence
  Description of Artificial Sequence: Synthetic oligonucleotide
uuaaagaggaucucuggaa

SEQ ID NO: 2717366 - RNA, 19 nt, Artificial Sequence
  Description of Artificial Sequence: Synthetic oligonucleotide
gacaguaaaacccacguua

SEQ ID NO: 2717367 - RNA, 19 nt, Artificial Sequence
  Description of Artificial Sequence: Synthetic oligonucleotide
agaaggguuaaagaggauc

SEQ ID NO: 2717368 - RNA, 19 nt, Artificial Sequence
  Description of Artificial Sequence: Synthetic oligonucleotide
auuuauguuaguugugaga

SEQ ID NO: 2717369 - RNA, 19 nt, Artificial Sequence
  Description of Artificial Sequence: Synthetic oligonucleotide
aaucaagcuucccaagacu

SEQ ID NO: 2717370 - RNA, 19 nt, Artificial Sequence
  Description of Artificial Sequence: Synthetic oligonucleotide
aaacaguguaaguauuggu

SEQ ID NO: 2717371 - RNA, 19 nt, Artificial Sequence
  Description of Artificial Sequence: Synthetic oligonucleotide
ugguauaguagucuaacua

SEQ ID NO: 2717372 - RNA, 19 nt, Artificial Sequence
  Description of Artificial Sequence: Synthetic oligonucleotide
uuaaccuccuuucaaggaa

SEQ ID NO: 2717373 - RNA, 19 nt, Artificial Sequence
  Description of Artificial Sequence: Synthetic oligonucleotide
guaaaacccacguuagaag

SEQ ID NO: 2717374 - RNA, 19 nt, Artificial Sequence
  Description of Artificial Sequence: Synthetic oligonucleotide
uugaaaucaagcuucccaa

SEQ ID NO: 2717375 - RNA, 19 nt, Artificial Sequence
  Description of Artificial Sequence: Synthetic oligonucleotide
uauucucagaaacagugua

SEQ ID NO: 2717376 - RNA, 19 nt, Artificial Sequence
  Description of Artificial Sequence: Synthetic oligonucleotide
ucuuaacuaugacaaguga

SEQ ID NO: 2717377 - RNA, 19 nt, Artificial Sequence
  Description of Artificial Sequence: Synthetic oligonucleotide
uuucaaggaaacuuugaaa

SEQ ID NO: 2717378 - RNA, 19 nt, Artificial Sequence
  Description of Artificial Sequence: Synthetic oligonucleotide
uuaaacauuuacucucacu

SEQ ID NO: 2717379 - RNA, 19 nt, Artificial Sequence
  Description of Artificial Sequence: Synthetic oligonucleotide
auuaaacauuuacucucac

SEQ ID NO: 2717380 - RNA, 19 nt, Artificial Sequence
  Description of Artificial Sequence: Synthetic oligonucleotide
ucagguagguuuugaauug

SEQ ID NO: 2717381 - RNA, 19 nt, Artificial Sequence
  Description of Artificial Sequence: Synthetic oligonucleotide
uuacacuagacaguaaaac

SEQ ID NO: 2717382 - RNA, 19 nt, Artificial Sequence
  Description of Artificial Sequence: Synthetic oligonucleotide
uucucagaaacaguguaag

SEQ ID NO: 2717383 - RNA, 19 nt, Artificial Sequence
  Description of Artificial Sequence: Synthetic oligonucleotide
aagucagguccuuaaccuc

SEQ ID NO: 2717384 - RNA, 19 nt, Artificial Sequence
  Description of Artificial Sequence: Synthetic oligonucleotide
aauuaaacauuuacucuca

SEQ ID NO: 2717385 - RNA, 19 nt, Artificial Sequence
  Description of Artificial Sequence: Synthetic oligonucleotide
uccuuaaccuccuuucaag

SEQ ID NO: 2717386 - RNA, 19 nt, Artificial Sequence
  Description of Artificial Sequence: Synthetic oligonucleotide
gguauaguagucuaacuac

SEQ ID NO: 2717387 - RNA, 19 nt, Artificial Sequence
  Description of Artificial Sequence: Synthetic oligonucleotide
uaacuaugacaagugaaag

SEQ ID NO: 2717388 - RNA, 19 nt, Artificial Sequence
  Description of Artificial Sequence: Synthetic oligonucleotide
gucagaaggguuaaagagg

SEQ ID NO: 2717389 - RNA, 19 nt, Artificial Sequence
  Description of Artificial Sequence: Synthetic oligonucleotide
uauguuaguugugagauuu

SEQ ID NO: 2717390 - RNA, 19 nt, Artificial Sequence
  Description of Artificial Sequence: Synthetic oligonucleotide
cuagacaguaaaacccacg

SEQ ID NO: 2717391 - RNA, 19 nt, Artificial Sequence
  Description of Artificial Sequence: Synthetic oligonucleotide
aguguaaguauugguauag

SEQ ID NO: 2717392 - RNA, 19 nt, Artificial Sequence
  Description of Artificial Sequence: Synthetic oligonucleotide
aucucuggaacagcaaacc

SEQ ID NO: 2717393 - RNA, 19 nt, Artificial Sequence
  Description of Artificial Sequence: Synthetic oligonucleotide
gaauagacgauagcuuccg

SEQ ID NO: 2717394 - RNA, 19 nt, Artificial Sequence
  Description of Artificial Sequence: Synthetic oligonucleotide
ugaaaucaagcuucccaag

SEQ ID NO: 2717395 - RNA, 19 nt, Artificial Sequence
  Description of Artificial Sequence: Synthetic oligonucleotide
agacacuauguccauuuuc

SEQ ID NO: 2717396 - RNA, 19 nt, Artificial Sequence
  Description of Artificial Sequence: Synthetic oligonucleotide
uccaaugucagaaggguua

SEQ ID NO: 2717397 - RNA, 19 nt, Artificial Sequence
  Description of Artificial Sequence: Synthetic oligonucleotide
aauagacgauagcuuccgg

SEQ ID NO: 2717398 - RNA, 19 nt, Artificial Sequence
  Description of Artificial Sequence: Synthetic oligonucleotide
gacuauuuauguuaguugu

SEQ ID NO: 2717399 - RNA, 19 nt, Artificial Sequence
  Description of Artificial Sequence: Synthetic oligonucleotide
guagguuuugaauugaaua

SEQ ID NO: 2717400 - RNA, 19 nt, Artificial Sequence
  Description of Artificial Sequence: Synthetic oligonucleotide
uguaaguauugguauagua

SEQ ID NO: 2717401 - RNA, 19 nt, Artificial Sequence
  Description of Artificial Sequence: Synthetic oligonucleotide
ugacucagacuauuuaugu

SEQ ID NO: 2717402 - RNA, 19 nt, Artificial Sequence
  Description of Artificial Sequence: Synthetic oligonucleotide
uagacgauagcuuccggga

SEQ ID NO: 2717403 - RNA, 19 nt, Artificial Sequence
  Description of Artificial Sequence: Synthetic oligonucleotide
aaguauugguauaguaguc

SEQ ID NO: 2717404 - RNA, 19 nt, Artificial Sequence
  Description of Artificial Sequence: Synthetic oligonucleotide
agguccuuaaccuccuuuc

SEQ ID NO: 2717405 - RNA, 19 nt, Artificial Sequence
  Description of Artificial Sequence: Synthetic oligonucleotide
acucagacuauuuauguua

SEQ ID NO: 2717406 - RNA, 19 nt, Artificial Sequence
  Description of Artificial Sequence: Synthetic oligonucleotide
agacuuauacuucccgcuc

SEQ ID NO: 2717407 - RNA, 19 nt, Artificial Sequence
  Description of Artificial Sequence: Synthetic oligonucleotide
ucuauaaucuucucuugua

SEQ ID NO: 2717408 - RNA, 19 nt, Artificial Sequence
  Description of Artificial Sequence: Synthetic oligonucleotide
gaaaucaagcuucccaaga

SEQ ID NO: 2717409 - RNA, 19 nt, Artificial Sequence
  Description of Artificial Sequence: Synthetic oligonucleotide
acaguguaaguauugguau

SEQ ID NO: 2717410 - RNA, 19 nt, Artificial Sequence
  Description of Artificial Sequence: Synthetic oligonucleotide
guagucuaacuacuaaaug

SEQ ID NO: 2717411 - RNA, 19 nt, Artificial Sequence
  Description of Artificial Sequence: Synthetic oligonucleotide
ucucaugacagacaaugua

SEQ ID NO: 2717412 - RNA, 19 nt, Artificial Sequence
  Description of Artificial Sequence: Synthetic oligonucleotide
gaauugaauagacgauagc

SEQ ID NO: 2717413 - RNA, 19 nt, Artificial Sequence
  Description of Artificial Sequence: Synthetic oligonucleotide
aagaggaucucuggaacag

SEQ ID NO: 2717414 - RNA, 19 nt, Artificial Sequence
  Description of Artificial Sequence: Synthetic oligonucleotide
cuacuaaaugaaacauggg

SEQ ID NO: 2717415 - RNA, 19 nt, Artificial Sequence
  Description of Artificial Sequence: Synthetic oligonucleotide
uacucucacuuucucauga

SEQ ID NO: 2717416 - RNA, 19 nt, Artificial Sequence
  Description of Artificial Sequence: Synthetic oligonucleotide
guuuugaauugaauagacg

SEQ ID NO: 2717417 - RNA, 19 nt, Artificial Sequence
  Description of Artificial Sequence: Synthetic oligonucleotide
accaccauaucuucaaagu

SEQ ID NO: 2717418 - RNA, 19 nt, Artificial Sequence
  Description of Artificial Sequence: Synthetic oligonucleotide
ucucucggcuuacaaaagc

SEQ ID NO: 2717419 - RNA, 19 nt, Artificial Sequence
  Description of Artificial Sequence: Synthetic oligonucleotide
aacaguguaaguauuggua

SEQ ID NO: 2717420 - RNA, 19 nt, Artificial Sequence
  Description of Artificial Sequence: Synthetic oligonucleotide
cucagacuauuuauguuag

SEQ ID NO: 2717421 - RNA, 19 nt, Artificial Sequence
  Description of Artificial Sequence: Synthetic oligonucleotide
uauaguagucuaacuacua

SEQ ID NO: 2717422 - RNA, 19 nt, Artificial Sequence
  Description of Artificial Sequence: Synthetic oligonucleotide
auccccaucuccugaauuc

SEQ ID NO: 2717423 - RNA, 19 nt, Artificial Sequence
  Description of Artificial Sequence: Synthetic oligonucleotide
ugacagacaauguauucuc

SEQ ID NO: 2717424 - RNA, 19 nt, Artificial Sequence
  Description of Artificial Sequence: Synthetic oligonucleotide
uguaaccaccauaucuuca

SEQ ID NO: 2717425 - RNA, 19 nt, Artificial Sequence
  Description of Artificial Sequence: Synthetic oligonucleotide
cuuaacuaugacaagugaa

SEQ ID NO: 2717426 - RNA, 19 nt, Artificial Sequence
  Description of Artificial Sequence: Synthetic oligonucleotide
aguaaaacccacguuagaa

SEQ ID NO: 2717427 - RNA, 19 nt, Artificial Sequence
  Description of Artificial Sequence: Synthetic oligonucleotide
uaguagucuaacuacuaaa

SEQ ID NO: 2717428 - RNA, 19 nt, Artificial Sequence
  Description of Artificial Sequence: Synthetic oligonucleotide
auuuacucucacuuucuca

SEQ ID NO: 2717429 - RNA, 19 nt, Artificial Sequence
  Description of Artificial Sequence: Synthetic oligonucleotide
uaacuacuaaaugaaacau

SEQ ID NO: 2717430 - RNA, 19 nt, Artificial Sequence
  Description of Artificial Sequence: Synthetic oligonucleotide
guuaaagaggaucucugga

SEQ ID NO: 2717431 - RNA, 19 nt, Artificial Sequence
  Description of Artificial Sequence: Synthetic oligonucleotide
ucucggcuuacaaaagccc

SEQ ID NO: 2717432 - RNA, 19 nt, Artificial Sequence
  Description of Artificial Sequence: Synthetic oligonucleotide
uucagauaucaauuuucca

SEQ ID NO: 2717433 - RNA, 19 nt, Artificial Sequence
  Description of Artificial Sequence: Synthetic oligonucleotide
uagaagccugugaacauca

SEQ ID NO: 2717434 - RNA, 19 nt, Artificial Sequence
  Description of Artificial Sequence: Synthetic oligonucleotide
uugaauugaauagacgaua

SEQ ID NO: 2717435 - RNA, 19 nt, Artificial Sequence
  Description of Artificial Sequence: Synthetic oligonucleotide
uauacuucccgcucagcac

SEQ ID NO: 2717436 - RNA, 19 nt, Artificial Sequence
  Description of Artificial Sequence: Synthetic oligonucleotide
aguauugguauaguagucu

SEQ ID NO: 2717437 - RNA, 19 nt, Artificial Sequence
  Description of Artificial Sequence: Synthetic oligonucleotide
agucaucauuuucagauau

SEQ ID NO: 2717438 - RNA, 19 nt, Artificial Sequence
  Description of Artificial Sequence: Synthetic oligonucleotide
aggcgaagaaucuguuccc

SEQ ID NO: 2717439 - RNA, 19 nt, Artificial Sequence
  Description of Artificial Sequence: Synthetic oligonucleotide
uccuuucaaggaaacuuug

SEQ ID NO: 2717440 - RNA, 19 nt, Artificial Sequence
  Description of Artificial Sequence: Synthetic oligonucleotide
cucucggcuuacaaaagcc

SEQ ID NO: 2717441 - RNA, 19 nt, Artificial Sequence
  Description of Artificial Sequence: Synthetic oligonucleotide
ugggcuuaauuacacuaga

SEQ ID NO: 2717442 - RNA, 19 nt, Artificial Sequence
  Description of Artificial Sequence: Synthetic oligonucleotide
uucucuuguaaccaccaua

SEQ ID NO: 2717443 - RNA, 19 nt, Artificial Sequence
  Description of Artificial Sequence: Synthetic oligonucleotide
gaagccugugaacaucagc

SEQ ID NO: 2717444 - RNA, 19 nt, Artificial Sequence
  Description of Artificial Sequence: Synthetic oligonucleotide
caccauaucuucaaaguca

SEQ ID NO: 2717445 - RNA, 19 nt, Artificial Sequence
  Description of Artificial Sequence: Synthetic oligonucleotide
agauaucaauuuuccaccu

SEQ ID NO: 2717446 - RNA, 19 nt, Artificial Sequence
  Description of Artificial Sequence: Synthetic oligonucleotide
augucagaaggguuaaaga

SEQ ID NO: 2717447 - RNA, 19 nt, Artificial Sequence
  Description of Artificial Sequence: Synthetic oligonucleotide
guuggcaaggcgaagaauc

SEQ ID NO: 2717448 - RNA, 19 nt, Artificial Sequence
  Description of Artificial Sequence: Synthetic oligonucleotide
cacuauguccauuuucuuc

SEQ ID NO: 2717449 - RNA, 19 nt, Artificial Sequence
  Description of Artificial Sequence: Synthetic oligonucleotide
aauuuuccaccuucccagu

SEQ ID NO: 2717450 - RNA, 19 nt, Artificial Sequence
  Description of Artificial Sequence: Synthetic oligonucleotide
acguuagaagccugugaac

SEQ ID NO: 2717451 - RNA, 19 nt, Artificial Sequence
  Description of Artificial Sequence: Synthetic oligonucleotide
acgauagcuuccgggaucc

SEQ ID NO: 2717452 - RNA, 19 nt, Artificial Sequence
  Description of Artificial Sequence: Synthetic oligonucleotide
gugaacaucagccaugacu

SEQ ID NO: 2717453 - RNA, 19 nt, Artificial Sequence
  Description of Artificial Sequence: Synthetic oligonucleotide
augacagacaauguauucu

SEQ ID NO: 2717454 - RNA, 19 nt, Artificial Sequence
  Description of Artificial Sequence: Synthetic oligonucleotide
acuuauacuucccgcucag

SEQ ID NO: 2717455 - RNA, 19 nt, Artificial Sequence
  Description of Artificial Sequence: Synthetic oligonucleotide
uauugguauaguagucuaa

SEQ ID NO: 2717456 - RNA, 19 nt, Artificial Sequence
  Description of Artificial Sequence: Synthetic oligonucleotide
auguuucuuaaauaucaaa

SEQ ID NO: 2717457 - RNA, 19 nt, Artificial Sequence
  Description of Artificial Sequence: Synthetic oligonucleotide
cucuggaacagcaaaccuc

SEQ ID NO: 2717458 - RNA, 19 nt, Artificial Sequence
  Description of Artificial Sequence: Synthetic oligonucleotide
uuuccaccuucccaguggc

SEQ ID NO: 2717459 - RNA, 19 nt, Artificial Sequence
  Description of Artificial Sequence: Synthetic oligonucleotide
caugacagacaauguauuc

SEQ ID NO: 2717460 - RNA, 19 nt, Artificial Sequence
  Description of Artificial Sequence: Synthetic oligonucleotide
ucacuuucucaugacagac

SEQ ID NO: 2717461 - RNA, 19 nt, Artificial Sequence
  Description of Artificial Sequence: Synthetic oligonucleotide
ucaugacagacaauguauu

SEQ ID NO: 2717462 - RNA, 19 nt, Artificial Sequence
  Description of Artificial Sequence: Synthetic oligonucleotide
aaacaugggcuuaauuaca

SEQ ID NO: 2717463 - RNA, 19 nt, Artificial Sequence
  Description of Artificial Sequence: Synthetic oligonucleotide
aaggguuaaagaggaucuc

SEQ ID NO: 2717464 - RNA, 19 nt, Artificial Sequence
  Description of Artificial Sequence: Synthetic oligonucleotide
uugguauaguagucuaacu

SEQ ID NO: 2717465 - RNA, 19 nt, Artificial Sequence
  Description of Artificial Sequence: Synthetic oligonucleotide
aauguuucuuaaauaucaa

SEQ ID NO: 2717466 - RNA, 19 nt, Artificial Sequence
  Description of Artificial Sequence: Synthetic oligonucleotide
ucuccugaauuccaauguc

SEQ ID NO: 2717467 - RNA, 19 nt, Artificial Sequence
  Description of Artificial Sequence: Synthetic oligonucleotide
cuauuuauguuaguuguga

SEQ ID NO: 2717468 - RNA, 19 nt, Artificial Sequence
  Description of Artificial Sequence: Synthetic oligonucleotide
acagacacuauguccauuu

SEQ ID NO: 2717469 - RNA, 19 nt, Artificial Sequence
  Description of Artificial Sequence: Synthetic oligonucleotide
agucuaacuacuaaaugaa

SEQ ID NO: 2717470 - RNA, 19 nt, Artificial Sequence
  Description of Artificial Sequence: Synthetic oligonucleotide
cuucucucggcuuacaaaa

SEQ ID NO: 2717471 - RNA, 19 nt, Artificial Sequence
  Description of Artificial Sequence: Synthetic oligonucleotide
caauguauucucagaaaca

SEQ ID NO: 2717472 - RNA, 19 nt, Artificial Sequence
  Description of Artificial Sequence: Synthetic oligonucleotide
uuggcaaggcgaagaaucu

SEQ ID NO: 2717473 - RNA, 19 nt, Artificial Sequence
  Description of Artificial Sequence: Synthetic oligonucleotide
ucuucucucggcuuacaaa

SEQ ID NO: 2717474 - RNA, 19 nt, Artificial Sequence
  Description of Artificial Sequence: Synthetic oligonucleotide
aguagucuaacuacuaaau

SEQ ID NO: 2717475 - RNA, 19 nt, Artificial Sequence
  Description of Artificial Sequence: Synthetic oligonucleotide
ucccaagacuuucauucca

SEQ ID NO: 2717476 - RNA, 19 nt, Artificial Sequence
  Description of Artificial Sequence: Synthetic oligonucleotide
aaacccacguuagaagccu

SEQ ID NO: 2717477 - RNA, 19 nt, Artificial Sequence
  Description of Artificial Sequence: Synthetic oligonucleotide
uucucaugacagacaaugu

SEQ ID NO: 2717478 - RNA, 19 nt, Artificial Sequence
  Description of Artificial Sequence: Synthetic oligonucleotide
cuuaauuacacuagacagu

SEQ ID NO: 2717479 - RNA, 19 nt, Artificial Sequence
  Description of Artificial Sequence: Synthetic oligonucleotide
gacaauguauucucagaaa

SEQ ID NO: 2717480 - RNA, 19 nt, Artificial Sequence
  Description of Artificial Sequence: Synthetic oligonucleotide
aaaugaaacaugggcuuaa

SEQ ID NO: 2717481 - RNA, 19 nt, Artificial Sequence
  Description of Artificial Sequence: Synthetic oligonucleotide
uucucucggcuuacaaaag

SEQ ID NO: 2717482 - RNA, 19 nt, Artificial Sequence
  Description of Artificial Sequence: Synthetic oligonucleotide
ggcuuaauuacacuagaca

SEQ ID NO: 2717483 - RNA, 19 nt, Artificial Sequence
  Description of Artificial Sequence: Synthetic oligonucleotide
uucccaagacuuucauucc

SEQ ID NO: 2717484 - RNA, 19 nt, Artificial Sequence
  Description of Artificial Sequence: Synthetic oligonucleotide
guggcugcauuucuucagg

SEQ ID NO: 2717485 - RNA, 19 nt, Artificial Sequence
  Description of Artificial Sequence: Synthetic oligonucleotide
agguuuugaauugaauaga

SEQ ID NO: 2717486 - RNA, 19 nt, Artificial Sequence
  Description of Artificial Sequence: Synthetic oligonucleotide
guaaccaccauaucuucaa

SEQ ID NO: 2717487 - RNA, 19 nt, Artificial Sequence
  Description of Artificial Sequence: Synthetic oligonucleotide
ucucagaaacaguguaagu

SEQ ID NO: 2717488 - RNA, 19 nt, Artificial Sequence
  Description of Artificial Sequence: Synthetic oligonucleotide
gacacuauguccauuuucu

SEQ ID NO: 2717489 - RNA, 19 nt, Artificial Sequence
  Description of Artificial Sequence: Synthetic oligonucleotide
auugaauagacgauagcuu

SEQ ID NO: 2717490 - RNA, 19 nt, Artificial Sequence
  Description of Artificial Sequence: Synthetic oligonucleotide
cuguuccccagacuuauac

SEQ ID NO: 2717491 - RNA, 19 nt, Artificial Sequence
  Description of Artificial Sequence: Synthetic oligonucleotide
augacucagacuauuuaug

SEQ ID NO: 2717492 - RNA, 19 nt, Artificial Sequence
  Description of Artificial Sequence: Synthetic oligonucleotide
gauagcuuccgggaucccc

SEQ ID NO: 2717493 - RNA, 19 nt, Artificial Sequence
  Description of Artificial Sequence: Synthetic oligonucleotide
acuagacaguaaaacccac

SEQ ID NO: 2717494 - RNA, 19 nt, Artificial Sequence
  Description of Artificial Sequence: Synthetic oligonucleotide
gacuuauacuucccgcuca

SEQ ID NO: 2717495 - RNA, 19 nt, Artificial Sequence
  Description of Artificial Sequence: Synthetic oligonucleotide
aaccucucguuggcaaggc

SEQ ID NO: 2717496 - RNA, 19 nt, Artificial Sequence
  Description of Artificial Sequence: Synthetic oligonucleotide
acuauuuauguuaguugug

SEQ ID NO: 2717497 - RNA, 19 nt, Artificial Sequence
  Description of Artificial Sequence: Synthetic oligonucleotide
gaucucuggaacagcaaac

SEQ ID NO: 2717498 - RNA, 19 nt, Artificial Sequence
  Description of Artificial Sequence: Synthetic oligonucleotide
cacuagacaguaaaaccca

SEQ ID NO: 2717499 - RNA, 19 nt, Artificial Sequence
  Description of Artificial Sequence: Synthetic oligonucleotide
gaagaaucuguuccccaga

SEQ ID NO: 2717500 - RNA, 19 nt, Artificial Sequence
  Description of Artificial Sequence: Synthetic oligonucleotide
agaggaucucuggaacagc

SEQ ID NO: 2717501 - RNA, 19 nt, Artificial Sequence
  Description of Artificial Sequence: Synthetic oligonucleotide
cuuaaccuccuuucaagga

SEQ ID NO: 2717502 - RNA, 19 nt, Artificial Sequence
  Description of Artificial Sequence: Synthetic oligonucleotide
uccgggauccccaucuccu

SEQ ID NO: 2717503 - RNA, 19 nt, Artificial Sequence
  Description of Artificial Sequence: Synthetic oligonucleotide
uuacucucacuuucucaug

SEQ ID NO: 2717504 - RNA, 19 nt, Artificial Sequence
  Description of Artificial Sequence: Synthetic oligonucleotide
uuagaagccugugaacauc

SEQ ID NO: 2717505 - RNA, 19 nt, Artificial Sequence
  Description of Artificial Sequence: Synthetic oligonucleotide
cuauaaucuucucuuguaa

SEQ ID NO: 2717506 - RNA, 19 nt, Artificial Sequence
  Description of Artificial Sequence: Synthetic oligonucleotide
augggcuuaauuacacuag

SEQ ID NO: 2717507 - RNA, 19 nt, Artificial Sequence
  Description of Artificial Sequence: Synthetic oligonucleotide
aggguuaaagaggaucucu

SEQ ID NO: 2717508 - RNA, 19 nt, Artificial Sequence
  Description of Artificial Sequence: Synthetic oligonucleotide
uaaaugaaacaugggcuua

SEQ ID NO: 2717509 - RNA, 19 nt, Artificial Sequence
  Description of Artificial Sequence: Synthetic oligonucleotide
cauuucuucagguagguuu

SEQ ID NO: 2717510 - RNA, 19 nt, Artificial Sequence
  Description of Artificial Sequence: Synthetic oligonucleotide
gacgauagcuuccgggauc

SEQ ID NO: 2717511 - RNA, 19 nt, Artificial Sequence
  Description of Artificial Sequence: Synthetic oligonucleotide
aaccuccuuucaaggaaac

SEQ ID NO: 2717512 - RNA, 19 nt, Artificial Sequence
  Description of Artificial Sequence: Synthetic oligonucleotide
caugggcuuaauuacacua

SEQ ID NO: 2717513 - RNA, 19 nt, Artificial Sequence
  Description of Artificial Sequence: Synthetic oligonucleotide
cacguuagaagccugugaa

SEQ ID NO: 2717514 - RNA, 19 nt, Artificial Sequence
  Description of Artificial Sequence: Synthetic oligonucleotide
cuaugacaagugaaaguca

SEQ ID NO: 2717515 - RNA, 19 nt, Artificial Sequence
  Description of Artificial Sequence: Synthetic oligonucleotide
ccuuaaccuccuuucaagg

SEQ ID NO: 2717516 - RNA, 19 nt, Artificial Sequence
  Description of Artificial Sequence: Synthetic oligonucleotide
augacaagugaaagucagg

SEQ ID NO: 2717517 - RNA, 19 nt, Artificial Sequence
  Description of Artificial Sequence: Synthetic oligonucleotide
cuuguaaccaccauaucuu

SEQ ID NO: 2717518 - RNA, 19 nt, Artificial Sequence
  Description of Artificial Sequence: Synthetic oligonucleotide
cauuuacucucacuuucuc

SEQ ID NO: 2717519 - RNA, 19 nt, Artificial Sequence
  Description of Artificial Sequence: Synthetic oligonucleotide
uuccgggauccccaucucc

SEQ ID NO: 2717520 - RNA, 19 nt, Artificial Sequence
  Description of Artificial Sequence: Synthetic oligonucleotide
cuaaaugaaacaugggcuu

SEQ ID NO: 2717521 - RNA, 19 nt, Artificial Sequence
  Description of Artificial Sequence: Synthetic oligonucleotide
uaauuacacuagacaguaa

SEQ ID NO: 2717522 - RNA, 19 nt, Artificial Sequence
  Description of Artificial Sequence: Synthetic oligonucleotide
uauguccauuuucuucuau

SEQ ID NO: 2717523 - RNA, 19 nt, Artificial Sequence
  Description of Artificial Sequence: Synthetic oligonucleotide
guauugguauaguagucua

SEQ ID NO: 2717524 - RNA, 19 nt, Artificial Sequence
  Description of Artificial Sequence: Synthetic oligonucleotide
agaaucuguuccccagacu

SEQ ID NO: 2717525 - RNA, 19 nt, Artificial Sequence
  Description of Artificial Sequence: Synthetic oligonucleotide
ugcauuucuucagguaggu

SEQ ID NO: 2717526 - RNA, 19 nt, Artificial Sequence
  Description of Artificial Sequence: Synthetic oligonucleotide
gugaaagucagguccuuaa

SEQ ID NO: 2717527 - RNA, 19 nt, Artificial Sequence
  Description of Artificial Sequence: Synthetic oligonucleotide
caaggcgaagaaucuguuc

SEQ ID NO: 2717528 - RNA, 19 nt, Artificial Sequence
  Description of Artificial Sequence: Synthetic oligonucleotide
caagcuucccaagacuuuc

SEQ ID NO: 2717529 - RNA, 19 nt, Artificial Sequence
  Description of Artificial Sequence: Synthetic oligonucleotide
uuccaaugucagaaggguu

SEQ ID NO: 2717530 - RNA, 19 nt, Artificial Sequence
  Description of Artificial Sequence: Synthetic oligonucleotide
acaugggcuuaauuacacu

SEQ ID NO: 2717531 - RNA, 19 nt, Artificial Sequence
  Description of Artificial Sequence: Synthetic oligonucleotide
ccagacuuauacuucccgc

SEQ ID NO: 2717532 - RNA, 19 nt, Artificial Sequence
  Description of Artificial Sequence: Synthetic oligonucleotide
cucacuuucucaugacaga

SEQ ID NO: 2717533 - RNA, 19 nt, Artificial Sequence
  Description of Artificial Sequence: Synthetic oligonucleotide
aggaaacuuugaaaucaag

SEQ ID NO: 2717534 - RNA, 19 nt, Artificial Sequence
  Description of Artificial Sequence: Synthetic oligonucleotide
uccccaucuccugaauucc

SEQ ID NO: 2717535 - RNA, 19 nt, Artificial Sequence
  Description of Artificial Sequence: Synthetic oligonucleotide
ucggcuuacaaaagcccuu

SEQ ID NO: 2717536 - RNA, 19 nt, Artificial Sequence
  Description of Artificial Sequence: Synthetic oligonucleotide
augaaacaugggcuuaauu

SEQ ID NO: 2717537 - RNA, 19 nt, Artificial Sequence
  Description of Artificial Sequence: Synthetic oligonucleotide
caugacucagacuauuuau

SEQ ID NO: 2717538 - RNA, 19 nt, Artificial Sequence
  Description of Artificial Sequence: Synthetic oligonucleotide
ucguuggcaaggcgaagaa

SEQ ID NO: 2717539 - RNA, 19 nt, Artificial Sequence
  Description of Artificial Sequence: Synthetic oligonucleotide
agacaguaaaacccacguu

SEQ ID NO: 2717540 - RNA, 19 nt, Artificial Sequence
  Description of Artificial Sequence: Synthetic oligonucleotide
auagcuuccgggaucccca

SEQ ID NO: 2717541 - RNA, 19 nt, Artificial Sequence
  Description of Artificial Sequence: Synthetic oligonucleotide
auucucagaaacaguguaa

SEQ ID NO: 2717542 - RNA, 19 nt, Artificial Sequence
  Description of Artificial Sequence: Synthetic oligonucleotide
aucaagcuucccaagacuu

SEQ ID NO: 2717543 - RNA, 19 nt, Artificial Sequence
  Description of Artificial Sequence: Synthetic oligonucleotide
caucagccaugacucagac

SEQ ID NO: 2717544 - RNA, 19 nt, Artificial Sequence
  Description of Artificial Sequence: Synthetic oligonucleotide
cagcaaaccucucguuggc

SEQ ID NO: 2717545 - RNA, 19 nt, Artificial Sequence
  Description of Artificial Sequence: Synthetic oligonucleotide
agacgauagcuuccgggau

SEQ ID NO: 2717546 - RNA, 19 nt, Artificial Sequence
  Description of Artificial Sequence: Synthetic oligonucleotide
accucucguuggcaaggcg

SEQ ID NO: 2717547 - RNA, 19 nt, Artificial Sequence
  Description of Artificial Sequence: Synthetic oligonucleotide
caucauuuucagauaucaa

SEQ ID NO: 2717548 - RNA, 19 nt, Artificial Sequence
  Description of Artificial Sequence: Synthetic oligonucleotide
guauaguagucuaacuacu

SEQ ID NO: 2717549 - RNA, 19 nt, Artificial Sequence
  Description of Artificial Sequence: Synthetic oligonucleotide
cuuauacuucccgcucagc

SEQ ID NO: 2717550 - RNA, 19 nt, Artificial Sequence
  Description of Artificial Sequence: Synthetic oligonucleotide
cagacuuauacuucccgcu

SEQ ID NO: 2717551 - RNA, 19 nt, Artificial Sequence
  Description of Artificial Sequence: Synthetic oligonucleotide
aucuguuccccagacuuau

SEQ ID NO: 2717552 - RNA, 19 nt, Artificial Sequence
  Description of Artificial Sequence: Synthetic oligonucleotide
cucucacuuucucaugaca

SEQ ID NO: 2717553 - RNA, 19 nt, Artificial Sequence
  Description of Artificial Sequence: Synthetic oligonucleotide
caccaucucuucucucggc

SEQ ID NO: 2717554 - RNA, 19 nt, Artificial Sequence
  Description of Artificial Sequence: Synthetic oligonucleotide
guccuuaaccuccuuucaa

SEQ ID NO: 2717555 - RNA, 19 nt, Artificial Sequence
  Description of Artificial Sequence: Synthetic oligonucleotide
ggaacagcaaaccucucgu

SEQ ID NO: 2717556 - RNA, 19 nt, Artificial Sequence
  Description of Artificial Sequence: Synthetic oligonucleotide
ugugaacaucagccaugac

SEQ ID NO: 2717557 - RNA, 19 nt, Artificial Sequence
  Description of Artificial Sequence: Synthetic oligonucleotide
acacuauguccauuuucuu

SEQ ID NO: 2717558 - RNA, 19 nt, Artificial Sequence
  Description of Artificial Sequence: Synthetic oligonucleotide
cccagacuuauacuucccg

SEQ ID NO: 2717559 - RNA, 19 nt, Artificial Sequence
  Description of Artificial Sequence: Synthetic oligonucleotide
caagugaaagucagguccu

SEQ ID NO: 2717560 - RNA, 19 nt, Artificial Sequence
  Description of Artificial Sequence: Synthetic oligonucleotide
gcaccaucucuucucucgg

SEQ ID NO: 2717561 - RNA, 19 nt, Artificial Sequence
  Description of Artificial Sequence: Synthetic oligonucleotide
ccaccauaucuucaaaguc

SEQ ID NO: 2717562 - RNA, 19 nt, Artificial Sequence
  Description of Artificial Sequence: Synthetic oligonucleotide
cuucagguagguuuugaau

SEQ ID NO: 2717563 - RNA, 19 nt, Artificial Sequence
  Description of Artificial Sequence: Synthetic oligonucleotide
gauaucaauuuuccaccuu

SEQ ID NO: 2717564 - RNA, 19 nt, Artificial Sequence
  Description of Artificial Sequence: Synthetic oligonucleotide
agcuucccaagacuuucau

SEQ ID NO: 2717565 - RNA, 19 nt, Artificial Sequence
  Description of Artificial Sequence: Synthetic oligonucleotide
acaucagccaugacucaga

SEQ ID NO: 2717566 - RNA, 19 nt, Artificial Sequence
  Description of Artificial Sequence: Synthetic oligonucleotide
guuagaagccugugaacau

SEQ ID NO: 2717567 - RNA, 19 nt, Artificial Sequence
  Description of Artificial Sequence: Synthetic oligonucleotide
cugugaacaucagccauga

SEQ ID NO: 2717568 - RNA, 19 nt, Artificial Sequence
  Description of Artificial Sequence: Synthetic oligonucleotide
cucguuggcaaggcgaaga

SEQ ID NO: 2717569 - RNA, 19 nt, Artificial Sequence
  Description of Artificial Sequence: Synthetic oligonucleotide
cucggcuuacaaaagcccu

SEQ ID NO: 2717570 - RNA, 19 nt, Artificial Sequence
  Description of Artificial Sequence: Synthetic oligonucleotide
gucaucauuuucagauauc

SEQ ID NO: 2717571 - RNA, 19 nt, Artificial Sequence
  Description of Artificial Sequence: Synthetic oligonucleotide
ucucguuggcaaggcgaag

SEQ ID NO: 2717572 - RNA, 19 nt, Artificial Sequence
  Description of Artificial Sequence: Synthetic oligonucleotide
gucuaacuacuaaaugaaa

SEQ ID NO: 2717573 - RNA, 19 nt, Artificial Sequence
  Description of Artificial Sequence: Synthetic oligonucleotide
uucccaguggcugcauuuc

SEQ ID NO: 2717574 - RNA, 19 nt, Artificial Sequence
  Description of Artificial Sequence: Synthetic oligonucleotide
caguguaaguauugguaua

SEQ ID NO: 2717575 - RNA, 19 nt, Artificial Sequence
  Description of Artificial Sequence: Synthetic oligonucleotide
caguaaaacccacguuaga

SEQ ID NO: 2717576 - RNA, 19 nt, Artificial Sequence
  Description of Artificial Sequence: Synthetic oligonucleotide
gguccuuaaccuccuuuca

SEQ ID NO: 2717577 - RNA, 19 nt, Artificial Sequence
  Description of Artificial Sequence: Synthetic oligonucleotide
cagacuauuuauguuaguu

SEQ ID NO: 2717578 - RNA, 19 nt, Artificial Sequence
  Description of Artificial Sequence: Synthetic oligonucleotide
cucucguuggcaaggcgaa

SEQ ID NO: 2717579 - RNA, 19 nt, Artificial Sequence
  Description of Artificial Sequence: Synthetic oligonucleotide
aagugaaagucagguccuu

SEQ ID NO: 2717580 - RNA, 19 nt, Artificial Sequence
  Description of Artificial Sequence: Synthetic oligonucleotide
aacccacguuagaagccug

SEQ ID NO: 2717581 - RNA, 19 nt, Artificial Sequence
  Description of Artificial Sequence: Synthetic oligonucleotide
ggcgaagaaucuguucccc

SEQ ID NO: 2717582 - RNA, 19 nt, Artificial Sequence
  Description of Artificial Sequence: Synthetic oligonucleotide
agcuuccgggauccccauc

SEQ ID NO: 2717583 - RNA, 19 nt, Artificial Sequence
  Description of Artificial Sequence: Synthetic oligonucleotide
agcaaaccucucguuggca

SEQ ID NO: 2717584 - RNA, 19 nt, Artificial Sequence
  Description of Artificial Sequence: Synthetic oligonucleotide
agaagccugugaacaucag

SEQ ID NO: 2717585 - RNA, 19 nt, Artificial Sequence
  Description of Artificial Sequence: Synthetic oligonucleotide
gggcuuaauuacacuagac

SEQ ID NO: 2717586 - RNA, 19 nt, Artificial Sequence
  Description of Artificial Sequence: Synthetic oligonucleotide
accuccuuucaaggaaacu

SEQ ID NO: 2717587 - RNA, 19 nt, Artificial Sequence
  Description of Artificial Sequence: Synthetic oligonucleotide
caguggcugcauuucuuca

SEQ ID NO: 2717588 - RNA, 19 nt, Artificial Sequence
  Description of Artificial Sequence: Synthetic oligonucleotide
caucucuucucucggcuua

SEQ ID NO: 2717589 - RNA, 19 nt, Artificial Sequence
  Description of Artificial Sequence: Synthetic oligonucleotide
cguuagaagccugugaaca

SEQ ID NO: 2717590 - RNA, 19 nt, Artificial Sequence
  Description of Artificial Sequence: Synthetic oligonucleotide
agguagguuuugaauugaa

SEQ ID NO: 2717591 - RNA, 19 nt, Artificial Sequence
  Description of Artificial Sequence: Synthetic oligonucleotide
cucuucucucggcuuacaa

SEQ ID NO: 2717592 - RNA, 19 nt, Artificial Sequence
  Description of Artificial Sequence: Synthetic oligonucleotide
agccaugacucagacuauu

SEQ ID NO: 2717593 - RNA, 19 nt, Artificial Sequence
  Description of Artificial Sequence: Synthetic oligonucleotide
ccucucguuggcaaggcga

SEQ ID NO: 2717594 - RNA, 19 nt, Artificial Sequence
  Description of Artificial Sequence: Synthetic oligonucleotide
cagguagguuuugaauuga

SEQ ID NO: 2717595 - RNA, 19 nt, Artificial Sequence
  Description of Artificial Sequence: Synthetic oligonucleotide
gauccccaucuccugaauu

SEQ ID NO: 2717596 - RNA, 19 nt, Artificial Sequence
  Description of Artificial Sequence: Synthetic oligonucleotide
cagaaacaguguaaguauu

SEQ ID NO: 2717597 - RNA, 19 nt, Artificial Sequence
  Description of Artificial Sequence: Synthetic oligonucleotide
gcgaagaaucuguucccca

SEQ ID NO: 2717598 - RNA, 19 nt, Artificial Sequence
  Description of Artificial Sequence: Synthetic oligonucleotide
ucagguccuuaaccuccuu

SEQ ID NO: 2717599 - RNA, 19 nt, Artificial Sequence
  Description of Artificial Sequence: Synthetic oligonucleotide
gaacagcaaaccucucguu

SEQ ID NO: 2717600 - RNA, 19 nt, Artificial Sequence
  Description of Artificial Sequence: Synthetic oligonucleotide
cuuccgggauccccaucuc

SEQ ID NO: 2717601 - RNA, 19 nt, Artificial Sequence
  Description of Artificial Sequence: Synthetic oligonucleotide
aggaucucuggaacagcaa

SEQ ID NO: 2717602 - RNA, 19 nt, Artificial Sequence
  Description of Artificial Sequence: Synthetic oligonucleotide
gcuuccgggauccccaucu

SEQ ID NO: 2717603 - RNA, 19 nt, Artificial Sequence
  Description of Artificial Sequence: Synthetic oligonucleotide
acccacguuagaagccugu

SEQ ID NO: 2717604 - RNA, 19 nt, Artificial Sequence
  Description of Artificial Sequence: Synthetic oligonucleotide
uagcuuccgggauccccau

SEQ ID NO: 2717605 - RNA, 19 nt, Artificial Sequence
  Description of Artificial Sequence: Synthetic oligonucleotide
ggcaaggcgaagaaucugu

SEQ ID NO: 2717606 - RNA, 19 nt, Artificial Sequence
  Description of Artificial Sequence: Synthetic oligonucleotide
auguuaguugugagauuuu

SEQ ID NO: 2717607 - RNA, 19 nt, Artificial Sequence
  Description of Artificial Sequence: Synthetic oligonucleotide
guguaaguauugguauagu

SEQ ID NO: 2717608 - RNA, 19 nt, Artificial Sequence
  Description of Artificial Sequence: Synthetic oligonucleotide
ccccagacuuauacuuccc

SEQ ID NO: 2717609 - RNA, 19 nt, Artificial Sequence
  Description of Artificial Sequence: Synthetic oligonucleotide
cuucccaguggcugcauuu

SEQ ID NO: 2717610 - RNA, 19 nt, Artificial Sequence
  Description of Artificial Sequence: Synthetic oligonucleotide
gguagguuuugaauugaau

SEQ ID NO: 2717611 - RNA, 19 nt, Artificial Sequence
  Description of Artificial Sequence: Synthetic oligonucleotide
ccacguuagaagccuguga

SEQ ID NO: 2717612 - RNA, 19 nt, Artificial Sequence
  Description of Artificial Sequence: Synthetic oligonucleotide
ccaugacucagacuauuua

SEQ ID NO: 2717613 - RNA, 19 nt, Artificial Sequence
  Description of Artificial Sequence: Synthetic oligonucleotide
cuuucucaugacagacaau

SEQ ID NO: 2717614 - RNA, 19 nt, Artificial Sequence
  Description of Artificial Sequence: Synthetic oligonucleotide
ccaagacuuucauuccaaa

SEQ ID NO: 2717615 - RNA, 19 nt, Artificial Sequence
  Description of Artificial Sequence: Synthetic oligonucleotide
gggauccccaucuccugaa

SEQ ID NO: 2717616 - RNA, 19 nt, Artificial Sequence
  Description of Artificial Sequence: Synthetic oligonucleotide
cuucucuuguaaccaccau

SEQ ID NO: 2717617 - RNA, 19 nt, Artificial Sequence
  Description of Artificial Sequence: Synthetic oligonucleotide
cccacguuagaagccugug

SEQ ID NO: 2717618 - RNA, 19 nt, Artificial Sequence
  Description of Artificial Sequence: Synthetic oligonucleotide
cagguccuuaaccuccuuu

SEQ ID NO: 2717619 - RNA, 19 nt, Artificial Sequence
  Description of Artificial Sequence: Synthetic oligonucleotide
ccgggauccccaucuccug

SEQ ID NO: 2717620 - RNA, 19 nt, Artificial Sequence
  Description of Artificial Sequence: Synthetic oligonucleotide
caccuucccaguggcugca

SEQ ID NO: 2717621 - RNA, 19 nt, Artificial Sequence
  Description of Artificial Sequence: Synthetic oligonucleotide
cagaaggguuaaagaggau

SEQ ID NO: 2717622 - RNA, 19 nt, Artificial Sequence
  Description of Artificial Sequence: Synthetic oligonucleotide
ccccaucuccugaauucca

SEQ ID NO: 2717623 - RNA, 19 nt, Artificial Sequence
  Description of Artificial Sequence: Synthetic oligonucleotide
cagacacuauguccauuuu

SEQ ID NO: 2717624 - RNA, 19 nt, Artificial Sequence
  Description of Artificial Sequence: Synthetic oligonucleotide
gcuucccaagacuuucauu

SEQ ID NO: 2717625 - RNA, 19 nt, Artificial Sequence
  Description of Artificial Sequence: Synthetic oligonucleotide
accuucccaguggcugcau

SEQ ID NO: 2717626 - RNA, 19 nt, Artificial Sequence
  Description of Artificial Sequence: Synthetic oligonucleotide
cagccaugacucagacuau

SEQ ID NO: 2717627 - RNA, 19 nt, Artificial Sequence
  Description of Artificial Sequence: Synthetic oligonucleotide
ggcuuacaaaagcccuuuu

SEQ ID NO: 2717628 - RNA, 19 nt, Artificial Sequence
  Description of Artificial Sequence: Synthetic oligonucleotide
ccaucuccugaauuccaau

SEQ ID NO: 2717629 - RNA, 19 nt, Artificial Sequence
  Description of Artificial Sequence: Synthetic oligonucleotide
ggauccccaucuccugaau

SEQ ID NO: 2717630 - RNA, 19 nt, Artificial Sequence
  Description of Artificial Sequence: Synthetic oligonucleotide
cacagacacuauguccauu

SEQ ID NO: 2717631 - RNA, 19 nt, Artificial Sequence
  Description of Artificial Sequence: Synthetic oligonucleotide
gccaugacucagacuauuu

SEQ ID NO: 2717632 - RNA, 19 nt, Artificial Sequence
  Description of Artificial Sequence: Synthetic oligonucleotide
gcaaggcgaagaaucuguu

SEQ ID NO: 2717633 - RNA, 19 nt, Artificial Sequence
  Description of Artificial Sequence: Synthetic oligonucleotide
gcauuucuucagguagguu

SEQ ID NO: 2717634 - RNA, 19 nt, Artificial Sequence
  Description of Artificial Sequence: Synthetic oligonucleotide
cggcuuacaaaagcccuuu

SEQ ID NO: 2717635 - RNA, 19 nt, Artificial Sequence
  Description of Artificial Sequence: Synthetic oligonucleotide
cguuggcaaggcgaagaau

SEQ ID NO: 2717636 - RNA, 19 nt, Artificial Sequence
  Description of Artificial Sequence: Synthetic oligonucleotide
guaaaauccaucuaugggg

SEQ ID NO: 2717637 - RNA, 19 nt, Artificial Sequence
  Description of Artificial Sequence: Synthetic oligonucleotide
uguaaaauccaucuauggg

SEQ ID NO: 2717638 - RNA, 19 nt, Artificial Sequence
  Description of Artificial Sequence: Synthetic oligonucleotide
aacaccuucacaucaggcc

SEQ ID NO: 2717639 - RNA, 19 nt, Artificial Sequence
  Description of Artificial Sequence: Synthetic oligonucleotide
acaauauccggcaagaggc

SEQ ID NO: 2717640 - RNA, 19 nt, Artificial Sequence
  Description of Artificial Sequence: Synthetic oligonucleotide
cucaaaagaagccaggucc

SEQ ID NO: 2717641 - RNA, 19 nt, Artificial Sequence
  Description of Artificial Sequence: Synthetic oligonucleotide
uguggauagcgucugacgg

SEQ ID NO: 2717642 - RNA, 19 nt, Artificial Sequence
  Description of Artificial Sequence: Synthetic oligonucleotide
cuucuuguguguaaaaucc

SEQ ID NO: 2717643 - RNA, 19 nt, Artificial Sequence
  Description of Artificial Sequence: Synthetic oligonucleotide
uaaaauccaucuauggggc

SEQ ID NO: 2717644 - RNA, 19 nt, Artificial Sequence
  Description of Artificial Sequence: Synthetic oligonucleotide
aauccuauucuccucccuc

SEQ ID NO: 2717645 - RNA, 19 nt, Artificial Sequence
  Description of Artificial Sequence: Synthetic oligonucleotide
acuucuuguguguaaaauc

SEQ ID NO: 2717646 - RNA, 19 nt, Artificial Sequence
  Description of Artificial Sequence: Synthetic oligonucleotide
uucacaucaggccuguucc

SEQ ID NO: 2717647 - RNA, 19 nt, Artificial Sequence
  Description of Artificial Sequence: Synthetic oligonucleotide
aagguuguuuugccaaccc

SEQ ID NO: 2717648 - RNA, 19 nt, Artificial Sequence
  Description of Artificial Sequence: Synthetic oligonucleotide
cauuucuuaggacagguag

SEQ ID NO: 2717649 - RNA, 19 nt, Artificial Sequence
  Description of Artificial Sequence: Synthetic oligonucleotide
ucaaauccuauucuccucc

SEQ ID NO: 2717650 - RNA, 19 nt, Artificial Sequence
  Description of Artificial Sequence: Synthetic oligonucleotide
ucuuaggacagguagugcc

SEQ ID NO: 2717651 - RNA, 19 nt, Artificial Sequence
  Description of Artificial Sequence: Synthetic oligonucleotide
aaugaugcacacacugugc

SEQ ID NO: 2717652 - RNA, 19 nt, Artificial Sequence
  Description of Artificial Sequence: Synthetic oligonucleotide
augaugcacacacugugcc

SEQ ID NO: 2717653 - RNA, 19 nt, Artificial Sequence
  Description of Artificial Sequence: Synthetic oligonucleotide
uuguguguaaaauccaucu

SEQ ID NO: 2717654 - RNA, 19 nt, Artificial Sequence
  Description of Artificial Sequence: Synthetic oligonucleotide
aacaguuccaucuucccaa

SEQ ID NO: 2717655 - RNA, 19 nt, Artificial Sequence
  Description of Artificial Sequence: Synthetic oligonucleotide
aaauccaucuauggggcac

SEQ ID NO: 2717656 - RNA, 19 nt, Artificial Sequence
  Description of Artificial Sequence: Synthetic oligonucleotide
ugacugaacaguuccaucu

SEQ ID NO: 2717657 - RNA, 19 nt, Artificial Sequence
  Description of Artificial Sequence: Synthetic oligonucleotide
cacaauauccggcaagagg

SEQ ID NO: 2717658 - RNA, 19 nt, Artificial Sequence
  Description of Artificial Sequence: Synthetic oligonucleotide
uauggggcacuccagagga

SEQ ID NO: 2717659 - RNA, 19 nt, Artificial Sequence
  Description of Artificial Sequence: Synthetic oligonucleotide
agggugacgacaucaaauc

SEQ ID NO: 2717660 - RNA, 19 nt, Artificial Sequence
  Description of Artificial Sequence: Synthetic oligonucleotide
aggcuuuccagguggaggc

SEQ ID NO: 2717661 - RNA, 19 nt, Artificial Sequence
  Description of Artificial Sequence: Synthetic oligonucleotide
ugugacccaacucuggaca

SEQ ID NO: 2717662 - RNA, 19 nt, Artificial Sequence
  Description of Artificial Sequence: Synthetic oligonucleotide
uucccaaucucaucaauga

SEQ ID NO: 2717663 - RNA, 19 nt, Artificial Sequence
  Description of Artificial Sequence: Synthetic oligonucleotide
agccagguccaccacauac

SEQ ID NO: 2717664 - RNA, 19 nt, Artificial Sequence
  Description of Artificial Sequence: Synthetic oligonucleotide
uuucuuaggacagguagug

SEQ ID NO: 2717665 - RNA, 19 nt, Artificial Sequence
  Description of Artificial Sequence: Synthetic oligonucleotide
aucaaauccuauucuccuc

SEQ ID NO: 2717666 - RNA, 19 nt, Artificial Sequence
  Description of Artificial Sequence: Synthetic oligonucleotide
cugaaugaagggcugacug

SEQ ID NO: 2717667 - RNA, 19 nt, Artificial Sequence
  Description of Artificial Sequence: Synthetic oligonucleotide
ugggauggugccaaggaca

SEQ ID NO: 2717668 - RNA, 19 nt, Artificial Sequence
  Description of Artificial Sequence: Synthetic oligonucleotide
agguuguuuugccaacccc

SEQ ID NO: 2717669 - RNA, 19 nt, Artificial Sequence
  Description of Artificial Sequence: Synthetic oligonucleotide
ucaaugaugcacacacugu

SEQ ID NO: 2717670 - RNA, 19 nt, Artificial Sequence
  Description of Artificial Sequence: Synthetic oligonucleotide
gacugcaggaccucacugg

SEQ ID NO: 2717671 - RNA, 19 nt, Artificial Sequence
  Description of Artificial Sequence: Synthetic oligonucleotide
aguggcuucccuuugggga

SEQ ID NO: 2717672 - RNA, 19 nt, Artificial Sequence
  Description of Artificial Sequence: Synthetic oligonucleotide
caaugaugcacacacugug

SEQ ID NO: 2717673 - RNA, 19 nt, Artificial Sequence
  Description of Artificial Sequence: Synthetic oligonucleotide
aagaggcuauuucuguucu

SEQ ID NO: 2717674 - RNA, 19 nt, Artificial Sequence
  Description of Artificial Sequence: Synthetic oligonucleotide
gauagcgucugacggacug

SEQ ID NO: 2717675 - RNA, 19 nt, Artificial Sequence
  Description of Artificial Sequence: Synthetic oligonucleotide
acagagguccccgagcgcc

SEQ ID NO: 2717676 - RNA, 19 nt, Artificial Sequence
  Description of Artificial Sequence: Synthetic oligonucleotide
cugaacaguuccaucuucc

SEQ ID NO: 2717677 - RNA, 19 nt, Artificial Sequence
  Description of Artificial Sequence: Synthetic oligonucleotide
ugaaugaagggcugacuga

SEQ ID NO: 2717678 - RNA, 19 nt, Artificial Sequence
  Description of Artificial Sequence: Synthetic oligonucleotide
ucuauggggcacuccagag

SEQ ID NO: 2717679 - RNA, 19 nt, Artificial Sequence
  Description of Artificial Sequence: Synthetic oligonucleotide
gaccucacuggcuuucugg

SEQ ID NO: 2717680 - RNA, 19 nt, Artificial Sequence
  Description of Artificial Sequence: Synthetic oligonucleotide
ucuggaucaagguuguuuu

SEQ ID NO: 2717681 - RNA, 19 nt, Artificial Sequence
  Description of Artificial Sequence: Synthetic oligonucleotide
gugaggaacacaugccgcg

SEQ ID NO: 2717682 - RNA, 19 nt, Artificial Sequence
  Description of Artificial Sequence: Synthetic oligonucleotide
ugaacaguuccaucuuccc

SEQ ID NO: 2717683 - RNA, 19 nt, Artificial Sequence
  Description of Artificial Sequence: Synthetic oligonucleotide
acaggucacaauauccggc

SEQ ID NO: 2717684 - RNA, 19 nt, Artificial Sequence
  Description of Artificial Sequence: Synthetic oligonucleotide
acaccuucacaucaggccu

SEQ ID NO: 2717685 - RNA, 19 nt, Artificial Sequence
  Description of Artificial Sequence: Synthetic oligonucleotide
uggaucaagguuguuuugc

SEQ ID NO: 2717686 - RNA, 19 nt, Artificial Sequence
  Description of Artificial Sequence: Synthetic oligonucleotide
caacucuggacagaggucc

SEQ ID NO: 2717687 - RNA, 19 nt, Artificial Sequence
  Description of Artificial Sequence: Synthetic oligonucleotide
uucuuguguguaaaaucca

SEQ ID NO: 2717688 - RNA, 19 nt, Artificial Sequence
  Description of Artificial Sequence: Synthetic oligonucleotide
ccaacugcucaaaagaagc

SEQ ID NO: 2717689 - RNA, 19 nt, Artificial Sequence
  Description of Artificial Sequence: Synthetic oligonucleotide
acacaggucacaauauccg

SEQ ID NO: 2717690 - RNA, 19 nt, Artificial Sequence
  Description of Artificial Sequence: Synthetic oligonucleotide
augaagggcugacugaaca

SEQ ID NO: 2717691 - RNA, 19 nt, Artificial Sequence
  Description of Artificial Sequence: Synthetic oligonucleotide
uuccugaucuccuccacca

SEQ ID NO: 2717692 - RNA, 19 nt, Artificial Sequence
  Description of Artificial Sequence: Synthetic oligonucleotide
gacagguagugccaacugc

SEQ ID NO: 2717693 - RNA, 19 nt, Artificial Sequence
  Description of Artificial Sequence: Synthetic oligonucleotide
cacaggucacaauauccgg

SEQ ID NO: 2717694 - RNA, 19 nt, Artificial Sequence
  Description of Artificial Sequence: Synthetic oligonucleotide
gacaacagugccuggugug

SEQ ID NO: 2717695 - RNA, 19 nt, Artificial Sequence
  Description of Artificial Sequence: Synthetic oligonucleotide
aaauccuauucuccucccu

SEQ ID NO: 2717696 - RNA, 19 nt, Artificial Sequence
  Description of Artificial Sequence: Synthetic oligonucleotide
uugccugacuucuugugug

SEQ ID NO: 2717697 - RNA, 19 nt, Artificial Sequence
  Description of Artificial Sequence: Synthetic oligonucleotide
aagaagccagguccaccac

SEQ ID NO: 2717698 - RNA, 19 nt, Artificial Sequence
  Description of Artificial Sequence: Synthetic oligonucleotide
cuuguguguaaaauccauc

SEQ ID NO: 2717699 - RNA, 19 nt, Artificial Sequence
  Description of Artificial Sequence: Synthetic oligonucleotide
ugccaaggacaacagugcc

SEQ ID NO: 2717700 - RNA, 19 nt, Artificial Sequence
  Description of Artificial Sequence: Synthetic oligonucleotide
guguggauagcgucugacg

SEQ ID NO: 2717701 - RNA, 19 nt, Artificial Sequence
  Description of Artificial Sequence: Synthetic oligonucleotide
ugacggacugccugaauga

SEQ ID NO: 2717702 - RNA, 19 nt, Artificial Sequence
  Description of Artificial Sequence: Synthetic oligonucleotide
ggugccaaggacaacagug

SEQ ID NO: 2717703 - RNA, 19 nt, Artificial Sequence
  Description of Artificial Sequence: Synthetic oligonucleotide
cugacggacugccugaaug

SEQ ID NO: 2717704 - RNA, 19 nt, Artificial Sequence
  Description of Artificial Sequence: Synthetic oligonucleotide
caagaggcuauuucuguuc

SEQ ID NO: 2717705 - RNA, 19 nt, Artificial Sequence
  Description of Artificial Sequence: Synthetic oligonucleotide
cuauggggcacuccagagg

SEQ ID NO: 2717706 - RNA, 19 nt, Artificial Sequence
  Description of Artificial Sequence: Synthetic oligonucleotide
ugcauuucuuaggacaggu

SEQ ID NO: 2717707 - RNA, 19 nt, Artificial Sequence
  Description of Artificial Sequence: Synthetic oligonucleotide
ugaugcacacacugugccc

SEQ ID NO: 2717708 - RNA, 19 nt, Artificial Sequence
  Description of Artificial Sequence: Synthetic oligonucleotide
cuauucuccucccuccuug

SEQ ID NO: 2717709 - RNA, 19 nt, Artificial Sequence
  Description of Artificial Sequence: Synthetic oligonucleotide
ucaagguuguuuugccaac

SEQ ID NO: 2717710 - RNA, 19 nt, Artificial Sequence
  Description of Artificial Sequence: Synthetic oligonucleotide
cacauacugccccacucgg

SEQ ID NO: 2717711 - RNA, 19 nt, Artificial Sequence
  Description of Artificial Sequence: Synthetic oligonucleotide
uggacagagguccccgagc

SEQ ID NO: 2717712 - RNA, 19 nt, Artificial Sequence
  Description of Artificial Sequence: Synthetic oligonucleotide
gcuuucuggaucaagguug

SEQ ID NO: 2717713 - RNA, 19 nt, Artificial Sequence
  Description of Artificial Sequence: Synthetic oligonucleotide
aaggacaacagugccuggu

SEQ ID NO: 2717714 - RNA, 19 nt, Artificial Sequence
  Description of Artificial Sequence: Synthetic oligonucleotide
ugacacugaacaccuucac

SEQ ID NO: 2717715 - RNA, 19 nt, Artificial Sequence
  Description of Artificial Sequence: Synthetic oligonucleotide
aucucaucaaugaugcaca

SEQ ID NO: 2717716 - RNA, 19 nt, Artificial Sequence
  Description of Artificial Sequence: Synthetic oligonucleotide
aacucuggacagagguccc

SEQ ID NO: 2717717 - RNA, 19 nt, Artificial Sequence
  Description of Artificial Sequence: Synthetic oligonucleotide
ugcucaaaagaagccaggu

SEQ ID NO: 2717718 - RNA, 19 nt, Artificial Sequence
  Description of Artificial Sequence: Synthetic oligonucleotide
ugggaccugcauuucuuag

SEQ ID NO: 2717719 - RNA, 19 nt, Artificial Sequence
  Description of Artificial Sequence: Synthetic oligonucleotide
gaucaagguuguuuugcca

SEQ ID NO: 2717720 - RNA, 19 nt, Artificial Sequence
  Description of Artificial Sequence: Synthetic oligonucleotide
cugcucaaaagaagccagg

SEQ ID NO: 2717721 - RNA, 19 nt, Artificial Sequence
  Description of Artificial Sequence: Synthetic oligonucleotide
uucuccucccuccuugccu

SEQ ID NO: 2717722 - RNA, 19 nt, Artificial Sequence
  Description of Artificial Sequence: Synthetic oligonucleotide
auuucuuaggacagguagu

SEQ ID NO: 2717723 - RNA, 19 nt, Artificial Sequence
  Description of Artificial Sequence: Synthetic oligonucleotide
aucuauggggcacuccaga

SEQ ID NO: 2717724 - RNA, 19 nt, Artificial Sequence
  Description of Artificial Sequence: Synthetic oligonucleotide
uccggcaagaggcuauuuc

SEQ ID NO: 2717725 - RNA, 19 nt, Artificial Sequence
  Description of Artificial Sequence: Synthetic oligonucleotide
gacugccugaaugaagggc

SEQ ID NO: 2717726 - RNA, 19 nt, Artificial Sequence
  Description of Artificial Sequence: Synthetic oligonucleotide
aggacaacagugccuggug

SEQ ID NO: 2717727 - RNA, 19 nt, Artificial Sequence
  Description of Artificial Sequence: Synthetic oligonucleotide
ugcaggaccucacuggcuu

SEQ ID NO: 2717728 - RNA, 19 nt, Artificial Sequence
  Description of Artificial Sequence: Synthetic oligonucleotide
uucuguucuccuuggugac

SEQ ID NO: 2717729 - RNA, 19 nt, Artificial Sequence
  Description of Artificial Sequence: Synthetic oligonucleotide
ggacagagguccccgagcg

SEQ ID NO: 2717730 - RNA, 19 nt, Artificial Sequence
  Description of Artificial Sequence: Synthetic oligonucleotide
guguguaaaauccaucuau

SEQ ID NO: 2717731 - RNA, 19 nt, Artificial Sequence
  Description of Artificial Sequence: Synthetic oligonucleotide
uucuggaucaagguuguuu

SEQ ID NO: 2717732 - RNA, 19 nt, Artificial Sequence
  Description of Artificial Sequence: Synthetic oligonucleotide
auagcgucugacggacugc

SEQ ID NO: 2717733 - RNA, 19 nt, Artificial Sequence
  Description of Artificial Sequence: Synthetic oligonucleotide
caggcuuuccagguggagg

SEQ ID NO: 2717734 - RNA, 19 nt, Artificial Sequence
  Description of Artificial Sequence: Synthetic oligonucleotide
uggauagcgucugacggac

SEQ ID NO: 2717735 - RNA, 19 nt, Artificial Sequence
  Description of Artificial Sequence: Synthetic oligonucleotide
acagguagugccaacugcu

SEQ ID NO: 2717736 - RNA, 19 nt, Artificial Sequence
  Description of Artificial Sequence: Synthetic oligonucleotide
aauccaucuauggggcacu

SEQ ID NO: 2717737 - RNA, 19 nt, Artificial Sequence
  Description of Artificial Sequence: Synthetic oligonucleotide
uucccuuuggggacuggga

SEQ ID NO: 2717738 - RNA, 19 nt, Artificial Sequence
  Description of Artificial Sequence: Synthetic oligonucleotide
cuuaggacagguagugcca

SEQ ID NO: 2717739 - RNA, 19 nt, Artificial Sequence
  Description of Artificial Sequence: Synthetic oligonucleotide
gggaccugcauuucuuagg

SEQ ID NO: 2717740 - RNA, 19 nt, Artificial Sequence
  Description of Artificial Sequence: Synthetic oligonucleotide
ggaucaagguuguuuugcc

SEQ ID NO: 2717741 - RNA, 19 nt, Artificial Sequence
  Description of Artificial Sequence: Synthetic oligonucleotide
ggcacucaggcuuuccagg

SEQ ID NO: 2717742 - RNA, 19 nt, Artificial Sequence
  Description of Artificial Sequence: Synthetic oligonucleotide
cauacugccccacucggca

SEQ ID NO: 2717743 - RNA, 19 nt, Artificial Sequence
  Description of Artificial Sequence: Synthetic oligonucleotide
ucacaauauccggcaagag

SEQ ID NO: 2717744 - RNA, 19 nt, Artificial Sequence
  Description of Artificial Sequence: Synthetic oligonucleotide
guccccgagcgccagacag

SEQ ID NO: 2717745 - RNA, 19 nt, Artificial Sequence
  Description of Artificial Sequence: Synthetic oligonucleotide
uguuccugaucuccuccac

SEQ ID NO: 2717746 - RNA, 19 nt, Artificial Sequence
  Description of Artificial Sequence: Synthetic oligonucleotide
ucggcacucaggcuuucca

SEQ ID NO: 2717747 - RNA, 19 nt, Artificial Sequence
  Description of Artificial Sequence: Synthetic oligonucleotide
auacugccccacucggcac

SEQ ID NO: 2717748 - RNA, 19 nt, Artificial Sequence
  Description of Artificial Sequence: Synthetic oligonucleotide
uugucagggacugcuucag

SEQ ID NO: 2717749 - RNA, 19 nt, Artificial Sequence
  Description of Artificial Sequence: Synthetic oligonucleotide
accucacuggcuuucugga

SEQ ID NO: 2717750 - RNA, 19 nt, Artificial Sequence
  Description of Artificial Sequence: Synthetic oligonucleotide
caagguuguuuugccaacc

SEQ ID NO: 2717751 - RNA, 19 nt, Artificial Sequence
  Description of Artificial Sequence: Synthetic oligonucleotide
uccuauucuccucccuccu

SEQ ID NO: 2717752 - RNA, 19 nt, Artificial Sequence
  Description of Artificial Sequence: Synthetic oligonucleotide
cugacugaacaguuccauc

SEQ ID NO: 2717753 - RNA, 19 nt, Artificial Sequence
  Description of Artificial Sequence: Synthetic oligonucleotide
acauacugccccacucggc

SEQ ID NO: 2717754 - RNA, 19 nt, Artificial Sequence
  Description of Artificial Sequence: Synthetic oligonucleotide
agacagggugacgacauca

SEQ ID NO: 2717755 - RNA, 19 nt, Artificial Sequence
  Description of Artificial Sequence: Synthetic oligonucleotide
gugacccaacucuggacag

SEQ ID NO: 2717756 - RNA, 19 nt, Artificial Sequence
  Description of Artificial Sequence: Synthetic oligonucleotide
gucacaauauccggcaaga

SEQ ID NO: 2717757 - RNA, 19 nt, Artificial Sequence
  Description of Artificial Sequence: Synthetic oligonucleotide
uucuuaggacagguagugc

SEQ ID NO: 2717758 - RNA, 19 nt, Artificial Sequence
  Description of Artificial Sequence: Synthetic oligonucleotide
guuccaucuucccaaucuc

SEQ ID NO: 2717759 - RNA, 19 nt, Artificial Sequence
  Description of Artificial Sequence: Synthetic oligonucleotide
caggucacaauauccggca

SEQ ID NO: 2717760 - RNA, 19 nt, Artificial Sequence
  Description of Artificial Sequence: Synthetic oligonucleotide
aacagugccugguguggau

SEQ ID NO: 2717761 - RNA, 19 nt, Artificial Sequence
  Description of Artificial Sequence: Synthetic oligonucleotide
accagggccaguggcuucc

SEQ ID NO: 2717762 - RNA, 19 nt, Artificial Sequence
  Description of Artificial Sequence: Synthetic oligonucleotide
aauauccggcaagaggcua

SEQ ID NO: 2717763 - RNA, 19 nt, Artificial Sequence
  Description of Artificial Sequence: Synthetic oligonucleotide
uccccgagcgccagacagg

SEQ ID NO: 2717764 - RNA, 19 nt, Artificial Sequence
  Description of Artificial Sequence: Synthetic oligonucleotide
gacugggauggugccaagg

SEQ ID NO: 2717765 - RNA, 19 nt, Artificial Sequence
  Description of Artificial Sequence: Synthetic oligonucleotide
cuucccuuuggggacuggg

SEQ ID NO: 2717766 - RNA, 19 nt, Artificial Sequence
  Description of Artificial Sequence: Synthetic oligonucleotide
cggacugccugaaugaagg

SEQ ID NO: 2717767 - RNA, 19 nt, Artificial Sequence
  Description of Artificial Sequence: Synthetic oligonucleotide
ugugcccggggccauggcu

SEQ ID NO: 2717768 - RNA, 19 nt, Artificial Sequence
  Description of Artificial Sequence: Synthetic oligonucleotide
gggcugacugaacaguucc

SEQ ID NO: 2717769 - RNA, 19 nt, Artificial Sequence
  Description of Artificial Sequence: Synthetic oligonucleotide
acucuggacagaggucccc

SEQ ID NO: 2717770 - RNA, 19 nt, Artificial Sequence
  Description of Artificial Sequence: Synthetic oligonucleotide
guggcuucccuuuggggac

SEQ ID NO: 2717771 - RNA, 19 nt, Artificial Sequence
  Description of Artificial Sequence: Synthetic oligonucleotide
gugccugguguggauagcg

SEQ ID NO: 2717772 - RNA, 19 nt, Artificial Sequence
  Description of Artificial Sequence: Synthetic oligonucleotide
cagugccugguguggauag

SEQ ID NO: 2717773 - RNA, 19 nt, Artificial Sequence
  Description of Artificial Sequence: Synthetic oligonucleotide
guucuccuuggugacacug

SEQ ID NO: 2717774 - RNA, 19 nt, Artificial Sequence
  Description of Artificial Sequence: Synthetic oligonucleotide
cuggaucaagguuguuuug

SEQ ID NO: 2717775 - RNA, 19 nt, Artificial Sequence
  Description of Artificial Sequence: Synthetic oligonucleotide
gacgacaucaaauccuauu

SEQ ID NO: 2717776 - RNA, 19 nt, Artificial Sequence
  Description of Artificial Sequence: Synthetic oligonucleotide
aggacugcaggaccucacu

SEQ ID NO: 2717777 - RNA, 19 nt, Artificial Sequence
  Description of Artificial Sequence: Synthetic oligonucleotide
uagcgucugacggacugcc

SEQ ID NO: 2717778 - RNA, 19 nt, Artificial Sequence
  Description of Artificial Sequence: Synthetic oligonucleotide
ggaccugcauuucuuagga

SEQ ID NO: 2717779 - RNA, 19 nt, Artificial Sequence
  Description of Artificial Sequence: Synthetic oligonucleotide
ucacaucaggccuguuccu

SEQ ID NO: 2717780 - RNA, 19 nt, Artificial Sequence
  Description of Artificial Sequence: Synthetic oligonucleotide
aggaacacaugccgcgcca

SEQ ID NO: 2717781 - RNA, 19 nt, Artificial Sequence
  Description of Artificial Sequence: Synthetic oligonucleotide
aggacagguagugccaacu

SEQ ID NO: 2717782 - RNA, 19 nt, Artificial Sequence
  Description of Artificial Sequence: Synthetic oligonucleotide
guggauagcgucugacgga

SEQ ID NO: 2717783 - RNA, 19 nt, Artificial Sequence
  Description of Artificial Sequence: Synthetic oligonucleotide
aggcuauuucuguucuccu

SEQ ID NO: 2717784 - RNA, 19 nt, Artificial Sequence
  Description of Artificial Sequence: Synthetic oligonucleotide
uacugccccacucggcacu

SEQ ID NO: 2717785 - RNA, 19 nt, Artificial Sequence
  Description of Artificial Sequence: Synthetic oligonucleotide
uggggcacuccagaggacu

SEQ ID NO: 2717786 - RNA, 19 nt, Artificial Sequence
  Description of Artificial Sequence: Synthetic oligonucleotide
cugcacacaggucacaaua

SEQ ID NO: 2717787 - RNA, 19 nt, Artificial Sequence
  Description of Artificial Sequence: Synthetic oligonucleotide
gggugacgacaucaaaucc

SEQ ID NO: 2717788 - RNA, 19 nt, Artificial Sequence
  Description of Artificial Sequence: Synthetic oligonucleotide
uccuugccugacuucuugu

SEQ ID NO: 2717789 - RNA, 19 nt, Artificial Sequence
  Description of Artificial Sequence: Synthetic oligonucleotide
cuggacagagguccccgag

SEQ ID NO: 2717790 - RNA, 19 nt, Artificial Sequence
  Description of Artificial Sequence: Synthetic oligonucleotide
agugccugguguggauagc

SEQ ID NO: 2717791 - RNA, 19 nt, Artificial Sequence
  Description of Artificial Sequence: Synthetic oligonucleotide
cucuggacagagguccccg

SEQ ID NO: 2717792 - RNA, 19 nt, Artificial Sequence
  Description of Artificial Sequence: Synthetic oligonucleotide
ugccccacucggcacucag

SEQ ID NO: 2717793 - RNA, 19 nt, Artificial Sequence
  Description of Artificial Sequence: Synthetic oligonucleotide
cagguccaccacauacugc

SEQ ID NO: 2717794 - RNA, 19 nt, Artificial Sequence
  Description of Artificial Sequence: Synthetic oligonucleotide
ucaggcuuuccagguggag

SEQ ID NO: 2717795 - RNA, 19 nt, Artificial Sequence
  Description of Artificial Sequence: Synthetic oligonucleotide
ucugcacacaggucacaau

SEQ ID NO: 2717796 - RNA, 19 nt, Artificial Sequence
  Description of Artificial Sequence: Synthetic oligonucleotide
ccacauacugccccacucg

SEQ ID NO: 2717797 - RNA, 19 nt, Artificial Sequence
  Description of Artificial Sequence: Synthetic oligonucleotide
ggugaggaacacaugccgc

SEQ ID NO: 2717798 - RNA, 19 nt, Artificial Sequence
  Description of Artificial Sequence: Synthetic oligonucleotide
cugcauuucuuaggacagg

SEQ ID NO: 2717799 - RNA, 19 nt, Artificial Sequence
  Description of Artificial Sequence: Synthetic oligonucleotide
uggugccaaggacaacagu

SEQ ID NO: 2717800 - RNA, 19 nt, Artificial Sequence
  Description of Artificial Sequence: Synthetic oligonucleotide
caccuucacaucaggccug

SEQ ID NO: 2717801 - RNA, 19 nt, Artificial Sequence
  Description of Artificial Sequence: Synthetic oligonucleotide
cagguagugccaacugcuc

SEQ ID NO: 2717802 - RNA, 19 nt, Artificial Sequence
  Description of Artificial Sequence: Synthetic oligonucleotide
uagugccaacugcucaaaa

SEQ ID NO: 2717803 - RNA, 19 nt, Artificial Sequence
  Description of Artificial Sequence: Synthetic oligonucleotide
acagggugacgacaucaaa

SEQ ID NO: 2717804 - RNA, 19 nt, Artificial Sequence
  Description of Artificial Sequence: Synthetic oligonucleotide
gugacacugaacaccuuca

SEQ ID NO: 2717805 - RNA, 19 nt, Artificial Sequence
  Description of Artificial Sequence: Synthetic oligonucleotide
gccaacugcucaaaagaag

SEQ ID NO: 2717806 - RNA, 19 nt, Artificial Sequence
  Description of Artificial Sequence: Synthetic oligonucleotide
gacagagguccccgagcgc

SEQ ID NO: 2717807 - RNA, 19 nt, Artificial Sequence
  Description of Artificial Sequence: Synthetic oligonucleotide
ugccugguguggauagcgu

SEQ ID NO: 2717808 - RNA, 19 nt, Artificial Sequence
  Description of Artificial Sequence: Synthetic oligonucleotide
cacaucaggccuguuccug

SEQ ID NO: 2717809 - RNA, 19 nt, Artificial Sequence
  Description of Artificial Sequence: Synthetic oligonucleotide
ugacgacaucaaauccuau

SEQ ID NO: 2717810 - RNA, 19 nt, Artificial Sequence
  Description of Artificial Sequence: Synthetic oligonucleotide
cugccugaaugaagggcug

SEQ ID NO: 2717811 - RNA, 19 nt, Artificial Sequence
  Description of Artificial Sequence: Synthetic oligonucleotide
gguccugcugcucugcaca

SEQ ID NO: 2717812 - RNA, 19 nt, Artificial Sequence
  Description of Artificial Sequence: Synthetic oligonucleotide
ggacagguagugccaacug

SEQ ID NO: 2717813 - RNA, 19 nt, Artificial Sequence
  Description of Artificial Sequence: Synthetic oligonucleotide
gucagggacugcuucaggu

SEQ ID NO: 2717814 - RNA, 19 nt, Artificial Sequence
  Description of Artificial Sequence: Synthetic oligonucleotide
gcucaaaagaagccagguc

SEQ ID NO: 2717815 - RNA, 19 nt, Artificial Sequence
  Description of Artificial Sequence: Synthetic oligonucleotide
cuccagaggacugcaggac

SEQ ID NO: 2717816 - RNA, 19 nt, Artificial Sequence
  Description of Artificial Sequence: Synthetic oligonucleotide
uaggacagguagugccaac

SEQ ID NO: 2717817 - RNA, 19 nt, Artificial Sequence
  Description of Artificial Sequence: Synthetic oligonucleotide
acggacugccugaaugaag

SEQ ID NO: 2717818 - RNA, 19 nt, Artificial Sequence
  Description of Artificial Sequence: Synthetic oligonucleotide
gaagggcugacugaacagu

SEQ ID NO: 2717819 - RNA, 19 nt, Artificial Sequence
  Description of Artificial Sequence: Synthetic oligonucleotide
ggacugccugaaugaaggg

SEQ ID NO: 2717820 - RNA, 19 nt, Artificial Sequence
  Description of Artificial Sequence: Synthetic oligonucleotide
ugacccaacucuggacaga

SEQ ID NO: 2717821 - RNA, 19 nt, Artificial Sequence
  Description of Artificial Sequence: Synthetic oligonucleotide
ugccugaaugaagggcuga

SEQ ID NO: 2717822 - RNA, 19 nt, Artificial Sequence
  Description of Artificial Sequence: Synthetic oligonucleotide
cacucaggcuuuccaggug

SEQ ID NO: 2717823 - RNA, 19 nt, Artificial Sequence
  Description of Artificial Sequence: Synthetic oligonucleotide
ucugacggacugccugaau

SEQ ID NO: 2717824 - RNA, 19 nt, Artificial Sequence
  Description of Artificial Sequence: Synthetic oligonucleotide
cggugaggaacacaugccg

SEQ ID NO: 2717825 - RNA, 19 nt, Artificial Sequence
  Description of Artificial Sequence: Synthetic oligonucleotide
cugguguggauagcgucug

SEQ ID NO: 2717826 - RNA, 19 nt, Artificial Sequence
  Description of Artificial Sequence: Synthetic oligonucleotide
gugacgacaucaaauccua

SEQ ID NO: 2717827 - RNA, 19 nt, Artificial Sequence
  Description of Artificial Sequence: Synthetic oligonucleotide
ugguguggauagcgucuga

SEQ ID NO: 2717828 - RNA, 19 nt, Artificial Sequence
  Description of Artificial Sequence: Synthetic oligonucleotide
cagggugacgacaucaaau

SEQ ID NO: 2717829 - RNA, 19 nt, Artificial Sequence
  Description of Artificial Sequence: Synthetic oligonucleotide
gcgucugacggacugccug

SEQ ID NO: 2717830 - RNA, 19 nt, Artificial Sequence
  Description of Artificial Sequence: Synthetic oligonucleotide
ggugacgacaucaaauccu

SEQ ID NO: 2717831 - RNA, 19 nt, Artificial Sequence
  Description of Artificial Sequence: Synthetic oligonucleotide
ccgagcgccagacagggug

SEQ ID NO: 2717832 - RNA, 19 nt, Artificial Sequence
  Description of Artificial Sequence: Synthetic oligonucleotide
ccaucuauggggcacucca

SEQ ID NO: 2717833 - RNA, 19 nt, Artificial Sequence
  Description of Artificial Sequence: Synthetic oligonucleotide
auauccggcaagaggcuau

SEQ ID NO: 2717834 - RNA, 19 nt, Artificial Sequence
  Description of Artificial Sequence: Synthetic oligonucleotide
cugacuucuuguguguaaa

SEQ ID NO: 2717835 - RNA, 19 nt, Artificial Sequence
  Description of Artificial Sequence: Synthetic oligonucleotide
ccggugaggaacacaugcc

SEQ ID NO: 2717836 - RNA, 19 nt, Artificial Sequence
  Description of Artificial Sequence: Synthetic oligonucleotide
gaggacugcaggaccucac

SEQ ID NO: 2717837 - RNA, 19 nt, Artificial Sequence
  Description of Artificial Sequence: Synthetic oligonucleotide
gguguggauagcgucugac

SEQ ID NO: 2717838 - RNA, 19 nt, Artificial Sequence
  Description of Artificial Sequence: Synthetic oligonucleotide
auccaucuauggggcacuc

SEQ ID NO: 2717839 - RNA, 19 nt, Artificial Sequence
  Description of Artificial Sequence: Synthetic oligonucleotide
uuuccagguggaggcugug

SEQ ID NO: 2717840 - RNA, 19 nt, Artificial Sequence
  Description of Artificial Sequence: Synthetic oligonucleotide
ccaguggcuucccuuuggg

SEQ ID NO: 2717841 - RNA, 19 nt, Artificial Sequence
  Description of Artificial Sequence: Synthetic oligonucleotide
gcuggaccuugucagggac

SEQ ID NO: 2717842 - RNA, 19 nt, Artificial Sequence
  Description of Artificial Sequence: Synthetic oligonucleotide
caggcagagcuggaccuug

SEQ ID NO: 2717843 - RNA, 19 nt, Artificial Sequence
  Description of Artificial Sequence: Synthetic oligonucleotide
ccaacucuggacagagguc

SEQ ID NO: 2717844 - RNA, 19 nt, Artificial Sequence
  Description of Artificial Sequence: Synthetic oligonucleotide
aggcugugacccaacucug

SEQ ID NO: 2717845 - RNA, 19 nt, Artificial Sequence
  Description of Artificial Sequence: Synthetic oligonucleotide
gacggacugccugaaugaa

SEQ ID NO: 2717846 - RNA, 19 nt, Artificial Sequence
  Description of Artificial Sequence: Synthetic oligonucleotide
agcgccagacagggugacg

SEQ ID NO: 2717847 - RNA, 19 nt, Artificial Sequence
  Description of Artificial Sequence: Synthetic oligonucleotide
caauauccggcaagaggcu

SEQ ID NO: 2717848 - RNA, 19 nt, Artificial Sequence
  Description of Artificial Sequence: Synthetic oligonucleotide
cacacugugcccggggcca

SEQ ID NO: 2717849 - RNA, 19 nt, Artificial Sequence
  Description of Artificial Sequence: Synthetic oligonucleotide
caguuccaucuucccaauc

SEQ ID NO: 2717850 - RNA, 19 nt, Artificial Sequence
  Description of Artificial Sequence: Synthetic oligonucleotide
accuucacaucaggccugu

SEQ ID NO: 2717851 - RNA, 19 nt, Artificial Sequence
  Description of Artificial Sequence: Synthetic oligonucleotide
uauccggcaagaggcuauu

SEQ ID NO: 2717852 - RNA, 19 nt, Artificial Sequence
  Description of Artificial Sequence: Synthetic oligonucleotide
gccugguguggauagcguc

SEQ ID NO: 2717853 - RNA, 19 nt, Artificial Sequence
  Description of Artificial Sequence: Synthetic oligonucleotide
ucccuccuugccugacuuc

SEQ ID NO: 2717854 - RNA, 19 nt, Artificial Sequence
  Description of Artificial Sequence: Synthetic oligonucleotide
auggggcacuccagaggac

SEQ ID NO: 2717855 - RNA, 19 nt, Artificial Sequence
  Description of Artificial Sequence: Synthetic oligonucleotide
cucggcacucaggcuuucc

SEQ ID NO: 2717856 - RNA, 19 nt, Artificial Sequence
  Description of Artificial Sequence: Synthetic oligonucleotide
cucugcacacaggucacaa

SEQ ID NO: 2717857 - RNA, 19 nt, Artificial Sequence
  Description of Artificial Sequence: Synthetic oligonucleotide
cagacagggugacgacauc

SEQ ID NO: 2717858 - RNA, 19 nt, Artificial Sequence
  Description of Artificial Sequence: Synthetic oligonucleotide
acagugccugguguggaua

SEQ ID NO: 2717859 - RNA, 19 nt, Artificial Sequence
  Description of Artificial Sequence: Synthetic oligonucleotide
cuuuccagguggaggcugu

SEQ ID NO: 2717860 - RNA, 19 nt, Artificial Sequence
  Description of Artificial Sequence: Synthetic oligonucleotide
cugggaccugcauuucuua

SEQ ID NO: 2717861 - RNA, 19 nt, Artificial Sequence
  Description of Artificial Sequence: Synthetic oligonucleotide
uggcuucccuuuggggacu

SEQ ID NO: 2717862 - RNA, 19 nt, Artificial Sequence
  Description of Artificial Sequence: Synthetic oligonucleotide
guagugccaacugcucaaa

SEQ ID NO: 2717863 - RNA, 19 nt, Artificial Sequence
  Description of Artificial Sequence: Synthetic oligonucleotide
caacagugccuggugugga

SEQ ID NO: 2717864 - RNA, 19 nt, Artificial Sequence
  Description of Artificial Sequence: Synthetic oligonucleotide
cggcaagaggcuauuucug

SEQ ID NO: 2717865 - RNA, 19 nt, Artificial Sequence
  Description of Artificial Sequence: Synthetic oligonucleotide
ggacaacagugccuggugu

SEQ ID NO: 2717866 - RNA, 19 nt, Artificial Sequence
  Description of Artificial Sequence: Synthetic oligonucleotide
gccugaaugaagggcugac

SEQ ID NO: 2717867 - RNA, 19 nt, Artificial Sequence
  Description of Artificial Sequence: Synthetic oligonucleotide
gggacugggauggugccaa

SEQ ID NO: 2717868 - RNA, 19 nt, Artificial Sequence
  Description of Artificial Sequence: Synthetic oligonucleotide
gcgccagacagggugacga

SEQ ID NO: 2717869 - RNA, 19 nt, Artificial Sequence
  Description of Artificial Sequence: Synthetic oligonucleotide
ccccgagcgccagacaggg

SEQ ID NO: 2717870 - RNA, 19 nt, Artificial Sequence
  Description of Artificial Sequence: Synthetic oligonucleotide
gagcgccagacagggugac

SEQ ID NO: 2717871 - RNA, 19 nt, Artificial Sequence
  Description of Artificial Sequence: Synthetic oligonucleotide
acucggcacucaggcuuuc

SEQ ID NO: 2717872 - RNA, 19 nt, Artificial Sequence
  Description of Artificial Sequence: Synthetic oligonucleotide
ccggcaagaggcuauuucu

SEQ ID NO: 2717873 - RNA, 19 nt, Artificial Sequence
  Description of Artificial Sequence: Synthetic oligonucleotide
uccucccuccuugccugac

SEQ ID NO: 2717874 - RNA, 19 nt, Artificial Sequence
  Description of Artificial Sequence: Synthetic oligonucleotide
cagagguccccgagcgcca

SEQ ID NO: 2717875 - RNA, 19 nt, Artificial Sequence
  Description of Artificial Sequence: Synthetic oligonucleotide
cuggaccuugucagggacu

SEQ ID NO: 2717876 - RNA, 19 nt, Artificial Sequence
  Description of Artificial Sequence: Synthetic oligonucleotide
ccugacuucuuguguguaa

SEQ ID NO: 2717877 - RNA, 19 nt, Artificial Sequence
  Description of Artificial Sequence: Synthetic oligonucleotide
ggccaguggcuucccuuug

SEQ ID NO: 2717878 - RNA, 19 nt, Artificial Sequence
  Description of Artificial Sequence: Synthetic oligonucleotide
gcacucaggcuuuccaggu

SEQ ID NO: 2717879 - RNA, 19 nt, Artificial Sequence
  Description of Artificial Sequence: Synthetic oligonucleotide
ccugguguggauagcgucu

SEQ ID NO: 2717880 - RNA, 19 nt, Artificial Sequence
  Description of Artificial Sequence: Synthetic oligonucleotide
ggggccauggcugggaccu

SEQ ID NO: 2717881 - RNA, 19 nt, Artificial Sequence
  Description of Artificial Sequence: Synthetic oligonucleotide
gggcacuccagaggacugc

SEQ ID NO: 2717882 - RNA, 19 nt, Artificial Sequence
  Description of Artificial Sequence: Synthetic oligonucleotide
ggcacuccagaggacugca

SEQ ID NO: 2717883 - RNA, 19 nt, Artificial Sequence
  Description of Artificial Sequence: Synthetic oligonucleotide
ggcuauuucuguucuccuu

SEQ ID NO: 2717884 - RNA, 19 nt, Artificial Sequence
  Description of Artificial Sequence: Synthetic oligonucleotide
gcaagaggcuauuucuguu

SEQ ID NO: 2717885 - RNA, 19 nt, Artificial Sequence
  Description of Artificial Sequence: Synthetic oligonucleotide
ggcugacugaacaguucca

SEQ ID NO: 2717886 - RNA, 19 nt, Artificial Sequence
  Description of Artificial Sequence: Synthetic oligonucleotide
agcgucugacggacugccu

SEQ ID NO: 2717887 - RNA, 19 nt, Artificial Sequence
  Description of Artificial Sequence: Synthetic oligonucleotide
aggcccggugaggaacaca

SEQ ID NO: 2717888 - RNA, 19 nt, Artificial Sequence
  Description of Artificial Sequence: Synthetic oligonucleotide
gcugcucugcacacagguc

SEQ ID NO: 2717889 - RNA, 19 nt, Artificial Sequence
  Description of Artificial Sequence: Synthetic oligonucleotide
gagguccccgagcgccaga

SEQ ID NO: 2717890 - RNA, 19 nt, Artificial Sequence
  Description of Artificial Sequence: Synthetic oligonucleotide
gaggcccggugaggaacac

SEQ ID NO: 2717891 - RNA, 19 nt, Artificial Sequence
  Description of Artificial Sequence: Synthetic oligonucleotide
gucugacggacugccugaa

SEQ ID NO: 2717892 - RNA, 19 nt, Artificial Sequence
  Description of Artificial Sequence: Synthetic oligonucleotide
gcacuccagaggacugcag

SEQ ID NO: 2717893 - RNA, 19 nt, Artificial Sequence
  Description of Artificial Sequence: Synthetic oligonucleotide
ggaggcccggugaggaaca

SEQ ID NO: 2717894 - RNA, 19 nt, Artificial Sequence
  Description of Artificial Sequence: Synthetic oligonucleotide
ccuggaggcccggugagga

SEQ ID NO: 2717895 - RNA, 19 nt, Artificial Sequence
  Description of Artificial Sequence: Synthetic oligonucleotide
gcauuucuuaggacaggua

SEQ ID NO: 2717896 - RNA, 19 nt, Artificial Sequence
  Description of Artificial Sequence: Synthetic oligonucleotide
gccccacucggcacucagg

SEQ ID NO: 2717897 - RNA, 19 nt, Artificial Sequence
  Description of Artificial Sequence: Synthetic oligonucleotide
cuggaggcccggugaggaa

SEQ ID NO: 2717898 - RNA, 19 nt, Artificial Sequence
  Description of Artificial Sequence: Synthetic oligonucleotide
ggcccggugaggaacacau

SEQ ID NO: 2717899 - RNA, 19 nt, Artificial Sequence
  Description of Artificial Sequence: Synthetic oligonucleotide
cgacaucaaauccuauucu

SEQ ID NO: 2717900 - RNA, 19 nt, Artificial Sequence
  Description of Artificial Sequence: Synthetic oligonucleotide
auccggcaagaggcuauuu

SEQ ID NO: 2717901 - RNA, 19 nt, Artificial Sequence
  Description of Artificial Sequence: Synthetic oligonucleotide
ggauggugccaaggacaac

SEQ ID NO: 2717902 - RNA, 19 nt, Artificial Sequence
  Description of Artificial Sequence: Synthetic oligonucleotide
cgucugacggacugccuga

SEQ ID NO: 2717903 - RNA, 19 nt, Artificial Sequence
  Description of Artificial Sequence: Synthetic oligonucleotide
cucccuccuugccugacuu

SEQ ID NO: 2717904 - RNA, 19 nt, Artificial Sequence
  Description of Artificial Sequence: Synthetic oligonucleotide
cacugugcccggggccaug

SEQ ID NO: 2717905 - RNA, 19 nt, Artificial Sequence
  Description of Artificial Sequence: Synthetic oligonucleotide
gccaaccccuggaggcccg

SEQ ID NO: 2717906 - RNA, 19 nt, Artificial Sequence
  Description of Artificial Sequence: Synthetic oligonucleotide
ccacucggcacucaggcuu

SEQ ID NO: 2717907 - RNA, 19 nt, Artificial Sequence
  Description of Artificial Sequence: Synthetic oligonucleotide
acacugugcccggggccau

SEQ ID NO: 2717908 - RNA, 19 nt, Artificial Sequence
  Description of Artificial Sequence: Synthetic oligonucleotide
cacucggcacucaggcuuu

SEQ ID NO: 2717909 - RNA, 19 nt, Artificial Sequence
  Description of Artificial Sequence: Synthetic oligonucleotide
ggcuucccuuuggggacug

SEQ ID NO: 2717910 - RNA, 19 nt, Artificial Sequence
  Description of Artificial Sequence: Synthetic oligonucleotide
gggccaguggcuucccuuu

SEQ ID NO: 2717911 - RNA, 19 nt, Artificial Sequence
  Description of Artificial Sequence: Synthetic oligonucleotide
gguccccgagcgccagaca

SEQ ID NO: 2717912 - RNA, 19 nt, Artificial Sequence
  Description of Artificial Sequence: Synthetic oligonucleotide
cgccagacagggugacgac

SEQ ID NO: 2717913 - RNA, 19 nt, Artificial Sequence
  Description of Artificial Sequence: Synthetic oligonucleotide
cccuccuugccugacuucu

SEQ ID NO: 2717914 - RNA, 19 nt, Artificial Sequence
  Description of Artificial Sequence: Synthetic oligonucleotide
ggaacacaugccgcgccau

SEQ ID NO: 2717915 - RNA, 19 nt, Artificial Sequence
  Description of Artificial Sequence: Synthetic oligonucleotide
ccaaccccuggaggcccgg

SEQ ID NO: 2717916 - RNA, 19 nt, Artificial Sequence
  Description of Artificial Sequence: Synthetic oligonucleotide
ggccuguuccugaucuccu

SEQ ID NO: 2717917 - RNA, 19 nt, Artificial Sequence
  Description of Artificial Sequence: Synthetic oligonucleotide
ccggggccauggcugggac

SEQ ID NO: 2717918 - RNA, 19 nt, Artificial Sequence
  Description of Artificial Sequence: Synthetic oligonucleotide
ccuauucuccucccuccuu

SEQ ID NO: 2717919 - RNA, 19 nt, Artificial Sequence
  Description of Artificial Sequence: Synthetic oligonucleotide
ggauagcgucugacggacu

SEQ ID NO: 2717920 - RNA, 19 nt, Artificial Sequence
  Description of Artificial Sequence: Synthetic oligonucleotide
cugccccacucggcacuca

SEQ ID NO: 2717921 - RNA, 19 nt, Artificial Sequence
  Description of Artificial Sequence: Synthetic oligonucleotide
ccucccuccuugccugacu

SEQ ID NO: 2717922 - RNA, 19 nt, Artificial Sequence
  Description of Artificial Sequence: Synthetic oligonucleotide
cccggggccauggcuggga

SEQ ID NO: 2717923 - RNA, 19 nt, Artificial Sequence
  Description of Artificial Sequence: Synthetic oligonucleotide
cccgagcgccagacagggu

SEQ ID NO: 2717924 - RNA, 19 nt, Artificial Sequence
  Description of Artificial Sequence: Synthetic oligonucleotide
ccuucacaucaggccuguu

SEQ ID NO: 2717925 - RNA, 19 nt, Artificial Sequence
  Description of Artificial Sequence: Synthetic oligonucleotide
ugaacagucaaaaucaggc

SEQ ID NO: 2717926 - RNA, 19 nt, Artificial Sequence
  Description of Artificial Sequence: Synthetic oligonucleotide
aaauauauguaugaacugg

SEQ ID NO: 2717927 - RNA, 19 nt, Artificial Sequence
  Description of Artificial Sequence: Synthetic oligonucleotide
aaaauauauguaugaacug

SEQ ID NO: 2717928 - RNA, 19 nt, Artificial Sequence
  Description of Artificial Sequence: Synthetic oligonucleotide
aauauauguaugaacuggg

SEQ ID NO: 2717929 - RNA, 19 nt, Artificial Sequence
  Description of Artificial Sequence: Synthetic oligonucleotide
uauauguaugaacugggcc

SEQ ID NO: 2717930 - RNA, 19 nt, Artificial Sequence
  Description of Artificial Sequence: Synthetic oligonucleotide
gaaggaaagagacugcugc

SEQ ID NO: 2717931 - RNA, 19 nt, Artificial Sequence
  Description of Artificial Sequence: Synthetic oligonucleotide
uaugaacugggccauaucu

SEQ ID NO: 2717932 - RNA, 19 nt, Artificial Sequence
  Description of Artificial Sequence: Synthetic oligonucleotide
auauguaugaacugggcca

SEQ ID NO: 2717933 - RNA, 19 nt, Artificial Sequence
  Description of Artificial Sequence: Synthetic oligonucleotide
ugaacugggccauaucucg

SEQ ID NO: 2717934 - RNA, 19 nt, Artificial Sequence
  Description of Artificial Sequence: Synthetic oligonucleotide
gaaaauauauguaugaacu

SEQ ID NO: 2717935 - RNA, 19 nt, Artificial Sequence
  Description of Artificial Sequence: Synthetic oligonucleotide
ucaaaaucaggcuugccca

SEQ ID NO: 2717936 - RNA, 19 nt, Artificial Sequence
  Description of Artificial Sequence: Synthetic oligonucleotide
uuggaaaauauauguauga

SEQ ID NO: 2717937 - RNA, 19 nt, Artificial Sequence
  Description of Artificial Sequence: Synthetic oligonucleotide
cucacaaucuucuagucac

SEQ ID NO: 2717938 - RNA, 19 nt, Artificial Sequence
  Description of Artificial Sequence: Synthetic oligonucleotide
ucugucaucucagagcgcg

SEQ ID NO: 2717939 - RNA, 19 nt, Artificial Sequence
  Description of Artificial Sequence: Synthetic oligonucleotide
ucugcucacaaucuucuag

SEQ ID NO: 2717940 - RNA, 19 nt, Artificial Sequence
  Description of Artificial Sequence: Synthetic oligonucleotide
uugaacagucaaaaucagg

SEQ ID NO: 2717941 - RNA, 19 nt, Artificial Sequence
  Description of Artificial Sequence: Synthetic oligonucleotide
gucaaaaucaggcuugccc

SEQ ID NO: 2717942 - RNA, 19 nt, Artificial Sequence
  Description of Artificial Sequence: Synthetic oligonucleotide
acuuggaaaauauauguau

SEQ ID NO: 2717943 - RNA, 19 nt, Artificial Sequence
  Description of Artificial Sequence: Synthetic oligonucleotide
cuuggaaaauauauguaug

SEQ ID NO: 2717944 - RNA, 19 nt, Artificial Sequence
  Description of Artificial Sequence: Synthetic oligonucleotide
ucuaccuuugaacagucaa

SEQ ID NO: 2717945 - RNA, 19 nt, Artificial Sequence
  Description of Artificial Sequence: Synthetic oligonucleotide
acaugcucugcucacaauc

SEQ ID NO: 2717946 - RNA, 19 nt, Artificial Sequence
  Description of Artificial Sequence: Synthetic oligonucleotide
aacagucaaaaucaggcuu

SEQ ID NO: 2717947 - RNA, 19 nt, Artificial Sequence
  Description of Artificial Sequence: Synthetic oligonucleotide
ucuggggugggcauguccg

SEQ ID NO: 2717948 - RNA, 19 nt, Artificial Sequence
  Description of Artificial Sequence: Synthetic oligonucleotide
aaccuugcggccccggggc

SEQ ID NO: 2717949 - RNA, 19 nt, Artificial Sequence
  Description of Artificial Sequence: Synthetic oligonucleotide
uugaaguccacgcaggcuc

SEQ ID NO: 2717950 - RNA, 19 nt, Artificial Sequence
  Description of Artificial Sequence: Synthetic oligonucleotide
aauuccucccgauccugcg

SEQ ID NO: 2717951 - RNA, 19 nt, Artificial Sequence
  Description of Artificial Sequence: Synthetic oligonucleotide
agggguaaaacuuggaaaa

SEQ ID NO: 2717952 - RNA, 19 nt, Artificial Sequence
  Description of Artificial Sequence: Synthetic oligonucleotide
auauauguaugaacugggc

SEQ ID NO: 2717953 - RNA, 19 nt, Artificial Sequence
  Description of Artificial Sequence: Synthetic oligonucleotide
caaucuucuagucacagga

SEQ ID NO: 2717954 - RNA, 19 nt, Artificial Sequence
  Description of Artificial Sequence: Synthetic oligonucleotide
uccgauucaccucauugug

SEQ ID NO: 2717955 - RNA, 19 nt, Artificial Sequence
  Description of Artificial Sequence: Synthetic oligonucleotide
agugcuugugucuggcugg

SEQ ID NO: 2717956 - RNA, 19 nt, Artificial Sequence
  Description of Artificial Sequence: Synthetic oligonucleotide
ucgucugucaucucagagc

SEQ ID NO: 2717957 - RNA, 19 nt, Artificial Sequence
  Description of Artificial Sequence: Synthetic oligonucleotide
uagaugucccacaugcucu

SEQ ID NO: 2717958 - RNA, 19 nt, Artificial Sequence
  Description of Artificial Sequence: Synthetic oligonucleotide
guaauaggcggccagcgug

SEQ ID NO: 2717959 - RNA, 19 nt, Artificial Sequence
  Description of Artificial Sequence: Synthetic oligonucleotide
uaugucuuccgcacacucc

SEQ ID NO: 2717960 - RNA, 19 nt, Artificial Sequence
  Description of Artificial Sequence: Synthetic oligonucleotide
agaaaagcccagguguggc

SEQ ID NO: 2717961 - RNA, 19 nt, Artificial Sequence
  Description of Artificial Sequence: Synthetic oligonucleotide
acaaucuucuagucacagg

SEQ ID NO: 2717962 - RNA, 19 nt, Artificial Sequence
  Description of Artificial Sequence: Synthetic oligonucleotide
cuugaugucccgcuucugc

SEQ ID NO: 2717963 - RNA, 19 nt, Artificial Sequence
  Description of Artificial Sequence: Synthetic oligonucleotide
cacgacuugaaguccacgc

SEQ ID NO: 2717964 - RNA, 19 nt, Artificial Sequence
  Description of Artificial Sequence: Synthetic oligonucleotide
cuuccgauucaccucauug

SEQ ID NO: 2717965 - RNA, 19 nt, Artificial Sequence
  Description of Artificial Sequence: Synthetic oligonucleotide
cuugcagggguaaaacuug

SEQ ID NO: 2717966 - RNA, 19 nt, Artificial Sequence
  Description of Artificial Sequence: Synthetic oligonucleotide
ggcuagaugucccacaugc

SEQ ID NO: 2717967 - RNA, 19 nt, Artificial Sequence
  Description of Artificial Sequence: Synthetic oligonucleotide
auguccggguaauaggcgg

SEQ ID NO: 2717968 - RNA, 19 nt, Artificial Sequence
  Description of Artificial Sequence: Synthetic oligonucleotide
gaaaagcccagguguggcg

SEQ ID NO: 2717969 - RNA, 19 nt, Artificial Sequence
  Description of Artificial Sequence: Synthetic oligonucleotide
cagcguguggagaaaagcc

SEQ ID NO: 2717970 - RNA, 19 nt, Artificial Sequence
  Description of Artificial Sequence: Synthetic oligonucleotide
ucccuaaacuugauguccc

SEQ ID NO: 2717971 - RNA, 19 nt, Artificial Sequence
  Description of Artificial Sequence: Synthetic oligonucleotide
agcguguggagaaaagccc

SEQ ID NO: 2717972 - RNA, 19 nt, Artificial Sequence
  Description of Artificial Sequence: Synthetic oligonucleotide
ugaaguccacgcaggcucg

SEQ ID NO: 2717973 - RNA, 19 nt, Artificial Sequence
  Description of Artificial Sequence: Synthetic oligonucleotide
uugcagggguaaaacuugg

SEQ ID NO: 2717974 - RNA, 19 nt, Artificial Sequence
  Description of Artificial Sequence: Synthetic oligonucleotide
cacgccaucgcucaucuac

SEQ ID NO: 2717975 - RNA, 19 nt, Artificial Sequence
  Description of Artificial Sequence: Synthetic oligonucleotide
uggaaaauauauguaugaa

SEQ ID NO: 2717976 - RNA, 19 nt, Artificial Sequence
  Description of Artificial Sequence: Synthetic oligonucleotide
augucuuccgcacacuccu

SEQ ID NO: 2717977 - RNA, 19 nt, Artificial Sequence
  Description of Artificial Sequence: Synthetic oligonucleotide
aaagcccagguguggcgac

SEQ ID NO: 2717978 - RNA, 19 nt, Artificial Sequence
  Description of Artificial Sequence: Synthetic oligonucleotide
uuccuuaugucuuccgcac

SEQ ID NO: 2717979 - RNA, 19 nt, Artificial Sequence
  Description of Artificial Sequence: Synthetic oligonucleotide
cugaaggagacucgagugc

SEQ ID NO: 2717980 - RNA, 19 nt, Artificial Sequence
  Description of Artificial Sequence: Synthetic oligonucleotide
ugucaucucagagcgcgcg

SEQ ID NO: 2717981 - RNA, 19 nt, Artificial Sequence
  Description of Artificial Sequence: Synthetic oligonucleotide
agacucgagugcuuguguc

SEQ ID NO: 2717982 - RNA, 19 nt, Artificial Sequence
  Description of Artificial Sequence: Synthetic oligonucleotide
auggacccuggcuagaugu

SEQ ID NO: 2717983 - RNA, 19 nt, Artificial Sequence
  Description of Artificial Sequence: Synthetic oligonucleotide
caccucauugugcaggcgg

SEQ ID NO: 2717984 - RNA, 19 nt, Artificial Sequence
  Description of Artificial Sequence: Synthetic oligonucleotide
gagugcuugugucuggcug

SEQ ID NO: 2717985 - RNA, 19 nt, Artificial Sequence
  Description of Artificial Sequence: Synthetic oligonucleotide
uccgcacacuccuugcagg

SEQ ID NO: 2717986 - RNA, 19 nt, Artificial Sequence
  Description of Artificial Sequence: Synthetic oligonucleotide
uaccuuugaacagucaaaa

SEQ ID NO: 2717987 - RNA, 19 nt, Artificial Sequence
  Description of Artificial Sequence: Synthetic oligonucleotide
agguguggcgacccaauuc

SEQ ID NO: 2717988 - RNA, 19 nt, Artificial Sequence
  Description of Artificial Sequence: Synthetic oligonucleotide
aacugggccauaucucgcu

SEQ ID NO: 2717989 - RNA, 19 nt, Artificial Sequence
  Description of Artificial Sequence: Synthetic oligonucleotide
cucccuaaacuugaugucc

SEQ ID NO: 2717990 - RNA, 19 nt, Artificial Sequence
  Description of Artificial Sequence: Synthetic oligonucleotide
gacuugaaguccacgcagg

SEQ ID NO: 2717991 - RNA, 19 nt, Artificial Sequence
  Description of Artificial Sequence: Synthetic oligonucleotide
uaucucgcuguuguucugg

SEQ ID NO: 2717992 - RNA, 19 nt, Artificial Sequence
  Description of Artificial Sequence: Synthetic oligonucleotide
gguguggcgacccaauucc

SEQ ID NO: 2717993 - RNA, 19 nt, Artificial Sequence
  Description of Artificial Sequence: Synthetic oligonucleotide
gcaggaaggaaagagacug

SEQ ID NO: 2717994 - RNA, 19 nt, Artificial Sequence
  Description of Artificial Sequence: Synthetic oligonucleotide
uaauaggcggccagcgugu

SEQ ID NO: 2717995 - RNA, 19 nt, Artificial Sequence
  Description of Artificial Sequence: Synthetic oligonucleotide
ugcuggguccgcauccacg

SEQ ID NO: 2717996 - RNA, 19 nt, Artificial Sequence
  Description of Artificial Sequence: Synthetic oligonucleotide
cuucuagucacaggagccg

SEQ ID NO: 2717997 - RNA, 19 nt, Artificial Sequence
  Description of Artificial Sequence: Synthetic oligonucleotide
caaaaucaggcuugcccag

SEQ ID NO: 2717998 - RNA, 19 nt, Artificial Sequence
  Description of Artificial Sequence: Synthetic oligonucleotide
acaggagccguccuuccag

SEQ ID NO: 2717999 - RNA, 19 nt, Artificial Sequence
  Description of Artificial Sequence: Synthetic oligonucleotide
cauguccggguaauaggcg

SEQ ID NO: 2718000 - RNA, 19 nt, Artificial Sequence
  Description of Artificial Sequence: Synthetic oligonucleotide
aaaagcccagguguggcga

SEQ ID NO: 2718001 - RNA, 19 nt, Artificial Sequence
  Description of Artificial Sequence: Synthetic oligonucleotide
aagucgucugucaucucag

SEQ ID NO: 2718002 - RNA, 19 nt, Artificial Sequence
  Description of Artificial Sequence: Synthetic oligonucleotide
ucauugugcaggcggcaca

SEQ ID NO: 2718003 - RNA, 19 nt, Artificial Sequence
  Description of Artificial Sequence: Synthetic oligonucleotide
gucgucugucaucucagag

SEQ ID NO: 2718004 - RNA, 19 nt, Artificial Sequence
  Description of Artificial Sequence: Synthetic oligonucleotide
auuccucccgauccugcgg

SEQ ID NO: 2718005 - RNA, 19 nt, Artificial Sequence
  Description of Artificial Sequence: Synthetic oligonucleotide
uauguaugaacugggccau

SEQ ID NO: 2718006 - RNA, 19 nt, Artificial Sequence
  Description of Artificial Sequence: Synthetic oligonucleotide
uaaacuugaugucccgcuu

SEQ ID NO: 2718007 - RNA, 19 nt, Artificial Sequence
  Description of Artificial Sequence: Synthetic oligonucleotide
acgacuugaaguccacgca

SEQ ID NO: 2718008 - RNA, 19 nt, Artificial Sequence
  Description of Artificial Sequence: Synthetic oligonucleotide
uguccggguaauaggcggc

SEQ ID NO: 2718009 - RNA, 19 nt, Artificial Sequence
  Description of Artificial Sequence: Synthetic oligonucleotide
gcugaaggagacucgagug

SEQ ID NO: 2718010 - RNA, 19 nt, Artificial Sequence
  Description of Artificial Sequence: Synthetic oligonucleotide
ucacaaucuucuagucaca

SEQ ID NO: 2718011 - RNA, 19 nt, Artificial Sequence
  Description of Artificial Sequence: Synthetic oligonucleotide
cuuccuuaugucuuccgca

SEQ ID NO: 2718012 - RNA, 19 nt, Artificial Sequence
  Description of Artificial Sequence: Synthetic oligonucleotide
ggaaagagacugcugcgag

SEQ ID NO: 2718013 - RNA, 19 nt, Artificial Sequence
  Description of Artificial Sequence: Synthetic oligonucleotide
ucuuccgcacacuccuugc

SEQ ID NO: 2718014 - RNA, 19 nt, Artificial Sequence
  Description of Artificial Sequence: Synthetic oligonucleotide
ugcccauggacccuggcua

SEQ ID NO: 2718015 - RNA, 19 nt, Artificial Sequence
  Description of Artificial Sequence: Synthetic oligonucleotide
ugugcaggcggcacagcca

SEQ ID NO: 2718016 - RNA, 19 nt, Artificial Sequence
  Description of Artificial Sequence: Synthetic oligonucleotide
agucaaaaucaggcuugcc

SEQ ID NO: 2718017 - RNA, 19 nt, Artificial Sequence
  Description of Artificial Sequence: Synthetic oligonucleotide
ggcauguccggguaauagg

SEQ ID NO: 2718018 - RNA, 19 nt, Artificial Sequence
  Description of Artificial Sequence: Synthetic oligonucleotide
uccacgcaggcucggcacg

SEQ ID NO: 2718019 - RNA, 19 nt, Artificial Sequence
  Description of Artificial Sequence: Synthetic oligonucleotide
uccuugcagggguaaaacu

SEQ ID NO: 2718020 - RNA, 19 nt, Artificial Sequence
  Description of Artificial Sequence: Synthetic oligonucleotide
ucaccaagucgucugucau

SEQ ID NO: 2718021 - RNA, 19 nt, Artificial Sequence
  Description of Artificial Sequence: Synthetic oligonucleotide
ucgcucaucuaccuuugaa

SEQ ID NO: 2718022 - RNA, 19 nt, Artificial Sequence
  Description of Artificial Sequence: Synthetic oligonucleotide
uguaugaacugggccauau

SEQ ID NO: 2718023 - RNA, 19 nt, Artificial Sequence
  Description of Artificial Sequence: Synthetic oligonucleotide
cuagucacaggagccgucc

SEQ ID NO: 2718024 - RNA, 19 nt, Artificial Sequence
  Description of Artificial Sequence: Synthetic oligonucleotide
cagggguaaaacuuggaaa

SEQ ID NO: 2718025 - RNA, 19 nt, Artificial Sequence
  Description of Artificial Sequence: Synthetic oligonucleotide
aggagccguccuuccagcc

SEQ ID NO: 2718026 - RNA, 19 nt, Artificial Sequence
  Description of Artificial Sequence: Synthetic oligonucleotide
accucauugugcaggcggc

SEQ ID NO: 2718027 - RNA, 19 nt, Artificial Sequence
  Description of Artificial Sequence: Synthetic oligonucleotide
cgugcugcaaccuugcggc

SEQ ID NO: 2718028 - RNA, 19 nt, Artificial Sequence
  Description of Artificial Sequence: Synthetic oligonucleotide
uuccucccgauccugcgga

SEQ ID NO: 2718029 - RNA, 19 nt, Artificial Sequence
  Description of Artificial Sequence: Synthetic oligonucleotide
uccuuaugucuuccgcaca

SEQ ID NO: 2718030 - RNA, 19 nt, Artificial Sequence
  Description of Artificial Sequence: Synthetic oligonucleotide
caauuccucccgauccugc

SEQ ID NO: 2718031 - RNA, 19 nt, Artificial Sequence
  Description of Artificial Sequence: Synthetic oligonucleotide
ucucgcuguuguucugggg

SEQ ID NO: 2718032 - RNA, 19 nt, Artificial Sequence
  Description of Artificial Sequence: Synthetic oligonucleotide
caagucgucugucaucuca

SEQ ID NO: 2718033 - RNA, 19 nt, Artificial Sequence
  Description of Artificial Sequence: Synthetic oligonucleotide
aucucgcuguuguucuggg

SEQ ID NO: 2718034 - RNA, 19 nt, Artificial Sequence
  Description of Artificial Sequence: Synthetic oligonucleotide
caggaaggaaagagacugc

SEQ ID NO: 2718035 - RNA, 19 nt, Artificial Sequence
  Description of Artificial Sequence: Synthetic oligonucleotide
gcauccacgacuugaaguc

SEQ ID NO: 2718036 - RNA, 19 nt, Artificial Sequence
  Description of Artificial Sequence: Synthetic oligonucleotide
cgucugucaucucagagcg

SEQ ID NO: 2718037 - RNA, 19 nt, Artificial Sequence
  Description of Artificial Sequence: Synthetic oligonucleotide
uggguccgcauccacgacu

SEQ ID NO: 2718038 - RNA, 19 nt, Artificial Sequence
  Description of Artificial Sequence: Synthetic oligonucleotide
ugcagggguaaaacuugga

SEQ ID NO: 2718039 - RNA, 19 nt, Artificial Sequence
  Description of Artificial Sequence: Synthetic oligonucleotide
uccgcauccacgacuugaa

SEQ ID NO: 2718040 - RNA, 19 nt, Artificial Sequence
  Description of Artificial Sequence: Synthetic oligonucleotide
uguggcgacccaauuccuc

SEQ ID NO: 2718041 - RNA, 19 nt, Artificial Sequence
  Description of Artificial Sequence: Synthetic oligonucleotide
ugcucacaaucuucuaguc

SEQ ID NO: 2718042 - RNA, 19 nt, Artificial Sequence
  Description of Artificial Sequence: Synthetic oligonucleotide
cuaccuuugaacagucaaa

SEQ ID NO: 2718043 - RNA, 19 nt, Artificial Sequence
  Description of Artificial Sequence: Synthetic oligonucleotide
ugguuccugccuauccucu

SEQ ID NO: 2718044 - RNA, 19 nt, Artificial Sequence
  Description of Artificial Sequence: Synthetic oligonucleotide
ucgcuguuguucuggggug

SEQ ID NO: 2718045 - RNA, 19 nt, Artificial Sequence
  Description of Artificial Sequence: Synthetic oligonucleotide
caucuaccuuugaacaguc

SEQ ID NO: 2718046 - RNA, 19 nt, Artificial Sequence
  Description of Artificial Sequence: Synthetic oligonucleotide
ucuagucacaggagccguc

SEQ ID NO: 2718047 - RNA, 19 nt, Artificial Sequence
  Description of Artificial Sequence: Synthetic oligonucleotide
cuaaacuugaugucccgcu

SEQ ID NO: 2718048 - RNA, 19 nt, Artificial Sequence
  Description of Artificial Sequence: Synthetic oligonucleotide
caaccuugcggccccgggg

SEQ ID NO: 2718049 - RNA, 19 nt, Artificial Sequence
  Description of Artificial Sequence: Synthetic oligonucleotide
ugucuggcugguuccugcc

SEQ ID NO: 2718050 - RNA, 19 nt, Artificial Sequence
  Description of Artificial Sequence: Synthetic oligonucleotide
aagcccagguguggcgacc

SEQ ID NO: 2718051 - RNA, 19 nt, Artificial Sequence
  Description of Artificial Sequence: Synthetic oligonucleotide
cauugugcaggcggcacag

SEQ ID NO: 2718052 - RNA, 19 nt, Artificial Sequence
  Description of Artificial Sequence: Synthetic oligonucleotide
uucuagucacaggagccgu

SEQ ID NO: 2718053 - RNA, 19 nt, Artificial Sequence
  Description of Artificial Sequence: Synthetic oligonucleotide
acgccaucgcucaucuacc

SEQ ID NO: 2718054 - RNA, 19 nt, Artificial Sequence
  Description of Artificial Sequence: Synthetic oligonucleotide
ucucagagcgcgcgccgcc

SEQ ID NO: 2718055 - RNA, 19 nt, Artificial Sequence
  Description of Artificial Sequence: Synthetic oligonucleotide
acucgagugcuugugucug

SEQ ID NO: 2718056 - RNA, 19 nt, Artificial Sequence
  Description of Artificial Sequence: Synthetic oligonucleotide
auccugcggacaguccucc

SEQ ID NO: 2718057 - RNA, 19 nt, Artificial Sequence
  Description of Artificial Sequence: Synthetic oligonucleotide
cauaucucgcuguuguucu

SEQ ID NO: 2718058 - RNA, 19 nt, Artificial Sequence
  Description of Artificial Sequence: Synthetic oligonucleotide
uguucuggggugggcaugu

SEQ ID NO: 2718059 - RNA, 19 nt, Artificial Sequence
  Description of Artificial Sequence: Synthetic oligonucleotide
caucgcucaucuaccuuug

SEQ ID NO: 2718060 - RNA, 19 nt, Artificial Sequence
  Description of Artificial Sequence: Synthetic oligonucleotide
ugucccacaugcucugcuc

SEQ ID NO: 2718061 - RNA, 19 nt, Artificial Sequence
  Description of Artificial Sequence: Synthetic oligonucleotide
gucuuccgcacacuccuug

SEQ ID NO: 2718062 - RNA, 19 nt, Artificial Sequence
  Description of Artificial Sequence: Synthetic oligonucleotide
aucucagagcgcgcgccgc

SEQ ID NO: 2718063 - RNA, 19 nt, Artificial Sequence
  Description of Artificial Sequence: Synthetic oligonucleotide
cucccgauccugcggacag

SEQ ID NO: 2718064 - RNA, 19 nt, Artificial Sequence
  Description of Artificial Sequence: Synthetic oligonucleotide
cugguuccugccuauccuc

SEQ ID NO: 2718065 - RNA, 19 nt, Artificial Sequence
  Description of Artificial Sequence: Synthetic oligonucleotide
ugcugcaaccuugcggccc

SEQ ID NO: 2718066 - RNA, 19 nt, Artificial Sequence
  Description of Artificial Sequence: Synthetic oligonucleotide
caucucagagcgcgcgccg

SEQ ID NO: 2718067 - RNA, 19 nt, Artificial Sequence
  Description of Artificial Sequence: Synthetic oligonucleotide
ucgagugcuugugucuggc

SEQ ID NO: 2718068 - RNA, 19 nt, Artificial Sequence
  Description of Artificial Sequence: Synthetic oligonucleotide
cucgagugcuugugucugg

SEQ ID NO: 2718069 - RNA, 19 nt, Artificial Sequence
  Description of Artificial Sequence: Synthetic oligonucleotide
auaggcggccagcgugugg

SEQ ID NO: 2718070 - RNA, 19 nt, Artificial Sequence
  Description of Artificial Sequence: Synthetic oligonucleotide
uccacgacuugaaguccac

SEQ ID NO: 2718071 - RNA, 19 nt, Artificial Sequence
  Description of Artificial Sequence: Synthetic oligonucleotide
gcauguccggguaauaggc

SEQ ID NO: 2718072 - RNA, 19 nt, Artificial Sequence
  Description of Artificial Sequence: Synthetic oligonucleotide
cauccacgacuugaagucc

SEQ ID NO: 2718073 - RNA, 19 nt, Artificial Sequence
  Description of Artificial Sequence: Synthetic oligonucleotide
uggcuagaugucccacaug

SEQ ID NO: 2718074 - RNA, 19 nt, Artificial Sequence
  Description of Artificial Sequence: Synthetic oligonucleotide
cagucaaaaucaggcuugc

SEQ ID NO: 2718075 - RNA, 19 nt, Artificial Sequence
  Description of Artificial Sequence: Synthetic oligonucleotide
augucccacaugcucugcu

SEQ ID NO: 2718076 - RNA, 19 nt, Artificial Sequence
  Description of Artificial Sequence: Synthetic oligonucleotide
ggagaaaagcccaggugug

SEQ ID NO: 2718077 - RNA, 19 nt, Artificial Sequence
  Description of Artificial Sequence: Synthetic oligonucleotide
ugccuauccucuuccuuau

SEQ ID NO: 2718078 - RNA, 19 nt, Artificial Sequence
  Description of Artificial Sequence: Synthetic oligonucleotide
ggagccguccuuccagccg

SEQ ID NO: 2718079 - RNA, 19 nt, Artificial Sequence
  Description of Artificial Sequence: Synthetic oligonucleotide
ccuuaugucuuccgcacac

SEQ ID NO: 2718080 - RNA, 19 nt, Artificial Sequence
  Description of Artificial Sequence: Synthetic oligonucleotide
gacccuggcuagauguccc

SEQ ID NO: 2718081 - RNA, 19 nt, Artificial Sequence
  Description of Artificial Sequence: Synthetic oligonucleotide
gguaaaacuuggaaaauau

SEQ ID NO: 2718082 - RNA, 19 nt, Artificial Sequence
  Description of Artificial Sequence: Synthetic oligonucleotide
caguccucccuaaacuuga

SEQ ID NO: 2718083 - RNA, 19 nt, Artificial Sequence
  Description of Artificial Sequence: Synthetic oligonucleotide
gucaucucagagcgcgcgc

SEQ ID NO: 2718084 - RNA, 19 nt, Artificial Sequence
  Description of Artificial Sequence: Synthetic oligonucleotide
gugcaggcggcacagccac

SEQ ID NO: 2718085 - RNA, 19 nt, Artificial Sequence
  Description of Artificial Sequence: Synthetic oligonucleotide
ggguaauaggcggccagcg

SEQ ID NO: 2718086 - RNA, 19 nt, Artificial Sequence
  Description of Artificial Sequence: Synthetic oligonucleotide
cugccuauccucuuccuua

SEQ ID NO: 2718087 - RNA, 19 nt, Artificial Sequence
  Description of Artificial Sequence: Synthetic oligonucleotide
agcccagguguggcgaccc

SEQ ID NO: 2718088 - RNA, 19 nt, Artificial Sequence
  Description of Artificial Sequence: Synthetic oligonucleotide
auugugcaggcggcacagc

SEQ ID NO: 2718089 - RNA, 19 nt, Artificial Sequence
  Description of Artificial Sequence: Synthetic oligonucleotide
aauaggcggccagcgugug

SEQ ID NO: 2718090 - RNA, 19 nt, Artificial Sequence
  Description of Artificial Sequence: Synthetic oligonucleotide
guaugaacugggccauauc

SEQ ID NO: 2718091 - RNA, 19 nt, Artificial Sequence
  Description of Artificial Sequence: Synthetic oligonucleotide
caccaagucgucugucauc

SEQ ID NO: 2718092 - RNA, 19 nt, Artificial Sequence
  Description of Artificial Sequence: Synthetic oligonucleotide
cucauugugcaggcggcac

SEQ ID NO: 2718093 - RNA, 19 nt, Artificial Sequence
  Description of Artificial Sequence: Synthetic oligonucleotide
aaucaggcuugcccagcuu

SEQ ID NO: 2718094 - RNA, 19 nt, Artificial Sequence
  Description of Artificial Sequence: Synthetic oligonucleotide
guuccugccuauccucuuc

SEQ ID NO: 2718095 - RNA, 19 nt, Artificial Sequence
  Description of Artificial Sequence: Synthetic oligonucleotide
cucgcuguuguucuggggu

SEQ ID NO: 2718096 - RNA, 19 nt, Artificial Sequence
  Description of Artificial Sequence: Synthetic oligonucleotide
gucccuaugcccggugcgg

SEQ ID NO: 2718097 - RNA, 19 nt, Artificial Sequence
  Description of Artificial Sequence: Synthetic oligonucleotide
guccucccuaaacuugaug

SEQ ID NO: 2718098 - RNA, 19 nt, Artificial Sequence
  Description of Artificial Sequence: Synthetic oligonucleotide
ugggccauaucucgcuguu

SEQ ID NO: 2718099 - RNA, 19 nt, Artificial Sequence
  Description of Artificial Sequence: Synthetic oligonucleotide
uggacccuggcuagauguc

SEQ ID NO: 2718100 - RNA, 19 nt, Artificial Sequence
  Description of Artificial Sequence: Synthetic oligonucleotide
gaaguccacgcaggcucgg

SEQ ID NO: 2718101 - RNA, 19 nt, Artificial Sequence
  Description of Artificial Sequence: Synthetic oligonucleotide
gacucgagugcuugugucu

SEQ ID NO: 2718102 - RNA, 19 nt, Artificial Sequence
  Description of Artificial Sequence: Synthetic oligonucleotide
ccgauucaccucauugugc

SEQ ID NO: 2718103 - RNA, 19 nt, Artificial Sequence
  Description of Artificial Sequence: Synthetic oligonucleotide
cugcucacaaucuucuagu

SEQ ID NO: 2718104 - RNA, 19 nt, Artificial Sequence
  Description of Artificial Sequence: Synthetic oligonucleotide
caggagccguccuuccagc

SEQ ID NO: 2718105 - RNA, 19 nt, Artificial Sequence
  Description of Artificial Sequence: Synthetic oligonucleotide
gccggcaggaaggaaagag

SEQ ID NO: 2718106 - RNA, 19 nt, Artificial Sequence
  Description of Artificial Sequence: Synthetic oligonucleotide
cugucaucucagagcgcgc

SEQ ID NO: 2718107 - RNA, 19 nt, Artificial Sequence
  Description of Artificial Sequence: Synthetic oligonucleotide
aggagacucgagugcuugu

SEQ ID NO: 2718108 - RNA, 19 nt, Artificial Sequence
  Description of Artificial Sequence: Synthetic oligonucleotide
gacaguccucccuaaacuu

SEQ ID NO: 2718109 - RNA, 19 nt, Artificial Sequence
  Description of Artificial Sequence: Synthetic oligonucleotide
ggaaggaaagagacugcug

SEQ ID NO: 2718110 - RNA, 19 nt, Artificial Sequence
  Description of Artificial Sequence: Synthetic oligonucleotide
gcagggguaaaacuuggaa

SEQ ID NO: 2718111 - RNA, 19 nt, Artificial Sequence
  Description of Artificial Sequence: Synthetic oligonucleotide
acgcaggcucggcacggcg

SEQ ID NO: 2718112 - RNA, 19 nt, Artificial Sequence
  Description of Artificial Sequence: Synthetic oligonucleotide
ggcugguuccugccuaucc

SEQ ID NO: 2718113 - RNA, 19 nt, Artificial Sequence
  Description of Artificial Sequence: Synthetic oligonucleotide
gaugucccacaugcucugc

SEQ ID NO: 2718114 - RNA, 19 nt, Artificial Sequence
  Description of Artificial Sequence: Synthetic oligonucleotide
uccagccgucacgccaucg

SEQ ID NO: 2718115 - RNA, 19 nt, Artificial Sequence
  Description of Artificial Sequence: Synthetic oligonucleotide
cauggacccuggcuagaug

SEQ ID NO: 2718116 - RNA, 19 nt, Artificial Sequence
  Description of Artificial Sequence: Synthetic oligonucleotide
guccacgcaggcucggcac

SEQ ID NO: 2718117 - RNA, 19 nt, Artificial Sequence
  Description of Artificial Sequence: Synthetic oligonucleotide
auccacgacuugaagucca

SEQ ID NO: 2718118 - RNA, 19 nt, Artificial Sequence
  Description of Artificial Sequence: Synthetic oligonucleotide
ccuaaacuugaugucccgc

SEQ ID NO: 2718119 - RNA, 19 nt, Artificial Sequence
  Description of Artificial Sequence: Synthetic oligonucleotide
ucggcacggcggcuucccg

SEQ ID NO: 2718120 - RNA, 19 nt, Artificial Sequence
  Description of Artificial Sequence: Synthetic oligonucleotide
gggcauguccggguaauag

SEQ ID NO: 2718121 - RNA, 19 nt, Artificial Sequence
  Description of Artificial Sequence: Synthetic oligonucleotide
ccgugcugcaaccuugcgg

SEQ ID NO: 2718122 - RNA, 19 nt, Artificial Sequence
  Description of Artificial Sequence: Synthetic oligonucleotide
gauccugcggacaguccuc

SEQ ID NO: 2718123 - RNA, 19 nt, Artificial Sequence
  Description of Artificial Sequence: Synthetic oligonucleotide
cgacuugaaguccacgcag

SEQ ID NO: 2718124 - RNA, 19 nt, Artificial Sequence
  Description of Artificial Sequence: Synthetic oligonucleotide
ucccuaugcccggugcggc

SEQ ID NO: 2718125 - RNA, 19 nt, Artificial Sequence
  Description of Artificial Sequence: Synthetic oligonucleotide
gagacucgagugcuugugu

SEQ ID NO: 2718126 - RNA, 19 nt, Artificial Sequence
  Description of Artificial Sequence: Synthetic oligonucleotide
augucccgcuucugcuggg

SEQ ID NO: 2718127 - RNA, 19 nt, Artificial Sequence
  Description of Artificial Sequence: Synthetic oligonucleotide
ggagacucgagugcuugug

SEQ ID NO: 2718128 - RNA, 19 nt, Artificial Sequence
  Description of Artificial Sequence: Synthetic oligonucleotide
agccgucacgccaucgcuc

SEQ ID NO: 2718129 - RNA, 19 nt, Artificial Sequence
  Description of Artificial Sequence: Synthetic oligonucleotide
aucgcucaucuaccuuuga

SEQ ID NO: 2718130 - RNA, 19 nt, Artificial Sequence
  Description of Artificial Sequence: Synthetic oligonucleotide
cccuaaacuugaugucccg

SEQ ID NO: 2718131 - RNA, 19 nt, Artificial Sequence
  Description of Artificial Sequence: Synthetic oligonucleotide
ccauaucucgcuguuguuc

SEQ ID NO: 2718132 - RNA, 19 nt, Artificial Sequence
  Description of Artificial Sequence: Synthetic oligonucleotide
ugcaaccuugcggccccgg

SEQ ID NO: 2718133 - RNA, 19 nt, Artificial Sequence
  Description of Artificial Sequence: Synthetic oligonucleotide
ccagcguguggagaaaagc

SEQ ID NO: 2718134 - RNA, 19 nt, Artificial Sequence
  Description of Artificial Sequence: Synthetic oligonucleotide
uugugucuggcugguuccu

SEQ ID NO: 2718135 - RNA, 19 nt, Artificial Sequence
  Description of Artificial Sequence: Synthetic oligonucleotide
cggcaggaaggaaagagac

SEQ ID NO: 2718136 - RNA, 19 nt, Artificial Sequence
  Description of Artificial Sequence: Synthetic oligonucleotide
gcugcaaccuugcggcccc

SEQ ID NO: 2718137 - RNA, 19 nt, Artificial Sequence
  Description of Artificial Sequence: Synthetic oligonucleotide
caggcuugcccagcuuccg

SEQ ID NO: 2718138 - RNA, 19 nt, Artificial Sequence
  Description of Artificial Sequence: Synthetic oligonucleotide
gcuggguccgcauccacga

SEQ ID NO: 2718139 - RNA, 19 nt, Artificial Sequence
  Description of Artificial Sequence: Synthetic oligonucleotide
ggacaguccucccuaaacu

SEQ ID NO: 2718140 - RNA, 19 nt, Artificial Sequence
  Description of Artificial Sequence: Synthetic oligonucleotide
guccgcauccacgacuuga

SEQ ID NO: 2718141 - RNA, 19 nt, Artificial Sequence
  Description of Artificial Sequence: Synthetic oligonucleotide
ggguaaaacuuggaaaaua

SEQ ID NO: 2718142 - RNA, 19 nt, Artificial Sequence
  Description of Artificial Sequence: Synthetic oligonucleotide
ggccauaucucgcuguugu

SEQ ID NO: 2718143 - RNA, 19 nt, Artificial Sequence
  Description of Artificial Sequence: Synthetic oligonucleotide
cuggcugaaggagacucga

SEQ ID NO: 2718144 - RNA, 19 nt, Artificial Sequence
  Description of Artificial Sequence: Synthetic oligonucleotide
aggcagaggccgcggcguc

SEQ ID NO: 2718145 - RNA, 19 nt, Artificial Sequence
  Description of Artificial Sequence: Synthetic oligonucleotide
aggcuugcccagcuuccga

SEQ ID NO: 2718146 - RNA, 19 nt, Artificial Sequence
  Description of Artificial Sequence: Synthetic oligonucleotide
cgauucaccucauugugca

SEQ ID NO: 2718147 - RNA, 19 nt, Artificial Sequence
  Description of Artificial Sequence: Synthetic oligonucleotide
cucagagcgcgcgccgccg

SEQ ID NO: 2718148 - RNA, 19 nt, Artificial Sequence
  Description of Artificial Sequence: Synthetic oligonucleotide
gcaaccuugcggccccggg

SEQ ID NO: 2718149 - RNA, 19 nt, Artificial Sequence
  Description of Artificial Sequence: Synthetic oligonucleotide
acuugaugucccgcuucug

SEQ ID NO: 2718150 - RNA, 19 nt, Artificial Sequence
  Description of Artificial Sequence: Synthetic oligonucleotide
ccucccuaaacuugauguc

SEQ ID NO: 2718151 - RNA, 19 nt, Artificial Sequence
  Description of Artificial Sequence: Synthetic oligonucleotide
gagccguccuuccagccgu

SEQ ID NO: 2718152 - RNA, 19 nt, Artificial Sequence
  Description of Artificial Sequence: Synthetic oligonucleotide
ccgcacacuccuugcaggg

SEQ ID NO: 2718153 - RNA, 19 nt, Artificial Sequence
  Description of Artificial Sequence: Synthetic oligonucleotide
ggacccuggcuagaugucc

SEQ ID NO: 2718154 - RNA, 19 nt, Artificial Sequence
  Description of Artificial Sequence: Synthetic oligonucleotide
uccggguaauaggcggcca

SEQ ID NO: 2718155 - RNA, 19 nt, Artificial Sequence
  Description of Artificial Sequence: Synthetic oligonucleotide
cgcgucagucaccaagucg

SEQ ID NO: 2718156 - RNA, 19 nt, Artificial Sequence
  Description of Artificial Sequence: Synthetic oligonucleotide
uccuuccagccgucacgcc

SEQ ID NO: 2718157 - RNA, 19 nt, Artificial Sequence
  Description of Artificial Sequence: Synthetic oligonucleotide
uccugcggacaguccuccc

SEQ ID NO: 2718158 - RNA, 19 nt, Artificial Sequence
  Description of Artificial Sequence: Synthetic oligonucleotide
ggcugaaggagacucgagu

SEQ ID NO: 2718159 - RNA, 19 nt, Artificial Sequence
  Description of Artificial Sequence: Synthetic oligonucleotide
cuaugcccggugcggcggc

SEQ ID NO: 2718160 - RNA, 19 nt, Artificial Sequence
  Description of Artificial Sequence: Synthetic oligonucleotide
ugucuuccgcacacuccuu

SEQ ID NO: 2718161 - RNA, 19 nt, Artificial Sequence
  Description of Artificial Sequence: Synthetic oligonucleotide
gcgucagucaccaagucgu

SEQ ID NO: 2718162 - RNA, 19 nt, Artificial Sequence
  Description of Artificial Sequence: Synthetic oligonucleotide
ggcacggcggcuucccgug

SEQ ID NO: 2718163 - RNA, 19 nt, Artificial Sequence
  Description of Artificial Sequence: Synthetic oligonucleotide
caggcggcacagccacugg

SEQ ID NO: 2718164 - RNA, 19 nt, Artificial Sequence
  Description of Artificial Sequence: Synthetic oligonucleotide
gucacgccaucgcucaucu

SEQ ID NO: 2718165 - RNA, 19 nt, Artificial Sequence
  Description of Artificial Sequence: Synthetic oligonucleotide
aucuaccuuugaacaguca

SEQ ID NO: 2718166 - RNA, 19 nt, Artificial Sequence
  Description of Artificial Sequence: Synthetic oligonucleotide
ccagccgucacgccaucgc

SEQ ID NO: 2718167 - RNA, 19 nt, Artificial Sequence
  Description of Artificial Sequence: Synthetic oligonucleotide
augcccggugcggcggccc

SEQ ID NO: 2718168 - RNA, 19 nt, Artificial Sequence
  Description of Artificial Sequence: Synthetic oligonucleotide
ugucccgcuucugcugggu

SEQ ID NO: 2718169 - RNA, 19 nt, Artificial Sequence
  Description of Artificial Sequence: Synthetic oligonucleotide
ccgcgcgucagucaccaag

SEQ ID NO: 2718170 - RNA, 19 nt, Artificial Sequence
  Description of Artificial Sequence: Synthetic oligonucleotide
guuguucuggggugggcau

SEQ ID NO: 2718171 - RNA, 19 nt, Artificial Sequence
  Description of Artificial Sequence: Synthetic oligonucleotide
gugcugcaaccuugcggcc

SEQ ID NO: 2718172 - RNA, 19 nt, Artificial Sequence
  Description of Artificial Sequence: Synthetic oligonucleotide
gcaggcucggcacggcggc

SEQ ID NO: 2718173 - RNA, 19 nt, Artificial Sequence
  Description of Artificial Sequence: Synthetic oligonucleotide
cuugaaguccacgcaggcu

SEQ ID NO: 2718174 - RNA, 19 nt, Artificial Sequence
  Description of Artificial Sequence: Synthetic oligonucleotide
gcguguggagaaaagccca

SEQ ID NO: 2718175 - RNA, 19 nt, Artificial Sequence
  Description of Artificial Sequence: Synthetic oligonucleotide
gagcgcgcgccgccggcag

SEQ ID NO: 2718176 - RNA, 19 nt, Artificial Sequence
  Description of Artificial Sequence: Synthetic oligonucleotide
uccucccgauccugcggac

SEQ ID NO: 2718177 - RNA, 19 nt, Artificial Sequence
  Description of Artificial Sequence: Synthetic oligonucleotide
ccggguaauaggcggccag

SEQ ID NO: 2718178 - RNA, 19 nt, Artificial Sequence
  Description of Artificial Sequence: Synthetic oligonucleotide
cggacaguccucccuaaac

SEQ ID NO: 2718179 - RNA, 19 nt, Artificial Sequence
  Description of Artificial Sequence: Synthetic oligonucleotide
acggcggcuucccgugcug

SEQ ID NO: 2718180 - RNA, 19 nt, Artificial Sequence
  Description of Artificial Sequence: Synthetic oligonucleotide
cuggcuagaugucccacau

SEQ ID NO: 2718181 - RNA, 19 nt, Artificial Sequence
  Description of Artificial Sequence: Synthetic oligonucleotide
ccuuccagccgucacgcca

SEQ ID NO: 2718182 - RNA, 19 nt, Artificial Sequence
  Description of Artificial Sequence: Synthetic oligonucleotide
gguaauaggcggccagcgu

SEQ ID NO: 2718183 - RNA, 19 nt, Artificial Sequence
  Description of Artificial Sequence: Synthetic oligonucleotide
cuggguccgcauccacgac

SEQ ID NO: 2718184 - RNA, 19 nt, Artificial Sequence
  Description of Artificial Sequence: Synthetic oligonucleotide
ccuauccucuuccuuaugu

SEQ ID NO: 2718185 - RNA, 19 nt, Artificial Sequence
  Description of Artificial Sequence: Synthetic oligonucleotide
ggccgcggcgucccuaugc

SEQ ID NO: 2718186 - RNA, 19 nt, Artificial Sequence
  Description of Artificial Sequence: Synthetic oligonucleotide
uaugcccggugcggcggcc

SEQ ID NO: 2718187 - RNA, 19 nt, Artificial Sequence
  Description of Artificial Sequence: Synthetic oligonucleotide
cuuccagccgucacgccau

SEQ ID NO: 2718188 - RNA, 19 nt, Artificial Sequence
  Description of Artificial Sequence: Synthetic oligonucleotide
gucugucaucucagagcgc

SEQ ID NO: 2718189 - RNA, 19 nt, Artificial Sequence
  Description of Artificial Sequence: Synthetic oligonucleotide
ggccccggggcugaggcag

SEQ ID NO: 2718190 - RNA, 19 nt, Artificial Sequence
  Description of Artificial Sequence: Synthetic oligonucleotide
gcggcacagccacuggcug

SEQ ID NO: 2718191 - RNA, 19 nt, Artificial Sequence
  Description of Artificial Sequence: Synthetic oligonucleotide
gccgcggcgucccuaugcc

SEQ ID NO: 2718192 - RNA, 19 nt, Artificial Sequence
  Description of Artificial Sequence: Synthetic oligonucleotide
ccggcaggaaggaaagaga

SEQ ID NO: 2718193 - RNA, 19 nt, Artificial Sequence
  Description of Artificial Sequence: Synthetic oligonucleotide
agcgcgcgccgccggcagg

SEQ ID NO: 2718194 - RNA, 19 nt, Artificial Sequence
  Description of Artificial Sequence: Synthetic oligonucleotide
gcugaggcagaggccgcgg

SEQ ID NO: 2718195 - RNA, 19 nt, Artificial Sequence
  Description of Artificial Sequence: Synthetic oligonucleotide
cccuaugcccggugcggcg

SEQ ID NO: 2718196 - RNA, 19 nt, Artificial Sequence
  Description of Artificial Sequence: Synthetic oligonucleotide
cgcgccgccggcaggaagg

SEQ ID NO: 2718197 - RNA, 19 nt, Artificial Sequence
  Description of Artificial Sequence: Synthetic oligonucleotide
cagagcgcgcgccgccggc

SEQ ID NO: 2718198 - RNA, 19 nt, Artificial Sequence
  Description of Artificial Sequence: Synthetic oligonucleotide
ccuaugcccggugcggcgg

SEQ ID NO: 2718199 - RNA, 19 nt, Artificial Sequence
  Description of Artificial Sequence: Synthetic oligonucleotide
ccgccggcaggaaggaaag

SEQ ID NO: 2718200 - RNA, 19 nt, Artificial Sequence
  Description of Artificial Sequence: Synthetic oligonucleotide
ccuugcagggguaaaacuu

SEQ ID NO: 2718201 - RNA, 19 nt, Artificial Sequence
  Description of Artificial Sequence: Synthetic oligonucleotide
cccgcuucugcuggguccg

SEQ ID NO: 2718202 - RNA, 19 nt, Artificial Sequence
  Description of Artificial Sequence: Synthetic oligonucleotide
accuugcggccccggggcu

SEQ ID NO: 2718203 - RNA, 19 nt, Artificial Sequence
  Description of Artificial Sequence: Synthetic oligonucleotide
cgucccuaugcccggugcg

SEQ ID NO: 2718204 - RNA, 19 nt, Artificial Sequence
  Description of Artificial Sequence: Synthetic oligonucleotide
ccucuuccuuaugucuucc

SEQ ID NO: 2718205 - RNA, 19 nt, Artificial Sequence
  Description of Artificial Sequence: Synthetic oligonucleotide
ugggcauguccggguaaua

SEQ ID NO: 2718206 - RNA, 19 nt, Artificial Sequence
  Description of Artificial Sequence: Synthetic oligonucleotide
cuuaugucuuccgcacacu

SEQ ID NO: 2718207 - RNA, 19 nt, Artificial Sequence
  Description of Artificial Sequence: Synthetic oligonucleotide
ccuggcuagaugucccaca

SEQ ID NO: 2718208 - RNA, 19 nt, Artificial Sequence
  Description of Artificial Sequence: Synthetic oligonucleotide
uuccagccgucacgccauc

SEQ ID NO: 2718209 - RNA, 19 nt, Artificial Sequence
  Description of Artificial Sequence: Synthetic oligonucleotide
gucccgcuucugcuggguc

SEQ ID NO: 2718210 - RNA, 19 nt, Artificial Sequence
  Description of Artificial Sequence: Synthetic oligonucleotide
ccacgacuugaaguccacg

SEQ ID NO: 2718211 - RNA, 19 nt, Artificial Sequence
  Description of Artificial Sequence: Synthetic oligonucleotide
gcgucccuaugcccggugc

SEQ ID NO: 2718212 - RNA, 19 nt, Artificial Sequence
  Description of Artificial Sequence: Synthetic oligonucleotide
gcggcgucccuaugcccgg

SEQ ID NO: 2718213 - RNA, 19 nt, Artificial Sequence
  Description of Artificial Sequence: Synthetic oligonucleotide
cugggccauaucucgcugu

SEQ ID NO: 2718214 - RNA, 19 nt, Artificial Sequence
  Description of Artificial Sequence: Synthetic oligonucleotide
gcggccccggggcugaggc

SEQ ID NO: 2718215 - RNA, 19 nt, Artificial Sequence
  Description of Artificial Sequence: Synthetic oligonucleotide
gcggccagcguguggagaa

SEQ ID NO: 2718216 - RNA, 19 nt, Artificial Sequence
  Description of Artificial Sequence: Synthetic oligonucleotide
aguccucccuaaacuugau

SEQ ID NO: 2718217 - RNA, 19 nt, Artificial Sequence
  Description of Artificial Sequence: Synthetic oligonucleotide
ucccgauccugcggacagu

SEQ ID NO: 2718218 - RNA, 19 nt, Artificial Sequence
  Description of Artificial Sequence: Synthetic oligonucleotide
cacgcaggcucggcacggc

SEQ ID NO: 2718219 - RNA, 19 nt, Artificial Sequence
  Description of Artificial Sequence: Synthetic oligonucleotide
gccuauccucuuccuuaug

SEQ ID NO: 2718220 - RNA, 19 nt, Artificial Sequence
  Description of Artificial Sequence: Synthetic oligonucleotide
auguaugaacugggccaua

SEQ ID NO: 2718221 - RNA, 19 nt, Artificial Sequence
  Description of Artificial Sequence: Synthetic oligonucleotide
cgcaggcucggcacggcgg

SEQ ID NO: 2718222 - RNA, 19 nt, Artificial Sequence
  Description of Artificial Sequence: Synthetic oligonucleotide
gcagaggccgcggcguccc

SEQ ID NO: 2718223 - RNA, 19 nt, Artificial Sequence
  Description of Artificial Sequence: Synthetic oligonucleotide
agagcgcgcgccgccggca

SEQ ID NO: 2718224 - RNA, 19 nt, Artificial Sequence
  Description of Artificial Sequence: Synthetic oligonucleotide
ccgauccugcggacagucc

SEQ ID NO: 2718225 - RNA, 19 nt, Artificial Sequence
  Description of Artificial Sequence: Synthetic oligonucleotide
ucacgccaucgcucaucua

SEQ ID NO: 2718226 - RNA, 19 nt, Artificial Sequence
  Description of Artificial Sequence: Synthetic oligonucleotide
cagucaccaagucgucugu

SEQ ID NO: 2718227 - RNA, 19 nt, Artificial Sequence
  Description of Artificial Sequence: Synthetic oligonucleotide
ccgcauccacgacuugaag

SEQ ID NO: 2718228 - RNA, 19 nt, Artificial Sequence
  Description of Artificial Sequence: Synthetic oligonucleotide
ggcaggaaggaaagagacu

SEQ ID NO: 2718229 - RNA, 19 nt, Artificial Sequence
  Description of Artificial Sequence: Synthetic oligonucleotide
gggccauaucucgcuguug

SEQ ID NO: 2718230 - RNA, 19 nt, Artificial Sequence
  Description of Artificial Sequence: Synthetic oligonucleotide
ccaucgcucaucuaccuuu

SEQ ID NO: 2718231 - RNA, 19 nt, Artificial Sequence
  Description of Artificial Sequence: Synthetic oligonucleotide
gaggccgcggcgucccuau

SEQ ID NO: 2718232 - RNA, 19 nt, Artificial Sequence
  Description of Artificial Sequence: Synthetic oligonucleotide
ggcgucccuaugcccggug

SEQ ID NO: 2718233 - RNA, 19 nt, Artificial Sequence
  Description of Artificial Sequence: Synthetic oligonucleotide
gaaggagacucgagugcuu

SEQ ID NO: 2718234 - RNA, 19 nt, Artificial Sequence
  Description of Artificial Sequence: Synthetic oligonucleotide
cuugcggccccggggcuga

SEQ ID NO: 2718235 - RNA, 19 nt, Artificial Sequence
  Description of Artificial Sequence: Synthetic oligonucleotide
cgcuguuguucuggggugg

SEQ ID NO: 2718236 - RNA, 19 nt, Artificial Sequence
  Description of Artificial Sequence: Synthetic oligonucleotide
cgcauccacgacuugaagu

SEQ ID NO: 2718237 - RNA, 19 nt, Artificial Sequence
  Description of Artificial Sequence: Synthetic oligonucleotide
gccgccggcaggaaggaaa

SEQ ID NO: 2718238 - RNA, 19 nt, Artificial Sequence
  Description of Artificial Sequence: Synthetic oligonucleotide
cccgauccugcggacaguc

SEQ ID NO: 2718239 - RNA, 19 nt, Artificial Sequence
  Description of Artificial Sequence: Synthetic oligonucleotide
gggguaaaacuuggaaaau

SEQ ID NO: 2718240 - RNA, 19 nt, Artificial Sequence
  Description of Artificial Sequence: Synthetic oligonucleotide
cggguaauaggcggccagc

SEQ ID NO: 2718241 - RNA, 19 nt, Artificial Sequence
  Description of Artificial Sequence: Synthetic oligonucleotide
ccacgcaggcucggcacgg

SEQ ID NO: 2718242 - RNA, 19 nt, Artificial Sequence
  Description of Artificial Sequence: Synthetic oligonucleotide
ggcggcuucccgugcugca

SEQ ID NO: 2718243 - RNA, 19 nt, Artificial Sequence
  Description of Artificial Sequence: Synthetic oligonucleotide
gcgacccaauuccucccga

SEQ ID NO: 2718244 - RNA, 19 nt, Artificial Sequence
  Description of Artificial Sequence: Synthetic oligonucleotide
ugcuugugucuggcugguu

SEQ ID NO: 2718245 - RNA, 19 nt, Artificial Sequence
  Description of Artificial Sequence: Synthetic oligonucleotide
gguccgcauccacgacuug

SEQ ID NO: 2718246 - RNA, 19 nt, Artificial Sequence
  Description of Artificial Sequence: Synthetic oligonucleotide
gugggcauguccggguaau

SEQ ID NO: 2718247 - RNA, 19 nt, Artificial Sequence
  Description of Artificial Sequence: Synthetic oligonucleotide
cgcacacuccuugcagggg

SEQ ID NO: 2718248 - RNA, 19 nt, Artificial Sequence
  Description of Artificial Sequence: Synthetic oligonucleotide
gcuagaugucccacaugcu

SEQ ID NO: 2718249 - RNA, 19 nt, Artificial Sequence
  Description of Artificial Sequence: Synthetic oligonucleotide
gcgcgucagucaccaaguc

SEQ ID NO: 2718250 - RNA, 19 nt, Artificial Sequence
  Description of Artificial Sequence: Synthetic oligonucleotide
aggccgcggcgucccuaug

SEQ ID NO: 2718251 - RNA, 19 nt, Artificial Sequence
  Description of Artificial Sequence: Synthetic oligonucleotide
agaggccgcggcgucccua

SEQ ID NO: 2718252 - RNA, 19 nt, Artificial Sequence
  Description of Artificial Sequence: Synthetic oligonucleotide
ggcggcacagccacuggcu

SEQ ID NO: 2718253 - RNA, 19 nt, Artificial Sequence
  Description of Artificial Sequence: Synthetic oligonucleotide
guguggcgacccaauuccu

SEQ ID NO: 2718254 - RNA, 19 nt, Artificial Sequence
  Description of Artificial Sequence: Synthetic oligonucleotide
gcggacaguccucccuaaa

SEQ ID NO: 2718255 - RNA, 19 nt, Artificial Sequence
  Description of Artificial Sequence: Synthetic oligonucleotide
cgauccugcggacaguccu

SEQ ID NO: 2718256 - RNA, 19 nt, Artificial Sequence
  Description of Artificial Sequence: Synthetic oligonucleotide
agcuuccgauucaccucau

SEQ ID NO: 2718257 - RNA, 19 nt, Artificial Sequence
  Description of Artificial Sequence: Synthetic oligonucleotide
ggccagcguguggagaaaa

SEQ ID NO: 2718258 - RNA, 19 nt, Artificial Sequence
  Description of Artificial Sequence: Synthetic oligonucleotide
ccgcggcgucccuaugccc

SEQ ID NO: 2718259 - RNA, 19 nt, Artificial Sequence
  Description of Artificial Sequence: Synthetic oligonucleotide
gguuccugccuauccucuu

SEQ ID NO: 2718260 - RNA, 19 nt, Artificial Sequence
  Description of Artificial Sequence: Synthetic oligonucleotide
ccucauugugcaggcggca

SEQ ID NO: 2718261 - RNA, 19 nt, Artificial Sequence
  Description of Artificial Sequence: Synthetic oligonucleotide
gcacggcggcuucccgugc

SEQ ID NO: 2718262 - RNA, 19 nt, Artificial Sequence
  Description of Artificial Sequence: Synthetic oligonucleotide
gcccagcuuccgauucacc

SEQ ID NO: 2718263 - RNA, 19 nt, Artificial Sequence
  Description of Artificial Sequence: Synthetic oligonucleotide
ggugcggcggcccgcgcgu

SEQ ID NO: 2718264 - RNA, 19 nt, Artificial Sequence
  Description of Artificial Sequence: Synthetic oligonucleotide
cacggcggcuucccgugcu

SEQ ID NO: 2718265 - RNA, 19 nt, Artificial Sequence
  Description of Artificial Sequence: Synthetic oligonucleotide
gcccgcgcgucagucacca

SEQ ID NO: 2718266 - RNA, 19 nt, Artificial Sequence
  Description of Artificial Sequence: Synthetic oligonucleotide
cagguguggcgacccaauu

SEQ ID NO: 2718267 - RNA, 19 nt, Artificial Sequence
  Description of Artificial Sequence: Synthetic oligonucleotide
cccacaugcucugcucaca

SEQ ID NO: 2718268 - RNA, 19 nt, Artificial Sequence
  Description of Artificial Sequence: Synthetic oligonucleotide
cgucacgccaucgcucauc

SEQ ID NO: 2718269 - RNA, 19 nt, Artificial Sequence
  Description of Artificial Sequence: Synthetic oligonucleotide
ggcggccagcguguggaga

SEQ ID NO: 2718270 - RNA, 19 nt, Artificial Sequence
  Description of Artificial Sequence: Synthetic oligonucleotide
gcgcgccgccggcaggaag

SEQ ID NO: 2718271 - RNA, 19 nt, Artificial Sequence
  Description of Artificial Sequence: Synthetic oligonucleotide
cggcccgcgcgucagucac

SEQ ID NO: 2718272 - RNA, 19 nt, Artificial Sequence
  Description of Artificial Sequence: Synthetic oligonucleotide
ggguccgcauccacgacuu

SEQ ID NO: 2718273 - RNA, 19 nt, Artificial Sequence
  Description of Artificial Sequence: Synthetic oligonucleotide
gccauaucucgcuguuguu

SEQ ID NO: 2718274 - RNA, 19 nt, Artificial Sequence
  Description of Artificial Sequence: Synthetic oligonucleotide
uugcggccccggggcugag

SEQ ID NO: 2718275 - RNA, 19 nt, Artificial Sequence
  Description of Artificial Sequence: Synthetic oligonucleotide
gccaucgcucaucuaccuu

SEQ ID NO: 2718276 - RNA, 19 nt, Artificial Sequence
  Description of Artificial Sequence: Synthetic oligonucleotide
ggcggcccgcgcgucaguc

SEQ ID NO: 2718277 - RNA, 19 nt, Artificial Sequence
  Description of Artificial Sequence: Synthetic oligonucleotide
gcuugcccagcuuccgauu

SEQ ID NO: 2718278 - RNA, 19 nt, Artificial Sequence
  Description of Artificial Sequence: Synthetic oligonucleotide
gcggcggcccgcgcgucag

SEQ ID NO: 2718279 - RNA, 19 nt, Artificial Sequence
  Description of Artificial Sequence: Synthetic oligonucleotide
ccagguguggcgacccaau

SEQ ID NO: 2718280 - RNA, 19 nt, Artificial Sequence
  Description of Artificial Sequence: Synthetic oligonucleotide
cgcgcgucagucaccaagu

SEQ ID NO: 2718281 - RNA, 19 nt, Artificial Sequence
  Description of Artificial Sequence: Synthetic oligonucleotide
gcggcccgcgcgucaguca

SEQ ID NO: 2718282 - RNA, 19 nt, Artificial Sequence
  Description of Artificial Sequence: Synthetic oligonucleotide
gcggcuucccgugcugcaa

SEQ ID NO: 2718283 - RNA, 19 nt, Artificial Sequence
  Description of Artificial Sequence: Synthetic oligonucleotide
ccucccgauccugcggaca

SEQ ID NO: 2718284 - RNA, 19 nt, Artificial Sequence
  Description of Artificial Sequence: Synthetic oligonucleotide
ccugccuauccucuuccuu

SEQ ID NO: 2718285 - RNA, 19 nt, Artificial Sequence
  Description of Artificial Sequence: Synthetic oligonucleotide
ggcccgcgcgucagucacc

SEQ ID NO: 2718286 - RNA, 19 nt, Artificial Sequence
  Description of Artificial Sequence: Synthetic oligonucleotide
cggcggcuucccgugcugc

SEQ ID NO: 2718287 - RNA, 19 nt, Artificial Sequence
  Description of Artificial Sequence: Synthetic oligonucleotide
ccccggggcugaggcagag

SEQ ID NO: 2718288 - RNA, 19 nt, Artificial Sequence
  Description of Artificial Sequence: Synthetic oligonucleotide
ccauggacccuggcuagau

SEQ ID NO: 2718289 - RNA, 19 nt, Artificial Sequence
  Description of Artificial Sequence: Synthetic oligonucleotide
cgagugcuugugucuggcu

SEQ ID NO: 2718290 - RNA, 19 nt, Artificial Sequence
  Description of Artificial Sequence: Synthetic oligonucleotide
gugcggcggcccgcgcguc

SEQ ID NO: 2718291 - RNA, 19 nt, Artificial Sequence
  Description of Artificial Sequence: Synthetic oligonucleotide
cgccaucgcucaucuaccu

SEQ ID NO: 2718292 - RNA, 19 nt, Artificial Sequence
  Description of Artificial Sequence: Synthetic oligonucleotide
ccgcuucugcuggguccgc

SEQ ID NO: 2718293 - RNA, 19 nt, Artificial Sequence
  Description of Artificial Sequence: Synthetic oligonucleotide
gcgccgccggcaggaagga

SEQ ID NO: 2718294 - RNA, 19 nt, Artificial Sequence
  Description of Artificial Sequence: Synthetic oligonucleotide
cgacccaauuccucccgau

SEQ ID NO: 2718295 - RNA, 19 nt, Artificial Sequence
  Description of Artificial Sequence: Synthetic oligonucleotide
gcccggugcggcggcccgc

SEQ ID NO: 2718296 - RNA, 19 nt, Artificial Sequence
  Description of Artificial Sequence: Synthetic oligonucleotide
ccggugcggcggcccgcgc

SEQ ID NO: 2718297 - RNA, 19 nt, Artificial Sequence
  Description of Artificial Sequence: Synthetic oligonucleotide
cagaggccgcggcgucccu

SEQ ID NO: 2718298 - RNA, 19 nt, Artificial Sequence
  Description of Artificial Sequence: Synthetic oligonucleotide
gccccggggcugaggcaga

SEQ ID NO: 2718299 - RNA, 19 nt, Artificial Sequence
  Description of Artificial Sequence: Synthetic oligonucleotide
cgccggcaggaaggaaaga

SEQ ID NO: 2718300 - RNA, 19 nt, Artificial Sequence
  Description of Artificial Sequence: Synthetic oligonucleotide
cccgcgcgucagucaccaa

SEQ ID NO: 2718301 - RNA, 19 nt, Artificial Sequence
  Description of Artificial Sequence: Synthetic oligonucleotide
cggccagcguguggagaaa

SEQ ID NO: 2718302 - RNA, 19 nt, Artificial Sequence
  Description of Artificial Sequence: Synthetic oligonucleotide
ccgucacgccaucgcucau

SEQ ID NO: 2718303 - RNA, 19 nt, Artificial Sequence
  Description of Artificial Sequence: Synthetic oligonucleotide
cgccgccggcaggaaggaa

SEQ ID NO: 2718304 - RNA, 19 nt, Artificial Sequence
  Description of Artificial Sequence: Synthetic oligonucleotide
cggcgucccuaugcccggu

SEQ ID NO: 2718305 - RNA, 19 nt, Artificial Sequence
  Description of Artificial Sequence: Synthetic oligonucleotide
cgcgcgccgccggcaggaa

SEQ ID NO: 2718306 - RNA, 19 nt, Artificial Sequence
  Description of Artificial Sequence: Synthetic oligonucleotide
cggcggcccgcgcgucagu

SEQ ID NO: 2718307 - RNA, 19 nt, Artificial Sequence
  Description of Artificial Sequence: Synthetic oligonucleotide
uagagaaagacccuggcag

SEQ ID NO: 2718308 - RNA, 19 nt, Artificial Sequence
  Description of Artificial Sequence: Synthetic oligonucleotide
aagaccuggaucuccuucc

SEQ ID NO: 2718309 - RNA, 19 nt, Artificial Sequence
  Description of Artificial Sequence: Synthetic oligonucleotide
uacacauggaccuggagag

SEQ ID NO: 2718310 - RNA, 19 nt, Artificial Sequence
  Description of Artificial Sequence: Synthetic oligonucleotide
ucuagaaggcagcagagca

SEQ ID NO: 2718311 - RNA, 19 nt, Artificial Sequence
  Description of Artificial Sequence: Synthetic oligonucleotide
agagcuaggguauccaugg

SEQ ID NO: 2718312 - RNA, 19 nt, Artificial Sequence
  Description of Artificial Sequence: Synthetic oligonucleotide
ccaacuuagagaaagaccc

SEQ ID NO: 2718313 - RNA, 19 nt, Artificial Sequence
  Description of Artificial Sequence: Synthetic oligonucleotide
gagacucauguacacaugg

SEQ ID NO: 2718314 - RNA, 19 nt, Artificial Sequence
  Description of Artificial Sequence: Synthetic oligonucleotide
ucauccaacuuagagaaag

SEQ ID NO: 2718315 - RNA, 19 nt, Artificial Sequence
  Description of Artificial Sequence: Synthetic oligonucleotide
auucagguuguccugagag

SEQ ID NO: 2718316 - RNA, 19 nt, Artificial Sequence
  Description of Artificial Sequence: Synthetic oligonucleotide
uccaacuuagagaaagacc

SEQ ID NO: 2718317 - RNA, 19 nt, Artificial Sequence
  Description of Artificial Sequence: Synthetic oligonucleotide
ugaugcagacaguacaggg

SEQ ID NO: 2718318 - RNA, 19 nt, Artificial Sequence
  Description of Artificial Sequence: Synthetic oligonucleotide
uuuuaugaggucauccaac

SEQ ID NO: 2718319 - RNA, 19 nt, Artificial Sequence
  Description of Artificial Sequence: Synthetic oligonucleotide
aaggcagcagagcagaaca

SEQ ID NO: 2718320 - RNA, 19 nt, Artificial Sequence
  Description of Artificial Sequence: Synthetic oligonucleotide
ucugacauuccucaggguc

SEQ ID NO: 2718321 - RNA, 19 nt, Artificial Sequence
  Description of Artificial Sequence: Synthetic oligonucleotide
gaggucauccaacuuagag

SEQ ID NO: 2718322 - RNA, 19 nt, Artificial Sequence
  Description of Artificial Sequence: Synthetic oligonucleotide
accuggagagaguugaugg

SEQ ID NO: 2718323 - RNA, 19 nt, Artificial Sequence
  Description of Artificial Sequence: Synthetic oligonucleotide
aagggcaugguuguguuuc

SEQ ID NO: 2718324 - RNA, 19 nt, Artificial Sequence
  Description of Artificial Sequence: Synthetic oligonucleotide
uuuaugaggucauccaacu

SEQ ID NO: 2718325 - RNA, 19 nt, Artificial Sequence
  Description of Artificial Sequence: Synthetic oligonucleotide
acucauguacacauggacc

SEQ ID NO: 2718326 - RNA, 19 nt, Artificial Sequence
  Description of Artificial Sequence: Synthetic oligonucleotide
caggggaugaugcagacag

SEQ ID NO: 2718327 - RNA, 19 nt, Artificial Sequence
  Description of Artificial Sequence: Synthetic oligonucleotide
uuagagaaagacccuggca

SEQ ID NO: 2718328 - RNA, 19 nt, Artificial Sequence
  Description of Artificial Sequence: Synthetic oligonucleotide
cuucugacauuccucaggg

SEQ ID NO: 2718329 - RNA, 19 nt, Artificial Sequence
  Description of Artificial Sequence: Synthetic oligonucleotide
aggagucuggagcaggccc

SEQ ID NO: 2718330 - RNA, 19 nt, Artificial Sequence
  Description of Artificial Sequence: Synthetic oligonucleotide
ggacugggcaucuagaagg

SEQ ID NO: 2718331 - RNA, 19 nt, Artificial Sequence
  Description of Artificial Sequence: Synthetic oligonucleotide
guuggugugcuucugccgg

SEQ ID NO: 2718332 - RNA, 19 nt, Artificial Sequence
  Description of Artificial Sequence: Synthetic oligonucleotide
ggucaaaggacagugaggg

SEQ ID NO: 2718333 - RNA, 19 nt, Artificial Sequence
  Description of Artificial Sequence: Synthetic oligonucleotide
agagaaagacccuggcagg

SEQ ID NO: 2718334 - RNA, 19 nt, Artificial Sequence
  Description of Artificial Sequence: Synthetic oligonucleotide
caugagagggucaaaggac

SEQ ID NO: 2718335 - RNA, 19 nt, Artificial Sequence
  Description of Artificial Sequence: Synthetic oligonucleotide
gaugaugcagacaguacag

SEQ ID NO: 2718336 - RNA, 19 nt, Artificial Sequence
  Description of Artificial Sequence: Synthetic oligonucleotide
caggcguucgugcagaugc

SEQ ID NO: 2718337 - RNA, 19 nt, Artificial Sequence
  Description of Artificial Sequence: Synthetic oligonucleotide
agggucaaaggacagugag

SEQ ID NO: 2718338 - RNA, 19 nt, Artificial Sequence
  Description of Artificial Sequence: Synthetic oligonucleotide
cuuccgaagggcaugguug

SEQ ID NO: 2718339 - RNA, 19 nt, Artificial Sequence
  Description of Artificial Sequence: Synthetic oligonucleotide
uggaucuccuuccgaaggg

SEQ ID NO: 2718340 - RNA, 19 nt, Artificial Sequence
  Description of Artificial Sequence: Synthetic oligonucleotide
uggaaccaggggaugaugc

SEQ ID NO: 2718341 - RNA, 19 nt, Artificial Sequence
  Description of Artificial Sequence: Synthetic oligonucleotide
agaacaggagccacagucc

SEQ ID NO: 2718342 - RNA, 19 nt, Artificial Sequence
  Description of Artificial Sequence: Synthetic oligonucleotide
auccaacuuagagaaagac

SEQ ID NO: 2718343 - RNA, 19 nt, Artificial Sequence
  Description of Artificial Sequence: Synthetic oligonucleotide
cuuagagaaagacccuggc

SEQ ID NO: 2718344 - RNA, 19 nt, Artificial Sequence
  Description of Artificial Sequence: Synthetic oligonucleotide
agccagucgguucuucugc

SEQ ID NO: 2718345 - RNA, 19 nt, Artificial Sequence
  Description of Artificial Sequence: Synthetic oligonucleotide
gaagggaggaggccaagag

SEQ ID NO: 2718346 - RNA, 19 nt, Artificial Sequence
  Description of Artificial Sequence: Synthetic oligonucleotide
uguuggugugcuucugccg

SEQ ID NO: 2718347 - RNA, 19 nt, Artificial Sequence
  Description of Artificial Sequence: Synthetic oligonucleotide
ucuccaaggacucgugcug

SEQ ID NO: 2718348 - RNA, 19 nt, Artificial Sequence
  Description of Artificial Sequence: Synthetic oligonucleotide
gaugcagacaguacagggc

SEQ ID NO: 2718349 - RNA, 19 nt, Artificial Sequence
  Description of Artificial Sequence: Synthetic oligonucleotide
augguuguguuucuccaag

SEQ ID NO: 2718350 - RNA, 19 nt, Artificial Sequence
  Description of Artificial Sequence: Synthetic oligonucleotide
augcagacaguacagggcu

SEQ ID NO: 2718351 - RNA, 19 nt, Artificial Sequence
  Description of Artificial Sequence: Synthetic oligonucleotide
guacacauggaccuggaga

SEQ ID NO: 2718352 - RNA, 19 nt, Artificial Sequence
  Description of Artificial Sequence: Synthetic oligonucleotide
aguugcucugccuggacug

SEQ ID NO: 2718353 - RNA, 19 nt, Artificial Sequence
  Description of Artificial Sequence: Synthetic oligonucleotide
cugggcaucuagaaggcag

SEQ ID NO: 2718354 - RNA, 19 nt, Artificial Sequence
  Description of Artificial Sequence: Synthetic oligonucleotide
acagcugggcuagaggggc

SEQ ID NO: 2718355 - RNA, 19 nt, Artificial Sequence
  Description of Artificial Sequence: Synthetic oligonucleotide
ggacagcugggcuagaggg

SEQ ID NO: 2718356 - RNA, 19 nt, Artificial Sequence
  Description of Artificial Sequence: Synthetic oligonucleotide
ugagagggucaaaggacag

SEQ ID NO: 2718357 - RNA, 19 nt, Artificial Sequence
  Description of Artificial Sequence: Synthetic oligonucleotide
ucuucagcugcuucugaca

SEQ ID NO: 2718358 - RNA, 19 nt, Artificial Sequence
  Description of Artificial Sequence: Synthetic oligonucleotide
aucuagaaggcagcagagc

SEQ ID NO: 2718359 - RNA, 19 nt, Artificial Sequence
  Description of Artificial Sequence: Synthetic oligonucleotide
uucuccaaggacucgugcu

SEQ ID NO: 2718360 - RNA, 19 nt, Artificial Sequence
  Description of Artificial Sequence: Synthetic oligonucleotide
cuggaucuccuuccgaagg

SEQ ID NO: 2718361 - RNA, 19 nt, Artificial Sequence
  Description of Artificial Sequence: Synthetic oligonucleotide
agguuguccugagaguugc

SEQ ID NO: 2718362 - RNA, 19 nt, Artificial Sequence
  Description of Artificial Sequence: Synthetic oligonucleotide
ggucauccaacuuagagaa

SEQ ID NO: 2718363 - RNA, 19 nt, Artificial Sequence
  Description of Artificial Sequence: Synthetic oligonucleotide
acccuggcaggcuggaacc

SEQ ID NO: 2718364 - RNA, 19 nt, Artificial Sequence
  Description of Artificial Sequence: Synthetic oligonucleotide
guauccaugggauucaggu

SEQ ID NO: 2718365 - RNA, 19 nt, Artificial Sequence
  Description of Artificial Sequence: Synthetic oligonucleotide
agagggucaaaggacagug

SEQ ID NO: 2718366 - RNA, 19 nt, Artificial Sequence
  Description of Artificial Sequence: Synthetic oligonucleotide
uuucuccaaggacucgugc

SEQ ID NO: 2718367 - RNA, 19 nt, Artificial Sequence
  Description of Artificial Sequence: Synthetic oligonucleotide
ugguuguguuucuccaagg

SEQ ID NO: 2718368 - RNA, 19 nt, Artificial Sequence
  Description of Artificial Sequence: Synthetic oligonucleotide
caucuagaaggcagcagag

SEQ ID NO: 2718369 - RNA, 19 nt, Artificial Sequence
  Description of Artificial Sequence: Synthetic oligonucleotide
guuccugagagcuagggua

SEQ ID NO: 2718370 - RNA, 19 nt, Artificial Sequence
  Description of Artificial Sequence: Synthetic oligonucleotide
acuuagagaaagacccugg

SEQ ID NO: 2718371 - RNA, 19 nt, Artificial Sequence
  Description of Artificial Sequence: Synthetic oligonucleotide
uggagagaguugaugggcu

SEQ ID NO: 2718372 - RNA, 19 nt, Artificial Sequence
  Description of Artificial Sequence: Synthetic oligonucleotide
uggaccuggagagaguuga

SEQ ID NO: 2718373 - RNA, 19 nt, Artificial Sequence
  Description of Artificial Sequence: Synthetic oligonucleotide
caaggacucgugcugcugg

SEQ ID NO: 2718374 - RNA, 19 nt, Artificial Sequence
  Description of Artificial Sequence: Synthetic oligonucleotide
uguccugagaguugcucug

SEQ ID NO: 2718375 - RNA, 19 nt, Artificial Sequence
  Description of Artificial Sequence: Synthetic oligonucleotide
ggagccaggagucuggagc

SEQ ID NO: 2718376 - RNA, 19 nt, Artificial Sequence
  Description of Artificial Sequence: Synthetic oligonucleotide
gagagaguugaugggcugg

SEQ ID NO: 2718377 - RNA, 19 nt, Artificial Sequence
  Description of Artificial Sequence: Synthetic oligonucleotide
uuguccugagaguugcucu

SEQ ID NO: 2718378 - RNA, 19 nt, Artificial Sequence
  Description of Artificial Sequence: Synthetic oligonucleotide
gaggccaagagacucaugu

SEQ ID NO: 2718379 - RNA, 19 nt, Artificial Sequence
  Description of Artificial Sequence: Synthetic oligonucleotide
uagaaggcagcagagcaga

SEQ ID NO: 2718380 - RNA, 19 nt, Artificial Sequence
  Description of Artificial Sequence: Synthetic oligonucleotide
uguuccugagagcuagggu

SEQ ID NO: 2718381 - RNA, 19 nt, Artificial Sequence
  Description of Artificial Sequence: Synthetic oligonucleotide
ugggcaucuagaaggcagc

SEQ ID NO: 2718382 - RNA, 19 nt, Artificial Sequence
  Description of Artificial Sequence: Synthetic oligonucleotide
ggagccacaguccacucgg

SEQ ID NO: 2718383 - RNA, 19 nt, Artificial Sequence
  Description of Artificial Sequence: Synthetic oligonucleotide
cauguacacauggaccugg

SEQ ID NO: 2718384 - RNA, 19 nt, Artificial Sequence
  Description of Artificial Sequence: Synthetic oligonucleotide
gaaagacccuggcaggcug

SEQ ID NO: 2718385 - RNA, 19 nt, Artificial Sequence
  Description of Artificial Sequence: Synthetic oligonucleotide
cuuguuggugugcuucugc

SEQ ID NO: 2718386 - RNA, 19 nt, Artificial Sequence
  Description of Artificial Sequence: Synthetic oligonucleotide
uaggguauccaugggauuc

SEQ ID NO: 2718387 - RNA, 19 nt, Artificial Sequence
  Description of Artificial Sequence: Synthetic oligonucleotide
uguuucuccaaggacucgu

SEQ ID NO: 2718388 - RNA, 19 nt, Artificial Sequence
  Description of Artificial Sequence: Synthetic oligonucleotide
uucuucagcugcuucugac

SEQ ID NO: 2718389 - RNA, 19 nt, Artificial Sequence
  Description of Artificial Sequence: Synthetic oligonucleotide
agagcagaacaggagccac

SEQ ID NO: 2718390 - RNA, 19 nt, Artificial Sequence
  Description of Artificial Sequence: Synthetic oligonucleotide
ugcagaugcaguguccggc

SEQ ID NO: 2718391 - RNA, 19 nt, Artificial Sequence
  Description of Artificial Sequence: Synthetic oligonucleotide
ugcaagaccuggaucuccu

SEQ ID NO: 2718392 - RNA, 19 nt, Artificial Sequence
  Description of Artificial Sequence: Synthetic oligonucleotide
gaaccaggggaugaugcag

SEQ ID NO: 2718393 - RNA, 19 nt, Artificial Sequence
  Description of Artificial Sequence: Synthetic oligonucleotide
gcuucugacauuccucagg

SEQ ID NO: 2718394 - RNA, 19 nt, Artificial Sequence
  Description of Artificial Sequence: Synthetic oligonucleotide
agcuaggguauccauggga

SEQ ID NO: 2718395 - RNA, 19 nt, Artificial Sequence
  Description of Artificial Sequence: Synthetic oligonucleotide
cuggagagaguugaugggc

SEQ ID NO: 2718396 - RNA, 19 nt, Artificial Sequence
  Description of Artificial Sequence: Synthetic oligonucleotide
ugggcagccagucgguucu

SEQ ID NO: 2718397 - RNA, 19 nt, Artificial Sequence
  Description of Artificial Sequence: Synthetic oligonucleotide
gaacaggagccacagucca

SEQ ID NO: 2718398 - RNA, 19 nt, Artificial Sequence
  Description of Artificial Sequence: Synthetic oligonucleotide
ggaugaugcagacaguaca

SEQ ID NO: 2718399 - RNA, 19 nt, Artificial Sequence
  Description of Artificial Sequence: Synthetic oligonucleotide
ugugcuucugccggcugcg

SEQ ID NO: 2718400 - RNA, 19 nt, Artificial Sequence
  Description of Artificial Sequence: Synthetic oligonucleotide
uucagguuguccugagagu

SEQ ID NO: 2718401 - RNA, 19 nt, Artificial Sequence
  Description of Artificial Sequence: Synthetic oligonucleotide
agcagaacaggagccacag

SEQ ID NO: 2718402 - RNA, 19 nt, Artificial Sequence
  Description of Artificial Sequence: Synthetic oligonucleotide
agcuguuccugagagcuag

SEQ ID NO: 2718403 - RNA, 19 nt, Artificial Sequence
  Description of Artificial Sequence: Synthetic oligonucleotide
uucgugcagaugcaguguc

SEQ ID NO: 2718404 - RNA, 19 nt, Artificial Sequence
  Description of Artificial Sequence: Synthetic oligonucleotide
augaugcagacaguacagg

SEQ ID NO: 2718405 - RNA, 19 nt, Artificial Sequence
  Description of Artificial Sequence: Synthetic oligonucleotide
cacauggaccuggagagag

SEQ ID NO: 2718406 - RNA, 19 nt, Artificial Sequence
  Description of Artificial Sequence: Synthetic oligonucleotide
cucauguacacauggaccu

SEQ ID NO: 2718407 - RNA, 19 nt, Artificial Sequence
  Description of Artificial Sequence: Synthetic oligonucleotide
agaccuggaucuccuuccg

SEQ ID NO: 2718408 - RNA, 19 nt, Artificial Sequence
  Description of Artificial Sequence: Synthetic oligonucleotide
aggacagugagggcagugg

SEQ ID NO: 2718409 - RNA, 19 nt, Artificial Sequence
  Description of Artificial Sequence: Synthetic oligonucleotide
agagaguugaugggcuggg

SEQ ID NO: 2718410 - RNA, 19 nt, Artificial Sequence
  Description of Artificial Sequence: Synthetic oligonucleotide
ggccaagagacucauguac

SEQ ID NO: 2718411 - RNA, 19 nt, Artificial Sequence
  Description of Artificial Sequence: Synthetic oligonucleotide
uuccugagagcuaggguau

SEQ ID NO: 2718412 - RNA, 19 nt, Artificial Sequence
  Description of Artificial Sequence: Synthetic oligonucleotide
ucagccugcaagaccugga

SEQ ID NO: 2718413 - RNA, 19 nt, Artificial Sequence
  Description of Artificial Sequence: Synthetic oligonucleotide
aaagacccuggcaggcugg

SEQ ID NO: 2718414 - RNA, 19 nt, Artificial Sequence
  Description of Artificial Sequence: Synthetic oligonucleotide
gagagcuaggguauccaug

SEQ ID NO: 2718415 - RNA, 19 nt, Artificial Sequence
  Description of Artificial Sequence: Synthetic oligonucleotide
aggagccacaguccacucg

SEQ ID NO: 2718416 - RNA, 19 nt, Artificial Sequence
  Description of Artificial Sequence: Synthetic oligonucleotide
agcucagccugcaagaccu

SEQ ID NO: 2718417 - RNA, 19 nt, Artificial Sequence
  Description of Artificial Sequence: Synthetic oligonucleotide
uuccgaagggcaugguugu

SEQ ID NO: 2718418 - RNA, 19 nt, Artificial Sequence
  Description of Artificial Sequence: Synthetic oligonucleotide
gacccuggcaggcuggaac

SEQ ID NO: 2718419 - RNA, 19 nt, Artificial Sequence
  Description of Artificial Sequence: Synthetic oligonucleotide
uccugagaguugcucugcc

SEQ ID NO: 2718420 - RNA, 19 nt, Artificial Sequence
  Description of Artificial Sequence: Synthetic oligonucleotide
cagggcaucugccuuguug

SEQ ID NO: 2718421 - RNA, 19 nt, Artificial Sequence
  Description of Artificial Sequence: Synthetic oligonucleotide
gacagcugggcuagagggg

SEQ ID NO: 2718422 - RNA, 19 nt, Artificial Sequence
  Description of Artificial Sequence: Synthetic oligonucleotide
caguccacucggcacaggc

SEQ ID NO: 2718423 - RNA, 19 nt, Artificial Sequence
  Description of Artificial Sequence: Synthetic oligonucleotide
gcaucuagaaggcagcaga

SEQ ID NO: 2718424 - RNA, 19 nt, Artificial Sequence
  Description of Artificial Sequence: Synthetic oligonucleotide
ucugccuuguuggugugcu

SEQ ID NO: 2718425 - RNA, 19 nt, Artificial Sequence
  Description of Artificial Sequence: Synthetic oligonucleotide
augagagggucaaaggaca

SEQ ID NO: 2718426 - RNA, 19 nt, Artificial Sequence
  Description of Artificial Sequence: Synthetic oligonucleotide
cagcagagcagaacaggag

SEQ ID NO: 2718427 - RNA, 19 nt, Artificial Sequence
  Description of Artificial Sequence: Synthetic oligonucleotide
agggcaguggggaagggag

SEQ ID NO: 2718428 - RNA, 19 nt, Artificial Sequence
  Description of Artificial Sequence: Synthetic oligonucleotide
acagugagggcagugggga

SEQ ID NO: 2718429 - RNA, 19 nt, Artificial Sequence
  Description of Artificial Sequence: Synthetic oligonucleotide
agccugcaagaccuggauc

SEQ ID NO: 2718430 - RNA, 19 nt, Artificial Sequence
  Description of Artificial Sequence: Synthetic oligonucleotide
uuaugaggucauccaacuu

SEQ ID NO: 2718431 - RNA, 19 nt, Artificial Sequence
  Description of Artificial Sequence: Synthetic oligonucleotide
agugagggcaguggggaag

SEQ ID NO: 2718432 - RNA, 19 nt, Artificial Sequence
  Description of Artificial Sequence: Synthetic oligonucleotide
caagaccuggaucuccuuc

SEQ ID NO: 2718433 - RNA, 19 nt, Artificial Sequence
  Description of Artificial Sequence: Synthetic oligonucleotide
uauccaugggauucagguu

SEQ ID NO: 2718434 - RNA, 19 nt, Artificial Sequence
  Description of Artificial Sequence: Synthetic oligonucleotide
ucgugcagaugcagugucc

SEQ ID NO: 2718435 - RNA, 19 nt, Artificial Sequence
  Description of Artificial Sequence: Synthetic oligonucleotide
accuggaucuccuuccgaa

SEQ ID NO: 2718436 - RNA, 19 nt, Artificial Sequence
  Description of Artificial Sequence: Synthetic oligonucleotide
aaggacucgugcugcuggu

SEQ ID NO: 2718437 - RNA, 19 nt, Artificial Sequence
  Description of Artificial Sequence: Synthetic oligonucleotide
ugcgcugggcagccagucg

SEQ ID NO: 2718438 - RNA, 19 nt, Artificial Sequence
  Description of Artificial Sequence: Synthetic oligonucleotide
ucauguacacauggaccug

SEQ ID NO: 2718439 - RNA, 19 nt, Artificial Sequence
  Description of Artificial Sequence: Synthetic oligonucleotide
uggggaagggaggaggcca

SEQ ID NO: 2718440 - RNA, 19 nt, Artificial Sequence
  Description of Artificial Sequence: Synthetic oligonucleotide
ucggcacaggcguucgugc

SEQ ID NO: 2718441 - RNA, 19 nt, Artificial Sequence
  Description of Artificial Sequence: Synthetic oligonucleotide
uccaugggauucagguugu

SEQ ID NO: 2718442 - RNA, 19 nt, Artificial Sequence
  Description of Artificial Sequence: Synthetic oligonucleotide
ugagagcuaggguauccau

SEQ ID NO: 2718443 - RNA, 19 nt, Artificial Sequence
  Description of Artificial Sequence: Synthetic oligonucleotide
cugcuucugacauuccuca

SEQ ID NO: 2718444 - RNA, 19 nt, Artificial Sequence
  Description of Artificial Sequence: Synthetic oligonucleotide
gagccaggagucuggagca

SEQ ID NO: 2718445 - RNA, 19 nt, Artificial Sequence
  Description of Artificial Sequence: Synthetic oligonucleotide
ugcagacaguacagggcug

SEQ ID NO: 2718446 - RNA, 19 nt, Artificial Sequence
  Description of Artificial Sequence: Synthetic oligonucleotide
gccaugagagggucaaagg

SEQ ID NO: 2718447 - RNA, 19 nt, Artificial Sequence
  Description of Artificial Sequence: Synthetic oligonucleotide
ggcaugguuguguuucucc

SEQ ID NO: 2718448 - RNA, 19 nt, Artificial Sequence
  Description of Artificial Sequence: Synthetic oligonucleotide
acaggagccacaguccacu

SEQ ID NO: 2718449 - RNA, 19 nt, Artificial Sequence
  Description of Artificial Sequence: Synthetic oligonucleotide
agacaguacagggcugggg

SEQ ID NO: 2718450 - RNA, 19 nt, Artificial Sequence
  Description of Artificial Sequence: Synthetic oligonucleotide
aaccaggggaugaugcaga

SEQ ID NO: 2718451 - RNA, 19 nt, Artificial Sequence
  Description of Artificial Sequence: Synthetic oligonucleotide
gagcuaggguauccauggg

SEQ ID NO: 2718452 - RNA, 19 nt, Artificial Sequence
  Description of Artificial Sequence: Synthetic oligonucleotide
agucgguucuucugcuucu

SEQ ID NO: 2718453 - RNA, 19 nt, Artificial Sequence
  Description of Artificial Sequence: Synthetic oligonucleotide
gagaggagccaggagucug

SEQ ID NO: 2718454 - RNA, 19 nt, Artificial Sequence
  Description of Artificial Sequence: Synthetic oligonucleotide
agaggagccaggagucugg

SEQ ID NO: 2718455 - RNA, 19 nt, Artificial Sequence
  Description of Artificial Sequence: Synthetic oligonucleotide
gaccuggagagaguugaug

SEQ ID NO: 2718456 - RNA, 19 nt, Artificial Sequence
  Description of Artificial Sequence: Synthetic oligonucleotide
uguccggccccaccgugcc

SEQ ID NO: 2718457 - RNA, 19 nt, Artificial Sequence
  Description of Artificial Sequence: Synthetic oligonucleotide
gacugggcaucuagaaggc

SEQ ID NO: 2718458 - RNA, 19 nt, Artificial Sequence
  Description of Artificial Sequence: Synthetic oligonucleotide
gguuguguuucuccaagga

SEQ ID NO: 2718459 - RNA, 19 nt, Artificial Sequence
  Description of Artificial Sequence: Synthetic oligonucleotide
caguggggaagggaggagg

SEQ ID NO: 2718460 - RNA, 19 nt, Artificial Sequence
  Description of Artificial Sequence: Synthetic oligonucleotide
gauucagguuguccugaga

SEQ ID NO: 2718461 - RNA, 19 nt, Artificial Sequence
  Description of Artificial Sequence: Synthetic oligonucleotide
uggugcagggcaucugccu

SEQ ID NO: 2718462 - RNA, 19 nt, Artificial Sequence
  Description of Artificial Sequence: Synthetic oligonucleotide
gcaguguccggccccaccg

SEQ ID NO: 2718463 - RNA, 19 nt, Artificial Sequence
  Description of Artificial Sequence: Synthetic oligonucleotide
gucaaaggacagugagggc

SEQ ID NO: 2718464 - RNA, 19 nt, Artificial Sequence
  Description of Artificial Sequence: Synthetic oligonucleotide
ugaggucauccaacuuaga

SEQ ID NO: 2718465 - RNA, 19 nt, Artificial Sequence
  Description of Artificial Sequence: Synthetic oligonucleotide
ccuggagagaguugauggg

SEQ ID NO: 2718466 - RNA, 19 nt, Artificial Sequence
  Description of Artificial Sequence: Synthetic oligonucleotide
cagucgguucuucugcuuc

SEQ ID NO: 2718467 - RNA, 19 nt, Artificial Sequence
  Description of Artificial Sequence: Synthetic oligonucleotide
gagaguugaugggcugggg

SEQ ID NO: 2718468 - RNA, 19 nt, Artificial Sequence
  Description of Artificial Sequence: Synthetic oligonucleotide
cagguuguccugagaguug

SEQ ID NO: 2718469 - RNA, 19 nt, Artificial Sequence
  Description of Artificial Sequence: Synthetic oligonucleotide
ucugccuggacugggcauc

SEQ ID NO: 2718470 - RNA, 19 nt, Artificial Sequence
  Description of Artificial Sequence: Synthetic oligonucleotide
gcaggcuggaaccagggga

SEQ ID NO: 2718471 - RNA, 19 nt, Artificial Sequence
  Description of Artificial Sequence: Synthetic oligonucleotide
guugcucugccuggacugg

SEQ ID NO: 2718472 - RNA, 19 nt, Artificial Sequence
  Description of Artificial Sequence: Synthetic oligonucleotide
cauccaacuuagagaaaga

SEQ ID NO: 2718473 - RNA, 19 nt, Artificial Sequence
  Description of Artificial Sequence: Synthetic oligonucleotide
gggucaaaggacagugagg

SEQ ID NO: 2718474 - RNA, 19 nt, Artificial Sequence
  Description of Artificial Sequence: Synthetic oligonucleotide
cagcucagccugcaagacc

SEQ ID NO: 2718475 - RNA, 19 nt, Artificial Sequence
  Description of Artificial Sequence: Synthetic oligonucleotide
gugagggcaguggggaagg

SEQ ID NO: 2718476 - RNA, 19 nt, Artificial Sequence
  Description of Artificial Sequence: Synthetic oligonucleotide
aucugccuuguuggugugc

SEQ ID NO: 2718477 - RNA, 19 nt, Artificial Sequence
  Description of Artificial Sequence: Synthetic oligonucleotide
gcagacaguacagggcugg

SEQ ID NO: 2718478 - RNA, 19 nt, Artificial Sequence
  Description of Artificial Sequence: Synthetic oligonucleotide
cucagccugcaagaccugg

SEQ ID NO: 2718479 - RNA, 19 nt, Artificial Sequence
  Description of Artificial Sequence: Synthetic oligonucleotide
aguccacucggcacaggcg

SEQ ID NO: 2718480 - RNA, 19 nt, Artificial Sequence
  Description of Artificial Sequence: Synthetic oligonucleotide
gugugcuucugccggcugc

SEQ ID NO: 2718481 - RNA, 19 nt, Artificial Sequence
  Description of Artificial Sequence: Synthetic oligonucleotide
gggacagcugggcuagagg

SEQ ID NO: 2718482 - RNA, 19 nt, Artificial Sequence
  Description of Artificial Sequence: Synthetic oligonucleotide
cuccaaggacucgugcugc

SEQ ID NO: 2718483 - RNA, 19 nt, Artificial Sequence
  Description of Artificial Sequence: Synthetic oligonucleotide
agaaagacccuggcaggcu

SEQ ID NO: 2718484 - RNA, 19 nt, Artificial Sequence
  Description of Artificial Sequence: Synthetic oligonucleotide
agccacaguccacucggca

SEQ ID NO: 2718485 - RNA, 19 nt, Artificial Sequence
  Description of Artificial Sequence: Synthetic oligonucleotide
ggacucgugcugcuggugc

SEQ ID NO: 2718486 - RNA, 19 nt, Artificial Sequence
  Description of Artificial Sequence: Synthetic oligonucleotide
cagccagucgguucuucug

SEQ ID NO: 2718487 - RNA, 19 nt, Artificial Sequence
  Description of Artificial Sequence: Synthetic oligonucleotide
agagacucauguacacaug

SEQ ID NO: 2718488 - RNA, 19 nt, Artificial Sequence
  Description of Artificial Sequence: Synthetic oligonucleotide
uccaaggacucgugcugcu

SEQ ID NO: 2718489 - RNA, 19 nt, Artificial Sequence
  Description of Artificial Sequence: Synthetic oligonucleotide
uucugacauuccucagggu

SEQ ID NO: 2718490 - RNA, 19 nt, Artificial Sequence
  Description of Artificial Sequence: Synthetic oligonucleotide
gcagaugcaguguccggcc

SEQ ID NO: 2718491 - RNA, 19 nt, Artificial Sequence
  Description of Artificial Sequence: Synthetic oligonucleotide
cugcaagaccuggaucucc

SEQ ID NO: 2718492 - RNA, 19 nt, Artificial Sequence
  Description of Artificial Sequence: Synthetic oligonucleotide
gaucuccuuccgaagggca

SEQ ID NO: 2718493 - RNA, 19 nt, Artificial Sequence
  Description of Artificial Sequence: Synthetic oligonucleotide
guuucuccaaggacucgug

SEQ ID NO: 2718494 - RNA, 19 nt, Artificial Sequence
  Description of Artificial Sequence: Synthetic oligonucleotide
ggagagaguugaugggcug

SEQ ID NO: 2718495 - RNA, 19 nt, Artificial Sequence
  Description of Artificial Sequence: Synthetic oligonucleotide
uccggccccaccgugccag

SEQ ID NO: 2718496 - RNA, 19 nt, Artificial Sequence
  Description of Artificial Sequence: Synthetic oligonucleotide
cuggacugggcaucuagaa

SEQ ID NO: 2718497 - RNA, 19 nt, Artificial Sequence
  Description of Artificial Sequence: Synthetic oligonucleotide
ggggcccucgccaugagag

SEQ ID NO: 2718498 - RNA, 19 nt, Artificial Sequence
  Description of Artificial Sequence: Synthetic oligonucleotide
agacucauguacacaugga

SEQ ID NO: 2718499 - RNA, 19 nt, Artificial Sequence
  Description of Artificial Sequence: Synthetic oligonucleotide
cuccuuccgaagggcaugg

SEQ ID NO: 2718500 - RNA, 19 nt, Artificial Sequence
  Description of Artificial Sequence: Synthetic oligonucleotide
ccaugagagggucaaagga

SEQ ID NO: 2718501 - RNA, 19 nt, Artificial Sequence
  Description of Artificial Sequence: Synthetic oligonucleotide
cagaugcaguguccggccc

SEQ ID NO: 2718502 - RNA, 19 nt, Artificial Sequence
  Description of Artificial Sequence: Synthetic oligonucleotide
ggauucagguuguccugag

SEQ ID NO: 2718503 - RNA, 19 nt, Artificial Sequence
  Description of Artificial Sequence: Synthetic oligonucleotide
gacucgugcugcuggugca

SEQ ID NO: 2718504 - RNA, 19 nt, Artificial Sequence
  Description of Artificial Sequence: Synthetic oligonucleotide
aggcccagcuguuccugag

SEQ ID NO: 2718505 - RNA, 19 nt, Artificial Sequence
  Description of Artificial Sequence: Synthetic oligonucleotide
caugguuguguuucuccaa

SEQ ID NO: 2718506 - RNA, 19 nt, Artificial Sequence
  Description of Artificial Sequence: Synthetic oligonucleotide
uagaggggcccucgccaug

SEQ ID NO: 2718507 - RNA, 19 nt, Artificial Sequence
  Description of Artificial Sequence: Synthetic oligonucleotide
guguuucuccaaggacucg

SEQ ID NO: 2718508 - RNA, 19 nt, Artificial Sequence
  Description of Artificial Sequence: Synthetic oligonucleotide
aaaggacagugagggcagu

SEQ ID NO: 2718509 - RNA, 19 nt, Artificial Sequence
  Description of Artificial Sequence: Synthetic oligonucleotide
gcaugguuguguuucucca

SEQ ID NO: 2718510 - RNA, 19 nt, Artificial Sequence
  Description of Artificial Sequence: Synthetic oligonucleotide
gcgcugggcagccagucgg

SEQ ID NO: 2718511 - RNA, 19 nt, Artificial Sequence
  Description of Artificial Sequence: Synthetic oligonucleotide
gccacaguccacucggcac

SEQ ID NO: 2718512 - RNA, 19 nt, Artificial Sequence
  Description of Artificial Sequence: Synthetic oligonucleotide
aggguauccaugggauuca

SEQ ID NO: 2718513 - RNA, 19 nt, Artificial Sequence
  Description of Artificial Sequence: Synthetic oligonucleotide
cucggcacaggcguucgug

SEQ ID NO: 2718514 - RNA, 19 nt, Artificial Sequence
  Description of Artificial Sequence: Synthetic oligonucleotide
cuucugccggcugcgcugg

SEQ ID NO: 2718515 - RNA, 19 nt, Artificial Sequence
  Description of Artificial Sequence: Synthetic oligonucleotide
gguauccaugggauucagg

SEQ ID NO: 2718516 - RNA, 19 nt, Artificial Sequence
  Description of Artificial Sequence: Synthetic oligonucleotide
ggaggaggccaagagacuc

SEQ ID NO: 2718517 - RNA, 19 nt, Artificial Sequence
  Description of Artificial Sequence: Synthetic oligonucleotide
gcccagcuguuccugagag

SEQ ID NO: 2718518 - RNA, 19 nt, Artificial Sequence
  Description of Artificial Sequence: Synthetic oligonucleotide
agggcaugguuguguuucu

SEQ ID NO: 2718519 - RNA, 19 nt, Artificial Sequence
  Description of Artificial Sequence: Synthetic oligonucleotide
gagucuggagcaggcccag

SEQ ID NO: 2718520 - RNA, 19 nt, Artificial Sequence
  Description of Artificial Sequence: Synthetic oligonucleotide
ggaaccaggggaugaugca

SEQ ID NO: 2718521 - RNA, 19 nt, Artificial Sequence
  Description of Artificial Sequence: Synthetic oligonucleotide
guccacucggcacaggcgu

SEQ ID NO: 2718522 - RNA, 19 nt, Artificial Sequence
  Description of Artificial Sequence: Synthetic oligonucleotide
aggccaagagacucaugua

SEQ ID NO: 2718523 - RNA, 19 nt, Artificial Sequence
  Description of Artificial Sequence: Synthetic oligonucleotide
ggcacaggcguucgugcag

SEQ ID NO: 2718524 - RNA, 19 nt, Artificial Sequence
  Description of Artificial Sequence: Synthetic oligonucleotide
uucagcugcuucugacauu

SEQ ID NO: 2718525 - RNA, 19 nt, Artificial Sequence
  Description of Artificial Sequence: Synthetic oligonucleotide
cagacaguacagggcuggg

SEQ ID NO: 2718526 - RNA, 19 nt, Artificial Sequence
  Description of Artificial Sequence: Synthetic oligonucleotide
gagaguugcucugccugga

SEQ ID NO: 2718527 - RNA, 19 nt, Artificial Sequence
  Description of Artificial Sequence: Synthetic oligonucleotide
aagacccuggcaggcugga

SEQ ID NO: 2718528 - RNA, 19 nt, Artificial Sequence
  Description of Artificial Sequence: Synthetic oligonucleotide
ggcccucgccaugagaggg

SEQ ID NO: 2718529 - RNA, 19 nt, Artificial Sequence
  Description of Artificial Sequence: Synthetic oligonucleotide
gcuucugccggcugcgcug

SEQ ID NO: 2718530 - RNA, 19 nt, Artificial Sequence
  Description of Artificial Sequence: Synthetic oligonucleotide
ggcaucuagaaggcagcag

SEQ ID NO: 2718531 - RNA, 19 nt, Artificial Sequence
  Description of Artificial Sequence: Synthetic oligonucleotide
ccuggaucuccuuccgaag

SEQ ID NO: 2718532 - RNA, 19 nt, Artificial Sequence
  Description of Artificial Sequence: Synthetic oligonucleotide
gccuggacugggcaucuag

SEQ ID NO: 2718533 - RNA, 19 nt, Artificial Sequence
  Description of Artificial Sequence: Synthetic oligonucleotide
agucuggagcaggcccagc

SEQ ID NO: 2718534 - RNA, 19 nt, Artificial Sequence
  Description of Artificial Sequence: Synthetic oligonucleotide
gagggucaaaggacaguga

SEQ ID NO: 2718535 - RNA, 19 nt, Artificial Sequence
  Description of Artificial Sequence: Synthetic oligonucleotide
cguucgugcagaugcagug

SEQ ID NO: 2718536 - RNA, 19 nt, Artificial Sequence
  Description of Artificial Sequence: Synthetic oligonucleotide
guccugagaguugcucugc

SEQ ID NO: 2718537 - RNA, 19 nt, Artificial Sequence
  Description of Artificial Sequence: Synthetic oligonucleotide
gagcagaacaggagccaca

SEQ ID NO: 2718538 - RNA, 19 nt, Artificial Sequence
  Description of Artificial Sequence: Synthetic oligonucleotide
cuggaaccaggggaugaug

SEQ ID NO: 2718539 - RNA, 19 nt, Artificial Sequence
  Description of Artificial Sequence: Synthetic oligonucleotide
ugcugcuggugcagggcau

SEQ ID NO: 2718540 - RNA, 19 nt, Artificial Sequence
  Description of Artificial Sequence: Synthetic oligonucleotide
agaggggcccucgccauga

SEQ ID NO: 2718541 - RNA, 19 nt, Artificial Sequence
  Description of Artificial Sequence: Synthetic oligonucleotide
ggcaggcuggaaccagggg

SEQ ID NO: 2718542 - RNA, 19 nt, Artificial Sequence
  Description of Artificial Sequence: Synthetic oligonucleotide
ccaggagucuggagcaggc

SEQ ID NO: 2718543 - RNA, 19 nt, Artificial Sequence
  Description of Artificial Sequence: Synthetic oligonucleotide
caacuuagagaaagacccu

SEQ ID NO: 2718544 - RNA, 19 nt, Artificial Sequence
  Description of Artificial Sequence: Synthetic oligonucleotide
ggaucuccuuccgaagggc

SEQ ID NO: 2718545 - RNA, 19 nt, Artificial Sequence
  Description of Artificial Sequence: Synthetic oligonucleotide
cucgugcugcuggugcagg

SEQ ID NO: 2718546 - RNA, 19 nt, Artificial Sequence
  Description of Artificial Sequence: Synthetic oligonucleotide
aggcagcagagcagaacag

SEQ ID NO: 2718547 - RNA, 19 nt, Artificial Sequence
  Description of Artificial Sequence: Synthetic oligonucleotide
gcugcuucugacauuccuc

SEQ ID NO: 2718548 - RNA, 19 nt, Artificial Sequence
  Description of Artificial Sequence: Synthetic oligonucleotide
gaccuggaucuccuuccga

SEQ ID NO: 2718549 - RNA, 19 nt, Artificial Sequence
  Description of Artificial Sequence: Synthetic oligonucleotide
gccaagagacucauguaca

SEQ ID NO: 2718550 - RNA, 19 nt, Artificial Sequence
  Description of Artificial Sequence: Synthetic oligonucleotide
caggagucuggagcaggcc

SEQ ID NO: 2718551 - RNA, 19 nt, Artificial Sequence
  Description of Artificial Sequence: Synthetic oligonucleotide
gcagcagagcagaacagga

SEQ ID NO: 2718552 - RNA, 19 nt, Artificial Sequence
  Description of Artificial Sequence: Synthetic oligonucleotide
cuucagcugcuucugacau

SEQ ID NO: 2718553 - RNA, 19 nt, Artificial Sequence
  Description of Artificial Sequence: Synthetic oligonucleotide
ucugccggcugcgcugggc

SEQ ID NO: 2718554 - RNA, 19 nt, Artificial Sequence
  Description of Artificial Sequence: Synthetic oligonucleotide
cgugcagaugcaguguccg

SEQ ID NO: 2718555 - RNA, 19 nt, Artificial Sequence
  Description of Artificial Sequence: Synthetic oligonucleotide
gcaucugccuuguuggugu

SEQ ID NO: 2718556 - RNA, 19 nt, Artificial Sequence
  Description of Artificial Sequence: Synthetic oligonucleotide
cacaguccacucggcacag

SEQ ID NO: 2718557 - RNA, 19 nt, Artificial Sequence
  Description of Artificial Sequence: Synthetic oligonucleotide
caucugccuuguuggugug

SEQ ID NO: 2718558 - RNA, 19 nt, Artificial Sequence
  Description of Artificial Sequence: Synthetic oligonucleotide
uccgaagggcaugguugug

SEQ ID NO: 2718559 - RNA, 19 nt, Artificial Sequence
  Description of Artificial Sequence: Synthetic oligonucleotide
cacucggcacaggcguucg

SEQ ID NO: 2718560 - RNA, 19 nt, Artificial Sequence
  Description of Artificial Sequence: Synthetic oligonucleotide
gccagcucagccugcaaga

SEQ ID NO: 2718561 - RNA, 19 nt, Artificial Sequence
  Description of Artificial Sequence: Synthetic oligonucleotide
gggaugaugcagacaguac

SEQ ID NO: 2718562 - RNA, 19 nt, Artificial Sequence
  Description of Artificial Sequence: Synthetic oligonucleotide
cagagcagaacaggagcca

SEQ ID NO: 2718563 - RNA, 19 nt, Artificial Sequence
  Description of Artificial Sequence: Synthetic oligonucleotide
ggcaucugccuuguuggug

SEQ ID NO: 2718564 - RNA, 19 nt, Artificial Sequence
  Description of Artificial Sequence: Synthetic oligonucleotide
cugagagcuaggguaucca

SEQ ID NO: 2718565 - RNA, 19 nt, Artificial Sequence
  Description of Artificial Sequence: Synthetic oligonucleotide
ggcuagaggggcccucgcc

SEQ ID NO: 2718566 - RNA, 19 nt, Artificial Sequence
  Description of Artificial Sequence: Synthetic oligonucleotide
gucuggagcaggcccagcu

SEQ ID NO: 2718567 - RNA, 19 nt, Artificial Sequence
  Description of Artificial Sequence: Synthetic oligonucleotide
gagggcaguggggaaggga

SEQ ID NO: 2718568 - RNA, 19 nt, Artificial Sequence
  Description of Artificial Sequence: Synthetic oligonucleotide
acacauggaccuggagaga

SEQ ID NO: 2718569 - RNA, 19 nt, Artificial Sequence
  Description of Artificial Sequence: Synthetic oligonucleotide
aucuccuuccgaagggcau

SEQ ID NO: 2718570 - RNA, 19 nt, Artificial Sequence
  Description of Artificial Sequence: Synthetic oligonucleotide
acaggcguucgugcagaug

SEQ ID NO: 2718571 - RNA, 19 nt, Artificial Sequence
  Description of Artificial Sequence: Synthetic oligonucleotide
auguacacauggaccugga

SEQ ID NO: 2718572 - RNA, 19 nt, Artificial Sequence
  Description of Artificial Sequence: Synthetic oligonucleotide
ugcuggugcagggcaucug

SEQ ID NO: 2718573 - RNA, 19 nt, Artificial Sequence
  Description of Artificial Sequence: Synthetic oligonucleotide
gggagaggagccaggaguc

SEQ ID NO: 2718574 - RNA, 19 nt, Artificial Sequence
  Description of Artificial Sequence: Synthetic oligonucleotide
uccacucggcacaggcguu

SEQ ID NO: 2718575 - RNA, 19 nt, Artificial Sequence
  Description of Artificial Sequence: Synthetic oligonucleotide
ccugagagcuaggguaucc

SEQ ID NO: 2718576 - RNA, 19 nt, Artificial Sequence
  Description of Artificial Sequence: Synthetic oligonucleotide
cucgccaugagagggucaa

SEQ ID NO: 2718577 - RNA, 19 nt, Artificial Sequence
  Description of Artificial Sequence: Synthetic oligonucleotide
cagcugggcuagaggggcc

SEQ ID NO: 2718578 - RNA, 19 nt, Artificial Sequence
  Description of Artificial Sequence: Synthetic oligonucleotide
aggacucgugcugcuggug

SEQ ID NO: 2718579 - RNA, 19 nt, Artificial Sequence
  Description of Artificial Sequence: Synthetic oligonucleotide
auggaccuggagagaguug

SEQ ID NO: 2718580 - RNA, 19 nt, Artificial Sequence
  Description of Artificial Sequence: Synthetic oligonucleotide
uccugagagcuaggguauc

SEQ ID NO: 2718581 - RNA, 19 nt, Artificial Sequence
  Description of Artificial Sequence: Synthetic oligonucleotide
gagagggucaaaggacagu

SEQ ID NO: 2718582 - RNA, 19 nt, Artificial Sequence
  Description of Artificial Sequence: Synthetic oligonucleotide
acauggaccuggagagagu

SEQ ID NO: 2718583 - RNA, 19 nt, Artificial Sequence
  Description of Artificial Sequence: Synthetic oligonucleotide
caggagccacaguccacuc

SEQ ID NO: 2718584 - RNA, 19 nt, Artificial Sequence
  Description of Artificial Sequence: Synthetic oligonucleotide
acaguccacucggcacagg

SEQ ID NO: 2718585 - RNA, 19 nt, Artificial Sequence
  Description of Artificial Sequence: Synthetic oligonucleotide
ccaccgugccagcucagcc

SEQ ID NO: 2718586 - RNA, 19 nt, Artificial Sequence
  Description of Artificial Sequence: Synthetic oligonucleotide
ggcguucgugcagaugcag

SEQ ID NO: 2718587 - RNA, 19 nt, Artificial Sequence
  Description of Artificial Sequence: Synthetic oligonucleotide
caggcuggaaccaggggau

SEQ ID NO: 2718588 - RNA, 19 nt, Artificial Sequence
  Description of Artificial Sequence: Synthetic oligonucleotide
cuggagcaggcccagcugu

SEQ ID NO: 2718589 - RNA, 19 nt, Artificial Sequence
  Description of Artificial Sequence: Synthetic oligonucleotide
ggagucuggagcaggccca

SEQ ID NO: 2718590 - RNA, 19 nt, Artificial Sequence
  Description of Artificial Sequence: Synthetic oligonucleotide
gggauucagguuguccuga

SEQ ID NO: 2718591 - RNA, 19 nt, Artificial Sequence
  Description of Artificial Sequence: Synthetic oligonucleotide
aggggcccucgccaugaga

SEQ ID NO: 2718592 - RNA, 19 nt, Artificial Sequence
  Description of Artificial Sequence: Synthetic oligonucleotide
gagccacaguccacucggc

SEQ ID NO: 2718593 - RNA, 19 nt, Artificial Sequence
  Description of Artificial Sequence: Synthetic oligonucleotide
gggcccucgccaugagagg

SEQ ID NO: 2718594 - RNA, 19 nt, Artificial Sequence
  Description of Artificial Sequence: Synthetic oligonucleotide
guguccggccccaccgugc

SEQ ID NO: 2718595 - RNA, 19 nt, Artificial Sequence
  Description of Artificial Sequence: Synthetic oligonucleotide
ccagcuguuccugagagcu

SEQ ID NO: 2718596 - RNA, 19 nt, Artificial Sequence
  Description of Artificial Sequence: Synthetic oligonucleotide
ggcaguggggaagggagga

SEQ ID NO: 2718597 - RNA, 19 nt, Artificial Sequence
  Description of Artificial Sequence: Synthetic oligonucleotide
guucgugcagaugcagugu

SEQ ID NO: 2718598 - RNA, 19 nt, Artificial Sequence
  Description of Artificial Sequence: Synthetic oligonucleotide
gaggggcccucgccaugag

SEQ ID NO: 2718599 - RNA, 19 nt, Artificial Sequence
  Description of Artificial Sequence: Synthetic oligonucleotide
gcuaggguauccaugggau

SEQ ID NO: 2718600 - RNA, 19 nt, Artificial Sequence
  Description of Artificial Sequence: Synthetic oligonucleotide
ggugugcuucugccggcug

SEQ ID NO: 2718601 - RNA, 19 nt, Artificial Sequence
  Description of Artificial Sequence: Synthetic oligonucleotide
acucggcacaggcguucgu

SEQ ID NO: 2718602 - RNA, 19 nt, Artificial Sequence
  Description of Artificial Sequence: Synthetic oligonucleotide
ggggacagcugggcuagag

SEQ ID NO: 2718603 - RNA, 19 nt, Artificial Sequence
  Description of Artificial Sequence: Synthetic oligonucleotide
cugccggcugcgcugggca

SEQ ID NO: 2718604 - RNA, 19 nt, Artificial Sequence
  Description of Artificial Sequence: Synthetic oligonucleotide
ggaagggaggaggccaaga

SEQ ID NO: 2718605 - RNA, 19 nt, Artificial Sequence
  Description of Artificial Sequence: Synthetic oligonucleotide
ggguauccaugggauucag

SEQ ID NO: 2718606 - RNA, 19 nt, Artificial Sequence
  Description of Artificial Sequence: Synthetic oligonucleotide
caccgugccagcucagccu

SEQ ID NO: 2718607 - RNA, 19 nt, Artificial Sequence
  Description of Artificial Sequence: Synthetic oligonucleotide
ccuggacugggcaucuaga

SEQ ID NO: 2718608 - RNA, 19 nt, Artificial Sequence
  Description of Artificial Sequence: Synthetic oligonucleotide
cccagcuguuccugagagc

SEQ ID NO: 2718609 - RNA, 19 nt, Artificial Sequence
  Description of Artificial Sequence: Synthetic oligonucleotide
cauggaccuggagagaguu

SEQ ID NO: 2718610 - RNA, 19 nt, Artificial Sequence
  Description of Artificial Sequence: Synthetic oligonucleotide
cugcgcugggcagccaguc

SEQ ID NO: 2718611 - RNA, 19 nt, Artificial Sequence
  Description of Artificial Sequence: Synthetic oligonucleotide
gaagggcaugguuguguuu

SEQ ID NO: 2718612 - RNA, 19 nt, Artificial Sequence
  Description of Artificial Sequence: Synthetic oligonucleotide
ggcuggaaccaggggauga

SEQ ID NO: 2718613 - RNA, 19 nt, Artificial Sequence
  Description of Artificial Sequence: Synthetic oligonucleotide
cuaggguauccaugggauu

SEQ ID NO: 2718614 - RNA, 19 nt, Artificial Sequence
  Description of Artificial Sequence: Synthetic oligonucleotide
gcucugccuggacugggca

SEQ ID NO: 2718615 - RNA, 19 nt, Artificial Sequence
  Description of Artificial Sequence: Synthetic oligonucleotide
aggcguucgugcagaugca

SEQ ID NO: 2718616 - RNA, 19 nt, Artificial Sequence
  Description of Artificial Sequence: Synthetic oligonucleotide
gucauccaacuuagagaaa

SEQ ID NO: 2718617 - RNA, 19 nt, Artificial Sequence
  Description of Artificial Sequence: Synthetic oligonucleotide
cuagaggggcccucgccau

SEQ ID NO: 2718618 - RNA, 19 nt, Artificial Sequence
  Description of Artificial Sequence: Synthetic oligonucleotide
ccagcucagccugcaagac

SEQ ID NO: 2718619 - RNA, 19 nt, Artificial Sequence
  Description of Artificial Sequence: Synthetic oligonucleotide
cagugagggcaguggggaa

SEQ ID NO: 2718620 - RNA, 19 nt, Artificial Sequence
  Description of Artificial Sequence: Synthetic oligonucleotide
ccuggcaggcuggaaccag

SEQ ID NO: 2718621 - RNA, 19 nt, Artificial Sequence
  Description of Artificial Sequence: Synthetic oligonucleotide
ucgccaugagagggucaaa

SEQ ID NO: 2718622 - RNA, 19 nt, Artificial Sequence
  Description of Artificial Sequence: Synthetic oligonucleotide
ggcccagcuguuccugaga

SEQ ID NO: 2718623 - RNA, 19 nt, Artificial Sequence
  Description of Artificial Sequence: Synthetic oligonucleotide
ggagcaggcccagcuguuc

SEQ ID NO: 2718624 - RNA, 19 nt, Artificial Sequence
  Description of Artificial Sequence: Synthetic oligonucleotide
gggaagggaggaggccaag

SEQ ID NO: 2718625 - RNA, 19 nt, Artificial Sequence
  Description of Artificial Sequence: Synthetic oligonucleotide
ccaaggacucgugcugcug

SEQ ID NO: 2718626 - RNA, 19 nt, Artificial Sequence
  Description of Artificial Sequence: Synthetic oligonucleotide
gugcuucugccggcugcgc

SEQ ID NO: 2718627 - RNA, 19 nt, Artificial Sequence
  Description of Artificial Sequence: Synthetic oligonucleotide
gggcuagaggggcccucgc

SEQ ID NO: 2718628 - RNA, 19 nt, Artificial Sequence
  Description of Artificial Sequence: Synthetic oligonucleotide
gcacaggcguucgugcaga

SEQ ID NO: 2718629 - RNA, 19 nt, Artificial Sequence
  Description of Artificial Sequence: Synthetic oligonucleotide
gcagccagucgguucuucu

SEQ ID NO: 2718630 - RNA, 19 nt, Artificial Sequence
  Description of Artificial Sequence: Synthetic oligonucleotide
cagccugcaagaccuggau

SEQ ID NO: 2718631 - RNA, 19 nt, Artificial Sequence
  Description of Artificial Sequence: Synthetic oligonucleotide
ccugcaagaccuggaucuc

SEQ ID NO: 2718632 - RNA, 19 nt, Artificial Sequence
  Description of Artificial Sequence: Synthetic oligonucleotide
gccccaccgugccagcuca

SEQ ID NO: 2718633 - RNA, 19 nt, Artificial Sequence
  Description of Artificial Sequence: Synthetic oligonucleotide
cgugcugcuggugcagggc

SEQ ID NO: 2718634 - RNA, 19 nt, Artificial Sequence
  Description of Artificial Sequence: Synthetic oligonucleotide
cucugccuggacugggcau

SEQ ID NO: 2718635 - RNA, 19 nt, Artificial Sequence
  Description of Artificial Sequence: Synthetic oligonucleotide
cagcuguuccugagagcua

SEQ ID NO: 2718636 - RNA, 19 nt, Artificial Sequence
  Description of Artificial Sequence: Synthetic oligonucleotide
ggccccaccgugccagcuc

SEQ ID NO: 2718637 - RNA, 19 nt, Artificial Sequence
  Description of Artificial Sequence: Synthetic oligonucleotide
agacccuggcaggcuggaa

SEQ ID NO: 2718638 - RNA, 19 nt, Artificial Sequence
  Description of Artificial Sequence: Synthetic oligonucleotide
cccaccgugccagcucagc

SEQ ID NO: 2718639 - RNA, 19 nt, Artificial Sequence
  Description of Artificial Sequence: Synthetic oligonucleotide
gggcaugguuguguuucuc

SEQ ID NO: 2718640 - RNA, 19 nt, Artificial Sequence
  Description of Artificial Sequence: Synthetic oligonucleotide
gccagucgguucuucugcu

SEQ ID NO: 2718641 - RNA, 19 nt, Artificial Sequence
  Description of Artificial Sequence: Synthetic oligonucleotide
ggggaagggaggaggccaa

SEQ ID NO: 2718642 - RNA, 19 nt, Artificial Sequence
  Description of Artificial Sequence: Synthetic oligonucleotide
ccugagaguugcucugccu

SEQ ID NO: 2718643 - RNA, 19 nt, Artificial Sequence
  Description of Artificial Sequence: Synthetic oligonucleotide
gccggcugcgcugggcagc

SEQ ID NO: 2718644 - RNA, 19 nt, Artificial Sequence
  Description of Artificial Sequence: Synthetic oligonucleotide
ggagaggagccaggagucu

SEQ ID NO: 2718645 - RNA, 19 nt, Artificial Sequence
  Description of Artificial Sequence: Synthetic oligonucleotide
ugccuggacugggcaucua

SEQ ID NO: 2718646 - RNA, 19 nt, Artificial Sequence
  Description of Artificial Sequence: Synthetic oligonucleotide
ccggcugcgcugggcagcc

SEQ ID NO: 2718647 - RNA, 19 nt, Artificial Sequence
  Description of Artificial Sequence: Synthetic oligonucleotide
gcucagccugcaagaccug

SEQ ID NO: 2718648 - RNA, 19 nt, Artificial Sequence
  Description of Artificial Sequence: Synthetic oligonucleotide
cccucgccaugagaggguc

SEQ ID NO: 2718649 - RNA, 19 nt, Artificial Sequence
  Description of Artificial Sequence: Synthetic oligonucleotide
gcguucgugcagaugcagu

SEQ ID NO: 2718650 - RNA, 19 nt, Artificial Sequence
  Description of Artificial Sequence: Synthetic oligonucleotide
caguguccggccccaccgu

SEQ ID NO: 2718651 - RNA, 19 nt, Artificial Sequence
  Description of Artificial Sequence: Synthetic oligonucleotide
ccaggggaugaugcagaca

SEQ ID NO: 2718652 - RNA, 19 nt, Artificial Sequence
  Description of Artificial Sequence: Synthetic oligonucleotide
guccggccccaccgugcca

SEQ ID NO: 2718653 - RNA, 19 nt, Artificial Sequence
  Description of Artificial Sequence: Synthetic oligonucleotide
cugcuggugcagggcaucu

SEQ ID NO: 2718654 - RNA, 19 nt, Artificial Sequence
  Description of Artificial Sequence: Synthetic oligonucleotide
ccgaagggcaugguugugu

SEQ ID NO: 2718655 - RNA, 19 nt, Artificial Sequence
  Description of Artificial Sequence: Synthetic oligonucleotide
ccuuccgaagggcaugguu

SEQ ID NO: 2718656 - RNA, 19 nt, Artificial Sequence
  Description of Artificial Sequence: Synthetic oligonucleotide
ccucgccaugagaggguca

SEQ ID NO: 2718657 - RNA, 19 nt, Artificial Sequence
  Description of Artificial Sequence: Synthetic oligonucleotide
ccaugggauucagguuguc

SEQ ID NO: 2718658 - RNA, 19 nt, Artificial Sequence
  Description of Artificial Sequence: Synthetic oligonucleotide
cggcacaggcguucgugca

SEQ ID NO: 2718659 - RNA, 19 nt, Artificial Sequence
  Description of Artificial Sequence: Synthetic oligonucleotide
cacaggcguucgugcagau

SEQ ID NO: 2718660 - RNA, 19 nt, Artificial Sequence
  Description of Artificial Sequence: Synthetic oligonucleotide
gguuguccugagaguugcu

SEQ ID NO: 2718661 - RNA, 19 nt, Artificial Sequence
  Description of Artificial Sequence: Synthetic oligonucleotide
gcaagaccuggaucuccuu

SEQ ID NO: 2718662 - RNA, 19 nt, Artificial Sequence
  Description of Artificial Sequence: Synthetic oligonucleotide
ccccaccgugccagcucag

SEQ ID NO: 2718663 - RNA, 19 nt, Artificial Sequence
  Description of Artificial Sequence: Synthetic oligonucleotide
ggaccuggagagaguugau

SEQ ID NO: 2718664 - RNA, 19 nt, Artificial Sequence
  Description of Artificial Sequence: Synthetic oligonucleotide
cgaagggcaugguuguguu

SEQ ID NO: 2718665 - RNA, 19 nt, Artificial Sequence
  Description of Artificial Sequence: Synthetic oligonucleotide
ccggccccaccgugccagc

SEQ ID NO: 2718666 - RNA, 19 nt, Artificial Sequence
  Description of Artificial Sequence: Synthetic oligonucleotide
cccuggcaggcuggaacca

SEQ ID NO: 2718667 - RNA, 19 nt, Artificial Sequence
  Description of Artificial Sequence: Synthetic oligonucleotide
ccagucgguucuucugcuu

SEQ ID NO: 2718668 - RNA, 19 nt, Artificial Sequence
  Description of Artificial Sequence: Synthetic oligonucleotide
gcugcgcugggcagccagu

SEQ ID NO: 2718669 - RNA, 19 nt, Artificial Sequence
  Description of Artificial Sequence: Synthetic oligonucleotide
gcccucgccaugagagggu

SEQ ID NO: 2718670 - RNA, 19 nt, Artificial Sequence
  Description of Artificial Sequence: Synthetic oligonucleotide
gcugggcuagaggggcccu

SEQ ID NO: 2718671 - RNA, 19 nt, Artificial Sequence
  Description of Artificial Sequence: Synthetic oligonucleotide
cgcugggcagccagucggu

SEQ ID NO: 2718672 - RNA, 19 nt, Artificial Sequence
  Description of Artificial Sequence: Synthetic oligonucleotide
gggcagccagucgguucuu

SEQ ID NO: 2718673 - RNA, 19 nt, Artificial Sequence
  Description of Artificial Sequence: Synthetic oligonucleotide
cggccccaccgugccagcu

SEQ ID NO: 2718674 - RNA, 19 nt, Artificial Sequence
  Description of Artificial Sequence: Synthetic oligonucleotide
cggcugcgcugggcagcca

SEQ ID NO: 2718675 - RNA, 19 nt, Artificial Sequence
  Description of Artificial Sequence: Synthetic oligonucleotide
aauaaacuggaagagaggc

SEQ ID NO: 2718676 - RNA, 19 nt, Artificial Sequence
  Description of Artificial Sequence: Synthetic oligonucleotide
aaaacggaaaugcaaaagg

SEQ ID NO: 2718677 - RNA, 19 nt, Artificial Sequence
  Description of Artificial Sequence: Synthetic oligonucleotide
aaauguaugcauccuacac

SEQ ID NO: 2718678 - RNA, 19 nt, Artificial Sequence
  Description of Artificial Sequence: Synthetic oligonucleotide
uuuaacuggaguuagcugc

SEQ ID NO: 2718679 - RNA, 19 nt, Artificial Sequence
  Description of Artificial Sequence: Synthetic oligonucleotide
uuuauuuggcacccgaugg

SEQ ID NO: 2718680 - RNA, 19 nt, Artificial Sequence
  Description of Artificial Sequence: Synthetic oligonucleotide
aacccaaaagaguacaaac

SEQ ID NO: 2718681 - RNA, 19 nt, Artificial Sequence
  Description of Artificial Sequence: Synthetic oligonucleotide
uuuuaaagaaugauaaagu

SEQ ID NO: 2718682 - RNA, 19 nt, Artificial Sequence
  Description of Artificial Sequence: Synthetic oligonucleotide
uguuauguggaaaauaaac

SEQ ID NO: 2718683 - RNA, 19 nt, Artificial Sequence
  Description of Artificial Sequence: Synthetic oligonucleotide
uggaaaauaaacuggaaga

SEQ ID NO: 2718684 - RNA, 19 nt, Artificial Sequence
  Description of Artificial Sequence: Synthetic oligonucleotide
aacaauuuagaaauugccg

SEQ ID NO: 2718685 - RNA, 19 nt, Artificial Sequence
  Description of Artificial Sequence: Synthetic oligonucleotide
ugaaacuacuguuaugugg

SEQ ID NO: 2718686 - RNA, 19 nt, Artificial Sequence
  Description of Artificial Sequence: Synthetic oligonucleotide
uuauguggaaaauaaacug

SEQ ID NO: 2718687 - RNA, 19 nt, Artificial Sequence
  Description of Artificial Sequence: Synthetic oligonucleotide
aacuguaugcuguaagaac

SEQ ID NO: 2718688 - RNA, 19 nt, Artificial Sequence
  Description of Artificial Sequence: Synthetic oligonucleotide
aucaacauuuauuuggcac

SEQ ID NO: 2718689 - RNA, 19 nt, Artificial Sequence
  Description of Artificial Sequence: Synthetic oligonucleotide
ugcuguaagaacaauuuag

SEQ ID NO: 2718690 - RNA, 19 nt, Artificial Sequence
  Description of Artificial Sequence: Synthetic oligonucleotide
uccaagggaaguaagagcc

SEQ ID NO: 2718691 - RNA, 19 nt, Artificial Sequence
  Description of Artificial Sequence: Synthetic oligonucleotide
uguaagaacaauuuagaaa

SEQ ID NO: 2718692 - RNA, 19 nt, Artificial Sequence
  Description of Artificial Sequence: Synthetic oligonucleotide
uuuauggagauccaaggga

SEQ ID NO: 2718693 - RNA, 19 nt, Artificial Sequence
  Description of Artificial Sequence: Synthetic oligonucleotide
aauacaaaaucuuggcagu

SEQ ID NO: 2718694 - RNA, 19 nt, Artificial Sequence
  Description of Artificial Sequence: Synthetic oligonucleotide
uuugaauuucagaugaggu

SEQ ID NO: 2718695 - RNA, 19 nt, Artificial Sequence
  Description of Artificial Sequence: Synthetic oligonucleotide
acaauuuagaaauugccga

SEQ ID NO: 2718696 - RNA, 19 nt, Artificial Sequence
  Description of Artificial Sequence: Synthetic oligonucleotide
uaauuaaacuguaugcugu

SEQ ID NO: 2718697 - RNA, 19 nt, Artificial Sequence
  Description of Artificial Sequence: Synthetic oligonucleotide
aauguaugcauccuacacu

SEQ ID NO: 2718698 - RNA, 19 nt, Artificial Sequence
  Description of Artificial Sequence: Synthetic oligonucleotide
uuagaaaucaccguuuaug

SEQ ID NO: 2718699 - RNA, 19 nt, Artificial Sequence
  Description of Artificial Sequence: Synthetic oligonucleotide
uuaaacuguaugcuguaag

SEQ ID NO: 2718700 - RNA, 19 nt, Artificial Sequence
  Description of Artificial Sequence: Synthetic oligonucleotide
uuagaaauugccgaaaggu

SEQ ID NO: 2718701 - RNA, 19 nt, Artificial Sequence
  Description of Artificial Sequence: Synthetic oligonucleotide
cacuaauuaaacuguaugc

SEQ ID NO: 2718702 - RNA, 19 nt, Artificial Sequence
  Description of Artificial Sequence: Synthetic oligonucleotide
uuaauugagcaccucaacu

SEQ ID NO: 2718703 - RNA, 19 nt, Artificial Sequence
  Description of Artificial Sequence: Synthetic oligonucleotide
uuaaagaaugauaaaguuu

SEQ ID NO: 2718704 - RNA, 19 nt, Artificial Sequence
  Description of Artificial Sequence: Synthetic oligonucleotide
guguauagaaaauaaaaca

SEQ ID NO: 2718705 - RNA, 19 nt, Artificial Sequence
  Description of Artificial Sequence: Synthetic oligonucleotide
gaaagguaggguuuaacug

SEQ ID NO: 2718706 - RNA, 19 nt, Artificial Sequence
  Description of Artificial Sequence: Synthetic oligonucleotide
aaagaguacaaacacuaau

SEQ ID NO: 2718707 - RNA, 19 nt, Artificial Sequence
  Description of Artificial Sequence: Synthetic oligonucleotide
uggcaauacaaaaucuugg

SEQ ID NO: 2718708 - RNA, 19 nt, Artificial Sequence
  Description of Artificial Sequence: Synthetic oligonucleotide
agaacaauuuagaaauugc

SEQ ID NO: 2718709 - RNA, 19 nt, Artificial Sequence
  Description of Artificial Sequence: Synthetic oligonucleotide
ugaauuucagaugaggugu

SEQ ID NO: 2718710 - RNA, 19 nt, Artificial Sequence
  Description of Artificial Sequence: Synthetic oligonucleotide
gaugagguguaacaggaag

SEQ ID NO: 2718711 - RNA, 19 nt, Artificial Sequence
  Description of Artificial Sequence: Synthetic oligonucleotide
caaacguuaauugagcacc

SEQ ID NO: 2718712 - RNA, 19 nt, Artificial Sequence
  Description of Artificial Sequence: Synthetic oligonucleotide
aagaacaauuuagaaauug

SEQ ID NO: 2718713 - RNA, 19 nt, Artificial Sequence
  Description of Artificial Sequence: Synthetic oligonucleotide
uugaauuucagaugaggug

SEQ ID NO: 2718714 - RNA, 19 nt, Artificial Sequence
  Description of Artificial Sequence: Synthetic oligonucleotide
ucagaugagguguaacagg

SEQ ID NO: 2718715 - RNA, 19 nt, Artificial Sequence
  Description of Artificial Sequence: Synthetic oligonucleotide
cuaauuaaacuguaugcug

SEQ ID NO: 2718716 - RNA, 19 nt, Artificial Sequence
  Description of Artificial Sequence: Synthetic oligonucleotide
acacuaauuaaacuguaug

SEQ ID NO: 2718717 - RNA, 19 nt, Artificial Sequence
  Description of Artificial Sequence: Synthetic oligonucleotide
guggaaaauaaacuggaag

SEQ ID NO: 2718718 - RNA, 19 nt, Artificial Sequence
  Description of Artificial Sequence: Synthetic oligonucleotide
uccuacacugaccaaaggc

SEQ ID NO: 2718719 - RNA, 19 nt, Artificial Sequence
  Description of Artificial Sequence: Synthetic oligonucleotide
acaaacaacaaaucagugu

SEQ ID NO: 2718720 - RNA, 19 nt, Artificial Sequence
  Description of Artificial Sequence: Synthetic oligonucleotide
gaaaauaaaacaccugaaa

SEQ ID NO: 2718721 - RNA, 19 nt, Artificial Sequence
  Description of Artificial Sequence: Synthetic oligonucleotide
uguaaaguggguguaagga

SEQ ID NO: 2718722 - RNA, 19 nt, Artificial Sequence
  Description of Artificial Sequence: Synthetic oligonucleotide
guauagaaaauaaaacacc

SEQ ID NO: 2718723 - RNA, 19 nt, Artificial Sequence
  Description of Artificial Sequence: Synthetic oligonucleotide
auuuagaaauugccgaaag

SEQ ID NO: 2718724 - RNA, 19 nt, Artificial Sequence
  Description of Artificial Sequence: Synthetic oligonucleotide
aaaucuuggcagugggacg

SEQ ID NO: 2718725 - RNA, 19 nt, Artificial Sequence
  Description of Artificial Sequence: Synthetic oligonucleotide
gaacaauuuagaaauugcc

SEQ ID NO: 2718726 - RNA, 19 nt, Artificial Sequence
  Description of Artificial Sequence: Synthetic oligonucleotide
guuuauggagauccaaggg

SEQ ID NO: 2718727 - RNA, 19 nt, Artificial Sequence
  Description of Artificial Sequence: Synthetic oligonucleotide
uaugcuguaagaacaauuu

SEQ ID NO: 2718728 - RNA, 19 nt, Artificial Sequence
  Description of Artificial Sequence: Synthetic oligonucleotide
acugaaacuacuguuaugu

SEQ ID NO: 2718729 - RNA, 19 nt, Artificial Sequence
  Description of Artificial Sequence: Synthetic oligonucleotide
acaaaaucuuggcaguggg

SEQ ID NO: 2718730 - RNA, 19 nt, Artificial Sequence
  Description of Artificial Sequence: Synthetic oligonucleotide
uaggccucaaauacgcugg

SEQ ID NO: 2718731 - RNA, 19 nt, Artificial Sequence
  Description of Artificial Sequence: Synthetic oligonucleotide
gaagcuagugcucuaagca

SEQ ID NO: 2718732 - RNA, 19 nt, Artificial Sequence
  Description of Artificial Sequence: Synthetic oligonucleotide
aaaugcaaaagguuuuaaa

SEQ ID NO: 2718733 - RNA, 19 nt, Artificial Sequence
  Description of Artificial Sequence: Synthetic oligonucleotide
gagucuaccacucaaaugu

SEQ ID NO: 2718734 - RNA, 19 nt, Artificial Sequence
  Description of Artificial Sequence: Synthetic oligonucleotide
uaaacuguaugcuguaaga

SEQ ID NO: 2718735 - RNA, 19 nt, Artificial Sequence
  Description of Artificial Sequence: Synthetic oligonucleotide
auguaugcauccuacacug

SEQ ID NO: 2718736 - RNA, 19 nt, Artificial Sequence
  Description of Artificial Sequence: Synthetic oligonucleotide
uagcauaggccucaaauac

SEQ ID NO: 2718737 - RNA, 19 nt, Artificial Sequence
  Description of Artificial Sequence: Synthetic oligonucleotide
uuucagaugagguguaaca

SEQ ID NO: 2718738 - RNA, 19 nt, Artificial Sequence
  Description of Artificial Sequence: Synthetic oligonucleotide
augcaaaagguuuuaaaga

SEQ ID NO: 2718739 - RNA, 19 nt, Artificial Sequence
  Description of Artificial Sequence: Synthetic oligonucleotide
acuaauuaaacuguaugcu

SEQ ID NO: 2718740 - RNA, 19 nt, Artificial Sequence
  Description of Artificial Sequence: Synthetic oligonucleotide
aagcuagugcucuaagcag

SEQ ID NO: 2718741 - RNA, 19 nt, Artificial Sequence
  Description of Artificial Sequence: Synthetic oligonucleotide
ucaccguuuauggagaucc

SEQ ID NO: 2718742 - RNA, 19 nt, Artificial Sequence
  Description of Artificial Sequence: Synthetic oligonucleotide
acuggaguuagcugcuugc

SEQ ID NO: 2718743 - RNA, 19 nt, Artificial Sequence
  Description of Artificial Sequence: Synthetic oligonucleotide
gacaucaucagauauuuua

SEQ ID NO: 2718744 - RNA, 19 nt, Artificial Sequence
  Description of Artificial Sequence: Synthetic oligonucleotide
aaagguuuuaaagaaugau

SEQ ID NO: 2718745 - RNA, 19 nt, Artificial Sequence
  Description of Artificial Sequence: Synthetic oligonucleotide
uuauggagauccaagggaa

SEQ ID NO: 2718746 - RNA, 19 nt, Artificial Sequence
  Description of Artificial Sequence: Synthetic oligonucleotide
agaaauugccgaaagguag

SEQ ID NO: 2718747 - RNA, 19 nt, Artificial Sequence
  Description of Artificial Sequence: Synthetic oligonucleotide
acaacaaaucaguguauag

SEQ ID NO: 2718748 - RNA, 19 nt, Artificial Sequence
  Description of Artificial Sequence: Synthetic oligonucleotide
acuagcauaggccucaaau

SEQ ID NO: 2718749 - RNA, 19 nt, Artificial Sequence
  Description of Artificial Sequence: Synthetic oligonucleotide
gaaauugccgaaagguagg

SEQ ID NO: 2718750 - RNA, 19 nt, Artificial Sequence
  Description of Artificial Sequence: Synthetic oligonucleotide
acuacuguuauguggaaaa

SEQ ID NO: 2718751 - RNA, 19 nt, Artificial Sequence
  Description of Artificial Sequence: Synthetic oligonucleotide
ggaaguaagagccagaucu

SEQ ID NO: 2718752 - RNA, 19 nt, Artificial Sequence
  Description of Artificial Sequence: Synthetic oligonucleotide
uaauugagcaccucaacua

SEQ ID NO: 2718753 - RNA, 19 nt, Artificial Sequence
  Description of Artificial Sequence: Synthetic oligonucleotide
caaaucaguguauagaaaa

SEQ ID NO: 2718754 - RNA, 19 nt, Artificial Sequence
  Description of Artificial Sequence: Synthetic oligonucleotide
uaaacuggaagagaggcaa

SEQ ID NO: 2718755 - RNA, 19 nt, Artificial Sequence
  Description of Artificial Sequence: Synthetic oligonucleotide
uuguaaaguggguguaagg

SEQ ID NO: 2718756 - RNA, 19 nt, Artificial Sequence
  Description of Artificial Sequence: Synthetic oligonucleotide
uguaaggauuugaauuuca

SEQ ID NO: 2718757 - RNA, 19 nt, Artificial Sequence
  Description of Artificial Sequence: Synthetic oligonucleotide
accucaacuagcauaggcc

SEQ ID NO: 2718758 - RNA, 19 nt, Artificial Sequence
  Description of Artificial Sequence: Synthetic oligonucleotide
aaaacugaaacuacuguua

SEQ ID NO: 2718759 - RNA, 19 nt, Artificial Sequence
  Description of Artificial Sequence: Synthetic oligonucleotide
ucaguguauagaaaauaaa

SEQ ID NO: 2718760 - RNA, 19 nt, Artificial Sequence
  Description of Artificial Sequence: Synthetic oligonucleotide
uaugcauccuacacugacc

SEQ ID NO: 2718761 - RNA, 19 nt, Artificial Sequence
  Description of Artificial Sequence: Synthetic oligonucleotide
cacucaaauguaugcaucc

SEQ ID NO: 2718762 - RNA, 19 nt, Artificial Sequence
  Description of Artificial Sequence: Synthetic oligonucleotide
uucagaugagguguaacag

SEQ ID NO: 2718763 - RNA, 19 nt, Artificial Sequence
  Description of Artificial Sequence: Synthetic oligonucleotide
acagcaaacguuaauugag

SEQ ID NO: 2718764 - RNA, 19 nt, Artificial Sequence
  Description of Artificial Sequence: Synthetic oligonucleotide
caaaagaguacaaacacua

SEQ ID NO: 2718765 - RNA, 19 nt, Artificial Sequence
  Description of Artificial Sequence: Synthetic oligonucleotide
cuaccacucaaauguaugc

SEQ ID NO: 2718766 - RNA, 19 nt, Artificial Sequence
  Description of Artificial Sequence: Synthetic oligonucleotide
auaggccucaaauacgcug

SEQ ID NO: 2718767 - RNA, 19 nt, Artificial Sequence
  Description of Artificial Sequence: Synthetic oligonucleotide
ucaaauacgcugggcaccg

SEQ ID NO: 2718768 - RNA, 19 nt, Artificial Sequence
  Description of Artificial Sequence: Synthetic oligonucleotide
aagaguacaaacacuaauu

SEQ ID NO: 2718769 - RNA, 19 nt, Artificial Sequence
  Description of Artificial Sequence: Synthetic oligonucleotide
ugaagagucuaccacucaa

SEQ ID NO: 2718770 - RNA, 19 nt, Artificial Sequence
  Description of Artificial Sequence: Synthetic oligonucleotide
agguuuuaaagaaugauaa

SEQ ID NO: 2718771 - RNA, 19 nt, Artificial Sequence
  Description of Artificial Sequence: Synthetic oligonucleotide
aaacggaaaugcaaaaggu

SEQ ID NO: 2718772 - RNA, 19 nt, Artificial Sequence
  Description of Artificial Sequence: Synthetic oligonucleotide
gaaggaaguugucucacac

SEQ ID NO: 2718773 - RNA, 19 nt, Artificial Sequence
  Description of Artificial Sequence: Synthetic oligonucleotide
uaaaguggguguaaggauu

SEQ ID NO: 2718774 - RNA, 19 nt, Artificial Sequence
  Description of Artificial Sequence: Synthetic oligonucleotide
agccagaucuuguaaagug

SEQ ID NO: 2718775 - RNA, 19 nt, Artificial Sequence
  Description of Artificial Sequence: Synthetic oligonucleotide
aacugaaacuacuguuaug

SEQ ID NO: 2718776 - RNA, 19 nt, Artificial Sequence
  Description of Artificial Sequence: Synthetic oligonucleotide
uugagcaccucaacuagca

SEQ ID NO: 2718777 - RNA, 19 nt, Artificial Sequence
  Description of Artificial Sequence: Synthetic oligonucleotide
aaauugccgaaagguaggg

SEQ ID NO: 2718778 - RNA, 19 nt, Artificial Sequence
  Description of Artificial Sequence: Synthetic oligonucleotide
aagagucuaccacucaaau

SEQ ID NO: 2718779 - RNA, 19 nt, Artificial Sequence
  Description of Artificial Sequence: Synthetic oligonucleotide
augcgaaggaaguugucuc

SEQ ID NO: 2718780 - RNA, 19 nt, Artificial Sequence
  Description of Artificial Sequence: Synthetic oligonucleotide
augagguguaacaggaagc

SEQ ID NO: 2718781 - RNA, 19 nt, Artificial Sequence
  Description of Artificial Sequence: Synthetic oligonucleotide
uagaaauugccgaaaggua

SEQ ID NO: 2718782 - RNA, 19 nt, Artificial Sequence
  Description of Artificial Sequence: Synthetic oligonucleotide
ggaaaauaaacuggaagag

SEQ ID NO: 2718783 - RNA, 19 nt, Artificial Sequence
  Description of Artificial Sequence: Synthetic oligonucleotide
agguguaacaggaagcuag

SEQ ID NO: 2718784 - RNA, 19 nt, Artificial Sequence
  Description of Artificial Sequence: Synthetic oligonucleotide
uucagacaguuuaaaacaa

SEQ ID NO: 2718785 - RNA, 19 nt, Artificial Sequence
  Description of Artificial Sequence: Synthetic oligonucleotide
agaguacaaacacuaauua

SEQ ID NO: 2718786 - RNA, 19 nt, Artificial Sequence
  Description of Artificial Sequence: Synthetic oligonucleotide
aaaagguuuuaaagaauga

SEQ ID NO: 2718787 - RNA, 19 nt, Artificial Sequence
  Description of Artificial Sequence: Synthetic oligonucleotide
aaauacgcugggcaccgug

SEQ ID NO: 2718788 - RNA, 19 nt, Artificial Sequence
  Description of Artificial Sequence: Synthetic oligonucleotide
accaaaggcagaaucuggc

SEQ ID NO: 2718789 - RNA, 19 nt, Artificial Sequence
  Description of Artificial Sequence: Synthetic oligonucleotide
acuguaugcuguaagaaca

SEQ ID NO: 2718790 - RNA, 19 nt, Artificial Sequence
  Description of Artificial Sequence: Synthetic oligonucleotide
ugugaagagucuaccacuc

SEQ ID NO: 2718791 - RNA, 19 nt, Artificial Sequence
  Description of Artificial Sequence: Synthetic oligonucleotide
uuaacuggaguuagcugcu

SEQ ID NO: 2718792 - RNA, 19 nt, Artificial Sequence
  Description of Artificial Sequence: Synthetic oligonucleotide
uagugcucuaagcagggga

SEQ ID NO: 2718793 - RNA, 19 nt, Artificial Sequence
  Description of Artificial Sequence: Synthetic oligonucleotide
caaaggcagaaucuggcag

SEQ ID NO: 2718794 - RNA, 19 nt, Artificial Sequence
  Description of Artificial Sequence: Synthetic oligonucleotide
aagagccagaucuuguaaa

SEQ ID NO: 2718795 - RNA, 19 nt, Artificial Sequence
  Description of Artificial Sequence: Synthetic oligonucleotide
aauuuagaaauugccgaaa

SEQ ID NO: 2718796 - RNA, 19 nt, Artificial Sequence
  Description of Artificial Sequence: Synthetic oligonucleotide
cuacacugaccaaaggcag

SEQ ID NO: 2718797 - RNA, 19 nt, Artificial Sequence
  Description of Artificial Sequence: Synthetic oligonucleotide
aaucaguguauagaaaaua

SEQ ID NO: 2718798 - RNA, 19 nt, Artificial Sequence
  Description of Artificial Sequence: Synthetic oligonucleotide
ggcaauacaaaaucuuggc

SEQ ID NO: 2718799 - RNA, 19 nt, Artificial Sequence
  Description of Artificial Sequence: Synthetic oligonucleotide
uauggagauccaagggaag

SEQ ID NO: 2718800 - RNA, 19 nt, Artificial Sequence
  Description of Artificial Sequence: Synthetic oligonucleotide
acuguuauguggaaaauaa

SEQ ID NO: 2718801 - RNA, 19 nt, Artificial Sequence
  Description of Artificial Sequence: Synthetic oligonucleotide
agagucuaccacucaaaug

SEQ ID NO: 2718802 - RNA, 19 nt, Artificial Sequence
  Description of Artificial Sequence: Synthetic oligonucleotide
ugagguguaacaggaagcu

SEQ ID NO: 2718803 - RNA, 19 nt, Artificial Sequence
  Description of Artificial Sequence: Synthetic oligonucleotide
auugccgaaagguaggguu

SEQ ID NO: 2718804 - RNA, 19 nt, Artificial Sequence
  Description of Artificial Sequence: Synthetic oligonucleotide
ucaacuagcauaggccuca

SEQ ID NO: 2718805 - RNA, 19 nt, Artificial Sequence
  Description of Artificial Sequence: Synthetic oligonucleotide
guaacaggaagcuagugcu

SEQ ID NO: 2718806 - RNA, 19 nt, Artificial Sequence
  Description of Artificial Sequence: Synthetic oligonucleotide
ugguucacacagcaaacgu

SEQ ID NO: 2718807 - RNA, 19 nt, Artificial Sequence
  Description of Artificial Sequence: Synthetic oligonucleotide
augcauccuacacugacca

SEQ ID NO: 2718808 - RNA, 19 nt, Artificial Sequence
  Description of Artificial Sequence: Synthetic oligonucleotide
acguuaauugagcaccuca

SEQ ID NO: 2718809 - RNA, 19 nt, Artificial Sequence
  Description of Artificial Sequence: Synthetic oligonucleotide
acauuuauuuggcacccga

SEQ ID NO: 2718810 - RNA, 19 nt, Artificial Sequence
  Description of Artificial Sequence: Synthetic oligonucleotide
aaguaagagccagaucuug

SEQ ID NO: 2718811 - RNA, 19 nt, Artificial Sequence
  Description of Artificial Sequence: Synthetic oligonucleotide
aaacuguaugcuguaagaa

SEQ ID NO: 2718812 - RNA, 19 nt, Artificial Sequence
  Description of Artificial Sequence: Synthetic oligonucleotide
agcaaacguuaauugagca

SEQ ID NO: 2718813 - RNA, 19 nt, Artificial Sequence
  Description of Artificial Sequence: Synthetic oligonucleotide
guuuaacuggaguuagcug

SEQ ID NO: 2718814 - RNA, 19 nt, Artificial Sequence
  Description of Artificial Sequence: Synthetic oligonucleotide
cacguguaugucuucagac

SEQ ID NO: 2718815 - RNA, 19 nt, Artificial Sequence
  Description of Artificial Sequence: Synthetic oligonucleotide
guuaauugagcaccucaac

SEQ ID NO: 2718816 - RNA, 19 nt, Artificial Sequence
  Description of Artificial Sequence: Synthetic oligonucleotide
aacuggaguuagcugcuug

SEQ ID NO: 2718817 - RNA, 19 nt, Artificial Sequence
  Description of Artificial Sequence: Synthetic oligonucleotide
ucagacaguuuaaaacaaa

SEQ ID NO: 2718818 - RNA, 19 nt, Artificial Sequence
  Description of Artificial Sequence: Synthetic oligonucleotide
agaaaucaccguuuaugga

SEQ ID NO: 2718819 - RNA, 19 nt, Artificial Sequence
  Description of Artificial Sequence: Synthetic oligonucleotide
gaaguugucucacacgugu

SEQ ID NO: 2718820 - RNA, 19 nt, Artificial Sequence
  Description of Artificial Sequence: Synthetic oligonucleotide
aaaucaguguauagaaaau

SEQ ID NO: 2718821 - RNA, 19 nt, Artificial Sequence
  Description of Artificial Sequence: Synthetic oligonucleotide
guaugcauccuacacugac

SEQ ID NO: 2718822 - RNA, 19 nt, Artificial Sequence
  Description of Artificial Sequence: Synthetic oligonucleotide
aacaacaaaucaguguaua

SEQ ID NO: 2718823 - RNA, 19 nt, Artificial Sequence
  Description of Artificial Sequence: Synthetic oligonucleotide
auggcaauacaaaaucuug

SEQ ID NO: 2718824 - RNA, 19 nt, Artificial Sequence
  Description of Artificial Sequence: Synthetic oligonucleotide
cagcaaacguuaauugagc

SEQ ID NO: 2718825 - RNA, 19 nt, Artificial Sequence
  Description of Artificial Sequence: Synthetic oligonucleotide
cauccuacacugaccaaag

SEQ ID NO: 2718826 - RNA, 19 nt, Artificial Sequence
  Description of Artificial Sequence: Synthetic oligonucleotide
agaaucuggcagcaagucu

SEQ ID NO: 2718827 - RNA, 19 nt, Artificial Sequence
  Description of Artificial Sequence: Synthetic oligonucleotide
aaaucaccguuuauggaga

SEQ ID NO: 2718828 - RNA, 19 nt, Artificial Sequence
  Description of Artificial Sequence: Synthetic oligonucleotide
auugagcaccucaacuagc

SEQ ID NO: 2718829 - RNA, 19 nt, Artificial Sequence
  Description of Artificial Sequence: Synthetic oligonucleotide
cuuguaaaguggguguaag

SEQ ID NO: 2718830 - RNA, 19 nt, Artificial Sequence
  Description of Artificial Sequence: Synthetic oligonucleotide
guuauguggaaaauaaacu

SEQ ID NO: 2718831 - RNA, 19 nt, Artificial Sequence
  Description of Artificial Sequence: Synthetic oligonucleotide
acguguaugucuucagaca

SEQ ID NO: 2718832 - RNA, 19 nt, Artificial Sequence
  Description of Artificial Sequence: Synthetic oligonucleotide
aucaguguauagaaaauaa

SEQ ID NO: 2718833 - RNA, 19 nt, Artificial Sequence
  Description of Artificial Sequence: Synthetic oligonucleotide
caccucaacuagcauaggc

SEQ ID NO: 2718834 - RNA, 19 nt, Artificial Sequence
  Description of Artificial Sequence: Synthetic oligonucleotide
aacacuaauuaaacuguau

SEQ ID NO: 2718835 - RNA, 19 nt, Artificial Sequence
  Description of Artificial Sequence: Synthetic oligonucleotide
agcuagugcucuaagcagg

SEQ ID NO: 2718836 - RNA, 19 nt, Artificial Sequence
  Description of Artificial Sequence: Synthetic oligonucleotide
cagaugagguguaacagga

SEQ ID NO: 2718837 - RNA, 19 nt, Artificial Sequence
  Description of Artificial Sequence: Synthetic oligonucleotide
aacggaaaugcaaaagguu

SEQ ID NO: 2718838 - RNA, 19 nt, Artificial Sequence
  Description of Artificial Sequence: Synthetic oligonucleotide
ugcgaaggaaguugucuca

SEQ ID NO: 2718839 - RNA, 19 nt, Artificial Sequence
  Description of Artificial Sequence: Synthetic oligonucleotide
aacguuaauugagcaccuc

SEQ ID NO: 2718840 - RNA, 19 nt, Artificial Sequence
  Description of Artificial Sequence: Synthetic oligonucleotide
auguggaaaauaaacugga

SEQ ID NO: 2718841 - RNA, 19 nt, Artificial Sequence
  Description of Artificial Sequence: Synthetic oligonucleotide
ccagaucuuguaaaguggg

SEQ ID NO: 2718842 - RNA, 19 nt, Artificial Sequence
  Description of Artificial Sequence: Synthetic oligonucleotide
cucaaauacgcugggcacc

SEQ ID NO: 2718843 - RNA, 19 nt, Artificial Sequence
  Description of Artificial Sequence: Synthetic oligonucleotide
cccaaaagaguacaaacac

SEQ ID NO: 2718844 - RNA, 19 nt, Artificial Sequence
  Description of Artificial Sequence: Synthetic oligonucleotide
uccuuagaaaucaccguuu

SEQ ID NO: 2718845 - RNA, 19 nt, Artificial Sequence
  Description of Artificial Sequence: Synthetic oligonucleotide
agcauaggccucaaauacg

SEQ ID NO: 2718846 - RNA, 19 nt, Artificial Sequence
  Description of Artificial Sequence: Synthetic oligonucleotide
caacaaaucaguguauaga

SEQ ID NO: 2718847 - RNA, 19 nt, Artificial Sequence
  Description of Artificial Sequence: Synthetic oligonucleotide
ucucacacguguaugucuu

SEQ ID NO: 2718848 - RNA, 19 nt, Artificial Sequence
  Description of Artificial Sequence: Synthetic oligonucleotide
accacucaaauguaugcau

SEQ ID NO: 2718849 - RNA, 19 nt, Artificial Sequence
  Description of Artificial Sequence: Synthetic oligonucleotide
gaguuagcugcuugccucc

SEQ ID NO: 2718850 - RNA, 19 nt, Artificial Sequence
  Description of Artificial Sequence: Synthetic oligonucleotide
ggcagaaucuggcagcaag

SEQ ID NO: 2718851 - RNA, 19 nt, Artificial Sequence
  Description of Artificial Sequence: Synthetic oligonucleotide
caauuuagaaauugccgaa

SEQ ID NO: 2718852 - RNA, 19 nt, Artificial Sequence
  Description of Artificial Sequence: Synthetic oligonucleotide
uaccacucaaauguaugca

SEQ ID NO: 2718853 - RNA, 19 nt, Artificial Sequence
  Description of Artificial Sequence: Synthetic oligonucleotide
aggguuuaacuggaguuag

SEQ ID NO: 2718854 - RNA, 19 nt, Artificial Sequence
  Description of Artificial Sequence: Synthetic oligonucleotide
cugguucacacagcaaacg

SEQ ID NO: 2718855 - RNA, 19 nt, Artificial Sequence
  Description of Artificial Sequence: Synthetic oligonucleotide
caagggaaguaagagccag

SEQ ID NO: 2718856 - RNA, 19 nt, Artificial Sequence
  Description of Artificial Sequence: Synthetic oligonucleotide
agugcucuaagcaggggag

SEQ ID NO: 2718857 - RNA, 19 nt, Artificial Sequence
  Description of Artificial Sequence: Synthetic oligonucleotide
cacagcaaacguuaauuga

SEQ ID NO: 2718858 - RNA, 19 nt, Artificial Sequence
  Description of Artificial Sequence: Synthetic oligonucleotide
uuggcagugggacguguga

SEQ ID NO: 2718859 - RNA, 19 nt, Artificial Sequence
  Description of Artificial Sequence: Synthetic oligonucleotide
cuguaagaacaauuuagaa

SEQ ID NO: 2718860 - RNA, 19 nt, Artificial Sequence
  Description of Artificial Sequence: Synthetic oligonucleotide
ggcagcaagucuucaaacc

SEQ ID NO: 2718861 - RNA, 19 nt, Artificial Sequence
  Description of Artificial Sequence: Synthetic oligonucleotide
auacaaaaucuuggcagug

SEQ ID NO: 2718862 - RNA, 19 nt, Artificial Sequence
  Description of Artificial Sequence: Synthetic oligonucleotide
acggaaaugcaaaagguuu

SEQ ID NO: 2718863 - RNA, 19 nt, Artificial Sequence
  Description of Artificial Sequence: Synthetic oligonucleotide
aaacguuaauugagcaccu

SEQ ID NO: 2718864 - RNA, 19 nt, Artificial Sequence
  Description of Artificial Sequence: Synthetic oligonucleotide
uggguguaaggauuugaau

SEQ ID NO: 2718865 - RNA, 19 nt, Artificial Sequence
  Description of Artificial Sequence: Synthetic oligonucleotide
aaacacuaauuaaacugua

SEQ ID NO: 2718866 - RNA, 19 nt, Artificial Sequence
  Description of Artificial Sequence: Synthetic oligonucleotide
ugcuugccuccuuagaaau

SEQ ID NO: 2718867 - RNA, 19 nt, Artificial Sequence
  Description of Artificial Sequence: Synthetic oligonucleotide
cguuuauggagauccaagg

SEQ ID NO: 2718868 - RNA, 19 nt, Artificial Sequence
  Description of Artificial Sequence: Synthetic oligonucleotide
uacuguuauguggaaaaua

SEQ ID NO: 2718869 - RNA, 19 nt, Artificial Sequence
  Description of Artificial Sequence: Synthetic oligonucleotide
aagguaggguuuaacugga

SEQ ID NO: 2718870 - RNA, 19 nt, Artificial Sequence
  Description of Artificial Sequence: Synthetic oligonucleotide
gacgugugaagagucuacc

SEQ ID NO: 2718871 - RNA, 19 nt, Artificial Sequence
  Description of Artificial Sequence: Synthetic oligonucleotide
ggaagcuagugcucuaagc

SEQ ID NO: 2718872 - RNA, 19 nt, Artificial Sequence
  Description of Artificial Sequence: Synthetic oligonucleotide
cuagcauaggccucaaaua

SEQ ID NO: 2718873 - RNA, 19 nt, Artificial Sequence
  Description of Artificial Sequence: Synthetic oligonucleotide
aaacuacuguuauguggaa

SEQ ID NO: 2718874 - RNA, 19 nt, Artificial Sequence
  Description of Artificial Sequence: Synthetic oligonucleotide
acacguguaugucuucaga

SEQ ID NO: 2718875 - RNA, 19 nt, Artificial Sequence
  Description of Artificial Sequence: Synthetic oligonucleotide
uacgcugggcaccgugagg

SEQ ID NO: 2718876 - RNA, 19 nt, Artificial Sequence
  Description of Artificial Sequence: Synthetic oligonucleotide
uguaugcauccuacacuga

SEQ ID NO: 2718877 - RNA, 19 nt, Artificial Sequence
  Description of Artificial Sequence: Synthetic oligonucleotide
aggaagcuagugcucuaag

SEQ ID NO: 2718878 - RNA, 19 nt, Artificial Sequence
  Description of Artificial Sequence: Synthetic oligonucleotide
aauacgcugggcaccguga

SEQ ID NO: 2718879 - RNA, 19 nt, Artificial Sequence
  Description of Artificial Sequence: Synthetic oligonucleotide
aacuacuguuauguggaaa

SEQ ID NO: 2718880 - RNA, 19 nt, Artificial Sequence
  Description of Artificial Sequence: Synthetic oligonucleotide
ugcucuaagcaggggagug

SEQ ID NO: 2718881 - RNA, 19 nt, Artificial Sequence
  Description of Artificial Sequence: Synthetic oligonucleotide
aaucaccguuuauggagau

SEQ ID NO: 2718882 - RNA, 19 nt, Artificial Sequence
  Description of Artificial Sequence: Synthetic oligonucleotide
aaggcagaaucuggcagca

SEQ ID NO: 2718883 - RNA, 19 nt, Artificial Sequence
  Description of Artificial Sequence: Synthetic oligonucleotide
uaggguuuaacuggaguua

SEQ ID NO: 2718884 - RNA, 19 nt, Artificial Sequence
  Description of Artificial Sequence: Synthetic oligonucleotide
acgugugaagagucuacca

SEQ ID NO: 2718885 - RNA, 19 nt, Artificial Sequence
  Description of Artificial Sequence: Synthetic oligonucleotide
ucuggcagcaagucuucaa

SEQ ID NO: 2718886 - RNA, 19 nt, Artificial Sequence
  Description of Artificial Sequence: Synthetic oligonucleotide
ucacacguguaugucuuca

SEQ ID NO: 2718887 - RNA, 19 nt, Artificial Sequence
  Description of Artificial Sequence: Synthetic oligonucleotide
uggcagcaagucuucaaac

SEQ ID NO: 2718888 - RNA, 19 nt, Artificial Sequence
  Description of Artificial Sequence: Synthetic oligonucleotide
gcaauacaaaaucuuggca

SEQ ID NO: 2718889 - RNA, 19 nt, Artificial Sequence
  Description of Artificial Sequence: Synthetic oligonucleotide
auccuacacugaccaaagg

SEQ ID NO: 2718890 - RNA, 19 nt, Artificial Sequence
  Description of Artificial Sequence: Synthetic oligonucleotide
aaaguggguguaaggauuu

SEQ ID NO: 2718891 - RNA, 19 nt, Artificial Sequence
  Description of Artificial Sequence: Synthetic oligonucleotide
gcaaacguuaauugagcac

SEQ ID NO: 2718892 - RNA, 19 nt, Artificial Sequence
  Description of Artificial Sequence: Synthetic oligonucleotide
caaauguaugcauccuaca

SEQ ID NO: 2718893 - RNA, 19 nt, Artificial Sequence
  Description of Artificial Sequence: Synthetic oligonucleotide
aguaagagccagaucuugu

SEQ ID NO: 2718894 - RNA, 19 nt, Artificial Sequence
  Description of Artificial Sequence: Synthetic oligonucleotide
ucuuguaaaguggguguaa

SEQ ID NO: 2718895 - RNA, 19 nt, Artificial Sequence
  Description of Artificial Sequence: Synthetic oligonucleotide
auacgcugggcaccgugag

SEQ ID NO: 2718896 - RNA, 19 nt, Artificial Sequence
  Description of Artificial Sequence: Synthetic oligonucleotide
auaaacuggaagagaggca

SEQ ID NO: 2718897 - RNA, 19 nt, Artificial Sequence
  Description of Artificial Sequence: Synthetic oligonucleotide
auggagauccaagggaagu

SEQ ID NO: 2718898 - RNA, 19 nt, Artificial Sequence
  Description of Artificial Sequence: Synthetic oligonucleotide
aauuucagaugagguguaa

SEQ ID NO: 2718899 - RNA, 19 nt, Artificial Sequence
  Description of Artificial Sequence: Synthetic oligonucleotide
aauugccgaaagguagggu

SEQ ID NO: 2718900 - RNA, 19 nt, Artificial Sequence
  Description of Artificial Sequence: Synthetic oligonucleotide
gaugcgaaggaaguugucu

SEQ ID NO: 2718901 - RNA, 19 nt, Artificial Sequence
  Description of Artificial Sequence: Synthetic oligonucleotide
caccgugaggaugcgaagg

SEQ ID NO: 2718902 - RNA, 19 nt, Artificial Sequence
  Description of Artificial Sequence: Synthetic oligonucleotide
uuuggcacccgauggcaau

SEQ ID NO: 2718903 - RNA, 19 nt, Artificial Sequence
  Description of Artificial Sequence: Synthetic oligonucleotide
ucuaagcaggggagugaca

SEQ ID NO: 2718904 - RNA, 19 nt, Artificial Sequence
  Description of Artificial Sequence: Synthetic oligonucleotide
cucaacuagcauaggccuc

SEQ ID NO: 2718905 - RNA, 19 nt, Artificial Sequence
  Description of Artificial Sequence: Synthetic oligonucleotide
ccuacacugaccaaaggca

SEQ ID NO: 2718906 - RNA, 19 nt, Artificial Sequence
  Description of Artificial Sequence: Synthetic oligonucleotide
ugucuucagacaguuuaaa

SEQ ID NO: 2718907 - RNA, 19 nt, Artificial Sequence
  Description of Artificial Sequence: Synthetic oligonucleotide
accgugaggaugcgaagga

SEQ ID NO: 2718908 - RNA, 19 nt, Artificial Sequence
  Description of Artificial Sequence: Synthetic oligonucleotide
augcuguaagaacaauuua

SEQ ID NO: 2718909 - RNA, 19 nt, Artificial Sequence
  Description of Artificial Sequence: Synthetic oligonucleotide
uugccgaaagguaggguuu

SEQ ID NO: 2718910 - RNA, 19 nt, Artificial Sequence
  Description of Artificial Sequence: Synthetic oligonucleotide
cacacguguaugucuucag

SEQ ID NO: 2718911 - RNA, 19 nt, Artificial Sequence
  Description of Artificial Sequence: Synthetic oligonucleotide
agugggacgugugaagagu

SEQ ID NO: 2718912 - RNA, 19 nt, Artificial Sequence
  Description of Artificial Sequence: Synthetic oligonucleotide
acccgauggcaauacaaaa

SEQ ID NO: 2718913 - RNA, 19 nt, Artificial Sequence
  Description of Artificial Sequence: Synthetic oligonucleotide
gcauaggccucaaauacgc

SEQ ID NO: 2718914 - RNA, 19 nt, Artificial Sequence
  Description of Artificial Sequence: Synthetic oligonucleotide
gccagaucuuguaaagugg

SEQ ID NO: 2718915 - RNA, 19 nt, Artificial Sequence
  Description of Artificial Sequence: Synthetic oligonucleotide
guaagagccagaucuugua

SEQ ID NO: 2718916 - RNA, 19 nt, Artificial Sequence
  Description of Artificial Sequence: Synthetic oligonucleotide
acucaaauguaugcauccu

SEQ ID NO: 2718917 - RNA, 19 nt, Artificial Sequence
  Description of Artificial Sequence: Synthetic oligonucleotide
ugggacgugugaagagucu

SEQ ID NO: 2718918 - RNA, 19 nt, Artificial Sequence
  Description of Artificial Sequence: Synthetic oligonucleotide
cucuaagcaggggagugac

SEQ ID NO: 2718919 - RNA, 19 nt, Artificial Sequence
  Description of Artificial Sequence: Synthetic oligonucleotide
agggaaguaagagccagau

SEQ ID NO: 2718920 - RNA, 19 nt, Artificial Sequence
  Description of Artificial Sequence: Synthetic oligonucleotide
guaggguuuaacuggaguu

SEQ ID NO: 2718921 - RNA, 19 nt, Artificial Sequence
  Description of Artificial Sequence: Synthetic oligonucleotide
ccgauggcaauacaaaauc

SEQ ID NO: 2718922 - RNA, 19 nt, Artificial Sequence
  Description of Artificial Sequence: Synthetic oligonucleotide
aguggguguaaggauuuga

SEQ ID NO: 2718923 - RNA, 19 nt, Artificial Sequence
  Description of Artificial Sequence: Synthetic oligonucleotide
ccguuuauggagauccaag

SEQ ID NO: 2718924 - RNA, 19 nt, Artificial Sequence
  Description of Artificial Sequence: Synthetic oligonucleotide
caaaaucuuggcaguggga

SEQ ID NO: 2718925 - RNA, 19 nt, Artificial Sequence
  Description of Artificial Sequence: Synthetic oligonucleotide
uguaugcuguaagaacaau

SEQ ID NO: 2718926 - RNA, 19 nt, Artificial Sequence
  Description of Artificial Sequence: Synthetic oligonucleotide
gauggcaauacaaaaucuu

SEQ ID NO: 2718927 - RNA, 19 nt, Artificial Sequence
  Description of Artificial Sequence: Synthetic oligonucleotide
gaagagucuaccacucaaa

SEQ ID NO: 2718928 - RNA, 19 nt, Artificial Sequence
  Description of Artificial Sequence: Synthetic oligonucleotide
guaaaguggguguaaggau

SEQ ID NO: 2718929 - RNA, 19 nt, Artificial Sequence
  Description of Artificial Sequence: Synthetic oligonucleotide
aggccucaaauacgcuggg

SEQ ID NO: 2718930 - RNA, 19 nt, Artificial Sequence
  Description of Artificial Sequence: Synthetic oligonucleotide
gugugaagagucuaccacu

SEQ ID NO: 2718931 - RNA, 19 nt, Artificial Sequence
  Description of Artificial Sequence: Synthetic oligonucleotide
acaaaucaguguauagaaa

SEQ ID NO: 2718932 - RNA, 19 nt, Artificial Sequence
  Description of Artificial Sequence: Synthetic oligonucleotide
cagugggacgugugaagag

SEQ ID NO: 2718933 - RNA, 19 nt, Artificial Sequence
  Description of Artificial Sequence: Synthetic oligonucleotide
cugaccaaaggcagaaucu

SEQ ID NO: 2718934 - RNA, 19 nt, Artificial Sequence
  Description of Artificial Sequence: Synthetic oligonucleotide
cucaaauguaugcauccua

SEQ ID NO: 2718935 - RNA, 19 nt, Artificial Sequence
  Description of Artificial Sequence: Synthetic oligonucleotide
ggguguaaggauuugaauu

SEQ ID NO: 2718936 - RNA, 19 nt, Artificial Sequence
  Description of Artificial Sequence: Synthetic oligonucleotide
uggagauccaagggaagua

SEQ ID NO: 2718937 - RNA, 19 nt, Artificial Sequence
  Description of Artificial Sequence: Synthetic oligonucleotide
gguguaaggauuugaauuu

SEQ ID NO: 2718938 - RNA, 19 nt, Artificial Sequence
  Description of Artificial Sequence: Synthetic oligonucleotide
aucaccguuuauggagauc

SEQ ID NO: 2718939 - RNA, 19 nt, Artificial Sequence
  Description of Artificial Sequence: Synthetic oligonucleotide
gagugacaucaucagauau

SEQ ID NO: 2718940 - RNA, 19 nt, Artificial Sequence
  Description of Artificial Sequence: Synthetic oligonucleotide
uagcugcuugccuccuuag

SEQ ID NO: 2718941 - RNA, 19 nt, Artificial Sequence
  Description of Artificial Sequence: Synthetic oligonucleotide
cuguuauguggaaaauaaa

SEQ ID NO: 2718942 - RNA, 19 nt, Artificial Sequence
  Description of Artificial Sequence: Synthetic oligonucleotide
ugucucacacguguauguc

SEQ ID NO: 2718943 - RNA, 19 nt, Artificial Sequence
  Description of Artificial Sequence: Synthetic oligonucleotide
ugagcaccucaacuagcau

SEQ ID NO: 2718944 - RNA, 19 nt, Artificial Sequence
  Description of Artificial Sequence: Synthetic oligonucleotide
aagggaaguaagagccaga

SEQ ID NO: 2718945 - RNA, 19 nt, Artificial Sequence
  Description of Artificial Sequence: Synthetic oligonucleotide
acgcugggcaccgugagga

SEQ ID NO: 2718946 - RNA, 19 nt, Artificial Sequence
  Description of Artificial Sequence: Synthetic oligonucleotide
aaguggguguaaggauuug

SEQ ID NO: 2718947 - RNA, 19 nt, Artificial Sequence
  Description of Artificial Sequence: Synthetic oligonucleotide
guguaaggauuugaauuuc

SEQ ID NO: 2718948 - RNA, 19 nt, Artificial Sequence
  Description of Artificial Sequence: Synthetic oligonucleotide
cuguaugcuguaagaacaa

SEQ ID NO: 2718949 - RNA, 19 nt, Artificial Sequence
  Description of Artificial Sequence: Synthetic oligonucleotide
gcuagugcucuaagcaggg

SEQ ID NO: 2718950 - RNA, 19 nt, Artificial Sequence
  Description of Artificial Sequence: Synthetic oligonucleotide
ccucaaauacgcugggcac

SEQ ID NO: 2718951 - RNA, 19 nt, Artificial Sequence
  Description of Artificial Sequence: Synthetic oligonucleotide
aggaugcgaaggaaguugu

SEQ ID NO: 2718952 - RNA, 19 nt, Artificial Sequence
  Description of Artificial Sequence: Synthetic oligonucleotide
cuggcagcaagucuucaaa

SEQ ID NO: 2718953 - RNA, 19 nt, Artificial Sequence
  Description of Artificial Sequence: Synthetic oligonucleotide
cuagugcucuaagcagggg

SEQ ID NO: 2718954 - RNA, 19 nt, Artificial Sequence
  Description of Artificial Sequence: Synthetic oligonucleotide
ugacaucaucagauauuuu

SEQ ID NO: 2718955 - RNA, 19 nt, Artificial Sequence
  Description of Artificial Sequence: Synthetic oligonucleotide
ugaggaugcgaaggaaguu

SEQ ID NO: 2718956 - RNA, 19 nt, Artificial Sequence
  Description of Artificial Sequence: Synthetic oligonucleotide
uugccuccuuagaaaucac

SEQ ID NO: 2718957 - RNA, 19 nt, Artificial Sequence
  Description of Artificial Sequence: Synthetic oligonucleotide
cgugaggaugcgaaggaag

SEQ ID NO: 2718958 - RNA, 19 nt, Artificial Sequence
  Description of Artificial Sequence: Synthetic oligonucleotide
gguuuaacuggaguuagcu

SEQ ID NO: 2718959 - RNA, 19 nt, Artificial Sequence
  Description of Artificial Sequence: Synthetic oligonucleotide
cacccgauggcaauacaaa

SEQ ID NO: 2718960 - RNA, 19 nt, Artificial Sequence
  Description of Artificial Sequence: Synthetic oligonucleotide
ccugguucacacagcaaac

SEQ ID NO: 2718961 - RNA, 19 nt, Artificial Sequence
  Description of Artificial Sequence: Synthetic oligonucleotide
gcugcuugccuccuuagaa

SEQ ID NO: 2718962 - RNA, 19 nt, Artificial Sequence
  Description of Artificial Sequence: Synthetic oligonucleotide
gaauuucagaugaggugua

SEQ ID NO: 2718963 - RNA, 19 nt, Artificial Sequence
  Description of Artificial Sequence: Synthetic oligonucleotide
aaacuggaagagaggcaaa

SEQ ID NO: 2718964 - RNA, 19 nt, Artificial Sequence
  Description of Artificial Sequence: Synthetic oligonucleotide
accguuuauggagauccaa

SEQ ID NO: 2718965 - RNA, 19 nt, Artificial Sequence
  Description of Artificial Sequence: Synthetic oligonucleotide
gugacaucaucagauauuu

SEQ ID NO: 2718966 - RNA, 19 nt, Artificial Sequence
  Description of Artificial Sequence: Synthetic oligonucleotide
guggguguaaggauuugaa

SEQ ID NO: 2718967 - RNA, 19 nt, Artificial Sequence
  Description of Artificial Sequence: Synthetic oligonucleotide
aucuuguaaagugggugua

SEQ ID NO: 2718968 - RNA, 19 nt, Artificial Sequence
  Description of Artificial Sequence: Synthetic oligonucleotide
augucuucagacaguuuaa

SEQ ID NO: 2718969 - RNA, 19 nt, Artificial Sequence
  Description of Artificial Sequence: Synthetic oligonucleotide
cugcuugccuccuuagaaa

SEQ ID NO: 2718970 - RNA, 19 nt, Artificial Sequence
  Description of Artificial Sequence: Synthetic oligonucleotide
cuaagcaggggagugacau

SEQ ID NO: 2718971 - RNA, 19 nt, Artificial Sequence
  Description of Artificial Sequence: Synthetic oligonucleotide
gucucacacguguaugucu

SEQ ID NO: 2718972 - RNA, 19 nt, Artificial Sequence
  Description of Artificial Sequence: Synthetic oligonucleotide
cuccuuagaaaucaccguu

SEQ ID NO: 2718973 - RNA, 19 nt, Artificial Sequence
  Description of Artificial Sequence: Synthetic oligonucleotide
ugcauccuacacugaccaa

SEQ ID NO: 2718974 - RNA, 19 nt, Artificial Sequence
  Description of Artificial Sequence: Synthetic oligonucleotide
gguaggguuuaacuggagu

SEQ ID NO: 2718975 - RNA, 19 nt, Artificial Sequence
  Description of Artificial Sequence: Synthetic oligonucleotide
guaugcuguaagaacaauu

SEQ ID NO: 2718976 - RNA, 19 nt, Artificial Sequence
  Description of Artificial Sequence: Synthetic oligonucleotide
cucacacguguaugucuuc

SEQ ID NO: 2718977 - RNA, 19 nt, Artificial Sequence
  Description of Artificial Sequence: Synthetic oligonucleotide
gggagugacaucaucagau

SEQ ID NO: 2718978 - RNA, 19 nt, Artificial Sequence
  Description of Artificial Sequence: Synthetic oligonucleotide
cacacagcaaacguuaauu

SEQ ID NO: 2718979 - RNA, 19 nt, Artificial Sequence
  Description of Artificial Sequence: Synthetic oligonucleotide
gugggacgugugaagaguc

SEQ ID NO: 2718980 - RNA, 19 nt, Artificial Sequence
  Description of Artificial Sequence: Synthetic oligonucleotide
ugccgaaagguaggguuua

SEQ ID NO: 2718981 - RNA, 19 nt, Artificial Sequence
  Description of Artificial Sequence: Synthetic oligonucleotide
ggaaaugcaaaagguuuua

SEQ ID NO: 2718982 - RNA, 19 nt, Artificial Sequence
  Description of Artificial Sequence: Synthetic oligonucleotide
gcauccuacacugaccaaa

SEQ ID NO: 2718983 - RNA, 19 nt, Artificial Sequence
  Description of Artificial Sequence: Synthetic oligonucleotide
gugaggaugcgaaggaagu

SEQ ID NO: 2718984 - RNA, 19 nt, Artificial Sequence
  Description of Artificial Sequence: Synthetic oligonucleotide
acaggaagcuagugcucua

SEQ ID NO: 2718985 - RNA, 19 nt, Artificial Sequence
  Description of Artificial Sequence: Synthetic oligonucleotide
cuuagaaaucaccguuuau

SEQ ID NO: 2718986 - RNA, 19 nt, Artificial Sequence
  Description of Artificial Sequence: Synthetic oligonucleotide
ccaaaagaguacaaacacu

SEQ ID NO: 2718987 - RNA, 19 nt, Artificial Sequence
  Description of Artificial Sequence: Synthetic oligonucleotide
ggaaguugucucacacgug

SEQ ID NO: 2718988 - RNA, 19 nt, Artificial Sequence
  Description of Artificial Sequence: Synthetic oligonucleotide
ggagugacaucaucagaua

SEQ ID NO: 2718989 - RNA, 19 nt, Artificial Sequence
  Description of Artificial Sequence: Synthetic oligonucleotide
ggagauccaagggaaguaa

SEQ ID NO: 2718990 - RNA, 19 nt, Artificial Sequence
  Description of Artificial Sequence: Synthetic oligonucleotide
ccaaaggcagaaucuggca

SEQ ID NO: 2718991 - RNA, 19 nt, Artificial Sequence
  Description of Artificial Sequence: Synthetic oligonucleotide
gggaaguaagagccagauc

SEQ ID NO: 2718992 - RNA, 19 nt, Artificial Sequence
  Description of Artificial Sequence: Synthetic oligonucleotide
cccugguucacacagcaaa

SEQ ID NO: 2718993 - RNA, 19 nt, Artificial Sequence
  Description of Artificial Sequence: Synthetic oligonucleotide
uggcacccgauggcaauac

SEQ ID NO: 2718994 - RNA, 19 nt, Artificial Sequence
  Description of Artificial Sequence: Synthetic oligonucleotide
ggacgugugaagagucuac

SEQ ID NO: 2718995 - RNA, 19 nt, Artificial Sequence
  Description of Artificial Sequence: Synthetic oligonucleotide
auuuggcacccgauggcaa

SEQ ID NO: 2718996 - RNA, 19 nt, Artificial Sequence
  Description of Artificial Sequence: Synthetic oligonucleotide
cagaucuuguaaagugggu

SEQ ID NO: 2718997 - RNA, 19 nt, Artificial Sequence
  Description of Artificial Sequence: Synthetic oligonucleotide
uuggcacccgauggcaaua

SEQ ID NO: 2718998 - RNA, 19 nt, Artificial Sequence
  Description of Artificial Sequence: Synthetic oligonucleotide
aguuagcugcuugccuccu

SEQ ID NO: 2718999 - RNA, 19 nt, Artificial Sequence
  Description of Artificial Sequence: Synthetic oligonucleotide
gagguguaacaggaagcua

SEQ ID NO: 2719000 - RNA, 19 nt, Artificial Sequence
  Description of Artificial Sequence: Synthetic oligonucleotide
cguuaauugagcaccucaa

SEQ ID NO: 2719001 - RNA, 19 nt, Artificial Sequence
  Description of Artificial Sequence: Synthetic oligonucleotide
ggguuuaacuggaguuagc

SEQ ID NO: 2719002 - RNA, 19 nt, Artificial Sequence
  Description of Artificial Sequence: Synthetic oligonucleotide
agucuaccacucaaaugua

SEQ ID NO: 2719003 - RNA, 19 nt, Artificial Sequence
  Description of Artificial Sequence: Synthetic oligonucleotide
ggcaccgugaggaugcgaa

SEQ ID NO: 2719004 - RNA, 19 nt, Artificial Sequence
  Description of Artificial Sequence: Synthetic oligonucleotide
ccucaacuagcauaggccu

SEQ ID NO: 2719005 - RNA, 19 nt, Artificial Sequence
  Description of Artificial Sequence: Synthetic oligonucleotide
cgaaagguaggguuuaacu

SEQ ID NO: 2719006 - RNA, 19 nt, Artificial Sequence
  Description of Artificial Sequence: Synthetic oligonucleotide
gcagugggacgugugaaga

SEQ ID NO: 2719007 - RNA, 19 nt, Artificial Sequence
  Description of Artificial Sequence: Synthetic oligonucleotide
ugggcaccgugaggaugcg

SEQ ID NO: 2719008 - RNA, 19 nt, Artificial Sequence
  Description of Artificial Sequence: Synthetic oligonucleotide
gcgaaggaaguugucucac

SEQ ID NO: 2719009 - RNA, 19 nt, Artificial Sequence
  Description of Artificial Sequence: Synthetic oligonucleotide
uaacuggaguuagcugcuu

SEQ ID NO: 2719010 - RNA, 19 nt, Artificial Sequence
  Description of Artificial Sequence: Synthetic oligonucleotide
caccguuuauggagaucca

SEQ ID NO: 2719011 - RNA, 19 nt, Artificial Sequence
  Description of Artificial Sequence: Synthetic oligonucleotide
gcaggggagugacaucauc

SEQ ID NO: 2719012 - RNA, 19 nt, Artificial Sequence
  Description of Artificial Sequence: Synthetic oligonucleotide
caggaagcuagugcucuaa

SEQ ID NO: 2719013 - RNA, 19 nt, Artificial Sequence
  Description of Artificial Sequence: Synthetic oligonucleotide
cauaggccucaaauacgcu

SEQ ID NO: 2719014 - RNA, 19 nt, Artificial Sequence
  Description of Artificial Sequence: Synthetic oligonucleotide
gcaaaagguuuuaaagaau

SEQ ID NO: 2719015 - RNA, 19 nt, Artificial Sequence
  Description of Artificial Sequence: Synthetic oligonucleotide
gcacccgauggcaauacaa

SEQ ID NO: 2719016 - RNA, 19 nt, Artificial Sequence
  Description of Artificial Sequence: Synthetic oligonucleotide
ccaagggaaguaagagcca

SEQ ID NO: 2719017 - RNA, 19 nt, Artificial Sequence
  Description of Artificial Sequence: Synthetic oligonucleotide
gucuaccacucaaauguau

SEQ ID NO: 2719018 - RNA, 19 nt, Artificial Sequence
  Description of Artificial Sequence: Synthetic oligonucleotide
ggccucaaauacgcugggc

SEQ ID NO: 2719019 - RNA, 19 nt, Artificial Sequence
  Description of Artificial Sequence: Synthetic oligonucleotide
gcugggcaccgugaggaug

SEQ ID NO: 2719020 - RNA, 19 nt, Artificial Sequence
  Description of Artificial Sequence: Synthetic oligonucleotide
ccgaaagguaggguuuaac

SEQ ID NO: 2719021 - RNA, 19 nt, Artificial Sequence
  Description of Artificial Sequence: Synthetic oligonucleotide
gguucacacagcaaacguu

SEQ ID NO: 2719022 - RNA, 19 nt, Artificial Sequence
  Description of Artificial Sequence: Synthetic oligonucleotide
cuacuguuauguggaaaau

SEQ ID NO: 2719023 - RNA, 19 nt, Artificial Sequence
  Description of Artificial Sequence: Synthetic oligonucleotide
cccgauggcaauacaaaau

SEQ ID NO: 2719024 - RNA, 19 nt, Artificial Sequence
  Description of Artificial Sequence: Synthetic oligonucleotide
gcagaaucuggcagcaagu

SEQ ID NO: 2719025 - RNA, 19 nt, Artificial Sequence
  Description of Artificial Sequence: Synthetic oligonucleotide
ccuccuuagaaaucaccgu

SEQ ID NO: 2719026 - RNA, 19 nt, Artificial Sequence
  Description of Artificial Sequence: Synthetic oligonucleotide
ggaugcgaaggaaguuguc

SEQ ID NO: 2719027 - RNA, 19 nt, Artificial Sequence
  Description of Artificial Sequence: Synthetic oligonucleotide
gcuugccuccuuagaaauc

SEQ ID NO: 2719028 - RNA, 19 nt, Artificial Sequence
  Description of Artificial Sequence: Synthetic oligonucleotide
gggacgugugaagagucua

SEQ ID NO: 2719029 - RNA, 19 nt, Artificial Sequence
  Description of Artificial Sequence: Synthetic oligonucleotide
gcaccucaacuagcauagg

SEQ ID NO: 2719030 - RNA, 19 nt, Artificial Sequence
  Description of Artificial Sequence: Synthetic oligonucleotide
cgauggcaauacaaaaucu

SEQ ID NO: 2719031 - RNA, 19 nt, Artificial Sequence
  Description of Artificial Sequence: Synthetic oligonucleotide
agcaggggagugacaucau

SEQ ID NO: 2719032 - RNA, 19 nt, Artificial Sequence
  Description of Artificial Sequence: Synthetic oligonucleotide
ggcacccgauggcaauaca

SEQ ID NO: 2719033 - RNA, 19 nt, Artificial Sequence
  Description of Artificial Sequence: Synthetic oligonucleotide
cgaaggaaguugucucaca

SEQ ID NO: 2719034 - RNA, 19 nt, Artificial Sequence
  Description of Artificial Sequence: Synthetic oligonucleotide
gugcucuaagcaggggagu

SEQ ID NO: 2719035 - RNA, 19 nt, Artificial Sequence
  Description of Artificial Sequence: Synthetic oligonucleotide
caacuagcauaggccucaa

SEQ ID NO: 2719036 - RNA, 19 nt, Artificial Sequence
  Description of Artificial Sequence: Synthetic oligonucleotide
gccgaaagguaggguuuaa

SEQ ID NO: 2719037 - RNA, 19 nt, Artificial Sequence
  Description of Artificial Sequence: Synthetic oligonucleotide
caaauacgcugggcaccgu

SEQ ID NO: 2719038 - RNA, 19 nt, Artificial Sequence
  Description of Artificial Sequence: Synthetic oligonucleotide
ccgugaggaugcgaaggaa

SEQ ID NO: 2719039 - RNA, 19 nt, Artificial Sequence
  Description of Artificial Sequence: Synthetic oligonucleotide
gggcaccgugaggaugcga

SEQ ID NO: 2719040 - RNA, 19 nt, Artificial Sequence
  Description of Artificial Sequence: Synthetic oligonucleotide
agcacagagacccggagcg

SEQ ID NO: 2719041 - RNA, 19 nt, Artificial Sequence
  Description of Artificial Sequence: Synthetic oligonucleotide
uuuauagacgccguccucc

SEQ ID NO: 2719042 - RNA, 19 nt, Artificial Sequence
  Description of Artificial Sequence: Synthetic oligonucleotide
acacuugaaagucccgcgc

SEQ ID NO: 2719043 - RNA, 19 nt, Artificial Sequence
  Description of Artificial Sequence: Synthetic oligonucleotide
gacacuugaaagucccgcg

SEQ ID NO: 2719044 - RNA, 19 nt, Artificial Sequence
  Description of Artificial Sequence: Synthetic oligonucleotide
agacacuugaaagucccgc

SEQ ID NO: 2719045 - RNA, 19 nt, Artificial Sequence
  Description of Artificial Sequence: Synthetic oligonucleotide
guagccagcugcuugcgcg

SEQ ID NO: 2719046 - RNA, 19 nt, Artificial Sequence
  Description of Artificial Sequence: Synthetic oligonucleotide
gagagcggagcacagagac

SEQ ID NO: 2719047 - RNA, 19 nt, Artificial Sequence
  Description of Artificial Sequence: Synthetic oligonucleotide
cuuggugcgagccauggug

SEQ ID NO: 2719048 - RNA, 19 nt, Artificial Sequence
  Description of Artificial Sequence: Synthetic oligonucleotide
uuggugcgagccauggugg

SEQ ID NO: 2719049 - RNA, 19 nt, Artificial Sequence
  Description of Artificial Sequence: Synthetic oligonucleotide
agcgacggggaccugcugc

SEQ ID NO: 2719050 - RNA, 19 nt, Artificial Sequence
  Description of Artificial Sequence: Synthetic oligonucleotide
gagcggagcacagagaccc

SEQ ID NO: 2719051 - RNA, 19 nt, Artificial Sequence
  Description of Artificial Sequence: Synthetic oligonucleotide
cagucggccgccuuuauag

SEQ ID NO: 2719052 - RNA, 19 nt, Artificial Sequence
  Description of Artificial Sequence: Synthetic oligonucleotide
cuccagaaggaacagcccc

SEQ ID NO: 2719053 - RNA, 19 nt, Artificial Sequence
  Description of Artificial Sequence: Synthetic oligonucleotide
ucggccgccuuuauagacg

SEQ ID NO: 2719054 - RNA, 19 nt, Artificial Sequence
  Description of Artificial Sequence: Synthetic oligonucleotide
uugguagccagcugcuugc

SEQ ID NO: 2719055 - RNA, 19 nt, Artificial Sequence
  Description of Artificial Sequence: Synthetic oligonucleotide
cagagagcggagcacagag

SEQ ID NO: 2719056 - RNA, 19 nt, Artificial Sequence
  Description of Artificial Sequence: Synthetic oligonucleotide
uuauagacgccguccuccc

SEQ ID NO: 2719057 - RNA, 19 nt, Artificial Sequence
  Description of Artificial Sequence: Synthetic oligonucleotide
cuugguagccagcugcuug

SEQ ID NO: 2719058 - RNA, 19 nt, Artificial Sequence
  Description of Artificial Sequence: Synthetic oligonucleotide
uuggccgugacgucaccgg

SEQ ID NO: 2719059 - RNA, 19 nt, Artificial Sequence
  Description of Artificial Sequence: Synthetic oligonucleotide
gacgucaccggaccgggcc

SEQ ID NO: 2719060 - RNA, 19 nt, Artificial Sequence
  Description of Artificial Sequence: Synthetic oligonucleotide
uugaaagucccgcgcugcc

SEQ ID NO: 2719061 - RNA, 19 nt, Artificial Sequence
  Description of Artificial Sequence: Synthetic oligonucleotide
auagacgccguccuccccu

SEQ ID NO: 2719062 - RNA, 19 nt, Artificial Sequence
  Description of Artificial Sequence: Synthetic oligonucleotide
ugaggcuucuugacgccgc

SEQ ID NO: 2719063 - RNA, 19 nt, Artificial Sequence
  Description of Artificial Sequence: Synthetic oligonucleotide
acuugaaagucccgcgcug

SEQ ID NO: 2719064 - RNA, 19 nt, Artificial Sequence
  Description of Artificial Sequence: Synthetic oligonucleotide
ggggccagacacuugaaag

SEQ ID NO: 2719065 - RNA, 19 nt, Artificial Sequence
  Description of Artificial Sequence: Synthetic oligonucleotide
ccaugguggacagagagcg

SEQ ID NO: 2719066 - RNA, 19 nt, Artificial Sequence
  Description of Artificial Sequence: Synthetic oligonucleotide
gagcacagagacccggagc

SEQ ID NO: 2719067 - RNA, 19 nt, Artificial Sequence
  Description of Artificial Sequence: Synthetic oligonucleotide
cuugaaagucccgcgcugc

SEQ ID NO: 2719068 - RNA, 19 nt, Artificial Sequence
  Description of Artificial Sequence: Synthetic oligonucleotide
gaaagucccgcgcugccca

SEQ ID NO: 2719069 - RNA, 19 nt, Artificial Sequence
  Description of Artificial Sequence: Synthetic oligonucleotide
agucccgcgcugcccagcc

SEQ ID NO: 2719070 - RNA, 19 nt, Artificial Sequence
  Description of Artificial Sequence: Synthetic oligonucleotide
ccagacacuugaaaguccc

SEQ ID NO: 2719071 - RNA, 19 nt, Artificial Sequence
  Description of Artificial Sequence: Synthetic oligonucleotide
uagccagcugcuugcgcgg

SEQ ID NO: 2719072 - RNA, 19 nt, Artificial Sequence
  Description of Artificial Sequence: Synthetic oligonucleotide
ugcugcgggccgcagucgg

SEQ ID NO: 2719073 - RNA, 19 nt, Artificial Sequence
  Description of Artificial Sequence: Synthetic oligonucleotide
ugguggacagagagcggag

SEQ ID NO: 2719074 - RNA, 19 nt, Artificial Sequence
  Description of Artificial Sequence: Synthetic oligonucleotide
gacggggaccugcugcggg

SEQ ID NO: 2719075 - RNA, 19 nt, Artificial Sequence
  Description of Artificial Sequence: Synthetic oligonucleotide
uauagacgccguccucccc

SEQ ID NO: 2719076 - RNA, 19 nt, Artificial Sequence
  Description of Artificial Sequence: Synthetic oligonucleotide
gagacccggagcgacgggg

SEQ ID NO: 2719077 - RNA, 19 nt, Artificial Sequence
  Description of Artificial Sequence: Synthetic oligonucleotide
auuggccgugacgucaccg

SEQ ID NO: 2719078 - RNA, 19 nt, Artificial Sequence
  Description of Artificial Sequence: Synthetic oligonucleotide
acgucaccggaccgggccc

SEQ ID NO: 2719079 - RNA, 19 nt, Artificial Sequence
  Description of Artificial Sequence: Synthetic oligonucleotide
cagacacuugaaagucccg

SEQ ID NO: 2719080 - RNA, 19 nt, Artificial Sequence
  Description of Artificial Sequence: Synthetic oligonucleotide
augguggacagagagcgga

SEQ ID NO: 2719081 - RNA, 19 nt, Artificial Sequence
  Description of Artificial Sequence: Synthetic oligonucleotide
acggggaccugcugcgggc

SEQ ID NO: 2719082 - RNA, 19 nt, Artificial Sequence
  Description of Artificial Sequence: Synthetic oligonucleotide
ugaaagucccgcgcugccc

SEQ ID NO: 2719083 - RNA, 19 nt, Artificial Sequence
  Description of Artificial Sequence: Synthetic oligonucleotide
cuuuauagacgccguccuc

SEQ ID NO: 2719084 - RNA, 19 nt, Artificial Sequence
  Description of Artificial Sequence: Synthetic oligonucleotide
gacgccguccuccccuggg

SEQ ID NO: 2719085 - RNA, 19 nt, Artificial Sequence
  Description of Artificial Sequence: Synthetic oligonucleotide
aaagucccgcgcugcccag

SEQ ID NO: 2719086 - RNA, 19 nt, Artificial Sequence
  Description of Artificial Sequence: Synthetic oligonucleotide
caugguggacagagagcgg

SEQ ID NO: 2719087 - RNA, 19 nt, Artificial Sequence
  Description of Artificial Sequence: Synthetic oligonucleotide
agagcggagcacagagacc

SEQ ID NO: 2719088 - RNA, 19 nt, Artificial Sequence
  Description of Artificial Sequence: Synthetic oligonucleotide
uugcgcggggccuugccgc

SEQ ID NO: 2719089 - RNA, 19 nt, Artificial Sequence
  Description of Artificial Sequence: Synthetic oligonucleotide
cuugcgcggggccuugccg

SEQ ID NO: 2719090 - RNA, 19 nt, Artificial Sequence
  Description of Artificial Sequence: Synthetic oligonucleotide
gccgccuuuauagacgccg

SEQ ID NO: 2719091 - RNA, 19 nt, Artificial Sequence
  Description of Artificial Sequence: Synthetic oligonucleotide
gacagagagcggagcacag

SEQ ID NO: 2719092 - RNA, 19 nt, Artificial Sequence
  Description of Artificial Sequence: Synthetic oligonucleotide
acgccguccuccccugggc

SEQ ID NO: 2719093 - RNA, 19 nt, Artificial Sequence
  Description of Artificial Sequence: Synthetic oligonucleotide
ugcgagccaugguggacag

SEQ ID NO: 2719094 - RNA, 19 nt, Artificial Sequence
  Description of Artificial Sequence: Synthetic oligonucleotide
uggacagagagcggagcac

SEQ ID NO: 2719095 - RNA, 19 nt, Artificial Sequence
  Description of Artificial Sequence: Synthetic oligonucleotide
gucggccgccuuuauagac

SEQ ID NO: 2719096 - RNA, 19 nt, Artificial Sequence
  Description of Artificial Sequence: Synthetic oligonucleotide
aagucccgcgcugcccagc

SEQ ID NO: 2719097 - RNA, 19 nt, Artificial Sequence
  Description of Artificial Sequence: Synthetic oligonucleotide
gccuuuauagacgccgucc

SEQ ID NO: 2719098 - RNA, 19 nt, Artificial Sequence
  Description of Artificial Sequence: Synthetic oligonucleotide
gugacgucaccggaccggg

SEQ ID NO: 2719099 - RNA, 19 nt, Artificial Sequence
  Description of Artificial Sequence: Synthetic oligonucleotide
aggaacagccccaccaggu

SEQ ID NO: 2719100 - RNA, 19 nt, Artificial Sequence
  Description of Artificial Sequence: Synthetic oligonucleotide
cagagacccggagcgacgg

SEQ ID NO: 2719101 - RNA, 19 nt, Artificial Sequence
  Description of Artificial Sequence: Synthetic oligonucleotide
acagagacccggagcgacg

SEQ ID NO: 2719102 - RNA, 19 nt, Artificial Sequence
  Description of Artificial Sequence: Synthetic oligonucleotide
cacagagacccggagcgac

SEQ ID NO: 2719103 - RNA, 19 nt, Artificial Sequence
  Description of Artificial Sequence: Synthetic oligonucleotide
uggccgugacgucaccgga

SEQ ID NO: 2719104 - RNA, 19 nt, Artificial Sequence
  Description of Artificial Sequence: Synthetic oligonucleotide
ugguagccagcugcuugcg

SEQ ID NO: 2719105 - RNA, 19 nt, Artificial Sequence
  Description of Artificial Sequence: Synthetic oligonucleotide
agccauuggccgugacguc

SEQ ID NO: 2719106 - RNA, 19 nt, Artificial Sequence
  Description of Artificial Sequence: Synthetic oligonucleotide
ggagcacagagacccggag

SEQ ID NO: 2719107 - RNA, 19 nt, Artificial Sequence
  Description of Artificial Sequence: Synthetic oligonucleotide
acccggagcgacggggacc

SEQ ID NO: 2719108 - RNA, 19 nt, Artificial Sequence
  Description of Artificial Sequence: Synthetic oligonucleotide
agagacccggagcgacggg

SEQ ID NO: 2719109 - RNA, 19 nt, Artificial Sequence
  Description of Artificial Sequence: Synthetic oligonucleotide
uggugcgagccauggugga

SEQ ID NO: 2719110 - RNA, 19 nt, Artificial Sequence
  Description of Artificial Sequence: Synthetic oligonucleotide
cagaaggaacagccccacc

SEQ ID NO: 2719111 - RNA, 19 nt, Artificial Sequence
  Description of Artificial Sequence: Synthetic oligonucleotide
ccagccauuggccgugacg

SEQ ID NO: 2719112 - RNA, 19 nt, Artificial Sequence
  Description of Artificial Sequence: Synthetic oligonucleotide
agucggccgccuuuauaga

SEQ ID NO: 2719113 - RNA, 19 nt, Artificial Sequence
  Description of Artificial Sequence: Synthetic oligonucleotide
ucccgcgcugcccagccau

SEQ ID NO: 2719114 - RNA, 19 nt, Artificial Sequence
  Description of Artificial Sequence: Synthetic oligonucleotide
cgagccaugguggacagag

SEQ ID NO: 2719115 - RNA, 19 nt, Artificial Sequence
  Description of Artificial Sequence: Synthetic oligonucleotide
uagacgccguccuccccug

SEQ ID NO: 2719116 - RNA, 19 nt, Artificial Sequence
  Description of Artificial Sequence: Synthetic oligonucleotide
guggccggcgcgcucuugc

SEQ ID NO: 2719117 - RNA, 19 nt, Artificial Sequence
  Description of Artificial Sequence: Synthetic oligonucleotide
uccuccccugggcggggcg

SEQ ID NO: 2719118 - RNA, 19 nt, Artificial Sequence
  Description of Artificial Sequence: Synthetic oligonucleotide
uggccggcgcgcucuugcg

SEQ ID NO: 2719119 - RNA, 19 nt, Artificial Sequence
  Description of Artificial Sequence: Synthetic oligonucleotide
ugacgucaccggaccgggc

SEQ ID NO: 2719120 - RNA, 19 nt, Artificial Sequence
  Description of Artificial Sequence: Synthetic oligonucleotide
gcgacggggaccugcugcg

SEQ ID NO: 2719121 - RNA, 19 nt, Artificial Sequence
  Description of Artificial Sequence: Synthetic oligonucleotide
ggggccuugccgccggugg

SEQ ID NO: 2719122 - RNA, 19 nt, Artificial Sequence
  Description of Artificial Sequence: Synthetic oligonucleotide
acagagagcggagcacaga

SEQ ID NO: 2719123 - RNA, 19 nt, Artificial Sequence
  Description of Artificial Sequence: Synthetic oligonucleotide
ggccagacacuugaaaguc

SEQ ID NO: 2719124 - RNA, 19 nt, Artificial Sequence
  Description of Artificial Sequence: Synthetic oligonucleotide
ccgccgguggacuugcggg

SEQ ID NO: 2719125 - RNA, 19 nt, Artificial Sequence
  Description of Artificial Sequence: Synthetic oligonucleotide
gccgugacgucaccggacc

SEQ ID NO: 2719126 - RNA, 19 nt, Artificial Sequence
  Description of Artificial Sequence: Synthetic oligonucleotide
gugcgagccaugguggaca

SEQ ID NO: 2719127 - RNA, 19 nt, Artificial Sequence
  Description of Artificial Sequence: Synthetic oligonucleotide
cuugccgccgguggacuug

SEQ ID NO: 2719128 - RNA, 19 nt, Artificial Sequence
  Description of Artificial Sequence: Synthetic oligonucleotide
cagccauuggccgugacgu

SEQ ID NO: 2719129 - RNA, 19 nt, Artificial Sequence
  Description of Artificial Sequence: Synthetic oligonucleotide
gguggacagagagcggagc

SEQ ID NO: 2719130 - RNA, 19 nt, Artificial Sequence
  Description of Artificial Sequence: Synthetic oligonucleotide
ggcggggccagacacuuga

SEQ ID NO: 2719131 - RNA, 19 nt, Artificial Sequence
  Description of Artificial Sequence: Synthetic oligonucleotide
ugcgcggggccuugccgcc

SEQ ID NO: 2719132 - RNA, 19 nt, Artificial Sequence
  Description of Artificial Sequence: Synthetic oligonucleotide
cacuugaaagucccgcgcu

SEQ ID NO: 2719133 - RNA, 19 nt, Artificial Sequence
  Description of Artificial Sequence: Synthetic oligonucleotide
agagagcggagcacagaga

SEQ ID NO: 2719134 - RNA, 19 nt, Artificial Sequence
  Description of Artificial Sequence: Synthetic oligonucleotide
gguagccagcugcuugcgc

SEQ ID NO: 2719135 - RNA, 19 nt, Artificial Sequence
  Description of Artificial Sequence: Synthetic oligonucleotide
gaccgggcccggccauugg

SEQ ID NO: 2719136 - RNA, 19 nt, Artificial Sequence
  Description of Artificial Sequence: Synthetic oligonucleotide
gccagacacuugaaagucc

SEQ ID NO: 2719137 - RNA, 19 nt, Artificial Sequence
  Description of Artificial Sequence: Synthetic oligonucleotide
agacgccguccuccccugg

SEQ ID NO: 2719138 - RNA, 19 nt, Artificial Sequence
  Description of Artificial Sequence: Synthetic oligonucleotide
cauuggccgugacgucacc

SEQ ID NO: 2719139 - RNA, 19 nt, Artificial Sequence
  Description of Artificial Sequence: Synthetic oligonucleotide
cugcgggccgcagucggcc

SEQ ID NO: 2719140 - RNA, 19 nt, Artificial Sequence
  Description of Artificial Sequence: Synthetic oligonucleotide
gacccggagcgacggggac

SEQ ID NO: 2719141 - RNA, 19 nt, Artificial Sequence
  Description of Artificial Sequence: Synthetic oligonucleotide
gggccagacacuugaaagu

SEQ ID NO: 2719142 - RNA, 19 nt, Artificial Sequence
  Description of Artificial Sequence: Synthetic oligonucleotide
uugccgccgguggacuugc

SEQ ID NO: 2719143 - RNA, 19 nt, Artificial Sequence
  Description of Artificial Sequence: Synthetic oligonucleotide
accggaccgggcccggcca

SEQ ID NO: 2719144 - RNA, 19 nt, Artificial Sequence
  Description of Artificial Sequence: Synthetic oligonucleotide
accugcugcgggccgcagu

SEQ ID NO: 2719145 - RNA, 19 nt, Artificial Sequence
  Description of Artificial Sequence: Synthetic oligonucleotide
caccggaccgggcccggcc

SEQ ID NO: 2719146 - RNA, 19 nt, Artificial Sequence
  Description of Artificial Sequence: Synthetic oligonucleotide
gccgccgguggacuugcgg

SEQ ID NO: 2719147 - RNA, 19 nt, Artificial Sequence
  Description of Artificial Sequence: Synthetic oligonucleotide
agcggagcacagagacccg

SEQ ID NO: 2719148 - RNA, 19 nt, Artificial Sequence
  Description of Artificial Sequence: Synthetic oligonucleotide
gcggagcacagagacccgg

SEQ ID NO: 2719149 - RNA, 19 nt, Artificial Sequence
  Description of Artificial Sequence: Synthetic oligonucleotide
ccauuggccgugacgucac

SEQ ID NO: 2719150 - RNA, 19 nt, Artificial Sequence
  Description of Artificial Sequence: Synthetic oligonucleotide
gggcccggccauuggcucg

SEQ ID NO: 2719151 - RNA, 19 nt, Artificial Sequence
  Description of Artificial Sequence: Synthetic oligonucleotide
gccauuggccgugacguca

SEQ ID NO: 2719152 - RNA, 19 nt, Artificial Sequence
  Description of Artificial Sequence: Synthetic oligonucleotide
ccugcugcgggccgcaguc

SEQ ID NO: 2719153 - RNA, 19 nt, Artificial Sequence
  Description of Artificial Sequence: Synthetic oligonucleotide
gccguccuccccugggcgg

SEQ ID NO: 2719154 - RNA, 19 nt, Artificial Sequence
  Description of Artificial Sequence: Synthetic oligonucleotide
gagcgacggggaccugcug

SEQ ID NO: 2719155 - RNA, 19 nt, Artificial Sequence
  Description of Artificial Sequence: Synthetic oligonucleotide
cgugacgucaccggaccgg

SEQ ID NO: 2719156 - RNA, 19 nt, Artificial Sequence
  Description of Artificial Sequence: Synthetic oligonucleotide
agacccggagcgacgggga

SEQ ID NO: 2719157 - RNA, 19 nt, Artificial Sequence
  Description of Artificial Sequence: Synthetic oligonucleotide
ccagaaggaacagccccac

SEQ ID NO: 2719158 - RNA, 19 nt, Artificial Sequence
  Description of Artificial Sequence: Synthetic oligonucleotide
gcgcugcccagccauuggc

SEQ ID NO: 2719159 - RNA, 19 nt, Artificial Sequence
  Description of Artificial Sequence: Synthetic oligonucleotide
ugccgccgguggacuugcg

SEQ ID NO: 2719160 - RNA, 19 nt, Artificial Sequence
  Description of Artificial Sequence: Synthetic oligonucleotide
ccuuuauagacgccguccu

SEQ ID NO: 2719161 - RNA, 19 nt, Artificial Sequence
  Description of Artificial Sequence: Synthetic oligonucleotide
ggccggcgcgcucuugcgg

SEQ ID NO: 2719162 - RNA, 19 nt, Artificial Sequence
  Description of Artificial Sequence: Synthetic oligonucleotide
ggugcgagccaugguggac

SEQ ID NO: 2719163 - RNA, 19 nt, Artificial Sequence
  Description of Artificial Sequence: Synthetic oligonucleotide
cugcugcgggccgcagucg

SEQ ID NO: 2719164 - RNA, 19 nt, Artificial Sequence
  Description of Artificial Sequence: Synthetic oligonucleotide
gcggggcggggccagacac

SEQ ID NO: 2719165 - RNA, 19 nt, Artificial Sequence
  Description of Artificial Sequence: Synthetic oligonucleotide
gccagcugcuugcgcgggg

SEQ ID NO: 2719166 - RNA, 19 nt, Artificial Sequence
  Description of Artificial Sequence: Synthetic oligonucleotide
gcuugcgcggggccuugcc

SEQ ID NO: 2719167 - RNA, 19 nt, Artificial Sequence
  Description of Artificial Sequence: Synthetic oligonucleotide
cggccgccuuuauagacgc

SEQ ID NO: 2719168 - RNA, 19 nt, Artificial Sequence
  Description of Artificial Sequence: Synthetic oligonucleotide
gucaccggaccgggcccgg

SEQ ID NO: 2719169 - RNA, 19 nt, Artificial Sequence
  Description of Artificial Sequence: Synthetic oligonucleotide
ccagcugcuugcgcggggc

SEQ ID NO: 2719170 - RNA, 19 nt, Artificial Sequence
  Description of Artificial Sequence: Synthetic oligonucleotide
ucaccggaccgggcccggc

SEQ ID NO: 2719171 - RNA, 19 nt, Artificial Sequence
  Description of Artificial Sequence: Synthetic oligonucleotide
cgcugcccagccauuggcc

SEQ ID NO: 2719172 - RNA, 19 nt, Artificial Sequence
  Description of Artificial Sequence: Synthetic oligonucleotide
ugcuugcgcggggccuugc

SEQ ID NO: 2719173 - RNA, 19 nt, Artificial Sequence
  Description of Artificial Sequence: Synthetic oligonucleotide
ggccgugacgucaccggac

SEQ ID NO: 2719174 - RNA, 19 nt, Artificial Sequence
  Description of Artificial Sequence: Synthetic oligonucleotide
ccgugacgucaccggaccg

SEQ ID NO: 2719175 - RNA, 19 nt, Artificial Sequence
  Description of Artificial Sequence: Synthetic oligonucleotide
ggcgcgcucuugcgggcag

SEQ ID NO: 2719176 - RNA, 19 nt, Artificial Sequence
  Description of Artificial Sequence: Synthetic oligonucleotide
gaccugcugcgggccgcag

SEQ ID NO: 2719177 - RNA, 19 nt, Artificial Sequence
  Description of Artificial Sequence: Synthetic oligonucleotide
cgccgguggacuugcgggc

SEQ ID NO: 2719178 - RNA, 19 nt, Artificial Sequence
  Description of Artificial Sequence: Synthetic oligonucleotide
gggaccugcugcgggccgc

SEQ ID NO: 2719179 - RNA, 19 nt, Artificial Sequence
  Description of Artificial Sequence: Synthetic oligonucleotide
ggccuugccgccgguggac

SEQ ID NO: 2719180 - RNA, 19 nt, Artificial Sequence
  Description of Artificial Sequence: Synthetic oligonucleotide
gcagucggccgccuuuaua

SEQ ID NO: 2719181 - RNA, 19 nt, Artificial Sequence
  Description of Artificial Sequence: Synthetic oligonucleotide
ggaccgggcccggccauug

SEQ ID NO: 2719182 - RNA, 19 nt, Artificial Sequence
  Description of Artificial Sequence: Synthetic oligonucleotide
cugcuugcgcggggccuug

SEQ ID NO: 2719183 - RNA, 19 nt, Artificial Sequence
  Description of Artificial Sequence: Synthetic oligonucleotide
cgcgcugcccagccauugg

SEQ ID NO: 2719184 - RNA, 19 nt, Artificial Sequence
  Description of Artificial Sequence: Synthetic oligonucleotide
ccguccuccccugggcggg

SEQ ID NO: 2719185 - RNA, 19 nt, Artificial Sequence
  Description of Artificial Sequence: Synthetic oligonucleotide
gggccuugccgccggugga

SEQ ID NO: 2719186 - RNA, 19 nt, Artificial Sequence
  Description of Artificial Sequence: Synthetic oligonucleotide
cgccguccuccccugggcg

SEQ ID NO: 2719187 - RNA, 19 nt, Artificial Sequence
  Description of Artificial Sequence: Synthetic oligonucleotide
cgccuuuauagacgccguc

SEQ ID NO: 2719188 - RNA, 19 nt, Artificial Sequence
  Description of Artificial Sequence: Synthetic oligonucleotide
cggagcgacggggaccugc

SEQ ID NO: 2719189 - RNA, 19 nt, Artificial Sequence
  Description of Artificial Sequence: Synthetic oligonucleotide
gcgggccgcagucggccgc

SEQ ID NO: 2719190 - RNA, 19 nt, Artificial Sequence
  Description of Artificial Sequence: Synthetic oligonucleotide
gcacagagacccggagcga

SEQ ID NO: 2719191 - RNA, 19 nt, Artificial Sequence
  Description of Artificial Sequence: Synthetic oligonucleotide
gcugcgggccgcagucggc

SEQ ID NO: 2719192 - RNA, 19 nt, Artificial Sequence
  Description of Artificial Sequence: Synthetic oligonucleotide
gccgcccguggccggcgcg

SEQ ID NO: 2719193 - RNA, 19 nt, Artificial Sequence
  Description of Artificial Sequence: Synthetic oligonucleotide
guccuccccugggcggggc

SEQ ID NO: 2719194 - RNA, 19 nt, Artificial Sequence
  Description of Artificial Sequence: Synthetic oligonucleotide
cccugggcggggcggggcc

SEQ ID NO: 2719195 - RNA, 19 nt, Artificial Sequence
  Description of Artificial Sequence: Synthetic oligonucleotide
ggagcgacggggaccugcu

SEQ ID NO: 2719196 - RNA, 19 nt, Artificial Sequence
  Description of Artificial Sequence: Synthetic oligonucleotide
gcuuggugcgagccauggu

SEQ ID NO: 2719197 - RNA, 19 nt, Artificial Sequence
  Description of Artificial Sequence: Synthetic oligonucleotide
ggcggggcggggccagaca

SEQ ID NO: 2719198 - RNA, 19 nt, Artificial Sequence
  Description of Artificial Sequence: Synthetic oligonucleotide
cggagcacagagacccgga

SEQ ID NO: 2719199 - RNA, 19 nt, Artificial Sequence
  Description of Artificial Sequence: Synthetic oligonucleotide
ggccgccuuuauagacgcc

SEQ ID NO: 2719200 - RNA, 19 nt, Artificial Sequence
  Description of Artificial Sequence: Synthetic oligonucleotide
gccuugguagccagcugcu

SEQ ID NO: 2719201 - RNA, 19 nt, Artificial Sequence
  Description of Artificial Sequence: Synthetic oligonucleotide
ugggcggggcggggccaga

SEQ ID NO: 2719202 - RNA, 19 nt, Artificial Sequence
  Description of Artificial Sequence: Synthetic oligonucleotide
cgcgcucuugcgggcagcc

SEQ ID NO: 2719203 - RNA, 19 nt, Artificial Sequence
  Description of Artificial Sequence: Synthetic oligonucleotide
ggaccugcugcgggccgca

SEQ ID NO: 2719204 - RNA, 19 nt, Artificial Sequence
  Description of Artificial Sequence: Synthetic oligonucleotide
ccgccuuuauagacgccgu

SEQ ID NO: 2719205 - RNA, 19 nt, Artificial Sequence
  Description of Artificial Sequence: Synthetic oligonucleotide
ccgcgcugcccagccauug

SEQ ID NO: 2719206 - RNA, 19 nt, Artificial Sequence
  Description of Artificial Sequence: Synthetic oligonucleotide
cgggcccggccauuggcuc

SEQ ID NO: 2719207 - RNA, 19 nt, Artificial Sequence
  Description of Artificial Sequence: Synthetic oligonucleotide
cccagccauuggccgugac

SEQ ID NO: 2719208 - RNA, 19 nt, Artificial Sequence
  Description of Artificial Sequence: Synthetic oligonucleotide
cgcggggccuugccgccgg

SEQ ID NO: 2719209 - RNA, 19 nt, Artificial Sequence
  Description of Artificial Sequence: Synthetic oligonucleotide
cggggccagacacuugaaa

SEQ ID NO: 2719210 - RNA, 19 nt, Artificial Sequence
  Description of Artificial Sequence: Synthetic oligonucleotide
cggggaccugcugcgggcc

SEQ ID NO: 2719211 - RNA, 19 nt, Artificial Sequence
  Description of Artificial Sequence: Synthetic oligonucleotide
gcgcggggccuugccgccg

SEQ ID NO: 2719212 - RNA, 19 nt, Artificial Sequence
  Description of Artificial Sequence: Synthetic oligonucleotide
cgacggggaccugcugcgg

SEQ ID NO: 2719213 - RNA, 19 nt, Artificial Sequence
  Description of Artificial Sequence: Synthetic oligonucleotide
gccgcagucggccgccuuu

SEQ ID NO: 2719214 - RNA, 19 nt, Artificial Sequence
  Description of Artificial Sequence: Synthetic oligonucleotide
ccgcccguggccggcgcgc

SEQ ID NO: 2719215 - RNA, 19 nt, Artificial Sequence
  Description of Artificial Sequence: Synthetic oligonucleotide
gggcggggccagacacuug

SEQ ID NO: 2719216 - RNA, 19 nt, Artificial Sequence
  Description of Artificial Sequence: Synthetic oligonucleotide
ggggcggggccagacacuu

SEQ ID NO: 2719217 - RNA, 19 nt, Artificial Sequence
  Description of Artificial Sequence: Synthetic oligonucleotide
gcgcgcucuugcgggcagc

SEQ ID NO: 2719218 - RNA, 19 nt, Artificial Sequence
  Description of Artificial Sequence: Synthetic oligonucleotide
cccggagcgacggggaccu

SEQ ID NO: 2719219 - RNA, 19 nt, Artificial Sequence
  Description of Artificial Sequence: Synthetic oligonucleotide
gggcggggcggggccagac

SEQ ID NO: 2719220 - RNA, 19 nt, Artificial Sequence
  Description of Artificial Sequence: Synthetic oligonucleotide
ccccugggcggggcggggc

SEQ ID NO: 2719221 - RNA, 19 nt, Artificial Sequence
  Description of Artificial Sequence: Synthetic oligonucleotide
ccgggcccggccauuggcu

SEQ ID NO: 2719222 - RNA, 19 nt, Artificial Sequence
  Description of Artificial Sequence: Synthetic oligonucleotide
cgggccgcagucggccgcc

SEQ ID NO: 2719223 - RNA, 19 nt, Artificial Sequence
  Description of Artificial Sequence: Synthetic oligonucleotide
gcgagccaugguggacaga

SEQ ID NO: 2719224 - RNA, 19 nt, Artificial Sequence
  Description of Artificial Sequence: Synthetic oligonucleotide
cgggcagccuugguagcca

SEQ ID NO: 2719225 - RNA, 19 nt, Artificial Sequence
  Description of Artificial Sequence: Synthetic oligonucleotide
cguccuccccugggcgggg

SEQ ID NO: 2719226 - RNA, 19 nt, Artificial Sequence
  Description of Artificial Sequence: Synthetic oligonucleotide
gcggggccagacacuugaa

SEQ ID NO: 2719227 - RNA, 19 nt, Artificial Sequence
  Description of Artificial Sequence: Synthetic oligonucleotide
gccuugccgccgguggacu

SEQ ID NO: 2719228 - RNA, 19 nt, Artificial Sequence
  Description of Artificial Sequence: Synthetic oligonucleotide
gcccguggccggcgcgcuc

SEQ ID NO: 2719229 - RNA, 19 nt, Artificial Sequence
  Description of Artificial Sequence: Synthetic oligonucleotide
gcccagccauuggccguga

SEQ ID NO: 2719230 - RNA, 19 nt, Artificial Sequence
  Description of Artificial Sequence: Synthetic oligonucleotide
ccgcagucggccgccuuua

SEQ ID NO: 2719231 - RNA, 19 nt, Artificial Sequence
  Description of Artificial Sequence: Synthetic oligonucleotide
cccguggccggcgcgcucu

SEQ ID NO: 2719232 - RNA, 19 nt, Artificial Sequence
  Description of Artificial Sequence: Synthetic oligonucleotide
ccuugguagccagcugcuu

SEQ ID NO: 2719233 - RNA, 19 nt, Artificial Sequence
  Description of Artificial Sequence: Synthetic oligonucleotide
ccuugccgccgguggacuu

SEQ ID NO: 2719234 - RNA, 19 nt, Artificial Sequence
  Description of Artificial Sequence: Synthetic oligonucleotide
cguggccggcgcgcucuug

SEQ ID NO: 2719235 - RNA, 19 nt, Artificial Sequence
  Description of Artificial Sequence: Synthetic oligonucleotide
ggccgcagucggccgccuu

SEQ ID NO: 2719236 - RNA, 19 nt, Artificial Sequence
  Description of Artificial Sequence: Synthetic oligonucleotide
cggggcggggccagacacu

SEQ ID NO: 2719237 - RNA, 19 nt, Artificial Sequence
  Description of Artificial Sequence: Synthetic oligonucleotide
cggcgcgcucuugcgggca

SEQ ID NO: 2719238 - RNA, 19 nt, Artificial Sequence
  Description of Artificial Sequence: Synthetic oligonucleotide
ccggagcgacggggaccug

SEQ ID NO: 2719239 - RNA, 19 nt, Artificial Sequence
  Description of Artificial Sequence: Synthetic oligonucleotide
ccggaccgggcccggccau

SEQ ID NO: 2719240 - RNA, 19 nt, Artificial Sequence
  Description of Artificial Sequence: Synthetic oligonucleotide
cccgcgcugcccagccauu

SEQ ID NO: 2719241 - RNA, 19 nt, Artificial Sequence
  Description of Artificial Sequence: Synthetic oligonucleotide
gggccgcagucggccgccu

SEQ ID NO: 2719242 - RNA, 19 nt, Artificial Sequence
  Description of Artificial Sequence: Synthetic oligonucleotide
cgcagucggccgccuuuau

SEQ ID NO: 2719243 - RNA, 19 nt, Artificial Sequence
  Description of Artificial Sequence: Synthetic oligonucleotide
ccguggccggcgcgcucuu

SEQ ID NO: 2719244 - RNA, 19 nt, Artificial Sequence
  Description of Artificial Sequence: Synthetic oligonucleotide
cgcccguggccggcgcgcu

SEQ ID NO: 2719245 - RNA, 19 nt, Artificial Sequence
  Description of Artificial Sequence: Synthetic oligonucleotide
aacuucacugaccuuuucc

SEQ ID NO: 2719246 - RNA, 19 nt, Artificial Sequence
  Description of Artificial Sequence: Synthetic oligonucleotide
uguuaaacuucacugaccu

SEQ ID NO: 2719247 - RNA, 19 nt, Artificial Sequence
  Description of Artificial Sequence: Synthetic oligonucleotide
uguggaagaggcaauaggc

SEQ ID NO: 2719248 - RNA, 19 nt, Artificial Sequence
  Description of Artificial Sequence: Synthetic oligonucleotide
acuucacugaccuuuuccc

SEQ ID NO: 2719249 - RNA, 19 nt, Artificial Sequence
  Description of Artificial Sequence: Synthetic oligonucleotide
uggaaucucauccagguga

SEQ ID NO: 2719250 - RNA, 19 nt, Artificial Sequence
  Description of Artificial Sequence: Synthetic oligonucleotide
gaggcaauaggcuuagggg

SEQ ID NO: 2719251 - RNA, 19 nt, Artificial Sequence
  Description of Artificial Sequence: Synthetic oligonucleotide
uggacucuggcuaagagca

SEQ ID NO: 2719252 - RNA, 19 nt, Artificial Sequence
  Description of Artificial Sequence: Synthetic oligonucleotide
ugaagcuuagccugaauag

SEQ ID NO: 2719253 - RNA, 19 nt, Artificial Sequence
  Description of Artificial Sequence: Synthetic oligonucleotide
aaucucauccaggugauag

SEQ ID NO: 2719254 - RNA, 19 nt, Artificial Sequence
  Description of Artificial Sequence: Synthetic oligonucleotide
agauucccaagacagcacc

SEQ ID NO: 2719255 - RNA, 19 nt, Artificial Sequence
  Description of Artificial Sequence: Synthetic oligonucleotide
agaggcaauaggcuuaggg

SEQ ID NO: 2719256 - RNA, 19 nt, Artificial Sequence
  Description of Artificial Sequence: Synthetic oligonucleotide
aguccuccaaacuacacag

SEQ ID NO: 2719257 - RNA, 19 nt, Artificial Sequence
  Description of Artificial Sequence: Synthetic oligonucleotide
uccuccaaacuacacagag

SEQ ID NO: 2719258 - RNA, 19 nt, Artificial Sequence
  Description of Artificial Sequence: Synthetic oligonucleotide
uacaggaagauucccaaga

SEQ ID NO: 2719259 - RNA, 19 nt, Artificial Sequence
  Description of Artificial Sequence: Synthetic oligonucleotide
aguauagcccuuguuaaac

SEQ ID NO: 2719260 - RNA, 19 nt, Artificial Sequence
  Description of Artificial Sequence: Synthetic oligonucleotide
cuggcuaagagcaguauag

SEQ ID NO: 2719261 - RNA, 19 nt, Artificial Sequence
  Description of Artificial Sequence: Synthetic oligonucleotide
uuaaacuucacugaccuuu

SEQ ID NO: 2719262 - RNA, 19 nt, Artificial Sequence
  Description of Artificial Sequence: Synthetic oligonucleotide
cuuguuaaacuucacugac

SEQ ID NO: 2719263 - RNA, 19 nt, Artificial Sequence
  Description of Artificial Sequence: Synthetic oligonucleotide
agagucaagggacaccagg

SEQ ID NO: 2719264 - RNA, 19 nt, Artificial Sequence
  Description of Artificial Sequence: Synthetic oligonucleotide
uuuucaucuggacucuggc

SEQ ID NO: 2719265 - RNA, 19 nt, Artificial Sequence
  Description of Artificial Sequence: Synthetic oligonucleotide
ucuggaaucucauccaggu

SEQ ID NO: 2719266 - RNA, 19 nt, Artificial Sequence
  Description of Artificial Sequence: Synthetic oligonucleotide
agugccaggauaguccucc

SEQ ID NO: 2719267 - RNA, 19 nt, Artificial Sequence
  Description of Artificial Sequence: Synthetic oligonucleotide
acaggaagauucccaagac

SEQ ID NO: 2719268 - RNA, 19 nt, Artificial Sequence
  Description of Artificial Sequence: Synthetic oligonucleotide
acuacuggaggguacagga

SEQ ID NO: 2719269 - RNA, 19 nt, Artificial Sequence
  Description of Artificial Sequence: Synthetic oligonucleotide
ucccugaagaaucggggcg

SEQ ID NO: 2719270 - RNA, 19 nt, Artificial Sequence
  Description of Artificial Sequence: Synthetic oligonucleotide
uuguuaaacuucacugacc

SEQ ID NO: 2719271 - RNA, 19 nt, Artificial Sequence
  Description of Artificial Sequence: Synthetic oligonucleotide
auguggaagaggcaauagg

SEQ ID NO: 2719272 - RNA, 19 nt, Artificial Sequence
  Description of Artificial Sequence: Synthetic oligonucleotide
uucaucuggacucuggcua

SEQ ID NO: 2719273 - RNA, 19 nt, Artificial Sequence
  Description of Artificial Sequence: Synthetic oligonucleotide
aaaaccauccuggagggau

SEQ ID NO: 2719274 - RNA, 19 nt, Artificial Sequence
  Description of Artificial Sequence: Synthetic oligonucleotide
gaagaaucggggcgguucg

SEQ ID NO: 2719275 - RNA, 19 nt, Artificial Sequence
  Description of Artificial Sequence: Synthetic oligonucleotide
ugaauagaaggugcgcgcg

SEQ ID NO: 2719276 - RNA, 19 nt, Artificial Sequence
  Description of Artificial Sequence: Synthetic oligonucleotide
ggauaugacuacuggaggg

SEQ ID NO: 2719277 - RNA, 19 nt, Artificial Sequence
  Description of Artificial Sequence: Synthetic oligonucleotide
uuagccugaauagaaggug

SEQ ID NO: 2719278 - RNA, 19 nt, Artificial Sequence
  Description of Artificial Sequence: Synthetic oligonucleotide
aauagaaggugcgcgcguc

SEQ ID NO: 2719279 - RNA, 19 nt, Artificial Sequence
  Description of Artificial Sequence: Synthetic oligonucleotide
uggugcucgccuuuaaucc

SEQ ID NO: 2719280 - RNA, 19 nt, Artificial Sequence
  Description of Artificial Sequence: Synthetic oligonucleotide
uagccugaauagaaggugc

SEQ ID NO: 2719281 - RNA, 19 nt, Artificial Sequence
  Description of Artificial Sequence: Synthetic oligonucleotide
agcaagagcauguggaaga

SEQ ID NO: 2719282 - RNA, 19 nt, Artificial Sequence
  Description of Artificial Sequence: Synthetic oligonucleotide
ugcucugcagagucaaggg

SEQ ID NO: 2719283 - RNA, 19 nt, Artificial Sequence
  Description of Artificial Sequence: Synthetic oligonucleotide
gaagauucccaagacagca

SEQ ID NO: 2719284 - RNA, 19 nt, Artificial Sequence
  Description of Artificial Sequence: Synthetic oligonucleotide
agcaguauagcccuuguua

SEQ ID NO: 2719285 - RNA, 19 nt, Artificial Sequence
  Description of Artificial Sequence: Synthetic oligonucleotide
agggauaugacuacuggag

SEQ ID NO: 2719286 - RNA, 19 nt, Artificial Sequence
  Description of Artificial Sequence: Synthetic oligonucleotide
auccaggugauagccaucc

SEQ ID NO: 2719287 - RNA, 19 nt, Artificial Sequence
  Description of Artificial Sequence: Synthetic oligonucleotide
uaguccuccaaacuacaca

SEQ ID NO: 2719288 - RNA, 19 nt, Artificial Sequence
  Description of Artificial Sequence: Synthetic oligonucleotide
ucuccauagcggcuggcgg

SEQ ID NO: 2719289 - RNA, 19 nt, Artificial Sequence
  Description of Artificial Sequence: Synthetic oligonucleotide
gggaaugagguccaggucc

SEQ ID NO: 2719290 - RNA, 19 nt, Artificial Sequence
  Description of Artificial Sequence: Synthetic oligonucleotide
ucuggacucuggcuaagag

SEQ ID NO: 2719291 - RNA, 19 nt, Artificial Sequence
  Description of Artificial Sequence: Synthetic oligonucleotide
ucaucuggaaucucaucca

SEQ ID NO: 2719292 - RNA, 19 nt, Artificial Sequence
  Description of Artificial Sequence: Synthetic oligonucleotide
cugaauagaaggugcgcgc

SEQ ID NO: 2719293 - RNA, 19 nt, Artificial Sequence
  Description of Artificial Sequence: Synthetic oligonucleotide
cuccaaacuacacagagaa

SEQ ID NO: 2719294 - RNA, 19 nt, Artificial Sequence
  Description of Artificial Sequence: Synthetic oligonucleotide
cucugcagagucaagggac

SEQ ID NO: 2719295 - RNA, 19 nt, Artificial Sequence
  Description of Artificial Sequence: Synthetic oligonucleotide
accuuuucccugaagaauc

SEQ ID NO: 2719296 - RNA, 19 nt, Artificial Sequence
  Description of Artificial Sequence: Synthetic oligonucleotide
ucccaagacagcaccagca

SEQ ID NO: 2719297 - RNA, 19 nt, Artificial Sequence
  Description of Artificial Sequence: Synthetic oligonucleotide
uccuggagggauaugacua

SEQ ID NO: 2719298 - RNA, 19 nt, Artificial Sequence
  Description of Artificial Sequence: Synthetic oligonucleotide
gcuuagccugaauagaagg

SEQ ID NO: 2719299 - RNA, 19 nt, Artificial Sequence
  Description of Artificial Sequence: Synthetic oligonucleotide
ccaaacuacacagagaaac

SEQ ID NO: 2719300 - RNA, 19 nt, Artificial Sequence
  Description of Artificial Sequence: Synthetic oligonucleotide
aaacuucacugaccuuuuc

SEQ ID NO: 2719301 - RNA, 19 nt, Artificial Sequence
  Description of Artificial Sequence: Synthetic oligonucleotide
ugcuucugaagcuuagccu

SEQ ID NO: 2719302 - RNA, 19 nt, Artificial Sequence
  Description of Artificial Sequence: Synthetic oligonucleotide
aagauucccaagacagcac

SEQ ID NO: 2719303 - RNA, 19 nt, Artificial Sequence
  Description of Artificial Sequence: Synthetic oligonucleotide
gcuucugaagcuuagccug

SEQ ID NO: 2719304 - RNA, 19 nt, Artificial Sequence
  Description of Artificial Sequence: Synthetic oligonucleotide
ucggcaaggccccagcaug

SEQ ID NO: 2719305 - RNA, 19 nt, Artificial Sequence
  Description of Artificial Sequence: Synthetic oligonucleotide
ucugcagagucaagggaca

SEQ ID NO: 2719306 - RNA, 19 nt, Artificial Sequence
  Description of Artificial Sequence: Synthetic oligonucleotide
cuggacucuggcuaagagc

SEQ ID NO: 2719307 - RNA, 19 nt, Artificial Sequence
  Description of Artificial Sequence: Synthetic oligonucleotide
uagcccuuguuaaacuuca

SEQ ID NO: 2719308 - RNA, 19 nt, Artificial Sequence
  Description of Artificial Sequence: Synthetic oligonucleotide
aggauaguccuccaaacua

SEQ ID NO: 2719309 - RNA, 19 nt, Artificial Sequence
  Description of Artificial Sequence: Synthetic oligonucleotide
uucccugaagaaucggggc

SEQ ID NO: 2719310 - RNA, 19 nt, Artificial Sequence
  Description of Artificial Sequence: Synthetic oligonucleotide
uaugacuacuggaggguac

SEQ ID NO: 2719311 - RNA, 19 nt, Artificial Sequence
  Description of Artificial Sequence: Synthetic oligonucleotide
accagguuuucaucuggac

SEQ ID NO: 2719312 - RNA, 19 nt, Artificial Sequence
  Description of Artificial Sequence: Synthetic oligonucleotide
caagacagcaccagcagca

SEQ ID NO: 2719313 - RNA, 19 nt, Artificial Sequence
  Description of Artificial Sequence: Synthetic oligonucleotide
cuuucuccguagaacggcc

SEQ ID NO: 2719314 - RNA, 19 nt, Artificial Sequence
  Description of Artificial Sequence: Synthetic oligonucleotide
ucuggcuaagagcaguaua

SEQ ID NO: 2719315 - RNA, 19 nt, Artificial Sequence
  Description of Artificial Sequence: Synthetic oligonucleotide
uggagggauaugacuacug

SEQ ID NO: 2719316 - RNA, 19 nt, Artificial Sequence
  Description of Artificial Sequence: Synthetic oligonucleotide
ucaagggacaccagguuuu

SEQ ID NO: 2719317 - RNA, 19 nt, Artificial Sequence
  Description of Artificial Sequence: Synthetic oligonucleotide
ucaccugcucugcagaguc

SEQ ID NO: 2719318 - RNA, 19 nt, Artificial Sequence
  Description of Artificial Sequence: Synthetic oligonucleotide
gugcuucugaagcuuagcc

SEQ ID NO: 2719319 - RNA, 19 nt, Artificial Sequence
  Description of Artificial Sequence: Synthetic oligonucleotide
ucauccaggugauagccau

SEQ ID NO: 2719320 - RNA, 19 nt, Artificial Sequence
  Description of Artificial Sequence: Synthetic oligonucleotide
uggaagaggcaauaggcuu

SEQ ID NO: 2719321 - RNA, 19 nt, Artificial Sequence
  Description of Artificial Sequence: Synthetic oligonucleotide
agugagugccaggauaguc

SEQ ID NO: 2719322 - RNA, 19 nt, Artificial Sequence
  Description of Artificial Sequence: Synthetic oligonucleotide
ucaucaucuggaaucucau

SEQ ID NO: 2719323 - RNA, 19 nt, Artificial Sequence
  Description of Artificial Sequence: Synthetic oligonucleotide
ggagggauaugacuacugg

SEQ ID NO: 2719324 - RNA, 19 nt, Artificial Sequence
  Description of Artificial Sequence: Synthetic oligonucleotide
uccccgcuucuccauagcg

SEQ ID NO: 2719325 - RNA, 19 nt, Artificial Sequence
  Description of Artificial Sequence: Synthetic oligonucleotide
gagggauaugacuacugga

SEQ ID NO: 2719326 - RNA, 19 nt, Artificial Sequence
  Description of Artificial Sequence: Synthetic oligonucleotide
gggauaugacuacuggagg

SEQ ID NO: 2719327 - RNA, 19 nt, Artificial Sequence
  Description of Artificial Sequence: Synthetic oligonucleotide
ugaccuuuucccugaagaa

SEQ ID NO: 2719328 - RNA, 19 nt, Artificial Sequence
  Description of Artificial Sequence: Synthetic oligonucleotide
uucuccauagcggcuggcg

SEQ ID NO: 2719329 - RNA, 19 nt, Artificial Sequence
  Description of Artificial Sequence: Synthetic oligonucleotide
cugaccuuuucccugaaga

SEQ ID NO: 2719330 - RNA, 19 nt, Artificial Sequence
  Description of Artificial Sequence: Synthetic oligonucleotide
ugagugccaggauaguccu

SEQ ID NO: 2719331 - RNA, 19 nt, Artificial Sequence
  Description of Artificial Sequence: Synthetic oligonucleotide
ugaagaaucggggcgguuc

SEQ ID NO: 2719332 - RNA, 19 nt, Artificial Sequence
  Description of Artificial Sequence: Synthetic oligonucleotide
cccuuguuaaacuucacug

SEQ ID NO: 2719333 - RNA, 19 nt, Artificial Sequence
  Description of Artificial Sequence: Synthetic oligonucleotide
auagcccuuguuaaacuuc

SEQ ID NO: 2719334 - RNA, 19 nt, Artificial Sequence
  Description of Artificial Sequence: Synthetic oligonucleotide
gaagcuuagccugaauaga

SEQ ID NO: 2719335 - RNA, 19 nt, Artificial Sequence
  Description of Artificial Sequence: Synthetic oligonucleotide
gugagugccaggauagucc

SEQ ID NO: 2719336 - RNA, 19 nt, Artificial Sequence
  Description of Artificial Sequence: Synthetic oligonucleotide
cuccauagcggcuggcggg

SEQ ID NO: 2719337 - RNA, 19 nt, Artificial Sequence
  Description of Artificial Sequence: Synthetic oligonucleotide
gaagaggcaauaggcuuag

SEQ ID NO: 2719338 - RNA, 19 nt, Artificial Sequence
  Description of Artificial Sequence: Synthetic oligonucleotide
uauagcccuuguuaaacuu

SEQ ID NO: 2719339 - RNA, 19 nt, Artificial Sequence
  Description of Artificial Sequence: Synthetic oligonucleotide
uccugguucaccugcucug

SEQ ID NO: 2719340 - RNA, 19 nt, Artificial Sequence
  Description of Artificial Sequence: Synthetic oligonucleotide
aagcuuagccugaauagaa

SEQ ID NO: 2719341 - RNA, 19 nt, Artificial Sequence
  Description of Artificial Sequence: Synthetic oligonucleotide
aagagcaguauagcccuug

SEQ ID NO: 2719342 - RNA, 19 nt, Artificial Sequence
  Description of Artificial Sequence: Synthetic oligonucleotide
gucccggugcuucugaagc

SEQ ID NO: 2719343 - RNA, 19 nt, Artificial Sequence
  Description of Artificial Sequence: Synthetic oligonucleotide
caucuggaaucucauccag

SEQ ID NO: 2719344 - RNA, 19 nt, Artificial Sequence
  Description of Artificial Sequence: Synthetic oligonucleotide
ucaccauguaugguccccg

SEQ ID NO: 2719345 - RNA, 19 nt, Artificial Sequence
  Description of Artificial Sequence: Synthetic oligonucleotide
uaaacuucacugaccuuuu

SEQ ID NO: 2719346 - RNA, 19 nt, Artificial Sequence
  Description of Artificial Sequence: Synthetic oligonucleotide
gcccuuucuccguagaacg

SEQ ID NO: 2719347 - RNA, 19 nt, Artificial Sequence
  Description of Artificial Sequence: Synthetic oligonucleotide
agaaucggggcgguucggc

SEQ ID NO: 2719348 - RNA, 19 nt, Artificial Sequence
  Description of Artificial Sequence: Synthetic oligonucleotide
ugguucaccugcucugcag

SEQ ID NO: 2719349 - RNA, 19 nt, Artificial Sequence
  Description of Artificial Sequence: Synthetic oligonucleotide
ucacugaccuuuucccuga

SEQ ID NO: 2719350 - RNA, 19 nt, Artificial Sequence
  Description of Artificial Sequence: Synthetic oligonucleotide
gacuacuggaggguacagg

SEQ ID NO: 2719351 - RNA, 19 nt, Artificial Sequence
  Description of Artificial Sequence: Synthetic oligonucleotide
guacaggaagauucccaag

SEQ ID NO: 2719352 - RNA, 19 nt, Artificial Sequence
  Description of Artificial Sequence: Synthetic oligonucleotide
auaguccuccaaacuacac

SEQ ID NO: 2719353 - RNA, 19 nt, Artificial Sequence
  Description of Artificial Sequence: Synthetic oligonucleotide
aggguacaggaagauuccc

SEQ ID NO: 2719354 - RNA, 19 nt, Artificial Sequence
  Description of Artificial Sequence: Synthetic oligonucleotide
ggaggguacaggaagauuc

SEQ ID NO: 2719355 - RNA, 19 nt, Artificial Sequence
  Description of Artificial Sequence: Synthetic oligonucleotide
cugcucugcagagucaagg

SEQ ID NO: 2719356 - RNA, 19 nt, Artificial Sequence
  Description of Artificial Sequence: Synthetic oligonucleotide
auccuggagggauaugacu

SEQ ID NO: 2719357 - RNA, 19 nt, Artificial Sequence
  Description of Artificial Sequence: Synthetic oligonucleotide
auucccaagacagcaccag

SEQ ID NO: 2719358 - RNA, 19 nt, Artificial Sequence
  Description of Artificial Sequence: Synthetic oligonucleotide
uaugguccccgcuucucca

SEQ ID NO: 2719359 - RNA, 19 nt, Artificial Sequence
  Description of Artificial Sequence: Synthetic oligonucleotide
agggacaccagguuuucau

SEQ ID NO: 2719360 - RNA, 19 nt, Artificial Sequence
  Description of Artificial Sequence: Synthetic oligonucleotide
ucaucuggacucuggcuaa

SEQ ID NO: 2719361 - RNA, 19 nt, Artificial Sequence
  Description of Artificial Sequence: Synthetic oligonucleotide
cucgccuuuaaucccagca

SEQ ID NO: 2719362 - RNA, 19 nt, Artificial Sequence
  Description of Artificial Sequence: Synthetic oligonucleotide
ccugaauagaaggugcgcg

SEQ ID NO: 2719363 - RNA, 19 nt, Artificial Sequence
  Description of Artificial Sequence: Synthetic oligonucleotide
aaucggggcgguucggcaa

SEQ ID NO: 2719364 - RNA, 19 nt, Artificial Sequence
  Description of Artificial Sequence: Synthetic oligonucleotide
guggugcucgccuuuaauc

SEQ ID NO: 2719365 - RNA, 19 nt, Artificial Sequence
  Description of Artificial Sequence: Synthetic oligonucleotide
guaugguccccgcuucucc

SEQ ID NO: 2719366 - RNA, 19 nt, Artificial Sequence
  Description of Artificial Sequence: Synthetic oligonucleotide
uccucaucaucuggaaucu

SEQ ID NO: 2719367 - RNA, 19 nt, Artificial Sequence
  Description of Artificial Sequence: Synthetic oligonucleotide
uggcuaagagcaguauagc

SEQ ID NO: 2719368 - RNA, 19 nt, Artificial Sequence
  Description of Artificial Sequence: Synthetic oligonucleotide
cauguggaagaggcaauag

SEQ ID NO: 2719369 - RNA, 19 nt, Artificial Sequence
  Description of Artificial Sequence: Synthetic oligonucleotide
aucuggaaucucauccagg

SEQ ID NO: 2719370 - RNA, 19 nt, Artificial Sequence
  Description of Artificial Sequence: Synthetic oligonucleotide
cauguaugguccccgcuuc

SEQ ID NO: 2719371 - RNA, 19 nt, Artificial Sequence
  Description of Artificial Sequence: Synthetic oligonucleotide
uuucuccguagaacggccu

SEQ ID NO: 2719372 - RNA, 19 nt, Artificial Sequence
  Description of Artificial Sequence: Synthetic oligonucleotide
gauaguccuccaaacuaca

SEQ ID NO: 2719373 - RNA, 19 nt, Artificial Sequence
  Description of Artificial Sequence: Synthetic oligonucleotide
uagccauccugcagcagcu

SEQ ID NO: 2719374 - RNA, 19 nt, Artificial Sequence
  Description of Artificial Sequence: Synthetic oligonucleotide
cuuuucccugaagaaucgg

SEQ ID NO: 2719375 - RNA, 19 nt, Artificial Sequence
  Description of Artificial Sequence: Synthetic oligonucleotide
guucaccugcucugcagag

SEQ ID NO: 2719376 - RNA, 19 nt, Artificial Sequence
  Description of Artificial Sequence: Synthetic oligonucleotide
cugaagcuuagccugaaua

SEQ ID NO: 2719377 - RNA, 19 nt, Artificial Sequence
  Description of Artificial Sequence: Synthetic oligonucleotide
agccugaauagaaggugcg

SEQ ID NO: 2719378 - RNA, 19 nt, Artificial Sequence
  Description of Artificial Sequence: Synthetic oligonucleotide
gagcauguggaagaggcaa

SEQ ID NO: 2719379 - RNA, 19 nt, Artificial Sequence
  Description of Artificial Sequence: Synthetic oligonucleotide
uccaaacuacacagagaaa

SEQ ID NO: 2719380 - RNA, 19 nt, Artificial Sequence
  Description of Artificial Sequence: Synthetic oligonucleotide
agagcaguauagcccuugu

SEQ ID NO: 2719381 - RNA, 19 nt, Artificial Sequence
  Description of Artificial Sequence: Synthetic oligonucleotide
cauccuggagggauaugac

SEQ ID NO: 2719382 - RNA, 19 nt, Artificial Sequence
  Description of Artificial Sequence: Synthetic oligonucleotide
ugcagagucaagggacacc

SEQ ID NO: 2719383 - RNA, 19 nt, Artificial Sequence
  Description of Artificial Sequence: Synthetic oligonucleotide
ugcccuuucuccguagaac

SEQ ID NO: 2719384 - RNA, 19 nt, Artificial Sequence
  Description of Artificial Sequence: Synthetic oligonucleotide
aggcugguggaucucugug

SEQ ID NO: 2719385 - RNA, 19 nt, Artificial Sequence
  Description of Artificial Sequence: Synthetic oligonucleotide
gauaugacuacuggagggu

SEQ ID NO: 2719386 - RNA, 19 nt, Artificial Sequence
  Description of Artificial Sequence: Synthetic oligonucleotide
acugaccuuuucccugaag

SEQ ID NO: 2719387 - RNA, 19 nt, Artificial Sequence
  Description of Artificial Sequence: Synthetic oligonucleotide
aagaaucggggcgguucgg

SEQ ID NO: 2719388 - RNA, 19 nt, Artificial Sequence
  Description of Artificial Sequence: Synthetic oligonucleotide
auagaaggugcgcgcguca

SEQ ID NO: 2719389 - RNA, 19 nt, Artificial Sequence
  Description of Artificial Sequence: Synthetic oligonucleotide
agcuuagccugaauagaag

SEQ ID NO: 2719390 - RNA, 19 nt, Artificial Sequence
  Description of Artificial Sequence: Synthetic oligonucleotide
uucggcaaggccccagcau

SEQ ID NO: 2719391 - RNA, 19 nt, Artificial Sequence
  Description of Artificial Sequence: Synthetic oligonucleotide
caucaucuggaaucucauc

SEQ ID NO: 2719392 - RNA, 19 nt, Artificial Sequence
  Description of Artificial Sequence: Synthetic oligonucleotide
gguacaggaagauucccaa

SEQ ID NO: 2719393 - RNA, 19 nt, Artificial Sequence
  Description of Artificial Sequence: Synthetic oligonucleotide
cccagcaugcccuuucucc

SEQ ID NO: 2719394 - RNA, 19 nt, Artificial Sequence
  Description of Artificial Sequence: Synthetic oligonucleotide
cuuagccugaauagaaggu

SEQ ID NO: 2719395 - RNA, 19 nt, Artificial Sequence
  Description of Artificial Sequence: Synthetic oligonucleotide
guagaacggccuuggccag

SEQ ID NO: 2719396 - RNA, 19 nt, Artificial Sequence
  Description of Artificial Sequence: Synthetic oligonucleotide
ccagcaugcccuuucuccg

SEQ ID NO: 2719397 - RNA, 19 nt, Artificial Sequence
  Description of Artificial Sequence: Synthetic oligonucleotide
ucuccguagaacggccuug

SEQ ID NO: 2719398 - RNA, 19 nt, Artificial Sequence
  Description of Artificial Sequence: Synthetic oligonucleotide
augacuacuggaggguaca

SEQ ID NO: 2719399 - RNA, 19 nt, Artificial Sequence
  Description of Artificial Sequence: Synthetic oligonucleotide
ggauaguccuccaaacuac

SEQ ID NO: 2719400 - RNA, 19 nt, Artificial Sequence
  Description of Artificial Sequence: Synthetic oligonucleotide
agucaagggacaccagguu

SEQ ID NO: 2719401 - RNA, 19 nt, Artificial Sequence
  Description of Artificial Sequence: Synthetic oligonucleotide
ucugaagcuuagccugaau

SEQ ID NO: 2719402 - RNA, 19 nt, Artificial Sequence
  Description of Artificial Sequence: Synthetic oligonucleotide
ggugcucgccuuuaauccc

SEQ ID NO: 2719403 - RNA, 19 nt, Artificial Sequence
  Description of Artificial Sequence: Synthetic oligonucleotide
guucccgagccggaggccg

SEQ ID NO: 2719404 - RNA, 19 nt, Artificial Sequence
  Description of Artificial Sequence: Synthetic oligonucleotide
gcaguauagcccuuguuaa

SEQ ID NO: 2719405 - RNA, 19 nt, Artificial Sequence
  Description of Artificial Sequence: Synthetic oligonucleotide
cagcaagagcauguggaag

SEQ ID NO: 2719406 - RNA, 19 nt, Artificial Sequence
  Description of Artificial Sequence: Synthetic oligonucleotide
caggaagauucccaagaca

SEQ ID NO: 2719407 - RNA, 19 nt, Artificial Sequence
  Description of Artificial Sequence: Synthetic oligonucleotide
ccuuuucccugaagaaucg

SEQ ID NO: 2719408 - RNA, 19 nt, Artificial Sequence
  Description of Artificial Sequence: Synthetic oligonucleotide
uccauagcggcuggcgggc

SEQ ID NO: 2719409 - RNA, 19 nt, Artificial Sequence
  Description of Artificial Sequence: Synthetic oligonucleotide
ccuuguuaaacuucacuga

SEQ ID NO: 2719410 - RNA, 19 nt, Artificial Sequence
  Description of Artificial Sequence: Synthetic oligonucleotide
uggcgggcguucccgagcc

SEQ ID NO: 2719411 - RNA, 19 nt, Artificial Sequence
  Description of Artificial Sequence: Synthetic oligonucleotide
cuggaaucucauccaggug

SEQ ID NO: 2719412 - RNA, 19 nt, Artificial Sequence
  Description of Artificial Sequence: Synthetic oligonucleotide
ugacuacuggaggguacag

SEQ ID NO: 2719413 - RNA, 19 nt, Artificial Sequence
  Description of Artificial Sequence: Synthetic oligonucleotide
aggugauagccauccugca

SEQ ID NO: 2719414 - RNA, 19 nt, Artificial Sequence
  Description of Artificial Sequence: Synthetic oligonucleotide
uucuccguagaacggccuu

SEQ ID NO: 2719415 - RNA, 19 nt, Artificial Sequence
  Description of Artificial Sequence: Synthetic oligonucleotide
aucggggcgguucggcaag

SEQ ID NO: 2719416 - RNA, 19 nt, Artificial Sequence
  Description of Artificial Sequence: Synthetic oligonucleotide
cuccguagaacggccuugg

SEQ ID NO: 2719417 - RNA, 19 nt, Artificial Sequence
  Description of Artificial Sequence: Synthetic oligonucleotide
gauucccaagacagcacca

SEQ ID NO: 2719418 - RNA, 19 nt, Artificial Sequence
  Description of Artificial Sequence: Synthetic oligonucleotide
accauguaugguccccgcu

SEQ ID NO: 2719419 - RNA, 19 nt, Artificial Sequence
  Description of Artificial Sequence: Synthetic oligonucleotide
ugcucgccuuuaaucccag

SEQ ID NO: 2719420 - RNA, 19 nt, Artificial Sequence
  Description of Artificial Sequence: Synthetic oligonucleotide
cguagaacggccuuggcca

SEQ ID NO: 2719421 - RNA, 19 nt, Artificial Sequence
  Description of Artificial Sequence: Synthetic oligonucleotide
gaaucggggcgguucggca

SEQ ID NO: 2719422 - RNA, 19 nt, Artificial Sequence
  Description of Artificial Sequence: Synthetic oligonucleotide
gucaccauguauggucccc

SEQ ID NO: 2719423 - RNA, 19 nt, Artificial Sequence
  Description of Artificial Sequence: Synthetic oligonucleotide
uccguagaacggccuuggc

SEQ ID NO: 2719424 - RNA, 19 nt, Artificial Sequence
  Description of Artificial Sequence: Synthetic oligonucleotide
cugccggcucacauccugg

SEQ ID NO: 2719425 - RNA, 19 nt, Artificial Sequence
  Description of Artificial Sequence: Synthetic oligonucleotide
uguaugguccccgcuucuc

SEQ ID NO: 2719426 - RNA, 19 nt, Artificial Sequence
  Description of Artificial Sequence: Synthetic oligonucleotide
ccaggauaguccuccaaac

SEQ ID NO: 2719427 - RNA, 19 nt, Artificial Sequence
  Description of Artificial Sequence: Synthetic oligonucleotide
augagguccagguccucau

SEQ ID NO: 2719428 - RNA, 19 nt, Artificial Sequence
  Description of Artificial Sequence: Synthetic oligonucleotide
cccgcuucuccauagcggc

SEQ ID NO: 2719429 - RNA, 19 nt, Artificial Sequence
  Description of Artificial Sequence: Synthetic oligonucleotide
acuggaggguacaggaaga

SEQ ID NO: 2719430 - RNA, 19 nt, Artificial Sequence
  Description of Artificial Sequence: Synthetic oligonucleotide
uagaacggccuuggccagg

SEQ ID NO: 2719431 - RNA, 19 nt, Artificial Sequence
  Description of Artificial Sequence: Synthetic oligonucleotide
cuucugaagcuuagccuga

SEQ ID NO: 2719432 - RNA, 19 nt, Artificial Sequence
  Description of Artificial Sequence: Synthetic oligonucleotide
caccauguaugguccccgc

SEQ ID NO: 2719433 - RNA, 19 nt, Artificial Sequence
  Description of Artificial Sequence: Synthetic oligonucleotide
ggaagauucccaagacagc

SEQ ID NO: 2719434 - RNA, 19 nt, Artificial Sequence
  Description of Artificial Sequence: Synthetic oligonucleotide
auguaugguccccgcuucu

SEQ ID NO: 2719435 - RNA, 19 nt, Artificial Sequence
  Description of Artificial Sequence: Synthetic oligonucleotide
ccaggugauagccauccug

SEQ ID NO: 2719436 - RNA, 19 nt, Artificial Sequence
  Description of Artificial Sequence: Synthetic oligonucleotide
ccguagaacggccuuggcc

SEQ ID NO: 2719437 - RNA, 19 nt, Artificial Sequence
  Description of Artificial Sequence: Synthetic oligonucleotide
gaauagaaggugcgcgcgu

SEQ ID NO: 2719438 - RNA, 19 nt, Artificial Sequence
  Description of Artificial Sequence: Synthetic oligonucleotide
aaccauccuggagggauau

SEQ ID NO: 2719439 - RNA, 19 nt, Artificial Sequence
  Description of Artificial Sequence: Synthetic oligonucleotide
uagaaggugcgcgcgucac

SEQ ID NO: 2719440 - RNA, 19 nt, Artificial Sequence
  Description of Artificial Sequence: Synthetic oligonucleotide
uucaccugcucugcagagu

SEQ ID NO: 2719441 - RNA, 19 nt, Artificial Sequence
  Description of Artificial Sequence: Synthetic oligonucleotide
gagucaagggacaccaggu

SEQ ID NO: 2719442 - RNA, 19 nt, Artificial Sequence
  Description of Artificial Sequence: Synthetic oligonucleotide
aagaggcaauaggcuuagg

SEQ ID NO: 2719443 - RNA, 19 nt, Artificial Sequence
  Description of Artificial Sequence: Synthetic oligonucleotide
guauagcccuuguuaaacu

SEQ ID NO: 2719444 - RNA, 19 nt, Artificial Sequence
  Description of Artificial Sequence: Synthetic oligonucleotide
aggugcgcgcgucaccaug

SEQ ID NO: 2719445 - RNA, 19 nt, Artificial Sequence
  Description of Artificial Sequence: Synthetic oligonucleotide
gcagagucaagggacacca

SEQ ID NO: 2719446 - RNA, 19 nt, Artificial Sequence
  Description of Artificial Sequence: Synthetic oligonucleotide
ugccaggauaguccuccaa

SEQ ID NO: 2719447 - RNA, 19 nt, Artificial Sequence
  Description of Artificial Sequence: Synthetic oligonucleotide
auccugcagcagcugccgg

SEQ ID NO: 2719448 - RNA, 19 nt, Artificial Sequence
  Description of Artificial Sequence: Synthetic oligonucleotide
agguccucaucaucuggaa

SEQ ID NO: 2719449 - RNA, 19 nt, Artificial Sequence
  Description of Artificial Sequence: Synthetic oligonucleotide
ccaagacagcaccagcagc

SEQ ID NO: 2719450 - RNA, 19 nt, Artificial Sequence
  Description of Artificial Sequence: Synthetic oligonucleotide
auaugacuacuggagggua

SEQ ID NO: 2719451 - RNA, 19 nt, Artificial Sequence
  Description of Artificial Sequence: Synthetic oligonucleotide
ucccggugcuucugaagcu

SEQ ID NO: 2719452 - RNA, 19 nt, Artificial Sequence
  Description of Artificial Sequence: Synthetic oligonucleotide
agcagcugccggcucacau

SEQ ID NO: 2719453 - RNA, 19 nt, Artificial Sequence
  Description of Artificial Sequence: Synthetic oligonucleotide
agguuuucaucuggacucu

SEQ ID NO: 2719454 - RNA, 19 nt, Artificial Sequence
  Description of Artificial Sequence: Synthetic oligonucleotide
caguauagcccuuguuaaa

SEQ ID NO: 2719455 - RNA, 19 nt, Artificial Sequence
  Description of Artificial Sequence: Synthetic oligonucleotide
uccaggugauagccauccu

SEQ ID NO: 2719456 - RNA, 19 nt, Artificial Sequence
  Description of Artificial Sequence: Synthetic oligonucleotide
cagagucaagggacaccag

SEQ ID NO: 2719457 - RNA, 19 nt, Artificial Sequence
  Description of Artificial Sequence: Synthetic oligonucleotide
cucauccaggugauagcca

SEQ ID NO: 2719458 - RNA, 19 nt, Artificial Sequence
  Description of Artificial Sequence: Synthetic oligonucleotide
aagggacaccagguuuuca

SEQ ID NO: 2719459 - RNA, 19 nt, Artificial Sequence
  Description of Artificial Sequence: Synthetic oligonucleotide
gguucaccugcucugcaga

SEQ ID NO: 2719460 - RNA, 19 nt, Artificial Sequence
  Description of Artificial Sequence: Synthetic oligonucleotide
ccuuucuccguagaacggc

SEQ ID NO: 2719461 - RNA, 19 nt, Artificial Sequence
  Description of Artificial Sequence: Synthetic oligonucleotide
augcccuuucuccguagaa

SEQ ID NO: 2719462 - RNA, 19 nt, Artificial Sequence
  Description of Artificial Sequence: Synthetic oligonucleotide
gaccuuuucccugaagaau

SEQ ID NO: 2719463 - RNA, 19 nt, Artificial Sequence
  Description of Artificial Sequence: Synthetic oligonucleotide
uucugaagcuuagccugaa

SEQ ID NO: 2719464 - RNA, 19 nt, Artificial Sequence
  Description of Artificial Sequence: Synthetic oligonucleotide
aaaccauccuggagggaua

SEQ ID NO: 2719465 - RNA, 19 nt, Artificial Sequence
  Description of Artificial Sequence: Synthetic oligonucleotide
gcaagagcauguggaagag

SEQ ID NO: 2719466 - RNA, 19 nt, Artificial Sequence
  Description of Artificial Sequence: Synthetic oligonucleotide
agaacggccuuggccaggu

SEQ ID NO: 2719467 - RNA, 19 nt, Artificial Sequence
  Description of Artificial Sequence: Synthetic oligonucleotide
cccaagacagcaccagcag

SEQ ID NO: 2719468 - RNA, 19 nt, Artificial Sequence
  Description of Artificial Sequence: Synthetic oligonucleotide
agagcauguggaagaggca

SEQ ID NO: 2719469 - RNA, 19 nt, Artificial Sequence
  Description of Artificial Sequence: Synthetic oligonucleotide
uaagagcaguauagcccuu

SEQ ID NO: 2719470 - RNA, 19 nt, Artificial Sequence
  Description of Artificial Sequence: Synthetic oligonucleotide
ugccggcucacauccuggu

SEQ ID NO: 2719471 - RNA, 19 nt, Artificial Sequence
  Description of Artificial Sequence: Synthetic oligonucleotide
guggaagaggcaauaggcu

SEQ ID NO: 2719472 - RNA, 19 nt, Artificial Sequence
  Description of Artificial Sequence: Synthetic oligonucleotide
gggcgguucggcaaggccc

SEQ ID NO: 2719473 - RNA, 19 nt, Artificial Sequence
  Description of Artificial Sequence: Synthetic oligonucleotide
cuggcgggcguucccgagc

SEQ ID NO: 2719474 - RNA, 19 nt, Artificial Sequence
  Description of Artificial Sequence: Synthetic oligonucleotide
cccuuucuccguagaacgg

SEQ ID NO: 2719475 - RNA, 19 nt, Artificial Sequence
  Description of Artificial Sequence: Synthetic oligonucleotide
agguccagguccucaucau

SEQ ID NO: 2719476 - RNA, 19 nt, Artificial Sequence
  Description of Artificial Sequence: Synthetic oligonucleotide
ggugcuucugaagcuuagc

SEQ ID NO: 2719477 - RNA, 19 nt, Artificial Sequence
  Description of Artificial Sequence: Synthetic oligonucleotide
gucaagggacaccagguuu

SEQ ID NO: 2719478 - RNA, 19 nt, Artificial Sequence
  Description of Artificial Sequence: Synthetic oligonucleotide
ccuggagggauaugacuac

SEQ ID NO: 2719479 - RNA, 19 nt, Artificial Sequence
  Description of Artificial Sequence: Synthetic oligonucleotide
gacucuggcuaagagcagu

SEQ ID NO: 2719480 - RNA, 19 nt, Artificial Sequence
  Description of Artificial Sequence: Synthetic oligonucleotide
caccagguuuucaucugga

SEQ ID NO: 2719481 - RNA, 19 nt, Artificial Sequence
  Description of Artificial Sequence: Synthetic oligonucleotide
ggacaccagguuuucaucu

SEQ ID NO: 2719482 - RNA, 19 nt, Artificial Sequence
  Description of Artificial Sequence: Synthetic oligonucleotide
caggauaguccuccaaacu

SEQ ID NO: 2719483 - RNA, 19 nt, Artificial Sequence
  Description of Artificial Sequence: Synthetic oligonucleotide
ggucccggugcuucugaag

SEQ ID NO: 2719484 - RNA, 19 nt, Artificial Sequence
  Description of Artificial Sequence: Synthetic oligonucleotide
gcuucuccauagcggcugg

SEQ ID NO: 2719485 - RNA, 19 nt, Artificial Sequence
  Description of Artificial Sequence: Synthetic oligonucleotide
uggaggguacaggaagauu

SEQ ID NO: 2719486 - RNA, 19 nt, Artificial Sequence
  Description of Artificial Sequence: Synthetic oligonucleotide
cgcgucaccauguaugguc

SEQ ID NO: 2719487 - RNA, 19 nt, Artificial Sequence
  Description of Artificial Sequence: Synthetic oligonucleotide
gccaggauaguccuccaaa

SEQ ID NO: 2719488 - RNA, 19 nt, Artificial Sequence
  Description of Artificial Sequence: Synthetic oligonucleotide
ugcgcgcgucaccauguau

SEQ ID NO: 2719489 - RNA, 19 nt, Artificial Sequence
  Description of Artificial Sequence: Synthetic oligonucleotide
ccccgcuucuccauagcgg

SEQ ID NO: 2719490 - RNA, 19 nt, Artificial Sequence
  Description of Artificial Sequence: Synthetic oligonucleotide
ccggcucacauccugguuc

SEQ ID NO: 2719491 - RNA, 19 nt, Artificial Sequence
  Description of Artificial Sequence: Synthetic oligonucleotide
gguucggcaaggccccagc

SEQ ID NO: 2719492 - RNA, 19 nt, Artificial Sequence
  Description of Artificial Sequence: Synthetic oligonucleotide
gggacaccagguuuucauc

SEQ ID NO: 2719493 - RNA, 19 nt, Artificial Sequence
  Description of Artificial Sequence: Synthetic oligonucleotide
ggcugguggaucucuguga

SEQ ID NO: 2719494 - RNA, 19 nt, Artificial Sequence
  Description of Artificial Sequence: Synthetic oligonucleotide
cccugaagaaucggggcgg

SEQ ID NO: 2719495 - RNA, 19 nt, Artificial Sequence
  Description of Artificial Sequence: Synthetic oligonucleotide
cugcagagucaagggacac

SEQ ID NO: 2719496 - RNA, 19 nt, Artificial Sequence
  Description of Artificial Sequence: Synthetic oligonucleotide
gguccccgcuucuccauag

SEQ ID NO: 2719497 - RNA, 19 nt, Artificial Sequence
  Description of Artificial Sequence: Synthetic oligonucleotide
ggcguucccgagccggagg

SEQ ID NO: 2719498 - RNA, 19 nt, Artificial Sequence
  Description of Artificial Sequence: Synthetic oligonucleotide
agcauguggaagaggcaau

SEQ ID NO: 2719499 - RNA, 19 nt, Artificial Sequence
  Description of Artificial Sequence: Synthetic oligonucleotide
ggaagaggcaauaggcuua

SEQ ID NO: 2719500 - RNA, 19 nt, Artificial Sequence
  Description of Artificial Sequence: Synthetic oligonucleotide
gcagcaagagcauguggaa

SEQ ID NO: 2719501 - RNA, 19 nt, Artificial Sequence
  Description of Artificial Sequence: Synthetic oligonucleotide
cagcaccagcagcaagagc

SEQ ID NO: 2719502 - RNA, 19 nt, Artificial Sequence
  Description of Artificial Sequence: Synthetic oligonucleotide
caagggacaccagguuuuc

SEQ ID NO: 2719503 - RNA, 19 nt, Artificial Sequence
  Description of Artificial Sequence: Synthetic oligonucleotide
agcaugcccuuucuccgua

SEQ ID NO: 2719504 - RNA, 19 nt, Artificial Sequence
  Description of Artificial Sequence: Synthetic oligonucleotide
aucuggacucuggcuaaga

SEQ ID NO: 2719505 - RNA, 19 nt, Artificial Sequence
  Description of Artificial Sequence: Synthetic oligonucleotide
guucggcaaggccccagca

SEQ ID NO: 2719506 - RNA, 19 nt, Artificial Sequence
  Description of Artificial Sequence: Synthetic oligonucleotide
caucuggacucuggcuaag

SEQ ID NO: 2719507 - RNA, 19 nt, Artificial Sequence
  Description of Artificial Sequence: Synthetic oligonucleotide
agcggcuggcgggcguucc

SEQ ID NO: 2719508 - RNA, 19 nt, Artificial Sequence
  Description of Artificial Sequence: Synthetic oligonucleotide
gcucacauccugguucacc

SEQ ID NO: 2719509 - RNA, 19 nt, Artificial Sequence
  Description of Artificial Sequence: Synthetic oligonucleotide
caugcccuuucuccguaga

SEQ ID NO: 2719510 - RNA, 19 nt, Artificial Sequence
  Description of Artificial Sequence: Synthetic oligonucleotide
gcgcgcgucaccauguaug

SEQ ID NO: 2719511 - RNA, 19 nt, Artificial Sequence
  Description of Artificial Sequence: Synthetic oligonucleotide
aaggugcgcgcgucaccau

SEQ ID NO: 2719512 - RNA, 19 nt, Artificial Sequence
  Description of Artificial Sequence: Synthetic oligonucleotide
gccugaauagaaggugcgc

SEQ ID NO: 2719513 - RNA, 19 nt, Artificial Sequence
  Description of Artificial Sequence: Synthetic oligonucleotide
caaggccccagcaugcccu

SEQ ID NO: 2719514 - RNA, 19 nt, Artificial Sequence
  Description of Artificial Sequence: Synthetic oligonucleotide
gguccagguccucaucauc

SEQ ID NO: 2719515 - RNA, 19 nt, Artificial Sequence
  Description of Artificial Sequence: Synthetic oligonucleotide
gcgucaccauguauggucc

SEQ ID NO: 2719516 - RNA, 19 nt, Artificial Sequence
  Description of Artificial Sequence: Synthetic oligonucleotide
augguccccgcuucuccau

SEQ ID NO: 2719517 - RNA, 19 nt, Artificial Sequence
  Description of Artificial Sequence: Synthetic oligonucleotide
gaggcugguggaucucugu

SEQ ID NO: 2719518 - RNA, 19 nt, Artificial Sequence
  Description of Artificial Sequence: Synthetic oligonucleotide
agccggaggccgcccgccg

SEQ ID NO: 2719519 - RNA, 19 nt, Artificial Sequence
  Description of Artificial Sequence: Synthetic oligonucleotide
ggggaaugagguccagguc

SEQ ID NO: 2719520 - RNA, 19 nt, Artificial Sequence
  Description of Artificial Sequence: Synthetic oligonucleotide
gugcucgccuuuaauccca

SEQ ID NO: 2719521 - RNA, 19 nt, Artificial Sequence
  Description of Artificial Sequence: Synthetic oligonucleotide
cgcgcgucaccauguaugg

SEQ ID NO: 2719522 - RNA, 19 nt, Artificial Sequence
  Description of Artificial Sequence: Synthetic oligonucleotide
ccauccuggagggauauga

SEQ ID NO: 2719523 - RNA, 19 nt, Artificial Sequence
  Description of Artificial Sequence: Synthetic oligonucleotide
cuucuccauagcggcuggc

SEQ ID NO: 2719524 - RNA, 19 nt, Artificial Sequence
  Description of Artificial Sequence: Synthetic oligonucleotide
gcguucccgagccggaggc

SEQ ID NO: 2719525 - RNA, 19 nt, Artificial Sequence
  Description of Artificial Sequence: Synthetic oligonucleotide
ugguccccgcuucuccaua

SEQ ID NO: 2719526 - RNA, 19 nt, Artificial Sequence
  Description of Artificial Sequence: Synthetic oligonucleotide
ggcgguucggcaaggcccc

SEQ ID NO: 2719527 - RNA, 19 nt, Artificial Sequence
  Description of Artificial Sequence: Synthetic oligonucleotide
ggggcgguucggcaaggcc

SEQ ID NO: 2719528 - RNA, 19 nt, Artificial Sequence
  Description of Artificial Sequence: Synthetic oligonucleotide
gcagcugccggcucacauc

SEQ ID NO: 2719529 - RNA, 19 nt, Artificial Sequence
  Description of Artificial Sequence: Synthetic oligonucleotide
guccccgcuucuccauagc

SEQ ID NO: 2719530 - RNA, 19 nt, Artificial Sequence
  Description of Artificial Sequence: Synthetic oligonucleotide
ccuccaaacuacacagaga

SEQ ID NO: 2719531 - RNA, 19 nt, Artificial Sequence
  Description of Artificial Sequence: Synthetic oligonucleotide
ccugguucaccugcucugc

SEQ ID NO: 2719532 - RNA, 19 nt, Artificial Sequence
  Description of Artificial Sequence: Synthetic oligonucleotide
acucuggcuaagagcagua

SEQ ID NO: 2719533 - RNA, 19 nt, Artificial Sequence
  Description of Artificial Sequence: Synthetic oligonucleotide
caccagcagcaagagcaug

SEQ ID NO: 2719534 - RNA, 19 nt, Artificial Sequence
  Description of Artificial Sequence: Synthetic oligonucleotide
ccagguuuucaucuggacu

SEQ ID NO: 2719535 - RNA, 19 nt, Artificial Sequence
  Description of Artificial Sequence: Synthetic oligonucleotide
cugguucaccugcucugca

SEQ ID NO: 2719536 - RNA, 19 nt, Artificial Sequence
  Description of Artificial Sequence: Synthetic oligonucleotide
gcccuuguuaaacuucacu

SEQ ID NO: 2719537 - RNA, 19 nt, Artificial Sequence
  Description of Artificial Sequence: Synthetic oligonucleotide
guuaaacuucacugaccuu

SEQ ID NO: 2719538 - RNA, 19 nt, Artificial Sequence
  Description of Artificial Sequence: Synthetic oligonucleotide
ucggggcgguucggcaagg

SEQ ID NO: 2719539 - RNA, 19 nt, Artificial Sequence
  Description of Artificial Sequence: Synthetic oligonucleotide
gaaugagguccagguccuc

SEQ ID NO: 2719540 - RNA, 19 nt, Artificial Sequence
  Description of Artificial Sequence: Synthetic oligonucleotide
gcaugcccuuucuccguag

SEQ ID NO: 2719541 - RNA, 19 nt, Artificial Sequence
  Description of Artificial Sequence: Synthetic oligonucleotide
gcgggcguucccgagccgg

SEQ ID NO: 2719542 - RNA, 19 nt, Artificial Sequence
  Description of Artificial Sequence: Synthetic oligonucleotide
guccuccaaacuacacaga

SEQ ID NO: 2719543 - RNA, 19 nt, Artificial Sequence
  Description of Artificial Sequence: Synthetic oligonucleotide
gagcaguauagcccuuguu

SEQ ID NO: 2719544 - RNA, 19 nt, Artificial Sequence
  Description of Artificial Sequence: Synthetic oligonucleotide
accauccuggagggauaug

SEQ ID NO: 2719545 - RNA, 19 nt, Artificial Sequence
  Description of Artificial Sequence: Synthetic oligonucleotide
ggaaugagguccagguccu

SEQ ID NO: 2719546 - RNA, 19 nt, Artificial Sequence
  Description of Artificial Sequence: Synthetic oligonucleotide
ucccgagccggaggccgcc

SEQ ID NO: 2719547 - RNA, 19 nt, Artificial Sequence
  Description of Artificial Sequence: Synthetic oligonucleotide
ccugcucugcagagucaag

SEQ ID NO: 2719548 - RNA, 19 nt, Artificial Sequence
  Description of Artificial Sequence: Synthetic oligonucleotide
gagugccaggauaguccuc

SEQ ID NO: 2719549 - RNA, 19 nt, Artificial Sequence
  Description of Artificial Sequence: Synthetic oligonucleotide
gcuggcgggcguucccgag

SEQ ID NO: 2719550 - RNA, 19 nt, Artificial Sequence
  Description of Artificial Sequence: Synthetic oligonucleotide
ggcaaggccccagcaugcc

SEQ ID NO: 2719551 - RNA, 19 nt, Artificial Sequence
  Description of Artificial Sequence: Synthetic oligonucleotide
auagcggcuggcgggcguu

SEQ ID NO: 2719552 - RNA, 19 nt, Artificial Sequence
  Description of Artificial Sequence: Synthetic oligonucleotide
caccugcucugcagaguca

SEQ ID NO: 2719553 - RNA, 19 nt, Artificial Sequence
  Description of Artificial Sequence: Synthetic oligonucleotide
ggccccagcaugcccuuuc

SEQ ID NO: 2719554 - RNA, 19 nt, Artificial Sequence
  Description of Artificial Sequence: Synthetic oligonucleotide
gcauguggaagaggcaaua

SEQ ID NO: 2719555 - RNA, 19 nt, Artificial Sequence
  Description of Artificial Sequence: Synthetic oligonucleotide
cuggagggauaugacuacu

SEQ ID NO: 2719556 - RNA, 19 nt, Artificial Sequence
  Description of Artificial Sequence: Synthetic oligonucleotide
ggaaucucauccaggugau

SEQ ID NO: 2719557 - RNA, 19 nt, Artificial Sequence
  Description of Artificial Sequence: Synthetic oligonucleotide
gguccucaucaucuggaau

SEQ ID NO: 2719558 - RNA, 19 nt, Artificial Sequence
  Description of Artificial Sequence: Synthetic oligonucleotide
gcucgccuuuaaucccagc

SEQ ID NO: 2719559 - RNA, 19 nt, Artificial Sequence
  Description of Artificial Sequence: Synthetic oligonucleotide
cagcaugcccuuucuccgu

SEQ ID NO: 2719560 - RNA, 19 nt, Artificial Sequence
  Description of Artificial Sequence: Synthetic oligonucleotide
cgucaccauguaugguccc

SEQ ID NO: 2719561 - RNA, 19 nt, Artificial Sequence
  Description of Artificial Sequence: Synthetic oligonucleotide
ggccuuggccaggucccgg

SEQ ID NO: 2719562 - RNA, 19 nt, Artificial Sequence
  Description of Artificial Sequence: Synthetic oligonucleotide
cggugcuucugaagcuuag

SEQ ID NO: 2719563 - RNA, 19 nt, Artificial Sequence
  Description of Artificial Sequence: Synthetic oligonucleotide
cgcuucuccauagcggcug

SEQ ID NO: 2719564 - RNA, 19 nt, Artificial Sequence
  Description of Artificial Sequence: Synthetic oligonucleotide
gguggugcucgccuuuaau

SEQ ID NO: 2719565 - RNA, 19 nt, Artificial Sequence
  Description of Artificial Sequence: Synthetic oligonucleotide
gaacggccuuggccagguc

SEQ ID NO: 2719566 - RNA, 19 nt, Artificial Sequence
  Description of Artificial Sequence: Synthetic oligonucleotide
cugguggaucucugugagu

SEQ ID NO: 2719567 - RNA, 19 nt, Artificial Sequence
  Description of Artificial Sequence: Synthetic oligonucleotide
cugcagcagcugccggcuc

SEQ ID NO: 2719568 - RNA, 19 nt, Artificial Sequence
  Description of Artificial Sequence: Synthetic oligonucleotide
cuggaggguacaggaagau

SEQ ID NO: 2719569 - RNA, 19 nt, Artificial Sequence
  Description of Artificial Sequence: Synthetic oligonucleotide
ccuuggccaggucccggug

SEQ ID NO: 2719570 - RNA, 19 nt, Artificial Sequence
  Description of Artificial Sequence: Synthetic oligonucleotide
cauagcggcuggcgggcgu

SEQ ID NO: 2719571 - RNA, 19 nt, Artificial Sequence
  Description of Artificial Sequence: Synthetic oligonucleotide
gggcguucccgagccggag

SEQ ID NO: 2719572 - RNA, 19 nt, Artificial Sequence
  Description of Artificial Sequence: Synthetic oligonucleotide
cacugaccuuuucccugaa

SEQ ID NO: 2719573 - RNA, 19 nt, Artificial Sequence
  Description of Artificial Sequence: Synthetic oligonucleotide
ccauguaugguccccgcuu

SEQ ID NO: 2719574 - RNA, 19 nt, Artificial Sequence
  Description of Artificial Sequence: Synthetic oligonucleotide
gcggcuggcgggcguuccc

SEQ ID NO: 2719575 - RNA, 19 nt, Artificial Sequence
  Description of Artificial Sequence: Synthetic oligonucleotide
ggcgggcguucccgagccg

SEQ ID NO: 2719576 - RNA, 19 nt, Artificial Sequence
  Description of Artificial Sequence: Synthetic oligonucleotide
ccgagccggaggccgcccg

SEQ ID NO: 2719577 - RNA, 19 nt, Artificial Sequence
  Description of Artificial Sequence: Synthetic oligonucleotide
uagcggcuggcgggcguuc

SEQ ID NO: 2719578 - RNA, 19 nt, Artificial Sequence
  Description of Artificial Sequence: Synthetic oligonucleotide
ggugcgcgcgucaccaugu

SEQ ID NO: 2719579 - RNA, 19 nt, Artificial Sequence
  Description of Artificial Sequence: Synthetic oligonucleotide
cggcucacauccugguuca

SEQ ID NO: 2719580 - RNA, 19 nt, Artificial Sequence
  Description of Artificial Sequence: Synthetic oligonucleotide
cucuggcuaagagcaguau

SEQ ID NO: 2719581 - RNA, 19 nt, Artificial Sequence
  Description of Artificial Sequence: Synthetic oligonucleotide
ccauagcggcuggcgggcg

SEQ ID NO: 2719582 - RNA, 19 nt, Artificial Sequence
  Description of Artificial Sequence: Synthetic oligonucleotide
gugcgcgcgucaccaugua

SEQ ID NO: 2719583 - RNA, 19 nt, Artificial Sequence
  Description of Artificial Sequence: Synthetic oligonucleotide
ggcuggcgggcguucccga

SEQ ID NO: 2719584 - RNA, 19 nt, Artificial Sequence
  Description of Artificial Sequence: Synthetic oligonucleotide
ccccagcaugcccuuucuc

SEQ ID NO: 2719585 - RNA, 19 nt, Artificial Sequence
  Description of Artificial Sequence: Synthetic oligonucleotide
gccuuggccaggucccggu

SEQ ID NO: 2719586 - RNA, 19 nt, Artificial Sequence
  Description of Artificial Sequence: Synthetic oligonucleotide
ggcucacauccugguucac

SEQ ID NO: 2719587 - RNA, 19 nt, Artificial Sequence
  Description of Artificial Sequence: Synthetic oligonucleotide
ccggugcuucugaagcuua

SEQ ID NO: 2719588 - RNA, 19 nt, Artificial Sequence
  Description of Artificial Sequence: Synthetic oligonucleotide
cggcuggcgggcguucccg

SEQ ID NO: 2719589 - RNA, 19 nt, Artificial Sequence
  Description of Artificial Sequence: Synthetic oligonucleotide
cguucccgagccggaggcc

SEQ ID NO: 2719590 - RNA, 19 nt, Artificial Sequence
  Description of Artificial Sequence: Synthetic oligonucleotide
gccaggucccggugcuucu

SEQ ID NO: 2719591 - RNA, 19 nt, Artificial Sequence
  Description of Artificial Sequence: Synthetic oligonucleotide
gccccagcaugcccuuucu

SEQ ID NO: 2719592 - RNA, 19 nt, Artificial Sequence
  Description of Artificial Sequence: Synthetic oligonucleotide
cugaagaaucggggcgguu

SEQ ID NO: 2719593 - RNA, 19 nt, Artificial Sequence
  Description of Artificial Sequence: Synthetic oligonucleotide
aggccccagcaugcccuuu

SEQ ID NO: 2719594 - RNA, 19 nt, Artificial Sequence
  Description of Artificial Sequence: Synthetic oligonucleotide
cagcagcugccggcucaca

SEQ ID NO: 2719595 - RNA, 19 nt, Artificial Sequence
  Description of Artificial Sequence: Synthetic oligonucleotide
cgguucggcaaggccccag

SEQ ID NO: 2719596 - RNA, 19 nt, Artificial Sequence
  Description of Artificial Sequence: Synthetic oligonucleotide
ccugaagaaucggggcggu

SEQ ID NO: 2719597 - RNA, 19 nt, Artificial Sequence
  Description of Artificial Sequence: Synthetic oligonucleotide
ccgggcguugguggugcuc

SEQ ID NO: 2719598 - RNA, 19 nt, Artificial Sequence
  Description of Artificial Sequence: Synthetic oligonucleotide
gccggcucacauccugguu

SEQ ID NO: 2719599 - RNA, 19 nt, Artificial Sequence
  Description of Artificial Sequence: Synthetic oligonucleotide
cccgagccggaggccgccc

SEQ ID NO: 2719600 - RNA, 19 nt, Artificial Sequence
  Description of Artificial Sequence: Synthetic oligonucleotide
ccgcuucuccauagcggcu

SEQ ID NO: 2719601 - RNA, 19 nt, Artificial Sequence
  Description of Artificial Sequence: Synthetic oligonucleotide
cggggcgguucggcaaggc

SEQ ID NO: 2719602 - RNA, 19 nt, Artificial Sequence
  Description of Artificial Sequence: Synthetic oligonucleotide
cgggcguucccgagccgga

SEQ ID NO: 2719603 - RNA, 19 nt, Artificial Sequence
  Description of Artificial Sequence: Synthetic oligonucleotide
gcgcgucaccauguauggu

SEQ ID NO: 2719604 - RNA, 19 nt, Artificial Sequence
  Description of Artificial Sequence: Synthetic oligonucleotide
cccggugcuucugaagcuu

SEQ ID NO: 2719605 - RNA, 19 nt, Artificial Sequence
  Description of Artificial Sequence: Synthetic oligonucleotide
gcgguucggcaaggcccca

SEQ ID NO: 2719606 - RNA, 19 nt, Artificial Sequence
  Description of Artificial Sequence: Synthetic oligonucleotide
aauuaagcacaguaaaacc

SEQ ID NO: 2719607 - RNA, 19 nt, Artificial Sequence
  Description of Artificial Sequence: Synthetic oligonucleotide
gauguaauaaaccacgcgg

SEQ ID NO: 2719608 - RNA, 19 nt, Artificial Sequence
  Description of Artificial Sequence: Synthetic oligonucleotide
uaagcuguuaccuauuagg

SEQ ID NO: 2719609 - RNA, 19 nt, Artificial Sequence
  Description of Artificial Sequence: Synthetic oligonucleotide
agagguaagacccacacuc

SEQ ID NO: 2719610 - RNA, 19 nt, Artificial Sequence
  Description of Artificial Sequence: Synthetic oligonucleotide
agauuggacuuguagaucc

SEQ ID NO: 2719611 - RNA, 19 nt, Artificial Sequence
  Description of Artificial Sequence: Synthetic oligonucleotide
uuuuguuccaacuaagcug

SEQ ID NO: 2719612 - RNA, 19 nt, Artificial Sequence
  Description of Artificial Sequence: Synthetic oligonucleotide
uccuacgacaccaagauug

SEQ ID NO: 2719613 - RNA, 19 nt, Artificial Sequence
  Description of Artificial Sequence: Synthetic oligonucleotide
aauuuuguuccaacuaagc

SEQ ID NO: 2719614 - RNA, 19 nt, Artificial Sequence
  Description of Artificial Sequence: Synthetic oligonucleotide
aacagaauuuuguuccaac

SEQ ID NO: 2719615 - RNA, 19 nt, Artificial Sequence
  Description of Artificial Sequence: Synthetic oligonucleotide
acaguaaaacccuugugac

SEQ ID NO: 2719616 - RNA, 19 nt, Artificial Sequence
  Description of Artificial Sequence: Synthetic oligonucleotide
uuuguuccaacuaagcugu

SEQ ID NO: 2719617 - RNA, 19 nt, Artificial Sequence
  Description of Artificial Sequence: Synthetic oligonucleotide
aggaaauaguaguaguggc

SEQ ID NO: 2719618 - RNA, 19 nt, Artificial Sequence
  Description of Artificial Sequence: Synthetic oligonucleotide
aagacccacacucuucacc

SEQ ID NO: 2719619 - RNA, 19 nt, Artificial Sequence
  Description of Artificial Sequence: Synthetic oligonucleotide
ugucuaggagcaaaggagg

SEQ ID NO: 2719620 - RNA, 19 nt, Artificial Sequence
  Description of Artificial Sequence: Synthetic oligonucleotide
aaagggaugaggaugucac

SEQ ID NO: 2719621 - RNA, 19 nt, Artificial Sequence
  Description of Artificial Sequence: Synthetic oligonucleotide
ucacagauguaauaaacca

SEQ ID NO: 2719622 - RNA, 19 nt, Artificial Sequence
  Description of Artificial Sequence: Synthetic oligonucleotide
cuagcguaaggcauaagcg

SEQ ID NO: 2719623 - RNA, 19 nt, Artificial Sequence
  Description of Artificial Sequence: Synthetic oligonucleotide
acagauguaauaaaccacg

SEQ ID NO: 2719624 - RNA, 19 nt, Artificial Sequence
  Description of Artificial Sequence: Synthetic oligonucleotide
agacccacacucuucaccc

SEQ ID NO: 2719625 - RNA, 19 nt, Artificial Sequence
  Description of Artificial Sequence: Synthetic oligonucleotide
uuaagcacaguaaaacccu

SEQ ID NO: 2719626 - RNA, 19 nt, Artificial Sequence
  Description of Artificial Sequence: Synthetic oligonucleotide
aagcuguuaccuauuaggc

SEQ ID NO: 2719627 - RNA, 19 nt, Artificial Sequence
  Description of Artificial Sequence: Synthetic oligonucleotide
gaggaaauaguaguagugg

SEQ ID NO: 2719628 - RNA, 19 nt, Artificial Sequence
  Description of Artificial Sequence: Synthetic oligonucleotide
uagcguaaggcauaagcgg

SEQ ID NO: 2719629 - RNA, 19 nt, Artificial Sequence
  Description of Artificial Sequence: Synthetic oligonucleotide
agauguaauaaaccacgcg

SEQ ID NO: 2719630 - RNA, 19 nt, Artificial Sequence
  Description of Artificial Sequence: Synthetic oligonucleotide
ucucuguugacuccagagg

SEQ ID NO: 2719631 - RNA, 19 nt, Artificial Sequence
  Description of Artificial Sequence: Synthetic oligonucleotide
aaauaguaguaguggcggg

SEQ ID NO: 2719632 - RNA, 19 nt, Artificial Sequence
  Description of Artificial Sequence: Synthetic oligonucleotide
agcuguuaccuauuaggcc

SEQ ID NO: 2719633 - RNA, 19 nt, Artificial Sequence
  Description of Artificial Sequence: Synthetic oligonucleotide
uggaauaggagucggagaa

SEQ ID NO: 2719634 - RNA, 19 nt, Artificial Sequence
  Description of Artificial Sequence: Synthetic oligonucleotide
auuuuguuccaacuaagcu

SEQ ID NO: 2719635 - RNA, 19 nt, Artificial Sequence
  Description of Artificial Sequence: Synthetic oligonucleotide
cauuacagugaugagaccc

SEQ ID NO: 2719636 - RNA, 19 nt, Artificial Sequence
  Description of Artificial Sequence: Synthetic oligonucleotide
aagaccuccaaguccuacg

SEQ ID NO: 2719637 - RNA, 19 nt, Artificial Sequence
  Description of Artificial Sequence: Synthetic oligonucleotide
ugaggauacauuacaguga

SEQ ID NO: 2719638 - RNA, 19 nt, Artificial Sequence
  Description of Artificial Sequence: Synthetic oligonucleotide
ugugucuaggagcaaagga

SEQ ID NO: 2719639 - RNA, 19 nt, Artificial Sequence
  Description of Artificial Sequence: Synthetic oligonucleotide
uucaaagggaugaggaugu

SEQ ID NO: 2719640 - RNA, 19 nt, Artificial Sequence
  Description of Artificial Sequence: Synthetic oligonucleotide
agaauuuuguuccaacuaa

SEQ ID NO: 2719641 - RNA, 19 nt, Artificial Sequence
  Description of Artificial Sequence: Synthetic oligonucleotide
ucacagaaguucuucacug

SEQ ID NO: 2719642 - RNA, 19 nt, Artificial Sequence
  Description of Artificial Sequence: Synthetic oligonucleotide
accaagauuggacuuguag

SEQ ID NO: 2719643 - RNA, 19 nt, Artificial Sequence
  Description of Artificial Sequence: Synthetic oligonucleotide
gacuccagagguaagaccc

SEQ ID NO: 2719644 - RNA, 19 nt, Artificial Sequence
  Description of Artificial Sequence: Synthetic oligonucleotide
ugguucaaagggaugagga

SEQ ID NO: 2719645 - RNA, 19 nt, Artificial Sequence
  Description of Artificial Sequence: Synthetic oligonucleotide
aaaacagaauuuuguucca

SEQ ID NO: 2719646 - RNA, 19 nt, Artificial Sequence
  Description of Artificial Sequence: Synthetic oligonucleotide
aaccacgcgguucagguug

SEQ ID NO: 2719647 - RNA, 19 nt, Artificial Sequence
  Description of Artificial Sequence: Synthetic oligonucleotide
ucagagaguggaauaggag

SEQ ID NO: 2719648 - RNA, 19 nt, Artificial Sequence
  Description of Artificial Sequence: Synthetic oligonucleotide
uucaacugaggauacauua

SEQ ID NO: 2719649 - RNA, 19 nt, Artificial Sequence
  Description of Artificial Sequence: Synthetic oligonucleotide
gaugcugccucagagagug

SEQ ID NO: 2719650 - RNA, 19 nt, Artificial Sequence
  Description of Artificial Sequence: Synthetic oligonucleotide
gaugagacccgccacggag

SEQ ID NO: 2719651 - RNA, 19 nt, Artificial Sequence
  Description of Artificial Sequence: Synthetic oligonucleotide
ugccauuucucucuguuga

SEQ ID NO: 2719652 - RNA, 19 nt, Artificial Sequence
  Description of Artificial Sequence: Synthetic oligonucleotide
ucaguuucaacugaggaua

SEQ ID NO: 2719653 - RNA, 19 nt, Artificial Sequence
  Description of Artificial Sequence: Synthetic oligonucleotide
agugaugagacccgccacg

SEQ ID NO: 2719654 - RNA, 19 nt, Artificial Sequence
  Description of Artificial Sequence: Synthetic oligonucleotide
ucggagaaaggacuggagc

SEQ ID NO: 2719655 - RNA, 19 nt, Artificial Sequence
  Description of Artificial Sequence: Synthetic oligonucleotide
uucauacagaucccggacc

SEQ ID NO: 2719656 - RNA, 19 nt, Artificial Sequence
  Description of Artificial Sequence: Synthetic oligonucleotide
aguaaaacccuugugacaa

SEQ ID NO: 2719657 - RNA, 19 nt, Artificial Sequence
  Description of Artificial Sequence: Synthetic oligonucleotide
gauacauuacagugaugag

SEQ ID NO: 2719658 - RNA, 19 nt, Artificial Sequence
  Description of Artificial Sequence: Synthetic oligonucleotide
uacgacaccaagauuggac

SEQ ID NO: 2719659 - RNA, 19 nt, Artificial Sequence
  Description of Artificial Sequence: Synthetic oligonucleotide
ucaacugaggauacauuac

SEQ ID NO: 2719660 - RNA, 19 nt, Artificial Sequence
  Description of Artificial Sequence: Synthetic oligonucleotide
cuucacugugucuaggagc

SEQ ID NO: 2719661 - RNA, 19 nt, Artificial Sequence
  Description of Artificial Sequence: Synthetic oligonucleotide
ucauacagaucccggacca

SEQ ID NO: 2719662 - RNA, 19 nt, Artificial Sequence
  Description of Artificial Sequence: Synthetic oligonucleotide
gcuguuaccuauuaggccc

SEQ ID NO: 2719663 - RNA, 19 nt, Artificial Sequence
  Description of Artificial Sequence: Synthetic oligonucleotide
gaauaggagucggagaaag

SEQ ID NO: 2719664 - RNA, 19 nt, Artificial Sequence
  Description of Artificial Sequence: Synthetic oligonucleotide
uaaaccacgcgguucaggu

SEQ ID NO: 2719665 - RNA, 19 nt, Artificial Sequence
  Description of Artificial Sequence: Synthetic oligonucleotide
uaagcgggcacaaggucgg

SEQ ID NO: 2719666 - RNA, 19 nt, Artificial Sequence
  Description of Artificial Sequence: Synthetic oligonucleotide
aggaugcugccucagagag

SEQ ID NO: 2719667 - RNA, 19 nt, Artificial Sequence
  Description of Artificial Sequence: Synthetic oligonucleotide
uucaguuucaacugaggau

SEQ ID NO: 2719668 - RNA, 19 nt, Artificial Sequence
  Description of Artificial Sequence: Synthetic oligonucleotide
acagaauuuuguuccaacu

SEQ ID NO: 2719669 - RNA, 19 nt, Artificial Sequence
  Description of Artificial Sequence: Synthetic oligonucleotide
aagauuggacuuguagauc

SEQ ID NO: 2719670 - RNA, 19 nt, Artificial Sequence
  Description of Artificial Sequence: Synthetic oligonucleotide
cacaguaaaacccuuguga

SEQ ID NO: 2719671 - RNA, 19 nt, Artificial Sequence
  Description of Artificial Sequence: Synthetic oligonucleotide
aauaguaguaguggcgggu

SEQ ID NO: 2719672 - RNA, 19 nt, Artificial Sequence
  Description of Artificial Sequence: Synthetic oligonucleotide
aaaccuagcgggucuucag

SEQ ID NO: 2719673 - RNA, 19 nt, Artificial Sequence
  Description of Artificial Sequence: Synthetic oligonucleotide
guuccaacuaagcuguuac

SEQ ID NO: 2719674 - RNA, 19 nt, Artificial Sequence
  Description of Artificial Sequence: Synthetic oligonucleotide
auaagcgggcacaaggucg

SEQ ID NO: 2719675 - RNA, 19 nt, Artificial Sequence
  Description of Artificial Sequence: Synthetic oligonucleotide
gugucuaggagcaaaggag

SEQ ID NO: 2719676 - RNA, 19 nt, Artificial Sequence
  Description of Artificial Sequence: Synthetic oligonucleotide
uccaacuaagcuguuaccu

SEQ ID NO: 2719677 - RNA, 19 nt, Artificial Sequence
  Description of Artificial Sequence: Synthetic oligonucleotide
aguccuacgacaccaagau

SEQ ID NO: 2719678 - RNA, 19 nt, Artificial Sequence
  Description of Artificial Sequence: Synthetic oligonucleotide
ggauacauuacagugauga

SEQ ID NO: 2719679 - RNA, 19 nt, Artificial Sequence
  Description of Artificial Sequence: Synthetic oligonucleotide
cucucuuuugcucugucac

SEQ ID NO: 2719680 - RNA, 19 nt, Artificial Sequence
  Description of Artificial Sequence: Synthetic oligonucleotide
aacugaggauacauuacag

SEQ ID NO: 2719681 - RNA, 19 nt, Artificial Sequence
  Description of Artificial Sequence: Synthetic oligonucleotide
cucucuguugacuccagag

SEQ ID NO: 2719682 - RNA, 19 nt, Artificial Sequence
  Description of Artificial Sequence: Synthetic oligonucleotide
acugaggauacauuacagu

SEQ ID NO: 2719683 - RNA, 19 nt, Artificial Sequence
  Description of Artificial Sequence: Synthetic oligonucleotide
guucaaagggaugaggaug

SEQ ID NO: 2719684 - RNA, 19 nt, Artificial Sequence
  Description of Artificial Sequence: Synthetic oligonucleotide
agcaaaggaggaugcugcc

SEQ ID NO: 2719685 - RNA, 19 nt, Artificial Sequence
  Description of Artificial Sequence: Synthetic oligonucleotide
auuacagugaugagacccg

SEQ ID NO: 2719686 - RNA, 19 nt, Artificial Sequence
  Description of Artificial Sequence: Synthetic oligonucleotide
ggcauaagcgggcacaagg

SEQ ID NO: 2719687 - RNA, 19 nt, Artificial Sequence
  Description of Artificial Sequence: Synthetic oligonucleotide
cuuguagaucccgagcugg

SEQ ID NO: 2719688 - RNA, 19 nt, Artificial Sequence
  Description of Artificial Sequence: Synthetic oligonucleotide
gucacagauguaauaaacc

SEQ ID NO: 2719689 - RNA, 19 nt, Artificial Sequence
  Description of Artificial Sequence: Synthetic oligonucleotide
ggaaauaguaguaguggcg

SEQ ID NO: 2719690 - RNA, 19 nt, Artificial Sequence
  Description of Artificial Sequence: Synthetic oligonucleotide
uguaauaaaccacgcgguu

SEQ ID NO: 2719691 - RNA, 19 nt, Artificial Sequence
  Description of Artificial Sequence: Synthetic oligonucleotide
auaggagucggagaaagga

SEQ ID NO: 2719692 - RNA, 19 nt, Artificial Sequence
  Description of Artificial Sequence: Synthetic oligonucleotide
uuuugcucugucacuugcc

SEQ ID NO: 2719693 - RNA, 19 nt, Artificial Sequence
  Description of Artificial Sequence: Synthetic oligonucleotide
agguuggcuagcguaaggc

SEQ ID NO: 2719694 - RNA, 19 nt, Artificial Sequence
  Description of Artificial Sequence: Synthetic oligonucleotide
aaguucuucacugugucua

SEQ ID NO: 2719695 - RNA, 19 nt, Artificial Sequence
  Description of Artificial Sequence: Synthetic oligonucleotide
gacagugucacagauguaa

SEQ ID NO: 2719696 - RNA, 19 nt, Artificial Sequence
  Description of Artificial Sequence: Synthetic oligonucleotide
agugucacagauguaauaa

SEQ ID NO: 2719697 - RNA, 19 nt, Artificial Sequence
  Description of Artificial Sequence: Synthetic oligonucleotide
gcuagcguaaggcauaagc

SEQ ID NO: 2719698 - RNA, 19 nt, Artificial Sequence
  Description of Artificial Sequence: Synthetic oligonucleotide
aauaggagucggagaaagg

SEQ ID NO: 2719699 - RNA, 19 nt, Artificial Sequence
  Description of Artificial Sequence: Synthetic oligonucleotide
cagauguaauaaaccacgc

SEQ ID NO: 2719700 - RNA, 19 nt, Artificial Sequence
  Description of Artificial Sequence: Synthetic oligonucleotide
uggacuuguagaucccgag

SEQ ID NO: 2719701 - RNA, 19 nt, Artificial Sequence
  Description of Artificial Sequence: Synthetic oligonucleotide
uaggagcaaaggaggaugc

SEQ ID NO: 2719702 - RNA, 19 nt, Artificial Sequence
  Description of Artificial Sequence: Synthetic oligonucleotide
uaguaguaguggcgggucg

SEQ ID NO: 2719703 - RNA, 19 nt, Artificial Sequence
  Description of Artificial Sequence: Synthetic oligonucleotide
gacacaagaccuccaaguc

SEQ ID NO: 2719704 - RNA, 19 nt, Artificial Sequence
  Description of Artificial Sequence: Synthetic oligonucleotide
acgacaccaagauuggacu

SEQ ID NO: 2719705 - RNA, 19 nt, Artificial Sequence
  Description of Artificial Sequence: Synthetic oligonucleotide
agcguaaggcauaagcggg

SEQ ID NO: 2719706 - RNA, 19 nt, Artificial Sequence
  Description of Artificial Sequence: Synthetic oligonucleotide
cacgcuguacccaggagag

SEQ ID NO: 2719707 - RNA, 19 nt, Artificial Sequence
  Description of Artificial Sequence: Synthetic oligonucleotide
cacaaggucggugacuugg

SEQ ID NO: 2719708 - RNA, 19 nt, Artificial Sequence
  Description of Artificial Sequence: Synthetic oligonucleotide
ugucacuugccacucguuc

SEQ ID NO: 2719709 - RNA, 19 nt, Artificial Sequence
  Description of Artificial Sequence: Synthetic oligonucleotide
gagcaaaggaggaugcugc

SEQ ID NO: 2719710 - RNA, 19 nt, Artificial Sequence
  Description of Artificial Sequence: Synthetic oligonucleotide
ucugucacuugccacucgu

SEQ ID NO: 2719711 - RNA, 19 nt, Artificial Sequence
  Description of Artificial Sequence: Synthetic oligonucleotide
cuuuugcucugucacuugc

SEQ ID NO: 2719712 - RNA, 19 nt, Artificial Sequence
  Description of Artificial Sequence: Synthetic oligonucleotide
ucacuugccacucguucca

SEQ ID NO: 2719713 - RNA, 19 nt, Artificial Sequence
  Description of Artificial Sequence: Synthetic oligonucleotide
uucagguuggcuagcguaa

SEQ ID NO: 2719714 - RNA, 19 nt, Artificial Sequence
  Description of Artificial Sequence: Synthetic oligonucleotide
gucacuugccacucguucc

SEQ ID NO: 2719715 - RNA, 19 nt, Artificial Sequence
  Description of Artificial Sequence: Synthetic oligonucleotide
agucggugucuucauggac

SEQ ID NO: 2719716 - RNA, 19 nt, Artificial Sequence
  Description of Artificial Sequence: Synthetic oligonucleotide
uacagaucccggaccaggc

SEQ ID NO: 2719717 - RNA, 19 nt, Artificial Sequence
  Description of Artificial Sequence: Synthetic oligonucleotide
ucacccagaggacaguguc

SEQ ID NO: 2719718 - RNA, 19 nt, Artificial Sequence
  Description of Artificial Sequence: Synthetic oligonucleotide
cuaagcuguuaccuauuag

SEQ ID NO: 2719719 - RNA, 19 nt, Artificial Sequence
  Description of Artificial Sequence: Synthetic oligonucleotide
auaguaguaguggcggguc

SEQ ID NO: 2719720 - RNA, 19 nt, Artificial Sequence
  Description of Artificial Sequence: Synthetic oligonucleotide
uggaccacgcuguacccag

SEQ ID NO: 2719721 - RNA, 19 nt, Artificial Sequence
  Description of Artificial Sequence: Synthetic oligonucleotide
cuucaguuucaacugagga

SEQ ID NO: 2719722 - RNA, 19 nt, Artificial Sequence
  Description of Artificial Sequence: Synthetic oligonucleotide
caaaggaggaugcugccuc

SEQ ID NO: 2719723 - RNA, 19 nt, Artificial Sequence
  Description of Artificial Sequence: Synthetic oligonucleotide
gacuuggaugcucuguuca

SEQ ID NO: 2719724 - RNA, 19 nt, Artificial Sequence
  Description of Artificial Sequence: Synthetic oligonucleotide
auacagaucccggaccagg

SEQ ID NO: 2719725 - RNA, 19 nt, Artificial Sequence
  Description of Artificial Sequence: Synthetic oligonucleotide
ucccggaccaggcucagca

SEQ ID NO: 2719726 - RNA, 19 nt, Artificial Sequence
  Description of Artificial Sequence: Synthetic oligonucleotide
cacucguuccaucugcagc

SEQ ID NO: 2719727 - RNA, 19 nt, Artificial Sequence
  Description of Artificial Sequence: Synthetic oligonucleotide
guaagacccacacucuuca

SEQ ID NO: 2719728 - RNA, 19 nt, Artificial Sequence
  Description of Artificial Sequence: Synthetic oligonucleotide
uuggacuuguagaucccga

SEQ ID NO: 2719729 - RNA, 19 nt, Artificial Sequence
  Description of Artificial Sequence: Synthetic oligonucleotide
gacaccaagauuggacuug

SEQ ID NO: 2719730 - RNA, 19 nt, Artificial Sequence
  Description of Artificial Sequence: Synthetic oligonucleotide
ugccacucguuccaucugc

SEQ ID NO: 2719731 - RNA, 19 nt, Artificial Sequence
  Description of Artificial Sequence: Synthetic oligonucleotide
ucccgagcugguucaaagg

SEQ ID NO: 2719732 - RNA, 19 nt, Artificial Sequence
  Description of Artificial Sequence: Synthetic oligonucleotide
ggaugcucuguucaguugc

SEQ ID NO: 2719733 - RNA, 19 nt, Artificial Sequence
  Description of Artificial Sequence: Synthetic oligonucleotide
aaaggaggaugcugccuca

SEQ ID NO: 2719734 - RNA, 19 nt, Artificial Sequence
  Description of Artificial Sequence: Synthetic oligonucleotide
auguaauaaaccacgcggu

SEQ ID NO: 2719735 - RNA, 19 nt, Artificial Sequence
  Description of Artificial Sequence: Synthetic oligonucleotide
cacauuugccauuucucuc

SEQ ID NO: 2719736 - RNA, 19 nt, Artificial Sequence
  Description of Artificial Sequence: Synthetic oligonucleotide
ggugucuucauggaccacg

SEQ ID NO: 2719737 - RNA, 19 nt, Artificial Sequence
  Description of Artificial Sequence: Synthetic oligonucleotide
guaauaaaccacgcgguuc

SEQ ID NO: 2719738 - RNA, 19 nt, Artificial Sequence
  Description of Artificial Sequence: Synthetic oligonucleotide
uuccaacuaagcuguuacc

SEQ ID NO: 2719739 - RNA, 19 nt, Artificial Sequence
  Description of Artificial Sequence: Synthetic oligonucleotide
aaaaccuagcgggucuuca

SEQ ID NO: 2719740 - RNA, 19 nt, Artificial Sequence
  Description of Artificial Sequence: Synthetic oligonucleotide
gucggugucuucauggacc

SEQ ID NO: 2719741 - RNA, 19 nt, Artificial Sequence
  Description of Artificial Sequence: Synthetic oligonucleotide
aaguccuacgacaccaaga

SEQ ID NO: 2719742 - RNA, 19 nt, Artificial Sequence
  Description of Artificial Sequence: Synthetic oligonucleotide
ucucuuuugcucugucacu

SEQ ID NO: 2719743 - RNA, 19 nt, Artificial Sequence
  Description of Artificial Sequence: Synthetic oligonucleotide
aucccgagcugguucaaag

SEQ ID NO: 2719744 - RNA, 19 nt, Artificial Sequence
  Description of Artificial Sequence: Synthetic oligonucleotide
uuucaacugaggauacauu

SEQ ID NO: 2719745 - RNA, 19 nt, Artificial Sequence
  Description of Artificial Sequence: Synthetic oligonucleotide
aggacacaagaccuccaag

SEQ ID NO: 2719746 - RNA, 19 nt, Artificial Sequence
  Description of Artificial Sequence: Synthetic oligonucleotide
agcugguucaaagggauga

SEQ ID NO: 2719747 - RNA, 19 nt, Artificial Sequence
  Description of Artificial Sequence: Synthetic oligonucleotide
uagaucccgagcugguuca

SEQ ID NO: 2719748 - RNA, 19 nt, Artificial Sequence
  Description of Artificial Sequence: Synthetic oligonucleotide
ucuuuugcucugucacuug

SEQ ID NO: 2719749 - RNA, 19 nt, Artificial Sequence
  Description of Artificial Sequence: Synthetic oligonucleotide
uguugacuccagagguaag

SEQ ID NO: 2719750 - RNA, 19 nt, Artificial Sequence
  Description of Artificial Sequence: Synthetic oligonucleotide
caacugaggauacauuaca

SEQ ID NO: 2719751 - RNA, 19 nt, Artificial Sequence
  Description of Artificial Sequence: Synthetic oligonucleotide
uaaaacccuugugacaaaa

SEQ ID NO: 2719752 - RNA, 19 nt, Artificial Sequence
  Description of Artificial Sequence: Synthetic oligonucleotide
ggaggaaauaguaguagug

SEQ ID NO: 2719753 - RNA, 19 nt, Artificial Sequence
  Description of Artificial Sequence: Synthetic oligonucleotide
ucggugucuucauggacca

SEQ ID NO: 2719754 - RNA, 19 nt, Artificial Sequence
  Description of Artificial Sequence: Synthetic oligonucleotide
auaaaccacgcgguucagg

SEQ ID NO: 2719755 - RNA, 19 nt, Artificial Sequence
  Description of Artificial Sequence: Synthetic oligonucleotide
ggauuucauacagaucccg

SEQ ID NO: 2719756 - RNA, 19 nt, Artificial Sequence
  Description of Artificial Sequence: Synthetic oligonucleotide
guagaucccgagcugguuc

SEQ ID NO: 2719757 - RNA, 19 nt, Artificial Sequence
  Description of Artificial Sequence: Synthetic oligonucleotide
ucggugacuuggaugcucu

SEQ ID NO: 2719758 - RNA, 19 nt, Artificial Sequence
  Description of Artificial Sequence: Synthetic oligonucleotide
agaggacagugucacagau

SEQ ID NO: 2719759 - RNA, 19 nt, Artificial Sequence
  Description of Artificial Sequence: Synthetic oligonucleotide
agaccuccaaguccuacga

SEQ ID NO: 2719760 - RNA, 19 nt, Artificial Sequence
  Description of Artificial Sequence: Synthetic oligonucleotide
ucuguugacuccagaggua

SEQ ID NO: 2719761 - RNA, 19 nt, Artificial Sequence
  Description of Artificial Sequence: Synthetic oligonucleotide
cuguuaccuauuaggcccc

SEQ ID NO: 2719762 - RNA, 19 nt, Artificial Sequence
  Description of Artificial Sequence: Synthetic oligonucleotide
uuggcuagcguaaggcaua

SEQ ID NO: 2719763 - RNA, 19 nt, Artificial Sequence
  Description of Artificial Sequence: Synthetic oligonucleotide
uugacuccagagguaagac

SEQ ID NO: 2719764 - RNA, 19 nt, Artificial Sequence
  Description of Artificial Sequence: Synthetic oligonucleotide
aagcacaguaaaacccuug

SEQ ID NO: 2719765 - RNA, 19 nt, Artificial Sequence
  Description of Artificial Sequence: Synthetic oligonucleotide
cugguucaaagggaugagg

SEQ ID NO: 2719766 - RNA, 19 nt, Artificial Sequence
  Description of Artificial Sequence: Synthetic oligonucleotide
uuggaugcucuguucaguu

SEQ ID NO: 2719767 - RNA, 19 nt, Artificial Sequence
  Description of Artificial Sequence: Synthetic oligonucleotide
cauaagcgggcacaagguc

SEQ ID NO: 2719768 - RNA, 19 nt, Artificial Sequence
  Description of Artificial Sequence: Synthetic oligonucleotide
ccagucggugucuucaugg

SEQ ID NO: 2719769 - RNA, 19 nt, Artificial Sequence
  Description of Artificial Sequence: Synthetic oligonucleotide
uggcgggucgcccacauuu

SEQ ID NO: 2719770 - RNA, 19 nt, Artificial Sequence
  Description of Artificial Sequence: Synthetic oligonucleotide
ucguuccaucugcagcagg

SEQ ID NO: 2719771 - RNA, 19 nt, Artificial Sequence
  Description of Artificial Sequence: Synthetic oligonucleotide
ugggaugaccucucucucu

SEQ ID NO: 2719772 - RNA, 19 nt, Artificial Sequence
  Description of Artificial Sequence: Synthetic oligonucleotide
acuaagcuguuaccuauua

SEQ ID NO: 2719773 - RNA, 19 nt, Artificial Sequence
  Description of Artificial Sequence: Synthetic oligonucleotide
uuguagaucccgagcuggu

SEQ ID NO: 2719774 - RNA, 19 nt, Artificial Sequence
  Description of Artificial Sequence: Synthetic oligonucleotide
caagauuggacuuguagau

SEQ ID NO: 2719775 - RNA, 19 nt, Artificial Sequence
  Description of Artificial Sequence: Synthetic oligonucleotide
uaagcacaguaaaacccuu

SEQ ID NO: 2719776 - RNA, 19 nt, Artificial Sequence
  Description of Artificial Sequence: Synthetic oligonucleotide
augaccucucucucuuuug

SEQ ID NO: 2719777 - RNA, 19 nt, Artificial Sequence
  Description of Artificial Sequence: Synthetic oligonucleotide
cagaauuuuguuccaacua

SEQ ID NO: 2719778 - RNA, 19 nt, Artificial Sequence
  Description of Artificial Sequence: Synthetic oligonucleotide
ugagacccgccacggagga

SEQ ID NO: 2719779 - RNA, 19 nt, Artificial Sequence
  Description of Artificial Sequence: Synthetic oligonucleotide
uuacagugaugagacccgc

SEQ ID NO: 2719780 - RNA, 19 nt, Artificial Sequence
  Description of Artificial Sequence: Synthetic oligonucleotide
gagucggagaaaggacugg

SEQ ID NO: 2719781 - RNA, 19 nt, Artificial Sequence
  Description of Artificial Sequence: Synthetic oligonucleotide
ccaagauuggacuuguaga

SEQ ID NO: 2719782 - RNA, 19 nt, Artificial Sequence
  Description of Artificial Sequence: Synthetic oligonucleotide
acugugucuaggagcaaag

SEQ ID NO: 2719783 - RNA, 19 nt, Artificial Sequence
  Description of Artificial Sequence: Synthetic oligonucleotide
uucucucuguugacuccag

SEQ ID NO: 2719784 - RNA, 19 nt, Artificial Sequence
  Description of Artificial Sequence: Synthetic oligonucleotide
uccagagguaagacccaca

SEQ ID NO: 2719785 - RNA, 19 nt, Artificial Sequence
  Description of Artificial Sequence: Synthetic oligonucleotide
uucacccagaggacagugu

SEQ ID NO: 2719786 - RNA, 19 nt, Artificial Sequence
  Description of Artificial Sequence: Synthetic oligonucleotide
ucuaggagcaaaggaggau

SEQ ID NO: 2719787 - RNA, 19 nt, Artificial Sequence
  Description of Artificial Sequence: Synthetic oligonucleotide
cauggaccacgcuguaccc

SEQ ID NO: 2719788 - RNA, 19 nt, Artificial Sequence
  Description of Artificial Sequence: Synthetic oligonucleotide
gauuggacuuguagauccc

SEQ ID NO: 2719789 - RNA, 19 nt, Artificial Sequence
  Description of Artificial Sequence: Synthetic oligonucleotide
caguaaaacccuugugaca

SEQ ID NO: 2719790 - RNA, 19 nt, Artificial Sequence
  Description of Artificial Sequence: Synthetic oligonucleotide
caaguccuacgacaccaag

SEQ ID NO: 2719791 - RNA, 19 nt, Artificial Sequence
  Description of Artificial Sequence: Synthetic oligonucleotide
guugacuccagagguaaga

SEQ ID NO: 2719792 - RNA, 19 nt, Artificial Sequence
  Description of Artificial Sequence: Synthetic oligonucleotide
caguuucaacugaggauac

SEQ ID NO: 2719793 - RNA, 19 nt, Artificial Sequence
  Description of Artificial Sequence: Synthetic oligonucleotide
aggaugucacagaaguucu

SEQ ID NO: 2719794 - RNA, 19 nt, Artificial Sequence
  Description of Artificial Sequence: Synthetic oligonucleotide
ugcugccucagagagugga

SEQ ID NO: 2719795 - RNA, 19 nt, Artificial Sequence
  Description of Artificial Sequence: Synthetic oligonucleotide
ggacuuguagaucccgagc

SEQ ID NO: 2719796 - RNA, 19 nt, Artificial Sequence
  Description of Artificial Sequence: Synthetic oligonucleotide
ucucucuguugacuccaga

SEQ ID NO: 2719797 - RNA, 19 nt, Artificial Sequence
  Description of Artificial Sequence: Synthetic oligonucleotide
ugacuuggaugcucuguuc

SEQ ID NO: 2719798 - RNA, 19 nt, Artificial Sequence
  Description of Artificial Sequence: Synthetic oligonucleotide
ugaggaugucacagaaguu

SEQ ID NO: 2719799 - RNA, 19 nt, Artificial Sequence
  Description of Artificial Sequence: Synthetic oligonucleotide
cacacucuucacccagagg

SEQ ID NO: 2719800 - RNA, 19 nt, Artificial Sequence
  Description of Artificial Sequence: Synthetic oligonucleotide
cugugucuaggagcaaagg

SEQ ID NO: 2719801 - RNA, 19 nt, Artificial Sequence
  Description of Artificial Sequence: Synthetic oligonucleotide
uugcucugucacuugccac

SEQ ID NO: 2719802 - RNA, 19 nt, Artificial Sequence
  Description of Artificial Sequence: Synthetic oligonucleotide
ccuacgacaccaagauugg

SEQ ID NO: 2719803 - RNA, 19 nt, Artificial Sequence
  Description of Artificial Sequence: Synthetic oligonucleotide
gaggacacaagaccuccaa

SEQ ID NO: 2719804 - RNA, 19 nt, Artificial Sequence
  Description of Artificial Sequence: Synthetic oligonucleotide
augagacccgccacggagg

SEQ ID NO: 2719805 - RNA, 19 nt, Artificial Sequence
  Description of Artificial Sequence: Synthetic oligonucleotide
cagguuggcuagcguaagg

SEQ ID NO: 2719806 - RNA, 19 nt, Artificial Sequence
  Description of Artificial Sequence: Synthetic oligonucleotide
gaggacagugucacagaug

SEQ ID NO: 2719807 - RNA, 19 nt, Artificial Sequence
  Description of Artificial Sequence: Synthetic oligonucleotide
agacccgccacggaggaca

SEQ ID NO: 2719808 - RNA, 19 nt, Artificial Sequence
  Description of Artificial Sequence: Synthetic oligonucleotide
uguuccaacuaagcuguua

SEQ ID NO: 2719809 - RNA, 19 nt, Artificial Sequence
  Description of Artificial Sequence: Synthetic oligonucleotide
aaggcauaagcgggcacaa

SEQ ID NO: 2719810 - RNA, 19 nt, Artificial Sequence
  Description of Artificial Sequence: Synthetic oligonucleotide
cucuguugacuccagaggu

SEQ ID NO: 2719811 - RNA, 19 nt, Artificial Sequence
  Description of Artificial Sequence: Synthetic oligonucleotide
agguaagacccacacucuu

SEQ ID NO: 2719812 - RNA, 19 nt, Artificial Sequence
  Description of Artificial Sequence: Synthetic oligonucleotide
ccacggaggacacaagacc

SEQ ID NO: 2719813 - RNA, 19 nt, Artificial Sequence
  Description of Artificial Sequence: Synthetic oligonucleotide
agucggagaaaggacugga

SEQ ID NO: 2719814 - RNA, 19 nt, Artificial Sequence
  Description of Artificial Sequence: Synthetic oligonucleotide
cccgagcugguucaaaggg

SEQ ID NO: 2719815 - RNA, 19 nt, Artificial Sequence
  Description of Artificial Sequence: Synthetic oligonucleotide
acagaucccggaccaggcu

SEQ ID NO: 2719816 - RNA, 19 nt, Artificial Sequence
  Description of Artificial Sequence: Synthetic oligonucleotide
cagaucccggaccaggcuc

SEQ ID NO: 2719817 - RNA, 19 nt, Artificial Sequence
  Description of Artificial Sequence: Synthetic oligonucleotide
uaagacccacacucuucac

SEQ ID NO: 2719818 - RNA, 19 nt, Artificial Sequence
  Description of Artificial Sequence: Synthetic oligonucleotide
aaaccacgcgguucagguu

SEQ ID NO: 2719819 - RNA, 19 nt, Artificial Sequence
  Description of Artificial Sequence: Synthetic oligonucleotide
ccagagguaagacccacac

SEQ ID NO: 2719820 - RNA, 19 nt, Artificial Sequence
  Description of Artificial Sequence: Synthetic oligonucleotide
uguacccaggagagcccug

SEQ ID NO: 2719821 - RNA, 19 nt, Artificial Sequence
  Description of Artificial Sequence: Synthetic oligonucleotide
ggacacaagaccuccaagu

SEQ ID NO: 2719822 - RNA, 19 nt, Artificial Sequence
  Description of Artificial Sequence: Synthetic oligonucleotide
guuucaacugaggauacau

SEQ ID NO: 2719823 - RNA, 19 nt, Artificial Sequence
  Description of Artificial Sequence: Synthetic oligonucleotide
acgcgguucagguuggcua

SEQ ID NO: 2719824 - RNA, 19 nt, Artificial Sequence
  Description of Artificial Sequence: Synthetic oligonucleotide
cuucacccagaggacagug

SEQ ID NO: 2719825 - RNA, 19 nt, Artificial Sequence
  Description of Artificial Sequence: Synthetic oligonucleotide
uagcgggucuucaguuuca

SEQ ID NO: 2719826 - RNA, 19 nt, Artificial Sequence
  Description of Artificial Sequence: Synthetic oligonucleotide
gugucuucauggaccacgc

SEQ ID NO: 2719827 - RNA, 19 nt, Artificial Sequence
  Description of Artificial Sequence: Synthetic oligonucleotide
acaccaagauuggacuugu

SEQ ID NO: 2719828 - RNA, 19 nt, Artificial Sequence
  Description of Artificial Sequence: Synthetic oligonucleotide
guaaggcauaagcgggcac

SEQ ID NO: 2719829 - RNA, 19 nt, Artificial Sequence
  Description of Artificial Sequence: Synthetic oligonucleotide
aacuaagcuguuaccuauu

SEQ ID NO: 2719830 - RNA, 19 nt, Artificial Sequence
  Description of Artificial Sequence: Synthetic oligonucleotide
gagccagucggugucuuca

SEQ ID NO: 2719831 - RNA, 19 nt, Artificial Sequence
  Description of Artificial Sequence: Synthetic oligonucleotide
cacggaggacacaagaccu

SEQ ID NO: 2719832 - RNA, 19 nt, Artificial Sequence
  Description of Artificial Sequence: Synthetic oligonucleotide
acggaggacacaagaccuc

SEQ ID NO: 2719833 - RNA, 19 nt, Artificial Sequence
  Description of Artificial Sequence: Synthetic oligonucleotide
accuagcgggucuucaguu

SEQ ID NO: 2719834 - RNA, 19 nt, Artificial Sequence
  Description of Artificial Sequence: Synthetic oligonucleotide
cauacagaucccggaccag

SEQ ID NO: 2719835 - RNA, 19 nt, Artificial Sequence
  Description of Artificial Sequence: Synthetic oligonucleotide
gaccacgcuguacccagga

SEQ ID NO: 2719836 - RNA, 19 nt, Artificial Sequence
  Description of Artificial Sequence: Synthetic oligonucleotide
gaccuccaaguccuacgac

SEQ ID NO: 2719837 - RNA, 19 nt, Artificial Sequence
  Description of Artificial Sequence: Synthetic oligonucleotide
gguuggcuagcguaaggca

SEQ ID NO: 2719838 - RNA, 19 nt, Artificial Sequence
  Description of Artificial Sequence: Synthetic oligonucleotide
gccucagagaguggaauag

SEQ ID NO: 2719839 - RNA, 19 nt, Artificial Sequence
  Description of Artificial Sequence: Synthetic oligonucleotide
ggagucggagaaaggacug

SEQ ID NO: 2719840 - RNA, 19 nt, Artificial Sequence
  Description of Artificial Sequence: Synthetic oligonucleotide
uguagaucccgagcugguu

SEQ ID NO: 2719841 - RNA, 19 nt, Artificial Sequence
  Description of Artificial Sequence: Synthetic oligonucleotide
gguaagacccacacucuuc

SEQ ID NO: 2719842 - RNA, 19 nt, Artificial Sequence
  Description of Artificial Sequence: Synthetic oligonucleotide
acagugucacagauguaau

SEQ ID NO: 2719843 - RNA, 19 nt, Artificial Sequence
  Description of Artificial Sequence: Synthetic oligonucleotide
uaguaguggcgggucgccc

SEQ ID NO: 2719844 - RNA, 19 nt, Artificial Sequence
  Description of Artificial Sequence: Synthetic oligonucleotide
gagcugguucaaagggaug

SEQ ID NO: 2719845 - RNA, 19 nt, Artificial Sequence
  Description of Artificial Sequence: Synthetic oligonucleotide
cuccagagguaagacccac

SEQ ID NO: 2719846 - RNA, 19 nt, Artificial Sequence
  Description of Artificial Sequence: Synthetic oligonucleotide
acgcuguacccaggagagc

SEQ ID NO: 2719847 - RNA, 19 nt, Artificial Sequence
  Description of Artificial Sequence: Synthetic oligonucleotide
guaguggcgggucgcccac

SEQ ID NO: 2719848 - RNA, 19 nt, Artificial Sequence
  Description of Artificial Sequence: Synthetic oligonucleotide
gcucagcaggaggaaauag

SEQ ID NO: 2719849 - RNA, 19 nt, Artificial Sequence
  Description of Artificial Sequence: Synthetic oligonucleotide
agaucccggaccaggcuca

SEQ ID NO: 2719850 - RNA, 19 nt, Artificial Sequence
  Description of Artificial Sequence: Synthetic oligonucleotide
cagugucacagauguaaua

SEQ ID NO: 2719851 - RNA, 19 nt, Artificial Sequence
  Description of Artificial Sequence: Synthetic oligonucleotide
caggagagcccugggauga

SEQ ID NO: 2719852 - RNA, 19 nt, Artificial Sequence
  Description of Artificial Sequence: Synthetic oligonucleotide
guuggcuagcguaaggcau

SEQ ID NO: 2719853 - RNA, 19 nt, Artificial Sequence
  Description of Artificial Sequence: Synthetic oligonucleotide
acaaggucggugacuugga

SEQ ID NO: 2719854 - RNA, 19 nt, Artificial Sequence
  Description of Artificial Sequence: Synthetic oligonucleotide
cagucggugucuucaugga

SEQ ID NO: 2719855 - RNA, 19 nt, Artificial Sequence
  Description of Artificial Sequence: Synthetic oligonucleotide
cacccagaggacaguguca

SEQ ID NO: 2719856 - RNA, 19 nt, Artificial Sequence
  Description of Artificial Sequence: Synthetic oligonucleotide
cgcuguacccaggagagcc

SEQ ID NO: 2719857 - RNA, 19 nt, Artificial Sequence
  Description of Artificial Sequence: Synthetic oligonucleotide
auggaccacgcuguaccca

SEQ ID NO: 2719858 - RNA, 19 nt, Artificial Sequence
  Description of Artificial Sequence: Synthetic oligonucleotide
gcugguucaaagggaugag

SEQ ID NO: 2719859 - RNA, 19 nt, Artificial Sequence
  Description of Artificial Sequence: Synthetic oligonucleotide
cacagaaguucuucacugu

SEQ ID NO: 2719860 - RNA, 19 nt, Artificial Sequence
  Description of Artificial Sequence: Synthetic oligonucleotide
uggcuagcguaaggcauaa

SEQ ID NO: 2719861 - RNA, 19 nt, Artificial Sequence
  Description of Artificial Sequence: Synthetic oligonucleotide
caaaaccuagcgggucuuc

SEQ ID NO: 2719862 - RNA, 19 nt, Artificial Sequence
  Description of Artificial Sequence: Synthetic oligonucleotide
cucguuccaucugcagcag

SEQ ID NO: 2719863 - RNA, 19 nt, Artificial Sequence
  Description of Artificial Sequence: Synthetic oligonucleotide
aguggcgggucgcccacau

SEQ ID NO: 2719864 - RNA, 19 nt, Artificial Sequence
  Description of Artificial Sequence: Synthetic oligonucleotide
gagguaagacccacacucu

SEQ ID NO: 2719865 - RNA, 19 nt, Artificial Sequence
  Description of Artificial Sequence: Synthetic oligonucleotide
aggacuggagccagucggu

SEQ ID NO: 2719866 - RNA, 19 nt, Artificial Sequence
  Description of Artificial Sequence: Synthetic oligonucleotide
gucggugacuuggaugcuc

SEQ ID NO: 2719867 - RNA, 19 nt, Artificial Sequence
  Description of Artificial Sequence: Synthetic oligonucleotide
aggagagcccugggaugac

SEQ ID NO: 2719868 - RNA, 19 nt, Artificial Sequence
  Description of Artificial Sequence: Synthetic oligonucleotide
gggucgcccacauuugcca

SEQ ID NO: 2719869 - RNA, 19 nt, Artificial Sequence
  Description of Artificial Sequence: Synthetic oligonucleotide
acuccagagguaagaccca

SEQ ID NO: 2719870 - RNA, 19 nt, Artificial Sequence
  Description of Artificial Sequence: Synthetic oligonucleotide
agcccugggaugaccucuc

SEQ ID NO: 2719871 - RNA, 19 nt, Artificial Sequence
  Description of Artificial Sequence: Synthetic oligonucleotide
aggcauaagcgggcacaag

SEQ ID NO: 2719872 - RNA, 19 nt, Artificial Sequence
  Description of Artificial Sequence: Synthetic oligonucleotide
cacugugucuaggagcaaa

SEQ ID NO: 2719873 - RNA, 19 nt, Artificial Sequence
  Description of Artificial Sequence: Synthetic oligonucleotide
gguucaaagggaugaggau

SEQ ID NO: 2719874 - RNA, 19 nt, Artificial Sequence
  Description of Artificial Sequence: Synthetic oligonucleotide
aggauacauuacagugaug

SEQ ID NO: 2719875 - RNA, 19 nt, Artificial Sequence
  Description of Artificial Sequence: Synthetic oligonucleotide
cagcaggauuucauacaga

SEQ ID NO: 2719876 - RNA, 19 nt, Artificial Sequence
  Description of Artificial Sequence: Synthetic oligonucleotide
accacgcgguucagguugg

SEQ ID NO: 2719877 - RNA, 19 nt, Artificial Sequence
  Description of Artificial Sequence: Synthetic oligonucleotide
gcgggcacaaggucgguga

SEQ ID NO: 2719878 - RNA, 19 nt, Artificial Sequence
  Description of Artificial Sequence: Synthetic oligonucleotide
agccagucggugucuucau

SEQ ID NO: 2719879 - RNA, 19 nt, Artificial Sequence
  Description of Artificial Sequence: Synthetic oligonucleotide
ccaacuaagcuguuaccua

SEQ ID NO: 2719880 - RNA, 19 nt, Artificial Sequence
  Description of Artificial Sequence: Synthetic oligonucleotide
agcgggcacaaggucggug

SEQ ID NO: 2719881 - RNA, 19 nt, Artificial Sequence
  Description of Artificial Sequence: Synthetic oligonucleotide
gcguaaggcauaagcgggc

SEQ ID NO: 2719882 - RNA, 19 nt, Artificial Sequence
  Description of Artificial Sequence: Synthetic oligonucleotide
gccacggaggacacaagac

SEQ ID NO: 2719883 - RNA, 19 nt, Artificial Sequence
  Description of Artificial Sequence: Synthetic oligonucleotide
gaucccggaccaggcucag

SEQ ID NO: 2719884 - RNA, 19 nt, Artificial Sequence
  Description of Artificial Sequence: Synthetic oligonucleotide
aucccggaccaggcucagc

SEQ ID NO: 2719885 - RNA, 19 nt, Artificial Sequence
  Description of Artificial Sequence: Synthetic oligonucleotide
ccacauuugccauuucucu

SEQ ID NO: 2719886 - RNA, 19 nt, Artificial Sequence
  Description of Artificial Sequence: Synthetic oligonucleotide
cgcgguucagguuggcuag

SEQ ID NO: 2719887 - RNA, 19 nt, Artificial Sequence
  Description of Artificial Sequence: Synthetic oligonucleotide
uuguuccaacuaagcuguu

SEQ ID NO: 2719888 - RNA, 19 nt, Artificial Sequence
  Description of Artificial Sequence: Synthetic oligonucleotide
gcaggauuucauacagauc

SEQ ID NO: 2719889 - RNA, 19 nt, Artificial Sequence
  Description of Artificial Sequence: Synthetic oligonucleotide
cgggucuucaguuucaacu

SEQ ID NO: 2719890 - RNA, 19 nt, Artificial Sequence
  Description of Artificial Sequence: Synthetic oligonucleotide
cguuccaucugcagcagga

SEQ ID NO: 2719891 - RNA, 19 nt, Artificial Sequence
  Description of Artificial Sequence: Synthetic oligonucleotide
gcaggaggaaauaguagua

SEQ ID NO: 2719892 - RNA, 19 nt, Artificial Sequence
  Description of Artificial Sequence: Synthetic oligonucleotide
ccacucguuccaucugcag

SEQ ID NO: 2719893 - RNA, 19 nt, Artificial Sequence
  Description of Artificial Sequence: Synthetic oligonucleotide
cucuuuugcucugucacuu

SEQ ID NO: 2719894 - RNA, 19 nt, Artificial Sequence
  Description of Artificial Sequence: Synthetic oligonucleotide
cuacgacaccaagauugga

SEQ ID NO: 2719895 - RNA, 19 nt, Artificial Sequence
  Description of Artificial Sequence: Synthetic oligonucleotide
gagcccugggaugaccucu

SEQ ID NO: 2719896 - RNA, 19 nt, Artificial Sequence
  Description of Artificial Sequence: Synthetic oligonucleotide
gcgggucgcccacauuugc

SEQ ID NO: 2719897 - RNA, 19 nt, Artificial Sequence
  Description of Artificial Sequence: Synthetic oligonucleotide
ggacuggagccagucggug

SEQ ID NO: 2719898 - RNA, 19 nt, Artificial Sequence
  Description of Artificial Sequence: Synthetic oligonucleotide
gaucccgagcugguucaaa

SEQ ID NO: 2719899 - RNA, 19 nt, Artificial Sequence
  Description of Artificial Sequence: Synthetic oligonucleotide
gccagucggugucuucaug

SEQ ID NO: 2719900 - RNA, 19 nt, Artificial Sequence
  Description of Artificial Sequence: Synthetic oligonucleotide
cagagguaagacccacacu

SEQ ID NO: 2719901 - RNA, 19 nt, Artificial Sequence
  Description of Artificial Sequence: Synthetic oligonucleotide
ggagagcccugggaugacc

SEQ ID NO: 2719902 - RNA, 19 nt, Artificial Sequence
  Description of Artificial Sequence: Synthetic oligonucleotide
agcgggucuucaguuucaa

SEQ ID NO: 2719903 - RNA, 19 nt, Artificial Sequence
  Description of Artificial Sequence: Synthetic oligonucleotide
ggaauaggagucggagaaa

SEQ ID NO: 2719904 - RNA, 19 nt, Artificial Sequence
  Description of Artificial Sequence: Synthetic oligonucleotide
gcccacauuugccauuucu

SEQ ID NO: 2719905 - RNA, 19 nt, Artificial Sequence
  Description of Artificial Sequence: Synthetic oligonucleotide
ccgagcugguucaaaggga

SEQ ID NO: 2719906 - RNA, 19 nt, Artificial Sequence
  Description of Artificial Sequence: Synthetic oligonucleotide
gcauaagcgggcacaaggu

SEQ ID NO: 2719907 - RNA, 19 nt, Artificial Sequence
  Description of Artificial Sequence: Synthetic oligonucleotide
cuucauggaccacgcugua

SEQ ID NO: 2719908 - RNA, 19 nt, Artificial Sequence
  Description of Artificial Sequence: Synthetic oligonucleotide
aagcgggcacaaggucggu

SEQ ID NO: 2719909 - RNA, 19 nt, Artificial Sequence
  Description of Artificial Sequence: Synthetic oligonucleotide
cgggucgcccacauuugcc

SEQ ID NO: 2719910 - RNA, 19 nt, Artificial Sequence
  Description of Artificial Sequence: Synthetic oligonucleotide
gggaugaccucucucucuu

SEQ ID NO: 2719911 - RNA, 19 nt, Artificial Sequence
  Description of Artificial Sequence: Synthetic oligonucleotide
ggagccagucggugucuuc

SEQ ID NO: 2719912 - RNA, 19 nt, Artificial Sequence
  Description of Artificial Sequence: Synthetic oligonucleotide
gcgggucuucaguuucaac

SEQ ID NO: 2719913 - RNA, 19 nt, Artificial Sequence
  Description of Artificial Sequence: Synthetic oligonucleotide
gacccgccacggaggacac

SEQ ID NO: 2719914 - RNA, 19 nt, Artificial Sequence
  Description of Artificial Sequence: Synthetic oligonucleotide
ggaccacgcuguacccagg

SEQ ID NO: 2719915 - RNA, 19 nt, Artificial Sequence
  Description of Artificial Sequence: Synthetic oligonucleotide
uaguggcgggucgcccaca

SEQ ID NO: 2719916 - RNA, 19 nt, Artificial Sequence
  Description of Artificial Sequence: Synthetic oligonucleotide
gagacccgccacggaggac

SEQ ID NO: 2719917 - RNA, 19 nt, Artificial Sequence
  Description of Artificial Sequence: Synthetic oligonucleotide
agaucccgagcugguucaa

SEQ ID NO: 2719918 - RNA, 19 nt, Artificial Sequence
  Description of Artificial Sequence: Synthetic oligonucleotide
gcacaaggucggugacuug

SEQ ID NO: 2719919 - RNA, 19 nt, Artificial Sequence
  Description of Artificial Sequence: Synthetic oligonucleotide
ggcgggucgcccacauuug

SEQ ID NO: 2719920 - RNA, 19 nt, Artificial Sequence
  Description of Artificial Sequence: Synthetic oligonucleotide
gguucagguuggcuagcgu

SEQ ID NO: 2719921 - RNA, 19 nt, Artificial Sequence
  Description of Artificial Sequence: Synthetic oligonucleotide
gcaaaggaggaugcugccu

SEQ ID NO: 2719922 - RNA, 19 nt, Artificial Sequence
  Description of Artificial Sequence: Synthetic oligonucleotide
cuguacccaggagagcccu

SEQ ID NO: 2719923 - RNA, 19 nt, Artificial Sequence
  Description of Artificial Sequence: Synthetic oligonucleotide
cccaaaaccuagcgggucu

SEQ ID NO: 2719924 - RNA, 19 nt, Artificial Sequence
  Description of Artificial Sequence: Synthetic oligonucleotide
caaggucggugacuuggau

SEQ ID NO: 2719925 - RNA, 19 nt, Artificial Sequence
  Description of Artificial Sequence: Synthetic oligonucleotide
caccaagauuggacuugua

SEQ ID NO: 2719926 - RNA, 19 nt, Artificial Sequence
  Description of Artificial Sequence: Synthetic oligonucleotide
gccacucguuccaucugca

SEQ ID NO: 2719927 - RNA, 19 nt, Artificial Sequence
  Description of Artificial Sequence: Synthetic oligonucleotide
ccaaguccuacgacaccaa

SEQ ID NO: 2719928 - RNA, 19 nt, Artificial Sequence
  Description of Artificial Sequence: Synthetic oligonucleotide
ggcuagcguaaggcauaag

SEQ ID NO: 2719929 - RNA, 19 nt, Artificial Sequence
  Description of Artificial Sequence: Synthetic oligonucleotide
gucgcccacauuugccauu

SEQ ID NO: 2719930 - RNA, 19 nt, Artificial Sequence
  Description of Artificial Sequence: Synthetic oligonucleotide
guccuacgacaccaagauu

SEQ ID NO: 2719931 - RNA, 19 nt, Artificial Sequence
  Description of Artificial Sequence: Synthetic oligonucleotide
cguaaggcauaagcgggca

SEQ ID NO: 2719932 - RNA, 19 nt, Artificial Sequence
  Description of Artificial Sequence: Synthetic oligonucleotide
ccauuucucucuguugacu

SEQ ID NO: 2719933 - RNA, 19 nt, Artificial Sequence
  Description of Artificial Sequence: Synthetic oligonucleotide
gcugccucagagaguggaa

SEQ ID NO: 2719934 - RNA, 19 nt, Artificial Sequence
  Description of Artificial Sequence: Synthetic oligonucleotide
gcgguucagguuggcuagc

SEQ ID NO: 2719935 - RNA, 19 nt, Artificial Sequence
  Description of Artificial Sequence: Synthetic oligonucleotide
cgccacggaggacacaaga

SEQ ID NO: 2719936 - RNA, 19 nt, Artificial Sequence
  Description of Artificial Sequence: Synthetic oligonucleotide
ggucgcccacauuugccau

SEQ ID NO: 2719937 - RNA, 19 nt, Artificial Sequence
  Description of Artificial Sequence: Synthetic oligonucleotide
cacgcgguucagguuggcu

SEQ ID NO: 2719938 - RNA, 19 nt, Artificial Sequence
  Description of Artificial Sequence: Synthetic oligonucleotide
ccgccacggaggacacaag

SEQ ID NO: 2719939 - RNA, 19 nt, Artificial Sequence
  Description of Artificial Sequence: Synthetic oligonucleotide
gggcacaaggucggugacu

SEQ ID NO: 2719940 - RNA, 19 nt, Artificial Sequence
  Description of Artificial Sequence: Synthetic oligonucleotide
cggugacuuggaugcucug

SEQ ID NO: 2719941 - RNA, 19 nt, Artificial Sequence
  Description of Artificial Sequence: Synthetic oligonucleotide
acccgccacggaggacaca

SEQ ID NO: 2719942 - RNA, 19 nt, Artificial Sequence
  Description of Artificial Sequence: Synthetic oligonucleotide
ccacgcgguucagguuggc

SEQ ID NO: 2719943 - RNA, 19 nt, Artificial Sequence
  Description of Artificial Sequence: Synthetic oligonucleotide
cacuugccacucguuccau

SEQ ID NO: 2719944 - RNA, 19 nt, Artificial Sequence
  Description of Artificial Sequence: Synthetic oligonucleotide
cgacaccaagauuggacuu

SEQ ID NO: 2719945 - RNA, 19 nt, Artificial Sequence
  Description of Artificial Sequence: Synthetic oligonucleotide
ggucggugacuuggaugcu

SEQ ID NO: 2719946 - RNA, 19 nt, Artificial Sequence
  Description of Artificial Sequence: Synthetic oligonucleotide
guggcgggucgcccacauu

SEQ ID NO: 2719947 - RNA, 19 nt, Artificial Sequence
  Description of Artificial Sequence: Synthetic oligonucleotide
ccaaaaccuagcgggucuu

SEQ ID NO: 2719948 - RNA, 19 nt, Artificial Sequence
  Description of Artificial Sequence: Synthetic oligonucleotide
aaaaggaacacacagggca

SEQ ID NO: 2719949 - RNA, 19 nt, Artificial Sequence
  Description of Artificial Sequence: Synthetic oligonucleotide
guagagaugaacuuggagc

SEQ ID NO: 2719950 - RNA, 19 nt, Artificial Sequence
  Description of Artificial Sequence: Synthetic oligonucleotide
aacagucccaaucccagcc

SEQ ID NO: 2719951 - RNA, 19 nt, Artificial Sequence
  Description of Artificial Sequence: Synthetic oligonucleotide
aaggguuccuggcauaacc

SEQ ID NO: 2719952 - RNA, 19 nt, Artificial Sequence
  Description of Artificial Sequence: Synthetic oligonucleotide
ugaaguuggaggacgaggg

SEQ ID NO: 2719953 - RNA, 19 nt, Artificial Sequence
  Description of Artificial Sequence: Synthetic oligonucleotide
agaaaggccaccauuaggc

SEQ ID NO: 2719954 - RNA, 19 nt, Artificial Sequence
  Description of Artificial Sequence: Synthetic oligonucleotide
aaugacgcugguuuggaag

SEQ ID NO: 2719955 - RNA, 19 nt, Artificial Sequence
  Description of Artificial Sequence: Synthetic oligonucleotide
accauuaggcaaaagagcc

SEQ ID NO: 2719956 - RNA, 19 nt, Artificial Sequence
  Description of Artificial Sequence: Synthetic oligonucleotide
gaacacacagggcagacgg

SEQ ID NO: 2719957 - RNA, 19 nt, Artificial Sequence
  Description of Artificial Sequence: Synthetic oligonucleotide
ggaaaaggaacacacaggg

SEQ ID NO: 2719958 - RNA, 19 nt, Artificial Sequence
  Description of Artificial Sequence: Synthetic oligonucleotide
cacgaaagaacuaugggag

SEQ ID NO: 2719959 - RNA, 19 nt, Artificial Sequence
  Description of Artificial Sequence: Synthetic oligonucleotide
ugagaggugcuccugagag

SEQ ID NO: 2719960 - RNA, 19 nt, Artificial Sequence
  Description of Artificial Sequence: Synthetic oligonucleotide
uacaggaaaaggaacacac

SEQ ID NO: 2719961 - RNA, 19 nt, Artificial Sequence
  Description of Artificial Sequence: Synthetic oligonucleotide
uagagaugaacuuggagca

SEQ ID NO: 2719962 - RNA, 19 nt, Artificial Sequence
  Description of Artificial Sequence: Synthetic oligonucleotide
uaaccaaugaugaggcucc

SEQ ID NO: 2719963 - RNA, 19 nt, Artificial Sequence
  Description of Artificial Sequence: Synthetic oligonucleotide
aaugaugaggcucccaaaa

SEQ ID NO: 2719964 - RNA, 19 nt, Artificial Sequence
  Description of Artificial Sequence: Synthetic oligonucleotide
gacacgaaagaacuauggg

SEQ ID NO: 2719965 - RNA, 19 nt, Artificial Sequence
  Description of Artificial Sequence: Synthetic oligonucleotide
uggaaguggagacagcugc

SEQ ID NO: 2719966 - RNA, 19 nt, Artificial Sequence
  Description of Artificial Sequence: Synthetic oligonucleotide
aaguuggaggacgaggggc

SEQ ID NO: 2719967 - RNA, 19 nt, Artificial Sequence
  Description of Artificial Sequence: Synthetic oligonucleotide
ucugagagggcaaagccca

SEQ ID NO: 2719968 - RNA, 19 nt, Artificial Sequence
  Description of Artificial Sequence: Synthetic oligonucleotide
uagggaugagugaaguugg

SEQ ID NO: 2719969 - RNA, 19 nt, Artificial Sequence
  Description of Artificial Sequence: Synthetic oligonucleotide
caggcauacauuuucgggg

SEQ ID NO: 2719970 - RNA, 19 nt, Artificial Sequence
  Description of Artificial Sequence: Synthetic oligonucleotide
aaagaacuaugggaggugg

SEQ ID NO: 2719971 - RNA, 19 nt, Artificial Sequence
  Description of Artificial Sequence: Synthetic oligonucleotide
uuuauuugucuucucucug

SEQ ID NO: 2719972 - RNA, 19 nt, Artificial Sequence
  Description of Artificial Sequence: Synthetic oligonucleotide
caggaaaaggaacacacag

SEQ ID NO: 2719973 - RNA, 19 nt, Artificial Sequence
  Description of Artificial Sequence: Synthetic oligonucleotide
aaucgcguaggagaagagc

SEQ ID NO: 2719974 - RNA, 19 nt, Artificial Sequence
  Description of Artificial Sequence: Synthetic oligonucleotide
auuuauuugucuucucucu

SEQ ID NO: 2719975 - RNA, 19 nt, Artificial Sequence
  Description of Artificial Sequence: Synthetic oligonucleotide
aaaagagccccauggccuc

SEQ ID NO: 2719976 - RNA, 19 nt, Artificial Sequence
  Description of Artificial Sequence: Synthetic oligonucleotide
acacgaaagaacuauggga

SEQ ID NO: 2719977 - RNA, 19 nt, Artificial Sequence
  Description of Artificial Sequence: Synthetic oligonucleotide
aggcaaaagagccccaugg

SEQ ID NO: 2719978 - RNA, 19 nt, Artificial Sequence
  Description of Artificial Sequence: Synthetic oligonucleotide
augacgcugguuuggaagc

SEQ ID NO: 2719979 - RNA, 19 nt, Artificial Sequence
  Description of Artificial Sequence: Synthetic oligonucleotide
aaacagucccaaucccagc

SEQ ID NO: 2719980 - RNA, 19 nt, Artificial Sequence
  Description of Artificial Sequence: Synthetic oligonucleotide
uauuuauuugucuucucuc

SEQ ID NO: 2719981 - RNA, 19 nt, Artificial Sequence
  Description of Artificial Sequence: Synthetic oligonucleotide
gaugagugaaguuggagga

SEQ ID NO: 2719982 - RNA, 19 nt, Artificial Sequence
  Description of Artificial Sequence: Synthetic oligonucleotide
uuugucuucucucugucaa

SEQ ID NO: 2719983 - RNA, 19 nt, Artificial Sequence
  Description of Artificial Sequence: Synthetic oligonucleotide
aacuaugggagguggaagu

SEQ ID NO: 2719984 - RNA, 19 nt, Artificial Sequence
  Description of Artificial Sequence: Synthetic oligonucleotide
aaaacagucccaaucccag

SEQ ID NO: 2719985 - RNA, 19 nt, Artificial Sequence
  Description of Artificial Sequence: Synthetic oligonucleotide
augucucuggaaaugacgc

SEQ ID NO: 2719986 - RNA, 19 nt, Artificial Sequence
  Description of Artificial Sequence: Synthetic oligonucleotide
cucugucaaacccugagcc

SEQ ID NO: 2719987 - RNA, 19 nt, Artificial Sequence
  Description of Artificial Sequence: Synthetic oligonucleotide
gaugucucuggaaaugacg

SEQ ID NO: 2719988 - RNA, 19 nt, Artificial Sequence
  Description of Artificial Sequence: Synthetic oligonucleotide
ggaugagugaaguuggagg

SEQ ID NO: 2719989 - RNA, 19 nt, Artificial Sequence
  Description of Artificial Sequence: Synthetic oligonucleotide
cuucacauggcgaagagga

SEQ ID NO: 2719990 - RNA, 19 nt, Artificial Sequence
  Description of Artificial Sequence: Synthetic oligonucleotide
ucaaggagcggguagagau

SEQ ID NO: 2719991 - RNA, 19 nt, Artificial Sequence
  Description of Artificial Sequence: Synthetic oligonucleotide
ugagugaaguuggaggacg

SEQ ID NO: 2719992 - RNA, 19 nt, Artificial Sequence
  Description of Artificial Sequence: Synthetic oligonucleotide
gagaaaggccaccauuagg

SEQ ID NO: 2719993 - RNA, 19 nt, Artificial Sequence
  Description of Artificial Sequence: Synthetic oligonucleotide
agacagcugcuucacaugg

SEQ ID NO: 2719994 - RNA, 19 nt, Artificial Sequence
  Description of Artificial Sequence: Synthetic oligonucleotide
acuguagcagccccagccc

SEQ ID NO: 2719995 - RNA, 19 nt, Artificial Sequence
  Description of Artificial Sequence: Synthetic oligonucleotide
caccauuaggcaaaagagc

SEQ ID NO: 2719996 - RNA, 19 nt, Artificial Sequence
  Description of Artificial Sequence: Synthetic oligonucleotide
cuagggaugagugaaguug

SEQ ID NO: 2719997 - RNA, 19 nt, Artificial Sequence
  Description of Artificial Sequence: Synthetic oligonucleotide
aaguggagacagcugcuuc

SEQ ID NO: 2719998 - RNA, 19 nt, Artificial Sequence
  Description of Artificial Sequence: Synthetic oligonucleotide
ugagaaaggccaccauuag

SEQ ID NO: 2719999 - RNA, 19 nt, Artificial Sequence
  Description of Artificial Sequence: Synthetic oligonucleotide
cauuaggcaaaagagcccc

SEQ ID NO: 2720000 - RNA, 19 nt, Artificial Sequence
  Description of Artificial Sequence: Synthetic oligonucleotide
ugcuccugaucaaggagcg

SEQ ID NO: 2720001 - RNA, 19 nt, Artificial Sequence
  Description of Artificial Sequence: Synthetic oligonucleotide
auucaacuccacugcagac

SEQ ID NO: 2720002 - RNA, 19 nt, Artificial Sequence
  Description of Artificial Sequence: Synthetic oligonucleotide
aguauuuauuugucuucuc

SEQ ID NO: 2720003 - RNA, 19 nt, Artificial Sequence
  Description of Artificial Sequence: Synthetic oligonucleotide
ugagccaagcacuuucccc

SEQ ID NO: 2720004 - RNA, 19 nt, Artificial Sequence
  Description of Artificial Sequence: Synthetic oligonucleotide
aagcacuuuccccagacuu

SEQ ID NO: 2720005 - RNA, 19 nt, Artificial Sequence
  Description of Artificial Sequence: Synthetic oligonucleotide
acgaaagaacuaugggagg

SEQ ID NO: 2720006 - RNA, 19 nt, Artificial Sequence
  Description of Artificial Sequence: Synthetic oligonucleotide
gagaugaacuuggagcagg

SEQ ID NO: 2720007 - RNA, 19 nt, Artificial Sequence
  Description of Artificial Sequence: Synthetic oligonucleotide
gauucaacuccacugcaga

SEQ ID NO: 2720008 - RNA, 19 nt, Artificial Sequence
  Description of Artificial Sequence: Synthetic oligonucleotide
cuguggucgauucaacucc

SEQ ID NO: 2720009 - RNA, 19 nt, Artificial Sequence
  Description of Artificial Sequence: Synthetic oligonucleotide
uguugcuucagagaagggu

SEQ ID NO: 2720010 - RNA, 19 nt, Artificial Sequence
  Description of Artificial Sequence: Synthetic oligonucleotide
caggggacgacucagcagc

SEQ ID NO: 2720011 - RNA, 19 nt, Artificial Sequence
  Description of Artificial Sequence: Synthetic oligonucleotide
gccccaaugaacuuggcgg

SEQ ID NO: 2720012 - RNA, 19 nt, Artificial Sequence
  Description of Artificial Sequence: Synthetic oligonucleotide
ucuguggucgauucaacuc

SEQ ID NO: 2720013 - RNA, 19 nt, Artificial Sequence
  Description of Artificial Sequence: Synthetic oligonucleotide
gucgauucaacuccacugc

SEQ ID NO: 2720014 - RNA, 19 nt, Artificial Sequence
  Description of Artificial Sequence: Synthetic oligonucleotide
ucagagaaggguuccuggc

SEQ ID NO: 2720015 - RNA, 19 nt, Artificial Sequence
  Description of Artificial Sequence: Synthetic oligonucleotide
ucucugucaaacccugagc

SEQ ID NO: 2720016 - RNA, 19 nt, Artificial Sequence
  Description of Artificial Sequence: Synthetic oligonucleotide
agaggugcuccugagagag

SEQ ID NO: 2720017 - RNA, 19 nt, Artificial Sequence
  Description of Artificial Sequence: Synthetic oligonucleotide
augaacuuggagcaggcau

SEQ ID NO: 2720018 - RNA, 19 nt, Artificial Sequence
  Description of Artificial Sequence: Synthetic oligonucleotide
uaugggagguggaagugga

SEQ ID NO: 2720019 - RNA, 19 nt, Artificial Sequence
  Description of Artificial Sequence: Synthetic oligonucleotide
aaaggccaccauuaggcaa

SEQ ID NO: 2720020 - RNA, 19 nt, Artificial Sequence
  Description of Artificial Sequence: Synthetic oligonucleotide
gaaguuggaggacgagggg

SEQ ID NO: 2720021 - RNA, 19 nt, Artificial Sequence
  Description of Artificial Sequence: Synthetic oligonucleotide
aggaaaaggaacacacagg

SEQ ID NO: 2720022 - RNA, 19 nt, Artificial Sequence
  Description of Artificial Sequence: Synthetic oligonucleotide
cucugagagggcaaagccc

SEQ ID NO: 2720023 - RNA, 19 nt, Artificial Sequence
  Description of Artificial Sequence: Synthetic oligonucleotide
cuuuccccagacuuccugg

SEQ ID NO: 2720024 - RNA, 19 nt, Artificial Sequence
  Description of Artificial Sequence: Synthetic oligonucleotide
acagucccaaucccagccc

SEQ ID NO: 2720025 - RNA, 19 nt, Artificial Sequence
  Description of Artificial Sequence: Synthetic oligonucleotide
cugguuuggaagcugcggc

SEQ ID NO: 2720026 - RNA, 19 nt, Artificial Sequence
  Description of Artificial Sequence: Synthetic oligonucleotide
uauuugucuucucucuguc

SEQ ID NO: 2720027 - RNA, 19 nt, Artificial Sequence
  Description of Artificial Sequence: Synthetic oligonucleotide
uuuccccagacuuccuggg

SEQ ID NO: 2720028 - RNA, 19 nt, Artificial Sequence
  Description of Artificial Sequence: Synthetic oligonucleotide
caaacccugagccaagcac

SEQ ID NO: 2720029 - RNA, 19 nt, Artificial Sequence
  Description of Artificial Sequence: Synthetic oligonucleotide
agcaggcauacauuuucgg

SEQ ID NO: 2720030 - RNA, 19 nt, Artificial Sequence
  Description of Artificial Sequence: Synthetic oligonucleotide
cuccugaucaaggagcggg

SEQ ID NO: 2720031 - RNA, 19 nt, Artificial Sequence
  Description of Artificial Sequence: Synthetic oligonucleotide
aaacccugagccaagcacu

SEQ ID NO: 2720032 - RNA, 19 nt, Artificial Sequence
  Description of Artificial Sequence: Synthetic oligonucleotide
agccccaaugaacuuggcg

SEQ ID NO: 2720033 - RNA, 19 nt, Artificial Sequence
  Description of Artificial Sequence: Synthetic oligonucleotide
ggucgauucaacuccacug

SEQ ID NO: 2720034 - RNA, 19 nt, Artificial Sequence
  Description of Artificial Sequence: Synthetic oligonucleotide
uucaacuccacugcagaca

SEQ ID NO: 2720035 - RNA, 19 nt, Artificial Sequence
  Description of Artificial Sequence: Synthetic oligonucleotide
cauccguccaugucugugg

SEQ ID NO: 2720036 - RNA, 19 nt, Artificial Sequence
  Description of Artificial Sequence: Synthetic oligonucleotide
gagguggaaguggagacag

SEQ ID NO: 2720037 - RNA, 19 nt, Artificial Sequence
  Description of Artificial Sequence: Synthetic oligonucleotide
ccaccauuaggcaaaagag

SEQ ID NO: 2720038 - RNA, 19 nt, Artificial Sequence
  Description of Artificial Sequence: Synthetic oligonucleotide
gugaaguuggaggacgagg

SEQ ID NO: 2720039 - RNA, 19 nt, Artificial Sequence
  Description of Artificial Sequence: Synthetic oligonucleotide
gagccaagcacuuucccca

SEQ ID NO: 2720040 - RNA, 19 nt, Artificial Sequence
  Description of Artificial Sequence: Synthetic oligonucleotide
ucugucaaacccugagcca

SEQ ID NO: 2720041 - RNA, 19 nt, Artificial Sequence
  Description of Artificial Sequence: Synthetic oligonucleotide
cucucugucaaacccugag

SEQ ID NO: 2720042 - RNA, 19 nt, Artificial Sequence
  Description of Artificial Sequence: Synthetic oligonucleotide
gcugcugaggcccucaucc

SEQ ID NO: 2720043 - RNA, 19 nt, Artificial Sequence
  Description of Artificial Sequence: Synthetic oligonucleotide
uuccuggggagguacagga

SEQ ID NO: 2720044 - RNA, 19 nt, Artificial Sequence
  Description of Artificial Sequence: Synthetic oligonucleotide
uggaaaugacgcugguuug

SEQ ID NO: 2720045 - RNA, 19 nt, Artificial Sequence
  Description of Artificial Sequence: Synthetic oligonucleotide
ucgauucaacuccacugca

SEQ ID NO: 2720046 - RNA, 19 nt, Artificial Sequence
  Description of Artificial Sequence: Synthetic oligonucleotide
acgacucagcagcugagag

SEQ ID NO: 2720047 - RNA, 19 nt, Artificial Sequence
  Description of Artificial Sequence: Synthetic oligonucleotide
aguggagacagcugcuuca

SEQ ID NO: 2720048 - RNA, 19 nt, Artificial Sequence
  Description of Artificial Sequence: Synthetic oligonucleotide
gguagagaugaacuuggag

SEQ ID NO: 2720049 - RNA, 19 nt, Artificial Sequence
  Description of Artificial Sequence: Synthetic oligonucleotide
gaaagaacuaugggaggug

SEQ ID NO: 2720050 - RNA, 19 nt, Artificial Sequence
  Description of Artificial Sequence: Synthetic oligonucleotide
gcaggcauacauuuucggg

SEQ ID NO: 2720051 - RNA, 19 nt, Artificial Sequence
  Description of Artificial Sequence: Synthetic oligonucleotide
gaacuaugggagguggaag

SEQ ID NO: 2720052 - RNA, 19 nt, Artificial Sequence
  Description of Artificial Sequence: Synthetic oligonucleotide
gaagcugcggcuagggaug

SEQ ID NO: 2720053 - RNA, 19 nt, Artificial Sequence
  Description of Artificial Sequence: Synthetic oligonucleotide
agcagcugagaggugcucc

SEQ ID NO: 2720054 - RNA, 19 nt, Artificial Sequence
  Description of Artificial Sequence: Synthetic oligonucleotide
agaugaacuuggagcaggc

SEQ ID NO: 2720055 - RNA, 19 nt, Artificial Sequence
  Description of Artificial Sequence: Synthetic oligonucleotide
ugcuucacauggcgaagag

SEQ ID NO: 2720056 - RNA, 19 nt, Artificial Sequence
  Description of Artificial Sequence: Synthetic oligonucleotide
uguggucgauucaacucca

SEQ ID NO: 2720057 - RNA, 19 nt, Artificial Sequence
  Description of Artificial Sequence: Synthetic oligonucleotide
agaaucgcguaggagaaga

SEQ ID NO: 2720058 - RNA, 19 nt, Artificial Sequence
  Description of Artificial Sequence: Synthetic oligonucleotide
uuggagcaggcauacauuu

SEQ ID NO: 2720059 - RNA, 19 nt, Artificial Sequence
  Description of Artificial Sequence: Synthetic oligonucleotide
agacgggacacgaaagaac

SEQ ID NO: 2720060 - RNA, 19 nt, Artificial Sequence
  Description of Artificial Sequence: Synthetic oligonucleotide
cugaucaaggagcggguag

SEQ ID NO: 2720061 - RNA, 19 nt, Artificial Sequence
  Description of Artificial Sequence: Synthetic oligonucleotide
gcaaaagagccccauggcc

SEQ ID NO: 2720062 - RNA, 19 nt, Artificial Sequence
  Description of Artificial Sequence: Synthetic oligonucleotide
gagacagcugcuucacaug

SEQ ID NO: 2720063 - RNA, 19 nt, Artificial Sequence
  Description of Artificial Sequence: Synthetic oligonucleotide
ugucaaacccugagccaag

SEQ ID NO: 2720064 - RNA, 19 nt, Artificial Sequence
  Description of Artificial Sequence: Synthetic oligonucleotide
ugucuucucucugucaaac

SEQ ID NO: 2720065 - RNA, 19 nt, Artificial Sequence
  Description of Artificial Sequence: Synthetic oligonucleotide
ugaucaaggagcggguaga

SEQ ID NO: 2720066 - RNA, 19 nt, Artificial Sequence
  Description of Artificial Sequence: Synthetic oligonucleotide
gagccagccaccccaacug

SEQ ID NO: 2720067 - RNA, 19 nt, Artificial Sequence
  Description of Artificial Sequence: Synthetic oligonucleotide
uaggcaaaagagccccaug

SEQ ID NO: 2720068 - RNA, 19 nt, Artificial Sequence
  Description of Artificial Sequence: Synthetic oligonucleotide
aucgcguaggagaagagcu

SEQ ID NO: 2720069 - RNA, 19 nt, Artificial Sequence
  Description of Artificial Sequence: Synthetic oligonucleotide
cucagcagcugagaggugc

SEQ ID NO: 2720070 - RNA, 19 nt, Artificial Sequence
  Description of Artificial Sequence: Synthetic oligonucleotide
uggucgauucaacuccacu

SEQ ID NO: 2720071 - RNA, 19 nt, Artificial Sequence
  Description of Artificial Sequence: Synthetic oligonucleotide
auuugucuucucucuguca

SEQ ID NO: 2720072 - RNA, 19 nt, Artificial Sequence
  Description of Artificial Sequence: Synthetic oligonucleotide
cuaugggagguggaagugg

SEQ ID NO: 2720073 - RNA, 19 nt, Artificial Sequence
  Description of Artificial Sequence: Synthetic oligonucleotide
agagaaggguuccuggcau

SEQ ID NO: 2720074 - RNA, 19 nt, Artificial Sequence
  Description of Artificial Sequence: Synthetic oligonucleotide
gucucuggaaaugacgcug

SEQ ID NO: 2720075 - RNA, 19 nt, Artificial Sequence
  Description of Artificial Sequence: Synthetic oligonucleotide
ggacacgaaagaacuaugg

SEQ ID NO: 2720076 - RNA, 19 nt, Artificial Sequence
  Description of Artificial Sequence: Synthetic oligonucleotide
uuggaagcugcggcuaggg

SEQ ID NO: 2720077 - RNA, 19 nt, Artificial Sequence
  Description of Artificial Sequence: Synthetic oligonucleotide
gagcaggcauacauuuucg

SEQ ID NO: 2720078 - RNA, 19 nt, Artificial Sequence
  Description of Artificial Sequence: Synthetic oligonucleotide
ugccaagcugcugaggccc

SEQ ID NO: 2720079 - RNA, 19 nt, Artificial Sequence
  Description of Artificial Sequence: Synthetic oligonucleotide
aacuuggcggcugugucga

SEQ ID NO: 2720080 - RNA, 19 nt, Artificial Sequence
  Description of Artificial Sequence: Synthetic oligonucleotide
uccccagacuuccugggga

SEQ ID NO: 2720081 - RNA, 19 nt, Artificial Sequence
  Description of Artificial Sequence: Synthetic oligonucleotide
acuuuccccagacuuccug

SEQ ID NO: 2720082 - RNA, 19 nt, Artificial Sequence
  Description of Artificial Sequence: Synthetic oligonucleotide
ggaaaugacgcugguuugg

SEQ ID NO: 2720083 - RNA, 19 nt, Artificial Sequence
  Description of Artificial Sequence: Synthetic oligonucleotide
ucgaugucucuggaaauga

SEQ ID NO: 2720084 - RNA, 19 nt, Artificial Sequence
  Description of Artificial Sequence: Synthetic oligonucleotide
ugguuuggaagcugcggcu

SEQ ID NO: 2720085 - RNA, 19 nt, Artificial Sequence
  Description of Artificial Sequence: Synthetic oligonucleotide
acaggggacgacucagcag

SEQ ID NO: 2720086 - RNA, 19 nt, Artificial Sequence
  Description of Artificial Sequence: Synthetic oligonucleotide
agagccagccaccccaacu

SEQ ID NO: 2720087 - RNA, 19 nt, Artificial Sequence
  Description of Artificial Sequence: Synthetic oligonucleotide
gaaaggccaccauuaggca

SEQ ID NO: 2720088 - RNA, 19 nt, Artificial Sequence
  Description of Artificial Sequence: Synthetic oligonucleotide
uguagcagccccagcccca

SEQ ID NO: 2720089 - RNA, 19 nt, Artificial Sequence
  Description of Artificial Sequence: Synthetic oligonucleotide
ugggagguggaaguggaga

SEQ ID NO: 2720090 - RNA, 19 nt, Artificial Sequence
  Description of Artificial Sequence: Synthetic oligonucleotide
ucgcguaggagaagagcug

SEQ ID NO: 2720091 - RNA, 19 nt, Artificial Sequence
  Description of Artificial Sequence: Synthetic oligonucleotide
agcacuuuccccagacuuc

SEQ ID NO: 2720092 - RNA, 19 nt, Artificial Sequence
  Description of Artificial Sequence: Synthetic oligonucleotide
gugucgaugucucuggaaa

SEQ ID NO: 2720093 - RNA, 19 nt, Artificial Sequence
  Description of Artificial Sequence: Synthetic oligonucleotide
gacucagcagcugagaggu

SEQ ID NO: 2720094 - RNA, 19 nt, Artificial Sequence
  Description of Artificial Sequence: Synthetic oligonucleotide
ucauccguccaugucugug

SEQ ID NO: 2720095 - RNA, 19 nt, Artificial Sequence
  Description of Artificial Sequence: Synthetic oligonucleotide
uuggcggcugugucgaugu

SEQ ID NO: 2720096 - RNA, 19 nt, Artificial Sequence
  Description of Artificial Sequence: Synthetic oligonucleotide
agcugcuucacauggcgaa

SEQ ID NO: 2720097 - RNA, 19 nt, Artificial Sequence
  Description of Artificial Sequence: Synthetic oligonucleotide
gccaccauuaggcaaaaga

SEQ ID NO: 2720098 - RNA, 19 nt, Artificial Sequence
  Description of Artificial Sequence: Synthetic oligonucleotide
aaaugacgcugguuuggaa

SEQ ID NO: 2720099 - RNA, 19 nt, Artificial Sequence
  Description of Artificial Sequence: Synthetic oligonucleotide
guuuggaagcugcggcuag

SEQ ID NO: 2720100 - RNA, 19 nt, Artificial Sequence
  Description of Artificial Sequence: Synthetic oligonucleotide
ugugucgaugucucuggaa

SEQ ID NO: 2720101 - RNA, 19 nt, Artificial Sequence
  Description of Artificial Sequence: Synthetic oligonucleotide
gcugccaagcugcugaggc

SEQ ID NO: 2720102 - RNA, 19 nt, Artificial Sequence
  Description of Artificial Sequence: Synthetic oligonucleotide
caaaagagccccauggccu

SEQ ID NO: 2720103 - RNA, 19 nt, Artificial Sequence
  Description of Artificial Sequence: Synthetic oligonucleotide
agacuuccuggggagguac

SEQ ID NO: 2720104 - RNA, 19 nt, Artificial Sequence
  Description of Artificial Sequence: Synthetic oligonucleotide
agaacuaugggagguggaa

SEQ ID NO: 2720105 - RNA, 19 nt, Artificial Sequence
  Description of Artificial Sequence: Synthetic oligonucleotide
caccccaacuguagcagcc

SEQ ID NO: 2720106 - RNA, 19 nt, Artificial Sequence
  Description of Artificial Sequence: Synthetic oligonucleotide
aggaacacacagggcagac

SEQ ID NO: 2720107 - RNA, 19 nt, Artificial Sequence
  Description of Artificial Sequence: Synthetic oligonucleotide
gaucaaggagcggguagag

SEQ ID NO: 2720108 - RNA, 19 nt, Artificial Sequence
  Description of Artificial Sequence: Synthetic oligonucleotide
gaacuuggagcaggcauac

SEQ ID NO: 2720109 - RNA, 19 nt, Artificial Sequence
  Description of Artificial Sequence: Synthetic oligonucleotide
agaggugcuccugaucaag

SEQ ID NO: 2720110 - RNA, 19 nt, Artificial Sequence
  Description of Artificial Sequence: Synthetic oligonucleotide
gugcuccugaucaaggagc

SEQ ID NO: 2720111 - RNA, 19 nt, Artificial Sequence
  Description of Artificial Sequence: Synthetic oligonucleotide
ugcuucagagaaggguucc

SEQ ID NO: 2720112 - RNA, 19 nt, Artificial Sequence
  Description of Artificial Sequence: Synthetic oligonucleotide
gaugagaaaggccaccauu

SEQ ID NO: 2720113 - RNA, 19 nt, Artificial Sequence
  Description of Artificial Sequence: Synthetic oligonucleotide
aacacacagggcagacggg

SEQ ID NO: 2720114 - RNA, 19 nt, Artificial Sequence
  Description of Artificial Sequence: Synthetic oligonucleotide
gcugugucgaugucucugg

SEQ ID NO: 2720115 - RNA, 19 nt, Artificial Sequence
  Description of Artificial Sequence: Synthetic oligonucleotide
gucgaugucucuggaaaug

SEQ ID NO: 2720116 - RNA, 19 nt, Artificial Sequence
  Description of Artificial Sequence: Synthetic oligonucleotide
ugucgaugucucuggaaau

SEQ ID NO: 2720117 - RNA, 19 nt, Artificial Sequence
  Description of Artificial Sequence: Synthetic oligonucleotide
uccugaucaaggagcgggu

SEQ ID NO: 2720118 - RNA, 19 nt, Artificial Sequence
  Description of Artificial Sequence: Synthetic oligonucleotide
ugucuguggucgauucaac

SEQ ID NO: 2720119 - RNA, 19 nt, Artificial Sequence
  Description of Artificial Sequence: Synthetic oligonucleotide
agagaugaacuuggagcag

SEQ ID NO: 2720120 - RNA, 19 nt, Artificial Sequence
  Description of Artificial Sequence: Synthetic oligonucleotide
gacaggggacgacucagca

SEQ ID NO: 2720121 - RNA, 19 nt, Artificial Sequence
  Description of Artificial Sequence: Synthetic oligonucleotide
aaggaacacacagggcaga

SEQ ID NO: 2720122 - RNA, 19 nt, Artificial Sequence
  Description of Artificial Sequence: Synthetic oligonucleotide
gaaaugacgcugguuugga

SEQ ID NO: 2720123 - RNA, 19 nt, Artificial Sequence
  Description of Artificial Sequence: Synthetic oligonucleotide
uggggagguacaggaaaag

SEQ ID NO: 2720124 - RNA, 19 nt, Artificial Sequence
  Description of Artificial Sequence: Synthetic oligonucleotide
ggcaaaagagccccauggc

SEQ ID NO: 2720125 - RNA, 19 nt, Artificial Sequence
  Description of Artificial Sequence: Synthetic oligonucleotide
acuaugggagguggaagug

SEQ ID NO: 2720126 - RNA, 19 nt, Artificial Sequence
  Description of Artificial Sequence: Synthetic oligonucleotide
aggaugagaaaggccacca

SEQ ID NO: 2720127 - RNA, 19 nt, Artificial Sequence
  Description of Artificial Sequence: Synthetic oligonucleotide
gacgggacacgaaagaacu

SEQ ID NO: 2720128 - RNA, 19 nt, Artificial Sequence
  Description of Artificial Sequence: Synthetic oligonucleotide
cuggaaaugacgcugguuu

SEQ ID NO: 2720129 - RNA, 19 nt, Artificial Sequence
  Description of Artificial Sequence: Synthetic oligonucleotide
agccccauggccucugaga

SEQ ID NO: 2720130 - RNA, 19 nt, Artificial Sequence
  Description of Artificial Sequence: Synthetic oligonucleotide
cugagccaagcacuuuccc

SEQ ID NO: 2720131 - RNA, 19 nt, Artificial Sequence
  Description of Artificial Sequence: Synthetic oligonucleotide
uuaggcaaaagagccccau

SEQ ID NO: 2720132 - RNA, 19 nt, Artificial Sequence
  Description of Artificial Sequence: Synthetic oligonucleotide
aagaacuaugggaggugga

SEQ ID NO: 2720133 - RNA, 19 nt, Artificial Sequence
  Description of Artificial Sequence: Synthetic oligonucleotide
agugaaguuggaggacgag

SEQ ID NO: 2720134 - RNA, 19 nt, Artificial Sequence
  Description of Artificial Sequence: Synthetic oligonucleotide
acugcagacaggggacgac

SEQ ID NO: 2720135 - RNA, 19 nt, Artificial Sequence
  Description of Artificial Sequence: Synthetic oligonucleotide
cuguagcagccccagcccc

SEQ ID NO: 2720136 - RNA, 19 nt, Artificial Sequence
  Description of Artificial Sequence: Synthetic oligonucleotide
augucuguggucgauucaa

SEQ ID NO: 2720137 - RNA, 19 nt, Artificial Sequence
  Description of Artificial Sequence: Synthetic oligonucleotide
acgcugguuuggaagcugc

SEQ ID NO: 2720138 - RNA, 19 nt, Artificial Sequence
  Description of Artificial Sequence: Synthetic oligonucleotide
cuucagagaaggguuccug

SEQ ID NO: 2720139 - RNA, 19 nt, Artificial Sequence
  Description of Artificial Sequence: Synthetic oligonucleotide
aggugcuccugagagaggu

SEQ ID NO: 2720140 - RNA, 19 nt, Artificial Sequence
  Description of Artificial Sequence: Synthetic oligonucleotide
accccaacuguagcagccc

SEQ ID NO: 2720141 - RNA, 19 nt, Artificial Sequence
  Description of Artificial Sequence: Synthetic oligonucleotide
cccagaaucgcguaggaga

SEQ ID NO: 2720142 - RNA, 19 nt, Artificial Sequence
  Description of Artificial Sequence: Synthetic oligonucleotide
acacagggcagacgggaca

SEQ ID NO: 2720143 - RNA, 19 nt, Artificial Sequence
  Description of Artificial Sequence: Synthetic oligonucleotide
ugcggcuagggaugaguga

SEQ ID NO: 2720144 - RNA, 19 nt, Artificial Sequence
  Description of Artificial Sequence: Synthetic oligonucleotide
aggugcuccugaucaagga

SEQ ID NO: 2720145 - RNA, 19 nt, Artificial Sequence
  Description of Artificial Sequence: Synthetic oligonucleotide
gguacaggaaaaggaacac

SEQ ID NO: 2720146 - RNA, 19 nt, Artificial Sequence
  Description of Artificial Sequence: Synthetic oligonucleotide
acaggaaaaggaacacaca

SEQ ID NO: 2720147 - RNA, 19 nt, Artificial Sequence
  Description of Artificial Sequence: Synthetic oligonucleotide
cagucccaaucccagcccc

SEQ ID NO: 2720148 - RNA, 19 nt, Artificial Sequence
  Description of Artificial Sequence: Synthetic oligonucleotide
agcggguagagaugaacuu

SEQ ID NO: 2720149 - RNA, 19 nt, Artificial Sequence
  Description of Artificial Sequence: Synthetic oligonucleotide
gaaucgcguaggagaagag

SEQ ID NO: 2720150 - RNA, 19 nt, Artificial Sequence
  Description of Artificial Sequence: Synthetic oligonucleotide
aguuggaggacgaggggcu

SEQ ID NO: 2720151 - RNA, 19 nt, Artificial Sequence
  Description of Artificial Sequence: Synthetic oligonucleotide
ucucucugucaaacccuga

SEQ ID NO: 2720152 - RNA, 19 nt, Artificial Sequence
  Description of Artificial Sequence: Synthetic oligonucleotide
ccauuaggcaaaagagccc

SEQ ID NO: 2720153 - RNA, 19 nt, Artificial Sequence
  Description of Artificial Sequence: Synthetic oligonucleotide
ccucugagagggcaaagcc

SEQ ID NO: 2720154 - RNA, 19 nt, Artificial Sequence
  Description of Artificial Sequence: Synthetic oligonucleotide
uggaagcugcggcuaggga

SEQ ID NO: 2720155 - RNA, 19 nt, Artificial Sequence
  Description of Artificial Sequence: Synthetic oligonucleotide
agccaccccaacuguagca

SEQ ID NO: 2720156 - RNA, 19 nt, Artificial Sequence
  Description of Artificial Sequence: Synthetic oligonucleotide
agccaagcacuuuccccag

SEQ ID NO: 2720157 - RNA, 19 nt, Artificial Sequence
  Description of Artificial Sequence: Synthetic oligonucleotide
cuccugagagaggugcucc

SEQ ID NO: 2720158 - RNA, 19 nt, Artificial Sequence
  Description of Artificial Sequence: Synthetic oligonucleotide
gagagaggugcuccugauc

SEQ ID NO: 2720159 - RNA, 19 nt, Artificial Sequence
  Description of Artificial Sequence: Synthetic oligonucleotide
cuuccuggggagguacagg

SEQ ID NO: 2720160 - RNA, 19 nt, Artificial Sequence
  Description of Artificial Sequence: Synthetic oligonucleotide
ggggagguacaggaaaagg

SEQ ID NO: 2720161 - RNA, 19 nt, Artificial Sequence
  Description of Artificial Sequence: Synthetic oligonucleotide
cugcggcuagggaugagug

SEQ ID NO: 2720162 - RNA, 19 nt, Artificial Sequence
  Description of Artificial Sequence: Synthetic oligonucleotide
cugccaagcugcugaggcc

SEQ ID NO: 2720163 - RNA, 19 nt, Artificial Sequence
  Description of Artificial Sequence: Synthetic oligonucleotide
guacaggaaaaggaacaca

SEQ ID NO: 2720164 - RNA, 19 nt, Artificial Sequence
  Description of Artificial Sequence: Synthetic oligonucleotide
ugcuccugagagaggugcu

SEQ ID NO: 2720165 - RNA, 19 nt, Artificial Sequence
  Description of Artificial Sequence: Synthetic oligonucleotide
acgaggggcugccaagcug

SEQ ID NO: 2720166 - RNA, 19 nt, Artificial Sequence
  Description of Artificial Sequence: Synthetic oligonucleotide
cugcugaggcccucauccg

SEQ ID NO: 2720167 - RNA, 19 nt, Artificial Sequence
  Description of Artificial Sequence: Synthetic oligonucleotide
gggagguacaggaaaagga

SEQ ID NO: 2720168 - RNA, 19 nt, Artificial Sequence
  Description of Artificial Sequence: Synthetic oligonucleotide
ccguccaugucuguggucg

SEQ ID NO: 2720169 - RNA, 19 nt, Artificial Sequence
  Description of Artificial Sequence: Synthetic oligonucleotide
ucuggaaaugacgcugguu

SEQ ID NO: 2720170 - RNA, 19 nt, Artificial Sequence
  Description of Artificial Sequence: Synthetic oligonucleotide
ggagguacaggaaaaggaa

SEQ ID NO: 2720171 - RNA, 19 nt, Artificial Sequence
  Description of Artificial Sequence: Synthetic oligonucleotide
uccugagagaggugcuccu

SEQ ID NO: 2720172 - RNA, 19 nt, Artificial Sequence
  Description of Artificial Sequence: Synthetic oligonucleotide
cggguagagaugaacuugg

SEQ ID NO: 2720173 - RNA, 19 nt, Artificial Sequence
  Description of Artificial Sequence: Synthetic oligonucleotide
gggagguggaaguggagac

SEQ ID NO: 2720174 - RNA, 19 nt, Artificial Sequence
  Description of Artificial Sequence: Synthetic oligonucleotide
gcugguuuggaagcugcgg

SEQ ID NO: 2720175 - RNA, 19 nt, Artificial Sequence
  Description of Artificial Sequence: Synthetic oligonucleotide
agcugcugaggcccucauc

SEQ ID NO: 2720176 - RNA, 19 nt, Artificial Sequence
  Description of Artificial Sequence: Synthetic oligonucleotide
ccagccccaaugaacuugg

SEQ ID NO: 2720177 - RNA, 19 nt, Artificial Sequence
  Description of Artificial Sequence: Synthetic oligonucleotide
cagagaaggguuccuggca

SEQ ID NO: 2720178 - RNA, 19 nt, Artificial Sequence
  Description of Artificial Sequence: Synthetic oligonucleotide
uggagcaggcauacauuuu

SEQ ID NO: 2720179 - RNA, 19 nt, Artificial Sequence
  Description of Artificial Sequence: Synthetic oligonucleotide
gacagcugcuucacauggc

SEQ ID NO: 2720180 - RNA, 19 nt, Artificial Sequence
  Description of Artificial Sequence: Synthetic oligonucleotide
cacacagggcagacgggac

SEQ ID NO: 2720181 - RNA, 19 nt, Artificial Sequence
  Description of Artificial Sequence: Synthetic oligonucleotide
cugaggcccucauccgucc

SEQ ID NO: 2720182 - RNA, 19 nt, Artificial Sequence
  Description of Artificial Sequence: Synthetic oligonucleotide
cugucaaacccugagccaa

SEQ ID NO: 2720183 - RNA, 19 nt, Artificial Sequence
  Description of Artificial Sequence: Synthetic oligonucleotide
gagaggugcuccugagaga

SEQ ID NO: 2720184 - RNA, 19 nt, Artificial Sequence
  Description of Artificial Sequence: Synthetic oligonucleotide
gaugaacuuggagcaggca

SEQ ID NO: 2720185 - RNA, 19 nt, Artificial Sequence
  Description of Artificial Sequence: Synthetic oligonucleotide
guugcuucagagaaggguu

SEQ ID NO: 2720186 - RNA, 19 nt, Artificial Sequence
  Description of Artificial Sequence: Synthetic oligonucleotide
auccguccaugucuguggu

SEQ ID NO: 2720187 - RNA, 19 nt, Artificial Sequence
  Description of Artificial Sequence: Synthetic oligonucleotide
gggaugagugaaguuggag

SEQ ID NO: 2720188 - RNA, 19 nt, Artificial Sequence
  Description of Artificial Sequence: Synthetic oligonucleotide
uuggaggacgaggggcugc

SEQ ID NO: 2720189 - RNA, 19 nt, Artificial Sequence
  Description of Artificial Sequence: Synthetic oligonucleotide
cugagagaggugcuccuga

SEQ ID NO: 2720190 - RNA, 19 nt, Artificial Sequence
  Description of Artificial Sequence: Synthetic oligonucleotide
gacgcugguuuggaagcug

SEQ ID NO: 2720191 - RNA, 19 nt, Artificial Sequence
  Description of Artificial Sequence: Synthetic oligonucleotide
ccccaaugaacuuggcggc

SEQ ID NO: 2720192 - RNA, 19 nt, Artificial Sequence
  Description of Artificial Sequence: Synthetic oligonucleotide
uggaggacgaggggcugcc

SEQ ID NO: 2720193 - RNA, 19 nt, Artificial Sequence
  Description of Artificial Sequence: Synthetic oligonucleotide
ggggcugccaagcugcuga

SEQ ID NO: 2720194 - RNA, 19 nt, Artificial Sequence
  Description of Artificial Sequence: Synthetic oligonucleotide
ggaacacacagggcagacg

SEQ ID NO: 2720195 - RNA, 19 nt, Artificial Sequence
  Description of Artificial Sequence: Synthetic oligonucleotide
gucaaacccugagccaagc

SEQ ID NO: 2720196 - RNA, 19 nt, Artificial Sequence
  Description of Artificial Sequence: Synthetic oligonucleotide
cugagagggcaaagcccag

SEQ ID NO: 2720197 - RNA, 19 nt, Artificial Sequence
  Description of Artificial Sequence: Synthetic oligonucleotide
gcuucacauggcgaagagg

SEQ ID NO: 2720198 - RNA, 19 nt, Artificial Sequence
  Description of Artificial Sequence: Synthetic oligonucleotide
agagggcaaagcccagaau

SEQ ID NO: 2720199 - RNA, 19 nt, Artificial Sequence
  Description of Artificial Sequence: Synthetic oligonucleotide
ugaggcccucauccgucca

SEQ ID NO: 2720200 - RNA, 19 nt, Artificial Sequence
  Description of Artificial Sequence: Synthetic oligonucleotide
gagugaaguuggaggacga

SEQ ID NO: 2720201 - RNA, 19 nt, Artificial Sequence
  Description of Artificial Sequence: Synthetic oligonucleotide
gcugagaggugcuccugag

SEQ ID NO: 2720202 - RNA, 19 nt, Artificial Sequence
  Description of Artificial Sequence: Synthetic oligonucleotide
gaggacgaggggcugccaa

SEQ ID NO: 2720203 - RNA, 19 nt, Artificial Sequence
  Description of Artificial Sequence: Synthetic oligonucleotide
gagcggguagagaugaacu

SEQ ID NO: 2720204 - RNA, 19 nt, Artificial Sequence
  Description of Artificial Sequence: Synthetic oligonucleotide
caguauuuauuugucuucu

SEQ ID NO: 2720205 - RNA, 19 nt, Artificial Sequence
  Description of Artificial Sequence: Synthetic oligonucleotide
gcggguagagaugaacuug

SEQ ID NO: 2720206 - RNA, 19 nt, Artificial Sequence
  Description of Artificial Sequence: Synthetic oligonucleotide
gacgacucagcagcugaga

SEQ ID NO: 2720207 - RNA, 19 nt, Artificial Sequence
  Description of Artificial Sequence: Synthetic oligonucleotide
caaugaugaggcucccaaa

SEQ ID NO: 2720208 - RNA, 19 nt, Artificial Sequence
  Description of Artificial Sequence: Synthetic oligonucleotide
ccagccaccccaacuguag

SEQ ID NO: 2720209 - RNA, 19 nt, Artificial Sequence
  Description of Artificial Sequence: Synthetic oligonucleotide
ccugagccaagcacuuucc

SEQ ID NO: 2720210 - RNA, 19 nt, Artificial Sequence
  Description of Artificial Sequence: Synthetic oligonucleotide
ucccaaucccagccccaga

SEQ ID NO: 2720211 - RNA, 19 nt, Artificial Sequence
  Description of Artificial Sequence: Synthetic oligonucleotide
gucuguggucgauucaacu

SEQ ID NO: 2720212 - RNA, 19 nt, Artificial Sequence
  Description of Artificial Sequence: Synthetic oligonucleotide
cagccaccccaacuguagc

SEQ ID NO: 2720213 - RNA, 19 nt, Artificial Sequence
  Description of Artificial Sequence: Synthetic oligonucleotide
agguggaaguggagacagc

SEQ ID NO: 2720214 - RNA, 19 nt, Artificial Sequence
  Description of Artificial Sequence: Synthetic oligonucleotide
ugacgcugguuuggaagcu

SEQ ID NO: 2720215 - RNA, 19 nt, Artificial Sequence
  Description of Artificial Sequence: Synthetic oligonucleotide
ccaagcacuuuccccagac

SEQ ID NO: 2720216 - RNA, 19 nt, Artificial Sequence
  Description of Artificial Sequence: Synthetic oligonucleotide
cuggggagguacaggaaaa

SEQ ID NO: 2720217 - RNA, 19 nt, Artificial Sequence
  Description of Artificial Sequence: Synthetic oligonucleotide
aucaaggagcggguagaga

SEQ ID NO: 2720218 - RNA, 19 nt, Artificial Sequence
  Description of Artificial Sequence: Synthetic oligonucleotide
cuuggcggcugugucgaug

SEQ ID NO: 2720219 - RNA, 19 nt, Artificial Sequence
  Description of Artificial Sequence: Synthetic oligonucleotide
ggcugugucgaugucucug

SEQ ID NO: 2720220 - RNA, 19 nt, Artificial Sequence
  Description of Artificial Sequence: Synthetic oligonucleotide
caacuccacugcagacagg

SEQ ID NO: 2720221 - RNA, 19 nt, Artificial Sequence
  Description of Artificial Sequence: Synthetic oligonucleotide
gaaggguuccuggcauaac

SEQ ID NO: 2720222 - RNA, 19 nt, Artificial Sequence
  Description of Artificial Sequence: Synthetic oligonucleotide
ggaagcugcggcuagggau

SEQ ID NO: 2720223 - RNA, 19 nt, Artificial Sequence
  Description of Artificial Sequence: Synthetic oligonucleotide
gggacgacucagcagcuga

SEQ ID NO: 2720224 - RNA, 19 nt, Artificial Sequence
  Description of Artificial Sequence: Synthetic oligonucleotide
caugucuguggucgauuca

SEQ ID NO: 2720225 - RNA, 19 nt, Artificial Sequence
  Description of Artificial Sequence: Synthetic oligonucleotide
gcagacgggacacgaaaga

SEQ ID NO: 2720226 - RNA, 19 nt, Artificial Sequence
  Description of Artificial Sequence: Synthetic oligonucleotide
cgaggggcugccaagcugc

SEQ ID NO: 2720227 - RNA, 19 nt, Artificial Sequence
  Description of Artificial Sequence: Synthetic oligonucleotide
auuaggcaaaagagcccca

SEQ ID NO: 2720228 - RNA, 19 nt, Artificial Sequence
  Description of Artificial Sequence: Synthetic oligonucleotide
ggcagacgggacacgaaag

SEQ ID NO: 2720229 - RNA, 19 nt, Artificial Sequence
  Description of Artificial Sequence: Synthetic oligonucleotide
ggagacagcugcuucacau

SEQ ID NO: 2720230 - RNA, 19 nt, Artificial Sequence
  Description of Artificial Sequence: Synthetic oligonucleotide
aacccugagccaagcacuu

SEQ ID NO: 2720231 - RNA, 19 nt, Artificial Sequence
  Description of Artificial Sequence: Synthetic oligonucleotide
cgauucaacuccacugcag

SEQ ID NO: 2720232 - RNA, 19 nt, Artificial Sequence
  Description of Artificial Sequence: Synthetic oligonucleotide
gucccaaucccagccccag

SEQ ID NO: 2720233 - RNA, 19 nt, Artificial Sequence
  Description of Artificial Sequence: Synthetic oligonucleotide
agccagccaccccaacugu

SEQ ID NO: 2720234 - RNA, 19 nt, Artificial Sequence
  Description of Artificial Sequence: Synthetic oligonucleotide
aacuuggagcaggcauaca

SEQ ID NO: 2720235 - RNA, 19 nt, Artificial Sequence
  Description of Artificial Sequence: Synthetic oligonucleotide
gggacacgaaagaacuaug

SEQ ID NO: 2720236 - RNA, 19 nt, Artificial Sequence
  Description of Artificial Sequence: Synthetic oligonucleotide
aagcugcugaggcccucau

SEQ ID NO: 2720237 - RNA, 19 nt, Artificial Sequence
  Description of Artificial Sequence: Synthetic oligonucleotide
cagaaucgcguaggagaag

SEQ ID NO: 2720238 - RNA, 19 nt, Artificial Sequence
  Description of Artificial Sequence: Synthetic oligonucleotide
gagaggugcuccugaucaa

SEQ ID NO: 2720239 - RNA, 19 nt, Artificial Sequence
  Description of Artificial Sequence: Synthetic oligonucleotide
uccaugucuguggucgauu

SEQ ID NO: 2720240 - RNA, 19 nt, Artificial Sequence
  Description of Artificial Sequence: Synthetic oligonucleotide
gagaaggguuccuggcaua

SEQ ID NO: 2720241 - RNA, 19 nt, Artificial Sequence
  Description of Artificial Sequence: Synthetic oligonucleotide
ggagcggguagagaugaac

SEQ ID NO: 2720242 - RNA, 19 nt, Artificial Sequence
  Description of Artificial Sequence: Synthetic oligonucleotide
cugagaggugcuccugaga

SEQ ID NO: 2720243 - RNA, 19 nt, Artificial Sequence
  Description of Artificial Sequence: Synthetic oligonucleotide
ccaaugaugaggcucccaa

SEQ ID NO: 2720244 - RNA, 19 nt, Artificial Sequence
  Description of Artificial Sequence: Synthetic oligonucleotide
gaggugcuccugagagagg

SEQ ID NO: 2720245 - RNA, 19 nt, Artificial Sequence
  Description of Artificial Sequence: Synthetic oligonucleotide
ccaugucuguggucgauuc

SEQ ID NO: 2720246 - RNA, 19 nt, Artificial Sequence
  Description of Artificial Sequence: Synthetic oligonucleotide
ccaacuguagcagccccag

SEQ ID NO: 2720247 - RNA, 19 nt, Artificial Sequence
  Description of Artificial Sequence: Synthetic oligonucleotide
ccucauccguccaugucug

SEQ ID NO: 2720248 - RNA, 19 nt, Artificial Sequence
  Description of Artificial Sequence: Synthetic oligonucleotide
guuggaggacgaggggcug

SEQ ID NO: 2720249 - RNA, 19 nt, Artificial Sequence
  Description of Artificial Sequence: Synthetic oligonucleotide
acagggcagacgggacacg

SEQ ID NO: 2720250 - RNA, 19 nt, Artificial Sequence
  Description of Artificial Sequence: Synthetic oligonucleotide
cagacgggacacgaaagaa

SEQ ID NO: 2720251 - RNA, 19 nt, Artificial Sequence
  Description of Artificial Sequence: Synthetic oligonucleotide
gcugcuucacauggcgaag

SEQ ID NO: 2720252 - RNA, 19 nt, Artificial Sequence
  Description of Artificial Sequence: Synthetic oligonucleotide
ccagaaucgcguaggagaa

SEQ ID NO: 2720253 - RNA, 19 nt, Artificial Sequence
  Description of Artificial Sequence: Synthetic oligonucleotide
aagcugcggcuagggauga

SEQ ID NO: 2720254 - RNA, 19 nt, Artificial Sequence
  Description of Artificial Sequence: Synthetic oligonucleotide
cuuggagcaggcauacauu

SEQ ID NO: 2720255 - RNA, 19 nt, Artificial Sequence
  Description of Artificial Sequence: Synthetic oligonucleotide
gccucugagagggcaaagc

SEQ ID NO: 2720256 - RNA, 19 nt, Artificial Sequence
  Description of Artificial Sequence: Synthetic oligonucleotide
uccguccaugucugugguc

SEQ ID NO: 2720257 - RNA, 19 nt, Artificial Sequence
  Description of Artificial Sequence: Synthetic oligonucleotide
cccugagccaagcacuuuc

SEQ ID NO: 2720258 - RNA, 19 nt, Artificial Sequence
  Description of Artificial Sequence: Synthetic oligonucleotide
cugcuucacauggcgaaga

SEQ ID NO: 2720259 - RNA, 19 nt, Artificial Sequence
  Description of Artificial Sequence: Synthetic oligonucleotide
agggaugagugaaguugga

SEQ ID NO: 2720260 - RNA, 19 nt, Artificial Sequence
  Description of Artificial Sequence: Synthetic oligonucleotide
aggcccucauccguccaug

SEQ ID NO: 2720261 - RNA, 19 nt, Artificial Sequence
  Description of Artificial Sequence: Synthetic oligonucleotide
uggccucugagagggcaaa

SEQ ID NO: 2720262 - RNA, 19 nt, Artificial Sequence
  Description of Artificial Sequence: Synthetic oligonucleotide
ggacgaggggcugccaagc

SEQ ID NO: 2720263 - RNA, 19 nt, Artificial Sequence
  Description of Artificial Sequence: Synthetic oligonucleotide
cagcugcuucacauggcga

SEQ ID NO: 2720264 - RNA, 19 nt, Artificial Sequence
  Description of Artificial Sequence: Synthetic oligonucleotide
ccaaucccagccccagagc

SEQ ID NO: 2720265 - RNA, 19 nt, Artificial Sequence
  Description of Artificial Sequence: Synthetic oligonucleotide
gggcagacgggacacgaaa

SEQ ID NO: 2720266 - RNA, 19 nt, Artificial Sequence
  Description of Artificial Sequence: Synthetic oligonucleotide
gcggcuagggaugagugaa

SEQ ID NO: 2720267 - RNA, 19 nt, Artificial Sequence
  Description of Artificial Sequence: Synthetic oligonucleotide
ggacgacucagcagcugag

SEQ ID NO: 2720268 - RNA, 19 nt, Artificial Sequence
  Description of Artificial Sequence: Synthetic oligonucleotide
cguaggagaagagcuguug

SEQ ID NO: 2720269 - RNA, 19 nt, Artificial Sequence
  Description of Artificial Sequence: Synthetic oligonucleotide
cugugucgaugucucugga

SEQ ID NO: 2720270 - RNA, 19 nt, Artificial Sequence
  Description of Artificial Sequence: Synthetic oligonucleotide
ccuggggagguacaggaaa

SEQ ID NO: 2720271 - RNA, 19 nt, Artificial Sequence
  Description of Artificial Sequence: Synthetic oligonucleotide
cagccccaaugaacuuggc

SEQ ID NO: 2720272 - RNA, 19 nt, Artificial Sequence
  Description of Artificial Sequence: Synthetic oligonucleotide
cgaugucucuggaaaugac

SEQ ID NO: 2720273 - RNA, 19 nt, Artificial Sequence
  Description of Artificial Sequence: Synthetic oligonucleotide
ccaccccaacuguagcagc

SEQ ID NO: 2720274 - RNA, 19 nt, Artificial Sequence
  Description of Artificial Sequence: Synthetic oligonucleotide
gacgaggggcugccaagcu

SEQ ID NO: 2720275 - RNA, 19 nt, Artificial Sequence
  Description of Artificial Sequence: Synthetic oligonucleotide
ccccaacuguagcagcccc

SEQ ID NO: 2720276 - RNA, 19 nt, Artificial Sequence
  Description of Artificial Sequence: Synthetic oligonucleotide
cagggcagacgggacacga

SEQ ID NO: 2720277 - RNA, 19 nt, Artificial Sequence
  Description of Artificial Sequence: Synthetic oligonucleotide
guggucgauucaacuccac

SEQ ID NO: 2720278 - RNA, 19 nt, Artificial Sequence
  Description of Artificial Sequence: Synthetic oligonucleotide
caagcugcugaggcccuca

SEQ ID NO: 2720279 - RNA, 19 nt, Artificial Sequence
  Description of Artificial Sequence: Synthetic oligonucleotide
cccagccccaaugaacuug

SEQ ID NO: 2720280 - RNA, 19 nt, Artificial Sequence
  Description of Artificial Sequence: Synthetic oligonucleotide
cagcugagaggugcuccug

SEQ ID NO: 2720281 - RNA, 19 nt, Artificial Sequence
  Description of Artificial Sequence: Synthetic oligonucleotide
gguuuggaagcugcggcua

SEQ ID NO: 2720282 - RNA, 19 nt, Artificial Sequence
  Description of Artificial Sequence: Synthetic oligonucleotide
gcuccugaucaaggagcgg

SEQ ID NO: 2720283 - RNA, 19 nt, Artificial Sequence
  Description of Artificial Sequence: Synthetic oligonucleotide
cagagccagccaccccaac

SEQ ID NO: 2720284 - RNA, 19 nt, Artificial Sequence
  Description of Artificial Sequence: Synthetic oligonucleotide
gcggcugugucgaugucuc

SEQ ID NO: 2720285 - RNA, 19 nt, Artificial Sequence
  Description of Artificial Sequence: Synthetic oligonucleotide
auggccucugagagggcaa

SEQ ID NO: 2720286 - RNA, 19 nt, Artificial Sequence
  Description of Artificial Sequence: Synthetic oligonucleotide
ccacugcagacaggggacg

SEQ ID NO: 2720287 - RNA, 19 nt, Artificial Sequence
  Description of Artificial Sequence: Synthetic oligonucleotide
cccucauccguccaugucu

SEQ ID NO: 2720288 - RNA, 19 nt, Artificial Sequence
  Description of Artificial Sequence: Synthetic oligonucleotide
ggcugccaagcugcugagg

SEQ ID NO: 2720289 - RNA, 19 nt, Artificial Sequence
  Description of Artificial Sequence: Synthetic oligonucleotide
ucccagccccagagccagc

SEQ ID NO: 2720290 - RNA, 19 nt, Artificial Sequence
  Description of Artificial Sequence: Synthetic oligonucleotide
cgcugguuuggaagcugcg

SEQ ID NO: 2720291 - RNA, 19 nt, Artificial Sequence
  Description of Artificial Sequence: Synthetic oligonucleotide
aggggcugccaagcugcug

SEQ ID NO: 2720292 - RNA, 19 nt, Artificial Sequence
  Description of Artificial Sequence: Synthetic oligonucleotide
gcaaagcccagaaucgcgu

SEQ ID NO: 2720293 - RNA, 19 nt, Artificial Sequence
  Description of Artificial Sequence: Synthetic oligonucleotide
aggggacgacucagcagcu

SEQ ID NO: 2720294 - RNA, 19 nt, Artificial Sequence
  Description of Artificial Sequence: Synthetic oligonucleotide
acgggacacgaaagaacua

SEQ ID NO: 2720295 - RNA, 19 nt, Artificial Sequence
  Description of Artificial Sequence: Synthetic oligonucleotide
gaggcccucauccguccau

SEQ ID NO: 2720296 - RNA, 19 nt, Artificial Sequence
  Description of Artificial Sequence: Synthetic oligonucleotide
guagcagccccagccccaa

SEQ ID NO: 2720297 - RNA, 19 nt, Artificial Sequence
  Description of Artificial Sequence: Synthetic oligonucleotide
gcuccugagagaggugcuc

SEQ ID NO: 2720298 - RNA, 19 nt, Artificial Sequence
  Description of Artificial Sequence: Synthetic oligonucleotide
ggcuagggaugagugaagu

SEQ ID NO: 2720299 - RNA, 19 nt, Artificial Sequence
  Description of Artificial Sequence: Synthetic oligonucleotide
ggguagagaugaacuugga

SEQ ID NO: 2720300 - RNA, 19 nt, Artificial Sequence
  Description of Artificial Sequence: Synthetic oligonucleotide
uggcggcugugucgauguc

SEQ ID NO: 2720301 - RNA, 19 nt, Artificial Sequence
  Description of Artificial Sequence: Synthetic oligonucleotide
ggccucugagagggcaaag

SEQ ID NO: 2720302 - RNA, 19 nt, Artificial Sequence
  Description of Artificial Sequence: Synthetic oligonucleotide
agggcagacgggacacgaa

SEQ ID NO: 2720303 - RNA, 19 nt, Artificial Sequence
  Description of Artificial Sequence: Synthetic oligonucleotide
cagcagcugagaggugcuc

SEQ ID NO: 2720304 - RNA, 19 nt, Artificial Sequence
  Description of Artificial Sequence: Synthetic oligonucleotide
acucagcagcugagaggug

SEQ ID NO: 2720305 - RNA, 19 nt, Artificial Sequence
  Description of Artificial Sequence: Synthetic oligonucleotide
ggaugagaaaggccaccau

SEQ ID NO: 2720306 - RNA, 19 nt, Artificial Sequence
  Description of Artificial Sequence: Synthetic oligonucleotide
cucuggaaaugacgcuggu

SEQ ID NO: 2720307 - RNA, 19 nt, Artificial Sequence
  Description of Artificial Sequence: Synthetic oligonucleotide
ggggacgacucagcagcug

SEQ ID NO: 2720308 - RNA, 19 nt, Artificial Sequence
  Description of Artificial Sequence: Synthetic oligonucleotide
agcugcggcuagggaugag

SEQ ID NO: 2720309 - RNA, 19 nt, Artificial Sequence
  Description of Artificial Sequence: Synthetic oligonucleotide
acuuggcggcugugucgau

SEQ ID NO: 2720310 - RNA, 19 nt, Artificial Sequence
  Description of Artificial Sequence: Synthetic oligonucleotide
cgaaagaacuaugggaggu

SEQ ID NO: 2720311 - RNA, 19 nt, Artificial Sequence
  Description of Artificial Sequence: Synthetic oligonucleotide
gccccagccccaaugaacu

SEQ ID NO: 2720312 - RNA, 19 nt, Artificial Sequence
  Description of Artificial Sequence: Synthetic oligonucleotide
aggccaccauuaggcaaaa

SEQ ID NO: 2720313 - RNA, 19 nt, Artificial Sequence
  Description of Artificial Sequence: Synthetic oligonucleotide
gcuagggaugagugaaguu

SEQ ID NO: 2720314 - RNA, 19 nt, Artificial Sequence
  Description of Artificial Sequence: Synthetic oligonucleotide
cggcuagggaugagugaag

SEQ ID NO: 2720315 - RNA, 19 nt, Artificial Sequence
  Description of Artificial Sequence: Synthetic oligonucleotide
gccaagcacuuuccccaga

SEQ ID NO: 2720316 - RNA, 19 nt, Artificial Sequence
  Description of Artificial Sequence: Synthetic oligonucleotide
acccugagccaagcacuuu

SEQ ID NO: 2720317 - RNA, 19 nt, Artificial Sequence
  Description of Artificial Sequence: Synthetic oligonucleotide
gcugcggcuagggaugagu

SEQ ID NO: 2720318 - RNA, 19 nt, Artificial Sequence
  Description of Artificial Sequence: Synthetic oligonucleotide
cagacuuccuggggaggua

SEQ ID NO: 2720319 - RNA, 19 nt, Artificial Sequence
  Description of Artificial Sequence: Synthetic oligonucleotide
ggcggcugugucgaugucu

SEQ ID NO: 2720320 - RNA, 19 nt, Artificial Sequence
  Description of Artificial Sequence: Synthetic oligonucleotide
cacuuuccccagacuuccu

SEQ ID NO: 2720321 - RNA, 19 nt, Artificial Sequence
  Description of Artificial Sequence: Synthetic oligonucleotide
gcuucagagaaggguuccu

SEQ ID NO: 2720322 - RNA, 19 nt, Artificial Sequence
  Description of Artificial Sequence: Synthetic oligonucleotide
ggccaccauuaggcaaaag

SEQ ID NO: 2720323 - RNA, 19 nt, Artificial Sequence
  Description of Artificial Sequence: Synthetic oligonucleotide
cucauccguccaugucugu

SEQ ID NO: 2720324 - RNA, 19 nt, Artificial Sequence
  Description of Artificial Sequence: Synthetic oligonucleotide
guccaugucuguggucgau

SEQ ID NO: 2720325 - RNA, 19 nt, Artificial Sequence
  Description of Artificial Sequence: Synthetic oligonucleotide
gaggggcugccaagcugcu

SEQ ID NO: 2720326 - RNA, 19 nt, Artificial Sequence
  Description of Artificial Sequence: Synthetic oligonucleotide
ccugaucaaggagcgggua

SEQ ID NO: 2720327 - RNA, 19 nt, Artificial Sequence
  Description of Artificial Sequence: Synthetic oligonucleotide
ggcccucauccguccaugu

SEQ ID NO: 2720328 - RNA, 19 nt, Artificial Sequence
  Description of Artificial Sequence: Synthetic oligonucleotide
ccagagccagccaccccaa

SEQ ID NO: 2720329 - RNA, 19 nt, Artificial Sequence
  Description of Artificial Sequence: Synthetic oligonucleotide
cgggacacgaaagaacuau

SEQ ID NO: 2720330 - RNA, 19 nt, Artificial Sequence
  Description of Artificial Sequence: Synthetic oligonucleotide
ccaagcugcugaggcccuc

SEQ ID NO: 2720331 - RNA, 19 nt, Artificial Sequence
  Description of Artificial Sequence: Synthetic oligonucleotide
ggaggacgaggggcugcca

SEQ ID NO: 2720332 - RNA, 19 nt, Artificial Sequence
  Description of Artificial Sequence: Synthetic oligonucleotide
cgcguaggagaagagcugu

SEQ ID NO: 2720333 - RNA, 19 nt, Artificial Sequence
  Description of Artificial Sequence: Synthetic oligonucleotide
cguccaugucuguggucga

SEQ ID NO: 2720334 - RNA, 19 nt, Artificial Sequence
  Description of Artificial Sequence: Synthetic oligonucleotide
gcguaggagaagagcuguu

SEQ ID NO: 2720335 - RNA, 19 nt, Artificial Sequence
  Description of Artificial Sequence: Synthetic oligonucleotide
gccaagcugcugaggcccu

SEQ ID NO: 2720336 - RNA, 19 nt, Artificial Sequence
  Description of Artificial Sequence: Synthetic oligonucleotide
ccccagccccaaugaacuu

SEQ ID NO: 2720337 - RNA, 19 nt, Artificial Sequence
  Description of Artificial Sequence: Synthetic oligonucleotide
cggcugugucgaugucucu

SEQ ID NO: 2720338 - RNA, 19 nt, Artificial Sequence
  Description of Artificial Sequence: Synthetic oligonucleotide
aauaaaacgacauuguucg

SEQ ID NO: 2720339 - RNA, 19 nt, Artificial Sequence
  Description of Artificial Sequence: Synthetic oligonucleotide
uuaucagugaauuuaaucg

SEQ ID NO: 2720340 - RNA, 19 nt, Artificial Sequence
  Description of Artificial Sequence: Synthetic oligonucleotide
auuaacuuuuauuuaauac

SEQ ID NO: 2720341 - RNA, 19 nt, Artificial Sequence
  Description of Artificial Sequence: Synthetic oligonucleotide
aagaguagauuguaugugc

SEQ ID NO: 2720342 - RNA, 19 nt, Artificial Sequence
  Description of Artificial Sequence: Synthetic oligonucleotide
uuuaucacaggaaaggcag

SEQ ID NO: 2720343 - RNA, 19 nt, Artificial Sequence
  Description of Artificial Sequence: Synthetic oligonucleotide
auuacagaagaguagauug

SEQ ID NO: 2720344 - RNA, 19 nt, Artificial Sequence
  Description of Artificial Sequence: Synthetic oligonucleotide
uuugagagaaccuucaaug

SEQ ID NO: 2720345 - RNA, 19 nt, Artificial Sequence
  Description of Artificial Sequence: Synthetic oligonucleotide
auuuaauacguuuucuugg

SEQ ID NO: 2720346 - RNA, 19 nt, Artificial Sequence
  Description of Artificial Sequence: Synthetic oligonucleotide
auggguggaauacagaugg

SEQ ID NO: 2720347 - RNA, 19 nt, Artificial Sequence
  Description of Artificial Sequence: Synthetic oligonucleotide
gaauauccaucucagaugc

SEQ ID NO: 2720348 - RNA, 19 nt, Artificial Sequence
  Description of Artificial Sequence: Synthetic oligonucleotide
aauacguuuucuugguuag

SEQ ID NO: 2720349 - RNA, 19 nt, Artificial Sequence
  Description of Artificial Sequence: Synthetic oligonucleotide
uauuuaauacguuuucuug

SEQ ID NO: 2720350 - RNA, 19 nt, Artificial Sequence
  Description of Artificial Sequence: Synthetic oligonucleotide
uaauaaaacgacauuguuc

SEQ ID NO: 2720351 - RNA, 19 nt, Artificial Sequence
  Description of Artificial Sequence: Synthetic oligonucleotide
uuaaguagauagcacacca

SEQ ID NO: 2720352 - RNA, 19 nt, Artificial Sequence
  Description of Artificial Sequence: Synthetic oligonucleotide
ucuaauaaaacgacauugu

SEQ ID NO: 2720353 - RNA, 19 nt, Artificial Sequence
  Description of Artificial Sequence: Synthetic oligonucleotide
auggaaaccaacaggaacc

SEQ ID NO: 2720354 - RNA, 19 nt, Artificial Sequence
  Description of Artificial Sequence: Synthetic oligonucleotide
aguagauuguaugugcugc

SEQ ID NO: 2720355 - RNA, 19 nt, Artificial Sequence
  Description of Artificial Sequence: Synthetic oligonucleotide
agaagugaccucucaaggc

SEQ ID NO: 2720356 - RNA, 19 nt, Artificial Sequence
  Description of Artificial Sequence: Synthetic oligonucleotide
cauuuuaucacaggaaagg

SEQ ID NO: 2720357 - RNA, 19 nt, Artificial Sequence
  Description of Artificial Sequence: Synthetic oligonucleotide
uccuucagaaucuuuauca

SEQ ID NO: 2720358 - RNA, 19 nt, Artificial Sequence
  Description of Artificial Sequence: Synthetic oligonucleotide
uuuuaaguagauagcacac

SEQ ID NO: 2720359 - RNA, 19 nt, Artificial Sequence
  Description of Artificial Sequence: Synthetic oligonucleotide
aauacagauggaaaccaac

SEQ ID NO: 2720360 - RNA, 19 nt, Artificial Sequence
  Description of Artificial Sequence: Synthetic oligonucleotide
acagauggaaaccaacagg

SEQ ID NO: 2720361 - RNA, 19 nt, Artificial Sequence
  Description of Artificial Sequence: Synthetic oligonucleotide
agucacguccuucagaauc

SEQ ID NO: 2720362 - RNA, 19 nt, Artificial Sequence
  Description of Artificial Sequence: Synthetic oligonucleotide
aaaacgacauuguucguga

SEQ ID NO: 2720363 - RNA, 19 nt, Artificial Sequence
  Description of Artificial Sequence: Synthetic oligonucleotide
ugaauauccaucucagaug

SEQ ID NO: 2720364 - RNA, 19 nt, Artificial Sequence
  Description of Artificial Sequence: Synthetic oligonucleotide
uuuuaucacaggaaaggca

SEQ ID NO: 2720365 - RNA, 19 nt, Artificial Sequence
  Description of Artificial Sequence: Synthetic oligonucleotide
uucuugguuagaaugguca

SEQ ID NO: 2720366 - RNA, 19 nt, Artificial Sequence
  Description of Artificial Sequence: Synthetic oligonucleotide
agaaccuucaaugccaacg

SEQ ID NO: 2720367 - RNA, 19 nt, Artificial Sequence
  Description of Artificial Sequence: Synthetic oligonucleotide
ugagagaaccuucaaugcc

SEQ ID NO: 2720368 - RNA, 19 nt, Artificial Sequence
  Description of Artificial Sequence: Synthetic oligonucleotide
gauggaaaccaacaggaac

SEQ ID NO: 2720369 - RNA, 19 nt, Artificial Sequence
  Description of Artificial Sequence: Synthetic oligonucleotide
uuuaauacguuuucuuggu

SEQ ID NO: 2720370 - RNA, 19 nt, Artificial Sequence
  Description of Artificial Sequence: Synthetic oligonucleotide
uacagauggaaaccaacag

SEQ ID NO: 2720371 - RNA, 19 nt, Artificial Sequence
  Description of Artificial Sequence: Synthetic oligonucleotide
uuguucgugacucuggaga

SEQ ID NO: 2720372 - RNA, 19 nt, Artificial Sequence
  Description of Artificial Sequence: Synthetic oligonucleotide
cucuaauaaaacgacauug

SEQ ID NO: 2720373 - RNA, 19 nt, Artificial Sequence
  Description of Artificial Sequence: Synthetic oligonucleotide
uucugguagaggcacauug

SEQ ID NO: 2720374 - RNA, 19 nt, Artificial Sequence
  Description of Artificial Sequence: Synthetic oligonucleotide
gugaauuuaaucgagcgug

SEQ ID NO: 2720375 - RNA, 19 nt, Artificial Sequence
  Description of Artificial Sequence: Synthetic oligonucleotide
uaucagugaauuuaaucga

SEQ ID NO: 2720376 - RNA, 19 nt, Artificial Sequence
  Description of Artificial Sequence: Synthetic oligonucleotide
agaagaguagauuguaugu

SEQ ID NO: 2720377 - RNA, 19 nt, Artificial Sequence
  Description of Artificial Sequence: Synthetic oligonucleotide
cagugaauuuaaucgagcg

SEQ ID NO: 2720378 - RNA, 19 nt, Artificial Sequence
  Description of Artificial Sequence: Synthetic oligonucleotide
gaggggaagacccugacac

SEQ ID NO: 2720379 - RNA, 19 nt, Artificial Sequence
  Description of Artificial Sequence: Synthetic oligonucleotide
auauccaucucagaugcac

SEQ ID NO: 2720380 - RNA, 19 nt, Artificial Sequence
  Description of Artificial Sequence: Synthetic oligonucleotide
acagggcucuaauaaaacg

SEQ ID NO: 2720381 - RNA, 19 nt, Artificial Sequence
  Description of Artificial Sequence: Synthetic oligonucleotide
aaugccaacgagacagggc

SEQ ID NO: 2720382 - RNA, 19 nt, Artificial Sequence
  Description of Artificial Sequence: Synthetic oligonucleotide
uaaaacgacauuguucgug

SEQ ID NO: 2720383 - RNA, 19 nt, Artificial Sequence
  Description of Artificial Sequence: Synthetic oligonucleotide
uugagagaaccuucaaugc

SEQ ID NO: 2720384 - RNA, 19 nt, Artificial Sequence
  Description of Artificial Sequence: Synthetic oligonucleotide
aggcacauugugaauaucc

SEQ ID NO: 2720385 - RNA, 19 nt, Artificial Sequence
  Description of Artificial Sequence: Synthetic oligonucleotide
uguaugugcugcauuugag

SEQ ID NO: 2720386 - RNA, 19 nt, Artificial Sequence
  Description of Artificial Sequence: Synthetic oligonucleotide
ugaauuuaaucgagcgugc

SEQ ID NO: 2720387 - RNA, 19 nt, Artificial Sequence
  Description of Artificial Sequence: Synthetic oligonucleotide
ucagugaauuuaaucgagc

SEQ ID NO: 2720388 - RNA, 19 nt, Artificial Sequence
  Description of Artificial Sequence: Synthetic oligonucleotide
uccgguuccagccacgcag

SEQ ID NO: 2720389 - RNA, 19 nt, Artificial Sequence
  Description of Artificial Sequence: Synthetic oligonucleotide
uuagucauuaucuucucuu

SEQ ID NO: 2720390 - RNA, 19 nt, Artificial Sequence
  Description of Artificial Sequence: Synthetic oligonucleotide
aauuuaaucgagcgugcau

SEQ ID NO: 2720391 - RNA, 19 nt, Artificial Sequence
  Description of Artificial Sequence: Synthetic oligonucleotide
aaguagauagcacaccauu

SEQ ID NO: 2720392 - RNA, 19 nt, Artificial Sequence
  Description of Artificial Sequence: Synthetic oligonucleotide
cacauugugaauauccauc

SEQ ID NO: 2720393 - RNA, 19 nt, Artificial Sequence
  Description of Artificial Sequence: Synthetic oligonucleotide
accauuuuaucacaggaaa

SEQ ID NO: 2720394 - RNA, 19 nt, Artificial Sequence
  Description of Artificial Sequence: Synthetic oligonucleotide
uggaauacagauggaaacc

SEQ ID NO: 2720395 - RNA, 19 nt, Artificial Sequence
  Description of Artificial Sequence: Synthetic oligonucleotide
uuuaaguagauagcacacc

SEQ ID NO: 2720396 - RNA, 19 nt, Artificial Sequence
  Description of Artificial Sequence: Synthetic oligonucleotide
accaacaggaaccccacag

SEQ ID NO: 2720397 - RNA, 19 nt, Artificial Sequence
  Description of Artificial Sequence: Synthetic oligonucleotide
auagcacaccauuuuauca

SEQ ID NO: 2720398 - RNA, 19 nt, Artificial Sequence
  Description of Artificial Sequence: Synthetic oligonucleotide
agugaauuuaaucgagcgu

SEQ ID NO: 2720399 - RNA, 19 nt, Artificial Sequence
  Description of Artificial Sequence: Synthetic oligonucleotide
acgacauuguucgugacuc

SEQ ID NO: 2720400 - RNA, 19 nt, Artificial Sequence
  Description of Artificial Sequence: Synthetic oligonucleotide
guggaauacagauggaaac

SEQ ID NO: 2720401 - RNA, 19 nt, Artificial Sequence
  Description of Artificial Sequence: Synthetic oligonucleotide
uaauacguuuucuugguua

SEQ ID NO: 2720402 - RNA, 19 nt, Artificial Sequence
  Description of Artificial Sequence: Synthetic oligonucleotide
gaugcaccgguguacggcg

SEQ ID NO: 2720403 - RNA, 19 nt, Artificial Sequence
  Description of Artificial Sequence: Synthetic oligonucleotide
augccaacgagacagggcu

SEQ ID NO: 2720404 - RNA, 19 nt, Artificial Sequence
  Description of Artificial Sequence: Synthetic oligonucleotide
gaagaguagauuguaugug

SEQ ID NO: 2720405 - RNA, 19 nt, Artificial Sequence
  Description of Artificial Sequence: Synthetic oligonucleotide
aaucgagcgugcauuaguc

SEQ ID NO: 2720406 - RNA, 19 nt, Artificial Sequence
  Description of Artificial Sequence: Synthetic oligonucleotide
guuagaauggucaggaguc

SEQ ID NO: 2720407 - RNA, 19 nt, Artificial Sequence
  Description of Artificial Sequence: Synthetic oligonucleotide
ugcauuagucauuaucuuc

SEQ ID NO: 2720408 - RNA, 19 nt, Artificial Sequence
  Description of Artificial Sequence: Synthetic oligonucleotide
gaagugaccucucaaggca

SEQ ID NO: 2720409 - RNA, 19 nt, Artificial Sequence
  Description of Artificial Sequence: Synthetic oligonucleotide
accucgacaggucccaggc

SEQ ID NO: 2720410 - RNA, 19 nt, Artificial Sequence
  Description of Artificial Sequence: Synthetic oligonucleotide
gauagcacaccauuuuauc

SEQ ID NO: 2720411 - RNA, 19 nt, Artificial Sequence
  Description of Artificial Sequence: Synthetic oligonucleotide
aacacggcgcaccucuccg

SEQ ID NO: 2720412 - RNA, 19 nt, Artificial Sequence
  Description of Artificial Sequence: Synthetic oligonucleotide
aacgacauuguucgugacu

SEQ ID NO: 2720413 - RNA, 19 nt, Artificial Sequence
  Description of Artificial Sequence: Synthetic oligonucleotide
uagcacaccauuuuaucac

SEQ ID NO: 2720414 - RNA, 19 nt, Artificial Sequence
  Description of Artificial Sequence: Synthetic oligonucleotide
acaggaauuacagaagagu

SEQ ID NO: 2720415 - RNA, 19 nt, Artificial Sequence
  Description of Artificial Sequence: Synthetic oligonucleotide
ugcugcauuugagagaacc

SEQ ID NO: 2720416 - RNA, 19 nt, Artificial Sequence
  Description of Artificial Sequence: Synthetic oligonucleotide
aauuacagaagaguagauu

SEQ ID NO: 2720417 - RNA, 19 nt, Artificial Sequence
  Description of Artificial Sequence: Synthetic oligonucleotide
aaccccacaggaauuacag

SEQ ID NO: 2720418 - RNA, 19 nt, Artificial Sequence
  Description of Artificial Sequence: Synthetic oligonucleotide
auuugagagaaccuucaau

SEQ ID NO: 2720419 - RNA, 19 nt, Artificial Sequence
  Description of Artificial Sequence: Synthetic oligonucleotide
uaaucgagcgugcauuagu

SEQ ID NO: 2720420 - RNA, 19 nt, Artificial Sequence
  Description of Artificial Sequence: Synthetic oligonucleotide
aaacgacauuguucgugac

SEQ ID NO: 2720421 - RNA, 19 nt, Artificial Sequence
  Description of Artificial Sequence: Synthetic oligonucleotide
gaaaccaacaggaacccca

SEQ ID NO: 2720422 - RNA, 19 nt, Artificial Sequence
  Description of Artificial Sequence: Synthetic oligonucleotide
aauggucaggagucacguc

SEQ ID NO: 2720423 - RNA, 19 nt, Artificial Sequence
  Description of Artificial Sequence: Synthetic oligonucleotide
uggaacacggcgcaccucu

SEQ ID NO: 2720424 - RNA, 19 nt, Artificial Sequence
  Description of Artificial Sequence: Synthetic oligonucleotide
ucaggagucacguccuuca

SEQ ID NO: 2720425 - RNA, 19 nt, Artificial Sequence
  Description of Artificial Sequence: Synthetic oligonucleotide
ucuuuucugguagaggcac

SEQ ID NO: 2720426 - RNA, 19 nt, Artificial Sequence
  Description of Artificial Sequence: Synthetic oligonucleotide
ucugguagaggcacauugu

SEQ ID NO: 2720427 - RNA, 19 nt, Artificial Sequence
  Description of Artificial Sequence: Synthetic oligonucleotide
agaugcaccgguguacggc

SEQ ID NO: 2720428 - RNA, 19 nt, Artificial Sequence
  Description of Artificial Sequence: Synthetic oligonucleotide
agcagcauggguggaauac

SEQ ID NO: 2720429 - RNA, 19 nt, Artificial Sequence
  Description of Artificial Sequence: Synthetic oligonucleotide
acaggaaccccacaggaau

SEQ ID NO: 2720430 - RNA, 19 nt, Artificial Sequence
  Description of Artificial Sequence: Synthetic oligonucleotide
ucucagaugcacuuacuau

SEQ ID NO: 2720431 - RNA, 19 nt, Artificial Sequence
  Description of Artificial Sequence: Synthetic oligonucleotide
agaugcacuuacuauuccu

SEQ ID NO: 2720432 - RNA, 19 nt, Artificial Sequence
  Description of Artificial Sequence: Synthetic oligonucleotide
ugguagaggcacauuguga

SEQ ID NO: 2720433 - RNA, 19 nt, Artificial Sequence
  Description of Artificial Sequence: Synthetic oligonucleotide
aaccuucaaugccaacgag

SEQ ID NO: 2720434 - RNA, 19 nt, Artificial Sequence
  Description of Artificial Sequence: Synthetic oligonucleotide
agggcucuaauaaaacgac

SEQ ID NO: 2720435 - RNA, 19 nt, Artificial Sequence
  Description of Artificial Sequence: Synthetic oligonucleotide
gaaccuucaaugccaacga

SEQ ID NO: 2720436 - RNA, 19 nt, Artificial Sequence
  Description of Artificial Sequence: Synthetic oligonucleotide
aaugcgcgcaguggaacac

SEQ ID NO: 2720437 - RNA, 19 nt, Artificial Sequence
  Description of Artificial Sequence: Synthetic oligonucleotide
gaccucucaaggcagccag

SEQ ID NO: 2720438 - RNA, 19 nt, Artificial Sequence
  Description of Artificial Sequence: Synthetic oligonucleotide
uagauagcacaccauuuua

SEQ ID NO: 2720439 - RNA, 19 nt, Artificial Sequence
  Description of Artificial Sequence: Synthetic oligonucleotide
cuugguuagaauggucagg

SEQ ID NO: 2720440 - RNA, 19 nt, Artificial Sequence
  Description of Artificial Sequence: Synthetic oligonucleotide
gaccuagaggggaagaccc

SEQ ID NO: 2720441 - RNA, 19 nt, Artificial Sequence
  Description of Artificial Sequence: Synthetic oligonucleotide
aucagugaauuuaaucgag

SEQ ID NO: 2720442 - RNA, 19 nt, Artificial Sequence
  Description of Artificial Sequence: Synthetic oligonucleotide
cacaccauuuuaucacagg

SEQ ID NO: 2720443 - RNA, 19 nt, Artificial Sequence
  Description of Artificial Sequence: Synthetic oligonucleotide
uuuucuugguuagaauggu

SEQ ID NO: 2720444 - RNA, 19 nt, Artificial Sequence
  Description of Artificial Sequence: Synthetic oligonucleotide
ugugaauauccaucucaga

SEQ ID NO: 2720445 - RNA, 19 nt, Artificial Sequence
  Description of Artificial Sequence: Synthetic oligonucleotide
cugcaaucuuuucugguag

SEQ ID NO: 2720446 - RNA, 19 nt, Artificial Sequence
  Description of Artificial Sequence: Synthetic oligonucleotide
aggaaaggcagaagugacc

SEQ ID NO: 2720447 - RNA, 19 nt, Artificial Sequence
  Description of Artificial Sequence: Synthetic oligonucleotide
uuuaaucgagcgugcauua

SEQ ID NO: 2720448 - RNA, 19 nt, Artificial Sequence
  Description of Artificial Sequence: Synthetic oligonucleotide
ucccaggcgagaugcaccg

SEQ ID NO: 2720449 - RNA, 19 nt, Artificial Sequence
  Description of Artificial Sequence: Synthetic oligonucleotide
uauccaucucagaugcacu

SEQ ID NO: 2720450 - RNA, 19 nt, Artificial Sequence
  Description of Artificial Sequence: Synthetic oligonucleotide
gugaauauccaucucagau

SEQ ID NO: 2720451 - RNA, 19 nt, Artificial Sequence
  Description of Artificial Sequence: Synthetic oligonucleotide
auuuaaucgagcgugcauu

SEQ ID NO: 2720452 - RNA, 19 nt, Artificial Sequence
  Description of Artificial Sequence: Synthetic oligonucleotide
uaaguagauagcacaccau

SEQ ID NO: 2720453 - RNA, 19 nt, Artificial Sequence
  Description of Artificial Sequence: Synthetic oligonucleotide
uguacggcgagcaccgcgu

SEQ ID NO: 2720454 - RNA, 19 nt, Artificial Sequence
  Description of Artificial Sequence: Synthetic oligonucleotide
cacaggaauuacagaagag

SEQ ID NO: 2720455 - RNA, 19 nt, Artificial Sequence
  Description of Artificial Sequence: Synthetic oligonucleotide
cacaggaaaggcagaagug

SEQ ID NO: 2720456 - RNA, 19 nt, Artificial Sequence
  Description of Artificial Sequence: Synthetic oligonucleotide
auacagauggaaaccaaca

SEQ ID NO: 2720457 - RNA, 19 nt, Artificial Sequence
  Description of Artificial Sequence: Synthetic oligonucleotide
uuaucacaggaaaggcaga

SEQ ID NO: 2720458 - RNA, 19 nt, Artificial Sequence
  Description of Artificial Sequence: Synthetic oligonucleotide
caaucuuuucugguagagg

SEQ ID NO: 2720459 - RNA, 19 nt, Artificial Sequence
  Description of Artificial Sequence: Synthetic oligonucleotide
caggaaaggcagaagugac

SEQ ID NO: 2720460 - RNA, 19 nt, Artificial Sequence
  Description of Artificial Sequence: Synthetic oligonucleotide
uguucgugacucuggagaa

SEQ ID NO: 2720461 - RNA, 19 nt, Artificial Sequence
  Description of Artificial Sequence: Synthetic oligonucleotide
ggaauuacagaagaguaga

SEQ ID NO: 2720462 - RNA, 19 nt, Artificial Sequence
  Description of Artificial Sequence: Synthetic oligonucleotide
cagggcucuaauaaaacga

SEQ ID NO: 2720463 - RNA, 19 nt, Artificial Sequence
  Description of Artificial Sequence: Synthetic oligonucleotide
aacgagacagggcucuaau

SEQ ID NO: 2720464 - RNA, 19 nt, Artificial Sequence
  Description of Artificial Sequence: Synthetic oligonucleotide
uuucuugguuagaaugguc

SEQ ID NO: 2720465 - RNA, 19 nt, Artificial Sequence
  Description of Artificial Sequence: Synthetic oligonucleotide
aggggaagacccugacacc

SEQ ID NO: 2720466 - RNA, 19 nt, Artificial Sequence
  Description of Artificial Sequence: Synthetic oligonucleotide
guaugugcugcauuugaga

SEQ ID NO: 2720467 - RNA, 19 nt, Artificial Sequence
  Description of Artificial Sequence: Synthetic oligonucleotide
cauggguggaauacagaug

SEQ ID NO: 2720468 - RNA, 19 nt, Artificial Sequence
  Description of Artificial Sequence: Synthetic oligonucleotide
ccuucaaugccaacgagac

SEQ ID NO: 2720469 - RNA, 19 nt, Artificial Sequence
  Description of Artificial Sequence: Synthetic oligonucleotide
gacauuguucgugacucug

SEQ ID NO: 2720470 - RNA, 19 nt, Artificial Sequence
  Description of Artificial Sequence: Synthetic oligonucleotide
uggcaaugcgcgcagugga

SEQ ID NO: 2720471 - RNA, 19 nt, Artificial Sequence
  Description of Artificial Sequence: Synthetic oligonucleotide
ucgagcgugcauuagucau

SEQ ID NO: 2720472 - RNA, 19 nt, Artificial Sequence
  Description of Artificial Sequence: Synthetic oligonucleotide
gcagaagugaccucucaag

SEQ ID NO: 2720473 - RNA, 19 nt, Artificial Sequence
  Description of Artificial Sequence: Synthetic oligonucleotide
uggaaaccaacaggaaccc

SEQ ID NO: 2720474 - RNA, 19 nt, Artificial Sequence
  Description of Artificial Sequence: Synthetic oligonucleotide
agaauggucaggagucacg

SEQ ID NO: 2720475 - RNA, 19 nt, Artificial Sequence
  Description of Artificial Sequence: Synthetic oligonucleotide
cugguagaggcacauugug

SEQ ID NO: 2720476 - RNA, 19 nt, Artificial Sequence
  Description of Artificial Sequence: Synthetic oligonucleotide
uuaaucgagcgugcauuag

SEQ ID NO: 2720477 - RNA, 19 nt, Artificial Sequence
  Description of Artificial Sequence: Synthetic oligonucleotide
aucucagaugcacuuacua

SEQ ID NO: 2720478 - RNA, 19 nt, Artificial Sequence
  Description of Artificial Sequence: Synthetic oligonucleotide
agugucccacuccauggag

SEQ ID NO: 2720479 - RNA, 19 nt, Artificial Sequence
  Description of Artificial Sequence: Synthetic oligonucleotide
agcacaccauuuuaucaca

SEQ ID NO: 2720480 - RNA, 19 nt, Artificial Sequence
  Description of Artificial Sequence: Synthetic oligonucleotide
gauuguaugugcugcauuu

SEQ ID NO: 2720481 - RNA, 19 nt, Artificial Sequence
  Description of Artificial Sequence: Synthetic oligonucleotide
ugcgcgcaguggaacacgg

SEQ ID NO: 2720482 - RNA, 19 nt, Artificial Sequence
  Description of Artificial Sequence: Synthetic oligonucleotide
ugacgucuccaccucaguc

SEQ ID NO: 2720483 - RNA, 19 nt, Artificial Sequence
  Description of Artificial Sequence: Synthetic oligonucleotide
caccgcguggcaaugcgcg

SEQ ID NO: 2720484 - RNA, 19 nt, Artificial Sequence
  Description of Artificial Sequence: Synthetic oligonucleotide
uggagaaggccacgguccc

SEQ ID NO: 2720485 - RNA, 19 nt, Artificial Sequence
  Description of Artificial Sequence: Synthetic oligonucleotide
uuaauacguuuucuugguu

SEQ ID NO: 2720486 - RNA, 19 nt, Artificial Sequence
  Description of Artificial Sequence: Synthetic oligonucleotide
gguagaggcacauugugaa

SEQ ID NO: 2720487 - RNA, 19 nt, Artificial Sequence
  Description of Artificial Sequence: Synthetic oligonucleotide
uagaggcacauugugaaua

SEQ ID NO: 2720488 - RNA, 19 nt, Artificial Sequence
  Description of Artificial Sequence: Synthetic oligonucleotide
uacagaagaguagauugua

SEQ ID NO: 2720489 - RNA, 19 nt, Artificial Sequence
  Description of Artificial Sequence: Synthetic oligonucleotide
acauuguucgugacucugg

SEQ ID NO: 2720490 - RNA, 19 nt, Artificial Sequence
  Description of Artificial Sequence: Synthetic oligonucleotide
cguuuucuugguuagaaug

SEQ ID NO: 2720491 - RNA, 19 nt, Artificial Sequence
  Description of Artificial Sequence: Synthetic oligonucleotide
uuagaauggucaggaguca

SEQ ID NO: 2720492 - RNA, 19 nt, Artificial Sequence
  Description of Artificial Sequence: Synthetic oligonucleotide
cagcauggguggaauacag

SEQ ID NO: 2720493 - RNA, 19 nt, Artificial Sequence
  Description of Artificial Sequence: Synthetic oligonucleotide
aggaccuagaggggaagac

SEQ ID NO: 2720494 - RNA, 19 nt, Artificial Sequence
  Description of Artificial Sequence: Synthetic oligonucleotide
agcaccgcguggcaaugcg

SEQ ID NO: 2720495 - RNA, 19 nt, Artificial Sequence
  Description of Artificial Sequence: Synthetic oligonucleotide
cugagugucccacuccaug

SEQ ID NO: 2720496 - RNA, 19 nt, Artificial Sequence
  Description of Artificial Sequence: Synthetic oligonucleotide
accggugacgucuccaccu

SEQ ID NO: 2720497 - RNA, 19 nt, Artificial Sequence
  Description of Artificial Sequence: Synthetic oligonucleotide
caccucuccgguuccagcc

SEQ ID NO: 2720498 - RNA, 19 nt, Artificial Sequence
  Description of Artificial Sequence: Synthetic oligonucleotide
gaauuuaaucgagcgugca

SEQ ID NO: 2720499 - RNA, 19 nt, Artificial Sequence
  Description of Artificial Sequence: Synthetic oligonucleotide
acggcgagcaccgcguggc

SEQ ID NO: 2720500 - RNA, 19 nt, Artificial Sequence
  Description of Artificial Sequence: Synthetic oligonucleotide
cauuagucauuaucuucuc

SEQ ID NO: 2720501 - RNA, 19 nt, Artificial Sequence
  Description of Artificial Sequence: Synthetic oligonucleotide
ugguuagaauggucaggag

SEQ ID NO: 2720502 - RNA, 19 nt, Artificial Sequence
  Description of Artificial Sequence: Synthetic oligonucleotide
agaguagauuguaugugcu

SEQ ID NO: 2720503 - RNA, 19 nt, Artificial Sequence
  Description of Artificial Sequence: Synthetic oligonucleotide
agaggcacauugugaauau

SEQ ID NO: 2720504 - RNA, 19 nt, Artificial Sequence
  Description of Artificial Sequence: Synthetic oligonucleotide
guagauuguaugugcugca

SEQ ID NO: 2720505 - RNA, 19 nt, Artificial Sequence
  Description of Artificial Sequence: Synthetic oligonucleotide
augugcugcauuugagaga

SEQ ID NO: 2720506 - RNA, 19 nt, Artificial Sequence
  Description of Artificial Sequence: Synthetic oligonucleotide
uuuucugguagaggcacau

SEQ ID NO: 2720507 - RNA, 19 nt, Artificial Sequence
  Description of Artificial Sequence: Synthetic oligonucleotide
uccggaggaccuagagggg

SEQ ID NO: 2720508 - RNA, 19 nt, Artificial Sequence
  Description of Artificial Sequence: Synthetic oligonucleotide
gacagggcucuaauaaaac

SEQ ID NO: 2720509 - RNA, 19 nt, Artificial Sequence
  Description of Artificial Sequence: Synthetic oligonucleotide
gacccugacaccaccugag

SEQ ID NO: 2720510 - RNA, 19 nt, Artificial Sequence
  Description of Artificial Sequence: Synthetic oligonucleotide
auaaaacgacauuguucgu

SEQ ID NO: 2720511 - RNA, 19 nt, Artificial Sequence
  Description of Artificial Sequence: Synthetic oligonucleotide
guguacggcgagcaccgcg

SEQ ID NO: 2720512 - RNA, 19 nt, Artificial Sequence
  Description of Artificial Sequence: Synthetic oligonucleotide
gaacacggcgcaccucucc

SEQ ID NO: 2720513 - RNA, 19 nt, Artificial Sequence
  Description of Artificial Sequence: Synthetic oligonucleotide
aguggaacacggcgcaccu

SEQ ID NO: 2720514 - RNA, 19 nt, Artificial Sequence
  Description of Artificial Sequence: Synthetic oligonucleotide
gaccucgacaggucccagg

SEQ ID NO: 2720515 - RNA, 19 nt, Artificial Sequence
  Description of Artificial Sequence: Synthetic oligonucleotide
gaaggccacggucccgagg

SEQ ID NO: 2720516 - RNA, 19 nt, Artificial Sequence
  Description of Artificial Sequence: Synthetic oligonucleotide
gagaugcaccgguguacgg

SEQ ID NO: 2720517 - RNA, 19 nt, Artificial Sequence
  Description of Artificial Sequence: Synthetic oligonucleotide
agauuguaugugcugcauu

SEQ ID NO: 2720518 - RNA, 19 nt, Artificial Sequence
  Description of Artificial Sequence: Synthetic oligonucleotide
acucuggagaaggccacgg

SEQ ID NO: 2720519 - RNA, 19 nt, Artificial Sequence
  Description of Artificial Sequence: Synthetic oligonucleotide
caaugccaacgagacaggg

SEQ ID NO: 2720520 - RNA, 19 nt, Artificial Sequence
  Description of Artificial Sequence: Synthetic oligonucleotide
cagaugcacuuacuauucc

SEQ ID NO: 2720521 - RNA, 19 nt, Artificial Sequence
  Description of Artificial Sequence: Synthetic oligonucleotide
uagaauggucaggagucac

SEQ ID NO: 2720522 - RNA, 19 nt, Artificial Sequence
  Description of Artificial Sequence: Synthetic oligonucleotide
accuucaaugccaacgaga

SEQ ID NO: 2720523 - RNA, 19 nt, Artificial Sequence
  Description of Artificial Sequence: Synthetic oligonucleotide
uacggcgagcaccgcgugg

SEQ ID NO: 2720524 - RNA, 19 nt, Artificial Sequence
  Description of Artificial Sequence: Synthetic oligonucleotide
ggagucacguccuucagaa

SEQ ID NO: 2720525 - RNA, 19 nt, Artificial Sequence
  Description of Artificial Sequence: Synthetic oligonucleotide
aguagauagcacaccauuu

SEQ ID NO: 2720526 - RNA, 19 nt, Artificial Sequence
  Description of Artificial Sequence: Synthetic oligonucleotide
gacgucuccaccucagucu

SEQ ID NO: 2720527 - RNA, 19 nt, Artificial Sequence
  Description of Artificial Sequence: Synthetic oligonucleotide
caggucccaggcgagaugc

SEQ ID NO: 2720528 - RNA, 19 nt, Artificial Sequence
  Description of Artificial Sequence: Synthetic oligonucleotide
gguuagaauggucaggagu

SEQ ID NO: 2720529 - RNA, 19 nt, Artificial Sequence
  Description of Artificial Sequence: Synthetic oligonucleotide
ugcaccgguguacggcgag

SEQ ID NO: 2720530 - RNA, 19 nt, Artificial Sequence
  Description of Artificial Sequence: Synthetic oligonucleotide
guggcaaugcgcgcagugg

SEQ ID NO: 2720531 - RNA, 19 nt, Artificial Sequence
  Description of Artificial Sequence: Synthetic oligonucleotide
aucgagcgugcauuaguca

SEQ ID NO: 2720532 - RNA, 19 nt, Artificial Sequence
  Description of Artificial Sequence: Synthetic oligonucleotide
agacccugacaccaccuga

SEQ ID NO: 2720533 - RNA, 19 nt, Artificial Sequence
  Description of Artificial Sequence: Synthetic oligonucleotide
aggucgaccggugacgucu

SEQ ID NO: 2720534 - RNA, 19 nt, Artificial Sequence
  Description of Artificial Sequence: Synthetic oligonucleotide
aggagucacguccuucaga

SEQ ID NO: 2720535 - RNA, 19 nt, Artificial Sequence
  Description of Artificial Sequence: Synthetic oligonucleotide
agauagcacaccauuuuau

SEQ ID NO: 2720536 - RNA, 19 nt, Artificial Sequence
  Description of Artificial Sequence: Synthetic oligonucleotide
auccaucucagaugcacuu

SEQ ID NO: 2720537 - RNA, 19 nt, Artificial Sequence
  Description of Artificial Sequence: Synthetic oligonucleotide
cucgacaggucccaggcga

SEQ ID NO: 2720538 - RNA, 19 nt, Artificial Sequence
  Description of Artificial Sequence: Synthetic oligonucleotide
aacaggaaccccacaggaa

SEQ ID NO: 2720539 - RNA, 19 nt, Artificial Sequence
  Description of Artificial Sequence: Synthetic oligonucleotide
cagaaucuuuaucagugaa

SEQ ID NO: 2720540 - RNA, 19 nt, Artificial Sequence
  Description of Artificial Sequence: Synthetic oligonucleotide
augcacuuacuauuccuuu

SEQ ID NO: 2720541 - RNA, 19 nt, Artificial Sequence
  Description of Artificial Sequence: Synthetic oligonucleotide
aaccaacaggaaccccaca

SEQ ID NO: 2720542 - RNA, 19 nt, Artificial Sequence
  Description of Artificial Sequence: Synthetic oligonucleotide
gucuccggaggaccuagag

SEQ ID NO: 2720543 - RNA, 19 nt, Artificial Sequence
  Description of Artificial Sequence: Synthetic oligonucleotide
cauuguucgugacucugga

SEQ ID NO: 2720544 - RNA, 19 nt, Artificial Sequence
  Description of Artificial Sequence: Synthetic oligonucleotide
guagauagcacaccauuuu

SEQ ID NO: 2720545 - RNA, 19 nt, Artificial Sequence
  Description of Artificial Sequence: Synthetic oligonucleotide
accgcguggcaaugcgcgc

SEQ ID NO: 2720546 - RNA, 19 nt, Artificial Sequence
  Description of Artificial Sequence: Synthetic oligonucleotide
agacagggcucuaauaaaa

SEQ ID NO: 2720547 - RNA, 19 nt, Artificial Sequence
  Description of Artificial Sequence: Synthetic oligonucleotide
uagauuguaugugcugcau

SEQ ID NO: 2720548 - RNA, 19 nt, Artificial Sequence
  Description of Artificial Sequence: Synthetic oligonucleotide
guccuucagaaucuuuauc

SEQ ID NO: 2720549 - RNA, 19 nt, Artificial Sequence
  Description of Artificial Sequence: Synthetic oligonucleotide
gacucuggagaaggccacg

SEQ ID NO: 2720550 - RNA, 19 nt, Artificial Sequence
  Description of Artificial Sequence: Synthetic oligonucleotide
gugucccacuccauggagg

SEQ ID NO: 2720551 - RNA, 19 nt, Artificial Sequence
  Description of Artificial Sequence: Synthetic oligonucleotide
ucgugacucuggagaaggc

SEQ ID NO: 2720552 - RNA, 19 nt, Artificial Sequence
  Description of Artificial Sequence: Synthetic oligonucleotide
cuaauaaaacgacauuguu

SEQ ID NO: 2720553 - RNA, 19 nt, Artificial Sequence
  Description of Artificial Sequence: Synthetic oligonucleotide
acguuuucuugguuagaau

SEQ ID NO: 2720554 - RNA, 19 nt, Artificial Sequence
  Description of Artificial Sequence: Synthetic oligonucleotide
gcaaucuuuucugguagag

SEQ ID NO: 2720555 - RNA, 19 nt, Artificial Sequence
  Description of Artificial Sequence: Synthetic oligonucleotide
gaaaggcagaagugaccuc

SEQ ID NO: 2720556 - RNA, 19 nt, Artificial Sequence
  Description of Artificial Sequence: Synthetic oligonucleotide
agggaccucgacagguccc

SEQ ID NO: 2720557 - RNA, 19 nt, Artificial Sequence
  Description of Artificial Sequence: Synthetic oligonucleotide
caguggaacacggcgcacc

SEQ ID NO: 2720558 - RNA, 19 nt, Artificial Sequence
  Description of Artificial Sequence: Synthetic oligonucleotide
aauauccaucucagaugca

SEQ ID NO: 2720559 - RNA, 19 nt, Artificial Sequence
  Description of Artificial Sequence: Synthetic oligonucleotide
cucucaaggcagccagagc

SEQ ID NO: 2720560 - RNA, 19 nt, Artificial Sequence
  Description of Artificial Sequence: Synthetic oligonucleotide
uggguggaauacagaugga

SEQ ID NO: 2720561 - RNA, 19 nt, Artificial Sequence
  Description of Artificial Sequence: Synthetic oligonucleotide
accgguguacggcgagcac

SEQ ID NO: 2720562 - RNA, 19 nt, Artificial Sequence
  Description of Artificial Sequence: Synthetic oligonucleotide
gcgugcauuagucauuauc

SEQ ID NO: 2720563 - RNA, 19 nt, Artificial Sequence
  Description of Artificial Sequence: Synthetic oligonucleotide
gagugucccacuccaugga

SEQ ID NO: 2720564 - RNA, 19 nt, Artificial Sequence
  Description of Artificial Sequence: Synthetic oligonucleotide
gaauggucaggagucacgu

SEQ ID NO: 2720565 - RNA, 19 nt, Artificial Sequence
  Description of Artificial Sequence: Synthetic oligonucleotide
cccacaggaauuacagaag

SEQ ID NO: 2720566 - RNA, 19 nt, Artificial Sequence
  Description of Artificial Sequence: Synthetic oligonucleotide
acacggcgcaccucuccgg

SEQ ID NO: 2720567 - RNA, 19 nt, Artificial Sequence
  Description of Artificial Sequence: Synthetic oligonucleotide
ggaagacccugacaccacc

SEQ ID NO: 2720568 - RNA, 19 nt, Artificial Sequence
  Description of Artificial Sequence: Synthetic oligonucleotide
gcauuagucauuaucuucu

SEQ ID NO: 2720569 - RNA, 19 nt, Artificial Sequence
  Description of Artificial Sequence: Synthetic oligonucleotide
gguggaauacagauggaaa

SEQ ID NO: 2720570 - RNA, 19 nt, Artificial Sequence
  Description of Artificial Sequence: Synthetic oligonucleotide
cuagaggggaagacccuga

SEQ ID NO: 2720571 - RNA, 19 nt, Artificial Sequence
  Description of Artificial Sequence: Synthetic oligonucleotide
ugaccucucaaggcagcca

SEQ ID NO: 2720572 - RNA, 19 nt, Artificial Sequence
  Description of Artificial Sequence: Synthetic oligonucleotide
gagaaggccacggucccga

SEQ ID NO: 2720573 - RNA, 19 nt, Artificial Sequence
  Description of Artificial Sequence: Synthetic oligonucleotide
gaccggugacgucuccacc

SEQ ID NO: 2720574 - RNA, 19 nt, Artificial Sequence
  Description of Artificial Sequence: Synthetic oligonucleotide
acaggucccaggcgagaug

SEQ ID NO: 2720575 - RNA, 19 nt, Artificial Sequence
  Description of Artificial Sequence: Synthetic oligonucleotide
aggcgagaugcaccggugu

SEQ ID NO: 2720576 - RNA, 19 nt, Artificial Sequence
  Description of Artificial Sequence: Synthetic oligonucleotide
gagaaccuucaaugccaac

SEQ ID NO: 2720577 - RNA, 19 nt, Artificial Sequence
  Description of Artificial Sequence: Synthetic oligonucleotide
guucgugacucuggagaag

SEQ ID NO: 2720578 - RNA, 19 nt, Artificial Sequence
  Description of Artificial Sequence: Synthetic oligonucleotide
ggaccuagaggggaagacc

SEQ ID NO: 2720579 - RNA, 19 nt, Artificial Sequence
  Description of Artificial Sequence: Synthetic oligonucleotide
cugacaccaccugaguguc

SEQ ID NO: 2720580 - RNA, 19 nt, Artificial Sequence
  Description of Artificial Sequence: Synthetic oligonucleotide
caccugagugucccacucc

SEQ ID NO: 2720581 - RNA, 19 nt, Artificial Sequence
  Description of Artificial Sequence: Synthetic oligonucleotide
ggaaaggcagaagugaccu

SEQ ID NO: 2720582 - RNA, 19 nt, Artificial Sequence
  Description of Artificial Sequence: Synthetic oligonucleotide
uccaucucagaugcacuua

SEQ ID NO: 2720583 - RNA, 19 nt, Artificial Sequence
  Description of Artificial Sequence: Synthetic oligonucleotide
caaugcgcgcaguggaaca

SEQ ID NO: 2720584 - RNA, 19 nt, Artificial Sequence
  Description of Artificial Sequence: Synthetic oligonucleotide
acgagacagggcucuaaua

SEQ ID NO: 2720585 - RNA, 19 nt, Artificial Sequence
  Description of Artificial Sequence: Synthetic oligonucleotide
gaugcacuuacuauuccuu

SEQ ID NO: 2720586 - RNA, 19 nt, Artificial Sequence
  Description of Artificial Sequence: Synthetic oligonucleotide
cgugcauuagucauuaucu

SEQ ID NO: 2720587 - RNA, 19 nt, Artificial Sequence
  Description of Artificial Sequence: Synthetic oligonucleotide
ccccacaggaauuacagaa

SEQ ID NO: 2720588 - RNA, 19 nt, Artificial Sequence
  Description of Artificial Sequence: Synthetic oligonucleotide
caggagucacguccuucag

SEQ ID NO: 2720589 - RNA, 19 nt, Artificial Sequence
  Description of Artificial Sequence: Synthetic oligonucleotide
augcgcgcaguggaacacg

SEQ ID NO: 2720590 - RNA, 19 nt, Artificial Sequence
  Description of Artificial Sequence: Synthetic oligonucleotide
cucuccgguuccagccacg

SEQ ID NO: 2720591 - RNA, 19 nt, Artificial Sequence
  Description of Artificial Sequence: Synthetic oligonucleotide
caggcgagaugcaccggug

SEQ ID NO: 2720592 - RNA, 19 nt, Artificial Sequence
  Description of Artificial Sequence: Synthetic oligonucleotide
auacguuuucuugguuaga

SEQ ID NO: 2720593 - RNA, 19 nt, Artificial Sequence
  Description of Artificial Sequence: Synthetic oligonucleotide
cagccacgcaggcagccgc

SEQ ID NO: 2720594 - RNA, 19 nt, Artificial Sequence
  Description of Artificial Sequence: Synthetic oligonucleotide
cuucaaugccaacgagaca

SEQ ID NO: 2720595 - RNA, 19 nt, Artificial Sequence
  Description of Artificial Sequence: Synthetic oligonucleotide
cgcgcaguggaacacggcg

SEQ ID NO: 2720596 - RNA, 19 nt, Artificial Sequence
  Description of Artificial Sequence: Synthetic oligonucleotide
gugaccucucaaggcagcc

SEQ ID NO: 2720597 - RNA, 19 nt, Artificial Sequence
  Description of Artificial Sequence: Synthetic oligonucleotide
gucccaggcgagaugcacc

SEQ ID NO: 2720598 - RNA, 19 nt, Artificial Sequence
  Description of Artificial Sequence: Synthetic oligonucleotide
ucgaccggugacgucucca

SEQ ID NO: 2720599 - RNA, 19 nt, Artificial Sequence
  Description of Artificial Sequence: Synthetic oligonucleotide
gcauggguggaauacagau

SEQ ID NO: 2720600 - RNA, 19 nt, Artificial Sequence
  Description of Artificial Sequence: Synthetic oligonucleotide
acccugacaccaccugagu

SEQ ID NO: 2720601 - RNA, 19 nt, Artificial Sequence
  Description of Artificial Sequence: Synthetic oligonucleotide
ggugacgucuccaccucag

SEQ ID NO: 2720602 - RNA, 19 nt, Artificial Sequence
  Description of Artificial Sequence: Synthetic oligonucleotide
ggggaagacccugacacca

SEQ ID NO: 2720603 - RNA, 19 nt, Artificial Sequence
  Description of Artificial Sequence: Synthetic oligonucleotide
ugccaacgagacagggcuc

SEQ ID NO: 2720604 - RNA, 19 nt, Artificial Sequence
  Description of Artificial Sequence: Synthetic oligonucleotide
ggcucuaauaaaacgacau

SEQ ID NO: 2720605 - RNA, 19 nt, Artificial Sequence
  Description of Artificial Sequence: Synthetic oligonucleotide
gagcgugcauuagucauua

SEQ ID NO: 2720606 - RNA, 19 nt, Artificial Sequence
  Description of Artificial Sequence: Synthetic oligonucleotide
cagucuccggaggaccuag

SEQ ID NO: 2720607 - RNA, 19 nt, Artificial Sequence
  Description of Artificial Sequence: Synthetic oligonucleotide
cucuuucuagcucugcaau

SEQ ID NO: 2720608 - RNA, 19 nt, Artificial Sequence
  Description of Artificial Sequence: Synthetic oligonucleotide
agcauggguggaauacaga

SEQ ID NO: 2720609 - RNA, 19 nt, Artificial Sequence
  Description of Artificial Sequence: Synthetic oligonucleotide
gaggaccuagaggggaaga

SEQ ID NO: 2720610 - RNA, 19 nt, Artificial Sequence
  Description of Artificial Sequence: Synthetic oligonucleotide
gcacaccauuuuaucacag

SEQ ID NO: 2720611 - RNA, 19 nt, Artificial Sequence
  Description of Artificial Sequence: Synthetic oligonucleotide
gaggcacauugugaauauc

SEQ ID NO: 2720612 - RNA, 19 nt, Artificial Sequence
  Description of Artificial Sequence: Synthetic oligonucleotide
cgguguacggcgagcaccg

SEQ ID NO: 2720613 - RNA, 19 nt, Artificial Sequence
  Description of Artificial Sequence: Synthetic oligonucleotide
gucacguccuucagaaucu

SEQ ID NO: 2720614 - RNA, 19 nt, Artificial Sequence
  Description of Artificial Sequence: Synthetic oligonucleotide
ggguggaauacagauggaa

SEQ ID NO: 2720615 - RNA, 19 nt, Artificial Sequence
  Description of Artificial Sequence: Synthetic oligonucleotide
caccaccugagugucccac

SEQ ID NO: 2720616 - RNA, 19 nt, Artificial Sequence
  Description of Artificial Sequence: Synthetic oligonucleotide
gaagacccugacaccaccu

SEQ ID NO: 2720617 - RNA, 19 nt, Artificial Sequence
  Description of Artificial Sequence: Synthetic oligonucleotide
uuucugguagaggcacauu

SEQ ID NO: 2720618 - RNA, 19 nt, Artificial Sequence
  Description of Artificial Sequence: Synthetic oligonucleotide
gugcauuagucauuaucuu

SEQ ID NO: 2720619 - RNA, 19 nt, Artificial Sequence
  Description of Artificial Sequence: Synthetic oligonucleotide
cccugacaccaccugagug

SEQ ID NO: 2720620 - RNA, 19 nt, Artificial Sequence
  Description of Artificial Sequence: Synthetic oligonucleotide
cgugacucuggagaaggcc

SEQ ID NO: 2720621 - RNA, 19 nt, Artificial Sequence
  Description of Artificial Sequence: Synthetic oligonucleotide
caccucagucuccggagga

SEQ ID NO: 2720622 - RNA, 19 nt, Artificial Sequence
  Description of Artificial Sequence: Synthetic oligonucleotide
cgagaugcaccgguguacg

SEQ ID NO: 2720623 - RNA, 19 nt, Artificial Sequence
  Description of Artificial Sequence: Synthetic oligonucleotide
ccgguuccagccacgcagg

SEQ ID NO: 2720624 - RNA, 19 nt, Artificial Sequence
  Description of Artificial Sequence: Synthetic oligonucleotide
ccuagaggggaagacccug

SEQ ID NO: 2720625 - RNA, 19 nt, Artificial Sequence
  Description of Artificial Sequence: Synthetic oligonucleotide
ccgguguacggcgagcacc

SEQ ID NO: 2720626 - RNA, 19 nt, Artificial Sequence
  Description of Artificial Sequence: Synthetic oligonucleotide
ccugacaccaccugagugu

SEQ ID NO: 2720627 - RNA, 19 nt, Artificial Sequence
  Description of Artificial Sequence: Synthetic oligonucleotide
guagaggcacauugugaau

SEQ ID NO: 2720628 - RNA, 19 nt, Artificial Sequence
  Description of Artificial Sequence: Synthetic oligonucleotide
ucagucuccggaggaccua

SEQ ID NO: 2720629 - RNA, 19 nt, Artificial Sequence
  Description of Artificial Sequence: Synthetic oligonucleotide
guacggcgagcaccgcgug

SEQ ID NO: 2720630 - RNA, 19 nt, Artificial Sequence
  Description of Artificial Sequence: Synthetic oligonucleotide
ccaccucagucuccggagg

SEQ ID NO: 2720631 - RNA, 19 nt, Artificial Sequence
  Description of Artificial Sequence: Synthetic oligonucleotide
ggagaaggccacggucccg

SEQ ID NO: 2720632 - RNA, 19 nt, Artificial Sequence
  Description of Artificial Sequence: Synthetic oligonucleotide
gggcucuaauaaaacgaca

SEQ ID NO: 2720633 - RNA, 19 nt, Artificial Sequence
  Description of Artificial Sequence: Synthetic oligonucleotide
gagcaccgcguggcaaugc

SEQ ID NO: 2720634 - RNA, 19 nt, Artificial Sequence
  Description of Artificial Sequence: Synthetic oligonucleotide
gcaaugcgcgcaguggaac

SEQ ID NO: 2720635 - RNA, 19 nt, Artificial Sequence
  Description of Artificial Sequence: Synthetic oligonucleotide
cucagucuccggaggaccu

SEQ ID NO: 2720636 - RNA, 19 nt, Artificial Sequence
  Description of Artificial Sequence: Synthetic oligonucleotide
gcgagaugcaccgguguac

SEQ ID NO: 2720637 - RNA, 19 nt, Artificial Sequence
  Description of Artificial Sequence: Synthetic oligonucleotide
gcacauugugaauauccau

SEQ ID NO: 2720638 - RNA, 19 nt, Artificial Sequence
  Description of Artificial Sequence: Synthetic oligonucleotide
caucucagaugcacuuacu

SEQ ID NO: 2720639 - RNA, 19 nt, Artificial Sequence
  Description of Artificial Sequence: Synthetic oligonucleotide
ucacguccuucagaaucuu

SEQ ID NO: 2720640 - RNA, 19 nt, Artificial Sequence
  Description of Artificial Sequence: Synthetic oligonucleotide
gcucuaauaaaacgacauu

SEQ ID NO: 2720641 - RNA, 19 nt, Artificial Sequence
  Description of Artificial Sequence: Synthetic oligonucleotide
ggucccaggcgagaugcac

SEQ ID NO: 2720642 - RNA, 19 nt, Artificial Sequence
  Description of Artificial Sequence: Synthetic oligonucleotide
gagcagcauggguggaaua

SEQ ID NO: 2720643 - RNA, 19 nt, Artificial Sequence
  Description of Artificial Sequence: Synthetic oligonucleotide
gcgcaguggaacacggcgc

SEQ ID NO: 2720644 - RNA, 19 nt, Artificial Sequence
  Description of Artificial Sequence: Synthetic oligonucleotide
ggaaccccacaggaauuac

SEQ ID NO: 2720645 - RNA, 19 nt, Artificial Sequence
  Description of Artificial Sequence: Synthetic oligonucleotide
cacgcaggcagccgcaggu

SEQ ID NO: 2720646 - RNA, 19 nt, Artificial Sequence
  Description of Artificial Sequence: Synthetic oligonucleotide
gucgaccggugacgucucc

SEQ ID NO: 2720647 - RNA, 19 nt, Artificial Sequence
  Description of Artificial Sequence: Synthetic oligonucleotide
ccaccugagugucccacuc

SEQ ID NO: 2720648 - RNA, 19 nt, Artificial Sequence
  Description of Artificial Sequence: Synthetic oligonucleotide
ccucgacaggucccaggcg

SEQ ID NO: 2720649 - RNA, 19 nt, Artificial Sequence
  Description of Artificial Sequence: Synthetic oligonucleotide
agcgugcauuagucauuau

SEQ ID NO: 2720650 - RNA, 19 nt, Artificial Sequence
  Description of Artificial Sequence: Synthetic oligonucleotide
ggcgagaugcaccggugua

SEQ ID NO: 2720651 - RNA, 19 nt, Artificial Sequence
  Description of Artificial Sequence: Synthetic oligonucleotide
gcugcauuugagagaaccu

SEQ ID NO: 2720652 - RNA, 19 nt, Artificial Sequence
  Description of Artificial Sequence: Synthetic oligonucleotide
caccgguguacggcgagca

SEQ ID NO: 2720653 - RNA, 19 nt, Artificial Sequence
  Description of Artificial Sequence: Synthetic oligonucleotide
ggucccgagggaccucgac

SEQ ID NO: 2720654 - RNA, 19 nt, Artificial Sequence
  Description of Artificial Sequence: Synthetic oligonucleotide
caggucgaccggugacguc

SEQ ID NO: 2720655 - RNA, 19 nt, Artificial Sequence
  Description of Artificial Sequence: Synthetic oligonucleotide
gguuccagccacgcaggca

SEQ ID NO: 2720656 - RNA, 19 nt, Artificial Sequence
  Description of Artificial Sequence: Synthetic oligonucleotide
cguggcaaugcgcgcagug

SEQ ID NO: 2720657 - RNA, 19 nt, Artificial Sequence
  Description of Artificial Sequence: Synthetic oligonucleotide
gggaagacccugacaccac

SEQ ID NO: 2720658 - RNA, 19 nt, Artificial Sequence
  Description of Artificial Sequence: Synthetic oligonucleotide
accucucaaggcagccaga

SEQ ID NO: 2720659 - RNA, 19 nt, Artificial Sequence
  Description of Artificial Sequence: Synthetic oligonucleotide
caacgagacagggcucuaa

SEQ ID NO: 2720660 - RNA, 19 nt, Artificial Sequence
  Description of Artificial Sequence: Synthetic oligonucleotide
ggcgcaccucuccgguucc

SEQ ID NO: 2720661 - RNA, 19 nt, Artificial Sequence
  Description of Artificial Sequence: Synthetic oligonucleotide
gccacggucccgagggacc

SEQ ID NO: 2720662 - RNA, 19 nt, Artificial Sequence
  Description of Artificial Sequence: Synthetic oligonucleotide
gugacgucuccaccucagu

SEQ ID NO: 2720663 - RNA, 19 nt, Artificial Sequence
  Description of Artificial Sequence: Synthetic oligonucleotide
cgcaggucgaccggugacg

SEQ ID NO: 2720664 - RNA, 19 nt, Artificial Sequence
  Description of Artificial Sequence: Synthetic oligonucleotide
gggaccucgacagguccca

SEQ ID NO: 2720665 - RNA, 19 nt, Artificial Sequence
  Description of Artificial Sequence: Synthetic oligonucleotide
cucuggagaaggccacggu

SEQ ID NO: 2720666 - RNA, 19 nt, Artificial Sequence
  Description of Artificial Sequence: Synthetic oligonucleotide
gagucacguccuucagaau

SEQ ID NO: 2720667 - RNA, 19 nt, Artificial Sequence
  Description of Artificial Sequence: Synthetic oligonucleotide
cgaccggugacgucuccac

SEQ ID NO: 2720668 - RNA, 19 nt, Artificial Sequence
  Description of Artificial Sequence: Synthetic oligonucleotide
agucuccggaggaccuaga

SEQ ID NO: 2720669 - RNA, 19 nt, Artificial Sequence
  Description of Artificial Sequence: Synthetic oligonucleotide
ccagccacgcaggcagccg

SEQ ID NO: 2720670 - RNA, 19 nt, Artificial Sequence
  Description of Artificial Sequence: Synthetic oligonucleotide
guggaacacggcgcaccuc

SEQ ID NO: 2720671 - RNA, 19 nt, Artificial Sequence
  Description of Artificial Sequence: Synthetic oligonucleotide
caggaaccccacaggaauu

SEQ ID NO: 2720672 - RNA, 19 nt, Artificial Sequence
  Description of Artificial Sequence: Synthetic oligonucleotide
agccacgcaggcagccgca

SEQ ID NO: 2720673 - RNA, 19 nt, Artificial Sequence
  Description of Artificial Sequence: Synthetic oligonucleotide
agccgcaggucgaccggug

SEQ ID NO: 2720674 - RNA, 19 nt, Artificial Sequence
  Description of Artificial Sequence: Synthetic oligonucleotide
acggcgcaccucuccgguu

SEQ ID NO: 2720675 - RNA, 19 nt, Artificial Sequence
  Description of Artificial Sequence: Synthetic oligonucleotide
ggcaaugcgcgcaguggaa

SEQ ID NO: 2720676 - RNA, 19 nt, Artificial Sequence
  Description of Artificial Sequence: Synthetic oligonucleotide
ccgcaggucgaccggugac

SEQ ID NO: 2720677 - RNA, 19 nt, Artificial Sequence
  Description of Artificial Sequence: Synthetic oligonucleotide
gccaacgagacagggcucu

SEQ ID NO: 2720678 - RNA, 19 nt, Artificial Sequence
  Description of Artificial Sequence: Synthetic oligonucleotide
cccgagggaccucgacagg

SEQ ID NO: 2720679 - RNA, 19 nt, Artificial Sequence
  Description of Artificial Sequence: Synthetic oligonucleotide
augcaccgguguacggcga

SEQ ID NO: 2720680 - RNA, 19 nt, Artificial Sequence
  Description of Artificial Sequence: Synthetic oligonucleotide
gcaccgcguggcaaugcgc

SEQ ID NO: 2720681 - RNA, 19 nt, Artificial Sequence
  Description of Artificial Sequence: Synthetic oligonucleotide
cgcaguggaacacggcgca

SEQ ID NO: 2720682 - RNA, 19 nt, Artificial Sequence
  Description of Artificial Sequence: Synthetic oligonucleotide
cgagggaccucgacagguc

SEQ ID NO: 2720683 - RNA, 19 nt, Artificial Sequence
  Description of Artificial Sequence: Synthetic oligonucleotide
ccggugacgucuccaccuc

SEQ ID NO: 2720684 - RNA, 19 nt, Artificial Sequence
  Description of Artificial Sequence: Synthetic oligonucleotide
cacggcgcaccucuccggu

SEQ ID NO: 2720685 - RNA, 19 nt, Artificial Sequence
  Description of Artificial Sequence: Synthetic oligonucleotide
ggaccucgacaggucccag

SEQ ID NO: 2720686 - RNA, 19 nt, Artificial Sequence
  Description of Artificial Sequence: Synthetic oligonucleotide
gccgcaggucgaccgguga

SEQ ID NO: 2720687 - RNA, 19 nt, Artificial Sequence
  Description of Artificial Sequence: Synthetic oligonucleotide
gcaccgguguacggcgagc

SEQ ID NO: 2720688 - RNA, 19 nt, Artificial Sequence
  Description of Artificial Sequence: Synthetic oligonucleotide
aggucccaggcgagaugca

SEQ ID NO: 2720689 - RNA, 19 nt, Artificial Sequence
  Description of Artificial Sequence: Synthetic oligonucleotide
gcaguggaacacggcgcac

SEQ ID NO: 2720690 - RNA, 19 nt, Artificial Sequence
  Description of Artificial Sequence: Synthetic oligonucleotide
cacguccuucagaaucuuu

SEQ ID NO: 2720691 - RNA, 19 nt, Artificial Sequence
  Description of Artificial Sequence: Synthetic oligonucleotide
gguguacggcgagcaccgc

SEQ ID NO: 2720692 - RNA, 19 nt, Artificial Sequence
  Description of Artificial Sequence: Synthetic oligonucleotide
ggaacacggcgcaccucuc

SEQ ID NO: 2720693 - RNA, 19 nt, Artificial Sequence
  Description of Artificial Sequence: Synthetic oligonucleotide
gccacgcaggcagccgcag

SEQ ID NO: 2720694 - RNA, 19 nt, Artificial Sequence
  Description of Artificial Sequence: Synthetic oligonucleotide
cgcguggcaaugcgcgcag

SEQ ID NO: 2720695 - RNA, 19 nt, Artificial Sequence
  Description of Artificial Sequence: Synthetic oligonucleotide
ggucgaccggugacgucuc

SEQ ID NO: 2720696 - RNA, 19 nt, Artificial Sequence
  Description of Artificial Sequence: Synthetic oligonucleotide
gcgagcaccgcguggcaau

SEQ ID NO: 2720697 - RNA, 19 nt, Artificial Sequence
  Description of Artificial Sequence: Synthetic oligonucleotide
cggcgcaccucuccgguuc

SEQ ID NO: 2720698 - RNA, 19 nt, Artificial Sequence
  Description of Artificial Sequence: Synthetic oligonucleotide
gugcugcauuugagagaac

SEQ ID NO: 2720699 - RNA, 19 nt, Artificial Sequence
  Description of Artificial Sequence: Synthetic oligonucleotide
gcaggucgaccggugacgu

SEQ ID NO: 2720700 - RNA, 19 nt, Artificial Sequence
  Description of Artificial Sequence: Synthetic oligonucleotide
cguccuucagaaucuuuau

SEQ ID NO: 2720701 - RNA, 19 nt, Artificial Sequence
  Description of Artificial Sequence: Synthetic oligonucleotide
gcgcgcaguggaacacggc

SEQ ID NO: 2720702 - RNA, 19 nt, Artificial Sequence
  Description of Artificial Sequence: Synthetic oligonucleotide
cccaggcgagaugcaccgg

SEQ ID NO: 2720703 - RNA, 19 nt, Artificial Sequence
  Description of Artificial Sequence: Synthetic oligonucleotide
ccgagggaccucgacaggu

SEQ ID NO: 2720704 - RNA, 19 nt, Artificial Sequence
  Description of Artificial Sequence: Synthetic oligonucleotide
cggaggaccuagaggggaa

SEQ ID NO: 2720705 - RNA, 19 nt, Artificial Sequence
  Description of Artificial Sequence: Synthetic oligonucleotide
ccgcguggcaaugcgcgca

SEQ ID NO: 2720706 - RNA, 19 nt, Artificial Sequence
  Description of Artificial Sequence: Synthetic oligonucleotide
cgagcaccgcguggcaaug

SEQ ID NO: 2720707 - RNA, 19 nt, Artificial Sequence
  Description of Artificial Sequence: Synthetic oligonucleotide
ggucaggagucacguccuu

SEQ ID NO: 2720708 - RNA, 19 nt, Artificial Sequence
  Description of Artificial Sequence: Synthetic oligonucleotide
cagccgcaggucgaccggu

SEQ ID NO: 2720709 - RNA, 19 nt, Artificial Sequence
  Description of Artificial Sequence: Synthetic oligonucleotide
ccagagcagcaugggugga

SEQ ID NO: 2720710 - RNA, 19 nt, Artificial Sequence
  Description of Artificial Sequence: Synthetic oligonucleotide
ccugagugucccacuccau

SEQ ID NO: 2720711 - RNA, 19 nt, Artificial Sequence
  Description of Artificial Sequence: Synthetic oligonucleotide
cgagcgugcauuagucauu

SEQ ID NO: 2720712 - RNA, 19 nt, Artificial Sequence
  Description of Artificial Sequence: Synthetic oligonucleotide
cgacauuguucgugacucu

SEQ ID NO: 2720713 - RNA, 19 nt, Artificial Sequence
  Description of Artificial Sequence: Synthetic oligonucleotide
cggugacgucuccaccuca

SEQ ID NO: 2720714 - RNA, 19 nt, Artificial Sequence
  Description of Artificial Sequence: Synthetic oligonucleotide
ccaacgagacagggcucua

SEQ ID NO: 2720715 - RNA, 19 nt, Artificial Sequence
  Description of Artificial Sequence: Synthetic oligonucleotide
cgacaggucccaggcgaga

SEQ ID NO: 2720716 - RNA, 19 nt, Artificial Sequence
  Description of Artificial Sequence: Synthetic oligonucleotide
gcgcaccucuccgguucca

SEQ ID NO: 2720717 - RNA, 19 nt, Artificial Sequence
  Description of Artificial Sequence: Synthetic oligonucleotide
ccacggucccgagggaccu

SEQ ID NO: 2720718 - RNA, 19 nt, Artificial Sequence
  Description of Artificial Sequence: Synthetic oligonucleotide
gcguggcaaugcgcgcagu

SEQ ID NO: 2720719 - RNA, 19 nt, Artificial Sequence
  Description of Artificial Sequence: Synthetic oligonucleotide
cggcgagcaccgcguggca

SEQ ID NO: 2720720 - RNA, 19 nt, Artificial Sequence
  Description of Artificial Sequence: Synthetic oligonucleotide
cggucccgagggaccucga

SEQ ID NO: 2720721 - RNA, 19 nt, Artificial Sequence
  Description of Artificial Sequence: Synthetic oligonucleotide
ucuucuuuuaaacacaaug

SEQ ID NO: 2720722 - RNA, 19 nt, Artificial Sequence
  Description of Artificial Sequence: Synthetic oligonucleotide
  modified_base (16)..(16): a, c, u, g, unknown or other
ugaguuuugaauugunacc

SEQ ID NO: 2720723 - RNA, 19 nt, Artificial Sequence
  Description of Artificial Sequence: Synthetic oligonucleotide
cuugcuaguaccaucaggc

SEQ ID NO: 2720724 - RNA, 19 nt, Artificial Sequence
  Description of Artificial Sequence: Synthetic oligonucleotide
ucugauguaguucucuagg

SEQ ID NO: 2720725 - RNA, 19 nt, Artificial Sequence
  Description of Artificial Sequence: Synthetic oligonucleotide
aacgguagaauccuaccac

SEQ ID NO: 2720726 - RNA, 19 nt, Artificial Sequence
  Description of Artificial Sequence: Synthetic oligonucleotide
  modified_base (17)..(17): a, c, u, g, unknown or other
augaguuuugaauugunac

SEQ ID NO: 2720727 - RNA, 19 nt, Artificial Sequence
  Description of Artificial Sequence: Synthetic oligonucleotide
uuugucuucuuuuaaacac

SEQ ID NO: 2720728 - RNA, 19 nt, Artificial Sequence
  Description of Artificial Sequence: Synthetic oligonucleotide
aaauauuccucugauguag

SEQ ID NO: 2720729 - RNA, 19 nt, Artificial Sequence
  Description of Artificial Sequence: Synthetic oligonucleotide
  modified_base (14)..(14): a, c, u, g, unknown or other
aguuuugaauugunacccc

SEQ ID NO: 2720730 - RNA, 19 nt, Artificial Sequence
  Description of Artificial Sequence: Synthetic oligonucleotide
aaaggacuugguuucucgc

SEQ ID NO: 2720731 - RNA, 19 nt, Artificial Sequence
  Description of Artificial Sequence: Synthetic oligonucleotide
gaagugcacaucuugcugg

SEQ ID NO: 2720732 - RNA, 19 nt, Artificial Sequence
  Description of Artificial Sequence: Synthetic oligonucleotide
aaaauagagauucuuccuu

SEQ ID NO: 2720733 - RNA, 19 nt, Artificial Sequence
  Description of Artificial Sequence: Synthetic oligonucleotide
auucaaauccuccucuggg

SEQ ID NO: 2720734 - RNA, 19 nt, Artificial Sequence
  Description of Artificial Sequence: Synthetic oligonucleotide
aacacacacuccuugcuag

SEQ ID NO: 2720735 - RNA, 19 nt, Artificial Sequence
  Description of Artificial Sequence: Synthetic oligonucleotide
ucaguuuucucauucaaau

SEQ ID NO: 2720736 - RNA, 19 nt, Artificial Sequence
  Description of Artificial Sequence: Synthetic oligonucleotide
  modified_base (15)..(15): a, c, u, g, unknown or other
gaguuuugaauugunaccc

SEQ ID NO: 2720737 - RNA, 19 nt, Artificial Sequence
  Description of Artificial Sequence: Synthetic oligonucleotide
uaacgcuucaugaagugca

SEQ ID NO: 2720738 - RNA, 19 nt, Artificial Sequence
  Description of Artificial Sequence: Synthetic oligonucleotide
uuggcugacaucagggccg

SEQ ID NO: 2720739 - RNA, 19 nt, Artificial Sequence
  Description of Artificial Sequence: Synthetic oligonucleotide
uacuuggcugacaucaggg

SEQ ID NO: 2720740 - RNA, 19 nt, Artificial Sequence
  Description of Artificial Sequence: Synthetic oligonucleotide
uucuuuuaaacacaaugua

SEQ ID NO: 2720741 - RNA, 19 nt, Artificial Sequence
  Description of Artificial Sequence: Synthetic oligonucleotide
ucgaugaacacacacuccu

SEQ ID NO: 2720742 - RNA, 19 nt, Artificial Sequence
  Description of Artificial Sequence: Synthetic oligonucleotide
ucaugaagugcacaucuug

SEQ ID NO: 2720743 - RNA, 19 nt, Artificial Sequence
  Description of Artificial Sequence: Synthetic oligonucleotide
gaaaggacuugguuucucg

SEQ ID NO: 2720744 - RNA, 19 nt, Artificial Sequence
  Description of Artificial Sequence: Synthetic oligonucleotide
acggugguguacuugaagg

SEQ ID NO: 2720745 - RNA, 19 nt, Artificial Sequence
  Description of Artificial Sequence: Synthetic oligonucleotide
ucucgaugaacacacacuc

SEQ ID NO: 2720746 - RNA, 19 nt, Artificial Sequence
  Description of Artificial Sequence: Synthetic oligonucleotide
aaguacuuuagguucaguu

SEQ ID NO: 2720747 - RNA, 19 nt, Artificial Sequence
  Description of Artificial Sequence: Synthetic oligonucleotide
ucugggaugaguuuugaau

SEQ ID NO: 2720748 - RNA, 19 nt, Artificial Sequence
  Description of Artificial Sequence: Synthetic oligonucleotide
acgguagaauccuaccacc

SEQ ID NO: 2720749 - RNA, 19 nt, Artificial Sequence
  Description of Artificial Sequence: Synthetic oligonucleotide
caugaagugcacaucuugc

SEQ ID NO: 2720750 - RNA, 19 nt, Artificial Sequence
  Description of Artificial Sequence: Synthetic oligonucleotide
auuccucugauguaguucu

SEQ ID NO: 2720751 - RNA, 19 nt, Artificial Sequence
  Description of Artificial Sequence: Synthetic oligonucleotide
ugaagugcacaucuugcug

SEQ ID NO: 2720752 - RNA, 19 nt, Artificial Sequence
  Description of Artificial Sequence: Synthetic oligonucleotide
aaauagagauucuuccuua

SEQ ID NO: 2720753 - RNA, 19 nt, Artificial Sequence
  Description of Artificial Sequence: Synthetic oligonucleotide
aguguggccggaccuagcc

SEQ ID NO: 2720754 - RNA, 19 nt, Artificial Sequence
  Description of Artificial Sequence: Synthetic oligonucleotide
guuuuccagaaccuucucg

SEQ ID NO: 2720755 - RNA, 19 nt, Artificial Sequence
  Description of Artificial Sequence: Synthetic oligonucleotide
aaaauauuccucugaugua

SEQ ID NO: 2720756 - RNA, 19 nt, Artificial Sequence
  Description of Artificial Sequence: Synthetic oligonucleotide
uuucgugaguccuuuguca

SEQ ID NO: 2720757 - RNA, 19 nt, Artificial Sequence
  Description of Artificial Sequence: Synthetic oligonucleotide
uugucuucuuuuaaacaca

SEQ ID NO: 2720758 - RNA, 19 nt, Artificial Sequence
  Description of Artificial Sequence: Synthetic oligonucleotide
ugugaguugacagcagucc

SEQ ID NO: 2720759 - RNA, 19 nt, Artificial Sequence
  Description of Artificial Sequence: Synthetic oligonucleotide
uucucgaugaacacacacu

SEQ ID NO: 2720760 - RNA, 19 nt, Artificial Sequence
  Description of Artificial Sequence: Synthetic oligonucleotide
aauagagauucuuccuuau

SEQ ID NO: 2720761 - RNA, 19 nt, Artificial Sequence
  Description of Artificial Sequence: Synthetic oligonucleotide
agcgucaguuuucucauuc

SEQ ID NO: 2720762 - RNA, 19 nt, Artificial Sequence
  Description of Artificial Sequence: Synthetic oligonucleotide
aguacuuuagguucaguuu

SEQ ID NO: 2720763 - RNA, 19 nt, Artificial Sequence
  Description of Artificial Sequence: Synthetic oligonucleotide
uguggccggaccuagccgg

SEQ ID NO: 2720764 - RNA, 19 nt, Artificial Sequence
  Description of Artificial Sequence: Synthetic oligonucleotide
ugaguugacagcagucccc

SEQ ID NO: 2720765 - RNA, 19 nt, Artificial Sequence
  Description of Artificial Sequence: Synthetic oligonucleotide
uuguuguuguuguuguuug

SEQ ID NO: 2720766 - RNA, 19 nt, Artificial Sequence
  Description of Artificial Sequence: Synthetic oligonucleotide
ugaguccuuugucaugggg

SEQ ID NO: 2720767 - RNA, 19 nt, Artificial Sequence
  Description of Artificial Sequence: Synthetic oligonucleotide
agcaccugugaguugacag

SEQ ID NO: 2720768 - RNA, 19 nt, Artificial Sequence
  Description of Artificial Sequence: Synthetic oligonucleotide
aaggacuugguuucucgca

SEQ ID NO: 2720769 - RNA, 19 nt, Artificial Sequence
  Description of Artificial Sequence: Synthetic oligonucleotide
ucaacgguagaauccuacc

SEQ ID NO: 2720770 - RNA, 19 nt, Artificial Sequence
  Description of Artificial Sequence: Synthetic oligonucleotide
cuggucaacgguagaaucc

SEQ ID NO: 2720771 - RNA, 19 nt, Artificial Sequence
  Description of Artificial Sequence: Synthetic oligonucleotide
uguuguuugcuuucagaac

SEQ ID NO: 2720772 - RNA, 19 nt, Artificial Sequence
  Description of Artificial Sequence: Synthetic oligonucleotide
gacagcaguccccuuuucg

SEQ ID NO: 2720773 - RNA, 19 nt, Artificial Sequence
  Description of Artificial Sequence: Synthetic oligonucleotide
uucucuaggggugagugug

SEQ ID NO: 2720774 - RNA, 19 nt, Artificial Sequence
  Description of Artificial Sequence: Synthetic oligonucleotide
uucaaauccuccucuggga

SEQ ID NO: 2720775 - RNA, 19 nt, Artificial Sequence
  Description of Artificial Sequence: Synthetic oligonucleotide
agaggcaagcaccugugag

SEQ ID NO: 2720776 - RNA, 19 nt, Artificial Sequence
  Description of Artificial Sequence: Synthetic oligonucleotide
cuuggcugacaucagggcc

SEQ ID NO: 2720777 - RNA, 19 nt, Artificial Sequence
  Description of Artificial Sequence: Synthetic oligonucleotide
accuucucgaugaacacac

SEQ ID NO: 2720778 - RNA, 19 nt, Artificial Sequence
  Description of Artificial Sequence: Synthetic oligonucleotide
cuaggggugaguguggccg

SEQ ID NO: 2720779 - RNA, 19 nt, Artificial Sequence
  Description of Artificial Sequence: Synthetic oligonucleotide
cauucaaauccuccucugg

SEQ ID NO: 2720780 - RNA, 19 nt, Artificial Sequence
  Description of Artificial Sequence: Synthetic oligonucleotide
aaauccuccucugggauga

SEQ ID NO: 2720781 - RNA, 19 nt, Artificial Sequence
  Description of Artificial Sequence: Synthetic oligonucleotide
ugucuucuuuuaaacacaa

SEQ ID NO: 2720782 - RNA, 19 nt, Artificial Sequence
  Description of Artificial Sequence: Synthetic oligonucleotide
aagcccacguaccagccug

SEQ ID NO: 2720783 - RNA, 19 nt, Artificial Sequence
  Description of Artificial Sequence: Synthetic oligonucleotide
ugaacacacacuccuugcu

SEQ ID NO: 2720784 - RNA, 19 nt, Artificial Sequence
  Description of Artificial Sequence: Synthetic oligonucleotide
agaauccuaccaccccucc

SEQ ID NO: 2720785 - RNA, 19 nt, Artificial Sequence
  Description of Artificial Sequence: Synthetic oligonucleotide
gacuugguuucucgcagcg

SEQ ID NO: 2720786 - RNA, 19 nt, Artificial Sequence
  Description of Artificial Sequence: Synthetic oligonucleotide
uugggguaacgcuucauga

SEQ ID NO: 2720787 - RNA, 19 nt, Artificial Sequence
  Description of Artificial Sequence: Synthetic oligonucleotide
gauguaguucucuaggggu

SEQ ID NO: 2720788 - RNA, 19 nt, Artificial Sequence
  Description of Artificial Sequence: Synthetic oligonucleotide
uuuucgugaguccuuuguc

SEQ ID NO: 2720789 - RNA, 19 nt, Artificial Sequence
  Description of Artificial Sequence: Synthetic oligonucleotide
cuucuuuuaaacacaaugu

SEQ ID NO: 2720790 - RNA, 19 nt, Artificial Sequence
  Description of Artificial Sequence: Synthetic oligonucleotide
ucauucaaauccuccucug

SEQ ID NO: 2720791 - RNA, 19 nt, Artificial Sequence
  Description of Artificial Sequence: Synthetic oligonucleotide
uggggaaaggacuugguuu

SEQ ID NO: 2720792 - RNA, 19 nt, Artificial Sequence
  Description of Artificial Sequence: Synthetic oligonucleotide
aggacuugguuucucgcag

SEQ ID NO: 2720793 - RNA, 19 nt, Artificial Sequence
  Description of Artificial Sequence: Synthetic oligonucleotide
ucaaauccuccucugggau

SEQ ID NO: 2720794 - RNA, 19 nt, Artificial Sequence
  Description of Artificial Sequence: Synthetic oligonucleotide
acacacuccuugcuaguac

SEQ ID NO: 2720795 - RNA, 19 nt, Artificial Sequence
  Description of Artificial Sequence: Synthetic oligonucleotide
aaccuuuggggaaaggacu

SEQ ID NO: 2720796 - RNA, 19 nt, Artificial Sequence
  Description of Artificial Sequence: Synthetic oligonucleotide
cuucucgaugaacacacac

SEQ ID NO: 2720797 - RNA, 19 nt, Artificial Sequence
  Description of Artificial Sequence: Synthetic oligonucleotide
augaagugcacaucuugcu

SEQ ID NO: 2720798 - RNA, 19 nt, Artificial Sequence
  Description of Artificial Sequence: Synthetic oligonucleotide
uuuguuguuguuguuguuu

SEQ ID NO: 2720799 - RNA, 19 nt, Artificial Sequence
  Description of Artificial Sequence: Synthetic oligonucleotide
uuucagaaccuuuggggaa

SEQ ID NO: 2720800 - RNA, 19 nt, Artificial Sequence
  Description of Artificial Sequence: Synthetic oligonucleotide
acuccuugcuaguaccauc

SEQ ID NO: 2720801 - RNA, 19 nt, Artificial Sequence
  Description of Artificial Sequence: Synthetic oligonucleotide
gaaccuuuggggaaaggac

SEQ ID NO: 2720802 - RNA, 19 nt, Artificial Sequence
  Description of Artificial Sequence: Synthetic oligonucleotide
ucugucugucccuuggggu

SEQ ID NO: 2720803 - RNA, 19 nt, Artificial Sequence
  Description of Artificial Sequence: Synthetic oligonucleotide
agagauucuuccuuauuuu

SEQ ID NO: 2720804 - RNA, 19 nt, Artificial Sequence
  Description of Artificial Sequence: Synthetic oligonucleotide
acagcaguccccuuuucgu

SEQ ID NO: 2720805 - RNA, 19 nt, Artificial Sequence
  Description of Artificial Sequence: Synthetic oligonucleotide
cacacuccuugcuaguacc

SEQ ID NO: 2720806 - RNA, 19 nt, Artificial Sequence
  Description of Artificial Sequence: Synthetic oligonucleotide
aguucucuaggggugagug

SEQ ID NO: 2720807 - RNA, 19 nt, Artificial Sequence
  Description of Artificial Sequence: Synthetic oligonucleotide
cuugggguaacgcuucaug

SEQ ID NO: 2720808 - RNA, 19 nt, Artificial Sequence
  Description of Artificial Sequence: Synthetic oligonucleotide
ucucuaggggugagugugg

SEQ ID NO: 2720809 - RNA, 19 nt, Artificial Sequence
  Description of Artificial Sequence: Synthetic oligonucleotide
aacgcuucaugaagugcac

SEQ ID NO: 2720810 - RNA, 19 nt, Artificial Sequence
  Description of Artificial Sequence: Synthetic oligonucleotide
cuuuggggaaaggacuugg

SEQ ID NO: 2720811 - RNA, 19 nt, Artificial Sequence
  Description of Artificial Sequence: Synthetic oligonucleotide
augggguucuggucaacgg

SEQ ID NO: 2720812 - RNA, 19 nt, Artificial Sequence
  Description of Artificial Sequence: Synthetic oligonucleotide
gacggugguguacuugaag

SEQ ID NO: 2720813 - RNA, 19 nt, Artificial Sequence
  Description of Artificial Sequence: Synthetic oligonucleotide
cucgaugaacacacacucc

SEQ ID NO: 2720814 - RNA, 19 nt, Artificial Sequence
  Description of Artificial Sequence: Synthetic oligonucleotide
ugucccuugggguaacgcu

SEQ ID NO: 2720815 - RNA, 19 nt, Artificial Sequence
  Description of Artificial Sequence: Synthetic oligonucleotide
gugaguugacagcaguccc

SEQ ID NO: 2720816 - RNA, 19 nt, Artificial Sequence
  Description of Artificial Sequence: Synthetic oligonucleotide
aauauuccucugauguagu

SEQ ID NO: 2720817 - RNA, 19 nt, Artificial Sequence
  Description of Artificial Sequence: Synthetic oligonucleotide
aagugcacaucuugcuggu

SEQ ID NO: 2720818 - RNA, 19 nt, Artificial Sequence
  Description of Artificial Sequence: Synthetic oligonucleotide
ugaagcccacguaccagcc

SEQ ID NO: 2720819 - RNA, 19 nt, Artificial Sequence
  Description of Artificial Sequence: Synthetic oligonucleotide
uuuggggaaaggacuuggu

SEQ ID NO: 2720820 - RNA, 19 nt, Artificial Sequence
  Description of Artificial Sequence: Synthetic oligonucleotide
cuugggacccuugcgaggc

SEQ ID NO: 2720821 - RNA, 19 nt, Artificial Sequence
  Description of Artificial Sequence: Synthetic oligonucleotide
  modified_base (18)..(18): a, c, u, g, unknown or other
gaugaguuuugaauuguna

SEQ ID NO: 2720822 - RNA, 19 nt, Artificial Sequence
  Description of Artificial Sequence: Synthetic oligonucleotide
ugggguaacgcuucaugaa

SEQ ID NO: 2720823 - RNA, 19 nt, Artificial Sequence
  Description of Artificial Sequence: Synthetic oligonucleotide
caguuuucucauucaaauc

SEQ ID NO: 2720824 - RNA, 19 nt, Artificial Sequence
  Description of Artificial Sequence: Synthetic oligonucleotide
uucgugaguccuuugucau

SEQ ID NO: 2720825 - RNA, 19 nt, Artificial Sequence
  Description of Artificial Sequence: Synthetic oligonucleotide
aaccuucucgaugaacaca

SEQ ID NO: 2720826 - RNA, 19 nt, Artificial Sequence
  Description of Artificial Sequence: Synthetic oligonucleotide
uguaguucucuagggguga

SEQ ID NO: 2720827 - RNA, 19 nt, Artificial Sequence
  Description of Artificial Sequence: Synthetic oligonucleotide
aguggggcggauccgccgg

SEQ ID NO: 2720828 - RNA, 19 nt, Artificial Sequence
  Description of Artificial Sequence: Synthetic oligonucleotide
uggucaacgguagaauccu

SEQ ID NO: 2720829 - RNA, 19 nt, Artificial Sequence
  Description of Artificial Sequence: Synthetic oligonucleotide
ugcacaucuugcugguucu

SEQ ID NO: 2720830 - RNA, 19 nt, Artificial Sequence
  Description of Artificial Sequence: Synthetic oligonucleotide
gggguaacgcuucaugaag

SEQ ID NO: 2720831 - RNA, 19 nt, Artificial Sequence
  Description of Artificial Sequence: Synthetic oligonucleotide
gguagaauccuaccacccc

SEQ ID NO: 2720832 - RNA, 19 nt, Artificial Sequence
  Description of Artificial Sequence: Synthetic oligonucleotide
uugguuucucgcagcguca

SEQ ID NO: 2720833 - RNA, 19 nt, Artificial Sequence
  Description of Artificial Sequence: Synthetic oligonucleotide
aacgcuuggugacgguggu

SEQ ID NO: 2720834 - RNA, 19 nt, Artificial Sequence
  Description of Artificial Sequence: Synthetic oligonucleotide
uuuuggugaagcccacgua

SEQ ID NO: 2720835 - RNA, 19 nt, Artificial Sequence
  Description of Artificial Sequence: Synthetic oligonucleotide
uaccagccugaguacuugg

SEQ ID NO: 2720836 - RNA, 19 nt, Artificial Sequence
  Description of Artificial Sequence: Synthetic oligonucleotide
uguagcucugucugucccu

SEQ ID NO: 2720837 - RNA, 19 nt, Artificial Sequence
  Description of Artificial Sequence: Synthetic oligonucleotide
cuucaugaagugcacaucu

SEQ ID NO: 2720838 - RNA, 19 nt, Artificial Sequence
  Description of Artificial Sequence: Synthetic oligonucleotide
uagaauccuaccaccccuc

SEQ ID NO: 2720839 - RNA, 19 nt, Artificial Sequence
  Description of Artificial Sequence: Synthetic oligonucleotide
guaacgcuucaugaagugc

SEQ ID NO: 2720840 - RNA, 19 nt, Artificial Sequence
  Description of Artificial Sequence: Synthetic oligonucleotide
caaauccuccucugggaug

SEQ ID NO: 2720841 - RNA, 19 nt, Artificial Sequence
  Description of Artificial Sequence: Synthetic oligonucleotide
agcaguccccuuuucguga

SEQ ID NO: 2720842 - RNA, 19 nt, Artificial Sequence
  Description of Artificial Sequence: Synthetic oligonucleotide
uugcuaguaccaucaggcu

SEQ ID NO: 2720843 - RNA, 19 nt, Artificial Sequence
  Description of Artificial Sequence: Synthetic oligonucleotide
cuccuugcuaguaccauca

SEQ ID NO: 2720844 - RNA, 19 nt, Artificial Sequence
  Description of Artificial Sequence: Synthetic oligonucleotide
uccuccucugggaugaguu

SEQ ID NO: 2720845 - RNA, 19 nt, Artificial Sequence
  Description of Artificial Sequence: Synthetic oligonucleotide
gugacggugguguacuuga

SEQ ID NO: 2720846 - RNA, 19 nt, Artificial Sequence
  Description of Artificial Sequence: Synthetic oligonucleotide
caugggguucuggucaacg

SEQ ID NO: 2720847 - RNA, 19 nt, Artificial Sequence
  Description of Artificial Sequence: Synthetic oligonucleotide
agccugaguacuuggcuga

SEQ ID NO: 2720848 - RNA, 19 nt, Artificial Sequence
  Description of Artificial Sequence: Synthetic oligonucleotide
cugugaguugacagcaguc

SEQ ID NO: 2720849 - RNA, 19 nt, Artificial Sequence
  Description of Artificial Sequence: Synthetic oligonucleotide
aguccccuuuucgugaguc

SEQ ID NO: 2720850 - RNA, 19 nt, Artificial Sequence
  Description of Artificial Sequence: Synthetic oligonucleotide
gguaacgcuucaugaagug

SEQ ID NO: 2720851 - RNA, 19 nt, Artificial Sequence
  Description of Artificial Sequence: Synthetic oligonucleotide
uguuuuccagaaccuucuc

SEQ ID NO: 2720852 - RNA, 19 nt, Artificial Sequence
  Description of Artificial Sequence: Synthetic oligonucleotide
uugucaugggguucugguc

SEQ ID NO: 2720853 - RNA, 19 nt, Artificial Sequence
  Description of Artificial Sequence: Synthetic oligonucleotide
acccuugcgaggccucccc

SEQ ID NO: 2720854 - RNA, 19 nt, Artificial Sequence
  Description of Artificial Sequence: Synthetic oligonucleotide
gugcacaucuugcugguuc

SEQ ID NO: 2720855 - RNA, 19 nt, Artificial Sequence
  Description of Artificial Sequence: Synthetic oligonucleotide
uucucccgggucuugggac

SEQ ID NO: 2720856 - RNA, 19 nt, Artificial Sequence
  Description of Artificial Sequence: Synthetic oligonucleotide
guacuuuagguucaguuuu

SEQ ID NO: 2720857 - RNA, 19 nt, Artificial Sequence
  Description of Artificial Sequence: Synthetic oligonucleotide
uuuccagaaccuucucgau

SEQ ID NO: 2720858 - RNA, 19 nt, Artificial Sequence
  Description of Artificial Sequence: Synthetic oligonucleotide
uucaugaagugcacaucuu

SEQ ID NO: 2720859 - RNA, 19 nt, Artificial Sequence
  Description of Artificial Sequence: Synthetic oligonucleotide
caacgguagaauccuacca

SEQ ID NO: 2720860 - RNA, 19 nt, Artificial Sequence
  Description of Artificial Sequence: Synthetic oligonucleotide
auguaguucucuaggggug

SEQ ID NO: 2720861 - RNA, 19 nt, Artificial Sequence
  Description of Artificial Sequence: Synthetic oligonucleotide
uuggugacggugguguacu

SEQ ID NO: 2720862 - RNA, 19 nt, Artificial Sequence
  Description of Artificial Sequence: Synthetic oligonucleotide
ucuaggggugaguguggcc

SEQ ID NO: 2720863 - RNA, 19 nt, Artificial Sequence
  Description of Artificial Sequence: Synthetic oligonucleotide
uccuugcuaguaccaucag

SEQ ID NO: 2720864 - RNA, 19 nt, Artificial Sequence
  Description of Artificial Sequence: Synthetic oligonucleotide
gaccuagccggggugagug

SEQ ID NO: 2720865 - RNA, 19 nt, Artificial Sequence
  Description of Artificial Sequence: Synthetic oligonucleotide
ggugguguacuugaagggc

SEQ ID NO: 2720866 - RNA, 19 nt, Artificial Sequence
  Description of Artificial Sequence: Synthetic oligonucleotide
ugaguguggccggaccuag

SEQ ID NO: 2720867 - RNA, 19 nt, Artificial Sequence
  Description of Artificial Sequence: Synthetic oligonucleotide
uaggggugaguguggccgg

SEQ ID NO: 2720868 - RNA, 19 nt, Artificial Sequence
  Description of Artificial Sequence: Synthetic oligonucleotide
uccucugauguaguucucu

SEQ ID NO: 2720869 - RNA, 19 nt, Artificial Sequence
  Description of Artificial Sequence: Synthetic oligonucleotide
ucgugaguccuuugucaug

SEQ ID NO: 2720870 - RNA, 19 nt, Artificial Sequence
  Description of Artificial Sequence: Synthetic oligonucleotide
gaacacacacuccuugcua

SEQ ID NO: 2720871 - RNA, 19 nt, Artificial Sequence
  Description of Artificial Sequence: Synthetic oligonucleotide
guagaauccuaccaccccu

SEQ ID NO: 2720872 - RNA, 19 nt, Artificial Sequence
  Description of Artificial Sequence: Synthetic oligonucleotide
uccccuuuucgugaguccu

SEQ ID NO: 2720873 - RNA, 19 nt, Artificial Sequence
  Description of Artificial Sequence: Synthetic oligonucleotide
gucaacgguagaauccuac

SEQ ID NO: 2720874 - RNA, 19 nt, Artificial Sequence
  Description of Artificial Sequence: Synthetic oligonucleotide
gaguggggcggauccgccg

SEQ ID NO: 2720875 - RNA, 19 nt, Artificial Sequence
  Description of Artificial Sequence: Synthetic oligonucleotide
ugaguggggcggauccgcc

SEQ ID NO: 2720876 - RNA, 19 nt, Artificial Sequence
  Description of Artificial Sequence: Synthetic oligonucleotide
ugguuucucgcagcgucag

SEQ ID NO: 2720877 - RNA, 19 nt, Artificial Sequence
  Description of Artificial Sequence: Synthetic oligonucleotide
cuuugucaugggguucugg

SEQ ID NO: 2720878 - RNA, 19 nt, Artificial Sequence
  Description of Artificial Sequence: Synthetic oligonucleotide
auauuccucugauguaguu

SEQ ID NO: 2720879 - RNA, 19 nt, Artificial Sequence
  Description of Artificial Sequence: Synthetic oligonucleotide
uucuggucaacgguagaau

SEQ ID NO: 2720880 - RNA, 19 nt, Artificial Sequence
  Description of Artificial Sequence: Synthetic oligonucleotide
cuuggugacggugguguac

SEQ ID NO: 2720881 - RNA, 19 nt, Artificial Sequence
  Description of Artificial Sequence: Synthetic oligonucleotide
cuagccggggugagugggg

SEQ ID NO: 2720882 - RNA, 19 nt, Artificial Sequence
  Description of Artificial Sequence: Synthetic oligonucleotide
uucucgcagcgucaguuuu

SEQ ID NO: 2720883 - RNA, 19 nt, Artificial Sequence
  Description of Artificial Sequence: Synthetic oligonucleotide
ccuugcuaguaccaucagg

SEQ ID NO: 2720884 - RNA, 19 nt, Artificial Sequence
  Description of Artificial Sequence: Synthetic oligonucleotide
ugguucucccgggucuugg

SEQ ID NO: 2720885 - RNA, 19 nt, Artificial Sequence
  Description of Artificial Sequence: Synthetic oligonucleotide
acacacacuccuugcuagu

SEQ ID NO: 2720886 - RNA, 19 nt, Artificial Sequence
  Description of Artificial Sequence: Synthetic oligonucleotide
cucauucaaauccuccucu

SEQ ID NO: 2720887 - RNA, 19 nt, Artificial Sequence
  Description of Artificial Sequence: Synthetic oligonucleotide
ggucuugggacccuugcga

SEQ ID NO: 2720888 - RNA, 19 nt, Artificial Sequence
  Description of Artificial Sequence: Synthetic oligonucleotide
guguggccggaccuagccg

SEQ ID NO: 2720889 - RNA, 19 nt, Artificial Sequence
  Description of Artificial Sequence: Synthetic oligonucleotide
uuucucgcagcgucaguuu

SEQ ID NO: 2720890 - RNA, 19 nt, Artificial Sequence
  Description of Artificial Sequence: Synthetic oligonucleotide
gaguccuuugucauggggu

SEQ ID NO: 2720891 - RNA, 19 nt, Artificial Sequence
  Description of Artificial Sequence: Synthetic oligonucleotide
ugguguacuugaagggcuu

SEQ ID NO: 2720892 - RNA, 19 nt, Artificial Sequence
  Description of Artificial Sequence: Synthetic oligonucleotide
cacguaccagccugaguac

SEQ ID NO: 2720893 - RNA, 19 nt, Artificial Sequence
  Description of Artificial Sequence: Synthetic oligonucleotide
cuuuucgugaguccuuugu

SEQ ID NO: 2720894 - RNA, 19 nt, Artificial Sequence
  Description of Artificial Sequence: Synthetic oligonucleotide
gggucuugggacccuugcg

SEQ ID NO: 2720895 - RNA, 19 nt, Artificial Sequence
  Description of Artificial Sequence: Synthetic oligonucleotide
aagggcuucuguagcucug

SEQ ID NO: 2720896 - RNA, 19 nt, Artificial Sequence
  Description of Artificial Sequence: Synthetic oligonucleotide
agggccguguaguuguuuu

SEQ ID NO: 2720897 - RNA, 19 nt, Artificial Sequence
  Description of Artificial Sequence: Synthetic oligonucleotide
ggcggauccgccgggaacg

SEQ ID NO: 2720898 - RNA, 19 nt, Artificial Sequence
  Description of Artificial Sequence: Synthetic oligonucleotide
guucuggucaacgguagaa

SEQ ID NO: 2720899 - RNA, 19 nt, Artificial Sequence
  Description of Artificial Sequence: Synthetic oligonucleotide
gaagggcuucuguagcucu

SEQ ID NO: 2720900 - RNA, 19 nt, Artificial Sequence
  Description of Artificial Sequence: Synthetic oligonucleotide
cuaccaccccucccgcucc

SEQ ID NO: 2720901 - RNA, 19 nt, Artificial Sequence
  Description of Artificial Sequence: Synthetic oligonucleotide
cucuaggggugaguguggc

SEQ ID NO: 2720902 - RNA, 19 nt, Artificial Sequence
  Description of Artificial Sequence: Synthetic oligonucleotide
guaccagccugaguacuug

SEQ ID NO: 2720903 - RNA, 19 nt, Artificial Sequence
  Description of Artificial Sequence: Synthetic oligonucleotide
gagaggcaagcaccuguga

SEQ ID NO: 2720904 - RNA, 19 nt, Artificial Sequence
  Description of Artificial Sequence: Synthetic oligonucleotide
gcaagcaccugugaguuga

SEQ ID NO: 2720905 - RNA, 19 nt, Artificial Sequence
  Description of Artificial Sequence: Synthetic oligonucleotide
accuagccggggugagugg

SEQ ID NO: 2720906 - RNA, 19 nt, Artificial Sequence
  Description of Artificial Sequence: Synthetic oligonucleotide
guaguucucuaggggugag

SEQ ID NO: 2720907 - RNA, 19 nt, Artificial Sequence
  Description of Artificial Sequence: Synthetic oligonucleotide
aggcaagcaccugugaguu

SEQ ID NO: 2720908 - RNA, 19 nt, Artificial Sequence
  Description of Artificial Sequence: Synthetic oligonucleotide
ugucugucccuugggguaa

SEQ ID NO: 2720909 - RNA, 19 nt, Artificial Sequence
  Description of Artificial Sequence: Synthetic oligonucleotide
guccccuuuucgugagucc

SEQ ID NO: 2720910 - RNA, 19 nt, Artificial Sequence
  Description of Artificial Sequence: Synthetic oligonucleotide
aagcaccugugaguugaca

SEQ ID NO: 2720911 - RNA, 19 nt, Artificial Sequence
  Description of Artificial Sequence: Synthetic oligonucleotide
ggccguguaguuguuuucc

SEQ ID NO: 2720912 - RNA, 19 nt, Artificial Sequence
  Description of Artificial Sequence: Synthetic oligonucleotide
cugaguacuuggcugacau

SEQ ID NO: 2720913 - RNA, 19 nt, Artificial Sequence
  Description of Artificial Sequence: Synthetic oligonucleotide
caucagggccguguaguug

SEQ ID NO: 2720914 - RNA, 19 nt, Artificial Sequence
  Description of Artificial Sequence: Synthetic oligonucleotide
guugacagcaguccccuuu

SEQ ID NO: 2720915 - RNA, 19 nt, Artificial Sequence
  Description of Artificial Sequence: Synthetic oligonucleotide
cugucccuugggguaacgc

SEQ ID NO: 2720916 - RNA, 19 nt, Artificial Sequence
  Description of Artificial Sequence: Synthetic oligonucleotide
ggaacgcuuggugacggug

SEQ ID NO: 2720917 - RNA, 19 nt, Artificial Sequence
  Description of Artificial Sequence: Synthetic oligonucleotide
gcucccaaguacuuuaggu

SEQ ID NO: 2720918 - RNA, 19 nt, Artificial Sequence
  Description of Artificial Sequence: Synthetic oligonucleotide
uuccucugauguaguucuc

SEQ ID NO: 2720919 - RNA, 19 nt, Artificial Sequence
  Description of Artificial Sequence: Synthetic oligonucleotide
ccguguaguuguuuuccag

SEQ ID NO: 2720920 - RNA, 19 nt, Artificial Sequence
  Description of Artificial Sequence: Synthetic oligonucleotide
uaguucucuaggggugagu

SEQ ID NO: 2720921 - RNA, 19 nt, Artificial Sequence
  Description of Artificial Sequence: Synthetic oligonucleotide
gauccgccgggaacgcuug

SEQ ID NO: 2720922 - RNA, 19 nt, Artificial Sequence
  Description of Artificial Sequence: Synthetic oligonucleotide
acguaccagccugaguacu

SEQ ID NO: 2720923 - RNA, 19 nt, Artificial Sequence
  Description of Artificial Sequence: Synthetic oligonucleotide
gaguugacagcaguccccu

SEQ ID NO: 2720924 - RNA, 19 nt, Artificial Sequence
  Description of Artificial Sequence: Synthetic oligonucleotide
accuuuggggaaaggacuu

SEQ ID NO: 2720925 - RNA, 19 nt, Artificial Sequence
  Description of Artificial Sequence: Synthetic oligonucleotide
acuugguuucucgcagcgu

SEQ ID NO: 2720926 - RNA, 19 nt, Artificial Sequence
  Description of Artificial Sequence: Synthetic oligonucleotide
cgguagaauccuaccaccc

SEQ ID NO: 2720927 - RNA, 19 nt, Artificial Sequence
  Description of Artificial Sequence: Synthetic oligonucleotide
caagcaccugugaguugac

SEQ ID NO: 2720928 - RNA, 19 nt, Artificial Sequence
  Description of Artificial Sequence: Synthetic oligonucleotide
cggugguguacuugaaggg

SEQ ID NO: 2720929 - RNA, 19 nt, Artificial Sequence
  Description of Artificial Sequence: Synthetic oligonucleotide
uagccggggugaguggggc

SEQ ID NO: 2720930 - RNA, 19 nt, Artificial Sequence
  Description of Artificial Sequence: Synthetic oligonucleotide
uccuaccaccccucccgcu

SEQ ID NO: 2720931 - RNA, 19 nt, Artificial Sequence
  Description of Artificial Sequence: Synthetic oligonucleotide
aauccuccucugggaugag

SEQ ID NO: 2720932 - RNA, 19 nt, Artificial Sequence
  Description of Artificial Sequence: Synthetic oligonucleotide
agggcuucuguagcucugu

SEQ ID NO: 2720933 - RNA, 19 nt, Artificial Sequence
  Description of Artificial Sequence: Synthetic oligonucleotide
ggguucuggucaacgguag

SEQ ID NO: 2720934 - RNA, 19 nt, Artificial Sequence
  Description of Artificial Sequence: Synthetic oligonucleotide
ggugacggugguguacuug

SEQ ID NO: 2720935 - RNA, 19 nt, Artificial Sequence
  Description of Artificial Sequence: Synthetic oligonucleotide
gcaguccccuuuucgugag

SEQ ID NO: 2720936 - RNA, 19 nt, Artificial Sequence
  Description of Artificial Sequence: Synthetic oligonucleotide
gccgggaacgcuuggugac

SEQ ID NO: 2720937 - RNA, 19 nt, Artificial Sequence
  Description of Artificial Sequence: Synthetic oligonucleotide
accugugaguugacagcag

SEQ ID NO: 2720938 - RNA, 19 nt, Artificial Sequence
  Description of Artificial Sequence: Synthetic oligonucleotide
gugguguacuugaagggcu

SEQ ID NO: 2720939 - RNA, 19 nt, Artificial Sequence
  Description of Artificial Sequence: Synthetic oligonucleotide
ugggacccuugcgaggccu

SEQ ID NO: 2720940 - RNA, 19 nt, Artificial Sequence
  Description of Artificial Sequence: Synthetic oligonucleotide
cucugggaugaguuuugaa

SEQ ID NO: 2720941 - RNA, 19 nt, Artificial Sequence
  Description of Artificial Sequence: Synthetic oligonucleotide
acgcuucaugaagugcaca

SEQ ID NO: 2720942 - RNA, 19 nt, Artificial Sequence
  Description of Artificial Sequence: Synthetic oligonucleotide
gacccuugcgaggccuccc

SEQ ID NO: 2720943 - RNA, 19 nt, Artificial Sequence
  Description of Artificial Sequence: Synthetic oligonucleotide
cgcagcgucaguuuucuca

SEQ ID NO: 2720944 - RNA, 19 nt, Artificial Sequence
  Description of Artificial Sequence: Synthetic oligonucleotide
gggugaguguggccggacc

SEQ ID NO: 2720945 - RNA, 19 nt, Artificial Sequence
  Description of Artificial Sequence: Synthetic oligonucleotide
cccaaguacuuuagguuca

SEQ ID NO: 2720946 - RNA, 19 nt, Artificial Sequence
  Description of Artificial Sequence: Synthetic oligonucleotide
auccgccgggaacgcuugg

SEQ ID NO: 2720947 - RNA, 19 nt, Artificial Sequence
  Description of Artificial Sequence: Synthetic oligonucleotide
cugacaucagggccgugua

SEQ ID NO: 2720948 - RNA, 19 nt, Artificial Sequence
  Description of Artificial Sequence: Synthetic oligonucleotide
gaagcccacguaccagccu

SEQ ID NO: 2720949 - RNA, 19 nt, Artificial Sequence
  Description of Artificial Sequence: Synthetic oligonucleotide
guucucuaggggugagugu

SEQ ID NO: 2720950 - RNA, 19 nt, Artificial Sequence
  Description of Artificial Sequence: Synthetic oligonucleotide
uggcugacaucagggccgu

SEQ ID NO: 2720951 - RNA, 19 nt, Artificial Sequence
  Description of Artificial Sequence: Synthetic oligonucleotide
uggccggaccuagccgggg

SEQ ID NO: 2720952 - RNA, 19 nt, Artificial Sequence
  Description of Artificial Sequence: Synthetic oligonucleotide
ccuagccggggugaguggg

SEQ ID NO: 2720953 - RNA, 19 nt, Artificial Sequence
  Description of Artificial Sequence: Synthetic oligonucleotide
guggggcggauccgccggg

SEQ ID NO: 2720954 - RNA, 19 nt, Artificial Sequence
  Description of Artificial Sequence: Synthetic oligonucleotide
gaguguggccggaccuagc

SEQ ID NO: 2720955 - RNA, 19 nt, Artificial Sequence
  Description of Artificial Sequence: Synthetic oligonucleotide
gguucuggucaacgguaga

SEQ ID NO: 2720956 - RNA, 19 nt, Artificial Sequence
  Description of Artificial Sequence: Synthetic oligonucleotide
ggaaaggacuugguuucuc

SEQ ID NO: 2720957 - RNA, 19 nt, Artificial Sequence
  Description of Artificial Sequence: Synthetic oligonucleotide
gcgucaguuuucucauuca

SEQ ID NO: 2720958 - RNA, 19 nt, Artificial Sequence
  Description of Artificial Sequence: Synthetic oligonucleotide
ggugaguguggccggaccu

SEQ ID NO: 2720959 - RNA, 19 nt, Artificial Sequence
  Description of Artificial Sequence: Synthetic oligonucleotide
ucaugggguucuggucaac

SEQ ID NO: 2720960 - RNA, 19 nt, Artificial Sequence
  Description of Artificial Sequence: Synthetic oligonucleotide
cucccgggucuugggaccc

SEQ ID NO: 2720961 - RNA, 19 nt, Artificial Sequence
  Description of Artificial Sequence: Synthetic oligonucleotide
uugcgaggccuccccuuuu

SEQ ID NO: 2720962 - RNA, 19 nt, Artificial Sequence
  Description of Artificial Sequence: Synthetic oligonucleotide
guggccggaccuagccggg

SEQ ID NO: 2720963 - RNA, 19 nt, Artificial Sequence
  Description of Artificial Sequence: Synthetic oligonucleotide
gccggggugaguggggcgg

SEQ ID NO: 2720964 - RNA, 19 nt, Artificial Sequence
  Description of Artificial Sequence: Synthetic oligonucleotide
aguugacagcaguccccuu

SEQ ID NO: 2720965 - RNA, 19 nt, Artificial Sequence
  Description of Artificial Sequence: Synthetic oligonucleotide
gccguguaguuguuuucca

SEQ ID NO: 2720966 - RNA, 19 nt, Artificial Sequence
  Description of Artificial Sequence: Synthetic oligonucleotide
ggcaagcaccugugaguug

SEQ ID NO: 2720967 - RNA, 19 nt, Artificial Sequence
  Description of Artificial Sequence: Synthetic oligonucleotide
gcagcgucaguuuucucau

SEQ ID NO: 2720968 - RNA, 19 nt, Artificial Sequence
  Description of Artificial Sequence: Synthetic oligonucleotide
ccuuuucgugaguccuuug

SEQ ID NO: 2720969 - RNA, 19 nt, Artificial Sequence
  Description of Artificial Sequence: Synthetic oligonucleotide
cacacacuccuugcuagua

SEQ ID NO: 2720970 - RNA, 19 nt, Artificial Sequence
  Description of Artificial Sequence: Synthetic oligonucleotide
ccccuagagagaggcaagc

SEQ ID NO: 2720971 - RNA, 19 nt, Artificial Sequence
  Description of Artificial Sequence: Synthetic oligonucleotide
ucccgcucccaaguacuuu

SEQ ID NO: 2720972 - RNA, 19 nt, Artificial Sequence
  Description of Artificial Sequence: Synthetic oligonucleotide
gcugacaucagggccgugu

SEQ ID NO: 2720973 - RNA, 19 nt, Artificial Sequence
  Description of Artificial Sequence: Synthetic oligonucleotide
gggccguguaguuguuuuc

SEQ ID NO: 2720974 - RNA, 19 nt, Artificial Sequence
  Description of Artificial Sequence: Synthetic oligonucleotide
ggguaacgcuucaugaagu

SEQ ID NO: 2720975 - RNA, 19 nt, Artificial Sequence
  Description of Artificial Sequence: Synthetic oligonucleotide
gugaguguggccggaccua

SEQ ID NO: 2720976 - RNA, 19 nt, Artificial Sequence
  Description of Artificial Sequence: Synthetic oligonucleotide
gggcggauccgccgggaac

SEQ ID NO: 2720977 - RNA, 19 nt, Artificial Sequence
  Description of Artificial Sequence: Synthetic oligonucleotide
ccuuuggggaaaggacuug

SEQ ID NO: 2720978 - RNA, 19 nt, Artificial Sequence
  Description of Artificial Sequence: Synthetic oligonucleotide
uggggcggauccgccggga

SEQ ID NO: 2720979 - RNA, 19 nt, Artificial Sequence
  Description of Artificial Sequence: Synthetic oligonucleotide
ccgcucccaaguacuuuag

SEQ ID NO: 2720980 - RNA, 19 nt, Artificial Sequence
  Description of Artificial Sequence: Synthetic oligonucleotide
ucgcagcgucaguuuucuc

SEQ ID NO: 2720981 - RNA, 19 nt, Artificial Sequence
  Description of Artificial Sequence: Synthetic oligonucleotide
ccgggaacgcuuggugacg

SEQ ID NO: 2720982 - RNA, 19 nt, Artificial Sequence
  Description of Artificial Sequence: Synthetic oligonucleotide
ccucugauguaguucucua

SEQ ID NO: 2720983 - RNA, 19 nt, Artificial Sequence
  Description of Artificial Sequence: Synthetic oligonucleotide
cgggucuugggacccuugc

SEQ ID NO: 2720984 - RNA, 19 nt, Artificial Sequence
  Description of Artificial Sequence: Synthetic oligonucleotide
gccggaccuagccggggug

SEQ ID NO: 2720985 - RNA, 19 nt, Artificial Sequence
  Description of Artificial Sequence: Synthetic oligonucleotide
ggacccuugcgaggccucc

SEQ ID NO: 2720986 - RNA, 19 nt, Artificial Sequence
  Description of Artificial Sequence: Synthetic oligonucleotide
cuugcgaggccuccccuuu

SEQ ID NO: 2720987 - RNA, 19 nt, Artificial Sequence
  Description of Artificial Sequence: Synthetic oligonucleotide
ccugugaguugacagcagu

SEQ ID NO: 2720988 - RNA, 19 nt, Artificial Sequence
  Description of Artificial Sequence: Synthetic oligonucleotide
cccucccgcucccaaguac

SEQ ID NO: 2720989 - RNA, 19 nt, Artificial Sequence
  Description of Artificial Sequence: Synthetic oligonucleotide
agcccacguaccagccuga

SEQ ID NO: 2720990 - RNA, 19 nt, Artificial Sequence
  Description of Artificial Sequence: Synthetic oligonucleotide
cuccucugggaugaguuuu

SEQ ID NO: 2720991 - RNA, 19 nt, Artificial Sequence
  Description of Artificial Sequence: Synthetic oligonucleotide
cccgcucccaaguacuuua

SEQ ID NO: 2720992 - RNA, 19 nt, Artificial Sequence
  Description of Artificial Sequence: Synthetic oligonucleotide
caaguacuuuagguucagu

SEQ ID NO: 2720993 - RNA, 19 nt, Artificial Sequence
  Description of Artificial Sequence: Synthetic oligonucleotide
cgggaacgcuuggugacgg

SEQ ID NO: 2720994 - RNA, 19 nt, Artificial Sequence
  Description of Artificial Sequence: Synthetic oligonucleotide
ccgccgggaacgcuuggug

SEQ ID NO: 2720995 - RNA, 19 nt, Artificial Sequence
  Description of Artificial Sequence: Synthetic oligonucleotide
cccuagagagaggcaagca

SEQ ID NO: 2720996 - RNA, 19 nt, Artificial Sequence
  Description of Artificial Sequence: Synthetic oligonucleotide
gccugaguacuuggcugac

SEQ ID NO: 2720997 - RNA, 19 nt, Artificial Sequence
  Description of Artificial Sequence: Synthetic oligonucleotide
ucccgggucuugggacccu

SEQ ID NO: 2720998 - RNA, 19 nt, Artificial Sequence
  Description of Artificial Sequence: Synthetic oligonucleotide
ccuucucgaugaacacaca

SEQ ID NO: 2720999 - RNA, 19 nt, Artificial Sequence
  Description of Artificial Sequence: Synthetic oligonucleotide
cacuccuugcuaguaccau

SEQ ID NO: 2721000 - RNA, 19 nt, Artificial Sequence
  Description of Artificial Sequence: Synthetic oligonucleotide
gcccacguaccagccugag

SEQ ID NO: 2721001 - RNA, 19 nt, Artificial Sequence
  Description of Artificial Sequence: Synthetic oligonucleotide
gcacaucuugcugguucuc

SEQ ID NO: 2721002 - RNA, 19 nt, Artificial Sequence
  Description of Artificial Sequence: Synthetic oligonucleotide
ccucccgcucccaaguacu

SEQ ID NO: 2721003 - RNA, 19 nt, Artificial Sequence
  Description of Artificial Sequence: Synthetic oligonucleotide
gguuucucgcagcgucagu

SEQ ID NO: 2721004 - RNA, 19 nt, Artificial Sequence
  Description of Artificial Sequence: Synthetic oligonucleotide
ggggugaguguggccggac

SEQ ID NO: 2721005 - RNA, 19 nt, Artificial Sequence
  Description of Artificial Sequence: Synthetic oligonucleotide
ccugaguacuuggcugaca

SEQ ID NO: 2721006 - RNA, 19 nt, Artificial Sequence
  Description of Artificial Sequence: Synthetic oligonucleotide
gcuuggugacgguggugua

SEQ ID NO: 2721007 - RNA, 19 nt, Artificial Sequence
  Description of Artificial Sequence: Synthetic oligonucleotide
ggggugaguggggcggauc

SEQ ID NO: 2721008 - RNA, 19 nt, Artificial Sequence
  Description of Artificial Sequence: Synthetic oligonucleotide
ggucaacgguagaauccua

SEQ ID NO: 2721009 - RNA, 19 nt, Artificial Sequence
  Description of Artificial Sequence: Synthetic oligonucleotide
gcggauccgccgggaacgc

SEQ ID NO: 2721010 - RNA, 19 nt, Artificial Sequence
  Description of Artificial Sequence: Synthetic oligonucleotide
cgccgggaacgcuugguga

SEQ ID NO: 2721011 - RNA, 19 nt, Artificial Sequence
  Description of Artificial Sequence: Synthetic oligonucleotide
ggauccgccgggaacgcuu

SEQ ID NO: 2721012 - RNA, 19 nt, Artificial Sequence
  Description of Artificial Sequence: Synthetic oligonucleotide
gggacccuugcgaggccuc

SEQ ID NO: 2721013 - RNA, 19 nt, Artificial Sequence
  Description of Artificial Sequence: Synthetic oligonucleotide
ggggcggauccgccgggaa

SEQ ID NO: 2721014 - RNA, 19 nt, Artificial Sequence
  Description of Artificial Sequence: Synthetic oligonucleotide
cucccgcucccaaguacuu

SEQ ID NO: 2721015 - RNA, 19 nt, Artificial Sequence
  Description of Artificial Sequence: Synthetic oligonucleotide
cgcuuggugacgguggugu

SEQ ID NO: 2721016 - RNA, 19 nt, Artificial Sequence
  Description of Artificial Sequence: Synthetic oligonucleotide
gggaacgcuuggugacggu

SEQ ID NO: 2721017 - RNA, 19 nt, Artificial Sequence
  Description of Artificial Sequence: Synthetic oligonucleotide
ggccggaccuagccggggu

SEQ ID NO: 2721018 - RNA, 19 nt, Artificial Sequence
  Description of Artificial Sequence: Synthetic oligonucleotide
caguccccuuuucgugagu

SEQ ID NO: 2721019 - RNA, 19 nt, Artificial Sequence
  Description of Artificial Sequence: Synthetic oligonucleotide
ccggaccuagccgggguga

SEQ ID NO: 2721020 - RNA, 19 nt, Artificial Sequence
  Description of Artificial Sequence: Synthetic oligonucleotide
cagcgucaguuuucucauu

SEQ ID NO: 2721021 - RNA, 19 nt, Artificial Sequence
  Description of Artificial Sequence: Synthetic oligonucleotide
cguaccagccugaguacuu

SEQ ID NO: 2721022 - RNA, 19 nt, Artificial Sequence
  Description of Artificial Sequence: Synthetic oligonucleotide
cgaugaacacacacuccuu

SEQ ID NO: 2721023 - RNA, 19 nt, Artificial Sequence
  Description of Artificial Sequence: Synthetic oligonucleotide
ggaccuagccggggugagu

SEQ ID NO: 2721024 - RNA, 19 nt, Artificial Sequence
  Description of Artificial Sequence: Synthetic oligonucleotide
ccuugcgaggccuccccuu

SEQ ID NO: 2721025 - RNA, 19 nt, Artificial Sequence
  Description of Artificial Sequence: Synthetic oligonucleotide
cccuuuucgugaguccuuu

SEQ ID NO: 2721026 - RNA, 19 nt, Artificial Sequence
  Description of Artificial Sequence: Synthetic oligonucleotide
cagggccguguaguuguuu

SEQ ID NO: 2721027 - RNA, 19 nt, Artificial Sequence
  Description of Artificial Sequence: Synthetic oligonucleotide
ccuugggguaacgcuucau

SEQ ID NO: 2721028 - RNA, 19 nt, Artificial Sequence
  Description of Artificial Sequence: Synthetic oligonucleotide
cccuugcgaggccuccccu

SEQ ID NO: 2721029 - RNA, 19 nt, Artificial Sequence
  Description of Artificial Sequence: Synthetic oligonucleotide
ccggggugaguggggcgga

SEQ ID NO: 2721030 - RNA, 19 nt, Artificial Sequence
  Description of Artificial Sequence: Synthetic oligonucleotide
cggauccgccgggaacgcu

SEQ ID NO: 2721031 - RNA, 19 nt, Artificial Sequence
  Description of Artificial Sequence: Synthetic oligonucleotide
agucaaaauagacaaaccc

SEQ ID NO: 2721032 - RNA, 19 nt, Artificial Sequence
  Description of Artificial Sequence: Synthetic oligonucleotide
aaggaggcuaaacagaggc

SEQ ID NO: 2721033 - RNA, 19 nt, Artificial Sequence
  Description of Artificial Sequence: Synthetic oligonucleotide
aaaguaagaaaccucaaca

SEQ ID NO: 2721034 - RNA, 19 nt, Artificial Sequence
  Description of Artificial Sequence: Synthetic oligonucleotide
aaaauagacaaacccuugg

SEQ ID NO: 2721035 - RNA, 19 nt, Artificial Sequence
  Description of Artificial Sequence: Synthetic oligonucleotide
uauagaauccuuuuccucc

SEQ ID NO: 2721036 - RNA, 19 nt, Artificial Sequence
  Description of Artificial Sequence: Synthetic oligonucleotide
uguacuaacagcuuugagu

SEQ ID NO: 2721037 - RNA, 19 nt, Artificial Sequence
  Description of Artificial Sequence: Synthetic oligonucleotide
uuuacaauucuuaagucaa

SEQ ID NO: 2721038 - RNA, 19 nt, Artificial Sequence
  Description of Artificial Sequence: Synthetic oligonucleotide
uuuuacaauucuuaaguca

SEQ ID NO: 2721039 - RNA, 19 nt, Artificial Sequence
  Description of Artificial Sequence: Synthetic oligonucleotide
aauacagucaaaauagaca

SEQ ID NO: 2721040 - RNA, 19 nt, Artificial Sequence
  Description of Artificial Sequence: Synthetic oligonucleotide
uugaguaugaagaggcagg

SEQ ID NO: 2721041 - RNA, 19 nt, Artificial Sequence
  Description of Artificial Sequence: Synthetic oligonucleotide
acagucaaaauagacaaac

SEQ ID NO: 2721042 - RNA, 19 nt, Artificial Sequence
  Description of Artificial Sequence: Synthetic oligonucleotide
aaacccuuggaauauagaa

SEQ ID NO: 2721043 - RNA, 19 nt, Artificial Sequence
  Description of Artificial Sequence: Synthetic oligonucleotide
acccuuggaauauagaauc

SEQ ID NO: 2721044 - RNA, 19 nt, Artificial Sequence
  Description of Artificial Sequence: Synthetic oligonucleotide
aacagcuuugaguaugaag

SEQ ID NO: 2721045 - RNA, 19 nt, Artificial Sequence
  Description of Artificial Sequence: Synthetic oligonucleotide
uggucuuggguuuaggcgg

SEQ ID NO: 2721046 - RNA, 19 nt, Artificial Sequence
  Description of Artificial Sequence: Synthetic oligonucleotide
uggaaaggaggcuaaacag

SEQ ID NO: 2721047 - RNA, 19 nt, Artificial Sequence
  Description of Artificial Sequence: Synthetic oligonucleotide
ucaauauuuuguacuaaca

SEQ ID NO: 2721048 - RNA, 19 nt, Artificial Sequence
  Description of Artificial Sequence: Synthetic oligonucleotide
aaauagacaaacccuugga

SEQ ID NO: 2721049 - RNA, 19 nt, Artificial Sequence
  Description of Artificial Sequence: Synthetic oligonucleotide
ucaaaauagacaaacccuu

SEQ ID NO: 2721050 - RNA, 19 nt, Artificial Sequence
  Description of Artificial Sequence: Synthetic oligonucleotide
auagaauccuuuuccuccc

SEQ ID NO: 2721051 - RNA, 19 nt, Artificial Sequence
  Description of Artificial Sequence: Synthetic oligonucleotide
aaguaagaaaccucaacaa

SEQ ID NO: 2721052 - RNA, 19 nt, Artificial Sequence
  Description of Artificial Sequence: Synthetic oligonucleotide
auauuuuguacuaacagcu

SEQ ID NO: 2721053 - RNA, 19 nt, Artificial Sequence
  Description of Artificial Sequence: Synthetic oligonucleotide
aauagacaaacccuuggaa

SEQ ID NO: 2721054 - RNA, 19 nt, Artificial Sequence
  Description of Artificial Sequence: Synthetic oligonucleotide
uucagaguggcaaugggga

SEQ ID NO: 2721055 - RNA, 19 nt, Artificial Sequence
  Description of Artificial Sequence: Synthetic oligonucleotide
auauagaauccuuuuccuc

SEQ ID NO: 2721056 - RNA, 19 nt, Artificial Sequence
  Description of Artificial Sequence: Synthetic oligonucleotide
aguaugaagaggcaggaaa

SEQ ID NO: 2721057 - RNA, 19 nt, Artificial Sequence
  Description of Artificial Sequence: Synthetic oligonucleotide
uuugaguaugaagaggcag

SEQ ID NO: 2721058 - RNA, 19 nt, Artificial Sequence
  Description of Artificial Sequence: Synthetic oligonucleotide
gaaaggaggcuaaacagag

SEQ ID NO: 2721059 - RNA, 19 nt, Artificial Sequence
  Description of Artificial Sequence: Synthetic oligonucleotide
ugucggacgaagaaguggc

SEQ ID NO: 2721060 - RNA, 19 nt, Artificial Sequence
  Description of Artificial Sequence: Synthetic oligonucleotide
uuaagucaauauuuuguac

SEQ ID NO: 2721061 - RNA, 19 nt, Artificial Sequence
  Description of Artificial Sequence: Synthetic oligonucleotide
gaugaaccgagccugcugc

SEQ ID NO: 2721062 - RNA, 19 nt, Artificial Sequence
  Description of Artificial Sequence: Synthetic oligonucleotide
cagagaguuagcaggacgg

SEQ ID NO: 2721063 - RNA, 19 nt, Artificial Sequence
  Description of Artificial Sequence: Synthetic oligonucleotide
uucuuaagucaauauuuug

SEQ ID NO: 2721064 - RNA, 19 nt, Artificial Sequence
  Description of Artificial Sequence: Synthetic oligonucleotide
aggcaggaaaguaagaaac

SEQ ID NO: 2721065 - RNA, 19 nt, Artificial Sequence
  Description of Artificial Sequence: Synthetic oligonucleotide
ugaagaggcaggaaaguaa

SEQ ID NO: 2721066 - RNA, 19 nt, Artificial Sequence
  Description of Artificial Sequence: Synthetic oligonucleotide
aagucaauauuuuguacua

SEQ ID NO: 2721067 - RNA, 19 nt, Artificial Sequence
  Description of Artificial Sequence: Synthetic oligonucleotide
aguaagaaaccucaacaaa

SEQ ID NO: 2721068 - RNA, 19 nt, Artificial Sequence
  Description of Artificial Sequence: Synthetic oligonucleotide
ugugaaucugucuggaguc

SEQ ID NO: 2721069 - RNA, 19 nt, Artificial Sequence
  Description of Artificial Sequence: Synthetic oligonucleotide
cuggucuuggguuuaggcg

SEQ ID NO: 2721070 - RNA, 19 nt, Artificial Sequence
  Description of Artificial Sequence: Synthetic oligonucleotide
guacuaacagcuuugagua

SEQ ID NO: 2721071 - RNA, 19 nt, Artificial Sequence
  Description of Artificial Sequence: Synthetic oligonucleotide
acuggugaacacuggaaag

SEQ ID NO: 2721072 - RNA, 19 nt, Artificial Sequence
  Description of Artificial Sequence: Synthetic oligonucleotide
acgaagaaguggcggaggc

SEQ ID NO: 2721073 - RNA, 19 nt, Artificial Sequence
  Description of Artificial Sequence: Synthetic oligonucleotide
agaaaccucaacaaaauaa

SEQ ID NO: 2721074 - RNA, 19 nt, Artificial Sequence
  Description of Artificial Sequence: Synthetic oligonucleotide
cuaaacagaggcucccugc

SEQ ID NO: 2721075 - RNA, 19 nt, Artificial Sequence
  Description of Artificial Sequence: Synthetic oligonucleotide
uagacaaacccuuggaaua

SEQ ID NO: 2721076 - RNA, 19 nt, Artificial Sequence
  Description of Artificial Sequence: Synthetic oligonucleotide
ucccaugagaucccacugg

SEQ ID NO: 2721077 - RNA, 19 nt, Artificial Sequence
  Description of Artificial Sequence: Synthetic oligonucleotide
uagcaggacgggaugagag

SEQ ID NO: 2721078 - RNA, 19 nt, Artificial Sequence
  Description of Artificial Sequence: Synthetic oligonucleotide
acaauucuuaagucaauau

SEQ ID NO: 2721079 - RNA, 19 nt, Artificial Sequence
  Description of Artificial Sequence: Synthetic oligonucleotide
uggaauauagaauccuuuu

SEQ ID NO: 2721080 - RNA, 19 nt, Artificial Sequence
  Description of Artificial Sequence: Synthetic oligonucleotide
ugacgguggcuguugaccg

SEQ ID NO: 2721081 - RNA, 19 nt, Artificial Sequence
  Description of Artificial Sequence: Synthetic oligonucleotide
acuaacagcuuugaguaug

SEQ ID NO: 2721082 - RNA, 19 nt, Artificial Sequence
  Description of Artificial Sequence: Synthetic oligonucleotide
aggaaaguaagaaaccuca

SEQ ID NO: 2721083 - RNA, 19 nt, Artificial Sequence
  Description of Artificial Sequence: Synthetic oligonucleotide
gaaaccucaacaaaauaaa

SEQ ID NO: 2721084 - RNA, 19 nt, Artificial Sequence
  Description of Artificial Sequence: Synthetic oligonucleotide
auuuuguacuaacagcuuu

SEQ ID NO: 2721085 - RNA, 19 nt, Artificial Sequence
  Description of Artificial Sequence: Synthetic oligonucleotide
aacagaggcucccugcggu

SEQ ID NO: 2721086 - RNA, 19 nt, Artificial Sequence
  Description of Artificial Sequence: Synthetic oligonucleotide
aguccgaggggccugugcg

SEQ ID NO: 2721087 - RNA, 19 nt, Artificial Sequence
  Description of Artificial Sequence: Synthetic oligonucleotide
guaagaaaccucaacaaaa

SEQ ID NO: 2721088 - RNA, 19 nt, Artificial Sequence
  Description of Artificial Sequence: Synthetic oligonucleotide
ugugcucuagggcacugcc

SEQ ID NO: 2721089 - RNA, 19 nt, Artificial Sequence
  Description of Artificial Sequence: Synthetic oligonucleotide
ugucuggagucccaaugag

SEQ ID NO: 2721090 - RNA, 19 nt, Artificial Sequence
  Description of Artificial Sequence: Synthetic oligonucleotide
ucccaaugagugacggugg

SEQ ID NO: 2721091 - RNA, 19 nt, Artificial Sequence
  Description of Artificial Sequence: Synthetic oligonucleotide
uuguacuaacagcuuugag

SEQ ID NO: 2721092 - RNA, 19 nt, Artificial Sequence
  Description of Artificial Sequence: Synthetic oligonucleotide
ugcggugucacgcccacug

SEQ ID NO: 2721093 - RNA, 19 nt, Artificial Sequence
  Description of Artificial Sequence: Synthetic oligonucleotide
uuggguuuaggcggggugg

SEQ ID NO: 2721094 - RNA, 19 nt, Artificial Sequence
  Description of Artificial Sequence: Synthetic oligonucleotide
gggacugugaaucugucug

SEQ ID NO: 2721095 - RNA, 19 nt, Artificial Sequence
  Description of Artificial Sequence: Synthetic oligonucleotide
acugccacaagugcagugg

SEQ ID NO: 2721096 - RNA, 19 nt, Artificial Sequence
  Description of Artificial Sequence: Synthetic oligonucleotide
aaguggcggaggcugguuc

SEQ ID NO: 2721097 - RNA, 19 nt, Artificial Sequence
  Description of Artificial Sequence: Synthetic oligonucleotide
agcuuugaguaugaagagg

SEQ ID NO: 2721098 - RNA, 19 nt, Artificial Sequence
  Description of Artificial Sequence: Synthetic oligonucleotide
uagggcacugccacaagug

SEQ ID NO: 2721099 - RNA, 19 nt, Artificial Sequence
  Description of Artificial Sequence: Synthetic oligonucleotide
guucagaguggcaaugggg

SEQ ID NO: 2721100 - RNA, 19 nt, Artificial Sequence
  Description of Artificial Sequence: Synthetic oligonucleotide
gcugguucagaguuggccg

SEQ ID NO: 2721101 - RNA, 19 nt, Artificial Sequence
  Description of Artificial Sequence: Synthetic oligonucleotide
gcuuugaguaugaagaggc

SEQ ID NO: 2721102 - RNA, 19 nt, Artificial Sequence
  Description of Artificial Sequence: Synthetic oligonucleotide
cuguugaccgccaaccgug

SEQ ID NO: 2721103 - RNA, 19 nt, Artificial Sequence
  Description of Artificial Sequence: Synthetic oligonucleotide
uuuguacuaacagcuuuga

SEQ ID NO: 2721104 - RNA, 19 nt, Artificial Sequence
  Description of Artificial Sequence: Synthetic oligonucleotide
uauuuuguacuaacagcuu

SEQ ID NO: 2721105 - RNA, 19 nt, Artificial Sequence
  Description of Artificial Sequence: Synthetic oligonucleotide
ugaguaugaagaggcagga

SEQ ID NO: 2721106 - RNA, 19 nt, Artificial Sequence
  Description of Artificial Sequence: Synthetic oligonucleotide
aaugagugacgguggcugu

SEQ ID NO: 2721107 - RNA, 19 nt, Artificial Sequence
  Description of Artificial Sequence: Synthetic oligonucleotide
ucggacgaagaaguggcgg

SEQ ID NO: 2721108 - RNA, 19 nt, Artificial Sequence
  Description of Artificial Sequence: Synthetic oligonucleotide
caggaaaguaagaaaccuc

SEQ ID NO: 2721109 - RNA, 19 nt, Artificial Sequence
  Description of Artificial Sequence: Synthetic oligonucleotide
uacaauucuuaagucaaua

SEQ ID NO: 2721110 - RNA, 19 nt, Artificial Sequence
  Description of Artificial Sequence: Synthetic oligonucleotide
gucccaaugagugacggug

SEQ ID NO: 2721111 - RNA, 19 nt, Artificial Sequence
  Description of Artificial Sequence: Synthetic oligonucleotide
agcaggacgggaugagagg

SEQ ID NO: 2721112 - RNA, 19 nt, Artificial Sequence
  Description of Artificial Sequence: Synthetic oligonucleotide
uguugaccgccaaccgugg

SEQ ID NO: 2721113 - RNA, 19 nt, Artificial Sequence
  Description of Artificial Sequence: Synthetic oligonucleotide
caaugagugacgguggcug

SEQ ID NO: 2721114 - RNA, 19 nt, Artificial Sequence
  Description of Artificial Sequence: Synthetic oligonucleotide
ggaauauagaauccuuuuc

SEQ ID NO: 2721115 - RNA, 19 nt, Artificial Sequence
  Description of Artificial Sequence: Synthetic oligonucleotide
cuggaaaggaggcuaaaca

SEQ ID NO: 2721116 - RNA, 19 nt, Artificial Sequence
  Description of Artificial Sequence: Synthetic oligonucleotide
aaaccucaacaaaauaaau

SEQ ID NO: 2721117 - RNA, 19 nt, Artificial Sequence
  Description of Artificial Sequence: Synthetic oligonucleotide
aacccuuggaauauagaau

SEQ ID NO: 2721118 - RNA, 19 nt, Artificial Sequence
  Description of Artificial Sequence: Synthetic oligonucleotide
uggagucccaaugagugac

SEQ ID NO: 2721119 - RNA, 19 nt, Artificial Sequence
  Description of Artificial Sequence: Synthetic oligonucleotide
uuacaauucuuaagucaau

SEQ ID NO: 2721120 - RNA, 19 nt, Artificial Sequence
  Description of Artificial Sequence: Synthetic oligonucleotide
ucagaguuggccggguuug

SEQ ID NO: 2721121 - RNA, 19 nt, Artificial Sequence
  Description of Artificial Sequence: Synthetic oligonucleotide
cugguucagaguuggccgg

SEQ ID NO: 2721122 - RNA, 19 nt, Artificial Sequence
  Description of Artificial Sequence: Synthetic oligonucleotide
gagguugccggugaagagc

SEQ ID NO: 2721123 - RNA, 19 nt, Artificial Sequence
  Description of Artificial Sequence: Synthetic oligonucleotide
aguuggccggguuuggaug

SEQ ID NO: 2721124 - RNA, 19 nt, Artificial Sequence
  Description of Artificial Sequence: Synthetic oligonucleotide
guugguguuggagugggug

SEQ ID NO: 2721125 - RNA, 19 nt, Artificial Sequence
  Description of Artificial Sequence: Synthetic oligonucleotide
cagcuuugaguaugaagag

SEQ ID NO: 2721126 - RNA, 19 nt, Artificial Sequence
  Description of Artificial Sequence: Synthetic oligonucleotide
uggugaacacuggaaagga

SEQ ID NO: 2721127 - RNA, 19 nt, Artificial Sequence
  Description of Artificial Sequence: Synthetic oligonucleotide
uacagucaaaauagacaaa

SEQ ID NO: 2721128 - RNA, 19 nt, Artificial Sequence
  Description of Artificial Sequence: Synthetic oligonucleotide
gaaccgagccugcugcugc

SEQ ID NO: 2721129 - RNA, 19 nt, Artificial Sequence
  Description of Artificial Sequence: Synthetic oligonucleotide
gugauggacccagaguccg

SEQ ID NO: 2721130 - RNA, 19 nt, Artificial Sequence
  Description of Artificial Sequence: Synthetic oligonucleotide
gguuuggaugaaccgagcc

SEQ ID NO: 2721131 - RNA, 19 nt, Artificial Sequence
  Description of Artificial Sequence: Synthetic oligonucleotide
agugacgguggcuguugac

SEQ ID NO: 2721132 - RNA, 19 nt, Artificial Sequence
  Description of Artificial Sequence: Synthetic oligonucleotide
agagaguuagcaggacggg

SEQ ID NO: 2721133 - RNA, 19 nt, Artificial Sequence
  Description of Artificial Sequence: Synthetic oligonucleotide
gugucggacgaagaagugg

SEQ ID NO: 2721134 - RNA, 19 nt, Artificial Sequence
  Description of Artificial Sequence: Synthetic oligonucleotide
gcagagaguuagcaggacg

SEQ ID NO: 2721135 - RNA, 19 nt, Artificial Sequence
  Description of Artificial Sequence: Synthetic oligonucleotide
uggcuguugaccgccaacc

SEQ ID NO: 2721136 - RNA, 19 nt, Artificial Sequence
  Description of Artificial Sequence: Synthetic oligonucleotide
gaguuagcaggacgggaug

SEQ ID NO: 2721137 - RNA, 19 nt, Artificial Sequence
  Description of Artificial Sequence: Synthetic oligonucleotide
aggcuaaacagaggcuccc

SEQ ID NO: 2721138 - RNA, 19 nt, Artificial Sequence
  Description of Artificial Sequence: Synthetic oligonucleotide
gacgggaugagaggcgggg

SEQ ID NO: 2721139 - RNA, 19 nt, Artificial Sequence
  Description of Artificial Sequence: Synthetic oligonucleotide
gagucccaaugagugacgg

SEQ ID NO: 2721140 - RNA, 19 nt, Artificial Sequence
  Description of Artificial Sequence: Synthetic oligonucleotide
uuggaugaaccgagccugc

SEQ ID NO: 2721141 - RNA, 19 nt, Artificial Sequence
  Description of Artificial Sequence: Synthetic oligonucleotide
guugccggugaagagcggg

SEQ ID NO: 2721142 - RNA, 19 nt, Artificial Sequence
  Description of Artificial Sequence: Synthetic oligonucleotide
acaaacccuuggaauauag

SEQ ID NO: 2721143 - RNA, 19 nt, Artificial Sequence
  Description of Artificial Sequence: Synthetic oligonucleotide
guguuggagugggugaugg

SEQ ID NO: 2721144 - RNA, 19 nt, Artificial Sequence
  Description of Artificial Sequence: Synthetic oligonucleotide
uucagaguuggccggguuu

SEQ ID NO: 2721145 - RNA, 19 nt, Artificial Sequence
  Description of Artificial Sequence: Synthetic oligonucleotide
aauggggacuguugguguu

SEQ ID NO: 2721146 - RNA, 19 nt, Artificial Sequence
  Description of Artificial Sequence: Synthetic oligonucleotide
gauggacccagaguccgag

SEQ ID NO: 2721147 - RNA, 19 nt, Artificial Sequence
  Description of Artificial Sequence: Synthetic oligonucleotide
uugaccgccaaccgugguc

SEQ ID NO: 2721148 - RNA, 19 nt, Artificial Sequence
  Description of Artificial Sequence: Synthetic oligonucleotide
gaggcuaaacagaggcucc

SEQ ID NO: 2721149 - RNA, 19 nt, Artificial Sequence
  Description of Artificial Sequence: Synthetic oligonucleotide
gguucagaguggcaauggg

SEQ ID NO: 2721150 - RNA, 19 nt, Artificial Sequence
  Description of Artificial Sequence: Synthetic oligonucleotide
agguugccggugaagagcg

SEQ ID NO: 2721151 - RNA, 19 nt, Artificial Sequence
  Description of Artificial Sequence: Synthetic oligonucleotide
cuuggguuuaggcggggug

SEQ ID NO: 2721152 - RNA, 19 nt, Artificial Sequence
  Description of Artificial Sequence: Synthetic oligonucleotide
auucuuaagucaauauuuu

SEQ ID NO: 2721153 - RNA, 19 nt, Artificial Sequence
  Description of Artificial Sequence: Synthetic oligonucleotide
agaucccacuggugaacac

SEQ ID NO: 2721154 - RNA, 19 nt, Artificial Sequence
  Description of Artificial Sequence: Synthetic oligonucleotide
gugacgguggcuguugacc

SEQ ID NO: 2721155 - RNA, 19 nt, Artificial Sequence
  Description of Artificial Sequence: Synthetic oligonucleotide
acaagugcaguggggacug

SEQ ID NO: 2721156 - RNA, 19 nt, Artificial Sequence
  Description of Artificial Sequence: Synthetic oligonucleotide
ggacugugaaucugucugg

SEQ ID NO: 2721157 - RNA, 19 nt, Artificial Sequence
  Description of Artificial Sequence: Synthetic oligonucleotide
accguggucaggcacuggu

SEQ ID NO: 2721158 - RNA, 19 nt, Artificial Sequence
  Description of Artificial Sequence: Synthetic oligonucleotide
ugaccgccaaccgugguca

SEQ ID NO: 2721159 - RNA, 19 nt, Artificial Sequence
  Description of Artificial Sequence: Synthetic oligonucleotide
ucuagggcacugccacaag

SEQ ID NO: 2721160 - RNA, 19 nt, Artificial Sequence
  Description of Artificial Sequence: Synthetic oligonucleotide
cuaacagcuuugaguauga

SEQ ID NO: 2721161 - RNA, 19 nt, Artificial Sequence
  Description of Artificial Sequence: Synthetic oligonucleotide
gacccagaguccgaggggc

SEQ ID NO: 2721162 - RNA, 19 nt, Artificial Sequence
  Description of Artificial Sequence: Synthetic oligonucleotide
agaguggcaauggggacug

SEQ ID NO: 2721163 - RNA, 19 nt, Artificial Sequence
  Description of Artificial Sequence: Synthetic oligonucleotide
acgguggcuguugaccgcc

SEQ ID NO: 2721164 - RNA, 19 nt, Artificial Sequence
  Description of Artificial Sequence: Synthetic oligonucleotide
agaguuagcaggacgggau

SEQ ID NO: 2721165 - RNA, 19 nt, Artificial Sequence
  Description of Artificial Sequence: Synthetic oligonucleotide
ugagugacgguggcuguug

SEQ ID NO: 2721166 - RNA, 19 nt, Artificial Sequence
  Description of Artificial Sequence: Synthetic oligonucleotide
ugaagagcgggcgccgcag

SEQ ID NO: 2721167 - RNA, 19 nt, Artificial Sequence
  Description of Artificial Sequence: Synthetic oligonucleotide
uggagugggugauggggca

SEQ ID NO: 2721168 - RNA, 19 nt, Artificial Sequence
  Description of Artificial Sequence: Synthetic oligonucleotide
guuuggaugaaccgagccu

SEQ ID NO: 2721169 - RNA, 19 nt, Artificial Sequence
  Description of Artificial Sequence: Synthetic oligonucleotide
cuuugaguaugaagaggca

SEQ ID NO: 2721170 - RNA, 19 nt, Artificial Sequence
  Description of Artificial Sequence: Synthetic oligonucleotide
uuagcaggacgggaugaga

SEQ ID NO: 2721171 - RNA, 19 nt, Artificial Sequence
  Description of Artificial Sequence: Synthetic oligonucleotide
aggagguugccggugaaga

SEQ ID NO: 2721172 - RNA, 19 nt, Artificial Sequence
  Description of Artificial Sequence: Synthetic oligonucleotide
guuagcaggacgggaugag

SEQ ID NO: 2721173 - RNA, 19 nt, Artificial Sequence
  Description of Artificial Sequence: Synthetic oligonucleotide
ggaggugauggacccagag

SEQ ID NO: 2721174 - RNA, 19 nt, Artificial Sequence
  Description of Artificial Sequence: Synthetic oligonucleotide
cucccaugagaucccacug

SEQ ID NO: 2721175 - RNA, 19 nt, Artificial Sequence
  Description of Artificial Sequence: Synthetic oligonucleotide
uuuaggcgggguggcagag

SEQ ID NO: 2721176 - RNA, 19 nt, Artificial Sequence
  Description of Artificial Sequence: Synthetic oligonucleotide
aguggcggaggcugguuca

SEQ ID NO: 2721177 - RNA, 19 nt, Artificial Sequence
  Description of Artificial Sequence: Synthetic oligonucleotide
caggacgggaugagaggcg

SEQ ID NO: 2721178 - RNA, 19 nt, Artificial Sequence
  Description of Artificial Sequence: Synthetic oligonucleotide
uggggacuguugguguugg

SEQ ID NO: 2721179 - RNA, 19 nt, Artificial Sequence
  Description of Artificial Sequence: Synthetic oligonucleotide
agacaaacccuuggaauau

SEQ ID NO: 2721180 - RNA, 19 nt, Artificial Sequence
  Description of Artificial Sequence: Synthetic oligonucleotide
ugguucagaguuggccggg

SEQ ID NO: 2721181 - RNA, 19 nt, Artificial Sequence
  Description of Artificial Sequence: Synthetic oligonucleotide
ggaggcuaaacagaggcuc

SEQ ID NO: 2721182 - RNA, 19 nt, Artificial Sequence
  Description of Artificial Sequence: Synthetic oligonucleotide
aguuagcaggacgggauga

SEQ ID NO: 2721183 - RNA, 19 nt, Artificial Sequence
  Description of Artificial Sequence: Synthetic oligonucleotide
caauucuuaagucaauauu

SEQ ID NO: 2721184 - RNA, 19 nt, Artificial Sequence
  Description of Artificial Sequence: Synthetic oligonucleotide
ggcaggaaaguaagaaacc

SEQ ID NO: 2721185 - RNA, 19 nt, Artificial Sequence
  Description of Artificial Sequence: Synthetic oligonucleotide
acgcccacugugcucuagg

SEQ ID NO: 2721186 - RNA, 19 nt, Artificial Sequence
  Description of Artificial Sequence: Synthetic oligonucleotide
agucaauauuuuguacuaa

SEQ ID NO: 2721187 - RNA, 19 nt, Artificial Sequence
  Description of Artificial Sequence: Synthetic oligonucleotide
ugauggacccagaguccga

SEQ ID NO: 2721188 - RNA, 19 nt, Artificial Sequence
  Description of Artificial Sequence: Synthetic oligonucleotide
guggcaauggggacuguug

SEQ ID NO: 2721189 - RNA, 19 nt, Artificial Sequence
  Description of Artificial Sequence: Synthetic oligonucleotide
ugaaccgagccugcugcug

SEQ ID NO: 2721190 - RNA, 19 nt, Artificial Sequence
  Description of Artificial Sequence: Synthetic oligonucleotide
auggacccagaguccgagg

SEQ ID NO: 2721191 - RNA, 19 nt, Artificial Sequence
  Description of Artificial Sequence: Synthetic oligonucleotide
guuggccggguuuggauga

SEQ ID NO: 2721192 - RNA, 19 nt, Artificial Sequence
  Description of Artificial Sequence: Synthetic oligonucleotide
aagaggcaggaaaguaaga

SEQ ID NO: 2721193 - RNA, 19 nt, Artificial Sequence
  Description of Artificial Sequence: Synthetic oligonucleotide
aaucugucuggagucccaa

SEQ ID NO: 2721194 - RNA, 19 nt, Artificial Sequence
  Description of Artificial Sequence: Synthetic oligonucleotide
ggcaggaggugauggaccc

SEQ ID NO: 2721195 - RNA, 19 nt, Artificial Sequence
  Description of Artificial Sequence: Synthetic oligonucleotide
ugcaguggggacugugaau

SEQ ID NO: 2721196 - RNA, 19 nt, Artificial Sequence
  Description of Artificial Sequence: Synthetic oligonucleotide
gggacuguugguguuggag

SEQ ID NO: 2721197 - RNA, 19 nt, Artificial Sequence
  Description of Artificial Sequence: Synthetic oligonucleotide
cacuggugaacacuggaaa

SEQ ID NO: 2721198 - RNA, 19 nt, Artificial Sequence
  Description of Artificial Sequence: Synthetic oligonucleotide
uggucaggcacuggucuug

SEQ ID NO: 2721199 - RNA, 19 nt, Artificial Sequence
  Description of Artificial Sequence: Synthetic oligonucleotide
uacuaacagcuuugaguau

SEQ ID NO: 2721200 - RNA, 19 nt, Artificial Sequence
  Description of Artificial Sequence: Synthetic oligonucleotide
cuuuuccucccaugagauc

SEQ ID NO: 2721201 - RNA, 19 nt, Artificial Sequence
  Description of Artificial Sequence: Synthetic oligonucleotide
gacugugaaucugucugga

SEQ ID NO: 2721202 - RNA, 19 nt, Artificial Sequence
  Description of Artificial Sequence: Synthetic oligonucleotide
aucccacuggugaacacug

SEQ ID NO: 2721203 - RNA, 19 nt, Artificial Sequence
  Description of Artificial Sequence: Synthetic oligonucleotide
gacgguggcuguugaccgc

SEQ ID NO: 2721204 - RNA, 19 nt, Artificial Sequence
  Description of Artificial Sequence: Synthetic oligonucleotide
gccggguuuggaugaaccg

SEQ ID NO: 2721205 - RNA, 19 nt, Artificial Sequence
  Description of Artificial Sequence: Synthetic oligonucleotide
ggcacugccacaagugcag

SEQ ID NO: 2721206 - RNA, 19 nt, Artificial Sequence
  Description of Artificial Sequence: Synthetic oligonucleotide
ggcugguucagaguuggcc

SEQ ID NO: 2721207 - RNA, 19 nt, Artificial Sequence
  Description of Artificial Sequence: Synthetic oligonucleotide
gaguccgaggggccugugc

SEQ ID NO: 2721208 - RNA, 19 nt, Artificial Sequence
  Description of Artificial Sequence: Synthetic oligonucleotide
ggaugaaccgagccugcug

SEQ ID NO: 2721209 - RNA, 19 nt, Artificial Sequence
  Description of Artificial Sequence: Synthetic oligonucleotide
gaggugauggacccagagu

SEQ ID NO: 2721210 - RNA, 19 nt, Artificial Sequence
  Description of Artificial Sequence: Synthetic oligonucleotide
gcaguggggacugugaauc

SEQ ID NO: 2721211 - RNA, 19 nt, Artificial Sequence
  Description of Artificial Sequence: Synthetic oligonucleotide
ggagguugccggugaagag

SEQ ID NO: 2721212 - RNA, 19 nt, Artificial Sequence
  Description of Artificial Sequence: Synthetic oligonucleotide
gcagugucggacgaagaag

SEQ ID NO: 2721213 - RNA, 19 nt, Artificial Sequence
  Description of Artificial Sequence: Synthetic oligonucleotide
agugcaguggggacuguga

SEQ ID NO: 2721214 - RNA, 19 nt, Artificial Sequence
  Description of Artificial Sequence: Synthetic oligonucleotide
ggcuguugaccgccaaccg

SEQ ID NO: 2721215 - RNA, 19 nt, Artificial Sequence
  Description of Artificial Sequence: Synthetic oligonucleotide
cacugccacaagugcagug

SEQ ID NO: 2721216 - RNA, 19 nt, Artificial Sequence
  Description of Artificial Sequence: Synthetic oligonucleotide
gagcgggcgccgcaggcag

SEQ ID NO: 2721217 - RNA, 19 nt, Artificial Sequence
  Description of Artificial Sequence: Synthetic oligonucleotide
uggggacugugaaucuguc

SEQ ID NO: 2721218 - RNA, 19 nt, Artificial Sequence
  Description of Artificial Sequence: Synthetic oligonucleotide
cccuuggaauauagaaucc

SEQ ID NO: 2721219 - RNA, 19 nt, Artificial Sequence
  Description of Artificial Sequence: Synthetic oligonucleotide
cagugucggacgaagaagu

SEQ ID NO: 2721220 - RNA, 19 nt, Artificial Sequence
  Description of Artificial Sequence: Synthetic oligonucleotide
gagaucccacuggugaaca

SEQ ID NO: 2721221 - RNA, 19 nt, Artificial Sequence
  Description of Artificial Sequence: Synthetic oligonucleotide
ggugaacacuggaaaggag

SEQ ID NO: 2721222 - RNA, 19 nt, Artificial Sequence
  Description of Artificial Sequence: Synthetic oligonucleotide
gguuuaggcgggguggcag

SEQ ID NO: 2721223 - RNA, 19 nt, Artificial Sequence
  Description of Artificial Sequence: Synthetic oligonucleotide
ggacccagaguccgagggg

SEQ ID NO: 2721224 - RNA, 19 nt, Artificial Sequence
  Description of Artificial Sequence: Synthetic oligonucleotide
cucccugcggugucacgcc

SEQ ID NO: 2721225 - RNA, 19 nt, Artificial Sequence
  Description of Artificial Sequence: Synthetic oligonucleotide
guccgaggggccugugcgg

SEQ ID NO: 2721226 - RNA, 19 nt, Artificial Sequence
  Description of Artificial Sequence: Synthetic oligonucleotide
gcaggacgggaugagaggc

SEQ ID NO: 2721227 - RNA, 19 nt, Artificial Sequence
  Description of Artificial Sequence: Synthetic oligonucleotide
augaaccgagccugcugcu

SEQ ID NO: 2721228 - RNA, 19 nt, Artificial Sequence
  Description of Artificial Sequence: Synthetic oligonucleotide
ggugucacgcccacugugc

SEQ ID NO: 2721229 - RNA, 19 nt, Artificial Sequence
  Description of Artificial Sequence: Synthetic oligonucleotide
ugguguuggagugggugau

SEQ ID NO: 2721230 - RNA, 19 nt, Artificial Sequence
  Description of Artificial Sequence: Synthetic oligonucleotide
gcugcagcggaggagguug

SEQ ID NO: 2721231 - RNA, 19 nt, Artificial Sequence
  Description of Artificial Sequence: Synthetic oligonucleotide
ugucacgcccacugugcuc

SEQ ID NO: 2721232 - RNA, 19 nt, Artificial Sequence
  Description of Artificial Sequence: Synthetic oligonucleotide
ggcggaggcugguucagag

SEQ ID NO: 2721233 - RNA, 19 nt, Artificial Sequence
  Description of Artificial Sequence: Synthetic oligonucleotide
agugucggacgaagaagug

SEQ ID NO: 2721234 - RNA, 19 nt, Artificial Sequence
  Description of Artificial Sequence: Synthetic oligonucleotide
ggugauggacccagagucc

SEQ ID NO: 2721235 - RNA, 19 nt, Artificial Sequence
  Description of Artificial Sequence: Synthetic oligonucleotide
uggaugaaccgagccugcu

SEQ ID NO: 2721236 - RNA, 19 nt, Artificial Sequence
  Description of Artificial Sequence: Synthetic oligonucleotide
gucggacgaagaaguggcg

SEQ ID NO: 2721237 - RNA, 19 nt, Artificial Sequence
  Description of Artificial Sequence: Synthetic oligonucleotide
ucuuggguuuaggcggggu

SEQ ID NO: 2721238 - RNA, 19 nt, Artificial Sequence
  Description of Artificial Sequence: Synthetic oligonucleotide
ucccugcggugucacgccc

SEQ ID NO: 2721239 - RNA, 19 nt, Artificial Sequence
  Description of Artificial Sequence: Synthetic oligonucleotide
auggggacuguugguguug

SEQ ID NO: 2721240 - RNA, 19 nt, Artificial Sequence
  Description of Artificial Sequence: Synthetic oligonucleotide
uccucccaugagaucccac

SEQ ID NO: 2721241 - RNA, 19 nt, Artificial Sequence
  Description of Artificial Sequence: Synthetic oligonucleotide
ggccugugcggucugugcc

SEQ ID NO: 2721242 - RNA, 19 nt, Artificial Sequence
  Description of Artificial Sequence: Synthetic oligonucleotide
ggacgaagaaguggcggag

SEQ ID NO: 2721243 - RNA, 19 nt, Artificial Sequence
  Description of Artificial Sequence: Synthetic oligonucleotide
aaccguggucaggcacugg

SEQ ID NO: 2721244 - RNA, 19 nt, Artificial Sequence
  Description of Artificial Sequence: Synthetic oligonucleotide
cggguuuggaugaaccgag

SEQ ID NO: 2721245 - RNA, 19 nt, Artificial Sequence
  Description of Artificial Sequence: Synthetic oligonucleotide
gaguaugaagaggcaggaa

SEQ ID NO: 2721246 - RNA, 19 nt, Artificial Sequence
  Description of Artificial Sequence: Synthetic oligonucleotide
agaguuggccggguuugga

SEQ ID NO: 2721247 - RNA, 19 nt, Artificial Sequence
  Description of Artificial Sequence: Synthetic oligonucleotide
cagaguuggccggguuugg

SEQ ID NO: 2721248 - RNA, 19 nt, Artificial Sequence
  Description of Artificial Sequence: Synthetic oligonucleotide
uaacagcuuugaguaugaa

SEQ ID NO: 2721249 - RNA, 19 nt, Artificial Sequence
  Description of Artificial Sequence: Synthetic oligonucleotide
accgccaaccguggucagg

SEQ ID NO: 2721250 - RNA, 19 nt, Artificial Sequence
  Description of Artificial Sequence: Synthetic oligonucleotide
agaaguggcggaggcuggu

SEQ ID NO: 2721251 - RNA, 19 nt, Artificial Sequence
  Description of Artificial Sequence: Synthetic oligonucleotide
gagugacgguggcuguuga

SEQ ID NO: 2721252 - RNA, 19 nt, Artificial Sequence
  Description of Artificial Sequence: Synthetic oligonucleotide
ggagucccaaugagugacg

SEQ ID NO: 2721253 - RNA, 19 nt, Artificial Sequence
  Description of Artificial Sequence: Synthetic oligonucleotide
cugcagcggaggagguugc

SEQ ID NO: 2721254 - RNA, 19 nt, Artificial Sequence
  Description of Artificial Sequence: Synthetic oligonucleotide
ggaggcugguucagagugg

SEQ ID NO: 2721255 - RNA, 19 nt, Artificial Sequence
  Description of Artificial Sequence: Synthetic oligonucleotide
uuaggcgggguggcagaga

SEQ ID NO: 2721256 - RNA, 19 nt, Artificial Sequence
  Description of Artificial Sequence: Synthetic oligonucleotide
cacuggucuuggguuuagg

SEQ ID NO: 2721257 - RNA, 19 nt, Artificial Sequence
  Description of Artificial Sequence: Synthetic oligonucleotide
cccaaugagugacgguggc

SEQ ID NO: 2721258 - RNA, 19 nt, Artificial Sequence
  Description of Artificial Sequence: Synthetic oligonucleotide
cucuagggcacugccacaa

SEQ ID NO: 2721259 - RNA, 19 nt, Artificial Sequence
  Description of Artificial Sequence: Synthetic oligonucleotide
caauggggacuguuggugu

SEQ ID NO: 2721260 - RNA, 19 nt, Artificial Sequence
  Description of Artificial Sequence: Synthetic oligonucleotide
gcagcggaggagguugccg

SEQ ID NO: 2721261 - RNA, 19 nt, Artificial Sequence
  Description of Artificial Sequence: Synthetic oligonucleotide
gucacgcccacugugcucu

SEQ ID NO: 2721262 - RNA, 19 nt, Artificial Sequence
  Description of Artificial Sequence: Synthetic oligonucleotide
gcucccugcggugucacgc

SEQ ID NO: 2721263 - RNA, 19 nt, Artificial Sequence
  Description of Artificial Sequence: Synthetic oligonucleotide
gaguuggccggguuuggau

SEQ ID NO: 2721264 - RNA, 19 nt, Artificial Sequence
  Description of Artificial Sequence: Synthetic oligonucleotide
gcccacugugcucuagggc

SEQ ID NO: 2721265 - RNA, 19 nt, Artificial Sequence
  Description of Artificial Sequence: Synthetic oligonucleotide
gugaagagcgggcgccgca

SEQ ID NO: 2721266 - RNA, 19 nt, Artificial Sequence
  Description of Artificial Sequence: Synthetic oligonucleotide
acacuggaaaggaggcuaa

SEQ ID NO: 2721267 - RNA, 19 nt, Artificial Sequence
  Description of Artificial Sequence: Synthetic oligonucleotide
cuagggcacugccacaagu

SEQ ID NO: 2721268 - RNA, 19 nt, Artificial Sequence
  Description of Artificial Sequence: Synthetic oligonucleotide
gccaaccguggucaggcac

SEQ ID NO: 2721269 - RNA, 19 nt, Artificial Sequence
  Description of Artificial Sequence: Synthetic oligonucleotide
gggcaggaggugauggacc

SEQ ID NO: 2721270 - RNA, 19 nt, Artificial Sequence
  Description of Artificial Sequence: Synthetic oligonucleotide
caaccguggucaggcacug

SEQ ID NO: 2721271 - RNA, 19 nt, Artificial Sequence
  Description of Artificial Sequence: Synthetic oligonucleotide
ggccggguuuggaugaacc

SEQ ID NO: 2721272 - RNA, 19 nt, Artificial Sequence
  Description of Artificial Sequence: Synthetic oligonucleotide
ccacaagugcaguggggac

SEQ ID NO: 2721273 - RNA, 19 nt, Artificial Sequence
  Description of Artificial Sequence: Synthetic oligonucleotide
ccaugagaucccacuggug

SEQ ID NO: 2721274 - RNA, 19 nt, Artificial Sequence
  Description of Artificial Sequence: Synthetic oligonucleotide
agugggugauggggcagga

SEQ ID NO: 2721275 - RNA, 19 nt, Artificial Sequence
  Description of Artificial Sequence: Synthetic oligonucleotide
guggcggaggcugguucag

SEQ ID NO: 2721276 - RNA, 19 nt, Artificial Sequence
  Description of Artificial Sequence: Synthetic oligonucleotide
augagugacgguggcuguu

SEQ ID NO: 2721277 - RNA, 19 nt, Artificial Sequence
  Description of Artificial Sequence: Synthetic oligonucleotide
gugggugauggggcaggag

SEQ ID NO: 2721278 - RNA, 19 nt, Artificial Sequence
  Description of Artificial Sequence: Synthetic oligonucleotide
cacaagugcaguggggacu

SEQ ID NO: 2721279 - RNA, 19 nt, Artificial Sequence
  Description of Artificial Sequence: Synthetic oligonucleotide
ccgccaaccguggucaggc

SEQ ID NO: 2721280 - RNA, 19 nt, Artificial Sequence
  Description of Artificial Sequence: Synthetic oligonucleotide
gggccugugcggucugugc

SEQ ID NO: 2721281 - RNA, 19 nt, Artificial Sequence
  Description of Artificial Sequence: Synthetic oligonucleotide
gucuggagucccaaugagu

SEQ ID NO: 2721282 - RNA, 19 nt, Artificial Sequence
  Description of Artificial Sequence: Synthetic oligonucleotide
cagaguggcaauggggacu

SEQ ID NO: 2721283 - RNA, 19 nt, Artificial Sequence
  Description of Artificial Sequence: Synthetic oligonucleotide
cgggguggcagagaguuag

SEQ ID NO: 2721284 - RNA, 19 nt, Artificial Sequence
  Description of Artificial Sequence: Synthetic oligonucleotide
gcuguugaccgccaaccgu

SEQ ID NO: 2721285 - RNA, 19 nt, Artificial Sequence
  Description of Artificial Sequence: Synthetic oligonucleotide
gccggugaagagcgggcgc

SEQ ID NO: 2721286 - RNA, 19 nt, Artificial Sequence
  Description of Artificial Sequence: Synthetic oligonucleotide
ggguuuggaugaaccgagc

SEQ ID NO: 2721287 - RNA, 19 nt, Artificial Sequence
  Description of Artificial Sequence: Synthetic oligonucleotide
ccgcaggcagugucggacg

SEQ ID NO: 2721288 - RNA, 19 nt, Artificial Sequence
  Description of Artificial Sequence: Synthetic oligonucleotide
guggggacugugaaucugu

SEQ ID NO: 2721289 - RNA, 19 nt, Artificial Sequence
  Description of Artificial Sequence: Synthetic oligonucleotide
ggguggcagagaguuagca

SEQ ID NO: 2721290 - RNA, 19 nt, Artificial Sequence
  Description of Artificial Sequence: Synthetic oligonucleotide
ggugaagagcgggcgccgc

SEQ ID NO: 2721291 - RNA, 19 nt, Artificial Sequence
  Description of Artificial Sequence: Synthetic oligonucleotide
ccggugaagagcgggcgcc

SEQ ID NO: 2721292 - RNA, 19 nt, Artificial Sequence
  Description of Artificial Sequence: Synthetic oligonucleotide
cccacuggugaacacugga

SEQ ID NO: 2721293 - RNA, 19 nt, Artificial Sequence
  Description of Artificial Sequence: Synthetic oligonucleotide
ggcaauggggacuguuggu

SEQ ID NO: 2721294 - RNA, 19 nt, Artificial Sequence
  Description of Artificial Sequence: Synthetic oligonucleotide
gugucacgcccacugugcu

SEQ ID NO: 2721295 - RNA, 19 nt, Artificial Sequence
  Description of Artificial Sequence: Synthetic oligonucleotide
gaggggccugugcggucug

SEQ ID NO: 2721296 - RNA, 19 nt, Artificial Sequence
  Description of Artificial Sequence: Synthetic oligonucleotide
uggcggaggcugguucaga

SEQ ID NO: 2721297 - RNA, 19 nt, Artificial Sequence
  Description of Artificial Sequence: Synthetic oligonucleotide
ccacuggugaacacuggaa

SEQ ID NO: 2721298 - RNA, 19 nt, Artificial Sequence
  Description of Artificial Sequence: Synthetic oligonucleotide
uggccggguuuggaugaac

SEQ ID NO: 2721299 - RNA, 19 nt, Artificial Sequence
  Description of Artificial Sequence: Synthetic oligonucleotide
ggacgggaugagaggcggg

SEQ ID NO: 2721300 - RNA, 19 nt, Artificial Sequence
  Description of Artificial Sequence: Synthetic oligonucleotide
ugcugcagcggaggagguu

SEQ ID NO: 2721301 - RNA, 19 nt, Artificial Sequence
  Description of Artificial Sequence: Synthetic oligonucleotide
uuggccggguuuggaugaa

SEQ ID NO: 2721302 - RNA, 19 nt, Artificial Sequence
  Description of Artificial Sequence: Synthetic oligonucleotide
ccggguuuggaugaaccga

SEQ ID NO: 2721303 - RNA, 19 nt, Artificial Sequence
  Description of Artificial Sequence: Synthetic oligonucleotide
guugaccgccaaccguggu

SEQ ID NO: 2721304 - RNA, 19 nt, Artificial Sequence
  Description of Artificial Sequence: Synthetic oligonucleotide
ggggacugugaaucugucu

SEQ ID NO: 2721305 - RNA, 19 nt, Artificial Sequence
  Description of Artificial Sequence: Synthetic oligonucleotide
cgcccacugugcucuaggg

SEQ ID NO: 2721306 - RNA, 19 nt, Artificial Sequence
  Description of Artificial Sequence: Synthetic oligonucleotide
cggacgaagaaguggcgga

SEQ ID NO: 2721307 - RNA, 19 nt, Artificial Sequence
  Description of Artificial Sequence: Synthetic oligonucleotide
ccucccaugagaucccacu

SEQ ID NO: 2721308 - RNA, 19 nt, Artificial Sequence
  Description of Artificial Sequence: Synthetic oligonucleotide
cugcugcugcagcggagga

SEQ ID NO: 2721309 - RNA, 19 nt, Artificial Sequence
  Description of Artificial Sequence: Synthetic oligonucleotide
gcugguucagaguggcaau

SEQ ID NO: 2721310 - RNA, 19 nt, Artificial Sequence
  Description of Artificial Sequence: Synthetic oligonucleotide
ccaaccguggucaggcacu

SEQ ID NO: 2721311 - RNA, 19 nt, Artificial Sequence
  Description of Artificial Sequence: Synthetic oligonucleotide
gguugccggugaagagcgg

SEQ ID NO: 2721312 - RNA, 19 nt, Artificial Sequence
  Description of Artificial Sequence: Synthetic oligonucleotide
agaguccgaggggccugug

SEQ ID NO: 2721313 - RNA, 19 nt, Artificial Sequence
  Description of Artificial Sequence: Synthetic oligonucleotide
ggcgggguggcagagaguu

SEQ ID NO: 2721314 - RNA, 19 nt, Artificial Sequence
  Description of Artificial Sequence: Synthetic oligonucleotide
ccugcggugucacgcccac

SEQ ID NO: 2721315 - RNA, 19 nt, Artificial Sequence
  Description of Artificial Sequence: Synthetic oligonucleotide
cacuggaaaggaggcuaaa

SEQ ID NO: 2721316 - RNA, 19 nt, Artificial Sequence
  Description of Artificial Sequence: Synthetic oligonucleotide
cggugucacgcccacugug

SEQ ID NO: 2721317 - RNA, 19 nt, Artificial Sequence
  Description of Artificial Sequence: Synthetic oligonucleotide
ccguggucaggcacugguc

SEQ ID NO: 2721318 - RNA, 19 nt, Artificial Sequence
  Description of Artificial Sequence: Synthetic oligonucleotide
guggucaggcacuggucuu

SEQ ID NO: 2721319 - RNA, 19 nt, Artificial Sequence
  Description of Artificial Sequence: Synthetic oligonucleotide
guucagaguuggccggguu

SEQ ID NO: 2721320 - RNA, 19 nt, Artificial Sequence
  Description of Artificial Sequence: Synthetic oligonucleotide
gcacuggucuuggguuuag

SEQ ID NO: 2721321 - RNA, 19 nt, Artificial Sequence
  Description of Artificial Sequence: Synthetic oligonucleotide
gguggcuguugaccgccaa

SEQ ID NO: 2721322 - RNA, 19 nt, Artificial Sequence
  Description of Artificial Sequence: Synthetic oligonucleotide
gggguggcagagaguuagc

SEQ ID NO: 2721323 - RNA, 19 nt, Artificial Sequence
  Description of Artificial Sequence: Synthetic oligonucleotide
cccaugagaucccacuggu

SEQ ID NO: 2721324 - RNA, 19 nt, Artificial Sequence
  Description of Artificial Sequence: Synthetic oligonucleotide
gcggaggagguugccggug

SEQ ID NO: 2721325 - RNA, 19 nt, Artificial Sequence
  Description of Artificial Sequence: Synthetic oligonucleotide
aggcugguucagaguggca

SEQ ID NO: 2721326 - RNA, 19 nt, Artificial Sequence
  Description of Artificial Sequence: Synthetic oligonucleotide
gcgccgcaggcagugucgg

SEQ ID NO: 2721327 - RNA, 19 nt, Artificial Sequence
  Description of Artificial Sequence: Synthetic oligonucleotide
ggggccugugcggucugug

SEQ ID NO: 2721328 - RNA, 19 nt, Artificial Sequence
  Description of Artificial Sequence: Synthetic oligonucleotide
ccagaguccgaggggccug

SEQ ID NO: 2721329 - RNA, 19 nt, Artificial Sequence
  Description of Artificial Sequence: Synthetic oligonucleotide
gaaguggcggaggcugguu

SEQ ID NO: 2721330 - RNA, 19 nt, Artificial Sequence
  Description of Artificial Sequence: Synthetic oligonucleotide
ggggaggcugguucagagu

SEQ ID NO: 2721331 - RNA, 19 nt, Artificial Sequence
  Description of Artificial Sequence: Synthetic oligonucleotide
ggcuaaacagaggcucccu

SEQ ID NO: 2721332 - RNA, 19 nt, Artificial Sequence
  Description of Artificial Sequence: Synthetic oligonucleotide
gggcgccgcaggcaguguc

SEQ ID NO: 2721333 - RNA, 19 nt, Artificial Sequence
  Description of Artificial Sequence: Synthetic oligonucleotide
cguggucaggcacuggucu

SEQ ID NO: 2721334 - RNA, 19 nt, Artificial Sequence
  Description of Artificial Sequence: Synthetic oligonucleotide
gccugugcggucugugccu

SEQ ID NO: 2721335 - RNA, 19 nt, Artificial Sequence
  Description of Artificial Sequence: Synthetic oligonucleotide
ggggacuguugguguugga

SEQ ID NO: 2721336 - RNA, 19 nt, Artificial Sequence
  Description of Artificial Sequence: Synthetic oligonucleotide
gcgggcgccgcaggcagug

SEQ ID NO: 2721337 - RNA, 19 nt, Artificial Sequence
  Description of Artificial Sequence: Synthetic oligonucleotide
ggguuuaggcgggguggca

SEQ ID NO: 2721338 - RNA, 19 nt, Artificial Sequence
  Description of Artificial Sequence: Synthetic oligonucleotide
aggggccugugcggucugu

SEQ ID NO: 2721339 - RNA, 19 nt, Artificial Sequence
  Description of Artificial Sequence: Synthetic oligonucleotide
cagaggcucccugcggugu

SEQ ID NO: 2721340 - RNA, 19 nt, Artificial Sequence
  Description of Artificial Sequence: Synthetic oligonucleotide
ggcacuggucuuggguuua

SEQ ID NO: 2721341 - RNA, 19 nt, Artificial Sequence
  Description of Artificial Sequence: Synthetic oligonucleotide
ccugugcggucugugccuc

SEQ ID NO: 2721342 - RNA, 19 nt, Artificial Sequence
  Description of Artificial Sequence: Synthetic oligonucleotide
gcaggaggugauggaccca

SEQ ID NO: 2721343 - RNA, 19 nt, Artificial Sequence
  Description of Artificial Sequence: Synthetic oligonucleotide
gcggaggcugguucagagu

SEQ ID NO: 2721344 - RNA, 19 nt, Artificial Sequence
  Description of Artificial Sequence: Synthetic oligonucleotide
aggcgggguggcagagagu

SEQ ID NO: 2721345 - RNA, 19 nt, Artificial Sequence
  Description of Artificial Sequence: Synthetic oligonucleotide
gguucagaguuggccgggu

SEQ ID NO: 2721346 - RNA, 19 nt, Artificial Sequence
  Description of Artificial Sequence: Synthetic oligonucleotide
cugcugcagcggaggaggu

SEQ ID NO: 2721347 - RNA, 19 nt, Artificial Sequence
  Description of Artificial Sequence: Synthetic oligonucleotide
cccugcggugucacgccca

SEQ ID NO: 2721348 - RNA, 19 nt, Artificial Sequence
  Description of Artificial Sequence: Synthetic oligonucleotide
ccaaugagugacgguggcu

SEQ ID NO: 2721349 - RNA, 19 nt, Artificial Sequence
  Description of Artificial Sequence: Synthetic oligonucleotide
cggaggagguugccgguga

SEQ ID NO: 2721350 - RNA, 19 nt, Artificial Sequence
  Description of Artificial Sequence: Synthetic oligonucleotide
agcgggcgccgcaggcagu

SEQ ID NO: 2721351 - RNA, 19 nt, Artificial Sequence
  Description of Artificial Sequence: Synthetic oligonucleotide
cagaguccgaggggccugu

SEQ ID NO: 2721352 - RNA, 19 nt, Artificial Sequence
  Description of Artificial Sequence: Synthetic oligonucleotide
gcggugucacgcccacugu

SEQ ID NO: 2721353 - RNA, 19 nt, Artificial Sequence
  Description of Artificial Sequence: Synthetic oligonucleotide
ccgaggggccugugcgguc

SEQ ID NO: 2721354 - RNA, 19 nt, Artificial Sequence
  Description of Artificial Sequence: Synthetic oligonucleotide
cgcaggcagugucggacga

SEQ ID NO: 2721355 - RNA, 19 nt, Artificial Sequence
  Description of Artificial Sequence: Synthetic oligonucleotide
gcacugccacaagugcagu

SEQ ID NO: 2721356 - RNA, 19 nt, Artificial Sequence
  Description of Artificial Sequence: Synthetic oligonucleotide
caagugcaguggggacugu

SEQ ID NO: 2721357 - RNA, 19 nt, Artificial Sequence
  Description of Artificial Sequence: Synthetic oligonucleotide
cugcggugucacgcccacu

SEQ ID NO: 2721358 - RNA, 19 nt, Artificial Sequence
  Description of Artificial Sequence: Synthetic oligonucleotide
gcgggguggcagagaguua

SEQ ID NO: 2721359 - RNA, 19 nt, Artificial Sequence
  Description of Artificial Sequence: Synthetic oligonucleotide
cgccaaccguggucaggca

SEQ ID NO: 2721360 - RNA, 19 nt, Artificial Sequence
  Description of Artificial Sequence: Synthetic oligonucleotide
cgguggcuguugaccgcca

SEQ ID NO: 2721361 - RNA, 19 nt, Artificial Sequence
  Description of Artificial Sequence: Synthetic oligonucleotide
cuaacagacaauaugauac

SEQ ID NO: 2721362 - RNA, 19 nt, Artificial Sequence
  Description of Artificial Sequence: Synthetic oligonucleotide
aauggacuggaucugcugc

SEQ ID NO: 2721363 - RNA, 19 nt, Artificial Sequence
  Description of Artificial Sequence: Synthetic oligonucleotide
aaaccuuacaugcuaacag

SEQ ID NO: 2721364 - RNA, 19 nt, Artificial Sequence
  Description of Artificial Sequence: Synthetic oligonucleotide
aacagugacauucugccuc

SEQ ID NO: 2721365 - RNA, 19 nt, Artificial Sequence
  Description of Artificial Sequence: Synthetic oligonucleotide
aaauacauaggggacauuc

SEQ ID NO: 2721366 - RNA, 19 nt, Artificial Sequence
  Description of Artificial Sequence: Synthetic oligonucleotide
uaaacagugacauucugcc

SEQ ID NO: 2721367 - RNA, 19 nt, Artificial Sequence
  Description of Artificial Sequence: Synthetic oligonucleotide
auuuacaucagccucuguc

SEQ ID NO: 2721368 - RNA, 19 nt, Artificial Sequence
  Description of Artificial Sequence: Synthetic oligonucleotide
aauagaaaguggcugaaaa

SEQ ID NO: 2721369 - RNA, 19 nt, Artificial Sequence
  Description of Artificial Sequence: Synthetic oligonucleotide
uauaauagaaaguggcuga

SEQ ID NO: 2721370 - RNA, 19 nt, Artificial Sequence
  Description of Artificial Sequence: Synthetic oligonucleotide
gacaauaugauacacaagu

SEQ ID NO: 2721371 - RNA, 19 nt, Artificial Sequence
  Description of Artificial Sequence: Synthetic oligonucleotide
uuugaugguaacagaacag

SEQ ID NO: 2721372 - RNA, 19 nt, Artificial Sequence
  Description of Artificial Sequence: Synthetic oligonucleotide
uguguaaacagugacauuc

SEQ ID NO: 2721373 - RNA, 19 nt, Artificial Sequence
  Description of Artificial Sequence: Synthetic oligonucleotide
ugucuauaauagaaagugg

SEQ ID NO: 2721374 - RNA, 19 nt, Artificial Sequence
  Description of Artificial Sequence: Synthetic oligonucleotide
caggccuacaccaagagcc

SEQ ID NO: 2721375 - RNA, 19 nt, Artificial Sequence
  Description of Artificial Sequence: Synthetic oligonucleotide
auagaaaguggcugaaaac

SEQ ID NO: 2721376 - RNA, 19 nt, Artificial Sequence
  Description of Artificial Sequence: Synthetic oligonucleotide
ucuauaauagaaaguggcu

SEQ ID NO: 2721377 - RNA, 19 nt, Artificial Sequence
  Description of Artificial Sequence: Synthetic oligonucleotide
agaacagcccaccucagac

SEQ ID NO: 2721378 - RNA, 19 nt, Artificial Sequence
  Description of Artificial Sequence: Synthetic oligonucleotide
uuuacaucagccucuguca

SEQ ID NO: 2721379 - RNA, 19 nt, Artificial Sequence
  Description of Artificial Sequence: Synthetic oligonucleotide
cugucuauaauagaaagug

SEQ ID NO: 2721380 - RNA, 19 nt, Artificial Sequence
  Description of Artificial Sequence: Synthetic oligonucleotide
gacaggaaagggcagaggc

SEQ ID NO: 2721381 - RNA, 19 nt, Artificial Sequence
  Description of Artificial Sequence: Synthetic oligonucleotide
auaguuacaggacugcuga

SEQ ID NO: 2721382 - RNA, 19 nt, Artificial Sequence
  Description of Artificial Sequence: Synthetic oligonucleotide
caugcuaacagacaauaug

SEQ ID NO: 2721383 - RNA, 19 nt, Artificial Sequence
  Description of Artificial Sequence: Synthetic oligonucleotide
uauaguuacaggacugcug

SEQ ID NO: 2721384 - RNA, 19 nt, Artificial Sequence
  Description of Artificial Sequence: Synthetic oligonucleotide
ucagagaugccccuguuga

SEQ ID NO: 2721385 - RNA, 19 nt, Artificial Sequence
  Description of Artificial Sequence: Synthetic oligonucleotide
agcgcacaaauacauaggg

SEQ ID NO: 2721386 - RNA, 19 nt, Artificial Sequence
  Description of Artificial Sequence: Synthetic oligonucleotide
aucacaaugaacucagaga

SEQ ID NO: 2721387 - RNA, 19 nt, Artificial Sequence
  Description of Artificial Sequence: Synthetic oligonucleotide
aacagacaauaugauacac

SEQ ID NO: 2721388 - RNA, 19 nt, Artificial Sequence
  Description of Artificial Sequence: Synthetic oligonucleotide
uuuccgaagcugcuuauag

SEQ ID NO: 2721389 - RNA, 19 nt, Artificial Sequence
  Description of Artificial Sequence: Synthetic oligonucleotide
aacagcccaccucagacag

SEQ ID NO: 2721390 - RNA, 19 nt, Artificial Sequence
  Description of Artificial Sequence: Synthetic oligonucleotide
ucaauggacugcugaaugg

SEQ ID NO: 2721391 - RNA, 19 nt, Artificial Sequence
  Description of Artificial Sequence: Synthetic oligonucleotide
ucaccugucuauaauagaa

SEQ ID NO: 2721392 - RNA, 19 nt, Artificial Sequence
  Description of Artificial Sequence: Synthetic oligonucleotide
gcugcuuuaacugagagcc

SEQ ID NO: 2721393 - RNA, 19 nt, Artificial Sequence
  Description of Artificial Sequence: Synthetic oligonucleotide
gucuauaauagaaaguggc

SEQ ID NO: 2721394 - RNA, 19 nt, Artificial Sequence
  Description of Artificial Sequence: Synthetic oligonucleotide
auaugauacacaaguaggg

SEQ ID NO: 2721395 - RNA, 19 nt, Artificial Sequence
  Description of Artificial Sequence: Synthetic oligonucleotide
uucuuugaugguaacagaa

SEQ ID NO: 2721396 - RNA, 19 nt, Artificial Sequence
  Description of Artificial Sequence: Synthetic oligonucleotide
ugcugaauggacuggaucu

SEQ ID NO: 2721397 - RNA, 19 nt, Artificial Sequence
  Description of Artificial Sequence: Synthetic oligonucleotide
ucucaccugucuauaauag

SEQ ID NO: 2721398 - RNA, 19 nt, Artificial Sequence
  Description of Artificial Sequence: Synthetic oligonucleotide
accugucuauaauagaaag

SEQ ID NO: 2721399 - RNA, 19 nt, Artificial Sequence
  Description of Artificial Sequence: Synthetic oligonucleotide
uuaacugagagccuucuuu

SEQ ID NO: 2721400 - RNA, 19 nt, Artificial Sequence
  Description of Artificial Sequence: Synthetic oligonucleotide
cuucggauuuacaucagcc

SEQ ID NO: 2721401 - RNA, 19 nt, Artificial Sequence
  Description of Artificial Sequence: Synthetic oligonucleotide
aaccuuacaugcuaacaga

SEQ ID NO: 2721402 - RNA, 19 nt, Artificial Sequence
  Description of Artificial Sequence: Synthetic oligonucleotide
augguaacagaacaggcga

SEQ ID NO: 2721403 - RNA, 19 nt, Artificial Sequence
  Description of Artificial Sequence: Synthetic oligonucleotide
gacauucuugucuucacac

SEQ ID NO: 2721404 - RNA, 19 nt, Artificial Sequence
  Description of Artificial Sequence: Synthetic oligonucleotide
ugcuuauaguuacaggacu

SEQ ID NO: 2721405 - RNA, 19 nt, Artificial Sequence
  Description of Artificial Sequence: Synthetic oligonucleotide
guagggugggaacagacag

SEQ ID NO: 2721406 - RNA, 19 nt, Artificial Sequence
  Description of Artificial Sequence: Synthetic oligonucleotide
cauucuugucuucacacag

SEQ ID NO: 2721407 - RNA, 19 nt, Artificial Sequence
  Description of Artificial Sequence: Synthetic oligonucleotide
aaaaccuuacaugcuaaca

SEQ ID NO: 2721408 - RNA, 19 nt, Artificial Sequence
  Description of Artificial Sequence: Synthetic oligonucleotide
ugaacaagguccagcagcu

SEQ ID NO: 2721409 - RNA, 19 nt, Artificial Sequence
  Description of Artificial Sequence: Synthetic oligonucleotide
caucacaaugaacucagag

SEQ ID NO: 2721410 - RNA, 19 nt, Artificial Sequence
  Description of Artificial Sequence: Synthetic oligonucleotide
cuggauaccccacaggccc

SEQ ID NO: 2721411 - RNA, 19 nt, Artificial Sequence
  Description of Artificial Sequence: Synthetic oligonucleotide
auaggggacauucuugucu

SEQ ID NO: 2721412 - RNA, 19 nt, Artificial Sequence
  Description of Artificial Sequence: Synthetic oligonucleotide
guuuugguugcuucauugg

SEQ ID NO: 2721413 - RNA, 19 nt, Artificial Sequence
  Description of Artificial Sequence: Synthetic oligonucleotide
uaacugagagccuucuuug

SEQ ID NO: 2721414 - RNA, 19 nt, Artificial Sequence
  Description of Artificial Sequence: Synthetic oligonucleotide
ucggauuuacaucagccuc

SEQ ID NO: 2721415 - RNA, 19 nt, Artificial Sequence
  Description of Artificial Sequence: Synthetic oligonucleotide
ggcugaaaaccuuacaugc

SEQ ID NO: 2721416 - RNA, 19 nt, Artificial Sequence
  Description of Artificial Sequence: Synthetic oligonucleotide
aggacugcugaacaagguc

SEQ ID NO: 2721417 - RNA, 19 nt, Artificial Sequence
  Description of Artificial Sequence: Synthetic oligonucleotide
uguaaacagugacauucug

SEQ ID NO: 2721418 - RNA, 19 nt, Artificial Sequence
  Description of Artificial Sequence: Synthetic oligonucleotide
cuguugaggguuuugguug

SEQ ID NO: 2721419 - RNA, 19 nt, Artificial Sequence
  Description of Artificial Sequence: Synthetic oligonucleotide
gucuggauaccccacaggc

SEQ ID NO: 2721420 - RNA, 19 nt, Artificial Sequence
  Description of Artificial Sequence: Synthetic oligonucleotide
uaugauacacaaguagggu

SEQ ID NO: 2721421 - RNA, 19 nt, Artificial Sequence
  Description of Artificial Sequence: Synthetic oligonucleotide
uacaccaagagccucucaa

SEQ ID NO: 2721422 - RNA, 19 nt, Artificial Sequence
  Description of Artificial Sequence: Synthetic oligonucleotide
aguuacaggacugcugaac

SEQ ID NO: 2721423 - RNA, 19 nt, Artificial Sequence
  Description of Artificial Sequence: Synthetic oligonucleotide
aauggacugcugaauggac

SEQ ID NO: 2721424 - RNA, 19 nt, Artificial Sequence
  Description of Artificial Sequence: Synthetic oligonucleotide
acaggcccguccuagggcc

SEQ ID NO: 2721425 - RNA, 19 nt, Artificial Sequence
  Description of Artificial Sequence: Synthetic oligonucleotide
ggagcgcacaaauacauag

SEQ ID NO: 2721426 - RNA, 19 nt, Artificial Sequence
  Description of Artificial Sequence: Synthetic oligonucleotide
uccuguguaaacagugaca

SEQ ID NO: 2721427 - RNA, 19 nt, Artificial Sequence
  Description of Artificial Sequence: Synthetic oligonucleotide
uggacugcugaauggacug

SEQ ID NO: 2721428 - RNA, 19 nt, Artificial Sequence
  Description of Artificial Sequence: Synthetic oligonucleotide
uucggauuuacaucagccu

SEQ ID NO: 2721429 - RNA, 19 nt, Artificial Sequence
  Description of Artificial Sequence: Synthetic oligonucleotide
cagacaauaugauacacaa

SEQ ID NO: 2721430 - RNA, 19 nt, Artificial Sequence
  Description of Artificial Sequence: Synthetic oligonucleotide
guaaacagugacauucugc

SEQ ID NO: 2721431 - RNA, 19 nt, Artificial Sequence
  Description of Artificial Sequence: Synthetic oligonucleotide
acauaggggacauucuugu

SEQ ID NO: 2721432 - RNA, 19 nt, Artificial Sequence
  Description of Artificial Sequence: Synthetic oligonucleotide
gcugcuuauaguuacagga

SEQ ID NO: 2721433 - RNA, 19 nt, Artificial Sequence
  Description of Artificial Sequence: Synthetic oligonucleotide
aaguagggugggaacagac

SEQ ID NO: 2721434 - RNA, 19 nt, Artificial Sequence
  Description of Artificial Sequence: Synthetic oligonucleotide
ugaaaaccuuacaugcuaa

SEQ ID NO: 2721435 - RNA, 19 nt, Artificial Sequence
  Description of Artificial Sequence: Synthetic oligonucleotide
acaggccuacaccaagagc

SEQ ID NO: 2721436 - RNA, 19 nt, Artificial Sequence
  Description of Artificial Sequence: Synthetic oligonucleotide
acacaaguagggugggaac

SEQ ID NO: 2721437 - RNA, 19 nt, Artificial Sequence
  Description of Artificial Sequence: Synthetic oligonucleotide
cuuauaguuacaggacugc

SEQ ID NO: 2721438 - RNA, 19 nt, Artificial Sequence
  Description of Artificial Sequence: Synthetic oligonucleotide
uuccuguguaaacagugac

SEQ ID NO: 2721439 - RNA, 19 nt, Artificial Sequence
  Description of Artificial Sequence: Synthetic oligonucleotide
augcuaacagacaauauga

SEQ ID NO: 2721440 - RNA, 19 nt, Artificial Sequence
  Description of Artificial Sequence: Synthetic oligonucleotide
ucuggauaccccacaggcc

SEQ ID NO: 2721441 - RNA, 19 nt, Artificial Sequence
  Description of Artificial Sequence: Synthetic oligonucleotide
uucauuggcuccuuuccga

SEQ ID NO: 2721442 - RNA, 19 nt, Artificial Sequence
  Description of Artificial Sequence: Synthetic oligonucleotide
gucuucacacagcaguggg

SEQ ID NO: 2721443 - RNA, 19 nt, Artificial Sequence
  Description of Artificial Sequence: Synthetic oligonucleotide
uccgaagcugcuuauaguu

SEQ ID NO: 2721444 - RNA, 19 nt, Artificial Sequence
  Description of Artificial Sequence: Synthetic oligonucleotide
agaacaggcgaugacaggu

SEQ ID NO: 2721445 - RNA, 19 nt, Artificial Sequence
  Description of Artificial Sequence: Synthetic oligonucleotide
uaggccuucggauuuacau

SEQ ID NO: 2721446 - RNA, 19 nt, Artificial Sequence
  Description of Artificial Sequence: Synthetic oligonucleotide
cuucauuggcuccuuuccg

SEQ ID NO: 2721447 - RNA, 19 nt, Artificial Sequence
  Description of Artificial Sequence: Synthetic oligonucleotide
aaagaacagcggaagucuc

SEQ ID NO: 2721448 - RNA, 19 nt, Artificial Sequence
  Description of Artificial Sequence: Synthetic oligonucleotide
aauacauaggggacauucu

SEQ ID NO: 2721449 - RNA, 19 nt, Artificial Sequence
  Description of Artificial Sequence: Synthetic oligonucleotide
aggaugaucuccaagggcu

SEQ ID NO: 2721450 - RNA, 19 nt, Artificial Sequence
  Description of Artificial Sequence: Synthetic oligonucleotide
gaucuccaagggcucagcg

SEQ ID NO: 2721451 - RNA, 19 nt, Artificial Sequence
  Description of Artificial Sequence: Synthetic oligonucleotide
uuggagcgcacaaauacau

SEQ ID NO: 2721452 - RNA, 19 nt, Artificial Sequence
  Description of Artificial Sequence: Synthetic oligonucleotide
aggccuucggauuuacauc

SEQ ID NO: 2721453 - RNA, 19 nt, Artificial Sequence
  Description of Artificial Sequence: Synthetic oligonucleotide
guuacaggacugcugaaca

SEQ ID NO: 2721454 - RNA, 19 nt, Artificial Sequence
  Description of Artificial Sequence: Synthetic oligonucleotide
uagggugggaacagacagg

SEQ ID NO: 2721455 - RNA, 19 nt, Artificial Sequence
  Description of Artificial Sequence: Synthetic oligonucleotide
agagaugccccuguugagg

SEQ ID NO: 2721456 - RNA, 19 nt, Artificial Sequence
  Description of Artificial Sequence: Synthetic oligonucleotide
aaacagugacauucugccu

SEQ ID NO: 2721457 - RNA, 19 nt, Artificial Sequence
  Description of Artificial Sequence: Synthetic oligonucleotide
agacagaacgaaacgccgc

SEQ ID NO: 2721458 - RNA, 19 nt, Artificial Sequence
  Description of Artificial Sequence: Synthetic oligonucleotide
agcugcuuauaguuacagg

SEQ ID NO: 2721459 - RNA, 19 nt, Artificial Sequence
  Description of Artificial Sequence: Synthetic oligonucleotide
agaacgaaacgccgcgcgg

SEQ ID NO: 2721460 - RNA, 19 nt, Artificial Sequence
  Description of Artificial Sequence: Synthetic oligonucleotide
uguugaggguuuugguugc

SEQ ID NO: 2721461 - RNA, 19 nt, Artificial Sequence
  Description of Artificial Sequence: Synthetic oligonucleotide
aacaggcgaugacaggucu

SEQ ID NO: 2721462 - RNA, 19 nt, Artificial Sequence
  Description of Artificial Sequence: Synthetic oligonucleotide
aacugagagccuucuuuga

SEQ ID NO: 2721463 - RNA, 19 nt, Artificial Sequence
  Description of Artificial Sequence: Synthetic oligonucleotide
acaggaaagggcagaggcc

SEQ ID NO: 2721464 - RNA, 19 nt, Artificial Sequence
  Description of Artificial Sequence: Synthetic oligonucleotide
ugucuucacacagcagugg

SEQ ID NO: 2721465 - RNA, 19 nt, Artificial Sequence
  Description of Artificial Sequence: Synthetic oligonucleotide
uuauaguuacaggacugcu

SEQ ID NO: 2721466 - RNA, 19 nt, Artificial Sequence
  Description of Artificial Sequence: Synthetic oligonucleotide
gaauggacuggaucugcug

SEQ ID NO: 2721467 - RNA, 19 nt, Artificial Sequence
  Description of Artificial Sequence: Synthetic oligonucleotide
gguuuugguugcuucauug

SEQ ID NO: 2721468 - RNA, 19 nt, Artificial Sequence
  Description of Artificial Sequence: Synthetic oligonucleotide
cagaacgaaacgccgcgcg

SEQ ID NO: 2721469 - RNA, 19 nt, Artificial Sequence
  Description of Artificial Sequence: Synthetic oligonucleotide
ugcuaacagacaauaugau

SEQ ID NO: 2721470 - RNA, 19 nt, Artificial Sequence
  Description of Artificial Sequence: Synthetic oligonucleotide
ugaauggacuggaucugcu

SEQ ID NO: 2721471 - RNA, 19 nt, Artificial Sequence
  Description of Artificial Sequence: Synthetic oligonucleotide
ucuucacacagcaguggga

SEQ ID NO: 2721472 - RNA, 19 nt, Artificial Sequence
  Description of Artificial Sequence: Synthetic oligonucleotide
acagaacaggcgaugacag

SEQ ID NO: 2721473 - RNA, 19 nt, Artificial Sequence
  Description of Artificial Sequence: Synthetic oligonucleotide
auacauaggggacauucuu

SEQ ID NO: 2721474 - RNA, 19 nt, Artificial Sequence
  Description of Artificial Sequence: Synthetic oligonucleotide
cuagggccugcuuggagcg

SEQ ID NO: 2721475 - RNA, 19 nt, Artificial Sequence
  Description of Artificial Sequence: Synthetic oligonucleotide
uacacaaguagggugggaa

SEQ ID NO: 2721476 - RNA, 19 nt, Artificial Sequence
  Description of Artificial Sequence: Synthetic oligonucleotide
agagccucucaauggacug

SEQ ID NO: 2721477 - RNA, 19 nt, Artificial Sequence
  Description of Artificial Sequence: Synthetic oligonucleotide
acauucuugucuucacaca

SEQ ID NO: 2721478 - RNA, 19 nt, Artificial Sequence
  Description of Artificial Sequence: Synthetic oligonucleotide
ucuugucuucacacagcag

SEQ ID NO: 2721479 - RNA, 19 nt, Artificial Sequence
  Description of Artificial Sequence: Synthetic oligonucleotide
aaguggcugaaaaccuuac

SEQ ID NO: 2721480 - RNA, 19 nt, Artificial Sequence
  Description of Artificial Sequence: Synthetic oligonucleotide
uuacaugcuaacagacaau

SEQ ID NO: 2721481 - RNA, 19 nt, Artificial Sequence
  Description of Artificial Sequence: Synthetic oligonucleotide
ugggaacagacaggaaagg

SEQ ID NO: 2721482 - RNA, 19 nt, Artificial Sequence
  Description of Artificial Sequence: Synthetic oligonucleotide
caggaugaucuccaagggc

SEQ ID NO: 2721483 - RNA, 19 nt, Artificial Sequence
  Description of Artificial Sequence: Synthetic oligonucleotide
gcuuggagcgcacaaauac

SEQ ID NO: 2721484 - RNA, 19 nt, Artificial Sequence
  Description of Artificial Sequence: Synthetic oligonucleotide
gagcgcacaaauacauagg

SEQ ID NO: 2721485 - RNA, 19 nt, Artificial Sequence
  Description of Artificial Sequence: Synthetic oligonucleotide
gaaagaacagcggaagucu

SEQ ID NO: 2721486 - RNA, 19 nt, Artificial Sequence
  Description of Artificial Sequence: Synthetic oligonucleotide
ugagcaucugccaggggau

SEQ ID NO: 2721487 - RNA, 19 nt, Artificial Sequence
  Description of Artificial Sequence: Synthetic oligonucleotide
uuacaucagccucugucau

SEQ ID NO: 2721488 - RNA, 19 nt, Artificial Sequence
  Description of Artificial Sequence: Synthetic oligonucleotide
agaaaguggcugaaaaccu

SEQ ID NO: 2721489 - RNA, 19 nt, Artificial Sequence
  Description of Artificial Sequence: Synthetic oligonucleotide
uucacacagcagugggagg

SEQ ID NO: 2721490 - RNA, 19 nt, Artificial Sequence
  Description of Artificial Sequence: Synthetic oligonucleotide
ugacaggucuggauacccc

SEQ ID NO: 2721491 - RNA, 19 nt, Artificial Sequence
  Description of Artificial Sequence: Synthetic oligonucleotide
gcccaccucagacagaacg

SEQ ID NO: 2721492 - RNA, 19 nt, Artificial Sequence
  Description of Artificial Sequence: Synthetic oligonucleotide
auaccccacaggcccgucc

SEQ ID NO: 2721493 - RNA, 19 nt, Artificial Sequence
  Description of Artificial Sequence: Synthetic oligonucleotide
acaaauacauaggggacau

SEQ ID NO: 2721494 - RNA, 19 nt, Artificial Sequence
  Description of Artificial Sequence: Synthetic oligonucleotide
ugccaucacaaugaacuca

SEQ ID NO: 2721495 - RNA, 19 nt, Artificial Sequence
  Description of Artificial Sequence: Synthetic oligonucleotide
acaggacugcugaacaagg

SEQ ID NO: 2721496 - RNA, 19 nt, Artificial Sequence
  Description of Artificial Sequence: Synthetic oligonucleotide
acaaguagggugggaacag

SEQ ID NO: 2721497 - RNA, 19 nt, Artificial Sequence
  Description of Artificial Sequence: Synthetic oligonucleotide
uggauaccccacaggcccg

SEQ ID NO: 2721498 - RNA, 19 nt, Artificial Sequence
  Description of Artificial Sequence: Synthetic oligonucleotide
aagggcucagcgucugcug

SEQ ID NO: 2721499 - RNA, 19 nt, Artificial Sequence
  Description of Artificial Sequence: Synthetic oligonucleotide
aagagccucucaauggacu

SEQ ID NO: 2721500 - RNA, 19 nt, Artificial Sequence
  Description of Artificial Sequence: Synthetic oligonucleotide
ggugggaacagacaggaaa

SEQ ID NO: 2721501 - RNA, 19 nt, Artificial Sequence
  Description of Artificial Sequence: Synthetic oligonucleotide
gacaggucuggauacccca

SEQ ID NO: 2721502 - RNA, 19 nt, Artificial Sequence
  Description of Artificial Sequence: Synthetic oligonucleotide
acagaacgaaacgccgcgc

SEQ ID NO: 2721503 - RNA, 19 nt, Artificial Sequence
  Description of Artificial Sequence: Synthetic oligonucleotide
acugagagccuucuuugau

SEQ ID NO: 2721504 - RNA, 19 nt, Artificial Sequence
  Description of Artificial Sequence: Synthetic oligonucleotide
ucagcgucugcugccauca

SEQ ID NO: 2721505 - RNA, 19 nt, Artificial Sequence
  Description of Artificial Sequence: Synthetic oligonucleotide
gcuucauuggcuccuuucc

SEQ ID NO: 2721506 - RNA, 19 nt, Artificial Sequence
  Description of Artificial Sequence: Synthetic oligonucleotide
aggucuggauaccccacag

SEQ ID NO: 2721507 - RNA, 19 nt, Artificial Sequence
  Description of Artificial Sequence: Synthetic oligonucleotide
gacauucugccucucaccu

SEQ ID NO: 2721508 - RNA, 19 nt, Artificial Sequence
  Description of Artificial Sequence: Synthetic oligonucleotide
aagaacagcggaagucucu

SEQ ID NO: 2721509 - RNA, 19 nt, Artificial Sequence
  Description of Artificial Sequence: Synthetic oligonucleotide
ugcuucauuggcuccuuuc

SEQ ID NO: 2721510 - RNA, 19 nt, Artificial Sequence
  Description of Artificial Sequence: Synthetic oligonucleotide
uccgagaacagcccaccuc

SEQ ID NO: 2721511 - RNA, 19 nt, Artificial Sequence
  Description of Artificial Sequence: Synthetic oligonucleotide
agugacauucugccucuca

SEQ ID NO: 2721512 - RNA, 19 nt, Artificial Sequence
  Description of Artificial Sequence: Synthetic oligonucleotide
aacgccgcgcggaaagaac

SEQ ID NO: 2721513 - RNA, 19 nt, Artificial Sequence
  Description of Artificial Sequence: Synthetic oligonucleotide
uuccgaagcugcuuauagu

SEQ ID NO: 2721514 - RNA, 19 nt, Artificial Sequence
  Description of Artificial Sequence: Synthetic oligonucleotide
gaggguuuugguugcuuca

SEQ ID NO: 2721515 - RNA, 19 nt, Artificial Sequence
  Description of Artificial Sequence: Synthetic oligonucleotide
uuuaacugagagccuucuu

SEQ ID NO: 2721516 - RNA, 19 nt, Artificial Sequence
  Description of Artificial Sequence: Synthetic oligonucleotide
ggacugcugaacaaggucc

SEQ ID NO: 2721517 - RNA, 19 nt, Artificial Sequence
  Description of Artificial Sequence: Synthetic oligonucleotide
uuacaggacugcugaacaa

SEQ ID NO: 2721518 - RNA, 19 nt, Artificial Sequence
  Description of Artificial Sequence: Synthetic oligonucleotide
cuuggagcgcacaaauaca

SEQ ID NO: 2721519 - RNA, 19 nt, Artificial Sequence
  Description of Artificial Sequence: Synthetic oligonucleotide
gcugccaucacaaugaacu

SEQ ID NO: 2721520 - RNA, 19 nt, Artificial Sequence
  Description of Artificial Sequence: Synthetic oligonucleotide
aucuccaagggcucagcgu

SEQ ID NO: 2721521 - RNA, 19 nt, Artificial Sequence
  Description of Artificial Sequence: Synthetic oligonucleotide
ucauuggcuccuuuccgaa

SEQ ID NO: 2721522 - RNA, 19 nt, Artificial Sequence
  Description of Artificial Sequence: Synthetic oligonucleotide
auaauagaaaguggcugaa

SEQ ID NO: 2721523 - RNA, 19 nt, Artificial Sequence
  Description of Artificial Sequence: Synthetic oligonucleotide
uaauagaaaguggcugaaa

SEQ ID NO: 2721524 - RNA, 19 nt, Artificial Sequence
  Description of Artificial Sequence: Synthetic oligonucleotide
ugcuuuaacugagagccuu

SEQ ID NO: 2721525 - RNA, 19 nt, Artificial Sequence
  Description of Artificial Sequence: Synthetic oligonucleotide
gauccgagaacagcccacc

SEQ ID NO: 2721526 - RNA, 19 nt, Artificial Sequence
  Description of Artificial Sequence: Synthetic oligonucleotide
gaugacaggucuggauacc

SEQ ID NO: 2721527 - RNA, 19 nt, Artificial Sequence
  Description of Artificial Sequence: Synthetic oligonucleotide
gggaacagacaggaaaggg

SEQ ID NO: 2721528 - RNA, 19 nt, Artificial Sequence
  Description of Artificial Sequence: Synthetic oligonucleotide
agacaauaugauacacaag

SEQ ID NO: 2721529 - RNA, 19 nt, Artificial Sequence
  Description of Artificial Sequence: Synthetic oligonucleotide
cagaacaggcgaugacagg

SEQ ID NO: 2721530 - RNA, 19 nt, Artificial Sequence
  Description of Artificial Sequence: Synthetic oligonucleotide
auggacuggaucugcugcu

SEQ ID NO: 2721531 - RNA, 19 nt, Artificial Sequence
  Description of Artificial Sequence: Synthetic oligonucleotide
cacaaauacauaggggaca

SEQ ID NO: 2721532 - RNA, 19 nt, Artificial Sequence
  Description of Artificial Sequence: Synthetic oligonucleotide
uccuagggccugcuuggag

SEQ ID NO: 2721533 - RNA, 19 nt, Artificial Sequence
  Description of Artificial Sequence: Synthetic oligonucleotide
ugguaacagaacaggcgau

SEQ ID NO: 2721534 - RNA, 19 nt, Artificial Sequence
  Description of Artificial Sequence: Synthetic oligonucleotide
aacgaaacgccgcgcggaa

SEQ ID NO: 2721535 - RNA, 19 nt, Artificial Sequence
  Description of Artificial Sequence: Synthetic oligonucleotide
caagagccucucaauggac

SEQ ID NO: 2721536 - RNA, 19 nt, Artificial Sequence
  Description of Artificial Sequence: Synthetic oligonucleotide
guggcugaaaaccuuacau

SEQ ID NO: 2721537 - RNA, 19 nt, Artificial Sequence
  Description of Artificial Sequence: Synthetic oligonucleotide
gaacagcccaccucagaca

SEQ ID NO: 2721538 - RNA, 19 nt, Artificial Sequence
  Description of Artificial Sequence: Synthetic oligonucleotide
acacagcagugggaggugc

SEQ ID NO: 2721539 - RNA, 19 nt, Artificial Sequence
  Description of Artificial Sequence: Synthetic oligonucleotide
gcuuauaguuacaggacug

SEQ ID NO: 2721540 - RNA, 19 nt, Artificial Sequence
  Description of Artificial Sequence: Synthetic oligonucleotide
ggccuucggauuuacauca

SEQ ID NO: 2721541 - RNA, 19 nt, Artificial Sequence
  Description of Artificial Sequence: Synthetic oligonucleotide
cacaggccuacaccaagag

SEQ ID NO: 2721542 - RNA, 19 nt, Artificial Sequence
  Description of Artificial Sequence: Synthetic oligonucleotide
aggugagcaucugccaggg

SEQ ID NO: 2721543 - RNA, 19 nt, Artificial Sequence
  Description of Artificial Sequence: Synthetic oligonucleotide
cauuggcuccuuuccgaag

SEQ ID NO: 2721544 - RNA, 19 nt, Artificial Sequence
  Description of Artificial Sequence: Synthetic oligonucleotide
acauucugccucucaccug

SEQ ID NO: 2721545 - RNA, 19 nt, Artificial Sequence
  Description of Artificial Sequence: Synthetic oligonucleotide
acaauaugauacacaagua

SEQ ID NO: 2721546 - RNA, 19 nt, Artificial Sequence
  Description of Artificial Sequence: Synthetic oligonucleotide
uaccccacaggcccguccu

SEQ ID NO: 2721547 - RNA, 19 nt, Artificial Sequence
  Description of Artificial Sequence: Synthetic oligonucleotide
acaccaagagccucucaau

SEQ ID NO: 2721548 - RNA, 19 nt, Artificial Sequence
  Description of Artificial Sequence: Synthetic oligonucleotide
ugguugcuucauuggcucc

SEQ ID NO: 2721549 - RNA, 19 nt, Artificial Sequence
  Description of Artificial Sequence: Synthetic oligonucleotide
agagccuucuuugauggua

SEQ ID NO: 2721550 - RNA, 19 nt, Artificial Sequence
  Description of Artificial Sequence: Synthetic oligonucleotide
cagagaugccccuguugag

SEQ ID NO: 2721551 - RNA, 19 nt, Artificial Sequence
  Description of Artificial Sequence: Synthetic oligonucleotide
acaggucuggauaccccac

SEQ ID NO: 2721552 - RNA, 19 nt, Artificial Sequence
  Description of Artificial Sequence: Synthetic oligonucleotide
agugggaggugcaggauga

SEQ ID NO: 2721553 - RNA, 19 nt, Artificial Sequence
  Description of Artificial Sequence: Synthetic oligonucleotide
uuggcuccuuuccgaagcu

SEQ ID NO: 2721554 - RNA, 19 nt, Artificial Sequence
  Description of Artificial Sequence: Synthetic oligonucleotide
gaacgaaacgccgcgcgga

SEQ ID NO: 2721555 - RNA, 19 nt, Artificial Sequence
  Description of Artificial Sequence: Synthetic oligonucleotide
cauaggggacauucuuguc

SEQ ID NO: 2721556 - RNA, 19 nt, Artificial Sequence
  Description of Artificial Sequence: Synthetic oligonucleotide
gcuaacagacaauaugaua

SEQ ID NO: 2721557 - RNA, 19 nt, Artificial Sequence
  Description of Artificial Sequence: Synthetic oligonucleotide
gagaacagcccaccucaga

SEQ ID NO: 2721558 - RNA, 19 nt, Artificial Sequence
  Description of Artificial Sequence: Synthetic oligonucleotide
ugcugccaucacaaugaac

SEQ ID NO: 2721559 - RNA, 19 nt, Artificial Sequence
  Description of Artificial Sequence: Synthetic oligonucleotide
cucucaauggacugcugaa

SEQ ID NO: 2721560 - RNA, 19 nt, Artificial Sequence
  Description of Artificial Sequence: Synthetic oligonucleotide
cuucuuggugaggugagca

SEQ ID NO: 2721561 - RNA, 19 nt, Artificial Sequence
  Description of Artificial Sequence: Synthetic oligonucleotide
cugccaucacaaugaacuc

SEQ ID NO: 2721562 - RNA, 19 nt, Artificial Sequence
  Description of Artificial Sequence: Synthetic oligonucleotide
uggagcgcacaaauacaua

SEQ ID NO: 2721563 - RNA, 19 nt, Artificial Sequence
  Description of Artificial Sequence: Synthetic oligonucleotide
caauggacugcugaaugga

SEQ ID NO: 2721564 - RNA, 19 nt, Artificial Sequence
  Description of Artificial Sequence: Synthetic oligonucleotide
ugcuuggagcgcacaaaua

SEQ ID NO: 2721565 - RNA, 19 nt, Artificial Sequence
  Description of Artificial Sequence: Synthetic oligonucleotide
cacaaguagggugggaaca

SEQ ID NO: 2721566 - RNA, 19 nt, Artificial Sequence
  Description of Artificial Sequence: Synthetic oligonucleotide
cacaggcccguccuagggc

SEQ ID NO: 2721567 - RNA, 19 nt, Artificial Sequence
  Description of Artificial Sequence: Synthetic oligonucleotide
cucucaccugucuauaaua

SEQ ID NO: 2721568 - RNA, 19 nt, Artificial Sequence
  Description of Artificial Sequence: Synthetic oligonucleotide
cgaagcugcuuauaguuac

SEQ ID NO: 2721569 - RNA, 19 nt, Artificial Sequence
  Description of Artificial Sequence: Synthetic oligonucleotide
gcggaaagaacagcggaag

SEQ ID NO: 2721570 - RNA, 19 nt, Artificial Sequence
  Description of Artificial Sequence: Synthetic oligonucleotide
gagccucucaauggacugc

SEQ ID NO: 2721571 - RNA, 19 nt, Artificial Sequence
  Description of Artificial Sequence: Synthetic oligonucleotide
gacugcugaauggacugga

SEQ ID NO: 2721572 - RNA, 19 nt, Artificial Sequence
  Description of Artificial Sequence: Synthetic oligonucleotide
agaacagcggaagucucuu

SEQ ID NO: 2721573 - RNA, 19 nt, Artificial Sequence
  Description of Artificial Sequence: Synthetic oligonucleotide
aggggacauucuugucuuc

SEQ ID NO: 2721574 - RNA, 19 nt, Artificial Sequence
  Description of Artificial Sequence: Synthetic oligonucleotide
gauaggccuucggauuuac

SEQ ID NO: 2721575 - RNA, 19 nt, Artificial Sequence
  Description of Artificial Sequence: Synthetic oligonucleotide
caccugucuauaauagaaa

SEQ ID NO: 2721576 - RNA, 19 nt, Artificial Sequence
  Description of Artificial Sequence: Synthetic oligonucleotide
uaguuacaggacugcugaa

SEQ ID NO: 2721577 - RNA, 19 nt, Artificial Sequence
  Description of Artificial Sequence: Synthetic oligonucleotide
gaacaggcgaugacagguc

SEQ ID NO: 2721578 - RNA, 19 nt, Artificial Sequence
  Description of Artificial Sequence: Synthetic oligonucleotide
caggggauaggccuucgga

SEQ ID NO: 2721579 - RNA, 19 nt, Artificial Sequence
  Description of Artificial Sequence: Synthetic oligonucleotide
aaacgccgcgcggaaagaa

SEQ ID NO: 2721580 - RNA, 19 nt, Artificial Sequence
  Description of Artificial Sequence: Synthetic oligonucleotide
gucauggcugcggugcgcc

SEQ ID NO: 2721581 - RNA, 19 nt, Artificial Sequence
  Description of Artificial Sequence: Synthetic oligonucleotide
gcgcacaaauacauagggg

SEQ ID NO: 2721582 - RNA, 19 nt, Artificial Sequence
  Description of Artificial Sequence: Synthetic oligonucleotide
ccgcgauccgagaacagcc

SEQ ID NO: 2721583 - RNA, 19 nt, Artificial Sequence
  Description of Artificial Sequence: Synthetic oligonucleotide
cucgccgcgauccgagaac

SEQ ID NO: 2721584 - RNA, 19 nt, Artificial Sequence
  Description of Artificial Sequence: Synthetic oligonucleotide
agccucucaauggacugcu

SEQ ID NO: 2721585 - RNA, 19 nt, Artificial Sequence
  Description of Artificial Sequence: Synthetic oligonucleotide
ggacauucuugucuucaca

SEQ ID NO: 2721586 - RNA, 19 nt, Artificial Sequence
  Description of Artificial Sequence: Synthetic oligonucleotide
ccgcgcggaaagaacagcg

SEQ ID NO: 2721587 - RNA, 19 nt, Artificial Sequence
  Description of Artificial Sequence: Synthetic oligonucleotide
auccgagaacagcccaccu

SEQ ID NO: 2721588 - RNA, 19 nt, Artificial Sequence
  Description of Artificial Sequence: Synthetic oligonucleotide
ggcuccuuuccgaagcugc

SEQ ID NO: 2721589 - RNA, 19 nt, Artificial Sequence
  Description of Artificial Sequence: Synthetic oligonucleotide
ugucauggcugcggugcgc

SEQ ID NO: 2721590 - RNA, 19 nt, Artificial Sequence
  Description of Artificial Sequence: Synthetic oligonucleotide
aggguuuugguugcuucau

SEQ ID NO: 2721591 - RNA, 19 nt, Artificial Sequence
  Description of Artificial Sequence: Synthetic oligonucleotide
acaugcuaacagacaauau

SEQ ID NO: 2721592 - RNA, 19 nt, Artificial Sequence
  Description of Artificial Sequence: Synthetic oligonucleotide
ccuucggauuuacaucagc

SEQ ID NO: 2721593 - RNA, 19 nt, Artificial Sequence
  Description of Artificial Sequence: Synthetic oligonucleotide
ucgccgcgauccgagaaca

SEQ ID NO: 2721594 - RNA, 19 nt, Artificial Sequence
  Description of Artificial Sequence: Synthetic oligonucleotide
cucagcgucugcugccauc

SEQ ID NO: 2721595 - RNA, 19 nt, Artificial Sequence
  Description of Artificial Sequence: Synthetic oligonucleotide
ccgagaacagcccaccuca

SEQ ID NO: 2721596 - RNA, 19 nt, Artificial Sequence
  Description of Artificial Sequence: Synthetic oligonucleotide
gcgaugacaggucuggaua

SEQ ID NO: 2721597 - RNA, 19 nt, Artificial Sequence
  Description of Artificial Sequence: Synthetic oligonucleotide
cucugucauggcugcggug

SEQ ID NO: 2721598 - RNA, 19 nt, Artificial Sequence
  Description of Artificial Sequence: Synthetic oligonucleotide
ccuuacaugcuaacagaca

SEQ ID NO: 2721599 - RNA, 19 nt, Artificial Sequence
  Description of Artificial Sequence: Synthetic oligonucleotide
gaaaguggcugaaaaccuu

SEQ ID NO: 2721600 - RNA, 19 nt, Artificial Sequence
  Description of Artificial Sequence: Synthetic oligonucleotide
gccucugucauggcugcgg

SEQ ID NO: 2721601 - RNA, 19 nt, Artificial Sequence
  Description of Artificial Sequence: Synthetic oligonucleotide
cguccuagggccugcuugg

SEQ ID NO: 2721602 - RNA, 19 nt, Artificial Sequence
  Description of Artificial Sequence: Synthetic oligonucleotide
acaggcgaugacaggucug

SEQ ID NO: 2721603 - RNA, 19 nt, Artificial Sequence
  Description of Artificial Sequence: Synthetic oligonucleotide
cgaaacgccgcgcggaaag

SEQ ID NO: 2721604 - RNA, 19 nt, Artificial Sequence
  Description of Artificial Sequence: Synthetic oligonucleotide
uggcuccuuuccgaagcug

SEQ ID NO: 2721605 - RNA, 19 nt, Artificial Sequence
  Description of Artificial Sequence: Synthetic oligonucleotide
acucagagaugccccuguu

SEQ ID NO: 2721606 - RNA, 19 nt, Artificial Sequence
  Description of Artificial Sequence: Synthetic oligonucleotide
gcaucugccaggggauagg

SEQ ID NO: 2721607 - RNA, 19 nt, Artificial Sequence
  Description of Artificial Sequence: Synthetic oligonucleotide
caggucuggauaccccaca

SEQ ID NO: 2721608 - RNA, 19 nt, Artificial Sequence
  Description of Artificial Sequence: Synthetic oligonucleotide
cuuuaacugagagccuucu

SEQ ID NO: 2721609 - RNA, 19 nt, Artificial Sequence
  Description of Artificial Sequence: Synthetic oligonucleotide
cacacagcagugggaggug

SEQ ID NO: 2721610 - RNA, 19 nt, Artificial Sequence
  Description of Artificial Sequence: Synthetic oligonucleotide
gcgcggaaagaacagcgga

SEQ ID NO: 2721611 - RNA, 19 nt, Artificial Sequence
  Description of Artificial Sequence: Synthetic oligonucleotide
gaaacgccgcgcggaaaga

SEQ ID NO: 2721612 - RNA, 19 nt, Artificial Sequence
  Description of Artificial Sequence: Synthetic oligonucleotide
acgccgcgcggaaagaaca

SEQ ID NO: 2721613 - RNA, 19 nt, Artificial Sequence
  Description of Artificial Sequence: Synthetic oligonucleotide
caucagccucugucauggc

SEQ ID NO: 2721614 - RNA, 19 nt, Artificial Sequence
  Description of Artificial Sequence: Synthetic oligonucleotide
ccguccuagggccugcuug

SEQ ID NO: 2721615 - RNA, 19 nt, Artificial Sequence
  Description of Artificial Sequence: Synthetic oligonucleotide
aggccuacaccaagagccu

SEQ ID NO: 2721616 - RNA, 19 nt, Artificial Sequence
  Description of Artificial Sequence: Synthetic oligonucleotide
ccugucuauaauagaaagu

SEQ ID NO: 2721617 - RNA, 19 nt, Artificial Sequence
  Description of Artificial Sequence: Synthetic oligonucleotide
ccacaggcccguccuaggg

SEQ ID NO: 2721618 - RNA, 19 nt, Artificial Sequence
  Description of Artificial Sequence: Synthetic oligonucleotide
uugcuucauuggcuccuuu

SEQ ID NO: 2721619 - RNA, 19 nt, Artificial Sequence
  Description of Artificial Sequence: Synthetic oligonucleotide
gauuuacaucagccucugu

SEQ ID NO: 2721620 - RNA, 19 nt, Artificial Sequence
  Description of Artificial Sequence: Synthetic oligonucleotide
ccccuguugaggguuuugg

SEQ ID NO: 2721621 - RNA, 19 nt, Artificial Sequence
  Description of Artificial Sequence: Synthetic oligonucleotide
ggugcgccggccucgccgc

SEQ ID NO: 2721622 - RNA, 19 nt, Artificial Sequence
  Description of Artificial Sequence: Synthetic oligonucleotide
ggugagcaucugccagggg

SEQ ID NO: 2721623 - RNA, 19 nt, Artificial Sequence
  Description of Artificial Sequence: Synthetic oligonucleotide
gccgcgauccgagaacagc

SEQ ID NO: 2721624 - RNA, 19 nt, Artificial Sequence
  Description of Artificial Sequence: Synthetic oligonucleotide
caaguagggugggaacaga

SEQ ID NO: 2721625 - RNA, 19 nt, Artificial Sequence
  Description of Artificial Sequence: Synthetic oligonucleotide
auaggccuucggauuuaca

SEQ ID NO: 2721626 - RNA, 19 nt, Artificial Sequence
  Description of Artificial Sequence: Synthetic oligonucleotide
gggcucagcgucugcugcc

SEQ ID NO: 2721627 - RNA, 19 nt, Artificial Sequence
  Description of Artificial Sequence: Synthetic oligonucleotide
ccuguguaaacagugacau

SEQ ID NO: 2721628 - RNA, 19 nt, Artificial Sequence
  Description of Artificial Sequence: Synthetic oligonucleotide
cugcuuggagcgcacaaau

SEQ ID NO: 2721629 - RNA, 19 nt, Artificial Sequence
  Description of Artificial Sequence: Synthetic oligonucleotide
gcuuuaacugagagccuuc

SEQ ID NO: 2721630 - RNA, 19 nt, Artificial Sequence
  Description of Artificial Sequence: Synthetic oligonucleotide
cgcgcggaaagaacagcgg

SEQ ID NO: 2721631 - RNA, 19 nt, Artificial Sequence
  Description of Artificial Sequence: Synthetic oligonucleotide
cccaccucagacagaacga

SEQ ID NO: 2721632 - RNA, 19 nt, Artificial Sequence
  Description of Artificial Sequence: Synthetic oligonucleotide
cuuuccgaagcugcuuaua

SEQ ID NO: 2721633 - RNA, 19 nt, Artificial Sequence
  Description of Artificial Sequence: Synthetic oligonucleotide
gcgauccgagaacagccca

SEQ ID NO: 2721634 - RNA, 19 nt, Artificial Sequence
  Description of Artificial Sequence: Synthetic oligonucleotide
cuacaccaagagccucuca

SEQ ID NO: 2721635 - RNA, 19 nt, Artificial Sequence
  Description of Artificial Sequence: Synthetic oligonucleotide
agccucugucauggcugcg

SEQ ID NO: 2721636 - RNA, 19 nt, Artificial Sequence
  Description of Artificial Sequence: Synthetic oligonucleotide
gcgucugcugccaucacaa

SEQ ID NO: 2721637 - RNA, 19 nt, Artificial Sequence
  Description of Artificial Sequence: Synthetic oligonucleotide
uagggccugcuuggagcgc

SEQ ID NO: 2721638 - RNA, 19 nt, Artificial Sequence
  Description of Artificial Sequence: Synthetic oligonucleotide
ugccaggggauaggccuuc

SEQ ID NO: 2721639 - RNA, 19 nt, Artificial Sequence
  Description of Artificial Sequence: Synthetic oligonucleotide
ccaggggauaggccuucgg

SEQ ID NO: 2721640 - RNA, 19 nt, Artificial Sequence
  Description of Artificial Sequence: Synthetic oligonucleotide
cgcgauccgagaacagccc

SEQ ID NO: 2721641 - RNA, 19 nt, Artificial Sequence
  Description of Artificial Sequence: Synthetic oligonucleotide
cugcggugcgccggccucg

SEQ ID NO: 2721642 - RNA, 19 nt, Artificial Sequence
  Description of Artificial Sequence: Synthetic oligonucleotide
cgauccgagaacagcccac

SEQ ID NO: 2721643 - RNA, 19 nt, Artificial Sequence
  Description of Artificial Sequence: Synthetic oligonucleotide
gcagaggccacaggccuac

SEQ ID NO: 2721644 - RNA, 19 nt, Artificial Sequence
  Description of Artificial Sequence: Synthetic oligonucleotide
cccacaggcccguccuagg

SEQ ID NO: 2721645 - RNA, 19 nt, Artificial Sequence
  Description of Artificial Sequence: Synthetic oligonucleotide
ugcggugcgccggccucgc

SEQ ID NO: 2721646 - RNA, 19 nt, Artificial Sequence
  Description of Artificial Sequence: Synthetic oligonucleotide
gauaccccacaggcccguc

SEQ ID NO: 2721647 - RNA, 19 nt, Artificial Sequence
  Description of Artificial Sequence: Synthetic oligonucleotide
gccggccucgccgcgaucc

SEQ ID NO: 2721648 - RNA, 19 nt, Artificial Sequence
  Description of Artificial Sequence: Synthetic oligonucleotide
ggcgaugacaggucuggau

SEQ ID NO: 2721649 - RNA, 19 nt, Artificial Sequence
  Description of Artificial Sequence: Synthetic oligonucleotide
ggggauaggccuucggauu

SEQ ID NO: 2721650 - RNA, 19 nt, Artificial Sequence
  Description of Artificial Sequence: Synthetic oligonucleotide
gggauaggccuucggauuu

SEQ ID NO: 2721651 - RNA, 19 nt, Artificial Sequence
  Description of Artificial Sequence: Synthetic oligonucleotide
ccacaggccuacaccaaga

SEQ ID NO: 2721652 - RNA, 19 nt, Artificial Sequence
  Description of Artificial Sequence: Synthetic oligonucleotide
cugcuuuaacugagagccu

SEQ ID NO: 2721653 - RNA, 19 nt, Artificial Sequence
  Description of Artificial Sequence: Synthetic oligonucleotide
agcccaccucagacagaac

SEQ ID NO: 2721654 - RNA, 19 nt, Artificial Sequence
  Description of Artificial Sequence: Synthetic oligonucleotide
acgaaacgccgcgcggaaa

SEQ ID NO: 2721655 - RNA, 19 nt, Artificial Sequence
  Description of Artificial Sequence: Synthetic oligonucleotide
gccuucggauuuacaucag

SEQ ID NO: 2721656 - RNA, 19 nt, Artificial Sequence
  Description of Artificial Sequence: Synthetic oligonucleotide
aggcccguccuagggccug

SEQ ID NO: 2721657 - RNA, 19 nt, Artificial Sequence
  Description of Artificial Sequence: Synthetic oligonucleotide
gagcaucugccaggggaua

SEQ ID NO: 2721658 - RNA, 19 nt, Artificial Sequence
  Description of Artificial Sequence: Synthetic oligonucleotide
gccucucaccugucuauaa

SEQ ID NO: 2721659 - RNA, 19 nt, Artificial Sequence
  Description of Artificial Sequence: Synthetic oligonucleotide
cgagaacagcccaccucag

SEQ ID NO: 2721660 - RNA, 19 nt, Artificial Sequence
  Description of Artificial Sequence: Synthetic oligonucleotide
cggauuuacaucagccucu

SEQ ID NO: 2721661 - RNA, 19 nt, Artificial Sequence
  Description of Artificial Sequence: Synthetic oligonucleotide
gccgcgcggaaagaacagc

SEQ ID NO: 2721662 - RNA, 19 nt, Artificial Sequence
  Description of Artificial Sequence: Synthetic oligonucleotide
ccuacaccaagagccucuc

SEQ ID NO: 2721663 - RNA, 19 nt, Artificial Sequence
  Description of Artificial Sequence: Synthetic oligonucleotide
acagcccaccucagacaga

SEQ ID NO: 2721664 - RNA, 19 nt, Artificial Sequence
  Description of Artificial Sequence: Synthetic oligonucleotide
cuguguaaacagugacauu

SEQ ID NO: 2721665 - RNA, 19 nt, Artificial Sequence
  Description of Artificial Sequence: Synthetic oligonucleotide
ccgaagcugcuuauaguua

SEQ ID NO: 2721666 - RNA, 19 nt, Artificial Sequence
  Description of Artificial Sequence: Synthetic oligonucleotide
gccugcuuggagcgcacaa

SEQ ID NO: 2721667 - RNA, 19 nt, Artificial Sequence
  Description of Artificial Sequence: Synthetic oligonucleotide
cgcggaaagaacagcggaa

SEQ ID NO: 2721668 - RNA, 19 nt, Artificial Sequence
  Description of Artificial Sequence: Synthetic oligonucleotide
gcugcggugcgccggccuc

SEQ ID NO: 2721669 - RNA, 19 nt, Artificial Sequence
  Description of Artificial Sequence: Synthetic oligonucleotide
cggugcgccggccucgccg

SEQ ID NO: 2721670 - RNA, 19 nt, Artificial Sequence
  Description of Artificial Sequence: Synthetic oligonucleotide
cagugacauucugccucuc

SEQ ID NO: 2721671 - RNA, 19 nt, Artificial Sequence
  Description of Artificial Sequence: Synthetic oligonucleotide
guccuagggccugcuugga

SEQ ID NO: 2721672 - RNA, 19 nt, Artificial Sequence
  Description of Artificial Sequence: Synthetic oligonucleotide
ggccuacaccaagagccuc

SEQ ID NO: 2721673 - RNA, 19 nt, Artificial Sequence
  Description of Artificial Sequence: Synthetic oligonucleotide
gccaggggauaggccuucg

SEQ ID NO: 2721674 - RNA, 19 nt, Artificial Sequence
  Description of Artificial Sequence: Synthetic oligonucleotide
accccacaggcccguccua

SEQ ID NO: 2721675 - RNA, 19 nt, Artificial Sequence
  Description of Artificial Sequence: Synthetic oligonucleotide
ccaccucagacagaacgaa

SEQ ID NO: 2721676 - RNA, 19 nt, Artificial Sequence
  Description of Artificial Sequence: Synthetic oligonucleotide
ugccccuguugaggguuuu

SEQ ID NO: 2721677 - RNA, 19 nt, Artificial Sequence
  Description of Artificial Sequence: Synthetic oligonucleotide
cgccgcgcggaaagaacag

SEQ ID NO: 2721678 - RNA, 19 nt, Artificial Sequence
  Description of Artificial Sequence: Synthetic oligonucleotide
gaacaagguccagcagcuu

SEQ ID NO: 2721679 - RNA, 19 nt, Artificial Sequence
  Description of Artificial Sequence: Synthetic oligonucleotide
ccugcuuggagcgcacaaa

SEQ ID NO: 2721680 - RNA, 19 nt, Artificial Sequence
  Description of Artificial Sequence: Synthetic oligonucleotide
ggauaggccuucggauuua

SEQ ID NO: 2721681 - RNA, 19 nt, Artificial Sequence
  Description of Artificial Sequence: Synthetic oligonucleotide
gccccuguugaggguuuug

SEQ ID NO: 2721682 - RNA, 19 nt, Artificial Sequence
  Description of Artificial Sequence: Synthetic oligonucleotide
ggguuuugguugcuucauu

SEQ ID NO: 2721683 - RNA, 19 nt, Artificial Sequence
  Description of Artificial Sequence: Synthetic oligonucleotide
cccuguugaggguuuuggu

SEQ ID NO: 2721684 - RNA, 19 nt, Artificial Sequence
  Description of Artificial Sequence: Synthetic oligonucleotide
gcuccuuuccgaagcugcu

SEQ ID NO: 2721685 - RNA, 19 nt, Artificial Sequence
  Description of Artificial Sequence: Synthetic oligonucleotide
ggacuggaucugcugcuuu

SEQ ID NO: 2721686 - RNA, 19 nt, Artificial Sequence
  Description of Artificial Sequence: Synthetic oligonucleotide
ccucucaccugucuauaau

SEQ ID NO: 2721687 - RNA, 19 nt, Artificial Sequence
  Description of Artificial Sequence: Synthetic oligonucleotide
cuccuuuccgaagcugcuu

SEQ ID NO: 2721688 - RNA, 19 nt, Artificial Sequence
  Description of Artificial Sequence: Synthetic oligonucleotide
caaauacauaggggacauu

SEQ ID NO: 2721689 - RNA, 19 nt, Artificial Sequence
  Description of Artificial Sequence: Synthetic oligonucleotide
ggccacaggccuacaccaa

SEQ ID NO: 2721690 - RNA, 19 nt, Artificial Sequence
  Description of Artificial Sequence: Synthetic oligonucleotide
cggaaagaacagcggaagu

SEQ ID NO: 2721691 - RNA, 19 nt, Artificial Sequence
  Description of Artificial Sequence: Synthetic oligonucleotide
ccucgccgcgauccgagaa

SEQ ID NO: 2721692 - RNA, 19 nt, Artificial Sequence
  Description of Artificial Sequence: Synthetic oligonucleotide
ggauaccccacaggcccgu

SEQ ID NO: 2721693 - RNA, 19 nt, Artificial Sequence
  Description of Artificial Sequence: Synthetic oligonucleotide
caggcccguccuagggccu

SEQ ID NO: 2721694 - RNA, 19 nt, Artificial Sequence
  Description of Artificial Sequence: Synthetic oligonucleotide
ggcccguccuagggccugc

SEQ ID NO: 2721695 - RNA, 19 nt, Artificial Sequence
  Description of Artificial Sequence: Synthetic oligonucleotide
cgccgcgauccgagaacag

SEQ ID NO: 2721696 - RNA, 19 nt, Artificial Sequence
  Description of Artificial Sequence: Synthetic oligonucleotide
gggugggaacagacaggaa

SEQ ID NO: 2721697 - RNA, 19 nt, Artificial Sequence
  Description of Artificial Sequence: Synthetic oligonucleotide
ccuuuccgaagcugcuuau

SEQ ID NO: 2721698 - RNA, 19 nt, Artificial Sequence
  Description of Artificial Sequence: Synthetic oligonucleotide
gccucgccgcgauccgaga

SEQ ID NO: 2721699 - RNA, 19 nt, Artificial Sequence
  Description of Artificial Sequence: Synthetic oligonucleotide
ggccugcuuggagcgcaca

SEQ ID NO: 2721700 - RNA, 19 nt, Artificial Sequence
  Description of Artificial Sequence: Synthetic oligonucleotide
gggccugcuuggagcgcac

SEQ ID NO: 2721701 - RNA, 19 nt, Artificial Sequence
  Description of Artificial Sequence: Synthetic oligonucleotide
gugggaggugcaggaugau

SEQ ID NO: 2721702 - RNA, 19 nt, Artificial Sequence
  Description of Artificial Sequence: Synthetic oligonucleotide
gcggugcgccggccucgcc

SEQ ID NO: 2721703 - RNA, 19 nt, Artificial Sequence
  Description of Artificial Sequence: Synthetic oligonucleotide
cgucugcugccaucacaau

SEQ ID NO: 2721704 - RNA, 19 nt, Artificial Sequence
  Description of Artificial Sequence: Synthetic oligonucleotide
gcccguccuagggccugcu

SEQ ID NO: 2721705 - RNA, 19 nt, Artificial Sequence
  Description of Artificial Sequence: Synthetic oligonucleotide
cccguccuagggccugcuu

SEQ ID NO: 2721706 - RNA, 19 nt, Artificial Sequence
  Description of Artificial Sequence: Synthetic oligonucleotide
cgccggccucgccgcgauc

SEQ ID NO: 2721707 - RNA, 19 nt, Artificial Sequence
  Description of Artificial Sequence: Synthetic oligonucleotide
aaacucauacaacagaagc

SEQ ID NO: 2721708 - RNA, 19 nt, Artificial Sequence
  Description of Artificial Sequence: Synthetic oligonucleotide
ucaagugacauucucagca

SEQ ID NO: 2721709 - RNA, 19 nt, Artificial Sequence
  Description of Artificial Sequence: Synthetic oligonucleotide
aaugccauuguuucaagug

SEQ ID NO: 2721710 - RNA, 19 nt, Artificial Sequence
  Description of Artificial Sequence: Synthetic oligonucleotide
aaagucuccuguuuguuuc

SEQ ID NO: 2721711 - RNA, 19 nt, Artificial Sequence
  Description of Artificial Sequence: Synthetic oligonucleotide
ucaggcauuuuccauaccg

SEQ ID NO: 2721712 - RNA, 19 nt, Artificial Sequence
  Description of Artificial Sequence: Synthetic oligonucleotide
aguuuuguagcuuuucuuc

SEQ ID NO: 2721713 - RNA, 19 nt, Artificial Sequence
  Description of Artificial Sequence: Synthetic oligonucleotide
uuauuuaaugcuuccauga

SEQ ID NO: 2721714 - RNA, 19 nt, Artificial Sequence
  Description of Artificial Sequence: Synthetic oligonucleotide
acaauuuugcauuuccggg

SEQ ID NO: 2721715 - RNA, 19 nt, Artificial Sequence
  Description of Artificial Sequence: Synthetic oligonucleotide
uguucugcuuucuagauca

SEQ ID NO: 2721716 - RNA, 19 nt, Artificial Sequence
  Description of Artificial Sequence: Synthetic oligonucleotide
auuguuucaaguguucugc

SEQ ID NO: 2721717 - RNA, 19 nt, Artificial Sequence
  Description of Artificial Sequence: Synthetic oligonucleotide
aauuuugcauuuccggguc

SEQ ID NO: 2721718 - RNA, 19 nt, Artificial Sequence
  Description of Artificial Sequence: Synthetic oligonucleotide
uuauccauagcuaguaaug

SEQ ID NO: 2721719 - RNA, 19 nt, Artificial Sequence
  Description of Artificial Sequence: Synthetic oligonucleotide
uucauaguuuauuuugagg

SEQ ID NO: 2721720 - RNA, 19 nt, Artificial Sequence
  Description of Artificial Sequence: Synthetic oligonucleotide
uugguuuuaacuucaaacu

SEQ ID NO: 2721721 - RNA, 19 nt, Artificial Sequence
  Description of Artificial Sequence: Synthetic oligonucleotide
ucugcuuucuagaucaggc

SEQ ID NO: 2721722 - RNA, 19 nt, Artificial Sequence
  Description of Artificial Sequence: Synthetic oligonucleotide
uuaacuucaaacucauaca

SEQ ID NO: 2721723 - RNA, 19 nt, Artificial Sequence
  Description of Artificial Sequence: Synthetic oligonucleotide
ucuagaucaggcauuuucc

SEQ ID NO: 2721724 - RNA, 19 nt, Artificial Sequence
  Description of Artificial Sequence: Synthetic oligonucleotide
ucauacaacagaagcaaug

SEQ ID NO: 2721725 - RNA, 19 nt, Artificial Sequence
  Description of Artificial Sequence: Synthetic oligonucleotide
gaagcaaugcuucacaguc

SEQ ID NO: 2721726 - RNA, 19 nt, Artificial Sequence
  Description of Artificial Sequence: Synthetic oligonucleotide
gagguuggcauuuagaaga

SEQ ID NO: 2721727 - RNA, 19 nt, Artificial Sequence
  Description of Artificial Sequence: Synthetic oligonucleotide
gaagauucaccuuagcuuc

SEQ ID NO: 2721728 - RNA, 19 nt, Artificial Sequence
  Description of Artificial Sequence: Synthetic oligonucleotide
ucaaacucauacaacagaa

SEQ ID NO: 2721729 - RNA, 19 nt, Artificial Sequence
  Description of Artificial Sequence: Synthetic oligonucleotide
acuuguuuugguuuuaacu

SEQ ID NO: 2721730 - RNA, 19 nt, Artificial Sequence
  Description of Artificial Sequence: Synthetic oligonucleotide
uauuuaaugcuuccaugag

SEQ ID NO: 2721731 - RNA, 19 nt, Artificial Sequence
  Description of Artificial Sequence: Synthetic oligonucleotide
aaugcuuccaugagguugg

SEQ ID NO: 2721732 - RNA, 19 nt, Artificial Sequence
  Description of Artificial Sequence: Synthetic oligonucleotide
uaacuucaaacucauacaa

SEQ ID NO: 2721733 - RNA, 19 nt, Artificial Sequence
  Description of Artificial Sequence: Synthetic oligonucleotide
uucaaacucauacaacaga

SEQ ID NO: 2721734 - RNA, 19 nt, Artificial Sequence
  Description of Artificial Sequence: Synthetic oligonucleotide
agcuucauaguuuauuuug

SEQ ID NO: 2721735 - RNA, 19 nt, Artificial Sequence
  Description of Artificial Sequence: Synthetic oligonucleotide
uuuauuuugagggagccaa

SEQ ID NO: 2721736 - RNA, 19 nt, Artificial Sequence
  Description of Artificial Sequence: Synthetic oligonucleotide
cuaguaaugccauuguuuc

SEQ ID NO: 2721737 - RNA, 19 nt, Artificial Sequence
  Description of Artificial Sequence: Synthetic oligonucleotide
auucaccuuagcuucauag

SEQ ID NO: 2721738 - RNA, 19 nt, Artificial Sequence
  Description of Artificial Sequence: Synthetic oligonucleotide
aaugcuucacagucaucac

SEQ ID NO: 2721739 - RNA, 19 nt, Artificial Sequence
  Description of Artificial Sequence: Synthetic oligonucleotide
gacauucucagcaaccugg

SEQ ID NO: 2721740 - RNA, 19 nt, Artificial Sequence
  Description of Artificial Sequence: Synthetic oligonucleotide
auccauagcuaguaaugcc

SEQ ID NO: 2721741 - RNA, 19 nt, Artificial Sequence
  Description of Artificial Sequence: Synthetic oligonucleotide
uuuucugugcaaucaguag

SEQ ID NO: 2721742 - RNA, 19 nt, Artificial Sequence
  Description of Artificial Sequence: Synthetic oligonucleotide
ugauggaucacuuguuuug

SEQ ID NO: 2721743 - RNA, 19 nt, Artificial Sequence
  Description of Artificial Sequence: Synthetic oligonucleotide
uccauagcuaguaaugcca

SEQ ID NO: 2721744 - RNA, 19 nt, Artificial Sequence
  Description of Artificial Sequence: Synthetic oligonucleotide
uguucaagugacauucuca

SEQ ID NO: 2721745 - RNA, 19 nt, Artificial Sequence
  Description of Artificial Sequence: Synthetic oligonucleotide
guuguuuggguguugguag

SEQ ID NO: 2721746 - RNA, 19 nt, Artificial Sequence
  Description of Artificial Sequence: Synthetic oligonucleotide
agaagauucaccuuagcuu

SEQ ID NO: 2721747 - RNA, 19 nt, Artificial Sequence
  Description of Artificial Sequence: Synthetic oligonucleotide
uguucggaaguuuuguagc

SEQ ID NO: 2721748 - RNA, 19 nt, Artificial Sequence
  Description of Artificial Sequence: Synthetic oligonucleotide
aagguggccaaggaauucc

SEQ ID NO: 2721749 - RNA, 19 nt, Artificial Sequence
  Description of Artificial Sequence: Synthetic oligonucleotide
uuuccauaccgaauccagg

SEQ ID NO: 2721750 - RNA, 19 nt, Artificial Sequence
  Description of Artificial Sequence: Synthetic oligonucleotide
aagugacauucucagcaac

SEQ ID NO: 2721751 - RNA, 19 nt, Artificial Sequence
  Description of Artificial Sequence: Synthetic oligonucleotide
uguugguaguugaaccugg

SEQ ID NO: 2721752 - RNA, 19 nt, Artificial Sequence
  Description of Artificial Sequence: Synthetic oligonucleotide
auaguuuauuuugagggag

SEQ ID NO: 2721753 - RNA, 19 nt, Artificial Sequence
  Description of Artificial Sequence: Synthetic oligonucleotide
cauacaacagaagcaaugc

SEQ ID NO: 2721754 - RNA, 19 nt, Artificial Sequence
  Description of Artificial Sequence: Synthetic oligonucleotide
cagaccuuaacuccaaccc

SEQ ID NO: 2721755 - RNA, 19 nt, Artificial Sequence
  Description of Artificial Sequence: Synthetic oligonucleotide
ugguaguugaaccuggguc

SEQ ID NO: 2721756 - RNA, 19 nt, Artificial Sequence
  Description of Artificial Sequence: Synthetic oligonucleotide
ugcuuuuaaccgcucagcc

SEQ ID NO: 2721757 - RNA, 19 nt, Artificial Sequence
  Description of Artificial Sequence: Synthetic oligonucleotide
uucacagucaucaccugca

SEQ ID NO: 2721758 - RNA, 19 nt, Artificial Sequence
  Description of Artificial Sequence: Synthetic oligonucleotide
uguuucaggagauuccaga

SEQ ID NO: 2721759 - RNA, 19 nt, Artificial Sequence
  Description of Artificial Sequence: Synthetic oligonucleotide
uauuuugagggagccaagg

SEQ ID NO: 2721760 - RNA, 19 nt, Artificial Sequence
  Description of Artificial Sequence: Synthetic oligonucleotide
aaguguucugcuuucuaga

SEQ ID NO: 2721761 - RNA, 19 nt, Artificial Sequence
  Description of Artificial Sequence: Synthetic oligonucleotide
uaguccuugaucagaagga

SEQ ID NO: 2721762 - RNA, 19 nt, Artificial Sequence
  Description of Artificial Sequence: Synthetic oligonucleotide
aacuucaaacucauacaac

SEQ ID NO: 2721763 - RNA, 19 nt, Artificial Sequence
  Description of Artificial Sequence: Synthetic oligonucleotide
ugagguuggcauuuagaag

SEQ ID NO: 2721764 - RNA, 19 nt, Artificial Sequence
  Description of Artificial Sequence: Synthetic oligonucleotide
ucuccuguuuguuucagga

SEQ ID NO: 2721765 - RNA, 19 nt, Artificial Sequence
  Description of Artificial Sequence: Synthetic oligonucleotide
uuccauaccgaauccagga

SEQ ID NO: 2721766 - RNA, 19 nt, Artificial Sequence
  Description of Artificial Sequence: Synthetic oligonucleotide
agugacauucucagcaacc

SEQ ID NO: 2721767 - RNA, 19 nt, Artificial Sequence
  Description of Artificial Sequence: Synthetic oligonucleotide
auagcuaguaaugccauug

SEQ ID NO: 2721768 - RNA, 19 nt, Artificial Sequence
  Description of Artificial Sequence: Synthetic oligonucleotide
aacucauacaacagaagca

SEQ ID NO: 2721769 - RNA, 19 nt, Artificial Sequence
  Description of Artificial Sequence: Synthetic oligonucleotide
ugcaggcuuauccauagcu

SEQ ID NO: 2721770 - RNA, 19 nt, Artificial Sequence
  Description of Artificial Sequence: Synthetic oligonucleotide
agugcuuuuaaccgcucag

SEQ ID NO: 2721771 - RNA, 19 nt, Artificial Sequence
  Description of Artificial Sequence: Synthetic oligonucleotide
augagguuggcauuuagaa

SEQ ID NO: 2721772 - RNA, 19 nt, Artificial Sequence
  Description of Artificial Sequence: Synthetic oligonucleotide
aucucugcagaccuuaacu

SEQ ID NO: 2721773 - RNA, 19 nt, Artificial Sequence
  Description of Artificial Sequence: Synthetic oligonucleotide
uuuguuucaggagauucca

SEQ ID NO: 2721774 - RNA, 19 nt, Artificial Sequence
  Description of Artificial Sequence: Synthetic oligonucleotide
uguacagugauggaucacu

SEQ ID NO: 2721775 - RNA, 19 nt, Artificial Sequence
  Description of Artificial Sequence: Synthetic oligonucleotide
auuccagacaauuuugcau

SEQ ID NO: 2721776 - RNA, 19 nt, Artificial Sequence
  Description of Artificial Sequence: Synthetic oligonucleotide
cagacaauuuugcauuucc

SEQ ID NO: 2721777 - RNA, 19 nt, Artificial Sequence
  Description of Artificial Sequence: Synthetic oligonucleotide
uauccauagcuaguaaugc

SEQ ID NO: 2721778 - RNA, 19 nt, Artificial Sequence
  Description of Artificial Sequence: Synthetic oligonucleotide
uguagcuuuucuuccuugc

SEQ ID NO: 2721779 - RNA, 19 nt, Artificial Sequence
  Description of Artificial Sequence: Synthetic oligonucleotide
uaguuuauuuugagggagc

SEQ ID NO: 2721780 - RNA, 19 nt, Artificial Sequence
  Description of Artificial Sequence: Synthetic oligonucleotide
uccaaugccaugcaggcuu

SEQ ID NO: 2721781 - RNA, 19 nt, Artificial Sequence
  Description of Artificial Sequence: Synthetic oligonucleotide
uuucaggagauuccagaca

SEQ ID NO: 2721782 - RNA, 19 nt, Artificial Sequence
  Description of Artificial Sequence: Synthetic oligonucleotide
agauuccagacaauuuugc

SEQ ID NO: 2721783 - RNA, 19 nt, Artificial Sequence
  Description of Artificial Sequence: Synthetic oligonucleotide
caggcuuauccauagcuag

SEQ ID NO: 2721784 - RNA, 19 nt, Artificial Sequence
  Description of Artificial Sequence: Synthetic oligonucleotide
uuaacuccaacccuuuauu

SEQ ID NO: 2721785 - RNA, 19 nt, Artificial Sequence
  Description of Artificial Sequence: Synthetic oligonucleotide
uuggcauuuagaagauuca

SEQ ID NO: 2721786 - RNA, 19 nt, Artificial Sequence
  Description of Artificial Sequence: Synthetic oligonucleotide
ucuagaucaacugcagcug

SEQ ID NO: 2721787 - RNA, 19 nt, Artificial Sequence
  Description of Artificial Sequence: Synthetic oligonucleotide
uucugugcaaucaguaguc

SEQ ID NO: 2721788 - RNA, 19 nt, Artificial Sequence
  Description of Artificial Sequence: Synthetic oligonucleotide
cuguucggaaguuuuguag

SEQ ID NO: 2721789 - RNA, 19 nt, Artificial Sequence
  Description of Artificial Sequence: Synthetic oligonucleotide
aacuccaacccuuuauuua

SEQ ID NO: 2721790 - RNA, 19 nt, Artificial Sequence
  Description of Artificial Sequence: Synthetic oligonucleotide
ucaccuuagcuucauaguu

SEQ ID NO: 2721791 - RNA, 19 nt, Artificial Sequence
  Description of Artificial Sequence: Synthetic oligonucleotide
uuccagacaauuuugcauu

SEQ ID NO: 2721792 - RNA, 19 nt, Artificial Sequence
  Description of Artificial Sequence: Synthetic oligonucleotide
ugcuuucuagaucaggcau

SEQ ID NO: 2721793 - RNA, 19 nt, Artificial Sequence
  Description of Artificial Sequence: Synthetic oligonucleotide
caaacucauacaacagaag

SEQ ID NO: 2721794 - RNA, 19 nt, Artificial Sequence
  Description of Artificial Sequence: Synthetic oligonucleotide
agcuuuucuuccuugcucu

SEQ ID NO: 2721795 - RNA, 19 nt, Artificial Sequence
  Description of Artificial Sequence: Synthetic oligonucleotide
aaccuggucuguucggaag

SEQ ID NO: 2721796 - RNA, 19 nt, Artificial Sequence
  Description of Artificial Sequence: Synthetic oligonucleotide
ugugcaaucaguaguccuu

SEQ ID NO: 2721797 - RNA, 19 nt, Artificial Sequence
  Description of Artificial Sequence: Synthetic oligonucleotide
agccagugcuuuuaaccgc

SEQ ID NO: 2721798 - RNA, 19 nt, Artificial Sequence
  Description of Artificial Sequence: Synthetic oligonucleotide
uuagaagauucaccuuagc

SEQ ID NO: 2721799 - RNA, 19 nt, Artificial Sequence
  Description of Artificial Sequence: Synthetic oligonucleotide
uucaccuuagcuucauagu

SEQ ID NO: 2721800 - RNA, 19 nt, Artificial Sequence
  Description of Artificial Sequence: Synthetic oligonucleotide
uuauuuugagggagccaag

SEQ ID NO: 2721801 - RNA, 19 nt, Artificial Sequence
  Description of Artificial Sequence: Synthetic oligonucleotide
agcugcuacaaguaaacau

SEQ ID NO: 2721802 - RNA, 19 nt, Artificial Sequence
  Description of Artificial Sequence: Synthetic oligonucleotide
aaguuguacagugauggau

SEQ ID NO: 2721803 - RNA, 19 nt, Artificial Sequence
  Description of Artificial Sequence: Synthetic oligonucleotide
uggagggccagccagugcu

SEQ ID NO: 2721804 - RNA, 19 nt, Artificial Sequence
  Description of Artificial Sequence: Synthetic oligonucleotide
gauuccagacaauuuugca

SEQ ID NO: 2721805 - RNA, 19 nt, Artificial Sequence
  Description of Artificial Sequence: Synthetic oligonucleotide
gucuguucaagugacauuc

SEQ ID NO: 2721806 - RNA, 19 nt, Artificial Sequence
  Description of Artificial Sequence: Synthetic oligonucleotide
agaguguuagauucccuga

SEQ ID NO: 2721807 - RNA, 19 nt, Artificial Sequence
  Description of Artificial Sequence: Synthetic oligonucleotide
acucauacaacagaagcaa

SEQ ID NO: 2721808 - RNA, 19 nt, Artificial Sequence
  Description of Artificial Sequence: Synthetic oligonucleotide
aguaaugccauuguuucaa

SEQ ID NO: 2721809 - RNA, 19 nt, Artificial Sequence
  Description of Artificial Sequence: Synthetic oligonucleotide
acuccaacccuuuauuuaa

SEQ ID NO: 2721810 - RNA, 19 nt, Artificial Sequence
  Description of Artificial Sequence: Synthetic oligonucleotide
cuagaucaacugcagcugc

SEQ ID NO: 2721811 - RNA, 19 nt, Artificial Sequence
  Description of Artificial Sequence: Synthetic oligonucleotide
guugugagcuguuguuugg

SEQ ID NO: 2721812 - RNA, 19 nt, Artificial Sequence
  Description of Artificial Sequence: Synthetic oligonucleotide
caaugcuucacagucauca

SEQ ID NO: 2721813 - RNA, 19 nt, Artificial Sequence
  Description of Artificial Sequence: Synthetic oligonucleotide
uuuggguguugguaguuga

SEQ ID NO: 2721814 - RNA, 19 nt, Artificial Sequence
  Description of Artificial Sequence: Synthetic oligonucleotide
gagauuccagacaauuuug

SEQ ID NO: 2721815 - RNA, 19 nt, Artificial Sequence
  Description of Artificial Sequence: Synthetic oligonucleotide
auuuugagggagccaaggu

SEQ ID NO: 2721816 - RNA, 19 nt, Artificial Sequence
  Description of Artificial Sequence: Synthetic oligonucleotide
cuucacagucaucaccugc

SEQ ID NO: 2721817 - RNA, 19 nt, Artificial Sequence
  Description of Artificial Sequence: Synthetic oligonucleotide
cauuuuccauaccgaaucc

SEQ ID NO: 2721818 - RNA, 19 nt, Artificial Sequence
  Description of Artificial Sequence: Synthetic oligonucleotide
ugacauucucagcaaccug

SEQ ID NO: 2721819 - RNA, 19 nt, Artificial Sequence
  Description of Artificial Sequence: Synthetic oligonucleotide
agacaauuuugcauuuccg

SEQ ID NO: 2721820 - RNA, 19 nt, Artificial Sequence
  Description of Artificial Sequence: Synthetic oligonucleotide
cauaguuuauuuugaggga

SEQ ID NO: 2721821 - RNA, 19 nt, Artificial Sequence
  Description of Artificial Sequence: Synthetic oligonucleotide
uuguuucaggagauuccag

SEQ ID NO: 2721822 - RNA, 19 nt, Artificial Sequence
  Description of Artificial Sequence: Synthetic oligonucleotide
auacaacagaagcaaugcu

SEQ ID NO: 2721823 - RNA, 19 nt, Artificial Sequence
  Description of Artificial Sequence: Synthetic oligonucleotide
uccaacccuuuauuuaaug

SEQ ID NO: 2721824 - RNA, 19 nt, Artificial Sequence
  Description of Artificial Sequence: Synthetic oligonucleotide
uccgggucuguucaaguga

SEQ ID NO: 2721825 - RNA, 19 nt, Artificial Sequence
  Description of Artificial Sequence: Synthetic oligonucleotide
uagcuuuucuuccuugcuc

SEQ ID NO: 2721826 - RNA, 19 nt, Artificial Sequence
  Description of Artificial Sequence: Synthetic oligonucleotide
ucaguaguccuugaucaga

SEQ ID NO: 2721827 - RNA, 19 nt, Artificial Sequence
  Description of Artificial Sequence: Synthetic oligonucleotide
uucaagugacauucucagc

SEQ ID NO: 2721828 - RNA, 19 nt, Artificial Sequence
  Description of Artificial Sequence: Synthetic oligonucleotide
aaugccaugcaggcuuauc

SEQ ID NO: 2721829 - RNA, 19 nt, Artificial Sequence
  Description of Artificial Sequence: Synthetic oligonucleotide
agaucaggcauuuuccaua

SEQ ID NO: 2721830 - RNA, 19 nt, Artificial Sequence
  Description of Artificial Sequence: Synthetic oligonucleotide
ugcagcugcuacaaguaaa

SEQ ID NO: 2721831 - RNA, 19 nt, Artificial Sequence
  Description of Artificial Sequence: Synthetic oligonucleotide
agaccuuaacuccaacccu

SEQ ID NO: 2721832 - RNA, 19 nt, Artificial Sequence
  Description of Artificial Sequence: Synthetic oligonucleotide
gcugcuacaaguaaacaug

SEQ ID NO: 2721833 - RNA, 19 nt, Artificial Sequence
  Description of Artificial Sequence: Synthetic oligonucleotide
uucugcuuucuagaucagg

SEQ ID NO: 2721834 - RNA, 19 nt, Artificial Sequence
  Description of Artificial Sequence: Synthetic oligonucleotide
aucaguaguccuugaucag

SEQ ID NO: 2721835 - RNA, 19 nt, Artificial Sequence
  Description of Artificial Sequence: Synthetic oligonucleotide
agcaaugcuucacagucau

SEQ ID NO: 2721836 - RNA, 19 nt, Artificial Sequence
  Description of Artificial Sequence: Synthetic oligonucleotide
uaaugccauuguuucaagu

SEQ ID NO: 2721837 - RNA, 19 nt, Artificial Sequence
  Description of Artificial Sequence: Synthetic oligonucleotide
uggagaguguuagauuccc

SEQ ID NO: 2721838 - RNA, 19 nt, Artificial Sequence
  Description of Artificial Sequence: Synthetic oligonucleotide
uggcauuuagaagauucac

SEQ ID NO: 2721839 - RNA, 19 nt, Artificial Sequence
  Description of Artificial Sequence: Synthetic oligonucleotide
agugauggaucacuuguuu

SEQ ID NO: 2721840 - RNA, 19 nt, Artificial Sequence
  Description of Artificial Sequence: Synthetic oligonucleotide
uugguaguugaaccugggu

SEQ ID NO: 2721841 - RNA, 19 nt, Artificial Sequence
  Description of Artificial Sequence: Synthetic oligonucleotide
aacccuuuauuuaaugcuu

SEQ ID NO: 2721842 - RNA, 19 nt, Artificial Sequence
  Description of Artificial Sequence: Synthetic oligonucleotide
ugccaugcaggcuuaucca

SEQ ID NO: 2721843 - RNA, 19 nt, Artificial Sequence
  Description of Artificial Sequence: Synthetic oligonucleotide
uagaucaggcauuuuccau

SEQ ID NO: 2721844 - RNA, 19 nt, Artificial Sequence
  Description of Artificial Sequence: Synthetic oligonucleotide
uagcuaguaaugccauugu

SEQ ID NO: 2721845 - RNA, 19 nt, Artificial Sequence
  Description of Artificial Sequence: Synthetic oligonucleotide
uagaucaacugcagcugcu

SEQ ID NO: 2721846 - RNA, 19 nt, Artificial Sequence
  Description of Artificial Sequence: Synthetic oligonucleotide
uuuugcauuuccgggucug

SEQ ID NO: 2721847 - RNA, 19 nt, Artificial Sequence
  Description of Artificial Sequence: Synthetic oligonucleotide
aagucuccuguuuguuuca

SEQ ID NO: 2721848 - RNA, 19 nt, Artificial Sequence
  Description of Artificial Sequence: Synthetic oligonucleotide
ugcauuuccgggucuguuc

SEQ ID NO: 2721849 - RNA, 19 nt, Artificial Sequence
  Description of Artificial Sequence: Synthetic oligonucleotide
uaccgaauccaggaaguug

SEQ ID NO: 2721850 - RNA, 19 nt, Artificial Sequence
  Description of Artificial Sequence: Synthetic oligonucleotide
cucuagaucaacugcagcu

SEQ ID NO: 2721851 - RNA, 19 nt, Artificial Sequence
  Description of Artificial Sequence: Synthetic oligonucleotide
ucuguucaagugacauucu

SEQ ID NO: 2721852 - RNA, 19 nt, Artificial Sequence
  Description of Artificial Sequence: Synthetic oligonucleotide
ggcauuuagaagauucacc

SEQ ID NO: 2721853 - RNA, 19 nt, Artificial Sequence
  Description of Artificial Sequence: Synthetic oligonucleotide
cuuuuaaccgcucagccau

SEQ ID NO: 2721854 - RNA, 19 nt, Artificial Sequence
  Description of Artificial Sequence: Synthetic oligonucleotide
ucggaaguuuuguagcuuu

SEQ ID NO: 2721855 - RNA, 19 nt, Artificial Sequence
  Description of Artificial Sequence: Synthetic oligonucleotide
gugagcuguuguuugggug

SEQ ID NO: 2721856 - RNA, 19 nt, Artificial Sequence
  Description of Artificial Sequence: Synthetic oligonucleotide
ccaacccuuuauuuaaugc

SEQ ID NO: 2721857 - RNA, 19 nt, Artificial Sequence
  Description of Artificial Sequence: Synthetic oligonucleotide
uccauaccgaauccaggaa

SEQ ID NO: 2721858 - RNA, 19 nt, Artificial Sequence
  Description of Artificial Sequence: Synthetic oligonucleotide
ggguguugguaguugaacc

SEQ ID NO: 2721859 - RNA, 19 nt, Artificial Sequence
  Description of Artificial Sequence: Synthetic oligonucleotide
guaaugccauuguuucaag

SEQ ID NO: 2721860 - RNA, 19 nt, Artificial Sequence
  Description of Artificial Sequence: Synthetic oligonucleotide
uguuucaaguguucugcuu

SEQ ID NO: 2721861 - RNA, 19 nt, Artificial Sequence
  Description of Artificial Sequence: Synthetic oligonucleotide
uggaucacuuguuuugguu

SEQ ID NO: 2721862 - RNA, 19 nt, Artificial Sequence
  Description of Artificial Sequence: Synthetic oligonucleotide
uuccgggucuguucaagug

SEQ ID NO: 2721863 - RNA, 19 nt, Artificial Sequence
  Description of Artificial Sequence: Synthetic oligonucleotide
accuuagcuucauaguuua

SEQ ID NO: 2721864 - RNA, 19 nt, Artificial Sequence
  Description of Artificial Sequence: Synthetic oligonucleotide
acccuuuauuuaaugcuuc

SEQ ID NO: 2721865 - RNA, 19 nt, Artificial Sequence
  Description of Artificial Sequence: Synthetic oligonucleotide
uugagggagccaagguggc

SEQ ID NO: 2721866 - RNA, 19 nt, Artificial Sequence
  Description of Artificial Sequence: Synthetic oligonucleotide
ucuguucggaaguuuugua

SEQ ID NO: 2721867 - RNA, 19 nt, Artificial Sequence
  Description of Artificial Sequence: Synthetic oligonucleotide
gaaguuguacagugaugga

SEQ ID NO: 2721868 - RNA, 19 nt, Artificial Sequence
  Description of Artificial Sequence: Synthetic oligonucleotide
gguugugagcuguuguuug

SEQ ID NO: 2721869 - RNA, 19 nt, Artificial Sequence
  Description of Artificial Sequence: Synthetic oligonucleotide
aggcauuuuccauaccgaa

SEQ ID NO: 2721870 - RNA, 19 nt, Artificial Sequence
  Description of Artificial Sequence: Synthetic oligonucleotide
auuuuccauaccgaaucca

SEQ ID NO: 2721871 - RNA, 19 nt, Artificial Sequence
  Description of Artificial Sequence: Synthetic oligonucleotide
uggucuguucggaaguuuu

SEQ ID NO: 2721872 - RNA, 19 nt, Artificial Sequence
  Description of Artificial Sequence: Synthetic oligonucleotide
caugagguuggcauuuaga

SEQ ID NO: 2721873 - RNA, 19 nt, Artificial Sequence
  Description of Artificial Sequence: Synthetic oligonucleotide
ucugugcaaucaguagucc

SEQ ID NO: 2721874 - RNA, 19 nt, Artificial Sequence
  Description of Artificial Sequence: Synthetic oligonucleotide
gaguguuagauucccugaa

SEQ ID NO: 2721875 - RNA, 19 nt, Artificial Sequence
  Description of Artificial Sequence: Synthetic oligonucleotide
caacccuuuauuuaaugcu

SEQ ID NO: 2721876 - RNA, 19 nt, Artificial Sequence
  Description of Artificial Sequence: Synthetic oligonucleotide
uuuaaccgcucagccaucu

SEQ ID NO: 2721877 - RNA, 19 nt, Artificial Sequence
  Description of Artificial Sequence: Synthetic oligonucleotide
guugguaguugaaccuggg

SEQ ID NO: 2721878 - RNA, 19 nt, Artificial Sequence
  Description of Artificial Sequence: Synthetic oligonucleotide
uuuccgggucuguucaagu

SEQ ID NO: 2721879 - RNA, 19 nt, Artificial Sequence
  Description of Artificial Sequence: Synthetic oligonucleotide
cuguucaagugacauucuc

SEQ ID NO: 2721880 - RNA, 19 nt, Artificial Sequence
  Description of Artificial Sequence: Synthetic oligonucleotide
uuuuaacuucaaacucaua

SEQ ID NO: 2721881 - RNA, 19 nt, Artificial Sequence
  Description of Artificial Sequence: Synthetic oligonucleotide
uuguuuggguguugguagu

SEQ ID NO: 2721882 - RNA, 19 nt, Artificial Sequence
  Description of Artificial Sequence: Synthetic oligonucleotide
gcagaccuuaacuccaacc

SEQ ID NO: 2721883 - RNA, 19 nt, Artificial Sequence
  Description of Artificial Sequence: Synthetic oligonucleotide
cuugaucagaaggacaaaa

SEQ ID NO: 2721884 - RNA, 19 nt, Artificial Sequence
  Description of Artificial Sequence: Synthetic oligonucleotide
uggguguugguaguugaac

SEQ ID NO: 2721885 - RNA, 19 nt, Artificial Sequence
  Description of Artificial Sequence: Synthetic oligonucleotide
caauuuugcauuuccgggu

SEQ ID NO: 2721886 - RNA, 19 nt, Artificial Sequence
  Description of Artificial Sequence: Synthetic oligonucleotide
uuggguguugguaguugaa

SEQ ID NO: 2721887 - RNA, 19 nt, Artificial Sequence
  Description of Artificial Sequence: Synthetic oligonucleotide
uagcuucauaguuuauuuu

SEQ ID NO: 2721888 - RNA, 19 nt, Artificial Sequence
  Description of Artificial Sequence: Synthetic oligonucleotide
accuggucuguucggaagu

SEQ ID NO: 2721889 - RNA, 19 nt, Artificial Sequence
  Description of Artificial Sequence: Synthetic oligonucleotide
guguugguaguugaaccug

SEQ ID NO: 2721890 - RNA, 19 nt, Artificial Sequence
  Description of Artificial Sequence: Synthetic oligonucleotide
ugcaaucaguaguccuuga

SEQ ID NO: 2721891 - RNA, 19 nt, Artificial Sequence
  Description of Artificial Sequence: Synthetic oligonucleotide
aaccgcucagccaucucug

SEQ ID NO: 2721892 - RNA, 19 nt, Artificial Sequence
  Description of Artificial Sequence: Synthetic oligonucleotide
aagcaaugcuucacaguca

SEQ ID NO: 2721893 - RNA, 19 nt, Artificial Sequence
  Description of Artificial Sequence: Synthetic oligonucleotide
agcuaguaaugccauuguu

SEQ ID NO: 2721894 - RNA, 19 nt, Artificial Sequence
  Description of Artificial Sequence: Synthetic oligonucleotide
cuuauccauagcuaguaau

SEQ ID NO: 2721895 - RNA, 19 nt, Artificial Sequence
  Description of Artificial Sequence: Synthetic oligonucleotide
aagauucaccuuagcuuca

SEQ ID NO: 2721896 - RNA, 19 nt, Artificial Sequence
  Description of Artificial Sequence: Synthetic oligonucleotide
ccauaccgaauccaggaag

SEQ ID NO: 2721897 - RNA, 19 nt, Artificial Sequence
  Description of Artificial Sequence: Synthetic oligonucleotide
uuuuaaccgcucagccauc

SEQ ID NO: 2721898 - RNA, 19 nt, Artificial Sequence
  Description of Artificial Sequence: Synthetic oligonucleotide
caucucugcagaccuuaac

SEQ ID NO: 2721899 - RNA, 19 nt, Artificial Sequence
  Description of Artificial Sequence: Synthetic oligonucleotide
uccagacaauuuugcauuu

SEQ ID NO: 2721900 - RNA, 19 nt, Artificial Sequence
  Description of Artificial Sequence: Synthetic oligonucleotide
guuuggguguugguaguug

SEQ ID NO: 2721901 - RNA, 19 nt, Artificial Sequence
  Description of Artificial Sequence: Synthetic oligonucleotide
cauaccgaauccaggaagu

SEQ ID NO: 2721902 - RNA, 19 nt, Artificial Sequence
  Description of Artificial Sequence: Synthetic oligonucleotide
caggcauuuuccauaccga

SEQ ID NO: 2721903 - RNA, 19 nt, Artificial Sequence
  Description of Artificial Sequence: Synthetic oligonucleotide
ugcagaccuuaacuccaac

SEQ ID NO: 2721904 - RNA, 19 nt, Artificial Sequence
  Description of Artificial Sequence: Synthetic oligonucleotide
cccuuuauuuaaugcuucc

SEQ ID NO: 2721905 - RNA, 19 nt, Artificial Sequence
  Description of Artificial Sequence: Synthetic oligonucleotide
cugcuuucuagaucaggca

SEQ ID NO: 2721906 - RNA, 19 nt, Artificial Sequence
  Description of Artificial Sequence: Synthetic oligonucleotide
gugcaaucaguaguccuug

SEQ ID NO: 2721907 - RNA, 19 nt, Artificial Sequence
  Description of Artificial Sequence: Synthetic oligonucleotide
guuuauuuugagggagcca

SEQ ID NO: 2721908 - RNA, 19 nt, Artificial Sequence
  Description of Artificial Sequence: Synthetic oligonucleotide
uuugcauuuccgggucugu

SEQ ID NO: 2721909 - RNA, 19 nt, Artificial Sequence
  Description of Artificial Sequence: Synthetic oligonucleotide
cuuaacuccaacccuuuau

SEQ ID NO: 2721910 - RNA, 19 nt, Artificial Sequence
  Description of Artificial Sequence: Synthetic oligonucleotide
ucacuuguuuugguuuuaa

SEQ ID NO: 2721911 - RNA, 19 nt, Artificial Sequence
  Description of Artificial Sequence: Synthetic oligonucleotide
uuaaugcuuccaugagguu

SEQ ID NO: 2721912 - RNA, 19 nt, Artificial Sequence
  Description of Artificial Sequence: Synthetic oligonucleotide
gucaucaccugcaaagucu

SEQ ID NO: 2721913 - RNA, 19 nt, Artificial Sequence
  Description of Artificial Sequence: Synthetic oligonucleotide
gcuuuuaaccgcucagcca

SEQ ID NO: 2721914 - RNA, 19 nt, Artificial Sequence
  Description of Artificial Sequence: Synthetic oligonucleotide
ggagauuccagacaauuuu

SEQ ID NO: 2721915 - RNA, 19 nt, Artificial Sequence
  Description of Artificial Sequence: Synthetic oligonucleotide
ggagccaagguggccaagg

SEQ ID NO: 2721916 - RNA, 19 nt, Artificial Sequence
  Description of Artificial Sequence: Synthetic oligonucleotide
caagugacauucucagcaa

SEQ ID NO: 2721917 - RNA, 19 nt, Artificial Sequence
  Description of Artificial Sequence: Synthetic oligonucleotide
caguaguccuugaucagaa

SEQ ID NO: 2721918 - RNA, 19 nt, Artificial Sequence
  Description of Artificial Sequence: Synthetic oligonucleotide
uuaaccgcucagccaucuc

SEQ ID NO: 2721919 - RNA, 19 nt, Artificial Sequence
  Description of Artificial Sequence: Synthetic oligonucleotide
guucggaaguuuuguagcu

SEQ ID NO: 2721920 - RNA, 19 nt, Artificial Sequence
  Description of Artificial Sequence: Synthetic oligonucleotide
gaucacuuguuuugguuuu

SEQ ID NO: 2721921 - RNA, 19 nt, Artificial Sequence
  Description of Artificial Sequence: Synthetic oligonucleotide
uccucuggagggccagcca

SEQ ID NO: 2721922 - RNA, 19 nt, Artificial Sequence
  Description of Artificial Sequence: Synthetic oligonucleotide
aacuggaguuacagguggu

SEQ ID NO: 2721923 - RNA, 19 nt, Artificial Sequence
  Description of Artificial Sequence: Synthetic oligonucleotide
ugguugugagcuguuguuu

SEQ ID NO: 2721924 - RNA, 19 nt, Artificial Sequence
  Description of Artificial Sequence: Synthetic oligonucleotide
agccaagguggccaaggaa

SEQ ID NO: 2721925 - RNA, 19 nt, Artificial Sequence
  Description of Artificial Sequence: Synthetic oligonucleotide
uuguacagugauggaucac

SEQ ID NO: 2721926 - RNA, 19 nt, Artificial Sequence
  Description of Artificial Sequence: Synthetic oligonucleotide
agucuccuguuuguuucag

SEQ ID NO: 2721927 - RNA, 19 nt, Artificial Sequence
  Description of Artificial Sequence: Synthetic oligonucleotide
gcagcugcuacaaguaaac

SEQ ID NO: 2721928 - RNA, 19 nt, Artificial Sequence
  Description of Artificial Sequence: Synthetic oligonucleotide
guagcuuuucuuccuugcu

SEQ ID NO: 2721929 - RNA, 19 nt, Artificial Sequence
  Description of Artificial Sequence: Synthetic oligonucleotide
uucggaaguuuuguagcuu

SEQ ID NO: 2721930 - RNA, 19 nt, Artificial Sequence
  Description of Artificial Sequence: Synthetic oligonucleotide
accugcaaagucuccuguu

SEQ ID NO: 2721931 - RNA, 19 nt, Artificial Sequence
  Description of Artificial Sequence: Synthetic oligonucleotide
gcuuccaugagguuggcau

SEQ ID NO: 2721932 - RNA, 19 nt, Artificial Sequence
  Description of Artificial Sequence: Synthetic oligonucleotide
cauucucagcaaccugguc

SEQ ID NO: 2721933 - RNA, 19 nt, Artificial Sequence
  Description of Artificial Sequence: Synthetic oligonucleotide
aggagauuccagacaauuu

SEQ ID NO: 2721934 - RNA, 19 nt, Artificial Sequence
  Description of Artificial Sequence: Synthetic oligonucleotide
caagguggccaaggaauuc

SEQ ID NO: 2721935 - RNA, 19 nt, Artificial Sequence
  Description of Artificial Sequence: Synthetic oligonucleotide
uguuuggguguugguaguu

SEQ ID NO: 2721936 - RNA, 19 nt, Artificial Sequence
  Description of Artificial Sequence: Synthetic oligonucleotide
acuggaguuacaggugguu

SEQ ID NO: 2721937 - RNA, 19 nt, Artificial Sequence
  Description of Artificial Sequence: Synthetic oligonucleotide
agauucaccuuagcuucau

SEQ ID NO: 2721938 - RNA, 19 nt, Artificial Sequence
  Description of Artificial Sequence: Synthetic oligonucleotide
cagugcuuuuaaccgcuca

SEQ ID NO: 2721939 - RNA, 19 nt, Artificial Sequence
  Description of Artificial Sequence: Synthetic oligonucleotide
uggguccucuggagggcca

SEQ ID NO: 2721940 - RNA, 19 nt, Artificial Sequence
  Description of Artificial Sequence: Synthetic oligonucleotide
cugugcaaucaguaguccu

SEQ ID NO: 2721941 - RNA, 19 nt, Artificial Sequence
  Description of Artificial Sequence: Synthetic oligonucleotide
gauucaccuuagcuucaua

SEQ ID NO: 2721942 - RNA, 19 nt, Artificial Sequence
  Description of Artificial Sequence: Synthetic oligonucleotide
aggugguugugagcuguug

SEQ ID NO: 2721943 - RNA, 19 nt, Artificial Sequence
  Description of Artificial Sequence: Synthetic oligonucleotide
gaccuuaacuccaacccuu

SEQ ID NO: 2721944 - RNA, 19 nt, Artificial Sequence
  Description of Artificial Sequence: Synthetic oligonucleotide
gugauggaucacuuguuuu

SEQ ID NO: 2721945 - RNA, 19 nt, Artificial Sequence
  Description of Artificial Sequence: Synthetic oligonucleotide
cauuuagaagauucaccuu

SEQ ID NO: 2721946 - RNA, 19 nt, Artificial Sequence
  Description of Artificial Sequence: Synthetic oligonucleotide
augcuuccaugagguuggc

SEQ ID NO: 2721947 - RNA, 19 nt, Artificial Sequence
  Description of Artificial Sequence: Synthetic oligonucleotide
guccucuggagggccagcc

SEQ ID NO: 2721948 - RNA, 19 nt, Artificial Sequence
  Description of Artificial Sequence: Synthetic oligonucleotide
gcuaguaaugccauuguuu

SEQ ID NO: 2721949 - RNA, 19 nt, Artificial Sequence
  Description of Artificial Sequence: Synthetic oligonucleotide
ccgggucuguucaagugac

SEQ ID NO: 2721950 - RNA, 19 nt, Artificial Sequence
  Description of Artificial Sequence: Synthetic oligonucleotide
auaccgaauccaggaaguu

SEQ ID NO: 2721951 - RNA, 19 nt, Artificial Sequence
  Description of Artificial Sequence: Synthetic oligonucleotide
gucuguucggaaguuuugu

SEQ ID NO: 2721952 - RNA, 19 nt, Artificial Sequence
  Description of Artificial Sequence: Synthetic oligonucleotide
ggugguugugagcuguugu

SEQ ID NO: 2721953 - RNA, 19 nt, Artificial Sequence
  Description of Artificial Sequence: Synthetic oligonucleotide
agguuggcauuuagaagau

SEQ ID NO: 2721954 - RNA, 19 nt, Artificial Sequence
  Description of Artificial Sequence: Synthetic oligonucleotide
ggcuuauccauagcuagua

SEQ ID NO: 2721955 - RNA, 19 nt, Artificial Sequence
  Description of Artificial Sequence: Synthetic oligonucleotide
gugguugugagcuguuguu

SEQ ID NO: 2721956 - RNA, 19 nt, Artificial Sequence
  Description of Artificial Sequence: Synthetic oligonucleotide
ccaugagguuggcauuuag

SEQ ID NO: 2721957 - RNA, 19 nt, Artificial Sequence
  Description of Artificial Sequence: Synthetic oligonucleotide
caccuuagcuucauaguuu

SEQ ID NO: 2721958 - RNA, 19 nt, Artificial Sequence
  Description of Artificial Sequence: Synthetic oligonucleotide
gcuuauccauagcuaguaa

SEQ ID NO: 2721959 - RNA, 19 nt, Artificial Sequence
  Description of Artificial Sequence: Synthetic oligonucleotide
cuuucuagaucaggcauuu

SEQ ID NO: 2721960 - RNA, 19 nt, Artificial Sequence
  Description of Artificial Sequence: Synthetic oligonucleotide
caaccuggucuguucggaa

SEQ ID NO: 2721961 - RNA, 19 nt, Artificial Sequence
  Description of Artificial Sequence: Synthetic oligonucleotide
guaguugaaccuggguccu

SEQ ID NO: 2721962 - RNA, 19 nt, Artificial Sequence
  Description of Artificial Sequence: Synthetic oligonucleotide
uccaugagguuggcauuua

SEQ ID NO: 2721963 - RNA, 19 nt, Artificial Sequence
  Description of Artificial Sequence: Synthetic oligonucleotide
cugcagcugcuacaaguaa

SEQ ID NO: 2721964 - RNA, 19 nt, Artificial Sequence
  Description of Artificial Sequence: Synthetic oligonucleotide
agcuguuguuuggguguug

SEQ ID NO: 2721965 - RNA, 19 nt, Artificial Sequence
  Description of Artificial Sequence: Synthetic oligonucleotide
accuuaacuccaacccuuu

SEQ ID NO: 2721966 - RNA, 19 nt, Artificial Sequence
  Description of Artificial Sequence: Synthetic oligonucleotide
caggagauuccagacaauu

SEQ ID NO: 2721967 - RNA, 19 nt, Artificial Sequence
  Description of Artificial Sequence: Synthetic oligonucleotide
cagcugcuacaaguaaaca

SEQ ID NO: 2721968 - RNA, 19 nt, Artificial Sequence
  Description of Artificial Sequence: Synthetic oligonucleotide
gcaaccuggucuguucgga

SEQ ID NO: 2721969 - RNA, 19 nt, Artificial Sequence
  Description of Artificial Sequence: Synthetic oligonucleotide
cauuuccgggucuguucaa

SEQ ID NO: 2721970 - RNA, 19 nt, Artificial Sequence
  Description of Artificial Sequence: Synthetic oligonucleotide
gcaggcuuauccauagcua

SEQ ID NO: 2721971 - RNA, 19 nt, Artificial Sequence
  Description of Artificial Sequence: Synthetic oligonucleotide
cagucaucaccugcaaagu

SEQ ID NO: 2721972 - RNA, 19 nt, Artificial Sequence
  Description of Artificial Sequence: Synthetic oligonucleotide
ccagacaauuuugcauuuc

SEQ ID NO: 2721973 - RNA, 19 nt, Artificial Sequence
  Description of Artificial Sequence: Synthetic oligonucleotide
cagugauggaucacuuguu

SEQ ID NO: 2721974 - RNA, 19 nt, Artificial Sequence
  Description of Artificial Sequence: Synthetic oligonucleotide
gggucuguucaagugacau

SEQ ID NO: 2721975 - RNA, 19 nt, Artificial Sequence
  Description of Artificial Sequence: Synthetic oligonucleotide
caccugcaaagucuccugu

SEQ ID NO: 2721976 - RNA, 19 nt, Artificial Sequence
  Description of Artificial Sequence: Synthetic oligonucleotide
guacagugauggaucacuu

SEQ ID NO: 2721977 - RNA, 19 nt, Artificial Sequence
  Description of Artificial Sequence: Synthetic oligonucleotide
ggucuguucaagugacauu

SEQ ID NO: 2721978 - RNA, 19 nt, Artificial Sequence
  Description of Artificial Sequence: Synthetic oligonucleotide
gccaugcaggcuuauccau

SEQ ID NO: 2721979 - RNA, 19 nt, Artificial Sequence
  Description of Artificial Sequence: Synthetic oligonucleotide
gcuuucuagaucaggcauu

SEQ ID NO: 2721980 - RNA, 19 nt, Artificial Sequence
  Description of Artificial Sequence: Synthetic oligonucleotide
gcaaugcuucacagucauc

SEQ ID NO: 2721981 - RNA, 19 nt, Artificial Sequence
  Description of Artificial Sequence: Synthetic oligonucleotide
ccuuaacuccaacccuuua

SEQ ID NO: 2721982 - RNA, 19 nt, Artificial Sequence
  Description of Artificial Sequence: Synthetic oligonucleotide
gggagccaagguggccaag

SEQ ID NO: 2721983 - RNA, 19 nt, Artificial Sequence
  Description of Artificial Sequence: Synthetic oligonucleotide
gcaaagucuccuguuuguu

SEQ ID NO: 2721984 - RNA, 19 nt, Artificial Sequence
  Description of Artificial Sequence: Synthetic oligonucleotide
ccaucucugcagaccuuaa

SEQ ID NO: 2721985 - RNA, 19 nt, Artificial Sequence
  Description of Artificial Sequence: Synthetic oligonucleotide
ccaagguggccaaggaauu

SEQ ID NO: 2721986 - RNA, 19 nt, Artificial Sequence
  Description of Artificial Sequence: Synthetic oligonucleotide
ccuugaucagaaggacaaa

SEQ ID NO: 2721987 - RNA, 19 nt, Artificial Sequence
  Description of Artificial Sequence: Synthetic oligonucleotide
ccgaauccaggaaguugua

SEQ ID NO: 2721988 - RNA, 19 nt, Artificial Sequence
  Description of Artificial Sequence: Synthetic oligonucleotide
ccuuagcuucauaguuuau

SEQ ID NO: 2721989 - RNA, 19 nt, Artificial Sequence
  Description of Artificial Sequence: Synthetic oligonucleotide
caaugccaugcaggcuuau

SEQ ID NO: 2721990 - RNA, 19 nt, Artificial Sequence
  Description of Artificial Sequence: Synthetic oligonucleotide
ggagggccagccagugcuu

SEQ ID NO: 2721991 - RNA, 19 nt, Artificial Sequence
  Description of Artificial Sequence: Synthetic oligonucleotide
agaagcaaggaccaggucc

SEQ ID NO: 2721992 - RNA, 19 nt, Artificial Sequence
  Description of Artificial Sequence: Synthetic oligonucleotide
agaaaugcaauuuccuucg

SEQ ID NO: 2721993 - RNA, 19 nt, Artificial Sequence
  Description of Artificial Sequence: Synthetic oligonucleotide
uuugauucuggccauagga

SEQ ID NO: 2721994 - RNA, 19 nt, Artificial Sequence
  Description of Artificial Sequence: Synthetic oligonucleotide
aguugggaaaccuagagcu

SEQ ID NO: 2721995 - RNA, 19 nt, Artificial Sequence
  Description of Artificial Sequence: Synthetic oligonucleotide
auaguagaaaugcaauuuc

SEQ ID NO: 2721996 - RNA, 19 nt, Artificial Sequence
  Description of Artificial Sequence: Synthetic oligonucleotide
aagguguugaaguguuugc

SEQ ID NO: 2721997 - RNA, 19 nt, Artificial Sequence
  Description of Artificial Sequence: Synthetic oligonucleotide
cauuacacccucaugacag

SEQ ID NO: 2721998 - RNA, 19 nt, Artificial Sequence
  Description of Artificial Sequence: Synthetic oligonucleotide
aaucucgucgcggauaugg

SEQ ID NO: 2721999 - RNA, 19 nt, Artificial Sequence
  Description of Artificial Sequence: Synthetic oligonucleotide
ugauucuggccauaggagg

SEQ ID NO: 2722000 - RNA, 19 nt, Artificial Sequence
  Description of Artificial Sequence: Synthetic oligonucleotide
aauaguagaaaugcaauuu

SEQ ID NO: 2722001 - RNA, 19 nt, Artificial Sequence
  Description of Artificial Sequence: Synthetic oligonucleotide
gagccaucgauacugagag

SEQ ID NO: 2722002 - RNA, 19 nt, Artificial Sequence
  Description of Artificial Sequence: Synthetic oligonucleotide
augacaacucgccuagugc

SEQ ID NO: 2722003 - RNA, 19 nt, Artificial Sequence
  Description of Artificial Sequence: Synthetic oligonucleotide
uugcacuggauauuggagg

SEQ ID NO: 2722004 - RNA, 19 nt, Artificial Sequence
  Description of Artificial Sequence: Synthetic oligonucleotide
uugauucuggccauaggag

SEQ ID NO: 2722005 - RNA, 19 nt, Artificial Sequence
  Description of Artificial Sequence: Synthetic oligonucleotide
ucugugaccuucauuacac

SEQ ID NO: 2722006 - RNA, 19 nt, Artificial Sequence
  Description of Artificial Sequence: Synthetic oligonucleotide
guacauuugauucuggcca

SEQ ID NO: 2722007 - RNA, 19 nt, Artificial Sequence
  Description of Artificial Sequence: Synthetic oligonucleotide
uuccgaauaguagaaaugc

SEQ ID NO: 2722008 - RNA, 19 nt, Artificial Sequence
  Description of Artificial Sequence: Synthetic oligonucleotide
ucuucguggaugaaggugu

SEQ ID NO: 2722009 - RNA, 19 nt, Artificial Sequence
  Description of Artificial Sequence: Synthetic oligonucleotide
aauguuccagaugucuucg

SEQ ID NO: 2722010 - RNA, 19 nt, Artificial Sequence
  Description of Artificial Sequence: Synthetic oligonucleotide
gaaguguuugcacugacga

SEQ ID NO: 2722011 - RNA, 19 nt, Artificial Sequence
  Description of Artificial Sequence: Synthetic oligonucleotide
uggaugaagguguugaagu

SEQ ID NO: 2722012 - RNA, 19 nt, Artificial Sequence
  Description of Artificial Sequence: Synthetic oligonucleotide
ugaaguguuugcacugacg

SEQ ID NO: 2722013 - RNA, 19 nt, Artificial Sequence
  Description of Artificial Sequence: Synthetic oligonucleotide
cuucauuacacccucauga

SEQ ID NO: 2722014 - RNA, 19 nt, Artificial Sequence
  Description of Artificial Sequence: Synthetic oligonucleotide
auaggagggcugcacaagc

SEQ ID NO: 2722015 - RNA, 19 nt, Artificial Sequence
  Description of Artificial Sequence: Synthetic oligonucleotide
ugggauuccgaauaguaga

SEQ ID NO: 2722016 - RNA, 19 nt, Artificial Sequence
  Description of Artificial Sequence: Synthetic oligonucleotide
caucuaucugucaaagugc

SEQ ID NO: 2722017 - RNA, 19 nt, Artificial Sequence
  Description of Artificial Sequence: Synthetic oligonucleotide
ugcaauuuccuucggaauc

SEQ ID NO: 2722018 - RNA, 19 nt, Artificial Sequence
  Description of Artificial Sequence: Synthetic oligonucleotide
ugugaccuucauuacaccc

SEQ ID NO: 2722019 - RNA, 19 nt, Artificial Sequence
  Description of Artificial Sequence: Synthetic oligonucleotide
gauacugagagagugccug

SEQ ID NO: 2722020 - RNA, 19 nt, Artificial Sequence
  Description of Artificial Sequence: Synthetic oligonucleotide
cacgcaaacagacuggggc

SEQ ID NO: 2722021 - RNA, 19 nt, Artificial Sequence
  Description of Artificial Sequence: Synthetic oligonucleotide
acaguugggaaaccuagag

SEQ ID NO: 2722022 - RNA, 19 nt, Artificial Sequence
  Description of Artificial Sequence: Synthetic oligonucleotide
aagcccuaaccccagcagg

SEQ ID NO: 2722023 - RNA, 19 nt, Artificial Sequence
  Description of Artificial Sequence: Synthetic oligonucleotide
uuccuucggaaucucgucg

SEQ ID NO: 2722024 - RNA, 19 nt, Artificial Sequence
  Description of Artificial Sequence: Synthetic oligonucleotide
aucaaguugcaguaguugu

SEQ ID NO: 2722025 - RNA, 19 nt, Artificial Sequence
  Description of Artificial Sequence: Synthetic oligonucleotide
aguaguugucauugccacc

SEQ ID NO: 2722026 - RNA, 19 nt, Artificial Sequence
  Description of Artificial Sequence: Synthetic oligonucleotide
uguugaaguguuugcacug

SEQ ID NO: 2722027 - RNA, 19 nt, Artificial Sequence
  Description of Artificial Sequence: Synthetic oligonucleotide
uaucugucaaagugcacag

SEQ ID NO: 2722028 - RNA, 19 nt, Artificial Sequence
  Description of Artificial Sequence: Synthetic oligonucleotide
gauucuggccauaggaggg

SEQ ID NO: 2722029 - RNA, 19 nt, Artificial Sequence
  Description of Artificial Sequence: Synthetic oligonucleotide
guugcaguaguugucauug

SEQ ID NO: 2722030 - RNA, 19 nt, Artificial Sequence
  Description of Artificial Sequence: Synthetic oligonucleotide
ugcagagccaucgauacug

SEQ ID NO: 2722031 - RNA, 19 nt, Artificial Sequence
  Description of Artificial Sequence: Synthetic oligonucleotide
cuacaguugggaaaccuag

SEQ ID NO: 2722032 - RNA, 19 nt, Artificial Sequence
  Description of Artificial Sequence: Synthetic oligonucleotide
gaugccacgaauguuccag

SEQ ID NO: 2722033 - RNA, 19 nt, Artificial Sequence
  Description of Artificial Sequence: Synthetic oligonucleotide
ugagagagugccuggcgcg

SEQ ID NO: 2722034 - RNA, 19 nt, Artificial Sequence
  Description of Artificial Sequence: Synthetic oligonucleotide
ugacgagaagucaucuucc

SEQ ID NO: 2722035 - RNA, 19 nt, Artificial Sequence
  Description of Artificial Sequence: Synthetic oligonucleotide
cuugcacuggauauuggag

SEQ ID NO: 2722036 - RNA, 19 nt, Artificial Sequence
  Description of Artificial Sequence: Synthetic oligonucleotide
ugcacaagcccuaacccca

SEQ ID NO: 2722037 - RNA, 19 nt, Artificial Sequence
  Description of Artificial Sequence: Synthetic oligonucleotide
gcuaacaugcugucgaagg

SEQ ID NO: 2722038 - RNA, 19 nt, Artificial Sequence
  Description of Artificial Sequence: Synthetic oligonucleotide
ugacaacucgccuagugcu

SEQ ID NO: 2722039 - RNA, 19 nt, Artificial Sequence
  Description of Artificial Sequence: Synthetic oligonucleotide
aacaugcugucgaaggaac

SEQ ID NO: 2722040 - RNA, 19 nt, Artificial Sequence
  Description of Artificial Sequence: Synthetic oligonucleotide
cuggguuacccucacaggc

SEQ ID NO: 2722041 - RNA, 19 nt, Artificial Sequence
  Description of Artificial Sequence: Synthetic oligonucleotide
aaguguuugcacugacgag

SEQ ID NO: 2722042 - RNA, 19 nt, Artificial Sequence
  Description of Artificial Sequence: Synthetic oligonucleotide
caggcaaugacaacucgcc

SEQ ID NO: 2722043 - RNA, 19 nt, Artificial Sequence
  Description of Artificial Sequence: Synthetic oligonucleotide
ucuugcacuggauauugga

SEQ ID NO: 2722044 - RNA, 19 nt, Artificial Sequence
  Description of Artificial Sequence: Synthetic oligonucleotide
gaugucuucguggaugaag

SEQ ID NO: 2722045 - RNA, 19 nt, Artificial Sequence
  Description of Artificial Sequence: Synthetic oligonucleotide
ucucucugcagucugugac

SEQ ID NO: 2722046 - RNA, 19 nt, Artificial Sequence
  Description of Artificial Sequence: Synthetic oligonucleotide
uucauuacacccucaugac

SEQ ID NO: 2722047 - RNA, 19 nt, Artificial Sequence
  Description of Artificial Sequence: Synthetic oligonucleotide
aggagggcugcacaagccc

SEQ ID NO: 2722048 - RNA, 19 nt, Artificial Sequence
  Description of Artificial Sequence: Synthetic oligonucleotide
ucauuacacccucaugaca

SEQ ID NO: 2722049 - RNA, 19 nt, Artificial Sequence
  Description of Artificial Sequence: Synthetic oligonucleotide
gaagguguugaaguguuug

SEQ ID NO: 2722050 - RNA, 19 nt, Artificial Sequence
  Description of Artificial Sequence: Synthetic oligonucleotide
gacgagaagucaucuuccg

SEQ ID NO: 2722051 - RNA, 19 nt, Artificial Sequence
  Description of Artificial Sequence: Synthetic oligonucleotide
ugccuggccacgcaaacag

SEQ ID NO: 2722052 - RNA, 19 nt, Artificial Sequence
  Description of Artificial Sequence: Synthetic oligonucleotide
aguguuugcacugacgaga

SEQ ID NO: 2722053 - RNA, 19 nt, Artificial Sequence
  Description of Artificial Sequence: Synthetic oligonucleotide
uguuccagaugucuucgug

SEQ ID NO: 2722054 - RNA, 19 nt, Artificial Sequence
  Description of Artificial Sequence: Synthetic oligonucleotide
ucuccugagggcuaacaug

SEQ ID NO: 2722055 - RNA, 19 nt, Artificial Sequence
  Description of Artificial Sequence: Synthetic oligonucleotide
ucgauacugagagagugcc

SEQ ID NO: 2722056 - RNA, 19 nt, Artificial Sequence
  Description of Artificial Sequence: Synthetic oligonucleotide
agggcuaacaugcugucga

SEQ ID NO: 2722057 - RNA, 19 nt, Artificial Sequence
  Description of Artificial Sequence: Synthetic oligonucleotide
cucuggguuacccucacag

SEQ ID NO: 2722058 - RNA, 19 nt, Artificial Sequence
  Description of Artificial Sequence: Synthetic oligonucleotide
cucaugacaguucauccug

SEQ ID NO: 2722059 - RNA, 19 nt, Artificial Sequence
  Description of Artificial Sequence: Synthetic oligonucleotide
gaauguuccagaugucuuc

SEQ ID NO: 2722060 - RNA, 19 nt, Artificial Sequence
  Description of Artificial Sequence: Synthetic oligonucleotide
gguacauuugauucuggcc

SEQ ID NO: 2722061 - RNA, 19 nt, Artificial Sequence
  Description of Artificial Sequence: Synthetic oligonucleotide
ucaaguugcaguaguuguc

SEQ ID NO: 2722062 - RNA, 19 nt, Artificial Sequence
  Description of Artificial Sequence: Synthetic oligonucleotide
uuugcacugacgagaaguc

SEQ ID NO: 2722063 - RNA, 19 nt, Artificial Sequence
  Description of Artificial Sequence: Synthetic oligonucleotide
uggccacgcaaacagacug

SEQ ID NO: 2722064 - RNA, 19 nt, Artificial Sequence
  Description of Artificial Sequence: Synthetic oligonucleotide
auuugauucuggccauagg

SEQ ID NO: 2722065 - RNA, 19 nt, Artificial Sequence
  Description of Artificial Sequence: Synthetic oligonucleotide
uccgaauaguagaaaugca

SEQ ID NO: 2722066 - RNA, 19 nt, Artificial Sequence
  Description of Artificial Sequence: Synthetic oligonucleotide
auauuggagguacugcaga

SEQ ID NO: 2722067 - RNA, 19 nt, Artificial Sequence
  Description of Artificial Sequence: Synthetic oligonucleotide
cugacgagaagucaucuuc

SEQ ID NO: 2722068 - RNA, 19 nt, Artificial Sequence
  Description of Artificial Sequence: Synthetic oligonucleotide
augucuucguggaugaagg

SEQ ID NO: 2722069 - RNA, 19 nt, Artificial Sequence
  Description of Artificial Sequence: Synthetic oligonucleotide
ugcacugacgagaagucau

SEQ ID NO: 2722070 - RNA, 19 nt, Artificial Sequence
  Description of Artificial Sequence: Synthetic oligonucleotide
agugcuugcacuugcccug

SEQ ID NO: 2722071 - RNA, 19 nt, Artificial Sequence
  Description of Artificial Sequence: Synthetic oligonucleotide
ugcacuggauauuggaggu

SEQ ID NO: 2722072 - RNA, 19 nt, Artificial Sequence
  Description of Artificial Sequence: Synthetic oligonucleotide
cauccugccauucuugcac

SEQ ID NO: 2722073 - RNA, 19 nt, Artificial Sequence
  Description of Artificial Sequence: Synthetic oligonucleotide
aauuuccuucggaaucucg

SEQ ID NO: 2722074 - RNA, 19 nt, Artificial Sequence
  Description of Artificial Sequence: Synthetic oligonucleotide
gaaccguugguacauuuga

SEQ ID NO: 2722075 - RNA, 19 nt, Artificial Sequence
  Description of Artificial Sequence: Synthetic oligonucleotide
caugcugucgaaggaaccg

SEQ ID NO: 2722076 - RNA, 19 nt, Artificial Sequence
  Description of Artificial Sequence: Synthetic oligonucleotide
agcagaagcaaggaccagg

SEQ ID NO: 2722077 - RNA, 19 nt, Artificial Sequence
  Description of Artificial Sequence: Synthetic oligonucleotide
gcggauaugggugaggucg
